United States Patent Application Publication US 2018/0126003 A1 - sequence listing, part 48

SEQ ID NO: 82753 - DNA, 14088 bp, Artificial Sequence
  derived and/or modified sequence
ggtgcagaggctccgccgtccaccgaagaggccgcacctccccgcagtgaggaggaggaagccccgcgccctcctacagtggaggctccagccgaagacgggttctcaccttcagccgaggacgcagtgtcatccgtggtcgattatcgcgatctgatcccaagcgaagaaggcatcgtcttgcccgatgatcacgaggccgatctgaatcgcgtaagacaaagactggcgccgcggccagtgcaaagcgttatctctgaggtgctgtctctaccctcctcacggagaagcagtagatatcgaagatccatgagtggactgcctaatttgcaggaaacgctgaaagaacggcaggcccgcttccgagaagcccgtgaaagtcggaggctgaaaatagacccttcatataagtacatctttgagatccttgctgagaacctcggtcttgacatagtcacggtggaggagctcatccttgattgtccaagtttggaagcattcaccaacttttttgctaaggacggatgtaaaaccctaaaattcctgtaccaagagggcgatgtgccaggaattgagtgcgggcgaacaatagccggcgccacaaaaggagccaagatgatgaaactctacatcgacaatgcggcgcctgacaaactgaaggggctgtgcattttctttgttaggtgcaggaacgacgtggccatcaatgtgaagaccatccaggaagaggccctcttcactgtattggacgccagcaaaggattactgaacgggatccgggatatgctcgccaacatcttcctacctgccgttctcgcaactaataactggggcgccttaaaccaaagcaaacagggcgagtcagaaaagcatattttcactgaaactattaatcgctatcttagcttccttgatggggctagaatttccattgagggcacagtgaagctcaaaacgatagacaacgtcaacttcagcaagcttcacacatttgaggaggtcacagcggcagcctcaaatagcgagaccgttcaccaactagaggaagtgttgatggtgtggtataaacaaatagaacaggtcctgatagagtcagaacagatgagaaaggaggctggagattctggtcccctgaccgagctcgagcattggaaaagaatgagcgctaagttcaactatatcatcgaacaaattaagggtccatcctgcaaagcggtgatcaatgtgctaaacgtggcgcatagcaagctgctcaagaattggcgagatctcgacgcccgaatcactgataccgctaacgagtccaaagataacgtaaggtatttgtacacgctggaaaaggtctgccagccactgtataaccatgacctggtgagtatggcccacggtatccagaatctgataaacgcaattcggatgattcacggcgtgagtagatattacaataccagcgaaagaatgacatctctgtttatcaaagtcaccaatcaaatggtgaccgcgtgcaaagcgtacattaccgatgggggattgaatcacgtgtgggatcaggagacgcctgtggtgcttaagaaaattcaggattgcatctttttgttcaaggaatatcaggccagttttcataaaactagaaagctcatcagcgaaagcagcggggaaaagagcttcgaggtttccgagatgtatatcttcggtaagttcgaggctttttgtaagcgcttagagaagatcacggagatgattaccgtggttcaaacttatagtacactgtctaattcaaccatcgagggcatcgatatcatggctatcaagtttcggaatatttaccagggcgtgaagaaaaaacaatacgatattctggatcccagaaggactgaattcgatacagactttctggatttcatgactaaaatcaatgggctggaggttcaaattcaggcgttcatgaattcatctttcggtaagatattatcctcacagcaggcgctgcagctgctgcaaagattccagaagctaaatattccctgtctcgggctggagatcaaccacacaatcgagagaattctgcagtattatgtggccgagctcgatgcaactaagaaactttatcatagtcagaaggacgaccctccactcgctaggaacatgcctcctatagcaggtaagatcctgtgggtcagacagctgtatcgccggataagcgaaccaattaattatttttttaagaactcagatatcctgagctctccagacggcaaagcggtgatccgtcagtataacaagatatcttacgttttggtagagtttgaggtggtttatcacacagcgtggatacgggagatcagccaactccattacgcccttcaggctactttatttgtgcgccatccagaaacagggaagttactggtcaacttcgacccgaaaatcctggaagtggtgcgggagaccaaatgtatgataaaaatgaagctggatgtccctgagcaggcaaagcgactcttgaagctagagagtaagttaaaggcagataagttgtatctacaggggctcctccaatactatgatgagctttgtcaggaggttccaagcgttttcgtaaacctgatgacgccaaagatgaaaaaggttgaatctgtgttaagacagggactcaccgtgctgacctggagctccttgacactggaaagtttttttcaggaggttgagcttgtgctggacatgtttaaccagttgctgaaaaaaatcagtgacctgtgtgagatgcacatcgacaccgtccttaaggagattgcaaaaacagtcctgataagtctgcccgagtctggggccacaaaggtcgaggacatgctcaccttgaatgagacctacactaaggagtgggctgacatcctaaaccataagtccaagcatgtcgaggaggcagtgagggagctcatttctatttttgagcaaatctatgaagtgaaatacaccggtaaggtgggaaagcagtccgaacagagaaagcacgtggtcttcggtagcgaaactggcgagggcgagaacaacgactacgaggccaacattgtgaacgagtttgatacccatgataaagaggatgaattcaaaaaggagtgtaaggaagtattcgccttcttctcacaccagctgctagacagcttgcaaaaagcaactagactgtcactggatacgatgaagaggcgaatctttgttgctagcctctacggtcgcaagcagtccgaggatattattagtttcatcaaatccgaggtgcatctggctatacccaacgtggtcatgatcccttccctggacgatattcagcaggctatcaatcggatgatccagctcacacttgaagtcagcaggggggttgcccactggggccagcagcagatccggccaatcaaaagcgtcataccaagccctacaacgactgacgtgacccaccaaaacaccggcaaactcctaaagaaggaggagcgtagctttgaagaagctattccagcacggaagttgaaaaacttttaccccggcgtggcggagcataaagatatctctaaactggtgctgctccttagttcatcagttaattcgctaaggaaagctgcgcacgaggccctgcaagacttccagaaatacaagaccttgtggaccgaagatcgggacgtgaaggtgaaagaatttctggctaacaatcccagcctgaccgagatccgatcagagatattgcattatgccacatttgagcaggagatcgacgaactgaaaccaattatcgttgttggggcactggagttgcatacagagcctatgaagcttgctctgtcgattgaggcaaaagcctggaagatgctcctgtgtcggtacttaaatgaggagtataagaaaaagatgtcctatatgatcgctttcatcaacgaatacttgaaaaaactgtctcgcccgattcgggacctggacgatgtacgcttcgccatggaagctctctcttgcatccgcgacaacgagattcaaatggatatgaccctagggcccattgaggaggcctatgccatcctgaacaggttcgaggtcgaggtgacaaaagaggagagcgaagccgtagacactctgagatactcattcaacaaactgcagtctaaggcggtctctgtgcaggaggatcttgttcaggttcagccgaaattcaagtcaaatctcctggagagcgtggaagtgtttagagaggacgtgatcaactttgccgaagcgtacgagctggagggccctatggtgccaaatatcccaccccaagaagcctccaataggttgcagatcttccaagccagcttcgacgacctgtggcgtaaattcgtgacatattcttctggggagcagttatttggcttgccagtgactgattatgaggtgctccacaaaactcgcaaggagctgaacctgttgcagaagctctacgggttatatgatacagtgatgagctctatttccggttattatgaaattctctggggagacgtcgatattgaaaaaatcaacgcggaactcttagagtttcagaatcgctgtaggaagttgccaaaaggcttaaaagactggcaagcattcttggaccttaagaagagaatagatgatttttctgagagctgtcccctgctcgagatgatgaccaataaggccatgaagcagagacattgggataggatttcagagttgacaggaactccctttgacgtcgagtccgactctttttgtttgcgtaatatcatggaggcgccactgctgaaacataaagacgatattgaagacatttgcataagcgcaattaaggagaaagacatcgaggccaagttaacccaggtgatcgagaactggacgaaccagaatttgtcattcgctgcctttaaaggaaagggggaactcctgcttaaggggaccgaatccggcgagattatcaccttaatggaagacagtctgatggtgctcggctccctgctgagtaaccggtacaatgccccgttcaagaaaaacatccagaactgggtttataaactgtccaccagctcagacattatcgaagagtggcttgtcgttcagaatctctgggtgtaccttgaagcggtgttcgtgggaggcgatatcgcaaaacagcttcctcaagaagctaaaagatttcagaacatcgataagagctggatcaagattatgcagagggcacacgagaatcccaatgtgatcaattgctgtgtgggggacgaaaccatgggccagctccttccacacctgcacgagcaactagaagtgtgccagaagagcctgaccggttacctggagaagaagcgcctgctcttccctagattcttctttgtcagcgacccagttctgctggagattctcggacaggcctcagacagccataccatccagccacacttgccggccgtcagcgacaacatcaatgaagtgacattccatgctaaagattacgatcgtatcatggccgtaatcagtagggaaggcgaaaagattgtcctcgacaattcggtgatggccaagggcccagtcgagatctggctgctcgatctcttaaagatgcagatgtcatcactgcataacattatcaggagcgcgttttatcagatatcggacagcgggttccagcttcttccgttcctgtcccattttccggcacaggtcggcctgttgggaatacagatgctatggacacacgactccgaagaggcactcagaaatgcaaaggatgatcgcaagattatgcaagtgaccaaccagaagttcctcgatattctgaacacccttatttcccagacaacccacgacctgtccaaatttgatcgggtgaaatttgagacactgatcactattcatgtgcaccaacgggatatattcgacgatctcgttaaaatgcatatcaaaagcccaactgacttcgagtggctcaagcaatctcggttttacttcaaggaggacctggatcagaccgtggtttctatcactgacgtggactttatttaccagaacgaatttttaggttgcacagatcgcctagtaatcacacctttgaccgataggtgctacattacgctcgcccaggccctcggcatgaacatgggtggagcaccagctggaccagccggcaccggtaagaccgagaccactaaagacatggggcgctgcttagggaagtatgtggtagtttttaactgcagtgatcagatggacttcagaggcttaggacggatttttaaagggctcgctcaatcagggtcttggggctgcttcgacgaattcaacagaatcgagttacccgttctatcagtggccgctcaacagatttatatcgtccttaccgcacgcaaggaacggaaaaaacagtttattttttccgacggagactgtgtggacctgaaccctgagttcgggatttttctgactatgaacccaggctacgccggtcgtcaggaattaccagaaaacttaaagattcagttccggaccgtggcaatgatggttccggataggcagattattatgcgggtaaagttggcaagttgcggattcctggagaacgttatcctagctcagaagttctacgtgctttacaaactgtgcgaagaacagctcaccaagcaagtgcactacgactttggtttgcgaaatatcctgtccgttctgcggaccctcggatcgcaaaagagagcccggcccgaagactccgagctctcaatcgtgatgcggggcctgcgcgatatgaatcttagcaagctggtggacgaggacgagccattattcttgtcattaattaacgatctgttcccggggctccagctggacagtaacacgtatgcggagttacagaatgctgtcgcccaccaagttcagatcgaaggccttataaaccatcccccctggaatctgaaactggtgcaattgtatgaaacctccctggtgaggcacggtctgatgactctggggccctcaggttccgggaaaaccaccgttatcactattttgatgaaggcacagactgagtgcggccgacctcatcgcgaaatgcgtatgaacccgaaggccatcaccgctccccaaatgtttggcagactcgacactgccaccaacgactggaccgatggcatcttttcaaccctttggagaaaaactctaaaggcaaaaaagggagagaatattttcctaatactggacggaccggtggacgctatctggatcgaaaatctgaatagcgttctagacgataataagacactcacactcgcaaacggcgacaggattcctatggcgcccagttgtaagctgctgtttgaggtgcataatatcgaaaacgcttcacctgctaccgttagccgtatgggcatggtctacatatcatcttccgcattgtcctggaggccaattttgcaggcctggctcaagaaaagaactgcccaggaggctgctgtgtttctcactctgtatgaaaaggtgttcgaagacacctacacatatatgaagctcaacctcaatccaaagatgcagcttctggagtgcaactatattgtgcaaagcctgaatttgctagagggacttatcccaagcaaagaagagggcggcgtctcctgcgtggagcatctgcataagctctttgtgttcggcctgatgtggtccctgggagccctgttagagttagaatcccgggagaagctggaagcctttcttagacagcacgaatctaagctggacctgccagagatacccaaaggttccaaccagacaatgtatgaattttatgtgacggattacggcgactgggagcattggaataagaagctgcagccctattactatccgactgatagcatccccgaatactcttcaatcctcgtgcctaacgtagataacattaggacaaatttccttattgatactatcgccaagcagcataaagccgtgctcctcaccggcgagcagggtaccgcaaagacagtgatggtcaaagcttatcttaagaaatatgacccggaggttcagctgtctaagagtctcaacttcagcagcgccacagagcccatgatgtttcagcggaccatagaatcctacgtcgataaaagaatcggctcaacatacgggccaccgggaggcagaaagatgacggtgttcattgacgatatcaatatgccagtgattaacgaatggggggaccaaatcaccaatgagatcgttcggcaaatgatggagatggaagggatgtacagcctggataagccaggagacttcaccaccatagtagacgtgcagctgattgctgctatgatccatcccggcggaggtcgcaacgatatccctcaaaggctgaagcgacaatttaccgtgtttaactgcacattaccatccaacgcaagcatagataaaatctttggaattataggttgcggttatttcgatccctgtcggagtttcaagccacagatttgcgaaatgatcgtgaacttggtgtccgttgggcgggtgctatggcagtggactaaggttaaaatgctgcccacccccagcaagtttcattacatatttaacctacgcgatctctcaaggatatggcagggaatgttaactatcaaggccgaggagtgtgccagcattccaacactgctgagcctctttaaacacgaatgttccagggtgattgctgatagatttattaccccagaagacgaacagtggtttaatgcccacctaaccagggccgtggaggaaaatatcggttccgatgctgcgtcttgtatactcccagagccatacttcgtcgatttcctgagagagatgcccgagccgacaggcgatgaaccggaggatagtgtgtttgaggtccctaaaatatacgagctgatgccatctttcgacttcctcgctgagaaattacagttttaccagcggcagttcaatgaaatcattaggggcacgagcctcgacctggtgttcttcaaggacgcaatgactcaccttatcaagatttcgaggattatcaggactagttgcgggaacgccctgctcgtcggcgtggggggatctgggaaacaaagcctctctcgcctcgcttcatttattgcaggctatcagattttccagataactcttaccaggagttataacgtgacaaacttgactgacgaccttaaagccttgtacaaggtcgccggcgctgacggcaagggaatcacgtttattttcaccgacagcgaaatcaaggacgaggcctttctggaatacctcaacaatctgctcagctccggtgagatctcgaacctattcgcgcgggacgagatggacgagattactcaaggcctgatctccgttatgaagagggagttgcctaggcatcctccgaccttcgacaacctctatgagtactttattagtcggtcacgaaagaacctccacgtcgtgctgtgtttttctcctgttggtgaaaaatttagggccaggtctcttaaatttccgggcttgatctcaggctgtactatggactggttcagcagatggccccgggaggctctaatagccgtcgcctcctatttcttgtcagactacaacatcgtgtgttcgtctgaaattaagcgccaggtggtggaaactatggggctgttccatgacatggtttccgaatcgtgtgagagttactttcagcgctatcgcaggcgagctcatgtgaccccaaagagctacctgtcgttcattaatgggtacaagaatatttacgctgagaaagtgaagttcatcaatgaacaggccgagcggatgaatatcggactggataaactcatggaggcttcggagagcgtcgctaagttgtctcaagaccttgcagttaaagagaaagagttagccgtcgcctcaatcaaggctgatgaggtgctggctgaagtgaccgtgtccgcacaagcatcggccaagatcaagaacgaggttcaggaggtgaaagataaagcccagaagattgtcgacgagattgatagtgagaaggtcaaagcagagagtaagctggaagcggctaaaccggcactggaggaagcggaagccgcattaaatactataaagcccaacgacatcgcaaccgtgaggaaattggcaaaaccgccccatcttattatgaggatcatggattgcgtcctgttgctgtttcaaaagaaaatcgatccagttactatggacccagagaaaagctgctgcaaaccttcttggggagagtctctcaagctgatgtccgccacgggattcctgtggtctctccaacagtttcctaaggataccatcaacgaggagaccgtggaactgttgcagccttacttcaacatggacgactacacgtttgagagtgccaagaaggtgtgtggtaatgtggccggcctgctctcgtggactctggccatggccatcttctatggtatcaaccgagaagtcctgccacttaaggcaaacctggccaagcaggagggcaggcttgccgtcgcaaacgccgaacttggaaaggctcaggcgctgctggacgaaaagcaagctgagcttgataaagtacaggccaagttcgatgccgccatgaacgagaagatggatctgctaaatgacgctgatacctgcaggaaaaaaatgcaagctgccagcaccctgatagacggtctgtctggggaaaagatcagatggacacagcagagcaaagagtttaaagcacagatcaataggttggtcggagatatattactctgcaccggttttctgagctacctcggtccatttaatcaaatattccgaaactatctccttaaagaccagtgggagatggagctgcgagcaaggaagattccctttacagaaaatttaaatctcataagcatgctggtggacccacctaccatcggggaatggggtctgcagggactgccgggcgacgacctgtccatccagaacggaatcatcgtcacaaaagcgactcgttaccccctcctgatcgatccacagacccaaggaaagacctggattaaaagcaaggaaaaggaaaatgaccttcaagtcaccagcctcaaccacaaatactttcgcactcacttggaggacagcttatctcttggccgccccctcttgatcgaggatatccacgaagagctagaccccgcattagacaatgtcctagagaagaacttcatcaagagcggaaccaccttcaaggtgaaagtgggtgacaaagaatgcgacatcatggacaccttcaaactctatattactacgaagttaccgaaccccgcgtttactccggaaatcaatgccaagacttctgtcatagattttaccgttacgatgaaggggctggagaatcagcttttgcgcagggtcatcctcacagaaaaacaggagctggaagctgaacgtgtcaagctgctggaagacgtaacgttcaacaagaggaaaatgaaggagttggaggataacctgctgtataagttatccgccacaaaggggtcgctggtggacgatgaaagtcttatcggagttttgcgtacaacaaagcagaccgctgcggaggttagtgaaaaattgcacgtcgccgccgagaccgagatcaagatcaacgcagcccaggaggagtttaggcctgctgcaacccgaggtagcatactctactttttaatcaccgaaatgtccatggtgaacatcatgtatcagacatctctggcccagttcctcaagctctttgatcaaagcatggcacggagcgagaagtctcctcttccacagaagagaatcactaatatcattgaatacctcacctacgaggtcttcacttactctgtgcggggactgtatgaaaatcataaatttctgttcgttttgctgatgactctgaaaatagacctacagagagggactgtcaaacatcgggagttccaggctctgatcaagggaggtgccgcactggacttaaaggcctgtccacccaagccctaccggtggattcttgacatgacatggttgaatctcgtggagctgtccaaattaccacaatttgcagaaattatgaaccagatcagccgcaatgaaaagggttggaaaagctggttcgacaaggatgctcctgaggaggagatcattcctgacggctataatgactcactggacacatgccacaagctgctcttgataagatcttggtgccctgataggactgtctttcaagcccggaaatacatcgccgattcgttagaagagaaatacacagaaccggtgattctcaacctggaaaagacctgggaagagtcagatacgcggactcccctgatctgcttcctcagcatgggaagtgacccaaccaaccagattgacgcactggctaaaaagctgaaactggaatgtagaactattagcatgggccagggacaggaggtacacgcacggaagctgatccagatgagtatgcagcaaggagggtgggtcctgttgcagaattgtcacctggggctagagtttatggaggagctcctggaaacacttatcaccaccgaggcgtctgatgatagtttccgcgtctggattaccaccgagccgcacgatcgcttcccaataaccctgctgcaaacatcactcaaatttactaatgaacctccacagggggtgagggccggcctgaaacggacatttgccggcataaatcaggaccttctggacatttccaacttgccaatgtggaaacctatgttgtacaccgtagccttcctgcactctaccgtgcaggaaaggaggaaatttggccccttgggttggaatatcccttatgaattcaactccgcggacttctcggcctctgtacagttcattcagaaccatctggatgagtgcgatataaaaaagggagtcagttggaacaccgtgcggtatatgattggggaagtgcaatacggtggcagggtcaccgacgatttcgataagagattacttaattgttttgcgagagtctggttctcagagaaaatgttcgaaccttctttctgcttctatacggggtataagatacctctttgtaagactctggatcagtacttcgagtatatccagagcctgccttctctcgataatcctgaagtgttcggcttgcatcccaatgccgatattacttaccagagtaacacagcatccgccgtcctcgagactatcacaaatatccaaccaaaggaaagtggtggaggcgttggggagaccagagaggcaatagtctaccgtcttagcgaggatatgctctcaaagctgccaccagactacatcccgcacgaagtgaaaagcagattgatcaagatggggcacctgaactcaatgaatattttcctgagacaggaaatcgaccgcatgcagagagtgatctccattttgcgcagctccctaagtgatctgaaattagctattgaaggcaccatcatcatgagcgagaacctacgcgatgctcttgataacatgtatgacgcccgcatcccgcagctatggaagcgggtcagctgggacagctctactctcggattctggttcaccgagctactagagcggaacgcccaattttccacttggatctttgagggacggcctaacgtgttctggatgaccggcttttttaaccctcagggctttctcaccgcgatgcggcaggaggtgactcgcgctcacaaggggtgggcgttggacaccgtcacgatacacaatgaagtgctccgccagactaaagaggagattacatccccgccaggtgagggcgtgtatatatacggcttgtatatggatggagctgcatgggataggcgcaatggtaagctgatggaaagtacccccaaggtcctgttcactcagctgcccgtgttacatatcttcgctataaatagtacagcccctaaggacccaaaactttatgtgtgtccaatctacaaaaaaccgcgacggactgatctgaccttcatcacagtcgtttacttaagaaccgtgctgtctcccgaccattggatactgagaggagtcgcgctgctgtgcgacattaagtag

SEQ ID NO: 82754 - DNA, 13473 bp, Artificial Sequence
  derived and/or modified sequence
atgatgaagctgtacatcgataacgccgctcctgataagctgaagggcctgtgcatattcttcgttagatgtaggaatgatgtggcgattaatgtgaagaccatccaggaggaagcactgtttaccgtacttgacgccagtaagggtcttctgaacggtatccgagacatgttggccaacatcttccttccggccgttctcgccaccaacaattggggcgcactgaaccaaagcaagcagggggagtccgagaaacacattttcaccgagaccatcaatcgatacctaagcttcctggatggtgctcgcattagcattgagggaacagtcaagctgaaaaccatcgataatgtaaatttttccaaattgcacactttcgaagaggtgacagccgcggcctctaacagcgagacagtgcaccagctggaggaggttctcatggtctggtacaagcaaattgaacaggttctcatagaaagtgaacagatgagaaaagaggctggggactcagggcctcttactgaactcgaacattggaagcgtatgtctgctaagtttaattatatcatcgagcaaataaagggaccgtcctgtaaagcggtgatcaacgtcctgaatgtggcccactctaagttgctgaaaaactggagagacctggacgcgcgcattaccgatacggccaatgaatcaaaagacaatgtgcggtatctgtatacactggaaaaggtgtgtcaacccctgtacaaccatgatctggtctctatggcacatggcatccagaacctgatcaacgcaattcggatgatacacggggttagcagatattataacacatctgaacggatgacttctctctttatcaaagttacgaatcagatggtgacagcttgcaaagcatacatcacagatggcggactaaatcacgtatgggatcaggagaccccagtagtgctgaaaaagattcaggactgcattttcctgttcaaggagtaccaggccagtttccacaaaaccagaaaactcatttcagaatcgagcggggaaaaatctttcgaagtgagcgagatgtatattttcggtaaattcgaagctttttgtaaacggctggagaagatcaccgagatgatcaccgtagtgcagacatactctacactctccaattcaacgatagagggcatcgacatcatggcaatcaagtttcggaacatctatcagggagtcaaaaagaaacagtatgatatccttgatccaagacgaaccgagtttgacacagactttctggacttcatgacgaaaattaatggactagaagtgcaaatccaagcttttatgaactcatcgtttgggaaaattctgtcgagtcagcaggctttgcaattactccaaaggttccagaaactgaacatcccatgtctagggcttgagatcaaccatacaattgagcgaattctgcagtactatgtcgccgagttagacgctacaaagaagctgtatcactcccagaaggatgaccctcccctggcgaggaatatgccacctatcgccggtaaaattttgtgggtccggcagctgtacagacgaatttccgaacccattaattacttctttaagaatagtgatatcctgtcctccccagacggtaaggctgttattaggcagtacaataagatcagctatgtcctggtcgaattcgaggtggtgtatcatacagcatggatacgcgaaataagtcagctgcattatgctcttcaggccactctgtttgtccgccatcccgagacggggaaactgctcgttaactttgaccccaagatactcgaggttgtcagagagaccaagtgcatgattaagatgaagctggacgtgccagagcaggctaagagacttctgaagctggagagcaaactgaaagctgacaaattatacctccagggactactgcagtactatgatgagctatgtcaggaagtgcccagcgtattcgtgaatctgatgactccaaagatgaaaaaggtggaatccgtcctgcggcaggggcttacagtgctgacctggagctcacttacattggaaagcttcttccaggaggtcgagcttgtcctggacatgtttaaccagctgctaaagaagatcagtgatctgtgtgagatgcacattgacacagttcttaaagagatcgcaaagaccgtgctgatatcgctgcccgagagtggggcgacaaaagtggaagatatgctaacgctcaatgagacctacaccaaggagtgggctgatatcctgaatcacaaatctaaacatgtcgaggaagccgtccgggaactgatttctattttcgagcaaatttacgaggtaaaatacactggaaaagtgggtaagcaatccgaacagcgaaaacacgtcgtgtttggcagtgagaccggggaaggcgagaacaacgattacgaggcaaatattgtaaatgagtttgacactcatgacaaggaagacgaatttaagaaggaatgcaaggaagttttcgcgtttttcagccaccagctgcttgatagcctgcagaaagccacaaggttatctctggatacgatgaagcgtcgcatcttcgtcgcaagtttgtacggacgcaagcaaagtgaagacatcatctcttttatcaaatctgaggtccacctggcaatccccaatgtggtaatgatccccagcctggatgacattcaacaggccatcaaccgtatgattcaacttaccctggaggtgtctaggggggtggcccactggggtcagcagcagattcgcccgataaagtcagtgattccgagccccaccaccacagatgtgacacaccaaaataccggtaagttgctgaagaaggaagagcgcagcttcgaagaggccatacctgctcgtaaactgaagaacttttaccctggagttgcagaacacaaggatatcagtaagctagtcctgttgttgagttcaagcgtaaatagcttacggaaggctgctcacgaggccttgcaggacttccagaagtacaagactttgtggactgaggaccgcgatgttaaggtgaaagagttcctggccaataatcctagcctcacagagatccgcagcgagattctccactatgctactttcgagcaggagattgacgaactgaagcctatcattgtggtcggggctctcgagttgcacacggagccaatgaagctggctttgagcatcgaggccaaggcatggaagatgctcttatgtagatacttaaatgaagagtacaagaagaagatgtcatacatgatagccttcataaacgagtacctgaagaagctgagtcgacctatccgcgacctggacgatgtgcgctttgccatggaagcactctcttgcattcgcgacaatgagattcagatggacatgaccttgggcccgattgaagaggcttatgcaattttgaacagattcgaggtggaggtaacgaaagaagaatctgaagccgttgatacactgagatacagcttcaataagcttcaatcaaaagccgtgtccgtgcaggaggatctggtgcaggtccagcctaagtttaaatcaaatctcctggaaagtgttgaagtgtttagggaggacgtgattaattttgccgaagcttatgagctggaggggcccatggttcccaatatcccgccccaggaagcctccaatcgcctccagattttccaagctagctttgatgatctttggaggaaattcgtgacctactcatccggcgagcagctctttggacttcctgttaccgattatgaagtgctgcataagacccgcaaggagctgaacctactgcagaagctgtatggcctgtacgatacagtgatgagtagtatctcagggtattatgaaattctgtggggggacgtcgacatcgagaagatcaacgcggaactccttgaattccaaaatcggtgtcggaagcttccgaagggtctgaaggactggcaggccttcttggacctcaagaaaagaatcgatgatttttcagagagttgccccctattggaaatgatgacaaacaaggcaatgaaacagcggcactgggatagaatcagtgagctcaccgggactccctttgacgtggagtcagactcattttgcctgaggaatattatggaagcccctcttttaaaacataaggacgatatcgaggatatttgcattagcgccatcaaagagaaggatattgaggctaagctgacgcaggtgatcgaaaactggacgaatcagaacctcagctttgcagcctttaaaggcaagggcgaactgttgctcaaaggtacagaatccggagagattatcaccttgatggaagattccctgatggtgcttggcagtctgctcagtaacaggtacaacgctcccttcaaaaagaatattcagaactgggtatataaattgagcacttcttccgacatcattgaagaatggctcgtggtccagaacctgtgggtgtacctggaggctgtgttcgtcggcggtgacatagccaaacagcttcctcaagaagccaaacggtttcagaacatcgacaagagctggatcaaaataatgcaacgggcccatgaaaatcctaacgtgatcaactgttgcgtcggggatgagacaatgggacagctcctcccccatctacacgagcaactcgaagtgtgtcaaaaatcgcttaccggttacctggagaaaaagcgcctgctgttccccaggttcttcttcgtgtccgaccccgtcctcttagagatactagggcaggcctctgacagtcacacgattcagccacatctgccagccgtatctgataacatcaacgaggtgacattccatgccaaggattatgatcgaatcatggccgtgatttctcgggaaggggagaaaatcgtcttggataattccgtgatggccaagggtcctgtggagatatggctgctcgaccttctgaaaatgcaaatgtcatctcttcacaacataatcagatcggccttctaccagataagcgattccggtttccagctactgccctttctcagtcattttcctgctcaggtcggtttgctaggaattcaaatgctgtggacccacgacagcgaggaggccctgcggaacgctaaggacgatcgtaagatcatgcaggttactaaccagaaatttctcgacattcttaacaccctgatctcgcagacaacccacgacctgagtaagttcgaccgagtcaagttcgaaacccttattaccatccatgtccatcagcgcgacatctttgatgatctggtgaagatgcacataaagtcccctacggacttcgagtggctaaagcagagccggttttacttcaaagaggatctcgaccagaccgtagtgagcataaccgacgttgatttcatctatcagaatgagtttctgggatgtactgaccgcctggtcataacccctttaaccgatcggtgttacataaccctggcccaagcgttaggaatgaacatgggaggagcacccgctggacctgccggaacaggaaagaccgagactaccaaggacatgggaagatgtctgggtaagtacgtggtcgtgtttaattgtagtgaccagatggattttcgggggttaggacggatctttaagggtctcgcccagtctgggtcatgggggtgttttgatgagtttaacaggattgagctgcccgtactgtcggttgcagcccaacaaatatatatcgttctgacggctaggaaggagcgtaagaaacaattcatattttctgacggggactgtgtggatttaaaccctgagttcggaatcttcctgacgatgaatccgggttacgcgggccgtcaggagctacccgagaacttgaagatacagtttcgaactgtggccatgatggtgcccgatcggcagattattatgagggttaagttagccagttgcggtttcctagaaaatgtcatactggctcagaagttctatgtgctgtacaaactatgcgaggaacaactaaccaaacaagtccattacgactttgggctccgtaatattttatccgtgctcagaacattaggaagccagaagagggcaagacccgaggactctgagctgtctatcgtgatgagaggtttgcgggatatgaacctgtccaagctcgtggacgaggatgaacctctcttcttgagcttgatcaacgacttgtttcccggtctgcagcttgattcaaacacttatgccgaactccagaacgccgtggcacaccaggtccagatcgaaggattgattaatcacccaccgtggaaccttaagctcgttcagctgtacgaaacttccctcgtgagacacggtcttatgacgctcggacctagtggaagtgggaagacaacagttattaccattctgatgaaggcacaaacagagtgcggaaggccccaccgtgagatgaggatgaaccccaaggccatcactgcccctcagatgtttgggagactagacactgcaactaatgactggactgatggcatctttagtaccctctggcgaaaaaccctgaaagctaagaaaggcgaaaacatctttctgatcctggatggacctgtcgatgcaatatggatagaaaacctcaacagcgtgctggacgacaacaagaccctaacactggcgaatggcgaccgaatccccatggccccctcttgtaaactgctgttcgaggtgcataacatcgaaaacgccagccctgcaacagtgagtcgcatgggaatggtatacatcagttcttcggccttgtcctggaggccaatccttcaggcctggctcaaaaagaggactgcacaggaggccgcagtatttctaaccttatacgaaaaagtctttgaagacacctatacctacatgaagctcaacctcaaccctaaaatgcaacttctggaatgtaattatatcgtgcagtctttgaacctgcttgagggactgatccccagtaaagaagagggtggcgtgagctgtgtagaacacctgcacaagctgtttgtattcggactgatgtggtcactcggtgctcttctggaattggagtcccgcgaaaaactggaagccttcctacgccagcatgagagcaagctggacctgcctgagatccctaagggttctaatcagactatgtacgagttttatgtgacagactatggcgattgggagcactggaataaaaaacttcagccgtactactaccctactgattctatcccggaatactcgtcaattttagtacccaacgtggataatatccggacaaatttcctaattgatactatcgcaaaacaacataaagcagttctgttaacaggtgaacaggggacagcgaagactgttatggtgaaagcgtacttgaaaaagtacgatcctgaggtacagttgtctaagtccctcaacttctcctccgccaccgagcctatgatgttccagagaaccatcgaaagttatgtggataagcggatcggctcaacctatggtcctcccggaggccgcaagatgactgtgttcatcgatgatattaacatgcctgtcattaacgaatggggggatcagataacaaacgaaatagtacgacagatgatggagatggaaggtatgtacagcctcgataagccgggggacttcaccactatcgttgacgtacagctcattgctgctatgatccatcctggtggcgggagaaacgacataccccagcgcttgaagagacagtttacagtatttaactgtaccctgccttccaatgcgtctattgataaaatatttggcattataggctgtgggtactttgacccttgccgcagctttaagccccagatttgcgagatgatcgtgaacttggtttcagtgggcagggtgctgtggcagtggactaaagtgaagatgctgcctactccatccaaatttcattatatttttaatctccgcgacctgagcagaatttggcaaggaatgcttacaataaaggccgaggagtgtgcctccatcccaacgttgcttagtctgttcaaacacgagtgctcacgagtgatcgccgaccggtttatcactcccgaggacgagcagtggtttaacgcccacctgacacgcgcagttgaagaaaatattggcagtgatgccgcaagctgtattttacccgaaccatactttgtcgactttctgcgggaaatgccagagcccactggggacgagcccgaagatagtgtattcgaggttccgaagatctacgaattaatgccctcgttcgatttcctggctgagaaactccagttctatcaacgacaatttaacgaaattatccgggggacttcccttgacctggtattttttaaagatgctatgacccacctaatcaaaataagcagaatcattcggaccagctgcgggaacgccctgttagtcggcgtgggcggatccggcaaacaatcattgtctagattggcaagttttatcgccggctaccagattttccagataaccctgacaagatcttacaatgtcacaaatcttactgacgatcttaaggcactttacaaggtggccggggcggacggaaagggcattaccttcatcttcactgacagtgaaatcaaagatgaggcctttctcgagtacttgaataacctactgtcttcaggggagatctctaatctttttgctagagacgagatggacgagattacccaaggcctcatctctgttatgaaacgcgagttgcctagacaccccccaacttttgacaacctgtacgagtacttcatcagccgcagtcgcaagaatctacacgtagtgctttgcttttctcctgttggagagaagtttcgagctagaagcctgaagttcccgggacttatctccgggtgcactatggattggttctccagatggcctcgggaagccctgatcgccgtggcctcctacttcctgtcagactataatattgtgtgtagtagcgagataaaacgccaggtggtggagacaatgggactgttccacgatatggtctctgaatcctgtgagtcgtactttcagaggtatagacggcgcgcgcatgtgactccgaagagttaccttagttttatcaacggctacaagaacatttacgcagagaaggtgaaattcatcaatgaacaagccgaacgtatgaatatcggtctggataaactgatggaggcctctgaatccgtcgcgaagttatctcaagatcttgcggtgaaggaaaaggagctcgctgttgcgtctataaaggcggatgaggtcctggccgaggtcaccgtgtcagcccaggccagcgcgaagatcaaaaacgaggtgcaggaggtgaaagacaaggctcagaagattgtggacgaaatcgacagtgagaaggtcaaggctgagagcaaactagaggcagccaagcctgcactcgaagaggccgaagcagccctcaatacgatcaagcccaatgatatcgccacagtgcgcaaactggccaagcctcctcatctgatcatgaggatcatggactgtgttctcttgctgtttcaaaaaaaaatcgatccagtcacaatggatcctgaaaagtcctgctgtaagccatcctggggtgaatctctgaagctcatgtccgccacgggctttctctggagcctgcagcagttccccaaagatacaatcaacgaagagactgttgaactgttacaaccctacttcaacatggacgattacacttttgagtctgcaaagaaggtgtgcgggaacgtagccgggctgcttagttggaccctggcaatggcaatcttctatggtatcaatcgggaggttttgcctcttaaagccaatctcgcaaagcaggaaggtagactcgccgtggccaatgccgaattagggaaagctcaggccctgctggatgagaagcaggcggagctagataaggtacaagcaaaattcgatgccgctatgaacgagaaaatggacttgcttaacgacgcggacacatgtcgtaaaaagatgcaggcagccagcacactgatcgatggcctgtctggtgagaagattaggtggactcagcaatccaaggagtttaaggcccagatcaacaggctcgtcggggacatactgctctgtacgggttttctgtcctacttaggcccttttaaccagatttttagaaactatctactgaaagatcaatgggagatggagttacgagcccgcaagattccgttcacggagaatctaaacttgatcagcatgctggttgacccccctacgataggggaatgggggctccagggccttccaggcgatgatctgagtatccaaaatggcattatcgtcaccaaagccaccagatatccactgctgatagacccccagacgcaggggaagacttggattaagtctaaggagaaggaaaatgatctacaggtgaccagcctaaatcacaaatatttcagaacccacctggaggattcgctgagtctgggtaggccattgcttatcgaggatattcacgaggaattagatcctgcattggacaatgtccttgagaagaatttcatcaaaagcgggacgaccttcaaagtgaaagtgggagacaaagagtgcgatataatggatacttttaaactatacattaccactaagttgccgaacccagccttcacacctgaaattaatgccaaaacctccgtgattgattttactgttaccatgaagggactggagaaccagctgttgcgaagggtcattctaacagagaagcaggaacttgaagcggagagagttaaacttctggaagatgtaaccttcaataagcgaaagatgaaggaactcgaagacaacctcttgtataaactgagcgcaacaaagggctctttagtggatgatgaaagcctgattggggtcttgagaacaaccaagcagacagccgcagaggtctccgaaaagctacatgttgccgcagaaaccgagataaaaataaacgctgcacaagaggaattcagaccagctgccactagggggagcattctgtacttcttaataacggagatgtcaatggtgaacataatgtaccagacttccctggcacagttcctgaaattgttcgaccagtcaatggcccggagtgagaagtccccactgccccagaaacgaattacaaacataatcgagtatttgacctatgaggttttcacctacagcgtgcgcggcctgtacgagaatcacaagttcctttttgtcctgctgatgactctcaaaattgatcttcagaggggcacagtgaagcacagagagttccaggcactgatcaaaggcggcgcagctctagatctgaaggcctgcccacctaaaccatatagatggattcttgatatgacgtggcttaacttggtggaactcagcaaactaccacagtttgctgagatcatgaatcagatctcccgaaacgagaaggggtggaagtcctggttcgataaggacgctccagaggaggagatcatccccgatgggtacaatgattctctggatacatgtcacaagctcctcttgatccggtcttggtgccctgacaggacggttttccaagcccgcaaatacattgcggacagcctagaggagaaatacacggagcccgtgattttgaacctcgagaaaacatgggaggaaagtgatacacgtacacctctaatctgttttttgagcatgggcagtgaccctaccaaccagatagatgccttggccaaaaagttgaagctcgagtgtcggaccatctctatggggcagggtcaggaagtgcacgcccgcaagcttattcagatgtccatgcagcaggggggttgggttctcttacagaactgtcacctggggctcgaatttatggaagaactcctcgagaccttaatcacaacggaagcttctgacgattcattccgtgtttggatcaccacagagccacacgacagatttcctatcactcttttgcagacttctctaaagttcacgaatgagccgccacaaggagtgcgggctggacttaagagaaccttcgcaggaattaaccaggatcttctcgatattagtaatttgccaatgtggaaaccaatgctatataccgtggccttcttgcactccacagtacaagagagaagaaagtttggaccactgggttggaatattccttacgaattcaactccgccgacttctccgccagtgtgcagttcatccaaaatcacttggacgagtgtgacataaagaaaggggtaagttggaacactgtcagatatatgattggtgaggtgcaatatggcggtcgagtgacagatgactttgacaaacgcctgctgaactgttttgcacgcgtgtggttctctgagaaaatgttcgagcccagcttttgcttctacacaggctataagatccccctgtgtaaaacccttgaccagtattttgagtatatccagtccttgccctcacttgacaatccggaagtgttcggtctgcaccccaacgcagatatcacctaccaatccaatactgcctccgcggttctggagactattactaatatccaacccaaagagtccggtgggggtgtgggcgagactcgtgaggcaattgtctacagattatctgaagacatgctgagtaagctacctcccgattacataccccacgaagttaagagtcgcctgatcaaaatgggacatctaaattctatgaatattttcctccgccaggaaatagacagaatgcagcgggtgatttcgatcctgcgctccagtttgtcagaccttaaactcgctatcgagggaacaatcatcatgtctgagaacttgcgcgacgcactagacaatatgtacgacgcaaggattcctcaattatggaaacgtgtgtcttgggactcttctactctcggattctggttcacagagctgctggagcgtaatgctcagttctccacgtggatctttgagggacgtccaaacgtgttctggatgacaggattctttaacccccaaggatttctgactgccatgcggcaagaggtcactagggcccataaggggtgggctctggataccgttacaattcacaacgaagtcctgcgccagaccaaagaggaaatcacctccccgcctggagagggggtctacatatacggcttgtatatggatggcgcagcgtgggacagacgtaatggtaagttgatggaaagtacgcccaaagtgttgtttacccaactcccagtgttgcacatctttgcgattaatagcacggcccctaaagaccccaagttgtacgtgtgccccatttataaaaaaccaaggagaaccgacctgacctttatcaccgtggtctatctacgtacagtgctcagtccagatcactggattttgagaggcgtggcactcctctgtgatataaaatag

SEQ ID NO: 82755 - DNA, 12567 bp, Artificial Sequence
  derived and/or modified sequence
atggagaaagatgctgaagatggggcgccctcagagggcgcggaggcgcccccctccaccgaggaggcagctcctcccagatcagaggaagaggaagctccaagacccccgacagtggaggcgcccgcagaagacggtttcagcccttccgccgaagatgccgtgagcagcgtggtggattatagagatttgatcccctcagaggaaggcattgtgctgccagatgaccatgaagctgacctgaatagagtgcggcaaagattagctccccgacctgtgcagtctgtgatcagcgaggtactcagcctgccgagttctcgccggagttctaggtaccggcgttcaatgtccggactgcctaaccttcaggagacactgaaggagcgccaagcccgcttcagggaggcacgggagtcaagacgacttaagatagaccccagctataagtacatatttgagatcctcgcagagaatctcggtttggacatcgtgaccgtggaggaactgatcttggattgtccctcactcgaagccttcacaaattttttcgccaaagatggctgtaaaaccctgaaattcctttatcaagagggggacgtgccaggaattgagtgtgggcgtaccatagctggagcgacgaagggcgccaaaatgatgaagctgtatatcgacaatgccgctccggacaagctaaagggactgtgcatattctttgtacgttgtaggaacgatgtggcaattaacgtaaaaaccattcaggaggaagccctgttcacagtcctggacgcgtccaaggggctcctgaatgggatccgggatatgttagccaatatattccttcccgccgtcctggccaccaacaactggggcgccctgaaccagagcaaacagggtgagagcgagaagcatattttcaccgagaccataaaccgctatctgtcttttttggacggtgccagaatctctattgagggtacagtgaaacttaaaacaatcgacaacgtcaatttttcaaagctgcacaccttcgaggaagtcaccgcggccgctagtaacagtgagaccgtgcatcaactcgaggaggtcctgatggtttggtacaagcagatcgaacaggttctcattgagtccgaacaaatgcgcaaggaagctggcgacagtgggccattaacggaactggagcactggaagcgcatgagcgcgaagttcaactacatcatcgaacagattaagggcccgtcatgtaaggctgtgatcaatgtactgaatgtagcccactccaagctgctgaagaactggcgggaccttgatgctagaatcacggataccgccaacgagagcaaggacaatgtgcgatacctgtacaccctcgaaaaagtctgccagcccctctacaatcatgacctggtttcaatggctcacggaatacaaaatctgattaatgccattcggatgatacacggtgtgtcccgctattacaacacgtccgaacggatgacatccctgtttattaaggttacaaatcagatggtgaccgcttgtaaggcatacatcaccgacgggggactgaatcatgtgtgggaccaggaaaccccagtggtcctcaagaaaatccaggattgtatattcctcttcaaggaatatcaggcctcctttcataagacacgcaagttgattagcgaatcctccggagaaaagagtttcgaggtttccgaaatgtacatatttgggaaatttgaggccttctgcaaaagactggagaaaataacagagatgatcacagtggtacaaacatatagcacactgtcaaactctactatcgaaggcattgacatcatggcgatcaagtttaggaatatatatcagggcgtgaaaaagaagcagtatgatatcttggacccgagaaggaccgaattcgacacggacttcctggactttatgactaagattaatggactcgaagtgcagatccaagcttttatgaattccagctttggcaagattttatcctcacaacaggcattgcagctgcttcaaagatttcagaagttgaatattccgtgtttaggcctggagattaaccacacaatcgagaggattttacagtactatgtcgctgagttagatgccacaaagaaattgtatcattcccagaaagatgatccgcccctggctagaaatatgccccctatcgccggaaagatcctttgggtacgacagttataccggaggatcagtgagccaattaattacttttttaagaactcagacattcttagtagtccagacgggaaggccgtaattagacaatacaacaaaatatcctacgtattggtggagttcgaagttgtgtatcatacggcatggattagggaaatatcacagttgcattacgcacttcaggctacactttttgtccgccatccagaaacaggaaagttgttagtgaactttgatcccaaaattctcgaggttgtgagggagacgaaatgtatgatcaagatgaagcttgatgtgccggaacaagctaagcgtctcctgaagctggaatctaaattgaaggctgataagctgtatctgcaaggtctgttgcagtactatgacgagctgtgtcaggaggttccctctgttttcgttaacctgatgacaccaaagatgaagaaggtggagtctgtactccgacagggactgacagtgttaacttggagtagcctaaccttggaaagctttttccaggaagttgagctggtgctagacatgttcaatcagttattgaagaaaatttcagatctctgcgagatgcatatagacactgtacttaaggaaatagcgaagactgtgcttatcagcctcccagagagcggtgcaactaaagtggaggacatgttaaccttaaatgaaacgtacactaaggagtgggccgacatactgaaccacaagtctaaacatgtcgaagaagcagttcgggagctaatcagcattttcgagcagatctacgaagtcaagtatacaggcaaggttggtaagcagagtgaacagcgcaaacatgtggtattcggcagtgagactggagagggagagaacaatgactacgaagcgaacatcgtaaacgagttcgatacccatgacaaagaggacgaattcaagaaagagtgtaaggaggtgttcgcattcttctctcaccaactgcttgactctctccagaaggccactagactatctctggacactatgaagaggcgcattttcgttgcaagcctttacggccggaagcaatccgaagacattattagcttcataaagagcgaagtgcatcttgcaattcctaatgtggtcatgatcccctccctggatgatattcagcaagccataaacagaatgattcaactgaccctggaggtttcccgtggtgttgcacactggggtcagcagcagatacggcctataaagtccgttatccctagtcccactacgaccgatgtgacgcaccaaaatacaggaaagttgctaaaaaaagaggagcgttccttcgaagaagccatccccgcacgcaaactcaagaatttctatcccggagtggccgaacataaggacataagcaagcttgtgctgctcctttccagtagcgtaaacagcttgcgcaaggcagcccacgaggcactccaggacttccagaagtacaaaactctgtggacagaggaccgcgatgtgaaagtcaaggagttcctggcaaataatcctagtctaaccgaaatccggagcgagattctccactatgccacattcgagcaggagatcgacgagcttaaaccgatcatagtggtaggcgcgcttgaactgcacacagaacctatgaagctggcccttagcattgaggccaaggcatggaagatgttgttatgcaggtacctgaacgaggagtacaagaagaagatgtcctatatgatcgcattcataaacgaatacctgaagaagctatccagacctattcgcgatctggatgacgtgagattcgcaatggaagccctgtcttgtattcgagataatgagattcagatggacatgacccttggaccgatcgaggaagcctatgcaattctcaatcggtttgaagtggaggtgacaaaagaagagtcagaggcagtcgatacgttgagatactctttcaacaaactacagtccaaagccgtttctgtgcaggaggatctagttcaagtgcagcccaaatttaagagtaatttgctggaaagtgtggaggtcttcagggaggatgtcatcaactttgctgaagcgtatgaactggagggcccaatggtgcctaacatcccaccacaggaagcttcaaaccggctgcagatctttcaggcaagcttcgacgatctgtggcgcaagtttgtgacatactctagcggcgagcagctgtttggcctacccgtgaccgactacgaggtgctacacaaaaccaggaaggagcttaatttgctgcaaaaactgtacggactttacgatacggttatgagcagcataagcggttattatgaaatcctgtggggcgacgtggacattgagaaaataaacgctgagctgctcgaattccagaatcggtgtcggaagctgcctaagggtctgaaggattggcaggctttcctggacctgaagaaaaggattgatgacttcagcgaaagctgtccgctcctcgaaatgatgacaaacaaagcgatgaaacagcgccattgggatagaataagtgagcttactgggactcctttcgacgtcgagtccgattcattttgcctgagaaatataatggaagctccacttctcaagcacaaggatgatatcgaggacatctgcataagcgctatcaaggagaaagacatcgaagcaaaactgacccaagtcattgaaaactggaccaaccagaacctgtcctttgcggccttcaagggcaagggggagctgctcctcaaggggaccgagtctggggagatcataacgctgatggaggattccttaatggtacttggctcactgctgagcaatcgctacaacgccccgttcaaaaagaacattcaaaactgggtttacaaattgtcaacatccagcgatattattgaggaatggctggtggtgcagaacctctgggtgtatctcgaggctgtttttgtcggcggggacatagccaaacagctccctcaggaagctaagcgctttcagaacatcgataagtcctggatcaagatcatgcagcgggcccatgagaatccaaacgtgatcaattgctgtgtcggtgatgagactatggggcaacttttgcctcacctccacgagcagcttgaggtttgccaaaagagcctgaccggatacctcgagaagaagagactcctctttccccgcttctttttcgtgagtgacccagtgctcttagagattctcggacaggcctcagattcccacaccattcagcctcatctcccagctgtgtcggataatataaacgaggtcactttccacgctaaggactatgacaggatcatggcggtaatttcaagagaaggtgagaagatcgtccttgataactcggtcatggcgaaaggcccagtcgaaatctggctcctagacctcttaaagatgcagatgtctagcctgcacaacattattaggagcgctttttaccagatttcagacagcgggtttcagctattacctttcctgagtcacttcccagcccaggtgggcctgctgggtatccaaatgctgtggacccatgacagcgaagaagccctgagaaacgccaaggacgatagaaagatcatgcaggttaccaatcaaaaattccttgacatcctgaacaccttaattagccagaccacccatgatttgtcaaagttcgaccgggtgaaattcgaaacactgattacgatccacgtgcatcagcgagacatcttcgatgatctggtaaagatgcacatcaagtctcccactgacttcgagtggctaaaacagtccagattttacttcaaggaggacctcgaccagaccgtggtctctattactgacgtggatttcatttaccagaacgagtttcttggttgcacagaccgcttagtgattacacccctgactgatcggtgctatattacactcgcccaggctctgggaatgaatatgggtggagctcctgccggaccagctgggaccggaaagacagaaacaacgaaggacatgggcaggtgcctgggtaaatacgtggtggtgttcaattgctctgaccagatggactttcggggccttggacggatctttaaggggctggcgcagtccgggtcttggggctgctttgacgaattcaaccggatcgagctgcccgtgctgtcagtcgctgcccagcagatatacatagtgcttactgcaagaaaggaacgcaagaaacagtttattttttctgacggggactgtgtagatttgaatcccgagtttggcatttttttgacaatgaaccccggctatgctggcagacaagaactcccggaaaacttaaagattcaatttcgcactgtcgcaatgatggtgccagataggcaaatcatcatgagggtgaaactcgctagttgtggattcctagaaaatgttatccttgctcaaaaattttatgttttgtataagctatgtgaggagcagctgacaaaacaagtgcactatgatttcgggctgaggaatattctgtctgtgctgcggacgcttggtagtcagaagcgagctaggcccgaagatagcgagctgtccattgtgatgcgcggattacgcgacatgaatctctccaaactggtggacgaggatgagcctctctttctgtctttaatcaacgacctgtttccaggcttacaattagactctaatacttatgcagagctgcaaaacgctgttgctcaccaagtccaaattgagggtctgatcaaccaccctccgtggaacctgaagctggtgcagctgtatgagaccagtcttgttaggcacggcctgatgaccttggggcccagcgggtccggcaagacaactgtgataaccatattgatgaaagcccaaacggaatgcggccggccacaccgagagatgaggatgaaccccaaggccattacggctccacagatgttcggccgacttgataccgctacgaatgactggacagacgggatattcagtaccctctggcgtaagacgttgaaagccaaaaagggcgagaatatttttttgattctggatggacccgtcgatgctatttggatcgagaacctcaattctgtgctggatgataataagaccctcaccctggctaatggcgatagaattcctatggccccaagctgtaaattactgtttgaggttcacaatattgagaatgcttcccccgccacggtgagcaggatgggaatggtgtatatttcctcctcggccctctcatggaggcccatacttcaagcatggctgaaaaaaaggacagcccaagaggcagccgtttttctcaccctctatgaaaaagtttttgaagacacgtacacatacatgaagcttaacctgaatcctaagatgcagctactggagtgtaactacattgttcagagccttaatttgctcgagggcctcatcccgtccaaagaggaagggggcgtgtcatgtgttgagcacctgcataaactgttcgtgttcggcctcatgtggtccctgggggcactgctggagctggagagccgagagaagctcgaagctttcctaaggcagcacgagtctaaacttgatctgcctgagataccaaaaggtagcaaccagaccatgtacgaattttacgttacggattacggagattgggaacactggaataaaaagcttcagccgtattactaccccacagacagtatccctgagtatagttcaatcctggtgcccaatgtggacaacatcagaaccaacttcctgattgatactatcgccaagcaacacaaggccgtgttgctcacaggggaacagggcacagctaaaactgtcatggtgaaagcttacctgaaaaaatatgacccagaagttcagctcagcaaaagcttgaattttagctctgcaacagaaccaatgatgtttcagcggacaattgagagttacgtggataagcgaatcggctccacctacggccctcccggaggcaggaaaatgactgtattcatcgacgacatcaacatgccagtgatcaacgagtggggagatcagatcactaacgagattgtgaggcagatgatggaaatggagggaatgtattcccttgataagcctggtgacttcacaaccattgtggatgtgcagctgatagccgctatgatccatccaggcggaggccgaaacgacattccacagcgcctgaagcgacagttcacagtcttcaattgcactcttcccagcaacgcatcgatagacaaaatcttcggcattattggctgtggctatttcgacccatgccgctccttcaaacctcagatctgcgagatgatcgtgaatttagtaagtgtgggacgggtcttgtggcagtggaccaaagttaaaatgctccccactccctctaagttccattatatatttaatctccgggacctgtctagaatctggcagggcatgctgaccataaaagccgaggagtgtgccagtatcccaactttgttgagcctatttaaacacgagtgtagcagagttattgctgatagatttataactcccgaagatgagcagtggtttaatgcccacctgacccgggccgtggaggaaaacatcggcagcgacgctgcgagctgcattctgccagagccctacttcgtcgactttctgagagagatgcccgagcccaccggagacgagcccgaagactctgtgttcgaggttccaaagatttacgaactgatgcctagcttcgatttcctggccgagaaactgcagttttaccagcggcagtttaatgagatcatacgtggaacgtccctggatctggtgttttttaaagatgcaatgacccatctgatcaagatcagtagaatcatacgtacgagctgtggcaacgctctcctggtgggagttggcggatcaggcaaacagagcctgtccaggcttgcttccttcattgctggatatcagatcttccagattacacttactcgatcttacaatgtgactaaccttactgacgatctgaaggctttgtataaagtggccggggcggatggcaaggggataacattcatttttacggacagcgagatcaaggacgaagcatttctagagtacctaaacaatctgttatcttcgggcgaaatcagtaacctgtttgccagggacgagatggacgaaatcacccaagggctgatctccgtcatgaagagagagctgcctaggcaccctcccacatttgataatctgtatgagtatttcatttcacgcagccgcaaaaatctgcatgtggtactgtgcttttccccggtgggagagaaattcagggcccgatctttgaaatttcctggactaatttctggatgcaccatggattggttctctcggtggccacgcgaagccctaattgccgttgcttcatacttcctttcagattacaatattgtgtgcagttccgagattaaacggcaggtggttgagactatgggactgtttcatgacatggttagcgaaagctgcgaatcatacttccagcgctacaggaggcgcgcccatgtcaccccaaagtcttacttgtcctttatcaatggatataaaaatatttacgccgaaaaggtgaagtttatcaatgagcaggctgagagaatgaacatcggtcttgataagttgatggaagctagtgaaagcgttgccaagctttcccaagatctggccgttaaagagaaagagctggctgtcgcctctattaaggcagacgaggtcctggcagaagttaccgtgtccgctcaagcctccgcaaagataaaaaacgaagtccaggaggtgaaagataaggcccaaaaaattgtcgatgagatcgattctgaaaaggtaaaggcagagtccaaactggaggcagccaagcccgccctggaagaggccgaggcagcgcttaatacaatcaagcccaacgacattgctacagtccggaaattggccaaaccaccccacctgatcatgcgaataatggactgcgttctgttgctgttccagaaaaagattgacccagtgacaatggatcccgagaaatcgtgctgtaagcccagctggggcgaatcactgaaacttatgtcagccaccggcttcctctggtccctgcagcaatttccaaaggatacaattaatgaagagactgtagaattactccagccttacttcaatatggatgactatacatttgaatctgctaaaaaggtctgtggaaacgtcgctggattgcttagctggacccttgccatggcaattttttacggaatcaatcgtgaggtactccctcttaaggcaaacctggctaagcaagagggcaggttagcagtcgcaaatgctgaactgggcaaagctcaggctctcttagacgagaaacaagccgagctggataaagtgcaggccaagtttgacgcagccatgaacgagaagatggatctgctgaatgatgctgatacctgccggaaaaaaatgcaggcagcatccacactcatcgatggtcttagcggggagaagattaggtggacacagcagtctaaagagttcaaagcacagataaacagacttgttggcgatatcctgctctgcaccgggttcctgagctatctgggaccttttaatcagatattccgtaactacctccttaaggatcagtgggagatggaacttagggcacgcaagattcccttcaccgagaatctcaatctgatcagtatgctggtggaccctcccactataggagagtggggcttgcaaggactgccaggagatgacctgtccattcagaacggtatcattgtgactaaagcaacccgttaccccttgctgattgacccacaaacccaaggaaaaacatggattaagtctaaggaaaaagagaatgacttacaggtaacatctctcaatcacaagtattttcgcacacaccttgaggattccttgtctctcggccgtcccctgctgatcgaagacatacatgaagaactggatccggctcttgataatgtgctcgaaaaaaacttcataaaatctggtacaaccttcaaggttaaagtcggagacaaagagtgtgatataatggatacgtttaagttatatattaccactaaacttccgaatccagcattcacaccagagattaatgccaaaacctccgtgattgactttacggtaacgatgaaaggtctggaaaatcagctgcttcgtcgcgtgattctcactgaaaagcaggagctggaggctgagagggtcaaactgctcgaagatgtcactttcaacaaaaggaagatgaaggagctagaggacaatcttctttataagctcagcgccacaaagggctccctggtcgacgatgagtctctcatcggggtcttaagaactaccaaacaaacggcggccgaagtgagtgagaaacttcacgtagccgccgaaaccgagattaaaattaacgccgctcaggaggaattcagacctgcagcaacccgtgggagcatcttgtatttccttataacagaaatgtcgatggtgaatatcatgtatcagacctctctggctcaattcctgaagctatttgatcaatcaatggccagatctgagaagtcacccctccctcagaaacggattacaaatatcatcgaatatctcacatacgaggtcttcacatatagtgttaggggactctacgagaaccataagtttttgttcgtcttgctcatgactcttaagatcgaccttcagcgcggcaccgttaaacaccgcgaatttcaggccttgataaagggcggagccgccctggatcttaaagcctgtcccccaaagccatacaggtggattctggacatgacttggctgaatctggttgagctctcaaaactgccacaattcgctgagatcatgaatcagatctctagaaacgaaaaaggatggaagagctggtttgacaaagacgctcctgaagaggagattatccccgacgggtataacgactctctcgatacctgccacaagctcctgttgattaggtcatggtgccccgacagaaccgttttccaggctagaaagtacattgctgactcgctggaagaaaagtatactgaacccgttatactgaatctggaaaaaacatgggaggagtccgacacaaggactccacttatctgttttctatctatggggtccgaccctaccaaccagattgatgccctggccaagaagttgaaattggagtgccgaaccatctccatggggcagggtcaggaagtgcatgcgagaaagctgatacagatgagtatgcaacaggtttgcgacaagcgactcttacttctacagcattactgttag

SEQ ID NO: 82756 - DNA, 14088 bp, Artificial Sequence
  derived and/or modified sequence
ggggctgaggccccacccagcacagaggaggccgccccacccaggtctgaggaggaggaggccccccggccccccaccgtggaggccccagcagaagatggcttcagccccagcgcagaagatgctgtgtcctctgtggtggactacagagacctgatccccagcgaggagggcatcgtgctgcctgatgaccatgaagctgacctgaacagagtgcggcagaggctggcccccaggcctgtgcagagcgtcatcagcgaggtgctgagcctgcccagcagcagaagaagcagccgctacagaagatccatgagcggcctgcccaacctgcaggagaccctgaaggagcggcaggcccgcttccgggaggcccgggagagccggcggctgaagattgaccccagctacaagtacatctttgagatcctggccgagaacctgggcctggacatcgtgacagtggaggagctgatcctggactgccccagcctggaggccttcaccaacttctttgccaaggatggctgcaagaccctgaagttcctgtaccaggagggagatgtgcccggcattgaatgtggccgcaccatcgccggggccaccaagggggccaagatgatgaagctgtacatcgacaatgctgccccagacaagctgaagggcctgtgcatcttctttgtgcgctgcagaaatgatgtggccatcaacgtgaagaccatccaggaggaggccctcttcaccgtgctggatgccagcaagggcctgctgaatggcatccgggacatgctggccaacatcttcctgcctgctgtgctggccaccaacaactggggcgccctgaaccagagcaagcagggcgagagcgagaagcacatcttcacagagaccatcaaccgctacctgtccttcctggatggagcccgcatcagcattgagggcaccgtgaagctgaagaccatcgacaacgtgaacttcagcaagctgcacacctttgaggaggtgacagctgctgccagcaacagcgagaccgtgcaccagctggaggaggtgctgatggtgtggtacaagcagatcgagcaggtgctgattgaaagtgagcagatgaggaaggaggccggggacagcggccccctgacagagctggagcactggaagaggatgtctgccaagttcaactacatcatcgagcagatcaagggccccagctgcaaggctgtgatcaacgtgctgaatgtggcccacagcaagctgctgaagaactggagggacctggatgcccgcatcacagacacagccaatgaaagcaaggacaacgtgcgctacctgtacaccctggagaaggtgtgccagcccctgtacaaccacgacctggtgtccatggcccacggcatccagaacctgatcaatgccatccgcatgattcatggagtgagccgctactacaacaccagcgagaggatgaccagcctcttcatcaaggtgaccaaccagatggtgacagcctgcaaggcctacatcacagatggcggcctgaaccacgtgtgggaccaggagacccctgtggtgctgaagaagatccaggactgcatcttcctgttcaaggagtaccaggccagcttccacaagaccaggaagctgatcagcgagagcagtggagagaagagctttgaggtgtctgagatgtacatctttgggaagtttgaggccttctgcaagaggctggagaagatcacagagatgatcaccgtggtgcagacctacagcaccctgagcaacagcaccatcgagggcatcgacatcatggccatcaagttcaggaacatctaccagggcgtgaagaagaagcagtatgacatcctggaccccaggagaacagaatttgacacagacttcctggacttcatgaccaagatcaatggcctggaggtgcagatccaggccttcatgaacagcagctttgggaagatcctgagcagccagcaggccctgcagctgctgcagcgcttccagaagctgaacatcccctgcctgggcctggagatcaaccacaccatcgagcgcatcctgcagtactacgtggccgagctggatgccaccaagaagctgtaccacagccagaaggatgacccccccctggccaggaacatgccacccatcgccggcaagatcctgtgggtgcggcagctgtaccgccgcatcagcgagcccatcaactacttcttcaagaacagcgacatcctgagcagcccagatggcaaggccgtcatccggcagtacaacaagatctcctatgtgctggtggagtttgaggtggtgtaccacacagcctggatccgggagatcagccagctgcactacgccctgcaggccaccctgtttgtgcgccaccctgagaccgggaagctgctggtgaactttgaccccaagatcctggaggtggtgcgggagaccaagtgcatgatcaagatgaagctggatgtgcctgagcaggccaagaggctgctgaagctggagagcaagctgaaggctgacaagctgtacctgcagggcctgctgcagtactatgatgagctgtgccaggaggtgcccagcgtgtttgtgaacctgatgacccccaagatgaagaaggtggagagcgtgctgcggcagggcctgactgtgctgacctggagcagcctgaccctggagagcttcttccaggaggtggagctggtgctggacatgttcaaccagctgctgaagaagatcagtgacctgtgtgagatgcacatcgacacagtgctgaaggagatcgccaagacagtgctgatcagcctgcctgagagcggggccaccaaggtggaggacatgctgaccctgaatgagacctacaccaaggagtgggccgacatcctgaaccacaagagcaagcacgtggaggaggccgtgcgggagctgatcagcatctttgagcagatctatgaggtgaagtacaccgggaaggtgggcaagcagagcgagcagaggaagcacgtggtgtttggaagtgaaacaggagaaggagaaaataatgactatgaggccaacatcgtgaatgaatttgacacccatgacaaggaggatgagttcaagaaggagtgcaaggaggtgtttgccttcttcagccaccagctgctggacagcctgcagaaggccacccggctgagcctggacaccatgaagaggcgcatctttgtggccagcctgtatggcaggaagcagagcgaggacatcatctccttcatcaagtctgaggtgcacctggccatccccaacgtggtgatgatccccagcctggatgacatccagcaggccatcaacaggatgatccagctgaccctggaggtgtccagaggagtggcccactggggccagcagcagatccggcccatcaagagcgtcatccccagccccaccaccacagatgtgacccaccagaacacaggcaagctgctgaagaaggaggagaggagctttgaggaggccatcccagccaggaagctgaagaacttctacccaggagtggccgagcacaaggacatcagcaagctggtgctgctgctgagcagctctgtgaacagcctgaggaaggccgcccacgaggccctgcaggacttccagaagtacaagaccctgtggacagaagatagagatgtgaaggtgaaggagttcctggccaacaaccccagcctgacagagatccgctctgagatcctgcactacgccacctttgagcaggagattgatgagctgaagcccatcatcgtggtgggcgccctggagctgcacacagagcccatgaagctggccctgagcattgaggccaaggcctggaagatgctgctgtgccgctacctgaatgaggagtacaagaagaagatgagctacatgattgccttcatcaatgagtacctgaagaagctgagccggcccatccgggacctggatgatgtgcgctttgccatggaggccctgagctgcatccgggacaatgagatccagatggacatgaccctgggccccatcgaggaggcctatgccatcctgaacagatttgaggtggaggtgaccaaggaggagagcgaggccgtggacaccctgcgctacagcttcaacaagctgcagagcaaggctgtgtctgtgcaggaggacctggtgcaggtgcagcccaagttcaagagcaacctgctggagagcgtggaggtgttcagagaagatgtgatcaactttgctgaggcctatgagctggagggccccatggtgcccaacatccccccccaggaggccagcaaccggctgcagatcttccaggccagctttgatgacctgtggaggaagtttgtgacctacagcagcggggagcagctgtttggcctgcctgtgacagattatgaggtgctgcacaagaccaggaaggagctgaacctgctgcagaagctgtatggcctgtatgacacagtgatgagcagcatcagcggctactatgagatcctgtggggagatgtggacatcgagaagatcaatgctgagctgctggagttccagaaccgctgcaggaagctgcccaagggcctgaaggactggcaggccttcctggacctgaagaagagaattgatgacttcagcgagagctgccccctgctggagatgatgaccaacaaggccatgaagcagaggcactgggaccgcatcagcgagctgaccggcaccccatttgatgtggagagtgacagcttctgcctgaggaacatcatggaggcccccctgctgaagcacaaggatgacatcgaggacatctgcatcagcgccatcaaggagaaggacatcgaggccaagctgacccaggtgattgagaactggaccaaccagaacctgagctttgctgccttcaagggcaaaggagagctgctgctgaagggcacagaaagtggagagatcatcaccctgatggaggacagcctgatggtgctgggcagcctgctgagcaaccgctacaatgcccccttcaagaagaacatccagaactgggtgtacaagctgagcaccagcagtgacatcatcgaggagtggctggtggtgcagaacctgtgggtgtacctggaggccgtgtttgtgggcggggacatcgccaagcagctgccccaggaggccaagcgcttccagaacatcgacaagtcctggatcaagatcatgcagagggcccacgagaaccccaacgtcatcaactgctgcgtgggagatgagaccatgggccagctgctgccccacctgcacgagcagctggaggtgtgccagaagagcctgaccggctacctggagaagaagaggctgctcttcccccgcttcttctttgtgtctgaccctgtgctgctggagatcctgggccaggccagtgacagccacaccatccagccccacctgcctgctgtgtctgacaacatcaatgaggtgaccttccacgccaaggactatgaccgcatcatggctgtgatcagccgggagggggagaagatcgtgctggacaacagcgtgatggccaagggccctgtggagatctggctgctggacctgctgaagatgcagatgagcagcctgcacaacatcatccgcagcgccttctaccagatcagtgacagcggcttccagctgctgcccttcctgagccacttccctgcccaggtgggcctgctgggcatccagatgctgtggacccatgattctgaggaggccctgagaaatgccaaggatgacaggaagatcatgcaggtgaccaaccagaagttcctggacatcctgaacaccctcatcagccagaccacccatgacctgagcaagtttgacagagtgaagtttgagaccctcatcaccatccacgtgcaccagagggacatctttgatgacctggtgaagatgcacatcaagagccccacagactttgagtggctgaagcagagccgcttctacttcaaggaggacctggaccagacagtggtgtccatcacagatgtggacttcatctaccagaatgagttcctgggctgcacagaccggctggtgatcacccccctgacagaccgctgctacatcaccctggcccaggccctgggcatgaacatgggcggggccccagctggccctgctggcaccgggaagacagagaccaccaaggacatgggccgctgcctgggcaagtatgtggtggtgttcaactgcagcgaccagatggacttccggggcctgggccgcatcttcaagggcctggcccagagcggctcctggggctgctttgatgagttcaaccgcatcgagctgcctgtgctgtctgtggccgcccagcagatctacatcgtgctgacagccaggaaggagaggaagaagcagttcatcttcagtgatggagactgtgtggacctgaaccctgagtttggcatcttcctgaccatgaaccctggctacgccggccggcaggagctgcctgagaacctgaagatccagttcagaacagtggccatgatggtgcctgaccggcagatcatcatgagggtgaagctggccagctgtggcttcctggagaatgtcatcctggcccagaagttctacgtgctgtacaagctgtgtgaggagcagctgaccaagcaggtgcactatgactttggcctgaggaacatcctgtctgtgctgcggaccctgggcagccagaagagggcccggccagaagattctgagctgagcatcgtgatgaggggcctgcgggacatgaacctgagcaagctggtggatgaagatgagcccctcttcctgagcctcatcaatgacctcttccctggcctgcagctggacagcaacacctatgcagagctgcagaatgctgtggcccaccaggtgcagatcgagggcctcatcaaccaccccccctggaacctgaagctggtgcagctgtatgagaccagcctggtgagacatggcctgatgaccctgggccccagcggcagcggcaagaccaccgtcatcaccatcctgatgaaggcccagacagaatgtggccggccccaccgggagatgaggatgaaccccaaggccatcacagccccccagatgtttggccgcctggacacagccaccaatgactggacagatggcatcttcagcaccctgtggaggaagaccctgaaggccaagaagggggagaacatcttcctgatcctggatggccctgtggatgccatctggattgagaacctgaacagcgtgctggatgacaacaagaccctgaccctggccaacggggaccgcatccccatggcccccagctgcaagctgctgtttgaggtgcacaacattgaaaatgccagccctgccaccgtgtccaggatgggcatggtgtacatcagcagcagcgccctgtcctggaggcccatcctgcaggcctggctgaagaagaggacagcccaggaggccgctgtgttcctgaccctgtatgagaaggtgtttgaggacacctacacctacatgaagctgaacctgaaccccaagatgcagctgctggagtgcaactacatcgtgcagagcctgaacctgctggagggcctcatccccagcaaggaggagggcggcgtgtcctgtgtggagcacctgcacaagctgtttgtgtttggcctgatgtggagcctgggcgccctgctggagctggagagccgggagaagctggaggccttcctgcggcagcacgagagcaagctggacctgcctgagatccccaagggcagcaaccagaccatgtatgagttctacgtgacagattatggagactgggagcactggaacaagaagctgcagccctactactaccccacagacagcatccctgagtacagcagcatcctggtgcccaacgtggacaacatccgcaccaacttcctgattgacaccatcgccaagcagcacaaggctgtgctgctgaccggggagcagggcacagccaagacagtgatggtgaaggcctacctgaagaagtatgaccctgaggtgcagctgagcaagagcctgaacttcagcagcgccacagagcccatgatgttccagaggaccatcgagagctatgtggacaagagaattggcagcacctacggccccccaggcggcaggaagatgaccgtcttcattgatgacatcaacatgcctgtgatcaatgagtggggagaccagatcaccaatgagatcgtgcggcagatgatggagatggagggcatgtacagcctggacaagccaggggacttcaccaccatcgtggatgtgcagctgattgctgccatgatccaccctgggggcggcagaaatgacatcccccagaggctgaagaggcagttcaccgtcttcaactgcaccctgcccagcaatgccagcattgacaagatcttcggcatcatcggctgcggctactttgacccctgccgctccttcaagccccagatctgtgagatgattgtgaacctggtgtctgtgggccgggtgctgtggcagtggaccaaggtgaagatgctgcccacccccagcaagttccactacatcttcaacctgcgggacctgagccgcatctggcagggcatgctgaccatcaaggccgaggagtgtgccagcatccccaccctgctgagcctcttcaagcatgagtgcagccgggtgattgctgaccgcttcatcaccccagaagatgagcagtggttcaatgcccacctgaccagggctgtggaggagaacatcggcagtgatgctgccagctgcatcctgcctgagccctactttgtggacttcctgcgggagatgcctgagcccactggagatgagcctgaggacagcgtgtttgaggtgcccaagatctatgagctgatgcccagctttgacttcctggccgagaagctgcagttctaccagaggcagttcaatgagatcatccggggcaccagcctggacctggtgttcttcaaggatgccatgacccacctgatcaagatcagccgcatcatccgcaccagctgtggaaatgccctgctggtgggcgtgggcggcagcggcaagcagagcctgagccggctggccagcttcatcgccggctaccagatcttccagatcaccctgaccaggagctacaacgtgaccaacctgacagatgacctgaaggccctgtacaaggtggccggggctgatggcaagggcatcaccttcatcttcacagattctgagatcaaggatgaggccttcctggagtacctgaacaacctgctgagcagcggggagatcagcaacctgtttgccagagatgagatggatgagatcacccagggcctcatctctgtgatgaagcgggagctgcccaggcacccccccacctttgacaacctgtatgagtacttcatcagccgcagcaggaagaacctgcacgtggtgctgtgcttcagccctgtgggggagaagttccgggcccggagcctgaagtttcctggcctcatcagcggctgcaccatggactggttcagccgctggccccgggaggccctgattgctgtggccagctacttcctgagtgactacaacatcgtgtgcagcagcgagatcaagaggcaggtggtggagaccatgggcctcttccatgacatggtgtctgagagctgtgagagctacttccagcgctacagaagaagagcccacgtgacccccaagagctacctgtccttcatcaatggctacaagaacatctatgcagagaaggtgaagttcatcaatgagcaggccgagaggatgaacatcggcctggacaagctgatggaggccagcgagagcgtggccaagctgagccaggacctggccgtgaaggagaaggagctggccgtggccagcatcaaggcagatgaggtgctggccgaggtgacagtgtctgcccaggccagcgccaagatcaagaatgaggtgcaggaggtgaaggacaaggcccagaagatcgtggatgaaattgacagcgagaaggtgaaggccgagagcaagctggaggccgccaagccagccctggaggaggccgaggccgccctgaacaccatcaagcccaatgacatcgccaccgtgaggaagctggccaagccaccccacctgatcatgaggatcatggactgtgtgctgctgctcttccagaagaagattgatcctgtgaccatggaccctgagaagagctgctgcaagcccagctggggcgagagcctgaagctgatgtctgccaccggcttcctgtggagcctgcagcagttccccaaggacaccatcaatgaggagaccgtggagctgctgcagccctacttcaacatggatgactacacctttgagagcgccaagaaggtgtgtggaaatgtggccggcctgctgtcctggaccctggccatggccatcttctacggcatcaaccgggaggtgctgcccctgaaggccaacctggccaagcaggagggccgcctggccgtggccaatgctgagctgggcaaggcccaggccctgctggatgagaagcaggccgagctggacaaggtgcaggccaagtttgatgctgccatgaatgagaagatggacctgctgaatgatgctgacacctgcaggaagaagatgcaggccgccagcaccctgattgatggcctgagcggggagaagatccgctggacccagcagagcaaggagttcaaggcccagatcaaccggctggtgggggacatcctgctgtgcaccggcttcctgagctacctgggccccttcaaccagatcttcaggaactacctgctgaaggaccagtgggagatggagctgcgggccaggaagatccccttcacagagaacctgaacctgatctccatgctggtggacccccccaccatcggggagtggggcctgcagggcctgcctggagatgacctgagcatccagaatggcatcatcgtgaccaaggccacccgctaccccctgctgattgacccccagacccagggcaagacctggatcaagagcaaggagaaggaaaatgacctgcaggtgaccagcctgaaccacaagtacttccgcacccacctggaggacagcctgagcctgggccggcccctgctgattgaggacatccacgaggagctggaccctgccctggacaacgtgctggagaagaacttcatcaagagcggcaccaccttcaaggtgaaggtgggggacaaggaatgtgacatcatggacaccttcaagctgtacatcaccaccaagctgcccaacccagccttcaccccagagatcaatgccaagaccagcgtcatcgacttcaccgtgaccatgaagggcctggagaaccagctgctgcggcgggtcatcctgacagagaagcaggagctggaggccgagcgggtgaagctgctggaggatgtgaccttcaacaagaggaagatgaaggagctggaggacaacctgctgtacaagctgagcgccaccaagggcagcctggtggatgatgagagcctcatcggcgtgctgcggaccaccaagcagacagctgctgaggtgtctgagaagctgcacgtggccgctgagacagagatcaagatcaatgctgcccaggaggagttccggcctgctgccacccggggcagcatcctgtacttcctgatcacagagatgtccatggtgaacatcatgtaccagaccagcctggcccagttcctgaagctgtttgaccagagcatggcccggtctgagaagagccccctgccccagaagaggatcaccaacatcatcgagtacctgacctatgaggtgttcacctacagcgtgcggggcctgtatgagaaccacaagttcctgtttgtgctgctgatgaccctgaagattgacctgcagaggggcaccgtgaagcaccgggagttccaggccctgatcaagggcggggccgccctggacctgaaggcctgcccccccaagccctaccgctggatcctggacatgacctggctgaacctggtggagctgagcaagctgccccagtttgctgagatcatgaaccagatcagcagaaatgagaagggctggaagtcctggtttgacaaggatgcccctgaggaggagatcatcccagatggctacaatgacagcctggacacctgccacaagctgctgctgatccgctcctggtgcccagacagaacagtgttccaggccaggaagtacatcgctgacagcctggaggagaagtacacagagcctgtgatcctgaacctggagaagacctgggaggagagtgacaccaggacccccctcatctgcttcctgtccatgggcagtgaccccaccaaccagattgatgccctggccaagaagctgaagctggagtgcaggaccatctccatgggccagggccaggaggtgcacgccaggaagctgatccagatgtccatgcagcagggcggctgggtgctgctgcagaactgccacctgggcctggagttcatggaggagctgctggagaccctcatcaccacagaggccagtgatgacagcttccgggtgtggatcaccacagagccccatgaccgcttccccatcaccctgctgcagaccagcctgaagttcaccaatgaaccaccccagggcgtgcgggccggcctgaagaggacctttgctggcatcaaccaggacctgctggacatcagcaacctgcccatgtggaagcccatgctgtacacagtggccttcctgcacagcacagtgcaggagaggaggaagtttggccccctgggctggaacatcccctatgagttcaacagcgctgacttcagcgcctctgtgcagttcatccagaaccacctggatgaatgtgacatcaagaagggcgtgtcctggaacacagtgcgctacatgattggagaggtgcagtatggaggccgggtgacagatgactttgacaagaggctgctgaactgctttgcccgggtgtggttcagcgagaagatgtttgagcccagcttctgcttctacacaggctacaagatccccctgtgcaagaccctggaccagtactttgagtacatccagagcctgcccagcctggacaaccctgaggtgtttggcctgcaccccaatgctgacatcacctaccagagcaacacagccagcgctgtgctggagaccatcaccaacatccagcccaaggagagcggcggcggcgtgggggagacccgggaggccatcgtgtaccgcctgtctgaggacatgctgagcaagctgcccccagactacatcccccatgaggtgaagagccgcctcatcaagatgggccacctgaacagcatgaacatcttcctgcggcaggagattgacaggatgcagagggtcatcagcatcctgcggagcagcctgagtgacctgaagctggccatcgagggcaccatcatcatgtctgagaacctgagagatgccctggacaacatgtatgatgcccgcatcccccagctgtggaagagggtgtcctgggacagcagcaccctgggcttctggttcacagagctgctggagagaaatgcccagttcagcacctggatctttgagggccggcccaacgtgttctggatgacaggcttcttcaacccccagggcttcctgacagccatgaggcaggaggtgacccgggcccacaagggctgggccctggacacagtgaccatccacaatgaggtgctgcggcagaccaaggaggagatcaccagccccccaggagagggcgtgtacatctacggcctgtacatggatggagctgcctgggacagaagaaatggcaagctgatggagagcacccccaaggtgctcttcacccagctgcctgtgctgcacatctttgccatcaacagcacagcccccaaggaccccaagctgtatgtgtgccccatctacaagaagcccaggagaacagacctgaccttcatcaccgtggtgtacctgaggacagtgctgagcccagaccactggatcctgcggggcgtggccctgctgtgtgacatcaagtag

SEQ ID NO: 82757 - DNA, 13473 bp, Artificial Sequence
  derived and/or modified sequence
atgatgaagctgtacatcgacaatgctgccccagacaagctgaagggcctgtgcatcttctttgtgcgctgcagaaatgatgtggccatcaacgtgaagaccatccaggaggaggccctcttcaccgtgctggatgccagcaagggcctgctgaatggcatccgggacatgctggccaacatcttcctgcctgctgtgctggccaccaacaactggggcgccctgaaccagagcaagcagggcgagagcgagaagcacatcttcacagagaccatcaaccgctacctgtccttcctggatggagcccgcatcagcattgagggcaccgtgaagctgaagaccatcgacaacgtgaacttcagcaagctgcacacctttgaggaggtgacagctgctgccagcaacagcgagaccgtgcaccagctggaggaggtgctgatggtgtggtacaagcagatcgagcaggtgctgattgagagcgagcagatgaggaaggaggccggggacagcggccccctgacagagctggagcactggaagaggatgtctgccaagttcaactacatcatcgagcagatcaagggccccagctgcaaggccgtcatcaacgtgctgaatgtggcccacagcaagctgctgaagaactggagggacctggatgcccgcatcacagacacagccaatgaaagcaaggacaacgtgcgctacctgtacaccctggagaaggtgtgccagcccctgtacaaccacgacctggtgtccatggcccacggcatccagaacctgatcaatgccatccgcatgatccacggcgtgagccgctactacaacaccagcgagaggatgaccagcctcttcatcaaggtgaccaaccagatggtgacagcctgcaaggcctacatcacagatggcggcctgaaccacgtgtgggaccaggagacccctgtggtgctgaagaagatccaggactgcatcttcctgttcaaggagtaccaggccagcttccacaagaccaggaagctgatcagcgagagcagcggggagaagagctttgaggtgtctgagatgtacatctttgggaagtttgaggccttctgcaagaggctggagaagatcacagagatgatcaccgtggtgcagacctacagcaccctgagcaacagcaccatcgagggcatcgacatcatggccatcaagttcaggaacatctaccagggcgtgaagaagaagcagtatgacatcctggaccccaggagaacagaatttgacacagacttcctggacttcatgaccaagatcaatggcctggaggtgcagatccaggccttcatgaacagcagctttgggaagatcctgagcagccagcaggccctgcagctgctgcagcgcttccagaagctgaacatcccctgcctgggcctggagatcaaccacaccatcgagcgcatcctgcagtactacgtggccgagctggatgccaccaagaagctgtaccacagccagaaggatgatcctcccctggccaggaacatgccacccatcgccggcaagatcctgtgggtgcggcagctgtaccgccgcatcagcgagcccatcaactacttcttcaagaacagcgacatcctgagcagcccagatggcaaggctgtgatccggcagtacaacaagatctcctatgtgctggtggagtttgaggtggtgtaccacacagcctggatccgggagatcagccagctgcactacgccctgcaggccaccctgtttgtgcgccaccctgagaccgggaagctgctggtgaactttgaccccaagatcctggaggtggtgcgggagaccaagtgcatgatcaagatgaagctggatgtgcctgagcaggccaagaggctgctgaagctggagagcaagctgaaggctgacaagctgtacctgcagggcctgctgcagtactatgatgagctgtgccaggaggtgcccagcgtgtttgtgaacctgatgacccccaagatgaagaaggtggagagcgtgctgcggcagggcctgactgtgctgacctggagcagcctgaccctggagagcttcttccaggaggtggagctggtgctggacatgttcaaccagctgctgaagaagatcagtgacctgtgtgagatgcacatcgacacagtgctgaaggagatcgccaagacagtgctgatcagcctgcctgagagcggggccaccaaggtggaggacatgctgaccctgaatgagacctacaccaaggagtgggccgacatcctgaaccacaagagcaagcacgtggaggaggccgtgcgggagctgatcagcatctttgagcagatctatgaggtgaagtacacaggcaaggtgggcaagcagagcgagcagaggaagcacgtggtgtttggcagcgagaccggggagggggagaacaatgactatgaggccaacatcgtgaatgaatttgacacccatgacaaggaggatgagttcaagaaggagtgcaaggaggtgtttgccttcttcagccaccagctgctggacagcctgcagaaggccacccggctgagcctggacaccatgaagaggcgcatctttgtggccagcctgtatggcaggaagcagagcgaggacatcatctccttcatcaagtctgaggtgcacctggccatccccaacgtggtgatgatccccagcctggatgacatccagcaggccatcaacaggatgatccagctgaccctggaggtgtcccggggcgtggcccactggggccagcagcagatccggcccatcaagagcgtcatccccagccccaccaccacagatgtgacccaccagaacacaggcaagctgctgaagaaggaggagaggagctttgaggaggccatcccagccaggaagctgaagaacttctacccaggagtggccgagcacaaggacatcagcaagctggtgctgctgctgagcagctctgtgaacagcctgaggaaggccgcccacgaggccctgcaggacttccagaagtacaagaccctgtggacagaggacagagatgtgaaggtgaaggagttcctggccaacaaccccagcctgacagagatccgctctgagatcctgcactacgccacctttgagcaggagattgatgagctgaagcccatcatcgtggtgggcgccctggagctgcacacagagcccatgaagctggccctgagcattgaggccaaggcctggaagatgctgctgtgccgctacctgaatgaggagtacaagaagaagatgagctacatgattgccttcatcaatgagtacctgaagaagctgagccggcccatccgggacctggatgatgtgcgctttgccatggaggccctgagctgcatccgggacaatgagatccagatggacatgaccctgggccccatcgaggaggcctatgccatcctgaacagatttgaggtggaggtgaccaaggaggagagcgaggccgtggacaccctgcgctacagcttcaacaagctgcagagcaaggctgtgtctgtgcaggaggacctggtgcaggtgcagcccaagttcaagagcaacctgctggagagcgtggaggtgttccgggaggatgtgatcaactttgctgaggcctatgagctggagggccccatggtgcccaacatccccccccaggaggccagcaaccggctgcagatcttccaggccagctttgatgacctgtggaggaagtttgtgacctacagcagtggagagcagctgtttggcctgcctgtgacagattatgaggtgctgcacaagaccaggaaggagctgaacctgctgcagaagctgtatggcctgtatgacacagtgatgagcagcatcagcggctactatgagatcctgtggggagatgtggacatcgagaagatcaatgctgagctgctggagttccagaaccgctgcaggaagctgcccaagggcctgaaggactggcaggccttcctggacctgaagaagagaattgatgacttcagcgagagctgccccctgctggagatgatgaccaacaaggccatgaagcagaggcactgggaccgcatcagcgagctgaccggcaccccatttgatgtggagagtgacagcttctgcctgaggaacatcatggaggcccccctgctgaagcacaaggatgacatcgaggacatctgcatcagcgccatcaaggagaaggacatcgaggccaagctgacccaggtgattgagaactggaccaaccagaacctgagctttgctgccttcaagggcaagggggagctgctgctgaagggcacagagagcggggagatcatcaccctgatggaggacagcctgatggtgctgggcagcctgctgagcaaccgctacaatgcccccttcaagaagaacatccagaactgggtgtacaagctgagcaccagcagtgacatcatcgaggagtggctggtggtgcagaacctgtgggtgtacctggaggccgtgtttgtgggcggggacatcgccaagcagctgccccaggaggccaagcgcttccagaacatcgacaagtcctggatcaagatcatgcagagggcccacgagaaccccaacgtcatcaactgctgcgtgggagatgagaccatgggccagctgctgccccacctgcacgagcagctggaggtgtgccagaagagcctgaccggctacctggagaagaagaggctgctcttcccccgcttcttctttgtgtctgaccctgtgctgctggagatcctgggccaggccagtgacagccacaccatccagccccacctgcctgctgtgtctgacaacatcaatgaggtgaccttccacgccaaggactatgaccgcatcatggccgtcatcagccgggagggggagaagatcgtgctggacaacagcgtgatggccaagggccctgtggagatctggctgctggacctgctgaagatgcagatgagcagcctgcacaacatcatccgcagcgccttctaccagatcagtgacagcggcttccagctgctgcccttcctgagccacttccctgcccaggtgggcctgctgggcatccagatgctgtggacccatgacagcgaggaggccctgagaaatgccaaggatgacaggaagatcatgcaggtgaccaaccagaagttcctggacatcctgaacaccctcatcagccagaccacccatgacctgagcaagtttgacagagtgaagtttgagaccctcatcaccatccacgtgcaccagagggacatctttgatgacctggtgaagatgcacatcaagagccccacagactttgagtggctgaagcagagccgcttctacttcaaggaggacctggaccagacagtggtgtccatcacagatgtggacttcatctaccagaatgagttcctgggctgcacagaccggctggtgatcacccccctgacagaccgctgctacatcaccctggcccaggccctgggcatgaacatgggcggggccccagctggccctgctggcaccgggaagacagagaccaccaaggacatgggccgctgcctgggcaagtatgtggtggtgttcaactgcagcgaccagatggacttccggggcctgggccgcatcttcaagggcctggcccagagcggctcctggggctgctttgatgagttcaacagaattgagctgcctgtgctgtctgtggccgcccagcagatctacatcgtgctgacagccaggaaggagaggaagaagcagttcatcttcagtgatggagactgtgtggacctgaaccctgagtttggcatcttcctgaccatgaaccctggctacgccggccggcaggagctgcctgagaacctgaagatccagttcagaacagtggccatgatggtgcctgaccggcagatcatcatgagggtgaagctggccagctgtggcttcctggagaatgtcatcctggcccagaagttctacgtgctgtacaagctgtgtgaggagcagctgaccaagcaggtgcactatgactttggcctgaggaacatcctgtctgtgctgcggaccctgggcagccagaagagggcccggcctgaggacagcgagctgagcatcgtgatgaggggcctgcgggacatgaacctgagcaagctggtggatgaagatgagcccctcttcctgagcctcatcaatgacctcttccctggcctgcagctggacagcaacacctacgccgagctgcagaatgctgtggcccaccaggtgcagatcgagggcctcatcaaccaccccccctggaacctgaagctggtgcagctgtatgagaccagcctggtgcgccacggcctgatgaccctgggccccagcggcagcggcaagaccaccgtcatcaccatcctgatgaaggcccagacagaatgtggccggccccaccgggagatgaggatgaaccccaaggccatcacagccccccagatgtttggccgcctggacacagccaccaatgactggacagatggcatcttcagcaccctgtggaggaagaccctgaaggccaagaagggggagaacatcttcctgatcctggatggccctgtggatgccatctggattgagaacctgaacagcgtgctggatgacaacaagaccctgaccctggccaatggagaccgcatccccatggcccccagctgcaagctgctgtttgaggtgcacaacattgaaaatgccagccctgccaccgtgtccaggatgggcatggtgtacatcagcagcagcgccctgtcctggaggcccatcctgcaggcctggctgaagaagaggacagcccaggaggccgctgtgttcctgaccctgtatgagaaggtgtttgaggacacctacacctacatgaagctgaacctgaaccccaagatgcagctgctggagtgcaactacatcgtgcagagcctgaacctgctggagggcctcatccccagcaaggaggagggcggcgtgtcctgtgtggagcacctgcacaagctgtttgtgtttggcctgatgtggagcctgggcgccctgctggagctggagagccgggagaagctggaggccttcctgcggcagcacgagagcaagctggacctgcctgagatccccaagggcagcaaccagaccatgtatgagttctacgtgacagattatggagactgggagcactggaacaagaagctgcagccctactactaccccacagacagcatccctgagtacagcagcatcctggtgcccaacgtggacaacatccgcaccaacttcctgattgacaccatcgccaagcagcacaaggctgtgctgctgactggagagcagggcacagccaagacagtgatggtgaaggcctacctgaagaagtatgaccctgaggtgcagctgagcaagagcctgaacttcagcagcgccacagagcccatgatgttccagaggaccatcgagagctatgtggacaagagaattggcagcacctacggccccccaggcggcaggaagatgacagtgttcattgatgacatcaacatgcctgtgatcaatgagtggggagaccagatcaccaatgaaattgtgcggcagatgatggagatggagggcatgtacagcctggacaagccaggggacttcaccaccatcgtggatgtgcagctgattgctgccatgatccaccctgggggcggcagaaatgacatcccccagaggctgaagaggcagttcaccgtcttcaactgcaccctgcccagcaatgccagcattgacaagatcttcggcatcatcggctgcggctactttgacccctgccgctccttcaagccccagatctgtgagatgattgtgaacctggtgtctgtgggccgggtgctgtggcagtggaccaaggtgaagatgctgcccacccccagcaagttccactacatcttcaacctgcgggacctgagccgcatctggcagggcatgctgaccatcaaggccgaggagtgtgccagcatccccaccctgctgagcctcttcaagcatgaatgttcccgggtgattgctgaccgcttcatcaccccagaagatgagcagtggttcaatgcccacctgaccagggctgtggaggagaacattggaagtgatgctgccagctgcatcctgcctgagccctactttgtggacttcctgcgggagatgcctgagcccactggagatgagccagaagattctgtgtttgaggtgcccaagatctatgagctgatgcccagctttgacttcctggccgagaagctgcagttctaccagaggcagttcaatgagatcatccggggcaccagcctggacctggtgttcttcaaggatgccatgacccacctgatcaagatcagccgcatcatccgcaccagctgtggaaatgccctgctggtgggcgtgggcggcagcggcaagcagagcctgagccggctggccagcttcatcgccggctaccagatcttccagatcaccctgaccaggagctacaacgtgaccaacctgacagatgacctgaaggccctgtacaaggtggccggggctgatggcaagggcatcaccttcatcttcacagacagcgagatcaaggatgaggccttcctggagtacctgaacaacctgctgagcagtggagagatcagcaacctgtttgccagagatgagatggatgagatcacccagggcctcatctctgtgatgaagcgggagctgcccaggcacccccccacctttgacaacctgtatgagtacttcatcagccgcagcaggaagaacctgcacgtggtgctgtgcttcagccctgtgggggagaagttccgggcccggagcctgaagtttcctggcctcatcagcggctgcaccatggactggttcagccgctggccccgggaggccctgattgctgtggccagctacttcctgagtgactacaacatcgtgtgcagcagcgagatcaagaggcaggtggtggagaccatgggcctcttccatgacatggtgtctgagagctgtgagagctacttccagcgctacagaagaagagcccacgtgacccccaagagctacctgtccttcatcaatggctacaagaacatctatgcagagaaggtgaagttcatcaatgagcaggccgagaggatgaacatcggcctggacaagctgatggaggccagcgagagcgtggccaagctgagccaggacctggccgtgaaggagaaggagctggccgtggccagcatcaaggcagatgaggtgctggccgaggtgacagtgtctgcccaggccagcgccaagatcaagaatgaggtgcaggaggtgaaggacaaggcccagaagatcgtggatgaaattgattctgagaaggtgaaggccgagagcaagctggaggccgccaagccagccctggaggaggccgaggccgccctgaacaccatcaagcccaatgacatcgccaccgtgaggaagctggccaagccaccccacctgatcatgaggatcatggactgtgtgctgctgctcttccagaagaagattgatcctgtgaccatggaccctgagaagagctgctgcaagcccagctggggcgagagcctgaagctgatgtctgccaccggcttcctgtggagcctgcagcagttccccaaggacaccatcaatgaggagaccgtggagctgctgcagccctacttcaacatggatgactacacctttgaaagtgccaagaaggtgtgtggaaatgtggccggcctgctgtcctggaccctggccatggccatcttctacggcatcaaccgggaggtgctgcccctgaaggccaacctggccaagcaggagggccgcctggccgtggccaatgctgagctgggcaaggcccaggccctgctggatgagaagcaggccgagctggacaaggtgcaggccaagtttgatgctgccatgaatgagaagatggacctgctgaatgatgctgacacctgcaggaagaagatgcaggccgccagcaccctgattgatggcctgtctggagagaagatccgctggacccagcagagcaaggagttcaaggcccagatcaaccggctggtgggggacatcctgctgtgcaccggcttcctgagctacctgggccccttcaaccagatcttcaggaactacctgctgaaggaccagtgggagatggagctgcgggccaggaagatccccttcacagagaacctgaacctgatctccatgctggtggacccccccaccatcggggagtggggcctgcagggcctgcctggagatgacctgagcatccagaatggcatcatcgtgaccaaggccacccgctaccccctgctgattgacccccagacccagggcaagacctggatcaagagcaaggagaaggaaaatgacctgcaggtgaccagcctgaaccacaagtacttccgcacccacctggaggacagcctgagcctgggccggcccctgctgattgaggacatccacgaggagctggaccctgccctggacaacgtgctggagaagaacttcatcaagagcggcaccaccttcaaggtgaaggtgggggacaaggaatgtgacatcatggacaccttcaagctgtacatcaccaccaagctgcccaacccagccttcaccccagagatcaatgccaagacctctgtgattgacttcaccgtgaccatgaagggcctggagaaccagctgctgcggcgggtcatcctgacagagaagcaggagctggaggccgagcgggtgaagctgctggaggatgtgaccttcaacaagaggaagatgaaggagctggaggacaacctgctgtacaagctgagcgccaccaagggcagcctggtggatgatgagagcctgattggagtgctgcggaccaccaagcagacagctgctgaggtgtctgagaagctgcacgtggccgctgagacagagatcaagatcaatgctgcccaggaggagttccggcctgctgccacccggggcagcatcctgtacttcctgatcacagagatgtccatggtgaacatcatgtaccagaccagcctggcccagttcctgaagctgtttgaccagagcatggcccggtctgagaagagccccctgccccagaagaggatcaccaacatcatcgagtacctgacctatgaggtgttcacctacagcgtgcggggcctgtatgagaaccacaagttcctgtttgtgctgctgatgaccctgaagattgacctgcagaggggcaccgtgaagcaccgggagttccaggccctgatcaagggcggggccgccctggacctgaaggcctgcccccccaagccctaccgctggatcctggacatgacctggctgaacctggtggagctgagcaagctgccccagtttgctgagatcatgaaccagatcagcagaaatgagaagggctggaagtcctggtttgacaaggatgcccctgaggaggagatcatcccagatggctacaatgacagcctggacacctgccacaagctgctgctgatccgctcctggtgcccagacagaacagtgttccaggccaggaagtacatcgctgacagcctggaggagaagtacacagagcccgtcatcctgaacctggagaagacctgggaggagagtgacaccaggacccccctcatctgcttcctgtccatgggcagtgaccccaccaaccagattgatgccctggccaagaagctgaagctggagtgcaggaccatctccatgggccagggccaggaggtgcacgccaggaagctgatccagatgtccatgcagcagggcggctgggtgctgctgcagaactgccacctgggcctggagttcatggaggagctgctggagaccctcatcaccacagaggccagtgatgacagcttccgggtgtggatcaccacagagccccatgaccgcttccccatcaccctgctgcagaccagcctgaagttcaccaatgagcccccccagggcgtgcgggccggcctgaagaggacctttgctggcatcaaccaggacctgctggacatcagcaacctgcccatgtggaagcccatgctgtacacagtggccttcctgcacagcacagtgcaggagaggaggaagtttggccccctgggctggaacatcccctatgagttcaacagcgctgacttcagcgcctctgtgcagttcatccagaaccacctggatgaatgtgacatcaagaagggcgtgtcctggaacacagtgcgctacatgattggagaggtgcagtatggaggccgggtgacagatgactttgacaagaggctgctgaactgctttgcccgggtgtggttcagcgagaagatgtttgagcccagcttctgcttctacacaggctacaagatccccctgtgcaagaccctggaccagtactttgagtacatccagagcctgcccagcctggacaaccctgaggtgtttggcctgcaccccaatgctgacatcacctaccagagcaacacagccagcgctgtgctggagaccatcaccaacatccagcccaaggagagcggcggcggcgtgggggagacccgggaggccatcgtgtaccgcctgtctgaggacatgctgagcaagctgcccccagactacatcccccatgaggtgaagagccgcctcatcaagatgggccacctgaacagcatgaacatcttcctgcggcaggagattgacaggatgcagagggtcatcagcatcctgcggagcagcctgagtgacctgaagctggccatcgagggcaccatcatcatgtctgagaacctgagagatgccctggacaacatgtatgatgcccgcatcccccagctgtggaagagggtgtcctgggacagcagcaccctgggcttctggttcacagagctgctggagagaaatgcccagttcagcacctggatctttgagggccggcccaacgtgttctggatgacaggcttcttcaacccccagggcttcctgacagccatgaggcaggaggtgacccgggcccacaagggctgggccctggacacagtgaccatccacaatgaggtgctgcggcagaccaaggaggagatcaccagccccccaggagaaggagtgtacatctacggcctgtacatggatggagctgcctgggacagaagaaatggcaagctgatggagagcacccccaaggtgctcttcacccagctgcctgtgctgcacatctttgccatcaacagcacagcccccaaggaccccaagctgtatgtgtgccccatctacaagaagcccaggagaacagacctgaccttcatcaccgtggtgtacctgaggacagtgctgagcccagaccactggatcctgcggggcgtggccctgctgtgtgacatcaagtag

SEQ ID NO: 82758 - DNA, 12567 bp, Artificial Sequence
  derived and/or modified sequence
atggagaaggatgctgaagatggagcccccagcgagggcgctgaggccccacccagcacagaggaggccgccccacccaggtctgaggaggaggaggccccccggccccccaccgtggaggccccagcagaagatggcttcagccccagcgcagaagatgctgtgtcctctgtggtggactacagagacctgatccccagcgaggagggcatcgtgctgcctgatgaccatgaagctgacctgaacagagtgcggcagaggctggcccccaggcctgtgcagagcgtcatcagcgaggtgctgagcctgcccagcagcagaagaagcagccgctacagaagatccatgagcggcctgcccaacctgcaggagaccctgaaggagcggcaggcccgcttccgggaggcccgggagagccggcggctgaagattgaccccagctacaagtacatctttgagatcctggccgagaacctgggcctggacatcgtgacagtggaggagctgatcctggactgccccagcctggaggccttcaccaacttctttgccaaggatggctgcaagaccctgaagttcctgtaccaggagggagatgtgcccggcattgaatgtggccgcaccatcgccggggccaccaagggggccaagatgatgaagctgtacatcgacaatgctgccccagacaagctgaagggcctgtgcatcttctttgtgcgctgcagaaatgatgtggccatcaacgtgaagaccatccaggaggaggccctcttcaccgtgctggatgccagcaagggcctgctgaatggcatccgggacatgctggccaacatcttcctgcctgctgtgctggccaccaacaactggggcgccctgaaccagagcaagcagggcgagagcgagaagcacatcttcacagagaccatcaaccgctacctgtccttcctggatggagcccgcatcagcattgagggcaccgtgaagctgaagaccatcgacaacgtgaacttcagcaagctgcacacctttgaggaggtgacagctgctgccagcaacagcgagaccgtgcaccagctggaggaggtgctgatggtgtggtacaagcagatcgagcaggtgctgattgaaagtgagcagatgaggaaggaggccggggacagcggccccctgacagagctggagcactggaagaggatgtctgccaagttcaactacatcatcgagcagatcaagggccccagctgcaaggctgtgatcaacgtgctgaatgtggcccacagcaagctgctgaagaactggagggacctggatgcccgcatcacagacacagccaatgaaagcaaggacaacgtgcgctacctgtacaccctggagaaggtgtgccagcccctgtacaaccacgacctggtgtccatggcccacggcatccagaacctgatcaatgccatccgcatgattcatggagtgagccgctactacaacaccagcgagaggatgaccagcctcttcatcaaggtgaccaaccagatggtgacagcctgcaaggcctacatcacagatggcggcctgaaccacgtgtgggaccaggagacccctgtggtgctgaagaagatccaggactgcatcttcctgttcaaggagtaccaggccagcttccacaagaccaggaagctgatcagcgagagcagtggagagaagagctttgaggtgtctgagatgtacatctttgggaagtttgaggccttctgcaagaggctggagaagatcacagagatgatcaccgtggtgcagacctacagcaccctgagcaacagcaccatcgagggcatcgacatcatggccatcaagttcaggaacatctaccagggcgtgaagaagaagcagtatgacatcctggaccccaggagaacagaatttgacacagacttcctggacttcatgaccaagatcaatggcctggaggtgcagatccaggccttcatgaacagcagctttgggaagatcctgagcagccagcaggccctgcagctgctgcagcgcttccagaagctgaacatcccctgcctgggcctggagatcaaccacaccatcgagcgcatcctgcagtactacgtggccgagctggatgccaccaagaagctgtaccacagccagaaggatgacccccccctggccaggaacatgccacccatcgccggcaagatcctgtgggtgcggcagctgtaccgccgcatcagcgagcccatcaactacttcttcaagaacagcgacatcctgagcagcccagatggcaaggccgtcatccggcagtacaacaagatctcctatgtgctggtggagtttgaggtggtgtaccacacagcctggatccgggagatcagccagctgcactacgccctgcaggccaccctgtttgtgcgccaccctgagaccgggaagctgctggtgaactttgaccccaagatcctggaggtggtgcgggagaccaagtgcatgatcaagatgaagctggatgtgcctgagcaggccaagaggctgctgaagctggagagcaagctgaaggctgacaagctgtacctgcagggcctgctgcagtactatgatgagctgtgccaggaggtgcccagcgtgtttgtgaacctgatgacccccaagatgaagaaggtggagagcgtgctgcggcagggcctgactgtgctgacctggagcagcctgaccctggagagcttcttccaggaggtggagctggtgctggacatgttcaaccagctgctgaagaagatcagtgacctgtgtgagatgcacatcgacacagtgctgaaggagatcgccaagacagtgctgatcagcctgcctgagagcggggccaccaaggtggaggacatgctgaccctgaatgagacctacaccaaggagtgggccgacatcctgaaccacaagagcaagcacgtggaggaggccgtgcgggagctgatcagcatctttgagcagatctatgaggtgaagtacaccgggaaggtgggcaagcagagcgagcagaggaagcacgtggtgtttggaagtgaaacaggagaaggagaaaataatgactatgaggccaacatcgtgaatgaatttgacacccatgacaaggaggatgagttcaagaaggagtgcaaggaggtgtttgccttcttcagccaccagctgctggacagcctgcagaaggccacccggctgagcctggacaccatgaagaggcgcatctttgtggccagcctgtatggcaggaagcagagcgaggacatcatctccttcatcaagtctgaggtgcacctggccatccccaacgtggtgatgatccccagcctggatgacatccagcaggccatcaacaggatgatccagctgaccctggaggtgtccagaggagtggcccactggggccagcagcagatccggcccatcaagagcgtcatccccagccccaccaccacagatgtgacccaccagaacacaggcaagctgctgaagaaggaggagaggagctttgaggaggccatcccagccaggaagctgaagaacttctacccaggagtggccgagcacaaggacatcagcaagctggtgctgctgctgagcagctctgtgaacagcctgaggaaggccgcccacgaggccctgcaggacttccagaagtacaagaccctgtggacagaagatagagatgtgaaggtgaaggagttcctggccaacaaccccagcctgacagagatccgctctgagatcctgcactacgccacctttgagcaggagattgatgagctgaagcccatcatcgtggtgggcgccctggagctgcacacagagcccatgaagctggccctgagcattgaggccaaggcctggaagatgctgctgtgccgctacctgaatgaggagtacaagaagaagatgagctacatgattgccttcatcaatgagtacctgaagaagctgagccggcccatccgggacctggatgatgtgcgctttgccatggaggccctgagctgcatccgggacaatgagatccagatggacatgaccctgggccccatcgaggaggcctatgccatcctgaacagatttgaggtggaggtgaccaaggaggagagcgaggccgtggacaccctgcgctacagcttcaacaagctgcagagcaaggctgtgtctgtgcaggaggacctggtgcaggtgcagcccaagttcaagagcaacctgctggagagcgtggaggtgttcagagaagatgtgatcaactttgctgaggcctatgagctggagggccccatggtgcccaacatccccccccaggaggccagcaaccggctgcagatcttccaggccagctttgatgacctgtggaggaagtttgtgacctacagcagcggggagcagctgtttggcctgcctgtgacagattatgaggtgctgcacaagaccaggaaggagctgaacctgctgcagaagctgtatggcctgtatgacacagtgatgagcagcatcagcggctactatgagatcctgtggggagatgtggacatcgagaagatcaatgctgagctgctggagttccagaaccgctgcaggaagctgcccaagggcctgaaggactggcaggccttcctggacctgaagaagagaattgatgacttcagcgagagctgccccctgctggagatgatgaccaacaaggccatgaagcagaggcactgggaccgcatcagcgagctgaccggcaccccatttgatgtggagagtgacagcttctgcctgaggaacatcatggaggcccccctgctgaagcacaaggatgacatcgaggacatctgcatcagcgccatcaaggagaaggacatcgaggccaagctgacccaggtgattgagaactggaccaaccagaacctgagctttgctgccttcaagggcaaaggagagctgctgctgaagggcacagaaagtggagagatcatcaccctgatggaggacagcctgatggtgctgggcagcctgctgagcaaccgctacaatgcccccttcaagaagaacatccagaactgggtgtacaagctgagcaccagcagtgacatcatcgaggagtggctggtggtgcagaacctgtgggtgtacctggaggccgtgtttgtgggcggggacatcgccaagcagctgccccaggaggccaagcgcttccagaacatcgacaagtcctggatcaagatcatgcagagggcccacgagaaccccaacgtcatcaactgctgcgtgggagatgagaccatgggccagctgctgccccacctgcacgagcagctggaggtgtgccagaagagcctgaccggctacctggagaagaagaggctgctcttcccccgcttcttctttgtgtctgaccctgtgctgctggagatcctgggccaggccagtgacagccacaccatccagccccacctgcctgctgtgtctgacaacatcaatgaggtgaccttccacgccaaggactatgaccgcatcatggctgtgatcagccgggagggggagaagatcgtgctggacaacagcgtgatggccaagggccctgtggagatctggctgctggacctgctgaagatgcagatgagcagcctgcacaacatcatccgcagcgccttctaccagatcagtgacagcggcttccagctgctgcccttcctgagccacttccctgcccaggtgggcctgctgggcatccagatgctgtggacccatgattctgaggaggccctgagaaatgccaaggatgacaggaagatcatgcaggtgaccaaccagaagttcctggacatcctgaacaccctcatcagccagaccacccatgacctgagcaagtttgacagagtgaagtttgagaccctcatcaccatccacgtgcaccagagggacatctttgatgacctggtgaagatgcacatcaagagccccacagactttgagtggctgaagcagagccgcttctacttcaaggaggacctggaccagacagtggtgtccatcacagatgtggacttcatctaccagaatgagttcctgggctgcacagaccggctggtgatcacccccctgacagaccgctgctacatcaccctggcccaggccctgggcatgaacatgggcggggccccagctggccctgctggcaccgggaagacagagaccaccaaggacatgggccgctgcctgggcaagtatgtggtggtgttcaactgcagcgaccagatggacttccggggcctgggccgcatcttcaagggcctggcccagagcggctcctggggctgctttgatgagttcaaccgcatcgagctgcctgtgctgtctgtggccgcccagcagatctacatcgtgctgacagccaggaaggagaggaagaagcagttcatcttcagtgatggagactgtgtggacctgaaccctgagtttggcatcttcctgaccatgaaccctggctacgccggccggcaggagctgcctgagaacctgaagatccagttcagaacagtggccatgatggtgcctgaccggcagatcatcatgagggtgaagctggccagctgtggcttcctggagaatgtcatcctggcccagaagttctacgtgctgtacaagctgtgtgaggagcagctgaccaagcaggtgcactatgactttggcctgaggaacatcctgtctgtgctgcggaccctgggcagccagaagagggcccggccagaagattctgagctgagcatcgtgatgaggggcctgcgggacatgaacctgagcaagctggtggatgaagatgagcccctcttcctgagcctcatcaatgacctcttccctggcctgcagctggacagcaacacctatgcagagctgcagaatgctgtggcccaccaggtgcagatcgagggcctcatcaaccaccccccctggaacctgaagctggtgcagctgtatgagaccagcctggtgagacatggcctgatgaccctgggccccagcggcagcggcaagaccaccgtcatcaccatcctgatgaaggcccagacagaatgtggccggccccaccgggagatgaggatgaaccccaaggccatcacagccccccagatgtttggccgcctggacacagccaccaatgactggacagatggcatcttcagcaccctgtggaggaagaccctgaaggccaagaagggggagaacatcttcctgatcctggatggccctgtggatgccatctggattgagaacctgaacagcgtgctggatgacaacaagaccctgaccctggccaacggggaccgcatccccatggcccccagctgcaagctgctgtttgaggtgcacaacattgaaaatgccagccctgccaccgtgtccaggatgggcatggtgtacatcagcagcagcgccctgtcctggaggcccatcctgcaggcctggctgaagaagaggacagcccaggaggccgctgtgttcctgaccctgtatgagaaggtgtttgaggacacctacacctacatgaagctgaacctgaaccccaagatgcagctgctggagtgcaactacatcgtgcagagcctgaacctgctggagggcctcatccccagcaaggaggagggcggcgtgtcctgtgtggagcacctgcacaagctgtttgtgtttggcctgatgtggagcctgggcgccctgctggagctggagagccgggagaagctggaggccttcctgcggcagcacgagagcaagctggacctgcctgagatccccaagggcagcaaccagaccatgtatgagttctacgtgacagattatggagactgggagcactggaacaagaagctgcagccctactactaccccacagacagcatccctgagtacagcagcatcctggtgcccaacgtggacaacatccgcaccaacttcctgattgacaccatcgccaagcagcacaaggctgtgctgctgaccggggagcagggcacagccaagacagtgatggtgaaggcctacctgaagaagtatgaccctgaggtgcagctgagcaagagcctgaacttcagcagcgccacagagcccatgatgttccagaggaccatcgagagctatgtggacaagagaattggcagcacctacggccccccaggcggcaggaagatgaccgtcttcattgatgacatcaacatgcctgtgatcaatgagtggggagaccagatcaccaatgagatcgtgcggcagatgatggagatggagggcatgtacagcctggacaagccaggggacttcaccaccatcgtggatgtgcagctgattgctgccatgatccaccctgggggcggcagaaatgacatcccccagaggctgaagaggcagttcaccgtcttcaactgcaccctgcccagcaatgccagcattgacaagatcttcggcatcatcggctgcggctactttgacccctgccgctccttcaagccccagatctgtgagatgattgtgaacctggtgtctgtgggccgggtgctgtggcagtggaccaaggtgaagatgctgcccacccccagcaagttccactacatcttcaacctgcgggacctgagccgcatctggcagggcatgctgaccatcaaggccgaggagtgtgccagcatccccaccctgctgagcctcttcaagcatgagtgcagccgggtgattgctgaccgcttcatcaccccagaagatgagcagtggttcaatgcccacctgaccagggctgtggaggagaacatcggcagtgatgctgccagctgcatcctgcctgagccctactttgtggacttcctgcgggagatgcctgagcccactggagatgagcctgaggacagcgtgtttgaggtgcccaagatctatgagctgatgcccagctttgacttcctggccgagaagctgcagttctaccagaggcagttcaatgagatcatccggggcaccagcctggacctggtgttcttcaaggatgccatgacccacctgatcaagatcagccgcatcatccgcaccagctgtggaaatgccctgctggtgggcgtgggcggcagcggcaagcagagcctgagccggctggccagcttcatcgccggctaccagatcttccagatcaccctgaccaggagctacaacgtgaccaacctgacagatgacctgaaggccctgtacaaggtggccggggctgatggcaagggcatcaccttcatcttcacagattctgagatcaaggatgaggccttcctggagtacctgaacaacctgctgagcagcggggagatcagcaacctgtttgccagagatgagatggatgagatcacccagggcctcatctctgtgatgaagcgggagctgcccaggcacccccccacctttgacaacctgtatgagtacttcatcagccgcagcaggaagaacctgcacgtggtgctgtgcttcagccctgtgggggagaagttccgggcccggagcctgaagtttcctggcctcatcagcggctgcaccatggactggttcagccgctggccccgggaggccctgattgctgtggccagctacttcctgagtgactacaacatcgtgtgcagcagcgagatcaagaggcaggtggtggagaccatgggcctcttccatgacatggtgtctgagagctgtgagagctacttccagcgctacagaagaagagcccacgtgacccccaagagctacctgtccttcatcaatggctacaagaacatctatgcagagaaggtgaagttcatcaatgagcaggccgagaggatgaacatcggcctggacaagctgatggaggccagcgagagcgtggccaagctgagccaggacctggccgtgaaggagaaggagctggccgtggccagcatcaaggcagatgaggtgctggccgaggtgacagtgtctgcccaggccagcgccaagatcaagaatgaggtgcaggaggtgaaggacaaggcccagaagatcgtggatgaaattgacagcgagaaggtgaaggccgagagcaagctggaggccgccaagccagccctggaggaggccgaggccgccctgaacaccatcaagcccaatgacatcgccaccgtgaggaagctggccaagccaccccacctgatcatgaggatcatggactgtgtgctgctgctcttccagaagaagattgatcctgtgaccatggaccctgagaagagctgctgcaagcccagctggggcgagagcctgaagctgatgtctgccaccggcttcctgtggagcctgcagcagttccccaaggacaccatcaatgaggagaccgtggagctgctgcagccctacttcaacatggatgactacacctttgagagcgccaagaaggtgtgtggaaatgtggccggcctgctgtcctggaccctggccatggccatcttctacggcatcaaccgggaggtgctgcccctgaaggccaacctggccaagcaggagggccgcctggccgtggccaatgctgagctgggcaaggcccaggccctgctggatgagaagcaggccgagctggacaaggtgcaggccaagtttgatgctgccatgaatgagaagatggacctgctgaatgatgctgacacctgcaggaagaagatgcaggccgccagcaccctgattgatggcctgagcggggagaagatccgctggacccagcagagcaaggagttcaaggcccagatcaaccggctggtgggggacatcctgctgtgcaccggcttcctgagctacctgggccccttcaaccagatcttcaggaactacctgctgaaggaccagtgggagatggagctgcgggccaggaagatccccttcacagagaacctgaacctgatctccatgctggtggacccccccaccatcggggagtggggcctgcagggcctgcctggagatgacctgagcatccagaatggcatcatcgtgaccaaggccacccgctaccccctgctgattgacccccagacccagggcaagacctggatcaagagcaaggagaaggaaaatgacctgcaggtgaccagcctgaaccacaagtacttccgcacccacctggaggacagcctgagcctgggccggcccctgctgattgaggacatccacgaggagctggaccctgccctggacaacgtgctggagaagaacttcatcaagagcggcaccaccttcaaggtgaaggtgggggacaaggaatgtgacatcatggacaccttcaagctgtacatcaccaccaagctgcccaacccagccttcaccccagagatcaatgccaagaccagcgtcatcgacttcaccgtgaccatgaagggcctggagaaccagctgctgcggcgggtcatcctgacagagaagcaggagctggaggccgagcgggtgaagctgctggaggatgtgaccttcaacaagaggaagatgaaggagctggaggacaacctgctgtacaagctgagcgccaccaagggcagcctggtggatgatgagagcctcatcggcgtgctgcggaccaccaagcagacagctgctgaggtgtctgagaagctgcacgtggccgctgagacagagatcaagatcaatgctgcccaggaggagttccggcctgctgccacccggggcagcatcctgtacttcctgatcacagagatgtccatggtgaacatcatgtaccagaccagcctggcccagttcctgaagctgtttgaccagagcatggcccggtctgagaagagccccctgccccagaagaggatcaccaacatcatcgagtacctgacctatgaggtgttcacctacagcgtgcggggcctgtatgagaaccacaagttcctgtttgtgctgctgatgaccctgaagattgacctgcagaggggcaccgtgaagcaccgggagttccaggccctgatcaagggcggggccgccctggacctgaaggcctgcccccccaagccctaccgctggatcctggacatgacctggctgaacctggtggagctgagcaagctgccccagtttgctgagatcatgaaccagatcagcagaaatgagaagggctggaagtcctggtttgacaaggatgcccctgaggaggagatcatcccagatggctacaatgacagcctggacacctgccacaagctgctgctgatccgctcctggtgcccagacagaacagtgttccaggccaggaagtacatcgctgacagcctggaggagaagtacacagagcctgtgatcctgaacctggagaagacctgggaggagagtgacaccaggacccccctcatctgcttcctgtccatgggcagtgaccccaccaaccagattgatgccctggccaagaagctgaagctggagtgcaggaccatctccatgggccagggccaggaggtgcacgccaggaagctgatccagatgtccatgcagcaggtgtgtgacaagaggctgctgctgctgcagcactactgctag

SEQ ID NO: 82759 - DNA, 14088 bp, Artificial Sequence
  derived and/or modified sequence
ggcgccgaggccccccccagcaccgaggaggccgcccccccccggtccgaggaagaggaagcccctcgacctccaacagtcgaagcacccgccgaggacggctttagcccctctgcggaagacgccgtgagtagcgtggtggactaccgcgatcttattccgtctgaggaagggatcgtgctccccgacgatcatgaagcggacctcaacagagtcaggcagcggctagcgccccgccctgttcaaagcgtcattagtgaagtcctgagcctgcccagcagtagacggagtagtagatatcggagatcgatgagcggcctgcccaacttacaggagactctgaaggagaggcaagcccgatttcgggaggctcgggagtctcggcgccttaagatagatccctcatacaagtatatttttgagattctcgctgagaacctgggtctggacattgttacagtagaggagctcatacttgattgcccctctttggaggccttcaccaatttcttcgctaaggacggctgtaaaacccttaaattcctgtatcaggagggcgacgtacccggcatcgagtgcggacggaccattgccggcgcgacaaagggcgctaaaatgatgaagttgtacattgacaatgccgcaccagacaaacttaaaggcctgtgcatcttcttcgtgagatgccgtaacgacgtagcaataaatgtgaaaacgatccaggaagaggctctcttcaccgttttggacgccagcaaaggcctcttgaatgggataagagacatgctggcgaatattttcctgcccgccgtcctcgcgaccaataactggggggcactaaaccagtcaaaacagggtgaatccgagaagcatatttttactgagactatcaaccggtacctgtcattcctcgacggtgcgcgcatatccatagagggaacagttaagctcaaaaccatcgacaacgtcaatttcagcaagttgcataccttcgaggaggtgacggcagccgcctcaaatagcgagacggtccatcaactggaagaggtgcttatggtgtggtacaagcagatcgaacaggtcctgatcgaatccgagcagatgcgcaaagaggccggcgacagcggccccctgacagagctggaacactggaaaaggatgtcagcgaagttcaattacatcatagagcagattaaagggccgtcttgcaaggccgtaataaacgtgcttaacgtggcacactcaaagctcctaaaaaactggagagacttggacgcaagaataacagacacagctaatgagtcgaaggataatgtgcgatatctctatacgctggaaaaagtttgtcagcctctgtacaaccacgacctggtgtccatggcacatggaattcagaatctgataaacgccatacgcatgatccatggagtgtctaggtactacaacacaagcgaacgaatgacctccctgttcataaaggtaactaaccagatggttacagcttgtaaagcatacatcacagatggcggcctgaatcacgtgtgggatcaggagaccccagttgtcctcaagaagatccaagactgtattttcttattcaaggagtatcaggcttccttccataagactcgaaaactcatcagtgaaagcagcggcgagaagtcttttgaagtgtctgagatgtacatcttcggtaagttcgaggctttttgtaagcgtctcgaaaaaatcaccgaaatgatcactgtcgtgcagacttacagcacactgagtaatagcactatcgaaggaatcgacattatggctattaagtttcgcaatatatatcagggcgtgaaaaaaaagcaatatgacattctggacccacgacggactgagttcgacactgattttctggattttatgacaaaaatcaatggacttgaggtgcaaatccaagccttcatgaattctagtttcgggaagatcctgagttcacagcaggcgttgcagctgctccagcgctttcagaagctcaacatcccttgtctggggctagaaatcaatcacaccatcgaaagaattctgcaatactacgtagctgagctggacgcgactaaaaagttataccacagtcagaaagatgatccccctctcgctcggaatatgcctcctattgccggcaaaatactgtgggttcggcaactctatcgccggattagtgagccaattaattatttctttaaaaattccgacattctgagtagtcctgacggtaaggcagtcattagacaatacaacaaaatatcttacgtgcttgttgaatttgaagtcgtttaccacactgcttggataagagagatttcccagttacactatgcattgcaggcgaccctctttgttagacaccctgaaactggcaaactgcttgtcaactttgaccccaagattctcgaggttgttcgcgagacaaaatgtatgataaagatgaaacttgacgttccagagcaggcaaaacgcctgctcaagctcgaaagcaagctgaaggctgacaaattatatttgcaggggctgctccagtactacgatgagctgtgtcaggaagtgccaagcgtgttcgttaacctcatgactcccaaaatgaaaaaggttgagtccgtgctgaggcagggacttaccgtcctgacctggtcctcactgaccttggagtccttcttccaggaagttgaactcgttttggacatgttcaaccagctgttaaagaagatttccgatctgtgtgaaatgcacatagacacggtcctgaaggagatcgctaaaacagttcttatctccctcccagaaagcggtgccacaaaggttgaggacatgctgacactcaacgaaacctatactaaggagtgggcggacattctgaatcacaagagtaagcacgtggaagaggctgtaagagagctcatttcgatcttcgagcaaatctacgaggtgaagtacacagggaaagtgggcaagcaatcagagcagcggaagcatgtagtgtttggatccgagactggagagggcgagaataacgactatgaagccaacatcgtcaatgagttcgacacccatgacaaggaagacgagtttaagaaggagtgcaaggaagtgtttgcattcttcagccaccaactccttgattctctgcagaaggctacaagactatctctggatactatgaagcggcggatttttgtggcatcactgtatggacggaagcagtcagaagacattatcagcttcatcaagtcagaagtgcacctggcaatccctaacgtagtcatgattccttcgctggacgacattcaacaggcgatcaataggatgatccagctcaccctcgaagtgagccgcggggtggcgcattggggccagcagcagattcgccctattaagagcgtcattccctctccgactacaactgatgtcacccaccaaaacacaggaaaactcttgaaaaaggaggagcggtcatttgaggaggcaataccagcgaggaagctcaagaacttttacccaggtgttgctgaacacaaggacatttcaaaactggtccttctgctttcatctagtgttaattctcttcgtaaggccgcccacgaggcgctccaggactttcagaaatataagactttgtggaccgaggaccgcgatgtaaaggtcaaggaatttctcgcaaataacccatctctgacagagatccgatccgagatcctccactatgctacctttgagcaggaaatagacgaacttaaacctatcattgttgttggagcacttgagctccatacagaacccatgaagctggccctgtcaatcgaagcaaaagcatggaaaatgctgttgtgtagatacctgaacgaagagtataaaaaaaaaatgtcttacatgatcgccttcataaatgaatatctgaagaaactgtccaggcccatacgagatttggatgatgtaaggtttgccatggaagctctgagttgtattcgggataatgagattcagatggatatgaccctgggccctattgaggaggcatatgccattcttaaccgctttgaggttgaagtgacgaaggaagaatccgaagccgtggacacccttaggtactccttcaacaagttgcagtctaaggctgtcagtgtacaagaggacctggtgcaggtgcagccgaagtttaagagcaatcttctggagtccgtggaagtcttccgagaagatgtgattaactttgcagaagcatacgagttagaaggtcccatggttcccaacatcccaccccaggaagcctctaataggctgcagatctttcaggcatcgttcgatgatctatggcgtaaatttgtgacatattccagcggagagcagctgttcggcctccctgtcactgactacgaggtgctgcacaagaccagaaaggagttgaatctgctccagaaactctacggtctgtacgatacggtgatgagctcaatcagtggatactacgagatcctgtggggcgacgtggacatcgagaagatcaacgctgagctcctggagtttcagaaccgctgcagaaaattacctaagggcctcaaggactggcaggcctttttagaccttaagaaacgcatcgacgacttttcagagagctgtcccctcctggagatgatgacgaacaaagccatgaagcagcgccattgggaccggatatccgaactcaccggcactccattcgatgtggagtcagattcattttgtctgcgaaacatcatggaggcaccccttctaaagcataaggatgatatcgaagacatctgcatctcagccatcaaagagaaggacatcgaggctaaactcacacaagtgattgagaattggacaaaccagaatctatcttttgctgccttcaaggggaagggcgagttgttgctgaaggggaccgagtccggggagatcattaccttaatggaggatagcctaatggtgctgggaagtctgctatccaatcggtacaacgcgccatttaagaagaacatccagaactgggtgtataagctgtctacgtcttccgacatcatagaggagtggctagtggtccagaacttgtgggtgtacttggaggcagtatttgtcggcggcgatatagcaaagcagttacctcaggaagccaaacgctttcagaacatagataagagctggatcaaaattatgcagcgcgcacatgaaaatccaaacgtgatcaactgctgtgtaggcgatgaaaccatgggccaactcttgccacacctgcacgagcagctggaggtttgccaaaaatccctgactggatatctagagaagaaaaggctgttatttccacgatttttctttgtgtccgatcccgtgctcctggagattctagggcaagcctcagattcgcacacaatccagcctcacttacctgctgtgagcgacaatatcaacgaagttacatttcacgcaaaagattatgaccggataatggctgtgatcagtcgggaaggagagaaaatcgtattggataactccgtcatggcaaagggacccgtggaaatatggctactggacttgctcaaaatgcagatgtcatcccttcacaatatcataaggtcagccttttaccagatcagtgactccggatttcagctcctgccattcctctcacatttcccggcccaggtcgggctcctaggcatccaaatgttgtggacccatgacagcgaggaggctctgcggaatgctaaggatgatcgcaagattatgcaggtgactaatcagaagtttttagatattcttaacaccttaatttctcagaccacgcatgatcttagcaagtttgatagggtcaagttcgaaactcttatcactattcacgtgcaccagcgggacatcttcgatgatctggttaaaatgcacataaaatcacctacggactttgagtggctcaaacagtcccggttttattttaaggaagatctagatcagactgtggtgtctataacggatgtggattttatttaccagaacgaatttttggggtgtaccgaccggcttgtaataacgcctctgacagataggtgctatataacactcgcccaggcactggggatgaacatggggggcgcccccgcaggccccgcgggaacagggaaaactgaaactaccaaggacatgggccgctgtctcggcaaatacgtcgttgtttttaactgttctgaccagatggattttcgtggcctcggtagaatatttaagggtctagcccagagtggctcttggggctgttttgatgagtttaatcgaatcgagctcccagtcctcagtgtcgctgcccagcaaatttacattgtcttaacggctcggaaagagaggaaaaaacagtttattttctctgacggagactgcgtcgatctgaacccggaatttggcatctttctgaccatgaacccaggctatgctggccggcaggagctaccagagaatcttaagatccagttccgaaccgtagccatgatggtcccagaccgccagattatcatgcgagtcaagctcgctagctgcggcttcttggaaaacgtgatcctggcacaaaagttctacgttctgtataaactgtgcgaggagcagctgacgaagcaagtccattatgacttcggactcaggaacatacttagtgtgcttcgcaccctgggttctcagaagcgtgcaagacctgaggattcagaactttctatagtgatgcgtggcttgagagatatgaatcttagtaaattggtggatgaggatgaacctctgttcctaagtctaataaacgacttgtttcctggattgcaactcgattctaacacctatgccgagttacagaatgctgtggcacaccaggtccagatagaaggactgatcaaccatccaccctggaatttaaagttggtccagctgtatgaaacttccctggtgaggcacgggctgatgacactgggtccctccggatcaggcaagactacagtcatcactatcttgatgaaagcccagactgaatgcggccggccccatcgggaaatgcggatgaatcccaaagctatcaccgcacctcagatgtttggacgactcgatacagctactaatgactggaccgatgggatcttctcaactttgtggcggaaaacattaaaggctaaaaaaggagaaaacatcttcctgattttggatggccctgtggacgccatatggattgaaaacctgaactcagtactggacgataacaaaaccctcaccctcgcaaacggcgatagaattcccatggccccaagctgtaagttgttgtttgaagtccataatatcgaaaatgcctcacccgcaacggtctcaagaatgggtatggtatacattagcagctccgcattgagctggcgcccaatcctccaggcctggctcaaaaaaaggaccgcgcaagaagccgcagtgttcctgacactgtatgaaaaagtgttcgaggacacatacacatatatgaaactgaacctgaatccaaaaatgcagctgctagaatgcaactatatcgtgcaatctcttaacctgctcgaaggcctgattcccagcaaagaggaaggcggcgtgagttgcgtggaacaccttcataaactctttgtgttcggcctcatgtggtcgttaggagcccttcttgagctcgaatccagggagaagctcgaggccttcctgcggcagcacgagtctaagttagaccttccagaaattccaaagggttctaatcagactatgtacgagttctatgtgacagattacggtgactgggaacattggaacaagaagctccagccctactattaccccacagactctataccagagtactctagcattctggtgcctaatgtggataacatccgaacaaattttctgatcgacactatcgccaagcagcacaaagccgtgcttctgactggcgagcagggcaccgccaagactgtaatggtgaaagcatacctaaagaaatatgaccctgaggtgcagctgagtaagtccctgaatttttcaagtgccaccgaacccatgatgtttcagcgtacaatcgaaagttacgttgataagaggatcgggagcacctacggcccaccaggcggccgcaagatgacagtatttattgatgatatcaatatgcccgtaatcaacgagtggggcgatcagatcacaaacgagatcgtcagacagatgatggaaatggaaggtatgtacagtctggataagcctggggatttcacgactatagtggacgtgcagctcatcgccgcaatgattcatccgggcggcgggcggaacgatatcccccagagactaaagaggcagtttacagtcttcaactgcaccctgcccagtaacgccagcatcgataagatctttggcattataggatgtggttattttgacccatgcaggtcattcaagccccagatttgcgaaatgattgtaaaccttgtgtctgtgggccgggtgctctggcagtggaccaaggtgaaaatgttgcccactcccagcaaattccattatatattcaatctgcgggatttgtccagaatttggcagggcatgcttacaatcaaagccgaagagtgtgcgagcatccctacgctcctgtccctgttcaaacacgagtgcagcagagttatcgccgaccgatttataaccccagaggatgagcagtggtttaatgcgcacttgactagggctgtagaagaaaatataggaagtgatgcggcctcatgtatcctgcctgagccatacttcgtggactttctgcgcgaaatgccggagcccactggggatgaacccgaagactcagtctttgaggtcccaaagatctatgagctgatgccctctttcgactttctggccgagaaacttcagttctatcagaggcagttcaacgagataatcagaggcacctctctcgaccttgtattctttaaagatgctatgactcatctcattaagatctcccggattattcgcacttcttgcgggaacgccttactcgtgggcgtgggcggtagtggcaaacaaagcttgtcccggctagcctccttcatagccggctaccagatcttccagatcaccctgacgcgaagctataacgtgaccaatctgacggatgacttgaaagctctgtacaaggtcgccggagccgatggaaaggggattacttttatcttcaccgactctgaaatcaaggacgaggccttcctggaatatctgaacaacctcctttccagcggcgagattagtaatctcttcgcgcgggacgaaatggatgagattacacaggggcttatcagcgtgatgaagagggaactccctagacatccgccaacctttgacaatttgtatgagtatttcatttcgaggtcgaggaaaaatctccatgtcgtgctctgcttctctcccgtgggtgaaaagtttagagcccggtccctgaagtttccgggactgatttctgggtgcacgatggactggttcagtaggtggcctcgcgaagcgctcatagctgtcgcctcctattttctttctgattataacattgtctgcagcagcgagatcaaacgccaggtggtggagactatgggcctgttccatgacatggtgagtgaaagctgtgagtcctacttccaacgctatcgccgtagggctcatgttaccccaaagagctacctgtccttcatcaacggatataagaacatctatgctgaaaaagtcaagtttattaatgaacaagctgagagaatgaacatcggattagacaagctgatggaggccagtgaaagcgtggctaagttatcccaggacctggccgtcaaagagaaggagctcgcggttgcctcaatcaaagcagatgaagtgctcgccgaagtgacagttagcgcccaggctagcgcaaagattaagaacgaggtgcaggaggtaaaagataaggcacaaaaaatagtggacgaaatcgattcagagaaggtcaaggcagagagtaaactcgaggcagcaaagccagcactggaggaggccgaagctgcccttaacacgatcaaacccaatgacatagcaactgtccgcaagctcgccaaaccgcctcacctcattatgcggatcatggattgcgtgcttttactgttccaaaaaaagattgatcccgtgaccatggacccagaaaagagttgctgcaagcctagttggggtgaaagtctgaagttaatgtccgcgacaggatttctgtggtccctgcagcagttccctaaggatactataaatgaagagacggtggaattgctacagccctatttcaacatggacgactacacatttgagagtgcaaaaaaggtgtgtggtaacgtcgctgggctgctgtcctggacattagctatggcgatattctacggcatcaaccgcgaggtcttaccgctgaaagccaacctggcgaagcaggaggggaggctagcggttgccaatgctgagctgggaaaagctcaggcactgttagatgagaaacaagctgagcttgataaagtacaggccaagttcgacgcagctatgaatgaaaagatggatcttttaaatgacgccgacacttgccgcaaaaagatgcaggcagcatccacgcttatcgacggactcagcggcgagaagatccgatggacacagcagtctaaggagttcaaggctcagatcaaccgcctagttggagacatactgctctgtacggggtttttatcatatctgggacctttcaaccagattttccggaattatctgttgaaggatcagtgggaaatggaactgagagcccggaaaatcccctttactgaaaaccttaacctgatttccatgctagtggatcctcccacaattggagagtggggtttgcaaggactgccgggggacgacttaagtattcagaacggtattatagtcaccaaagcaactagatacccactcttaattgacccacagacccagggcaagacctggattaagtctaaagagaaggagaatgacctccaagtgaccagccttaatcataagtacttcagaacacacctagaagatagcttgtctctcggacgacccctcttgattgaagatattcatgaagagctcgatccagccctggacaatgtgttggagaaaaatttcatcaagagtggaacaacgtttaaagttaaggtcggcgacaaggaatgcgatatcatggacacatttaagctgtacatcaccaccaagctgcctaaccccgccttcacccccgagatcaatgcgaaaacttccgttatcgatttcacggtcaccatgaagggcctcgagaaccaattactcaggcgggtgatcctcaccgagaaacaggagctggaagcagaaagggtgaaattactagaggacgtgacctttaataagcgtaaaatgaaggaactggaggataacctgttgtataaactctctgctactaagggcagcctggttgacgatgagagtttgattggcgttctacgcactaccaagcagaccgccgctgaggtctcagaaaaattacacgtcgctgctgagaccgaaattaaaatcaatgccgcccaggaggagtttagaccggcagctacccgaggtagcatcctgtatttcctgattaccgagatgtccatggtaaatatcatgtaccagactagcttagcacaattcttgaagctgttcgaccagtcaatggcgaggtcggaaaagagcccactgccgcagaaacgaattaccaatattatagagtatctgacctacgaagtcttcacttatagcgttcgcgggctttacgagaaccacaagttcctcttcgtgcttcttatgactctaaagattgacctccagcgcggtaccgtgaaacatagagaattccaggccttaatcaagggcggagctgcactagatctgaaggcgtgtccgccgaaaccgtaccgctggatcctcgatatgacatggttgaatcttgtggagctctcaaagctgcctcagttcgctgaaattatgaatcagataagccggaatgaaaagggatggaaatcttggtttgataaggacgcccctgaagaagaaatcattcccgacggctataatgactccctagacacgtgccacaagttgctccttattagaagttggtgtcccgacagaacagtcttccaggcacgcaaatatatagccgacagtttggaggagaagtatactgaacctgtgatccttaatctggaaaagacgtgggaagaatcagatacccgaaccccactgatctgtttcctctcaatgggatctgaccccactaaccaaattgacgccctggccaaaaagcttaagttagaatgccgtaccattagtatgggccagggacaggaagtgcacgctagaaagcttatccagatgtctatgcagcagggaggctgggttctcctgcagaactgtcacctcggtctggagttcatggaagaactgttagagacactgatcacgacagaagcatccgatgacagctttcgggtctggatcaccaccgagccccacgacaggtttcctattaccctactgcagactagcttgaagtttacaaatgagcctccccagggggtgagagcaggcctgaaacgcacctttgcggggatcaaccaggacctgctcgatatatctaacctgccgatgtggaagccaatgctatacacggttgccttcttgcacagcactgtccaggagagacgtaaatttggtccattgggatggaatattccttatgaattcaacagcgctgatttttcagcttcggtgcagttcattcagaaccacttagacgaatgtgatatcaaaaaaggtgtgtcgtggaataccgttcgctatatgattggcgaagtacaatacggcgggagggtgactgacgattttgacaaacgtctgctgaactgcttcgcacgggtatggttctctgagaagatgttcgaaccctccttctgcttctacaccggttacaaaatccctctgtgcaaaacgctcgaccagtattttgaatatatccagtcactaccctccctggataaccctgaggtgtttggcctccaccctaatgccgacattacataccagtccaacacagcgtcagcggtcctggagactatcacaaatattcagcctaaggaatctggcgggggcgtgggcgaaacccgagaggccatagtgtatcgcctgtcagaagatatgctgtccaagttgccgccagactacattccccacgaggtgaagtcacggctaattaagatgggccatctgaatagtatgaatatctttcttaggcaggaaatcgataggatgcagagggtgattagcatcctcagatcatctctttcagacttgaaactggctatagaggggacaattattatgtctgagaatctgcgcgatgccctcgacaacatgtatgacgctcgcattccccagctttggaaaagggtaagctgggactcgagcacactaggattctggtttaccgagctgctggaacgtaatgcacagttttctacttggatattcgaaggcagaccaaacgtgttttggatgaccggcttctttaacccccagggtttcttaacagcaatgcgacaggaagtaactagggcgcataaaggatgggcattggacacagtcacaattcacaatgaggtcctgcgccagacaaaagaggagattacaagccctccaggcgaaggcgtttatatctatggactgtatatggatggtgcagcctgggataggagaaatggcaaactcatggaatccactccaaaggtcctcttcacccaactgcccgtgttgcacatctttgcaatcaattccaccgctccaaaggacccaaaactttacgtgtgtcccatctacaagaagccacgacgtaccgatctgaccttcatcaccgtcgtgtacctgcgaacagtactcagccctgaccattggattctgaggggcgttgctctattatgtgatatcaagtag

SEQ ID NO: 82760 - DNA, 13473 bp, Artificial Sequence
  derived and/or modified sequence
atgatgaagctgtacatcgacaacgccgcccccgacaagctgaagggtctgtgcatatttttcgtgaggtgtcggaatgatgttgccataaatgtcaagacaattcaggaggaagccctgtttacagtgctagacgctagtaaaggcctgctgaacggcattagagacatgttggctaatattttcctacctgctgtcctagcaacaaataattggggtgcacttaaccaatcaaaacagggtgagtcagagaagcacatctttaccgagacaatcaatcgctatctgagtttcctcgatggcgcacgcatctccatcgagggcacggtcaaactgaagaccatcgataacgtgaactttagtaaacttcacacattcgaagaggtgacagccgctgctagcaatagtgagaccgtacaccagctggaggaggtgctgatggtttggtataaacagatcgaacaagtgcttatagagtcagagcagatgcgcaaggaggccggggatagtggacccttaactgagttggagcactggaagcgaatgagcgcgaagtttaactacataatcgagcaaatcaaaggcccatcatgcaaagcggtcatcaacgtcctaaacgttgcccactcaaagttgctcaagaattggagagatttagatgccagaattacggatactgcaaacgagagtaaggataatgtgaggtatctctacaccctggagaaggtctgtcagcctctgtacaaccacgatcttgtgagcatggcccatggtatacagaatctgattaatgcaattaggatgattcatggggtgtctaggtactataatacctctgaacggatgacatccctgtttattaaagttacaaatcagatggttacggcctgcaaggcttatattaccgacggtggtttgaatcacgtgtgggatcaggagacccccgtggttctgaagaaaattcaggactgcatatttctctttaaggagtatcaagcatccttccataaaacgcgcaagctaataagcgagagttccggcgaaaaatcctttgaggtgtccgaaatgtatatatttgggaagttcgaagccttctgcaagcggctcgagaaaatcacagagatgattacggtcgtgcaaacatacagtaccttgtctaactccacgatcgaagggatcgatattatggcaataaaatttcgcaacatttaccagggagtcaagaagaaacagtacgacatcctggatcccaggaggacagaattcgacacagactttctcgatttcatgacgaaaataaatggactggaagtgcagattcaagccttcatgaactccagctttggcaagatactgtcaagccagcaagcactgcaactactgcagcgcttccagaagctgaatatcccgtgcctgggcctggagatcaaccacacaatcgagagaattctccagtactatgtggcagagctggacgctaccaagaaactgtaccattctcagaaggacgatcctccactcgcgcgcaacatgccccctattgccggaaaaattttgtgggtaaggcagttatatagacgcatcagcgagccaatcaactatttcttcaagaactcagatattctttcctcaccagatggtaaggccgtgattaggcaatacaataaaatttcctacgttctcgtggagtttgaggttgtctatcatacagcttggatccgcgaaattagtcagttgcactacgctctgcaggctactctttttgtacgccaccctgagactggtaagctgctggtaaatttcgatccgaagattctggaagttgtgagagaaacaaagtgcatgatcaagatgaagctcgatgtgccagaacaggctaaacgactgcttaaactcgaaagtaagctgaaggccgacaagctatacctacagggactgctgcagtactacgacgagctgtgtcaggaggtgccttccgtatttgtcaacctgatgacacccaagatgaagaaggtggaatcagtcctcaggcaagggctgactgtgcttacctggtcctctcttactcttgaaagcttcttccaggaggtcgaactggtgctcgatatgttcaaccagttgttgaaaaagattagtgatctgtgcgagatgcacatcgatacggtgctcaaggagatcgcaaaaacagtcttaattagcctcccagagtctggggctacaaaggtggaggatatgctcacactgaatgagacctacacaaaagagtgggcggacatcctgaaccacaagtccaagcacgttgaagaagcagtgcgagagctgatctccatatttgaacagatttatgaggtcaagtacactggcaaagtggggaagcagagcgagcagaggaaacatgtagtgttcgggagtgaaaccggcgagggggagaacaacgattacgaagcaaacattgtcaatgagttcgatacccacgacaaagaggacgaattcaagaaagagtgtaaggaggtgtttgccttcttcagtcaccagttactcgactctctacagaaggcaactaggctgtccctggacactatgaaacggaggatctttgttgctagcctgtacgggcgtaagcagtcagaagatattattagttttatcaaatctgaagtccaccttgcaatcccaaatgttgtgatgattccctctctggatgacattcaacaggccataaatcgcatgattcaactaaccctcgaagtgagtcgaggggtggcccactggggccaacagcagattaggcccattaaatcagttattccctcccccaccacaacggacgtcacccatcagaacacgggcaagttacttaaaaaagaggagcgcagctttgaagaggcaatcccagccagaaagctgaagaacttttaccctggcgttgccgagcacaaggacatcagtaaactggtcctattgctctccagctctgttaattcgcttaggaaagctgcccacgaagctttgcaagatttccaaaaatataaaacattatggactgaggatagagacgtgaaagtgaaggaattcttagctaataacccttccttgactgaaattagaagtgagatccttcactacgccacattcgaacaggagatagatgaactgaagcctattatcgttgttggcgcactggaacttcacacagaacccatgaaactagccttgtcaattgaggctaaggcgtggaagatgctgttgtgccgctatctgaatgaggagtataaaaagaaaatgtcatacatgatcgcatttattaatgaatacctgaagaaactttcacggcccattcgggatctcgatgacgtgagattcgccatggaggctctctcctgtattagggacaatgagatacagatggatatgacactcggacccatcgaggaggcctatgccattctgaacagatttgaggtggaagttaccaaggaagagagcgaagcggttgataccttgcggtattcctttaataaacttcaatccaaggctgtgagcgtgcaagaagatttggtccaggtacagcccaaattcaaatcaaatcttctggaatcggtggaagtattcagagaagatgtgatcaattttgcagaagcttatgagctggaaggtccgatggttcccaacatccccccgcaggaggctagcaaccgactgcagatatttcaggccagtttcgatgatttgtggagaaagtttgtgacctattcgagcggtgaacagttgttcgggctcccagtcactgactacgaagtgctgcacaagacacgtaaagagctgaatttattacagaaactgtacggactgtacgacacagttatgagttctatttccgggtactatgagatcttatggggggacgtcgatattgagaaaattaatgccgagttacttgagttccaaaaccgttgccgcaagctgcccaagggcctgaaggattggcaagcctttctggacctcaaaaagcgaatcgacgatttttctgagtcctgtcctctattggaaatgatgaccaataaggcaatgaaacagcggcactgggaccgcatcagcgaacttacggggaccccctttgacgttgagtccgactcattctgcctgcgaaacatcatggaggctcctctgttgaagcacaaagacgatatcgaggatatctgtatttccgccataaaggagaaggacatcgaggctaaactcacccaggttatagagaattggaccaaccagaatctgtccttcgcggcctttaaggggaaaggggaacttctgctaaaaggtacagaatcaggcgagattattaccctgatggaggatagcttgatggtactgggctcactgctgtcaaaccgatataacgcgcccttcaagaagaacattcagaactgggtgtataagctttccacaagctctgacatcatcgaagagtggcttgtagtccagaacttatgggtgtatttggaggccgtgttcgtggggggggacattgccaagcagcttccccaggaggccaaacgcttccaaaatatcgacaagtcatggattaagatcatgcaacgcgcacatgagaacccgaacgtgatcaattgctgtgtgggagacgagaccatgggccagctccttcctcacctccatgaacagctggaagtttgtcagaagagcctaaccggttacctggagaagaagaggctgctgttcccccgattcttttttgtctctgacccggtcctgctcgaaattcttggccaggcatccgactcccataccattcagccacacctgccagcagtgtccgataatattaacgaggttacatttcacgctaaggattacgatagaatcatggccgtcatcagccgcgagggggagaaaattgtgttagacaattctgttatggccaagggcccagtggagatctggctgttggacctgctgaagatgcaaatgtcgtcactgcacaacataatacggtctgcattctaccagatctctgacagcggctttcaactgctgccattccttagccacttccctgcccaggtggggctattgggaatacaaatgctgtggacacacgatagtgaagaagcactccgcaatgctaaagacgacaggaagattatgcaggtaaccaatcaaaagtttttggacatcctgaatacacttatttcacagacgacccatgatttgagcaagtttgatcgagttaagttcgaaacccttatcacaattcatgtccaccaaagagacatcttcgacgacctggtgaagatgcacattaagtctcctaccgacttcgagtggctaaaacaaagcagattttatttcaaggaagacctcgatcagaccgtggtgagcattacagatgtcgacttcatataccagaacgagtttctggggtgcacggataggctagtgatcacccccctaacagatcgctgttatattactctcgcccaggctctgggaatgaacatgggcggggcaccagcagggccagcagggacaggaaaaactgaaactacgaaagacatgggtagatgtctgggtaagtacgtagtcgtatttaactgtagcgaccaaatggatttccgaggtttaggcagaatcttcaaaggcctggctcaatctggcagctggggctgctttgatgagtttaatcgaatcgaattgcctgttctttccgtggcagcccaacagatttacattgttcttactgctcgcaaggaacgcaaaaaacaatttatcttcagcgatggcgactgcgtggatttgaacccagagttcggcatattcctgacgatgaatcctggctacgctggccgtcaggaattgccggaaaacctcaagatccagttcaggactgtggctatgatggtgcctgacaggcagattatcatgagggttaagcttgcctcttgcggttttttggaaaatgttatactagctcaaaaattctatgtgctgtacaagctgtgtgaggagcagctcacgaagcaagtacactacgactttggcctgagaaacatcctgtcagttcttcgcacgctgggcagccagaaacgagccaggccagaggactctgaactgtccattgtgatgcgagggctacgggatatgaatttgtctaagttggtggacgaggacgaaccactgtttcttagcctgattaacgatctattccccggactgcaactggatagcaacacctacgcagaattacagaatgccgtggcgcaccaggtgcagattgagggcctgattaaccacccaccatggaatctgaaactcgtccagctgtatgagacaagcctggtccgtcacggacttatgacccttggtccttctggatctggcaaaaccactgtgatcactattctaatgaaagcgcaaaccgagtgtgggcgtccgcacagggagatgcggatgaatcctaaggccataaccgcccctcaaatgtttgggagacttgacaccgctaccaacgactggactgacgggatcttttctactctatggcggaagactcttaaggccaaaaaaggtgagaacatttttctgattttagacggacccgtcgacgccatctggatcgaaaatctgaacagtgtactcgatgataataagactttgactctcgcaaacggcgatcgcatcccgatggccccgagctgtaagctcctgtttgaagtgcacaacatcgagaatgcaagccctgccactgtttctcggatggggatggtgtatatttccagttccgcactgtcatggcggcctatcctgcaggcgtggctgaaaaagaggactgcccaggaggccgcagtgttcctcactctatacgagaaggtgttcgaggacacatacacctatatgaaactgaacctgaatccaaaaatgcagctgttggagtgcaactacattgtgcaatctctgaacctgctagaagggctcataccatccaaagaagaaggaggagtatcttgtgtggagcacctgcataagctgtttgtattcggcctaatgtggagcctaggggcactgctggagctcgaatctagggagaaactggaagcattcctcaggcagcatgagagtaaactcgatctgcctgagattcccaagggctcgaaccagactatgtatgaattctatgtcactgattacggcgactgggagcattggaacaaaaagctccagccctattattacccaaccgacagtatccccgagtattccagcatcctcgtccccaatgtggacaatatacgcacaaatttcctgatcgacactatcgcaaaacagcataaggctgtccttttgacaggcgaacaggggaccgccaaaactgtgatggtgaaagcgtatcttaagaaatatgacccagaagttcaactatctaaaagtctgaatttctctagtgcgactgagcctatgatgttccaaagaacaattgagtcatatgtggataagagaatcggttctacctatggaccacctggcggccgtaagatgaccgtgttcattgacgacataaatatgccggttataaatgaatggggtgatcagatcacaaatgagatcgtaagacagatgatggagatggagggtatgtatagcttggataaaccgggggatttcacaaccatcgtggatgtccagctgatagctgccatgattcatcctggtgggggcagaaatgatatccctcaacggctgaaacgccagtttacagtgttcaactgcaccctcccctctaacgcctccattgacaagatctttggcatcatcggatgcgggtatttcgatccctgtcggtctttcaagccgcagatctgcgaaatgatagtgaaccttgtgtccgtgggaagagtcttgtggcagtggacaaaagtgaagatgttacccactccctctaagttccattatattttcaatttgcgggatttgagccggatctggcaaggaatgctgacaataaaggctgaagaatgcgcttctatccctacactgctttccttgtttaagcacgagtgctccagagtgattgctgatcgctttattaccccagaggatgaacagtggttcaatgcacatctgacacgggctgtggaggagaatatcggtagcgacgccgcctcctgcatcctccccgaaccatacttcgtggactttcttagagagatgccagaaccaaccggagacgaacccgaggactctgttttcgaggtgcctaaaatttatgaactgatgccatcttttgactttctggccgagaagctccagttctatcagaggcagtttaacgaaattattcgagggacgtcactggacctcgtgttttttaaggatgctatgactcatctcattaagatttcgcgcattatcaggaccagctgcggcaatgcgctcctcgtgggagtgggaggctccggaaagcaatcgttgtcgcggttggcatcgttcattgctgggtatcagatctttcaaataactctcacccggtcttacaacgtaaccaacctcaccgacgaccttaaggccttgtacaaggttgcaggggccgatgggaaaggcatcacattcatatttactgacagtgaaataaaggatgaagcttttcttgaatatttgaataacttactcagtagtggggagattagcaatctgtttgcaagggacgaaatggatgagataacccaaggattgatctcagtcatgaagagggagttgcccagacacccccccacgttcgataatctgtatgagtatttcatctccaggtcccgcaagaatttacatgttgtgctgtgcttctcacctgtgggtgagaaattcagggctcgatcattaaaattcccgggcctgattagtggttgcaccatggattggttttcccggtggccacgggaagccctgatcgccgtggcttcatacttcctgagtgactacaatattgtatgtagcagtgagatcaaacggcaggtagtagagactatgggcctattccacgacatggtttctgagtcatgcgaatcttacttccagaggtacaggcgtcgcgcacatgtcacacctaaatcctatctgtcctttatcaatggttacaaaaatatttatgctgaaaaagtgaagtttatcaacgaacaggcagaacggatgaatattggacttgacaaactgatggaggcaagcgagagtgtggcaaagctcagccaagatttggccgtgaaggaaaaggaactggcggtcgcctctatcaaggcggatgaagtgctggcggaggtaaccgtatccgcacaggcttccgctaagatcaagaatgaggtgcaggaggtgaaggataaggctcagaagatcgtggacgaaatcgattcagaaaaggtaaaagccgaatcgaagctcgaggcggcaaagcccgctttggaggaggctgaagcggccttaaataccatcaaaccgaatgacatagctactgttagaaaattagccaagccaccacacttgataatgcgaattatggactgcgtgctgcttctgttccagaagaaaatcgaccccgtgaccatggatccagaaaaaagctgttgcaaacctagctggggtgagagtcttaaactcatgagtgccactgggtttctctggtccctgcagcagttcccaaaagatactatcaacgaggagactgtggaactcctacagccttactttaatatggacgattacacttttgagagtgcaaagaaggtttgtggcaatgttgcaggcctgcttagctggacactagccatggcgatattttatggtattaatcgtgaggttcttcctctgaaggcgaacctcgccaaacaggagggcagactggcagttgcgaacgctgaactggggaaagcccaagcactcctggacgagaagcaggcagaactggataaagtccaagctaagtttgacgccgccatgaacgaaaagatggacctgctaaatgatgcagacacctgtcgcaaaaagatgcaggcagcgagcaccctgatcgatggtctatctggagagaagattaggtggacgcagcaaagcaaggaattcaaggctcaaatcaaccgtttggtgggcgacattcttctctgcaccggattcctaagttacctgggcccatttaaccagatctttcgcaactatctgttgaaagatcagtgggagatggaattacgcgcccggaaaattcctttcaccgaaaatctcaacttaatcagtatgctggtggatcctcccaccatcggcgagtggggccttcagggactcccgggcgatgatctgtctattcaaaacggcatcattgtgaccaaggccacccgttacccgctcctgattgatccacagacacagggaaagacctggatcaagagcaaggaaaaggaaaacgatctgcaggtgacatctcttaaccataagtacttccgcacccacctggaggattccctctctctcggacgtcctcttctgatcgaggatattcacgaagaactcgaccccgccctcgacaatgtgctggagaagaattttataaagtctggcacaaccttcaaggtcaaggtaggtgacaaggagtgcgacattatggatacctttaaactctatattactactaaactccctaatcctgcttttacgcctgagattaacgcaaagacttcagtgattgattttaccgtcaccatgaagggacttgaaaaccagcttctgcggcgggtaatcctcacagagaagcaggagctggaggccgaacgggtcaaactcctggaagacgttacgtttaataagagaaagatgaaagagctagaggataatctgctgtacaagctgagtgcgaccaagggctcactggtggacgatgagtctctgatcggagtgctgcggacaaccaagcaaactgcagccgaagtaagcgaaaaactgcacgttgcagccgagacagaaattaagattaatgccgcacaggaagaatttaggcctgccgcaactagaggtagtattctgtattttctcataactgaaatgtcaatggtgaatatcatgtaccaaactagcctggcccagttcctgaagctctttgaccagagcatggcccgctcagaaaaatctcctctgcctcagaaacggatcactaacattattgagtacttgacatacgaagtgttcacttatagcgtgcgcggcctgtatgagaaccacaagttcctgtttgtcctgctaatgactctgaagatcgacctacagcgtgggaccgtgaaacaccgggagttccaggctctgattaaggggggggccgcactcgatttaaaggcttgccctccgaagccgtatcgatggatccttgacatgacttggctgaacctcgtcgagttgtcaaagcttccacagtttgctgagattatgaaccagatatcacgcaacgaaaagggctggaaatcctggttcgataaggacgcccccgaggaggagatcatacctgatggctacaatgactccttagatacttgccacaagctccttctgattaggagctggtgccccgaccgaacagtgtttcaggcacggaagtatatagccgactctctggaggagaaatataccgagccagtgatacttaatttagagaaaacctgggaggagtccgatacgcgcaccccccttatttgtttcctgtccatgggtagcgatcccacaaatcaaattgacgcgctggcaaaaaaactcaagcttgagtgccgcactatatccatggggcagggccaagaagtgcatgcgcggaaactcatccagatgtccatgcagcagggagggtgggtgctactgcagaactgtcatttagggctcgaatttatggaagagctgttggagacccttatcacgaccgaagctagcgatgattcattcagagtgtggattacgactgagccccacgaccggtttccaatcactctgttacaaacatcgctgaagttcaccaacgaaccccctcagggggtgagagcgggcctgaagcggacattcgctggaattaatcaagaccttttggacatttccaaccttcccatgtggaaacccatgttgtataccgtcgctttcctgcatagtacagttcaggaacgtcggaagtttggcccactaggctggaacataccttacgagttcaactcagccgatttttcggcgagcgtacagtttatccagaatcatcttgacgagtgcgacattaagaagggcgtgagctggaataccgtgcggtacatgattggcgaagtgcaatacggaggtcgggtgacagacgatttcgacaaaaggctgttgaattgcttcgcacgagtctggttctctgaaaagatgttcgagccttcattttgtttctacactggttataagataccactttgcaagactttggatcagtactttgaatacatccagagtctgccctcactcgataaccccgaggtatttggactgcatccaaacgctgatatcacgtatcagtctaacaccgcaagcgccgttctggagacaatcacaaacatacagccaaaagagtcaggcggcggagtgggcgaaactcgcgaagccatcgtttacaggctgtcagaggacatgctgtccaaactccccccggattacatcccacatgaagttaagagcagacttataaaaatgggccacctgaactcgatgaacatcttcctccgacaggagatagacagaatgcagcgggttatcagcatcctaaggagttccctcagcgaccttaagctcgctatagagggaacaatcatcatgtccgagaatcttagggacgccctagacaacatgtacgacgccagaattccgcagctctggaagcgagtgagttgggattcttctaccctcggattctggttcaccgagctactcgaacggaatgctcaattctccacctggatcttcgagggtaggcccaacgtcttctggatgacagggttttttaacccacagggcttcctgaccgcaatgcgtcaggaggtcacccgtgctcacaagggctgggctctggacactgtcaccattcataacgaagtactccgacagactaaagaggaaattacgagtccccccggtgagggagtttacatctacgggctctacatggacggagccgcctgggataggcgcaatggcaagctgatggaaagtacccctaaggtcttatttacgcagctgcctgttctgcacatatttgccattaatagtacagctcccaaggaccccaagctctatgtgtgtcccatttataaaaagccgaggagaacggacttgacatttatcacagtggtgtacctgaggaccgtgctgtcgcctgaccactggatactgcgaggcgtggcccttctctgcgatatcaagtag

SEQ ID NO: 82761 - DNA, 12567 bp, Artificial Sequence
  derived and/or modified sequence
atggagaaggacgccgaggacggcgcccccagcgagggcgccgaggctcccccctctacggaggaagctgcccccccacgcagcgaagaggaagaggcaccaaggccccccacagtggaggccccggccgaggacggattctcaccgagtgccgaggacgcagtatctagtgtggtcgactatcgtgatctgattccttcagaggaaggcatcgtgctgcccgacgatcacgaagcagatttgaaccgggtcaggcagcgcttagctcctaggcccgtacaatccgtaatctctgaggtgctgtcactaccgtcaagcagaagatcatcccggtacagacgctcgatgtccggattacccaatctccaggagaccctgaaggagagacaggctcggtttcgggaggccagggagtcacgacgcctcaagatcgacccaagttacaaatatatcttcgagatccttgcagagaaccttggactggacattgttactgtggaggagctcatcctggattgcccgagtctagaggctttcacgaattttttcgcaaaagacgggtgcaagactctgaagtttctctatcaagagggcgacgtgcccggcattgaatgtggtcggacaatcgctggtgctacgaaaggcgcaaagatgatgaaactgtacattgacaacgcagcccctgacaaactgaagggcctttgcatatttttcgtgcggtgtagaaatgacgtggccatcaatgttaaaaccatacaggaggaagccttattcacagtgttagatgcatcaaaaggcctgcttaatgggattcgggatatgttggctaatatttttctgcccgctgtcctcgccaccaacaattggggagccctcaatcaaagcaaacagggagagtctgaaaagcacatatttactgaaaccattaaccgctatcttagttttcttgacggggcgcggatctcaatcgagggaactgtgaagctcaaaactatcgacaatgtcaattttagtaaattacacacgttcgaggaggtgactgccgccgcctcaaactctgagaccgtccatcaactggaggaggttctgatggtgtggtataaacagattgaacaggtgttgattgaaagcgaacagatgaggaaagaagctggcgactccggcccacttacagagctggaacattggaagaggatgagtgctaaattcaattacattatcgagcaaatcaaagggccatcctgcaaagccgtaattaatgtccttaatgtggcacatagcaagctcctcaagaattggcgcgaccttgatgcccgaataaccgacacagcaaacgagtcgaaagacaatgttcggtacctgtacacgctggagaaggtgtgtcagccactgtacaaccatgatttggtaagcatggctcatggcattcagaacctcataaatgccatcaggatgattcacggggtttctagatactataacacttccgagcgaatgacatctctgtttattaaggtcactaatcaaatggttacagcatgtaaggcttacatcacagatggaggactgaatcacgtgtgggaccaggagacgccggtggtcttaaaaaaaattcaggactgcatcttcttgttcaaggagtatcaggcctcctttcataagacccggaagttgattagcgaatcgagcggggagaagtccttcgaagtgtcagagatgtatatcttcggaaaatttgaagctttctgtaagaggttggaaaaaattacagaaatgattacagtggtgcagacatattccactctctccaacagcacgatcgaggggatagacattatggccataaaatttcggaatatttatcagggcgtgaagaagaaacaatacgacattcttgacccccgcagaacagagttcgatacagattttctggacttcatgacaaagattaacggactggaagttcagatccaggctttcatgaatagttccttcgggaagatcttatcttctcagcaggccctgcagttgttgcagagattccagaagctgaatattccttgtctgggtctggagattaaccataccattgagagaatcctccagtattacgtggcggaactcgatgccactaaaaaactgtaccattcacaaaaagacgaccctccgttggcccgcaacatgccgcctatagctggcaaaatcctatgggtccgtcagctttacagaaggatttcagagcccataaactactttttcaaaaattctgatattctttcgtccccagacgggaaggcggtcattagacaatataacaaaattagctacgttctcgtggaattcgaagtagtctaccacactgcctggatccgtgaaatatctcagctccactacgcgttgcaggctaccctctttgtgagacatccagagaccggaaaactgctcgtgaattttgatccaaaaattctcgaggtggtgagagaaacaaaatgcatgatcaaaatgaagctggacgtgcccgagcaagccaaaagattgttgaaattggagtcaaaactgaaagctgataaactttatctccaaggactgctacagtattacgatgagttgtgtcaggaagtcccaagtgtctttgtgaatttaatgaccccgaagatgaagaaggtagaatccgttctccgccagggcctgaccgtgttgacctggagctctttgacgctggagtccttctttcaggaggtcgaactggtgcttgatatgttcaaccaactcctgaagaaaattagtgatctgtgtgagatgcacatcgacactgtgctgaaggaaattgccaagaccgttctgatctctctgccagaaagcggagcaactaaggttgaggacatgctcaccttgaatgagacatacactaaagagtgggccgacatcctcaaccataagtccaagcacgtggaggaggccgttcgggagctgatctcaattttcgagcagatctatgaggtcaagtacaccggcaaggttggcaagcagagtgaacagaggaaacatgtcgttttcggttccgaaacgggcgaaggcgaaaacaatgactacgaggcaaacattgttaatgaattcgacacacacgacaaggaagacgaatttaagaaagagtgtaaggaggttttcgcattctttagccatcagctgctggatagtcttcagaaagctactagactgagcctcgacaccatgaagcgtaggatcttcgtggcttctctatacggccgaaagcaaagcgaggacataatttcatttattaaatccgaggttcacctcgctatacctaacgttgtgatgattccaagtctcgatgatattcaacaggctatcaaccggatgatccagctgaccttggaggtctcccgaggcgtggcccattggggccaacaacaaattaggccgataaagagcgtaattcccagccctaccacaacagatgtcacccaccagaacactggaaagctcctcaagaaagaagagcgaagttttgaggaggctattccagctcgcaagctaaagaatttttaccccggcgtggctgagcacaaagacatttcgaaacttgtgttgctgcttagcagcagcgttaacagcctgcgcaaggccgcccatgaggcgctgcaagactttcagaagtacaagactctgtggaccgaggaccgggacgtgaaagtgaaagagtttttggcaaataatccatcactgacagagataagatcagagatcctccattacgcgactttcgaacaggagattgacgagctgaagccaatcatcgttgtaggagccctggagctccacacggagcccatgaagctcgcactaagcatcgaagccaaggcgtggaaaatgctgctgtgcaggtatctgaacgaagagtacaagaaaaagatgagttacatgatcgccttcattaacgagtatttgaaaaagctgagccgccctatcagggacctggacgacgtgcgcttcgccatggaggccctgtcttgcattagggacaatgagatccagatggacatgacccttgggcccatcgaggaagcctatgccatactgaataggttcgaggttgaagtcacaaaggaagaatccgaagcagtggataccctgaggtatagctttaataagctgcagagcaaggctgtgtccgtccaggaggatctcgttcaggtacagcccaaattcaagagcaatctgttagaatctgttgaggtcttcagggaggatgtcattaacttcgccgaggcatatgaattagagggtccaatggtccccaacatcccgccgcaagaagcctccaatagattgcaaatcttccaagcttctttcgacgacctgtggagaaagttcgtcacatactctagcggggaacagctattcggtctacccgttaccgattacgaagtgctgcacaaaacaagaaaggagcttaacttattacagaagctgtacgggttatacgacacagtgatgagctccatctctggttactatgagatcttgtggggcgacgtcgatattgaaaaaatcaatgctgaactgctggagttccagaatcggtgtcgcaagctgccaaagggtttgaaggactggcaggctttccttgacctgaagaaaagaatagacgatttttccgagagttgccctttattggagatgatgaccaacaaggcaatgaagcagcgccactgggaccgcatatcagagctcaccggcacaccttttgacgtcgagtcggactccttctgtttgcgcaatattatggaggcccccctgttgaaacacaaggacgatattgaggatatttgtatcagtgctataaaggaaaaggacatcgaagcgaagctcacccaagtgatagaaaactggacgaatcagaatctgagctttgcagcatttaagggcaaaggagaactgctgttgaaaggaacagagagtggcgagatcatcacactgatggaggattctctcatggttctgggaagtctattgagcaaccggtataatgccccatttaagaagaatatccaaaattgggtctacaagctcagcactagcagcgacatcattgaggagtggctggttgttcagaacctttgggtatacctcgaagcggtctttgtgggaggggatatagccaaacagctgcctcaggaggccaagagattccagaatatcgataagagctggattaagatcatgcaacgggcccacgagaaccctaacgtgatcaactgctgtgtgggcgacgagaccatggggcagctgctcccccacctccacgagcagctcgaagtctgccagaagtctttgactgggtacctggagaagaaacggctattgttcccccggtttttttttgtgagtgatcctgtgcttttagaaatcttaggtcaggcaagcgatagccatacaatacaaccccatctgcccgctgtatcagataacataaacgaggtgacctttcacgccaaggactacgaccgaattatggccgtgatttccagggaaggcgagaagattgttctggataactccgtgatggccaaagggccagtggagatttggcttctggacctgctcaagatgcagatgagttccctccacaacatcatacgcagcgccttctaccagatcagcgacagcgggttccagctgttgccctttctctctcacttcccggctcaggtgggtctcctcggcatccagatgttgtggacacacgactcagaagaagccctgagaaacgctaaggacgatagaaagattatgcaggtgaccaaccagaaatttttggatattctcaacacgctgatttctcagacaacgcatgacctaagcaagttcgatcgggtcaagtttgagaccctgataacaatacacgtacatcagagagacattttcgatgatttagtcaaaatgcacattaagtctcccaccgactttgaatggctgaaacaatcccggttctattttaaggaggaccttgaccagactgttgtaagtatcaccgatgtagactttatttaccaaaacgagttcctgggctgtacagaccgactggtgatcacacccctgaccgatagatgctatatcacactggcccaggctctgggtatgaatatgggcggcgctccggcaggtccagctggcacaggcaaaactgagaccactaaagacatgggccggtgtctcgggaagtacgtcgtggttttcaactgttcagaccagatggattttcgtggtctggggcgaattttcaaggggctggcgcagtcaggctcatggggttgtttcgacgagtttaatagaattgaactccccgtgcttagcgtggccgcccaacagatctatatcgtgttgactgctcggaaagagcgcaagaagcagttcattttttccgacggagactgtgtggacctgaaccccgaatttgggattttccttacaatgaatcccgggtacgccggcaggcaggagctgccggagaacctgaagattcagtttcggacggtggcaatgatggtcccggaccgacagattatcatgagggtgaagttggcgtcttgcggattcctcgaaaacgtaatcctggctcagaaattctacgtgttgtacaaactgtgcgaggagcagttaacaaagcaggtgcattacgatttcggcctgcgcaacatcctttctgtgctacgcacactggggtcccagaaacgagccaggcccgaggactcagaactgagcattgtcatgaggggactgcgtgatatgaacctcagcaaactcgtggatgaggacgaacccctctttctgtctctcatcaatgacctctttcccgggctgcagctcgatagcaacacttatgccgagttacagaatgctgtcgctcatcaggtgcagattgaaggcctgatcaatcacccaccttggaacctgaaactggtgcagctctatgaaacctcactggtgagacatgggttgatgacactgggcccatcaggttcaggaaagaccactgttatcactattctcatgaaagcacagactgagtgtggacgacctcatcgcgaaatgcgaatgaatcccaaggcaattacagcacctcagatgttcggcagattagacacagcaaccaacgactggacagacgggattttttcaaccctgtggcggaagaccctgaaggctaagaagggggagaatatctttttgattcttgacggacctgttgatgccatctggatagagaaccttaactctgtgctggacgacaataagaccctgacactcgcaaatggcgacaggatccctatggcgcccagctgtaagcttctctttgaagtgcataacatcgagaacgcaagtccagccactgtgtccaggatgggaatggtttacatctcatccagcgcgctaagctggcggcctatcctccaggcctggttaaagaagcgaacggcacaggaagctgccgtgttccttaccttgtatgagaaggtgttcgaggatacctatacatatatgaaactaaacttaaatccaaaaatgcagctcctggagtgtaactacatcgtgcagtccctgaatctgctagagggacttattccaagcaaagaggaagggggcgtgtcgtgcgtagagcaccttcataaactgtttgtgttcgggcttatgtggagcctcggcgcacttctggaactggagtctcgagaaaagctggaggcctttctgcgacagcacgaaagcaagctggacttgcccgagattcctaagggcagcaaccagaccatgtacgaattttacgtgacagattacggagactgggagcactggaataaaaagctccagccatattactaccctacagactccattcccgaatacagtagcattctagtgcctaacgtagataatatccgcaccaactttcttatcgataccattgccaaacagcataaagctgtactcctcacaggagaacaaggcactgctaaaacagtcatggtgaaagcctacctgaagaagtacgacccagaagtgcagctgagcaagtctctgaatttttcttcagcgacggagccaatgatgttccaaagaacaatcgaaagctacgtggataagcgtattggctcgacttacggaccacctggcggcagaaaaatgaccgtttttatagacgacattaatatgcccgtaattaacgagtggggcgaccagattacgaatgagatcgtgagacaaatgatggagatggagggcatgtattccctagataagcctggcgacttcacaacgattgtggatgtgcagctgattgctgcaatgatccatcccggaggaggcaggaacgatattccccagcggctgaagcgccagtttaccgtctttaactgcactcttccttctaacgcatccattgacaagatctttggaattattggctgcggatacttcgacccttgtcgtagttttaagccccagatatgcgaaatgattgtgaacctggtctccgttggccgtgttttgtggcagtggacaaaggtcaagatgctgcccaccccctctaagtttcattatatcttcaatctcagggacctatcccgtatctggcagggaatgttgaccattaaggctgaggagtgcgcttcaatcccgaccctgctttctctgtttaagcacgaatgtagtcgtgtgatagccgaccgctttattaccccagaggacgaacagtggtttaacgcccatctgacgagagccgtggaagagaacataggaagcgacgcagcctcctgtatattgcccgaaccctacttcgtggacttcttacgcgagatgcccgagccaactggcgatgagcctgaggacagcgtgttcgaagtgccaaaaatctatgagctgatgccgtccttcgattttctcgccgagaagctgcaattctaccagaggcagtttaacgagatcatcaggggcacatctctagacctcgtattcttcaaagacgccatgacccacttgattaagatctcccgcatcatcaggaccagctgcggtaacgcccttctggtcggcgtcggcggctctgggaagcagtcactgtccagattggcctctttcatcgctggctaccagattttccagatcacactaacccgctcttacaatgtaaccaatctgaccgacgatctgaaggcactgtataaggtggctggcgccgatggcaagggcattaccttcatttttacagacagtgagattaaagacgaggcgtttctggaatatctgaacaaccttctcagctctggtgagataagcaatctattcgctcgcgatgaaatggatgagattacccaggggttgattagcgtgatgaaaagagaactgccaaggcatccgcctacatttgacaatctctacgagtatttcatctctcgcagccgaaagaatttgcacgtggtgctgtgtttttctcctgtcggcgagaagtttcgagcacggtcgctcaaatttcccggattaatatctgggtgcacaatggattggtttagccgatggcctagggaagccctgattgctgtggcttcctattttcttagcgactacaatatcgtgtgttccagtgaaatcaagcgtcaggttgtggaaacgatgggactttttcacgacatggtcagcgaaagttgtgagagctattttcaaagatatcgaagacgagctcacgtaacacctaagagttacctgtcattcatcaacggttataagaacatctatgccgagaaggtgaaatttatcaatgaacaggccgagcggatgaacatcgggctggataagctgatggaggcctcagagtcggtggccaagctgagtcaggacctggctgtgaaagagaaggaactggcagttgctagtattaaggccgacgaagttcttgcagaagttacagtgtctgcgcaggcaagcgcaaagatcaaaaacgaggtgcaggaagtgaaggacaaagcccagaagatcgtggacgagatcgattctgagaaagtcaaggccgagtccaaactggaggcagctaaacccgctctggaagaggccgaggccgcgctcaacaccattaagcccaatgacatcgctactgtcagaaaacttgccaaaccacctcaccttatcatgcgcattatggattgcgtgttgctgctctttcagaaaaagattgaccctgttaccatggatcctgaaaagtcatgttgcaagcccagctggggggagtctttaaagttaatgtccgccaccgggttcctgtggtctctgcagcaattcccgaaggatactatcaatgaggagaccgtcgagttgctacagccttacttcaacatggatgattacacctttgagagtgccaaaaaagtttgtggaaatgtagcgggcctgttgtcctggaccctggctatggccatcttttacggcatcaaccgggaggtgctgccccttaaggccaatttggctaagcaggaggggcgcctcgccgttgcaaatgccgaactaggtaaagcacaggccctgctcgacgagaagcaggccgaactagacaaggtgcaagctaagttcgacgccgcgatgaatgagaaaatggacctgctcaatgatgccgacacttgtcgcaagaaaatgcaagcggctagcacgctgatcgatggattaagcggggaaaaaattaggtggacacaacaatcaaaagaattcaaggctcagattaatcgattggtgggcgatatcctcctttgcaccggctttctctcctatctagggccattcaatcaaatctttcggaattaccttctgaaggatcagtgggaaatggagctccgtgccagaaagattccatttactgaaaatttaaatttgattagtatgcttgtcgacccccctacgattggagagtggggcctgcagggcttgcccggggatgatctatcaatccaaaatggcataattgttacgaaagccacccgttaccccctccttatcgatccccagacacagggcaagacctggatcaaaagcaaggagaaagagaatgacctgcaggtcacatcgctgaatcataagtacttccgcactcacctcgaggattccctgagtctgggtcgcccattgttgatagaggatatccatgaggagctggaccctgccttggacaatgtgctagaaaaaaatttcatcaagtctggtaccacattcaaagttaaagtgggggataaagagtgcgacattatggacacttttaagttatacattaccaccaagctgcctaacccggcttttacccctgaaataaacgctaagacatccgtcattgattttaccgttaccatgaagggcctggagaatcaattactcaggagagtcatccttaccgaaaaacaggagcttgaggccgagcgcgttaaactgctcgaggatgtgacttttaataagcgtaaaatgaaagagcttgaggacaatcttctgtataaactctccgctactaagggttctctagtcgatgatgagtctctcattggcgtgctccgcacgactaagcagacagccgcagaggtgtcggagaagcttcacgttgcggccgagaccgaaatcaagatcaacgccgcccaggaagagtttcgcccagctgccacccgggggtccatcctctacttcttgatcaccgaaatgagcatggtcaacatcatgtaccagacatccctcgcccagttcctgaaactttttgatcagtctatggccaggtctgaaaagagcccgctgccacaaaaaagaatcacaaatattatcgaatatctaacttacgaggtgttcacatattctgtccgagggctatacgagaaccataaatttcttttcgttcttcttatgacactgaagattgacctgcagagaggcaccgtaaaacacagggaatttcaggccctgattaaggggggcgctgcactagatctgaaagcctgtccaccaaaaccatataggtggattctagacatgacatggctgaatctcgttgagcttagtaaactgccacaattcgctgaaatcatgaaccagatctccaggaatgaaaaaggttggaaaagttggtttgacaaggacgctcccgaggaggaaataattccagatggatacaatgacagcctggatacatgtcacaagctgctgcttatcaggtcatggtgcccagaccggaccgtgtttcaggctagaaaatatattgctgattctctggaggagaaatataccgagcccgttattttgaacctggaaaagacttgggaggaatctgatacgcgaacaccccttatttgctttctgagcatggggagcgatcccacgaatcagatcgacgcccttgccaagaaactgaagctggaatgtaggaccataagtatgggacaggggcaggaggtgcacgcccgcaaattaattcagatgagcatgcagcaggtgtgcgataagcggctactcttactccaacattactgttag

SEQ ID NO: 82762 - DNA, 14088 bp, Artificial Sequence
  derived and/or modified sequence
ggggctgaggcccctccatccactgaggaagctgcacctccacggtccgaggaggaagaggctccgcgaccgccaacagtggaggcgcctgccgaagacggcttcagtccctctgcagaggatgctgtgagcagcgttgtggactatcgggacctgatcccttccgaggagggcatcgtcttgccagatgatcatgaggctgatctgaatagagtccgccagcggcttgcgccaaggcccgtccagtctgtcatcagtgaagtgctgagtctcccaagctcacgaaggtcatccaggtatcggagaagcatgtccgggttacccaacctccaagagaccctgaaagaacgtcaggccaggtttcgcgaagcgagagagtctaggcgcctcaaaattgacccctcctacaagtacatatttgagatcttagctgaaaaccttggtctggatattgtgacagtggaagaactcatccttgactgtcccagtttggaggcgtttaccaactttttcgccaaggacgggtgcaaaaccctaaagttcctctaccaggagggggatgtaccaggcattgagtgcggccgaacgatagctggtgccactaaaggggcaaagatgatgaagttgtacatcgacaatgccgctccagataaactcaagggactgtgcatcttcttcgtgcgttgccgaaatgacgttgccattaacgtgaagaccatccaggaagaagctctttttacggtccttgacgcatctaaaggtctactcaatggcatccgtgatatgttggctaacattttcctccccgcagtgctggccactaataattggggagccttaaatcagtccaaacagggggagtcagagaagcacatattcaccgagaccatcaacaggtacctgtccttcctggacggcgcacggatttctattgaggggaccgttaaattgaagacaatcgataacgtcaacttttcaaagctgcacacattcgaagaggttactgcggctgcttctaatagcgaaactgtgcatcagttagaggaggtgcttatggtttggtacaagcagatcgagcaagtgctcatcgagtcagaacagatgaggaaagaggcaggcgattccggtcccctgacggaactcgaacactggaagcgaatgtcagccaagttcaactacatcatagaacaaatcaaagggccttcctgcaaagctgtcattaacgtgctcaacgttgcccattcgaagctccttaagaactggagggatctagatgctcggatcacagataccgcaaacgagagcaaggacaacgtgcgttacctttacactcttgaaaaagtctgtcagcctctgtataaccacgatctggtgtctatggctcatggcatccagaatctgataaacgccatccgcatgatccacggagttagcagatattataacaccagcgagagaatgaccagtctgttcataaaagtcacgaatcaaatggtcacggcttgtaaagcgtacatcaccgacgggggactaaaccatgtgtgggatcaggagacaccagtggtgcttaaaaagatccaggattgtatctttctgtttaaagaatatcaggcttctttccataagacgcgcaagcttatcagcgagagctccggagagaaatcgtttgaggtgtcagagatgtacatcttcgggaaattcgaggccttctgcaagagacttgagaagataaccgagatgatcaccgtggttcaaacgtattctaccttatcaaactccactattgaaggaatcgatatcatggccattaaatttcgtaacatatatcagggcgtgaagaaaaagcagtacgacatccttgatccacgcagaactgagttcgatacagatttcctggactttatgacgaagattaacggcttggaagtacagattcaggcatttatgaattcctcattcggaaagatactgagctcccagcaggcccttcagttactgcagaggttccagaaattgaacatcccgtgtctgggactcgaaatcaaccacactatcgagcggatcctgcagtattacgttgctgagttggacgccacgaaaaagctgtaccactcccagaaagacgatcccccactggcacgaaacatgccacctattgccggaaagattctgtgggtgcgccagctttaccggaggatatccgagccaatcaattatttcttcaaaaactctgacattcttagtagtcctgatggcaaggccgttatccgccagtataacaagatcagctacgtgctggtcgagtttgaggttgtctatcatactgcctggatcagagagattagccagctgcactacgcactccaggcaaccctatttgtacgccaccccgagacaggcaaattactggtgaatttcgaccctaagattctggaagtcgtacgcgagacgaaatgtatgataaagatgaaactggatgtcccagaacaggccaagaggctgctcaaactagaaagcaagctgaaagccgataagctctacctgcaagggttgttacagtattatgatgaattgtgccaggaggtcccgtctgtgtttgtgaatttaatgactccaaagatgaaaaaggtcgaatctgtgttaagacaggggttgactgtactgacctggtcatctctaacactcgagtctttcttccaggaggtcgagctggtgttagacatgtttaatcagctgttgaagaaaattagtgacctgtgtgaaatgcatatagatacggtgcttaaagagattgccaagaccgtcttgataagcctgcccgaatctggcgcaacaaaagtcgaagacatgctgaccctgaatgaaacttacacaaaagaatgggctgacatactcaaccacaagtccaaacatgtggaagaagctgtcagggagctaattagtatttttgaacagatctatgaggtgaaatacaccggcaaagttgggaaacagtctgagcagaggaagcacgtagtctttggcagcgagactggcgaaggagagaacaacgattatgaggcaaacatagttaacgagtttgatacccatgacaaggaggacgaatttaaaaaggagtgtaaagaggtgtttgcttttttcagccaccagctcctcgactctcttcagaaggcgactcgcctctctctggataccatgaaacgaagaattttcgtcgcttccctttacggcagaaagcagagcgaggatatcatctcctttatcaagagcgaagttcatttagctatccccaatgtggtgatgataccctcactggacgacatccagcaggcgatcaaccgaatgatccagctcacattggaagtatctagaggggtcgctcactggggccagcagcagattcgacccataaaatcagtgatcccatcccccactactactgacgtcacacatcagaacacaggaaaacttctcaagaaggaagagaggagcttcgaggaagctatacccgcacgaaagttgaagaatttctaccccggtgtggccgagcacaaggacatcagtaagttggtgctcctcctgagcagttctgtcaactcactgagaaaagcagctcacgaggcactgcaagactttcagaagtacaaaactctgtggaccgaggatagggatgtgaaagttaaggaattcctggcaaacaacccatctcttactgagatccgcagtgagatccttcactacgcaacttttgagcaagaaatcgacgagttgaagcccataatcgtcgtcggggcacttgagttacatacagagccgatgaagctggccctctctattgaagctaaggcttggaaaatgctgctgtgtagatatctgaacgaggaatacaaaaaaaagatgagctacatgatagcattcataaacgagtacctgaaaaagctaagcaggcctatcagggaccttgacgatgttcggtttgccatggaggcactgtcctgcattagagacaatgagatccagatggacatgaccctggggccaatcgaagaggcgtacgccatcctgaaccgcttcgaagttgaggtgaccaaagaagaaagtgaggccgtggataccttgcggtattccttcaataaactccagagtaaggccgtgtccgtacaggaggacttggtgcaggtgcaacccaagttcaaaagcaatctgctcgagtcagtggaagttttcagggaggacgtgatcaatttcgctgaagcatacgagctagagggccctatggttcctaacattcctccacaggaggcctctaacaggttgcagatcttccaggcatcctttgatgacctgtggcggaagttcgtgacatattcatccggcgaacaactgtttggacttcctgtgacggattatgaggtgctgcacaagacaaggaaagaacttaacttgctccagaaattgtacggcttatatgataccgtgatgagctctatcagtggatactacgagatattatggggcgacgtggacatcgagaagatcaatgccgagcttctcgagtttcagaaccggtgcagaaagttaccaaaaggcctaaaggattggcaggctttccttgacctgaaaaaacggatcgatgatttcagcgagtcctgcccactactagagatgatgacgaataaggcaatgaaacagagacattgggacagaatctcagagctgaccggaaccccattcgacgtggaaagcgacagcttctgccttagaaatatcatggaggcccctttgctgaaacacaaggacgatattgaggatatatgcatctccgccatcaaggagaaagacatcgaagcaaaacttacccaagttattgagaattggacaaatcagaatctgtctttcgcagctttcaagggaaaaggagagctactgcttaagggcaccgaatcaggcgaaattatcaccctgatggaggatagcttgatggtcttgggcagtttgctgtccaaccggtacaacgccccttttaaaaagaatattcagaactgggtgtataagctgtccaccagcagtgatatcatcgaggaatggctggtggtccaaaacctgtgggtctatctggaggccgttttcgtcgggggtgacatcgctaagcagcttccccaggaggccaaacgattccaaaatatcgataaaagctggattaagatcatgcagagggcgcacgagaatcctaacgtcatcaattgttgcgtcggggatgaaacgatggggcagctgctaccacacctgcacgagcagctggaagtgtgtcagaaatcccttacgggatatctcgagaagaagaggcttctgttccccaggttcttcttcgtatccgatccggtgttgctcgagatcctaggccaagcctccgatagtcacacgatccagccacatctccccgctgtgagtgacaacattaatgaagtaaccttccacgccaaagattatgacagaataatggcagtcatatctagggagggcgagaaaatcgtactcgataacagcgtgatggcaaaaggcccagtggaaatttggctgctcgacctgcttaaaatgcagatgagttccctacataatatcatccggtccgccttttaccagatctctgattccgggttccagctactacccttcctatctcacttcccggcacaggtgggactgttaggtattcagatgctgtggactcacgattcagaggaagccctcagaaatgctaaagacgataggaagattatgcaggtgaccaaccaaaaatttctcgatatcctgaataccttgatcagtcaaacaacccatgatctctctaaattcgaccgtgtcaaattcgaaacactgatcaccattcatgtccatcagcgggacatttttgacgatctagtgaagatgcacattaagagccccactgactttgagtggctgaaacaaagccgtttttattttaaagaggacctggatcagaccgtggtatctattactgatgttgacttcatttatcagaacgagtttcttgggtgcaccgatcggctggtgatcacaccactgactgatagatgttatatcacgctggcccaggcgctcggaatgaacatgggaggcgctcccgcaggcccagccggtactggaaagacagaaactacaaaggatatgggtcgttgtctgggcaagtacgtcgtggtgttcaattgcagcgatcagatggattttagggggttggggcgaattttcaagggtctggctcagtcaggctcttggggctgtttcgacgagtttaaccggatcgagttgcccgtgctcagcgtcgccgcacagcaaatttatatcgttctgaccgctaggaaagagaggaaaaaacaattcatcttctccgacggggactgcgtcgatctcaatcctgagttcgggatctttctgacaatgaacccagggtacgccggtcggcaagagctgccagagaacctcaagatccagtttagaacagtggctatgatggtgcccgaccgtcaaatcattatgagggtgaagctagcctcctgcgggtttttagagaacgtgatcttagcgcagaaattttacgtgctctataagctgtgcgaggaacagttgacaaagcaggtgcattacgacttcggactgcggaatattctgtctgtgcttcggaccctcggtagtcagaagagagccagaccagaagacagcgaattgtcgattgtgatgcggggtctccgggacatgaacctttcaaaattggtcgatgaagatgagcccctgtttttgagcctgatcaatgatctgttcccgggactccaactggattcgaacacatacgctgaacttcaaaacgctgtggctcatcaggttcagatcgagggtcttattaatcacccaccatggaacttaaagctggtacagctgtatgagactagtcttgtgcggcacggccttatgactttgggtccgtcaggatccggcaagaccactgtgatcaccattctgatgaaagctcagactgaatgcggcagaccccacagagagatgcggatgaacccaaaagccatcactgctccccagatgtttggcagacttgatactgctaccaacgactggaccgacggaatattcagtaccctctggaggaaaaccctgaaagctaagaagggcgagaacatttttttaatacttgacggtccagtagacgccatatggattgaaaacttgaatagtgtgctcgatgacaataagactctgaccctagccaacggcgacagaatccctatggctccttcttgtaagctgcttttcgaggtccacaacatcgagaatgcatcaccagctacggttagcagaatgggtatggtctatatctcatctagtgctttgtcttggaggccaattctgcaggcatggctcaaaaagaggactgcgcaggaggccgctgtcttcctcactctctatgaaaaagtgttcgaggacacttacacttacatgaaacttaacttgaacccaaagatgcagctgctcgaatgcaattacatcgtgcagagtttaaacctccttgagggcttaattccttcaaaagaggaaggcggagtgagctgtgtagagcatctccacaagttatttgtcttcgggctcatgtggagcctgggggctctcctcgaactcgagtctagagagaaactggaagcgtttctgagacagcatgaatctaaactggatctccccgaaatcccaaaggggtccaaccagaccatgtacgaattttatgtcactgattacggagattgggaacactggaacaagaaactacaaccctattattatcccactgacagtatcccagagtacagtagtatcttagtgccaaatgtggataatattcggacaaattttcttatcgatacgatcgcaaaacagcataaagcagtgctgttgaccggagagcaggggaccgcaaagacagtcatggtgaaagcctatctaaagaagtatgaccctgaagttcaactgtcaaagtcactgaatttttccagcgccacagagcctatgatgttccaacggacgatcgagagctatgttgataagaggatcggatccacttatggaccacccggtggcaggaagatgaccgtgtttatcgacgacattaatatgccagtgataaacgaatggggtgatcagatcaccaatgagattgtacgccagatgatggaaatggagggcatgtacagcctggataaaccgggagactttactaccatcgtggacgtgcagctcatcgctgctatgatccatcccggaggcggacggaatgacatcccacagcgactgaagagacagttcactgtatttaactgtaccctcccttctaacgcctcaatcgataaaatttttggtatcatcggatgcggctacttcgacccctgtcgaagctttaagccccagatatgtgaaatgattgttaacctggtttctgtggggcgtgtcctgtggcaatggaccaaggtaaagatgctgccaacaccaagtaagtttcactatatattcaatctcagggatctgtctagaatttggcagggtatgctcaccatcaaggccgaagaatgcgcttctatccccaccctcctcagtctcttcaagcacgaatgttctcgggttatagccgaccggttcataacacctgaagacgagcagtggtttaacgctcatctgaccagagctgtggaggagaatatcgggtccgacgcagcgagctgcatcctgcccgagccttatttcgtagacttcctgcgagaaatgccagaacccaccggggatgagcccgaggattctgtcttcgaggttccaaagatctacgagctcatgccctccttcgacttcctggcagagaagctccaattttaccaaagacagttcaacgaaatcatacgaggaacctccctggatctggtgttctttaaagatgccatgacacatttgatcaagattagtcgtatcatacgtacttcttgcggtaatgcactcctggtgggtgtgggcggatcgggcaaacagtctctgtccagattggcttcttttatcgcagggtaccagatcttccagatcaccctgactaggtcctacaacgtgacaaacctgacagacgacctcaaagcactgtataaagtggccggagccgatggtaagggcattactttcattttcactgacagcgagatcaaggatgaggcgtttttggagtatctgaataaccttctgagctctggtgaaatttctaacctgtttgcgcgagacgaaatggatgaaataactcaaggactgatctccgtgatgaagagggagctgccgcgacatccgcctacatttgacaacctttatgaatacttcatcagcagatccagaaaaaatttgcacgtcgtgctttgtttttcccctgttggcgaaaaatttcgcgctagatccctgaaatttcccggactcatctcaggatgtaccatggactggttttcccggtggccacgcgaagcattaattgctgtcgcgtcttatttcctgtctgattataacatcgtctgctcttccgaaattaagcgccaagtggtagagacaatgggactcttccacgacatggtgtccgagtcttgcgagagttacttccagaggtataggcgccgagctcacgtgacacccaagtcttatttgtcatttatcaatgggtacaaaaacatctatgcagagaaggtgaaatttatcaatgagcaggccgagcgtatgaatattggccttgacaaactgatggaggcctcagaatccgtggccaagctgtcccaggacctggcagtgaaggagaaggagctcgccgtcgcctccatcaaagctgatgaggtcctggccgaggttaccgtgagcgctcaggcgtcagcgaaaattaaaaatgaggtgcaggaggttaaggataaggcacaaaaaatcgtcgacgagatcgactctgagaaggtgaaagcggagagcaaactggaggccgcaaagccggctctcgaggaggcagaggcagccctaaacacaataaaacccaacgatatcgctactgtgaggaagctcgccaagcccccacacctgataatgcggatcatggattgcgtcctgctgctgttccagaaaaagatcgacccggtgaccatggaccctgaaaagagctgttgtaagccctcctggggtgaatcccttaagctcatgagtgccactggcttcctgtggtcgttgcagcagtttccaaaggatactattaatgaggagactgtcgaactccttcagccatactttaatatggatgactatacgttcgagtctgcaaaaaaggtgtgcggtaatgtagccggacttctctcctggacattggctatggccatcttctacggaattaatcgcgaagtgctcccattgaaagcgaacctggcaaaacaagagggcaggctcgctgtggccaatgccgagctaggcaaggcgcaagcattactggatgagaaacaggctgagcttgataaggtacaagccaagtttgatgcagctatgaacgagaagatggatttattgaacgacgctgacacatgtcggaaaaagatgcaggccgcttctaccctaatcgatggcctgagcggggaaaagatccgctggacacagcagagcaaggagtttaaggcccagatcaataggcttgttggcgacatccttctgtgtaccggcttcctcagctatctgggaccatttaaccaaatcttcaggaactatctattgaaggaccagtgggaaatggaattgcgcgcaagaaagattcccttcactgagaacctgaatcttatctctatgctggtcgatccccctaccatcggagaatggggcctccagggtctgcccggagatgacctgagcattcagaacgggattatagtcacaaaggctacaagataccccttgctgatagatccgcaaactcagggcaagacgtggataaagtcaaaggagaaggagaacgaccttcaggtcacttccttgaatcataaatactttcggacacaccttgaagactcgttgagcctcgggcgacctctgctgatcgaggacatccacgaggagcttgatcctgcactggacaacgtactggaaaagaattttataaagtcaggaactacattcaaggtcaaggttggcgacaaagagtgcgacattatggacacttttaaactgtacatcacaactaaactcccaaacccggctttcaccccggagataaatgccaaaacaagcgtgattgactttacagttaccatgaagggtttggagaaccaactcctcaggcgcgtgatcttgaccgagaagcaggagctggaggccgagcgcgtgaaactgcttgaggacgtaaccttcaataagcggaaaatgaaagagcttgaggacaacctcctgtataaacttagcgccacaaagggctcgttggtggacgatgaatcactgataggcgtgctgcgaacaactaaacagaccgccgctgaggtgagcgagaaactacatgtggcagccgaaacagaaatcaagattaacgctgcgcaggaggagtttcgcccagccgcaacacggggatcaatcctgtacttcctgatcaccgagatgtctatggtcaatattatgtaccaaacttctctcgctcaattcctaaagttatttgatcagagtatggcccgttcagagaagtcccccctccctcagaaaaggatcacgaacatcattgaatatctgacctatgaggtattcacctacagcgtgagggggctgtacgaaaatcacaaatttctcttcgtactcctcatgacactgaagatcgacttacaacggggtactgtcaagcacagggaattccaggcacttatcaagggaggcgctgccctggacctgaaagcttgtcccccaaagccctacaggtggatccttgatatgacgtggcttaatctggtagagctgtcaaagttgccccaattcgctgaaattatgaaccagatctctcgtaacgagaagggttggaaatcctggtttgataaggacgcccctgaagaggagatcatcccggatggctacaacgactccttagatacctgccataaactactgctgatacgatcatggtgcccagatcgtaccgtcttccaggcacgaaagtatattgccgatagtctggaggagaaatacacagagcccgtcatcctgaacctagaaaagacttgggaggagagcgatacacggaccccactgatatgctttctctctatgggaagcgacccaacaaatcagatcgacgcacttgctaaaaagctgaagctcgaatgtcgaacgatcagcatgggacagggacaggaggtccacgccaggaagttaatccagatgtcaatgcagcagggtggctgggtgctgctgcagaactgccatctgggtttggagtttatggaggaattattggagaccttgatcacaaccgaggcatccgatgacagcttccgcgtctggataacaactgaaccacacgacaggttcccgatcactttgctccagacatctctgaaatttacaaatgaacctcctcagggtgtgcgggctgggctaaagagaacctttgctggaataaatcaagatcttctggacatttctaatctccccatgtggaagccgatgctttataccgtagcctttcttcacagtacagtgcaggaacgacgcaagttcggcccactgggctggaacattccctacgagttcaattccgctgactttagtgcatctgttcagtttattcagaatcacctggacgagtgcgacatcaagaagggcgtaagctggaatacagtgagatatatgattggagaagtccaatatggcggacgtgtgaccgatgattttgacaagcggctgctcaactgctttgccagagtgtggtttagcgagaaaatgttcgaaccaagcttctgcttttatactggttataagattccgctgtgcaaaacattagatcagtacttcgagtacatccagagcctaccttccctcgacaaccccgaagtatttggactgcacccaaacgcagatataacttaccagagcaacacggcctcagctgtgctcgaaacgatcacaaacatacagccaaaggagtctgggggaggcgtgggcgagacacgtgaagcgatagtgtacaggctgagcgaagatatgctaagcaaattgcctcccgactacatcccacatgaagttaaaagccgtctgattaagatgggccatctgaatagtatgaatatctttctcaggcaggaaatcgatcggatgcaacgagtaatctccatcctgcgttcgagcctgtctgatttgaaactggccatcgaggggacaattatcatgagcgaaaacctcagagatgcactggataacatgtacgatgcccgaatcccccagctgtggaagcgcgtgagctgggatagttctaccctcgggttctggtttacggagctgctggagaggaatgcccagttctctacttggatcttcgaaggcaggcctaatgtgttttggatgacaggcttcttcaaccctcaagggttcctgaccgccatgagacaggaggtgacgagagcacacaaaggttgggcactcgatactgtgaccatccacaacgaggtcctgagacagacaaaagaggagatcacatccccacctggcgagggtgtgtacatctacggtctctacatggatggagctgcatgggaccggcgaaacggcaaactgatggaatcaacccccaaagtcttattcacccaactgcctgtgcttcatatcttcgctattaattctacggctccaaaagatcccaagctgtacgtttgtccaatttacaagaagcccagaagaactgacctgacgttcattactgtggtgtaccttcgtacagtgctcagcccagaccactggattttacgcggtgttgccctactgtgtgacataaagtag

SEQ ID NO: 82763 - DNA, 13473 bp, Artificial Sequence
  derived and/or modified sequence
atgatgaagttgtacattgacaacgctgccccagataaactcaagggtctttgtatcttcttcgtgcgttgccggaatgacgtggccataaatgtgaagacaattcaagaggaagcgctttttacggttctagacgccagtaaaggccttctgaatggaatccgggatatgttagcaaacatttttctgcctgcagtcctggcaacaaataattggggcgctttgaaccaatccaaacagggcgagagcgagaagcatatctttacggagactatcaatcgatacctgtcattcctggatggggcacgaatcagcatcgagggaaccgtgaaactgaagaccatcgataatgtaaatttttcaaagctgcacaccttcgaggaagtcactgccgcagcttccaatagtgaaacagtccatcaacttgaagaggtattaatggtgtggtataaacaaatagagcaggttcttatcgaatccgagcaaatgagaaaggaagcaggcgactctgggccactcaccgaattggagcactggaagagaatgagcgccaagttcaactatataatcgaacagattaaaggcccatcatgcaaagctgttataaatgtcttgaacgtggcccattctaaactactgaagaattggcgcgacctcgatgctcggatcaccgacaccgccaacgagtcgaaagacaatgttaggtacctgtatactctggagaaggtctgtcagccactgtacaaccacgatctggttagtatggcccatggtattcagaacctgattaatgcaattcgcatgattcacggcgttagcagatactacaatacttccgagcgcatgaccagcctttttattaaagtgactaaccagatggtcaccgcctgcaaggcatacatcactgatgggggtctaaatcacgtgtgggaccaagaaacacctgtggtgctgaaaaaaattcaggattgtatttttctctttaaagaataccaggcaagtttccataagacccggaagctgattagcgagtctagtggggaaaagtcgttcgaagtgtccgaaatgtatatcttcgggaagttcgaggccttttgtaaaagactggagaagataactgagatgatcacagtcgtgcaaacctacagtaccctatctaattctaccattgagggcattgacataatggcaatcaaatttcgcaacatctaccagggagtgaagaaaaaacagtacgatattctcgatcccaggcgcactgagttcgatacagactttctcgatttcatgacaaagatcaatggcttggaggttcagattcaggcatttatgaacagttctttcgggaaaattctcagctctcagcaggcgctccagttgcttcagcgattccagaagcttaacataccctgcctcggattagagataaaccacacaatcgagcgtattctgcaatattatgtagcggagctagatgccacaaaaaagctataccactctcagaaagatgatccacctctcgcacgcaatatgccccctatagccggtaagatcctttgggtgcgacaactgtaccggaggatttctgagcctatcaattactttttcaaaaatagcgatattcttagctcgcccgacggtaaggctgtgatcaggcagtacaataagatcagttatgtattggtagaatttgaggtggtctaccacacagcctggatccgtgaaatctctcagctacactacgccttacaagcaacgctgtttgttcgacaccctgaaaccgggaaactgctcgtaaattttgacccaaagatcctagaggtagtgcgagagaccaagtgcatgatcaaaatgaagctggacgtcccagaacaggcgaagaggctcttaaaattggagagcaagttgaaagccgataagctgtacctccagggtttactccagtactacgacgaactctgccaggaggtcccgtctgtgttcgtgaatttgatgacgcctaaaatgaaaaaagtggagtcagtgctgcgtcaggggctgacggtactgacttggtcttctctgaccctggagtcctttttccaggaggttgaattggtcttggacatgttcaaccagttgctgaaaaagatttccgacctctgcgagatgcacatcgacactgtgttgaaagaaattgccaagaccgtcctgatttcactccctgaatccggagcaactaaggtcgaagatatgttaacactgaacgagacctacaccaaagagtgggccgatatcctcaatcacaaatctaagcacgtggaagaggctgttagggaattgatttccatttttgagcaaatttacgaggtgaaatatacagggaaagtcggcaaacagagcgagcaaaggaagcatgtggtcttcggctcagagacaggagagggggaaaacaacgactacgaagccaacatcgtgaatgaattcgatacacacgacaaggaagatgagtttaagaaggagtgtaaggaggtgtttgccttcttttcccatcaacttttggactctcttcagaaggccacgcggcttagtttggataccatgaaaaggagaatcttcgttgcctcgctatacgggcgtaaacagtctgaggacatcatatccttcattaaaagtgaggttcacctggccatcccaaacgtagtcatgataccctctctggatgacatacaacaggctattaaccggatgattcagctgacactggaagtgagcaggggcgtggcacattggggccagcaacagattcgccctattaaaagcgtgatcccatccccaactaccaccgatgtcacccaccagaatacaggcaagctgttaaagaaggaggagcggtcattcgaagaggcaattcctgctagaaagcttaaaaatttctatccaggagtagctgagcacaaggatatctctaagctggtgctgctgctgtcttcttcagtcaatagcttgcgcaaagccgctcatgaagccctgcaagacttccaaaagtacaaaactctttggacagaggacagagatgtcaaagtgaaggaattcttggcgaataatccctccctcactgaaatccggagcgagatccttcactacgccactttcgagcaggaaatagatgagctcaagcctatcatagttgtgggtgccctggagctacataccgaaccaatgaaattagcattgtcaatcgaggctaaagcttggaaaatgttactgtgcaggtacctcaacgaggaatacaagaaaaagatgtcctacatgatcgccttcatcaacgaatatttaaagaagctcagtaggcctattcgggatctggatgacgtgagatttgcaatggaagccttatcatgcatacgagacaacgagattcaaatggacatgactttgggccctattgaggaggcctacgccatcttgaatcggttcgaggtggaggttacaaaggaggaaagcgaggctgttgacaccctgcgctactcatttaataagctgcaatctaaggccgtgtccgttcaggaagacttggtgcaggtccaaccaaagttcaaatctaacctgctggagtctgtagaggtctttagggaagacgtcatcaactttgccgaggcttacgagctggaaggtcccatggtgcctaacatcccccctcaagaggctagcaatcggcttcaaatcttccaggcatccttcgacgatctttggaggaagtttgtgacctattccagcggcgaacagttgttcggcttacctgtgactgactatgaggtcctgcataaaacccggaaagaacttaatctgttgcagaagctttacggcctttacgataccgtaatgtcctccatcagtgggtattacgaaattctgtggggcgacgtggacatagagaaaatcaatgctgagttgctagagtttcagaatagatgccgtaagctgcccaagggccttaaggactggcaggcgtttttagacttgaagaagagaatcgacgatttctccgaatcctgcccacttctggagatgatgacgaacaaagcgatgaagcagcgccactgggatcgcatatctgagctcaccggtactccattcgacgtcgaatcggacagcttctgcctccgaaacattatggaagctcccttactcaagcataaggatgatatcgaggacatctgcattagcgctataaaagagaaggacatcgaagccaaactaacacaggtgatcgaaaactggaccaaccaaaatctcagtttcgccgcttttaagggtaaaggggagttgttactcaaaggcactgagtcaggagaaatcatcactctgatggaggattcactcatggtcttggggtccttgctctctaacagatacaacgcgccttttaagaagaacatccagaactgggtgtataaactgagtacttcttctgatatcatcgaagagtggctcgttgtgcagaatctatgggtatatttagaggccgtgttcgtggggggagatatcgctaaacagttaccccaagaagctaagaggttccagaacattgataaaagctggattaaaataatgcagcgggcacatgaaaatccaaatgtcatcaattgctgcgtgggggacgaaactatgggccaactcctaccccacctgcacgagcagttagaagtgtgccaaaagagtctgactggttacttggaaaaaaagagacttctctttccacggtttttcttcgttagcgatccagtcctcctcgaaattctaggccaggcttctgactctcacacaatccagccgcacctcccggcagtaagcgataacattaatgaggtgaccttccatgcaaaagactatgatcgtatcatggctgttatttccagggaaggcgagaagattgtcctggacaattcagttatggccaaagggcctgtcgagatctggctattagatctcctgaagatgcagatgtcgtcccttcataatatcattaggtctgcattttaccagatctccgattctggctttcagctgctccccttcttaagccacttcccagcacaggtcggattgcttggaatccagatgctgtggacacatgattccgaggaagccctgcgcaatgctaaagatgatcggaaaattatgcaagtgaccaaccagaaatttctggatatattgaacaccctgatttcacaaacaacacatgatttaagtaaatttgatcgggttaaatttgaaacccttatcacaattcacgtgcatcaacgggatatcttcgatgacctcgtcaagatgcatatcaagagccctactgatttcgagtggctcaaacagagtcgcttttacttcaaggaagatctggatcagaccgtcgtgtctattaccgatgtcgacttcatatatcagaatgagtttctgggctgtacagacaggctggtcattactccccttactgacaggtgttacattaccctggcgcaggcgcttggaatgaacatgggaggtgcaccagccggacccgcaggcacaggaaaaactgagaccaccaaagatatgggcagatgcctgggcaagtacgtagtggtattcaattgttctgaccagatggattttaggggactgggccgaatctttaaaggtctcgctcagtctggttcctggggatgttttgatgagtttaatagaatagagcttcccgttctgtcagtcgcagcacagcagatttacatcgtgttgaccgccaggaaggagagaaaaaagcagttcatcttttcagacggtgattgtgtggacttgaacccggagttcggaatattcctcactatgaaccctgggtatgctggtcgacaggaactgccagagaatctgaagatccagtttcggactgtggcaatgatggtacccgacaggcagattatcatgcgagtgaaactggctagttgtggctttctcgagaatgttatcctcgcacagaagttctatgtgctgtataagctgtgcgaggagcagttaaccaagcaggtccattacgactttggtttgcggaacatactgagcgttctgcgcaccctggggtcacagaagcgcgcacggcctgaagattccgaactgtctatcgtaatgcggggactgcgcgacatgaatctctccaaactggtcgacgaagacgagccactttttctgtctctcatcaacgacctgttccctgggcttcaactagattcaaacacctatgccgagctgcagaacgccgttgcacaccaggtgcagatagaggggctcattaatcatccaccatggaacctcaagcttgttcaactctacgaaacctctctggttcgtcacggactcatgaccctaggtcccagtggctctggcaaaaccaccgttattaccatactcatgaaggcacaaaccgagtgcggaagaccccaccgcgagatgagaatgaacccgaaagccatcaccgcaccccagatgttcggacgcttagacacagcaactaatgactggacagatggaatctttagcaccctttggcgaaaaacccttaaggccaaaaaaggggagaacatcttccttatcttagacggacccgtcgatgccatctggatagaaaatctgaatagcgtgctggacgacaacaaaactttgaccttggcgaacggggatagaatcccaatggccccaagttgtaagttgctattcgaggttcacaacattgagaatgccagtcccgcaacagtgtcccggatgggcatggtgtatataagcagttccgccctaagctggcgccctatactgcaggcctggttgaaaaagcggacagctcaggaggccgctgtgtttctgaccctgtacgagaaagtgtttgaagatacatatacctacatgaagctgaatcttaatcctaagatgcaacttttggagtgcaattatattgtgcagagtctgaatcttcttgagggactgatcccctccaaagaagaaggtggcgtgagctgcgtggagcatttgcacaaactgtttgttttcgggctcatgtggtccctaggggctctgctcgagctagagtcgagagagaaattggaggcctttctgcgccagcatgaatccaaacttgacctgcctgaaatcccaaaaggatctaaccaaaccatgtatgaattttatgtgaccgactacggcgattgggagcattggaataaaaaattacagccttattactatcctacagactccatcccagaatattcgagtatcctggtgcctaacgttgataacatcagaactaactttctcatcgatacgatagccaagcagcacaaggccgtcctgctcaccggggaacagggcaccgccaaaactgtcatggtgaaggcttatttgaagaagtacgatcctgaggtgcagctcagcaagagcctgaacttttcttctgcgacagagccaatgatgttccaacgtaccattgagtcctacgtcgacaagaggataggctctacttacggaccaccaggcggacgaaaaatgacagtatttatagatgatattaacatgccagtgatcaacgaatggggggaccagattacaaacgagatcgttagacagatgatggaaatggaaggaatgtattcactggataaacctggcgactttaccacaattgtcgacgtgcagctgatagccgcaatgatccatccgggtggaggtagaaatgatattccgcaacgcctgaaaagacagttcacggtctttaactgcaccctgccaagcaatgcaagcattgacaagatcttcgggatcatcgggtgtggatatttcgacccatgccgtagctttaagccccaaatctgtgagatgatcgttaacctcgtaagtgtcggtcgtgtgctgtggcagtggaccaaggtcaagatgctgccgacccccagcaagttccattacatcttcaacctgagagatctgagccgcatctggcagggcatgcttacgattaaagctgaggagtgtgctagtatccctaccttactgtcgcttttcaagcatgaatgctcccgcgtcattgcggaccgattcattaccccagaggacgaacagtggtttaatgcacaccttacccgggctgttgaagaaaacatcgggagcgacgcagcatcctgtatcctgccggaaccgtacttcgttgatttcttgagggagatgcccgagcctaccggtgacgagccagaggactcagttttcgaggtgccaaaaatatacgagttgatgccctcatttgatttccttgccgagaagctgcaattctatcagagacagttcaacgaaattattagaggcacaagtctggatttagtcttcttcaaggacgcaatgactcatctaataaagatatctcggatcatccgaacctcatgtggcaatgccctccttgtgggcgtgggcggatccggtaagcaatctctcagtagattggcctctttcattgccggttaccagatctttcagattacactgaccagatcctacaacgtcacgaaccttacagatgatctaaaggccctctacaaggtcgcaggcgctgatggcaagggcatcacattcatcttcactgattctgagatcaaggacgaggcctttctcgagtatctcaataatctcttgtcatccggcgagattagcaaccttttcgctcgagacgaaatggacgaaattactcaaggactgatctcagtgatgaagcgggaattaccacggcacccccctaccttcgataatctctatgaatattttatcagtcgcagtagaaaaaacttgcacgtggtgctctgcttcagtcccgtcggagagaagttcagagctagatccctcaaatttcctggcttgatttccggatgtaccatggattggttttcaagatggcctcgggaggccctgatcgctgtggctagctattttctttcagattataatatcgtctgttcttcggagatcaaaaggcaagtggtggaaacaatgggcctgtttcacgacatggtgtctgagtcgtgcgagtcatactttcaacgctacaggaggcgtgcgcacgtaacccctaaaagttacctgagtttcattaacggatataagaacatttacgccgagaaagtgaaattcattaatgagcaggcagagcgcatgaacataggtctggataaactgatggaggcttcagaatctgtcgcgaagctatcccaggatctggcggtcaaagagaaagagctggccgtcgctagcattaaggcggatgaagtcctagctgaagttacggtgagtgctcaggccagcgccaaaataaaaaacgaagtccaagaagtcaaagacaaggctcagaaaattgtagacgagattgatagtgagaaggtcaaggcagagtctaagctagaagccgctaaaccggctctcgaggaggccgaggccgcactcaacacaatcaagcccaatgacatagcgaccgtgagaaagctcgccaaacccccacacctgatcatgagaataatggactgtgtgctccttctgttccagaagaagatcgaccccgttacaatggatcccgaaaaatcgtgttgtaagcccagttggggcgagagtttgaagctgatgtccgccacgggctttctgtggtccttgcagcagttcccaaaggatacgatcaacgaggagactgtggagctgcttcagccgtatttcaacatggacgactatacctttgagtcagccaagaaagtatgcggtaacgtggctggtctcctgtcctggacgttagcgatggcaattttttacgggattaaccgggaggtgctgcccctcaaagcaaacctcgccaaacaagagggcaggctcgcggttgctaatgcggaacttggcaaggcacaggctctgcttgacgaaaagcaagcagaacttgataaggtccaggctaaatttgacgccgctatgaacgaaaaaatggatctgcttaatgatgcagacacttgcaggaagaaaatgcaggctgccagcactctgatcgatggtctgagcggcgagaagatccggtggacacagcagagcaaagagtttaaggcccagattaatcggctagtgggggatatccttctttgtactgggttcctgagctacctcggtcctttcaatcagatctttcggaattacctgctcaaggatcaatgggagatggaactccgggcaagaaaaattccattcaccgaaaatctgaaccttattagcatgctcgttgatccacctactatcggcgagtggggactccaaggattgcccggtgatgacctgtccattcagaatggaattatcgttactaaggcaacacgatatcccctcctgatcgaccctcagacacaggggaaaacttggattaaatcaaaagaaaaggaaaatgatctgcaggttaccagtctcaaccacaagtacttcagaactcacctggaagactccctcagtctcgggaggcccttgcttatcgaggatattcacgaagagttagaccccgctctcgacaatgtccttgagaagaactttataaaatcgggcaccacatttaaagtgaaagtaggcgacaaggagtgcgacataatggacacattcaagctgtatataaccacaaagctgcccaaccccgcattcacccctgagatcaacgccaagacgtccgtgatcgactttaccgtaactatgaaggggctggagaatcaactgcttcgcagagtcatcctgactgagaagcaagagttggaggccgaacgagtgaaactactggaggacgtgacattcaacaagaggaagatgaaggagctggaggacaacctcctctacaagctgtcagctactaaaggcagtcttgtcgacgacgaatcactgataggcgttttacggactactaagcagactgccgcagaggtgtctgagaagcttcatgtggccgctgaaacagagattaagataaatgccgcacaagaggagttccgtcccgcagcgactagggggagcattctttactttctgatcacggaaatgagcatggttaatatcatgtaccagacaagtcttgctcagtttctcaaactattcgaccagtcaatggccagatcagagaagtctccattgccccagaagagaattaccaacatcatcgagtacctaacctacgaggtttttacttatagtgtcaggggtctctatgagaaccacaaatttctgttcgtgctgctgatgactctcaaaatagatctccagcgcggtacggtcaaacatagggagttccaggccctgatcaagggcggagccgcactggacttaaaagcgtgccctcctaagccttatcgatggattttagatatgacctggctgaatctggtggaactgtctaagttgccccagttcgcagagatcatgaaccagatcagtcggaatgagaaggggtggaagtcttggtttgacaaagatgctccagaggaagagattatacccgatgggtacaatgactccctggatacttgccacaagttacttctgatccgatcttggtgccctgacaggacagtgttccaggccagaaagtacattgccgattcattggaggagaaatacaccgagcctgtaatcctgaatttagagaaaacctgggaggaatctgatactcgtactccccttatctgttttctcagcatggggtccgacccgaccaaccagatcgacgctcttgcaaagaagctgaaactggaatgtagaaccatttctatgggccagggccaagaagtccacgccagaaagctgatccagatgtcaatgcaacaaggcggttgggttctattacagaactgccacctaggtctggaattcatggaggagcttttagagaccctaataacaaccgaagcatctgatgacagttttcgtgtttggataacaaccgaaccccacgatcggtttccgattaccctcctgcagacctctctgaagttcaccaacgaacctccacagggggttcgcgctggcctcaagcgcacctttgccggaattaatcaagatctccttgacattagtaatctccccatgtggaagcccatgctatacaccgtcgcattcctccacagtactgtccaggagagacgaaagtttggcccactcggctggaatatcccgtatgagttcaatagcgcggacttttctgcatcagtgcagtttattcaaaaccatctggacgagtgtgacataaagaaaggagtctcgtggaatactgtgagatacatgataggggaagtgcaatatggcggacgcgtcacggacgattttgacaagagactactcaattgttttgcgagagtgtggttcagtgagaaaatgtttgaaccatcattctgcttctacaccggctataagattcctctgtgcaaaacgcttgatcagtactttgaatacattcagtccttgccctcactggacaaccctgaggttttcggcctgcacccaaatgccgatatcacttaccaatccaacacagccagtgctgtcctcgaaaccataactaatattcaacctaaggagtccgggggtggcgtgggcgaaacgagagaggccattgtgtaccggctttccgaagatatgctctctaagctgcctcccgattacattccacacgaggtcaagagcagactaattaagatggggcatttgaattcaatgaatatttttcttcgacaagaaatcgaccgtatgcaaagagtgatttcaattctcaggagtagcctgtccgacctgaaactggccatcgaaggaactatcatcatgagcgaaaatttaagggatgcactcgacaacatgtacgacgccagaattccacagttgtggaaacgcgtttcctgggattcctcaacgttgggattctggtttacagaactcctggagcggaatgcacagttctccacctggatctttgaagggcgacctaacgtattttggatgaccggattctttaatccacagggcttcctcactgccatgcggcaggaggtgacacgcgctcacaaaggatgggccctggacactgtaacaatccacaacgaagtgcttagacagactaaggaagagattacctccccacctggagaaggcgtatacatttacggattgtacatggacggagcagcatgggatcgtagaaacgggaagcttatggagagcacccccaaggttttatttacacaattgccagtcctccatattttcgctatcaatagtacagcgcctaaggaccccaaactttatgtatgtcccatctacaaaaagcctcgaaggaccgatcttacattcatcaccgtggtttacctgagaaccgtcctgagccctgatcactggatcttacgcggagttgccctcctgtgtgatatcaagtat

SEQ ID NO: 82764 - DNA, 12567 bp, Artificial Sequence
  derived and/or modified sequence
atggagaaagatgccgaagatggcgcaccaagtgagggggctgaggcgccaccatcgaccgaagaagctgctccgccaaggtctgaagaggaagaggcccctagacctcccacagtagaggcccctgcggaggacggattctcaccctcagctgaggatgcagtaagttccgttgtggactatcgcgacttgatcccctcagaggagggaatcgtgctgccggacgaccacgaggcggacttaaatagggtaaggcagaggctggccccacgtcctgtgcagtccgtgatctctgaggtcctcagcctgccaagctcccggagatcttctaggtatcgaagaagtatgtctgggttgccgaacctccaggagaccctgaaggagcgtcaggctcgcttccgtgaggccagagaatctcggcgactgaagatcgacccatcctataaatacatatttgaaattctggccgagaatttgggactcgacattgtcacagtggaggaattaattctcgattgccctagcctggaagcctttacaaatttctttgcaaaggacgggtgcaagaccttaaagtttctctaccaggagggtgatgtcccaggaattgaatgtggcagaactattgctggggcaacaaaaggcgcaaagatgatgaaactctatatcgacaacgcagcccctgacaaacttaagggcctgtgtatctttttcgtcagatgtcggaacgacgttgccattaacgtgaaaacaatccaagaggaggccctgttcaccgtgcttgatgctagcaaagggctcctgaatggtattagggatatgttagccaatatattcctgcccgctgtattggcgactaacaattggggtgctcttaaccagagtaagcaaggagaatccgagaaacacatcttcactgagacgatcaacaggtaccttagttttctagacggcgctaggattagcatagaaggcacagttaagctgaaaacaattgataacgtgaacttcagcaaactccataccttcgaagaggtcaccgccgcagcatccaacagtgaaaccgtgcatcaacttgaggaggttctcatggtgtggtacaagcagattgaacaggtgctaattgagagcgaacagatgcggaaggaggccggtgattctggtcccttgaccgagctggagcattggaaacggatgtcggctaaattcaattacatcatcgaacagatcaaagggccatcctgcaaagccgtcataaacgtgttgaatgtggcacatagcaagctcctcaagaattggcgtgatttggacgcacgcattacagatactgccaacgagtctaaggacaacgtcagatatttgtacactttagagaaggtctgtcagcctctttataaccatgatctcgtgagcatggcccatggcatccagaatctgatcaatgctatacgtatgattcacggggtgagtcgatactacaatacatctgagagaatgacctcactgttcatcaaggtgacaaaccagatggtaactgcctgcaaggcctatatcactgatggaggccttaatcatgtgtgggaccaagagaccccagtagtcctcaagaagatccaggattgcatcttcttgttcaaagaataccaggcctcgttccacaaaactcgaaagctcatttccgagagcagcggcgaaaagagctttgaagtttcggagatgtatatttttggcaaatttgaggcattctgcaagcggctcgaaaaaattaccgaaatgatcacagttgtgcaaacatattcaacactgagtaactccacgatcgagggaatcgacataatggctattaagttccggaacatctatcaaggcgtgaaaaagaaacagtacgacatcctcgatccgaggcgcactgaatttgacactgatttcctggactttatgacaaagatcaacggactggaggtccaaatccaagccttcatgaatagtagtttcggaaagattctgtcctcccaacaggcgctccagctgctgcagcgcttccaaaagctcaacattccctgcctggggctcgaaattaatcacaccatagagagaatacttcaatattatgtcgccgaactcgacgctaccaaaaagctttatcactcacagaaggatgatccccctttagcacgcaacatgccacccattgccggaaaaatcttatgggtcaggcagctctacaggaggatctccgagcccataaattacttctttaagaatagtgatatattgtcctcccccgacggcaaggcagtaattcgccagtacaataagatttcttacgtgctcgttgaatttgaggtcgtgtatcacaccgcctggatccgagagatcagccaactccactacgcccttcaggccactttgtttgttaggcaccctgaaacagggaaactccttgtcaatttcgatccaaagattctcgaagttgtgagggagactaagtgcatgattaaaatgaagctggatgtcccggagcaggctaaaaggctattgaaactggagagcaaacttaaggcagacaagttatatctgcagggtttgctccagtactatgatgaactatgtcaggaggtcccaagcgtctttgtaaacctaatgacaccaaaaatgaagaaggtagaatctgttctcagacagggtcttactgtcctgacttggagcagccttacactcgaatccttctttcaggaggttgagctggtgcttgacatgtttaaccagctcctcaagaagatttctgacttgtgtgaaatgcacatcgacacggttcttaaagaaatcgctaaaactgttctgatttccctgccggagtccggcgcaaccaaggtggaagatatgctgacgctgaatgagacttacacgaaggaatgggccgatatactgaaccataagtccaagcatgtggaggaggccgttagggagctaatctctatctttgagcagatatacgaggttaaatacaccggaaaggttggtaaacagtccgaacagcgtaaacatgtggtctttggctcggagactggcgagggagagaacaatgattacgaagccaatatcgttaacgagttcgacacccacgacaaagaagacgagtttaagaaggagtgtaaagaggtgtttgcttttttttcacaccagcttctcgacagtctgcagaaggccactcgtttgtctctggatacgatgaagcgcaggatttttgtagcatcattatacggtcggaaacagtcagaggatatcatttccttcataaagtctgaggtccatctcgctatacccaacgttgtcatgataccatcgctggatgatatccagcaagccattaataggatgattcagttaactctcgaggtctcaagaggtgtcgcccactggggccagcagcaaattaggcccatcaaaagcgtgatcccttctccaacaacaacagatgtcacacatcaaaatactggaaagcttctcaaaaaggaagagcgcagtttcgaggaagctatccctgctcgtaaactcaaaaatttttatcctggcgtagcagagcacaaggatatttcaaagcttgtgttacttctgagcagcagtgtcaattccctccgaaaagcagcccatgaagctttgcaggattttcagaaatacaaaactctatggacagaagatcgagacgttaaagtgaaggaatttctggccaataacccttctctgaccgaaatacgctcagagattttgcactacgcgacctttgaacaggaaatcgatgaactgaagccaatcatagtcgtgggcgctctcgaactccatactgagcccatgaagctggctctttctattgaagccaaagcttggaagatgctactttgtcgctacctcaacgaagagtacaagaagaagatgtcctacatgattgcttttatcaacgagtacctcaaaaaattatcgcgaccaattagagacctcgacgacgtgcgattcgcaatggaggcactgtcttgtataagggataacgaaatacagatggatatgacactcgggcctattgaggaagcatacgcaatccttaatcgcttcgaagtcgaggtcaccaaagaggaatccgaggctgtagacactctgcgctacagttttaacaaattgcaatcaaaagccgtgtccgtgcaggaggacttggttcaagtgcagcccaaatttaagtcaaatttgctggaaagcgtggaagtgtttagggaggacgttataaactttgctgaagcctatgagctcgagggtccaatggttccaaacattcccccacaggaggcttcaaaccgcctgcagatcttccaagcaagcttcgacgatctctggaggaaattcgtgacgtatagttctggcgagcaactattcgggctgcctgtcaccgactatgaggtgcttcataaaacacggaaagaacttaatttgttacagaagctgtatggactttacgatacagtgatgagttccatatccggatattacgagattttgtggggggatgtggacatagaaaaaattaacgccgagctgttggagttccaaaacagatgccgcaagttgcccaaaggactgaaggactggcaggcgtttttggacctgaaaaagaggatcgacgacttcagcgaatcctgtcctctgttggaaatgatgaccaataaggctatgaagcagagacactgggaccggatctccgagttaacaggcaccccgttcgatgtggagtccgactcgttctgcctgaggaatatcatggaggcaccgctgctgaaacacaaagacgacatcgaggatatttgtatctccgcgataaaggaaaaggatattgaagcgaagctaacccaggtaatcgaaaattggacaaaccagaatctgtccttcgccgcttttaaagggaaaggggagcttctcctgaaggggactgagtctggagaaattattacccttatggaagactcgctaatggtgctggggtcattactatcaaaccggtacaatgccccattcaagaaaaacatacagaactgggtgtacaaattgtctacctcatcagacatcatagaggaatggttggtggttcagaacctttgggtctacctagaagccgtattcgttggcggtgatatcgccaaacagctcccgcaggaggcaaagcggtttcaaaatatcgataagtcatggatcaagatcatgcaacgcgcacacgaaaacccgaatgtgataaattgctgtgtgggcgacgaaaccatgggtcagctgttaccccacctgcatgagcagttggaggtatgtcagaagtcattgacaggctatctggaaaaaaaacgcctgctgtttccacgttttttcttcgtgagcgatcccgtactgcttgagatactaggccaagcatcagacagccacaccatacagccacatcttcccgctgttagtgacaatataaacgaggtgaccttccacgctaaagactacgataggatcatggccgttatttcacgagaaggggagaaaattgtgctggataacagcgtgatggctaagggacccgtagaaatctggctcctggacctgctgaagatgcaaatgagttcattacacaatattattagatccgccttttaccagatcagcgatagcggttttcagcttctgccgttcctgtctcattttccagctcaggtgggcctcctaggaattcaaatgttatggacacacgatagcgaagaagccctgcgcaatgctaaggatgaccgaaaaattatgcaagtcacgaatcagaagttcctggatattcttaacaccttaatttctcagaccacccacgacctctccaaattcgacagggtgaaatttgagaccctgataaccattcacgttcatcagcgggatatcttcgatgatctcgtcaagatgcacattaagtcacccacagactttgaatggctgaagcaaagccggttttacttcaaggaggatctggaccagaccgtcgttagcatcactgatgtggacttcatataccaaaatgaatttttggggtgcactgatcgccttgtcataacacctttgaccgaccgctgttatatcacactagcgcaggccctcggtatgaatatggggggtgccccagctggacccgctgggactgggaaaacggagactacgaaagatatgggcagatgcctgggaaaatacgtcgtcgtgttcaactgctcggatcagatggattttcggggtcttgggcgtatttttaagggactggcccagtctgggtcatggggatgtttcgatgagttcaatcgtatcgaacttcctgtgctgtccgtggccgctcagcagatctacattgtcctgacggctcggaaagagcgtaagaaacaattcattttctccgacggggactgtgtggacctgaatcccgagtttggcatcttcctaacgatgaaccccggatacgcaggcaggcaggaactgcctgagaatttaaagatacagttccgcacagtcgccatgatggtgccagataggcaaatcatcatgcgggttaaactagcttcctgcggatttctcgagaacgtgattcttgcacagaagttctatgtattgtacaaattgtgcgaggagcagctcactaagcaggtacattacgactttgggctgagaaacattctctcggtgttgcggactctcggttctcagaagcgggcacgccctgaagattctgagttgtcgatcgtcatgagaggcctcagggacatgaacctgagtaaacttgtggatgaagatgaacccttgtttctatccctgattaatgatctgttcccagggcttcagctcgacagcaatacctatgccgagctgcagaatgctgttgcgcatcaggtgcagattgagggcctaatcaatcaccccccttggaacctgaagttagtccaactttatgagaccagcttggtacggcatggcctgatgactttgggaccgtctggaagcggcaagaccacagtgatcacaatcctgatgaaagcccagacggagtgcggcaggccacatagagagatgcggatgaatcctaaagccattactgcaccacaaatgttcggtcgacttgacaccgcaactaatgactggacagatgggatcttcagcacactgtggaggaagaccctgaaagcaaagaaaggggagaatatattcctgattctggatgggccagtagatgccatctggatcgaaaacctcaattctgtccttgacgataacaaaaccttgacattggctaatggggaccggatcccaatggcaccatcttgcaaacttttatttgaggtacataacatagagaatgccagcccagccactgtcagcaggatgggaatggtctacatctcgagctccgcattatcatggagaccaatcctgcaggcctggctcaagaaacgcacagcccaggaggctgcagtgtttttaaccttgtacgaaaaggtgttcgaagacacttatacttacatgaagctgaacctcaacccgaaaatgcaactcctcgagtgcaactacattgtgcagagcctgaatctgctggagggcctgattccgagcaaggaggagggcggtgtatcatgtgtcgaacacctccataagctcttcgtgttcggcttgatgtggagcctcggcgctctgctcgaactggagagtcgcgagaaacttgaggcctttcttcggcagcacgagtcaaagctggatctgcctgagatcccaaaagggtcaaatcagactatgtacgaattttatgtgaccgactacggtgattgggagcactggaacaagaaacttcaaccgtattattaccctaccgattccatcccagaatacagcagcattctcgttcctaacgtcgacaatattcgaaccaattttctgatagacacaatagccaaacaacacaaggctgttctgctgacaggcgagcaaggcactgccaaaactgtgatggttaaagcttacttgaagaagtacgaccccgaggttcagcttagcaagtccctgaacttcagcagtgcaacagagcctatgatgttccagcgaacaattgagtcttatgttgacaaaagaattgggagtacctatggtcctcccggagggcgtaaaatgactgtgtttatcgatgacataaatatgcctgtcattaacgaatggggcgaccagattactaatgagatcgtgaggcagatgatggaaatggagggaatgtattctctcgacaagccgggagatttcaccacaattgtggatgtgcagctgattgcggctatgatacatcctggtgggggaaggaacgatatccctcagaggctcaagcgtcaatttactgtgttcaactgtacactcccttcaaacgcgagtattgataaaatctttggcattattggctgcgggtacttcgacccatgcaggagcttcaaaccccaaatctgtgaaatgattgttaatttggtgtcagtggggagggtgctgtggcaatggacaaaggtgaaaatgctgcctacaccgtcgaagttccactacatatttaaccttcgggaccttagtcgcatttggcagggaatgctgacaattaaggccgaggagtgtgcctcgatcccaaccctgctgagtttgtttaaacacgagtgttctcgcgtgatcgctgatcggttcattactcccgaagacgagcagtggttcaatgcgcacttaactcgcgctgtggaagagaatattgggtctgatgctgctagctgcattttgcctgagccttatttcgtcgactttcttagagaaatgcctgagccaacaggggacgagcccgaagattcagtttttgaggtcccaaagatatatgagctaatgcctagctttgacttcctagcggagaagctccagttctatcagagacagttcaacgagatcatcagaggcaccagtttggacttggtgttttttaaggacgcaatgacacacttgattaaaataagtagaattattcgtacttcttgtggcaatgcgttactggtgggtgtggggggatcggggaaacagtctttaagtagactcgccagctttatcgccggatatcagatattccagatcacactgactcgctcttacaacgtaacaaacctcactgatgacctaaaggccctttacaaggtagcaggcgcagacggtaagggtattacattcatttttactgactcagagattaaggatgaggcattcctcgagtatcttaacaacctgttgtcaagtggcgagatctccaacttgttcgcacgcgatgaaatggatgaaatcactcagggactcatctcagtgatgaaacgcgagcttcctcgacatccccctacatttgataacctctatgagtattttatttcacgcagcagaaagaatctccacgttgtcctttgttttagccccgtgggtgagaaatttagagcacgcagcctcaaattccccggtctcatttccgggtgcactatggattggttttctaggtggcctcgcgaggctctgatcgcggtggcatcttatttcctaagcgactacaacatcgtgtgttcctcagaaattaaacgacaagtagtagaaacaatgggtctatttcacgacatggttagcgagtcttgtgagtcatactttcagcgatacagaaggagggcccatgtgacccctaagagctacctcagctttatcaacggctacaaaaacatatatgccgagaaggttaaatttatcaatgaacaggcggagcgcatgaatatcgggctggataagttgatggaggcaagcgaatccgtagctaagctctcacaagatctcgccgtcaaggaaaaagaattagcggtggcgtcaatcaaagccgacgaagtgctggcagaggtcactgtctccgcacaggcctcggccaaaataaaaaacgaggtgcaagaggtgaaggataaagcacagaaaatcgttgatgaaatcgattccgagaaagtgaaggccgaatctaagctcgaagcggcaaaaccagctctagaggaggccgaggccgctctcaacactattaaacccaacgatatcgcgacagtaagaaagttagccaaacctccccatctgattatgcgcataatggactgcgtgctgcttctgtttcagaagaaaattgaccctgtcaccatggatccggagaagtcctgctgtaaacctagttggggagagtcactgaaactgatgtctgcgaccggttttctctggagtctgcaacaattccctaaggacaccattaacgaggaaaccgtagaactgttgcaaccgtatttcaacatggatgattacacgttcgaaagcgctaaaaaagtctgcgggaacgtggcgggtctgctttcttggactctggctatggcgatattctatggcatcaatagagaagtactgcccttgaaggccaacctagctaaacaggaggggaggctggccgtagccaacgccgagcttggcaaggcccaggccctgctggatgaaaagcaggctgagctggataaggtgcaagcgaaatttgacgccgctatgaacgagaaaatggacctgctgaatgacgctgacacatgccgtaaaaaaatgcaggccgcaagcacccttattgatggattgtccggcgagaagattcggtggacacagcagagcaaggagtttaaggcccagatcaatcggctggtcggtgacattcttttgtgtacgggtttcctgtcctacctagggcctttcaaccaaatttttcgaaactatctgcttaaagatcaatgggaaatggaattgcgcgctcggaaaataccattcaccgagaatctcaatcttattagcatgctggtcgaccctccaacgattggcgaatggggcctgcagggactccccggagacgacctcagcattcagaacggaattatcgtaaccaaggccaccagataccctctgctgatcgatcctcagacgcaaggcaagacttggattaaatcaaaggagaaagagaacgacctgcaagtcaccagtctaaatcataagtacttccgcactcacttggaagatagtctttctcttggtaggcctctgctcatcgaagatattcacgaggaattagatccagctcttgataatgtgctggaaaaaaattttatcaagagcgggacaacatttaaagttaaagttggcgacaaagaatgtgacatcatggacacctttaaactctatattaccaccaagttgcccaacccggcttttacccctgagatcaacgctaagacttcagtgattgactttacagtgacgatgaagggactcgaaaatcagctcctgaggcgggtcattctgacggagaagcaggaacttgaagccgagcgcgtgaagttgctggaggacgtgaccttcaacaaaaggaaaatgaaggagctcgaggataacttgctctataagctcagtgctacaaagggatcccttgtcgacgatgagtccctgattggtgtgctgaggacaacaaaacaaaccgctgcagaggtgagtgagaaactgcatgttgccgctgagactgaaattaagatcaacgccgcacaggaagagtttcgccctgcagcaactcgtggctcaattttatacttcctaattacggagatgagcatggtcaacataatgtatcaaacgagtctcgcacagttccttaaactctttgaccagtctatggccagatcagagaaatctcctctcccacagaagcgaattacaaacatcattgaatacctgacatacgaggtgttcacctatagcgtccgaggactgtacgaaaaccataagttcctttttgtgctgctgatgaccctcaaaatcgacttgcagaggggaaccgtaaagcatcgcgaattccaggccctgattaaaggtggcgcagccttagaccttaaggcttgtcctcccaagccgtaccggtggattctggacatgacgtggctcaatctggtggagctgtccaagctcccacaattcgcagagattatgaatcagatttcaagaaacgagaagggctggaagtcctggtttgataaggatgccccagaggaggaaatcattccggacgggtacaatgacagcctggatacatgccacaagttacttctgatccgcagttggtgtcctgaccggactgtctttcaggccagaaaatacatcgccgattctctcgaggagaagtataccgaacctgtcatcttaaacctggaaaaaacctgggaagaaagcgataccagaacccccttaatctgctttttgagcatgggcagcgacccaaccaatcagattgacgcactggcgaaaaaactgaaactggaatgtcgcacaattagtatgggtcaggggcaggaggtgcacgcacgtaagcttatccagatgtctatgcaacaggtttgcgacaagcgtctattactgcttcaacattattgctag

SEQ ID NO: 82765 - DNA, 14088 bp, Artificial Sequence
  derived and/or modified sequence
ggcgccgaggccccccccagcaccgaggaggccgccccccccagaagcgaggaggaggaggcccccagaccccccaccgtggaggcccccgccgaggacggcttcagccccagcgccgaggacgccgtgagcagcgtggtggactacagagacctgatccccagcgaggagggcatcgtgctgcccgacgaccacgaggccgacctgaacagagtgagacagagactggcccccagacccgtgcagagcgtgatcagcgaggtgctgagcctgcccagcagcagaagaagcagcagatacagaagaagcatgagcggcctgcccaacctgcaggagaccctgaaggagagacaggccagattcagagaggccagagagagcagaagactgaagatcgaccccagctacaagtacatcttcgagatcctggccgagaacctgggcctggacatcgtgaccgtggaggagctgatcctggactgccccagcctggaggccttcaccaacttcttcgccaaggacggctgcaagaccctgaagttcctgtaccaggagggcgacgtgcccggcatcgagtgcggcagaaccatcgccggcgccaccaagggcgccaagatgatgaagctgtacatcgacaacgccgcccccgacaagctgaagggcctgtgcatcttcttcgtgagatgcagaaacgacgtggccatcaacgtgaagaccatccaggaggaggccctgttcaccgtgctggacgccagcaagggcctgctgaacggcatcagagacatgctggccaacatcttcctgcccgccgtgctggccaccaacaactggggcgccctgaaccagagcaagcagggcgagagcgagaagcacatcttcaccgagaccatcaacagatacctgagcttcctggacggcgccagaatcagcatcgagggcaccgtgaagctgaagaccatcgacaacgtgaacttcagcaagctgcacaccttcgaggaggtgaccgccgccgccagcaacagcgagaccgtgcaccagctggaggaggtgctgatggtgtggtacaagcagatcgagcaggtgctgatcgagagcgagcagatgagaaaggaggccggcgacagcggccccctgaccgagctggagcactggaagagaatgagcgccaagttcaactacatcatcgagcagatcaagggccccagctgcaaggccgtgatcaacgtgctgaacgtggcccacagcaagctgctgaagaactggagagacctggacgccagaatcaccgacaccgccaacgagagcaaggacaacgtgagatacctgtacaccctggagaaggtgtgccagcccctgtacaaccacgacctggtgagcatggcccacggcatccagaacctgatcaacgccatcagaatgatccacggcgtgagcagatactacaacaccagcgagagaatgaccagcctgttcatcaaggtgaccaaccagatggtgaccgcctgcaaggcctacatcaccgacggcggcctgaaccacgtgtgggaccaggagacccccgtggtgctgaagaagatccaggactgcatcttcctgttcaaggagtaccaggccagcttccacaagaccagaaagctgatcagcgagagcagcggcgagaagagcttcgaggtgagcgagatgtacatcttcggcaagttcgaggccttctgcaagagactggagaagatcaccgagatgatcaccgtggtgcagacctacagcaccctgagcaacagcaccatcgagggcatcgacatcatggccatcaagttcagaaacatctaccagggcgtgaagaagaagcagtacgacatcctggaccccagaagaaccgagttcgacaccgacttcctggacttcatgaccaagatcaacggcctggaggtgcagatccaggccttcatgaacagcagcttcggcaagatcctgagcagccagcaggccctgcagctgctgcagagattccagaagctgaacatcccctgcctgggcctggagatcaaccacaccatcgagagaatcctgcagtactacgtggccgagctggacgccaccaagaagctgtaccacagccagaaggacgacccccccctggccagaaacatgccccccatcgccggcaagatcctgtgggtgagacagctgtacagaagaatcagcgagcccatcaactacttcttcaagaacagcgacatcctgagcagccccgacggcaaggccgtgatcagacagtacaacaagatcagctacgtgctggtggagttcgaggtggtgtaccacaccgcctggatcagagagatcagccagctgcactacgccctgcaggccaccctgttcgtgagacaccccgagaccggcaagctgctggtgaacttcgaccccaagatcctggaggtggtgagagagaccaagtgcatgatcaagatgaagctggacgtgcccgagcaggccaagagactgctgaagctggagagcaagctgaaggccgacaagctgtacctgcagggcctgctgcagtactacgacgagctgtgccaggaggtgcccagcgtgttcgtgaacctgatgacccccaagatgaagaaggtggagagcgtgctgagacagggcctgaccgtgctgacctggagcagcctgaccctggagagcttcttccaggaggtggagctggtgctggacatgttcaaccagctgctgaagaagatcagcgacctgtgcgagatgcacatcgacaccgtgctgaaggagatcgccaagaccgtgctgatcagcctgcccgagagcggcgccaccaaggtggaggacatgctgaccctgaacgagacctacaccaaggagtgggccgacatcctgaaccacaagagcaagcacgtggaggaggccgtgagagagctgatcagcatcttcgagcagatctacgaggtgaagtacaccggcaaggtgggcaagcagagcgagcagagaaagcacgtggtgttcggcagcgagaccggcgagggcgagaacaacgactacgaggccaacatcgtgaacgagttcgacacccacgacaaggaggacgagttcaagaaggagtgcaaggaggtgttcgccttcttcagccaccagctgctggacagcctgcagaaggccaccagactgagcctggacaccatgaagagaagaatcttcgtggccagcctgtacggcagaaagcagagcgaggacatcatcagcttcatcaagagcgaggtgcacctggccatccccaacgtggtgatgatccccagcctggacgacatccagcaggccatcaacagaatgatccagctgaccctggaggtgagcagaggcgtggcccactggggccagcagcagatcagacccatcaagagcgtgatccccagccccaccaccaccgacgtgacccaccagaacaccggcaagctgctgaagaaggaggagagaagcttcgaggaggccatccccgccagaaagctgaagaacttctaccccggcgtggccgagcacaaggacatcagcaagctggtgctgctgctgagcagcagcgtgaacagcctgagaaaggccgcccacgaggccctgcaggacttccagaagtacaagaccctgtggaccgaggacagagacgtgaaggtgaaggagttcctggccaacaaccccagcctgaccgagatcagaagcgagatcctgcactacgccaccttcgagcaggagatcgacgagctgaagcccatcatcgtggtgggcgccctggagctgcacaccgagcccatgaagctggccctgagcatcgaggccaaggcctggaagatgctgctgtgcagatacctgaacgaggagtacaagaagaagatgagctacatgatcgccttcatcaacgagtacctgaagaagctgagcagacccatcagagacctggacgacgtgagattcgccatggaggccctgagctgcatcagagacaacgagatccagatggacatgaccctgggccccatcgaggaggcctacgccatcctgaacagattcgaggtggaggtgaccaaggaggagagcgaggccgtggacaccctgagatacagcttcaacaagctgcagagcaaggccgtgagcgtgcaggaggacctggtgcaggtgcagcccaagttcaagagcaacctgctggagagcgtggaggtgttcagagaggacgtgatcaacttcgccgaggcctacgagctggagggccccatggtgcccaacatccccccccaggaggccagcaacagactgcagatcttccaggccagcttcgacgacctgtggagaaagttcgtgacctacagcagcggcgagcagctgttcggcctgcccgtgaccgactacgaggtgctgcacaagaccagaaaggagctgaacctgctgcagaagctgtacggcctgtacgacaccgtgatgagcagcatcagcggctactacgagatcctgtggggcgacgtggacatcgagaagatcaacgccgagctgctggagttccagaacagatgcagaaagctgcccaagggcctgaaggactggcaggccttcctggacctgaagaagagaatcgacgacttcagcgagagctgccccctgctggagatgatgaccaacaaggccatgaagcagagacactgggacagaatcagcgagctgaccggcacccccttcgacgtggagagcgacagcttctgcctgagaaacatcatggaggcccccctgctgaagcacaaggacgacatcgaggacatctgcatcagcgccatcaaggagaaggacatcgaggccaagctgacccaggtgatcgagaactggaccaaccagaacctgagcttcgccgccttcaagggcaagggcgagctgctgctgaagggcaccgagagcggcgagatcatcaccctgatggaggacagcctgatggtgctgggcagcctgctgagcaacagatacaacgcccccttcaagaagaacatccagaactgggtgtacaagctgagcaccagcagcgacatcatcgaggagtggctggtggtgcagaacctgtgggtgtacctggaggccgtgttcgtgggcggcgacatcgccaagcagctgccccaggaggccaagagattccagaacatcgacaagagctggatcaagatcatgcagagagcccacgagaaccccaacgtgatcaactgctgcgtgggcgacgagaccatgggccagctgctgccccacctgcacgagcagctggaggtgtgccagaagagcctgaccggctacctggagaagaagagactgctgttccccagattcttcttcgtgagcgaccccgtgctgctggagatcctgggccaggccagcgacagccacaccatccagccccacctgcccgccgtgagcgacaacatcaacgaggtgaccttccacgccaaggactacgacagaatcatggccgtgatcagcagagagggcgagaagatcgtgctggacaacagcgtgatggccaagggccccgtggagatctggctgctggacctgctgaagatgcagatgagcagcctgcacaacatcatcagaagcgccttctaccagatcagcgacagcggcttccagctgctgcccttcctgagccacttccccgcccaggtgggcctgctgggcatccagatgctgtggacccacgacagcgaggaggccctgagaaacgccaaggacgacagaaagatcatgcaggtgaccaaccagaagttcctggacatcctgaacaccctgatcagccagaccacccacgacctgagcaagttcgacagagtgaagttcgagaccctgatcaccatccacgtgcaccagagagacatcttcgacgacctggtgaagatgcacatcaagagccccaccgacttcgagtggctgaagcagagcagattctacttcaaggaggacctggaccagaccgtggtgagcatcaccgacgtggacttcatctaccagaacgagttcctgggctgcaccgacagactggtgatcacccccctgaccgacagatgctacatcaccctggcccaggccctgggcatgaacatgggcggcgcccccgccggccccgccggcaccggcaagaccgagaccaccaaggacatgggcagatgcctgggcaagtacgtggtggtgttcaactgcagcgaccagatggacttcagaggcctgggcagaatcttcaagggcctggcccagagcggcagctggggctgcttcgacgagttcaacagaatcgagctgcccgtgctgagcgtggccgcccagcagatctacatcgtgctgaccgccagaaaggagagaaagaagcagttcatcttcagcgacggcgactgcgtggacctgaaccccgagttcggcatcttcctgaccatgaaccccggctacgccggcagacaggagctgcccgagaacctgaagatccagttcagaaccgtggccatgatggtgcccgacagacagatcatcatgagagtgaagctggccagctgcggcttcctggagaacgtgatcctggcccagaagttctacgtgctgtacaagctgtgcgaggagcagctgaccaagcaggtgcactacgacttcggcctgagaaacatcctgagcgtgctgagaaccctgggcagccagaagagagccagacccgaggacagcgagctgagcatcgtgatgagaggcctgagagacatgaacctgagcaagctggtggacgaggacgagcccctgttcctgagcctgatcaacgacctgttccccggcctgcagctggacagcaacacctacgccgagctgcagaacgccgtggcccaccaggtgcagatcgagggcctgatcaaccaccccccctggaacctgaagctggtgcagctgtacgagaccagcctggtgagacacggcctgatgaccctgggccccagcggcagcggcaagaccaccgtgatcaccatcctgatgaaggcccagaccgagtgcggcagaccccacagagagatgagaatgaaccccaaggccatcaccgccccccagatgttcggcagactggacaccgccaccaacgactggaccgacggcatcttcagcaccctgtggagaaagaccctgaaggccaagaagggcgagaacatcttcctgatcctggacggccccgtggacgccatctggatcgagaacctgaacagcgtgctggacgacaacaagaccctgaccctggccaacggcgacagaatccccatggcccccagctgcaagctgctgttcgaggtgcacaacatcgagaacgccagccccgccaccgtgagcagaatgggcatggtgtacatcagcagcagcgccctgagctggagacccatcctgcaggcctggctgaagaagagaaccgcccaggaggccgccgtgttcctgaccctgtacgagaaggtgttcgaggacacctacacctacatgaagctgaacctgaaccccaagatgcagctgctggagtgcaactacatcgtgcagagcctgaacctgctggagggcctgatccccagcaaggaggagggcggcgtgagctgcgtggagcacctgcacaagctgttcgtgttcggcctgatgtggagcctgggcgccctgctggagctggagagcagagagaagctggaggccttcctgagacagcacgagagcaagctggacctgcccgagatccccaagggcagcaaccagaccatgtacgagttctacgtgaccgactacggcgactgggagcactggaacaagaagctgcagccctactactaccccaccgacagcatccccgagtacagcagcatcctggtgcccaacgtggacaacatcagaaccaacttcctgatcgacaccatcgccaagcagcacaaggccgtgctgctgaccggcgagcagggcaccgccaagaccgtgatggtgaaggcctacctgaagaagtacgaccccgaggtgcagctgagcaagagcctgaacttcagcagcgccaccgagcccatgatgttccagagaaccatcgagagctacgtggacaagagaatcggcagcacctacggcccccccggcggcagaaagatgaccgtgttcatcgacgacatcaacatgcccgtgatcaacgagtggggcgaccagatcaccaacgagatcgtgagacagatgatggagatggagggcatgtacagcctggacaagcccggcgacttcaccaccatcgtggacgtgcagctgatcgccgccatgatccaccccggcggcggcagaaacgacatcccccagagactgaagagacagttcaccgtgttcaactgcaccctgcccagcaacgccagcatcgacaagatcttcggcatcatcggctgcggctacttcgacccctgcagaagcttcaagccccagatctgcgagatgatcgtgaacctggtgagcgtgggcagagtgctgtggcagtggaccaaggtgaagatgctgcccacccccagcaagttccactacatcttcaacctgagagacctgagcagaatctggcagggcatgctgaccatcaaggccgaggagtgcgccagcatccccaccctgctgagcctgttcaagcacgagtgcagcagagtgatcgccgacagattcatcacccccgaggacgagcagtggttcaacgcccacctgaccagagccgtggaggagaacatcggcagcgacgccgccagctgcatcctgcccgagccctacttcgtggacttcctgagagagatgcccgagcccaccggcgacgagcccgaggacagcgtgttcgaggtgcccaagatctacgagctgatgcccagcttcgacttcctggccgagaagctgcagttctaccagagacagttcaacgagatcatcagaggcaccagcctggacctggtgttcttcaaggacgccatgacccacctgatcaagatcagcagaatcatcagaaccagctgcggcaacgccctgctggtgggcgtgggcggcagcggcaagcagagcctgagcagactggccagcttcatcgccggctaccagatcttccagatcaccctgaccagaagctacaacgtgaccaacctgaccgacgacctgaaggccctgtacaaggtggccggcgccgacggcaagggcatcaccttcatcttcaccgacagcgagatcaaggacgaggccttcctggagtacctgaacaacctgctgagcagcggcgagatcagcaacctgttcgccagagacgagatggacgagatcacccagggcctgatcagcgtgatgaagagagagctgcccagacacccccccaccttcgacaacctgtacgagtacttcatcagcagaagcagaaagaacctgcacgtggtgctgtgcttcagccccgtgggcgagaagttcagagccagaagcctgaagttccccggcctgatcagcggctgcaccatggactggttcagcagatggcccagagaggccctgatcgccgtggccagctacttcctgagcgactacaacatcgtgtgcagcagcgagatcaagagacaggtggtggagaccatgggcctgttccacgacatggtgagcgagagctgcgagagctacttccagagatacagaagaagagcccacgtgacccccaagagctacctgagcttcatcaacggctacaagaacatctacgccgagaaggtgaagttcatcaacgagcaggccgagagaatgaacatcggcctggacaagctgatggaggccagcgagagcgtggccaagctgagccaggacctggccgtgaaggagaaggagctggccgtggccagcatcaaggccgacgaggtgctggccgaggtgaccgtgagcgcccaggccagcgccaagatcaagaacgaggtgcaggaggtgaaggacaaggcccagaagatcgtggacgagatcgacagcgagaaggtgaaggccgagagcaagctggaggccgccaagcccgccctggaggaggccgaggccgccctgaacaccatcaagcccaacgacatcgccaccgtgagaaagctggccaagcccccccacctgatcatgagaatcatggactgcgtgctgctgctgttccagaagaagatcgaccccgtgaccatggaccccgagaagagctgctgcaagcccagctggggcgagagcctgaagctgatgagcgccaccggcttcctgtggagcctgcagcagttccccaaggacaccatcaacgaggagaccgtggagctgctgcagccctacttcaacatggacgactacaccttcgagagcgccaagaaggtgtgcggcaacgtggccggcctgctgagctggaccctggccatggccatcttctacggcatcaacagagaggtgctgcccctgaaggccaacctggccaagcaggagggcagactggccgtggccaacgccgagctgggcaaggcccaggccctgctggacgagaagcaggccgagctggacaaggtgcaggccaagttcgacgccgccatgaacgagaagatggacctgctgaacgacgccgacacctgcagaaagaagatgcaggccgccagcaccctgatcgacggcctgagcggcgagaagatcagatggacccagcagagcaaggagttcaaggcccagatcaacagactggtgggcgacatcctgctgtgcaccggcttcctgagctacctgggccccttcaaccagatcttcagaaactacctgctgaaggaccagtgggagatggagctgagagccagaaagatccccttcaccgagaacctgaacctgatcagcatgctggtggacccccccaccatcggcgagtggggcctgcagggcctgcccggcgacgacctgagcatccagaacggcatcatcgtgaccaaggccaccagataccccctgctgatcgacccccagacccagggcaagacctggatcaagagcaaggagaaggagaacgacctgcaggtgaccagcctgaaccacaagtacttcagaacccacctggaggacagcctgagcctgggcagacccctgctgatcgaggacatccacgaggagctggaccccgccctggacaacgtgctggagaagaacttcatcaagagcggcaccaccttcaaggtgaaggtgggcgacaaggagtgcgacatcatggacaccttcaagctgtacatcaccaccaagctgcccaaccccgccttcacccccgagatcaacgccaagaccagcgtgatcgacttcaccgtgaccatgaagggcctggagaaccagctgctgagaagagtgatcctgaccgagaagcaggagctggaggccgagagagtgaagctgctggaggacgtgaccttcaacaagagaaagatgaaggagctggaggacaacctgctgtacaagctgagcgccaccaagggcagcctggtggacgacgagagcctgatcggcgtgctgagaaccaccaagcagaccgccgccgaggtgagcgagaagctgcacgtggccgccgagaccgagatcaagatcaacgccgcccaggaggagttcagacccgccgccaccagaggcagcatcctgtacttcctgatcaccgagatgagcatggtgaacatcatgtaccagaccagcctggcccagttcctgaagctgttcgaccagagcatggccagaagcgagaagagccccctgccccagaagagaatcaccaacatcatcgagtacctgacctacgaggtgttcacctacagcgtgagaggcctgtacgagaaccacaagttcctgttcgtgctgctgatgaccctgaagatcgacctgcagagaggcaccgtgaagcacagagagttccaggccctgatcaagggcggcgccgccctggacctgaaggcctgcccccccaagccctacagatggatcctggacatgacctggctgaacctggtggagctgagcaagctgccccagttcgccgagatcatgaaccagatcagcagaaacgagaagggctggaagagctggttcgacaaggacgcccccgaggaggagatcatccccgacggctacaacgacagcctggacacctgccacaagctgctgctgatcagaagctggtgccccgacagaaccgtgttccaggccagaaagtacatcgccgacagcctggaggagaagtacaccgagcccgtgatcctgaacctggagaagacctgggaggagagcgacaccagaacccccctgatctgcttcctgagcatgggcagcgaccccaccaaccagatcgacgccctggccaagaagctgaagctggagtgcagaaccatcagcatgggccagggccaggaggtgcacgccagaaagctgatccagatgagcatgcagcagggcggctgggtgctgctgcagaactgccacctgggcctggagttcatggaggagctgctggagaccctgatcaccaccgaggccagcgacgacagcttcagagtgtggatcaccaccgagccccacgacagattccccatcaccctgctgcagaccagcctgaagttcaccaacgagcccccccagggcgtgagagccggcctgaagagaaccttcgccggcatcaaccaggacctgctggacatcagcaacctgcccatgtggaagcccatgctgtacaccgtggccttcctgcacagcaccgtgcaggagagaagaaagttcggccccctgggctggaacatcccctacgagttcaacagcgccgacttcagcgccagcgtgcagttcatccagaaccacctggacgagtgcgacatcaagaagggcgtgagctggaacaccgtgagatacatgatcggcgaggtgcagtacggcggcagagtgaccgacgacttcgacaagagactgctgaactgcttcgccagagtgtggttcagcgagaagatgttcgagcccagcttctgcttctacaccggctacaagatccccctgtgcaagaccctggaccagtacttcgagtacatccagagcctgcccagcctggacaaccccgaggtgttcggcctgcaccccaacgccgacatcacctaccagagcaacaccgccagcgccgtgctggagaccatcaccaacatccagcccaaggagagcggcggcggcgtgggcgagaccagagaggccatcgtgtacagactgagcgaggacatgctgagcaagctgccccccgactacatcccccacgaggtgaagagcagactgatcaagatgggccacctgaacagcatgaacatcttcctgagacaggagatcgacagaatgcagagagtgatcagcatcctgagaagcagcctgagcgacctgaagctggccatcgagggcaccatcatcatgagcgagaacctgagagacgccctggacaacatgtacgacgccagaatcccccagctgtggaagagagtgagctgggacagcagcaccctgggcttctggttcaccgagctgctggagagaaacgcccagttcagcacctggatcttcgagggcagacccaacgtgttctggatgaccggcttcttcaacccccagggcttcctgaccgccatgagacaggaggtgaccagagcccacaagggctgggccctggacaccgtgaccatccacaacgaggtgctgagacagaccaaggaggagatcaccagcccccccggcgagggcgtgtacatctacggcctgtacatggacggcgccgcctgggacagaagaaacggcaagctgatggagagcacccccaaggtgctgttcacccagctgcccgtgctgcacatcttcgccatcaacagcaccgcccccaaggaccccaagctgtacgtgtgccccatctacaagaagcccagaagaaccgacctgaccttcatcaccgtggtgtacctgagaaccgtgctgagccccgaccactggatcctgagaggcgtggccctgctgtgcgacatcaagtag

SEQ ID NO: 82766 - DNA, 13473 bp, Artificial Sequence
  derived and/or modified sequence
atgatgaagctgtacatcgacaacgccgcccccgacaagctgaagggcctgtgcatcttcttcgtgagatgcagaaacgacgtggccatcaacgtgaagaccatccaggaggaggccctgttcaccgtgctggacgccagcaagggcctgctgaacggcatcagagacatgctggccaacatcttcctgcccgccgtgctggccaccaacaactggggcgccctgaaccagagcaagcagggcgagagcgagaagcacatcttcaccgagaccatcaacagatacctgagcttcctggacggcgccagaatcagcatcgagggcaccgtgaagctgaagaccatcgacaacgtgaacttcagcaagctgcacaccttcgaggaggtgaccgccgccgccagcaacagcgagaccgtgcaccagctggaggaggtgctgatggtgtggtacaagcagatcgagcaggtgctgatcgagagcgagcagatgagaaaggaggccggcgacagcggccccctgaccgagctggagcactggaagagaatgagcgccaagttcaactacatcatcgagcagatcaagggccccagctgcaaggccgtgatcaacgtgctgaacgtggcccacagcaagctgctgaagaactggagagacctggacgccagaatcaccgacaccgccaacgagagcaaggacaacgtgagatacctgtacaccctggagaaggtgtgccagcccctgtacaaccacgacctggtgagcatggcccacggcatccagaacctgatcaacgccatcagaatgatccacggcgtgagcagatactacaacaccagcgagagaatgaccagcctgttcatcaaggtgaccaaccagatggtgaccgcctgcaaggcctacatcaccgacggcggcctgaaccacgtgtgggaccaggagacccccgtggtgctgaagaagatccaggactgcatcttcctgttcaaggagtaccaggccagcttccacaagaccagaaagctgatcagcgagagcagcggcgagaagagcttcgaggtgagcgagatgtacatcttcggcaagttcgaggccttctgcaagagactggagaagatcaccgagatgatcaccgtggtgcagacctacagcaccctgagcaacagcaccatcgagggcatcgacatcatggccatcaagttcagaaacatctaccagggcgtgaagaagaagcagtacgacatcctggaccccagaagaaccgagttcgacaccgacttcctggacttcatgaccaagatcaacggcctggaggtgcagatccaggccttcatgaacagcagcttcggcaagatcctgagcagccagcaggccctgcagctgctgcagagattccagaagctgaacatcccctgcctgggcctggagatcaaccacaccatcgagagaatcctgcagtactacgtggccgagctggacgccaccaagaagctgtaccacagccagaaggacgacccccccctggccagaaacatgccccccatcgccggcaagatcctgtgggtgagacagctgtacagaagaatcagcgagcccatcaactacttcttcaagaacagcgacatcctgagcagccccgacggcaaggccgtgatcagacagtacaacaagatcagctacgtgctggtggagttcgaggtggtgtaccacaccgcctggatcagagagatcagccagctgcactacgccctgcaggccaccctgttcgtgagacaccccgagaccggcaagctgctggtgaacttcgaccccaagatcctggaggtggtgagagagaccaagtgcatgatcaagatgaagctggacgtgcccgagcaggccaagagactgctgaagctggagagcaagctgaaggccgacaagctgtacctgcagggcctgctgcagtactacgacgagctgtgccaggaggtgcccagcgtgttcgtgaacctgatgacccccaagatgaagaaggtggagagcgtgctgagacagggcctgaccgtgctgacctggagcagcctgaccctggagagcttcttccaggaggtggagctggtgctggacatgttcaaccagctgctgaagaagatcagcgacctgtgcgagatgcacatcgacaccgtgctgaaggagatcgccaagaccgtgctgatcagcctgcccgagagcggcgccaccaaggtggaggacatgctgaccctgaacgagacctacaccaaggagtgggccgacatcctgaaccacaagagcaagcacgtggaggaggccgtgagagagctgatcagcatcttcgagcagatctacgaggtgaagtacaccggcaaggtgggcaagcagagcgagcagagaaagcacgtggtgttcggcagcgagaccggcgagggcgagaacaacgactacgaggccaacatcgtgaacgagttcgacacccacgacaaggaggacgagttcaagaaggagtgcaaggaggtgttcgccttcttcagccaccagctgctggacagcctgcagaaggccaccagactgagcctggacaccatgaagagaagaatcttcgtggccagcctgtacggcagaaagcagagcgaggacatcatcagcttcatcaagagcgaggtgcacctggccatccccaacgtggtgatgatccccagcctggacgacatccagcaggccatcaacagaatgatccagctgaccctggaggtgagcagaggcgtggcccactggggccagcagcagatcagacccatcaagagcgtgatccccagccccaccaccaccgacgtgacccaccagaacaccggcaagctgctgaagaaggaggagagaagcttcgaggaggccatccccgccagaaagctgaagaacttctaccccggcgtggccgagcacaaggacatcagcaagctggtgctgctgctgagcagcagcgtgaacagcctgagaaaggccgcccacgaggccctgcaggacttccagaagtacaagaccctgtggaccgaggacagagacgtgaaggtgaaggagttcctggccaacaaccccagcctgaccgagatcagaagcgagatcctgcactacgccaccttcgagcaggagatcgacgagctgaagcccatcatcgtggtgggcgccctggagctgcacaccgagcccatgaagctggccctgagcatcgaggccaaggcctggaagatgctgctgtgcagatacctgaacgaggagtacaagaagaagatgagctacatgatcgccttcatcaacgagtacctgaagaagctgagcagacccatcagagacctggacgacgtgagattcgccatggaggccctgagctgcatcagagacaacgagatccagatggacatgaccctgggccccatcgaggaggcctacgccatcctgaacagattcgaggtggaggtgaccaaggaggagagcgaggccgtggacaccctgagatacagcttcaacaagctgcagagcaaggccgtgagcgtgcaggaggacctggtgcaggtgcagcccaagttcaagagcaacctgctggagagcgtggaggtgttcagagaggacgtgatcaacttcgccgaggcctacgagctggagggccccatggtgcccaacatccccccccaggaggccagcaacagactgcagatcttccaggccagcttcgacgacctgtggagaaagttcgtgacctacagcagcggcgagcagctgttcggcctgcccgtgaccgactacgaggtgctgcacaagaccagaaaggagctgaacctgctgcagaagctgtacggcctgtacgacaccgtgatgagcagcatcagcggctactacgagatcctgtggggcgacgtggacatcgagaagatcaacgccgagctgctggagttccagaacagatgcagaaagctgcccaagggcctgaaggactggcaggccttcctggacctgaagaagagaatcgacgacttcagcgagagctgccccctgctggagatgatgaccaacaaggccatgaagcagagacactgggacagaatcagcgagctgaccggcacccccttcgacgtggagagcgacagcttctgcctgagaaacatcatggaggcccccctgctgaagcacaaggacgacatcgaggacatctgcatcagcgccatcaaggagaaggacatcgaggccaagctgacccaggtgatcgagaactggaccaaccagaacctgagcttcgccgccttcaagggcaagggcgagctgctgctgaagggcaccgagagcggcgagatcatcaccctgatggaggacagcctgatggtgctgggcagcctgctgagcaacagatacaacgcccccttcaagaagaacatccagaactgggtgtacaagctgagcaccagcagcgacatcatcgaggagtggctggtggtgcagaacctgtgggtgtacctggaggccgtgttcgtgggcggcgacatcgccaagcagctgccccaggaggccaagagattccagaacatcgacaagagctggatcaagatcatgcagagagcccacgagaaccccaacgtgatcaactgctgcgtgggcgacgagaccatgggccagctgctgccccacctgcacgagcagctggaggtgtgccagaagagcctgaccggctacctggagaagaagagactgctgttccccagattcttcttcgtgagcgaccccgtgctgctggagatcctgggccaggccagcgacagccacaccatccagccccacctgcccgccgtgagcgacaacatcaacgaggtgaccttccacgccaaggactacgacagaatcatggccgtgatcagcagagagggcgagaagatcgtgctggacaacagcgtgatggccaagggccccgtggagatctggctgctggacctgctgaagatgcagatgagcagcctgcacaacatcatcagaagcgccttctaccagatcagcgacagcggcttccagctgctgcccttcctgagccacttccccgcccaggtgggcctgctgggcatccagatgctgtggacccacgacagcgaggaggccctgagaaacgccaaggacgacagaaagatcatgcaggtgaccaaccagaagttcctggacatcctgaacaccctgatcagccagaccacccacgacctgagcaagttcgacagagtgaagttcgagaccctgatcaccatccacgtgcaccagagagacatcttcgacgacctggtgaagatgcacatcaagagccccaccgacttcgagtggctgaagcagagcagattctacttcaaggaggacctggaccagaccgtggtgagcatcaccgacgtggacttcatctaccagaacgagttcctgggctgcaccgacagactggtgatcacccccctgaccgacagatgctacatcaccctggcccaggccctgggcatgaacatgggcggcgcccccgccggccccgccggcaccggcaagaccgagaccaccaaggacatgggcagatgcctgggcaagtacgtggtggtgttcaactgcagcgaccagatggacttcagaggcctgggcagaatcttcaagggcctggcccagagcggcagctggggctgcttcgacgagttcaacagaatcgagctgcccgtgctgagcgtggccgcccagcagatctacatcgtgctgaccgccagaaaggagagaaagaagcagttcatcttcagcgacggcgactgcgtggacctgaaccccgagttcggcatcttcctgaccatgaaccccggctacgccggcagacaggagctgcccgagaacctgaagatccagttcagaaccgtggccatgatggtgcccgacagacagatcatcatgagagtgaagctggccagctgcggcttcctggagaacgtgatcctggcccagaagttctacgtgctgtacaagctgtgcgaggagcagctgaccaagcaggtgcactacgacttcggcctgagaaacatcctgagcgtgctgagaaccctgggcagccagaagagagccagacccgaggacagcgagctgagcatcgtgatgagaggcctgagagacatgaacctgagcaagctggtggacgaggacgagcccctgttcctgagcctgatcaacgacctgttccccggcctgcagctggacagcaacacctacgccgagctgcagaacgccgtggcccaccaggtgcagatcgagggcctgatcaaccaccccccctggaacctgaagctggtgcagctgtacgagaccagcctggtgagacacggcctgatgaccctgggccccagcggcagcggcaagaccaccgtgatcaccatcctgatgaaggcccagaccgagtgcggcagaccccacagagagatgagaatgaaccccaaggccatcaccgccccccagatgttcggcagactggacaccgccaccaacgactggaccgacggcatcttcagcaccctgtggagaaagaccctgaaggccaagaagggcgagaacatcttcctgatcctggacggccccgtggacgccatctggatcgagaacctgaacagcgtgctggacgacaacaagaccctgaccctggccaacggcgacagaatccccatggcccccagctgcaagctgctgttcgaggtgcacaacatcgagaacgccagccccgccaccgtgagcagaatgggcatggtgtacatcagcagcagcgccctgagctggagacccatcctgcaggcctggctgaagaagagaaccgcccaggaggccgccgtgttcctgaccctgtacgagaaggtgttcgaggacacctacacctacatgaagctgaacctgaaccccaagatgcagctgctggagtgcaactacatcgtgcagagcctgaacctgctggagggcctgatccccagcaaggaggagggcggcgtgagctgcgtggagcacctgcacaagctgttcgtgttcggcctgatgtggagcctgggcgccctgctggagctggagagcagagagaagctggaggccttcctgagacagcacgagagcaagctggacctgcccgagatccccaagggcagcaaccagaccatgtacgagttctacgtgaccgactacggcgactgggagcactggaacaagaagctgcagccctactactaccccaccgacagcatccccgagtacagcagcatcctggtgcccaacgtggacaacatcagaaccaacttcctgatcgacaccatcgccaagcagcacaaggccgtgctgctgaccggcgagcagggcaccgccaagaccgtgatggtgaaggcctacctgaagaagtacgaccccgaggtgcagctgagcaagagcctgaacttcagcagcgccaccgagcccatgatgttccagagaaccatcgagagctacgtggacaagagaatcggcagcacctacggcccccccggcggcagaaagatgaccgtgttcatcgacgacatcaacatgcccgtgatcaacgagtggggcgaccagatcaccaacgagatcgtgagacagatgatggagatggagggcatgtacagcctggacaagcccggcgacttcaccaccatcgtggacgtgcagctgatcgccgccatgatccaccccggcggcggcagaaacgacatcccccagagactgaagagacagttcaccgtgttcaactgcaccctgcccagcaacgccagcatcgacaagatcttcggcatcatcggctgcggctacttcgacccctgcagaagcttcaagccccagatctgcgagatgatcgtgaacctggtgagcgtgggcagagtgctgtggcagtggaccaaggtgaagatgctgcccacccccagcaagttccactacatcttcaacctgagagacctgagcagaatctggcagggcatgctgaccatcaaggccgaggagtgcgccagcatccccaccctgctgagcctgttcaagcacgagtgcagcagagtgatcgccgacagattcatcacccccgaggacgagcagtggttcaacgcccacctgaccagagccgtggaggagaacatcggcagcgacgccgccagctgcatcctgcccgagccctacttcgtggacttcctgagagagatgcccgagcccaccggcgacgagcccgaggacagcgtgttcgaggtgcccaagatctacgagctgatgcccagcttcgacttcctggccgagaagctgcagttctaccagagacagttcaacgagatcatcagaggcaccagcctggacctggtgttcttcaaggacgccatgacccacctgatcaagatcagcagaatcatcagaaccagctgcggcaacgccctgctggtgggcgtgggcggcagcggcaagcagagcctgagcagactggccagcttcatcgccggctaccagatcttccagatcaccctgaccagaagctacaacgtgaccaacctgaccgacgacctgaaggccctgtacaaggtggccggcgccgacggcaagggcatcaccttcatcttcaccgacagcgagatcaaggacgaggccttcctggagtacctgaacaacctgctgagcagcggcgagatcagcaacctgttcgccagagacgagatggacgagatcacccagggcctgatcagcgtgatgaagagagagctgcccagacacccccccaccttcgacaacctgtacgagtacttcatcagcagaagcagaaagaacctgcacgtggtgctgtgcttcagccccgtgggcgagaagttcagagccagaagcctgaagttccccggcctgatcagcggctgcaccatggactggttcagcagatggcccagagaggccctgatcgccgtggccagctacttcctgagcgactacaacatcgtgtgcagcagcgagatcaagagacaggtggtggagaccatgggcctgttccacgacatggtgagcgagagctgcgagagctacttccagagatacagaagaagagcccacgtgacccccaagagctacctgagcttcatcaacggctacaagaacatctacgccgagaaggtgaagttcatcaacgagcaggccgagagaatgaacatcggcctggacaagctgatggaggccagcgagagcgtggccaagctgagccaggacctggccgtgaaggagaaggagctggccgtggccagcatcaaggccgacgaggtgctggccgaggtgaccgtgagcgcccaggccagcgccaagatcaagaacgaggtgcaggaggtgaaggacaaggcccagaagatcgtggacgagatcgacagcgagaaggtgaaggccgagagcaagctggaggccgccaagcccgccctggaggaggccgaggccgccctgaacaccatcaagcccaacgacatcgccaccgtgagaaagctggccaagcccccccacctgatcatgagaatcatggactgcgtgctgctgctgttccagaagaagatcgaccccgtgaccatggaccccgagaagagctgctgcaagcccagctggggcgagagcctgaagctgatgagcgccaccggcttcctgtggagcctgcagcagttccccaaggacaccatcaacgaggagaccgtggagctgctgcagccctacttcaacatggacgactacaccttcgagagcgccaagaaggtgtgcggcaacgtggccggcctgctgagctggaccctggccatggccatcttctacggcatcaacagagaggtgctgcccctgaaggccaacctggccaagcaggagggcagactggccgtggccaacgccgagctgggcaaggcccaggccctgctggacgagaagcaggccgagctggacaaggtgcaggccaagttcgacgccgccatgaacgagaagatggacctgctgaacgacgccgacacctgcagaaagaagatgcaggccgccagcaccctgatcgacggcctgagcggcgagaagatcagatggacccagcagagcaaggagttcaaggcccagatcaacagactggtgggcgacatcctgctgtgcaccggcttcctgagctacctgggccccttcaaccagatcttcagaaactacctgctgaaggaccagtgggagatggagctgagagccagaaagatccccttcaccgagaacctgaacctgatcagcatgctggtggacccccccaccatcggcgagtggggcctgcagggcctgcccggcgacgacctgagcatccagaacggcatcatcgtgaccaaggccaccagataccccctgctgatcgacccccagacccagggcaagacctggatcaagagcaaggagaaggagaacgacctgcaggtgaccagcctgaaccacaagtacttcagaacccacctggaggacagcctgagcctgggcagacccctgctgatcgaggacatccacgaggagctggaccccgccctggacaacgtgctggagaagaacttcatcaagagcggcaccaccttcaaggtgaaggtgggcgacaaggagtgcgacatcatggacaccttcaagctgtacatcaccaccaagctgcccaaccccgccttcacccccgagatcaacgccaagaccagcgtgatcgacttcaccgtgaccatgaagggcctggagaaccagctgctgagaagagtgatcctgaccgagaagcaggagctggaggccgagagagtgaagctgctggaggacgtgaccttcaacaagagaaagatgaaggagctggaggacaacctgctgtacaagctgagcgccaccaagggcagcctggtggacgacgagagcctgatcggcgtgctgagaaccaccaagcagaccgccgccgaggtgagcgagaagctgcacgtggccgccgagaccgagatcaagatcaacgccgcccaggaggagttcagacccgccgccaccagaggcagcatcctgtacttcctgatcaccgagatgagcatggtgaacatcatgtaccagaccagcctggcccagttcctgaagctgttcgaccagagcatggccagaagcgagaagagccccctgccccagaagagaatcaccaacatcatcgagtacctgacctacgaggtgttcacctacagcgtgagaggcctgtacgagaaccacaagttcctgttcgtgctgctgatgaccctgaagatcgacctgcagagaggcaccgtgaagcacagagagttccaggccctgatcaagggcggcgccgccctggacctgaaggcctgcccccccaagccctacagatggatcctggacatgacctggctgaacctggtggagctgagcaagctgccccagttcgccgagatcatgaaccagatcagcagaaacgagaagggctggaagagctggttcgacaaggacgcccccgaggaggagatcatccccgacggctacaacgacagcctggacacctgccacaagctgctgctgatcagaagctggtgccccgacagaaccgtgttccaggccagaaagtacatcgccgacagcctggaggagaagtacaccgagcccgtgatcctgaacctggagaagacctgggaggagagcgacaccagaacccccctgatctgcttcctgagcatgggcagcgaccccaccaaccagatcgacgccctggccaagaagctgaagctggagtgcagaaccatcagcatgggccagggccaggaggtgcacgccagaaagctgatccagatgagcatgcagcagggcggctgggtgctgctgcagaactgccacctgggcctggagttcatggaggagctgctggagaccctgatcaccaccgaggccagcgacgacagcttcagagtgtggatcaccaccgagccccacgacagattccccatcaccctgctgcagaccagcctgaagttcaccaacgagcccccccagggcgtgagagccggcctgaagagaaccttcgccggcatcaaccaggacctgctggacatcagcaacctgcccatgtggaagcccatgctgtacaccgtggccttcctgcacagcaccgtgcaggagagaagaaagttcggccccctgggctggaacatcccctacgagttcaacagcgccgacttcagcgccagcgtgcagttcatccagaaccacctggacgagtgcgacatcaagaagggcgtgagctggaacaccgtgagatacatgatcggcgaggtgcagtacggcggcagagtgaccgacgacttcgacaagagactgctgaactgcttcgccagagtgtggttcagcgagaagatgttcgagcccagcttctgcttctacaccggctacaagatccccctgtgcaagaccctggaccagtacttcgagtacatccagagcctgcccagcctggacaaccccgaggtgttcggcctgcaccccaacgccgacatcacctaccagagcaacaccgccagcgccgtgctggagaccatcaccaacatccagcccaaggagagcggcggcggcgtgggcgagaccagagaggccatcgtgtacagactgagcgaggacatgctgagcaagctgccccccgactacatcccccacgaggtgaagagcagactgatcaagatgggccacctgaacagcatgaacatcttcctgagacaggagatcgacagaatgcagagagtgatcagcatcctgagaagcagcctgagcgacctgaagctggccatcgagggcaccatcatcatgagcgagaacctgagagacgccctggacaacatgtacgacgccagaatcccccagctgtggaagagagtgagctgggacagcagcaccctgggcttctggttcaccgagctgctggagagaaacgcccagttcagcacctggatcttcgagggcagacccaacgtgttctggatgaccggcttcttcaacccccagggcttcctgaccgccatgagacaggaggtgaccagagcccacaagggctgggccctggacaccgtgaccatccacaacgaggtgctgagacagaccaaggaggagatcaccagcccccccggcgagggcgtgtacatctacggcctgtacatggacggcgccgcctgggacagaagaaacggcaagctgatggagagcacccccaaggtgctgttcacccagctgcccgtgctgcacatcttcgccatcaacagcaccgcccccaaggaccccaagctgtacgtgtgccccatctacaagaagcccagaagaaccgacctgaccttcatcaccgtggtgtacctgagaaccgtgctgagccccgaccactggatcctgagaggcgtggccctgctgtgcgacatcaagtag

SEQ ID NO: 82767 - DNA, 12567 bp, Artificial Sequence
  derived and/or modified sequence
atggagaaggacgccgaggacggcgcccccagcgagggcgccgaggccccccccagcaccgaggaggccgccccccccagaagcgaggaggaggaggcccccagaccccccaccgtggaggcccccgccgaggacggcttcagccccagcgccgaggacgccgtgagcagcgtggtggactacagagacctgatccccagcgaggagggcatcgtgctgcccgacgaccacgaggccgacctgaacagagtgagacagagactggcccccagacccgtgcagagcgtgatcagcgaggtgctgagcctgcccagcagcagaagaagcagcagatacagaagaagcatgagcggcctgcccaacctgcaggagaccctgaaggagagacaggccagattcagagaggccagagagagcagaagactgaagatcgaccccagctacaagtacatcttcgagatcctggccgagaacctgggcctggacatcgtgaccgtggaggagctgatcctggactgccccagcctggaggccttcaccaacttcttcgccaaggacggctgcaagaccctgaagttcctgtaccaggagggcgacgtgcccggcatcgagtgcggcagaaccatcgccggcgccaccaagggcgccaagatgatgaagctgtacatcgacaacgccgcccccgacaagctgaagggcctgtgcatcttcttcgtgagatgcagaaacgacgtggccatcaacgtgaagaccatccaggaggaggccctgttcaccgtgctggacgccagcaagggcctgctgaacggcatcagagacatgctggccaacatcttcctgcccgccgtgctggccaccaacaactggggcgccctgaaccagagcaagcagggcgagagcgagaagcacatcttcaccgagaccatcaacagatacctgagcttcctggacggcgccagaatcagcatcgagggcaccgtgaagctgaagaccatcgacaacgtgaacttcagcaagctgcacaccttcgaggaggtgaccgccgccgccagcaacagcgagaccgtgcaccagctggaggaggtgctgatggtgtggtacaagcagatcgagcaggtgctgatcgagagcgagcagatgagaaaggaggccggcgacagcggccccctgaccgagctggagcactggaagagaatgagcgccaagttcaactacatcatcgagcagatcaagggccccagctgcaaggccgtgatcaacgtgctgaacgtggcccacagcaagctgctgaagaactggagagacctggacgccagaatcaccgacaccgccaacgagagcaaggacaacgtgagatacctgtacaccctggagaaggtgtgccagcccctgtacaaccacgacctggtgagcatggcccacggcatccagaacctgatcaacgccatcagaatgatccacggcgtgagcagatactacaacaccagcgagagaatgaccagcctgttcatcaaggtgaccaaccagatggtgaccgcctgcaaggcctacatcaccgacggcggcctgaaccacgtgtgggaccaggagacccccgtggtgctgaagaagatccaggactgcatcttcctgttcaaggagtaccaggccagcttccacaagaccagaaagctgatcagcgagagcagcggcgagaagagcttcgaggtgagcgagatgtacatcttcggcaagttcgaggccttctgcaagagactggagaagatcaccgagatgatcaccgtggtgcagacctacagcaccctgagcaacagcaccatcgagggcatcgacatcatggccatcaagttcagaaacatctaccagggcgtgaagaagaagcagtacgacatcctggaccccagaagaaccgagttcgacaccgacttcctggacttcatgaccaagatcaacggcctggaggtgcagatccaggccttcatgaacagcagcttcggcaagatcctgagcagccagcaggccctgcagctgctgcagagattccagaagctgaacatcccctgcctgggcctggagatcaaccacaccatcgagagaatcctgcagtactacgtggccgagctggacgccaccaagaagctgtaccacagccagaaggacgacccccccctggccagaaacatgccccccatcgccggcaagatcctgtgggtgagacagctgtacagaagaatcagcgagcccatcaactacttcttcaagaacagcgacatcctgagcagccccgacggcaaggccgtgatcagacagtacaacaagatcagctacgtgctggtggagttcgaggtggtgtaccacaccgcctggatcagagagatcagccagctgcactacgccctgcaggccaccctgttcgtgagacaccccgagaccggcaagctgctggtgaacttcgaccccaagatcctggaggtggtgagagagaccaagtgcatgatcaagatgaagctggacgtgcccgagcaggccaagagactgctgaagctggagagcaagctgaaggccgacaagctgtacctgcagggcctgctgcagtactacgacgagctgtgccaggaggtgcccagcgtgttcgtgaacctgatgacccccaagatgaagaaggtggagagcgtgctgagacagggcctgaccgtgctgacctggagcagcctgaccctggagagcttcttccaggaggtggagctggtgctggacatgttcaaccagctgctgaagaagatcagcgacctgtgcgagatgcacatcgacaccgtgctgaaggagatcgccaagaccgtgctgatcagcctgcccgagagcggcgccaccaaggtggaggacatgctgaccctgaacgagacctacaccaaggagtgggccgacatcctgaaccacaagagcaagcacgtggaggaggccgtgagagagctgatcagcatcttcgagcagatctacgaggtgaagtacaccggcaaggtgggcaagcagagcgagcagagaaagcacgtggtgttcggcagcgagaccggcgagggcgagaacaacgactacgaggccaacatcgtgaacgagttcgacacccacgacaaggaggacgagttcaagaaggagtgcaaggaggtgttcgccttcttcagccaccagctgctggacagcctgcagaaggccaccagactgagcctggacaccatgaagagaagaatcttcgtggccagcctgtacggcagaaagcagagcgaggacatcatcagcttcatcaagagcgaggtgcacctggccatccccaacgtggtgatgatccccagcctggacgacatccagcaggccatcaacagaatgatccagctgaccctggaggtgagcagaggcgtggcccactggggccagcagcagatcagacccatcaagagcgtgatccccagccccaccaccaccgacgtgacccaccagaacaccggcaagctgctgaagaaggaggagagaagcttcgaggaggccatccccgccagaaagctgaagaacttctaccccggcgtggccgagcacaaggacatcagcaagctggtgctgctgctgagcagcagcgtgaacagcctgagaaaggccgcccacgaggccctgcaggacttccagaagtacaagaccctgtggaccgaggacagagacgtgaaggtgaaggagttcctggccaacaaccccagcctgaccgagatcagaagcgagatcctgcactacgccaccttcgagcaggagatcgacgagctgaagcccatcatcgtggtgggcgccctggagctgcacaccgagcccatgaagctggccctgagcatcgaggccaaggcctggaagatgctgctgtgcagatacctgaacgaggagtacaagaagaagatgagctacatgatcgccttcatcaacgagtacctgaagaagctgagcagacccatcagagacctggacgacgtgagattcgccatggaggccctgagctgcatcagagacaacgagatccagatggacatgaccctgggccccatcgaggaggcctacgccatcctgaacagattcgaggtggaggtgaccaaggaggagagcgaggccgtggacaccctgagatacagcttcaacaagctgcagagcaaggccgtgagcgtgcaggaggacctggtgcaggtgcagcccaagttcaagagcaacctgctggagagcgtggaggtgttcagagaggacgtgatcaacttcgccgaggcctacgagctggagggccccatggtgcccaacatccccccccaggaggccagcaacagactgcagatcttccaggccagcttcgacgacctgtggagaaagttcgtgacctacagcagcggcgagcagctgttcggcctgcccgtgaccgactacgaggtgctgcacaagaccagaaaggagctgaacctgctgcagaagctgtacggcctgtacgacaccgtgatgagcagcatcagcggctactacgagatcctgtggggcgacgtggacatcgagaagatcaacgccgagctgctggagttccagaacagatgcagaaagctgcccaagggcctgaaggactggcaggccttcctggacctgaagaagagaatcgacgacttcagcgagagctgccccctgctggagatgatgaccaacaaggccatgaagcagagacactgggacagaatcagcgagctgaccggcacccccttcgacgtggagagcgacagcttctgcctgagaaacatcatggaggcccccctgctgaagcacaaggacgacatcgaggacatctgcatcagcgccatcaaggagaaggacatcgaggccaagctgacccaggtgatcgagaactggaccaaccagaacctgagcttcgccgccttcaagggcaagggcgagctgctgctgaagggcaccgagagcggcgagatcatcaccctgatggaggacagcctgatggtgctgggcagcctgctgagcaacagatacaacgcccccttcaagaagaacatccagaactgggtgtacaagctgagcaccagcagcgacatcatcgaggagtggctggtggtgcagaacctgtgggtgtacctggaggccgtgttcgtgggcggcgacatcgccaagcagctgccccaggaggccaagagattccagaacatcgacaagagctggatcaagatcatgcagagagcccacgagaaccccaacgtgatcaactgctgcgtgggcgacgagaccatgggccagctgctgccccacctgcacgagcagctggaggtgtgccagaagagcctgaccggctacctggagaagaagagactgctgttccccagattcttcttcgtgagcgaccccgtgctgctggagatcctgggccaggccagcgacagccacaccatccagccccacctgcccgccgtgagcgacaacatcaacgaggtgaccttccacgccaaggactacgacagaatcatggccgtgatcagcagagagggcgagaagatcgtgctggacaacagcgtgatggccaagggccccgtggagatctggctgctggacctgctgaagatgcagatgagcagcctgcacaacatcatcagaagcgccttctaccagatcagcgacagcggcttccagctgctgcccttcctgagccacttccccgcccaggtgggcctgctgggcatccagatgctgtggacccacgacagcgaggaggccctgagaaacgccaaggacgacagaaagatcatgcaggtgaccaaccagaagttcctggacatcctgaacaccctgatcagccagaccacccacgacctgagcaagttcgacagagtgaagttcgagaccctgatcaccatccacgtgcaccagagagacatcttcgacgacctggtgaagatgcacatcaagagccccaccgacttcgagtggctgaagcagagcagattctacttcaaggaggacctggaccagaccgtggtgagcatcaccgacgtggacttcatctaccagaacgagttcctgggctgcaccgacagactggtgatcacccccctgaccgacagatgctacatcaccctggcccaggccctgggcatgaacatgggcggcgcccccgccggccccgccggcaccggcaagaccgagaccaccaaggacatgggcagatgcctgggcaagtacgtggtggtgttcaactgcagcgaccagatggacttcagaggcctgggcagaatcttcaagggcctggcccagagcggcagctggggctgcttcgacgagttcaacagaatcgagctgcccgtgctgagcgtggccgcccagcagatctacatcgtgctgaccgccagaaaggagagaaagaagcagttcatcttcagcgacggcgactgcgtggacctgaaccccgagttcggcatcttcctgaccatgaaccccggctacgccggcagacaggagctgcccgagaacctgaagatccagttcagaaccgtggccatgatggtgcccgacagacagatcatcatgagagtgaagctggccagctgcggcttcctggagaacgtgatcctggcccagaagttctacgtgctgtacaagctgtgcgaggagcagctgaccaagcaggtgcactacgacttcggcctgagaaacatcctgagcgtgctgagaaccctgggcagccagaagagagccagacccgaggacagcgagctgagcatcgtgatgagaggcctgagagacatgaacctgagcaagctggtggacgaggacgagcccctgttcctgagcctgatcaacgacctgttccccggcctgcagctggacagcaacacctacgccgagctgcagaacgccgtggcccaccaggtgcagatcgagggcctgatcaaccaccccccctggaacctgaagctggtgcagctgtacgagaccagcctggtgagacacggcctgatgaccctgggccccagcggcagcggcaagaccaccgtgatcaccatcctgatgaaggcccagaccgagtgcggcagaccccacagagagatgagaatgaaccccaaggccatcaccgccccccagatgttcggcagactggacaccgccaccaacgactggaccgacggcatcttcagcaccctgtggagaaagaccctgaaggccaagaagggcgagaacatcttcctgatcctggacggccccgtggacgccatctggatcgagaacctgaacagcgtgctggacgacaacaagaccctgaccctggccaacggcgacagaatccccatggcccccagctgcaagctgctgttcgaggtgcacaacatcgagaacgccagccccgccaccgtgagcagaatgggcatggtgtacatcagcagcagcgccctgagctggagacccatcctgcaggcctggctgaagaagagaaccgcccaggaggccgccgtgttcctgaccctgtacgagaaggtgttcgaggacacctacacctacatgaagctgaacctgaaccccaagatgcagctgctggagtgcaactacatcgtgcagagcctgaacctgctggagggcctgatccccagcaaggaggagggcggcgtgagctgcgtggagcacctgcacaagctgttcgtgttcggcctgatgtggagcctgggcgccctgctggagctggagagcagagagaagctggaggccttcctgagacagcacgagagcaagctggacctgcccgagatccccaagggcagcaaccagaccatgtacgagttctacgtgaccgactacggcgactgggagcactggaacaagaagctgcagccctactactaccccaccgacagcatccccgagtacagcagcatcctggtgcccaacgtggacaacatcagaaccaacttcctgatcgacaccatcgccaagcagcacaaggccgtgctgctgaccggcgagcagggcaccgccaagaccgtgatggtgaaggcctacctgaagaagtacgaccccgaggtgcagctgagcaagagcctgaacttcagcagcgccaccgagcccatgatgttccagagaaccatcgagagctacgtggacaagagaatcggcagcacctacggcccccccggcggcagaaagatgaccgtgttcatcgacgacatcaacatgcccgtgatcaacgagtggggcgaccagatcaccaacgagatcgtgagacagatgatggagatggagggcatgtacagcctggacaagcccggcgacttcaccaccatcgtggacgtgcagctgatcgccgccatgatccaccccggcggcggcagaaacgacatcccccagagactgaagagacagttcaccgtgttcaactgcaccctgcccagcaacgccagcatcgacaagatcttcggcatcatcggctgcggctacttcgacccctgcagaagcttcaagccccagatctgcgagatgatcgtgaacctggtgagcgtgggcagagtgctgtggcagtggaccaaggtgaagatgctgcccacccccagcaagttccactacatcttcaacctgagagacctgagcagaatctggcagggcatgctgaccatcaaggccgaggagtgcgccagcatccccaccctgctgagcctgttcaagcacgagtgcagcagagtgatcgccgacagattcatcacccccgaggacgagcagtggttcaacgcccacctgaccagagccgtggaggagaacatcggcagcgacgccgccagctgcatcctgcccgagccctacttcgtggacttcctgagagagatgcccgagcccaccggcgacgagcccgaggacagcgtgttcgaggtgcccaagatctacgagctgatgcccagcttcgacttcctggccgagaagctgcagttctaccagagacagttcaacgagatcatcagaggcaccagcctggacctggtgttcttcaaggacgccatgacccacctgatcaagatcagcagaatcatcagaaccagctgcggcaacgccctgctggtgggcgtgggcggcagcggcaagcagagcctgagcagactggccagcttcatcgccggctaccagatcttccagatcaccctgaccagaagctacaacgtgaccaacctgaccgacgacctgaaggccctgtacaaggtggccggcgccgacggcaagggcatcaccttcatcttcaccgacagcgagatcaaggacgaggccttcctggagtacctgaacaacctgctgagcagcggcgagatcagcaacctgttcgccagagacgagatggacgagatcacccagggcctgatcagcgtgatgaagagagagctgcccagacacccccccaccttcgacaacctgtacgagtacttcatcagcagaagcagaaagaacctgcacgtggtgctgtgcttcagccccgtgggcgagaagttcagagccagaagcctgaagttccccggcctgatcagcggctgcaccatggactggttcagcagatggcccagagaggccctgatcgccgtggccagctacttcctgagcgactacaacatcgtgtgcagcagcgagatcaagagacaggtggtggagaccatgggcctgttccacgacatggtgagcgagagctgcgagagctacttccagagatacagaagaagagcccacgtgacccccaagagctacctgagcttcatcaacggctacaagaacatctacgccgagaaggtgaagttcatcaacgagcaggccgagagaatgaacatcggcctggacaagctgatggaggccagcgagagcgtggccaagctgagccaggacctggccgtgaaggagaaggagctggccgtggccagcatcaaggccgacgaggtgctggccgaggtgaccgtgagcgcccaggccagcgccaagatcaagaacgaggtgcaggaggtgaaggacaaggcccagaagatcgtggacgagatcgacagcgagaaggtgaaggccgagagcaagctggaggccgccaagcccgccctggaggaggccgaggccgccctgaacaccatcaagcccaacgacatcgccaccgtgagaaagctggccaagcccccccacctgatcatgagaatcatggactgcgtgctgctgctgttccagaagaagatcgaccccgtgaccatggaccccgagaagagctgctgcaagcccagctggggcgagagcctgaagctgatgagcgccaccggcttcctgtggagcctgcagcagttccccaaggacaccatcaacgaggagaccgtggagctgctgcagccctacttcaacatggacgactacaccttcgagagcgccaagaaggtgtgcggcaacgtggccggcctgctgagctggaccctggccatggccatcttctacggcatcaacagagaggtgctgcccctgaaggccaacctggccaagcaggagggcagactggccgtggccaacgccgagctgggcaaggcccaggccctgctggacgagaagcaggccgagctggacaaggtgcaggccaagttcgacgccgccatgaacgagaagatggacctgctgaacgacgccgacacctgcagaaagaagatgcaggccgccagcaccctgatcgacggcctgagcggcgagaagatcagatggacccagcagagcaaggagttcaaggcccagatcaacagactggtgggcgacatcctgctgtgcaccggcttcctgagctacctgggccccttcaaccagatcttcagaaactacctgctgaaggaccagtgggagatggagctgagagccagaaagatccccttcaccgagaacctgaacctgatcagcatgctggtggacccccccaccatcggcgagtggggcctgcagggcctgcccggcgacgacctgagcatccagaacggcatcatcgtgaccaaggccaccagataccccctgctgatcgacccccagacccagggcaagacctggatcaagagcaaggagaaggagaacgacctgcaggtgaccagcctgaaccacaagtacttcagaacccacctggaggacagcctgagcctgggcagacccctgctgatcgaggacatccacgaggagctggaccccgccctggacaacgtgctggagaagaacttcatcaagagcggcaccaccttcaaggtgaaggtgggcgacaaggagtgcgacatcatggacaccttcaagctgtacatcaccaccaagctgcccaaccccgccttcacccccgagatcaacgccaagaccagcgtgatcgacttcaccgtgaccatgaagggcctggagaaccagctgctgagaagagtgatcctgaccgagaagcaggagctggaggccgagagagtgaagctgctggaggacgtgaccttcaacaagagaaagatgaaggagctggaggacaacctgctgtacaagctgagcgccaccaagggcagcctggtggacgacgagagcctgatcggcgtgctgagaaccaccaagcagaccgccgccgaggtgagcgagaagctgcacgtggccgccgagaccgagatcaagatcaacgccgcccaggaggagttcagacccgccgccaccagaggcagcatcctgtacttcctgatcaccgagatgagcatggtgaacatcatgtaccagaccagcctggcccagttcctgaagctgttcgaccagagcatggccagaagcgagaagagccccctgccccagaagagaatcaccaacatcatcgagtacctgacctacgaggtgttcacctacagcgtgagaggcctgtacgagaaccacaagttcctgttcgtgctgctgatgaccctgaagatcgacctgcagagaggcaccgtgaagcacagagagttccaggccctgatcaagggcggcgccgccctggacctgaaggcctgcccccccaagccctacagatggatcctggacatgacctggctgaacctggtggagctgagcaagctgccccagttcgccgagatcatgaaccagatcagcagaaacgagaagggctggaagagctggttcgacaaggacgcccccgaggaggagatcatccccgacggctacaacgacagcctggacacctgccacaagctgctgctgatcagaagctggtgccccgacagaaccgtgttccaggccagaaagtacatcgccgacagcctggaggagaagtacaccgagcccgtgatcctgaacctggagaagacctgggaggagagcgacaccagaacccccctgatctgcttcctgagcatgggcagcgaccccaccaaccagatcgacgccctggccaagaagctgaagctggagtgcagaaccatcagcatgggccagggccaggaggtgcacgccagaaagctgatccagatgagcatgcagcaggtgtgcgacaagagactgctgctgctgcagcactactgctag

SEQ ID NO: 82768 - DNA, 14215 bp, Artificial Sequence
  derived and/or modified sequence
ggagcagaggctcctccctctacggaagaggctgcccctccccgttcagaagaggaagaggccccgcgccctccgacagtggaggccccggcagaagatggtttctctccttccgcagaagatgctgtttcttctgtggtggattatcgggatctcattccttctgaagaagggatagttcttccagatgatcatgaagcggatctgaatagagttcgacagaggcttgcaccgcgaccggttcagtcagtgatttcggaagtgctgtccttgccgtcttcccggaggtcctccagataccgccggagtatgagtggccttcccaatctacaggaaacattaaaagagagacaggcaagatttagagaggcaagggaaagccgaagactgaaaattgacccttcatacaaatatatatttgaaattctagcagaaaatcttggcctggacatagtaactgttgaagaattaattttggattgcccatctctggaagcatttactaatttttttgcgaaagatggttgtaagacactgaaatttttgtaccaagaaggagatgtacctggtattgaatgtggtcgaactattgctggagcaactaaaggggcaaaaatgatgaaattgtatatagacaatgcagccccggataaactaaaaggactgtgcatattttttgttcgttgccgtaatgatgttgctataaatgttaaaactattcaagaggaagcgctctttactgttctggatgcgtcgaaaggactcttaaatggaattagggatatgttggcaaatatatttctaccagctgttcttgcaacaaacaactggggtgctttaaaccagtccaagcagggagaatctgaaaaacatattttcactgaaaccatcaacagatatctttcatttttagatggtgctagaataagtattgagggaacagtgaagttaaagacaatagacaatgttaatttttccaaactgcacacctttgaagaagtaactgctgcagccagcaactcagaaactgttcatcagctggaggaagtgctgatggtatggtacaaacagatcgaacaggtacttattgagagtgagcagatgagaaaagaagctggtgattcaggtccactcactgaattggaacactggaaacgcatgtcagccaagttcaactatatcattgagcagattaaagggccaagttgtaaggctgtcataaatgtgctaaatgttgcacactccaaactgctaaagaattggcgtgatttggatgcaagaatcactgatacagcaaatgaatccaaagataatgtcagatatttgtatactttggaaaaagtgtgtcaacctctctataaccatgacctagtttccatggcacatggaatacaaaatttgattaatgccatcagaatgattcacggtgtgtcaaggtattataatacctcagagagaatgacctcattgtttatcaaggtaacaaatcaaatggtaacagcatgtaaagcatatattactgatggaggattaaaccatgtatgggatcaggaaacgccagttgtactaaagaaaattcaggactgcatttttctattcaaggaatatcaggcatcttttcataaaacaaggaaactgatttcagaatcctcaggggaaaaatcttttgaggtttcagaaatgtatatatttggaaaatttgaagctttttgcaaaagactggagaagattacagaaatgataactgttgtgcaaacatattcaaccttgagtaattctaccatagaaggaatagatattatggcaataaaattcagaaatatataccaaggggttaagaaaaagcaatatgacattctggatccaagaaggacagaatttgacacagatttcttagatttcatgacaaaaatcaatggtttagaggtacaaatacaggcatttatgaacagtagttttgggaaaatcttatcttctcagcaggctcttcagctacttcaaaggtttcagaagctgaacattccctgtctgggattagaaataaaccacacaatagagcgtattcttcagtactatgtggctgaacttgatgctactaagaagctttatcattctcagaaagatgacccccctcttgctcgcaacatgccccctatagcaggaaaaatactctgggtgaggcagctctatcgccggataagtgagcccatcaattatttctttaaaaactcagacattttatcaagtccggacggtaaagctgtcatccgtcagtataacaagatctcctatgtgctggtggaattcgaggtggtctatcacacagcctggatcagagagatttcacagttgcattacgctttacaagccacgctttttgtgcgacatccagaaacagggaagttgctggttaatttcgatcccaaaattttggaagttgttcgggaaactaagtgtatgataaaaatgaagttggatgtaccagaacaggcaaagagattgctaaaattggaaagtaaattgaaagcagacaaactgtatttgcagggtcttctgcaatattatgatgagttatgtcaggaagtgccttctgtgtttgtcaatctgatgaccccaaaaatgaaaaaggtggaatctgtgttgaggcaaggactcacagtgttaacatggtcgtctttaacactggaaagcttctttcaagaagtcgaattagttttggatatgttcaatcaacttttaaagaagatcagtgacttgtgtgaaatgcatattgatacagttctgaaggagatagccaaaactgtgttgatttctctgcctgaaagtggtgctaccaaagtagaagatatgttgaccctcaatgagacatacacaaaagaatgggctgacattctaaaccacaaaagtaagcatgtggaagaagctgtcagagaacttatatcaatatttgagcagatttatgaagtgaaatacactgggaaagtaggaaaacagtcagaacagcggaaacacgttgtttttggaagtgaaacaggagagggtgaaaacaatgactatgaagctaatattgtgaatgagtttgatactcatgataaagaagatgaatttaaaaaggagtgtaaagaggtctttgcttttttctctcatcaattactagacagtcttcaaaaagctacacggttatctctggacacaatgaaaagaagaatatttgttgcaagcctttatgggcgaaagcagtcagaagatattatttcctttataaaaagtgaagtacatcttgcaattcctaatgtggtgatgattcctagtttggatgacattcaacaagccattaaccgtatgatccagttaaccctggaggtcagcagaggagtggctcactgggggcaacagcaaatccgtcccatcaagtctgtcattcccagccccaccactactgacgtgacccatcaaaacacaggaaaactgctgaagaaggaagaaagatcttttgaagaagctattcctgcgaggaagctgaagaatttttacccgggggtagcggagcacaaggatatttctaagttggtcctgctcctttcttcctctgtaaattccctaagaaaggcagctcatgaggccctgcaggactttcagaagtacaagactctctggacagaggaccgcgatgtgaaagtgaaggaatttttggctaacaacccctctctgactgaaatcagatcagaaattctacactatgctacttttgaacaggagattgatgagttgaagcctattattgttgtaggagcacttgaattacatacagagccgatgaaattggccttatccatcgaggccaaggcatggaagatgttactctgtcgatatctgaatgaagaatacaaaaagaaaatgtcatacatgatagcatttattaatgaatacttgaaaaagttatctagacctattcgtgatttagatgatgtcagatttgcaatggaagccttgtcttgcatacgtgataatgaaattcaaatggacatgactttgggaccaattgaagaagcctatgctattttaaacagatttgaagttgaagtaaccaaagaagaatcagaagcagttgataccttaagatattctttcaacaaattgcagagcaaagctgtttcagtacaagaggacctagttcaagtgcagccaaagtttaaaagcaatctacttgagtctgtggaagtttttcgtgaggacgtgataaactttgcagaagcatatgaattggaaggacctatggttccaaatataccaccccaagaagctagcaacaggctacagatatttcaggccagtttcgatgatctgtggaggaaatttgttacgtattcatctggtgaacaactttttggattgcctgtgactgattatgaggttttacacaaaaccagaaaagaactcaacttgctgcagaagctgtatggattgtatgacaccgtaatgagcagtattagtggttattatgaaatactttggggagatgtagatattgaaaaaattaatgcagaactgctggaatttcaaaacagatgtcgtaaacttccaaaaggacttaaagattggcaagcttttttggatctcaaaaagagaattgatgatttcagtgagtcatgtcctctactggaaatgatgaccaataaggccatgaaacagagacactgggatagaatctccgagttaactggaaccccatttgatgtggaatctgattctttttgccttagaaatatcatggaagcaccactccttaaacataaggatgatattgaggatatttgcatatctgccattaaggagaaggatatcgaagccaagctgactcaggtgattgagaattggaccaaccaaaatctgagttttgcagcatttaagggaaaaggagagctcctgctcaaaggaaccgaatcgggagaaattatcactttgatggaggatagtttaatggtcttagggtctttactcagcaacagatacaatgctccatttaaaaaaaatatccagaattgggtgtataaattgtccacttcctcagatataattgaagagtggctcgtagtacagaacctttgggtttatcttgaagccgtctttgtaggtggagatattgccaaacagctgcctcaggaagcaaaacgttttcagaatattgacaagtcttggataaaaataatgcagcgagctcatgagaatcccaatgtgattaattgctgtgttggagatgaaaccatgggacaacttttacctcatttacatgagcagttggaagtatgtcagaagtcactcacagggtatttggagaagaaacgattactgtttccaagattcttctttgtatctgatccagttctcctggaaattcttggacaagccagtgattcccacaccatacagccgcatctccctgcagtatctgacaacatcaatgaggtgacatttcatgcaaaagactatgatcgcatcatggccgtcatatcaagagaaggagaaaaaattgttttggataattctgttatggccaaaggtcctgtggagatttggctactggatttgttaaaaatgcagatgtcatcattacataatataattagatccgctttctatcaaatcagtgattcaggatttcaactcttaccattcctcagccactttccagcacaggttggacttctgggaattcagatgttgtggacacacgattcagaagaggctttacgtaatgcaaaagatgacaggaaaatcatgcaagtgaccaatcagaaatttttggatattctaaatactctcattagtcagacaacacatgatctaagcaagtttgatagagtgaagttcgagactctaattaccatccatgtgcatcagagagatatttttgatgacttggtaaaaatgcatatcaaatcacctactgactttgaatggctaaaacagagtagattttattttaaggaagatttggatcaaactgtggtgtctattacagatgttgattttatttaccaaaatgaatttctgggatgtactgatcgtcttgttatcactccattaacagatagatgctatatcacgttagctcaggccttgggcatgaacatgggaggtgctcccgcaggacctgctggcactggcaaaacagaaaccacaaaagacatgggaaggtgtttgggaaaatatgtggtcgtgttcaattgctcagatcaaatggatttcagaggcctaggaaggattttcaaaggtcttgcacagtcgggttcctggggctgttttgatgagtttaacagaattgaattgcctgtattatcagtggcagcacaacaaatttatattgttttgacagcaagaaaagaaagaaagaaacagttcattttttctgatggtgattgtgttgatttaaatccagaatttggaatcttcttaacgatgaaccctggatatgctgggcgccaggaactaccagaaaacctaaaaatccagtttagaactgttgctatgatggttcctgatagacagatcattatgagagttaaacttgcaagctgtggttttcttgaaaatgttatcttggctcaaaaattttacgttctttacaaactctgtgaagagcaacttactaaacaggttcattatgactttggattgagaaatattctgtctgtattgaggactcttggatctcaaaaaagagccagaccagaagatagtgaattaagcattgtcatgagaggactaagagatatgaacctttccaaactggttgatgaagatgaacccctgttcctcagcttaatcaatgacctgttcccaggactgcaactggatagtaatacttatgcagaactgcaaaacgcagtagcccatcaggttcagatagagggtttgattaaccatccaccctggaacctgaaactcgtgcagttatatgagacgtctttggtacggcatggcttgatgactcttgggcccagtggttctggaaagacaaccgttatcacgattctaatgaaggcgcaaacagaatgcggaaggcctcatagagaaatgcgaatgaatccaaaagccattactgcacctcagatgtttggcagactggacactgctaccaatgactggacagatgggattttttctactctgtggagaaaaacattaaaagctaaaaaaggtgaaaacattttcctcattttagatggtcctgtggatgccatctggattgagaacttaaattccgttttggatgacaataaaactctgacgttagctaatggagatcgcattcccatggcccctagttgtaagcttctgtttgaagtccacaatatcgagaacgcctctcctgccacggtttctaggatgggcatggtctatatcagcagctctgctctcagctggaggccaatcttacaggcatggttgaagaaacgcactgcacaggaagctgctgtattcctgacactgtatgagaaagtctttgaagatacatacacatatatgaagctaaatctcaatcccaaaatgcagctcttggagtgcaactatattgtgcaatctctcaatcttctggaagggttaattccctccaaagaagaaggcggtgtttcctgtgtcgaacatcttcataaattatttgtgtttggcctaatgtggagtttaggagcccttctggaattagaaagcagagaaaagcttgaagccttcttacggcagcatgaaagcaagttggacttaccagaaatacctaaaggctcaaatcaaaccatgtatgagttttatgttactgattatggtgattgggagcactggaataagaaacttcagccttattattatccaactgacagtattccggaatattcatcaattttggttccaaatgttgacaatattagaacaaattttttgatagacaccattgcaaaacaacataaagctgttttgctcacaggagagcagggaactgcaaaaactgtcatggttaaggcctatttgaaaaaatatgatcctgaagtacagctatccaaaagtctaaacttttcatctgccacagaaccaatgatgtttcagagaacaattgaaagctacgtggataagcgaattggaagcacatatgggccaccaggagggagaaaaatgactgtatttattgatgatattaatatgcctgtgattaatgagtggggagatcagataactaatgagattgtgcgacagatgatggaaatggaaggaatgtacagcttggacaagcctggagacttcactactattgttgatgtgcagctcatagcagcaatgatccaccctggaggtggtcgaaatgatattccacaacgtttaaaaagacaatttactgtgtttaattgtacattgccttcaaatgcttcaatagacaaaatttttggaattattggatgtggatactttgatccttgtagaagtttcaagcctcaaatatgtgagatgattgtgaatttagtctcagtgggtagagtgctgtggcaatggactaaggtgaagatgctgccaactccttctaaatttcattacatcttcaatcttcgagatctttccagaatttggcaaggaatgttgaccataaaagctgaggagtgcgcttcaatccctactctcctgtcccttttcaaacacgagtgcagcagagtaattgcagacagatttataactcctgaagatgagcagtggtttaatgcacatcttactcgtgcagttgaagaaaatattggctctgatgcagcgtcgtgtattcttcctgaaccatactttgtggattttcttcgtgagatgccagaaccaactggtgatgaacctgaagactctgtgtttgaagtacccaaaatatatgaattgatgccatcctttgactttctggctgaaaaactccagttttaccagagacagttcaatgaaatcattagaggaacatctcttgatctggtgttttttaaagatgcaatgactcatcttattaagatttcacgaataattcgaacgtcgtgtggaaatgcattgctggtgggtgttggtggttccggaaaacaaagtctttcaagattggcctcttttattgctggctatcaaatattccagataacattaaccaggtcttacaatgtgactaatctaacagatgatttaaaagctttgtacaaagttgctggtgctgatggaaaaggcatcactttcatctttactgacagtgaaataaaagatgaggcatttctagaataccttaacaacttgctatcttcaggggagatctccaacttgtttgcacgagatgagatggatgaaatcacccaaggtctgatttcagtgatgaagagggagctacctcgccatcctcctacctttgataatttgtatgaatacttcatttcaagatcaaggaagaacttacatgttgttctctgcttttctccagttggtgagaagttccgtgcccgttctttgaaatttcctggcttgatatcaggttgcactatggactggttcagccgctggccaagggaggctctgattgctgtggcctcctacttcctttcagactataatattgtctgctctagtgaaattaaaagacaagttgtagaaacaatgggcctgtttcatgacatggtttcagagagctgtgaaagttatttccaaagataccgccgaagagcacatgtgactcccaaatcttacctctcatttataaatggttataaaaacatttatgctgaaaaggtgaagttcattaatgaacaggctgaacgtatgaatattggtcttgataaactaatggaggcaagtgaatctgttgctaaactctctcaggatcttgcagtcaaggagaaggagttggcagtggcttccataaaagcagacgaagtattagcagaagtcacagtaagcgctcaggcttcagccaaaattaaaaatgaagtacaggaggtaaaggacaaagcccaaaaaattgtggatgaaattgatagtgaaaaagtgaaagctgaaagcaagcttgaggcagctaaacctgcactggaagaagcagaagcagccctgaatactatcaagccaaatgatattgccacagtcaggaaacttgcaaaaccaccacatcttattatgagaatcatggactgtgttctgttactatttcaaaagaaaattgaccctgttactatggatccagaaaaatcttgctgtaagccatcatggggagagtcattaaagttgatgagtgcaacaggattcctgtggagccttcagcagttccctaaggacactataaatgaagagactgttgagttactacagccatattttaatatggatgattatacttttgaaagtgccaaaaaagtctgtgggaatgtggctggtctcctgtcttggacacttgctatggcaatattttatggcatcaatagagaagtgttgcctctgaaggccaacctggccaagcaggaaggccggttagcagttgctaatgctgagttagggaaggcacaagccctgctggatgagaagcaagctgagctggataaagtacaggcaaaatttgatgcagcaatgaatgagaaaatggatttgcttaatgacgctgatacgtgccggaaaaagatgcaggccgcctccactctcatcgatgggctgagtggagaaaaaatccggtggacccagcaaagtaaagaattcaaagctcagattaatagacttgtaggtgatattctgctgtgcacgggattcctttcctaccttggtcctttcaatcagatatttaggaactatttgcttaaagatcaatgggaaatggagttgagagcacggaaaattcctttcacagaaaacctgaatcttatttcaatgttggtggatcctccaactattggtgagtgggggctacagggattaccaggagatgatctctcaattcagaatggcattattgtgacaaaggccaccagatacccactcctcatagacccacaaactcaaggcaaaacttggattaaatcaaaggaaaaagaaaatgatttacaggtgacatctctgaaccataaatattttcgcacacacttggaggacagcctttccttgggccgaccccttctcattgaggacattcatgaagagctggatccagccttggataatgtattagaaaagaattttattaaatctggcaccactttcaaggtgaaagtcggtgataaggaatgtgatatcatggatacatttaaactttacattactacgaagttaccaaatcctgcctttaccccagagattaatgctaaaacgtcagtcattgatttcactgttacaatgaaaggacttgagaatcagttactaaggagagtcattctaacagagaaacaggagttagaggctgagagggttaaacttttggaggatgttacttttaataagcggaagatgaaagaacttgaagataacctcctctataaattaagtgctacaaaaggctcattggtagatgacgaatctctcattggtgtacttcgaactaccaagcagacagcagctgaggtaagtgaaaagttgcatgtggctgcagaaactgagatcaagatcaacgcggctcaggaggagttccggcccgcagccacccgcggaagcatcctctacttcctcatcacagagatgagcatggtcaacatcatgtatcagacgtcattggcccagttcttgaagttatttgaccagtccatggccagatctgaaaagtcaccactacctcaaaagagaattacaaatattatcgagtacctgacatatgaagtttttacatactctgtcagaggcctatacgaaaaccacaaattcctgtttgtactcctcatgaccttaaagattgaccttcagagagggacagttaagcacagagagtttcaagctctcattaaagggggagcagctctggacctgaaagcctgtcctcccaaaccctatcgctggatccttgacatgacttggctgaatcttgtggagctgagtaaacttccacaatttgcagaaattatgaaccagatatctcgtaatgagaaggggtggaaaagctggtttgataaagatgctccagaggaggaaattatccctgatggatataatgattcactagatacctgccataaacttttacttatcaggtcttggtgcccagaccgtactgtttttcaagcaagaaagtatattgcagattctttggaggagaagtacacagaaccagttatcttaaatctggagaaaacttgggaagaaagtgatacccggacacctctgatatgcttcctgtccatgggatctgaccccaccaatcaaattgatgcattggccaagaaactgaaactggaatgtagaactatctcaatggggcaaggacaagaagtacatgctcgaaagctgattcagatgtcaatgcagcagggtggttgggtattactacaaaattgccaccttggcctggaattcatggaagaattactagagacgctaattaccactgaagccagtgatgattctttccgagtatggataactacggagccccatgatcgatttccaattacattgcttcagacctctctcaaattcactaatgagccaccccaaggtgtacgcgcaggtttgaaaagaacatttgctggaattaatcaagaccttctggacatcagtaatttacccatgtggaagccgatgctttacacagtagcatttttacactccactgtgcaggagcgacgaaaatttggccccttaggatggaatattccctacgaattcaattctgctgacttttcagccagtgttcagtttattcagaatcaccttgatgaatgcgatattaagaaaggtgtatcatggaatacggttcggtacatgatcggagaagtacaatatggaggcagagtgacagatgactttgacaaacgtctacttaattgctttgccagagtctggttcagtgagaagatgtttgaaccgtcattctgcttttatactggatataaaatccccttatgcaaaaccttagaccagtattttgaatacatccagtcactgccatccctagataaccctgaagtctttgggcttcaccctaatgctgatatcacgtatcagagtaacactgcttctgctgttcttgaaacaattaccaacattcaacccaaagagagtggaggtggtgtgggagagacccgggaggctattgtttatagattatctgaagatatgctgagtaaactccctcctgattacattcctcatgaggtgaaatctcgtttgataaagatgggccatcttaattcaatgaacatatttcttagacaagaaattgacagaatgcaaagagtcatttcaatactccgcagtagcctgagtgatctaaaattggccattgaaggaacaatcattatgagtgagaatctgagagatgctctggacaacatgtatgatgctcgtatacctcagctctggaaaagagtgtcttgggattcgtccacactgggcttctggttcactgaacttttggaaagaaatgctcagttttctacgtggatatttgaagggaggcctaatgtgttttggatgactggtttctttaatccccaaggcttcctcacagcaatgaggcaagaagtgacccgtgcccacaaaggctgggcactggacactgtgaccatccacaatgaagttctgagacagaccaaggaggagatcacgtcaccccctggggaaggtgtgtatatttatgggctctacatggatggagcagcctgggacagacggaatgggaagctcatggaatccacccccaaggtactcttcacgcagttacccgtgctccacatctttgccattaactccacggcacccaaggaccccaagctgtatgtgtgtcctatttacaagaaacccaggcgaactgatttgaccttcatcactgtggtatatttacgaacagtgttgtccccggatcactggatcctgagaggagtggcccttttgtgtgacatcaagtaagttcatttccatctgctcagggcaccagaacccacatagacagcctgtgctattgagggactcagtgatgtgtgtgtcttttctccccagtaattccttaattactctttctacattaaaaagttga

SEQ ID NO: 82769 - DNA, 13860 bp, Artificial Sequence
  derived and/or modified sequence
tcttcccggaggtcctccagataccgccggagtatgagtggccttcccaatctacaggaaacattaaaagagagacaggcaagatttagagaggcaagggaaagccgaagactgaaaattgacccttcatacaaatatatatttgaaattctagcagaaaatcttggcctggacatagtaactgttgaagaattaattttggattgcccatctaatgtggtcgaactattgctggagcaactaaaggggcaaaaatgatgaaattgtatatagacaatgcagccccggataaactaaaaggactgtgcatattttttgttcgttgccgtaatgatgttgctataaatgttaaaactattcaagaggaagcgctctttactgttctggatgcgtcgaaaggactcttaaatggaattagggatatgttggcaaatatatttctaccagctgttcttgcaacaaacaactggggtgctttaaaccagtccaagcagggagaatctgaaaaacatattttcactgaaaccatcaacagatatctttcatttttagatggtgctagaataagtattgagggaacagtgaagttaaagacaatagacaatgttaatttttccaaactgcacacctttgaagaagtaactgctgcagccagcaactcagaaactgttcatcagctggaggaagtgctgatggtatggtacaaacagatcgaacaggtacttattgagagtgagcagatgagaaaagaagctggtgattcaggtccactcactgaattggaacactggaaacgcatgtcagccaagttcaactatatcattgagcagattaaagggccaagttgtaaggctgtcataaatgtgctaaatgttgcacactccaaactgctaaagaattggcgtgatttggatgcaagaatcactgatacagcaaatgaatccaaagataatgtcagatatttgtatactttggaaaaagtgtgtcaacctctctataaccatgacctagtttccatggcacatggaatacaaaatttgattaatgccatcagaatgattcacggtgtgtcaaggtattataatacctcagagagaatgacctcattgtttatcaaggtaacaaatcaaatggtaacagcatgtaaagcatatattactgatggaggattaaaccatgtatgggatcaggaaacgccagttgtactaaagaaaattcaggactgcatttttctattcaaggaatatcaggcatcttttcataaaacaaggaaactgatttcagaatcctcaggggaaaaatcttttgaggtttcagaaatgtatatatttggaaaatttgaagctttttgcaaaagactggagaagattacagaaatgataactgttgtgcaaacatattcaaccttgagtaattctaccatagaaggaatagatattatggcaataaaattcagaaatatataccaaggggttaagaaaaagcaatatgacattctggatccaagaaggacagaatttgacacagatttcttagatttcatgacaaaaatcaatggtttagaggtacaaatacaggcatttatgaacagtagttttgggaaaatcttatcttctcagcaggctcttcagctacttcaaaggtttcagaagctgaacattccctgtctgggattagaaataaaccacacaatagagcgtattcttcagtactatgtggctgaacttgatgctactaagaagctttatcattctcagaaagatgacccccctcttgctcgcaacatgccccctatagcaggaaaaatactctgggtgaggcagctctatcgccggataagtgagcccatcaattatttctttaaaaactcagacattttatcaagtccggacggtaaagctgtcatccgtcagtataacaagatctcctatgtgctggtggaattcgaggtggtctatcacacagcctggatcagagagatttcacagttgcattacgctttacaagccacgctttttgtgcgacatccagaaacagggaagttgctggttaatttcgatcccaaaattttggaagttgttcgggaaactaagtgtatgataaaaatgaagttggatgtaccagaacaggcaaagagattgctaaaattggaaagtaaattgaaagcagacaaactgtatttgcagggtcttctgcaatattatgatgagttatgtcaggaagtgccttctgtgtttgtcaatctgatgaccccaaaaatgaaaaaggtggaatctgtgttgaggcaaggactcacagtgttaacatggtcgtctttaacactggaaagcttctttcaagaagtcgaattagttttggatatgttcaatcaacttttaaagaagatcagtgacttgtgtgaaatgcatattgatacagttctgaaggagatagccaaaactgtgttgatttctctgcctgaaagtggtgctaccaaagtagaagatatgttgaccctcaatgagacatacacaaaagaatgggctgacattctaaaccacaaaagtaagcatgtggaagaagctgtcagagaacttatatcaatatttgagcagatttatgaagtgaaatacactgggaaagtaggaaaacagtcagaacagcggaaacacgttgtttttggaagtgaaacaggagagggtgaaaacaatgactatgaagctaatattgtgaatgagtttgatactcatgataaagaagatgaatttaaaaaggagtgtaaagaggtctttgcttttttctctcatcaattactagacagtcttcaaaaagctacacggttatctctggacacaatgaaaagaagaatatttgttgcaagcctttatgggcgaaagcagtcagaagatattatttcctttataaaaagtgaagtacatcttgcaattcctaatgtggtgatgattcctagtttggatgacattcaacaagccattaaccgtatgatccagttaaccctggaggtcagcagaggagtggctcactgggggcaacagcaaatccgtcccatcaagtctgtcattcccagccccaccactactgacgtgacccatcaaaacacaggaaaactgctgaagaaggaagaaagatcttttgaagaagctattcctgcgaggaagctgaagaatttttacccgggggtagcggagcacaaggatatttctaagttggtcctgctcctttcttcctctgtaaattccctaagaaaggcagctcatgaggccctgcaggactttcagaagtacaagactctctggacagaggaccgcgatgtgaaagtgaaggaatttttggctaacaacccctctctgactgaaatcagatcagaaattctacactatgctacttttgaacaggagattgatgagttgaagcctattattgttgtaggagcacttgaattacatacagagccgatgaaattggccttatccatcgaggccaaggcatggaagatgttactctgtcgatatctgaatgaagaatacaaaaagaaaatgtcatacatgatagcatttattaatgaatacttgaaaaagttatctagacctattcgtgatttagatgatgtcagatttgcaatggaagccttgtcttgcatacgtgataatgaaattcaaatggacatgactttgggaccaattgaagaagcctatgctattttaaacagatttgaagttgaagtaaccaaagaagaatcagaagcagttgataccttaagatattctttcaacaaattgcagagcaaagctgtttcagtacaagaggacctagttcaagtgcagccaaagtttaaaagcaatctacttgagtctgtggaagtttttcgtgaggacgtgataaactttgcagaagcatatgaattggaaggacctatggttccaaatataccaccccaagaagctagcaacaggctacagatatttcaggccagtttcgatgatctgtggaggaaatttgttacgtattcatctggtgaacaactttttggattgcctgtgactgattatgaggttttacacaaaaccagaaaagaactcaacttgctgcagaagctgtatggattgtatgacaccgtaatgagcagtattagtggttattatgaaatactttggggagatgtagatattgaaaaaattaatgcagaactgctggaatttcaaaacagatgtcgtaaacttccaaaaggacttaaagattggcaagcttttttggatctcaaaaagagaattgatgatttcagtgagtcatgtcctctactggaaatgatgaccaataaggccatgaaacagagacactgggatagaatctccgagttaactggaaccccatttgatgtggaatctgattctttttgccttagaaatatcatggaagcaccactccttaaacataaggatgatattgaggatatttgcatatctgccattaaggagaaggatatcgaagccaagctgactcaggtgattgagaattggaccaaccaaaatctgagttttgcagcatttaagggaaaaggagagctcctgctcaaaggaaccgaatcgggagaaattatcactttgatggaggatagtttaatggtcttagggtctttactcagcaacagatacaatgctccatttaaaaaaaatatccagaattgggtgtataaattgtccacttcctcagatataattgaagagtggctcgtagtacagaacctttgggtttatcttgaagccgtctttgtaggtggagatattgccaaacagctgcctcaggaagcaaaacgttttcagaatattgacaagtcttggataaaaataatgcagcgagctcatgagaatcccaatgtgattaattgctgtgttggagatgaaaccatgggacaacttttacctcatttacatgagcagttggaagtatgtcagaagtcactcacagggtatttggagaagaaacgattactgtttccaagattcttctttgtatctgatccagttctcctggaaattcttggacaagccagtgattcccacaccatacagccgcatctccctgcagtatctgacaacatcaatgaggtgacatttcatgcaaaagactatgatcgcatcatggccgtcatatcaagagaaggagaaaaaattgttttggataattctgttatggccaaaggtcctgtggagatttggctactggatttgttaaaaatgcagatgtcatcattacataatataattagatccgctttctatcaaatcagtgattcaggatttcaactcttaccattcctcagccactttccagcacaggttggacttctgggaattcagatgttgtggacacacgattcagaagaggctttacgtaatgcaaaagatgacaggaaaatcatgcaagtgaccaatcagaaatttttggatattctaaatactctcattagtcagacaacacatgatctaagcaagtttgatagagtgaagttcgagactctaattaccatccatgtgcatcagagagatatttttgatgacttggtaaaaatgcatatcaaatcacctactgactttgaatggctaaaacagagtagattttattttaaggaagatttggatcaaactgtggtgtctattacagatgttgattttatttaccaaaatgaatttctgggatgtactgatcgtcttgttatcactccattaacagatagatgctatatcacgttagctcaggccttgggcatgaacatgggaggtgctcccgcaggacctgctggcactggcaaaacagaaaccacaaaagacatgggaaggtgtttgggaaaatatgtggtcgtgttcaattgctcagatcaaatggatttcagaggcctaggaaggattttcaaaggtcttgcacagtcgggttcctggggctgttttgatgagtttaacagaattgaattgcctgtattatcagtggcagcacaacaaatttatattgttttgacagcaagaaaagaaagaaagaaacagttcattttttctgatggtgattgtgttgatttaaatccagaatttggaatcttcttaacgatgaaccctggatatgctgggcgccaggaactaccagaaaacctaaaaatccagtttagaactgttgctatgatggttcctgatagacagatcattatgagagttaaacttgcaagctgtggttttcttgaaaatgttatcttggctcaaaaattttacgttctttacaaactctgtgaagagcaacttactaaacaggttcattatgactttggattgagaaatattctgtctgtattgaggactcttggatctcaaaaaagagccagaccagaagatagtgaattaagcattgtcatgagaggactaagagatatgaacctttccaaactggttgatgaagatgaacccctgttcctcagcttaatcaatgacctgttcccaggactgcaactggatagtaatacttatgcagaactgcaaaacgcagtagcccatcaggttcagatagagggtttgattaaccatccaccctggaacctgaaactcgtgcagttatatgagacgtctttggtacggcatggcttgatgactcttgggcccagtggttctggaaagacaaccgttatcacgattctaatgaaggcgcaaacagaatgcggaaggcctcatagagaaatgcgaatgaatccaaaagccattactgcacctcagatgtttggcagactggacactgctaccaatgactggacagatgggattttttctactctgtggagaaaaacattaaaagctaaaaaaggtgaaaacattttcctcattttagatggtcctgtggatgccatctggattgagaacttaaattccgttttggatgacaataaaactctgacgttagctaatggagatcgcattcccatggcccctagttgtaagcttctgtttgaagtccacaatatcgagaacgcctctcctgccacggtttctaggatgggcatggtctatatcagcagctctgctctcagctggaggccaatcttacaggcatggttgaagaaacgcactgcacaggaagctgctgtattcctgacactgtatgagaaagtctttgaagatacatacacatatatgaagctaaatctcaatcccaaaatgcagctcttggagtgcaactatattgtgcaatctctcaatcttctggaagggttaattccctccaaagaagaaggcggtgtttcctgtgtcgaacatcttcataaattatttgtgtttggcctaatgtggagtttaggagcccttctggaattagaaagcagagaaaagcttgaagccttcttacggcagcatgaaagcaagttggacttaccagaaatacctaaaggctcaaatcaaaccatgtatgagttttatgttactgattatggtgattgggagcactggaataagaaacttcagccttattattatccaactgacagtattccggaatattcatcaattttggttccaaatgttgacaatattagaacaaattttttgatagacaccattgcaaaacaacataaagctgttttgctcacaggagagcagggaactgcaaaaactgtcatggttaaggcctatttgaaaaaatatgatcctgaagtacagctatccaaaagtctaaacttttcatctgccacagaaccaatgatgtttcagagaacaattgaaagctacgtggataagcgaattggaagcacatatgggccaccaggagggagaaaaatgactgtatttattgatgatattaatatgcctgtgattaatgagtggggagatcagataactaatgagattgtgcgacagatgatggaaatggaaggaatgtacagcttggacaagcctggagacttcactactattgttgatgtgcagctcatagcagcaatgatccaccctggaggtggtcgaaatgatattccacaacgtttaaaaagacaatttactgtgtttaattgtacattgccttcaaatgcttcaatagacaaaatttttggaattattggatgtggatactttgatccttgtagaagtttcaagcctcaaatatgtgagatgattgtgaatttagtctcagtgggtagagtgctgtggcaatggactaaggtgaagatgctgccaactccttctaaatttcattacatcttcaatcttcgagatctttccagaatttggcaaggaatgttgaccataaaagctgaggagtgcgcttcaatccctactctcctgtcccttttcaaacacgagtgcagcagagtaattgcagacagatttataactcctgaagatgagcagtggtttaatgcacatcttactcgtgcagttgaagaaaatattggctctgatgcagcgtcgtgtattcttcctgaaccatactttgtggattttcttcgtgagatgccagaaccaactggtgatgaacctgaagactctgtgtttgaagtacccaaaatatatgaattgatgccatcctttgactttctggctgaaaaactccagttttaccagagacagttcaatgaaatcattagaggaacatctcttgatctggtgttttttaaagatgcaatgactcatcttattaagatttcacgaataattcgaacgtcgtgtggaaatgcattgctggtgggtgttggtggttccggaaaacaaagtctttcaagattggcctcttttattgctggctatcaaatattccagataacattaaccaggtcttacaatgtgactaatctaacagatgatttaaaagctttgtacaaagttgctggtgctgatggaaaaggcatcactttcatctttactgacagtgaaataaaagatgaggcatttctagaataccttaacaacttgctatcttcaggggagatctccaacttgtttgcacgagatgagatggatgaaatcacccaaggtctgatttcagtgatgaagagggagctacctcgccatcctcctacctttgataatttgtatgaatacttcatttcaagatcaaggaagaacttacatgttgttctctgcttttctccagttggtgagaagttccgtgcccgttctttgaaatttcctggcttgatatcaggttgcactatggactggttcagccgctggccaagggaggctctgattgctgtggcctcctacttcctttcagactataatattgtctgctctagtgaaattaaaagacaagttgtagaaacaatgggcctgtttcatgacatggtttcagagagctgtgaaagttatttccaaagataccgccgaagagcacatgtgactcccaaatcttacctctcatttataaatggttataaaaacatttatgctgaaaaggtgaagttcattaatgaacaggctgaacgtatgaatattggtcttgataaactaatggaggcaagtgaatctgttgctaaactctctcaggatcttgcagtcaaggagaaggagttggcagtggcttccataaaagcagacgaagtattagcagaagtcacagtaagcgctcaggcttcagccaaaattaaaaatgaagtacaggaggtaaaggacaaagcccaaaaaattgtggatgaaattgatagtgaaaaagtgaaagctgaaagcaagcttgaggcagctaaacctgcactggaagaagcagaagcagccctgaatactatcaagccaaatgatattgccacagtcaggaaacttgcaaaaccaccacatcttattatgagaatcatggactgtgttctgttactatttcaaaagaaaattgaccctgttactatggatccagaaaaatcttgctgtaagccatcatggggagagtcattaaagttgatgagtgcaacaggattcctgtggagccttcagcagttccctaaggacactataaatgaagagactgttgagttactacagccatattttaatatggatgattatacttttgaaagtgccaaaaaagtctgtgggaatgtggctggtctcctgtcttggacacttgctatggcaatattttatggcatcaatagagaagtgttgcctctgaaggccaacctggccaagcaggaaggccggttagcagttgctaatgctgagttagggaaggcacaagccctgctggatgagaagcaagctgagctggataaagtacaggcaaaatttgatgcagcaatgaatgagaaaatggatttgcttaatgacgctgatacgtgccggaaaaagatgcaggccgcctccactctcatcgatgggctgagtggagaaaaaatccggtggacccagcaaagtaaagaattcaaagctcagattaatagacttgtaggtgatattctgctgtgcacgggattcctttcctaccttggtcctttcaatcagatatttaggaactatttgcttaaagatcaatgggaaatggagttgagagcacggaaaattcctttcacagaaaacctgaatcttatttcaatgttggtggatcctccaactattggtgagtgggggctacagggattaccaggagatgatctctcaattcagaatggcattattgtgacaaaggccaccagatacccactcctcatagacccacaaactcaaggcaaaacttggattaaatcaaaggaaaaagaaaatgatttacaggtgacatctctgaaccataaatattttcgcacacacttggaggacagcctttccttgggccgaccccttctcattgaggacattcatgaagagctggatccagccttggataatgtattagaaaagaattttattaaatctggcaccactttcaaggtgaaagtcggtgataaggaatgtgatatcatggatacatttaaactttacattactacgaagttaccaaatcctgcctttaccccagagattaatgctaaaacgtcagtcattgatttcactgttacaatgaaaggacttgagaatcagttactaaggagagtcattctaacagagaaacaggagttagaggctgagagggttaaacttttggaggatgttacttttaataagcggaagatgaaagaacttgaagataacctcctctataaattaagtgctacaaaaggctcattggtagatgacgaatctctcattggtgtacttcgaactaccaagcagacagcagctgaggtaagtgaaaagttgcatgtggctgcagaaactgagatcaagatcaacgcggctcaggaggagttccggcccgcagccacccgcggaagcatcctctacttcctcatcacagagatgagcatggtcaacatcatgtatcagacgtcattggcccagttcttgaagttatttgaccagtccatggccagatctgaaaagtcaccactacctcaaaagagaattacaaatattatcgagtacctgacatatgaagtttttacatactctgtcagaggcctatacgaaaaccacaaattcctgtttgtactcctcatgaccttaaagattgaccttcagagagggacagttaagcacagagagtttcaagctctcattaaagggggagcagctctggacctgaaagcctgtcctcccaaaccctatcgctggatccttgacatgacttggctgaatcttgtggagctgagtaaacttccacaatttgcagaaattatgaaccagatatctcgtaatgagaaggggtggaaaagctggtttgataaagatgctccagaggaggaaattatccctgatggatataatgattcactagatacctgccataaacttttacttatcaggtcttggtgcccagaccgtactgtttttcaagcaagaaagtatattgcagattctttggaggagaagtacacagaaccagttatcttaaatctggagaaaacttgggaagaaagtgatacccggacacctctgatatgcttcctgtccatgggatctgaccccaccaatcaaattgatgcattggccaagaaactgaaactggaatgtagaactatctcaatggggcaaggacaagaagtacatgctcgaaagctgattcagatgtcaatgcagcagggtggttgggtattactacaaaattgccaccttggcctggaattcatggaagaattactagagacgctaattaccactgaagccagtgatgattctttccgagtatggataactacggagccccatgatcgatttccaattacattgcttcagacctctctcaaattcactaatgagccaccccaaggtgtacgcgcaggtttgaaaagaacatttgctggaattaatcaagaccttctggacatcagtaatttacccatgtggaagccgatgctttacacagtagcatttttacactccactgtgcaggagcgacgaaaatttggccccttaggatggaatattccctacgaattcaattctgctgacttttcagccagtgttcagtttattcagaatcaccttgatgaatgcgatattaagaaaggtgtatcatggaatacggttcggtacatgatcggagaagtacaatatggaggcagagtgacagatgactttgacaaacgtctacttaattgctttgccagagtctggttcagtgagaagatgtttgaaccgtcattctgcttttatactggatataaaatccccttatgcaaaaccttagaccagtattttgaatacatccagtcactgccatccctagataaccctgaagtctttgggcttcaccctaatgctgatatcacgtatcagagtaacactgcttctgctgttcttgaaacaattaccaacattcaacccaaagagagtggaggtggtgtgggagagacccgggaggctattgtttatagattatctgaagatatgctgagtaaactccctcctgattacattcctcatgaggtgaaatctcgtttgataaagatgggccatcttaattcaatgaacatatttcttagacaagaaattgacagaatgcaaagagtcatttcaatactccgcagtagcctgagtgatctaaaattggccattgaaggaacaatcattatgagtgagaatctgagagatgctctggacaacatgtatgatgctcgtatacctcagctctggaaaagagtgtcttgggattcgtccacactgggcttctggttcactgaacttttggaaagaaatgctcagttttctacgtggatatttgaagggaggcctaatgtgttttggatgactggtttctttaatccccaaggcttcctcacagcaatgaggcaagaagtgacccgtgcccacaaaggctgggcactggacactgtgaccatccacaatgaagttctgagacagaccaaggaggagatcacgtcaccccctggggaaggtgtgtatatttatgggctctacatggatggagcagcctgggacagacggaatgggaagctcatggaatccacccccaaggtactcttcacgcagttacccgtgctccacatctttgccattaactccacggcacccaaggaccccaagctgtatgtgtgtcctatttacaagaaacccaggcgaactgatttgaccttcatcactgtggtatatttacgaacagtgttgtccccggatcactggatcctgagaggagtggcccttttgtgtgacatcaagtaagttcatttccatctgctcagggcaccagaacccacatagacagcctgtgctattgagggactcagtgatgtgtgtgtcttttctccccagtaattccttaattactctttctacattaaaaagttgatgttct

SEQ ID NO: 82770 - DNA, 13049 bp, Artificial Sequence
  derived and/or modified sequence
cccggggcagcgcaaccgctggggccggcctcagtgggctgagtggtcggggcatcggggcccagagagcggctggtttcgaagtataaagcattccgcacgacgggggatggagaaggatgctgaagatggcgccccttctgagggagcagaggctcctccctctacggaagaggctgcccctccccgttcagaagaggaagaggccccgcgccctccgacagtggaggccccggcagaagatggtttctctccttccgcagaagatgctgtttcttctgtggtggattatcgggatctcattccttctgaagaagggatagttcttccagatgatcatgaagcggatctgaatagagttcgacagaggcttgcaccgcgaccggttcagtcagtgatttcggaagtgctgtccttgccgtcttcccggaggtcctccagataccgccggagtatgagtggccttcccaatctacaggaaacattaaaagagagacaggcaagatttagagaggcaagggaaagccgaagactgaaaattgacccttcatacaaatatatatttgaaattctagcagaaaatcttggcctggacatagtaactgttgaagaattaattttggattgcccatctctggaagcatttactaatttttttgcgaaagatggttgtaagacactgaaatttttgtaccaagaaggagatgtacctggtattgaatgtggtcgaactattgctggagcaactaaaggggcaaaaatgatgaaattgtatatagacaatgcagccccggataaactaaaaggactgtgcatattttttgttcgttgccgtaatgatgttgctataaatgttaaaactattcaagaggaagcgctctttactgttctggatgcgtcgaaaggactcttaaatggaattagggatatgttggcaaatatatttctaccagctgttcttgcaacaaacaactggggtgctttaaaccagtccaagcagggagaatctgaaaaacatattttcactgaaaccatcaacagatatctttcatttttagatggtgctagaataagtattgagggaacagtgaagttaaagacaatagacaatgttaatttttccaaactgcacacctttgaagaagtaactgctgcagccagcaactcagaaactgttcatcagctggaggaagtgctgatggtatggtacaaacagatcgaacaggtacttattgagagtgagcagatgagaaaagaagctggtgattcaggtccactcactgaattggaacactggaaacgcatgtcagccaagttcaactatatcattgagcagattaaagggccaagttgtaaggctgtcataaatgtgctaaatgttgcacactccaaactgctaaagaattggcgtgatttggatgcaagaatcactgatacagcaaatgaatccaaagataatgtcagatatttgtatactttggaaaaagtgtgtcaacctctctataaccatgacctagtttccatggcacatggaatacaaaatttgattaatgccatcagaatgattcacggtgtgtcaaggtattataatacctcagagagaatgacctcattgtttatcaaggtaacaaatcaaatggtaacagcatgtaaagcatatattactgatggaggattaaaccatgtatgggatcaggaaacgccagttgtactaaagaaaattcaggactgcatttttctattcaaggaatatcaggcatcttttcataaaacaaggaaactgatttcagaatcctcaggggaaaaatcttttgaggtttcagaaatgtatatatttggaaaatttgaagctttttgcaaaagactggagaagattacagaaatgataactgttgtgcaaacatattcaaccttgagtaattctaccatagaaggaatagatattatggcaataaaattcagaaatatataccaaggggttaagaaaaagcaatatgacattctggatccaagaaggacagaatttgacacagatttcttagatttcatgacaaaaatcaatggtttagaggtacaaatacaggcatttatgaacagtagttttgggaaaatcttatcttctcagcaggctcttcagctacttcaaaggtttcagaagctgaacattccctgtctgggattagaaataaaccacacaatagagcgtattcttcagtactatgtggctgaacttgatgctactaagaagctttatcattctcagaaagatgacccccctcttgctcgcaacatgccccctatagcaggaaaaatactctgggtgaggcagctctatcgccggataagtgagcccatcaattatttctttaaaaactcagacattttatcaagtccggacggtaaagctgtcatccgtcagtataacaagatctcctatgtgctggtggaattcgaggtggtctatcacacagcctggatcagagagatttcacagttgcattacgctttacaagccacgctttttgtgcgacatccagaaacagggaagttgctggttaatttcgatcccaaaattttggaagttgttcgggaaactaagtgtatgataaaaatgaagttggatgtaccagaacaggcaaagagattgctaaaattggaaagtaaattgaaagcagacaaactgtatttgcagggtcttctgcaatattatgatgagttatgtcaggaagtgccttctgtgtttgtcaatctgatgaccccaaaaatgaaaaaggtggaatctgtgttgaggcaaggactcacagtgttaacatggtcgtctttaacactggaaagcttctttcaagaagtcgaattagttttggatatgttcaatcaacttttaaagaagatcagtgacttgtgtgaaatgcatattgatacagttctgaaggagatagccaaaactgtgttgatttctctgcctgaaagtggtgctaccaaagtagaagatatgttgaccctcaatgagacatacacaaaagaatgggctgacattctaaaccacaaaagtaagcatgtggaagaagctgtcagagaacttatatcaatatttgagcagatttatgaagtgaaatacactgggaaagtaggaaaacagtcagaacagcggaaacacgttgtttttggaagtgaaacaggagagggtgaaaacaatgactatgaagctaatattgtgaatgagtttgatactcatgataaagaagatgaatttaaaaaggagtgtaaagaggtctttgcttttttctctcatcaattactagacagtcttcaaaaagctacacggttatctctggacacaatgaaaagaagaatatttgttgcaagcctttatgggcgaaagcagtcagaagatattatttcctttataaaaagtgaagtacatcttgcaattcctaatgtggtgatgattcctagtttggatgacattcaacaagccattaaccgtatgatccagttaaccctggaggtcagcagaggagtggctcactgggggcaacagcaaatccgtcccatcaagtctgtcattcccagccccaccactactgacgtgacccatcaaaacacaggaaaactgctgaagaaggaagaaagatcttttgaagaagctattcctgcgaggaagctgaagaatttttacccgggggtagcggagcacaaggatatttctaagttggtcctgctcctttcttcctctgtaaattccctaagaaaggcagctcatgaggccctgcaggactttcagaagtacaagactctctggacagaggaccgcgatgtgaaagtgaaggaatttttggctaacaacccctctctgactgaaatcagatcagaaattctacactatgctacttttgaacaggagattgatgagttgaagcctattattgttgtaggagcacttgaattacatacagagccgatgaaattggccttatccatcgaggccaaggcatggaagatgttactctgtcgatatctgaatgaagaatacaaaaagaaaatgtcatacatgatagcatttattaatgaatacttgaaaaagttatctagacctattcgtgatttagatgatgtcagatttgcaatggaagccttgtcttgcatacgtgataatgaaattcaaatggacatgactttgggaccaattgaagaagcctatgctattttaaacagatttgaagttgaagtaaccaaagaagaatcagaagcagttgataccttaagatattctttcaacaaattgcagagcaaagctgtttcagtacaagaggacctagttcaagtgcagccaaagtttaaaagcaatctacttgagtctgtggaagtttttcgtgaggacgtgataaactttgcagaagcatatgaattggaaggacctatggttccaaatataccaccccaagaagctagcaacaggctacagatatttcaggccagtttcgatgatctgtggaggaaatttgttacgtattcatctggtgaacaactttttggattgcctgtgactgattatgaggttttacacaaaaccagaaaagaactcaacttgctgcagaagctgtatggattgtatgacaccgtaatgagcagtattagtggttattatgaaatactttggggagatgtagatattgaaaaaattaatgcagaactgctggaatttcaaaacagatgtcgtaaacttccaaaaggacttaaagattggcaagcttttttggatctcaaaaagagaattgatgatttcagtgagtcatgtcctctactggaaatgatgaccaataaggccatgaaacagagacactgggatagaatctccgagttaactggaaccccatttgatgtggaatctgattctttttgccttagaaatatcatggaagcaccactccttaaacataaggatgatattgaggatatttgcatatctgccattaaggagaaggatatcgaagccaagctgactcaggtgattgagaattggaccaaccaaaatctgagttttgcagcatttaagggaaaaggagagctcctgctcaaaggaaccgaatcgggagaaattatcactttgatggaggatagtttaatggtcttagggtctttactcagcaacagatacaatgctccatttaaaaaaaatatccagaattgggtgtataaattgtccacttcctcagatataattgaagagtggctcgtagtacagaacctttgggtttatcttgaagccgtctttgtaggtggagatattgccaaacagctgcctcaggaagcaaaacgttttcagaatattgacaagtcttggataaaaataatgcagcgagctcatgagaatcccaatgtgattaattgctgtgttggagatgaaaccatgggacaacttttacctcatttacatgagcagttggaagtatgtcagaagtcactcacagggtatttggagaagaaacgattactgtttccaagattcttctttgtatctgatccagttctcctggaaattcttggacaagccagtgattcccacaccatacagccgcatctccctgcagtatctgacaacatcaatgaggtgacatttcatgcaaaagactatgatcgcatcatggccgtcatatcaagagaaggagaaaaaattgttttggataattctgttatggccaaaggtcctgtggagatttggctactggatttgttaaaaatgcagatgtcatcattacataatataattagatccgctttctatcaaatcagtgattcaggatttcaactcttaccattcctcagccactttccagcacaggttggacttctgggaattcagatgttgtggacacacgattcagaagaggctttacgtaatgcaaaagatgacaggaaaatcatgcaagtgaccaatcagaaatttttggatattctaaatactctcattagtcagacaacacatgatctaagcaagtttgatagagtgaagttcgagactctaattaccatccatgtgcatcagagagatatttttgatgacttggtaaaaatgcatatcaaatcacctactgactttgaatggctaaaacagagtagattttattttaaggaagatttggatcaaactgtggtgtctattacagatgttgattttatttaccaaaatgaatttctgggatgtactgatcgtcttgttatcactccattaacagatagatgctatatcacgttagctcaggccttgggcatgaacatgggaggtgctcccgcaggacctgctggcactggcaaaacagaaaccacaaaagacatgggaaggtgtttgggaaaatatgtggtcgtgttcaattgctcagatcaaatggatttcagaggcctaggaaggattttcaaaggtcttgcacagtcgggttcctggggctgttttgatgagtttaacagaattgaattgcctgtattatcagtggcagcacaacaaatttatattgttttgacagcaagaaaagaaagaaagaaacagttcattttttctgatggtgattgtgttgatttaaatccagaatttggaatcttcttaacgatgaaccctggatatgctgggcgccaggaactaccagaaaacctaaaaatccagtttagaactgttgctatgatggttcctgatagacagatcattatgagagttaaacttgcaagctgtggttttcttgaaaatgttatcttggctcaaaaattttacgttctttacaaactctgtgaagagcaacttactaaacaggttcattatgactttggattgagaaatattctgtctgtattgaggactcttggatctcaaaaaagagccagaccagaagatagtgaattaagcattgtcatgagaggactaagagatatgaacctttccaaactggttgatgaagatgaacccctgttcctcagcttaatcaatgacctgttcccaggactgcaactggatagtaatacttatgcagaactgcaaaacgcagtagcccatcaggttcagatagagggtttgattaaccatccaccctggaacctgaaactcgtgcagttatatgagacgtctttggtacggcatggcttgatgactcttgggcccagtggttctggaaagacaaccgttatcacgattctaatgaaggcgcaaacagaatgcggaaggcctcatagagaaatgcgaatgaatccaaaagccattactgcacctcagatgtttggcagactggacactgctaccaatgactggacagatgggattttttctactctgtggagaaaaacattaaaagctaaaaaaggtgaaaacattttcctcattttagatggtcctgtggatgccatctggattgagaacttaaattccgttttggatgacaataaaactctgacgttagctaatggagatcgcattcccatggcccctagttgtaagcttctgtttgaagtccacaatatcgagaacgcctctcctgccacggtttctaggatgggcatggtctatatcagcagctctgctctcagctggaggccaatcttacaggcatggttgaagaaacgcactgcacaggaagctgctgtattcctgacactgtatgagaaagtctttgaagatacatacacatatatgaagctaaatctcaatcccaaaatgcagctcttggagtgcaactatattgtgcaatctctcaatcttctggaagggttaattccctccaaagaagaaggcggtgtttcctgtgtcgaacatcttcataaattatttgtgtttggcctaatgtggagtttaggagcccttctggaattagaaagcagagaaaagcttgaagccttcttacggcagcatgaaagcaagttggacttaccagaaatacctaaaggctcaaatcaaaccatgtatgagttttatgttactgattatggtgattgggagcactggaataagaaacttcagccttattattatccaactgacagtattccggaatattcatcaattttggttccaaatgttgacaatattagaacaaattttttgatagacaccattgcaaaacaacataaagctgttttgctcacaggagagcagggaactgcaaaaactgtcatggttaaggcctatttgaaaaaatatgatcctgaagtacagctatccaaaagtctaaacttttcatctgccacagaaccaatgatgtttcagagaacaattgaaagctacgtggataagcgaattggaagcacatatgggccaccaggagggagaaaaatgactgtatttattgatgatattaatatgcctgtgattaatgagtggggagatcagataactaatgagattgtgcgacagatgatggaaatggaaggaatgtacagcttggacaagcctggagacttcactactattgttgatgtgcagctcatagcagcaatgatccaccctggaggtggtcgaaatgatattccacaacgtttaaaaagacaatttactgtgtttaattgtacattgccttcaaatgcttcaatagacaaaatttttggaattattggatgtggatactttgatccttgtagaagtttcaagcctcaaatatgtgagatgattgtgaatttagtctcagtgggtagagtgctgtggcaatggactaaggtgaagatgctgccaactccttctaaatttcattacatcttcaatcttcgagatctttccagaatttggcaaggaatgttgaccataaaagctgaggagtgcgcttcaatccctactctcctgtcccttttcaaacacgagtgcagcagagtaattgcagacagatttataactcctgaagatgagcagtggtttaatgcacatcttactcgtgcagttgaagaaaatattggctctgatgcagcgtcgtgtattcttcctgaaccatactttgtggattttcttcgtgagatgccagaaccaactggtgatgaacctgaagactctgtgtttgaagtacccaaaatatatgaattgatgccatcctttgactttctggctgaaaaactccagttttaccagagacagttcaatgaaatcattagaggaacatctcttgatctggtgttttttaaagatgcaatgactcatcttattaagatttcacgaataattcgaacgtcgtgtggaaatgcattgctggtgggtgttggtggttccggaaaacaaagtctttcaagattggcctcttttattgctggctatcaaatattccagataacattaaccaggtcttacaatgtgactaatctaacagatgatttaaaagctttgtacaaagttgctggtgctgatggaaaaggcatcactttcatctttactgacagtgaaataaaagatgaggcatttctagaataccttaacaacttgctatcttcaggggagatctccaacttgtttgcacgagatgagatggatgaaatcacccaaggtctgatttcagtgatgaagagggagctacctcgccatcctcctacctttgataatttgtatgaatacttcatttcaagatcaaggaagaacttacatgttgttctctgcttttctccagttggtgagaagttccgtgcccgttctttgaaatttcctggcttgatatcaggttgcactatggactggttcagccgctggccaagggaggctctgattgctgtggcctcctacttcctttcagactataatattgtctgctctagtgaaattaaaagacaagttgtagaaacaatgggcctgtttcatgacatggtttcagagagctgtgaaagttatttccaaagataccgccgaagagcacatgtgactcccaaatcttacctctcatttataaatggttataaaaacatttatgctgaaaaggtgaagttcattaatgaacaggctgaacgtatgaatattggtcttgataaactaatggaggcaagtgaatctgttgctaaactctctcaggatcttgcagtcaaggagaaggagttggcagtggcttccataaaagcagacgaagtattagcagaagtcacagtaagcgctcaggcttcagccaaaattaaaaatgaagtacaggaggtaaaggacaaagcccaaaaaattgtggatgaaattgatagtgaaaaagtgaaagctgaaagcaagcttgaggcagctaaacctgcactggaagaagcagaagcagccctgaatactatcaagccaaatgatattgccacagtcaggaaacttgcaaaaccaccacatcttattatgagaatcatggactgtgttctgttactatttcaaaagaaaattgaccctgttactatggatccagaaaaatcttgctgtaagccatcatggggagagtcattaaagttgatgagtgcaacaggattcctgtggagccttcagcagttccctaaggacactataaatgaagagactgttgagttactacagccatattttaatatggatgattatacttttgaaagtgccaaaaaagtctgtgggaatgtggctggtctcctgtcttggacacttgctatggcaatattttatggcatcaatagagaagtgttgcctctgaaggccaacctggccaagcaggaaggccggttagcagttgctaatgctgagttagggaaggcacaagccctgctggatgagaagcaagctgagctggataaagtacaggcaaaatttgatgcagcaatgaatgagaaaatggatttgcttaatgacgctgatacgtgccggaaaaagatgcaggccgcctccactctcatcgatgggctgagtggagaaaaaatccggtggacccagcaaagtaaagaattcaaagctcagattaatagacttgtaggtgatattctgctgtgcacgggattcctttcctaccttggtcctttcaatcagatatttaggaactatttgcttaaagatcaatgggaaatggagttgagagcacggaaaattcctttcacagaaaacctgaatcttatttcaatgttggtggatcctccaactattggtgagtgggggctacagggattaccaggagatgatctctcaattcagaatggcattattgtgacaaaggccaccagatacccactcctcatagacccacaaactcaaggcaaaacttggattaaatcaaaggaaaaagaaaatgatttacaggtgacatctctgaaccataaatattttcgcacacacttggaggacagcctttccttgggccgaccccttctcattgaggacattcatgaagagctggatccagccttggataatgtattagaaaagaattttattaaatctggcaccactttcaaggtgaaagtcggtgataaggaatgtgatatcatggatacatttaaactttacattactacgaagttaccaaatcctgcctttaccccagagattaatgctaaaacgtcagtcattgatttcactgttacaatgaaaggacttgagaatcagttactaaggagagtcattctaacagagaaacaggagttagaggctgagagggttaaacttttggaggatgttacttttaataagcggaagatgaaagaacttgaagataacctcctctataaattaagtgctacaaaaggctcattggtagatgacgaatctctcattggtgtacttcgaactaccaagcagacagcagctgaggtaagtgaaaagttgcatgtggctgcagaaactgagatcaagatcaacgcggctcaggaggagttccggcccgcagccacccgcggaagcatcctctacttcctcatcacagagatgagcatggtcaacatcatgtatcagacgtcattggcccagttcttgaagttatttgaccagtccatggccagatctgaaaagtcaccactacctcaaaagagaattacaaatattatcgagtacctgacatatgaagtttttacatactctgtcagaggcctatacgaaaaccacaaattcctgtttgtactcctcatgaccttaaagattgaccttcagagagggacagttaagcacagagagtttcaagctctcattaaagggggagcagctctggacctgaaagcctgtcctcccaaaccctatcgctggatccttgacatgacttggctgaatcttgtggagctgagtaaacttccacaatttgcagaaattatgaaccagatatctcgtaatgagaaggggtggaaaagctggtttgataaagatgctccagaggaggaaattatccctgatggatataatgattcactagatacctgccataaacttttacttatcaggtcttggtgcccagaccgtactgtttttcaagcaagaaagtatattgcagattctttggaggagaagtacacagaaccagttatcttaaatctggagaaaacttgggaagaaagtgatacccggacacctctgatatgcttcctgtccatgggatctgaccccaccaatcaaattgatgcattggccaagaaactgaaactggaatgtagaactatctcaatggggcaaggacaagaagtacatgctcgaaagctgattcagatgtcaatgcagcaggtatgtgacaagagactgctcctgctgcaacattattgctagaaaccccacaatcatggatgttaccacattcttctcgtgatgctcaatcctggtttttccatttttgtttatcattacctgtgaattttaaacctcagtctagtttcctcctgatattcgcatggaaagcttattccattttctatagtatatgctccattttaccttcaccaattttttgttcgttttatgatttgggagacacaccttctgatttctaagaatgcatctctagcagtcttggaatttcatgatcaatatgaataggtagtacttaaggagtgacagattgagacagttaaatttccattttcagttaaaggcagactttcatttttcattaacggatcatttcaggcaaagaaggaatatt

SEQ ID NO: 82771 - protein, 233 aa, Artificial Sequence
  derived and/or modified sequence
MAAGTAVGAWVLVLSLWGAVVGAQNITARIGEPLVLKCKGAPKKPPQRLEWKLNTGRTEAWKVLSPQGGGPWDSVARVLPNSSLFLPAVGIQDEGIFRCQAMNRNGKETKSNYRVRVYQIPGKPEIVDSASELTAGVPNKVVEESRRSRKRPCEQEVGTCVSEGSYPAGTLSWHLDGKPLVPNEKGVSVKEQTRRHPETGLFTLQSELMVTPARGGDPRPTFSCSFSPGLPRH

SEQ ID NO: 82772 - protein, 128 aa, Artificial Sequence
  derived and/or modified sequence
MAAGTAVGAWVLVLSLWGAVVGAQNITARIGEPLVLKCKGAPKKPPQRLEWKLNTGRTEAWKVLSPQGGGPWDSVARVLPNSSLFLPAVGIQDEGIFRCQAMNRNGKETKSNYRVRVYQFENLHNYSL

SEQ ID NO: 82773 - protein, 233 aa, Artificial Sequence
  derived and/or modified sequence
MAAGTAVGAWVLVLSLWGAVVGAQNITARIGEPLVLKCKGAPKKPPQRLEWKLNTGRTEAWKVLSPQGGGPWDSVARVLPNGSLFLPAVGIQDEGIFRCQAMNRNGKETKSNYRVRVYQIPGKPEIVDSASELTAGVPNKVVEESRRSRKRPCEQEVGTCVSEGSYPAGTLSWHLDGKPLVPNEKGVSVKEQTRRHPETGLFTLQSELMVTPARGGDPRPTFSCSFSPGLPRH

SEQ ID NO: 82774 - protein, 128 aa, Artificial Sequence
  derived and/or modified sequence
MAAGTAVGAWVLVLSLWGAVVGAQNITARIGEPLVLKCKGAPKKPPQRLEWKLNTGRTEAWKVLSPQGGGPWDSVARVLPNGSLFLPAVGIQDEGIFRCQAMNRNGKETKSNYRVRVYQFENLHNYSL

SEQ ID NO: 82775 - DNA, 402 bp, Artificial Sequence
  derived and/or modified sequence
atgaaagacggggtcccgctgccactgccacccagccctgttctgatcttgccagaaatcggaccacaggaccagggtacttattcctgtgtggccactcatagtagccatggtccacaggaatctcgggctgtcagcatcagtattattgagcctggtgaggaagggcctaccgccggctctgtgggcgggtccggactcggcactctggccttggctttggggatcctaggtggtcttggcacagcagccctgctcataggcgtgatcctgtggcagcgtaggcagcgcaggggagaggagagaaaagctccagagaaccaagaggaggaggaggaaagggcagaactgaaccagagtgaagaaccggaggctggggaaagtagcacgggagggccatag

SEQ ID NO: 82776 - DNA, 885 bp, Artificial Sequence
  derived and/or modified sequence
atgaacagaaacggcaaagaaacaaagtccaactatagagtgcgggtctaccagattcctggaaagcccgagatcgtggatagcgccagtgagcttaccgcaggcgtgcccaataaggtcggcacatgcgtgtctgagggatcttacccggccggaactctgagctggcacctcgacggaaagccactggtccccaatgaaaagggtgtctctgtcaaagaacagacccgcaggcacccagagacagggctgtttacgcttcaaagcgaacttatggtgactcctgcccgcgggggtgacccacggccgaccttctcctgctccttttctcctggccttccacgccatagagccctgcgaaccgcacctattcagcctagggtgtgggagcccgttcccttggaggaagtgcaactggtcgtcgaaccagaagggggcgccgtagcccctggcggtacagtcaccctaacctgcgaagttcctgcgcagccctcacctcagattcattggatgaaggacggcgtaccccttcctctgcctccaagtccggtattgatcttacctgaaataggacctcaggatcaggggacttactcctgtgtggctacgcactccagtcatggcccccaggagtcccgggccgtgtccatttctattattgggtcagttggcggaagcgggttggggacactcgcccttgctctgggcattctcggggggctgggcactgccgccctgctgattggagttattctctggcagcggcgtcagcgacgcggtgaggagcgtaaagcacctgagaaccaagaggaggaggaggaaagggccgaactgaatcagagcgaagagccggaggctggggagtcatccacgggaggaccatag

SEQ ID NO: 82777 - DNA, 402 bp, Artificial Sequence
  derived and/or modified sequence
atgaaggatggagtgcccctgcccctgccccccagccctgtgctgatcctgcctgagatcggcccccaggaccagggcacctacagctgtgtggccacccacagcagccacggcccccaggagagcagagctgtgtccatcagcatcatcgagcccggggaggagggccccacagctggctctgtgggcggcagcggcctgggcaccctggccctggccctgggcatcctgggcggcctgggcacagctgccctgctgattggagtcatcctgtggcagaggcggcagaggagaggagaggagaggaaggcccctgagaaccaggaggaggaggaggagagagctgagctgaaccagagcgaggagcctgaggccggggagagcagcactggaggcccctag

SEQ ID NO: 82778 - DNA, 885 bp, Artificial Sequence
  derived and/or modified sequence
atgaacagaaatggcaaggagaccaagagcaactacagagtgcgggtgtaccagatccctgggaagccagaaattgtggacagcgccagcgagctgacagctggggtgcccaacaaggtgggcacctgtgtgtctgagggcagctacccagctggcaccctgtcctggcacctggatggcaagcccctggtgcccaatgagaagggcgtgtctgtgaaggagcagaccaggaggcaccctgagaccggcctcttcaccctgcagagcgagctgatggtgaccccagcccggggcggggacccccggcccaccttcagctgcagcttcagccctggcctgcccaggcaccgggccctgaggacagcccccatccagccccgggtgtgggagcctgtgcccctggaggaggtgcagctggtggtggagcctgagggcggcgctgtggcccctgggggcaccgtgaccctgacctgtgaggtgcctgcccagcccagcccccagatccactggatgaaggatggagtgcccctgcccctgccccccagccctgtgctgatcctgcctgagatcggcccccaggaccagggcacctacagctgtgtggccacccacagcagccacggcccccaggagagcagagctgtgtccatcagcatcatcggctctgtgggcggcagcggcctgggcaccctggccctggccctgggcatcctgggcggcctgggcacagctgccctgctgattggagtcatcctgtggcagaggcggcagaggagaggagaggagaggaaggcccctgagaaccaggaggaggaggaggagcgggcagagctgaaccagagcgaggagcctgaggccggggagagcagcactggaggcccctag

SEQ ID NO: 82779 - DNA, 402 bp, Artificial Sequence
  derived and/or modified sequence
atgaaggacggcgtgcccctgcccctgccccccagccccgtgctgatcttgcccgagattggtcctcaagaccagggaacatactcttgtgtggcaacccattcatctcatggaccacaggaatcacgggctgtgtcaatctcaatcattgaacccggagaggaagggccaacggcgggatccgtgggcggatcggggctggggactcttgcactggcgctggggatactgggtgggttagggaccgctgctcttcttataggcgtgatcctgtggcaacgacgccagaggcgtggggaagagcgtaaggcaccagaaaatcaggaggaagaagaagagcgcgccgaactgaaccagtcagaagaacccgaggctggcgagagcagcacaggaggaccatag

SEQ ID NO: 82780 - DNA, 885 bp, Artificial Sequence
  derived and/or modified sequence
atgaaccggaacggcaaggagaccaagagcaactaccgggtgcgggtgtaccagatcccaggcaagcccgaaatagttgacagcgctagcgagttgacagctggggtgcccaacaaggttggcacatgtgtatcagagggtagctacccagccggaacacttagttggcacctagatggtaagcccttggtccccaacgagaagggagtgagcgtgaaggagcagacccgtagacatcctgagaccggcttgtttaccctccaatccgagcttatggttactcccgctcgtggcggtgatcctagacccaccttttcctgctccttcagccccgggctgccccgtcacagggcattacgcactgctcctattcaaccccgtgtctgggagcccgtccccttggaagaagtgcagcttgttgtggagccagaagggggcgccgttgccccaggaggcacggtgaccctgacttgtgaggtgccagctcagcctagccctcagatccactggatgaaagatggagtgccattgcctctgccccccagtccagtccttatcttacccgagattggtcctcaggatcaaggcacttacagttgtgtagctacacactcctctcacggaccccaggaatcacgcgccgtttccatttcgattatcggctcggtgggagggtcaggactcggcaccctggccttggcccttggaatcctcggggggctgggtaccgctgccctcttgattggcgtgatcttgtggcagaggcgacagcgcagaggggaagagcgtaaggcccctgagaaccaagaggaggaggaagagcgtgcggagctgaaccagagtgaagagcccgaggccggagaaagctctactgggggcccatag

SEQ ID NO: 82781 - DNA, 665 bp, Artificial Sequence
  derived and/or modified sequence
atggcagccggaacagcagttggagcctgggtgctggtcctcagtctgtggggggcagtagtaggtgctcaaaacatcacagcccaggccttccccgacaccgggccttgcgcacagcccccatccagccccgtgtctgggagcctgtgcctctggaggaggtccaattggtggtggagccagaaggtggagcagtagctcctggtggaaccgtaaccctgacctgtgaagtccctgcccagccctctcctcaaatccactggatgaaggatggtgtgcccttgccccttccccccagccctgtgctgatcctccctgagatagggcctcaggaccagggaacctacagctgtgtggccacccattccagccacgggccccaggaaagccgtgctgtcagcatcagcatcatcgaaccaggcgaggaggggccaactgcaggctctgtgggaggatcagggctgggaactctagccctggccctggggatcctgggaggcctggggacagccgccctgctcattggggtcatcttgtggcaaaggcggcaacgccgaggagaggagaggaaggccccagaaaaccaggaggaagaggaggagcgtgcagaactgaatcagtcggaggaacctgaggcaggcgagagtagtactggagggccttga

SEQ ID NO: 82782 - DNA, 402 bp, Artificial Sequence
  derived and/or modified sequence
atgaaggacggcgtccctctgcccctgcccccatcacccgttctgatcctgccagagattgggccacaggaccaggggacctacagctgtgtcgcaacccacagctcacatggcccacaggagagtcgcgctgtctctatctccatcattgaacccggagaagaagggcctactgcaggcagcgtcggaggatctggccttgggactctggccctggccctcggcatcctgggcggacttggaactgccgcattgctcattggtgtcatactgtggcagcgcaggcagcgacgtggcgaagagcgcaaagcccctgagaatcaagaagaagaagaggagagggcagagctaaaccagagcgaagaacccgaggcgggtgaatcctctaccggcggtccctag

SEQ ID NO: 82783 - DNA, 885 bp, Artificial Sequence
  derived and/or modified sequence
atgaacagaaacgggaaggaaacaaagagcaactatcgtgtgcgcgtttaccaaattcccggtaaacccgagatcgttgacagcgccagcgaacttactgctggcgttcctaacaaggtgggcacctgtgtaagtgagggcagctaccccgctggtacactctcctggcaccttgacggcaagccactcgtgcctaatgagaagggggtgtcagtgaaagagcagactagaagacatcccgagaccggcctatttactctccagagtgaactgatggtgacacccgcacgaggcggagacccccgaccaactttctcttgttcctttagtccgggactaccacgccacagagcccttcggaccgccccaatccagcccagagtctgggagccagtgcctctggaggaggtacagctggtcgtggaacccgaggggggtgcagtggcacctggcggaactgtgactctgacatgcgaggtgcctgcccagccctctccacaaatccactggatgaaggacggggtccccctgcccctcccaccctcacctgtgctcattctgcccgagattgggcctcaggaccagggcacctactcctgtgtggccactcatagctctcatggccctcaggagagccgggcagtttccattagcatcattggaagcgtggggggaagcgggttgggcactctggccctggcgttgggaatactggggggactagggactgccgctctgctgatcggcgtcattctctggcagcggagacagcggcgaggcgaagagcggaaagcccctgagaatcaggaagaggaggaggagcgggcagagctaaaccaaagcgaagaaccagaggccggagagtcctctactggcggaccgtag

SEQ ID NO: 82784 - DNA, 402 bp, Artificial Sequence
  derived and/or modified sequence
atgaaggacggcgtgcccctgcccctgccccccagccccgtgctgatcctgcccgagatcggcccccaggaccagggcacctacagctgcgtggccacccacagcagccacggcccccaggagagcagagccgtgagcatcagcatcatcgagcccggcgaggagggccccaccgccggcagcgtgggcggcagcggcctgggcaccctggccctggccctgggcatcctgggcggcctgggcaccgccgccctgctgatcggcgtgatcctgtggcagagaagacagagaagaggcgaggagagaaaggcccccgagaaccaggaggaggaggaggagagagccgagctgaaccagagcgaggagcccgaggccggcgagagcagcaccggcggcccctag

SEQ ID NO: 82785 - DNA, 885 bp, Artificial Sequence
  derived and/or modified sequence
atgaacagaaacggcaaggagaccaagagcaactacagagtgagagtgtaccagatccccggcaagcccgagatcgtggacagcgccagcgagctgaccgccggcgtgcccaacaaggtgggcacctgcgtgagcgagggcagctaccccgccggcaccctgagctggcacctggacggcaagcccctggtgcccaacgagaagggcgtgagcgtgaaggagcagaccagaagacaccccgagaccggcctgttcaccctgcagagcgagctgatggtgacccccgccagaggcggcgaccccagacccaccttcagctgcagcttcagccccggcctgcccagacacagagccctgagaaccgcccccatccagcccagagtgtgggagcccgtgcccctggaggaggtgcagctggtggtggagcccgagggcggcgccgtggcccccggcggcaccgtgaccctgacctgcgaggtgcccgcccagcccagcccccagatccactggatgaaggacggcgtgcccctgcccctgccccccagccccgtgctgatcctgcccgagatcggcccccaggaccagggcacctacagctgcgtggccacccacagcagccacggcccccaggagagcagagccgtgagcatcagcatcatcggcagcgtgggcggcagcggcctgggcaccctggccctggccctgggcatcctgggcggcctgggcaccgccgccctgctgatcggcgtgatcctgtggcagagaagacagagaagaggcgaggagagaaaggcccccgagaaccaggaggaggaggaggagagagccgagctgaaccagagcgaggagcccgaggccggcgagagcagcaccggcggcccctag

SEQ ID NO: 82786 - DNA, 402 bp, Artificial Sequence
  derived and/or modified sequence
atgaaagacggagtccccttgcccctgcccccatccccagtgctgatccttccggaaattggaccccaggatcaaggtacttattcttgcgtagcgacacacagttcccacggtccacaagagtcccgtgccgtcagcatcagcatcatcgagcctggcgaggagggccccaccgctggttcagtgggtggttctgggctgggtaccctcgctctagccttagggatcctggggggtctcgggacggccgcgcttctgatcggggtgattctgtggcagcggagacagcgtagaggggaagagcggaaagcccctgagaatcaagaggaggaagaagaaagggctgagctgaatcagagcgaggagccggaggcaggggaatccagcactggcggcccatag

SEQ ID NO: 82787 - DNA, 885 bp, Artificial Sequence
  derived and/or modified sequence
atgaacagaaacggaaaggagactaagtccaattaccgcgtccgggtatatcagatcccaggaaaacctgagatcgtcgattcagcgtcggagctgaccgcgggagtcccaaacaaagtaggaacctgcgtttcagaaggctcataccccgccggtacactgagctggcatttggacggcaagcctctggtccccaatgagaaaggggtaagtgtgaaagaacaaactaggcgacaccctgagactggccttttcaccctacagagcgaactgatggtgacccccgcacgaggaggggatcctaggccaacatttagctgttctttctccccaggactgccccggcatcgcgccctgcgtaccgccccaattcagccaagggtgtgggagcctgtacccctggaagaggtccagctggtcgttgaacctgaagggggagctgtggcacctggcggtacagtcacacttacatgtgaggtgccagcccaaccaagcccgcagattcattggatgaaagacggagtaccattgcctctcccaccatccccagtgcttatccttcctgagattggcccacaggatcaagggacctatagctgtgtggccactcattcaagccatgggccccaggagagcagggctgtatcaatcagcataatcgggtcggttgggggcagcggccttggcaccctagctttggccttagggattctcggagggctcggcacagctgccttgctcattggggttatcctgtggcagaggcgacagcggcgcggagaggagcgcaaagctcccgagaatcaagaagaggaggaggagcgtgctgagctcaaccagtcagaagaaccggaggctggagaatcaagtaccggcggaccttag

SEQ ID NO: 82788 - DNA, 885 bp, Artificial Sequence
  derived and/or modified sequence
atgaatcgcaacggtaaagaaactaaatcaaactacagggtacgcgtctatcagattcctgggaagcctgagatcgtagactccgcatccgaacttacagctggggtgccaaacaaagtgggcacctgtgtcagtgagggatcctatcctgccggaactctctcatggcatctcgatggcaaaccattagttccaaacgaaaaaggtgtatccgtgaaggagcagactcgaaggcaccccgagacaggcctgtttaccctgcagtctgagctcatggtcactccagcccgggggggggatccacggcccacattcagctgttctttcagtcccggcctaccccgccatcgggccctgagaacagctccaattcagccaagggtatgggaaccagtgccactggaggaggtacagcttgtggtggaaccggagggcggtgcagtcgctcctggaggtacagtaactctgacctgcgaagttcccgcccagccctcaccccaaattcactggatgaaggatggggttcctctccccttgccgccgagcccagtcctaatcctccccgagattgggcctcaggaccagggtacatatagctgtgtggcaacacatagctcacatgggccgcaggaaagccgggcagtttctatcagtattataggatccgtgggcggatctggtctgggcacactggctttagccttgggaatccttggggggctcgggaccgccgctttgctgattggcgtcatcctctggcagcgaaggcaaagaagaggtgaggaacgcaaagcacccgagaaccaagaagaagaagaggagagagccgagcttaaccaatccgaggaaccagaggctggggagagttcgacaggaggcccttag

SEQ ID NO: 82789 - DNA, 885 bp, Artificial Sequence
  derived and/or modified sequence
atgaacagaaacgggaaggagaccaagtccaactatcgcgtgagagtgtaccagatccccggcaaaccagaaatcgtggactctgctagtgagctaacagccggcgtgcccaataaggtcggcacatgcgtgtccgagggaagctatcccgccggcacactttcctggcatctggatgggaaacccctagtgccaaacgaaaaaggcgtgtccgtgaaagagcagacccgacggcatcccgagactggcctctttaccctgcaatctgaactaatggtaacaccagcccgcggcggtgacccaagacctaccttctcttgttcttttagtcccgggctgccaaggcacagagccctgcggaccgcccccattcaaccaagggtttgggaacccgtgcctcttgaggaggtgcagcttgtagtcgaacctgaaggaggtgcggtcgccccggggggaactgtgacacttacctgcgaggttccggcccaaccttcaccccagattcactggatgaaagacggcgtgcctctgccactgcctcctagcccagttctgatcctgccagagataggcccgcaggaccaaggaacatacagctgtgtagctactcattcgtcccatggtccgcaggaatctagagccgtctcaataagtattatcgggtctgtgggggggtccgggctgggcacccttgctctggccctcggtatccttgggggtcttgggacagcggctctcctgatcggagtcatcctctggcaacggcgccagcgaaggggagaagaaaggaaggcccctgaaaatcaggaagaagaagaggaaagagctgaactgaatcaatccgaggaacccgaagccggggaaagcagtactggcggtccctag

SEQ ID NO: 82790 - DNA, 402 bp, Artificial Sequence
  derived and/or modified sequence
atgaaagacggggtaccgctgcctctgcccccatctccggttctcattctcccggaaataggtccgcaggatcagggcacgtatagctgcgtggctacacactcttcccacgggccgcaggagtcccgggcagtgtccatatctatcatcgaaccaggggaggaaggccctacggccggcagtgtggggggctcaggactgggcaccctggctctagcactgggcatcctcggcggattggggacagcagccttgctgatcggtgttatcctgtggcaaaggcggcagcgtaggggagaggaacgtaaggcccctgaaaatcaggaggaggaagaggagcgagctgagcttaaccagagcgaagagccagaagctggagagtccagcactggagggccatag

SEQ ID NO: 82791 - DNA, 885 bp, Artificial Sequence
  derived and/or modified sequence
atgaaccgcaacggtaaagagaccaaaagtaattaccgagtacgtgtgtatcagatccccggcaagccggagatcgtcgactctgctagtgaactcacggccggtgtccccaacaaagttggtacctgcgtatccgaaggaagttaccccgcagggactttaagctggcaccttgatggaaagcccctggtgccaaatgagaaaggagtgtctgtgaaggagcagacacgtcgacacccagaaactgggctgttcacccttcaatcagaactaatggtgacgcccgcaagaggcggtgacccccgtcctaccttctcctgttcattcagtcccggcctgcctaggcatcgggctctaaggacggctcctatccagcccagagtgtgggaacccgtccctctcgaggaggttcagctcgttgtggaaccggagggcggtgccgttgccccagggggcaccgtgacactcacctgtgaggttcccgcccagccaagcccacagatacactggatgaaggatggcgttcccctcccacttccacccagcccggtcctcattttacccgaaatcggccctcaggaccaggggacctattcctgtgtggctacacattcgtcccatggaccacaggaaagccgtgcagtctccatctccatcatcggttccgtcggcggaagtggtctagggacgctagcactggccctgggtattctgggaggcctggggacggccgcactgctaatcggtgtgatcctctggcagcgcaggcagcgtagaggtgaggaaaggaaggcccccgagaaccaggaagaggaggaagaaagggccgagctaaaccagagtgaggaacccgaggcaggtgaaagcagcacaggcggcccatag

SEQ ID NO: 82792 - DNA, 402 bp, Artificial Sequence
  derived and/or modified sequence
atgaaggatggggtccctctcccactgcctcctagtcctgtcttaattcttccagagattggtccccaggatcagggcacctattcgtgtgtagcaactcactcctctcacggcccgcaggagagtagagccgtgagcattagcatcattgagccaggggaggaaggacccactgctgggtccgtgggcggtagtggcttggggaccttggccttggccctgggaatcctcgggggactggggactgccgccctgctcatcggggttattctgtggcagcggagacagaggcgtggagaggaacgtaaagcccccgagaaccaggaagaggaagaggagcgtgccgagttgaatcagagcgaagagccagaagcaggtgagtcttctactggcggaccatag

SEQ ID NO: 82793 - DNA, 885 bp, Artificial Sequence
  derived and/or modified sequence
atgaaccggaacgggaaagagaccaaatcgaactaccgtgtcagagtttaccaaattcctggtaaaccggaaatagtggactctgcctccgaactgactgcgggcgtgccaaataaagtgggcacttgcgttagcgaaggatcctaccctgcaggcactctatcttggcatcttgatggtaagccactggtgcccaatgaaaagggagtgagtgtgaaggaacagacacggcgtcatccagagaccggcctgtttacgttacagtccgaactaatggttactcctgcgaggggaggggacccacggcctaccttcagctgctccttcagtcctggtctgccgcggcatcgcgcattgagaaccgccccaattcaacccagggtttgggaaccggtgcctctcgaagaagttcagctagttgtggagcccgagggcggggcggtagccccaggtgggactgtgactctgacgtgtgaggtgccggcccaaccatctccccagattcactggatgaaggatggcgtgcccttaccgctccctcccagccccgtcctcatcctgccagaaatcgggccccaggaccagggaacatactcatgcgtggccacgcacagcagtcacggtccacaagagtctagagctgtgagcatctccatcataggctcagtcggggggagtggcctgggcacacttgcgcttgcacttggcattctcggggggttgggcaccgctgctctcttgatcggcgtgatcctgtggcagcgccggcagcgaagaggcgaagaacgaaaagcgcctgagaatcaagaagaggaggaggagagggccgaacttaatcagagtgaggaacctgaagccggggagtcaagtacaggtggaccatag

SEQ ID NO: 82794 - DNA, 402 bp, Artificial Sequence
  derived and/or modified sequence
atgaaggacggggttccgttgcctctgccaccttcccccgtgctgatcctgcctgagatcggcccacaggatcagggaacgtacagctgtgtggccactcattcatcccatggccctcaggagagccgggctgtgagtatttccatcatcgaaccaggagaagaaggaccgacagccggaagtgtgggcgggtcagggctgggtaccctcgccctcgctcttggcattttaggagggctgggcacggccgcactgctcattggggtcattctgtggcagcggagacagcggaggggtgaggaaaggaaggccccagagaaccaagaagaggaagaggaacgggcagagctcaaccagagtgaagagcctgaggctggagagagttcaactggcggcccctag

SEQ ID NO: 82795 - DNA, 402 bp, Artificial Sequence
  derived and/or modified sequence
atgaaggacggcgtccccctcccattgcctccttctcctgttctcattctgcccgagatcggaccgcaagatcagggaacttattcatgtgtggccacacatagctctcatggtccacaggagtctcgagctgtgagtatctccatcatcgaacccggagaggaaggcccaaccgcgggatccgtcggtggcagcggccttggcactctcgccttagccctgggaattctgggagggcttgggaccgctgccctcttaatcggtgtcatcctgtggcagagacgccaacgaaggggcgaagagcgcaaggcacctgaaaatcaggaggaagaagaggaacgagcggagttaaatcagtctgaggagcccgaagcgggggagagttcaaccgggggcccatag

SEQ ID NO: 82796 - DNA, 402 bp, Artificial Sequence
  derived and/or modified sequence
atgaaagatggagtcccgttaccactgccgccttcccccgtgctgattctccccgaaatcggacctcaggaccagggtacgtatagctgcgtggcaactcactcgtcccacggaccgcaagagagccgcgccgtgtcaatcagcataattgagccaggggaggagggtcccacggccggatcagtaggcggctccggtctgggaacattggcactggcccttggaatccttggcggcctggggacagctgcactactcataggggtcatcttatggcagcggaggcagaggcggggggaggaaaggaaagcacccgagaaccaagaggaagaagaggagcgcgctgaactcaatcagagcgaagagccagaggccggcgagagctcaactggtggcccgtag

SEQ ID NO: 82797 - DNA, 885 bp, Artificial Sequence
  derived and/or modified sequence
atgaatcggaatggcaaagagaccaaatcgaattatcgcgtcagagtctaccagattcccggaaagccagagatcgtagattctgccagcgagctgactgccggcgtgcctaacaaagtgggcacctgcgtctctgagggctcatacccagcgggtaccctctcctggcacctagatggcaagccactggtaccaaacgaaaaaggcgtgtctgttaaagaacagactcggagacaccccgagaccggtctctttacacttcagagtgagctgatggtgactccagcacggggaggcgacccccgacccactttcagttgcagcttctctcccgggctgcccaggcacagggcattgaggactgcacctatccagccccgagtctgggagcctgtccccctggaggaagtacagctggttgtcgagccggaaggcggcgctgtggccccagggggaaccgtgacccttacatgcgaggtgccagcacagccatcacctcagatccattggatgaaggatggagtgccactccccctccctccttctccggttcttatacttccagagattggtccccaagaccaggggacttactcttgtgtcgccacccattctagtcatggacctcaggaatcacgcgctgtctctatctctatcattggaagcgtcggcggttccggactgggaactctggctctagctctcggaattctaggaggacttgggactgctgcgctgctaattggcgtgatcttatggcagcggcgccaacgccgtggggaagaaaggaaagcacccgagaatcaggaggaagaggaggaacgagctgagctaaatcagtcagaggagccggaggcaggcgagagctcaacaggcggaccgtag

SEQ ID NO: 82798 - DNA, 665 bp, Artificial Sequence
  derived and/or modified sequence
atggctgccggaacagcagttggagcctgggtgctggtcctcagtctgtggggggcagtagtaggtgctcaaaacatcacagcccaggccttccccgacaccgggccttgcgcacagcccccatccagccccgtgtctgggagcctgtgcctctggaggaggtccaattggtggtggagccagaaggtggagcagtagctcctggtggaaccgtaaccctgacctgtgaagtccctgcccagccctctcctcaaatccactggatgaaggatggtgtgcccttgccccttccccccagccctgtgctgatcctccctgagatagggcctcaggaccagggaacctacagctgtgtggccacccattccagccacgggccccaggaaagccgtgctgtcagcatcagcatcatcgaaccaggcgaggaggggccaactgcaggctctgtgggaggatcagggctgggaactctagccctggccctggggatcctgggaggcctggggacagccgccctgctcattggggtcatcttgtggcaaaggcggcaacgccgaggagaggagaggaaggccccagaaaaccaggaggaagaggaggagcgtgcagaactgaatcagtcggaggaacctgaggcaggcgagagtagtactggagggccttga

SEQ ID NO: 82799 - DNA, 402 bp, Artificial Sequence
  derived and/or modified sequence
atgaaggacggcgtgcccctgcccctgccccccagccccgtgctgatcctacccgagatcgggccccaagatcagggaacatactcctgcgttgcgacacactccagtcacgggccacaggagtcccgggccgtatctatcagcatcatagaacccggggaggaagggccaacagccggatctgtcggggggagcgggttaggaacccttgcactggctctgggcattctggggggactaggtactgccgcgctcctcattggcgtgatcctctggcaacggcggcagcgtaggggcgaggagcgaaaggctcctgagaatcaagaagaagaggaagagcgcgcagagcttaaccagagcgaggaaccggaggctggggagagcagtactggcgggccttag

SEQ ID NO: 82800 - DNA, 885 bp, Artificial Sequence
  derived and/or modified sequence
atgaaccggaacggcaaggagaccaagagcaactaccgggtgcgggtataccaaatcccaggcaagccagaaatcgttgactctgcctcagagctgaccgctggggtgcctaacaaggtgggaacttgtgtgtctgagggcagttaccccgccggcactcttagttggcatctggatggcaagccccttgtcccaaatgagaagggcgtgtccgttaaggagcaaaccagacgacatccagaaacaggtctgttcactcttcagtccgagctcatggttacaccagcgcgcggcggcgatccgaggccaacattctcctgcagtttctctcctgggctgcctagacatagagctctgaggacagctccaatacagcctagagtgtgggagcctgtcccccttgaagaagtgcaacttgtcgttgaacccgaaggaggcgccgtggcccccggcggtaccgtcactctgacttgcgaagtccctgctcagccatccccacaaatacattggatgaaggatggagtgccgcttcccctgccgccttctcccgtgctgattctacctgaaatcggcccacaggaccaaggtacctattcctgtgtagctacacatagtagccacggcccgcaggagtcccgcgcagtgagcatcagcattatcggctcagtggggggcagcggacttggcacattggctctcgcgctcggaatattaggggggctcggtacagccgctttgctgatcggtgtcatcctgtggcagagaaggcagagacggggagaagaaaggaaagcaccagagaatcaggaagaggaggaagaacgtgcggagctgaaccagagtgaagaacctgaagcaggggaaagttcaacaggcggaccatag

SEQ ID NO: 82801 - DNA, 885 bp, Artificial Sequence
  derived and/or modified sequence
atgaaccggaacggcaaggagaccaagagcaactaccgggtgcgggtttaccagatcccagggaaaccggagatcgtcgattctgctagtgaacttactgctggcgtgcctaataaggtgggaacatgtgtctcagaaggttcctacccggcagggactctttcttggcacctagacgggaaacctctggtaccaaatgagaagggggtgtcagtgaaggagcagacccgccggcatcctgagactggtcttttcaccctacagtctgagctgatggtgactcccgcgcggggtggggaccctcggcccacatttagttgcagttttagcccagggctgccccgccaccgagcactgcgtaccgccccaatccagcctcgcgtctgggaacctgtgcctcttgaggaagttcaattggtagtagagcctgagggaggcgcagtggcccccggcgggacagtgactcttacatgtgaagtccccgcacagccttcgccacaaatccattggatgaaggatggcgtcccattgccacttcccccgagcccagtgctgattctgccagagatcgggcctcaggaccagggcacgtattcatgtgtcgccacccacagttcccatggacctcaagagtcacgcgcagtgtcgatttcgattataggcagcgtgggcggcagtggccttggcacacttgcccttgctttgggaatattgggcggcctgggcactgccgccctgctgattggggttattctgtggcagagaaggcagcggcgtggggaggagcgtaaggctcccgaaaatcaggaggaggaggaggagagagctgaactcaaccagagcgaggagcccgaggcaggcgagagcagcaccggaggcccctag

SEQ ID NO: 82802 - DNA, 885 bp, Artificial Sequence
  derived and/or modified sequence
atgaaccggaacggcaaggagaccaagagcaactaccgggtgcgggtttaccagatcccaggcaagccggagatcgtggatagcgcgtccgaattgactgctggcgtcccaaacaaggtcggtacatgcgtgtctgaggggtcttacccagccggtacactctcttggcatctcgatggcaagccgctagtgccaaacgagaaaggtgtaagtgtgaaagaacagacccggcggcaccctgaaactgggctatttacactgcagagcgagctgatggtgacgcccgctcgcggtggagaccctagacccaccttttcatgctccttctcccctggcctgcctcgccatcgcgctctgagaactgccccaattcaaccccgagtttgggagccagtgcccctggaggaggtgcagctcgtcgtggagcctgagggtggtgctgtagccccagggggtacggtgaccctgacctgtgaagtcccagcccagccatctccccagatccactggatgaaggacggggtaccacttcctctgccaccctcccctgtcctgattcttcccgagattggacctcaggatcagggaacctattcctgcgtcgccactcactcgtctcatggaccgcaagagtctcgcgcggtgtcaattagcatcataggatctgtcggcgggagcggactgggcaccctagctctggctctgggtatcctgggcggtctgggtaccgcagcactactcataggggtgatcctatggcagaggaggcagcggcgcggagaggagcgcaaggctcctgaaaaccaggaggaagaagaggaacgtgccgaactgaaccaaagcgaggaacccgaagcaggggagagttccacaggtgggccatag

SEQ ID NO: 82803 - DNA, 402 bp, Artificial Sequence
  derived and/or modified sequence
atgaaggacggcgtgcccctgcccctgccccccagccccgtgctgattctccctgagatcggcccacaggaccaaggcacctatagctgtgtcgctacccactcgagccatggacctcaggaaagcagggctgtctccatatctattatcgaacccggcgaagaagggccgacagctggctctgttgggggttcaggtctcggtactctggccctcgccttaggcattcttgggggtctcggcactgctgctctactaattggtgttatcctgtggcagcggagacaacgaagaggtgaagaaagaaaagctcccgaaaaccaggaagaggaagaggagagagcggaacttaatcagtctgaggagcctgaggctggtgaatccagtaccgggggcccttag

SEQ ID NO: 82804 - DNA, 885 bp, Artificial Sequence
  derived and/or modified sequence
atgaaccggaacggcaaggagaccaagagcaactaccgggtgcgggtgtatcaaattcctggcaagcctgagatagtggactccgcttccgagctgaccgccggagtgcccaacaaggttggcacatgtgtgagcgagggaagttatcctgcaggaaccttgagttggcacctggacggtaaaccgctagtccctaatgagaaaggagtcagtgtcaaagagcagacaagacgtcatcccgagactgggctgtttactctgcagtcagaattaatggtgacacccgcccggggcggggacccacgccctacattctcatgctccttttcccctggactgccgcggcatagggccctgagaaccgcacctattcagcctcgcgtctgggagccagtgcctcttgaggaggtccagctggtggtggagcccgaaggtggggcagtcgctcccggagggactgtcactctgacctgcgaggtgcctgctcaacctagccctcaaatccactggatgaaagatggtgtgcctctgccactcccacccagtcctgtgctaatactccccgagatcggcccgcaggatcagggaacttactcctgtgtggccacacacagctcccatggacctcaggaatcgcgcgccgtgagcattagcatcatcgggtccgtggggggttccggcttaggaacgctcgctcttgctctcgggatactaggcggactggggacagccgcacttcttatcggggtcattctctggcagagaaggcagcgacgcggcgaggagagaaaagcgcccgagaaccaggaggaagaggaagagagagctgagctgaatcaaagcgaagaaccagaggccggggagtcatcaacggggggcccgtag

SEQ ID NO: 82805 - DNA, 402 bp, Artificial Sequence
  derived and/or modified sequence
atgaaggacggcgtgcccctgcccctgccccccagccccgtgctgatcctgccagagatcggcccccaagaccaagggacttattcttgcgttgccacacatagttctcacggaccacaagaaagcagggctgtaagtatttccatcattgaaccaggggaagagggtccgacagcgggaagcgtgggcggcagtggactcgggactctcgccttggccctgggaattctggggggcctgggcacggccgcactactgataggagtgattctgtggcagcgaaggcagaggaggggcgaggaaaggaaggctcccgaaaatcaagaagaggaagaagagcgggctgagctgaatcagagtgaggagcccgaggcgggcgaatcctctactggaggtccatag

SEQ ID NO: 82806 - DNA, 885 bp, Artificial Sequence
  derived and/or modified sequence
atgaaccggaacggcaaggagaccaagagcaactaccgggtgcgggtctatcagatcccaggcaagccagaaatcgtagatagcgcctctgagctgactgcaggcgttcccaataaagtgggcacttgcgtgagcgagggaagctatcccgcaggcactctgtcatggcatctggatggcaaaccacttgtaccaaacgaaaagggggtctctgtcaaagagcaaacacgacgacatccagagaccggcctctttaccctgcagagcgaactgatggtgacacctgctcgcggaggtgacccacgaccaaccttcagttgctctttttcgcctgggctgcccaggcatcgcgcgttaaggaccgcccctatccagcccagagtgtgggagcctgtcccactcgaggaagtgcagcttgtcgtcgaaccagaggggggcgcagttgcccctggtggcaccgttacccttacatgtgaggtccctgcacagccctctccccaaattcattggatgaaagatggagtcccattacctctgccaccatcccctgtgctgatactgccagagatcggccctcaagatcagggcacgtattcctgtgtcgcaacccattcttctcatggcccccaggagtctagggccgtgtcaatctctattatcggcagcgtagggggtagcggcttggggacgctcgctctcgctcttggtatcttagggggattgggaaccgccgcactattgattggcgtgatactatggcagaggagacagcggaggggcgaagaaagaaaggctccagagaaccaggaagaagaggaagaaagggctgaactgaaccagtccgaggaacccgaagcgggagaaagtagcaccggcgggccttag

SEQ ID NO: 82807 - DNA, 402 bp, Artificial Sequence
  derived and/or modified sequence
atgaaggacggcgtgcccctgcccctgccccccagccccgtgctgattttaccagagatcggccctcaggatcagggcacatatagttgcgtcgctacccacagttcccatggcccccaggagtcacgtgccgttagcatatcaattatcgagcccggtgaggagggccccacagctggctccgttggaggttctgggcttggcaccctggctctggcgctcggcattctgggcggcctcggcacagccgccttgctcattggcgtgattctgtggcaaagaagacagcgtcgaggggaggaacgaaaagcacccgaaaaccaggaggaggaggaggagagagccgagctgaatcagagcgaggaacccgaggcaggggagtctagcacaggtgggccatag

SEQ ID NO: 82808 - DNA, 402 bp, Artificial Sequence
  derived and/or modified sequence
atgaaggacggcgtgcccctgcccctgccccccagccccgtgctgatcctgcctgagatagggccccaggatcagggcacttatagttgcgtcgcaacacacagctcccatggcccacaggaaagtcgggcggtgtctatttctattatagagccaggcgaggaggggccaacggctggctctgtgggggggtccggactgggcacccttgctctggctctcggcatcctcggcgggctgggaaccgctgccttgctgattggtgttatcctttggcagaggagacaaaggcggggcgaagaacggaaggctcccgagaaccaagaggaggaggaagagagggcagaactcaatcaatctgaggaacctgaggcaggggagtccagtacaggtggcccttag

SEQ ID NO: 82809 - DNA, 402 bp, Artificial Sequence
  derived and/or modified sequence
atgaaggacggcgtgcccctgcccctgccccccagccccgtgctgatccttcctgagataggacctcaggatcagggtacatacagttgcgtagcaacccacagctcacatggtcctcaggagtcccgagccgtgtctatatccatcatagaacctggggaggaagggcctaccgccggttccgtagggggcagcggccttggaacgctggccttagccctcggtattctgggcgggctcgggaccgcagcccttctgatcggagtaattctgtggcagcgacgacagagaaggggggaagagcggaaggcacccgaaaatcaagaagaggaagaggagagagctgagctgaaccaaagtgaggaacccgaagctggcgaaagtagtaccgggggcccttag

SEQ ID NO: 82810 - DNA, 885 bp, Artificial Sequence
  derived and/or modified sequence
atgaaccggaacggcaaggagaccaagagcaactaccgggtgcgggtgtatcaaattccaggaaagcccgagatcgtagactcagcgtccgagctgactgcaggagtgccgaacaaggtggggacgtgcgtcagcgaaggcagctaccctgcaggcactctttcgtggcatctggatggcaagccccttgtgcccaatgagaagggcgtgtccgtgaaggagcaaactcggagacaccctgaaaccggtctgtttacattacagagcgaactaatggtaacacctgcacgggggggcgacccaaggcctaccttctcatgcagcttctcaccagggctacccaggcaccgggctcttaggactgctccaatccaacctcgcgtctgggagccagtgccactcgaagaagtgcagctcgtggtcgagcctgagggcggcgccgtcgcacccggagggactgtgacactcacatgtgaggtccccgcgcagccatctcctcagattcactggatgaaagatggcgttccattacccctgcccccgagtccggtgctaattttgcctgaaatcggcccccaggaccaggggacatacagttgtgtggccacccacagttcgcacggacctcaggagagccgagccgtgagcatcagcattattgggagcgtcggaggatccggtcttggcactctcgccctggcgcttgggattctgggaggcctgggcactgccgctctgctgataggcgtcatcctctggcagagaagacagcgccggggcgaggaaagaaaagcaccagagaaccaggaggaggaggaagagcgggcagagctgaatcagagtgaagagcccgaggctggggagagcagcaccgggggcccatag

SEQ ID NO: 82811 - DNA, 402 bp, Artificial Sequence
  derived and/or modified sequence
atgaaggacggagtgccactgccgctccctccatcaccagtgctgatacttccagaaatcggaccccaggaccagggaacgtacagctgtgtggcgacacacagtagccacggaccacaggaaagcagagctgtgagcatcagcattatagagccaggggaagaggggccaactgctgggtcggtgggagggtccggactcgggaccctagcactggcgcttgggattctgggcggtctgggcactgcagcccttttgatcggagtgatcttgtggcagcggaggcagagaaggggagaggagcgaaaagccccagaaaatcaggaggaagaggaagaacgcgcagaacttaatcagtccgaggagcccgaagcaggggagagtagtactgggggaccttag

SEQ ID NO: 82812 - DNA, 885 bp, Artificial Sequence
  derived and/or modified sequence
atgaacagaaatggaaaagagacaaagagcaattaccgcgtaagggtgtatcagattcccggtaagcccgagattgtggatagcgcatctgaactcacggccggtgttcccaataaggtgggaacctgcgtgtccgaaggttcctaccccgcaggaaccctgtcgtggcatttggatggcaagcccttagtccctaacgaaaagggggtcagtgtgaaggagcaaacccggagacatcccgaaactgggctattcaccctccagagtgaactaatggttacacccgcacgcggaggagaccctcgacctacattttcatgctcgtttagtcctggtcttcctcgtcatagagcgctgaggacagcacccatccagccgagagtttgggaaccagtgcccctggaagaggttcaactcgtggtggagcccgagggcggtgccgtagccccaggtggcacggtgactctgacatgcgaagtaccagctcagccttccccgcagatacattggatgaaggatggagttccgctcccactccccccatcccctgtgcttatcctgcctgaaatcggccctcaggatcagggcacatatagctgcgttgcaacacactctagccatggcccacaagagagccgcgcagtgtccatttctattattggcagcgtggggggatctggtctaggtactcttgcgctcgcactgggaatcctggggggtttgggtaccgccgctctgctgattggggtgatcttatggcaacggcgtcaaaggagaggagaagaacgaaaggctcccgaaaaccaagaggaggaagaggaacgcgcagaattaaaccaatccgaggagccggaggccggagagtcaagtaccgggggaccatag

SEQ ID NO: 82813 - DNA, 885 bp, Artificial Sequence
  derived and/or modified sequence
atgaaccgcaacggaaaggaaacaaagagcaattaccgcgtgagagtttaccagatcccaggtaaacccgagattgtcgactctgcatctgaactgactgccggtgtgcctaataaagtgggcacgtgcgtgtctgagggtagttacccagcaggcactctgagctggcacttggacggaaagcctctggtccccaacgagaagggtgtgagcgtaaaagaacaaacccgacggcatcctgagaccggcctctttaccctccagtctgagctcatggttactcccgctcggggtggagatcctagacccaccttcagctgctctttcagcccaggcctgcccagacatagggcactgaggactgcccctatacagcccagggtttgggagcctgtgccattagaagaggtgcagctggtggtcgagcccgaggggggtgccgtcgcaccgggtggcaccgtcaccctcacttgtgaggtacccgctcagccgagccctcagattcattggatgaaggatggcgttcctctgcccctgcctccatctcctgtgcttattctgcctgaaatcggtcctcaggaccagggcacctattcctgtgtggcaacacactctagccacggcccacaggaaagcagagctgtaagtatcagcattattggcagcgtcggcggttcaggcctcggcaccctagcactggcgctaggaattctcggtggactgggaactgctgcccttctgattggcgttatattgtggcagcggagacagagacgcggagaagaaagaaaagcccctgagaaccaggaggaggaggaggagcgagctgaactgaaccagtccgaggagccggaagccggtgagagctcgaccgggggtccttag

SEQ ID NO: 82814 - DNA, 885 bp, Artificial Sequence
  derived and/or modified sequence
atgaacagaaatggcaaggaaactaagtcaaactaccgtgtacgcgtctaccagatccccggaaagcccgagattgtcgatagtgcctcagaactcaccgccggagtccccaataaggtcggcacctgcgtgtccgaggggtcttatccagccggaaccctgagctggcacctggacggaaagcctcttgttccaaatgagaagggcgtgtcagtgaaggagcagacacgcaggcatcccgaaacagggctcttcacactgcagtccgagctgatggtcacgcccgctcgcggaggcgatcccagacctaccttcagctgttcattcagtcccggtttaccccgacatagggctcttcggaccgctcctattcagcctcgggtgtgggagcctgttccactggaagaagtacaactcgtagtggaacccgaagggggagcagtagcacccggtggcaccgtcacactgacttgtgaggtccctgcccagccttcaccacagatccactggatgaaggacggagttcctctgcctctccctccttcaccagttctcattctgccagagatcggacctcaggatcagggcacctactcttgtgtagcaactcactccagtcatggtcctcaggaaagtagggccgtgtccatttcaatcatcggctctgtgggcggttctggtctaggaacgctggcactggcactgggcatcctcggcggattaggaaccgcagctcttcttatcggagtgattctctggcagcgcaggcaaagaagaggggaagagcggaaagcgcctgagaaccaggaggaagaggaggagagggcagagctcaaccaaagcgaggagcctgaggccggtgaatcatccactggcggtccatag

SEQ ID NO: 82815 - DNA, 402 bp, Artificial Sequence
  derived and/or modified sequence
atgaaagatggggtgcctctgccattgccaccatcccctgtcctgatcctgcccgaaatcggacctcaagatcaaggaacttattcctgcgtcgccacgcattctagccatgggcctcaagagtccagagctgtaagtattagcatcattgaaccaggcgaggagggacctaccgctggtagcgttggagggtcaggcctggggactttagctctcgcactaggcatattgggcggactcggtaccgcagcactgttgataggggtcatcctgtggcagagaagacagaggcgcggagaagaacgcaaggccccagaaaaccaggaggaagaagaggagcgggcagagctgaaccagagtgaggaaccggaggccggagaatcaagtactgggggaccctag

SEQ ID NO: 82816 - DNA, 885 bp, Artificial Sequence
  derived and/or modified sequence
atgaacagaaacggaaaagaaactaaaagcaattacagggttcgcgtttaccagatacccggaaagcccgagatcgttgactctgcctctgaattaacggccggagtgcccaacaaggttggtacctgtgtcagcgagggatcttaccccgcaggcacgctgagctggcacctggacggcaaaccactcgtgcctaacgaaaagggtgtcagcgtcaaagaacagaccaggaggcacccggaaactggtctgttcacactgcagtctgagctgatggtcactccggcaagaggaggggacccccgacctactttttcctgctctttctctcctggtctccctaggcaccgcgctctccgaacggcacctatccaacctcgtgtatgggaacctgtccctctggaggaggttcagctcgtggttgaacccgaaggtggtgccgtggctcccggtggtaccgttaccctgacctgcgaagtccccgctcaaccctcacctcaaattcattggatgaaggatggggtaccattgccccttccaccttccccagtccttatcctgccagaaatcggccctcaagatcagggcacatacagttgcgtggccacccactcctcacatggtcctcaagagagcagggccgtaagtatctcgataatcggtagcgtgggtggcagcggactgggaactttagcgctggccctggggattctcgggggactgggtaccgccgcattgctaattggcgtgatcctttggcagcgcaggcagcgacggggagaggaacgaaaggctccggaaaatcaggaggaagaggaggagagggcggagctaaatcagtcagaggagcctgaggccggagagagttccacaggcggaccctag

SEQ ID NO: 82817 - DNA, 402 bp, Artificial Sequence
  derived and/or modified sequence
atgaaagacggggtacctctccctttgccaccatcaccggtgctgatcctgcctgaaattggacctcaggaccaaggaacctatagttgcgtcgctacacatagcagccatgggcctcaggagtcacgcgctgtgtccatcagcataatcgagcccggagaagaagggcctacggctggatccgtggggggaagcgggttaggtactcttgccctggctctgggaatactcggtggcctgggcactgcggctttattgataggggtgatcttatggcagagacggcagaggagaggcgaagagaggaaggcgcctgaaaatcaagaggaggaggaagagcgggcagaacttaaccagtcggaagagcccgaggcaggagagtcctccactggcggaccttag

SEQ ID NO: 82818 - DNA, 885 bp, Artificial Sequence
  derived and/or modified sequence
atgaaccgcaacgggaaggaaactaaaagcaactatagagtgagggtctaccagattccaggcaagccagagatcgtggattccgcttccgagctgacggctggcgtccccaacaaagtcggaacttgtgtgagtgagggaagttatcctgccggtacactgtcctggcatctggatggcaagcccctagtgcctaatgagaaaggcgttagcgtcaaagaacagacgcgcagacaccctgagacagggctgtttacactgcagtctgaactgatggtaacaccagccagaggtggcgaccccagaccgactttctcatgctcttttagcccaggcctgcctcgacacagagcgctccgtaccgcacccattcagcccagggtttgggagcccgtccccttggaagaagtgcagttagtagttgagcctgaaggcggagctgtggccccaggcggaaccgtaaccctgacgtgtgaggtgcctgcccagccttctccacaaattcattggatgaaagatggggttcctctccccttgccccctagtcccgttttgattctgcctgaaatcggacctcaggatcagggaacctactcctgtgtcgccactcactcaagtcacggccctcaggaaagccgtgcagtgtccattagcatcattggaagcgtcgggggatcaggcctgggaactttggctctcgcattaggcatcttgggaggtctaggtaccgccgcattgctgattggcgtaattctgtggcagcgcagacagaggagaggcgaggagcggaaggctcccgaaaaccaagaagaggaagaggagcgcgcagagttaaaccaaagcgaggagcctgaagctggcgagtcaagcaccggtggcccttag

SEQ ID NO: 82819 - DNA, 402 bp, Artificial Sequence
  derived and/or modified sequence
atgaaggacggcgtgcctctccctctccctccaagccctgtcctgattctaccagagatcggaccccaggatcagggcacctattcctgtgttgccactcactccagccacggtcctcaggaaagtcgcgctgtctcaatttctatcatcgagccaggcgaggaaggcccaaccgccggatcagtgggcggaagtggcctcggcactctggcgctggccctgggaattctggggggtctcgggaccgctgcactgttaattggcgtgatcctgtggcagcgcagacagcggaggggggaggagcgcaaagcccctgaaaaccaggaggaggaagaagagagggccgaattaaatcaatctgaggagccagaggcaggtgaaagctctaccggtgggccatag

SEQ ID NO: 82820 - DNA, 402 bp, Artificial Sequence
  derived and/or modified sequence
atgaaggacggcgtccctttaccgctgcccccatctcctgtgctgatcttgcctgaaatagggccacaggaccagggtacctacagttgcgtggccacccattcttctcatgggcctcaggagagtagggccgtgagtatctcaataattgagccaggtgaggaagggcctacggcaggttccgttgggggaagcggcctcggcaccctggctttggcgctggggattcttggaggactcgggaccgctgcattgcttatcggagtgatcctgtggcagagacggcaacggaggggtgaggagcgtaaggctcccgaaaaccaggaggaagaggaagaacgggcagaactgaaccagtcagaggaacccgaggccggagaatcatccacagggggtccttag

SEQ ID NO: 82821 - DNA, 402 bp, Artificial Sequence
  derived and/or modified sequence
atgaaagacggcgtgccactgcctttgcccccttcccccgtcctgatccttccagagatcgggccacaggatcaggggacgtattcgtgcgtcgccacccactcctcgcatggcccacaggagtctcgggcagtaagtattagtatcatcgaaccaggcgaggagggacctactgcaggcagcgtcggaggctcaggactgggaaccctcgccctggctctggggatcctgggcggtctgggaaccgccgctctgctgataggggtgatcctgtggcagcggaggcagagaaggggtgaggagaggaaggcccctgaaaaccaagaggaggaggaagaaagagctgaattaaatcagagtgaggagcccgaagctggggaatccagcacgggagggccatag

SEQ ID NO: 82822 - DNA, 885 bp, Artificial Sequence
  derived and/or modified sequence
atgaaccgaaatggcaaggagactaagtctaactatcgcgtgcgcgtctaccagattcctggaaagccggaaatcgttgattctgcttctgaactgaccgccggagtaccaaataaagttggaacctgtgtgagtgaaggtagttatcctgcgggaaccctgagctggcatctggatggcaagccacttgtacccaacgaaaagggggtttcagtgaaggaacaaactaggcgacatccggaaaccggcctgttcactctccaaagcgagcttatggtcactcccgctcgcggtggagaccccagacccacattctcgtgctccttttcgcctggtctccctcgccaccgggcactgcgtaccgccccaattcagcctagagtgtgggagccagtgcctttggaggaggtccagttggttgttgagcctgaaggcggagccgtggcgcctgggggaactgtgaccctgacctgcgaagtaccggctcaaccaagtccccaaatccattggatgaaggatggggtcccattacctctgcctccatcccctgtgcttattctccctgagataggaccccaagatcaggggacctattcttgcgttgcaacccattcgtcccacgggcctcaggagagccgtgctgtgtccattagcatcataggtagtgtcgggggatctggactggggacattggccctagccctgggaatattggggggtctcgggaccgccgcattgctgatcggggttattctgtggcaacggcgtcaacgtcgtggggaagaacgaaaggcccctgagaaccaggaagaagaagaagagagagccgagctcaatcagtcggaggagccagaggccggagagtcctccacaggcggaccctag

SEQ ID NO: 82823 - protein, 153 aa, Artificial Sequence
  derived and/or modified sequence
MAAGTAVGAWVLVLSLWGAVVGAQNITARIGEPLVLKCKGAPKKPPQRLEWKLNTGRTEAWKVLSPQGGGPWDSVARVLPNSSLFLPAVGIQDEGILGGLGTAALLIGVILWQRRQRRGEERKAPENQEEEEERAELNQSEEPEAGESSTGGP

SEQ ID NO: 82824 - protein, 121 aa, Artificial Sequence
  derived and/or modified sequence
MAAGTAVGAWVLVLSLWGAVVGAQNITARIGEPLVLKCKGAPKKPPQRLEWKLNTGRTEAWKVLSPQGGGPWDSVARVLPNSSLFLPAVGIQDEGIFRCQAMNRNGKETKSNWWWSQKVEQ

SEQ ID NO: 82825 - protein, 363 aa, Artificial Sequence
  derived and/or modified sequence
MAAGTAVGAWVLVLSLWGAVVGAQNITARIGEPLVLKCKGAPKKPPQRLEWKLNTGRTEAWKVLSPQGGGPWDSVARVLPNSSLFLPAVGIQDEGIFRCQAMNRNGKETKSNYRVRVYQIPGKPEIVDSASELTAGVPNKVVEESRRSRKRPCEQEVGTCVSEGSYPAGTLSWHLDGKPLVPNEKGVSVKEQTRRHPETGLFTLQSELMVTPARGGDPRPTFSCSFSPGLPRHRALRTAPIQPRVWEPVPLEEVQLVVEPEGGAVAPGGTVTLTCEVPAQPSPQIHWMKDGVPLPLPPSPVLILPEIGPQDQGTYSCVATHSSHGPQESRAVSISIIEPGEEGPTAGEGFDKVREAEDSPQHM

SEQ ID NO: 82826 - protein, 121 aa, Artificial Sequence
  derived and/or modified sequence
MAAGTAVGAWVLVLSLWGAVVGAQNITARIGEPLVLKCKGAPKKPPQRLEWKLNTGRTEAWKVLSPQGGGPWDSVARVLPNGSLFLPAVGIQDEGIFRCQAMNRNGKETKSNWWWSQKVEQ

SEQ ID NO: 82827 - protein, 363 aa, Artificial Sequence
  derived and/or modified sequence
MAAGTAVGAWVLVLSLWGAVVGAQNITARIGEPLVLKCKGAPKKPPQRLEWKLNTGRTEAWKVLSPQGGGPWDSVARVLPNGSLFLPAVGIQDEGIFRCQAMNRNGKETKSNYRVRVYQIPGKPEIVDSASELTAGVPNKVVEESRRSRKRPCEQEVGTCVSEGSYPAGTLSWHLDGKPLVPNEKGVSVKEQTRRHPETGLFTLQSELMVTPARGGDPRPTFSCSFSPGLPRHRALRTAPIQPRVWEPVPLEEVQLVVEPEGGAVAPGGTVTLTCEVPAQPSPQIHWMKDGVPLPLPPSPVLILPEIGPQDQGTYSCVATHSSHGPQESRAVSISIIEPGEEGPTAGEGFDKVREAEDSPQHM

SEQ ID NO: 82828 - protein, 153 aa, Artificial Sequence
  derived and/or modified sequence
MAAGTAVGAWVLVLSLWGAVVGAQNITARIGEPLVLKCKGAPKKPPQRLEWKLNTGRTEAWKVLSPQGGGPWDSVARVLPNGSLFLPAVGIQDEGILGGLGTAALLIGVILWQRRQRRGEERKAPENQEEEEERAELNQSEEPEAGESSTGGP

SEQ ID NO: 82829 - DNA, 702 bp, Artificial Sequence
  derived and/or modified sequence
atggcagcaggtactgctgtgggggcttgggttctcgtgcttagcctgtggggcgcagttgtgggcgctcaaaacataaccgcccgaataggcgaacctctcgtgctgaagtgcaaaggcgctcccaaaaagcccccccagcgcttggagtggaagctgaataccggaagaacagaagcctggaaagtcctgtcgcctcagggaggcgggccgtgggacagcgtggcccgtgtcctgccaaactcttctttattcttgccagccgtgggcattcaggacgaggggatattcaggtgtcaggctatgaataggaatggcaaagaaaccaaaagcaattatagagtaagagtctaccagattccaggcaagcccgaaatagtggattccgcttccgagctcacagctggcgtgccgaataaggtggtcgaggaaagtagaagatcccggaaacggccatgtgaacaggaagtcgggacttgtgtaagcgaaggatcttaccccgccggcacactgtcctggcacctggatggcaaaccactggttccaaacgaaaaaggggttagtgtgaaagaacagaccagacgccatcccgaaactggcctgtttacccttcagagcgaactaatggtcacccccgcgcgggggggggacccacggcctacatttagttgtagcttctcacccggcttaccaaggcactag

SEQ ID NO: 82830 - DNA, 1092 bp, Artificial Sequence
  derived and/or modified sequence
atggctgctggcaccgcggttggggcatgggtgctcgtgctgtccctgtggggcgcagtcgttggcgcccagaacattaccgcacgcataggggagcctctcgtgcttaagtgcaagggtgcccccaagaaacccccccaaaggttagagtggaaactgaacactgggcgtacagaggcgtggaaagtgttgtccccacaggggggggggccctgggactccgtggcaagggtgctcccgaatagcagcttgtttctgcccgcagtggggatccaggatgaggggatctttaggtgtcaggccatgaatcggaatggaaaggagaccaaatccaactatcgagtgcgcgtctatcagatcccgggaaagcccgagatcgtcgatagcgctagcgaactgactgcaggcgtgccaaataaagtggtggaggagagtcgccgcagcaggaaacgaccctgtgagcaagaagtaggaacttgcgtaagcgaggggtcataccctgctggtaccttgtcatggcacctggatggaaagcctctggtgcctaatgagaaaggggtgtctgtcaaggagcagaccaggcgccatcccgagacggggcttttcacgctgcaatctgaactgatggtgacccctgctcgcgggggagaccccagacccacctttagttgttctttttcaccgggtctccctcggcacagagcactccgcacagcccctattcaaccccgcgtttgggagcccgtgcccctcgaggaagtacaattggtagtggaaccagagggcggtgctgtcgcaccgggaggtacagtaacccttacttgtgaggttccggcccagccaagtcctcagatccattggatgaaggatggggtgcccttacctttacccccatctcccgtgcttatcctcccggagatcggccctcaggatcaggggacatattcttgtgtggccacccactcatctcacggcccacaggaaagccgggctgtgagcattagtatcattgagcctggggaggaaggacctactgccggtgaaggatttgacaaagtgagggaggcagaggattctccccagcatatgtag

SEQ ID NO: 82831 - DNA, 702 bp, Artificial Sequence
  derived and/or modified sequence
atggctgctggaacagctgtgggcgcctgggtgctggtgctgagcctgtggggcgctgtggtgggcgcccagaacatcacagcccgcatcggggagcccctggtgctgaagtgcaagggggcccccaagaagccaccccagaggctggagtggaagctgaacacaggccgcacagaggcctggaaggtgctgagcccccagggcggcggcccctgggacagcgtggcccgggtgctgcccaacagcagcctcttcctgcctgctgtgggcatccaggatgagggcatcttccgctgccaggccatgaacagaaatggcaaggagaccaagagcaactacagagtgcgggtgtaccagatccctgggaagccagagatcgtggacagcgccagcgagctgacagctggggtgcccaacaaggtggtggaggagagccgccgcagcaggaagaggccctgtgagcaggaggtgggcacctgtgtgtctgagggcagctacccagctggcaccctgtcctggcacctggatggcaagcccctggtgcccaatgaaaaaggagtgtctgtgaaggagcagacccggcggcaccctgagaccggcctcttcaccctgcagagcgagctgatggtgaccccagcccggggcggggacccccggcccaccttcagctgcagcttcagccctggcctgcccaggcactag

SEQ ID NO: 82832 - DNA, 1092 bp, Artificial Sequence
  derived and/or modified sequence
atggctgctggaacagctgtgggcgcctgggtgctggtgctgagcctgtggggcgctgtggtgggcgcccagaacatcacagcccgcatcggggagcccctggtgctgaagtgcaagggggcccccaagaagccaccccagaggctggagtggaagctgaacacaggccgcacagaggcctggaaggtgctgagcccccagggcggcggcccctgggacagcgtggcccgggtgctgcccaacagcagcctcttcctgcctgctgtgggcatccaggatgagggcatcttccgctgccaggccatgaacagaaatggcaaggagaccaagagcaactacagagtgcgggtgtaccagatccctgggaagccagagatcgtggacagcgccagcgagctgacagctggggtgcccaacaaggtggtggaggagagccgccgcagcaggaagaggccctgtgagcaggaggtgggcacctgtgtgtctgagggcagctacccagctggcaccctgtcctggcacctggatggcaagcccctggtgcccaatgaaaaaggagtgtctgtgaaggagcagacccggcggcaccctgagaccggcctcttcaccctgcagagcgagctgatggtgaccccagcccggggcggggacccccggcccaccttcagctgcagcttcagccctggcctgcccaggcaccgggccctgaggacagcccccatccagccccgggtgtgggagcctgtgcccctggaggaggtgcagctggtggtggagcctgagggcggcgctgtggcccctgggggcaccgtgaccctgacctgtgaggtgcctgcccagcccagcccccagatccactggatgaaggatggagtgcccctgcccctgccccccagccctgtgctgatcctgcctgagatcggcccccaggaccagggcacctacagctgtgtggccacccacagcagccacggcccccaggagagcagagctgtgtccatcagcatcatcgagcctggagaggagggccccacagctggggagggctttgacaaggtgcgggaggccgaggacagcccccagcacatgtag

SEQ ID NO: 82833 - DNA, 702 bp, Artificial Sequence
  derived and/or modified sequence
atggccgccggcaccgccgtgggcgcctgggtgctggtgctgagcctgtggggcgcggtggtgggcgctcagaacataactgctcgtattggtgaacctctcgtgttaaagtgtaaaggcgcccctaagaaacccccacaacggctggaatggaaattaaatacaggccgcacggaagcttggaaggtcctgtcaccccaaggaggaggtccttgggattcagtcgcacgggtgcttcctaatagttctcttttcctcccggcagtgggcatccaggatgagggaatatttcggtgccaggcaatgaatcgcaatggaaaggagactaagtctaattacagagttcgcgtttaccagatcccagggaagcctgagatcgtagactccgcttctgagttgacagcaggcgtccctaataaggtagtggaagaatcaagaagatctcgaaagcgcccctgtgagcaagaagtggggacatgtgtgtccgaaggatcatatccagccgggacattgagctggcacttggacggcaagcccctggtgccgaacgagaagggggtgtcagtcaaggaacagacacggcgtcatccagagactggtctcttcaccttgcaaagcgagcttatggtgacccccgccagagggggcgaccctaggccgaccttttcctgtagtttcagtcccggcctgcctcgccactag

SEQ ID NO: 82834 - DNA, 1092 bp, Artificial Sequence
  derived and/or modified sequence
atggccgccggcaccgccgtgggcgcctgggtgctggtgctgagcctctggggtgctgtggtcggcgcccagaacataactgcaaggattggggagccgttagtcctaaagtgcaaaggagccccaaaaaaacccccccagcgcttggagtggaagctgaacactggacggacagaagcctggaaggttctgtcaccccaggggggaggtccttgggactcagtcgccagggtcttgccaaattcctcactgttcctgccagccgtcggcatccaggacgagggaatcttccggtgtcaggccatgaatagaaatggcaaagagactaaatccaattacagagttagagtttaccagatacccggaaagcccgagatcgtggattcggcgtcggagttgactgctggagtgcctaacaaagtcgtcgaggagtcccgcagatctcggaaaaggccttgtgagcaggaagttggcacatgtgtatctgagggatcctatccagccgggacattatcttggcacctcgacggcaaacctctggtccccaacgagaagggcgtctcagtgaaagaacagacccgccgacatccagaaaccggattgttcacattgcagtctgagcttatggtaacccctgctcgtggaggcgatcctcgacctacgtttagttgcagtttttcacctggtctgccccgccacagggccctgaggaccgcaccaattcagccaagagtgtgggaaccagtgccactggaagaggtgcagttggtggtggagcccgaagggggcgcagtcgccccaggaggcaccgtcaccttgacatgtgaggtacccgcacagccttcacctcagattcattggatgaaggatggcgtgccgttacccttgccccctagccccgtgttaatcttacccgagatagggccccaggatcagggaacatattcctgtgtcgccacacactccagtcatggtccccaggaaagcagagctgtatccatatcgattatcgaacctggcgaggaaggtcctacagctggggagggattcgataaggtcagagaagccgaagactcacctcagcacatgtag

SEQ ID NO: 82835 - DNA, 715 bp, Artificial Sequence
  derived and/or modified sequence
ctggaaggaagcaggatggcagccggaacagcagttggagcctgggtgctggtcctcagtctgtggggggcagtagtaggtgctcaaaacatcacagcccggattggcgagccactggtgctgaagtgtaagggggcccccaagaaaccaccccagcggctggaatggaaactgaacacaggccggacagaagcttggaaggtcctgtctccccagggaggaggcccctgggacagtgtggctcgtgtccttcccaacagctccctcttccttccggctgtcgggatccaggatgaggggattttccggtgccaggcaatgaacaggaatggaaaggagaccaagtccaactaccgagtccgtgtctaccagattcctgggaagccagaaattgtagattctgcctctgaactcacggctggtgttcccaataaggtagtggaagaaagcaggagaagtagaaaacggccctgtgaacaggaggtggggacatgtgtgtcagagggaagctaccctgcagggactcttagctggcacttggatgggaagcccctggtgcctaatgagaagggagtatctgtgaaggaacagaccaggagacaccctgagacagggctcttcacactgcagtcggagctaatggtgaccccagcccggggaggagatccccgtcccaccttctcctgtagcttcagcccaggccttccccgacacc

SEQ ID NO: 82836 - DNA, 1249 bp, Artificial Sequence
  derived and/or modified sequence
aggaagcaggatggcagccggaacagcagttggagcctgggtgctggtcctcagtctgtggggggcagtagtaggtgctcaaaacatcacagcccggattggcgagccactggtgctgaagtgtaagggggcccccaagaaaccaccccagcggctggaatggaaactgaacacaggccggacagaagcttggaaggtcctgtctccccagggaggaggcccctgggacagtgtggctcgtgtccttcccaacagctccctcttccttccggctgtcgggatccaggatgaggggattttccggtgccaggcaatgaacaggaatggaaaggagaccaagtccaactaccgagtccgtgtctaccagattcctgggaagccagaaattgtagattctgcctctgaactcacggctggtgttcccaataaggtagtggaagaaagcaggagaagtagaaaacggccctgtgaacaggaggtggggacatgtgtgtcagagggaagctaccctgcagggactcttagctggcacttggatgggaagcccctggtgcctaatgagaagggagtatctgtgaaggaacagaccaggagacaccctgagacagggctcttcacactgcagtcggagctaatggtgaccccagcccggggaggagatccccgtcccaccttctcctgtagcttcagcccaggccttccccgacaccgggccttgcgcacagcccccatccagccccgtgtctgggagcctgtgcctctggaggaggtccaattggtggtggagccagaaggtggagcagtagctcctggtggaaccgtaaccctgacctgtgaagtccctgcccagccctctcctcaaatccactggatgaaggatggtgtgcccttgccccttccccccagccctgtgctgatcctccctgagatagggcctcaggaccagggaacctacagctgtgtggccacccattccagccacgggccccaggaaagccgtgctgtcagcatcagcatcatcgaaccaggcgaggaggggccaactgcaggtgaggggtttgataaagtcagggaagcagaagatagcccccaacacatgtgactggggggatggtcaacaagaaaggaatggaaggccccagaaaaccaggaggaagaggaggagcgtgcagaactgaatcagtcggaggaacctgaggcaggcgagagtagtactggagggccttgaggggcccacagacagatccca

SEQ ID NO: 82837 - DNA, 702 bp, Artificial Sequence
  derived and/or modified sequence
atggccgcaggtactgcagtaggtgcctgggtgctggtgctgagcctgtggggggctgtcgtgggtgcccaaaatattactgcaaggataggcgagcctttggtgctgaagtgcaaaggtgcaccgaaaaaacctccacaacgcctcgagtggaagttgaatacgggtaggactgaggcctggaaggtcttgtctccgcaggggggaggcccatgggacagtgtcgccagggttttgccaaattcctccctgtttctaccggcagttggtatccaggatgagggcatcttccgatgtcaggcaatgaaccggaacggcaaagaaacaaagtccaactaccgcgtccgagtgtaccagataccaggaaaacccgagattgtcgatagcgcttctgagctcactgcgggagtcccaaacaaagtcgtggaggaatctcgacgaagccgaaagaggccttgtgagcaggaagtggggacctgtgtgtctgaggggagctatccagccggaacactgtcgtggcacctagatggtaagccgctagtgccgaacgagaagggcgttagcgtgaaagagcagactcgaagacatcctgagacaggccttttcaccctacagagcgaacttatggtgaccccagccagaggtggcgatccgagaccaactttttcttgctcttttagtccaggcctacctaggcattag

SEQ ID NO: 82838 - DNA, 1092 bp, Artificial Sequence
  derived and/or modified sequence
atggcagccggaaccgcagtgggagcatgggttttggtcctctcactctggggtgcagtggttggcgcacagaatattaccgcaagaatcggcgaacccctggtcctgaagtgcaagggagcaccaaagaaaccaccgcagaggctcgaatggaagttaaatactggcagaacggaagcttggaaggtgctgagtccgcagggagggggaccgtgggatagtgtcgcacgcgttctgcccaattcttctctgtttcttccagccgttggcatccaggatgaaggaattttcaggtgccaagctatgaaccgaaacggcaaggagactaaatctaactaccgggtgcgtgtataccaaattcctggaaagcccgagattgttgactccgcatctgaactcaccgctggcgttcccaataaggttgttgaagaaagcaggcgtagtcgaaagcgcccatgcgaacaagaggtgggtacatgtgtgtcggaggggagctaccctgcaggtaccttgtcatggcatcttgacgggaagcccctggttcccaacgagaaaggggtgtcagtaaaagaacagacaagacgccacccagaaactggcctgttcacgctccagtcagagctgatggtaactcctgcacggggtggcgaccccaggcctacgttcagctgttctttcagccccggactcccccgacaccgggcactgagaacggcgccaatccagccgcgagtctgggagccggtgccactggaggaagtccagctagtcgtggaacctgagggaggcgcagtggcccctggcggtacagttaccctgacctgcgaggtgccagcccagccgagcccgcaaatccattggatgaaggatggtgtgccgctgcccttaccgccttctcccgtgctaattctgcctgagattggccctcaggaccagggaacctactcgtgtgttgcaacccacagctcacatggccctcaggaaagccgggcagttagcatcagcatcatcgagccgggtgaggagggaccaaccgctggggaagggtttgataaggtccgggaggctgaggatagtccacaacatatgtag

SEQ ID NO: 82839 - DNA, 702 bp, Artificial Sequence
  derived and/or modified sequence
atggccgccggcaccgccgtgggcgcctgggtgctggtgctgagcctgtggggcgccgtggtgggcgcccagaacatcaccgccagaatcggcgagcccctggtgctgaagtgcaagggcgcccccaagaagcccccccagagactggagtggaagctgaacaccggcagaaccgaggcctggaaggtgctgagcccccagggcggcggcccctgggacagcgtggccagagtgctgcccaacagcagcctgttcctgcccgccgtgggcatccaggacgagggcatcttcagatgccaggccatgaacagaaacggcaaggagaccaagagcaactacagagtgagagtgtaccagatccccggcaagcccgagatcgtggacagcgccagcgagctgaccgccggcgtgcccaacaaggtggtggaggagagcagaagaagcagaaagagaccctgcgagcaggaggtgggcacctgcgtgagcgagggcagctaccccgccggcaccctgagctggcacctggacggcaagcccctggtgcccaacgagaagggcgtgagcgtgaaggagcagaccagaagacaccccgagaccggcctgttcaccctgcagagcgagctgatggtgacccccgccagaggcggcgaccccagacccaccttcagctgcagcttcagccccggcctgcccagacactag

SEQ ID NO: 82840 - DNA, 1092 bp, Artificial Sequence
  derived and/or modified sequence
atggccgccggcaccgccgtgggcgcctgggtgctggtgctgagcctgtggggcgccgtggtgggcgcccagaacatcaccgccagaatcggcgagcccctggtgctgaagtgcaagggcgcccccaagaagcccccccagagactggagtggaagctgaacaccggcagaaccgaggcctggaaggtgctgagcccccagggcggcggcccctgggacagcgtggccagagtgctgcccaacagcagcctgttcctgcccgccgtgggcatccaggacgagggcatcttcagatgccaggccatgaacagaaacggcaaggagaccaagagcaactacagagtgagagtgtaccagatccccggcaagcccgagatcgtggacagcgccagcgagctgaccgccggcgtgcccaacaaggtggtggaggagagcagaagaagcagaaagagaccctgcgagcaggaggtgggcacctgcgtgagcgagggcagctaccccgccggcaccctgagctggcacctggacggcaagcccctggtgcccaacgagaagggcgtgagcgtgaaggagcagaccagaagacaccccgagaccggcctgttcaccctgcagagcgagctgatggtgacccccgccagaggcggcgaccccagacccaccttcagctgcagcttcagccccggcctgcccagacacagagccctgagaaccgcccccatccagcccagagtgtgggagcccgtgcccctggaggaggtgcagctggtggtggagcccgagggcggcgccgtggcccccggcggcaccgtgaccctgacctgcgaggtgcccgcccagcccagcccccagatccactggatgaaggacggcgtgcccctgcccctgccccccagccccgtgctgatcctgcccgagatcggcccccaggaccagggcacctacagctgcgtggccacccacagcagccacggcccccaggagagcagagccgtgagcatcagcatcatcgagcccggcgaggagggccccaccgccggcgagggcttcgacaaggtgagagaggccgaggacagcccccagcacatgtag

SEQ ID NO: 82841 - DNA, 702 bp, Artificial Sequence
  derived and/or modified sequence
atggccgccggcaccgccgtgggtgcctgggtactagtgcttagcctatggggcgcagtggtaggggcccagaacatcactgcaagaatcggcgaacccctcgtgcttaagtgcaagggtgccccaaagaagcccccccagcgactcgaatggaagttaaatactggtcgtacggaagcctggaaggtattaagtccgcaaggggggggtccttgggactccgtggctagggtgcttccaaatggaagcctgtttctgcccgctgtcggtatccaggatgaaggaatctttcgctgtcaggcaatgaacaggaatggtaaggaaacaaagagtaattaccgagtgagagtgtaccagatccctggaaagcccgaaatagtcgatagtgcttcggagctcacggccggcgtgcctaacaaagtcgtggaggagtcacgaaggtcacgaaaacggccttgcgagcaggaggtggggacctgtgtgagcgaaggaagttatcccgcagggactctctcatggcacttggacggcaagcctcttgtgcctaatgagaaaggcgtttctgtgaaggagcagactcggcgccaccccgaaacaggactgtttactctccagtcagaacttatggtgacacccgcccgcggaggcgacccaaggccaactttttcatgtagttttagccctggactgcctaggcattag

SEQ ID NO: 82842 - DNA, 702 bp, Artificial Sequence
  derived and/or modified sequence
atggctgcaggtacagcggtgggagcttgggtgctggttctgagcttgtggggagctgtggtcggtgctcaaaacataacggctcgcataggagaacccctggtactcaaatgcaagggcgctccaaagaaaccccctcagagacttgagtggaaacttaatacaggaagaacggaggcctggaaagtcctctccccacagggaggcggcccttgggactccgtggcccgcgttctgccaaactctagtctttttctacctgctgtggggatccaggacgaaggcatcttcagatgtcaagcaatgaatagaaacggcaaagaaacgaaatccaactacagggtacgggtttatcagattccgggcaagccagagatcgtggactccgcgtctgaactgacagcaggagtgcccaacaaagtggtggaagagagccggcgttcgcggaagcgcccttgcgaacaggaggtcggcacctgcgtgtctgaaggctcatatcccgccggtaccttaagctggcacctggatggtaagcctctggtgccgaatgagaagggcgtcagtgtgaaggagcagactcgaaggcaccccgagaccggactttttactctccaatcagagttgatggtgacacccgcacgcggtggggaccctcggccaacgttttcctgctccttttcacccgggctcccacgtcattag

SEQ ID NO: 82843 - DNA, 702 bp, Artificial Sequence
  derived and/or modified sequence
atggctgctgggaccgcggtgggggcttgggtcttagtcctatctctgtggggcgccgtcgtcggtgcacagaacatcacggcacgcataggcgagcctctggtcctgaaatgtaagggggctcccaagaaacctccccagcgcctggagtggaagcttaacacaggaagaaccgaggcctggaaagtactttctccgcagggggggggtccatgggattctgtcgctagggtgctaccgaatggctctctgttcctgcctgccgtagggatccaggatgagggcattttccgctgccaggccatgaatagaaatgggaaagagactaaaagcaactatagggtcagggtgtaccagatacctgggaagcctgaaatcgtggactctgcctcagagctcacggctggagtccctaataaagtcgtggaggagtccaggcgcagcagaaaaagaccctgcgagcaggaggtgggcacctgcgtctcggaaggtagttatccagcggggactctctcttggcatctggatggtaagccactagtaccaaatgagaaaggggtcagcgtcaaggagcagacacggagacatcccgagacagggctcttcacattacaaagtgaattaatggttaccccggctcgcggaggtgacccaagacccacattctcctgttcattctctcctgggctgccccgccactag

SEQ ID NO: 82844 - DNA, 702 bp, Artificial Sequence
  derived and/or modified sequence
atggcggccggcaccgcagtgggtgcgtgggtgctggtgcttagcttgtggggagccgtcgtgggcgcccagaacataacagctcgcatcggcgaacccctggtgcttaagtgcaagggtgctcccaagaagccgccccaacggctagagtggaagctgaatacgggccggacggaagcgtggaaagtactctctccacaaggtggggggccttgggacagcgtggccagagtgctacccaacggctcactgtttctgcccgccgtgggtatccaagatgagggcattttccgatgccaagcaatgaatagaaacgggaaggaaactaaaagtaattaccgcgttcgtgtctatcaaattcctgggaagcctgagatcgtggacagcgcatcagaactgacagcaggagtgccaaacaaggtggtagaggagtcaaggcggtctagaaagagaccatgcgagcaggaagtgggcacctgcgtgtccgaggggtcctatcctgctggcaccctttcttggcacctcgatggaaagcccctggtgccgaatgaaaagggcgttagcgtgaaagagcagacacgtaggcaccccgagacaggtctattcaccctgcagtctgagcttatggttactcccgccagaggtggggacccaaggcccactttctcttgttccttttcccccggcttaccccgccattag

SEQ ID NO: 82845 - DNA, 1092 bp, Artificial Sequence
  derived and/or modified sequence
atggctgctgggaccgcagtgggcgcttgggtgctcgtgcttagcctctggggggcagttgttggcgcacagaatatcacagcccgcataggagagcctcttgtgctcaagtgtaagggcgcacctaagaaacccccacagcggctggagtggaagcttaacactggcagaactgaggcctggaaggtcctctcacctcagggcgggggtccctgggacagcgttgcgcgcgtgctgcccaatggcagcctgttcctgccagcagtgggcatacaggatgaaggcattttcagatgtcaggctatgaatagaaacggcaaggaaactaaatcgaattatagggtcagggtctaccaaatccccggcaaaccagagatcgtcgactccgcttctgaattgactgctggtgttcccaataaagtggttgaagaaagtcgtaggtctcgcaaaaggccctgcgagcaggaggtggggacatgcgtgagtgagggttcctacccggccggaaccttgtcctggcacctagatggcaagccactcgtccctaatgaaaaaggtgtttccgtgaaagagcagactcgtcgacacccagaaaccggccttttcactctccagtccgagttaatggtgacccctgcacggggcggcgacccccggccgaccttctcctgctcctttagcccagggcttcctcggcatagagctttgcgcaccgcccctattcagccacgggtgtgggagcctgttccattggaggaagtgcaactcgttgttgaaccagagggtggcgccgtcgcgcctggcggtaccgtgacgttaacatgtgaagtgcccgcccagccaagcccccagatccactggatgaaagacggcgtaccattgcctttacctccaagtcccgtacttatcttaccagaaattggcccacaggatcaggggacttactcgtgcgttgccactcactctagtcacgggccccaagagtcccgagctgtgtccatcagcataatcgagccaggcgaagaggggcccacggccggagagggcttcgacaaagttcgcgaggctgaggactcccctcagcacatgtag

SEQ ID NO: 82846 - DNA, 702 bp, Artificial Sequence
  derived and/or modified sequence
atggccgcaggtaccgccgtcggagcatgggtcttagtgctcagcctctggggggcggtcgtgggtgctcagaacattaccgctagaatcggggaacctctggtgctaaagtgcaagggggcacctaagaaacccccccaacggcttgagtggaaattgaatacggggcgaaccgaggcttggaaggtgttaagcccccagggcgggggcccttgggacagcgtcgctcgcgtactccctaacgggagtctgtttctgcccgccgtgggtattcaggacgaggggatcttccgatgccaggctatgaacaggaacgggaaggagacaaagtcaaattaccgagtgagagtgtaccagatacccgggaagcccgagatcgtagacagtgcctcagagttaacggccggagtgccaaacaaggtggttgaggaatctcgaaggagtcggaaacggccctgcgagcaagaggtgggaacgtgtgtgagcgagggatcttatcctgccggcacactttcctggcacctggacgggaagccactcgtgccaaatgagaagggagtgtctgtcaaagaacagactagacgacatccagagaccggacttttcaccctgcagagcgagttgatggttacacctgccagggggggtgacccaagaccaaccttctcttgttcattctcaccagggctgccgcgccactag

SEQ ID NO: 82847 - DNA, 702 bp, Artificial Sequence
  derived and/or modified sequence
atggctgcaggcaccgcagtgggagcgtgggtgctggtcctgtccttgtggggggctgtcgtcggcgcgcagaatattactgcacggatcggcgagcctctggtcttaaaatgtaagggggccccaaaaaagcctccccagcgcctcgaatggaagctcaacacaggcagaaccgaggcctggaaggtgttgtcccctcaggggggaggtccatgggattcagtagcccgtgttttgcccaacggcagcctctttctgcctgccgtgggcatccaggatgagggaattttccggtgccaggcaatgaacaggaacgggaaggaaacaaaatcaaattatcgggttcgggtgtatcagattccgggaaagccagaaatcgtggactctgcatcagaactgaccgcgggcgtccctaataaggtggttgaggagagtagacgcagtcgcaaacgtccttgcgaacaggaagtagggacatgtgttagtgaagggtcttaccccgcagggaccctgtcctggcacctcgatggcaaaccattggtgccaaatgaaaagggcgttagtgtcaaggaacagacacgacgacatccagagacgggtctgtttacactccaatccgaactgatggtcaccccagctcggggcggagatccaaggcccactttctcttgtagcttttccccaggactgccacgacattag

SEQ ID NO: 82848 - DNA, 1092 bp, Artificial Sequence
  derived and/or modified sequence
atggcagccggcaccgccgtaggggcatgggtcttggttctgtctctgtggggcgcagtagtgggcgctcagaatatcaccgcccgcatcggagaacctcttgtccttaagtgtaagggagcccccaaaaaacccccgcaacgtttggaatggaaattgaacaccggacgtaccgaggcctggaaggtgctaagcccccagggtggagggccatgggactcagtcgctcgagtacttccaaatggatcactctttctgcccgccgtcggcattcaggatgaggggatctttcgctgccaagcaatgaacagaaatggcaaagaaacaaagagcaactatagagtgcgggtctaccagattccgggtaaaccagagattgttgacagtgccagcgagttaaccgctggagttcccaataaagtggtcgaagaatctaggcggtccaggaaacgtccatgcgagcaggaggtcggcacctgcgtcagcgagggaagctaccccgccggaactctgtcctggcatctggatggcaagccactcgtccccaacgaaaagggtgtatcagtgaaggagcagacacggcgacatccggagaccgggttatttaccctacagagtgagctgatggttaccccagcccgcggtggcgatccaagacctactttctcgtgctctttcagccctggtctgccccgtcaccgtgccctgcgtactgctccaatccagcctagagtctgggagccagtgccactggaagaagtccagttagtagttgaacccgagggcggggctgtggcgcctggcggaactgtcaccctgacctgcgaagttccggcacagccttcgccccagatccattggatgaaggacggtgtgccactgccattaccaccttctccagtcttgattctgccagaaattgggccccaagatcagggaacttatagctgcgtggctacgcactcaagtcatggaccccaagagtctcgcgccgtgagcatcagcataatagagcctggagaagagggcccaacagccggcgagggatttgataaggtgcgggaagccgaggactccccgcagcatatgtag

SEQ ID NO: 82849 - DNA, 1092 bp, Artificial Sequence
  derived and/or modified sequence
atggctgcgggcacagccgtcggcgcctgggtgttggtcttgtctctgtggggagccgtggtcggggcccagaacatcaccgcacgaattggggagccgctcgtcctaaagtgcaagggggcgcccaagaagccaccgcaaagactggaatggaaattgaacactgggcggactgaggcctggaaagttcttagtcctcaaggtggcggtccatgggactcagtggcaagggtgttaccaaatgggtccctttttcttcctgcagtcggcatccaggacgagggaatcttccgttgccaagctatgaacagaaacggtaaagagaccaagagcaactaccgagttcgggtgtatcagatccccggaaagcctgagattgtggactctgctagcgaacttaccgctggggtgccaaataaggtggtcgaggagagtcggcgctcccgtaaacgaccgtgtgagcaagaagtgggcacctgcgttagtgaaggcagttatcctgcaggaactctaagctggcatcttgacgggaaacccctggtcccgaatgagaaaggcgtgagcgttaaggaacagacccgccggcaccctgagactggtctgtttacactacagtcggagctaatggttacaccagcccgaggaggagatccgcgacccaccttctcttgcagtttttcacccggcctcccaagacatagagccctcagaaccgcgcctatacagccccgggtgtgggaaccagtcccactggaggaagtccagctagtcgtagaaccagaaggcggcgcagtggcaccaggagggaccgtgaccctaacctgcgaggtaccagcccagccctcacctcagattcactggatgaaggacggggtgcctctacctctgccgccctcacccgttttgatcctccctgagataggcccacaggaccaaggaacttactcatgtgtggctacacactcttcccacgggccccaagagtctagagctgtgagcatttcaatcattgagcctggggaggaaggtcccactgccggcgaaggatttgacaaggttagggaggcagaagacagccctcagcatatgtag

SEQ ID NO: 82850 - DNA, 1092 bp, Artificial Sequence
  derived and/or modified sequence
atggccgcgggaacagccgtcggagcctgggtcctggtgctgtccctttggggcgcagtcgtcggggcccaaaatataactgcccgtattggagaacccctggtccttaagtgtaaaggcgccccaaaaaaacccccacaaaggcttgaatggaagctaaacaccggaagaacagaagcctggaaggttctctctccccaaggcgggggaccctgggatagtgtagcacgggtcctcccaaacggcagcctctttctaccagctgttggaatccaggacgagggtatctttaggtgccaggctatgaatcgcaacggtaaggagaccaaaagcaactatagggtacgggtttatcagatccctgggaaaccagagatagtggattcggcgtcagaattaaccgcaggtgtaccaaataaggtagtggaggaaagtcgccgcagtcgtaagcggccttgcgagcaggaagtcggcacatgtgtctcagaagggtcctatcctgcaggcacactgagttggcacctggatggaaaacctctcgtccccaacgagaagggggtgtccgtcaaggagcagacaagaagacaccctgagaccgggctgttcactctccagtctgagctgatggtgacgcccgcgcggggaggcgacccacgtccaacattttcatgtagcttctctccgggactgcccagacatcgggctctgcgaaccgctcctatacagcccagggtgtgggaaccagttcctctggaggaggttcaacttgtcgtggagcctgagggcggcgccgttgcccctgggggtaccgtgacactgacttgcgaagtgccggcacaaccaagccctcagattcactggatgaaggatggagtgccactgcctctgcccccctccccagttctaatccttcctgagatcgggcctcaggatcaggggacctacagttgcgtggcgacccattccagccacgggcctcaggagagccgcgccgtctcgattagcatcatagagccaggggaagagggacccaccgcaggcgaggggttcgacaaagtgagagaagccgaggactcgccacaacacatgtag

SEQ ID NO: 82851 - DNA, 1092 bp, Artificial Sequence
  derived and/or modified sequence
atggccgctggcaccgctgtgggtgcttgggtgctggtcctcagcctctggggggcggtggtaggagcacagaatatcaccgccaggattggagaaccactagtgctcaaatgtaaaggggcacctaaaaaacccccacagagactggaatggaagctcaataccggcagaacagaagcctggaaagtcctgtccccccagggaggaggcccctgggactccgtggcccgggtgttgcctaatggcagtctcttcttgccagcagtggggatacaggacgagggaatttttcgttgtcaagccatgaaccgcaatgggaaggagacaaaatccaactacagggtgagagtctaccagatccctggaaagccagaaattgtggattcagcgagcgaacttaccgcgggagtgcccaacaaggtcgtcgaggaatctcgacgttcccgaaagcgcccgtgcgagcaggaggtgggcacatgcgtgtctgagggttcataccctgccgggaccctaagctggcaccttgacgggaagccactggtgccaaatgagaaaggcgttagcgtaaaagaacagaccagaaggcaccccgagacaggtctgttcactttgcaatccgagctcatggttacccccgctaggggtggtgatcctcgccctaccttttcttgcagcttctcacccgggttgccacgtcacagagctctcagaactgctccgatccagccaagagtttgggagcccgtacctcttgaggaggtgcagctggtcgtggagcccgagggaggagctgtggcccccggagggactgtgacgttgacctgtgaagtgccagcccagcccagccctcaaatccattggatgaaggatggtgttccgctgcctctgcccccgtctccagtgttaatcctccctgaaatagggcctcaagaccaggggacttattcttgtgtcgccacccattcctcgcacggccctcaggagtcccgagccgtgtccatttccattatcgaaccaggagaggagggacccacagccggcgagggctttgataaggtgcgggaagccgaagactccccgcaacatatgtag

SEQ ID NO: 82852 - DNA, 1092 bp, Artificial Sequence
  derived and/or modified sequence
atggctgccggcacagccgttggcgcttgggtgcttgtgctgtcactgtggggtgccgttgtgggcgctcagaacatcacagcgagaataggcgaaccgctagtgctgaaatgtaagggggccccgaaaaaaccaccccaacgtctcgagtggaagctcaatacaggacgcacagaggcctggaaggtgctgtctccccagggagggggcccatgggatagtgtcgctcgagtcttacctaacagctctttgttcctgcctgccgtaggaattcaggatgagggcatctttcgctgccaggctatgaacaggaacggcaaagaaacgaagtccaactatcgggtgcgcgtctatcagattcctgggaaacctgagatcgtggacagcgccagcgagctcaccgctggtgttcctaacaaggtggtcgaagaaagccggaggagccggaaacgtccctgcgagcaggaggtgggcacatgcgtgagcgaaggttcctacccggctggcaccctgagctggcatctcgacggcaagcctctggtgcctaacgagaaaggtgtatctgtgaaggagcagactaggagacatcccgagacaggcctattcactttacagtccgaactgatggtcacccctgctagaggaggtgacccacgacccactttcagctgctcgtttagtccgggtctgccccgccaccgggcgcttagaacagctcctatacagcctcgcgtctgggaacccgtccccctggaagaggtccaactggtggtagaaccggagggcggggccgtcgccccaggtgggaccgttaccttgacttgcgaggtccctgctcaacccagccctcagattcattggatgaaggatggcgtgcctctgcctctacccccttcccctgtcctgatcctccccgagatcggtccacaagaccagggcacatactcttgcgttgccacccactcttcccatggccctcaggagtccagggccgtttccatctccatcattgaaccgggagaggaaggtcccactgctggagaaggttttgataaagtaagagaggcagaggacagtcctcaacacatgtag

SEQ ID NO: 82853 - DNA, 715 bp, Artificial Sequence
  derived and/or modified sequence
ctggaaggaagcaggatggctgccggaacagcagttggagcctgggtgctggtcctcagtctgtggggggcagtagtaggtgctcaaaacatcacagcccggattggcgagccactggtgctgaagtgtaagggggcccccaagaaaccaccccagcggctggaatggaaactgaacacaggccggacagaagcttggaaggtcctgtctccccagggaggaggcccctgggacagtgtggctcgtgtccttcccaacggctccctcttccttccggctgtcgggatccaggatgaggggattttccggtgccaggcaatgaacaggaatggaaaggagaccaagtccaactaccgagtccgtgtctaccagattcctgggaagccagaaattgtagattctgcctctgaactcacggctggtgttcccaataaggtagtggaagaaagcaggagaagtagaaaacggccctgtgaacaggaggtggggacatgtgtgtcagagggaagctaccctgcagggactcttagctggcacttggatgggaagcccctggtgcctaatgagaagggagtatctgtgaaggaacagaccaggagacaccctgagacagggctcttcacactgcagtcggagctaatggtgaccccagcccggggaggagatccccgtcccaccttctcctgtagcttcagcccaggccttccccgacacc

SEQ ID NO: 82854 - DNA, 715 bp, Artificial Sequence
  derived and/or modified sequence
ctggaaggaagcaggatggcagccggaacagcagttggagcctgggtgctggtcctcagtctgtggggggcagtagtaggtgctcaaaacatcacagcccggattggcgagccactggtgctgaagtgtaagggggcccccaagaaaccaccccagcggctggaatggaaactgaacacaggccggacagaagcttggaaggtcctgtctccccagggaggaggcccctgggacagtgtggctcgtgtccttcccaacggctccctcttccttccggctgtcgggatccaggatgaggggattttccggtgccaggcaatgaacaggaatggaaaggagaccaagtccaactaccgagtccgtgtctaccagattcctgggaagccagaaattgtagattctgcctctgaactcacggctggtgttcccaataaggtagtggaagaaagcaggagaagtagaaaacggccctgtgaacaggaggtggggacatgtgtgtcagagggaagctaccctgcagggactcttagctggcacttggatgggaagcccctggtgcctaatgagaagggagtatctgtgaaggaacagaccaggagacaccctgagacagggctcttcacactgcagtcggagctaatggtgaccccagcccggggaggagatccccgtcccaccttctcctgtagcttcagcccaggccttccccgacacc

SEQ ID NO: 82855 - DNA, 1249 bp, Artificial Sequence
  derived and/or modified sequence
aggaagcaggatggctgccggaacagcagttggagcctgggtgctggtcctcagtctgtggggggcagtagtaggtgctcaaaacatcacagcccggattggcgagccactggtgctgaagtgtaagggggcccccaagaaaccaccccagcggctggaatggaaactgaacacaggccggacagaagcttggaaggtcctgtctccccagggaggaggcccctgggacagtgtggctcgtgtccttcccaacggctccctcttccttccggctgtcgggatccaggatgaggggattttccggtgccaggcaatgaacaggaatggaaaggagaccaagtccaactaccgagtccgtgtctaccagattcctgggaagccagaaattgtagattctgcctctgaactcacggctggtgttcccaataaggtagtggaagaaagcaggagaagtagaaaacggccctgtgaacaggaggtggggacatgtgtgtcagagggaagctaccctgcagggactcttagctggcacttggatgggaagcccctggtgcctaatgagaagggagtatctgtgaaggaacagaccaggagacaccctgagacagggctcttcacactgcagtcggagctaatggtgaccccagcccggggaggagatccccgtcccaccttctcctgtagcttcagcccaggccttccccgacaccgggccttgcgcacagcccccatccagccccgtgtctgggagcctgtgcctctggaggaggtccaattggtggtggagccagaaggtggagcagtagctcctggtggaaccgtaaccctgacctgtgaagtccctgcccagccctctcctcaaatccactggatgaaggatggtgtgcccttgccccttccccccagccctgtgctgatcctccctgagatagggcctcaggaccagggaacctacagctgtgtggccacccattccagccacgggccccaggaaagccgtgctgtcagcatcagcatcatcgaaccaggcgaggaggggccaactgcaggtgaggggtttgataaagtcagggaagcagaagatagcccccaacacatgtgactggggggatggtcaacaagaaaggaatggaaggccccagaaaaccaggaggaagaggaggagcgtgcagaactgaatcagtcggaggaacctgaggcaggcgagagtagtactggagggccttgaggggcccacagacagatccca

SEQ ID NO: 82856 - DNA, 702 bp, Artificial Sequence
  derived and/or modified sequence
atggctgctggaacagctgtgggcgcctgggtgctggtgctgagcctgtggggcgctgtggtgggcgcccagaacatcacagcccgcatcggggagcccctggtgctgaagtgcaagggggcccccaagaagccaccccagaggctggagtggaagctgaacacaggccgcacagaggcctggaaggtgctgagcccccagggcggcggcccctgggacagcgtggcccgggtgctgcccaacggcagcctcttcctgcctgctgtgggcatccaggatgagggcatcttccgctgccaggccatgaacagaaatggcaaggagaccaagagcaactacagagtgcgggtgtaccagatccctgggaagccagagatcgtggacagcgccagcgagctgacagctggggtgcccaacaaggtggtggaggagagccgccgcagcaggaagaggccctgtgagcaggaggtgggcacctgtgtgtctgagggcagctacccagctggcaccctgtcctggcacctggatggcaagcccctggtgcccaatgaaaaaggagtgtctgtgaaggagcagacccggcggcaccctgagaccggcctcttcaccctgcagagcgagctgatggtgaccccagcccggggcggggacccccggcccaccttcagctgcagcttcagccctggcctgcccaggcactag

SEQ ID NO: 82857 - DNA, 1092 bp, Artificial Sequence
  derived and/or modified sequence
atggctgctggaacagctgtgggcgcctgggtgctggtgctgagcctgtggggcgctgtggtgggcgcccagaacatcacagcccgcatcggggagcccctggtgctgaagtgcaagggggcccccaagaagccaccccagaggctggagtggaagctgaacacaggccgcacagaggcctggaaggtgctgagcccccagggcggcggcccctgggacagcgtggcccgggtgctgcccaacggcagcctcttcctgcctgctgtgggcatccaggatgagggcatcttccgctgccaggccatgaacagaaatggcaaggagaccaagagcaactacagagtgcgggtgtaccagatccctgggaagccagagatcgtggacagcgccagcgagctgacagctggggtgcccaacaaggtggtggaggagagccgccgcagcaggaagaggccctgtgagcaggaggtgggcacctgtgtgtctgagggcagctacccagctggcaccctgtcctggcacctggatggcaagcccctggtgcccaatgaaaaaggagtgtctgtgaaggagcagacccggcggcaccctgagaccggcctcttcaccctgcagagcgagctgatggtgaccccagcccggggcggggacccccggcccaccttcagctgcagcttcagccctggcctgcccaggcaccgggccctgaggacagcccccatccagccccgggtgtgggagcctgtgcccctggaggaggtgcagctggtggtggagcctgagggcggcgctgtggcccctgggggcaccgtgaccctgacctgtgaggtgcctgcccagcccagcccccagatccactggatgaaggatggagtgcccctgcccctgccccccagccctgtgctgatcctgcctgagatcggcccccaggaccagggcacctacagctgtgtggccacccacagcagccacggcccccaggagagcagagctgtgtccatcagcatcatcgagcctggagaggagggccccacagctggggagggctttgacaaggtgcgggaggccgaggacagcccccagcacatgtag

SEQ ID NO: 82858 - DNA, 1249 bp, Artificial Sequence
  derived and/or modified sequence
aggaagcaggatggcagccggaacagcagttggagcctgggtgctggtcctcagtctgtggggggcagtagtaggtgctcaaaacatcacagcccggattggcgagccactggtgctgaagtgtaagggggcccccaagaaaccaccccagcggctggaatggaaactgaacacaggccggacagaagcttggaaggtcctgtctccccagggaggaggcccctgggacagtgtggctcgtgtccttcccaacggctccctcttccttccggctgtcgggatccaggatgaggggattttccggtgccaggcaatgaacaggaatggaaaggagaccaagtccaactaccgagtccgtgtctaccagattcctgggaagccagaaattgtagattctgcctctgaactcacggctggtgttcccaataaggtagtggaagaaagcaggagaagtagaaaacggccctgtgaacaggaggtggggacatgtgtgtcagagggaagctaccctgcagggactcttagctggcacttggatgggaagcccctggtgcctaatgagaagggagtatctgtgaaggaacagaccaggagacaccctgagacagggctcttcacactgcagtcggagctaatggtgaccccagcccggggaggagatccccgtcccaccttctcctgtagcttcagcccaggccttccccgacaccgggccttgcgcacagcccccatccagccccgtgtctgggagcctgtgcctctggaggaggtccaattggtggtggagccagaaggtggagcagtagctcctggtggaaccgtaaccctgacctgtgaagtccctgcccagccctctcctcaaatccactggatgaaggatggtgtgcccttgccccttccccccagccctgtgctgatcctccctgagatagggcctcaggaccagggaacctacagctgtgtggccacccattccagccacgggccccaggaaagccgtgctgtcagcatcagcatcatcgaaccaggcgaggaggggccaactgcaggtgaggggtttgataaagtcagggaagcagaagatagcccccaacacatgtgactggggggatggtcaacaagaaaggaatggaaggccccagaaaaccaggaggaagaggaggagcgtgcagaactgaatcagtcggaggaacctgaggcaggcgagagtagtactggagggccttgaggggcccacagacagatccca

SEQ ID NO: 82859 - DNA, 702 bp, Artificial Sequence
  derived and/or modified sequence
atggccgccggcaccgccgtgggcgcctgggtgctggtgctgagcttatggggcgctgtcgtaggggcgcaaaacatcacagcacgtataggcgagcccctggtcctgaaatgcaaaggagcccccaagaagccccctcagcgacttgagtggaaattaaataccggccgtaccgaggcttggaaagtgctaagccctcagggcggcggcccctgggattctgttgcccgcgtactgcctaacgggtctttatttcttcccgccgtcggaattcaggacgagggcatttttcgatgccaggctatgaataggaatggtaaagaaactaagagtaactatcgcgtgagggtgtaccaaatcccgggaaagccagagattgtcgactccgcctcagagttgacagccggcgtgccaaataaagtcgtggaagaatctcggcgtagcaggaaaagaccttgtgaacaggaagtaggtacttgtgtcagcgaaggcagttatccagccggcaccttatcctggcatctggatgggaaacctctggtgcccaacgagaaaggcgtgtctgtgaaggagcagacacgacggcacccggaaactggcctctttacactacaatcagaactcatggtgacccccgcccggggtggagacccacggccaacatttagctgtagctttagccctggtttaccccggcattag

SEQ ID NO: 82860 - DNA, 702 bp, Artificial Sequence
  derived and/or modified sequence
atggccgccggcaccgccgtgggcgcctgggtgctggtgctgagcctgtggggagcagtggtgggagcacagaacatcaccgcaaggatcggtgagccacttgttctcaaatgtaaaggagctccaaagaagcctccccaacgactcgagtggaagctgaatactggccgcactgaagcatggaaggtgctatcaccacagggaggcggcccttgggattccgtggctagagttttgccgaacagctccctgttcttaccagcggtggggattcaggacgaggggattttcaggtgccaagctatgaatcgtaacggcaaggagacaaagagcaactatagagtccgcgtgtatcagatccccggaaaacccgaaatcgtcgatagcgccagtgagttgactgcgggggtacccaataaggtcgtggaggaatcccggaggtcaagaaaacgaccctgcgaacaagaagtgggaacatgtgtttctgagggttcttaccctgctggaacactctcttggcacctggacggtaagccactggtgcctaatgagaagggagtgtcagtaaaggaacagacccgacgacaccccgaaacaggtctcttcactctgcagtccgaacttatggtgactccggctcgaggcggtgaccctcgcccgacgttttcatgttcattctccccaggactacctaggcattag

SEQ ID NO: 82861 - DNA, 702 bp, Artificial Sequence
  derived and/or modified sequence
atggccgccggcaccgccgtgggcgcctgggtgctggtgctgagcctgtggggggcagttgtcggagcgcagaatatcactgcccggattggggaaccgcttgttctgaaatgcaagggcgccccaaaaaagcctccccagcgcttggaatggaagctgaatacaggacggacagaggcatggaaggtgctatctcctcagggcggcggcccttgggacagcgtggcgagagtcctacccaatggaagcctatttctgcccgcagtgggtatacaggatgaaggtatcttcagatgtcaggccatgaacagaaatgggaaggagacaaaatccaattatagggtgcgagtttaccagatccccgggaagccggagattgtggattccgccagtgagctgaccgcaggcgtgccgaacaaggttgtggaggaaagccgacgcagtcggaagagaccttgtgaacaagaagtgggtacctgcgtgtccgagggctcctatccggccgggacactgagctggcacctggacggtaagcctttagtgcctaacgaaaaaggtgtcagcgtgaaggaacaaacaaggcggcatcccgaaaccggcttatttacattgcaatctgagctcatggtaactccagctcgggggggtgaccccagacctacattcagttgctcgttcagtcccggcctgcctagacactag

SEQ ID NO: 82862 - DNA, 702 bp, Artificial Sequence
  derived and/or modified sequence
atggccgccggcaccgccgtgggcgcctgggtgctggtgctgagcctatggggggcggtggtgggcgcacagaatatcaccgcacggatcggcgaaccattggtactgaaatgtaagggtgcacctaagaagcctcctcaacgtttagagtggaagctgaacacggggaggaccgaagcctggaaagttctgtcccctcagggaggtgggccatgggacagcgtagcccgggtgctgccaaacgggagcctctttttacccgctgttggtatacaagatgaaggaatattcaggtgtcaggctatgaatcgcaatgggaaagagaccaaatccaactacagggtgcgcgtatatcaaatcccaggcaaacccgagatcgtggatagcgctagcgaactgactgcaggagttcctaataaagtggtggaggaaagtcgacggagtcgcaaacgaccttgcgaacaggaggtgggcacttgcgtgtctgagggatcctacccagcaggcactctctcttggcatctcgacggcaaacccctggttcccaacgaaaagggtgtgtcagtgaaggagcagacccgcaggcacccagaaactggactctttaccctccagagcgagctgatggttactcctgcccggggcggtgacccccgacctacctttagttgctcttttagccctggcctgccccggcattag

SEQ ID NO: 82863 - DNA, 1092 bp, Artificial Sequence
  derived and/or modified sequence
atggccgccggcaccgccgtgggcgcctgggtgctggtgctgagcctctggggtgctgtggtgggtgcccagaacatcacggcgcggattggggagcctctcgtgctgaagtgcaagggcgcaccgaaaaaaccacctcagaggttggagtggaagctgaatacgggtagaacagaggcatggaaggtgctgtcgccccaaggcggtgggccctgggatagtgttgccagagttctgccaaacggaagtctgtttctaccagcagttgggattcaggacgaaggcatcttcagatgccaggcaatgaaccgcaacggtaaggagaccaaatcgaattaccgggttcgggtgtaccagattccaggtaagcccgagatcgtggattctgcttcagagctgactgccggtgttcctaacaaagtcgttgaggaaagcagaagatcccgtaaaagaccttgcgaacaagaagttggcacttgcgttagcgaaggatcatacccggcagggactctgagttggcatctggatggcaaaccgctggtgcctaatgaaaagggagtgtctgtgaaggagcaaaccagaaggcaccctgagactgggctgttcactctgcagtcggaactgatggtcacaccagcacgaggaggtgaccctcgccctactttctcctgcagcttttctcccggcctcccaaggcatcgggccctgcgaaccgccccgatccagccgagggtgtgggaacccgtgccgcttgaagaggtgcagctggttgtcgaaccagaaggtggggctgtggcgccaggcggcacagtcacgctgacctgtgaagttcccgcgcagccttccccacagattcactggatgaaggatggagtccccctgccactgccaccctcaccagtcctgattttgccggaaattggcccccaagatcaaggaacctattcctgtgtggccactcattcttctcacggccctcaggaatcacgggctgtttcgatttcaattatagaaccaggggaggaaggaccgacagccggcgaaggatttgataaggttagggaagcggaggacagcccccagcatatgtag

SEQ ID NO: 82864 - DNA, 702 bp, Artificial Sequence
  derived and/or modified sequence
atggccgccggcaccgccgtgggcgcctgggtgctggtgctgagcctgtggggggccgtggtgggtgcccaaaacatcactgcaagaattggggagcccttagttcttaagtgcaaaggcgcaccgaaaaagcctccacagcggttagagtggaaactgaacacaggtcgaacagaagcttggaaagtactgtcacctcaggggggcggtccctgggacagcgttgcaagggttctgcccaacggcagcctgtttttacccgccgtcggtatccaggatgagggtatttttagatgccaggctatgaacagaaacggtaaagagacaaagtctaactacagggtcagggtctaccagattccagggaagcccgaaattgtggacagcgccagcgagctgacagccggcgttcccaacaaggtcgtcgaagagtcccgcaggtctcgtaagcgcccctgtgagcaggaggtggggacatgtgtctcggaaggatcttaccctgcaggtaccctgagttggcacctggatggcaagcctttggtccctaacgaaaagggtgtgtctgtgaaggagcagacccgccggcacccagaaactggcctattcactttgcaaagcgaacttatggtgacccccgcacgcggtggggacccgcggcccaccttctcgtgtagtttctcacccggtttgcctcgacactag

SEQ ID NO: 82865 - DNA, 702 bp, Artificial Sequence
  derived and/or modified sequence
atggccgccggcaccgccgtgggcgcctgggtgctggtgctgagcctctggggggccgtcgtgggcgcacagaacataaccgcccggataggcgagcctctggtgctcaaatgcaagggggcccctaagaagccaccgcagcgcctggagtggaaactaaatactggtaggactgaggcatggaaagtgctctccccacagggcggtggaccctgggacagtgtggctagagtgctgcccaacggttccctgttcctccccgctgtagggatccaggatgagggcatttttcgctgtcaagcaatgaaccggaatggtaaagagacaaaatctaactatcgcgtcagagtctatcaaatacccggaaagccggagatcgtcgattctgcctctgaactgacggcgggagtccctaataaagttgtagaggaatctcgccgatcacggaaaaggccgtgtgagcaggaagttggcacttgtgtgagtgaaggtagttaccccgcgggcacccttagttggcacttagatggaaagcccctcgttccaaatgaaaaaggggtctccgtcaaagaacagacgaggagacaccccgaaacaggtcttttcacgcttcagagcgagctgatggtaacgcctgccagggggggtgacccaagacctaccttttcgtgtagcttttctcccggcctcccgagacattag

SEQ ID NO: 82866 - DNA, 1092 bp, Artificial Sequence
  derived and/or modified sequence
atggccgccggcaccgccgtgggcgcctgggtgctggtgctgagcctatggggagccgttgtgggtgctcagaatattactgccaggattggggagccattagtcctgaaatgcaagggcgcgccgaaaaaaccaccccagcgacttgagtggaagctgaacacagggcggacagaagcctggaaagtgttatctccccagggcggcggaccttgggattctgttgctcgagtgctccccaatggatctctgtttctccctgcggtggggattcaggatgagggaatcttccgctgccaggcaatgaacaggaatggcaaagagaccaagagtaactaccgggtgagagtctaccagatcccgggcaagccagagattgtggattcagcctcagagctcaccgctggggttccaaataaggtagtggaagagagccgcagatctaggaagcgcccctgcgagcaggaggtaggtacatgcgtgagcgaaggaagctaccccgccgggactctgagttggcatctcgatggaaagccattggtaccgaacgagaaaggagtttcagtgaaggagcaaactcgcagacatccagagacaggcctgtttactttgcagtccgagttgatggtcacccctgctcggggcggggacccccgaccaactttttcttgtagcttttcccccggactgccccgacatcgcgcgcttcggacagctcccatccagccccgggtatgggagcctgtccccctagaagaggtccaactggtggtcgagcctgagggaggcgcggttgcgccgggagggacagtgacactcacctgtgaagtccccgcccagccaagccctcagattcactggatgaaagatggcgttccactccctctgcccccttctcctgttcttatactgcctgagattggtccgcaagaccagggcacctatagttgcgtagcaacccattcctcccatgggccgcaggaaagcagggctgtatcaatctctatcatcgagcccggggaagaggggcccacagcaggcgagggcttcgataaagtccgagaggccgaagattcccctcagcatatgtag

SEQ ID NO: 82867 - DNA, 1092 bp, Artificial Sequence
  derived and/or modified sequence
atggccgccggcaccgccgtgggcgcctgggtgctggtgctgagcctgtggggcgcagtcgttggtgctcagaacatcacggcaaggattggggagcctttggtcctcaaatgtaagggtgccccgaagaaaccgccccagagactggagtggaagctcaatacggggagaacagaagcttggaaggtcctgagccctcaaggtgggggcccctgggacagcgttgcccgggtgttgccaaacggaagtctgttccttccagcagtggggattcaagatgagggaatcttcaggtgtcaggctatgaatagaaacggaaaagagaccaagagtaattaccgggtgagagtttaccaaattcctggcaaaccagagatcgtggatagcgcctcagaacttaccgccggagtgcccaacaaagtggtggaggagtccagaaggtcccgcaagagaccttgcgaacaggaggtgggcacatgcgtgagcgaaggaagttatccagccgggaccttgagttggcacctcgatgggaagccactcgtgcctaacgagaagggtgtatctgttaaggagcagacgcgacggcacccggagaccgggctgtttactctgcagtccgagctgatggtaactccagctcggggaggtgacccgaggccaaccttttcttgcagtttttctcctggtcttccacggcaccgcgccttacgcacagctcctattcagcctcgagtttgggagcctgtacctctcgaggaggttcagctcgtggttgagccggaggggggcgccgtggcacccggtggcaccgtgaccctcacttgcgaggtgcccgcccagcctagcccgcagattcactggatgaaagacggggtacctctcccactaccaccatcacctgtattgatcctacccgagatcgggccacaggaccaaggtacatatagctgcgtggcgacccacagtagccacgggccgcaagagtcacgggctgtgtcgatctcgattatagagcccggggaggagggccctacagccggtgagggcttcgacaaggttcgggaggctgaggactcaccccaacacatgtag

SEQ ID NO: 82868 - DNA, 1092 bp, Artificial Sequence
  derived and/or modified sequence
atggccgccggcaccgccgtgggcgcctgggtgctggtgctgagcttatggggcgccgtggtgggcgcacagaacataactgcacggatcggggagcctcttgtgctgaagtgtaagggcgcccctaaaaaaccaccgcagcgcttggaatggaagctgaacacgggccgaacagaagcctggaaggtgctgtccccccaagggggagggccttgggatagcgttgctcgagtgttgcccaacggctccctcttcctgccggccgtgggtattcaggatgagggtatattcagatgtcaggcaatgaacagaaatgggaaagaaaccaaatcaaactaccgcgtgagggtctatcagatacccgggaaacctgagatcgtcgattctgcctccgagttgaccgcgggtgtgccaaataaggtggtcgaggagagccgcaggtcacgaaaaagaccctgcgaacaggaagtcgggacctgtgtctctgagggatcttaccccgccgggacactgagttggcatcttgatggcaagcccttggttcctaacgagaagggggtttctgtaaaggagcaaacccgtaggcaccctgagaccggcctgttcacactgcaaagcgagttaatggtaacaccagctcgggggggagacccacgtccaactttcagttgttcattttcacccgggttacctcgtcatcgcgccctcaggaccgctcccatccagcctcgcgtctgggagccagtccccctggaggaggtgcagctagtagtcgagccggaggggggcgcagtggccccaggggggaccgttactctgacatgtgaagtcccagctcaaccctcgcctcagatacattggatgaaagatggtgtcccattgcctctccctccctcccccgtgctgatactgcccgagattggcccccaagatcaggggacctattcctgtgtggctacccattcaagtcacgggccccaagagtcccgggcggtcagcatatcaattatagagcccggcgaagaggggcccactgccggcgagggatttgataaggtgcgggaggccgaagattcacctcagcacatgtag

SEQ ID NO: 82869 - DNA, 1092 bp, Artificial Sequence
  derived and/or modified sequence
atggccgccggcaccgccgtgggcgcctgggtgctggtgctgagcttgtggggcgccgtggtgggtgctcagaatatcaccgccagaataggggagcctttagtgctgaaatgcaaaggagcaccaaaaaagccaccacagcgcctggagtggaaacttaacactgggcgcacggaggcttggaaggtcctgtctccccagggggggggaccttgggactccgtggctagggtactgcccaatggcagcttatttctccccgctgtgggcattcaagacgaaggaatatttaggtgtcaagctatgaaccgcaatggtaaggaaacaaagtcaaattaccgtgtacgcgtctatcagattcctggcaagcctgagattgttgactccgcctcggaactaacagccggcgtgccgaataaagttgtcgaggagtcaaggagaagcaggaaacgcccctgtgagcaggaggtcggtacctgcgtttccgaaggaagctacccagccggaacactatcttggcatctcgacgggaagcctctggtgcccaatgaaaaaggagtcagcgtcaaggaacaaaccagacggcatcccgagacgggcctattcactctgcagtccgaacttatggtgactccggcgcgcggcggcgatccacggcctactttttcttgttcttttagccccggtctcccacgtcatcgagctctgcggacagctccaattcaaccgagagtctgggaaccagttcccctggaggaagttcagctcgtcgtggaaccagaaggcggcgctgtggcacctggcggcactgtgacgttgacctgcgaggtgcccgctcagccaagccctcagatccactggatgaaagatggcgtacctttgcctctcccaccttcccctgtgctcattctgccagagatcggcccccaagaccagggaacatattcttgcgtggctacgcatagttctcatggcccccaggagagcagagctgtctccatctccataattgagccgggcgaggagggccccacggctggagagggcttcgacaaggtgcgcgaggctgaggatagtccccagcacatgtag

SEQ ID NO: 82870 - DNA, 1092 bp, Artificial Sequence
  derived and/or modified sequence
atggccgccggcaccgccgtgggcgcctgggtgctggtgctgagcctctggggggccgtagtaggagcgcagaacattaccgccagaataggagagccgttagtgctgaagtgcaagggagcacccaagaagccacctcagaggctagagtggaagctgaacactggccgcacagaggcgtggaaagttttatcaccccaggggggaggcccctgggacagtgtcgcgagggtgctgcctaatagcagcctgtttctgccagccgtgggcattcaggatgaggggattttccgatgccaggcaatgaaccgcaacgggaaagagacaaaaagcaattatcgagtgagagtttaccagattccggggaagcctgagattgtcgactcagcttctgaattgacagccggagttcctaacaaagtggtggaagaatcaagacggagtcggaaacggccttgtgaacaggaagtcgggacctgtgtgtcagaaggatcttacccagccggcactttgagctggcatttagatggcaaacctctggtgccgaacgaaaaaggggtttctgttaaagaacagacacgaagacacccggagacaggtctgtttaccctgcagagtgaactgatggtaacacctgctagggggggagatcccaggccaacgttctcatgttccttttcgccaggtttaccacgacaccgagcgttaagaacggcacctattcagccgcgggtctgggaaccagtccccctggaagaggtccaactcgtggtggagcccgaaggtggtgcagtagcacccggcgggacggtgaccctgacatgtgaagtgccagcccaaccgtctcctcagatccattggatgaaggacggcgttcccctgcctttgccacccagccccgtactcattctgcctgaaatagggccccaggaccagggcacctattcgtgtgtggcgacacactctagccacggcccacaggaatccagagcagtgagcatttccattattgagcccggtgaagaaggacctacggcaggtgaggggtttgataaggtgagagaagccgaggactcccctcagcacatgtag

SEQ ID NO: 82871 - DNA, 702 bp, Artificial Sequence
  derived and/or modified sequence
atggctgctggcactgctgtaggcgcttgggttctcgtgcttagtctctggggtgccgttgtaggggcacagaacattacagcaagaatcggcgaaccccttgtcttaaaatgcaagggtgcccctaaaaaaccacctcagaggctggagtggaaactgaataccgggaggaccgaagcctggaaggtgctgagccctcaagggggtgggccttgggattctgtcgctagagtccttcctaacggctcgttgttcctgcccgctgtcggaattcaggatgaaggcatctttcggtgccaggcaatgaatcgcaatgggaaagagaccaagtccaattatcgtgttagagtgtaccaaatcccaggtaagccggagattgtggacagtgcatcagagctcacagccggtgtgcccaataaggtggtcgaggagagccgcaggtctcggaagagaccttgcgaacaggaggtaggcacctgtgtcagcgagggctcgtaccccgcaggcactctgagctggcatcttgatggaaagccattggtcccaaacgaaaaaggcgtttctgtgaaggagcagacaagacggcatccagaaacagggctcttcacactccagtcggagctcatggtgacccccgcacgcggaggtgaccctaggcccacattctcttgtagttttagccccggactcccgcgtcactag

SEQ ID NO: 82872 - DNA, 702 bp, Artificial Sequence
  derived and/or modified sequence
atggcggcaggaacggccgttggcgcatgggtcctcgtgctgtcgctctggggggcagttgtcggggcacagaacatcaccgctagaataggcgaaccacttgtgctcaaatgtaagggggcaccgaaaaaaccacctcagcgattggagtggaaactgaacacaggtcgtacagaagcttggaaggtcctcagtccgcaagggggagggccttgggacagcgttgcgcgagtgctgcctaatagttcactcttccttccagcggtgggaatacaggatgaaggcatcttcagatgtcaggcaatgaacagaaacggcaaagagacaaaatcaaactatagggtgcgcgtttatcagatccctgggaagcccgagatagtcgactcagcaagcgagctcactgcgggtgtccccaataaggttgtcgaggagagccggcgaagcagaaaaaggccttgtgagcaagaggtgggcacttgtgtgtctgaggggagctacccggcaggcacgctctcatggcacctcgacggtaagccactcgtgccaaacgaaaagggtgtgagcgtgaaggaacagactagacggcaccccgaaaccgggttgtttactctgcagtccgagttgatggtcaccccggctagggggggagatccacgccctacattttcatgcagttttagtcctggcttacccaggcattag

SEQ ID NO: 82873 - DNA, 702 bp, Artificial Sequence
  derived and/or modified sequence
atggccgctggtactgccgttggtgcttgggtgctggtcctatcattgtggggcgctgtggtgggagcacaaaatattacagcgaggatcggggagccccttgtcctcaagtgcaaaggtgccccaaaaaagccacctcaaagattagaatggaaactgaatacaggcaggacagaagcttggaaggttttaagcccccagggaggaggcccttgggatagtgtggcccgagtgctccctaacgggagcctctttctgccagccgtggggatccaggatgaaggaatctttagatgtcaagctatgaaccgcaacggtaaggaaaccaaatccaattatagagtccgtgtataccagattccgggaaaaccagaaatcgtagattcagcctcggaactgacagcaggcgtcccgaacaaggtggtcgaggaaagcagaagaagccgcaagcggccttgtgaacaggaggtcgggacctgcgtgtctgaaggctcttatcccgctgggacactgtcatggcatcttgatggcaaaccactggtacccaacgagaagggagtctcagtgaaagagcaaaccagacggcatcctgagaccggcctttttaccttacagtccgagctaatggtcactccagcgcgaggaggcgatccaaggcccacattcagctgttcctttagccctggcctacccaggcactag

SEQ ID NO: 82874 - DNA, 702 bp, Artificial Sequence
  derived and/or modified sequence
atggcagcaggcactgccgttggagcgtgggttctcgtgctgagcctttggggagcggtcgtcggggcacagaatattactgcaaggattggggagccactggtcctcaagtgcaaaggcgcaccaaagaaacctccccagcgtctcgaatggaagctaaacactggtcgcaccgaagcctggaaagttctgagcccacagggcggtggcccttgggacagcgtggcacgtgtgctgcctaatggttccctgttcctccccgctgtggggattcaggatgaaggaatattcagatgtcaagctatgaatcgcaatggtaaggaaacaaaaagtaattatcgcgtgagagtttaccaaatcccgggaaaacccgaaatcgtcgactccgcctcagaattaacagcaggggttcccaacaaagtagttgaagaaagtaggcgtagcagaaaacgaccctgcgagcaggaagtgggcacatgcgtttccgaggggtcgtaccctgctggaaccttgagctggcacttagacggtaaaccattggtccccaatgaaaaaggtgtttcagtgaaagaacaaacaaggcggcaccctgaaactggattatttacactgcagtctgagctaatggtaaccccagccaggggcggtgatcccagacctacttttagttgctccttctccccaggcctcccccgacattag

SEQ ID NO: 82875 - DNA, 1092 bp, Artificial Sequence
  derived and/or modified sequence
atggcagccggaaccgccgtgggggcatgggtcctggtgctgagcctctggggagcggttgtgggtgcacaaaatattactgcaaggatcggggagccattggtcctgaaatgtaagggagctccgaagaagccaccccaaagactagaatggaaattaaacaccggccgtaccgaagcttggaaggtgttgtcacctcagggcggtggaccctgggatagcgtggctagggtactgcccaatggctcattgtttctgccagcggtcggtattcaggatgagggcattttccgttgtcaggccatgaatcgaaacggaaaggaaaccaagtcaaactatcgcgtgagagtgtaccaaatccccggaaagccggagatcgtggacagcgcatcagagctcactgctggagttcccaataaggttgtcgaggagagcaggcgttctcgcaaaagaccttgcgagcaggaggtggggacttgcgtgtccgagggaagctatcctgccggaactctttcatggcatcttgacgggaagccactggtcccaaacgaaaagggagtaagcgtgaaagagcagactaggcggcatccagaaaccggcctgtttactttgcaaagcgagttaatggtaacaccagccaggggaggtgatcccagacccacattcagttgctctttcagccctgggctgccgagacatcgggctctaaggaccgccccaatacaacccagagtgtgggagcccgtgcctctggaagaagtgcaactagtggtcgagccagaggggggagcggttgcaccagggggtacggtgactctgacctgcgaggtgccagcccagccatctcctcagatccactggatgaaggacggggttcccttgcctctgcctccgtctcccgttttgatcctgcccgagatagggccacaggaccaaggcacctattcttgcgtcgccacacacagctcccatggccctcaggaatcacgagctgttagcatttctatcatcgaacccggagaagaaggacccaccgcgggagagggctttgacaaggtgagggaagcagaggactcgccgcagcatatgtag

SEQ ID NO: 82876 - DNA, 702 bp, Artificial Sequence
  derived and/or modified sequence
atggcagccggaaccgccgtgggagcatgggtgctggtgctttccctgtggggcgcagtggtgggagctcagaatataaccgcgaggattggggagcctctggtgctgaagtgcaagggggctcccaagaaaccaccgcagagactggagtggaagctgaacactgggaggaccgaggcctggaaggttctgagccctcagggcggaggcccttgggactcggtggctcgggtgttaccaaatggaagtctgttcctccctgctgtaggaatacaggacgaaggaatatttcggtgccaggccatgaacagaaatggtaaagagaccaaatctaattaccgggttcgggtgtatcagattccgggaaagcctgagatcgtcgattcagcttcagaactgaccgccggtgttcctaacaaagtggtcgaagaatcaagacgaagccgaaaacggccttgtgagcaggaggtgggcacctgcgtaagcgagggaagctatccggctggaacgctgtcttggcatctagatggaaagcccctggttcctaacgaaaagggagtgtccgtgaaagagcagacccggaggcaccccgagacagggctgttcactctccagagcgagctgatggtgactccggcaagagggggagatcctcggcctaccttttcttgcagtttcagccccggactgccacggcattag

SEQ ID NO: 82877 - DNA, 702 bp, Artificial Sequence
  derived and/or modified sequence
atggcagcaggcacagccgtgggcgcttgggtgctcgtgctttccctgtggggggctgtggtaggggctcagaacatcacagctaggataggtgaacccctggtcctaaagtgtaaaggcgcaccaaagaaacctccgcagaggctggagtggaagcttaatacgggcagaaccgaggcatggaaggtgttaagcccccagggcggaggtccttgggacagcgtggccagggtcttacccaacggctcactgttcctgccagcagtgggcattcaggatgaggggattttccggtgccaggctatgaacaggaatgggaaggagacaaaaagcaactacagagtgcgcgtttatcagatacctgggaagcccgagatcgtggattccgccagcgaactcaccgccggtgtgcccaataaggtggtggaggagtccagacgctctagaaaaaggccatgcgaacaggaagttggcacctgtgtgtccgagggcagctacccggctggcaccctgtcctggcatttggatgggaagccactggtaccaaacgagaagggggtgtctgttaaggagcagacacggaggcatcctgaaacgggattatttaccctgcagagtgagttgatggtgacccctgcacgcggaggtgaccctcggcctacgtttagctgtagtttcagccctggactccccagacactag

SEQ ID NO: 82878 - DNA, 1092 bp, Artificial Sequence
  derived and/or modified sequence
atggcggctggcacagcggtgggcgcttgggtgctggtgttgagtttgtggggcgcagtcgtgggagctcagaacatcactgctcgcataggagagcctttggttttgaaatgcaaaggtgccccaaaaaaaccaccccagagactggagtggaagctgaatacaggacggactgaggcttggaaggtgctaagcccacagggtggcggtccgtgggactccgtggcacgagtgttgccaaatggaagcctgtttcttccggctgtgggcattcaagacgaagggatctttaggtgtcaggccatgaatcgaaacgggaaggagacaaagagtaactatcgcgtgcgcgtgtatcaaatccccggaaaacccgaaatagttgacagcgcctctgaactgaccgccggagtcccaaataaggtggtggaggagagtcgcagatccaggaaaagaccttgcgagcaggaagtgggaacatgtgtttccgagggttcgtatcccgctggaaccctgagttggcacctggacggtaaacccctggtgccgaatgagaaaggggtgtcagtgaaggaacaaacccggcgtcacccggagaccggtctttttacactgcagagcgagttgatggtcactccggctcgcggaggggaccctaggccaaccttctcctgcagcttcagtcctggattacctcgtcaccgcgctttacgcaccgcccctattcagccaagggtgtgggagcccgtgcccctggaagaagtccagctggtggtggagccagagggcggagctgtggcccctgggggaacagtgactttaacatgtgaggtgcctgcccagccatcacctcaaatccactggatgaaggatggcgtcccactgccactgccgccaagccccgtgttaatcctacctgaaattggaccccaggatcaaggtacttatagctgcgtggcgacacatagctcccatggccctcaggagagcagagcagtgagtatttcgatcatcgagccaggagaggagggccctactgcaggtgaggggtttgacaaggttcgtgaggccgaggattctccccaacatatgtag

SEQ ID NO: 82879 - DNA, 1092 bp, Artificial Sequence
  derived and/or modified sequence
atggccgcaggtaccgccgttggcgcatgggtgctcgtgttgtccctttggggagccgttgtgggcgcacagaacattacagccaggattggggagcccttagtcctgaagtgtaagggtgcccctaaaaagcccccacaaaggctggaatggaaactcaacacaggtcgcactgaggcctggaaagttctgtccccgcaagggggaggtccttgggattcagtggccagggtgctgccaaatggttctctttttctacctgctgtggggattcaagacgaagggatttttcgatgccaagccatgaaccggaatggaaaggaaacaaagtcaaattacagggttagagtgtatcagattcccggaaagcccgaaatcgtggattccgcgtcagaacttaccgccggagttccaaacaaggtcgtggaagaaagcagaagatccaggaaaaggccctgtgaacaagaggtgggcacgtgtgtgtcggaaggcagttatccagctggaacactttcatggcaccttgacgggaagccactggttcctaacgaaaagggcgtctctgttaaggaacagacacgtagacaccccgaaactggcctcttcaccctgcaatcagaattgatggttactcctgccagggggggagatcccagaccaactttctcctgcagcttttctccgggattgcctcgacaccgggctttgcgaactgctcctattcaaccacgggtgtgggagcctgtcccacttgaggaagtccaactggtggtggagccagagggcggagctgtggctccaggaggcacagtcacattaacctgcgaagtgcccgcacagccaagtcctcagattcattggatgaaagatggggtgcctctgcccctgcctcctagtcctgtcctcatactcccagaaatagggccacaggatcagggtacctactcctgcgttgccacacactcatcgcatggaccccaagaatcccgagctgtatccattagcatcatcgaacctggcgaggagggcccaacagctggggaggggtttgataaggtacgtgaagctgaggacagtccgcaacacatgtag

SEQ ID NO: 82880 - DNA, 1092 bp, Artificial Sequence
  derived and/or modified sequence
atggcggctgggactgcggtgggcgcttgggtgctggtcctgtccttgtggggggcagtcgtaggagcccagaatatcactgccagaattggcgagcccctcgtcctcaaatgtaaaggagctccaaagaaaccccctcaacgactggaatggaaactcaacactggccgtactgaggcttggaaggtgttgtctccccagggaggcggaccttgggacagtgtggctcgtgtgttaccaaacggtagtctgtttctgcctgccgttgggatacaagatgaaggcattttcaggtgtcaggccatgaacagaaatggaaaagagacaaaatcgaattatcgcgtgagagtctaccaaatccctggcaaaccagagatcgtagacagtgcctctgagcttacagccggagtgcctaataaggtcgtggaagagtctcgcagaagccgaaaaagaccttgcgagcaggaagttggcacatgtgtgagtgagggttcttaccccgcaggcaccttgagttggcatcttgacggcaaacccctagtccctaacgagaagggcgtgtccgtgaaggaacaaactcggaggcaccccgaaactggccttttcactctgcagtccgaattaatggtgactccggctcgtggcggtgacccacgccctaccttctcatgctcattttccccaggtctgcccagacaccgcgcactgcgtacagctcccatccagcctcgcgtttgggaacccgtgccattggaggaggtacagttggtcgtcgagccagaaggaggggcagtggcgcctgggggaactgtgacacttacttgcgaagtgcctgcccagccttcaccccagattcactggatgaaggacggagtaccactccccctacctccaagccctgtcctcattttgcccgagattggacctcaagatcaagggacgtacagctgcgtcgctacccatagctctcatggcccacaagaatcgcgggctgtgtccatttccatcatagaacctggcgaggaggggccaaccgcaggcgaggggttcgataaggtcagagaggctgaggactctccacaacacatgtag

SEQ ID NO: 82881 - DNA, 1092 bp, Artificial Sequence
  derived and/or modified sequence
atggctgcgggtactgctgtgggggcttgggtcctggtgctgtctttgtggggcgctgttgtcggcgcacagaacatcacagccagaatcggagaacccctggtgctgaaatgcaaaggcgctcccaaaaagccaccacagcgtctcgagtggaaactgaacaccggtagaactgaagcatggaaagtcctgagccctcagggcggaggcccatgggattccgtggcacgcgttttgcccaatgggagcctttttctgcccgctgttggaatccaagatgaaggcattttccgttgtcaggctatgaatcgcaatggaaaagaaaccaaatcaaactaccgggtgagggtgtatcagatcccgggaaagcctgagatcgttgactctgcctcggagctaaccgctggcgtccctaataaagttgttgaggagagtcggaggagccgtaaacggccatgtgagcaggaggttgggacgtgtgtaagtgaaggttcctacccagctgggaccctctcatggcacctcgatggtaaacccctcgttcctaatgagaaaggagtgtccgtaaaagagcagactcgacggcacccggagaccggactgtttacattgcagtctgaacttatggtaaccccagcccgtggcggtgatccgagacctacctttagctgctcatttagccccggtcttcctcggcaccgagccctacggaccgcacctatacagccaagagtctgggagccagtgcccctggaagaggtccagctggtggtcgagcctgagggaggtgccgttgcccctggcggaaccgtaaccttgacatgcgaggtgcccgcacagccctcacctcaaatacactggatgaaggacggagtcccccttccacttcccccatctccggtcctcattttacccgaaatcgggccacaggaccaaggaacatactcgtgtgtcgcaactcattcctcacatggaccccaggaatcgagggcagtctctatctctatcattgaacctggcgaagaagggccaacggccggtgagggatttgataaggtacgtgaggcagaggattcaccccagcacatgtag

SEQ ID NO: 82882 - DNA, 1092 bp, Artificial Sequence
  derived and/or modified sequence
atggctgcagggaccgctgtgggcgcttgggtgttagtcttgtccctgtggggcgctgtggttggggctcagaatattacagcacgcatcggagaacctctggtactgaagtgcaaaggcgctccaaaaaaaccgccacagcggctagagtggaaattaaatacaggaaggacagaggcttggaaagtgttaagtccacaggggggtgggccatgggattcagtcgctcgggtgttgcctaatagctcgctgttcctgcctgccgttgggattcaggacgaaggcattttccgctgccaagcgatgaaccggaacgggaaggaaacgaagagcaattaccgggtcagggtgtaccagattcccggtaagcctgaaatcgtagattcagcttctgaactgacggctggcgtcccaaataaagttgtcgaggaatcccggcgatcccgcaaaaggccttgcgaacaggaagtaggaacctgcgtttcagagggcagttacccagccggtacgttgtcatggcacctcgacggtaagccgttagtcccaaacgaaaagggggtaagcgtcaaagaacagactagacgtcacccagaaactgggctctttactctgcagagcgaactcatggtcacgccagctcgaggcggtgacccaagaccaactttcagttgctcattcagtccaggacttccccgacaccgcgcactgcgtaccgcccctatccagcccagagtgtgggaaccagtgcctctggaggaagtacagcttgttgttgaaccagagggcggagctgtagccccaggtggtacagtcaccctcacctgcgaagtgcctgctcagccttcaccgcagatacattggatgaaggacggagtacccctccccctccccccaagccccgtcctgatccttcctgagattgggccacaggaccagggcacctactcctgtgtcgcaactcattcatcgcacggaccccaggagtctagggctgtgagcatctcgataatcgaaccaggagaggagggtccaacagccggtgaggggttcgacaaggtgcgggaggcagaggattcgcctcagcatatgtag

SEQ ID NO: 82883 - DNA, 702 bp, Artificial Sequence
  derived and/or modified sequence
atggccgccggcaccgccgtgggcgcctgggtgctggtgctgagcctgtggggcgccgtggtgggcgcccagaacatcaccgccagaatcggcgagcccctggtgctgaagtgcaagggcgcccccaagaagcccccccagagactggagtggaagctgaacaccggcagaaccgaggcctggaaggtgctgagcccccagggcggcggcccctgggacagcgtggccagagtgctgcccaacggcagcctgttcctgcccgccgtgggcatccaggacgagggcatcttcagatgccaggccatgaacagaaacggcaaggagaccaagagcaactacagagtgagagtgtaccagatccccggcaagcccgagatcgtggacagcgccagcgagctgaccgccggcgtgcccaacaaggtggtggaggagagcagaagaagcagaaagagaccctgcgagcaggaggtgggcacctgcgtgagcgagggcagctaccccgccggcaccctgagctggcacctggacggcaagcccctggtgcccaacgagaagggcgtgagcgtgaaggagcagaccagaagacaccccgagaccggcctgttcaccctgcagagcgagctgatggtgacccccgccagaggcggcgaccccagacccaccttcagctgcagcttcagccccggcctgcccagacactag

SEQ ID NO: 82884 - DNA, 1092 bp, Artificial Sequence
  derived and/or modified sequence
atggccgccggcaccgccgtgggcgcctgggtgctggtgctgagcctgtggggcgccgtggtgggcgcccagaacatcaccgccagaatcggcgagcccctggtgctgaagtgcaagggcgcccccaagaagcccccccagagactggagtggaagctgaacaccggcagaaccgaggcctggaaggtgctgagcccccagggcggcggcccctgggacagcgtggccagagtgctgcccaacggcagcctgttcctgcccgccgtgggcatccaggacgagggcatcttcagatgccaggccatgaacagaaacggcaaggagaccaagagcaactacagagtgagagtgtaccagatccccggcaagcccgagatcgtggacagcgccagcgagctgaccgccggcgtgcccaacaaggtggtggaggagagcagaagaagcagaaagagaccctgcgagcaggaggtgggcacctgcgtgagcgagggcagctaccccgccggcaccctgagctggcacctggacggcaagcccctggtgcccaacgagaagggcgtgagcgtgaaggagcagaccagaagacaccccgagaccggcctgttcaccctgcagagcgagctgatggtgacccccgccagaggcggcgaccccagacccaccttcagctgcagcttcagccccggcctgcccagacacagagccctgagaaccgcccccatccagcccagagtgtgggagcccgtgcccctggaggaggtgcagctggtggtggagcccgagggcggcgccgtggcccccggcggcaccgtgaccctgacctgcgaggtgcccgcccagcccagcccccagatccactggatgaaggacggcgtgcccctgcccctgccccccagccccgtgctgatcctgcccgagatcggcccccaggaccagggcacctacagctgcgtggccacccacagcagccacggcccccaggagagcagagccgtgagcatcagcatcatcgagcccggcgaggagggccccaccgccggcgagggcttcgacaaggtgagagaggccgaggacagcccccagcacatgtag

SEQ ID NO: 82885 - DNA, 1206 bp, Artificial Sequence
  derived and/or modified sequence
atgccccccgccatccccgaggccaccgaggccagcggcccccccagccccacccccggcgacaagctgagccccgccagcgagctgcccaaggagagccccctggaggtgtggctgaacctgggcggcagcacccccgacccccagggccccgagctgacctaccccttccagggcaccctggagccccagcccgccagcgacatcatcgacatcgactacttcgagggcctggacggcgagggcagaggcgccgacctgggcagcttccccggcagccccggcaccagcgagaaccaccccgacaccgagggcgagacccccagctggagcctgctggacctgtacgacgacttcacccccttcgacgagagcgacttctaccccaccaccagcttctacgacgacctggacgaggaggaggaggaggaggaggacgacaaggacgccgtgggcggcggcgacctggaggacgagaacgagctgctggtgcccaccggcaagcccggcctgggccccggcaccggccagcccaccagcagatggcacgccgtgcccccccagcacaccctgggcagcgtgcccggcagcagcatcgccctgagacccagacccggcgagcccggcagagacctggccagcagcgagaacggcaccgagtgcagaagcggcttcgtgagacacaacggcagctgcagaagcgtgtgcgacctgttccccagctactgccacaacggcggccagtgctacctggtggagaacatcggcgccttctgcagatgcaacacccaggactacatctggcacaagggcatgagatgcgagagcatcatcaccgacttccaggtgatgtgcgtggccgtgggcagcgccgccctggtgctgctgctgctgttcatgatgaccgtgttcttcgccaagaagctgtacctgctgaagaccgagaacaccaagctgagaagaaccaacaagttcagaacccccagcgagctgcacaacgacaacttcagcctgagcaccatcgccgagggcagccaccccaacgacgaccccagcgccccccacaagatccaggaggtgctgaagagctgcctgaaggaggaggagagcttcaacatccagaacagcatgagccccaagctggagggcggcaagggcgaccaggccgacctggacgtgaactgcctgcagaacaacctgacctag

SEQ ID NO: 82886 - DNA, 1206 bp, Artificial Sequence
  derived and/or modified sequence
atgcccccagctattcccgaagcaacagaagcctctggtccacctagccccacccccggcgataagttaagccccgcctccgaactccctaaggaaagccccctggaggtgtggctgaacttgggcggaagcactccggacccccagggccccgagttaacatatccatttcagggtaccctggaaccgcagccagcttctgacatcatcgacatagattatttcgaaggtctggacggcgagggtagaggtgctgacctgggtagctttcctggctccccgggtacgagcgagaaccatcccgacaccgaaggcgagaccccgagctggagcctgctagacctatacgatgattttacccccttcgatgagtcggacttctaccccaccactagcttctatgatgatctcgacgaggaggaggaggaggaggaagatgataaggacgctgtgggaggcggagatctagaagatgagaatgagctgctcgtaccaacaggaaagcccggtctgggtccaggtactggccagcccacctcccgatggcatgcagtgcctccccaacatactctgggctccgtgcctggatcctccattgcccttcgaccccggccaggtgaacctggcagggacctcgcctccagcgaaaatgggactgagtgtaggtcaggttttgtgcggcataacggaagctgccggtccgtgtgtgatctattcccctcctattgtcacaatggcgggcagtgctatctcgtggagaatattggagctttttgccgctgcaatacccaggattacatctggcacaagggaatgcgctgcgagtctatcatcaccgacttccaagtcatgtgcgtggccgtgggttccgcagccctcgtgcttctactcctcttcatgatgacagtttttttcgccaaaaaactctacctgcttaaaactgaaaatactaagttgaggagaacaaataagtttcggactccctctgaacttcacaacgataacttctccctcagcacaatagctgaggggagccatcctaatgatgatccgagcgcgcctcacaagattcaagaggtgctcaagagctgcctcaaagaggaggaaagcttcaatattcagaatagtatgtcgccgaagctggagggaggcaagggcgatcaggccgatttggacgtgaactgtttgcagaataacttgacttag

SEQ ID NO: 82887 - DNA, 1206 bp, Artificial Sequence
  derived and/or modified sequence
atgcccccagccatccctgaggccacagaggccagcggcccccccagccccacccctggggacaagctgagccctgccagcgagctgcccaaggagagccccctggaggtgtggctgaacctgggcggcagcaccccagacccccagggccctgagctgacctaccccttccagggcaccctggagccccagcctgccagtgacatcatcgacatcgactactttgagggcctggatggagagggcagaggagctgacctgggcagcttccctggcagccctggcaccagcgagaaccacccagacacagaaggagagacccccagctggagcctgctggacctgtatgatgacttcaccccatttgatgaaagtgacttctaccccaccaccagcttctatgatgacctggatgaggaggaggaggaggaggaggatgacaaggatgctgtgggcggcggggacctggaggatgaaaatgagctgctggtgcccaccgggaagccaggcctgggccctggcaccggccagcccaccagccgctggcatgctgtgcccccccagcacaccctgggctctgtgcccggcagcagcatcgccctgcggcccaggcctggagagcccggccgggacctggccagcagtgaaaatggaacagagtgccgcagcggctttgtgcgccacaacggcagctgccgctctgtgtgtgacctcttccccagctactgccacaatggaggccagtgctacctggtggagaacattggagccttctgccgctgcaacacccaggactacatctggcacaagggcatgagatgtgagagcatcatcacagacttccaggtgatgtgtgtggccgtgggcagcgctgccctggtgctgctgctgctcttcatgatgaccgtcttctttgccaagaagctgtacctgctgaagacagagaacaccaagctgcggaggaccaacaagttccgcaccccatctgagctgcacaatgacaacttcagcctgagcaccatcgccgagggcagccaccccaatgatgaccccagcgccccccacaagatccaggaggtgctgaagagctgcctgaaggaggaggagagcttcaacatccagaacagcatgagccccaagctggagggcggcaaaggagaccaggccgacctggatgtgaactgcctgcagaacaacctgacctag

SEQ ID NO: 82888 - DNA, 1206 bp, Artificial Sequence
  derived and/or modified sequence
atgccccccgccatccccgaggccaccgaggccagcggcccccccagtcctacccctggcgacaagctgagccctgcctcagagctcccaaaggagtcacccttggaggtctggcttaacttgggaggtagtacgccggacccacaaggtcccgagctgacctacccattccaagggacactggagccccaaccagcaagtgacattatagatattgactatttcgaggggcttgacggggaaggccgcggtgccgacctcggctcgttccccgggagtcctggaacgtctgagaaccaccctgacacagaaggcgagacaccatcctggtccttactcgatctgtatgatgatttcaccccttttgacgaatccgatttttatccaaccacgagtttctacgatgatctggacgaagaggaggaggaagaggaagatgataaggatgccgtgggcggcggagacctggaggacgaaaatgagttgttagtccctaccggaaagccaggactaggacccggtactgggcagcccactagccggtggcatgccgttccccctcaacatacactgggcagtgtccctgggtcttccattgctctccgaccccgaccaggagagccaggccgtgatctggccagcagcgaaaatggcacagaatgcaggagtggtttcgttcgacataacgggagctgtcggtctgtctgtgatttgtttccttcctattgtcacaatggcggacagtgctaccttgtggaaaacatcggtgccttttgcaggtgcaacactcaagattacatttggcacaagggcatgcgctgcgagtccattatcacggattttcaggtgatgtgcgtcgccgtcggcagtgctgcacttgtcttactgcttctgttcatgatgacagtgttcttcgccaaaaaattatatttgttgaaaacagagaataccaagctccgacgaaccaacaaattccgaacaccttccgaactgcacaatgacaacttttcgctctctaccatcgcagagggctctcaccctaatgacgacccttccgcgcctcacaagattcaggaagtattaaagagctgcctgaaggaggaagaaagctttaacattcagaatagcatgtcacctaaactggaaggtggaaagggcgaccaggctgacctggatgttaattgcctccagaacaacttaacatag

SEQ ID NO: 82889 - DNA, 1206 bp, Artificial Sequence
  derived and/or modified sequence
atgcctcccgctattcccgaagcgacagaggcttccgggccacccagtccaacacctggtgataagctgagccctgcgtctgagttgcctaaggagtctcctctcgaggtctggctcaatctgggtggaagtactccagatcctcagggccctgaactgacctatcccttccagggaactctggagccccagcctgcctctgatattattgatatcgactatttcgaaggactggacggcgagggccgaggggcagacctcgggtccttccctggttcacccggaaccagtgaaaatcatccagatactgagggcgaaaccccatcatggtccctgttggacctgtacgacgactttaccccattcgatgaatcagacttttaccctacgacctcgttctatgatgacttggacgaggaggaggaggaggaagaagatgacaaggacgccgtgggtggtggagatctcgaagatgagaatgaactcttagtgcccacaggaaagcctggactcggccctggtaccggccaacctacatcaagatggcatgcggtgcctccacagcacacccttggaagcgtccccggttcctcaatcgctctgcgcccaagacctggagaacccggtagggacctcgcgtccagcgagaacggaacggaatgccgctctgggttcgtgaggcacaatggctcttgccgcagcgtctgtgatctgtttccttcatattgccacaatggtgggcagtgctatttggtggagaacattggggctttctgtcggtgtaacacccaagactacatctggcacaaaggcatgagatgcgaaagtatcatcactgacttccaggttatgtgtgtggctgtggggtcggccgctctggtcctcctgttgttatttatgatgacagtgtttttcgccaaaaagctctatctgctgaagacagagaatacaaaattgcgacggactaacaaattcaggacaccctctgaactgcataacgacaatttttctttatctacgattgctgagggaagtcaccccaacgatgatccttctgccccacacaagatccaagaggtcctcaagtcatgcttaaaagaggaggagagtttcaacatccagaactccatgtcgcctaagctggagggaggcaaaggcgatcaggcagatttggatgttaactgcctccagaacaatttgacctag

SEQ ID NO: 82890 - protein, 566 aa, Artificial Sequence
  derived and/or modified sequence
MGRAGGGGPGRGPPPLLLFLGAALVLASGAVPAREAGSAVEAEELVKGSPAWEPPANDTREEAGPPAAGEDEASWTAPGGELAGPEEVLQESAAVTGTAWLEADSPGLGGVTAEAGSGDAQALPATLQAPHEVLGQSIMPPAIPEATEASGPPSPTPGDKLSPASELPKESPLEVWLNLGGSTPDPQGPELTYPFQGTLEPQPASDIIDIDYFEGLDGEGRGADLGSFPGSPGTSENHPDTEGETPSWSLLDLYDDFTPFDESDFYPTTSFYDDLDEEEEEEEDDKDAVGGGDLEDENELLVPTGKPGLGPGTGQPTSRWHAVPPQHTLGSVPGSSIALRPRPGEPGRDLASSENGTECRSGFVRHNGSCRSVCDLFPSYCHNGGQCYLVENIGAFCRCNTQDYIWHKGMRCESIITDFQVMCVAVGSAALVLLLLFMMTVFFAKKLYLLKTENTKLRRTNKFRTPSELHNDNFSLSTIAEGSHPNVRKLCNTPRTSSPHARALAHYDNVICQDDPSAPHKIQEVLKSCLKEEESFNIQNSMSPKLEGGKGDQADLDVNCLQNNLT

SEQ ID NO: 82891 - DNA, 4161 bp, Artificial Sequence
  derived and/or modified sequence
agatacttaaataattaacaaaatatatttaaaatgagtgggagaacttcctccattaaaccctgttgaaaatgtgtgagtggttgtcatgccccagacatcaaggaacccatccatgaggtcttcccacacagactggcctcaggaagggaaggaggaggtaggccgctctgacagccacaacccgagttgaggaaacaagcaaaggaacacagagagtctacatacagtaaaaggtgacaggagttaagctgcacacaagggaagcagagatgggttggaggcagttaagggtgcgttgctgcctctgtggctgaggtgagtgcaaagccctacatggtcccctgtttagagaaggctattgtttcaaacatattttacttggtccccggaggcagcatgaaactatgaaagaaagagccttaccccttttttcaaggctctccagaccacagttctgggatgggtgtgggtggttgccattcgttcatttatgcctgtctgatatggagcctccctctgttaccagccctgtgcactcaagtgccttgcagtccagtgaggaataactgtagataagatgagatgatgggcattaagtgtaactgctgagaagccttcatagagggaaaggtgataagaactgagtttttctggcatgaggagtttaccaggcaggagaggtggagacgctaggctaggcaaataggctgcagccatagttctgctgagaaacaggttttgaaccaaggcaactccatctggagatatgtatcagaaagattaggagatagaatctccatcttggtcacttatttggtcttctaagacagcaatgggaccgtctcttaaatactggagttgtcctatctccttgggctgataccctgaactgtcatttgggtgagtaacacattaaggggtagacggtcggtttgggggaataaactaagtaactaggttgcggttcctcctgccgactaagcagacctcctggtgcgtggtcttgggttgccctgtgagccctgaagctgtgaatgggccccacagatcactctaaagccaagcatccatgtgtgcccggctggggatctagacccccctggtctacccaggaacctgagttttggtggtctgagacacctgggggacgacgtatcccggagaagggaccaggattaaaggccgctccccaggctgcccggagactagaaggaaggcgaggtagccgcagtcccagggagggtcttaccccttgctcccgggatgcgttatggcgggcctggctgtgcgagatctaggctagtggctttggctgcgaacggattagatctgatccgattagagcctgggcggtcggcttcgcccccttgccaggctctgccaacgcccgcccctccctcgtggagacccggagacctccctgagagccttcccgcccggaacacgggattggtgcagaatccgagaggctccatgcgccccgggcctggcttgtttccacagtgggggctcgtgcttccgccccctgcggctcttctggaccccgccccgaccctgcgggtaactgggcccgcgacgtccccgcctccgtgcttgccgcgtggcgggtgggttcctccgggtcggggccccgtgccgcctgttcacctggggcgggaccgtggccccatcccacaggtctcccgcccgtgcacctgccgcctaacgccgcgcgccgcgccgtgcgcctgcctcgcgctccccgtccgcctgccccgcactccccgtccgtgtgtctcctagtccccagcgaggggtctgtctgttcccctggcaggctgaccaaggggccggcgtcaccgctacgtgcggcggggccggcgcggcgggcggggtgagggcggcgctgagcgcagcggcggcagcggcggcgcgggaggcggggaggcgcggcgcgccggggacagcggcggacggcggcggcggcggcatgcggctcctcgcgctgcccatcgtgggctgaggcggccgcagaaccggcgggaggcgcggcggccgggcgagccgagggcgcagccagccgggcggaccgcggacagcggtcggggcgccgcgccatggggcgagccgggggcgggggcccgggccgggggccgccgccactgctgctgtttctgggggccgcgctggtcctggcctctggggccgtgccggcgcgtgaggcgggcagcgcggttgaggccgaagagctggtgaagggcagcccggcgtgggagccgcctgccaacgacacgcgggaagaagccggcccaccagcggctggggaagatgaggcgtcgtggacggcgcccggtggcgagctggccgggccagaagaggtgctgcaggagtcggctgcggtgaccggcaccgcctggctggaagctgacagcccaggcctgggaggagtgaccgcagaggcgggcagcggcgatgcccaggcccttccagctacgctccaggctccccacgaggtcctcgggcagtcaatcatgccccctgccattcctgaggctacagaggccagcgggccaccctcccccacccccggcgacaagctgagcccagcttctgaactccccaaggagagccccttggaggtttggctgaacctggggggcagcacacccgaccctcaagggccagagctgacttacccatttcagggcaccctggagccccaaccggcatcagatatcattgacatcgactacttcgaaggactggatggtgagggtcgtggcgcagatctggggagcttcccagggtcaccaggaacctcagagaaccaccctgatactgagggagagaccccttcctggagcctgcttgacttatacgatgatttcacccccttcgatgaatctgatttctaccccaccacatccttttatgatgacttggatgaagaggaggaggaagaggaggatgacaaagatgcagtaggaggtggagacctagaagatgaaaatgagcttctagtgcccactgggaagcctggtctggggcccgggacaggccagcccaccagtcggtggcatgctgtccctccacagcacactctggggtcggtccccggcagcagcatcgccctcaggccccgcccaggagagccaggcagggacttggcctccagtgaaaatggcactgagtgccgcagtggctttgtgcggcataacggctcctgccggtcagtgtgcgacctcttcccaagttactgtcacaatggcggccagtgctacctggtggagaacataggggccttctgcaggtgcaacacgcaggactacatctggcacaaggggatgcgctgcgagtccatcatcaccgacttccaggtgatgtgcgtggccgtgggctcggctgccctcgtcctgctcctgctcttcatgatgacggtgttctttgccaagaagctctacctgctcaagacggagaataccaagctgcgtaggaccaacaaattccggaccccatctgagctccacaatgataacttctccctctccaccattgccgagggctctcacccaaatgtaaggaaactttgcaacactccccgtacctcctccccccatgcccgtgccttggctcactatgataacgttatctgtcaggatgatcctagtgctccccacaaaatccaggaggttctcaagtcctgcctgaaagaggaggagtcatttaacatccagaactccatgtcgcccaaacttgagggtggcaaaggtgaccaggctgacttggatgtgaactgtcttcagaataatttaacctaaagcagagcaagaagagaggaagcgggggtagtgggtggggggtaggggaagaaacattatctcctcttgtacagagtctatttcttgtaaccatttgttaaactcttttctttttctgatctcatggcatgcttttatgtattttgtacaggaggcaaaaaaatacttaaaataagcaaagaaactgaacagaattgcatacattgggttgttttttctgtgctgtctgtacattgcttctgctgctgtgatttctaaacctgtgctgttattcaactgacttttttttgtactttgacccacgtttttttgaaataccagtaaaaaacaaagttcttgaaataaaactttttaaaaagtt

SEQ ID NO: 82892 - DNA, 1701 bp, Artificial Sequence
  derived and/or modified sequence
atgggcagagccggcggcggcggccccggcagaggccccccccccctgctgctgttcctgggcgccgccctggtgctggccagcggcgccgtgcccgccagagaggccggcagcgccgtggaggccgaggagctggtgaagggcagccccgcctgggagccccccgccaacgacaccagagaggaggccggcccccccgccgccggcgaggacgaggccagctggaccgcccccggcggcgagctggccggccccgaggaggtgctgcaggagagcgccgccgtgaccggcaccgcctggctggaggccgacagccccggcctgggcggcgtgaccgccgaggccggcagcggcgacgcccaggccctgcccgccaccctgcaggccccccacgaggtgctgggccagagcatcatgccccccgccatccccgaggccaccgaggccagcggcccccccagccccacccccggcgacaagctgagccccgccagcgagctgcccaaggagagccccctggaggtgtggctgaacctgggcggcagcacccccgacccccagggccccgagctgacctaccccttccagggcaccctggagccccagcccgccagcgacatcatcgacatcgactacttcgagggcctggacggcgagggcagaggcgccgacctgggcagcttccccggcagccccggcaccagcgagaaccaccccgacaccgagggcgagacccccagctggagcctgctggacctgtacgacgacttcacccccttcgacgagagcgacttctaccccaccaccagcttctacgacgacctggacgaggaggaggaggaggaggaggacgacaaggacgccgtgggcggcggcgacctggaggacgagaacgagctgctggtgcccaccggcaagcccggcctgggccccggcaccggccagcccaccagcagatggcacgccgtgcccccccagcacaccctgggcagcgtgcccggcagcagcatcgccctgagacccagacccggcgagcccggcagagacctggccagcagcgagaacggcaccgagtgcagaagcggcttcgtgagacacaacggcagctgcagaagcgtgtgcgacctgttccccagctactgccacaacggcggccagtgctacctggtggagaacatcggcgccttctgcagatgcaacacccaggactacatctggcacaagggcatgagatgcgagagcatcatcaccgacttccaggtgatgtgcgtggccgtgggcagcgccgccctggtgctgctgctgctgttcatgatgaccgtgttcttcgccaagaagctgtacctgctgaagaccgagaacaccaagctgagaagaaccaacaagttcagaacccccagcgagctgcacaacgacaacttcagcctgagcaccatcgccgagggcagccaccccaacgtgagaaagctgtgcaacacccccagaaccagcagcccccacgccagagccctggcccactacgacaacgtgatctgccaggacgaccccagcgccccccacaagatccaggaggtgctgaagagctgcctgaaggaggaggagagcttcaacatccagaacagcatgagccccaagctggagggcggcaagggcgaccaggccgacctggacgtgaactgcctgcagaacaacctgacctag

SEQ ID NO: 82893 - DNA, 1701 bp, Artificial Sequence
  derived and/or modified sequence
atgggacgagctggtggtgggggacccggaagaggaccaccgcccttgctgctatttctgggggctgctttagttttagcttccggggccgtgccagcacgcgaggcaggcagcgccgtagaagccgaggaactggtgaagggctcaccagcttgggagccgccagccaatgacacgagggaagaggccggaccccctgccgccggcgaggacgaagcctcgtggacggccccgggtggagagctggccggccccgaagaggtgctgcaggaatctgccgctgtgacgggaaccgcctggctggaagctgacagccctgggctggggggtgtcaccgctgaagcgggcagcggagatgcccaagcgctcccagccaccttacaggccccgcacgaggtcctgggccaatctattatgccccccgctatcccagaagcaaccgaggcttctgggccccccagcccaacccctggagacaaattaagccccgcatcggagctgcctaaggagagtccattggaagtctggctgaacctgggaggcagcaccccagacccccaaggacctgagttgacatatccgtttcaaggcacgctggaaccgcagccggcctctgatataattgatattgattattttgaaggcctggacggggaaggccgcggcgcggacctcgggtctttccctggcagtcccgggaccagcgaaaatcatccggatactgagggtgagacacccagctggtcactccttgatctgtacgacgatttcacgccgtttgacgagtccgatttttacccaactaccagcttttatgatgacctggatgaggaagaggaagaggaggaggatgacaaggatgccgtcggcgggggcgatctggaggacgaaaatgagctgttggttcccactggcaagccaggcctcgggcctggaactggacagccgacctccagatggcacgcagtaccgccgcagcacacccttggatctgtcccaggttcgtctatcgccttgcgcccaaggcccggcgagccaggccgcgatctggcatcatccgagaatggaaccgaatgccgcagtggcttcgtgcgacacaacggctcctgtagatccgtctgtgacctgttcccatcatactgtcataatggtgggcaatgctaccttgttgaaaacataggcgctttttgtagatgcaacacccaggactacatttggcataaaggcatgcgatgcgagagcatcatcactgacttccaggtgatgtgcgtggctgtgggctctgcagctctggtcctcctcctgctgttcatgatgactgtcttctttgctaaaaagttgtatttgctgaagaccgaaaatacgaaactcaggcggactaacaagttccgcactccaagcgagctgcataatgataatttttccttgagcactatcgctgagggctcacaccccaatgtccggaaactgtgcaacactcccaggacatctagtccacacgcacgggctctggcgcactacgataatgtgatatgtcaggatgatccctcggccccccataaaattcaggaagtgctgaaaagttgtctgaaggaagaagagagttttaatattcagaactcaatgagcccaaagctggagggaggtaagggcgatcaagcagacttggacgtgaactgtctccagaacaacctgacttag

SEQ ID NO: 82894 - DNA, 1701 bp, Artificial Sequence
  derived and/or modified sequence
atgggccgggccggcggcggcggccctggccggggccccccacccctgctgctcttcctgggcgccgccctggtgctggccagcggggctgtgcctgcccgggaggccggcagcgctgtggaggccgaggagctggtgaagggcagccctgcctgggagcccccagccaatgacacccgggaggaggccggccccccagctgctggggaggatgaggcctcctggacagcccctggaggagagctggccggccctgaggaggtgctgcaggagagcgctgctgtgactggaacagcctggctggaggccgacagccctggcctgggcggcgtgacagctgaggccggcagcggagatgcccaggccctgcctgccaccctgcaggcccctcatgaggtgctgggccagagcatcatgcccccagccatccctgaggccacagaggccagcggcccccccagccccacccctggggacaagctgagccctgccagcgagctgcccaaggagagccccctggaggtgtggctgaacctgggcggcagcaccccagacccccagggccctgagctgacctaccccttccagggcaccctggagccccagcctgccagtgacatcatcgacatcgactactttgagggcctggatggagagggcagaggagctgacctgggcagcttccctggcagccctggcaccagcgagaaccacccagacacagaaggagagacccccagctggagcctgctggacctgtatgatgacttcaccccatttgatgaaagtgacttctaccccaccaccagcttctatgatgacctggatgaggaggaggaggaggaggaggatgacaaggatgctgtgggcggcggggacctggaggatgaaaatgagctgctggtgcccaccgggaagccaggcctgggccctggcaccggccagcccaccagccgctggcatgctgtgcccccccagcacaccctgggctctgtgcccggcagcagcatcgccctgcggcccaggcctggagagcccggccgggacctggccagcagtgaaaatggaacagagtgccgcagcggctttgtgcgccacaacggcagctgccgctctgtgtgtgacctcttccccagctactgccacaatggaggccagtgctacctggtggagaacattggagccttctgccgctgcaacacccaggactacatctggcacaagggcatgagatgtgagagcatcatcacagacttccaggtgatgtgtgtggccgtgggcagcgctgccctggtgctgctgctgctcttcatgatgaccgtcttctttgccaagaagctgtacctgctgaagacagagaacaccaagctgcggaggaccaacaagttccgcaccccatctgagctgcacaatgacaacttcagcctgagcaccatcgccgagggcagccaccccaacgtgaggaagctgtgcaacacccccaggaccagcagcccccacgcccgggccctggcccactatgacaacgtcatctgccaggatgaccccagcgccccccacaagatccaggaggtgctgaagagctgcctgaaggaggaggagagcttcaacatccagaacagcatgagccccaagctggagggcggcaagggggaccaggccgacctggatgtgaactgcctgcagaacaacctgacctag

SEQ ID NO: 82895 - DNA, 1701 bp, Artificial Sequence
  derived and/or modified sequence
atgggccgggccggcggcggcggccccggccggggcccccccccccttctgttgtttttaggcgccgccctggttctagccagcggtgcagtgccagcccgggaagccggatctgccgtcgaggccgaagaattggtgaagggaagtcccgcctgggaaccacccgccaatgacactagggaagaggcgggccccccagctgccggcgaagatgaggccagctggacggccccgggtggggaacttgctggtcctgaagaagttctgcaggagtctgctgcagttactggtacagcctggctcgaggctgattcacccggactgggtggcgtcacagccgaagcaggaagcggagacgctcaggcgctgccagcaacactgcaagcacctcatgaggttcttggtcaatcaataatgccgccagccatccctgaggctacggaagcatcaggccccccgagccctacaccaggggataaattgagcccggcctccgagctccccaaagagagccctctggaggtttggttgaacctcgggggctccacgccagacccacagggtcccgagttgacatatccgtttcaagggaccctggagccccagccagcttcagatattatcgacatcgattacttcgaagggctggacggggaaggccgaggagcagacctgggctccttccctggttcaccggggaccagcgaaaatcatcccgacaccgaaggcgaaaccccttcatggtctctgctcgatttgtatgatgacttcaccccgttcgacgaaagcgacttttaccccacaacgtctttctatgacgacctggacgaggaggaggaggaggaagaagacgataaagacgctgtcggcgggggtgacttggaggatgagaacgagttgctcgtgccaactggtaaaccaggtctcgggccgggcacgggccagcccacatcccgctggcacgcagttcctccccagcatacccttggaagtgttccagggtcttctattgctctgcgccctcgtcccggggagcctgggcgtgacctggcttcctcggagaacggcacagagtgcaggtccggctttgttcggcataatgggagctgtcgcagcgtttgcgatctgtttccaagctactgccataacggcggacaatgctatctggtggaaaacattggtgctttctgcaggtgtaacacccaggactatatctggcacaagggcatgcggtgcgaatccattattacagatttccaggtcatgtgtgtggccgtcggcagcgctgcactggtgctgctgcttctcttcatgatgaccgttttctttgcaaagaaattgtacctactgaagacagagaatacaaagcttcggcggaccaataaatttcgaactccgagcgaactgcacaacgacaatttctctctgagcaccatcgctgagggatcccatcctaatgttcgaaaactttgcaataccccaagaacttcaagtccacacgccagggcgttggcccattatgataatgtcatttgccaggatgaccctagcgcgccccacaagattcaagaagtactcaagagttgtctgaaagaggaagagtctttcaacatccaaaattcgatgtcccccaaactagaggggggcaaaggggaccaggccgatctagatgtcaattgtcttcagaataaccttacatag

SEQ ID NO: 82896 - DNA, 1701 bp, Artificial Sequence
  derived and/or modified sequence
atgggtcgtgcagggggtgggggtccaggccgaggccctcccccactcttgcttttcttaggggcagccttggtgctcgccagcggcgcagtgcctgctcgggaggccggatccgcagtggaagccgaggaattggttaaaggatcacccgcttgggagccacccgctaacgatacacgggaagaggccggacccccagccgctggcgaagatgaggcctcatggactgcacctggaggtgagctggcaggacctgaagaggtcctccaggagtcagcagcggtgactggcaccgcctggctggaagccgactctcctggtctcggaggagtcacagccgaggccggatccggggacgctcaggcccttccagccactcttcaggcccctcatgaggtacttggtcagagcattatgccacctgctatcccggaagctaccgaggcctccggccctccctctccgacacccggagataagttaagtccagcatctgagctgccaaaagaatcacctctggaggtatggttgaatctcgggggatccacccctgatccacagggtcctgagcttacctacccgtttcaagggactctggaaccccagccggctagcgatattattgacattgactattttgaaggcttagatggcgaaggcaggggagcagacctgggctcttttccgggtagtcccggaacatctgagaatcaccccgacaccgaaggggaaaccccaagctggagcctgctggatctgtatgatgacttcaccccttttgatgagagtgatttctacccaaccaccagtttctatgatgacctagatgaagaagaggaagaggaagaggacgataaagacgccgtcggcggtggcgatctcgaggatgaaaatgagcttctggtcccaaccggtaagccaggactaggacccggtaccggacagcctacaagccgttggcatgctgtccccccacagcatacactgggatcggtgcctgggagcagcatagccttacgccctcgacccggtgagcctggacgggacctcgccagcagcgaaaatggaacagaatgccggtccggctttgtgcggcataacggttcttgcagaagcgtatgcgatctctttccgtcctactgccataacgggggacagtgctacctcgtggagaacatcggagccttttgccgttgcaatacccaggactacatttggcacaagggcatgcggtgcgagtccataattaccgatttccaggtaatgtgtgtggccgtggggtccgcggcacttgttctgctactgttattcatgatgacggttttcttcgccaagaagttatacctgctgaaaacagagaataccaagctgagaagaactaacaagttcagaacgccgtccgaactgcataatgacaattttagtctcagtaccatagccgagggatcgcatcccaatgtgaggaagttatgtaatactcccagaacatccagcccacacgccagagccctggctcattatgacaacgtgatctgtcaggatgatcctagcgcccctcacaagatacaggaagtgcttaaatcttgtcttaaagaagaggaaagttttaatatccagaacagtatgtctccaaagctggaaggcggtaagggagaccaggccgatctggacgtgaattgtttacagaacaacctgacttag

SEQ ID NO: 82897 - protein, 645 aa, Artificial Sequence
  derived and/or modified sequence
MSGQSLTDRITAAQHSVTGSAVSKTVCKATTHEIMGPKKKHLDYLIQCTNEMNVNIPQLADSLFERTTNSSWVVVFKSLITTHHLMVYGNERFIQYLASRNTLFNLSNFLDKSGLQGYDMSTFIRRYSRYLNEKAVSYRQVAFDFTKVKRGADGVMRTMNTEKLLKTVPIIQNQMDALLDFNVNSNELTNGVINAAFMLLFKDAIRLFAAYNEGIINLLEKYFDMKKNQCKEGLDIYKKFLTRMTRISEFLKVAEQVGIDRGDIPDLSQAPSSLLDALEQHLASLEGKKIKDSTAASRATTLSNAVSSLASTGLSLTKVDEREKQAALEEEQARLKALKEQRLKELAKKPHTSLTTAASPVSTSAGGIMTAPAIDIFSTPSSSNSTSKLPNDLLDLQQPTFHPSVHPMSTASQVASTWGDAVDDAIPSLNPFLTKSSGDVHLSISSDVSTFTTRTPTHEMFVGFTPSPVAQPHPSAGLNVDFESVFGNKSTNVIVDSGGFDELGGLLKPTVASQNQNLPVAKLPPSKLVSDDLDSSLANLVGNLGIGNGTTKNDVNWSQPGEKKLTGGSNWQPKVAPTTAWNAATMAPPVMAYPATTPTGMIGYGIPPQMGSVPVMTQPTLIYSQPVMRPPNPFGPVSGAQIQFM

SEQ ID NO: 82898 - DNA, 1938 bp, Artificial Sequence
  derived and/or modified sequence
atgtccggacagtccttaacggaccgcatcacggccgcacaacattctgtcaccggttctgccgtgtcaaaaaccgtgtgcaaagccaccacccatgaaataatgggacctaaaaagaaacacctagattacctgatccagtgcaccaacgagatgaatgtaaacattcctcagctcgccgattctctttttgaaaggaccaccaacagctcttgggtggtggtcttcaagagcctcatcactactcaccatttgatggtttatggaaatgagcgttttatacaatacctagccagtaggaacaccttattcaatcttagcaactttctggacaagtctggcctgcagggctatgatatgtccacatttataaggcgttactcaaggtatctcaatgagaaggccgtgagctatcgccaggtagcctttgactttaccaaggtaaagcgtggagcagacggggttatgcggacaatgaacacagagaaactactgaaaaccgtccccatcattcaaaatcagatggatgcactacttgattttaatgtcaactcgaacgagttgactaatggggtgattaatgccgcatttatgctgctcttcaaagacgctatccgcctttttgcagcttacaatgaaggtattattaatttgctggaaaaatactttgacatgaaaaaaaatcaatgcaaagaaggtctagacatttataagaagttcctaacccgcatgactaggatctctgaatttcttaaggttgccgaacaggtgggcatcgatagaggggacattccggatctgagccaggccccatcctccctgcttgatgcactagagcaacaccttgcaagtctggaaggcaaaaaaatcaaggactctactgccgcttccagggctacgacactgagcaacgcagtaagttccctcgcatctaccggcctaagcctgactaaggtggacgaaagagagaagcaagctgccctcgaagaagaacaggccagactgaaagcattgaaggagcagaggctgaaggagctggctaagaagccccatacatctctcactacagctgcttctccagtctctacatcggccggcggaattatgaccgctccagcaatagatattttcagtaccccttcgagctctaattctacgtcaaaattacctaatgatctcctggatctgcaacaacctacattccaccctagtgtgcaccccatgtccactgcaagtcaggttgcaagtacctggggtgacgcagtggacgatgcgattccttccttgaacccatttctaactaagagcagcggcgatgttcacctgtccattagtagcgacgtctctactttcactacacggacacccacccacgagatgttcgtgggtttcacaccctctcctgttgcgcaacctcatcccagcgcgggtttgaatgtggatttcgaaagcgtgttcggcaacaagtctacgaacgtgatagttgactcaggcggattcgacgagctgggagggctcctcaaaccaactgtggcctctcagaatcagaatctgcctgttgccaagctgccaccgtccaagctcgtatccgacgacctggatagcagcctggctaacctggtgggaaacctggggattggaaacggaacaacgaagaacgacgttaactggagtcagccaggggaaaaaaagctcactggggggagcaattggcagccaaaagttgctcctacgactgcttggaatgctgccaccatggcgccgcccgtcatggcctaccccgcaaccacacctacaggcatgatcgggtatgggattcctccccaaatgggaagcgtacccgtgatgacccaacccactcttatttattctcagcccgtgatgcgaccccccaacccctttggccctgtctctggtgctcaaattcaatttatgtag

SEQ ID NO: 82899 - DNA, 1938 bp, Artificial Sequence
  derived and/or modified sequence
atgagcggccagagcctgacagaccgcatcacagctgcccagcacagcgtgacaggcagcgctgtgtccaagacagtgtgcaaggccaccacccatgagatcatgggccccaagaagaagcacctggactacctgatccagtgcaccaatgagatgaatgtgaacatcccccagctggccgacagcctgtttgagaggaccaccaacagctcctgggtggtggtgttcaagagcctcatcaccacccaccacctgatggtgtatggaaatgaacgcttcatccagtacctggccagcaggaacaccctcttcaacctgagcaacttcctggacaagagcggcctgcagggctatgacatgagcaccttcatccgccgctacagccgctacctgaatgagaaggctgtgtcctaccggcaggtggcctttgacttcaccaaggtgaagagaggagcagatggagtgatgaggaccatgaacacagagaagctgctgaagacagtgcccatcatccagaaccagatggatgccctgctggacttcaacgtgaacagcaatgagctgaccaacggggtcatcaatgctgccttcatgctgctcttcaaggatgccatccggctgtttgctgcctacaatgaaggcatcatcaacctgctggagaagtactttgacatgaagaagaaccagtgcaaggagggcctggacatctacaagaagttcctgaccaggatgacccgcatcagcgagttcctgaaggtggccgagcaggtgggcatcgacagaggagacatcccagacctgagccaggcccccagcagcctgctggatgccctggagcagcacctggccagcctggagggcaagaagatcaaggacagcacagctgccagccgggccaccaccctgagcaatgctgtgagcagcctggccagcacaggcctgagcctgaccaaggtggatgagcgggagaagcaggccgccctggaggaggagcaggcccggctgaaggccctgaaggagcagaggctgaaggagctggccaagaagccccacaccagcctgaccacagctgccagccctgtgtccaccagcgctgggggcatcatgacagccccagccatcgacatcttcagcacccccagcagcagcaacagcaccagcaagctgcccaatgacctgctggacctgcagcagcccaccttccaccccagcgtgcaccccatgagcacagccagccaggtggccagcacctggggagatgctgtggatgatgccatccccagcctgaaccccttcctgaccaagagcagtggagatgtgcacctgagcatcagcagtgatgtgtccaccttcaccaccaggacccccacccatgagatgtttgtgggcttcacccccagccctgtggcccagccccaccccagcgctggcctgaatgtggactttgagagcgtgtttggaaacaagagcaccaacgtcatcgtggacagcggcggctttgatgagctgggcggcctgctgaagcccaccgtggccagccagaaccagaacctgcctgtggccaagctgccccccagcaagctggtgtctgatgacctggacagcagcctggccaacctggtgggcaacctgggcattggaaatggcaccaccaagaatgatgtgaactggagccagcccggggagaagaagctgaccggcggcagcaactggcagcccaaggtggcccccaccacagcctggaatgctgccaccatggcccctcctgtgatggcctacccagccaccacccccaccggcatgattggctacggcatccccccccagatgggctctgtgcctgtgatgacccagcccaccctcatctacagccagcctgtgatgaggcctcccaaccccttcggccctgtgtctggggcccagatccagttcatgtag

SEQ ID NO: 82900 - DNA, 1938 bp, Artificial Sequence
  derived and/or modified sequence
atgagcggccagagcctgaccgaccggatcaccgccgcccagcacagcgtgaccgggtctgcagttagtaagactgtgtgtaaggccacgacccatgagatcatgggacccaaaaagaaacacctcgactatctgattcagtgcacaaatgagatgaacgtgaatattcctcagctcgccgatagtctctttgagcggactactaacagttcttgggttgtcgtattcaaaagtctcattacaacccatcacctgatggtgtatggcaacgaaaggtttattcagtacctcgcgtcaagaaacacacttttcaatctctctaattttctggataagtctggtttacagggttatgatatgagtacgtttatccgacggtactctcggtacctgaatgaaaaggctgttagttataggcaggtggcttttgatttcaccaaagtcaagcgcggggccgacggggttatgaggaccatgaataccgagaaactcctcaaaacagtgcctattattcagaatcagatggacgccctgctggatttcaatgttaattccaacgaactcaccaacggagtaattaatgccgctttcatgttattattcaaggacgcaatcagattatttgccgcctacaacgagggcataatcaatttactggagaagtattttgatatgaagaaaaatcaatgcaaagagggcctggatatttataagaagtttctcacaaggatgacacgaatttcagagtttctcaaggtcgccgagcaggttgggatagataggggagacattccagacctcagtcaggcacctagctccctgttggacgcgttggaacagcaccttgctagcctggaaggcaagaagatcaaagattcaaccgcagcttccagggctacgacactcagcaacgccgtttcatcactggcgtcaactgggctgtctctcactaaagtggacgagcgagagaagcaggccgcactcgaagaagaacaagctagactgaaggcccttaaggagcagcggttgaaagagctggccaagaaaccccatacatccctgacgaccgctgccagcccagtcagcacctctgctggcggcatcatgaccgccccagcaatcgatattttcagcaccccatcctcgtccaacagtactagcaagctgccaaacgatttgttggacttacagcagcccacgtttcacccttccgtgcaccctatgagcactgcatctcaggtggccagtacatggggcgatgcggtggacgacgccatcccgagccttaatcctttccttaccaagtcctctggagatgtgcatctgtctatttccagcgatgtaagtaccttcactacaaggacgcctacgcacgaaatgttcgtcggcttcaccccgagccctgtggcacagccccacccttccgccggcctcaacgtcgactttgaatccgtcttcggcaataagagcaccaatgtcatagtggatagtggcggatttgacgagctcggcgggctgttaaagccaactgtggcctcccagaaccaaaacctgcccgtggccaagctccctccctcaaaactggtgtccgatgatttagattcatccctggctaatctggtaggtaacctgggtattgggaatggcaccacaaaaaacgacgtgaactggagtcagccaggtgaaaaaaaactcactggaggtagtaattggcaaccaaaggtggcaccaactacagcctggaatgccgctaccatggccccccccgtcatggcatatcccgccacaactcctactggaatgatcggatacgggattccgccccagatggggtctgttccggttatgacacagcctacactgatctattcgcagcccgtgatgcgaccaccaaatccattcggtccggtttccggagctcagatccaattcatgtag

SEQ ID NO: 82901 - DNA, 3613 bp, Artificial Sequence
  derived and/or modified sequence
ggagcctggcgccgccattttcctgcagctgcctgttcctcttaccctgcccggctccagctgacccgggaaggggtgggctgaactgaggcgggggcaagggagtgcccgacatcttgtccgactccgcgggtgacacgagccggttctctctggactggtggcagcgcgcggccccgaaccgcgccccaggccggcaggcggggaaggagccggtgggggtagggggtgcggtggggggtggggaccctccggctcttgggggtcccagtccccgccggctgctgagcgggtggggtggtggaggagctgcagagatgtccggccagagcctgacggaccgaatcactgccgcccagcacagtgtcaccggctctgccgtatccaagacagtatgcaaggccacgacccacgagatcatggggcccaagaaaaagcacctggactacttaattcagtgcacaaatgagatgaatgtgaacatcccacagttggcagacagtttatttgaaagaactactaatagtagttgggtggtggtcttcaaatctctcattacaactcatcatttgatggtgtatggaaatgagcgttttattcagtatttggcttcaagaaacacgttgtttaacttaagcaattttttggataaaagtggattgcaaggatatgacatgtctacatttattaggcggtatagtagatatttaaatgagaaagcagtttcatacagacaagttgcatttgatttcacaaaagtgaagagaggggctgatggagttatgagaacaatgaacacagaaaaactcctaaaaactgtaccaattattcagaatcagatggatgcacttcttgattttaatgttaatagcaatgaacttacaaatggggtaataaatgctgccttcatgctcctgttcaaagatgccattagactgtttgcagcatacaatgaaggaattattaatttgttggaaaaatattttgatatgaaaaagaaccaatgcaaagaaggtcttgacatctataagaagttcctaactaggatgacaagaatctcagagttcctcaaagttgcagagcaagttggaattgacagaggtgatataccagacctttcacaggcccctagcagtcttcttgatgctttggaacaacatttagcttccttggaaggaaagaaaatcaaagattctacagctgcaagcagggcaactacactttccaatgcagtgtcttccctggcaagcactggtctatctctgaccaaagtggatgaaagggaaaagcaggcagcattagaggaagaacaggcacgtttgaaagctttaaaggaacagcgcctaaaagaacttgcaaagaaacctcatacctctttaacaactgcagcctctcctgtatccacctcagcaggagggataatgactgcaccagccattgacatattttctacccctagttcttctaacagcacatcaaagctgcccaatgatctgcttgatttgcagcagccaacttttcacccatctgtacatcctatgtcaactgcttctcaggtagcaagtacatggggagatgctgttgatgatgccattccaagcttaaatcctttcctcacaaaaagtagtggtgatgttcacctttccatttcttcagatgtatctacttttactactaggacacctactcatgaaatgtttgttggattcactccttctccagttgcacagccacacccttcagctggccttaatgttgactttgaatctgtgtttggaaataaatctacaaatgttattgtagattctgggggctttgatgaactaggtggacttctcaaaccaacagtggcctctcagaaccagaaccttcctgttgccaaactcccacctagcaagttagtatctgatgacttggattcatctttagccaaccttgtgggcaatcttggcatcggaaatggaaccactaagaatgatgtaaattggagtcaaccaggtgaaaagaagttaactgggggatctaactggcaaccaaaggttgcaccaacaaccgcttggaatgctgcaacaatggcaccccctgtaatggcctatcctgctactacaccaacaggcatgataggatatggaattcctccacaaatgggaagtgttcctgtaatgacgcaaccaaccttaatatacagccagcctgtcatgagacctccaaacccctttggccctgtatcaggagcacagatacagtttatgtaacttgatggaagaaaatggaattactccaaaaagacaagtgctcaagcagcaaaatccttacttccagcaaaatccaaactgctgtctcttaaatctcttaaactctcttcttccattagaatgctacaagtaactcagtgaaggcccatgaaggaaattgggactagtttataggagaacgtatcaatacagtttataaagccaagaattgctatgatttaagactaagatctgtctttttggtgactaacccttcaattctttcaactcctgttaatacccataatcagtaacctatcaagaaaagcccttatttggaaagtgtgaaatttgtatttggaaaagctgcctggagagaagaactgtgtcctttactgtatttcaacaggactcttttgggggatcaaaattaaaattcctaattatgcattatctttcttttctccagtcctcacaaatacagaaacaataactgaaattaacttttctttttttaaaaaaaattatattcagtttgcagtagacattccttaagtatttgtatttatttatgattatcaattttacataacattaatattgtatcagacctccttatgaaaatgagtatggatgtgcacagtatgtttgatttttatccacaagaatgaatctgattcagaatgcttttctcagctgacatacagagcactaaatattttaaggcaagtccataggtctgaatctcttaagaattctcggcctctgtgggatttagggaagcattataaatgcattaatccttatagtcaattctgtgcctaggattttgccagggaacagttcactgactaggaaaagcactacattttaaattcagcattagtgcattgggaaggatctttactgctttgtgcttggcatgtcattattttccatttgacattagggcctttccaaaatgaatgtgaggaattgctttcacttcaagactttccttcttttcactaaaactctagaaggtgttacaagggggagggaaggggggcaaagtccttgaacattttctttggctcgtgccatgttatgatcatataccttttaaataaggggaaatagtatctttaaagttaatgtctagccaagagtttagtaaacgaagaattaaactgcactgttgatcggtgctttgtgtaaatacatctttaacatttgggtggagaggggccttaagaaggacagttcattgtaggaaagcaattctgtacatgagtttaagcattcttgttgcattgtctctgcagattctatttttgtttacaatattaaaatgtatgttagcaaaatgggtggattttcaaataaaatgcagcttccac

SEQ ID NO: 82902 - DNA, 1938 bp, Artificial Sequence
  derived and/or modified sequence
atgtcgggccagagcctgaccgaccggattacagctgctcagcatagcgtgacaggctccgctgtttccaagaccgtctgcaaagcaactactcacgagataatgggcccaaaaaaaaagcatttggattatttgatccagtgcaccaatgaaatgaatgtcaatattccacagctggccgacagtctattcgaacgcactaccaattcctcctgggtggtcgttttcaagagtctgatcactacacatcatctgatggtttacggaaatgaacgttttattcaatatctggccagtcggaatacattgttcaatctgtcaaactttttagataaatccgggctgcagggctacgatatgtctacgtttattcgccgttatagcaggtatcttaacgagaaggctgtctcctataggcaggtcgcatttgatttcaccaaggttaagagaggcgcagacggcgtcatgagaaccatgaatacggaaaaactgctgaagacagttccaatcatacagaatcagatggacgccttgctggactttaatgtaaacagcaacgaattgactaatggcgtgatcaatgccgcattcatgctactgtttaaggacgctattcgtctgttcgctgcttacaacgagggtatcatcaaccttttagagaagtattttgatatgaaaaagaaccagtgcaaagagggtcttgacatttataaaaagttcctgacgcgtatgactcggatctctgagttcctcaaagtggctgagcaggtgggtattgacagaggagatatccccgatctgagccaggccccatcatccctgctcgatgcattggaacagcatctcgcaagcttggaggggaaaaaaataaaggatagtactgctgctagccgcgcaacaaccctgagcaatgcggtgtcctccttggccagcaccggtttgagcctaactaaggtggacgagcgagaaaaacaggcagctctggaagaggaacaagccagacttaaagcactgaaagaacaaaggctaaaggagttggcaaagaaaccgcatacaagtctgactaccgctgcctccccagtgtctaccagcgccggagggattatgacagcccctgcaatagatatttttagtacccccagttcctcaaattccacatcaaaactgcctaatgatcttcttgatctgcagcaaccgacctttcacccatcagttcatcccatgagtacagcatctcaggtggcttcaacctggggcgatgcggtcgatgatgccataccgtctctgaaccccttcttaaccaagtcctcaggagacgtgcacctgtccatctcttccgatgtgagcactttcacgacacgaactcctactcacgagatgtttgtggggtttaccccctcccccgtggcgcagccacacccctccgccggactgaacgtggatttcgaatccgtgttcgggaacaaatcaacaaatgtgattgtcgacagcggtggctttgatgagttgggcggtcttcttaaaccgaccgtggccagccagaatcagaatctgccagtagctaaactacctccctctaaacttgtcagtgacgacctggatagcagcctggccaaccttgtagggaacttgggcattgggaacggcaccacaaagaacgatgtaaactggtctcagcccggagagaaaaagctgactggagggagcaactggcaacccaaggtggctcctaccactgcatggaacgccgctaccatggcaccccctgtaatggcctaccccgcaaccacacctaccggtatgattgggtatggaattcccccacagatgggctcagtacctgtgatgactcagcccaccttaatctactcccagccagtaatgcgacctcccaatccctttgggccagtctctggagctcaaatacagtttatgtag

SEQ ID NO: 82903 - DNA, 1938 bp, Artificial Sequence
  derived and/or modified sequence
atgagcggccagagcctgaccgacagaatcaccgccgcccagcacagcgtgaccggcagcgccgtgagcaagaccgtgtgcaaggccaccacccacgagatcatgggccccaagaagaagcacctggactacctgatccagtgcaccaacgagatgaacgtgaacatcccccagctggccgacagcctgttcgagagaaccaccaacagcagctgggtggtggtgttcaagagcctgatcaccacccaccacctgatggtgtacggcaacgagagattcatccagtacctggccagcagaaacaccctgttcaacctgagcaacttcctggacaagagcggcctgcagggctacgacatgagcaccttcatcagaagatacagcagatacctgaacgagaaggccgtgagctacagacaggtggccttcgacttcaccaaggtgaagagaggcgccgacggcgtgatgagaaccatgaacaccgagaagctgctgaagaccgtgcccatcatccagaaccagatggacgccctgctggacttcaacgtgaacagcaacgagctgaccaacggcgtgatcaacgccgccttcatgctgctgttcaaggacgccatcagactgttcgccgcctacaacgagggcatcatcaacctgctggagaagtacttcgacatgaagaagaaccagtgcaaggagggcctggacatctacaagaagttcctgaccagaatgaccagaatcagcgagttcctgaaggtggccgagcaggtgggcatcgacagaggcgacatccccgacctgagccaggcccccagcagcctgctggacgccctggagcagcacctggccagcctggagggcaagaagatcaaggacagcaccgccgccagcagagccaccaccctgagcaacgccgtgagcagcctggccagcaccggcctgagcctgaccaaggtggacgagagagagaagcaggccgccctggaggaggagcaggccagactgaaggccctgaaggagcagagactgaaggagctggccaagaagccccacaccagcctgaccaccgccgccagccccgtgagcaccagcgccggcggcatcatgaccgcccccgccatcgacatcttcagcacccccagcagcagcaacagcaccagcaagctgcccaacgacctgctggacctgcagcagcccaccttccaccccagcgtgcaccccatgagcaccgccagccaggtggccagcacctggggcgacgccgtggacgacgccatccccagcctgaaccccttcctgaccaagagcagcggcgacgtgcacctgagcatcagcagcgacgtgagcaccttcaccaccagaacccccacccacgagatgttcgtgggcttcacccccagccccgtggcccagccccaccccagcgccggcctgaacgtggacttcgagagcgtgttcggcaacaagagcaccaacgtgatcgtggacagcggcggcttcgacgagctgggcggcctgctgaagcccaccgtggccagccagaaccagaacctgcccgtggccaagctgccccccagcaagctggtgagcgacgacctggacagcagcctggccaacctggtgggcaacctgggcatcggcaacggcaccaccaagaacgacgtgaactggagccagcccggcgagaagaagctgaccggcggcagcaactggcagcccaaggtggcccccaccaccgcctggaacgccgccaccatggccccccccgtgatggcctaccccgccaccacccccaccggcatgatcggctacggcatccccccccagatgggcagcgtgcccgtgatgacccagcccaccctgatctacagccagcccgtgatgagaccccccaaccccttcggccccgtgagcggcgcccagatccagttcatgtag

SEQ ID NO: 82904 - protein, 551 aa, Artificial Sequence
  derived and/or modified sequence
MNVNIPQLADSLFERTTNSSWVVVFKSLITTHHLMVYGNERFIQYLASRNTLFNLSNFLDKSGLQGYDMSTFIRRYSRYLNEKAVSYRQVAFDFTKVKRGADGVMRTMNTEKLLKTVPIIQNQMDALLDFNVNSNELTNGVINAAFMLLFKDAIRLFAAYNEGIINLLEKYFDMKKNQCKEGLDIYKKFLTRMTRISEFLKVAEQVGIDRGDIPDLSQAPSSLLDALEQHLASLEGKKIKDSTAASRATTLSNAVSSLASTGLSLTKVDEREKQAALEEEQARLKALKEQRLKELAKKPHTSLTTAASPVSTSAGGIMTAPAIDIFSTPSSSNSTSKLPNDLLDLQQPTFHPSVHPMSTASQVASTWGGFTPSPVAQPHPSAGLNVDFESVFGNKSTNVIVDSGGFDELGGLLKPTVASQNQNLPVAKLPPSKLVSDDLDSSLANLVGNLGIGNGTTKNDVNWSQPGEKKLTGGSNWQPKVAPTTAWNAATMAPPVMAYPATTPTGMIGYGIPPQMGSVPVMTQPTLIYSQPVMRPPNPFGPVSGAQIQFM

SEQ ID NO: 82905 - DNA, 1656 bp, Artificial Sequence
  derived and/or modified sequence
atgaacgtcaacatcccgcagctggcagacagcctgtttgagaggaccaccaactctagctgggtcgttgtgtttaagtctctgatcaccacccaccacttgatggtctacggcaacgagagatttatccagtacttggcgtcgcggaatactttgtttaatctgtccaactttcttgacaagagtggccttcagggctacgacatgagcacttttatccggcgttacagcagatacctgaatgagaaggccgtttcctacaggcaggttgcatttgatttcacgaaagtgaagcggggtgcagacggcgtcatgcggactatgaacactgagaagcttctcaagactgtaccaatcatccaaaatcagatggacgccctactggatttcaacgtcaattctaatgagctaactaacggtgtaattaatgccgcatttatgttgttgttcaaagatgccattagacttttcgccgcttacaatgaaggaattatcaacttgctcgagaaatactttgatatgaagaagaaccagtgcaaggagggcctagacatttataaaaagtttctaaccaggatgacacgtatatctgagttcctgaaggtcgctgaacaggtcggtatcgaccgaggagacataccagacctcagccaggctccaagcagcctgctggatgcactcgagcagcacctggcttcactggaaggaaagaaaatcaaagactcaacggctgctagccgtgccacgaccctgtcgaacgccgttagctccctggcctccacaggtctctcccttaccaaagtcgacgagagagagaagcaagccgcccttgaagaagagcaggccaggcttaaggccttgaaggagcagcgtttaaaggagcttgcaaagaagccccatacaagtttgaccacggccgcgagtcctgtttccacttcagcgggcggaataatgacagcccccgccatcgacattttcagcaccccctcttctagtaactccacttcaaaactgcccaatgacctgctggacttgcagcagcccacgtttcacccctctgtccatcctatgtctactgcttctcaggtcgcctctacttggggaggcttcaccccatcccccgtggcacaaccacatccttcagccggacttaatgtggacttcgaaagtgtcttcggtaacaagtctactaatgtgattgtggactcaggtggattcgatgaattggggggactgctgaaacctaccgttgctagtcagaatcagaacctccccgttgccaaattgccccctagtaagcttgtgagcgacgacttggattcgagcctggctaatcttgtggggaatctgggcatcggcaatggcactaccaaaaatgacgtgaattggtcacagcctggtgaaaagaaacttacgggaggcagtaattggcagcctaaggtagctcctaccacagcatggaacgctgctacaatggctccgcccgtgatggcttatccggccaccactcccaccggcatgatcggctacggaatcccaccacagatgggctcagtgcctgtcatgacccagccaaccttgatctactcccagcctgtgatgcggcctccaaacccatttgggcccgtctcaggagctcaaattcagttcatgtag

SEQ ID NO: 82906 - DNA, 1656 bp, Artificial Sequence
  derived and/or modified sequence
atgaatgtgaacatcccccagctggccgacagcctgtttgagaggaccaccaacagctcctgggtggtggtgttcaagagcctcatcaccacccaccacctgatggtgtatggaaatgaacgcttcatccagtacctggccagcaggaacaccctcttcaacctgagcaacttcctggacaagagcggcctgcagggctatgacatgagcaccttcatccgccgctacagccgctacctgaatgagaaggctgtgtcctaccggcaggtggcctttgacttcaccaaggtgaagagaggagcagatggagtgatgaggaccatgaacacagagaagctgctgaagacagtgcccatcatccagaaccagatggatgccctgctggacttcaacgtgaacagcaatgagctgaccaatggagtcatcaatgctgccttcatgctgctcttcaaggatgccatccggctgtttgctgcctacaatgaaggcatcatcaacctgctggagaagtactttgacatgaagaagaaccagtgcaaggagggcctggacatctacaagaagttcctgaccaggatgacccgcatcagcgagttcctgaaggtggccgagcaggtgggcatcgacagaggagacatcccagacctgagccaggcccccagcagcctgctggatgccctggagcagcacctggccagcctggagggcaagaagatcaaggacagcacagctgccagccgggccaccaccctgagcaatgctgtgagcagcctggccagcacaggcctgagcctgaccaaggtggatgagcgggagaagcaggccgccctggaggaggagcaggcccggctgaaggccctgaaggagcagaggctgaaggagctggccaagaagccccacaccagcctgaccacagctgccagccctgtgtccaccagcgctgggggcatcatgacagccccagccatcgacatcttcagcacccccagcagcagcaacagcaccagcaagctgcccaatgacctgctggacctgcagcagcccaccttccaccccagcgtgcaccccatgagcacagccagccaggtggccagcacctggggcggcttcacccccagccctgtggcccagccccaccccagcgctggcctgaatgtggactttgagagcgtgtttggaaacaagagcaccaacgtcatcgtggacagcggcggctttgatgagctgggcggcctgctgaagcccaccgtggccagccagaaccagaacctgcctgtggccaagctgccccccagcaagctggtgtctgatgacctggacagcagcctggccaacctggtgggcaacctgggcattggaaatggcaccaccaagaatgatgtgaactggagccagcccggggagaagaagctgaccggcggcagcaactggcagcccaaggtggcccccaccacagcctggaatgctgccaccatggcccctcctgtgatggcctacccagccaccacccccaccggcatgattggctacggcatccccccccagatgggctctgtgcctgtgatgacccagcccaccctcatctacagccagcctgtgatgaggcctcccaaccccttcggccctgtgtctggggcccagatccagttcatgtag

SEQ ID NO: 82907 - DNA, 1656 bp, Artificial Sequence
  derived and/or modified sequence
atgaacgtgaacatcccccagctggccgacagcctgttcgagcggactactaacagcagctgggtcgtggtgtttaaatccctaatcacaacccaccaccttatggtatacggcaatgaaagatttatccagtatctggcatcacgaaatactctgtttaatcttagcaacttcctggataagtcaggcctacaaggctacgacatgtccacattcatcagacggtactctcgctacttgaacgaaaaagccgttagctacaggcaggtggccttcgactttacgaaggttaaacggggcgcagatggcgtaatgagaacaatgaataccgagaaactcctaaaaactgtcccaataatacagaatcagatggacgccttgctagacttcaatgtaaacagtaacgagctgactaatggggttattaatgctgcctttatgctgctgtttaaggacgctatccgcctatttgcagcgtataacgagggcatcattaacctgctggagaaatactttgacatgaaaaagaatcagtgcaaagagggtttggatatctataaaaagtttctgactcgcatgaccagaatatccgagttcctcaaggtggccgagcaggttggtattgacagaggtgacattccagatctgtctcaggcaccatccagtctgctggacgctcttgaacagcacctcgcgtcactagagggcaagaagatcaaggacagcacagccgcttcgagagctactactctttcaaatgctgtgtcgtccctcgcttccacagggctgagcttgacaaaggtggatgagcgggagaagcaagccgccttggaggaggagcaggcccgcctgaaagccttaaaggaacaaaggctcaaggagctggccaaaaagcctcacacgtctctgaccactgctgcatccccagtgtctacttcggcaggcgggatcatgactgcaccagctatcgatatcttttccacgcctagctctagcaacagtacctccaagctgcccaacgacctgttagacctgcagcagcctacgtttcaccctagcgttcatcctatgtctaccgcatcccaggttgcttctacttgggggggattcactcctagtccagtggcccagccccaccctagtgccggcctgaacgtggatttcgagagcgttttcggaaataagtctacaaacgtgatcgttgattcaggtgggttcgatgagttaggcggcctgctgaaaccaactgtggcgtcccagaatcagaatctcccggtcgccaagctacctccttccaagctggtgagtgatgacttggactctagtctcgccaatctggtcggcaatttagggatcggcaatggcactacgaaaaatgatgttaactggtcacaacctggcgaaaagaaactgacaggcggttccaactggcagccaaaagtggccccgaccacagcctggaatgcagccacaatggctccccctgtgatggcttacccagccacaacccccacggggatgatcgggtatggcattccccctcagatgggttccgtccctgtgatgactcagccaactctaatttactcccagcctgttatgagaccgccaaacccgttcgggcctgtgagcggtgcacagatacaatttatgtag

SEQ ID NO: 82908 - DNA, 1656 bp, Artificial Sequence
  derived and/or modified sequence
atgaacgtaaacattccacagctggcagactcactgtttgaacgcacgaccaattcctcctgggtcgtggtcttcaaaagtctcataactacccatcaccttatggtgtatggcaacgaaaggtttatccagtatcttgcatcccggaatacgttgtttaacctgtccaacttcctggacaaatcaggcctgcaaggctatgatatgtctactttcatcagacgatatagcaggtatttgaacgagaaggcagtgagctatcggcaggttgcctttgactttactaaggtgaagcgcggagccgacggggtgatgcgaaccatgaacaccgagaagttgctcaagacagtgccaatcatccagaaccagatggacgccctgttggactttaatgtgaactctaacgagctgaccaatggcgtgatcaacgccgcattcatgctgctgtttaaggatgccatacgtctttttgccgcatataacgaggggataatcaatttgctagagaagtacttcgacatgaaaaaaaatcaatgcaaggagggtttagatatctataagaagtttttgacaaggatgacccggataagtgagttcctgaaggttgcagaacaggtgggtattgacaggggagatattcctgatctttcccaagccccttccagcctacttgatgccctggagcagcacctggcctcgctggaggggaagaaaattaaagatagtacagctgctagcagagcgactaccctctccaatgctgtaagttctcttgcaagtacagggctgtctctgaccaaagtcgacgaacgggaaaaacaggccgcactcgaggaagagcaggctcgactgaaggccctcaaggagcagcgcctcaaggaattagccaaaaaacctcatacctctctgacaactgccgcaagtcccgtcagcacatccgctggcggaataatgaccgcgccagccatagacatcttcagcacgccatccagctccaactccacgtcaaaactcccaaatgacctactggacctgcagcagcccacattccacccatctgtacacccgatgagtacagcttcccaagttgcgtcgacatggggcggttttacacctagtccggtggcccaacctcaccctagcgcgggacttaacgttgactttgaatctgtgtttggaaacaaaagtactaacgttattgttgattctggcggattcgatgagttgggtgggctgcttaagccaactgtggcgtcacaaaatcagaacctccctgtggctaagttgccgccatctaaactggtttcagatgaccttgactcttcactggctaacctcgtcggcaacctgggtattgggaatgggaccactaaaaacgacgtcaattggagccagccgggtgagaagaaactgaccggtggttcaaactggcagccaaaggtagcgcctaccacagcttggaacgctgccacgatggcgcctccagtcatggcttatcctgcgacaacccctaccggcatgattggctatggcatcccaccgcagatggggtctgttcccgtgatgacccaacccaccctgatctactctcagcctgtcatgcgacctcctaatccctttggtccagtgagtggggctcagattcagtttatgtag

SEQ ID NO: 82909 - DNA, 1656 bp, Artificial Sequence
  derived and/or modified sequence
atgaacgtgaacatcccccagctggccgacagcctgttcgagagaaccaccaacagcagctgggtggtggtgttcaagagcctgatcaccacccaccacctgatggtgtacggcaacgagagattcatccagtacctggccagcagaaacaccctgttcaacctgagcaacttcctggacaagagcggcctgcagggctacgacatgagcaccttcatcagaagatacagcagatacctgaacgagaaggccgtgagctacagacaggtggccttcgacttcaccaaggtgaagagaggcgccgacggcgtgatgagaaccatgaacaccgagaagctgctgaagaccgtgcccatcatccagaaccagatggacgccctgctggacttcaacgtgaacagcaacgagctgaccaacggcgtgatcaacgccgccttcatgctgctgttcaaggacgccatcagactgttcgccgcctacaacgagggcatcatcaacctgctggagaagtacttcgacatgaagaagaaccagtgcaaggagggcctggacatctacaagaagttcctgaccagaatgaccagaatcagcgagttcctgaaggtggccgagcaggtgggcatcgacagaggcgacatccccgacctgagccaggcccccagcagcctgctggacgccctggagcagcacctggccagcctggagggcaagaagatcaaggacagcaccgccgccagcagagccaccaccctgagcaacgccgtgagcagcctggccagcaccggcctgagcctgaccaaggtggacgagagagagaagcaggccgccctggaggaggagcaggccagactgaaggccctgaaggagcagagactgaaggagctggccaagaagccccacaccagcctgaccaccgccgccagccccgtgagcaccagcgccggcggcatcatgaccgcccccgccatcgacatcttcagcacccccagcagcagcaacagcaccagcaagctgcccaacgacctgctggacctgcagcagcccaccttccaccccagcgtgcaccccatgagcaccgccagccaggtggccagcacctggggcggcttcacccccagccccgtggcccagccccaccccagcgccggcctgaacgtggacttcgagagcgtgttcggcaacaagagcaccaacgtgatcgtggacagcggcggcttcgacgagctgggcggcctgctgaagcccaccgtggccagccagaaccagaacctgcccgtggccaagctgccccccagcaagctggtgagcgacgacctggacagcagcctggccaacctggtgggcaacctgggcatcggcaacggcaccaccaagaacgacgtgaactggagccagcccggcgagaagaagctgaccggcggcagcaactggcagcccaaggtggcccccaccaccgcctggaacgccgccaccatggccccccccgtgatggcctaccccgccaccacccccaccggcatgatcggctacggcatccccccccagatgggcagcgtgcccgtgatgacccagcccaccctgatctacagccagcccgtgatgagaccccccaaccccttcggccccgtgagcggcgcccagatccagttcatgtag

SEQ ID NO: 82910 - DNA, 705 bp, Artificial Sequence
  derived and/or modified sequence
atggccgctgggacagcggtgggggcctgggtgctggtcttatcgctctggggagcagtggtgggtgcccagaacataaccgcaaggattggtgagccactcgtgctgaagtgcaaaggagcaccaaaaaaacctcctcagcgactggagtggaagctgaacaccggaagaacagaggcgtggaaggtactgagcccccaaggcggggggccatgggacagcgtggctcgtgtattgcccaatagcagcctcttcctccccgctgtcggcatccaggacgaggggatttttcggtgccaagctatgaatcgtaacgggaaagaaactaagtccaattacagatccctacggacctttacaatcacggccagcgattggatcttccccccaagcgaaataccgggcaaaccggaaattgtagactccgcctcggagctcacagcaggagtgcctaataaagttggaacttgtgtgtctgaggggtcttatccggctggaacgttgtcatggcacctagacggtaagccactggtccctaacgagaagggcgtcagcgtgaaggagcaaactcggcgccatcccgagacggggttgtttacgctgcaatctgagctgatggtcacaccggcccggggaggcgatccccgtcccacattcagctgctcttttagccctgggctgcctcgacacagggcactccgctag

SEQ ID NO: 82911 - DNA, 387 bp, Artificial Sequence
  derived and/or modified sequence
atggccgcgggaaccgcggtgggtgcctgggtgctggtgctgtctctatggggggcagttgtcggcgcacagaatatcactgccaggatcggcgaacctttggtcctgaaatgcaagggtgcaccaaagaagcctccacaacgactggagtggaagctcaacacaggccgaaccgaggcatggaaggtgttgtccccacagggcgggggtccgtgggatagtgtcgccagggttctccctaatagctcgctgtttctgccagccgtgggaatccaagatgagggaatcttcagatgtcaggcgatgaacaggaatggaaaagagaccaagagcaattacagagtgagagtgtaccaatttgagaacctccataattattcgttgtag

SEQ ID NO: 82912 - DNA, 462 bp, Artificial Sequence
  derived and/or modified sequence
atggcagccggcacagcggtgggtgcatgggtactggtgttgtctttatggggcgctgtagtgggcgcccagaatatcacggcacgcattggcgagcccctcgttctaaaatgcaagggcgcaccaaaaaaaccaccgcagagattggaatggaaactgaacacaggtagaaccgaggcttggaaggttctgtcaccccagggtggtggtccctgggactctgtggcccgtgtcctgcccaatagctctttatttttgcctgcagtgggtatccaagacgaggggatacttggtgggctggggactgcggcgttactcatcggggttattctgtggcagagacggcagaggagaggcgaagaacgaaaggcccccgaaaatcaggaggaggaggaggagagagccgagttgaaccagtcagaagagccggaggccggcgagtcctccacaggaggaccgtag

SEQ ID NO: 82913 - DNA, 366 bp, Artificial Sequence
  derived and/or modified sequence
atggcggccggtactgcagttggtgcttgggttctggttctctcgctgtggggagccgttgttggtgctcagaatattacagcccggattggggaacccctcgtactcaagtgtaagggcgcgcccaagaaacccccccaacgcctggagtggaagttgaacaccgggcggacggaggcttggaaagtattatcaccacagggagggggtccctgggactctgtcgctagggtacttccaaactcatcacttttcctgcctgccgtcggtattcaggacgagggaatcttccggtgccaggccatgaaccgtaacgggaaagagaccaagagcaattggtggtggagccaaaaggtggaacagtag

SEQ ID NO: 82914 - DNA, 705 bp, Artificial Sequence
  derived and/or modified sequence
atggctgctggaacagctgtgggcgcctgggtgctggtgctgagcctgtggggcgctgtggtgggcgcccagaacatcacagcccgcatcggggagcccctggtgctgaagtgcaagggggcccccaagaagccaccccagaggctggagtggaagctgaacacaggccgcacagaggcctggaaggtgctgagcccccagggcggcggcccctgggacagcgtggcccgggtgctgcccaacagcagcctcttcctgcctgctgtgggcatccaggatgagggcatcttccgctgccaggccatgaacagaaatggcaaggagaccaagagcaactaccgcagcctgcggaccttcaccatcacagccagtgactggatcttccccccatctgagatccctgggaagccagaaattgtggacagcgccagcgagctgacagctggggtgcccaacaaggtgggcacctgtgtgtctgagggcagctacccagctggcaccctgtcctggcacctggatggcaagcccctggtgcccaatgagaagggcgtgtctgtgaaggagcagaccaggaggcaccctgagaccggcctcttcaccctgcagagcgagctgatggtgaccccagcccggggcggggacccccggcccaccttcagctgcagcttcagccctggcctgcccaggcaccgggccctgaggtag

SEQ ID NO: 82915 - DNA, 387 bp, Artificial Sequence
  derived and/or modified sequence
atggctgctggaacagctgtgggcgcctgggtgctggtgctgagcctgtggggcgctgtggtgggcgcccagaacatcacagcccgcatcggggagcccctggtgctgaagtgcaagggggcccccaagaagccaccccagaggctggagtggaagctgaacacaggccgcacagaggcctggaaggtgctgagcccccagggcggcggcccctgggacagcgtggcccgggtgctgcccaacagcagcctcttcctgcctgctgtgggcatccaggatgagggcatcttccgctgccaggccatgaacagaaatggcaaggagaccaagagcaactacagagtgcgggtgtaccagtttgagaacctgcacaactacagcctgtag

SEQ ID NO: 82916 - DNA, 462 bp, Artificial Sequence
  derived and/or modified sequence
atggctgctggaacagctgtgggcgcctgggtgctggtgctgagcctgtggggcgctgtggtgggcgcccagaacatcacagcccgcatcggggagcccctggtgctgaagtgcaagggggcccccaagaagccaccccagaggctggagtggaagctgaacacaggccgcacagaggcctggaaggtgctgagcccccagggcggcggcccctgggacagcgtggcccgggtgctgcccaacagcagcctcttcctgcctgctgtgggcatccaggatgagggcatcctgggcggcctgggcacagctgccctgctgattggagtcatcctgtggcagaggcggcagaggagaggagaggagaggaaggcccctgagaaccaggaggaggaggaggagagagctgagctgaaccagagcgaggagcctgaggccggggagagcagcactggaggcccctag

SEQ ID NO: 82917 - DNA, 366 bp, Artificial Sequence
  derived and/or modified sequence
atggctgctggaacagctgtgggcgcctgggtgctggtgctgagcctgtggggcgctgtggtgggcgcccagaacatcacagcccgcatcggggagcccctggtgctgaagtgcaagggggcccccaagaagccaccccagaggctggagtggaagctgaacacaggccgcacagaggcctggaaggtgctgagcccccagggcggcggcccctgggacagcgtggcccgggtgctgcccaacagcagcctcttcctgcctgctgtgggcatccaggatgagggcatcttccgctgccaggccatgaacagaaatggcaaggagaccaagagcaactggtggtggagccagaaggtggagcagtag

SEQ ID NO: 82918 - DNA, 705 bp, Artificial Sequence
  derived and/or modified sequence
atggccgccggcaccgccgtgggcgcctgggtgctggtgctgagcttgtggggggccgtggttggcgcacagaacattactgcaaggataggggagcctctggttctcaagtgcaaaggcgccccaaagaaaccacctcagcgtctggagtggaaattaaacacgggaaggacagaggcatggaaggtgctgtctccgcagggggggggcccctgggactccgttgccagagtactgccaaattcctctctttttctgcctgctgtggggatccaggacgagggcatcttccgctgccaagctatgaatcgtaatggcaaggagacgaagtctaattaccggagcctccgaacatttaccatcacagccagtgattggatctttcctcctagcgaaattccagggaaaccagaaatagtagacagcgcctctgaactgacggctggcgtaccaaataaggttggcacctgtgtaagtgaaggatcctatccggctggtacactgtcatggcacctcgacggcaaaccgcttgtgccaaatgagaagggtgtctccgtgaaggaacaaacacggcgtcacccagagacagggctgttcactctgcagagtgagctcatggtgactcccgccagaggcggcgacccacgtccaaccttttcgtgcagctttagccccggtctgcctcgacatcgagccttaagatag

SEQ ID NO: 82919 - DNA, 387 bp, Artificial Sequence
  derived and/or modified sequence
atggccgccggcaccgccgtgggcgcctgggtgctggtgctgagcctttggggggccgtcgtgggagcccaaaacataactgcccgaatcggggagccattagttcttaagtgtaaaggcgctccaaagaaaccaccacagcggttggagtggaaacttaacacgggtaggaccgaggcctggaaagtgctgtcgccacagggtggtggtccctgggactctgtagcaagagtgctgccaaacagtagcctgtttctgccggccgtaggcatccaggacgagggaatcttccgctgtcaggctatgaataggaatggtaaggaaaccaagagcaactatcgggtgagagtctaccagttcgaaaacctgcataactacagcctctag

SEQ ID NO: 82920 - DNA, 462 bp, Artificial Sequence
  derived and/or modified sequence
atggccgccggcaccgccgtgggcgcctgggtgctggtgctgagcttgtggggcgccgtggtcggcgcccaaaatatcaccgcccgcattggcgaacctcttgtcctcaaatgcaaaggcgcacccaagaaacctccacagaggctggaatggaaactaaacaccggaaggactgaggcttggaaggtgctgagcccacaaggcggcggcccatgggattcagttgcccgcgtcctgccgaactcatcacttttcctgcccgcggtcggaatccaggacgaggggattctgggaggactgggcacggctgcgctactcataggtgtgattctctggcagcggcgccagcggaggggagaggagagaaaagctcctgaaaaccaggaagaagaggaagagagggctgagttgaaccagagtgaggagcctgaagccggggagagctcaactggaggaccttag

SEQ ID NO: 82921 - DNA, 366 bp, Artificial Sequence
  derived and/or modified sequence
atggccgccggcaccgccgtgggcgcctgggtgctggtgctgagcctatggggtgctgtagttggagcccagaacataactgctaggattggtgagcctctagttctgaagtgcaagggcgcacccaagaagcccccacagcggctggagtggaagttgaacactggccgtaccgaggcttggaaggtactctccccccagggaggaggcccatgggactctgtcgcccgcgtcctgccaaactcctcactatttctacctgctgtcgggatacaggacgagggaatcttccgatgtcaggccatgaacagaaacgggaaagagactaaatcgaactggtggtggagccagaaggtcgagcaatag

SEQ ID NO: 82922 - DNA, 716 bp, Artificial Sequence
  derived and/or modified sequence
ggaaggaagcaggatggcagccggaacagcagttggagcctgggtgctggtcctcagtctgtggggggcagtagtaggtgctcaaaacatcacagcccggattggcgagccactggtgctgaagtgtaagggggcccccaagaaaccaccccagcggctggaatggaaactgaacacaggccggacagaagcttggaaggtcctgtctccccagggaggaggcccctgggacagtgtggctcgtgtccttcccaacagctccctcttccttccggctgtcgggatccaggatgaggggattttccggtgccaggcaatgaacaggaatggaaaggagaccaagtccaactaccgaagtttgagaaccttcacaattacagcctctgactggatttttcctccttcagagattcctgggaagccagaaattgtagattctgcctctgaactcacggctggtgttcccaataaggtggggacatgtgtgtcagagggaagctaccctgcagggactcttagctggcacttggatgggaagcccctggtgcctaatgagaagggagtatctgtgaaggaacagaccaggagacaccctgagacagggctcttcacactgcagtcggagctaatggtgaccccagcccggggaggagatccccgtcccaccttctcctgtagcttcagcccaggccttccccgacaccgggccttgcgca

SEQ ID NO: 82923 - DNA, 387 bp, Artificial Sequence
  derived and/or modified sequence
atggcagccggaacagcagttggagcctgggtgctggtcctcagtctgtggggggcagtagtaggtgctcaaaacatcacagcccggattggcgagccactggtgctgaagtgtaagggggcccccaagaaaccaccccagcggctggaatggaaactgaacacaggccggacagaagcttggaaggtcctgtctccccagggaggaggcccctgggacagtgtggctcgtgtccttcccaacagctccctcttccttccggctgtcgggatccaggatgaggggattttccggtgccaggcaatgaacaggaatggaaaggagaccaagtccaactaccgagtccgtgtctaccagtttgagaaccttcacaattacagcctctga

SEQ ID NO: 82924 - DNA, 493 bp, Artificial Sequence
  derived and/or modified sequence
aggaagcaggatggcagccggaacagcagttggagcctgggtgctggtcctcagtctgtggggggcagtagtaggtgctcaaaacatcacagcccggattggcgagccactggtgctgaagtgtaagggggcccccaagaaaccaccccagcggctggaatggaaactgaacacaggccggacagaagcttggaaggtcctgtctccccagggaggaggcccctgggacagtgtggctcgtgtccttcccaacagctccctcttccttccggctgtcgggatccaggatgaggggatcctgggaggcctggggacagccgccctgctcattggggtcatcttgtggcaaaggcggcaacgccgaggagaggagaggaaggccccagaaaaccaggaggaagaggaggagcgtgcagaactgaatcagtcggaggaacctgaggcaggcgagagtagtactggagggccttgaggggcccacagacagatccca

SEQ ID NO: 82925 - DNA, 864 bp, Artificial Sequence
  derived and/or modified sequence
aggaagcaggatggcagccggaacagcagttggagcctgggtgctggtcctcagtctgtggggggcagtagtaggtgctcaaaacatcacagcccggattggcgagccactggtgctgaagtgtaagggggcccccaagaaaccaccccagcggctggaatggaaactgaacacaggccggacagaagcttggaaggtcctgtctccccagggaggaggcccctgggacagtgtggctcgtgtccttcccaacagctccctcttccttccggctgtcgggatccaggatgaggggattttccggtgccaggcaatgaacaggaatggaaaggagaccaagtccaattggtggtggagccagaaggtggagcagtagctcctggtggaaccgtaaccctgacctgtgaagtccctgcccagccctctcctcaaatccactggatgaaggatggtgtgcccttgccccttccccccagccctgtgctgatcctccctgagatagggcctcaggaccagggaacctacagctgtgtggccacccattccagccacgggccccaggaaagccgtgctgtcagcatcagcatcatcgaaccaggcgaggaggggccaactgcaggctctgtgggaggatcagggctgggaactctagccctggccctggggatcctgggaggcctggggacagccgccctgctcattggggtcatcttgtggcaaaggcggcaacgccgaggagaggagaggaaggccccagaaaaccaggaggaagaggaggagcgtgcagaactgaatcagtcggaggaacctgaggcaggcgagagtagtactggagggccttgaggggcccacagacagatccca

SEQ ID NO: 82926 - DNA, 705 bp, Artificial Sequence
  derived and/or modified sequence
atggcagccggtactgctgtgggcgcttgggtgctcgttctctccctgtggggggctgtagtgggtgcgcagaatattacagctcggattggggaaccgctggtcctgaagtgcaaaggcgcacctaaaaaaccacctcaaagactcgagtggaagctgaacaccggtcgcactgaggcttggaaagtgctgtcgccccagggaggtgggccttgggattccgtcgccagagtgctccccaatagcagcctgttcctaccagcagtggggatccaagacgagggtatctttagatgtcaggcaatgaaccggaatgggaaagaaacaaagtcaaattacaggagcctccgaacatttacaatcaccgcctcggattggatattccccccatctgaaatccctggaaaaccggaaattgtggactctgcgagcgaactcacagcgggtgtgcccaacaaggtggggacctgtgtgtccgagggtagctacccagcaggcacactgagctggcatctggacgggaagcccctggtgcctaacgaaaagggcgtttccgtgaaagaacagactcgcagacatcctgagacgggactgtttaccctccagtcagagcttatggtgactcctgcacgtggcggagaccccaggccaacctttagctgtagcttttctccaggcctcccacgccacagggcacttcgctag

SEQ ID NO: 82927 - DNA, 387 bp, Artificial Sequence
  derived and/or modified sequence
atggctgcgggaacagcagtgggtgcatgggtgttagtcctgagcctttggggtgcagtggttggggctcagaatattaccgcccgtatcggtgagccccttgtgctgaaatgcaaaggagcccctaagaagccacctcagaggctggagtggaaactgaacactggtaggaccgaggcatggaaagtactcagtcctcaggggggtgggccatgggactctgtagctagggttttgcccaatagtagcctgtttctgccggctgttgggattcaggacgaaggaatatttagatgtcaggccatgaaccggaacgggaaggaaacgaaaagcaattatcgtgttagggtatatcaatttgagaacctgcacaactatagcctttag

SEQ ID NO: 82928 - DNA, 462 bp, Artificial Sequence
  derived and/or modified sequence
atggcagctgggaccgcagtaggcgcatgggtgcttgtgctaagtctgtggggggcagtggtaggagcacagaatataacggccagaatcggggagccactagtgttgaagtgtaagggggctcctaaaaagcctccgcagagactcgaatggaagctgaataccggacgcacagaggcctggaaagttttgtctccccaggggggaggaccctgggactccgtggcacgggtcctgccaaactcctccctgttcttgcctgcggtcggtattcaggatgaaggtatcttgggtggcctcggcacagcagcactgcttatcggcgtgattctttggcagagaaggcagaggcggggtgaagagcggaaagcaccagagaaccaggaggaggaggaggaacgggctgaattgaatcagagcgaagagcccgaggcaggggaatccagcacgggagggccatag

SEQ ID NO: 82929 - DNA, 366 bp, Artificial Sequence
  derived and/or modified sequence
atggccgcaggcaccgcggtgggcgcttgggtcctcgtgctgagcttgtggggggcagttgtaggagctcagaatatcaccgccagaatcggcgaacctcttgtgttgaagtgtaaaggagctcccaagaaacctccccagcgactcgagtggaaattaaataccggtcggaccgaggcctggaaggtgctcagccctcagggcggtggcccatgggacagtgtagcacgggttttgcccaacagtagcttgttccttcctgccgtgggtatccaggacgagggcatcttccggtgtcaagcaatgaatcgtaacggcaaggaaacaaaatcaaattggtggtggtcacagaaggttgagcagtag

SEQ ID NO: 82930 - DNA, 705 bp, Artificial Sequence
  derived and/or modified sequence
atggccgccggcaccgccgtgggcgcctgggtgctggtgctgagcctgtggggcgccgtggtgggcgcccagaacatcaccgccagaatcggcgagcccctggtgctgaagtgcaagggcgcccccaagaagcccccccagagactggagtggaagctgaacaccggcagaaccgaggcctggaaggtgctgagcccccagggcggcggcccctgggacagcgtggccagagtgctgcccaacagcagcctgttcctgcccgccgtgggcatccaggacgagggcatcttcagatgccaggccatgaacagaaacggcaaggagaccaagagcaactacagaagcctgagaaccttcaccatcaccgccagcgactggatcttcccccccagcgagatccccggcaagcccgagatcgtggacagcgccagcgagctgaccgccggcgtgcccaacaaggtgggcacctgcgtgagcgagggcagctaccccgccggcaccctgagctggcacctggacggcaagcccctggtgcccaacgagaagggcgtgagcgtgaaggagcagaccagaagacaccccgagaccggcctgttcaccctgcagagcgagctgatggtgacccccgccagaggcggcgaccccagacccaccttcagctgcagcttcagccccggcctgcccagacacagagccctgagatag

SEQ ID NO: 82931 - DNA, 387 bp, Artificial Sequence
  derived and/or modified sequence
atggccgccggcaccgccgtgggcgcctgggtgctggtgctgagcctgtggggcgccgtggtgggcgcccagaacatcaccgccagaatcggcgagcccctggtgctgaagtgcaagggcgcccccaagaagcccccccagagactggagtggaagctgaacaccggcagaaccgaggcctggaaggtgctgagcccccagggcggcggcccctgggacagcgtggccagagtgctgcccaacagcagcctgttcctgcccgccgtgggcatccaggacgagggcatcttcagatgccaggccatgaacagaaacggcaaggagaccaagagcaactacagagtgagagtgtaccagttcgagaacctgcacaactacagcctgtag

SEQ ID NO: 82932 - DNA, 462 bp, Artificial Sequence
  derived and/or modified sequence
atggccgccggcaccgccgtgggcgcctgggtgctggtgctgagcctgtggggcgccgtggtgggcgcccagaacatcaccgccagaatcggcgagcccctggtgctgaagtgcaagggcgcccccaagaagcccccccagagactggagtggaagctgaacaccggcagaaccgaggcctggaaggtgctgagcccccagggcggcggcccctgggacagcgtggccagagtgctgcccaacagcagcctgttcctgcccgccgtgggcatccaggacgagggcatcctgggcggcctgggcaccgccgccctgctgatcggcgtgatcctgtggcagagaagacagagaagaggcgaggagagaaaggcccccgagaaccaggaggaggaggaggagagagccgagctgaaccagagcgaggagcccgaggccggcgagagcagcaccggcggcccctag

SEQ ID NO: 82933 - DNA, 366 bp, Artificial Sequence
  derived and/or modified sequence
atggccgccggcaccgccgtgggcgcctgggtgctggtgctgagcctgtggggcgccgtggtgggcgcccagaacatcaccgccagaatcggcgagcccctggtgctgaagtgcaagggcgcccccaagaagcccccccagagactggagtggaagctgaacaccggcagaaccgaggcctggaaggtgctgagcccccagggcggcggcccctgggacagcgtggccagagtgctgcccaacagcagcctgttcctgcccgccgtgggcatccaggacgagggcatcttcagatgccaggccatgaacagaaacggcaaggagaccaagagcaactggtggtggagccagaaggtggagcagtag

SEQ ID NO: 82934 - DNA, 366 bp, Artificial Sequence
  derived and/or modified sequence
atggctgcaggaacagctgtaggcgcatgggtgctggtgctgagcctttggggcgccgttgtgggagctcagaatatcactgcccgcataggcgaacccctggtgctcaagtgtaaaggggctccgaaaaaacccccacagcgccttgagtggaaactcaatacaggaagaactgaagcatggaaggtgctgagtcctcagggaggcggcccatgggattccgtcgctagggttctgccaaatggaagcctgttcctgcccgcggtgggcattcaagatgagggaatctttcgctgtcaggccatgaataggaatggcaaggaaaccaaatcaaactggtggtggtctcaaaaggttgagcagtag

SEQ ID NO: 82935 - DNA, 705 bp, Artificial Sequence
  derived and/or modified sequence
atggccgcagggactgctgtaggggcttgggttttggttttgagcctctggggagcagtggtgggggctcagaatatcactgcgaggatcggagagcctctcgtgttgaaatgcaaaggcgctcctaagaagcccccgcaaagacttgagtggaaactcaataccgggaggaccgaggcctggaaggtgctgagcccccagggcggagggccatgggattctgttgcaagagtgctgccgaacggcagcctgttcttgccagcagtaggaattcaagatgaaggaatttttagatgtcaggcaatgaatcggaacgggaaggagaccaaaagtaactaccggtcactccgtacctttaccattactgcatctgactggatttttccgccatccgaaatacccgggaagcctgaaattgttgatagtgcctccgagctgacagctggggtgcccaacaaggttggcacatgtgtatccgaaggaagctacccagcgggaaccctgagttggcacctggatgggaagcctttagtgcctaatgaaaagggagtgtccgtcaaggagcagactcgccgccatccagagacaggtctgttcactctgcaatcggaactgatggtaactcctgcacggggaggcgatcctaggcccaccttctcatgctcatttagccctgggttaccacgccaccgagctctgcgctag

SEQ ID NO: 82936 - DNA, 705 bp, Artificial Sequence
  derived and/or modified sequence
atggccgctgggacggccgtgggggcttgggtgctcgtcctgtcactttggggtgccgttgtcggggcacagaatattacagccaggataggcgagccgctggtgctgaagtgcaagggcgccccgaagaagccaccccaacgtctggagtggaagctgaatacaggaagaacggaagcctggaaggtcctgtccccacagggcggggggccctgggacagcgtggcccgcgttttacccaacgggtcactgtttctgccagcagtaggaatccaagatgaaggcattttcagatgtcaggctatgaataggaatggaaaggagacaaagagcaactaccgcagcctgcgaaccttcaccatcacggcctccgactggattttccccccctccgaaatccccggaaaaccagagatcgtcgattccgcatctgagcttaccgcaggcgttccaaataaggtggggacttgcgtatctgaaggatcgtacccggcaggaactctgtcctggcacctcgacggtaagcccctcgtgcctaatgaaaagggagtttcagtgaaggaacaaaccaggagacatcccgaaactggcttgttcaccctgcagtctgaactcatggtgactcccgcacgaggaggcgaccccaggccgacgttctcctgttccttctcacctggactccctagacatagagctctccggtag

SEQ ID NO: 82937 - DNA, 705 bp, Artificial Sequence
  derived and/or modified sequence
atggctgccggcactgcagtgggggcgtgggtacttgtgttaagcctatggggcgccgtggtgggggcgcagaatattaccgctagaattggagagccattagtgcttaaatgtaagggggcccccaaaaaaccccctcagcgccttgagtggaaactcaataccggccggaccgaagcctggaaagttttatccccacaaggaggcggaccttgggacagtgtggccagggtccttccaaacagctcactgtttctccccgctgtcggcatccaggatgagggcatttttcggtgccaggcaatgaatcgtaatggaaaagaaaccaaatcgaactatcggtccctgagaactttcaccattacagcatctgactggattttcccaccgtctgagatccccgggaagccagaaattgtggattcagccagtgagctaaccgcaggagtcccaaataaggtcggaacttgtgtatccgaaggatcataccctgctggcaccctgtcgtggcatttagatggaaaacctctggttcctaatgaaaagggggtgtcggtcaaagagcaaactcgcaggcaccccgaaacagggctatttacactgcagtcagagctgatggtgacccccgcccgggggggtgaccctcgacctacattctcctgcagcttctcaccagggcttccccggcacagggctctgagatag

SEQ ID NO: 82938 - DNA, 705 bp, Artificial Sequence
  derived and/or modified sequence
atggctgcgggcaccgccgtcggcgcctgggtgctggtactatccctgtggggcgccgtagtcggcgcccagaatataaccgctcgaataggcgagcccctcgttctaaaatgcaagggtgcacctaaaaagcctccacagcgtctggagtggaaattgaatactggccgtactgaagcatggaaggtcctctcccctcaaggaggtggaccctgggacagcgtcgcgagagtcctgccaaatggttctctctttctgcctgccgtgggaatccaagacgagggaattttccgctgtcaagctatgaatcgaaacggcaaagagacaaaaagcaactacaggtcgctgcgcactttcactattaccgccagcgattggatatttccgccctcagagatacctggaaagcctgagatcgtagactcagcaagcgagcttacggctggcgtcccaaataaagtaggtacttgcgtcagcgaggggtcttacccagcaggcactctctcgtggcacctggatgggaaaccgctggtcccgaacgagaaaggcgtgtccgtgaaggagcagacacggcggcatcctgagaccggattattcaccctgcaatcagagttaatggtcactccagccagggggggcgatcctcggccaaccttctcatgctcatttagtcctggcctcccgagacaccgggctttaagatag

SEQ ID NO: 82939 - DNA, 705 bp, Artificial Sequence
  derived and/or modified sequence
atggcagcaggcaccgcggtaggggcatgggtgcttgtcctttccttgtggggggctgtggttggagcgcagaatattaccgcgcgcattggcgagccactggtgctgaaatgtaagggcgcccctaagaaacctcctcagcggttggaatggaaactgaacactgggcggaccgaggcctggaaagtgctctctccacagggcggagggccctgggactccgtggctcgcgtcttacccaatgggagtcttttcttgcccgctgtgggcatccaggatgaggggattttccgctgtcaggcgatgaatcgtaacggtaaggagaccaaatctaattataggtcccttcggactttcaccattactgcttcagattggatatttccaccttctgagatccctggaaaacccgagattgtcgactcggcttccgagctgaccgctggcgttcctaacaaagtgggaacatgtgttagcgagggatcatacccagccggcacactctcctggcatctggacgggaaacctcttgttcctaacgagaagggagtatcggtgaaagagcagactcggagacatccagaaacaggcctgtttactttgcagtccgaactcatggtgacgcccgctcggggtggcgatcccagacccacattctcttgctccttttcaccgggactgccacgccaccgtgcattgcgatag

SEQ ID NO: 82940 - DNA, 705 bp, Artificial Sequence
  derived and/or modified sequence
atggcagctggtacggctgtgggcgcatgggtgctggtgttgtctctatggggcgccgttgttggcgcccagaatatcacagcgcgaattggagaaccattggtgctgaagtgcaaaggcgctccaaagaaacccccacaaaggctcgaatggaaactcaacacaggccggaccgaggcctggaaggtactttcacctcaggggggtggaccctgggactccgtggcacgagtgttacccaacggtagtctctttctgccggcagtgggcatccaggatgagggcatatttagatgccaggctatgaatcgcaatgggaaggaaacgaaatcgaactatcggagtctgcgcacctttacgatcactgcaagtgactggatattccccccctcagagattcccggaaaacctgaaatcgtcgatagcgcatcggagttgacagccggggtgcccaataaggtgggcacatgtgttagcgaggggagctacccagcaggaaccctgtcttggcatctcgatggtaagcctctcgttccgaacgagaaaggcgtatcagtgaaggaacaaactcgacgccatcccgaaactggcttgtttactctacagtcagaacttatggtgactcctgctcgggggggcgatccaaggccgactttctcttgtagctttagccccggactacctaggcatcgggccctcaggtag

SEQ ID NO: 82941 - DNA, 387 bp, Artificial Sequence
  derived and/or modified sequence
atggctgctggcactgccgtcggtgcgtgggtgcttgtgctgtccctttggggggctgtcgtcggcgcccagaatataaccgcacggatcggggaacccctggttcttaagtgtaaaggggcaccaaaaaagcccccacagagactggaatggaagctcaacacagggcggacggaggcctggaaagtgctgagcccacagggaggaggtccatgggatagtgttgcacgggtgctccccaatgggagcctgtttctgcctgcagtgggtatccaggatgagggcatctttcggtgccaggcgatgaacagaaatggaaaagagacaaagtctaattatagggtgcgcgtgtaccagttcgagaacctccacaattatagcttgtag

SEQ ID NO: 82942 - DNA, 462 bp, Artificial Sequence
  derived and/or modified sequence
atggcagccggaacggccgtcggagcatgggtcttggtgctgagcctgtggggagccgtggtgggggcacagaatatcaccgcaaggatcggagaacctctggtcctgaaatgcaaaggggcccctaagaaacctccgcaacgcctggaatggaaactgaacaccggcagaaccgaagcctggaaagtcctgtccccccaggggggcgggccttgggactctgtcgcacgagttctgccaaacggcagcctgttcctgccagcagtaggaatccaagatgagggcatcctcggcggccttggaacagcagccctgctgatcggcgtgatactctggcagaggcgtcaaagaaggggcgaggagaggaaggctcctgaaaatcaggaagaagaggaggaacgtgccgagctgaatcagtcggaggaacccgaggcaggggagtcatccacgggcggcccttag

SEQ ID NO: 82943 - DNA, 366 bp, Artificial Sequence
  derived and/or modified sequence
atggccgccgggactgctgtgggggcatgggtgctggtgctatccctctggggcgctgtggtgggtgcccagaatattacagcgcgcattggagaaccactagttttgaaatgtaaaggcgcccccaagaaacccccgcagcggctagagtggaagctgaacaccggaagaacagaggcctggaaagtgctgagccctcaggggggcgggccatgggactcggtcgcaagagtcctgccaaatggaagcctgttcctgcccgcagtggggatccaggatgagggcatttttcgttgccaggccatgaacaggaatggtaaggaaaccaagagtaattggtggtggtcgcagaaagtggaacaatag

SEQ ID NO: 82944 - DNA, 387 bp, Artificial Sequence
  derived and/or modified sequence
atggctgctggaaccgctgtcggagcctgggtgctggtgttgagcctatggggggccgttgtgggggctcagaatataacagcacgcatcggggaacccttggtcctgaagtgtaaaggagcccctaagaagcctccacagaggctagagtggaaacttaacactggacggacagaggcgtggaaggtgctgagtcctcagggaggcggaccttgggattcagtggcaagagtgctccctaactcctccttatttttgcccgccgtgggaattcaagatgagggaattttcaggtgccaagccatgaaccgaaatggaaaggagactaagtcgaactatcgcgtgcgagtctaccagtttgagaacctccataattattcgttatag

SEQ ID NO: 82945 - DNA, 462 bp, Artificial Sequence
  derived and/or modified sequence
atggcagccgggaccgcagtgggagcttgggtgctggtgttatccctttggggagcggtcgtgggggcccaaaatatcaccgctagaataggcgaacctctggtcctgaaatgcaagggagctcccaaaaagccgccacagaggctggagtggaaactgaataccggacggaccgaagcatggaaagtcctcagtcctcagggtggcggaccttgggatagcgtggccagagtgctgcctaatggttcattgttcctgcccgccgtgggaattcaggacgaggggatcctgggaggattaggcaccgccgctcttctgatcggcgtgattttatggcaacgcaggcagagacgtggcgaagaacggaaagctcctgagaaccaagaagaagaagaggagcgcgccgaacttaatcagtcagaggaaccggaggcaggagaaagttcaactgggggcccgtag

SEQ ID NO: 82946 - DNA, 366 bp, Artificial Sequence
  derived and/or modified sequence
atggcagctggtaccgcggttggggcctgggtccttgtgctatccctctggggagctgtggtgggagcgcagaacatcacagcaagaatcggggagcccttggtcctgaagtgtaaaggggcaccgaagaagcctcctcaaagacttgagtggaaactgaacacgggaaggacggaggcgtggaaggtgctctcgcctcagggcggtgggccatgggattccgtggcccgcgtgttacccaatggcagcttgtttctgccagccgtggggatacaggacgaggggatcttccgctgtcaagcgatgaaccgcaacgggaaggaaactaaatcgaactggtggtggtcccaaaaggttgagcaatag

SEQ ID NO: 82947 - DNA, 387 bp, Artificial Sequence
  derived and/or modified sequence
atggccgcaggaactgccgtgggcgcatgggtgctggtgctctccctgtggggagctgtggtcggggctcagaatattacagcacgcattggagagcctctggtgcttaagtgtaagggggcccctaagaaacccccacagaggctagagtggaagctgaacaccggccggaccgaggcctggaaagtcctgagtccccagggtgggggcccctgggacagtgtagcacgggtcctgcccaatggttctctgttcctccctgccgtgggaatacaggatgaggggatattcaggtgccaagccatgaaccggaatgggaaggagacaaaatccaactaccgtgttagagtgtaccagttcgagaacctccacaattacagtctgtag

SEQ ID NO: 82948 - DNA, 366 bp, Artificial Sequence
  derived and/or modified sequence
atggctgcaggtactgctgtgggagcatgggttctggttcttagcctctggggcgccgttgtcggggcacaaaatatcactgctaggattggagagcctctagtgttgaagtgcaagggtgcacctaaaaagcccccacagcgcctcgaatggaaattgaacacaggtagaacagaggcatggaaagtactgtcaccccagggaggcggaccgtgggattctgtagcacgagtccttcctaacagctccctcttcctcccggccgtgggcatccaagacgagggtatctttcgttgtcaggcaatgaatcgaaacggcaaagagacaaagagtaactggtggtggagtcaaaaagttgaacaatag

SEQ ID NO: 82949 - DNA, 462 bp, Artificial Sequence
  derived and/or modified sequence
atggcggcagggacggccgtgggggcatgggtcctagttctcagcctttggggcgccgtcgtcggcgcccagaacattacagctcgcatcggcgagcctttagtcctgaagtgcaaaggtgctcctaaaaagccgccccagcgactggaatggaagctgaacaccgggcgaacagaggcgtggaaagtgcttagccctcagggggggggtccctgggactcagtagcccgggtgcttccgaatggatctctgttcctccccgctgtggggattcaagacgaaggaatcctcgggggcctgggaacggctgccttactgattggagtaattctgtggcagcgacggcagaggcgtggtgaggagcgcaaagctcccgagaatcaggaagaggaggaagagcgggccgagttgaatcagagcgaagagcccgaggcaggagaaagttcaacaggggggccttag

SEQ ID NO: 82950 - DNA, 366 bp, Artificial Sequence
  derived and/or modified sequence
atggctgcgggcactgccgtgggcgcgtgggtgctcgtactgtccctgtggggcgctgttgttggtgcgcagaacattactgcccgcataggcgaacccctggtgttgaagtgcaaaggagcaccaaagaaacctccccagaggctggagtggaaactcaatacaggcaggactgaagcctggaaagtactatccccgcagggcggaggcccctgggatagcgttgctagggttctacccaacggaagcttatttcttcctgctgtcggaatccaggacgagggtatctttaggtgccaggctatgaacaggaatggaaaggagacaaaaagcaattggtggtggtcacagaaggtggaacagtag

SEQ ID NO: 82951 - DNA, 387 bp, Artificial Sequence
  derived and/or modified sequence
atggccgccgggactgcagtaggcgcctgggtgctcgtgctctccctgtggggtgctgtggtgggtgctcagaacatcacagccagaataggggagccccttgtgctgaaatgcaaaggtgctcctaaaaaacctccacagagactggagtggaaacttaacaccggtcggaccgaggcctggaaggtcttgagcccacaagggggcggaccttgggattccgtggcacgagtattaccaaacggttctctgttcctccctgcagtcggcatccaggacgaaggtatctttagatgtcaagccatgaaccgcaacggtaaagaaaccaaatcaaattaccgggtgagggtctatcagtttgaaaatctgcataactacagtctctag

SEQ ID NO: 82952 - DNA, 462 bp, Artificial Sequence
  derived and/or modified sequence
atggcagctggcaccgctgtcggagcctgggtcctcgtactttctctttggggtgccgtggtcggtgcccagaacataactgcccgcatcggtgaacctctggtgctcaagtgtaaaggtgccccaaagaagcctccgcaacgcctggaatggaagctgaacacagggcggactgaggcctggaaagtcctatccccacaagggggcggcccatgggatagtgttgcgagggtgctgccaaacgggagcctgttccttcccgccgttgggattcaggacgagggaatactggggggtctgggcaccgctgctctgttgatcggggtcatcttgtggcagaggaggcaaaggcgaggagaggagagaaaggctcctgagaaccaggaggaggaggaagagcgggccgagctgaatcagtcggaggagccagaggccggagaatccagcactggcgggccttag

SEQ ID NO: 82953 - DNA, 366 bp, Artificial Sequence
  derived and/or modified sequence
atggccgcaggaactgccgtgggggcatgggtactcgtcctttccctgtggggcgccgtagttggagcacaaaacatcacagccagaatcggcgagccgctggtcctcaagtgcaagggagctccgaaaaagcccccacagcggttagagtggaaactgaatacgggacggactgaagcatggaaagtactgagtccacaggggggaggtccatgggacagtgtggctcgagtgcttcccaatgggagcctttttctgccagcagtcggaatccaggatgaaggcatctttaggtgtcaagctatgaaccgaaatggcaaggagacaaagtccaattggtggtggagccagaaagtcgagcagtag

SEQ ID NO: 82954 - DNA, 387 bp, Artificial Sequence
  derived and/or modified sequence
atggctgcaggtaccgccgtaggcgcctgggttcttgtcctgtctctgtggggagccgtggtcggcgcacagaatattaccgcacggatcggagaaccactggtcttaaagtgtaaaggggcacccaaaaagccaccccagagactggagtggaagctgaacaccgggaggactgaggcgtggaaggtactgtctcctcaaggcgggggcccatgggactctgtcgctcgcgttctccccaacggttccctgtttttacctgctgtcggcattcaggatgagggcatatttaggtgccaggctatgaaccgaaacggtaaagaaacaaagtcgaattaccgcgtcagagtgtaccagttcgagaaccttcataattactctttatag

SEQ ID NO: 82955 - DNA, 462 bp, Artificial Sequence
  derived and/or modified sequence
atggccgccggaacagccgtcggggcttgggttttggtgctcagtctgtggggagctgtggtcggcgctcagaacataaccgcccggattggagagcccctggtcctcaagtgcaagggggcacctaagaagccacctcaaaggctggagtggaagctgaatacggggagaaccgaggcctggaaagtattgtccccacagggaggaggtccatgggattctgttgcccgagtgctccccaattcctccctattcttgcccgctgtcggcatacaggacgaaggtattctgggtggcctcggcactgccgcgttgttaattggtgttatcttgtggcagcgacgccagcggaggggagaggaacggaaagctccagaaaaccaggaggaggaggaagagcgcgctgaactgaatcagtccgaggagcccgaggctggcgagtcatccactggcggaccttag

SEQ ID NO: 82956 - DNA, 462 bp, Artificial Sequence
  derived and/or modified sequence
atggctgcgggaaccgccgtgggcgcgtgggtactggtgctctcattatggggcgccgtggtaggtgcccagaatattacggctcggatcggcgagcctctggtgttaaaatgcaagggggctcctaagaaaccacctcaacggctggaatggaaattgaacaccgggcgtaccgaggcctggaaggtgctttcgccccagggtggcggaccatgggatagtgtggcacgagtgttacctaacggtagcctgtttttgccagccgtcgggattcaagacgagggcattctgggagggctgggtaccgcggccctattaataggggtaatactctggcagcggcgccagcgacgcggtgaggagagaaaagcacccgagaaccaggaagaggaggaggagagggcagagctgaaccagagtgaggagcccgaggcaggtgagagtagcactggtggtccctag

SEQ ID NO: 82957 - DNA, 387 bp, Artificial Sequence
  derived and/or modified sequence
atggccgccgggaccgctgtgggagcctgggtcttggtgttgtccctgtggggagctgttgtgggggctcagaacatcacagctagaattggagagccactggtgctgaagtgcaagggggctcccaaaaagcctccacaaagactggagtggaagctgaacaccggccgaactgaggcttggaaggtactgtccccacagggaggcggcccatgggacagtgtcgcccgggtcttaccaaatggctcactttttctgcccgccgtgggcatccaagatgaggggattttcaggtgtcaagccatgaaccgcaacggaaaagagaccaagagtaattatcgagtacgagtgtaccagtttgaaaacctccacaattatagcctgtag

SEQ ID NO: 82958 - DNA, 864 bp, Artificial Sequence
  derived and/or modified sequence
aggaagcaggatggctgccggaacagcagttggagcctgggtgctggtcctcagtctgtggggggcagtagtaggtgctcaaaacatcacagcccggattggcgagccactggtgctgaagtgtaagggggcccccaagaaaccaccccagcggctggaatggaaactgaacacaggccggacagaagcttggaaggtcctgtctccccagggaggaggcccctgggacagtgtggctcgtgtccttcccaacggctccctcttccttccggctgtcgggatccaggatgaggggattttccggtgccaggcaatgaacaggaatggaaaggagaccaagtccaattggtggtggagccagaaggtggagcagtagctcctggtggaaccgtaaccctgacctgtgaagtccctgcccagccctctcctcaaatccactggatgaaggatggtgtgcccttgccccttccccccagccctgtgctgatcctccctgagatagggcctcaggaccagggaacctacagctgtgtggccacccattccagccacgggccccaggaaagccgtgctgtcagcatcagcatcatcgaaccaggcgaggaggggccaactgcaggctctgtgggaggatcagggctgggaactctagccctggccctggggatcctgggaggcctggggacagccgccctgctcattggggtcatcttgtggcaaaggcggcaacgccgaggagaggagaggaaggccccagaaaaccaggaggaagaggaggagcgtgcagaactgaatcagtcggaggaacctgaggcaggcgagagtagtactggagggccttgaggggcccacagacagatccca

SEQ ID NO: 82959 - DNA, 716 bp, Artificial Sequence
  derived and/or modified sequence
ggaaggaagcaggatggcagccggaacagcagttggagcctgggtgctggtcctcagtctgtggggggcagtagtaggtgctcaaaacatcacagcccggattggcgagccactggtgctgaagtgtaagggggcccccaagaaaccaccccagcggctggaatggaaactgaacacaggccggacagaagcttggaaggtcctgtctccccagggaggaggcccctgggacagtgtggctcgtgtccttcccaacggctccctcttccttccggctgtcgggatccaggatgaggggattttccggtgccaggcaatgaacaggaatggaaaggagaccaagtccaactaccgaagtttgagaaccttcacaattacagcctctgactggatttttcctccttcagagattcctgggaagccagaaattgtagattctgcctctgaactcacggctggtgttcccaataaggtggggacatgtgtgtcagagggaagctaccctgcagggactcttagctggcacttggatgggaagcccctggtgcctaatgagaagggagtatctgtgaaggaacagaccaggagacaccctgagacagggctcttcacactgcagtcggagctaatggtgaccccagcccggggaggagatccccgtcccaccttctcctgtagcttcagcccaggccttccccgacaccgggccttgcgca

SEQ ID NO: 82960 - DNA, 366 bp, Artificial Sequence
  derived and/or modified sequence
atggctgctggaacagctgtgggcgcctgggtgctggtgctgagcctgtggggcgctgtggtgggcgcccagaacatcacagcccgcatcggggagcccctggtgctgaagtgcaagggggcccccaagaagccaccccagaggctggagtggaagctgaacacaggccgcacagaggcctggaaggtgctgagcccccagggcggcggcccctgggacagcgtggcccgggtgctgcccaacggcagcctcttcctgcctgctgtgggcatccaggatgagggcatcttccgctgccaggccatgaacagaaatggcaaggagaccaagagcaactggtggtggagccagaaggtggagcagtag

SEQ ID NO: 82961 - DNA, 705 bp, Artificial Sequence
  derived and/or modified sequence
atggctgctggaacagctgtgggcgcctgggtgctggtgctgagcctgtggggcgctgtggtgggcgcccagaacatcacagcccgcatcggggagcccctggtgctgaagtgcaagggggcccccaagaagccaccccagaggctggagtggaagctgaacacaggccgcacagaggcctggaaggtgctgagcccccagggcggcggcccctgggacagcgtggcccgggtgctgcccaacggcagcctcttcctgcctgctgtgggcatccaggatgagggcatcttccgctgccaggccatgaacagaaatggcaaggagaccaagagcaactaccgcagcctgcggaccttcaccatcacagccagtgactggatcttccccccatctgagatccctgggaagccagaaattgtggacagcgccagcgagctgacagctggggtgcccaacaaggtgggcacctgtgtgtctgagggcagctacccagctggcaccctgtcctggcacctggatggcaagcccctggtgcccaatgagaagggcgtgtctgtgaaggagcagaccaggaggcaccctgagaccggcctcttcaccctgcagagcgagctgatggtgaccccagcccggggcggggacccccggcccaccttcagctgcagcttcagccctggcctgcccaggcaccgggccctgaggtag

SEQ ID NO: 82962 - DNA, 387 bp, Artificial Sequence
  derived and/or modified sequence
atggctgctggaacagctgtgggcgcctgggtgctggtgctgagcctgtggggcgctgtggtgggcgcccagaacatcacagcccgcatcggggagcccctggtgctgaagtgcaagggggcccccaagaagccaccccagaggctggagtggaagctgaacacaggccgcacagaggcctggaaggtgctgagcccccagggcggcggcccctgggacagcgtggcccgggtgctgcccaacggcagcctcttcctgcctgctgtgggcatccaggatgagggcatcttccgctgccaggccatgaacagaaatggcaaggagaccaagagcaactacagagtgcgggtgtaccagtttgagaacctgcacaactacagcctgtag

SEQ ID NO: 82963 - DNA, 462 bp, Artificial Sequence
  derived and/or modified sequence
atggctgctggaacagctgtgggcgcctgggtgctggtgctgagcctgtggggcgctgtggtgggcgcccagaacatcacagcccgcatcggggagcccctggtgctgaagtgcaagggggcccccaagaagccaccccagaggctggagtggaagctgaacacaggccgcacagaggcctggaaggtgctgagcccccagggcggcggcccctgggacagcgtggcccgggtgctgcccaacggcagcctcttcctgcctgctgtgggcatccaggatgagggcatcctgggcggcctgggcacagctgccctgctgattggagtcatcctgtggcagaggcggcagaggagaggagaggagaggaaggcccctgagaaccaggaggaggaggaggagagagctgagctgaaccagagcgaggagcctgaggccggggagagcagcactggaggcccctag

SEQ ID NO: 82964 - DNA, 716 bp, Artificial Sequence
  derived and/or modified sequence
ggaaggaagcaggatggctgccggaacagcagttggagcctgggtgctggtcctcagtctgtggggggcagtagtaggtgctcaaaacatcacagcccggattggcgagccactggtgctgaagtgtaagggggcccccaagaaaccaccccagcggctggaatggaaactgaacacaggccggacagaagcttggaaggtcctgtctccccagggaggaggcccctgggacagtgtggctcgtgtccttcccaacggctccctcttccttccggctgtcgggatccaggatgaggggattttccggtgccaggcaatgaacaggaatggaaaggagaccaagtccaactaccgaagtttgagaaccttcacaattacagcctctgactggatttttcctccttcagagattcctgggaagccagaaattgtagattctgcctctgaactcacggctggtgttcccaataaggtggggacatgtgtgtcagagggaagctaccctgcagggactcttagctggcacttggatgggaagcccctggtgcctaatgagaagggagtatctgtgaaggaacagaccaggagacaccctgagacagggctcttcacactgcagtcggagctaatggtgaccccagcccggggaggagatccccgtcccaccttctcctgtagcttcagcccaggccttccccgacaccgggccttgcgca

SEQ ID NO: 82965 - DNA, 387 bp, Artificial Sequence
  derived and/or modified sequence
atggctgccggaacagcagttggagcctgggtgctggtcctcagtctgtggggggcagtagtaggtgctcaaaacatcacagcccggattggcgagccactggtgctgaagtgtaagggggcccccaagaaaccaccccagcggctggaatggaaactgaacacaggccggacagaagcttggaaggtcctgtctccccagggaggaggcccctgggacagtgtggctcgtgtccttcccaacggctccctcttccttccggctgtcgggatccaggatgaggggattttccggtgccaggcaatgaacaggaatggaaaggagaccaagtccaactaccgagtccgtgtctaccagtttgagaaccttcacaattacagcctctga

SEQ ID NO: 82966 - DNA, 493 bp, Artificial Sequence
  derived and/or modified sequence
aggaagcaggatggctgccggaacagcagttggagcctgggtgctggtcctcagtctgtggggggcagtagtaggtgctcaaaacatcacagcccggattggcgagccactggtgctgaagtgtaagggggcccccaagaaaccaccccagcggctggaatggaaactgaacacaggccggacagaagcttggaaggtcctgtctccccagggaggaggcccctgggacagtgtggctcgtgtccttcccaacggctccctcttccttccggctgtcgggatccaggatgaggggatcctgggaggcctggggacagccgccctgctcattggggtcatcttgtggcaaaggcggcaacgccgaggagaggagaggaaggccccagaaaaccaggaggaagaggaggagcgtgcagaactgaatcagtcggaggaacctgaggcaggcgagagtagtactggagggccttgaggggcccacagacagatccca

SEQ ID NO: 82967 - DNA, 864 bp, Artificial Sequence
  derived and/or modified sequence
aggaagcaggatggcagccggaacagcagttggagcctgggtgctggtcctcagtctgtggggggcagtagtaggtgctcaaaacatcacagcccggattggcgagccactggtgctgaagtgtaagggggcccccaagaaaccaccccagcggctggaatggaaactgaacacaggccggacagaagcttggaaggtcctgtctccccagggaggaggcccctgggacagtgtggctcgtgtccttcccaacggctccctcttccttccggctgtcgggatccaggatgaggggattttccggtgccaggcaatgaacaggaatggaaaggagaccaagtccaattggtggtggagccagaaggtggagcagtagctcctggtggaaccgtaaccctgacctgtgaagtccctgcccagccctctcctcaaatccactggatgaaggatggtgtgcccttgccccttccccccagccctgtgctgatcctccctgagatagggcctcaggaccagggaacctacagctgtgtggccacccattccagccacgggccccaggaaagccgtgctgtcagcatcagcatcatcgaaccaggcgaggaggggccaactgcaggctctgtgggaggatcagggctgggaactctagccctggccctggggatcctgggaggcctggggacagccgccctgctcattggggtcatcttgtggcaaaggcggcaacgccgaggagaggagaggaaggccccagaaaaccaggaggaagaggaggagcgtgcagaactgaatcagtcggaggaacctgaggcaggcgagagtagtactggagggccttgaggggcccacagacagatccca

SEQ ID NO: 82968 - DNA, 493 bp, Artificial Sequence
  derived and/or modified sequence
aggaagcaggatggcagccggaacagcagttggagcctgggtgctggtcctcagtctgtggggggcagtagtaggtgctcaaaacatcacagcccggattggcgagccactggtgctgaagtgtaagggggcccccaagaaaccaccccagcggctggaatggaaactgaacacaggccggacagaagcttggaaggtcctgtctccccagggaggaggcccctgggacagtgtggctcgtgtccttcccaacggctccctcttccttccggctgtcgggatccaggatgaggggatcctgggaggcctggggacagccgccctgctcattggggtcatcttgtggcaaaggcggcaacgccgaggagaggagaggaaggccccagaaaaccaggaggaagaggaggagcgtgcagaactgaatcagtcggaggaacctgaggcaggcgagagtagtactggagggccttgaggggcccacagacagatccca

SEQ ID NO: 82969 - DNA, 387 bp, Artificial Sequence
  derived and/or modified sequence
atggcagccggaacagcagttggagcctgggtgctggtcctcagtctgtggggggcagtagtaggtgctcaaaacatcacagcccggattggcgagccactggtgctgaagtgtaagggggcccccaagaaaccaccccagcggctggaatggaaactgaacacaggccggacagaagcttggaaggtcctgtctccccagggaggaggcccctgggacagtgtggctcgtgtccttcccaacggctccctcttccttccggctgtcgggatccaggatgaggggattttccggtgccaggcaatgaacaggaatggaaaggagaccaagtccaactaccgagtccgtgtctaccagtttgagaaccttcacaattacagcctctga

SEQ ID NO: 82970 - DNA, 366 bp, Artificial Sequence
  derived and/or modified sequence
atggccgccggcaccgccgtgggcgcctgggtgctggtgctgagcctctggggcgctgtggtgggggcacaaaatattaccgcccgaatcggggagccactggtgctgaaatgtaaaggagcacccaagaagccccctcagagactggagtggaaactgaacacaggaaggacggaagcctggaaggttttgtcgccccaggggggcggaccgtgggatagcgttgctcgcgtcttacctaacggctccctctttctgcctgccgtgggcatccaggatgagggtatttttaggtgtcaggcaatgaacaggaatggcaaggaaaccaaatccaattggtggtggtcgcagaaggtggaacagtag

SEQ ID NO: 82971 - DNA, 705 bp, Artificial Sequence
  derived and/or modified sequence
atggccgccggcaccgccgtgggcgcctgggtgctggtgctgagcctgtggggcgccgtggtgggtgcccaaaacatcacggcaaggatcggcgagccactggtgttaaagtgtaaaggcgccccaaaaaaacctccgcagcgtctcgagtggaaactcaataccggaagaactgaggcatggaaagtcctgagtccacagggtggaggaccatgggattcagtcgctagggtgctgccgaatgggtctctctttctgcctgccgtagggatccaggatgagggaatcttcaggtgccaggcaatgaataggaacgggaaagaaaccaagagtaattataggtctttgcgcaccttcacgattactgccagtgattggatatttcctccctcagaaatccccgggaagcctgaaatagtagacagtgcttccgagctgacagctggtgtacctaataaggtcggtacatgtgtgtcggaaggctcttatcctgccggaacactgagctggcaccttgatggaaagcctttggtgccgaacgagaagggcgtctccgtgaaggagcaaacgagaagacaccccgagactggactttttaccctccagagtgaactgatggtgacacccgctcgaggcggagatcccaggccaacattttcctgctctttctccccagggctgccgagacaccgcgctctcaggtag

SEQ ID NO: 82972 - DNA, 705 bp, Artificial Sequence
  derived and/or modified sequence
atggccgccggcaccgccgtgggcgcctgggtgctggtgctgagcctctggggagcggtggtgggcgctcagaatatcacagcccgcattggcgaacccttggttcttaaatgtaaaggcgcaccaaagaaaccccctcagagactggaatggaagctgaacaccggacggaccgaagcatggaaggtgttatccccccagggcgggggtccttgggattctgtcgcacgagtgctgcccaatggaagcctgttcctcccagcagttggaatccaggacgaaggaatcttccgatgccaagcaatgaatcgaaatgggaaagagactaaaagcaattatcgcagcttgagaaccttcaccataaccgcctctgattggatcttccctccctccgagatcccagggaagccagaaattgttgacagtgcttcagaactgaccgccggtgtgccaaataaggtggggacttgtgtgtccgaggggagctatccagctgggactctgtcttggcacctggatggcaagccacttgtccctaatgagaaaggcgtttcagtgaaagagcagacaagacgccatcctgagacagggctgtttacacttcagtcagaactgatggttacccccgccaggggaggcgatccccggcccacattctcttgttcttttagtcctggacttccacgacatagagccctgagatag

SEQ ID NO: 82973 - DNA, 705 bp, Artificial Sequence
  derived and/or modified sequence
atggccgccggcaccgccgtgggcgcctgggtgctggtgctgagcttgtggggcgcagtagtcggagctcaaaatataacggcaagaatcggggagccccttgttctgaaatgtaagggcgcgcctaagaagcctccacagcgattagaatggaagcttaacacggggcgcactgaagcttggaaggtgttgagcccccagggtggaggtccttgggatagtgtcgcgagggttttgcctaacagcagtctattccttcccgctgtgggaattcaggatgaaggaatctttagatgtcaagccatgaaccgcaacggaaaggagaccaagtctaattaccgttcactgagaactttcaccattacagcaagcgactggatatttccaccttcagagattcccggcaaaccggagattgttgatagcgcatctgaactcactgctggggtccccaacaaagtggggacctgcgtgagtgagggatcataccccgctggtaccctaagctggcatctggacggcaaaccgctggtacccaacgagaaaggagtttccgtgaaagagcagactcgcagacaccctgaaacgggtctgtttacattacagtcagagctcatggtgactccggcgagaggaggcgacccacggcccactttcagctgctctttcagccctggtcttccgcgccaccgggctctcaggtag

SEQ ID NO: 82974 - DNA, 705 bp, Artificial Sequence
  derived and/or modified sequence
atggccgccggcaccgccgtgggcgcctgggtgctggtgctgagcctgtggggcgcggtggtaggggcccaaaatatcacagcacggatcggggaacccctggtcctgaaatgtaagggtgcccccaagaaacccccccagagattagaatggaagctgaacacagggcgaaccgaggcctggaaagtgctctctccccagggaggtggaccttgggattcagtggcacgggtcttacctaacgggtctctatttctccccgccgtaggcatacaggacgagggtattttccggtgtcaggcaatgaatagaaatgggaaggagaccaagtctaattatcggtctctgagaactttcaccatcaccgcatcagactggatctttccgcctagtgaaatcccaggcaaacccgagattgtcgatagcgcatcggagttgacggccggtgtgccaaataaagttggaacttgcgtgtctgagggtagctaccccgccggaactttgtcctggcatctcgatgggaagcccttggtgccgaatgagaaaggagtgtctgttaaggaacagaccagacgccatccagagacaggcctgtttactctgcagagcgaactcatggtgactccagcccggggtggcgatcctcgaccgactttctcatgttctttttctcccggcctaccccgtcacagggctcttcgatag

SEQ ID NO: 82975 - DNA, 705 bp, Artificial Sequence
  derived and/or modified sequence
atggccgccggcaccgccgtgggcgcctgggtgctggtgctgagcctgtggggagcggtggtaggtgctcagaatatcacggcacgcattggagagcctctggtgttgaagtgcaagggagcaccaaagaagcctcctcaaaggctcgagtggaaactcaacaccggccgaaccgaagcatggaaagtcttgagtccccagggcggcgggccttgggattctgtggcccgcgttctgccaaatggatcactgttcttgccggccgtggggatccaggacgagggcatttttcgatgtcaggctatgaaccggaacggcaaggagactaagtccaattatcgcagcttaaggacgttcactatcaccgcttccgattggatctttccaccctcagagatccctggaaaacccgagattgtcgacagcgccagtgagctgactgcaggggtccctaacaaggtcggaacatgcgtgagcgagggctcctaccccgccgggaccctttcctggcatctggatggcaagccactcgtccccaatgagaaaggcgtcagtgtcaaggaacagacccgtaggcaccctgaaactggcctattcacattgcagtctgaactaatggtcacacctgccaggggcggagacccaaggccaacattttcctgcagtttctctccaggtttaccgcgacacagggccctgaggtag

SEQ ID NO: 82976 - DNA, 705 bp, Artificial Sequence
  derived and/or modified sequence
atggccgccggcaccgccgtgggcgcctgggtgctggtgctgagcttatggggggccgtagtcggtgctcagaacattactgcccgtattggggagccactagttctgaagtgtaaaggggcgcctaagaaacccccccagcgactggagtggaagctcaatacgggcaggaccgaggcctggaaggtgctaagtccgcagggcggtgggccctgggacagcgtcgcccgcgtactcccaaacggctcactcttcctgcccgccgtgggcattcaggacgaggggatattccgatgtcaggcaatgaacagaaacggaaaagagaccaagagcaactacagaagcctgaggacctttacaattaccgcttcggattggattttccccccaagcgagattcccggcaaaccagagattgtggattccgcctccgagttgactgctggcgtgccaaataaggttggaacatgcgtgtctgaaggcagctaccctgctggaaccctgtcatggcatttagacggaaagcctctggtacctaacgagaaaggcgtgtccgtgaaggagcaaactcggaggcaccccgaaaccggcctctttaccttacaaagcgaacttatggtcactcccgcgcgaggcggtgacccaaggccaacttttagttgctctttcagtcctgggctgccaagacaccgcgccctccgctag

SEQ ID NO: 82977 - DNA, 387 bp, Artificial Sequence
  derived and/or modified sequence
atggccgccggcaccgccgtgggcgcctgggtgctggtgctgagcttatggggggccgtggttggcgctcagaacattactgctaggatcggggaacccctggtgctgaaatgcaaaggcgccccaaagaagccaccccaacgtctggaatggaagcttaataccggacgaactgaagcatggaaagtcctctctccccaaggtgggggcccatgggacagcgtggcaagagtcttaccaaatggatccctgttcctccctgccgtcggcatccaggatgaaggaatattcagatgccaggccatgaaccgaaacggcaaagagactaagtcgaactatcgtgttagagtttaccagtttgaaaacctgcataactattcgctgtag

SEQ ID NO: 82978 - DNA, 462 bp, Artificial Sequence
  derived and/or modified sequence
atggccgccggcaccgccgtgggcgcctgggtgctggtgctgagcctttggggcgccgtcgtgggcgcacagaacataacagctaggataggagagccgttagtgctgaagtgcaagggggcccctaagaaaccaccccagcgccttgaatggaagttaaacaccggaaggaccgaggcttggaaggtactatcccctcaaggtggcggaccttgggactccgtagccagagttctgcccaacggaagtctgttcttgcccgccgttggcattcaggacgaagggattctagggggtttaggcaccgcagcactgctgatcggtgtaattttgtggcagagacgccaaagacgtggcgaggagaggaaggctcccgagaaccaggaagaggaagaagagcgagccgagctgaaccagtccgaggagcccgaggccggggagagctccaccggcggcccttag

SEQ ID NO: 82979 - DNA, 366 bp, Artificial Sequence
  derived and/or modified sequence
atggccgccggcaccgccgtgggcgcctgggtgctggtgctgagcttatggggagccgtcgtcggagcccagaatataaccgcacggataggagaacccctcgtgctgaagtgcaagggcgcgcccaagaagccccctcagcgcctggaatggaaactcaataccggccgcacagaggcctggaaggtgctgagcccccagggtggcggtccttgggacagcgtggcaagggtgctgcccaatggcagtcttttcctgccagcggtcggcattcaagacgaggggatctttaggtgtcaggcgatgaatcggaacgggaaggaaactaagagtaattggtggtggtcacagaaggtcgaacagtag

SEQ ID NO: 82980 - DNA, 387 bp, Artificial Sequence
  derived and/or modified sequence
atggccgccggcaccgccgtgggcgcctgggtgctggtgctgagcctttggggggcagttgttggagcccagaatatcacagccagaattggggagccgctggttctgaagtgtaaaggcgcgccaaagaaaccaccccaacgtctagaatggaaattaaacaccggccgcacagaggcatggaaggtgctcagtcctcaagggggcggaccttgggatagtgtggcacgcgtgctgccaaatagttccttattcttgcccgccgtgggaattcaggacgagggaatttttcggtgccaggccatgaaccgcaacggcaaggaaactaagtctaactaccgtgtcagagtgtaccagtttgaaaatctgcataactattcgctgtag

SEQ ID NO: 82981 - DNA, 462 bp, Artificial Sequence
  derived and/or modified sequence
atggccgccggcaccgccgtgggcgcctgggtgctggtgctgagcctgtggggagcagtggtaggggcacagaacatcaccgcacgcatcggtgagcccttggtactcaagtgtaagggcgcgcctaaaaagccccctcagcgcctggagtggaaactgaacactggcaggacagaagcttggaaagtcctaagccctcagggagggggaccatgggatagtgttgcccgagttctgcccaatggaagtctgttcctcccagctgtcggcatccaggacgagggtatcctgggcggattgggtactgcagccctcctgatcggggtaattctgtggcagaggagacaacggagaggggaagagagaaaagctccggagaatcaggaagaggaggaagagcgagccgagttgaaccagtccgaggaacccgaggcaggtgagtccagtaccggcggtccttag

SEQ ID NO: 82982 - DNA, 366 bp, Artificial Sequence
  derived and/or modified sequence
atggccgccggcaccgccgtgggcgcctgggtgctggtgctgagcttatggggggctgtggtgggggcccaaaatattaccgcgaggatcggggagcctctggtccttaagtgcaaaggggcgccaaagaaaccacctcagagattggagtggaaactcaatacaggacggacagaagcatggaaagtgctaagcccacaggggggaggcccttgggattcagttgcacgcgtattgcccaatggaagtctgtttttgccggccgtgggaatacaggatgaaggaatttttaggtgccaggctatgaacagaaatggcaaggaaactaaatctaattggtggtggagtcagaaagtagaacagtag

SEQ ID NO: 82983 - DNA, 387 bp, Artificial Sequence
  derived and/or modified sequence
atggccgccggcaccgccgtgggcgcctgggtgctggtgctgagcttgtggggggccgtggtaggcgcccagaacatcaccgccaggattggggagccactcgtgctgaagtgtaaaggcgcaccgaagaagcctccccaacggctcgaatggaaattgaatacaggacggacagaggcttggaaagtgctctctccccagggcggcggtccatgggattcggtggctcgggtgctgcctaatggaagcctctttctgccagcagtgggtatccaggatgaagggattttcagatgtcaggctatgaaccgcaatgggaaggagactaaatccaactatagggtcagggtgtaccaattcgagaacctgcataactactccctgtag

SEQ ID NO: 82984 - DNA, 366 bp, Artificial Sequence
  derived and/or modified sequence
atggccgccggcaccgccgtgggcgcctgggtgctggtgctgagcctatggggtgcagtagtaggcgcccagaatatcacagcccgcattggggaaccgctggtgttgaaatgcaagggggcacctaagaaacccccccagcgactggaatggaagctaaacactggacggaccgaagcttggaaggttcttagcccacaaggaggaggtccatgggactccgtggcccgggttcttcccaattcttccctcttcttgcccgcagtcggcatccaagacgagggaatctttaggtgtcaagccatgaaccgtaatggaaaagaaactaaatcaaattggtggtggagccagaaggtggaacagtag

SEQ ID NO: 82985 - DNA, 462 bp, Artificial Sequence
  derived and/or modified sequence
atggccgccggcaccgccgtgggcgcctgggtgctggtgctgagcctctggggcgcagtggttggtgctcagaacataaccgcccgaatcggggagccactcgtgcttaaatgcaagggtgctcccaagaaacctccacaaaggctggaatggaaacttaacacaggaagaaccgaggcctggaaggtcctgagcccacaagggggaggtccctgggactctgtcgcaagggttttgccgaacggatcgctgtttttacccgccgtgggtatccaagatgagggtatactggggggactgggaaccgcggccttgctgataggcgtgatattgtggcagagacgtcaacgtagaggcgaggagagaaaggcccccgagaatcaagaagaagaggaggagcgggcagaactgaaccagtcagaagagcctgaagccggagaaagcagtaccggaggtccttag

SEQ ID NO: 82986 - DNA, 366 bp, Artificial Sequence
  derived and/or modified sequence
atggccgccggcaccgccgtgggcgcctgggtgctggtgctgagcctgtggggtgcagtggtgggcgcccagaacataacagctcgaattggcgaaccacttgtcctgaaatgcaagggtgcccccaagaaacccccccagagacttgagtggaaactaaacaccggcaggactgaagcttggaaggtgctttccccccaggggggaggaccttgggactcagtggcccgtgtactcccaaatggctcactgtttctgccagccgtcggcatacaggacgagggcatttttaggtgtcaagctatgaataggaacggcaaggaaacaaagagcaattggtggtggagtcaaaaggtggaacagtag

SEQ ID NO: 82987 - DNA, 387 bp, Artificial Sequence
  derived and/or modified sequence
atggccgccggcaccgccgtgggcgcctgggtgctggtgctgagcctgtggggagcagtcgtaggcgcccagaatataaccgccaggatcggcgaacctctggttctcaagtgtaaaggcgctccaaagaagccgccgcaaagattggagtggaaactcaataccggtcggacagaagcttggaaagtcctctccccacagggcggaggcccatgggattctgtagctagggttctgcccaatggaagtctgtttctgccagcggtggggatacaagatgagggaatctttaggtgccaggccatgaacagaaatggcaaggagaccaagagcaattaccgcgtgcgagtctatcagttcgagaatctgcataactattccctctag

SEQ ID NO: 82988 - DNA, 462 bp, Artificial Sequence
  derived and/or modified sequence
atggccgccggcaccgccgtgggcgcctgggtgctggtgctgagcctgtggggcgcagtggttggagctcaaaacatcactgccagaattggggaacctcttgtactaaaatgcaaaggcgcgcctaagaagccaccccaacgcctggagtggaaactcaatacaggccgcaccgaggcctggaaggttctcagccctcagggaggtggcccgtgggacagtgtggcaagggtcctgcccaacggatcattgtttctgcctgccgtcgggattcaagacgagggaatattgggtgggcttggaactgccgccttattgattggggtcattctatggcaacgcagacaacgtagaggagaggagcgaaaggctccggaaaatcaagaggaagaggaggagagagcggagctcaatcaatccgaagaacccgaagctggggaatcttctacgggtggaccctag

SEQ ID NO: 82989 - DNA, 366 bp, Artificial Sequence
  derived and/or modified sequence
atggccgccggcaccgccgtgggcgcctgggtgctggtgctgagcttgtggggcgctgtcgtgggggcgcaaaatataacagctcggattggtgagcccttggtgctgaagtgcaagggcgcacccaagaaacctccacagcggctagagtggaagctcaacactggccggacagaggcttggaaggtactttctccacaaggcggaggtccttgggattccgttgcaagggtgttgcctaacggtagtttatttctccctgcagtgggcatccaagacgaggggattttcaggtgccaggctatgaaccggaacgggaaggagacgaagtctaattggtggtggagccagaaagtggagcagtag

SEQ ID NO: 82990 - DNA, 387 bp, Artificial Sequence
  derived and/or modified sequence
atggccgccggcaccgccgtgggcgcctgggtgctggtgctgagcctgtggggagcagtggtgggcgctcagaacatcacagcacgcattggcgagccactcgtgttaaagtgcaagggggcacccaagaagccgccgcagcgtcttgagtggaagctcaacactggacgtacggaagcctggaaggtcctgagtccacagggaggtggcccatgggactctgtcgcgcgagtcctccccaacggttccctgtttctgcctgccgtaggaatacaggatgaagggatatttagatgtcaggctatgaatagaaacgggaaagagactaagagtaattatagagtgcgggtgtatcagttcgagaatttacataactactccctgtag

SEQ ID NO: 82991 - DNA, 462 bp, Artificial Sequence
  derived and/or modified sequence
atggccgccggcaccgccgtgggcgcctgggtgctggtgctgagcctgtggggtgcagtggtcggcgcccagaatatcaccgcacgcatcggagagccactcgtcttgaaatgcaagggcgcaccaaaaaaacccccccagagactggagtggaaactcaacacaggacggacggaagcatggaaggtgttgtcaccacagggaggcggtccctgggatagcgttgctcgcgtgctgcctaacagttcactgttcttacctgcagtggggatccaggatgagggcattctcggtggactcggaaccgccgcgctcttgattggcgtgattctgtggcagagacgtcagcgacggggcgaggagcggaaggcgcctgaaaaccaagaagaggaagaggaaagggcagaattaaaccagagtgaggagccagaagcaggtgagtcgtccaccggaggaccttag

SEQ ID NO: 82992 - DNA, 462 bp, Artificial Sequence
  derived and/or modified sequence
atggccgccggcaccgccgtgggcgcctgggtgctggtgctgagcctgtggggagcggtggtgggcgcccagaacatcaccgcaagaatcggagagccactggtgcttaagtgcaaaggggcacctaagaagcccccccagcgtctggaatggaagctgaacaccggaagaactgaagcctggaaagtcttatccccccagggcggcggcccctgggattcagtcgcaagagtcttacctaacggatccttgtttctgccggcagtgggtattcaggacgaaggtattctggggggcctgggaaccgcggcccttttgatcggcgttatcttgtggcagagaagacagcggaggggggaggagcgcaaagctcctgagaaccaagaggaagaagaggaacgcgccgagctgaatcagtccgaagaacccgaagcaggggagtcttccacaggcggaccctag

SEQ ID NO: 82993 - DNA, 387 bp, Artificial Sequence
  derived and/or modified sequence
atggccgccggcaccgccgtgggcgcctgggtgctggtgctgagcctgtggggagccgttgtgggagcccagaatataaccgctcgcattggcgagcccctcgtgctgaaatgtaaaggtgcaccaaagaagcctccacaacggctggaatggaagctcaatacgggacgaactgaagcttggaaggtactgagtcctcaagggggagggccatgggatagcgttgcacgcgtccttcccaacgggagcctgtttctgcccgccgtaggaatccaggatgaagggatttttagatgccaggccatgaaccggaacggtaaggagaccaaaagtaactatcgagtgcgtgtgtaccagtttgagaatctccataattactccctgtag

SEQ ID NO: 82994 - DNA, 366 bp, Artificial Sequence
  derived and/or modified sequence
atggcagcaggtacagccgtgggggcttgggtgctcgttctatccctttggggcgcagtagtgggcgctcagaatatcaccgcccgaattggtgaaccactcgttctcaagtgcaagggagcccctaagaaacctccgcagcgcctcgaatggaaactgaacacagggaggaccgaggcctggaaagttctgtccccacagggcggagggccatgggactcagtcgccagagtgctgccaaatggtagtttgttcctccccgcagtaggaatccaggacgaggggatctttagatgccaggctatgaatcgcaatggcaaggagaccaaatccaactggtggtggagccagaaagttgagcagtag

SEQ ID NO: 82995 - DNA, 705 bp, Artificial Sequence
  derived and/or modified sequence
atggccgctgggactgcagtgggggcttgggtgctcgtcctctccctgtggggcgctgttgttggcgctcaaaatatcactgctcggattggtgaaccactcgtactcaagtgcaaaggagcccctaagaagcccccacagaggttggagtggaagctgaatacaggacgcacggaagcctggaaggtattgtctccacagggtggtggaccatgggactccgtcgcaagggtgttgccgaacggcagcctgtttctgcctgcagttggtatccaggacgaagggatatttagatgccaggccatgaataggaatgggaaagagaccaagtctaactatcggagcctgagaactttcactattaccgcctccgactggatttttccgcctagtgaaattccagggaagcccgagattgttgatagcgcttccgaattgacagcaggtgtgcccaacaaggtgggaacttgcgtctcagagggcagttatccggcaggcacactgagctggcacctggacggcaaaccccttgttcctaatgaaaagggagtcagcgtgaaggaacaaaccaggagacatccagaaaccggattgttcacactgcagtccgagctaatggttacccctgccaggggtggcgaccctcgtcccacattcagttgttctttttctccaggcctgcccaggcacagggccctgcggtag

SEQ ID NO: 82996 - DNA, 705 bp, Artificial Sequence
  derived and/or modified sequence
atggctgccggaactgctgtaggtgcctgggtgctcgtgctctcgctgtggggagctgtggtaggagctcagaatattaccgccaggataggtgagcctctcgtgctgaaatgcaagggggctcctaagaagccgcctcaaagattggagtggaagcttaataccgggaggacggaagcttggaaagtgttatcgccccagggcggaggcccttgggacagcgtcgcgagagttctcccaaacggcagtctgttcctgccagccgtggggattcaggacgagggcattttccggtgccaggcaatgaaccgcaacggcaaggaaaccaagtctaactaccgctctctgaggacattcaccatcactgccagcgattggatcttccccccatctgagatccctggcaaaccggagattgtggacagtgcctcagagttgaccgcaggggtaccaaacaaagtgggaacctgtgtgtccgaaggttcatatcccgcagggacactatcatggcacctggatggaaagcctttagttcctaatgagaaaggcgtgtctgtgaaggaacagacacgcaggcatcccgagacagggctctttacactccagtcagaactgatggttacacccgcacgagggggtgacccccgacccacatttagttgcagctttagcccagggcttcctagacaccgtgccctgaggtag

SEQ ID NO: 82997 - DNA, 705 bp, Artificial Sequence
  derived and/or modified sequence
atggccgctggaacagccgtaggagcatgggttcttgtcctgtcactctggggggcagtggtgggtgcgcagaatattaccgctcgcatcggagaacccctggtccttaaatgtaagggcgctcccaagaaaccacctcagcgactggaatggaagttaaatactgggaggactgaagcttggaaagtcctgagtccacagggaggtggcccttgggatagcgttgctcgagtcttgcctaatagcagcctattcctgcctgccgtgggtatccaggatgagggaatcttccgatgccaggctatgaatagaaacggcaaagaaaccaagagcaactaccggagtttaagaacgttcaccatcaccgctagcgactggatcttccctccgtccgaaatccccggtaagccagagatcgtagattcagcttcggaactgacagcaggagttcctaataaagttgggacctgcgtatctgaaggctcatacccggcaggcaccctgtcttggcatctggacgggaaacctctggtcccaaatgaaaaaggcgtcagcgtgaaagaacaaacaaggcgtcaccctgaaacaggactgtttaccctccagagcgagttgatggtaactcccgctagaggtggggacccgaggcccacattctcctgttcattcagcccagggctaccacggcaccgggctctccggtag

SEQ ID NO: 82998 - DNA, 705 bp, Artificial Sequence
  derived and/or modified sequence
atggctgcgggaactgcagtgggtgcttgggtgctggtcctgagtttgtggggcgctgtagttggcgcacagaatatcacagcaaggattggagagcctctcgttttgaagtgtaaaggcgctccaaaaaaaccgccacaacgattagaatggaaactcaatacaggccgaacagaggcctggaaagttttatcaccccaggggggaggaccttgggacagcgtggcgcgtgtcttacctaacggcagccttttcctgcctgcagtaggaattcaggacgaaggtatcttccggtgtcaggccatgaacaggaatgggaaagagactaaatcaaactacagatctctgcggacgtttacaatcaccgcgtctgattggatttttcccccatccgaaattccaggaaaacccgagatcgtcgattctgcttctgagctgacagcaggagtacccaacaaggtgggaacttgtgtttcagagggctcctatccagcagggactctgagttggcatctggacggcaaaccacttgtcccaaacgaaaagggcgtctcggttaaagagcagacacggaggcaccctgagactgggctgttcactttgcagtcagagcttatggtgactccagctagaggaggagaccctcgccctaccttttcgtgtagcttctctcctggactgccaaggcaccgggcactgaggtag

SEQ ID NO: 82999 - DNA, 705 bp, Artificial Sequence
  derived and/or modified sequence
atggctgccggtactgccgtcggagcatgggtgctggtactatctctatggggcgcagtagtgggggcacagaatatcacagcacgaattggagaacctcttgtgctgaagtgcaagggggcacctaaaaagcctccacagcgcctggagtggaagctgaacaccggcaggacagaggcgtggaaagtcctttctccgcaaggtggaggcccttgggattccgtagccagggtcctgcccaatgggagcctctttttgcccgcagtcgggatccaggatgaaggcatttttcgctgtcaggcaatgaacaggaatgggaaagagactaagagcaactataggagcctgcgcacctttactattacggcgtcagactggattttcccaccaagcgagattccaggaaaaccggagatcgtggactccgcttccgagttaaccgccggagttcctaacaaggtgggtacttgcgtttcagagggctcgtaccccgctgggaccttgtcctggcaccttgacggcaagccattggttccgaatgagaaaggtgtaagtgtgaaagaacaaaccaggaggcatcccgaaacgggcctgttcacattacagagcgagctgatggtgaccccagcccgaggaggagaccctagacccaccttctcttgttcattcagcccaggtctgccaaggcaccgagccctgcggtag

SEQ ID NO: 83000 - DNA, 705 bp, Artificial Sequence
  derived and/or modified sequence
atggcggctggaacggcggtgggagcctgggtgcttgtgttgtctctttggggcgcagtggttggagcccagaatatcacagcacgcatcggagagccactggtcctgaagtgtaaaggtgctccaaaaaaaccaccccagcgactcgagtggaagctgaacactggcaggaccgaggcatggaaggtgctctctccacaaggaggcggaccctgggactccgtagcaagagtgctgcctaacggctcactctttctgcccgctgtggggattcaagacgagggtatctttaggtgccaagcaatgaacaggaacgggaaagaaacaaagtccaattacaggtcactcagaacctttacgataactgccagcgactggatcttcccccctagtgagattccagggaagccagagatcgtggacagcgcgtcagaactgaccgcaggagtgcccaacaaagtaggcacctgtgtcagcgaaggttcctatccggcagggaccctcagctggcatctggatgggaagcccctggtccccaatgaaaaaggcgtatcggtcaaggaacaaactcgacgacaccctgaaaccggccttttcacattacaaagcgaactcatggtcactccagccagaggtggtgatcctcgtcctaccttcagctgtagctttagccccggattaccacgccatcgtgctttgcgttag

SEQ ID NO: 83001 - DNA, 387 bp, Artificial Sequence
  derived and/or modified sequence
atggccgcagggacagctgtgggcgcttgggttctggtcttgagcctctggggagctgttgtgggggctcagaatattacggcgaggataggcgagcctttagttttgaaatgtaagggagcacctaagaaaccgccacaacgcctcgagtggaaattgaacacgggaagaactgaggcttggaaagttctaagtccacaaggcggaggaccctgggattccgttgccagggtcctgccaaatggctcactgttcctgccagctgtgggcatccaagatgaaggaatttttcggtgccaggcgatgaacagaaatggtaaggagacaaaaagcaattatcgagttcgagtgtaccagtttgaaaacctgcataactacagcctctag

SEQ ID NO: 83002 - DNA, 462 bp, Artificial Sequence
  derived and/or modified sequence
atggccgctggcactgctgttggggcttgggttcttgttctgagcctgtggggcgcagtggtgggcgcacagaatattaccgcccgaatcggggaacctctggtgttgaagtgtaagggtgctcctaagaagccgccacaaaggctcgaatggaagctcaataccggaagaaccgaggcatggaaagtcttaagccctcagggaggcggaccctgggattctgtcgctcgagtcctgcccaacggtagcctcttcctcccggcagtgggcattcaggatgaaggaatactaggcggactgggaaccgcagcgttactcataggagtgatattgtggcagcgccgacagagaaggggggaggagagaaaagccccagagaaccaggaggaggaggaagaacgcgctgagctcaatcagtctgaagagccagaggctggagagtcatccacgggcggaccctag

SEQ ID NO: 83003 - DNA, 366 bp, Artificial Sequence
  derived and/or modified sequence
atggccgcaggaaccgcagtgggcgcttgggtcctagttcttagcctctggggcgcagttgtcggtgctcagaatatcactgctcgaatcggcgagcctctggtgttgaaatgcaagggagcccctaagaagccccctcagagactggaatggaaactcaacacaggcaggaccgaggcatggaaggtgttaagtcctcaaggcggaggcccttgggacagcgtcgctcgagtactccctaacggctccttattcttgccagctgtgggcatccaagacgagggcatattcaggtgtcaggccatgaatcgcaacggaaaagagactaaatccaattggtggtggtcccagaaagtggagcagtag

SEQ ID NO: 83004 - DNA, 387 bp, Artificial Sequence
  derived and/or modified sequence
atggcagccggaaccgccgttggggcttgggtgcttgttctcagcttatggggcgctgtggtgggagcgcagaacatcactgcccgtatcggggagccattagtgttaaaatgcaagggggcacccaagaagcccccacaacgtctggagtggaaactcaacacaggacgaacggaagcctggaaggtcctttctcctcagggtggaggaccctgggactcagtggctcgggtactgcctaatagcagccttttcctaccagccgtaggaatccaggatgagggcatcttccggtgtcaggctatgaatcggaacggtaaggagacaaaatccaactacagggtcagggtgtatcaatttgaaaatttgcacaactacagtctttag

SEQ ID NO: 83005 - DNA, 462 bp, Artificial Sequence
  derived and/or modified sequence
atggccgctgggacagccgtgggggcttgggtgcttgtgctatcactgtggggtgctgtagtgggggcacagaacatcacggctcggataggagaacctctcgtgctgaaatgcaagggcgcacccaaaaaacctccccaaaggctggaatggaagctgaacaccggcagaactgaggcctggaaagtgctgtccccccagggcggtgggccatgggatagcgtagcccgtgttttgcccaatggaagtctgttcctgccagcggtcggcatccaagatgaaggcattctgggtggattaggcacggctgctttactaatcggtgtgatcctatggcagcgtcgccaaagacggggtgaggaaaggaaagccccagagaatcaggaagaagaggaggagcgggcagaactgaaccaatcagaggagccagaagcaggcgagtcgagcacaggtggaccatag

SEQ ID NO: 83006 - DNA, 366 bp, Artificial Sequence
  derived and/or modified sequence
atggccgcaggaacggcagtgggggcttgggtactggtgctcagcctgtggggcgcagtcgtcggtgcacagaatatcaccgccaggattggtgaacctctggtactcaagtgtaagggggctcccaaaaaaccaccccagcgccttgaatggaagctgaataccggaaggactgaggcatggaaagtcctgtcaccacagggaggaggcccttgggacagtgtcgcaagggtgcttcccaatggttccctgttcctccctgccgtaggaatccaggacgagggtatcttcaggtgtcaagccatgaacagaaatggtaaagaaacaaagagtaattggtggtggtcacaaaaagtggagcagtag

SEQ ID NO: 83007 - DNA, 387 bp, Artificial Sequence
  derived and/or modified sequence
atggccgctggcactgccgtcggtgcatgggtgctagtgctgagtctgtggggggcagtagtgggagcacaaaacataactgcccgtataggagaacctctcgttctcaaatgcaaaggagccccaaaaaagcctccacaaagattggagtggaagctaaacacaggcaggacagaggcttggaaagtgctttctccccaggggggaggcccttgggactccgttgcccgagttctgcccaacggatccctcttcttaccggcagtggggatacaggacgaggggattttcaggtgtcaggctatgaatcgcaacggcaaggagacgaagtccaattacagggttcgggtgtatcagtttgagaatcttcacaattactcactttag

SEQ ID NO: 83008 - DNA, 366 bp, Artificial Sequence
  derived and/or modified sequence
atggccgcagggacagctgtgggtgcctgggtgctcgtcctgagcctgtggggtgctgttgttggtgcacagaatatcacggcacgaatcggtgagcctttggtgctgaagtgcaaaggggcacccaagaagcctccacagcggttagagtggaagctgaacaccggccgtaccgaagcctggaaggtgctgtccccacaaggcggaggaccttgggatagcgtcgccagagttctgcccaattcctcactgtttctgcctgccgtgggtatccaggatgagggcatattccggtgccaggccatgaaccgaaacggaaaagaaaccaagtcaaactggtggtggagtcagaaggttgaacagtag

SEQ ID NO: 83009 - DNA, 462 bp, Artificial Sequence
  derived and/or modified sequence
atggcagcagggacggctgttggagcgtgggtgctagtcctgtctttatggggcgcagtcgtgggtgcccagaacatcacagcaagaattggagaaccattagtactcaaatgtaaaggagcacccaagaaacccccacagcgtctggagtggaagctaaatacaggcaggaccgaggcctggaaggtgctgagtcctcagggagggggtccctgggatagtgtagctcgtgtgcttcctaatggctcactgtttctgcctgcagtagggatccaggatgaggggatcttgggaggtctcgggaccgccgcacttctgatcggcgtaatcctgtggcaacgcagacagcgcaggggggaagagaggaaggcacccgagaaccaggaggaagaggaggagcgggctgaattgaaccagtccgaagagcctgaagctggcgagtcctcgacaggaggtccctag

SEQ ID NO: 83010 - DNA, 366 bp, Artificial Sequence
  derived and/or modified sequence
atggccgctggcaccgcagtaggggcttgggtcctcgtgctttccctgtggggcgcagtggtgggagcacagaatatcactgctagaatcggcgaaccattagtgcttaagtgcaaaggggctccaaaaaaacccccacaaagactggaatggaagttgaacaccggcaggaccgaggcctggaaagtactgtcaccccagggagggggtccctgggacagcgttgccagggtgctcccaaacgggtcattattcttaccagccgtgggtatccaggacgaaggcatcttccgttgtcaggccatgaatcgcaatgggaaagagaccaaatccaactggtggtggtcgcaaaaggtggagcagtag

SEQ ID NO: 83011 - DNA, 387 bp, Artificial Sequence
  derived and/or modified sequence
atggctgctggaactgccgttggcgcttgggtactagtgctctctctctggggagcggtggttggagcacagaatattactgcccgtattggcgaaccccttgtactcaaatgtaagggcgctccaaaaaaacctccccagagattagagtggaagctgaatacaggtcggacagaggcctggaaggtgctgagtccccaaggcggaggcccatgggacagtgtggctagggtgctacctaatggctctttgttccttcccgcagtggggatccaggacgagggcatcttcaggtgccaggccatgaacagaaacgggaaagagaccaagtcgaattaccgggtcagagtttaccagttcgagaatctacacaattactctttgtag

SEQ ID NO: 83012 - DNA, 462 bp, Artificial Sequence
  derived and/or modified sequence
atggcagccggtaccgctgtgggggcatgggtactggtactgagcctttggggcgcagtagttggggctcagaacattacagccaggatcggagaacccctcgtcctgaagtgcaagggcgctccgaagaagccgccacagcggttggagtggaagctcaacacgggtcgtacggaagcctggaaagttctctccccacagggcggaggaccctgggactccgtggccagggttctgcctaacggctctctgtttttgcccgctgtcggcatccaagatgagggcatcctgggcggtctgggcaccgctgctctcttgattggcgttatcttatggcaacgcagacagaggcggggtgaggaacgcaaagcccctgagaaccaggaggaagaggaggaaagagccgagctcaatcagagcgaggaacccgaagcaggggaatcttctacagggggtccttag

SEQ ID NO: 83013 - DNA, 366 bp, Artificial Sequence
  derived and/or modified sequence
atggctgcaggcaccgctgtgggggcttgggtgctcgtactcagtctttggggtgcggtcgtgggagctcaaaatatcaccgcgagaatcggggagcctctggtgttaaagtgcaagggcgcacctaaaaagccaccacagcgtcttgagtggaagttaaacacgggacgtactgaagcctggaaagtgctgtctcctcaggggggagggccttgggattccgtcgccagggttctgccaaacgggagtcttttcctgcccgcagtgggtattcaggacgagggtatattcaggtgccaggccatgaataggaatggaaaggaaacgaagtcgaactggtggtggagccagaaagtagaacagtag

SEQ ID NO: 83014 - DNA, 387 bp, Artificial Sequence
  derived and/or modified sequence
atggccgctggaaccgcagtcggggcatgggtcctagttcttagcctgtggggggcagtcgtgggggctcaaaatatcacagctcgtattggagagcccctggttctcaagtgtaaaggagcgcctaagaagcctccccagagactggaatggaagctgaatacaggcagaaccgaggcttggaaagtgctgtccccgcagggaggcggaccttgggatagcgtggctagggtgctgccaaacggttctctcttcctgccagcagttggcatccaggacgaagggatctttcgctgtcaggccatgaatcgcaatgggaaggagactaagtccaattacagagtgcgggtttaccagttcgagaacctccataattacagcttgtag

SEQ ID NO: 83015 - DNA, 462 bp, Artificial Sequence
  derived and/or modified sequence
atggccgcaggcaccgccgtgggtgcttgggtcctggtgctctcgctgtggggtgctgtggtcggagcacagaacatcaccgcacgcataggcgagcccttagtgctaaaatgcaagggcgctccaaagaaaccacctcagagactcgagtggaaattgaacacaggcaggaccgaggcatggaaggtactgagccctcagggcggtggtccatgggactccgttgcccgtgttctcccaaactcgtccctcttccttccggcagttgggatccaggacgaaggaatcctcggcggactggggacggccgcactcctgatcggagttatattgtggcaacggagacagcggagaggagaggaacgcaaggctccagagaatcaggaagaggaagaggagagagctgagctcaatcagagcgaggagcccgaggcaggcgaatccagtactggagggccatag

SEQ ID NO: 83016 - DNA, 462 bp, Artificial Sequence
  derived and/or modified sequence
atggctgctggtacggcagttggcgcttgggtcctcgtgctgtcactttggggcgcagtggtcggcgcacagaatattacagccagaatcggggaacccctggtgctgaaatgtaagggggctcctaagaagcccccacaaagattggagtggaagctgaacaccggcaggaccgaggcctggaaggtgctgagcccacaggggggaggaccttgggacagcgttgcaagggtgcttccaaatggcagcctttttctacctgccgtgggaatccaggatgaaggtattctgggcggactcggcacagctgcgctgctcatcggtgttattctgtggcagagacgtcagcggagaggcgaagagcgtaaggctcccgagaaccaggaggaagaggaggaacgcgctgagctcaaccagagcgaggaacccgaagccggagagtcttctaccggcggtccatag

SEQ ID NO: 83017 - DNA, 387 bp, Artificial Sequence
  derived and/or modified sequence
atggctgcaggcaccgccgtcggagcctgggtgcttgtcttatccctctggggcgctgttgttggagctcagaatattaccgccagaatcggagagccgctcgttctgaaatgtaagggagctccaaagaagccgcctcagaggttggagtggaaactgaacacagggagaaccgaagcatggaaagtgctgtcaccacaaggcggtggcccttgggactccgtcgctagagtactgcccaatggttctctctttctacccgctgtgggaattcaagatgagggaatcttccggtgtcaggccatgaaccgcaatggaaaggagacaaagtctaattatagggtgagggtgtatcagtttgagaatttgcataactatagtttgtag

SEQ ID NO: 83018 - DNA, 366 bp, Artificial Sequence
  derived and/or modified sequence
atggccgccggcaccgccgtgggcgcctgggtgctggtgctgagcctgtggggcgccgtggtgggcgcccagaacatcaccgccagaatcggcgagcccctggtgctgaagtgcaagggcgcccccaagaagcccccccagagactggagtggaagctgaacaccggcagaaccgaggcctggaaggtgctgagcccccagggcggcggcccctgggacagcgtggccagagtgctgcccaacggcagcctgttcctgcccgccgtgggcatccaggacgagggcatcttcagatgccaggccatgaacagaaacggcaaggagaccaagagcaactggtggtggagccagaaggtggagcagtag

SEQ ID NO: 83019 - DNA, 705 bp, Artificial Sequence
  derived and/or modified sequence
atggccgccggcaccgccgtgggcgcctgggtgctggtgctgagcctgtggggcgccgtggtgggcgcccagaacatcaccgccagaatcggcgagcccctggtgctgaagtgcaagggcgcccccaagaagcccccccagagactggagtggaagctgaacaccggcagaaccgaggcctggaaggtgctgagcccccagggcggcggcccctgggacagcgtggccagagtgctgcccaacggcagcctgttcctgcccgccgtgggcatccaggacgagggcatcttcagatgccaggccatgaacagaaacggcaaggagaccaagagcaactacagaagcctgagaaccttcaccatcaccgccagcgactggatcttcccccccagcgagatccccggcaagcccgagatcgtggacagcgccagcgagctgaccgccggcgtgcccaacaaggtgggcacctgcgtgagcgagggcagctaccccgccggcaccctgagctggcacctggacggcaagcccctggtgcccaacgagaagggcgtgagcgtgaaggagcagaccagaagacaccccgagaccggcctgttcaccctgcagagcgagctgatggtgacccccgccagaggcggcgaccccagacccaccttcagctgcagcttcagccccggcctgcccagacacagagccctgagatag

SEQ ID NO: 83020 - DNA, 387 bp, Artificial Sequence
  derived and/or modified sequence
atggccgccggcaccgccgtgggcgcctgggtgctggtgctgagcctgtggggcgccgtggtgggcgcccagaacatcaccgccagaatcggcgagcccctggtgctgaagtgcaagggcgcccccaagaagcccccccagagactggagtggaagctgaacaccggcagaaccgaggcctggaaggtgctgagcccccagggcggcggcccctgggacagcgtggccagagtgctgcccaacggcagcctgttcctgcccgccgtgggcatccaggacgagggcatcttcagatgccaggccatgaacagaaacggcaaggagaccaagagcaactacagagtgagagtgtaccagttcgagaacctgcacaactacagcctgtag

SEQ ID NO: 83021 - DNA, 462 bp, Artificial Sequence
  derived and/or modified sequence
atggccgccggcaccgccgtgggcgcctgggtgctggtgctgagcctgtggggcgccgtggtgggcgcccagaacatcaccgccagaatcggcgagcccctggtgctgaagtgcaagggcgcccccaagaagcccccccagagactggagtggaagctgaacaccggcagaaccgaggcctggaaggtgctgagcccccagggcggcggcccctgggacagcgtggccagagtgctgcccaacggcagcctgttcctgcccgccgtgggcatccaggacgagggcatcctgggcggcctgggcaccgccgccctgctgatcggcgtgatcctgtggcagagaagacagagaagaggcgaggagagaaaggcccccgagaaccaggaggaggaggaggagagagccgagctgaaccagagcgaggagcccgaggccggcgagagcagcaccggcggcccctag

SEQ ID NO: 83022 - protein, 1026 aa, Artificial Sequence
  derived and/or modified sequence
MRLPWELLVLQSFILCLADDSTLHGPIFIQEPSPVMFPLDSEEKKVKLNCEVKGNPKPHIRWKLNGTDVDTGMDFRYSVVEGSLLINNPNKTQDAGTYQCTATNSFGTIVSREAKLQFAYLDNFKTRTRSTVSVRRGQGMVLLCGPPPHSGELSYAWIFNEYPSYQDNRRFVSQETGNLYIAKVEKSDVGNYTCVVTNTVTNHKVLGPPTPLILRNDGVMGEYEPKIEVQFPETVPTAKGATVKLECFALGNPVPTIIWRRADGKPIARKARRHKSNGILEIPNFQQEDAGLYECVAENSRGKNVARGQLTFYAQPNWIQKINDIHVAMEENVFWECKANGRPKPTYKWLKNGEPLLTRDRIQIEQGTLNITIVNLSDAGMYQCLAENKHGVIFSNAELSVIAVGPDFSRTLLKRVTLVKVGGEVVIECKPKASPKPVYTWKKGRDILKENERITISEDGNLRIINVTKSDAGSYTCIATNHFGTASSTGNLVVKDPTRVMVPPSSMDVTVGESIVLPCQVTHDHSLDIVFTWSFNGHLIDFDRDGDHFERVGGQDSAGDLMIRNIQLKHAGKYVCMVQTSVDRLSAAADLIVRGPPGPPEAVTIDEITDTTAQLSWRPGPDNHSPITMYVIQARTPFSVGWQAVSTVPELIDGKTFTATVVGLNPWVEYEFRTVAANVIGIGEPSRPSEKRRTEEALPEVTPANVSGGGGSKSELVITWETVPEELQNGRGFGYVVAFRPYGKMIWMLTVLASADASRYVFRNESVHPFSPFEVKVGVFNNKGEGPFSPTTVVYSAEEEPTKPPASIFARSLSATDIEVFWASPLEKNRGRIQGYEVKYWRHEDKEENARKIRTVGNQTSTKITNLKGSVLYHLAVKAYNSAGTGPSSATVNVTTRKPPPSQPPGNIIWNSSDSKIILNWDQVKALDNESEVKGYKVLYRWNRQSSTSVIETNKTSVELSLPFDEDYIIEIKPFSDGGDGSSSEQIRIPKISNAYARGSGASTSNACTLSAISTIMISLTARSSL

SEQ ID NO: 83023 - protein, 116 aa, Artificial Sequence
  derived and/or modified sequence
MRLPWELLVLQSFILCLADDSTLHGPIFIQEPSPVMFPLDSEEKKVKLNCEVKGNPKPHIRWKLNGTDVDTGMDFRYSVVEGSLLINNPNKTQDAGTYQCTATNSFGTIVSREAKL

SEQ ID NO: 83024 - protein, 54 aa, Artificial Sequence
  derived and/or modified sequence
MRLPWELLVLQSFILCLADDSTLHGPIFIQEPSPVMFPLDSEEKKVKLNCEVKG

SEQ ID NO: 83025 - DNA, 2424 bp, Artificial Sequence
  derived and/or modified sequence
atgggagagtacgagccaaaaatagaagtccagttccctgagaccgtccccactgctaagggagccacagtgaagttggagtgtttcgcactaggtaaccctgtcccaacaataatatggcgaagagccgacggcaaacctattgccagaaaggcccggaggcacaagtcaaatggcatactggagatccccaactttcaacaggaggatgccggcctttacgagtgcgttgctgaaaactcaagaggtaagaatgtggctagaggccagctcaccttttatgcgcagcctaactggattcagaaaataaatgatattcatgtggcgatggaagagaacgttttctgggagtgtaaggccaacggccggccaaagccgacctacaaatggttgaagaatggcgaacccctcctgacccgggaccggatccaaatcgaacagggtacactgaatatcacaatcgtcaacctttctgatgccgggatgtaccagtgcttagccgaaaataagcacggagttatatttagcaacgcggagttatccgtgattgctgtgggcccagattttagcagaaccctgctgaagagagtgaccctggtgaaagtggggggggaggttgtgatcgagtgcaagccaaaggcttctccaaaacctgtgtatacctggaaaaagggtagggacatcctcaaggagaatgaacgaattaccatttcagaggacgggaacctcaggattatcaatgtgactaaatctgacgctgggtcttacacttgcatcgcgaccaatcattttggcactgcgtccagtaccggcaatctcgtggtgaaagaccccacaagagttatggtcccccccagctctatggacgtgactgtgggggaatcaattgtcctgccttgtcaggtgacacacgaccactccctggacatagttttcacctggtcatttaacggccatcttattgactttgatcgcgatggtgatcatttcgaacgagtgggaggtcaggacagcgccggggacttgatgatccggaatatccagctcaaacatgcgggcaaatatgtctgcatggtgcagaccagcgtggataggctgtcagctgcggctgatctcattgtaaggggaccgcccggaccccctgaagctgttactatcgacgagatcaccgatactacggcccaactgtcatggagacccggtccggataaccactcaccgattaccatgtatgtgatccaggcacgtactccattttccgtgggctggcaagcagtgagtactgtccctgagctgatcgatggcaaaacattcacagcaaccgtggtgggcctgaatccgtgggttgaatacgaattcagaacagtggcggccaacgtgattggcatcggagaacccagccgcccatccgagaaaaggaggaccgaagaggcactgccggaagttaccccagctaatgtctccggcggtgggggttctaagagcgaactggtgatcacttgggaaacagtcccagaggagctgcagaacggcaggggttttgggtatgtcgtggcctttcgcccttatggtaaaatgatatggatgctcaccgtgctcgcctccgctgatgctagtagatacgtcttcagaaacgaatctgtgcaccccttctcgccttttgaagtaaaggttggcgtttttaataacaaaggtgaggggccattttcgcctaccactgtagtttattccgcagaggaagaacccacgaagccccccgctagcatcttcgctagatcactgtctgcaacggatattgaggtcttctgggcaagccccctcgagaaaaatcgggggaggattcaaggttacgaggttaaatactggcgccatgaggataaggaagagaatgcaagaaagatcagaacagtgggcaatcagacaagcacaaagatcactaaccttaaaggatctgtcctctatcatttagctgtgaaagcatataatagtgccggtactggtccaagcagtgccactgtcaacgtaaccacacgcaagcctcctccatcccagcctcctggcaatatcatatggaatagcagcgactcaaagatcatcctcaactgggatcaggtgaaagccttggacaatgagtctgaagtcaaagggtataaggtgctctacaggtggaatcgccagagttccacttctgtgatcgaaaccaacaaaacctcggtggaactgtcactacccttcgacgaagattatataatagagatcaagcccttctctgatggaggggatggctcttcatcagagcaaatcaggattcccaaaatcagcaacgcatatgccaggggttcaggcgccagtacaagtaatgcatgtaccctgagtgcaatttctacaatcatgatctccttgacggcccgctcttccctatag

SEQ ID NO: 83026 - DNA, 3081 bp, Artificial Sequence
  derived and/or modified sequence
atgcgcctgccctgggaactcctggttttgcagagctttattctgtgcctggccgacgacagcaccttgcacggccctatctttatacaagagcccagccccgtcatgttccccttggatagcgaggaaaagaaggttaagcttaattgcgaagtgaagggaaatccgaagccacatattagatggaaactaaatggaacggatgtggacacaggcatggactttcgttatagcgtggtggagggctcactcctcattaacaatcctaataaaacacaggacgcaggcacctaccagtgtaccgccaccaatagcttcggtactatcgtttcccgagaggccaaactgcagtttgcctacttggacaacttcaagacacgcaccaggtcaaccgtaagcgtacgccgaggacagggtatggtcctcctgtgcggcccacccccacactccggcgaactgtcatacgcatggatcttcaatgaataccccagctaccaggacaatcggaggtttgtctcccaggagacaggaaacctgtacatcgcaaaagttgaaaaatccgacgtagggaactatacctgcgtggtcaccaacacagtaaccaatcacaaggtcctagggccacccactccactgatcctgagaaatgatggagtgatgggagagtacgagcccaagatcgaggttcagttcccagagacagtccccacagcaaaaggcgccaccgtaaagttggaatgtttcgccctggggaatcctgttcccactattatttggaggcgagccgatgggaagccgatcgcgcgcaaagcccgtcggcataagtcaaacgggattctggagatccccaattttcagcaggaagatgcaggtctgtacgaatgcgtggcagaaaatagccgaggaaaaaatgtggctaggggacagctcacattctacgcccagccgaattggatacagaagatcaatgatatccatgtggccatggaggaaaatgtgttctgggaatgcaaagcaaacgggcggccaaaacccacctataagtggttaaagaatggtgagcccttgttgactcgtgatcggatccagattgaacaagggacactcaacattacaatcgtcaacttgtctgacgcaggcatgtatcagtgcctggctgaaaacaagcacggagttatcttcagtaacgcggagctgagtgtgatcgccgtaggccctgactttagcaggacgttactcaaacgggtgaccctggtgaaggtgggaggcgaagtagttatcgagtgtaaacccaaagcatctccaaagccagtgtatacctggaaaaaaggaagggatatcctcaaggagaatgagaggataaccatctccgaggacggaaatctgagaatcataaacgtcaccaagtctgatgcgggatcttatacctgcattgctaccaatcattttggcaccgcctctagcacaggtaatctagtcgtgaaggatccgacaagggttatggtaccaccaagctcaatggatgtgactgtcggcgagtccattgtcctaccttgccaagtgacccatgaccatagcctggatatcgtcttcacctggtcattcaatggtcatctcattgatttcgatagggacggtgatcactttgaacgagttgggggacaggatagcgcaggggacctgatgatcagaaacattcagctcaagcatgctggaaaatacgtgtgcatggtccagacatctgtagaccgattatctgcagcagcagacctgatcgttaggggcccccccggacccccagaggcagtgaccatagacgagattaccgacacgactgcacagcttagctggaggccagggccagataatcattcccccattacaatgtatgtgattcaggcacgcacccccttctcggtggggtggcaggctgtatccaccgtgcctgaacttatcgacggcaagactttcacagctaccgtggtgggcctgaatccctgggtggaatacgagtttaggactgtggccgccaacgtcatcggcattggcgagccctctagacctagcgagaagaggagaaccgaggaagccctccccgaggttaccccagctaacgtcagtggcggcggaggcagcaaaagcgagctggtgataacctgggaaaccgtcccagaggagttgcaaaacgggagaggctttggctacgtggtggcttttcgcccgtatggcaaaatgatttggatgctgacagtgctcgcctctgcagatgcatctcggtacgtgttcaggaatgaaagtgtgcatccttttagccctttcgaagtaaaggtgggagttttcaacaacaaaggcgagggaccattctcccccactaccgtggtgtactcagctgaagaggagccaaccaaaccccccgcctcgattttcgctcggagccttagtgccaccgatattgaggttttttgggcttcaccccttgagaagaatcgcggtaggattcagggatatgaggtgaagtattggcggcacgaagacaaggaggaaaatgccaggaagataaggactgtcggaaatcagacctctacaaagataacaaatctaaaggggtccgttttatatcatttagccgtgaaagcatacaactctgccggcacagggccatcttcagcaaccgtgaatgtgacaacccggaagcctcccccgtcacaacctcccggaaacattatttggaatagtagtgattcaaaaatcattttgaattgggaccaggttaaagctcttgataacgagtctgaggtgaaggggtacaaagtcctgtaccgctggaacagacaaagtagtaccagtgtgatcgaaactaacaagacctctgtggagttgagcctcccctttgatgaggattacattattgagattaaacctttttcggatggtggagatggctccagcagcgaacaaatcagaatccccaagatctccaatgcctacgctcggggatccggcgcctcaacctccaacgcctgtacactcagcgcaatcagcaccattatgatctccctgacagcgcgtagctcactttag

SEQ ID NO: 83027 - DNA, 3081 bp, Artificial Sequence
  derived and/or modified sequence
atgcgtttgccttgggagctgctagtgttgcagagctttatcctgtgtctagccgacgatagcaccttacacggcccaatctttatccaggaaccaagtcccgttatgttccctctggatagtgaagagaagaaagtgaagctgaattgtgaggtaaagggcaaccccaagccccatattcgctggaagcttaatggcaccgatgtcgatactggaatggacttccgctactcagttgtggagggttcgctgctaattaacaacccaaacaaaacccaagacgcgggaacataccagtgtactgcaaccaactcctttggtacaatcgtatcgcgggaagctaaacttcagttcgcttatctggacaatttcaaaactcgaacaaggtctacggtgagcgttcgaaggggccaaggtatggtgttactctgcggcccgcctccacactccggagagctttcatatgcctggatcttcaatgagtacccatcgtatcaggacaatcgtcgctttgtgtcccaggagaccggaaatctgtatatcgccaaggtcgagaagtctgacgtagggaactacacctgtgtggtgaccaatactgtgactaaccacaaggtcctgggaccgcccacccctcttatacttcgcaatgacggcgttatgggagaatacgagccaaagattgaagtgcagttccctgagactgttcccaccgctaaaggcgccacagttaagcttgaatgttttgctctgggcaacccagtgcccactataatctggaggagagccgatggcaagcctatcgcaaggaaagctaggagacataaaagcaatggcatcctggagatacccaatttccagcaggaagacgccgggctctacgagtgcgtggccgagaattctagggggaaaaatgttgcacgtggtcagctgacattttatgctcagcctaattggatccagaagatcaacgatattcacgttgctatggaggaaaatgtgttctgggagtgtaaggctaatgggcgccccaaacctacttataagtggctcaagaacggcgagcctttgctcacgcgtgatcgaattcagattgagcagggaacattgaatatcacgattgtgaacttaagcgacgccggcatgtaccagtgtttggccgaaaataaacacggcgttattttctccaacgctgaactcagcgttatagccgtgggccctgacttctcccgcaccctgttgaagcgggtgaccctggtcaaggtgggtggggaagtagtcattgagtgcaagcccaaagcctcacctaagccagtgtatacatggaagaaaggccgggacattttgaaagagaacgaaaggatcacaattagcgaggacggcaacttacggataataaatgtcaccaaatcagacgccggtagttacacttgtatcgccacaaatcatttcggcacagcctcttcaactgggaacctcgtggtgaaggatcccactcgcgtcatggtgccgccgtcatcaatggatgtcacggtcggcgagagcatcgtgctaccttgtcaggtgacccatgaccacagtctggatattgtgttcacatggtctttcaatggccacctgattgatttcgaccgtgacggggatcatttcgaaagggtgggcggacaggacagcgctggcgacctcatgatcagaaacatccagctgaaacacgctggtaagtacgtgtgcatggttcagacctctgtcgaccgtttatctgcggcagcagacctcattgtgcgtggcccgcctggcccccctgaagctgtcactattgacgaaatcaccgataccaccgcccagttaagctggcgccccgggcctgataaccactccccgatcacaatgtacgtaatccaggctagaactcctttcagtgtgggatggcaggctgtttcgaccgtgccagagctgattgatgggaagacatttaccgccacagtagtagggctgaatccttgggtcgagtatgagttccgaaccgtggccgcgaatgtcatcggaattggggaacccagcagaccgtctgaaaagaggagaacagaggaagccttacctgaggtcacaccggccaacgtcagtggaggggggggatcaaaaagcgagctggtgattacctgggagacagtgccagaagagttgcaaaacggtaggggattcggctatgttgtggcattccgcccatatgggaagatgatatggatgttgaccgtccttgcctctgccgacgcgagcaggtatgtgtttaggaacgagtcagtgcatcccttctcaccatttgaggtgaaagtgggggtgttcaacaacaagggggaaggcccattctcacctacaactgtcgtctactctgccgaagaagagcctaccaagcctcctgcatctatatttgctcggagccttagcgccactgacatcgaagtgttttgggcatcacctcttgagaagaaccgcggaagaatccaaggatacgaggtaaagtattggcggcacgaggacaaagaagaaaacgcacgcaaaatccgaaccgtaggtaaccagacttcgacaaaaatcacaaaccttaagggtagtgttctctatcatctggctgtgaaggcctacaactcagccggaaccggcccgagctctgccactgtcaacgtgacgacccggaaaccaccgcctagtcaaccacccggaaatatcatttggaatagtagtgactctaaaatcatcctgaattgggaccaggttaaggcactcgacaatgagagcgaggtgaagggctacaaggtgctgtacagatggaatcggcagtctagcacttcagtcattgaaacaaacaaaacttctgtcgaactgtctctaccttttgatgaagattatatcatcgagataaaacctttcagcgatgggggagatgggtcctccagtgagcaaataagaattcccaagattagtaatgcttacgctcgaggcagtggcgcatccacctccaacgcctgtactctgtcggcaattagtactataatgattagtctcaccgctagatcgagtctctag

SEQ ID NO: 83028 - DNA, 3081 bp, Artificial Sequence
  derived and/or modified sequence
atgcgtctgccttgggagctgctggtgctccagtctttcatcctatgccttgccgatgactccacattacatgggccaatctttatacaggagcccagcccagtcatgttccctctggactcggaagagaagaaggttaagctaaactgtgaggtgaaaggcaaccctaaacctcacatcagatggaaactaaacggtacagatgtggatacagggatggatttccggtactccgtcgtggagggcagtctgctgattaataacccaaataaaactcaggacgctggcacttaccaatgtacagccaccaatagcttcggcactattgtgtcaagagaggccaaactgcagttcgcttatctggacaattttaaaaccaggactcggtctaccgtgtcagtgaggcgcggccaggggatggtactattgtgcggacctcctccacattccggcgagctgtcttacgcctggatattcaatgagtacccttcctatcaggataacagacgctttgtttcccaggagacggggaacctgtatattgccaaagttgaaaagtctgatgtgggcaactatacctgcgtcgtaactaatacagtgaccaaccataaagttttgggccccccaacacctctgatcttaaggaacgacggcgtcatgggagagtacgagcctaaaatagaagtccagtttccggagacggttcccacagctaaaggcgccaccgttaagttggagtgttttgcactcggtaatcccgtccccacgattatctggcgtagagcagatgggaagcccatagccaggaaggcaagaagacataagtcaaacggaattctggaaatacccaacttccagcaagaagatgcaggtctctacgagtgtgtggcagagaatagccgtggcaagaacgttgcccgaggacagctgacattctacgcccaacccaactggatacaaaagatcaacgacatacatgtggctatggaggagaacgtgttctgggagtgcaaggctaacgggaggccgaaacccacatacaagtggctgaagaacggcgagccactcctgaccagggaccggattcagatcgaacaggggaccctgaatattacaatcgttaatttatcagatgctggtatgtatcagtgcctggctgaaaacaagcatggcgtgatctttagcaatgccgagttgagtgtgatagccgtgggacctgacttctctaggaccttactaaaacgggtgactctcgtgaaagtcggcggtgaggtggttatcgagtgcaagccaaaggcgagtcccaagccggtgtacacctggaagaagggcagggatattcttaaggagaacgaaaggatcacgatttccgaagacggcaacttgaggattatcaatgtcactaagagcgacgcagggagttatacgtgtattgctacaaatcattttggtacagctagctctaccgggaacctggtggtaaaggaccctacccgggtgatggtcccccccagctccatggacgtaaccgtgggagagtccatcgtcttaccatgtcaagtgacccacgaccactccttagacattgtatttacctggagcttcaatggccatctgattgacttcgatagggacggggatcatttcgagagggtgggcggccaggatagcgctggcgatctgatgatccgcaatattcagctcaagcatgccggaaaatacgtatgcatggttcaaacttcagtggaccgcctgagcgctgccgctgaccttattgtcagaggccccccaggtcccccagaggctgtgaccatcgacgagatcacagataccaccgcccagttgtcatggcgcccagggcccgataaccacagccccattaccatgtacgtgattcaggctagaactccattctctgtcgggtggcaggccgtcagcaccgtgcccgagcttattgatgggaaaacttttaccgcaactgtcgtgggtctgaacccatgggtggaatacgagtttagaaccgtcgcggctaatgtaatcggcatcggcgaaccctctcgaccatcagaaaagcgcaggaccgaagaggccctccccgaagtgaccccggcgaacgtgtcaggcggtggaggaagcaaatccgagttggttatcacctgggagacagttcctgaggaattgcagaacggacgcggttttgggtacgttgtggccttcagaccctacggtaaaatgatctggatgctgacagtgttggcttcagccgacgcaagtagatacgttttccgcaatgagtccgttcatccattttctccattcgaggtgaaggtgggcgtttttaacaataagggggaaggccctttttctccaacaacggtagtgtacagtgccgaagaggagcccacgaagccccctgcatccatcttcgcccggtcactctcagctacagacatcgaggttttttgggcctcaccactggaaaagaaccggggcaggatccagggctatgaggtcaagtactggaggcatgaggataaggaggagaatgcccgcaagattagaaccgtagggaaccagacaagtaccaagattaccaatctgaagggcagcgtcctgtaccacttggcagtaaaagcctacaatagtgcagggactggaccgagctccgcaactgtcaatgttaccacccgaaaacccccaccctcccaaccccctggcaacatcatttggaattcgagtgattcaaagattatcttgaattgggaccaggtgaaggcgctcgataacgaatctgaagtgaagggctataaggtcctgtacaggtggaatcggcagagcagcacaagtgtgattgaaaccaataaaaccagtgtggagcttagcctgccatttgatgaagattacattatcgagataaaaccattcagcgatggtggcgacggatcatccagtgaacagattcgcattcctaaaatctctaatgcctacgctagaggatcgggcgcctcaacatccaatgcctgcactctctctgctataagcacaatcatgatttcactcacagctcggtcaagcttgtag

SEQ ID NO: 83029 - DNA, 165 bp, Artificial Sequence
  derived and/or modified sequence
atgcgcctcccctgggaactgttagtactgcaatcgttcatactctgccttgctgatgattccactctccacggaccgatttttatccaagaaccaagccctgtaatgttccccttagatagtgaggagaaaaaagtgaagttgaattgcgaagttaagggctag

SEQ ID NO: 83030 - DNA, 2424 bp, Artificial Sequence
  derived and/or modified sequence
atgggagaatatgagcccaagattgaggtgcagtttcctgagaccgtgcccacagccaagggggccaccgtgaagctggagtgctttgccctgggcaaccctgtgcccaccatcatctggaggagagcagatggcaagcccatcgccaggaaggcccggcggcacaagagcaatggcatcctggagatccccaacttccagcaggaggatgctggcctgtatgaatgtgtggccgagaacagccggggcaagaatgtggcccggggccagctgaccttctacgcccagcccaactggatccagaagatcaatgacatccacgtggccatggaggagaatgtgttctgggagtgcaaggccaacggccggcccaagcccacctacaagtggctgaagaatggagagcccctgctgacccgggaccgcatccagatcgagcagggcaccctgaacatcaccatcgtgaacctgagtgatgctggcatgtaccagtgcctggccgagaacaagcatggagtcatcttcagcaatgctgagctgtctgtgattgctgtgggccctgacttcagcaggaccctgctgaagagggtgaccctggtgaaggtgggcggggaggtggtgattgagtgcaagcccaaggccagccccaagcctgtgtacacctggaagaagggccgggacatcctgaaggaaaatgaaagaatcaccatcagtgaagatggcaacctgcgcatcatcaacgtgaccaagagtgatgctggcagctacacctgcatcgccaccaaccacttcggcacagccagcagcacaggcaacctggtggtgaaggaccccaccagggtgatggtgccccccagctccatggatgtgacagtgggggagagcatcgtgctgccctgccaggtgacccatgaccacagcctggacatcgtgttcacctggagcttcaacggccacctgattgactttgacagagatggagaccactttgagcgggtgggcggccaggacagcgctggggacctgatgatccggaacatccagctgaagcacgccggcaagtatgtgtgcatggtgcagacctctgtggaccggctgtctgctgctgctgacctgattgtgcggggccccccaggccccccagaggccgtgaccattgatgagatcacagacaccacagcccagctgtcctggaggcctggccctgacaaccacagccccatcaccatgtatgtgatccaggcccggacccccttctctgtgggctggcaggccgtgtccacagtgcctgagctgattgatggcaagaccttcaccgccaccgtggtgggcctgaacccctgggtggagtatgagttcagaacagtggccgccaacgtgattggaattggagagcccagccggcccagcgagaagagaagaacagaggaggccctgcctgaggtgaccccagccaacgtgtctgggggcggcggcagcaagtctgagctggtgatcacctgggagaccgtgcctgaggagctgcagaatggccggggcttcggctacgtggtggccttccggccctacggcaagatgatctggatgctgactgtgctggccagcgcagatgccagccgctacgtgttcagaaatgaatctgtgcaccccttcagcccctttgaggtgaaggtgggcgtcttcaacaacaagggggagggccccttcagccccaccaccgtggtgtacagcgctgaggaggagcccaccaagcccccagccagcatctttgcccggagcctgagcgccacagacatcgaggtgttctgggccagccccctggagaagaacagaggccgcatccagggctatgaggtgaagtactggaggcatgaggacaaggaggagaatgccaggaagatcagaacagtgggcaaccagaccagcaccaagatcaccaacctgaagggctctgtgctgtaccacctggccgtgaaggcctacaacagcgctggcaccggccccagcagcgccaccgtgaatgtgaccaccaggaagcccccacccagccagcccccaggcaacatcatctggaacagcagtgacagcaagatcatcctgaactgggaccaggtgaaggccctggacaatgaaagtgaggtgaagggctacaaggtgctgtaccgctggaaccggcagagcagcaccagcgtcatcgagaccaacaagacctctgtggagctgagcctgccctttgatgaggactacatcatcgagatcaagcccttcagtgatggaggagatggcagcagcagcgagcagatccgcatccccaagatcagcaatgcctatgcccggggcagcggggccagcaccagcaatgcctgcaccctgagcgccatcagcaccatcatgatcagcctgacagcccggagcagcctgtag

SEQ ID NO: 83031 - DNA, 3081 bp, Artificial Sequence
  derived and/or modified sequence
atgaggctgccctgggagctgctggtgctgcagagcttcatcctgtgcctggctgatgacagcaccctgcacggccccatcttcatccaggagcccagccctgtgatgttccccctggacagcgaggagaagaaggtgaagctgaactgtgaggtgaagggcaaccccaagccccacatccgctggaagctgaatggaacagatgtggacaccggcatggacttccgctacagcgtggtggagggcagcctgctgatcaacaaccccaacaagacccaggatgctggcacctaccagtgcacagccaccaacagctttggcaccatcgtgtcccgggaggccaagctgcagtttgcctacctggacaacttcaagaccaggaccaggagcacagtgtctgtgagaagaggccagggcatggtgctgctgtgtggccccccaccccacagcggggagctgtcctatgcctggatcttcaatgagtaccccagctaccaggacaacagaagatttgtgtcccaggagaccggcaacctgtacatcgccaaggtggagaagagtgatgtgggcaactacacctgtgtggtgaccaacacagtgaccaaccacaaggtgctgggcccccccacccccctcatcctgagaaatgatggagtgatgggagaatatgagcccaagattgaggtgcagtttcctgagaccgtgcccacagccaagggggccaccgtgaagctggagtgctttgccctgggcaaccctgtgcccaccatcatctggaggagagcagatggcaagcccatcgccaggaaggcccggcggcacaagagcaatggcatcctggagatccccaacttccagcaggaggatgctggcctgtatgaatgtgtggccgagaacagccggggcaagaatgtggcccggggccagctgaccttctacgcccagcccaactggatccagaagatcaatgacatccacgtggccatggaggagaatgtgttctgggagtgcaaggccaacggccggcccaagcccacctacaagtggctgaagaatggagagcccctgctgacccgggaccgcatccagatcgagcagggcaccctgaacatcaccatcgtgaacctgagtgatgctggcatgtaccagtgcctggccgagaacaagcacggcgtcatcttcagcaatgctgagctgtctgtgattgctgtgggccctgacttcagcaggaccctgctgaagagggtgaccctggtgaaggtgggcggggaggtggtgattgagtgcaagcccaaggccagccccaagcctgtgtacacctggaagaagggccgggacatcctgaaggaaaatgaaagaatcaccatcagtgaagatggcaacctgcgcatcatcaacgtgaccaagagtgatgctggcagctacacctgcatcgccaccaaccactttggaacagccagcagcactggaaacctggtggtgaaggaccccaccagggtgatggtgccccccagctccatggatgtgacagtgggggagagcatcgtgctgccctgccaggtgacccatgaccacagcctggacatcgtgttcacctggagcttcaacggccacctgattgactttgacagagatggagaccactttgagcgggtgggcggccaggacagcgctggggacctgatgatccggaacatccagctgaagcatgctgggaagtatgtgtgcatggtgcagacctctgtggaccggctgtctgctgctgctgacctgattgtgcggggccccccaggccccccagaggccgtgaccattgatgagatcacagacaccacagcccagctgtcctggaggcctggccctgacaaccacagccccatcaccatgtatgtgatccaggcccggacccccttctctgtgggctggcaggccgtgtccacagtgcctgagctgattgatggcaagaccttcaccgccaccgtggtgggcctgaacccctgggtggagtatgagttcagaacagtggccgccaacgtcatcggcatcggggagcccagccggcccagcgagaagagaagaacagaggaggccctgcctgaggtgaccccagccaacgtgtctgggggcggcggcagcaagtctgagctggtgatcacctgggagaccgtgcctgaggagctgcagaatggccggggcttcggctacgtggtggccttccggccctacggcaagatgatctggatgctgactgtgctggccagcgcagatgccagccgctacgtgttcagaaatgaatctgtgcaccccttcagcccctttgaggtgaaggtgggcgtcttcaacaacaagggggagggccccttcagccccaccaccgtggtgtacagcgctgaggaggagcccaccaagcccccagccagcatctttgcccggagcctgagcgccacagacatcgaggtgttctgggccagccccctggagaagaacagaggccgcatccagggctatgaggtgaagtactggaggcatgaggacaaggaggagaatgccaggaagatcagaacagtgggcaaccagaccagcaccaagatcaccaacctgaagggctctgtgctgtaccacctggccgtgaaggcctacaacagcgctggcaccggccccagcagcgccaccgtgaatgtgaccaccaggaagcccccacccagccagcccccaggcaacatcatctggaacagcagtgacagcaagatcatcctgaactgggaccaggtgaaggccctggacaatgaaagtgaggtgaagggctacaaggtgctgtaccgctggaaccggcagagcagcacctctgtgattgagaccaacaagacctctgtggagctgagcctgccctttgatgaggactacatcatcgagatcaagcccttcagtgatggaggagatggcagcagcagcgagcagatccgcatccccaagatcagcaatgcctatgcccggggcagcggggccagcaccagcaatgcctgcaccctgagcgccatcagcaccatcatgatcagcctgacagcccggagcagcctgtag

SEQ ID NO: 83032 - DNA, 165 bp, Artificial Sequence
  derived and/or modified sequence
atgaggctgccctgggagctgctggtgctgcagagcttcatcctgtgcctggctgatgacagcaccctgcacggccccatcttcatccaggagcccagccctgtgatgttccccctggacagcgaggagaagaaggtgaagctgaactgtgaggtgaagggctag

SEQ ID NO: 83033 - DNA, 2424 bp, Artificial Sequence
  derived and/or modified sequence
atgggcgagtacgagcccaagatcgaggtgcagttccccgagaccgtgccgaccgcgaaaggcgccaccgtgaaactggaatgtttcgctcttggaaaccccgtgcctactataatctggcgcagggccgatggaaagccaattgcccgcaaagccaggcggcataaatcaaacggcatcctggagatcccgaatttccagcaagaggatgcaggcctgtatgagtgcgtggccgagaactcacgcggcaaaaacgtagccagggggcagttaacattctatgcacagccaaattggatccagaagatcaacgacattcacgtggcgatggaagagaatgtattctgggagtgtaaggcaaacgggcgccccaagcctacctacaaatggctgaagaatggagaacctctcctcaccagggaccgcatacaaatcgagcagggtactctaaatatcactatcgtaaacctctccgatgcgggcatgtaccagtgtctggcagagaacaagcatggagtcatcttcagtaacgcagagctgagcgtgattgccgtgggaccggatttcagtcgcaccctgcttaagcgcgtgaccctggtgaaggttggcggggaagtggtgatcgagtgtaagccaaaagcctccccgaagcccgtgtacacttggaagaaaggtagggacattcttaaggagaacgaaagaatcactatttcagaagatgggaatctgcggatcataaatgttaccaagagcgacgccggctcttacacatgtatcgccacgaatcattttggcacagcctcttcgactggtaacctggtggtcaaggatccaacgcgcgttatggttccaccatctagcatggatgtgactgtaggtgagtcaattgtgttaccctgtcaggtgacccacgaccattcactggatatcgtctttacatggtcttttaacggtcacttgattgattttgaccgcgacggagaccatttcgagcgagtgggcggacaggacagcgcgggcgatctgatgatccgtaatattcagttgaaacacgccggaaaatacgtgtgcatggtgcagacaagcgtcgatcgccttagtgccgcagctgacttgattgtcagaggtcctcccggaccacctgaggcagttactattgatgaaatcacagacaccaccgctcagctgtcatggaggccgggaccagacaaccactcccctattaccatgtatgtcatccaggccaggacaccttttagtgtcggatggcaagctgtgagcactgtgccagagctgatcgatggaaaaaccttcactgccactgttgtgggcctcaacccatgggtcgaatacgaattccgaaccgttgctgctaacgtgatcggtatcggagagccttcccggccaagcgagaagcgtaggacagaggaagctttacccgaagtcacacctgccaatgtgtctggtggcggaggcagcaaaagtgagctcgtgattacctgggagacagttcctgaagagctgcaaaatgggcgaggtttcggatacgtcgttgctttccggccatatggcaagatgatatggatgctgacagtcctcgcctccgccgacgcttctcggtatgttttcaggaacgagtcggtacatcctttctctccttttgaagtgaaggtcggcgtgttcaataataagggcgaggggcccttttctcctacgacagttgtctatagtgccgaggaggagcctaccaaacctcccgcctctatttttgcccggtcactgtctgccaccgatattgaagtcttttgggcaagccccctagagaaaaatcgtggtcgtattcagggctacgaggtcaagtactggagacatgaggacaaagaggagaatgcccgcaaaattagaactgttggcaatcaaacgagtactaagattactaatctgaagggaagtgtcttataccacttggcagtcaaggcgtacaacagcgcaggaaccgggccatcttctgccactgtaaacgtgaccactcgcaaacctcctcctagccagcctccaggcaatatcatatggaactctagtgactccaaaatcattcttaattgggaccaagtgaaggccttggacaatgaaagtgaggtcaagggctataaggtgctttacagatggaaccggcaatcaagcacctcagtgatcgaaactaacaagacatctgtggaattgagtctgccgtttgatgaggattatattattgagatcaaaccgttctctgacggaggcgatggctctagctcagagcaaatacgcatacccaaaatctcgaacgcctacgctcgcggctctggggcatccacatctaatgcttgcacgctgtcagccatctccactatcatgatctccctgaccgcgcggtcatcattgtag

SEQ ID NO: 83034 - DNA, 3081 bp, Artificial Sequence
  derived and/or modified sequence
atgcggctgccctgggagctgctggtgctgcagagcttcatcctgtgcctggccgacgactctactctccacggaccgattttcattcaggaacctagtccagttatgtttcccctcgattctgaggagaagaaggtgaaacttaattgtgaggtcaaagggaacccaaaaccccacatccggtggaaactcaatggcacagacgtcgataccggcatggactttaggtatagtgtggtcgagggctcgctcctgattaataatcccaacaaaacgcaggatgctggcacgtatcagtgtaccgctactaacagcttcggaacaatcgttagtagagaagccaaattgcagtttgcttatttggataattttaaaacacgcacacgctcaaccgtatccgtcagaagaggacaagggatggtgctgctgtgcggcccaccaccacacagcggggagctgtcctacgcttggatctttaacgaatacccaagttaccaagataatcgccggtttgtctctcaggaaaccggtaacctctacatcgcaaaggtggaaaaatcagacgttggcaactatacttgtgtagtgaccaatacagtcactaatcacaaagtgctaggcccgccgacaccactgattctgagaaacgacggagtaatgggcgagtacgaaccaaagattgaggtgcaattcccagagacggtgccaacagctaagggtgccacagttaagctggagtgttttgcactcggcaatcctgtgccaacgataatctggagacgcgccgatggcaaaccaatagctcggaaggcccgcagacacaaatccaacggaatactagaaattcccaattttcaacaggaagacgccggattgtacgaatgtgtggctgaaaacagccggggcaaaaatgtcgcacggggccagctgaccttctatgcacaacccaattggatccagaagataaacgacatacatgtagcaatggaggagaatgttttctgggaatgtaaggcaaatgggagacccaagcctacctacaaatggctcaagaacggggagccactgctgacccgtgacaggatccagattgaacaaggcacgctgaacattactattgtcaatctgtcagatgccggcatgtaccagtgcctcgctgaaaacaaacacggcgttattttcagcaacgctgaactcagtgttatcgccgtgggacctgatttcagcaggactctgctaaaaagggtcacacttgtcaaggtgggtggagaggtagtcattgaatgcaaacctaaagctagtccaaaaccagtgtacacatggaaaaagggtcgggatatattgaaagaaaacgagcggatcaccatctccgaagatgggaacctgaggatcatcaatgtcactaagtccgacgccggaagttatacttgcattgctaccaatcactttggaacagccagctctaccggcaaccttgtcgtcaaagacccaaccagagtaatggtgccacccagctccatggacgttacagtaggtgagtctattgtcctgccgtgtcaggtgactcacgaccacagccttgatatcgtgttcacatggagcttcaatgggcatctgatcgacttcgacagggatggtgaccattttgagagggtaggtgggcaggatagcgcaggtgacctgatgatccgtaacatacagctgaagcatgccgggaagtacgtttgtatggtgcaaacctctgtggatcggttgtccgcggccgctgaccttatagttcgcggccccccaggaccccctgaggccgtaaccattgatgagatcaccgatactacagcccagctgtcatggagaccaggacccgacaatcacagccctatcacgatgtacgtgattcaggctcggaccccatttagtgtcgggtggcaagctgtgtctacagttccagaactaattgatgggaagacgtttaccgctaccgtggtcggcctcaatccttgggttgaatacgagtttagaactgtggccgctaacgtgataggcataggtgagccaagtcggccttccgaaaaacgacgtaccgaggaggcactccccgaggtgactcccgcaaacgtctctggaggcggaggctcaaaatccgagctggtcattacttgggaaactgtgcctgaggaattacagaatggtaggggctttggctatgtggtggctttcagaccttatggtaagatgatttggatgttgaccgtcctggcctcagcagatgcaagccggtatgtattcagaaatgagagcgtacaccccttttcaccttttgaggtgaaggtgggtgtattcaataataaaggggaaggtccattctccccaaccactgtggtctatagcgcagaggaagagcccacaaagccacccgctagtatatttgcgagatcattgagtgccaccgacattgaagtgttctgggcgagtccactggaaaagaatcgtggacggattcagggttacgaggttaagtactggcgacacgaggacaaggaggaaaatgctcgcaagatacggactgtggggaatcagacttccactaagatcacaaatctaaaggggtctgtgctttaccatctggccgtcaaagcatataattctgccggcactgggccgtcctccgccacggtgaatgtcaccactaggaaacctcccccatcacagccaccaggcaatatcatttggaacagcagtgacagcaaaattatacttaattgggatcaggtgaaagcactcgacaatgaaagcgaggttaaggggtataaagtcctatatcgttggaaccggcagagcagcaccagcgtaattgaaaccaataaaacttccgtggagctgagcctcccatttgatgaggattacattatcgaaatcaaacccttttccgatgggggtgacgggtccagcagcgagcagattagaatcccgaagatctccaatgcctatgctagggggagcggggcatcaacatccaacgcatgtactttgagtgctatttctacaattatgatctctctcactgctcgctcctccctgtag

SEQ ID NO: 83035 - DNA, 3081 bp, Artificial Sequence
  derived and/or modified sequence
atgcggctgccctgggagctgctggtgctgcagagcttcatcctgtgcctcgctgacgactctactctgcacgggcctatctttatccaagaacctagtccggtcatgtttccattagacagcgaagaaaaaaaggtcaagctaaattgcgaagtgaagggtaaccctaagccccatattcggtggaagctgaacgggactgacgtggacacagggatggattttaggtatagtgtagtggagggatccctgctgatcaataacccaaataaaacccaggatgcgggcacctaccagtgcactgcaacaaactcattcggaaccattgtgtccagggaagctaaacttcagttcgcctaccttgacaacttcaagacgcgtacccgctctaccgtttccgtgcggaggggacaagggatggttcttttgtgtggccccccaccacacagcggagaactcagttacgcctggatcttcaacgaatatccatcatatcaggacaaccgaaggtttgtgagccaggagacgggaaacctgtatatcgctaaggtggaaaagagcgacgttggcaactacacctgcgttgtaaccaacacagtcactaatcacaaagtactgggacccccaacacctctgattttgcgcaacgacggtgtcatgggcgagtatgaacctaagatcgaggttcagttccccgagacagtaccaactgctaaaggcgccactgtgaagctggaatgctttgccctgggaaacccagtcccgaccatcatctggagacgggccgatggcaaaccaatcgcccgcaaggctaggagacacaagtcgaacggaattctcgagatcccaaactttcagcaagaagatgcagggctgtacgagtgcgttgcagaaaattccagaggaaaaaatgtggccagaggccagcttacattctacgcccagcccaattggatccagaagataaatgacatacacgttgcaatggaggagaatgttttttgggagtgcaaagctaacggacggccgaaacccacctacaaatggctgaagaacggcgagccactgctcacccgtgatcggattcagatcgagcaggggacgctgaacataaccatcgtgaatttgtccgatgcaggaatgtatcagtgtctggccgagaacaagcacggagtgattttctctaacgccgagctatccgttatcgccgtgggacccgatttctccagaaccctccttaagagggtaaccctggtgaaagtgggaggtgaggttgtgatcgaatgcaagccaaaagcctcccccaaaccagtgtacacatggaagaagggcagagacattctgaaggaaaacgaaaggatcaccatttctgaggacggcaacctgcggattatcaatgtcactaagtcagacgccgggagttacacctgcatagcaacgaatcacttcgggactgcgagcagtaccggcaaccttgtggtgaaggatcccacccgcgtgatggtgccacctagctcaatggatgtgactgtgggcgaaagtatagtcctgccgtgtcaggtgactcacgaccactcccttgatatcgtgttcacatggagttttaatggacacttaattgactttgatagagacggagatcactttgagcgggtgggtggccaggattccgcaggagaccttatgattcgcaatatccagttaaaacacgctggaaaatacgtttgcatggtacagacctccgtcgatagactgtccgctgctgccgatctgattgttcggggcccccctggtccccccgaggcggtcacaatagacgagatcactgacactacagctcagctcagctggagacccggccccgacaatcacagcccaatcaccatgtacgtgatacaggcccgtacacccttctctgttggatggcaagctgtgagcacggtgcctgaattgattgatgggaagacctttacggcgactgtggtgggtctgaacccgtgggtagagtatgagttcagaaccgtggcagccaatgtgatagggattggggaaccttcccgtccctcagagaagcgccgcacagaagaagctttacccgaggtgacacccgccaacgtatcaggcgggggggggtccaagtccgagctcgtgattacctgggaaactgtacccgaggagctacaaaatggacggggtttcggctatgttgtcgctttcagaccatacgggaaaatgatatggatgctgactgttctcgctagcgccgatgctagccggtatgtgttccgtaacgagagtgtgcacccattcagtccctttgaggttaaagtcggagtatttaataataagggggaaggaccattctcccctacaactgtggtatactccgccgaggaagagcccaccaagccacccgcttccatttttgcccggagtctctctgctactgacatcgaggtcttctgggcctcaccgctcgagaagaaccggggacgaattcagggttacgaagtgaagtactggcgacatgaggacaaagaagaaaatgcgcgcaaaataagaacagtaggcaatcagactagtaccaagatcacaaatctgaaaggctctgtgctgtaccatctggctgtgaaggcttacaacagcgcagggacaggcccttcttctgccactgtcaacgtaaccacccgcaagccacctccgtctcagcccccaggcaatattatttggaactcaagtgattctaaaattatcctgaattgggaccaggttaaggctctcgacaatgaaagcgaagtcaagggctacaaggtgctataccgctggaataggcagtcatcgacttccgtaattgaaacaaataaaacaagtgtggagctgtccctgccatttgatgaggactatattatcgagatcaagccgttctcggatggcggggacgggtcttccagcgagcaaatcagaataccaaagatcagcaatgcgtacgcccggggcagtggcgcctcaacgtccaatgcctgtactcttagtgccatcagtaccattatgatctccctaaccgctcgaagctccctgtag

SEQ ID NO: 83036 - DNA, 3081 bp, Artificial Sequence
  derived and/or modified sequence
atgcggctgccctgggagctgctggtgctgcagagcttcatcctgtgtttggcagatgattccacccttcacggtcctatatttatccaggagccctccccagtgatgtttccactggactctgaggaaaagaaagtgaagcttaactgcgaagtgaagggaaacccaaagcctcacattagatggaagttaaatggaacagacgttgacaccggcatggacttcagatacagcgtagtggagggaagcctgcttattaacaatccgaacaagacacaggacgcagggacgtaccagtgtacggccaccaattcgttcggcacgatcgttagtcgcgaggccaagctgcaattcgcttacttggacaattttaaaacccgaactcggtccaccgtctctgttagaaggggccaaggaatggtgctactgtgtggtccacccccccattctggggaactgtcatatgcttggatatttaacgagtacccctcctaccaggataaccgacggtttgtctctcaggagaccggaaatttgtacattgctaaggtcgaaaagtctgatgtgggcaattacacatgcgttgtaaccaataccgttacgaatcataaagtgctgggtccgcccacacctcttatcctgcgcaatgacggcgtgatgggggagtacgaacccaaaatcgaagtccagtttcctgagacagtccctaccgccaagggagccaccgttaaattagagtgctttgccctgggaaatcccgtcccgaccattatctggcgaagggccgacggcaaacctatcgcacgcaaggccaggcgtcacaagtcaaacggcatccttgagatccccaacttccaacaggaagacgctggcttgtacgaatgcgttgccgagaactctcgaggaaaaaacgtggcgaggggacaattgaccttttacgctcagccgaactggatccagaaaatcaatgatattcacgtcgccatggaggagaatgtcttctgggagtgcaaggctaacgggcgccccaaacctacatacaagtggcttaaaaatggggagccgctcctgacaagggacaggatccaaatcgagcaagggacgcttaatatcacaatagtgaacttgtcggacgccggaatgtatcagtgcctggccgagaataagcatggggtgattttctccaatgccgagcttagtgtgattgccgtggggcctgacttctcgcgcaccttgctcaagcgcgttaccctggtgaaggtagggggcgaggtcgtgattgagtgcaagccaaaggcttccccaaagccggtctatacttggaaaaaggggagggacattttgaaggagaacgagcgaatcactatatccgaggatggcaatctaaggatcatcaatgtaaccaaaagcgatgcagggagttacacgtgtatcgcaactaaccattttggtaccgcctcctccacaggcaatttagtagtgaaggacccgacgagggtaatggtgccgccatcaagtatggacgttactgtcggcgagagtatcgtactgccctgccaggttacacacgatcactcccttgatatcgtctttacctggagtttcaatggccacctcatcgattttgatcgagacggggatcactttgagcgggtaggcggtcaggacagtgctggcgatttaatgatacgaaacattcagcttaagcatgctgggaagtacgtgtgcatggtacaaacaagcgtcgacagattatccgcggcggctgacctcattgtgagggggccaccagggccaccagaagcggtgacaattgatgagatcaccgatacaaccgcccagctgtcatggcgccccggaccggacaaccacagcccaattacaatgtacgtcattcaggctagaactcctttctccgttggctggcaggctgtttctaccgttccggaactcattgatggtaagacgtttacagccacagtcgtgggactcaacccttgggtggaatacgaattccggacagttgccgccaacgtgattggcatcggcgagccttcccggcccagcgagaagaggcggaccgaggaggccctacccgaggttacacccgccaacgtgtcaggcggtggaggatcaaaaagcgagttggttatcacctgggaaacagtgccagaggaactccagaatgggagagggttcggttacgtcgtcgctttcaggccttacgggaaaatgatttggatgctcaccgtcctggccagcgcagatgcctctcgttatgtctttagaaacgaatctgtgcatccctttagccctttcgaggttaaagtcggtgttttcaacaacaaaggagaaggtcccttctccccaacgacagtagtttacagtgcggaggaggagccaacaaagccaccagctagtatttttgctaggagtcttagcgcaacagatatcgaggttttttgggcgtctccactggagaagaatcgtggcaggatccaaggctacgaggtcaaatattggagacatgaagacaaggaggagaatgcaagaaaaataaggacagtgggcaaccagacctcaacaaaaataacgaatctcaagggctctgtgttgtatcatctggccgtcaaggcttataactcggcgggtacaggaccaagctctgctaccgtgaatgtgactacccggaaacccccaccctcccaacccccggggaatattatctggaactccagtgattccaagatcattctgaattgggaccaggtgaaggcacttgacaacgaatccgaggtaaaaggttataaggtgctctaccgttggaatcgacaaagcagcacgtcggtgattgaaacaaataagacaagtgttgagcttagtctgcctttcgatgaggactacatcattgaaattaagccattttcagatgggggggatggctccagctccgaacagattcggattcccaaaatctctaatgcttacgctagaggttcaggcgcctctacctctaatgcctgcactctatctgcaatcagcaccataatgatttctctcaccgcccgttcaagtctgtag

SEQ ID NO: 83037 - DNA, 165 bp, Artificial Sequence
  derived and/or modified sequence
atgcggctgccctgggagctgctggtgctgcagagcttcatcctgtgtctggccgacgactcaacactacacggacccatcttcatccaggagcccagtcccgttatgtttcccttggattctgaagagaagaaagtaaaacttaactgcgaggttaaaggttag

SEQ ID NO: 83038 - DNA, 2424 bp, Artificial Sequence
  derived and/or modified sequence
atgggagagtatgagcctaagattgaagtgcagttcccagagacagtcccaaccgccaagggagctaccgtaaaactggagtgtttcgcactaggcaaccccgttcctaccatcatttggcgcagagctgatgggaagccgattgccaggaaagctcggagacataaatccaacggcattttggaaatccctaatttccaacaggaggacgcagggctttatgagtgtgtagcggagaatagtcgaggtaaaaatgtcgcccgaggtcagctgactttctatgcccagcctaactggatacaaaaaataaacgatatccacgtggccatggaggagaatgtgttctgggagtgcaaggccaacggtcggcctaagcctacttacaagtggctcaaaaacggcgagcccctactcactcgggatcgaattcagatagagcagggtaccctcaatatcactattgtgaatctgtcggacgcaggtatgtaccagtgtctggccgaaaataagcacggggtcattttcagcaatgcggaactgtccgtgattgccgtcggccctgatttttcccgaacactactcaaacgggtcactctggtcaaggtgggaggcgaagtggttatcgaatgcaaacctaaggcttcccccaagcccgtttatacatggaagaaaggacgcgatatcttaaaggagaatgagagaataacgatttccgaggacggcaacttaagaatcattaatgtgaccaaatctgacgccggtagctacacgtgtatagcgacaaatcactttggaactgcaagcagcacaggcaacctggtggtaaaagatccaacgcgggtaatggtgcctccatcaagtatggatgttaccgtaggggaatcgatcgtgctcccatgtcaggtgacgcacgaccattccctggacatcgtctttacctggtcttttaacggacacttgatcgactttgatcgtgatggtgaccactttgaacgagtaggagggcaggattctgccggtgacctgatgattagaaatatccagctgaagcatgcagggaagtatgtctgcatggtccagaccagtgttgatcgtctgtccgctgcagccgacctgatagtgagaggccctcccggaccgccagaagctgtgactatcgatgaaataaccgacacaacggctcaattatcctggcgcccaggcccagacaatcatagtccgataaccatgtatgtcattcaggctcggaccccattctccgtaggatggcaggctgtgagtacagttccagaactcatagatggcaagacctttactgccaccgtggtgggcctcaacccatgggttgaatacgagtttaggacagttgcagccaacgtaataggcatcggagagcccagtcggccatcagagaaacgacgcacagaggaagcactgcctgaggtcactcccgctaacgtttccggagggggtggctcgaagtcagagctggtgattacttgggagacagtgcctgaggagctccaaaatggtagggggttcggctatgtggtggccttccgcccatacgggaagatgatctggatgctgactgtgttagcctcggccgatgcttcccgctacgtgtttcgtaatgaatccgtccaccctttcagtccattcgaggtgaaggttggcgtgtttaataataaaggtgaaggacctttttcccccacgactgtggtgtacagtgctgaagaggagcccacaaagcctccggcaagtatctttgccaggtccctgtcggccaccgatatcgaagtattttgggccagccctctagaaaaaaaccgcggacggatccagggctatgaagtgaagtactggcgccatgaggacaaagaagagaatgccagaaaaattcggacagtggggaaccaaaccagcactaagattacaaacttgaagggatccgttctttaccatctagccgtgaaggcctacaacagcgcgggtacaggaccttcatctgccacggtcaacgtgaccactcgtaaacctcctcctagccaaccaccgggaaatattatttggaattcctcagattccaaaattatcttgaattgggaccaggtcaaggctttggataatgaaagcgaagtgaagggatataaggtgctctaccgctggaaccgtcagtcttctacctcagtcatcgaaactaacaagacaagcgtggaacttagcctaccttttgatgaggattatatcattgagattaagccattcagtgacggaggggacgggtcctcgtctgagcagatcaggataccaaaaatttcaaatgcttacgccaggggtagcggagcctctacctccaacgcctgtacactctctgcgataagtactattatgatcagccttacagcccgtagctcgctgtag

SEQ ID NO: 83039 - DNA, 3081 bp, Artificial Sequence
  derived and/or modified sequence
atgcgcctaccttgggagctgctggtgcttcagtctttcattttatgcctcgcagacgactccactctccacggacctatattcatacaagaaccttcaccagtaatgtttcctctggactcagaggagaagaaggtgaagttgaactgtgaggttaaggggaacccaaaacctcacataagatggaagttgaatggcaccgacgtggacaccggcatggactttcggtattccgtagtggaaggctccctgcttattaataatcccaataagacacaggacgctggcacataccaatgtaccgccaccaattctttcggaacaatcgtgagcagggaagcaaagttgcagttcgcttacctggacaacttcaaaacaaggacgcggtccactgtgtcagtgcgacgaggccagggcatggttcttttgtgcggtccccctccacattcaggcgagctgtcctatgcctggattttcaacgaatatccatcctaccaagataatcgccgtttcgtcagtcaagagactggtaatctgtacattgccaaagtggagaaatcagacgtgggaaattacacatgcgtggtgacaaataccgtcacaaaccacaaagtattgggaccacctaccccactgattctgcggaatgatggcgtcatgggtgaatatgagcccaaaatcgaagtgcagttccccgagaccgtgccgacggccaagggtgccacggtcaaattggaatgtttcgctctgggcaaccccgtgccgaccattatatggcgcagggcggacggtaagcctattgcacgcaaggctcgccgacacaaatccaatgggattctggaaatacccaatttccagcaggaggacgccggattatacgagtgcgtggccgaaaattctcgtggcaaaaatgttgcacgaggacagctaaccttctatgcgcagcccaactggatccaaaaaattaacgatatccacgtggcaatggaggaaaacgttttttgggaatgtaaggctaacggacgccctaaaccaacatataaatggttgaagaatggcgagcccctcctcacgcgggatagaatacaaatcgaacaaggcactctgaatataaccatcgtcaacctttctgatgcaggcatgtaccagtgcctcgccgaaaacaaacacggggttattttcagtaacgccgaacttagcgtcatagcggtgggacccgacttcagccggaccctcctcaagcgagtgactctggtcaaagtgggaggagaggtggtgatcgaatgtaagccaaaggccagccccaagcctgtctacacgtggaagaaaggccgtgacattcttaaagaaaacgaaagaatcacgatatcagaggacggcaacctcaggattattaatgtaactaaatccgatgctggttcctacacatgcatcgctactaaccactttgggaccgcctcaagcactggaaacctggttgtgaaggatcccactcgcgtgatggtccctcctagctccatggatgtaacggttggcgagtccattgtgctgccctgtcaagttactcacgatcattcactcgacatagttttcacttggagttttaacggccacctgatcgattttgaccgagacggcgatcacttcgaaagggtcgggggacaggactcagcgggtgatctaatgatccgcaacatacagttaaaacacgccggaaagtatgtctgcatggtccaaactagcgtggatcggctgtccgccgcagccgatcttatcgtccgtggtccacccggtcctccagaagccgtcacaatcgatgaaatcacagacacaacagcccagctatcttggcgccctgggccagacaatcacagccctatcaccatgtatgtgatacaggccagaacacccttctctgtaggctggcaggcggtttccactgtcccggagttgatcgacggaaagacctttaccgcaacagtggtcgggctcaacccctgggtggagtatgagttccgcaccgtggcagcgaatgtgatcggaattggtgaaccatcgagaccaagcgagaaacggagaacagaggaagctctgcctgaggtcacgccagccaacgtgtccggcggaggagggtcaaaatcagaactagtgatcacatgggagaccgtacccgaggaattacagaacggtcggggattcggttacgtggtcgcattccgcccatacgggaaaatgatttggatgctgactgtcctcgcatctgcggacgcttcccggtacgtgtttcgcaatgagtctgtacaccctttttcccccttcgaggtgaaagtaggagtgttcaacaataagggagagggacctttctcccctacgactgtggtctactctgccgaggaagagccgaccaaaccgccagcctccatttttgcaagaagtttgagcgctacggatattgaggtgttttgggcctcgccgttggagaagaacagaggaagaatccagggctacgaggtgaaatactggagacatgaggataaggaggaaaatgctcgtaaaattcgcacggtgggaaaccagacaagcactaagataacgaacctgaaggggtccgtcctgtaccacctagccgtgaaagcctataattccgccggtactggacccagctctgccaccgtgaacgtcactactaggaagcctccaccatctcagccccctgggaacataatctggaattcctccgattctaaaataatcctaaactgggatcaggtgaaggccctggacaacgaaagcgaggtaaaggggtacaaagttctttatcggtggaatcgtcagtcttccactagcgtgatagagacaaacaagacaagtgtggaactgagcctgccctttgatgaggattacatcatagagatcaaaccgttctctgacggtggagatggcagcagctcagagcaaatccggatcccgaagatcagcaatgcctacgcccgaggctccggtgccagtacttccaacgcttgcacactatccgctatttcaactatcatgataagcctgacggcccgaagttccctgtag

SEQ ID NO: 83040 - DNA, 3081 bp, Artificial Sequence
  derived and/or modified sequence
atgaggctgccctgggagctgctggttcttcagtcattcattttatgtctggccgatgacagtacattgcacggacctattttcatccaggagccgtcccccgtaatgtttcccttggatagcgaagagaagaaggtgaaactgaactgtgaggtcaaaggtaacccgaagccccatattagatggaaattaaatggcaccgatgtagacacgggaatggatttcaggtactcagtagtggagggcagtctcctaataaataaccccaacaaaacccaggatgctggcacttaccaatgtaccgctactaacagttttggaaccatcgtctctcgagaagctaaactccagttcgcctatcttgacaattttaagacacgtactagaagcaccgtgtcagtgcgccgtggccaggggatggtcctactgtgcggacctcctccacacagcggggagctctcctatgcgtggatcttcaacgagtacccttcgtaccaggacaatcgacggttcgtgagtcaggagactggtaacctgtacatcgcaaaagtcgaaaaaagcgatgtcggcaattacacctgcgtcgtcactaatacggttaccaaccataaggtactcggaccacccacacctctgatcttgcgtaatgacggggtgatgggtgaatacgagccaaagattgaagtgcagtttccagagacagtgcccaccgccaagggcgcaactgtcaagctggaatgttttgcccttggcaacccagtgcccactataatttggagacgagccgatggcaagccaatagcaaggaaagcacgcagacacaagtccaatggcattcttgaaatcccgaactttcagcaggaggacgctggactctatgagtgtgtggctgagaattctagaggcaagaacgtggccaggggtcagctgaccttttatgcacagcccaactggattcaaaagatcaatgatatccacgtggcgatggaggaaaatgtgttctgggagtgtaaggctaatgggcgaccaaaaccaacctataagtggctgaaaaacggagaaccccttttaacacgggatcggattcagattgagcaaggaacgctaaacattactattgtcaacctctccgacgccggaatgtaccagtgtctcgcggaaaacaagcacggagtaatattcagtaatgcggagctcagcgttatcgcggtggggcctgattttagccgtaccttattgaagcgcgtgactctggttaaggtgggaggggaagttgtgattgagtgcaagcctaaggcttcccctaagcctgtgtacacctggaaaaaaggtcgggacattctgaaggaaaacgaaagaatcaccatttcagaagacgggaaccttagaattataaatgtgaccaaatccgatgcaggctcgtatacttgcattgccaccaatcatttcggtactgcaagcagcaccggcaacctggtggtcaaagaccccacgagggtcatggtcccaccaagctctatggacgtgaccgtcggagagagcattgtgctgccatgccaggttacccatgatcactccctcgatattgtgttcacctggtcgtttaatgggcatctcatcgatttcgaccgagacggggaccattttgagcgcgtgggcggtcaggactcggctggcgatctgatgattaggaacattcagctgaaacacgctggtaagtatgtttgcatggtgcagacttctgttgataggctgtcagctgccgctgacctaatagtacgcggacccccagggccaccggaggccgttaccattgatgagattaccgacacaactgcacagttatcctggcgccctgggccagataatcattcccccataaccatgtatgttattcaagctaggaccccattctccgtgggctggcaggccgtgtcgactgtgcccgagctcattgatggcaagacctttacagctactgtggtgggcctgaatccatgggtggagtacgagtttcgaacagtggcggcaaacgtgattggcattggtgaaccttctaggccttccgagaagagacgcacagaggaagcactgcccgaggtcacacccgctaacgtgtcagggggagggggttctaagagtgagctggtgatcacatgggagaccgtgccggaagaactgcaaaacggtagagggttcggctatgtcgtggcctttcgaccatacgggaaaatgatttggatgttaaccgttctggcgtcagccgatgcctccagatatgtttttcggaatgaatctgtgcatccattctctcctttcgaggttaaggtgggtgttttcaacaacaaaggcgaaggcccattctccccaaccaccgtcgtctactcagccgaagaggagccgaccaaacccccagcctccatatttgccaggagtctaagtgccactgacatcgaggtcttctgggcgtccccgctggagaagaatagggggcgtatccagggctatgaggttaaatactggcgacatgaagataaggaggaaaacgcgcgaaagatacggacggttgggaatcaaactagcaccaagatcaccaacctcaaagggtcagtgctgtatcacctggccgtgaaggcatacaactctgctggcacaggcccttcttccgctaccgtcaatgtgactacaaggaagcctcctccatcccagcctcctggcaatatcatctggaactcctcagattctaagattatcctcaattgggaccaggtgaaagccctcgacaacgaatcagaagtcaaaggatataaggtgttgtatcgctggaatagacagtctagcacttcggtgatcgagaccaacaagacttccgtcgagctatccctgccctttgatgaagattatattatcgagatcaagcccttctccgacggcggagatgggtcctcctccgagcaaattcgaattccaaagataagtaacgcctatgcaagaggcagtggcgcaagtactagcaatgcttgcacccttagcgccatatccactattatgatctctctgaccgcaagaagctcgctctag

SEQ ID NO: 83041 - DNA, 3081 bp, Artificial Sequence
  derived and/or modified sequence
atgaggctgccctgggaactccttgtgcttcagtctttcattctatgcctcgccgacgattccactctgcacggtccgatcttcatccaggagccttctcctgtgatgtttccgctggattccgaggaaaagaaggtcaagctaaactgtgaggtcaagggcaaccccaaacctcatataagatggaaactgaatggtaccgatgtggacaccggtatggattttcgatatagcgtcgtagaaggcagtctcttaatcaataaccccaataaaacacaggatgctggaacctaccagtgcaccgccacaaattccttcgggactatcgtctcaagagaggcgaaactgcagttcgcatatctggacaactttaaaaccaggacccggagcaccgtgagcgtcaggcggggacagggcatggttctattgtgtggcccaccgcctcacagcggtgagctcagctatgcttggatattcaacgagtaccctagttatcaggataatagacgctttgtgtcccaggagactggcaatctgtacatcgcgaaggtagagaagtctgacgtaggcaattacacctgtgtggtgacgaatacggtgacgaatcataaggtacttgggccaccgacacctctcatactgaggaacgatggtgtgatgggcgagtacgagccaaagatcgaggtccagtttcctgagactgtccctaccgcaaaaggagccaccgtcaagctggagtgtttcgccctgggaaacccagtgccaactataatctggcgcagggccgatggaaagccaattgctcgtaaagcgaggcgccataaatcaaatggaatcttggaaattccaaattttcagcaggaggacgcaggtctctatgaatgcgtcgccgagaattcccgaggaaagaacgttgctagaggacagctgacattctacgcccagcccaactggatccaaaaaattaatgatatccacgttgccatggaagagaatgtattctgggagtgtaaggctaatggcagaccaaagccaacttacaagtggctgaagaacggggagccgctattgactcgcgaccgaatccagatcgagcaggggaccctgaatattactatcgtcaacctgagcgatgcaggcatgtaccaatgtctggcagaaaacaaacacggggtcatattcagcaatgcggagctgtcggtgattgcggtggggccagattttagccggacactgttgaagcgggtcaccctggtgaaggtgggaggggaagtcgtcattgagtgtaaaccgaaagccagccccaagcctgtatacacgtggaagaaggggagagacatccttaaagagaacgaaagaattacaataagcgaggatggcaacttgcgcatcatcaatgtcactaaatccgatgccggtagctacacatgcattgcaacaaaccactttggcacagcaagttccaccggcaacctggtcgttaaagacccaaccagggtgatggtccccccatccagcatggatgtcaccgtgggcgagtctatcgtgcttccatgccaggtcacacatgatcacagcctcgatattgtgttcacctggtcgtttaacggacacctgatagacttcgatcgcgatggagatcacttcgagagggtcgggggacaggattctgcaggcgatctcatgattagaaacatccagcttaagcacgctggtaaatacgtatgcatggtccagactagcgtggacagactcagcgccgctgctgatctcattgtccgcggtccgcctggtccacccgaagcggtcactattgacgagataacagatacaacagcccaattatcttggcggcctggcccagataatcactcgcctataacgatgtacgtgatccaggcacgtactccctttagtgtcggatggcaagctgtgagtacagttcctgaactgattgacggtaaaacctttacagctacagttgtgggcctcaatccttgggtggagtacgaattccgtacagtagccgcaaacgttatcggcatcggtgaaccttcgcgtccctccgaaaaaaggagaacggaggaggcactcccagaagttacacctgcaaatgtctctgggggaggcggatcgaaaagcgagcttgtcattacctgggagactgtccccgaggagctgcagaatggtcgcggttttggttacgtggtagctttccgtccttacgggaagatgatatggatgctgactgttctggccagtgccgatgctagtaggtacgtctttcgaaatgaaagcgtacatcctttctcaccctttgaagtgaaggtgggagtttttaacaataagggtgagggccctttcagtcctactacggtcgtttacagcgccgaggaggagcctaccaagccaccagctagcatctttgctcggtccctgtcagccacagatattgaggtattttgggctagccccctcgaaaaaaatcgtggacgaatacagggttatgaggtaaaatactggcgacatgaagacaaggaggaaaatgcgcgaaagatccgtacggttggaaatcagacctccaccaagattactaacttgaaggggtctgttctgtaccatctcgccgtgaaggcgtataattctgcaggtaccggaccgtcatcagctactgtgaacgtgaccaccagaaaaccaccaccctcccagccacccggaaatattatctggaactccagtgattctaaaattatactgaattgggaccaggtaaaagcattagacaatgagtctgaggtgaaggggtataaagtgctgtacaggtggaatcgtcagtcaagtacgagcgtcatcgagacaaacaaaacctctgtagagttgtctctacccttcgacgaagactatattatagagatcaagccgttcagtgatgggggtgacggtagctcctctgagcagattcggatccctaaaatctcaaatgcatatgctaggggatcaggagcctctacaagcaacgcgtgcacactgagcgctataagcaccattatgatctcattaaccgcccgaagcagcctttag

SEQ ID NO: 83042 - DNA, 165 bp, Artificial Sequence
  derived and/or modified sequence
atgagactgccttgggaactgctggtcctccagtcttttattctttgtctagctgacgactccacgttgcatgggcctatcttcatccaggaaccatcccctgtgatgtttcctttagattctgaggaaaaaaaggtgaagctgaattgcgaggtgaaaggatag

SEQ ID NO: 83043 - DNA, 2846 bp, Artificial Sequence
  derived and/or modified sequence
aatttgagcattactcaatacatgttacatagtgcctgacacctgattagcaaactataaatgcttagcccttgacttaaagagagctgagttatgcctggatcttcaatgaatacccttcctatcaggataatcgccgctttgtttctcaagagactgggaatctgtatattgccaaagtagaaaaatcagatgttgggaattatacctgtgtggttaccaataccgtgacaaaccacaaggtcctggggccacctacaccactaatattgagaaatgatggagtgatgggtgaatatgagcccaaaatagaagtgcagttcccagaaacagttccgactgcaaaaggagcaacggtgaagctggaatgctttgctttaggaaatccagtaccaactattatctggcgaagagctgatggaaagccaatagcaaggaaagccagaagacacaagtcaaatggaattcttgagatccctaattttcagcaggaggatgctggtttatatgaatgtgtagctgaaaattccagagggaaaaatgtagcaaggggacagctaactttctatgctcaacctaattggattcaaaaaataaatgatattcacgtggccatggaagaaaatgtcttttgggaatgtaaagcaaatggaaggcctaagcctacatacaagtggctaaaaaatggcgaacctctgctaactcgggatagaattcaaattgagcaaggaacactcaacataacaatagtgaacctctcagatgctggcatgtatcagtgtttggcagagaataaacatggagttatcttttccaacgcagagcttagtgttatagctgtaggtccagatttttcaagaacactcttgaaaagagtaactcttgtcaaagtgggaggtgaagttgtcattgagtgtaagccaaaagcgtctccaaaacctgtttacacctggaagaaaggaagggatatattaaaagaaaatgaaagaattaccatttctgaagatggaaacctcagaatcatcaacgttactaaatcagacgctgggagttatacctgtatagccactaaccattttggaactgctagcagtactggaaacttggtagtgaaagatccaacaagggtaatggtacccccttccagtatggatgtcactgttggagagagtattgttttaccgtgccaggtaacgcatgatcactcgctagacatcgtgtttacttggtcatttaatggacacctgatagactttgacagagatggggaccactttgaaagagttggagggcaggattcagctggtgatttgatgatccgaaacatccaactgaagcatgctgggaaatatgtctgcatggtccaaacaagtgtggacaggctatctgctgctgcagacctgattgtaagaggtcctccaggtcccccagaggctgtgacaatagacgaaatcacagataccactgctcagctctcctggagacccgggcctgacaaccacagccccatcaccatgtatgtcattcaagccaggactccattctccgtgggctggcaagcagtcagtacagtcccagaactcattgatgggaagacattcacagcgaccgtggtgggtttgaacccttgggttgaatatgaattccgcacagttgcagccaacgtgattgggattggggagcccagccgcccctcagagaaacggagaacagaagaagctctccccgaagtcacaccagcgaatgtcagtggtggcggaggcagcaaatctgaactggttataacctgggagacggtccctgaggaattacagaatggtcgaggctttggttatgtggtggccttccggccctacggtaaaatgatctggatgctgacagtgctggcctcagctgatgcctctagatacgtgttcaggaatgagagcgtgcaccccttctctccctttgaggttaaagtaggtgtcttcaacaacaaaggagaaggccctttcagtcccaccacggtggtgtattctgcagaagaagaacccaccaaaccaccagccagtatctttgccagaagtctttctgccacagatattgaagttttctgggcctccccactggagaagaatagaggacgaatacaaggttatgaggttaaatattggagacatgaagacaaagaagaaaatgctagaaaaatacgaacagttggaaatcagacatcaacaaaaatcacgaacttaaaaggcagtgtgctgtatcacttagctgtcaaggcatataattctgctgggacaggcccctctagtgcaacagtcaatgtgacaacccgaaagccaccaccaagtcaaccccccggaaacatcatatggaattcatcagactccaaaattatcctgaattgggatcaagtgaaggccctggataatgagtcggaagtaaaaggatacaaagtcttgtacagatggaacagacaaagcagcacatctgtcattgaaacaaataaaacatcggtggagctttctttgcctttcgatgaagattatataatagaaattaagccattcagcgacggaggagatggcagcagcagtgaacaaattcgaattccaaagatatcaaatgcctacgcgagaggatctggggcttccacttcgaatgcatgtacgctgtcagccatcagtacaataatgatttccctcacagctaggtccagtttatgacaaaagttatctgaaggacttgctgtttataatataagcaacatttagctagttgttttgaagacacccagtactaagtaatattgttgttcaagtacatcttattactggaataaaaatgttttttgcttcttt

SEQ ID NO: 83044 - DNA, 2322 bp, Artificial Sequence
  derived and/or modified sequence
gttctatgttcccagtgggaacataccagatggaggctttgatttgctcaacctaattggattcaaaaaataaatgatattcacgtggccatggaagaaaatgtcttttgggaatgtaaagcaaatggaaggcctaagcctacatacaagtggctaaaaaatggcgaacctctgctaactcgggatagaattcaaattgagcaaggaacactcaacataacaatagtgaacctctcagatgctggcatgtatcagtgtttggcagagaataaacatggagttatcttttccaacgcagagcttagtgttatagctgtaggtccagatttttcaagaacactcttgaaaagagtaactcttgtcaaagtgggaggtgaagttgtcattgagtgtaagccaaaagcgtctccaaaacctgtttacacctggaagaaaggaagggatatattaaaagaaaatgaaagaattaccatttctgaagatggaaacctcagaatcatcaacgttactaaatcagacgctgggagttatacctgtatagccactaaccattttggaactgctagcagtactggaaacttggtagtgaaagatccaacaagggtaatggtacccccttccagtatggatgtcactgttggagagagtattgttttaccgtgccaggtaacgcatgatcactcgctagacatcgtgtttacttggtcatttaatggacacctgatagactttgacagagatggggaccactttgaaagagttggagggcaggattcagctggtgatttgatgatccgaaacatccaactgaagcatgctgggaaatatgtctgcatggtccaaacaagtgtggacaggctatctgctgctgcagacctgattgtaagaggtcctccaggtcccccagaggctgtgacaatagacgaaatcacagataccactgctcagctctcctggagacccgggcctgacaaccacagccccatcaccatgtatgtcattcaagccaggactccattctccgtgggctggcaagcagtcagtacagtcccagaactcattgatgggaagacattcacagcgaccgtggtgggtttgaacccttgggttgaatatgaattccgcacagttgcagccaacgtgattgggattggggagcccagccgcccctcagagaaacggagaacagaagaagctctccccgaagtcacaccagcgaatgtcagtggtggcggaggcagcaaatctgaactggttataacctgggagacggtccctgaggaattacagaatggtcgaggctttggttatgtggtggccttccggccctacggtaaaatgatctggatgctgacagtgctggcctcagctgatgcctctagatacgtgttcaggaatgagagcgtgcaccccttctctccctttgaggttaaagtaggtgtcttcaacaacaaaggagaaggccctttcagtcccaccacggtggtgtattctgcagaagaagaacccaccaaaccaccagccagtatctttgccagaagtctttctgccacagatattgaagttttctgggcctccccactggagaagaatagaggacgaatacaaggttatgaggttaaatattggagacatgaagacaaagaagaaaatgctagaaaaatacgaacagttggaaatcagacatcaacaaaaatcacgaacttaaaaggcagtgtgctgtatcacttagctgtcaaggcatataattctgctgggacaggcccctctagtgcaacagtcaatgtgacaacccgaaagccaccaccaagtcaaccccccggaaacatcatatggaattcatcagactccaaaattatcctgaattgggatcaagtgaaggccctggataatgagtcggaagtaaaaggatacaaagtcttgtacagatggaacagacaaagcagcacatctgtcattgaaacaaataaaacatcggtggagctttctttgcctttcgatgaagattatataatagaaattaagccattcagcgacggaggagatggcagcagcagtgaacaaattcgaattccaaagatatcaaatgcctacgcgagaggatctggggcttccacttcgaatgcatgtacgctgtcagccatcagtacaataatgatttccctcacagctaggtccagtttatgacaaaagttatctgaaggacttgctgtttataatataagcaacatttagctagttgttttgaagacacccagtactaagtaatattgttgttcaagtacatcttattactggaataaaaatgttttttgcttcttt

SEQ ID NO: 83045 - DNA, 5198 bp, Artificial Sequence
  derived and/or modified sequence
gccattctcccgcctcagcctcccgagtagctgggactacaggcgccgccaccacgcctggctaatttttgtatttttagtagagacggggtttcaccgtgttagccaggatggtctcgatctcctgacctcgtgatccgcccgcctcggcctcccaaagtgctgggatgacaggcgtgagccaccgtgcccggcctggctctgtttttattagaaaaattctcaatcgtcgtcttttaagaatcattgacatagagtaactccacagcatgtgtcttcaagagcttccctaaaagattaaaggttatacaaaacttaaaagaagcagcaattctattcgcttgttattggacttgaaactccctttgacctcggaaactgaagatgaggttgccatgggaactgctggtactgcaatcattcattttgtgccttgcagatgattccacactgcatggcccgatttttattcaagaaccaagtcctgtaatgttccctttggattctgaggagaaaaaagtgaagctcaattgtgaagttaaaggaaatccaaaacctcatatcaggtggaagttaaatggaacagatgttgacactggtatggatttccgctacagtgttgttgaagggagcttgttgatcaataaccccaataaaacccaagatgctggaacgtaccagtgcacagcgacaaactcgtttggaacaattgttagcagagaagcaaagcttcagtttgcttatcttgacaactttaaaacaagaacaagaagcactgtgtctgtccgtcgaggtcaaggaatggtgctactgtgtggcccgccaccccattctggagagctgagttatgcctggatcttcaatgaatacccttcctatcaggataatcgccgctttgtttctcaagagactgggaatctgtatattgccaaagtagaaaaatcagatgttgggaattatacctgtgtggttaccaataccgtgacaaaccacaaggtcctggggccacctacaccactaatattgagaaatgatggagtgatgggtgaatatgagcccaaaatagaagtgcagttcccagaaacagttccgactgcaaaaggagcaacggtgaagctggaatgctttgctttaggaaatccagtaccaactattatctggcgaagagctgatggaaagccaatagcaaggaaagccagaagacacaagtcaaatggaattcttgagatccctaattttcagcaggaggatgctggtttatatgaatgtgtagctgaaaattccagagggaaaaatgtagcaaggggacagctaactttctatgctcaacctaattggattcaaaaaataaatgatattcacgtggccatggaagaaaatgtcttttgggaatgtaaagcaaatggaaggcctaagcctacatacaagtggctaaaaaatggcgaacctctgctaactcgggatagaattcaaattgagcaaggaacactcaacataacaatagtgaacctctcagatgctggcatgtatcagtgtttggcagagaataaacatggagttatcttttccaacgcagagcttagtgttatagctgtaggtccagatttttcaagaacactcttgaaaagagtaactcttgtcaaagtgggaggtgaagttgtcattgagtgtaagccaaaagcgtctccaaaacctgtttacacctggaagaaaggaagggatatattaaaagaaaatgaaagaattaccatttctgaagatggaaacctcagaatcatcaacgttactaaatcagacgctgggagttatacctgtatagccactaaccattttggaactgctagcagtactggaaacttggtagtgaaagatccaacaagggtaatggtacccccttccagtatggatgtcactgttggagagagtattgttttaccgtgccaggtaacgcatgatcactcgctagacatcgtgtttacttggtcatttaatggacacctgatagactttgacagagatggggaccactttgaaagagttggagggcaggattcagctggtgatttgatgatccgaaacatccaactgaagcatgctgggaaatatgtctgcatggtccaaacaagtgtggacaggctatctgctgctgcagacctgattgtaagaggtcctccaggtcccccagaggctgtgacaatagacgaaatcacagataccactgctcagctctcctggagacccgggcctgacaaccacagccccatcaccatgtatgtcattcaagccaggactccattctccgtgggctggcaagcagtcagtacagtcccagaactcattgatgggaagacattcacagcgaccgtggtgggtttgaacccttgggttgaatatgaattccgcacagttgcagccaacgtgattgggattggggagcccagccgcccctcagagaaacggagaacagaagaagctctccccgaagtcacaccagcgaatgtcagtggtggcggaggcagcaaatctgaactggttataacctgggagacggtccctgaggaattacagaatggtcgaggctttggttatgtggtggccttccggccctacggtaaaatgatctggatgctgacagtgctggcctcagctgatgcctctagatacgtgttcaggaatgagagcgtgcaccccttctctccctttgaggttaaagtaggtgtcttcaacaacaaaggagaaggccctttcagtcccaccacggtggtgtattctgcagaagaagaacccaccaaaccaccagccagtatctttgccagaagtctttctgccacagatattgaagttttctgggcctccccactggagaagaatagaggacgaatacaaggttatgaggttaaatattggagacatgaagacaaagaagaaaatgctagaaaaatacgaacagttggaaatcagacatcaacaaaaatcacgaacttaaaaggcagtgtgctgtatcacttagctgtcaaggcatataattctgctgggacaggcccctctagtgcaacagtcaatgtgacaacccgaaagccaccaccaagtcaaccccccggaaacatcatatggaattcatcagactccaaaattatcctgaattgggatcaagtgaaggccctggataatgagtcggaagtaaaaggatacaaagtcttgtacagatggaacagacaaagcagcacatctgtcattgaaacaaataaaacatcggtggagctttctttgcctttcgatgaagattatataatagaaattaagccattcagcgacggaggagatggcagcagcagtgaacaaattcgaattccaaagatatcaaatgcctacgcgagaggatctggggcttccacttcgaatgcatgtacgctgtcagccatcagtacaataatgatttccctcacagctaggtccagtttatgacaaaagttatctgaaggacttgctgtttataatataagcaacatttagctagttgttttgaagacacccagtactaagtaatattgttgttcaagtacatcttattactggaataaaaatgttttttgcttctttaggaatggcattatacagtacttcctcaaagcaaatctagctttgtctgaagtttctttggaaactctgcaatgcactgaagacatctgtaatatgatgttaccaaagcagtttacatatgtccttatatgcatattttttattatatatttagtgttttatagaattttttaaagttaacatataatgtagatattaattttttcctcggctgtaaaatgctatgggcaacacaatcatgcaattataatttgaaaatatttcctttaaagacagagtttgaaactcatcttggtaaataaattgcaaattactcgtacagttttacaaggatctcatggcagaacagcggaagacttggtccgtaactcaaggctgttgtatgcaaactactcttctagtggttaatgcacttgacatgtacagtatgtttcccatgccgttgtgattttgacatgtacagtatgttttcatgccgttgtgaattttgttgttcaacccaacttgagatggtttcaggaatggctgcaatctcaaaagctcaatgtactgcccaagaggcaccttgtgcaatattcccatccctgaatttagcattgtacaggaagattttcttttcactcaactgagttagcattgtctttgtggtagcattatcttagacattaaatttgaagtaacatatatcctgtagtaacatagacccaaagttactatagtcaaccaagtctttcaaaggataaaagatcattttattatctttaactgtatctattttgaatgtaaatttaaaaaaagtaattctctgtcaatggattcgtaatttctttacaaaatttcttatatataatatgtgtatctctgtaataatagagcccttcttttgaatcaaaattacatatggactttggaagattgctcctatttcaacaaatagttgctgcaagaatttttaatatgactctataaaagctctttagtacaattgtatggtttcttgatgattctgttttgcaataggtagcctagttgctttatatgctttaccttctaggtcttaaaatcacacattggaaaatgacaatatcaacaaaactgtattcttatgaaaagaactatttgttacaatgagaaaggttttgtgagtaaaccctactggacagtgacataaaaggcaatggaattttctataaacattttctcatgtaaacatgctgccaccttttcttctttctcagagaactcaaatttgctatagtttgtcatttttgcttacaaataatataacttttcaaccttctagttatatttatccaataaagtcataatcgggattccatttgtgtaaaaactagggtggtaaccggaaaaaaatattgtcagtatttcaagctgtgttcctttcttagtttgatatggttacttctatgttgaaataaaatttaaaatcacatgcaaaaaaaaaatcagcaaaataataaaatgaacgaaaaaaaatgacacccagggagttcccaaccccagtgtaaatgatatttaccagtgatctagcatatgtaatcttttttaaaggtattgttaataaatattctgtcatt

SEQ ID NO: 83046 - DNA, 5093 bp, Artificial Sequence
  derived and/or modified sequence
ctgtgccggcgccgcacccgaggctctcgccagcccggcgccccggtgctgagtgggtgaaaaagaacagtgtgtcatgaagacaggcacctggaggtgatttgggtggcattcatgagaaaattcacgttacccgaatcattgacatagagtaactccacagcatgtgtcttcaagagcttccctaaaagattaaaggttatacaaaacttaaaagaagcagcaattctattcgcttgttattggacttgaaactccctttgacctcggaaactgaagatgaggttgccatgggaactgctggtactgcaatcattcattttgtgccttgcagatgattccacactgcatggcccgatttttattcaagaaccaagtcctgtaatgttccctttggattctgaggagaaaaaagtgaagctcaattgtgaagttaaaggaaatccaaaacctcatatcaggtggaagttaaatggaacagatgttgacactggtatggatttccgctacagtgttgttgaagggagcttgttgatcaataaccccaataaaacccaagatgctggaacgtaccagtgcacagcgacaaactcgtttggaacaattgttagcagagaagcaaagcttcagtttgcttatcttgacaactttaaaacaagaacaagaagcactgtgtctgtccgtcgaggtcaaggaatggtgctactgtgtggcccgccaccccattctggagagctgagttatgcctggatcttcaatgaatacccttcctatcaggataatcgccgctttgtttctcaagagactgggaatctgtatattgccaaagtagaaaaatcagatgttgggaattatacctgtgtggttaccaataccgtgacaaaccacaaggtcctggggccacctacaccactaatattgagaaatgatggagtgatgggtgaatatgagcccaaaatagaagtgcagttcccagaaacagttccgactgcaaaaggagcaacggtgaagctggaatgctttgctttaggaaatccagtaccaactattatctggcgaagagctgatggaaagccaatagcaaggaaagccagaagacacaagtcaaatggaattcttgagatccctaattttcagcaggaggatgctggtttatatgaatgtgtagctgaaaattccagagggaaaaatgtagcaaggggacagctaactttctatgctcaacctaattggattcaaaaaataaatgatattcacgtggccatggaagaaaatgtcttttgggaatgtaaagcaaatggaaggcctaagcctacatacaagtggctaaaaaatggcgaacctctgctaactcgggatagaattcaaattgagcaaggaacactcaacataacaatagtgaacctctcagatgctggcatgtatcagtgtttggcagagaataaacatggagttatcttttccaacgcagagcttagtgttatagctgtaggtccagatttttcaagaacactcttgaaaagagtaactcttgtcaaagtgggaggtgaagttgtcattgagtgtaagccaaaagcgtctccaaaacctgtttacacctggaagaaaggaagggatatattaaaagaaaatgaaagaattaccatttctgaagatggaaacctcagaatcatcaacgttactaaatcagacgctgggagttatacctgtatagccactaaccattttggaactgctagcagtactggaaacttggtagtgaaagatccaacaagggtaatggtacccccttccagtatggatgtcactgttggagagagtattgttttaccgtgccaggtaacgcatgatcactcgctagacatcgtgtttacttggtcatttaatggacacctgatagactttgacagagatggggaccactttgaaagagttggagggcaggattcagctggtgatttgatgatccgaaacatccaactgaagcatgctgggaaatatgtctgcatggtccaaacaagtgtggacaggctatctgctgctgcagacctgattgtaagaggtcctccaggtcccccagaggctgtgacaatagacgaaatcacagataccactgctcagctctcctggagacccgggcctgacaaccacagccccatcaccatgtatgtcattcaagccaggactccattctccgtgggctggcaagcagtcagtacagtcccagaactcattgatgggaagacattcacagcgaccgtggtgggtttgaacccttgggttgaatatgaattccgcacagttgcagccaacgtgattgggattggggagcccagccgcccctcagagaaacggagaacagaagaagctctccccgaagtcacaccagcgaatgtcagtggtggcggaggcagcaaatctgaactggttataacctgggagacggtccctgaggaattacagaatggtcgaggctttggttatgtggtggccttccggccctacggtaaaatgatctggatgctgacagtgctggcctcagctgatgcctctagatacgtgttcaggaatgagagcgtgcaccccttctctccctttgaggttaaagtaggtgtcttcaacaacaaaggagaaggccctttcagtcccaccacggtggtgtattctgcagaagaagaacccaccaaaccaccagccagtatctttgccagaagtctttctgccacagatattgaagttttctgggcctccccactggagaagaatagaggacgaatacaaggttatgaggttaaatattggagacatgaagacaaagaagaaaatgctagaaaaatacgaacagttggaaatcagacatcaacaaaaatcacgaacttaaaaggcagtgtgctgtatcacttagctgtcaaggcatataattctgctgggacaggcccctctagtgcaacagtcaatgtgacaacccgaaagccaccaccaagtcaaccccccggaaacatcatatggaattcatcagactccaaaattatcctgaattgggatcaagtgaaggccctggataatgagtcggaagtaaaaggatacaaagtcttgtacagatggaacagacaaagcagcacatctgtcattgaaacaaataaaacatcggtggagctttctttgcctttcgatgaagattatataatagaaattaagccattcagcgacggaggagatggcagcagcagtgaacaaattcgaattccaaagatatcaaatgcctacgcgagaggatctggggcttccacttcgaatgcatgtacgctgtcagccatcagtacaataatgatttccctcacagctaggtccagtttatgacaaaagttatctgaaggacttgctgtttataatataagcaacatttagctagttgttttgaagacacccagtactaagtaatattgttgttcaagtacatcttattactggaataaaaatgttttttgcttctttaggaatggcattatacagtacttcctcaaagcaaatctagctttgtctgaagtttctttggaaactctgcaatgcactgaagacatctgtaatatgatgttaccaaagcagtttacatatgtccttatatgcatattttttattatatatttagtgttttatagaattttttaaagttaacatataatgtagatattaattttttcctcggctgtaaaatgctatgggcaacacaatcatgcaattataatttgaaaatatttcctttaaagacagagtttgaaactcatcttggtaaataaattgcaaattactcgtacagttttacaaggatctcatggcagaacagcggaagacttggtccgtaactcaaggctgttgtatgcaaactactcttctagtggttaatgcacttgacatgtacagtatgtttcccatgccgttgtgattttgacatgtacagtatgttttcatgccgttgtgaattttgttgttcaacccaacttgagatggtttcaggaatggctgcaatctcaaaagctcaatgtactgcccaagaggcaccttgtgcaatattcccatccctgaatttagcattgtacaggaagattttcttttcactcaactgagttagcattgtctttgtggtagcattatcttagacattaaatttgaagtaacatatatcctgtagtaacatagacccaaagttactatagtcaaccaagtctttcaaaggataaaagatcattttattatctttaactgtatctattttgaatgtaaatttaaaaaaagtaattctctgtcaatggattcgtaatttctttacaaaatttcttatatataatatgtgtatctctgtaataatagagcccttcttttgaatcaaaattacatatggactttggaagattgctcctatttcaacaaatagttgctgcaagaatttttaatatgactctataaaagctctttagtacaattgtatggtttcttgatgattctgttttgcaataggtagcctagttgctttatatgctttaccttctaggtcttaaaatcacacattggaaaatgacaatatcaacaaaactgtattcttatgaaaagaactatttgttacaatgagaaaggttttgtgagtaaaccctactggacagtgacataaaaggcaatggaattttctataaacattttctcatgtaaacatgctgccaccttttcttctttctcagagaactcaaatttgctatagtttgtcatttttgcttacaaataatataacttttcaaccttctagttatatttatccaataaagtcataatcgggattccatttgtgtaaaaactagggtggtaaccggaaaaaaatattgtcagtatttcaagctgtgttcctttcttagtttgatatggttacttctatgttgaaataaaatttaaaatcacatgcaaaaaaaaaatcagcaaaataataaaatgaacgaaaaaaaatgacacccagggagttcccaaccccagtgtaaatgatatttaccagtgatctagcatatgtaatcttttttaaaggtattgttaataaatattctgtcatt

SEQ ID NO: 83047 - DNA, 4985 bp, Artificial Sequence
  derived and/or modified sequence
agtaaagataaacttgcagagaccacaaggagaaatattcccaaatctcattgtaatgtctcttctttcccacagattaaaggttatacaaaacttaaaagaagcagcaattctattcgcttgttattggacttgaaactccctttgacctcggaaactgaagatgaggttgccatgggaactgctggtactgcaatcattcattttgtgccttgcagatgattccacactgcatggcccgatttttattcaagaaccaagtcctgtaatgttccctttggattctgaggagaaaaaagtgaagctcaattgtgaagttaaaggaaatccaaaacctcatatcaggtggaagttaaatggaacagatgttgacactggtatggatttccgctacagtgttgttgaagggagcttgttgatcaataaccccaataaaacccaagatgctggaacgtaccagtgcacagcgacaaactcgtttggaacaattgttagcagagaagcaaagcttcagtttgcttatcttgacaactttaaaacaagaacaagaagcactgtgtctgtccgtcgaggtcaaggaatggtgctactgtgtggcccgccaccccattctggagagctgagttatgcctggatcttcaatgaatacccttcctatcaggataatcgccgctttgtttctcaagagactgggaatctgtatattgccaaagtagaaaaatcagatgttgggaattatacctgtgtggttaccaataccgtgacaaaccacaaggtcctggggccacctacaccactaatattgagaaatgatggagtgatgggtgaatatgagcccaaaatagaagtgcagttcccagaaacagttccgactgcaaaaggagcaacggtgaagctggaatgctttgctttaggaaatccagtaccaactattatctggcgaagagctgatggaaagccaatagcaaggaaagccagaagacacaagtcaaatggaattcttgagatccctaattttcagcaggaggatgctggtttatatgaatgtgtagctgaaaattccagagggaaaaatgtagcaaggggacagctaactttctatgctcaacctaattggattcaaaaaataaatgatattcacgtggccatggaagaaaatgtcttttgggaatgtaaagcaaatggaaggcctaagcctacatacaagtggctaaaaaatggcgaacctctgctaactcgggatagaattcaaattgagcaaggaacactcaacataacaatagtgaacctctcagatgctggcatgtatcagtgtttggcagagaataaacatggagttatcttttccaacgcagagcttagtgttatagctgtaggtccagatttttcaagaacactcttgaaaagagtaactcttgtcaaagtgggaggtgaagttgtcattgagtgtaagccaaaagcgtctccaaaacctgtttacacctggaagaaaggaagggatatattaaaagaaaatgaaagaattaccatttctgaagatggaaacctcagaatcatcaacgttactaaatcagacgctgggagttatacctgtatagccactaaccattttggaactgctagcagtactggaaacttggtagtgaaagatccaacaagggtaatggtacccccttccagtatggatgtcactgttggagagagtattgttttaccgtgccaggtaacgcatgatcactcgctagacatcgtgtttacttggtcatttaatggacacctgatagactttgacagagatggggaccactttgaaagagttggagggcaggattcagctggtgatttgatgatccgaaacatccaactgaagcatgctgggaaatatgtctgcatggtccaaacaagtgtggacaggctatctgctgctgcagacctgattgtaagaggtcctccaggtcccccagaggctgtgacaatagacgaaatcacagataccactgctcagctctcctggagacccgggcctgacaaccacagccccatcaccatgtatgtcattcaagccaggactccattctccgtgggctggcaagcagtcagtacagtcccagaactcattgatgggaagacattcacagcgaccgtggtgggtttgaacccttgggttgaatatgaattccgcacagttgcagccaacgtgattgggattggggagcccagccgcccctcagagaaacggagaacagaagaagctctccccgaagtcacaccagcgaatgtcagtggtggcggaggcagcaaatctgaactggttataacctgggagacggtccctgaggaattacagaatggtcgaggctttggttatgtggtggccttccggccctacggtaaaatgatctggatgctgacagtgctggcctcagctgatgcctctagatacgtgttcaggaatgagagcgtgcaccccttctctccctttgaggttaaagtaggtgtcttcaacaacaaaggagaaggccctttcagtcccaccacggtggtgtattctgcagaagaagaacccaccaaaccaccagccagtatctttgccagaagtctttctgccacagatattgaagttttctgggcctccccactggagaagaatagaggacgaatacaaggttatgaggttaaatattggagacatgaagacaaagaagaaaatgctagaaaaatacgaacagttggaaatcagacatcaacaaaaatcacgaacttaaaaggcagtgtgctgtatcacttagctgtcaaggcatataattctgctgggacaggcccctctagtgcaacagtcaatgtgacaacccgaaagccaccaccaagtcaaccccccggaaacatcatatggaattcatcagactccaaaattatcctgaattgggatcaagtgaaggccctggataatgagtcggaagtaaaaggatacaaagtcttgtacagatggaacagacaaagcagcacatctgtcattgaaacaaataaaacatcggtggagctttctttgcctttcgatgaagattatataatagaaattaagccattcagcgacggaggagatggcagcagcagtgaacaaattcgaattccaaagatatcaaatgcctacgcgagaggatctggggcttccacttcgaatgcatgtacgctgtcagccatcagtacaataatgatttccctcacagctaggtccagtttatgacaaaagttatctgaaggacttgctgtttataatataagcaacatttagctagttgttttgaagacacccagtactaagtaatattgttgttcaagtacatcttattactggaataaaaatgttttttgcttctttaggaatggcattatacagtacttcctcaaagcaaatctagctttgtctgaagtttctttggaaactctgcaatgcactgaagacatctgtaatatgatgttaccaaagcagtttacatatgtccttatatgcatattttttattatatatttagtgttttatagaattttttaaagttaacatataatgtagatattaattttttcctcggctgtaaaatgctatgggcaacacaatcatgcaattataatttgaaaatatttcctttaaagacagagtttgaaactcatcttggtaaataaattgcaaattactcgtacagttttacaaggatctcatggcagaacagcggaagacttggtccgtaactcaaggctgttgtatgcaaactactcttctagtggttaatgcacttgacatgtacagtatgtttcccatgccgttgtgattttgacatgtacagtatgttttcatgccgttgtgaattttgttgttcaacccaacttgagatggtttcaggaatggctgcaatctcaaaagctcaatgtactgcccaagaggcaccttgtgcaatattcccatccctgaatttagcattgtacaggaagattttcttttcactcaactgagttagcattgtctttgtggtagcattatcttagacattaaatttgaagtaacatatatcctgtagtaacatagacccaaagttactatagtcaaccaagtctttcaaaggataaaagatcattttattatctttaactgtatctattttgaatgtaaatttaaaaaaagtaattctctgtcaatggattcgtaatttctttacaaaatttcttatatataatatgtgtatctctgtaataatagagcccttcttttgaatcaaaattacatatggactttggaagattgctcctatttcaacaaatagttgctgcaagaatttttaatatgactctataaaagctctttagtacaattgtatggtttcttgatgattctgttttgcaataggtagcctagttgctttatatgctttaccttctaggtcttaaaatcacacattggaaaatgacaatatcaacaaaactgtattcttatgaaaagaactatttgttacaatgagaaaggttttgtgagtaaaccctactggacagtgacataaaaggcaatggaattttctataaacattttctcatgtaaacatgctgccaccttttcttctttctcagagaactcaaatttgctatagtttgtcatttttgcttacaaataatataacttttcaaccttctagttatatttatccaataaagtcataatcgggattccatttgtgtaaaaactagggtggtaaccggaaaaaaatattgtcagtatttcaagctgtgttcctttcttagtttgatatggttacttctatgttgaaataaaatttaaaatcacatgcaaaaaaaaaatcagcaaaataataaaatgaacgaaaaaaaatgacacccagggagttcccaaccccagtgtaaatgatatttaccagtgatctagcatatgtaatcttttttaaaggtattgttaataaatattctgtcatttgtaaaga

SEQ ID NO: 83048 - DNA, 2279 bp, Artificial Sequence
  derived and/or modified sequence
tagctcaacctaattggattcaaaaaataaatgatattcacgtggccatggaagaaaatgtcttttgggaatgtaaagcaaatggaaggcctaagcctacatacaagtggctaaaaaatggcgaacctctgctaactcgggatagaattcaaattgagcaaggaacactcaacataacaatagtgaacctctcagatgctggcatgtatcagtgtttggcagagaataaacatggagttatcttttccaacgcagagcttagtgttatagctgtaggtccagatttttcaagaacactcttgaaaagagtaactcttgtcaaagtgggaggtgaagttgtcattgagtgtaagccaaaagcgtctccaaaacctgtttacacctggaagaaaggaagggatatattaaaagaaaatgaaagaattaccatttctgaagatggaaacctcagaatcatcaacgttactaaatcagacgctgggagttatacctgtatagccactaaccattttggaactgctagcagtactggaaacttggtagtgaaagatccaacaagggtaatggtacccccttccagtatggatgtcactgttggagagagtattgttttaccgtgccaggtaacgcatgatcactcgctagacatcgtgtttacttggtcatttaatggacacctgatagactttgacagagatggggaccactttgaaagagttggagggcaggattcagctggtgatttgatgatccgaaacatccaactgaagcatgctgggaaatatgtctgcatggtccaaacaagtgtggacaggctatctgctgctgcagacctgattgtaagaggtcctccaggtcccccagaggctgtgacaatagacgaaatcacagataccactgctcagctctcctggagacccgggcctgacaaccacagccccatcaccatgtatgtcattcaagccaggactccattctccgtgggctggcaagcagtcagtacagtcccagaactcattgatgggaagacattcacagcgaccgtggtgggtttgaacccttgggttgaatatgaattccgcacagttgcagccaacgtgattgggattggggagcccagccgcccctcagagaaacggagaacagaagaagctctccccgaagtcacaccagcgaatgtcagtggtggcggaggcagcaaatctgaactggttataacctgggagacggtccctgaggaattacagaatggtcgaggctttggttatgtggtggccttccggccctacggtaaaatgatctggatgctgacagtgctggcctcagctgatgcctctagatacgtgttcaggaatgagagcgtgcaccccttctctccctttgaggttaaagtaggtgtcttcaacaacaaaggagaaggccctttcagtcccaccacggtggtgtattctgcagaagaagaacccaccaaaccaccagccagtatctttgccagaagtctttctgccacagatattgaagttttctgggcctccccactggagaagaatagaggacgaatacaaggttatgaggttaaatattggagacatgaagacaaagaagaaaatgctagaaaaatacgaacagttggaaatcagacatcaacaaaaatcacgaacttaaaaggcagtgtgctgtatcacttagctgtcaaggcatataattctgctgggacaggcccctctagtgcaacagtcaatgtgacaacccgaaagccaccaccaagtcaaccccccggaaacatcatatggaattcatcagactccaaaattatcctgaattgggatcaagtgaaggccctggataatgagtcggaagtaaaaggatacaaagtcttgtacagatggaacagacaaagcagcacatctgtcattgaaacaaataaaacatcggtggagctttctttgcctttcgatgaagattatataatagaaattaagccattcagcgacggaggagatggcagcagcagtgaacaaattcgaattccaaagatatcaaatgcctacgcgagaggatctggggcttccacttcgaatgcatgtacgctgtcagccatcagtacaataatgatttccctcacagctaggtccagtttatgacaaaagttatctgaaggacttgctgtttataatataagcaacatttagctagttgttttgaagacacccagtactaagtaatattgttgttcaagtacatcttattactggaataaaaatgttttttgcttcttt

SEQ ID NO: 83049 - DNA, 2424 bp, Artificial Sequence
  derived and/or modified sequence
atgggcgagtacgagcccaagatcgaggtgcagttccccgagaccgtgcccaccgccaagggcgccaccgtgaagctggagtgcttcgccctgggcaaccccgtgcccaccatcatctggagaagagccgacggcaagcccatcgccagaaaggccagaagacacaagagcaacggcatcctggagatccccaacttccagcaggaggacgccggcctgtacgagtgcgtggccgagaacagcagaggcaagaacgtggccagaggccagctgaccttctacgcccagcccaactggatccagaagatcaacgacatccacgtggccatggaggagaacgtgttctgggagtgcaaggccaacggcagacccaagcccacctacaagtggctgaagaacggcgagcccctgctgaccagagacagaatccagatcgagcagggcaccctgaacatcaccatcgtgaacctgagcgacgccggcatgtaccagtgcctggccgagaacaagcacggcgtgatcttcagcaacgccgagctgagcgtgatcgccgtgggccccgacttcagcagaaccctgctgaagagagtgaccctggtgaaggtgggcggcgaggtggtgatcgagtgcaagcccaaggccagccccaagcccgtgtacacctggaagaagggcagagacatcctgaaggagaacgagagaatcaccatcagcgaggacggcaacctgagaatcatcaacgtgaccaagagcgacgccggcagctacacctgcatcgccaccaaccacttcggcaccgccagcagcaccggcaacctggtggtgaaggaccccaccagagtgatggtgccccccagcagcatggacgtgaccgtgggcgagagcatcgtgctgccctgccaggtgacccacgaccacagcctggacatcgtgttcacctggagcttcaacggccacctgatcgacttcgacagagacggcgaccacttcgagagagtgggcggccaggacagcgccggcgacctgatgatcagaaacatccagctgaagcacgccggcaagtacgtgtgcatggtgcagaccagcgtggacagactgagcgccgccgccgacctgatcgtgagaggcccccccggcccccccgaggccgtgaccatcgacgagatcaccgacaccaccgcccagctgagctggagacccggccccgacaaccacagccccatcaccatgtacgtgatccaggccagaacccccttcagcgtgggctggcaggccgtgagcaccgtgcccgagctgatcgacggcaagaccttcaccgccaccgtggtgggcctgaacccctgggtggagtacgagttcagaaccgtggccgccaacgtgatcggcatcggcgagcccagcagacccagcgagaagagaagaaccgaggaggccctgcccgaggtgacccccgccaacgtgagcggcggcggcggcagcaagagcgagctggtgatcacctgggagaccgtgcccgaggagctgcagaacggcagaggcttcggctacgtggtggccttcagaccctacggcaagatgatctggatgctgaccgtgctggccagcgccgacgccagcagatacgtgttcagaaacgagagcgtgcaccccttcagccccttcgaggtgaaggtgggcgtgttcaacaacaagggcgagggccccttcagccccaccaccgtggtgtacagcgccgaggaggagcccaccaagccccccgccagcatcttcgccagaagcctgagcgccaccgacatcgaggtgttctgggccagccccctggagaagaacagaggcagaatccagggctacgaggtgaagtactggagacacgaggacaaggaggagaacgccagaaagatcagaaccgtgggcaaccagaccagcaccaagatcaccaacctgaagggcagcgtgctgtaccacctggccgtgaaggcctacaacagcgccggcaccggccccagcagcgccaccgtgaacgtgaccaccagaaagcccccccccagccagccccccggcaacatcatctggaacagcagcgacagcaagatcatcctgaactgggaccaggtgaaggccctggacaacgagagcgaggtgaagggctacaaggtgctgtacagatggaacagacagagcagcaccagcgtgatcgagaccaacaagaccagcgtggagctgagcctgcccttcgacgaggactacatcatcgagatcaagcccttcagcgacggcggcgacggcagcagcagcgagcagatcagaatccccaagatcagcaacgcctacgccagaggcagcggcgccagcaccagcaacgcctgcaccctgagcgccatcagcaccatcatgatcagcctgaccgccagaagcagcctgtag

SEQ ID NO: 83050 - DNA, 3081 bp, Artificial Sequence
  derived and/or modified sequence
atgagactgccctgggagctgctggtgctgcagagcttcatcctgtgcctggccgacgacagcaccctgcacggccccatcttcatccaggagcccagccccgtgatgttccccctggacagcgaggagaagaaggtgaagctgaactgcgaggtgaagggcaaccccaagccccacatcagatggaagctgaacggcaccgacgtggacaccggcatggacttcagatacagcgtggtggagggcagcctgctgatcaacaaccccaacaagacccaggacgccggcacctaccagtgcaccgccaccaacagcttcggcaccatcgtgagcagagaggccaagctgcagttcgcctacctggacaacttcaagaccagaaccagaagcaccgtgagcgtgagaagaggccagggcatggtgctgctgtgcggcccccccccccacagcggcgagctgagctacgcctggatcttcaacgagtaccccagctaccaggacaacagaagattcgtgagccaggagaccggcaacctgtacatcgccaaggtggagaagagcgacgtgggcaactacacctgcgtggtgaccaacaccgtgaccaaccacaaggtgctgggcccccccacccccctgatcctgagaaacgacggcgtgatgggcgagtacgagcccaagatcgaggtgcagttccccgagaccgtgcccaccgccaagggcgccaccgtgaagctggagtgcttcgccctgggcaaccccgtgcccaccatcatctggagaagagccgacggcaagcccatcgccagaaaggccagaagacacaagagcaacggcatcctggagatccccaacttccagcaggaggacgccggcctgtacgagtgcgtggccgagaacagcagaggcaagaacgtggccagaggccagctgaccttctacgcccagcccaactggatccagaagatcaacgacatccacgtggccatggaggagaacgtgttctgggagtgcaaggccaacggcagacccaagcccacctacaagtggctgaagaacggcgagcccctgctgaccagagacagaatccagatcgagcagggcaccctgaacatcaccatcgtgaacctgagcgacgccggcatgtaccagtgcctggccgagaacaagcacggcgtgatcttcagcaacgccgagctgagcgtgatcgccgtgggccccgacttcagcagaaccctgctgaagagagtgaccctggtgaaggtgggcggcgaggtggtgatcgagtgcaagcccaaggccagccccaagcccgtgtacacctggaagaagggcagagacatcctgaaggagaacgagagaatcaccatcagcgaggacggcaacctgagaatcatcaacgtgaccaagagcgacgccggcagctacacctgcatcgccaccaaccacttcggcaccgccagcagcaccggcaacctggtggtgaaggaccccaccagagtgatggtgccccccagcagcatggacgtgaccgtgggcgagagcatcgtgctgccctgccaggtgacccacgaccacagcctggacatcgtgttcacctggagcttcaacggccacctgatcgacttcgacagagacggcgaccacttcgagagagtgggcggccaggacagcgccggcgacctgatgatcagaaacatccagctgaagcacgccggcaagtacgtgtgcatggtgcagaccagcgtggacagactgagcgccgccgccgacctgatcgtgagaggcccccccggcccccccgaggccgtgaccatcgacgagatcaccgacaccaccgcccagctgagctggagacccggccccgacaaccacagccccatcaccatgtacgtgatccaggccagaacccccttcagcgtgggctggcaggccgtgagcaccgtgcccgagctgatcgacggcaagaccttcaccgccaccgtggtgggcctgaacccctgggtggagtacgagttcagaaccgtggccgccaacgtgatcggcatcggcgagcccagcagacccagcgagaagagaagaaccgaggaggccctgcccgaggtgacccccgccaacgtgagcggcggcggcggcagcaagagcgagctggtgatcacctgggagaccgtgcccgaggagctgcagaacggcagaggcttcggctacgtggtggccttcagaccctacggcaagatgatctggatgctgaccgtgctggccagcgccgacgccagcagatacgtgttcagaaacgagagcgtgcaccccttcagccccttcgaggtgaaggtgggcgtgttcaacaacaagggcgagggccccttcagccccaccaccgtggtgtacagcgccgaggaggagcccaccaagccccccgccagcatcttcgccagaagcctgagcgccaccgacatcgaggtgttctgggccagccccctggagaagaacagaggcagaatccagggctacgaggtgaagtactggagacacgaggacaaggaggagaacgccagaaagatcagaaccgtgggcaaccagaccagcaccaagatcaccaacctgaagggcagcgtgctgtaccacctggccgtgaaggcctacaacagcgccggcaccggccccagcagcgccaccgtgaacgtgaccaccagaaagcccccccccagccagccccccggcaacatcatctggaacagcagcgacagcaagatcatcctgaactgggaccaggtgaaggccctggacaacgagagcgaggtgaagggctacaaggtgctgtacagatggaacagacagagcagcaccagcgtgatcgagaccaacaagaccagcgtggagctgagcctgcccttcgacgaggactacatcatcgagatcaagcccttcagcgacggcggcgacggcagcagcagcgagcagatcagaatccccaagatcagcaacgcctacgccagaggcagcggcgccagcaccagcaacgcctgcaccctgagcgccatcagcaccatcatgatcagcctgaccgccagaagcagcctgtag

SEQ ID NO: 83051 - DNA, 165 bp, Artificial Sequence
  derived and/or modified sequence
atgagactgccctgggagctgctggtgctgcagagcttcatcctgtgcctggccgacgacagcaccctgcacggccccatcttcatccaggagcccagccccgtgatgttccccctggacagcgaggagaagaaggtgaagctgaactgcgaggtgaagggctag

SEQ ID NO: 83052 - DNA, 570 bp, Artificial Sequence
  derived and/or modified sequence
atgagcctgaacaaggacggcagctacaccggcttcatcaaggtgcagctgaagctggtgagacccgtgagcgtgcccagcagcaagaagccccccagcctgcaggacgccagaagaggccccggcagaggcaccagcgtgagaagaagaaccagcttctacctgcccaaggacgccgtgaagcacctgcacgtgctgagcagaaccagagccagagaggtgatcgaggccctgctgagaaagttcctggtggtggacgaccccagaaagttcgccctgttcgagagagccgagagacacggccaggtgtacctgagaaagctgctggacgacgagcagcccctgagactgagactgctggccggccccagcgacaaggccctgagcttcgtgctgaaggagaacgacagcggcgaggtgaactgggacgccttcagcatgcccgagctgcacaacttcctgagaatcctgcagagagaggaggaggagcacctgagacagatcctgcagaagtacagctactgcagacagaagatccaggaggccctgcacgcctgccccctgggctag

SEQ ID NO: 83053 - DNA, 570 bp, Artificial Sequence
  derived and/or modified sequence
atgagtttaaacaaggacggatcctacaccggtttcatcaaagtgcagctgaaactggtccggccggtgtctgttccctccagcaagaaacccccgagtttgcaggacgctcgacggggacctggccgcggcacaagtgtgcggcgcaggacctccttctacctaccaaaggacgctgtcaaacacctgcatgtgctgagccgcacccgcgcacgtgaagtgatcgaggctctgctcaggaaattcctggtggtggacgacccccggaaattcgcactcttcgaacgggctgagagacacgggcaggtttacctgagaaaactgttagacgatgagcagccactgcgcttgcgcctgctcgcaggtccgtcagataaggcactgagcttcgtcctgaaagaaaatgactccggggaggtcaactgggatgccttttccatgcccgagctgcacaattttctgagaatattacagcgcgaggaggaggagcacctgcgtcaaattctgcagaagtactcttactgtcgacagaaaatccaggaagctcttcatgcatgccctcttggttag

SEQ ID NO: 83054 - DNA, 570 bp, Artificial Sequence
  derived and/or modified sequence
atgagcctgaacaaggatggcagctacacaggcttcatcaaggtgcagctgaagctggtgcggcctgtgtctgtgcccagcagcaagaagccacccagcctgcaggatgcccggcggggccctggccggggcacctctgtgagaagaaggaccagcttctacctgcccaaggatgctgtgaagcacctgcacgtgctgagcaggacccgggcccgggaggtgattgaggccctgctgaggaagttcctggtggtggatgaccccaggaagtttgccctgtttgaaagagctgagcggcacggccaggtgtacctgaggaagctgctggatgatgagcagcccctgcggctgcggctgctggccggccccagcgacaaggccctgagctttgtgctgaaggaaaatgattctggagaggtgaactgggatgccttctccatgcctgagctgcacaacttcctgcgcatcctgcagcgggaggaggaggagcacctgcggcagatcctgcagaagtacagctactgccggcagaagatccaggaggccctgcacgcctgccccctgggctag

SEQ ID NO: 83055 - DNA, 570 bp, Artificial Sequence
  derived and/or modified sequence
atgagcctgaacaaggacggcagctacaccggcttcatcaaggtgcagctcaaattagtccggccagtcagtgtgccatcatcgaagaaacctcctagtttacaggatgctaggcggggccccgggcgcggaacaagcgttcggcggcgtacctccttctatcttcccaaggatgctgtgaagcatctccacgtactgagtaggacaagagccagggaagtcattgaggccctcctgagaaagttcctagtggtggatgatccaagaaagtttgctcttttcgaaagagccgagcggcatggccaggtatacttgaggaaattactggatgacgaacaacctctccggctgagactgctcgcgggtccttctgacaaggctctctccttcgtgctgaaggaaaacgactctggggaagtcaactgggacgcatttagtatgcccgagctgcacaatttcttgcgaattctccagcgcgaggaagaggagcacctgcgtcagattctccagaaatacagctattgcaggcagaagatccaagaggcccttcacgcatgcccgctgggatag

SEQ ID NO: 83056 - DNA, 570 bp, Artificial Sequence
  derived and/or modified sequence
atgtccctgaacaaggacggcagctacacaggctttataaaagttcaactaaagctggtgcgcccagtgagcgtgccctcgagcaagaaaccacccagcttgcaagatgctaggcggggtcccggtagggggacctccgttcggcgaaggacgtctttttatttgccaaaagatgctgtgaagcacctgcatgtattgagtcgaacgagggcacgggaggttattgaggcactgctcagaaaattcttggtcgtggacgaccccagaaagtttgcccttttcgaacgcgcagagcggcatggccaggtgtacctcagaaagcttctggatgacgagcagccccttaggctacgactgctggctggtcctagcgataaagccttatcgtttgtactgaaagagaatgactcgggtgaagtaaattgggatgccttcagtatgccagagcttcacaacttcctgcggattcttcagcgcgaggaagaggaacatctgcgtcagatcctgcaaaagtactcttattgcagacaaaaaatacaagaagctctgcacgcttgtcctctaggttag

SEQ ID NO: 83057 - protein, 440 aa, Artificial Sequence
  derived and/or modified sequence
MPPGPWESCFWVGGLILWLSVGSSGDAPPTPQPKCADFQSANLFEGTDLKVQFLLFVPSNPSCGQLVEGSSDLQNSGFNATLGTKLIIHGFRVLGTKPSWIDTFIRTLLRATNANVIAVDWIYGSTGVYFSAVKNVLGVSESSIHIIGVSLGAHVGGMVGQLFGGQLGQITGLDPAGPEYTRASVEERLDAGDALFVEAIHTDTDNLGIRIPVGHVDYFVNGGQDQPGCPTFFYAGYSYLICDHMRAVHLYISALENSCPLMAFPCASYKAFLAGRCLDCFNPFLLSCPRIGLVEQGGVKIEPLPKEVKVYLLTTSSAPYCMHHSLVEFHLKELRNKDTNIEVTFLSSNITSSSKITIPKQQRYGKGIIAHATPQCQINQVKFKFQSSNRVWKKDRTTIIGKFCTALLPVNDREKMVCLPEPVNLQASVTVSCDLKIACV

SEQ ID NO: 83058 - DNA, 1323 bp, Artificial Sequence
  derived and/or modified sequence
atgccaccgggaccttgggaatcttgtttttgggttggggggttgattctctggttgtccgtcggctcatctggcgatgccccccccacccctcaacccaagtgtgccgactttcaaagcgcaaacctcttcgaaggcaccgatctcaaggtgcagtttctccttttcgttccaagcaatccctcttgtgggcagctggtggagggaagttcagatctgcagaactcagggttcaacgccacactgggcaccaaactcatcatacacggctttcgggtgctcggaaccaagccctcatggattgacacatttatccgtacactcctgcgcgcaacaaacgccaacgtcattgcagtagactggatatacggttcaactggggtgtacttttcagctgtcaagaatgtcctgggtgtctccgagtcgtccatccatatcatcggcgtctccctaggtgcccatgttggaggaatggtcggccaactcttcggcggacaacttggccaaattacgggtctcgatccagctgggccagaatacacgcgtgcatctgtcgaagagaggctggacgcgggcgatgccttattcgtggaagctatccacacagatacagacaaccttggaattagaattcccgtaggtcatgtcgactactttgttaatggagggcaggaccagccagggtgcccaacctttttctacgccggctactcctatttaatatgcgaccacatgcgcgctgttcacctgtatatttctgccctcgagaactcatgtccgttaatggccttcccgtgcgcaagttataaggcctttttggcggggcggtgcctcgactgcttcaacccattcctgctgtcctgccctcggatcggcctggtggagcaagggggcgtgaagatagagccactgcccaaggaggtcaaagtatatttgcttaccacttcttccgctccctactgcatgcaccatagcctcgtggagtttcacttgaaggagttgcggaacaaggacaccaatattgaagtcacctttctgtcatccaatattacatccagctctaaaataactattcccaagcagcagcgatacggaaaaggcataattgcacatgcaaccccccagtgtcaaatcaaccaagtaaaatttaagtttcaatcatccaaccgagtatggaagaaagacagaaccactattataggtaagttctgtacggccctgctgccagtgaacgacagggagaagatggtatgcctccccgagcctgtgaatctgcaagcaagcgtgacggtaagttgtgacctgaagattgcctgtgtgtag

SEQ ID NO: 83059 - DNA, 1323 bp, Artificial Sequence
  derived and/or modified sequence
atgcctcctggcccctgggagagctgcttctgggtgggcggcctcatcctgtggctgtctgtgggcagcagtggagatgccccacccaccccccagcccaagtgtgccgacttccagagcgccaacctgtttgagggcacagacctgaaggtgcagttcctgctgtttgtgcccagcaaccccagctgtggccagctggtggagggcagcagtgacctgcagaacagcggcttcaatgccaccctgggcaccaagctgatcatccacggcttccgggtgctgggcaccaagcccagctggattgacaccttcatccgcaccctgctgcgggccaccaatgccaacgtgattgctgtggactggatctacggcagcactggagtgtacttctctgctgtgaagaatgtgctgggcgtgtctgagagcagcatccacatcattggagtgtccctgggcgcccacgtgggcggcatggtgggccagctgtttggaggccagctgggccagatcaccggcctggaccctgctggccctgagtacacccgggcctctgtggaggagcggctggatgctggagatgccctgtttgtggaggccatccacacagacacagacaacctgggcatccgcatccctgtgggccacgtggactactttgtgaatggaggccaggaccagcccggctgccccaccttcttctacgccggctacagctacctgatctgtgaccacatgagagctgtgcacctgtacatcagcgccctggagaacagctgccccctgatggccttcccctgtgccagctacaaggccttcctggccggccgctgcctggactgcttcaaccccttcctgctgagctgccccagaattggcctggtggagcagggcggcgtgaagattgagcccctgcccaaggaggtgaaggtgtacctgctgaccaccagcagcgccccctactgcatgcaccacagcctggtggagttccacctgaaggagctgaggaacaaggacaccaacatcgaggtgaccttcctgagcagcaacatcaccagcagcagcaagatcaccatccccaagcagcagagatatggcaagggcatcatcgcccacgccaccccccagtgccagatcaaccaggtgaagttcaagttccagagcagcaacagagtgtggaagaaggacaggaccaccatcatcggcaagttctgcacagccctgctgcctgtgaatgaccgggagaagatggtgtgcctgcctgagcctgtgaacctgcaggcctctgtgacagtgtcctgtgacctgaagatcgcctgtgtgtag

SEQ ID NO: 83060 - DNA, 1323 bp, Artificial Sequence
  derived and/or modified sequence
atgccccccggcccctgggagagctgcttctgggtgggcggcctgattttatggctcagcgtgggttccagcggagacgccccacccacgccgcagccaaagtgcgccgattttcagtccgccaatttgtttgaaggaacagatctcaaggtgcagtttttgctgtttgtgccaagcaacccttcttgtggacaactcgtggagggctcaagtgacctacagaattccggcttcaacgctaccttaggtactaaactcataattcatgggtttcgggtgttgggtaccaagccttcttggatcgataccttcattaggaccctgctgcgcgccactaacgctaatgtgattgccgtggattggatttatgggagtacgggtgtgtacttctctgcagttaaaaatgtgcttggggtctcagagtcatccatccatatcattggcgtttccctgggagcgcacgtgggggggatggtgggccagttgttcggtggccagctgggacagatcaccggcctggaccctgcaggccctgagtatacccgagcgtctgttgaagagaggttggatgcaggcgatgcactgtttgttgaggccatccataccgatacagataatctcggcatcagaataccagtcggccacgtagactactttgtcaacggaggacaagaccaacctggctgtccaactttcttctacgccggctactcctatctgatttgtgaccacatgagagcagtgcacttgtatatcagtgccctggaaaattcctgcccactaatggcttttccatgtgcaagttacaaagcatttttggccggccgttgtctggattgttttaatccctttttactgtcgtgcccaagaatcgggctggtggaacagggaggcgtcaaaatcgaacccttgcccaaggaggtaaaggtgtatttactgacaacatcatccgctccttactgcatgcaccacagtctggttgagtttcacctcaaggaactgcgaaacaaggataccaatattgaagtgacgtttctgtccagtaatatcactagctccagcaaaattacaatccctaaacaacagcgatacgggaaaggcatcattgcacatgctaccccccagtgccagataaaccaggtgaagttcaagttccaaagttccaaccgggtatggaaaaaagaccggaccacgattatcggcaagttctgcaccgcattactccccgtgaatgacagggaaaaaatggtctgcctgcctgaacccgtgaatttacaggcctctgtgaccgtgagttgcgatttaaaaatcgcatgcgtatag

SEQ ID NO: 83061 - DNA, 1695 bp, Artificial Sequence
  derived and/or modified sequence
ataccagctctgagatttccagctcagcgatgcccccaggtccctgggagagctgcttctgggtggggggcctcattttgtggctcagcgttggaagttcaggggatgcacctcctaccccacagccaaagtgcgctgacttccagagcgccaacctttttgaaggcaccgatctcaaagtccagtttctcctctttgtcccttcgaatcctagctgtgggcagctagtagaaggaagcagtgacctccaaaactctgggttcaatgccactctgggaaccaaactaattatccatggattcagggttttaggaacaaagccttcctggattgacacatttattagaacccttctgcgtgcaacgaatgctaatgtgattgccgtggactggatttatgggtctacaggagtctacttctcagctgtgaaaaatgtgctgggtgtgtcggaatcctcaatccacatcattggtgttagcctgggggcccacgttgggggcatggtgggacagctcttcggaggccagctgggacagatcacaggcctggaccccgctggacctgagtacaccagggccagtgtggaagagcgcttggatgctggagatgccctcttcgtggaagccatccacacagacaccgacaatttgggtattcggattcccgttggacatgtggactacttcgtcaacggaggccaagaccaacctggctgccccaccttcttttacgcaggttatagttatctgatctgtgatcacatgagggctgtgcacctctacatcagcgccctggagaattcctgtccactgatggcctttccctgtgccagctacaaggccttccttgctggacgctgtctggattgctttaacccttttctgctttcctgcccaaggataggactggtggaacaaggtggtgtcaagatagagccgctccccaaggaagtgaaagtctacctcctgactacttccagtgctccgtactgcatgcatcacagcctcgtggagtttcacttgaaggaactgagaaacaaggacaccaacatcgaggttaccttccttagcagtaacatcacctcttcatctaagatcaccatacctaagcagcaacgctatgggaaaggaatcatagcccatgccaccccacaatgccagataaaccaagtgaaattcaagtttcagtcttccaaccgagtttggaaaaaagaccggactaccattattgggaagttctgcactgcccttttgcctgtcaatgacagagaaaagatggtctgcttacctgaaccagtgaacttacaagcaagtgtgactgtttcctgtgacctgaagatagcctgtgtgtagtttaacctgggcaggacacatctccctgcattttttttttttttttgagagagaggtgtgatgagggatgtgtgtgtgcagcttattgtagaccattactactaaggagaaaagcaaagctctttcttattttcctcataatcagctaccctggaggggagggagaactcattttacagaacttggtttcctttgccgatcttatgtacatacccattttagctttcccatgcatacttaactgcacttgctttatctccttgggcattcgtacttaggattcaatagaaacatgtacagggtaaacaattttttaaaaataaaacttcatggagtatctgaa

SEQ ID NO: 83062 - DNA, 1323 bp, Artificial Sequence
  derived and/or modified sequence
atgccaccagggccttgggaaagttgcttctgggtcggcggactaatcctgtggttatccgtagggagcagcggcgatgccccacctaccccacagccaaaatgcgctgactttcagagtgcaaacctgttcgagggcaccgatctcaaagtgcagttccttctgttcgtcccaagtaatccctcttgtggacagctcgttgaagggagcagcgatctgcagaatagtgggtttaacgccactctcggaaccaaactgatcattcatggattcagggtactgggaacaaaacccagctggatcgacacttttattagaacacttctgagggccacaaacgctaatgtgatcgccgtcgactggatctatggctccacaggagtatactttagcgctgtaaaaaatgtgttgggtgtcagcgaaagctcaatccatattatcggcgtgagtcttggggctcacgttgggggtatggtaggccagctcttcggtggccagctaggccagattaccggcctggatcccgctggcccagagtacacgcgtgcgtccgtggaggaacgtcttgatgctggagacgctctgtttgtggaagccatacacacagataccgacaacctcgggatacgtatccctgtgggtcatgtggattatttcgtaaacggagggcaggaccagccagggtgtcctacatttttctatgccggatactcgtatttgatatgcgaccatatgcgcgctgttcacctgtatatcagcgcactcgaaaactcttgcccactgatggcttttccatgtgcctcctacaaggcctttttagcaggcagatgtctcgactgtttcaacccgtttcttctcagctgtcctaggatcgggcttgttgaacagggcggtgtcaagatcgagcctctccccaaagaggttaaggtttacctgctgactaccagttccgccccatactgtatgcaccatagtttggtggaatttcacctgaaagaactgcggaacaaagacaccaacatcgaagtgacttttctgtcatccaacattacgagttctagtaaaattaccattcccaagcagcagcggtatggtaaaggcatcatagcccatgcaacacctcaatgccaaatcaaccaggttaagtttaagtttcaaagctccaaccgcgtatggaagaaagacaggacaaccatcatcggcaagttctgtactgccctgctccctgtcaatgatcgcgagaagatggtgtgtcttccagaacctgtgaatttgcaagccagcgtgacagtttcttgtgatctaaaaattgcctgcgtgtag

SEQ ID NO: 83063 - DNA, 1323 bp, Artificial Sequence
  derived and/or modified sequence
atgccccccggcccctgggagagctgcttctgggtgggcggcctgatcctgtggctgagcgtgggcagcagcggcgacgccccccccaccccccagcccaagtgcgccgacttccagagcgccaacctgttcgagggcaccgacctgaaggtgcagttcctgctgttcgtgcccagcaaccccagctgcggccagctggtggagggcagcagcgacctgcagaacagcggcttcaacgccaccctgggcaccaagctgatcatccacggcttcagagtgctgggcaccaagcccagctggatcgacaccttcatcagaaccctgctgagagccaccaacgccaacgtgatcgccgtggactggatctacggcagcaccggcgtgtacttcagcgccgtgaagaacgtgctgggcgtgagcgagagcagcatccacatcatcggcgtgagcctgggcgcccacgtgggcggcatggtgggccagctgttcggcggccagctgggccagatcaccggcctggaccccgccggccccgagtacaccagagccagcgtggaggagagactggacgccggcgacgccctgttcgtggaggccatccacaccgacaccgacaacctgggcatcagaatccccgtgggccacgtggactacttcgtgaacggcggccaggaccagcccggctgccccaccttcttctacgccggctacagctacctgatctgcgaccacatgagagccgtgcacctgtacatcagcgccctggagaacagctgccccctgatggccttcccctgcgccagctacaaggccttcctggccggcagatgcctggactgcttcaaccccttcctgctgagctgccccagaatcggcctggtggagcagggcggcgtgaagatcgagcccctgcccaaggaggtgaaggtgtacctgctgaccaccagcagcgccccctactgcatgcaccacagcctggtggagttccacctgaaggagctgagaaacaaggacaccaacatcgaggtgaccttcctgagcagcaacatcaccagcagcagcaagatcaccatccccaagcagcagagatacggcaagggcatcatcgcccacgccaccccccagtgccagatcaaccaggtgaagttcaagttccagagcagcaacagagtgtggaagaaggacagaaccaccatcatcggcaagttctgcaccgccctgctgcccgtgaacgacagagagaagatggtgtgcctgcccgagcccgtgaacctgcaggccagcgtgaccgtgagctgcgacctgaagatcgcctgcgtgtag

SEQ ID NO: 83064 - DNA, 852 bp, Artificial Sequence
  derived and/or modified sequence
atggttggccagctctttggcggacagctcgggcagattactgggttggacccagccggacctgaatacacgagagcctctgtggaggagagattggacgcaggggatgctcttttcgtggaggcgatccacaccgatacagacaacctgggcatccgtataccagtgggacatgtggattattttgtaaatggggggcaggaccaacctggctgtcccacattcttttacgccgggtactcttatttgatctgcgaccatatgcgggctgttcacttatacattagcgctttggagaactcctgtcctctcatggctttcccctgcgcatcctacaaagcgttcctggctggccgctgtttggactgttttaatccttttttgctctcctgtccgagaattggactggtggagcagggcggtgttaaaatcgagcctctccccaaagaagtaaaggtttatctgctaaccacctctagcgccccttactgtatgcaccatagtctggtggagtttcacctgaaagaactccgaaataaggacactaacatcgaagtgacgtttctgagtagtaacataactagtagttcgaagataacgatccccaagcaacagagatacggtaaaggcatcattgcacatgcaacccctcagtgtcagatcaaccaggtcaaattcaagtttcagagcagtaatagagtttggaagaaagaccggactactattattggaaagttctgtactgcactgctccctgtcaacgaccgtgaaaagatggtctgcctgcctgaacccgtaaacttacaggctagcgtcacggtgtcttgcgatcttaagatcgcctgcgtatag

SEQ ID NO: 83065 - DNA, 852 bp, Artificial Sequence
  derived and/or modified sequence
atggtgggccagctgtttggaggccagctgggccagatcaccggcctggaccctgctggccctgagtacacccgggcctctgtggaggagcggctggatgctggagatgccctgtttgtggaggccatccacacagacacagacaacctgggcatccgcatccctgtgggccacgtggactactttgtgaatggaggccaggaccagcccggctgccccaccttcttctacgccggctacagctacctgatctgtgaccacatgagagctgtgcacctgtacatcagcgccctggagaacagctgccccctgatggccttcccctgtgccagctacaaggccttcctggccggccgctgcctggactgcttcaaccccttcctgctgagctgcccccgcatcggcctggtggagcagggcggcgtgaagattgagcccctgcccaaggaggtgaaggtgtacctgctgaccaccagcagcgccccctactgcatgcaccacagcctggtggagttccacctgaaggagctgaggaacaaggacaccaacatcgaggtgaccttcctgagcagcaacatcaccagcagcagcaagatcaccatccccaagcagcagagatatggcaagggcatcatcgcccacgccaccccccagtgccagatcaaccaggtgaagttcaagttccagagcagcaacagagtgtggaagaaggacaggaccaccatcatcggcaagttctgcacagccctgctgcctgtgaatgaccgggagaagatggtgtgcctgcctgagcctgtgaacctgcaggcctctgtgacagtgtcctgtgacctgaagatcgcctgtgtgtag

SEQ ID NO: 83066 - DNA, 852 bp, Artificial Sequence
  derived and/or modified sequence
atggtgggccagctgttcggcggccagctgggccagatcaccggcctggacccagccgggcccgaatacaccagagcatcagttgaggagcgactagacgcaggcgatgcgctgttcgtggaagcgatccataccgatacagacaacctagggattcgtattcctgttggccacgtagattattttgttaacggggggcaggaccagccaggctgtccgaccttcttctatgctggctacagctacctgatctgcgaccacatgcgcgcagtacatttatacatttccgccttagagaactcgtgccccctgatggcctttccttgtgcttcctacaaagccttcctggccgggcggtgcctggactgttttaatccattcttgctctcttgtccgcggatcggcttagtggaacagggtggcgtgaagattgagcctctcccgaaggaagtcaaggtatacttgctgacgacgtcctcagctccatattgtatgcaccactccttagtcgaatttcatctgaaagagctgagaaataaggacacaaacatagaggttacattcctctcctctaatatcacaagttcctccaaaatcacgatcccaaagcagcagcgctatggcaagggaatcatcgcccatgccactccacagtgccaaatcaatcaggttaaatttaaattccaatcatctaatagggtatggaaaaaggaccgaacaactattatcggcaaattttgtacggccttactacctgtaaacgacagggaaaagatggtctgtctcccagagcccgtcaatctacaagcaagcgtgactgtatcatgcgacctcaaaatagcctgcgtctag

SEQ ID NO: 83067 - DNA, 852 bp, Artificial Sequence
  derived and/or modified sequence
atggtggggcagctgtttggcggtcagcttggtcagattaccggcctggacccagctggcccagagtataccagggccagtgtggaggaacgtctggacgctggcgatgccctgttcgtggaagccatacacaccgacaccgataacttggggatacgaatccccgtagggcatgtggattatttcgtcaatggtgggcaagatcaacctggatgcccgacttttttttatgctgggtattcatatctgatttgtgatcacatgcgagctgtgcatctatacatatccgcacttgaaaactcatgcccattgatggcctttccctgcgcctcctacaaggccttcctggccggacggtgtctggactgttttaatccttttctgctgagctgcccccgtataggcctggttgagcagggaggagtgaagattgagccgctgccgaaggaggtgaaggtatatctgctcacaacctctagcgctccttactgtatgcaccacagtctcgttgagttccaccttaaagaattacgaaataaagacaccaacatagaagtcacatttttgagttcaaacattacctccagtagcaagattactatcccaaagcagcagaggtacggcaaaggcataattgcccacgccacgccacagtgccaaatcaaccaggtaaagttcaaattccagagcagcaacagggtgtggaagaaagatagaacaactatcattggcaagttctgcactgcattactgccggtcaatgatagggaaaaaatggtgtgtctgcctgaacccgtgaatctgcaggccagcgttacagtgagctgtgaccttaagattgcgtgtgtctag

SEQ ID NO: 83068 - DNA, 852 bp, Artificial Sequence
  derived and/or modified sequence
atggtgggccagctgttcggcggccagctgggccagatcaccggcctggaccccgccggccccgagtacaccagagccagcgtggaggagagactggacgccggcgacgccctgttcgtggaggccatccacaccgacaccgacaacctgggcatcagaatccccgtgggccacgtggactacttcgtgaacggcggccaggaccagcccggctgccccaccttcttctacgccggctacagctacctgatctgcgaccacatgagagccgtgcacctgtacatcagcgccctggagaacagctgccccctgatggccttcccctgcgccagctacaaggccttcctggccggcagatgcctggactgcttcaaccccttcctgctgagctgccccagaatcggcctggtggagcagggcggcgtgaagatcgagcccctgcccaaggaggtgaaggtgtacctgctgaccaccagcagcgccccctactgcatgcaccacagcctggtggagttccacctgaaggagctgagaaacaaggacaccaacatcgaggtgaccttcctgagcagcaacatcaccagcagcagcaagatcaccatccccaagcagcagagatacggcaagggcatcatcgcccacgccaccccccagtgccagatcaaccaggtgaagttcaagttccagagcagcaacagagtgtggaagaaggacagaaccaccatcatcggcaagttctgcaccgccctgctgcccgtgaacgacagagagaagatggtgtgcctgcccgagcccgtgaacctgcaggccagcgtgaccgtgagctgcgacctgaagatcgcctgcgtgtag

SEQ ID NO: 83069 - protein, 347 aa, Artificial Sequence
  derived and/or modified sequence
MAAGTAVGAWVLVLSLWGAVVGAQNITARIGEPLVLKCKGAPKKPPQRLEWKLNTGRTEAWKVLSPQGGGPWDSVARVLPNSSLFLPAVGIQDEGIFRCQAMNRNGKETKSNYRVRVYQIPGKPEIVDSASELTAGVPNKVGTCVSEGSYPAGTLSWHLDGKPLVPNEKGVSVKEQTRRHPETGLFTLQSELMVTPARGGDPRPTFSCSFSPGLPRHRALRTAPIQPRVWEPVPLEEVQLVVEPEGGAVAPGGTVTLTCEVPAQPSPQIHWMKDGVPLPLPPSPVLILPEIGPQDQGTYSCVATHSSHGPQESRAVSISIIEPGEEGPTAGEGFDKVREAEDSPQHM

SEQ ID NO: 83070 - protein, 234 aa, Artificial Sequence
  derived and/or modified sequence
MAAGTAVGAWVLVLSLWGAVVGAQNITARIGEPLVLKCKGAPKKPPQRLEWKLNTGRTEAWKVLSPQGGGPWDSVARVLPNSSLFLPAVGIQDEGIFRCQAMNRNGKETKSNYRSLRTFTITASDWIFPPSEIPGKPEIVDSASELTAGVPNKVGTCVSEGSYPAGTLSWHLDGKPLVPNEKGVSVKEQTRRHPETGLFTLQSELMVTPARGGDPRPTFSCSFSPGLPRHRALR

SEQ ID NO: 83071 - protein, 347 aa, Artificial Sequence
  derived and/or modified sequence
MAAGTAVGAWVLVLSLWGAVVGAQNITARIGEPLVLKCKGAPKKPPQRLEWKLNTGRTEAWKVLSPQGGGPWDSVARVLPNGSLFLPAVGIQDEGIFRCQAMNRNGKETKSNYRVRVYQIPGKPEIVDSASELTAGVPNKVGTCVSEGSYPAGTLSWHLDGKPLVPNEKGVSVKEQTRRHPETGLFTLQSELMVTPARGGDPRPTFSCSFSPGLPRHRALRTAPIQPRVWEPVPLEEVQLVVEPEGGAVAPGGTVTLTCEVPAQPSPQIHWMKDGVPLPLPPSPVLILPEIGPQDQGTYSCVATHSSHGPQESRAVSISIIEPGEEGPTAGEGFDKVREAEDSPQHM

SEQ ID NO: 83072 - DNA, 1044 bp, Artificial Sequence
  derived and/or modified sequence
atggctgcaggtaccgcagtgggggcttgggtattggtattaagtctgtggggggccgttgtgggcgcccagaatataacagctcggataggcgagcccctcgtactgaagtgcaagggtgctcccaaaaagcctccacagcgactagaatggaaactgaacacaggccggacggaggcctggaaagtcttgtcgccacagggcggtggtccctgggactcagtcgcccgcgtgctgccgaactcctccttgttcctgccagcagtgggcattcaagatgagggcattttccgttgtcaggcgatgaataggaatggtaaggagacaaaatcaaattacagggtgagggtttatcaaataccagggaaacccgaaattgtagactcagcaagtgaactcaccgctggcgtgcctaataaagtcggaacttgtgtgtccgagggctcctatccagccggcacactttcttggcatctggatggaaagccgcttgtgcccaacgaaaagggagttagcgtcaaggaacaaacaaggcgtcatcctgagactggtttgtttaccctgcagagtgaattaatggttacccccgctagagggggggatcccagaccaacgttttcctgttccttcagcccaggactacccagacaccgtgcactgcggacagcccctatccagccccgggtatgggaacctgtgcccctggaagaagttcaactggtggtggaaccagaaggcggagccgtcgcgcccgggggaacagtgactctgacatgcgaagtgcccgcccagccatctcctcagattcactggatgaaagatggggtcccactacctctgccaccttccccggtactgatcctgcctgagattggaccacaggaccaggggacatattcttgtgtcgctacccacagtagccacggtcctcaggagtcccgagccgttagtattagcatcattgagcctggcgaggagggtcctacggcaggcgagggatttgacaaggtgagagaggccgaggactctccacagcacatgtag

SEQ ID NO: 83073 - DNA, 1044 bp, Artificial Sequence
  derived and/or modified sequence
atggctgctggaacagctgtgggcgcctgggtgctggtgctgagcctgtggggcgctgtggtgggcgcccagaacatcacagcccgcatcggggagcccctggtgctgaagtgcaagggggcccccaagaagccaccccagaggctggagtggaagctgaacacaggccgcacagaggcctggaaggtgctgagcccccagggcggcggcccctgggacagcgtggcccgggtgctgcccaacagcagcctcttcctgcctgctgtgggcatccaggatgagggcatcttccgctgccaggccatgaacagaaatggcaaggagaccaagagcaactacagagtgcgggtgtaccagatccctgggaagccagagatcgtggacagcgccagcgagctgacagctggggtgcccaacaaggtgggcacctgtgtgtctgagggcagctacccagctggcaccctgtcctggcacctggatggcaagcccctggtgcccaatgaaaaaggagtgtctgtgaaggagcagacccggcggcaccctgagaccggcctcttcaccctgcagagcgagctgatggtgaccccagcccggggcggggacccccggcccaccttcagctgcagcttcagccctggcctgcccaggcaccgggccctgaggacagcccccatccagccccgggtgtgggagcctgtgcccctggaggaggtgcagctggtggtggagcctgagggcggcgctgtggcccctgggggcaccgtgaccctgacctgtgaggtgcctgcccagcccagcccccagatccactggatgaaggatggagtgcccctgcccctgccccccagccctgtgctgatcctgcctgagatcggcccccaggaccagggcacctacagctgtgtggccacccacagcagccacggcccccaggagagcagagctgtgtccatcagcatcatcgagcctggagaggagggccccacagctggggagggctttgacaaggtgcgggaggccgaggacagcccccagcacatgtag

SEQ ID NO: 83074 - DNA, 1044 bp, Artificial Sequence
  derived and/or modified sequence
atggccgccggcaccgccgtgggcgcctgggtgctggtgctgagcctttggggagccgtcgttggagcacagaacataaccgctcgcattggcgagccgctggttttaaaatgcaagggagccccgaagaagccacctcagcgtctggagtggaagctgaatacaggacgaaccgaggcctggaaagtgctgagcccccaaggaggcggcccctgggacagtgtggctcgagtgttgccaaactccagcctgtttctcccggccgttggaatccaggacgaggggatcttcagatgccaggcgatgaaccgcaatgggaaggaaactaaatctaactacagggtgagagtctatcagatacctgggaagccggagattgttgactctgcctccgaactgactgctggcgttcccaacaaggttggaacctgtgtgtcagagggctcgtatcccgctggaacacttagttggcacctagacggcaaacccttggtgcccaacgagaagggcgtctcagtcaaagagcagaccaggaggcaccccgaaactggtctttttaccttgcagagcgagctgatggtcacacctgctcgcggtggagatcccagacccaccttttcctgctcttttagccctggtctcccccgccaccgcgccctgcggactgctcccatccagccgcgggtgtgggaaccagttccactagaggaggttcaacttgtggtcgagccggaagggggcgccgtggctccagggggaactgttactctcacctgcgaagtgcccgctcagccatcaccgcagattcactggatgaaggatggagttcctctcccccttcctccgtctccagttctcatcttgccagagataggaccacaggaccagggaacctatagctgcgtagcgacccatagtagccacgggccacaggaatctagggctgtgtccatttccattatcgagccaggtgaagagggccctacggccggggaggggtttgacaaagtgagggaggctgaagattcacctcagcatatgtag

SEQ ID NO: 83075 - DNA, 1369 bp, Artificial Sequence
  derived and/or modified sequence
gccaggaccctggaaggaagcaggatggcagccggaacagcagttggagcctgggtgctggtcctcagtctgtggggggcagtagtaggtgctcaaaacatcacagcccggattggcgagccactggtgctgaagtgtaagggggcccccaagaaaccaccccagcggctggaatggaaactgaacacaggccggacagaagcttggaaggtcctgtctccccagggaggaggcccctgggacagtgtggctcgtgtccttcccaacagctccctcttccttccggctgtcgggatccaggatgaggggattttccggtgccaggcaatgaacaggaatggaaaggagaccaagtccaactaccgagtccgtgtctaccagattcctgggaagccagaaattgtagattctgcctctgaactcacggctggtgttcccaataaggtggggacatgtgtgtcagagggaagctaccctgcagggactcttagctggcacttggatgggaagcccctggtgcctaatgagaagggagtatctgtgaaggaacagaccaggagacaccctgagacagggctcttcacactgcagtcggagctaatggtgaccccagcccggggaggagatccccgtcccaccttctcctgtagcttcagcccaggccttccccgacaccgggccttgcgcacagcccccatccagccccgtgtctgggagcctgtgcctctggaggaggtccaattggtggtggagccagaaggtggagcagtagctcctggtggaaccgtaaccctgacctgtgaagtccctgcccagccctctcctcaaatccactggatgaaggatggtgtgcccttgccccttccccccagccctgtgctgatcctccctgagatagggcctcaggaccagggaacctacagctgtgtggccacccattccagccacgggccccaggaaagccgtgctgtcagcatcagcatcatcgaaccaggcgaggaggggccaactgcaggtgaggggtttgataaagtcagggaagcagaagatagcccccaacacatgtgactggggggatggtcaacaagaaaggaatggaaggccccagaaaaccaggaggaagaggaggagcgtgcagaactgaatcagtcggaggaacctgaggcaggcgagagtagtactggagggccttgaggggcccacagacagatcccatccatcagctcccttttctttttcccttgaactgttctggcctcagaccaactctctcctgtataatctctctcctgtataaccccaccttgccaagctttcttctacaaccagagccccccacaatgatgattaaacacctgacacatcttgc

SEQ ID NO: 83076 - DNA, 1044 bp, Artificial Sequence
  derived and/or modified sequence
atggccgcagggactgctgtcggagcctgggtgctggtcctgtcactgtggggggcagtcgtcggagcacaaaatatcacagccagaattggggaacctctggtgttaaaatgcaaaggggcaccgaagaaaccccctcagagactcgaatggaaactcaataccggcagaacggaggcatggaaggtcctgtccccccagggagggggaccctgggattccgttgcacgtgtgttgccaaacagcagcctctttctgcctgccgttggtatccaagacgagggtatcttcaggtgccaggccatgaaccgtaacggtaaggagaccaagagcaattatcgggttcgagtttatcagattccagggaaaccagaaattgtagactctgcatccgagctgactgctggcgttccaaataaggtgggcacctgtgtgtcagagggaagctatccagctggaacactctcatggcatcttgacggcaaacctctcgttccaaacgagaagggcgtttctgtcaaggaacagacgcgtcgccacccagaaaccggtttgttcacattacagtcggagctgatggtaactcccgctcgaggcggagacccgcgacccacctttagttgcagtttttccccgggtctgccacggcatagagccctgcgtacggccccaatccagccaagggtctgggagccagtccccctagaggaagttcaactcgtagtggagcccgagggcggagcagtcgctccgggaggtaccgtgactctgacctgtgaagttcctgcccaaccttctccccagatccactggatgaaggatggtgtgccattgcctctgccccctagccccgtcctgattctccctgaaatcggacctcaggaccagggtacttactcttgtgtggctactcattcctcccatggaccgcaagagtctagggctgtgtcaatttcaattatcgaaccaggagaggagggcccaactgcaggtgagggatttgacaaagtgcgagaggccgaggatagccctcagcatatgtag

SEQ ID NO: 83077 - DNA, 1044 bp, Artificial Sequence
  derived and/or modified sequence
atggccgccggcaccgccgtgggcgcctgggtgctggtgctgagcctgtggggcgccgtggtgggcgcccagaacatcaccgccagaatcggcgagcccctggtgctgaagtgcaagggcgcccccaagaagcccccccagagactggagtggaagctgaacaccggcagaaccgaggcctggaaggtgctgagcccccagggcggcggcccctgggacagcgtggccagagtgctgcccaacagcagcctgttcctgcccgccgtgggcatccaggacgagggcatcttcagatgccaggccatgaacagaaacggcaaggagaccaagagcaactacagagtgagagtgtaccagatccccggcaagcccgagatcgtggacagcgccagcgagctgaccgccggcgtgcccaacaaggtgggcacctgcgtgagcgagggcagctaccccgccggcaccctgagctggcacctggacggcaagcccctggtgcccaacgagaagggcgtgagcgtgaaggagcagaccagaagacaccccgagaccggcctgttcaccctgcagagcgagctgatggtgacccccgccagaggcggcgaccccagacccaccttcagctgcagcttcagccccggcctgcccagacacagagccctgagaaccgcccccatccagcccagagtgtgggagcccgtgcccctggaggaggtgcagctggtggtggagcccgagggcggcgccgtggcccccggcggcaccgtgaccctgacctgcgaggtgcccgcccagcccagcccccagatccactggatgaaggacggcgtgcccctgcccctgccccccagccccgtgctgatcctgcccgagatcggcccccaggaccagggcacctacagctgcgtggccacccacagcagccacggcccccaggagagcagagccgtgagcatcagcatcatcgagcccggcgaggagggccccaccgccggcgagggcttcgacaaggtgagagaggccgaggacagcccccagcacatgtag

SEQ ID NO: 83078 - DNA, 1044 bp, Artificial Sequence
  derived and/or modified sequence
atggctgctggaaccgccgtgggcgcgtgggtgcttgtcctgagtctgtggggtgccgtggttggagcacagaacatcactgcgagaatcggagaacctctggtgttgaagtgtaaaggcgcccctaagaaaccccctcagcgactggaatggaaactcaacactggcagaacggaggcatggaaggttctatccccccagggtggcggcccgtgggactcagtagctcgggtcctgccaaacggctccctgttccttcctgccgtgggcatacaggacgaaggaatcttccgctgccaggctatgaaccggaacgggaaggagacaaagtctaactatcgtgtacgggtctatcagatacctgggaagcctgaaattgtagattctgcatctgagcttactgccggcgtccccaataaggttggcacatgcgtttctgaagggtcctatcctgcgggaacactcagctggcacttggacggtaaacccctcgtgccaaacgaaaaaggagttagcgtgaaagagcagacccggaggcatcctgagaccgggctctttaccctccagtcagagctgatggtgactcctgcccggggcggtgacccaaggcccactttttcgtgttcattctctcccggactgcctagacacagggcgttacgcaccgcacccatccaaccccgggtgtgggagccagtgcccctagaagaagtacagttggttgtcgagcccgagggaggagcggtggcccctggaggcaccgtgacgcttacctgtgaagtccctgcccaaccgagccctcagattcactggatgaaggatggcgtgccgttgccacttccaccaagtcctgtgctgatcctaccagaaatcggcccacaggatcagggtacctattcctgtgtcgcgactcattcctcacatgggccacaagagagtcgagcagtgagcattagcattattgagccaggggaagaagggccaacagcgggagaggggttcgacaaggtgagggaagcagaagatagccctcagcacatgtag

SEQ ID NO: 83079 - DNA, 1044 bp, Artificial Sequence
  derived and/or modified sequence
atggccgccggcactgccgtcggcgcctgggtcttggtactgtccctgtggggagctgttgtcggggctcagaacattacagcgcgtattggggaaccactggttctgaagtgcaagggagcccctaagaagcccccacaaagactcgaatggaagctgaataccggcaggacggaggcttggaaggttctgtccccccagggcggcggcccatgggattctgtggccagagtgctcccaaacggctctttgttcttacctgccgtgggtatacaggacgagggcatcttccgttgccaggccatgaacaggaatggcaaggagacaaagtcaaactatcgcgttagggtgtatcagattcccggcaagccggaaatcgttgactccgcatccgagcttacagccggtgtcccaaacaaggtaggcacctgcgtctctgaaggctcatatcccgccggcactctaagctggcaccttgatggcaaacctctggtgcccaacgagaagggggtgtctgtgaaagagcagacgaggcgtcatccggagactggcctgttcacacttcaatccgaactcatggtgacaccggccaggggcggggatccccgccccacgttcagctgctccttctcgccgggcctgcctaggcatcgcgccctaaggacagctcctatccagccacgcgtgtgggagcctgtaccactggaagaagtccagctggtagtcgagcccgagggcggcgccgtcgcccctgggggcaccgtcaccctgacatgcgaagtgcccgcgcagccatctcctcagatccactggatgaaagacggtgtgccattgcctctcccgccctctccggtgttgatcctgcccgaaatagggccacaagaccaagggacatacagctgcgtggcgacccactcctcgcacggcccacaggagtctcgcgcagtgtccatttcaattattgagccaggtgaggagggaccgaccgccggggaagggttcgataaagtgcgtgaagctgaagatagccctcagcacatgtag

SEQ ID NO: 83080 - DNA, 1044 bp, Artificial Sequence
  derived and/or modified sequence
atggccgccggcaccgctgtaggtgcttgggtcttagtactcagcctgtggggagcggtggtgggcgcacaaaatattactgcccggataggagagcctctcgtccttaaatgcaaaggcgccccaaagaagccaccacagcgactggaatggaagcttaatacagggagaacagaggcctggaaggtcctgagcccacaaggtggtggaccctgggactccgtggcccgcgttctcccgaacgggtcgttgtttctcccagccgtgggtattcaggatgaaggcatatttcgctgccaagctatgaaccgtaatgggaaagaaacaaagtcgaattacagggtaagagtgtaccaaatccccggaaagccggagatagttgatagcgcctcagaactgactgctggggtgcctaataaggtagggacttgcgtgagcgagggctcttatcctgcagggactctgtcttggcaccttgatgggaagccattagtcccaaacgagaaaggagtctcagtaaaggagcagactaggaggcaccctgaaacaggactctttaccctacagtctgaattaatggtgaccccggctcggggaggagaccctcggcctactttctcatgttcgttttctcccggtcttcccagacatcgtgcattgcgcactgcaccgattcaaccaagggtgtgggagccagttcctcttgaggaagtccagctggtcgtcgagcccgagggcggggctgtcgctcccgggggcactgtcacgctgacttgtgaggtgccagcccagcctagcccccagatacactggatgaaagatggcgtccctctcccgcttccccccagccccgttctgattctgccggaaatcggcccacaggaccaaggaacctatagctgcgtcgcgacgcattctagccacgggcctcaggagtcgcgagcagtaagtatttcgatcattgaacccggcgaggaagggccaacagccggcgagggcttcgataaagtacgcgaggcagaggactcaccccagcacatgtag

SEQ ID NO: 83081 - DNA, 1044 bp, Artificial Sequence
  derived and/or modified sequence
atggccgccggaacggctgtaggagcttgggtgcttgttctttctttatggggcgcagtggtaggcgcccagaatattactgctagaataggtgagcctttggtcttgaagtgtaagggcgcccccaagaagcctccccaacgcctggagtggaagctgaatactggcagaacagaagcttggaaagtgctttccccccagggaggtggtccttgggatagcgttgccagagtgctccccaatggatccttatttttgcctgctgtgggaatccaggatgaaggtatctttaggtgtcaggcgatgaaccgtaatggcaaagagaccaagtcaaactaccgcgtaagggtttaccagatccccggaaagcctgaaatcgtcgattccgcctcagaacttaccgccggagtgcctaacaaggtaggcacctgcgtcagcgagggctcatatcccgccgggactctgtcttggcacctggatggaaagccccttgttccaaatgaaaaaggggtgagtgtcaaagaacagacccgacggcaccctgagacagggctcttcactctccaatccgagctgatggtcacaccggcccgcggaggggaccctaggccaacattcagctgttctttcagccccggactgcctaggcatagagcgctccggaccgccccaatccagcctcgcgtgtgggagcccgtgcccctggaggaagtgcaactggtcgtcgagcctgagggcggcgctgtagccccaggtggaaccgtgactcttacatgtgaggtgcccgcacagccgtcgccacagattcattggatgaaggatggcgtgccactcccattgcctccaagcccagttcttattttacctgagataggtccacaggaccagggcacttactcctgtgtcgctacacatagcagtcacggaccacaggaatctcgtgctgttagtatatcgatcatcgagccaggcgaagagggccccactgctggggaggggtttgataaggttcgagaggccgaagattctcctcagcacatgtag

SEQ ID NO: 83082 - DNA, 1044 bp, Artificial Sequence
  derived and/or modified sequence
atggccgctgggactgctgtcggtgcctgggtgttggtgctctcattatggggggcagtcgtcggcgcgcagaacatcaccgcaaggatcggggaaccactggtgctgaaatgtaagggcgcaccgaagaagccaccacagcgcctcgaatggaagctgaataccggacgcaccgaagcttggaaggtgttgtcaccgcaaggcggcggtccctgggactcagttgcaagagtcctcccgaatagctccttgtttctacctgcagtgggaatccaggatgagggcatcttccgctgtcaggctatgaacagaaacggtaaagagactaaaagcaactaccgggtgagggtgtatcagatccccggaaaaccggagatcgtggattcagcctcagagctgactgccggggtgcccaacaaggttggaacctgtgtgtcagagggaagttaccccgccggaaccctctcttggcatcttgacgggaaacctctagtgcctaatgaaaagggcgtgagcgttaaggagcagacccgtcgccatccagagaccgggttgttcacactccagtctgagcttatggtaaccccagcccgagggggcgatccacgtcctaccttctcgtgctcattcagccctggcctccctagacaccgtgccctgaggactgcacccatccagccacgtgtgtgggagccggtccctctagaagaggtacagctggtcgtggaacccgagggcggggctgtggcccccggcggtaccgttactttgacatgcgaggtgcccgcacagccttccccacagattcactggatgaaagacggcgtgcctttaccgctaccgcccagccctgtcttgatactgcccgaaatcggtccccaggatcagggtacctactcatgcgtcgccacccatagtagtcacggcccacaggagtcgcgtgccgtttctatcagcattattgagccaggcgaggagggccctactgctggtgaggggttcgataaggtacgggaagctgaagacagtcctcagcacatgtag

SEQ ID NO: 83083 - DNA, 1044 bp, Artificial Sequence
  derived and/or modified sequence
atggctgccggcactgctgtgggcgcctgggtgctggtgctgtccctgtggggagccgtggtgggcgcccagaacattacggcacgtatcggggaaccactcgtcctcaaatgtaagggagcgcccaaaaagcctcctcaacggctcgagtggaaactgaacaccggacgcactgaagcctggaaggtactatctccccagggcgggggtccttgggattcagtggcacgggtcttaccgaacggcagcctgttcctgccagctgtgggcattcaggatgaggggatctttcgctgtcaggctatgaataggaacggtaaggaaaccaagagtaactatcgtgtcagagtgtatcagatcccaggtaagccagaaattgttgactcagcatccgaattgaccgccggggtacccaacaaagtcgggacctgtgttagcgagggatcataccctgccgggaccctttcttggcaccttgatggaaagcctctcgtgcccaatgaaaagggcgtgtctgttaaggagcagacacggagacatcccgaaactgggctgtttactctgcaaagtgaattgatggtgacacccgccaggggaggagacccaaggccgacgtttagctgctcattcagccctggactgcctagacacagggccttgcggaccgctcccatccagccccgcgtctgggaacccgttcctcttgaagaggttcagctggtggtggagccagaggggggggctgttgccccaggaggcacagtcacactcacgtgcgaggttcctgcacagccatccccccaaattcactggatgaaggatggcgttcctctccctctcccaccttcccccgtgttaatccttcctgagatcgggccacaggaccagggcacatactcttgcgtcgctacccactcctcacatggcccccaggaatcccgtgccgttagcattagcataatcgagcctggggaggaaggtcctactgcaggggaaggatttgataaggtacgggaggcagaagacagtccccagcacatgtag

SEQ ID NO: 83084 - DNA, 1369 bp, Artificial Sequence
  derived and/or modified sequence
gccaggaccctggaaggaagcaggatggctgccggaacagcagttggagcctgggtgctggtcctcagtctgtggggggcagtagtaggtgctcaaaacatcacagcccggattggcgagccactggtgctgaagtgtaagggggcccccaagaaaccaccccagcggctggaatggaaactgaacacaggccggacagaagcttggaaggtcctgtctccccagggaggaggcccctgggacagtgtggctcgtgtccttcccaacggctccctcttccttccggctgtcgggatccaggatgaggggattttccggtgccaggcaatgaacaggaatggaaaggagaccaagtccaactaccgagtccgtgtctaccagattcctgggaagccagaaattgtagattctgcctctgaactcacggctggtgttcccaataaggtggggacatgtgtgtcagagggaagctaccctgcagggactcttagctggcacttggatgggaagcccctggtgcctaatgagaagggagtatctgtgaaggaacagaccaggagacaccctgagacagggctcttcacactgcagtcggagctaatggtgaccccagcccggggaggagatccccgtcccaccttctcctgtagcttcagcccaggccttccccgacaccgggccttgcgcacagcccccatccagccccgtgtctgggagcctgtgcctctggaggaggtccaattggtggtggagccagaaggtggagcagtagctcctggtggaaccgtaaccctgacctgtgaagtccctgcccagccctctcctcaaatccactggatgaaggatggtgtgcccttgccccttccccccagccctgtgctgatcctccctgagatagggcctcaggaccagggaacctacagctgtgtggccacccattccagccacgggccccaggaaagccgtgctgtcagcatcagcatcatcgaaccaggcgaggaggggccaactgcaggtgaggggtttgataaagtcagggaagcagaagatagcccccaacacatgtgactggggggatggtcaacaagaaaggaatggaaggccccagaaaaccaggaggaagaggaggagcgtgcagaactgaatcagtcggaggaacctgaggcaggcgagagtagtactggagggccttgaggggcccacagacagatcccatccatcagctcccttttctttttcccttgaactgttctggcctcagaccaactctctcctgtataatctctctcctgtataaccccaccttgccaagctttcttctacaaccagagccccccacaatgatgattaaacacctgacacatcttgc

SEQ ID NO: 83085 - DNA, 1369 bp, Artificial Sequence
  derived and/or modified sequence
gccaggaccctggaaggaagcaggatggcagccggaacagcagttggagcctgggtgctggtcctcagtctgtggggggcagtagtaggtgctcaaaacatcacagcccggattggcgagccactggtgctgaagtgtaagggggcccccaagaaaccaccccagcggctggaatggaaactgaacacaggccggacagaagcttggaaggtcctgtctccccagggaggaggcccctgggacagtgtggctcgtgtccttcccaacggctccctcttccttccggctgtcgggatccaggatgaggggattttccggtgccaggcaatgaacaggaatggaaaggagaccaagtccaactaccgagtccgtgtctaccagattcctgggaagccagaaattgtagattctgcctctgaactcacggctggtgttcccaataaggtggggacatgtgtgtcagagggaagctaccctgcagggactcttagctggcacttggatgggaagcccctggtgcctaatgagaagggagtatctgtgaaggaacagaccaggagacaccctgagacagggctcttcacactgcagtcggagctaatggtgaccccagcccggggaggagatccccgtcccaccttctcctgtagcttcagcccaggccttccccgacaccgggccttgcgcacagcccccatccagccccgtgtctgggagcctgtgcctctggaggaggtccaattggtggtggagccagaaggtggagcagtagctcctggtggaaccgtaaccctgacctgtgaagtccctgcccagccctctcctcaaatccactggatgaaggatggtgtgcccttgccccttccccccagccctgtgctgatcctccctgagatagggcctcaggaccagggaacctacagctgtgtggccacccattccagccacgggccccaggaaagccgtgctgtcagcatcagcatcatcgaaccaggcgaggaggggccaactgcaggtgaggggtttgataaagtcagggaagcagaagatagcccccaacacatgtgactggggggatggtcaacaagaaaggaatggaaggccccagaaaaccaggaggaagaggaggagcgtgcagaactgaatcagtcggaggaacctgaggcaggcgagagtagtactggagggccttgaggggcccacagacagatcccatccatcagctcccttttctttttcccttgaactgttctggcctcagaccaactctctcctgtataatctctctcctgtataaccccaccttgccaagctttcttctacaaccagagccccccacaatgatgattaaacacctgacacatcttgc

SEQ ID NO: 83086 - DNA, 1044 bp, Artificial Sequence
  derived and/or modified sequence
atggctgctggaacagctgtgggcgcctgggtgctggtgctgagcctgtggggcgctgtggtgggcgcccagaacatcacagcccgcatcggggagcccctggtgctgaagtgcaagggggcccccaagaagccaccccagaggctggagtggaagctgaacacaggccgcacagaggcctggaaggtgctgagcccccagggcggcggcccctgggacagcgtggcccgggtgctgcccaacggcagcctcttcctgcctgctgtgggcatccaggatgagggcatcttccgctgccaggccatgaacagaaatggcaaggagaccaagagcaactacagagtgcgggtgtaccagatccctgggaagccagagatcgtggacagcgccagcgagctgacagctggggtgcccaacaaggtgggcacctgtgtgtctgagggcagctacccagctggcaccctgtcctggcacctggatggcaagcccctggtgcccaatgaaaaaggagtgtctgtgaaggagcagacccggcggcaccctgagaccggcctcttcaccctgcagagcgagctgatggtgaccccagcccggggcggggacccccggcccaccttcagctgcagcttcagccctggcctgcccaggcaccgggccctgaggacagcccccatccagccccgggtgtgggagcctgtgcccctggaggaggtgcagctggtggtggagcctgagggcggcgctgtggcccctgggggcaccgtgaccctgacctgtgaggtgcctgcccagcccagcccccagatccactggatgaaggatggagtgcccctgcccctgccccccagccctgtgctgatcctgcctgagatcggcccccaggaccagggcacctacagctgtgtggccacccacagcagccacggcccccaggagagcagagctgtgtccatcagcatcatcgagcctggagaggagggccccacagctggggagggctttgacaaggtgcgggaggccgaggacagcccccagcacatgtag

SEQ ID NO: 83087 - DNA, 1044 bp, Artificial Sequence
  derived and/or modified sequence
atggccgccggcaccgccgtgggcgcctgggtgctggtgctgagcttgtggggcgctgtggtaggggcccaaaatattaccgcccgaattggtgagccactcgttctgaaatgcaaaggggcccctaagaagccgccccagcggctcgagtggaaactgaacactggcaggacagaagcttggaaagtcttatcccctcagggaggcgggccctgggactctgtggcacgcgttctgccaaacggtagcctgtttctgcccgccgtggggatccaggatgaaggcattttcagatgccaggccatgaataggaatggtaaggagaccaagtccaactaccgagttcgggtgtatcagatcccgggcaagcctgaaattgtagacagcgcatccgagctcacagcgggagtccccaataaagttggcacctgtgtgagcgagggaagctacccagctgggaccctgagctggcatctcgatggaaagcctctggtgccgaatgagaagggtgtatcagtgaaagagcagactagacggcatccagagactggtttatttaccttgcagtccgagttaatggtgacccccgcgcgcggcggtgacccacgcccgactttctcctgttcctttagcccgggcctgcctaggcatcgggcattgaggactgcgcccatccagccacgggtgtgggaacctgttcctctggaggaagtccaattggtggtggagcctgagggcggcgctgtcgcacccgggggtactgtgacccttacatgtgaagtgcctgcccagccatcaccccagatacattggatgaaggatggggtccccctgccacttcctccatcccctgtcttgattcttcctgagattggaccccaggaccagggcacgtattcttgcgtggcaacgcatagctcacatggacctcaagaaagtcgagccgtgagcatctctatcatagagccaggagaagagggacccacggcgggggagggctttgataaagttagagaagccgaagactcaccgcagcacatgtag

SEQ ID NO: 83088 - DNA, 1044 bp, Artificial Sequence
  derived and/or modified sequence
atggccgccggcaccgccgtgggcgcctgggtgctggtgctgagcctgtggggagcagtcgtaggagcccagaatattacagcacgtataggcgagcccctagtcttaaaatgtaaaggggcccctaaaaagccaccccaacgcctggagtggaagctgaatacggggcgtaccgaggcctggaaggtcctctctccccaggggggcggcccatgggattctgttgcccgggtgttgcccaacggctccttattcctcccagctgtcgggattcaagacgaaggcatcttcaggtgccaagcgatgaataggaacgggaaagaaaccaaatctaactacagagtgagggtctaccagatacccggaaaacccgagatcgtagatagcgcttcagaacttaccgcaggcgtcccaaacaaagtgggtacctgcgtgtccgagggcagttatccagccggcaccctctcctggcacctggatggaaaacctctcgtgcccaatgagaaaggagtaagcgtcaaggagcagacaagacggcacccggagactggcctgttcacattgcagagcgaattgatggtgacaccagctaggggcggcgatccacgccccactttctcctgctctttcagccccggccttccccgccaccgtgcccttcggaccgcccctattcagccccgggtctgggaaccagtcccgctggaagaagtacagctggtggttgagccagaaggtggagcagtggcaccgggtgggactgtgaccctgacctgcgaggtgccagctcagcctagcccgcaaattcattggatgaaggatggggttccgctgcctctcccaccgagcccggttctgattctccccgaaatcggacctcaggatcaggggacctacagttgcgtagccacacactcttcacacggaccccaagagtcacgcgccgtcagtatctccattatcgaaccaggtgaagaggggcccactgccggcgaaggcttcgacaaggtaagagaagccgaggattccccacagcatatgtag

SEQ ID NO: 83089 - DNA, 1044 bp, Artificial Sequence
  derived and/or modified sequence
atggccgccggcaccgccgtgggcgcctgggtgctggtgctgagcttgtggggagccgtggtgggggcccagaatattacggctcgcattggagaaccgctggtcctgaaatgcaagggcgccccaaaaaaacccccgcagagactcgagtggaaactcaatacagggcgtaccgaagcatggaaggtgctcagtccacagggagggggcccctgggactccgtagccagggtactccccaacggttctttgtttctccctgccgtgggcatccaggatgaggggatattcaggtgccaagctatgaaccgaaacgggaaggagacaaaatcaaactacagggtccgggtgtaccagatcccaggcaaacctgagatcgttgatagcgcatccgagctgacagccggcgtacccaataaagtcggtacttgcgtgagcgaaggctcttatccagctgggacactctcttggcacctcgacggtaagcctctcgttccaaacgaaaagggagtgtccgttaaggaacaaacccgaaggcatccggagaccggcctcttcacactgcagtcagaactgatggtgacccccgcgaggggcggtgatcctagaccgacattctcttgctccttctcccctggccttcctaggcaccgggcactccgcaccgcccccattcagcccagggtgtgggaacctgtcccattagaggaggtccagctggtggtggagcccgaaggcggggctgtggctcctggcggtaccgtgactctgacttgcgaggtgcccgcccagccctcaccacagatacactggatgaaggatggcgttccgcttcccctgccaccgagtcccgtcctgatcctgccagaaatcggtccccaggatcagggtacttatagctgcgttgccacacacagcagtcacggccctcaggagagtcgtgctgttagcatctcgatcattgagccaggcgaggaaggtcccacggctggggaaggcttcgacaaggtgcgggaagccgaggactcgccccagcacatgtag

SEQ ID NO: 83090 - DNA, 1044 bp, Artificial Sequence
  derived and/or modified sequence
atggccgccggcaccgccgtgggcgcctgggtgctggtgctgagcttgtggggcgccgtggtgggagcacagaacattacggcacggattggggagcctctggtgctgaaatgcaagggcgcccctaagaagccacctcagcgtttggaatggaaattgaacactggtagaacagaagcttggaaggttctgtccccccaagggggtggaccgtgggacagcgtggcgagggtgctgcccaacggatctttatttttgccggctgtgggcatccaggatgagggcatattccggtgccaggccatgaacagaaacggcaaggaaactaaatcgaattaccgagtgagggtgtaccagatccccggtaaacccgagattgtagatagcgcttccgaacttactgccggggtgccaaataaagtgggcacatgtgtctctgagggctcctacccagccgggaccctgtcatggcacctggacggtaagcccctcgttcccaacgagaaaggcgtaagtgttaaggagcagacccgccgacatcccgagacgggactcttcacccttcagagcgaactcatggtgaccccagcccggggaggagatcccagaccgaccttttcgtgctccttctcgccaggcctgcccagacatagagctctgcggactgcacctattcagccaagagtgtgggagcctgtgcctctggaagaggttcagctggttgtcgagcctgagggcggcgcagtagcacctggcggcaccgtgaccctgacatgcgaggttcccgctcagccatcgccccagattcattggatgaaggatggggtacccctgccgctacctccctcgccagtgctcattctgccggagatcggaccacaagaccagggcacatactcctgcgtcgccactcactcttcacatgggcctcaggaatcacgggccgtgtccatctccatcatagagccaggcgaggaggggcctacagcaggcgagggttttgataaagtccgggaagcggaggactctccacagcacatgtag

SEQ ID NO: 83091 - DNA, 1044 bp, Artificial Sequence
  derived and/or modified sequence
atggccgccggcaccgccgtgggcgcctgggtgctggtgctgagcttatggggcgcagttgtcggtgcccaaaacattacagcccgcataggagagcccttggtgttaaaatgtaaaggggcccctaagaagccaccccagagactggagtggaagctgaatactggccggacggaggcctggaaagttctgtccccccaggggggagggccgtgggatagtgtagcacgagttttgcccaacagcagcctgttccttcccgccgttggaattcaggacgaaggaatcttccgttgtcaagcaatgaacaggaatggcaaagagactaagtcaaactaccgagtacgggtgtaccagatcccaggtaagcctgagatagtcgactcagcatctgagctgacggctggggtgcccaacaaggtcggcacctgcgtgtccgaggggtcttatcctgcgggtactctctcctggcatttggatgggaaaccgttagtgcccaacgagaagggtgtgagcgtgaaggagcagacaagaagacacccagagactggcctatttactcttcaatctgagctgatggttacccctgctagagggggcgacccgagacccactttttcctgctctttttctccgggtttgcccaggcaccgggcactgcgcacagccccaattcagcctcgggtgtgggagccagtgcccttagaggaagtgcagcttgttgtggagcctgaaggcggagccgttgcccctggcggtactgttaccttgacatgcgaagtgccggcacagccatcgccccagatccactggatgaaggacggagtgccactgcccttgccaccatccccagtcctgattttgcctgaaattgggccacaagatcagggcacctactcttgtgtcgcgacgcactcttctcatggacctcaggagtctagagccgtctccatttctatcattgagccaggcgaggaaggccctaccgctggggagggctttgataaggtgcgcgaagctgaggacagcccacagcacatgtag

SEQ ID NO: 83092 - DNA, 1044 bp, Artificial Sequence
  derived and/or modified sequence
atggccgccggcaccgccgtgggcgcctgggtgctggtgctgagcctgtggggcgccgtggtcggcgcccaaaacattacagcccgaattggagagcccttggttctcaagtgcaagggtgccccgaagaagcctcctcagagattggagtggaagctgaacacaggtaggacagaggcatggaaggtactctcaccccaaggagggggcccatgggattctgtagcacgcgtgctgcccaatggaagcctctttttaccagctgtgggcatccaagacgagggaatcttccggtgtcaggcaatgaacagaaatgggaaggaaacaaagagtaattaccgagttcgcgtttaccagattccaggcaagcctgagatcgtggatagtgctagtgaacttactgctggagtcccaaataaggtgggaacctgtgtgtctgagggatcataccctgctgggacccttagctggcatctcgatggaaagcctctagtccctaacgaaaagggtgtatctgttaaagagcaaacccgaaggcacccagagaccggactttttacgctgcagtccgaattgatggtgacccccgcaaggggcggagatccaaggcctacattctcgtgcagcttcagccctggcctaccacgccacagggccctgcggaccgcccccattcagccccgagtatgggaaccagtgcctcttgaggaagtacagttggttgtcgaaccagaagggggcgcagtggcccctggcgggaccgttactttgacctgtgaggtccctgcccagccctctcctcagattcattggatgaaagatggcgttccactgcctcttccaccatccccggtcctgatcctaccggagattgggccacaggatcagggaacttactcatgcgtggcaactcacagctctcacggaccacaagaaagtagggcggtttccatctctataatcgagcctggagaggaaggacctactgcaggcgagggattcgacaaggtgagggaagccgaggacagcccccagcatatgtag

SEQ ID NO: 83093 - DNA, 1044 bp, Artificial Sequence
  derived and/or modified sequence
atggctgcagggacagctgtaggcgcttgggttttggtgcttagcctgtggggagctgtggtcggtgcgcagaatatcaccgccaggattggtgagccactggttctgaagtgcaaaggtgctcctaagaagccgcctcagcgccttgaatggaagctaaatacgggtaggacggaggcctggaaagtgttgagtccgcagggcggtgggccttgggatagcgtggctagagtgttgccaaatgggtccctgtttctgccagccgtcgggattcaagacgagggaattttcaggtgccaggctatgaataggaacggaaaagaaaccaaatccaactatagagtaagagtctaccagatcccaggcaagccagagattgtcgactccgccagcgaactcacagccggagtgccaaataaagtcggaacatgtgtaagcgaaggatcataccccgcaggaactctgtcgtggcacttagatggcaagccacttgtcccgaacgagaagggggtgagtgtgaaagagcagacccggagacacccagaaactggactcttcactctgcagtctgaattgatggtcacaccggctcgcggaggggaccctagacccacgtttagttgtagcttttctccgggacttccgagacatcgcgcactgaggaccgctcctatccagccacgtgtttgggaacccgtcccactggaggaggtgcagttggtcgtggaaccagaaggtggcgctgtcgctccagggggtaccgttacactaacctgcgaagtccctgcccagcccagccctcagattcattggatgaaggatggggtccccctgcctcttcccccatcgcctgttctgatcttgccagagatcggcccacaggatcagggcacctattcatgtgtcgccacccactcctctcacgggcctcaggaatcgagagccgttagcatttcaatcatcgaaccgggtgaagaaggtccaaccgccggtgaggggtttgataaagtgagggaagccgaggacagtcctcagcacatgtag

SEQ ID NO: 83094 - DNA, 1044 bp, Artificial Sequence
  derived and/or modified sequence
atggcagcaggtacggccgtgggagcttgggttctggtgttgagcctctggggggcagttgttggcgctcagaacattacagcaagaatcggggaacctttagtcctgaagtgtaagggtgcaccaaagaaacctccacagaggctggaatggaaactcaacacaggcaggaccgaggcctggaaggtgctgtccccccaagggggtggaccatgggactctgtggctcgcgtcctcccaaacggcagcctgttcctaccagccgtaggaatacaggacgaggggatctttaggtgccaggctatgaatcgtaacggtaaggaaactaagagcaactaccgggtgcgagtctaccagattcctggtaagcctgaaatagttgattcagcaagcgaactaacagctggagttccaaacaaagttggaacttgcgtttccgaagggtcttacccagctggaactttgtcctggcatctggacggcaaaccactcgttcctaacgaaaaaggcgtttctgtcaaggaacagactagaagacatcccgaaaccggcctttttactttacaatccgaacttatggtaacccctgcaagagggggtgatcccagacccactttctcatgcagttttagtcccggactgcccaggcaccgcgctctgcgaacggctcctattcagcctcgggtttgggaaccagtgccgctagaagaagttcaactcgtcgtcgaaccagagggaggagcagttgccccaggaggcaccgtgactctgacatgcgaagtccccgctcaaccctccccacagatccactggatgaaagacggagtgccgctgccactcccacctagtcctgttttgatcctgcccgaaattgggcctcaggatcaggggacttacagctgcgtggcaacccactcttctcacggcccacaagagagccgagccgtttccatcagtatcatagaaccaggagaggaaggcccaactgccggagaagggtttgataaagtccgggaagcggaggatagcccccaacacatgtag

SEQ ID NO: 83095 - DNA, 1044 bp, Artificial Sequence
  derived and/or modified sequence
atggctgccggaacagcagtcggagcttgggtcctggtcctgtctttatggggagcggtggttggagctcagaacataaccgccagaatcggagagccgctagttctaaaatgtaaaggagctcccaaaaagccaccccagcgcctggaatggaaactgaatacaggtcgcaccgaagcctggaaagttctgtctccccagggaggcggtccctgggacagcgtggccagagtcttaccaaacgggagcttgtttctccccgcagtgggcatccaggatgagggtatcttccggtgccaggccatgaaccggaatggtaaagagaccaagtctaactacagggtaagggtctatcagattcctggtaagcccgagatcgtggattccgcttccgagcttacggccggagtgcctaacaaagtaggaacctgtgtgagcgagggaagttaccctgctggtactctttcttggcatttagacggcaaaccgcttgtgcccaacgagaaaggtgtgagtgtgaaagagcagacccgccgtcatcctgagaccggactctttaccctccagtctgagctaatggtcacaccagccaggggaggcgaccctcgtccgactttctcttgctccttctcgcccggactgcccaggcacagggccctgaggacggctcccatccagcctagagtatgggagccagtcccattagaagaagtgcagcttgtcgtcgaacctgagggcggtgctgtcgcgccaggcggtacggtcaccctgacctgcgaggttccagctcagccttccccccaaatccactggatgaaggatggcgtgccgctcccactgccaccttccccagtgctaattctcccagagattgggcctcaggatcagggaacttactcttgcgtggccacgcactcctctcacggccctcaagagtcccgcgcagtcagtatcagtattatcgagcccggagaggagggaccaaccgcaggtgaagggtttgataaggtgcgcgaggctgaagactcaccacaacacatgtag

SEQ ID NO: 83096 - DNA, 1044 bp, Artificial Sequence
  derived and/or modified sequence
atggcagctggcaccgctgtgggggcttgggtgctagtgcttagtctgtggggcgctgtagtgggcgctcagaatatcactgcgcgaataggtgagcctctggtgctcaaatgtaagggggcacctaagaaaccccctcaacgcctggagtggaaactgaacaccggaagaacggaagcttggaaagtgctttctcctcagggtggcggtccttgggattctgttgccagagttctccctaatggtagtctattcctgcctgcagttgggatacaggacgagggcatttttagatgtcaagcgatgaatcggaatggcaaggagacaaaaagcaattatcgggtacgggtttatcaaatccccggaaagccagagatcgttgatagcgcttccgagttgacagccggtgtgccaaacaaagtaggcacttgcgtctccgaaggttcttatcccgcaggcaccctctcctggcatctggacgggaagccactagtccccaacgaaaaaggcgtcagcgtgaaggaacagacccgacgccaccccgagacagggcttttcacacttcaatcagagctcatggtaactccagccagaggcggtgatcccaggccgactttttcttgcagcttctctccaggcttgccgcgacatcgagctctccggacggccccaattcaacccagagtgtgggaaccggtgccactagaggaagtccagttagttgtggagcctgaaggcggtgccgttgcccctggtggtaccgtaacattgacatgcgaggttcctgctcagccttctccacagatccattggatgaaggacggcgtgccacttccattgcctccctctcccgtcctgatccttccagaaataggaccgcaagatcagggcacctatagctgcgtagctacacactctagccacggaccgcaggaatcaagagcagtgtcgatctctatcatagagccaggagaggaaggacctacagccggagagggtttcgacaaggtccgagaggccgaagatagcccgcagcacatgtag

SEQ ID NO: 83097 - DNA, 1044 bp, Artificial Sequence
  derived and/or modified sequence
atggcagcaggaactgccgtgggtgcgtgggtgttagtgctgtctttgtggggtgccgtggtgggggctcagaacataaccgctagaattggggaaccactggtacttaagtgtaagggcgcacctaagaagcccccacagcgcttggaatggaagcttaatacaggcaggactgaggcctggaaagttttgagtccacaggggggtggcccttgggactccgtcgcgagggttctgccaaacagttctctgttcttgcctgcggtcgggattcaggacgaaggcatttttaggtgccaggctatgaatcgtaatgggaaggagaccaaatcgaactaccgcgtgagagtttatcagattccaggcaaacctgaaattgtagactctgcgtcagagcttaccgcaggagtgcctaacaaggtgggaacttgtgtatccgagggatcctatccagccggaaccttgtcctggcacctcgatgggaagccactggttcccaatgaaaagggagtttctgtcaaagagcagacacgtagacatcctgaaactggtctctttacattacagtccgagctgatggttaccccagctagaggcggagacccgcgaccaactttttcctgcagtttctcacccggactgccacgacaccgtgctctcagaactgctcctatacagccaagagtttgggagcctgttccgctcgaggaagtgcaactggttgtggaaccagaggggggagcagtggcccctggcggtactgttacgctgacttgcgaggtccccgcacagccctccccccagatccattggatgaaggacggagtacctctgcctcttccgccatccccagtattaattctgccggagattgggcctcaggatcagggcacctactcttgcgtcgcaacccattccagccatggacctcaggaatctcgcgcagtgagcatctccatcatcgagcccggtgaagaaggtcccaccgctggagagggatttgataaagtgagggaggctgaagactctccacagcatatgtag

SEQ ID NO: 83098 - DNA, 1044 bp, Artificial Sequence
  derived and/or modified sequence
atggctgcgggaacagctgtaggcgcatgggtcttggtgctgtcactgtggggtgctgtggtgggtgctcaaaatatcactgcacggattggcgagcccctcgtgctcaaatgcaaaggcgcaccaaaaaaaccgcctcagcgcctcgaatggaaactgaataccgggagaacagaggcttggaaggtgctgtctccgcaaggcggaggtccatgggattcagtggccagagttttgcccaacggttctttgttccttcctgccgtgggaattcaagacgaaggtatcttcagatgtcaggctatgaacagaaatggtaaagagacaaagtccaactatagagtcagggtttatcagatacccggaaagcctgaaatcgtagattctgcaagcgagctaaccgccggagtgcctaacaaggtgggcacatgtgtcagcgaaggatcctaccctgcaggaaccctgtcctggcacttagatggcaaacccttggtgcctaatgaaaagggagtttcagtgaaagagcagacgaggcggcatccagagaccggtctattcactcttcagtctgagctgatggtgacaccagccagaggaggggatccaaggcctacgtttagctgctcattttcccctggactaccccgacaccgtgccctgcggaccgctccaattcagcctagagtctgggaacccgttcctctagaagaagttcagctggttgtggagcccgaggggggtgccgttgccccaggaggaaccgtaacgctgacttgtgaagtacccgcacagccctcaccccagatccactggatgaaggacggtgtccctctccctttaccgccatcacccgtcctcatactccctgaaatcggcccacaggaccagggcacttactcttgcgtagcgacacactcaagccatgggccacaagaatcccgcgctgtgtcaataagcatcatcgagcctggcgaggagggaccgacagcaggcgagggtttcgacaaggtccgagaagcagaggattcccctcagcatatgtag

SEQ ID NO: 83099 - DNA, 1044 bp, Artificial Sequence
  derived and/or modified sequence
atggccgccggcaccgccgtgggcgcctgggtgctggtgctgagcctgtggggcgccgtggtgggcgcccagaacatcaccgccagaatcggcgagcccctggtgctgaagtgcaagggcgcccccaagaagcccccccagagactggagtggaagctgaacaccggcagaaccgaggcctggaaggtgctgagcccccagggcggcggcccctgggacagcgtggccagagtgctgcccaacggcagcctgttcctgcccgccgtgggcatccaggacgagggcatcttcagatgccaggccatgaacagaaacggcaaggagaccaagagcaactacagagtgagagtgtaccagatccccggcaagcccgagatcgtggacagcgccagcgagctgaccgccggcgtgcccaacaaggtgggcacctgcgtgagcgagggcagctaccccgccggcaccctgagctggcacctggacggcaagcccctggtgcccaacgagaagggcgtgagcgtgaaggagcagaccagaagacaccccgagaccggcctgttcaccctgcagagcgagctgatggtgacccccgccagaggcggcgaccccagacccaccttcagctgcagcttcagccccggcctgcccagacacagagccctgagaaccgcccccatccagcccagagtgtgggagcccgtgcccctggaggaggtgcagctggtggtggagcccgagggcggcgccgtggcccccggcggcaccgtgaccctgacctgcgaggtgcccgcccagcccagcccccagatccactggatgaaggacggcgtgcccctgcccctgccccccagccccgtgctgatcctgcccgagatcggcccccaggaccagggcacctacagctgcgtggccacccacagcagccacggcccccaggagagcagagccgtgagcatcagcatcatcgagcccggcgaggagggccccaccgccggcgagggcttcgacaaggtgagagaggccgaggacagcccccagcacatgtag

SEQ ID NO: 83100 - protein, 1907 aa, Artificial Sequence
  derived and/or modified sequence
MLSHGAGLALWITLSLLQTGLAEPERCNFTLAESKASSHSVSIQWRILGSPCNFSLIYSSDTLGAALCPTFRIDNTTYGCNLQDLQAGTIYNFRIISLDEERTVVLQTDPLPPARFGVSKEKTTSTSLHVWWTPSSGKVTSYEVQLFDENNQKIQGVQIQESTSWNEYTFFNLTAGSKYNIAITAVSGGKRSFSVYTNGSTVPSPVKDIGISTKANSLLISWSHGSGNVERYRLMLMDKGILVHGGVVDKHATSYAFHGLTPGYLYNLTVMTEAAGLQNYRWKLVRTAPMEVSNLKVTNDGSLTSLKVKWQRPPGNVDSYNITLSHKGTIKESRVLAPWITETHFKELVPGRLYQVTVSCVSGELSAQKMAVGRTFPLAVLQLRVKHANETSLSIMWQTPVAEWEKYIISLADRDLLLIHKSLSKDAKEFTFTDLVPGRKYMATVTSISGDLKNSSSVKGRTVPAQVTDLHVANQGMTSSLFTNWTQAQGDVEFYQVLLIHENVVIKNESISSETSRYSFHSLKSGSLYSVVVTTVSGGISSRQVVVEGRTVPSSVSGVTVNNSGRNDYLSVSWLLAPGDVDNYEVTLSHDGKVVQSLVIAKSVRECSFSSLTPGRLYTVTITTRSGKYENHSFSQERTVPDKVQGVSVSNSARSDYLRVSWVHATGDFDHYEVTIKNKNNFIQTKSIPKSENECVFVQLVPGRLYSVTVTTKSGQYEANEQGNGRTIPEPVKDLTLRNRSTEDLHVTWSGANGDVDQYEIQLLFNDMKVFPPFHLVNTATEYRFTSLTPGRQYKILVLTISGDVQQSAFIEGFTVPSAVKNIHISPNGATDSLTVNWTPGGGDVDSYTVSAFRHSQKVDSQTIPKHVFEHTFHRLEAGEQYQIMIASVSGSLKNQINVVGRTVPASVQGVIADNAYSSYSLIVSWQKAAGVAERYDILLLTENGILLRNTSEPATTKQHKFEDLTPGKKYKIQILTVSGGLFSKEAQTEGRTVPAAVTDLRITENSTRHLSFRWTASEGELSWYNIFLYNPDGNLQERAQVDPLVQSFSFQNLLQGRMYKMVIVTHSGELSNESFIFGRTVPASVSHLRGSNRNTTDSLWFNWSPASGDFDFYELILYNPNGTKKENWKDKDLTEWRFQGLVPGRKYVLWVVTHSGDLSNKVTAESRTAPSPPSLMSFADIANTSLAITWKGPPDWTDYNDFELQWLPRDALTVFNPYNNRKSEGRIVYGLRPGRSYQFNVKTVSGDSWKTYSKPIFGSVRTKPDKIQNLHCRPQNSTAIACSWIPPDSDFDGYSIECRKMDTQEVEFSRKLEKEKSLLNIMMLVPHKRYLVSIKVQSAGMTSEVVEDSTITMIDRPPPPPPHIRVNEKDVLISKSSINFTVNCSWFSDTNGAVKYFTVVVREADGNDELKPEQQHPLPSYLEYRHNASIRVYQTNYFASKCAENPNSNSKSFNIKLGAEMESLGGKCDPTQQKFCDGPLKPHTAYRISIRAFTQLFDEDLKEFTKPLYSDTFFSLPITTESEPLFGAIEGVSAGLFLIGMLVAVVALLICRQKVSHGRERPSARLSIRRDRPLSVHLNLGQKGNRKTSCPIKINQFEGHFMKLQADSNYLLSKEYEELKDVGRNQSCDIALLPENRGKNRYNNILPYDATRVKLSNVDDDPCSDYINASYIPGNNFRREYIVTQGPLPGTKDDFWKMVWEQNVHNIVMVTQCVEKGRVKCDHYWPADQDSLYYGDLILQMLSESVLPEWTIREFKICGEEQLDAHRLIRHFHYTVWPDHGVPETTQSLIQFVRTVRDYINRSPGAGPTVVHCSAGVGRTGTFIALDRILQQLDSKDSVDIYGAVHDLRLHRVHMVQTECQYVYLHQCVRDVLRARKLRSEQENPLFPIYENVNPEYHRDPVYSRH

SEQ ID NO: 83101 - protein, 1907 aa, Artificial Sequence
  derived and/or modified sequence
MLSHGAGLALWITLSLLQTGLAEPERCNFTLAESKASSHSVSIQWRILGSPCNFSLIYSSDTLGAALCPTFRIDNTTYGCNLQDLQAGTIYNFRIISLDEERTVVLQTDPLPPARFGVSKEKTTSTSLHVWWTPSSGKVTSYEVQLFDENNQKIQGVQIQESTSWNEYTFFNLTAGSKYNIAITAVSGGKRSFSVYTNGSTVPSPVKDIGISTKANSLLISWSHGSGNVERYRLMLMDKGILVHGGVVDKHATSYAFHGLTPGYLYNLTVMTEAAGLQNYRWKLVRTAPMEVSNLKVTNDGSLTSLKVKWQRPPGNVDSYNITLSHKGTIKESRVLAPWITETHFKELVPGRLYQVTVSCVSGELSAQKMAVGRTFPLAVLQLRVKHANETSLSIMWQTPVAEWEKYIISLADRDLLLIHKSLSKDAKEFTFTDLVPGRKYMATVTSISGDLKNSSSVKGRTVPAQVTDLHVANQGMTSSLFTNWTQAQGDVEFYQVLLIHENVVIKNESISSETSRYSFHSLKSGSLYSVVVTTVSGGISSRQVVVEGRTVPSSVSGVTVNNSGRNDYLSVSWLLAPGDVDNYEVTLSHDGKVVQSLVIAKSVRECSFSSLTPGRLYTVTITTRSGKYENHSFSQERTVPDKVQGVSVSNSARSDYLRVSWVHATGDFDHYEVTIKNKNNFIQTKSIPKSENECVFVQLVPGRLYSVTVTTKSGQYEANEQGNGRTIPEPVKDLTLRNRSTEDLHVTWSGANGDVDQYEIQLLFNDMKVFPPFHLVNTATEYRFTSLTPGRQYKILVLTISGDVQQSAFIEGFTVPSAVKNIHISPNGATDSLTVNWTPGGGDVDSYTVSAFRHSQKVDSQTIPKHVFEHTFHRLEAGEQYQIMIASVSGSLKNQINVVGRTVPASVQGVIADNAYSSYSLIVSWQKAAGVAERYDILLLTENGILLRNTSEPATTKQHKFEDLTPGKKYKIQILTVSGGLFSKEAQTEGRTVPAAVTDLRITENSTRHLSFRWTASEGELSWYNIFLYNPDGNLQERAQVDPLVQSFSFQNLLQGRMYKMVIVTHSGELSNESFIFGRTVPASVSHLRGSNRNTTDSLWFNWSPASGDFDFYELILYNPNGTKKENWKDKDLTEWRFQGLVPGRKYVLWVVTHSGDLSNKVTAESRTAPSPPSLMSFADIANTSLAITWKGPPDWTDYNDFELQWLPRDALTVFNPYNNRKSEGRIVYGLRPGRSYQFNVKTVSGDSWKTYSKPIFGSVRTKPDKIQNLHCRPQNSTAIACSWIPPDSDFDGYSIECRKMDTQEVEFSRKLEKEKSLLNIMMLVPHKRYLVSIKVQSAGMTSEVVEDSTITMIDRPPPPPPHIRVNEKDVLISKSSINFTVNCSWFSDTNGAVKYFTVVVREADGSDELKPEQQHPLPSYLEYRHNASIRVYQTNYFASKCAENPNSNSKSFNIKLGAEMESLGGKCDPTQQKFCDGPLKPHTAYRISIRAFTQLFDEDLKEFTKPLYSDTFFSLPITTESEPLFGAIEGVSAGLFLIGMLVAVVALLICRQKVSHGRERPSARLSIRRDRPLSVHLNLGQKGNRKTSCPIKINQFEGHFMKLQADSNYLLSKEYEELKDVGRNQSCDIALLPENRGKNRYNNILPYDATRVKLSNVDDDPCSDYINASYIPGNNFRREYIVTQGPLPGTKDDFWKMVWEQNVHNIVMVTQCVEKGRVKCDHYWPADQDSLYYGDLILQMLSESVLPEWTIREFKICGEEQLDAHRLIRHFHYTVWPDHGVPETTQSLIQFVRTVRDYINRSPGAGPTVVHCSAGVGRTGTFIALDRILQQLDSKDSVDIYGAVHDLRLHRVHMVQTECQYVYLHQCVRDVLRARKLRSEQENPLFPIYENVNPEYHRDPVYSRH

SEQ ID NO: 83102 - DNA, 5724 bp, Artificial Sequence
  derived and/or modified sequence
atgctctcccacggagctggtctggccctgtggattaccctctcactgctgcagacggggcttgccgaacctgagagatgtaacttcacactcgccgagtctaaagcatcctcacattcggtttccatccaatggcgaatcctggggagcccctgcaatttcagcctcatttacagttccgacaccctgggggcagcgttgtgcccgaccttccggatcgacaacacgacctatggatgtaatctccaggatctacaggcaggcactatttacaactttcgtataatctctctggacgaggagagaaccgtcgtcctgcagacagatccactgcccccagccaggttcggagtctcaaaggaaaaaacgacctccacctctctccacgtctggtggacaccttctagtggcaaagtcacatcatatgaagtgcaattgtttgatgaaaacaaccagaagatccagggcgtccagatacaggaaagcaccagctggaatgaatatactttttttaacctgaccgccggcagtaaatataacattgcgatcacagcagtaagcggaggaaagcgaagcttctcagtctatacaaatggtagcaccgtgcccagtcctgtaaaggacataggcatatctaccaaagctaactcacttctcatttcatggagccatggctctggtaacgttgagcggtaccggctcatgttgatggataagggcattttagttcatgggggagtcgtcgataagcatgctaccagctacgcatttcatggcctgactccaggttacctgtataacctcaccgttatgactgaagccgctggcctgcagaattaccgatggaagctggtcaggacggcgcccatggaggttagtaatctcaaggtgactaatgacgggagtctaactagtctaaaggtgaagtggcaacggccccctggtaacgtagactcttacaacatcaccctatcacataagggcacaatcaaggagtctcgggtgttagcaccctggatcaccgagacccactttaaagaactggttccaggtcggttgtaccaggtgactgtgtcatgcgtatccggcgagctgagtgcgcagaaaatggccgtggggaggactttcccgttggctgtgctgcagttaagggtcaagcatgcaaacgaaacttccctttccattatgtggcagacgccagtggccgagtgggagaaatacattatatctcttgctgaccgggacctgcttctgatccacaagagcttgagtaaggatgccaaggagtttactttcacagacttggtgccaggacgcaagtatatggccactgttacaagtatcagcggagacttgaagaactcaagttctgtgaaaggccgaacagtgccggcccaagttacagacctccacgtcgccaaccaaggaatgaccagcagcctatttacaaactggacccaggcacagggcgacgtagaattttaccaggtactgctgatccacgaaaatgtggtcatcaagaacgaatcaataagttcggagacctcccgatacagcttccatagcctgaaatctggcagcttgtactcagttgtcgtgactacagtctcgggtgggatctcatcacgtcaggttgtcgtagaaggccgcacagtaccgtcaagtgtgagcggggtgaccgtcaacaattctggaagaaacgactacctgtccgtcagttggctgttggcccccggggatgtcgataattacgaggtgaccttgagccacgatggaaaggtggtccagagtctagtaattgctaagtccgtccgcgagtgttccttttccagcctcacccccgggaggctgtatacagtgaccattacgacccgatctgggaagtatgagaaccattcctttagccaggaacgcactgttccagataaagtccagggagtctccgtctctaacagcgcgagatccgactacctgcgcgtgagctgggtccacgcaacgggggactttgaccactacgaagtgaccattaagaacaagaacaacttcattcagaccaagtctattccaaaatcggaaaacgaatgcgtctttgtgcagcttgtgccaggaaggctgtacagcgtgaccgtcacaaccaagtctggacaatatgaagccaacgaacaggggaatggacggactattcctgaacccgtgaaagatcttacactgcgtaaccgctcaactgaggaccttcacgtcacctggtccggagccaatggcgacgtggaccagtacgaaatccagcttctgtttaacgacatgaaggtgtttcccccatttcatctggtgaataccgccacggagtaccgttttacatctcttactcctgggcgacagtacaaaatcctggtgctgactatatccggggatgttcagcaatctgcctttattgagggcttcacagtgccaagtgctgtcaagaacatccacatcagccccaatggagccaccgatagccttactgtcaactggacacctgggggcggtgatgtcgactcttacacagttagcgccttccgccatagccagaaagtggatagccagacgatcccaaagcacgtcttcgaacacacgttccacaggctcgaagcgggagagcagtaccaaattatgattgcttctgtgagtggatcgcttaagaatcagattaacgtagtgggtagaactgtgcctgcgtccgtgcagggggtgatagcagacaacgcctatagctcatatagtctcatagtgtcctggcagaaagctgccggtgtggccgagaggtacgacattctgctcctcactgagaatggtatcctgttgagaaacacttcggaacccgccaccacgaaacagcacaaatttgaagacctgacgcctggtaagaaatacaaaattcagatcctgaccgtatcaggtgggctgttttccaaggaagcacagaccgaaggcaggactgtcccagccgcggtgaccgacctacgcataaccgagaatagtactcgtcacctatccttccgttggaccgcaagcgagggtgaactgtcttggtacaatatattcttgtataatcctgatgggaatctgcaggagcgggctcaggttgatcccttggtgcaaagtttttcattccagaatttgttgcaggggcgcatgtataagatggtaatagtgacccactctggggagctatcgaacgagagcttcattttcggccgcacagtgcccgccagcgtgagtcacctccggggatccaataggaacaccacggactccctgtggttcaattggagtccagcatccggggacttcgacttttacgagctgatcctctacaatcccaacggcacaaagaaagaaaactggaaagacaaagacctgaccgaatggcggttccagggcctcgttcccggaaggaaatatgtcctctgggtcgtgacacacagtggggacctgtccaacaaggtgacagcagaaagtcggaccgctccctcgcccccaagcctgatgtcatttgcagatatagccaacacgtctcttgctattacttggaaaggtcccccagattggaccgactataacgactttgagttgcagtggctgcccagagacgccctgaccgtattcaacccctataataaccggaagtcggaagggcgcattgtatacgggcttcgcccaggcaggtcttaccaattcaacgtgaaaacggtctccggtgatagttggaagacctactctaagcccatctttggctctgtaagaaccaagcctgacaagattcaaaatctacattgtcgcccacagaactctactgccatagcgtgcagctggattcctcccgattcggacttcgacggttatagcatagagtgcagaaaaatggatactcaggaggtagagtttagtagaaagctggaaaaggagaagagcctgcttaatatcatgatgctggtcccgcacaagagatatcttgtgtctattaaagtgcaatcggccgggatgacatctgaagtcgtggaagattcaaccattacaatgattgaccggccgccacctcctcctccccacatccgagtgaatgaaaaggacgtgctgatttccaagagcagcattaattttaccgtcaactgctcctggttttcagacaccaacggtgctgtaaagtactttaccgtcgtggtgagagaggctgatggtaacgacgagctcaaaccagagcagcagcacccacttccatcctatctggaataccgccacaacgcaagcatcagagtataccagacaaattatttcgcatcaaaatgcgccgaaaaccccaattctaacagtaagagttttaacataaaactcggagccgagatggaaagtctggggggtaagtgcgacccaactcagcagaagttttgtgacggaccgctcaaacctcacacggcctaccgtatcagcatccgggccttcacacagttgtttgatgaggacctgaaggagtttacaaagccgctgtactcagataccttctttagcctccccatcaccacagagagcgagccactttttggggcaatagagggtgtgtcagctgggttattcctcatagggatgttggtcgctgtcgtggctctgctgatctgtagacagaaggtgagtcacggcagggaaaggccatccgcccgtctgagtattaggcgggaccgtccgctgagcgtccatctcaacctgggccaaaagggcaataggaagaccagttgtcccatcaagattaatcagtttgaaggccattttatgaagctgcaggccgacagcaattatctcctgagcaaggaatacgaggagctcaaggatgttggtaggaaccagtcttgcgatattgccctactaccagaaaacaggggcaagaacaggtacaataatattcttccttatgatgccacccgcgtgaaactctctaatgtcgatgacgatccttgtagcgactacattaacgcttcctatatccctggaaataattttcgaagagaatatatcgttacccaggggcctttgcctgggaccaaggacgacttttggaaaatggtctgggagcagaatgtacacaacatcgttatggtaacacagtgcgttgagaaaggacgcgttaaatgcgaccactattggcccgccgatcaggattccctatattacggggatctcatcctgcagatgctgtctgagagtgtgctacccgagtggaccattcgggagtttaaaatctgtggggaggaacagctcgacgcccatcgcttgattagacacttccattatactgtgtggcctgatcatggagtccccgagactactcagtctctcatccagttcgtgaggacggtgcgggattatattaataggtccccaggcgcagggcccacggtggtgcattgttctgccggagtggggagaacgggaacattcattgccctggatcgtatactgcagcagctggactccaaggacagcgttgacatctatggcgccgtacacgatctgcggctccacagagtccatatggtgcaaacggaatgtcagtacgtgtatcttcaccagtgtgttcgcgatgttctgagggctcgcaaactgcgtagcgagcaggagaatcccctctttccgatttatgaaaacgtgaatcccgaatatcaccgtgatcctgtgtattccaggcattag

SEQ ID NO: 83103 - DNA, 5724 bp, Artificial Sequence
  derived and/or modified sequence
atgctgagtcacggcgctggcctagcactatggataacactgagcctgctgcagaccggcttggctgaacccgagcgttgcaactttacacttgcagaatcaaaggctagctctcactctgttagtatccagtggcgcattttaggttccccatgcaacttcagcctgatctattccagcgatacccttggggctgccctgtgccccacattccgcatcgacaacacaacatacggatgcaacctgcaggacctgcaggcggggaccatttacaacttccgcattatctccctcgatgaagagaggactgtggtcctacagacagatccattacctccagctcggttcggcgtgtctaaggagaagaccacttctacatcgctacacgtgtggtggacccccagcagcggcaaggtgactagctatgaagtgcagctctttgacgagaataatcagaaaattcaaggagtgcagatccaggaatccacaagctggaatgagtacacctttttcaatctgaccgccggttccaaatacaatatcgcaatcacagcagtgtctggcggaaaacgctcattctccgtgtataccaacggcagcactgtcccttcccccgttaaggacatcgggattagcaccaaggctaatagtctgctgatcagctggagccatgggtcagggaacgtcgagcgctacaggttgatgctgatggataagggcatcctggttcacggtggagtcgtggacaagcatgctacaagttatgccttccatgggctgacacccggctacctttacaaccttaccgtcatgaccgaagcagccggactgcagaattaccgctggaagctggttcggacagctccaatggaggtttcaaacctgaaggtaaccaatgatggatcccttacatcactgaaggtcaaatggcaacgcccccccgggaatgtggacagttataacattactctttctcacaagggaactattaaggaaagcagggtcctcgctccttggataaccgagacccatttcaaggaactcgttcctggtcggctgtatcaggtgactgtatcatgtgtgtcaggtgagctgagcgctcaaaaaatggctgtgggtagaacctttcctcttgccgtcctccagctccgtgtcaagcacgctaacgagacctcactaagtataatgtggcagacacccgtggctgagtgggagaagtacattatctcccttgcggatagagatttactactcatccataagtccttaagtaaggatgcaaaggagttcaccttcacggatctcgtgcctggacgtaagtatatggccaccgtgacatctatatccggagatctgaaaaattcttcatccgttaaaggcaggacagtgccggctcaagtcacagaccttcatgtggccaatcagggcatgacgtcatcattgtttacaaattggacgcaagcacagggcgacgtggagttctatcaggtcctgcttattcacgagaacgttgtgataaagaacgaatctatttcaagcgagacctctcggtactcttttcactccttgaagtcaggctccctgtatagcgtcgtggtgacaacagtgtcaggagggatttcttctagacaggtcgtcgtagaggggcgaactgtgccatcatcagtgagcggggtcacggtgaataattccggccgtaacgattatctctccgtgtcttggctgctggcccccggagacgttgataattatgaggttactctgtcccacgacggaaaagtagtacaaagtctcgtaatagcaaagtcagtcagagagtgctctttctcctcgctgacaccaggacggctgtatactgtaaccatcaccactagaagtggtaaatatgagaaccactctttctcacaggagaggacagtgcccgacaaagtccaaggcgtgagtgtgtcaaattccgcacggtcagattacttgagagtctcatgggtgcacgccactggcgattttgatcactatgaagttaccattaaaaataagaacaacttcattcagactaaatccatccccaagtccgaaaatgagtgtgtgttcgtccagcttgttccaggtagactctactccgtgaccgttaccactaagagcggacagtatgaggctaacgagcagggcaatggtaggaccatacccgagcctgtgaaggacctcacactgcgcaaccgaagcacagaggatctgcacgttacctggtctggagcaaatggtgacgttgatcagtacgagatccaactcttgtttaacgacatgaaggtgtttcctcctttccatttagtgaataccgcaaccgagtatcgattcacctccttaactcctggccgccaatataaaattcttgtcttgaccattagtggagacgtccagcaaagcgcttttattgaggggttcacagtgccaagcgctgtgaaaaacattcacatcagcccgaatggggctacagactcactcacagtaaattggacgcccgggggtggtgatgtggacagctacaccgtgtccgccttcagacactctcagaaggtggactcacagacaattcctaagcacgtgtttgaacacacatttcatcgcctggaggctggagaacagtaccagatcatgattgctagtgtctccggctccttaaaaaaccagatcaatgtggtaggccggacggtaccggcctctgtacagggggtgatagccgataacgcctacagcagctactccctcattgtaagttggcagaaagctgccggcgtggctgagcgctacgacattctccttctgaccgaaaacggtatcctcctgaggaacacctcggaacctgcaacgaccaagcagcacaagtttgaagatcttacacccggcaaaaagtataaaatccagatcctcacggtctcagggggactattctctaaagaggcccaaactgaggggaggactgttcctgcggcggtgaccgaccttcggatcaccgaaaacagcacgaggcacctatccttccggtggacggcatccgaaggagaactgagctggtataacatcttcctgtataatcccgacggaaatctgcaggaacgagctcaagtcgaccccctggtccaaagtttctcttttcagaacctgctgcaaggacgcatgtacaagatggtgatagtcactcactccggagaactaagcaatgaaagctttatctttggaaggaccgtccccgcctctgtttcgcacctgaggggaagcaatcgcaacaccacagattccctttggttcaactggagtcctgcatctggggatttcgacttctacgaactgatactctataaccccaacggtacaaaaaaggaaaactggaaggataaagatttgacagagtggcgcttccaggggctcgtgcccggacgaaagtacgttctctgggtggtgactcatagtggggatctaagtaataaagttaccgctgagagcaggacagccccttcccctcctagtctgatgagcttcgctgatattgcgaataccagcctggctattacatggaaaggtccccccgactggactgattacaatgactttgagctgcaatggctccctagggacgctctgaccgttttcaatccatataataatcggaagtcggagggtcgaatcgtgtacggcctgcggcctggtaggtcataccagtttaatgtcaagactgtgtctggcgattcctggaaaacctacagcaaacctatatttggctcagtgcgtaccaagccagacaaaattcagaacctgcattgtagaccccagaatagtactgctattgcttgcagttggattcctccggattccgacttcgacggctactcaatcgagtgtaggaagatggacacacaggaagtcgagttttctaggaagttggagaaggagaagtctcttctgaatataatgatgctggtgccacacaagaggtacttggtgtccatcaaggtgcagtcagccggaatgacaagcgaggtagtcgaagacagcacaattacaatgatagacagaccacccccccccccaccccatatacgcgtcaatgagaaggacgtgctcatcagtaagtcaagcattaattttactgtcaattgtagctggttcagtgatacgaatggtgctgttaagtattttaccgtggtggtcagagaggcagacggtagtgatgagcttaagcccgaacagcagcaccccctgccaagttatctcgagtaccgtcacaacgcgtccatccgagtgtaccaaaccaactacttcgcctctaagtgcgctgagaatccaaactcaaatagcaaatcttttaatataaaacttggtgccgagatggaatcactggggggtaaatgcgatcctacccaacagaagttttgtgacgggcctctcaaaccgcacactgcctaccgcatcagtatcagggcttttacacagctttttgacgaggatcttaaggaatttacaaagcctctgtacagtgatactttcttctctttgcccatcactacagaaagcgagcctctgttcggcgccatagaaggtgtgtccgcaggcctttttctgatcggcatgcttgtggctgtcgtggcgttgttaatctgcaggcagaaagtttctcatggccgtgagcggccttctgccagactttctatccgcagagatagacctctgagcgtgcatctgaatctggggcagaaaggaaaccgtaagacctcctgtccaatcaagatcaatcagttcgagggccattttatgaagttacaggcagactccaattatttactgtccaaggaatacgaagaacttaaagacgtgggcaggaatcagagttgcgatatcgccctcctaccggagaatagaggcaagaacagatacaataacattctgccttatgacgccacccgcgtaaagctgtctaacgttgatgacgacccctgtagcgattatatcaacgcttcttacatcccaggaaataactttaggcgcgaatacattgtcacccagggccctttgcccggtactaaagacgacttctggaagatggtgtgggaacagaacgtccacaacatcgtgatggtgacccagtgcgtcgagaaggggcgcgtaaaatgtgaccattattggccagcagaccaggattctctgtattacggagacttaattctccagatgctgtcggagagcgtgctcccggagtggactattagggagtttaaaatctgtggagaggagcagctggacgcccatcggctgatcaggcactttcactataccgtatggcctgaccacggcgtgcccgagaccactcaatctctaatccaattcgtgcggacagtgcgtgattatatcaacaggtctcccggcgccgggccgacggtcgtgcattgctctgccggggtaggccggaccgggacttttatcgcactggatcggatcctgcagcagcttgactcgaaggattcggtggacatatacggcgccgtccacgacctaagactccatcgggtgcatatggtccaaacggaatgtcaatacgtgtatctgcaccagtgcgtgagagatgtgttgagagcgagaaaactgcggagcgaacaagaaaaccccctctttccgatttatgaaaacgtgaaccccgagtaccaccgcgatccggtgtatagtcgccactag

SEQ ID NO: 83104 - DNA, 5724 bp, Artificial Sequence
  derived and/or modified sequence
atgctgagccacggggccggcctggccctgtggatcaccctgagcctgctgcagacaggcctggccgagcctgagcgctgcaacttcaccctggccgagagcaaggccagcagccacagcgtgtccatccagtggaggatcctgggcagcccctgcaacttcagcctcatctacagcagtgacaccctgggcgccgccctgtgccccaccttcagaattgacaacaccacctacggctgcaacctgcaggacctgcaggccggcaccatctacaacttccgcatcatcagcctggatgaggagaggacagtggtgctgcagacagaccccctgcccccagcccgcttcggcgtgtccaaggagaagaccaccagcaccagcctgcacgtgtggtggacccccagcagcggcaaggtgaccagctatgaggtgcagctgtttgatgagaacaaccagaagatccagggcgtgcagatccaggagagcacctcctggaatgagtacaccttcttcaacctgacagctggcagcaagtacaacatcgccatcacagctgtgtctgggggcaagaggagcttctctgtgtacaccaacggcagcacagtgcccagccctgtgaaggacatcggcatcagcaccaaggccaacagcctgctgatctcctggagccacggcagcggaaatgtggagcgctaccgcctgatgctgatggacaagggcatcctggtgcacggcggcgtggtggacaagcacgccaccagctatgccttccacggcctgaccccaggctacctgtacaacctgactgtgatgacagaggccgccggcctgcagaactaccgctggaagctggtgaggacagcccccatggaggtgagcaacctgaaggtgaccaatgatggcagcctgaccagcctgaaggtgaagtggcagaggcctcctggaaatgtggacagctacaacatcaccctgagccacaagggcaccatcaaggagagccgggtgctggccccctggatcacagagacccacttcaaggagctggtgcccggccgcctgtaccaggtgacagtgtcctgtgtgtctggagagctgagcgcccagaagatggctgtgggccgcaccttccccctggccgtgctgcagctgcgggtgaagcacgccaatgagaccagcctgagcatcatgtggcagacccctgtggccgagtgggagaagtacatcatcagcctggccgaccgggacctgctgctgatccacaagagcctgagcaaggatgccaaggagttcaccttcacagacctggtgcccggcaggaagtacatggccaccgtgaccagcatcagcggggacctgaagaacagcagctctgtgaagggccgcacagtgcctgcccaggtgacagacctgcacgtggccaaccagggcatgaccagcagcctcttcaccaactggacccaggcccagggagatgtggagttctaccaggtgctgctgattcatgaaaatgtggtgatcaagaatgaaagcatcagcagcgagaccagccgctacagcttccacagcctgaagagcggcagcctgtacagcgtggtggtgaccaccgtgtctgggggcatcagcagccggcaggtggtggtggagggccgcacagtgcccagctctgtgtctggagtgacagtgaacaacagcggcagaaatgactacctgtctgtgtcctggctgctggcccctggagatgtggacaactatgaggtgaccctgagccatgatggcaaggtggtgcagagcctggtgattgccaagtctgtgcgggagtgcagcttcagcagcctgaccccaggccgcctgtacacagtgaccatcaccaccaggtctgggaagtatgagaaccacagcttcagccaggagaggacagtgcctgacaaggtgcagggcgtgtctgtgagcaacagcgcccggagtgactacctgcgggtgtcctgggtgcacgccaccggggactttgaccactatgaggtgaccatcaagaacaagaacaacttcatccagaccaagagcatccccaagtcagaaaatgaatgtgtgtttgtgcagctggtgcccggccgcctgtacagcgtgacagtgaccaccaagagcggccagtatgaggccaatgagcagggcaatggccgcaccatccctgagcctgtgaaggacctgaccctgaggaacagaagcacagaggacctgcacgtgacctggagcggggccaatggagatgtggaccagtatgagatccagctgctcttcaatgacatgaaggtgttcccccccttccacctggtgaacacagccacagagtaccgcttcaccagcctgaccccaggccggcagtacaagatcctggtgctgaccatctctggagatgtgcagcagagcgccttcatcgagggcttcaccgtgcccagcgctgtgaagaacatccacatcagccccaacggggccacagacagcctgactgtgaactggaccccaggaggaggagatgtggacagctacacagtgtctgccttccgccacagccagaaggtggacagccagaccatccccaagcacgtgtttgagcacaccttccaccggctggaggccggggagcagtaccagatcatgattgcctctgtgtctggcagcctgaagaaccagatcaacgtggtgggccgcacagtgcctgcctctgtgcagggcgtgattgctgacaatgcctacagcagctacagcctgattgtgtcctggcagaaggccgccggcgtggccgagagatatgacatcctgctgctgacagaaaatggcatcctgctgaggaacaccagcgagcccgccaccaccaagcagcacaagtttgaggacctgaccccaggcaagaagtacaagatccagatcctgactgtgtctgggggcctcttcagcaaggaggcccagacagagggccgcacagtgcctgctgctgtgacagacctgcgcatcacagagaacagcaccaggcacctgtccttccgctggacagccagcgagggggagctgtcctggtacaacatcttcctgtacaacccagatggcaacctgcaggagcgggcccaggtggaccccctggtgcagagcttctccttccagaacctgctgcagggccgcatgtacaagatggtgattgtgacccacagcggggagctgagcaatgaaagcttcatcttcggccgcacagtgcctgcctctgtgagccacctgcggggcagcaacagaaacaccacagacagcctgtggttcaactggagccctgccagcggggactttgacttctatgagctgatcctgtacaaccccaacggcaccaagaaggagaactggaaggacaaggacctgacagagtggaggttccagggcctggtgcccggcaggaaatatgtgctgtgggtggtgacccacagcggggacctgagcaacaaggtgacagctgagagcaggacagcccccagcccccccagcctgatgagctttgctgacatcgccaacaccagcctggccatcacctggaagggccccccagactggacagactacaatgactttgagctgcagtggctgcccagagatgccctgaccgtcttcaacccctacaacaacaggaagtctgagggccgcatcgtgtatggcctgcggcccggccgcagctaccagttcaacgtgaagacagtgtctggggacagctggaagacctacagcaagcccatcttcggctctgtgaggaccaagccagacaagatccagaacctgcactgccggccccagaacagcacagccatcgcctgctcctggatccccccagacagcgactttgatggctacagcattgagtgcaggaagatggacacccaggaggtggagttcagcaggaagctggagaaggagaagagcctgctgaacatcatgatgctggtgccccacaagcgctacctggtgtccatcaaggtgcagagcgctggcatgaccagcgaggtggtggaggacagcaccatcaccatgattgaccggcccccacctcctccaccccacatccgggtgaatgagaaggatgtgctgatcagcaagagcagcatcaacttcaccgtgaactgctcctggttcagtgacaccaacggggctgtgaagtacttcaccgtggtggtgcgggaggctgatggaaatgatgagctgaagccagagcagcagcaccccctgcccagctacctggagtaccgccacaatgccagcatccgggtgtaccagaccaactactttgccagcaaatgtgccgagaaccccaacagcaacagcaagagcttcaacatcaagctgggcgctgagatggagagcctgggcggcaaatgtgaccccacccagcagaagttctgtgatggccccctgaagccccacacagcctaccgcatcagcatccgggccttcacccagctgtttgatgaggacctgaaggagttcaccaagcccctgtacagcgacaccttcttcagcctgcccatcaccacagaaagtgagcccctgtttggagccatcgagggcgtgtctgctggcctcttcctgattggcatgctggtggccgtggtggccctgctgatctgccggcagaaggtgagccacggccgggagcggcccagcgcccggctgagcatccggcgggaccggcccctgtctgtgcacctgaacctgggccagaagggcaacaggaagaccagctgccccatcaagatcaaccagtttgagggccacttcatgaagctgcaggccgacagcaactacctgctgagcaaggagtatgaggagctgaaggatgtgggcaggaaccagagctgtgacatcgccctgctgcctgagaacagaggcaagaaccgctacaacaacatcctgccctatgatgccaccagggtgaagctgagcaatgtggatgatgacccctgcagcgactacatcaatgccagctacatccctggcaacaacttcagaagagagtacatcgtgacccagggccccctgcccggcaccaaggatgacttctggaagatggtgtgggagcagaatgtgcacaacatcgtgatggtgacccagtgtgtggagaagggccgggtgaagtgtgaccactactggccagctgaccaggacagcctgtactatggagacctgatcctgcagatgctgtctgagagcgtgctgcctgagtggaccatccgggagttcaagatctgtggggaggagcagctggatgcccacaggctcatccgccacttccactacacagtgtggccagaccatggagtgcctgagaccacccagagcctcatccagtttgtgaggacagtgcgggactacatcaacagaagccctggagctggccccaccgtggtgcactgcagcgctggggtgggccgcacaggcaccttcatcgccctggaccgcatcctgcagcagctggacagcaaggacagcgtggacatctatggagctgtgcatgacctgcggctgcaccgggtgcacatggtgcagacagagtgccagtatgtgtacctgcaccagtgtgtgagagatgtgctgcgggccaggaagctgcggtctgagcaggagaaccccctcttccccatctatgaaaatgtgaaccctgagtaccaccgggaccctgtgtacagccgccactag

SEQ ID NO: 83105 - DNA, 5724 bp, Artificial Sequence
  derived and/or modified sequence
atgctgagccacggggccggcctggccctgtggatcaccctgagcctgctgcagacaggcctggccgagcctgagcgctgcaacttcaccctggccgagagcaaggccagcagccacagcgtgtccatccagtggaggatcctgggcagcccctgcaacttcagcctcatctacagcagtgacaccctgggcgccgccctgtgccccaccttcagaattgacaacaccacctacggctgcaacctgcaggacctgcaggccggcaccatctacaacttccgcatcatcagcctggatgaggagaggacagtggtgctgcagacagaccccctgcccccagcccgcttcggcgtgtccaaggagaagaccaccagcaccagcctgcacgtgtggtggacccccagcagcggcaaggtgaccagctatgaggtgcagctgtttgatgagaacaaccagaagatccagggcgtgcagatccaggagagcacctcctggaatgagtacaccttcttcaacctgacagctggcagcaagtacaacatcgccatcacagctgtgtctgggggcaagaggagcttctctgtgtacaccaacggcagcacagtgcccagccctgtgaaggacatcggcatcagcaccaaggccaacagcctgctgatctcctggagccacggcagcggaaatgtggagcgctaccgcctgatgctgatggacaagggcatcctggtgcacggcggcgtggtggacaagcacgccaccagctatgccttccacggcctgaccccaggctacctgtacaacctgactgtgatgacagaggccgccggcctgcagaactaccgctggaagctggtgaggacagcccccatggaggtgagcaacctgaaggtgaccaatgatggcagcctgaccagcctgaaggtgaagtggcagaggcctcctggaaatgtggacagctacaacatcaccctgagccacaagggcaccatcaaggagagccgggtgctggccccctggatcacagagacccacttcaaggagctggtgcccggccgcctgtaccaggtgacagtgtcctgtgtgtctggagagctgagcgcccagaagatggctgtgggccgcaccttccccctggccgtgctgcagctgcgggtgaagcacgccaatgagaccagcctgagcatcatgtggcagacccctgtggccgagtgggagaagtacatcatcagcctggccgaccgggacctgctgctgatccacaagagcctgagcaaggatgccaaggagttcaccttcacagacctggtgcccggcaggaagtacatggccaccgtgaccagcatcagcggggacctgaagaacagcagctctgtgaagggccgcacagtgcctgcccaggtgacagacctgcacgtggccaaccagggcatgaccagcagcctcttcaccaactggacccaggcccagggagatgtggagttctaccaggtgctgctgattcatgaaaatgtggtgatcaagaatgaaagcatcagcagcgagaccagccgctacagcttccacagcctgaagagcggcagcctgtacagcgtggtggtgaccaccgtgtctgggggcatcagcagccggcaggtggtggtggagggccgcacagtgcccagctctgtgtctggagtgacagtgaacaacagcggcagaaatgactacctgtctgtgtcctggctgctggcccctggagatgtggacaactatgaggtgaccctgagccatgatggcaaggtggtgcagagcctggtgattgccaagtctgtgcgggagtgcagcttcagcagcctgaccccaggccgcctgtacacagtgaccatcaccaccaggtctgggaagtatgagaaccacagcttcagccaggagaggacagtgcctgacaaggtgcagggcgtgtctgtgagcaacagcgcccggagtgactacctgcgggtgtcctgggtgcacgccaccggggactttgaccactatgaggtgaccatcaagaacaagaacaacttcatccagaccaagagcatccccaagtcagaaaatgaatgtgtgtttgtgcagctggtgcccggccgcctgtacagcgtgacagtgaccaccaagagcggccagtatgaggccaatgagcagggcaatggccgcaccatccctgagcctgtgaaggacctgaccctgaggaacagaagcacagaggacctgcacgtgacctggagcggggccaatggagatgtggaccagtatgagatccagctgctcttcaatgacatgaaggtgttcccccccttccacctggtgaacacagccacagagtaccgcttcaccagcctgaccccaggccggcagtacaagatcctggtgctgaccatctctggagatgtgcagcagagcgccttcatcgagggcttcaccgtgcccagcgctgtgaagaacatccacatcagccccaacggggccacagacagcctgactgtgaactggaccccaggaggaggagatgtggacagctacacagtgtctgccttccgccacagccagaaggtggacagccagaccatccccaagcacgtgtttgagcacaccttccaccggctggaggccggggagcagtaccagatcatgattgcctctgtgtctggcagcctgaagaaccagatcaacgtggtgggccgcacagtgcctgcctctgtgcagggcgtgattgctgacaatgcctacagcagctacagcctgattgtgtcctggcagaaggccgccggcgtggccgagagatatgacatcctgctgctgacagaaaatggcatcctgctgaggaacaccagcgagcccgccaccaccaagcagcacaagtttgaggacctgaccccaggcaagaagtacaagatccagatcctgactgtgtctgggggcctcttcagcaaggaggcccagacagagggccgcacagtgcctgctgctgtgacagacctgcgcatcacagagaacagcaccaggcacctgtccttccgctggacagccagcgagggggagctgtcctggtacaacatcttcctgtacaacccagatggcaacctgcaggagcgggcccaggtggaccccctggtgcagagcttctccttccagaacctgctgcagggccgcatgtacaagatggtgattgtgacccacagcggggagctgagcaatgaaagcttcatcttcggccgcacagtgcctgcctctgtgagccacctgcggggcagcaacagaaacaccacagacagcctgtggttcaactggagccctgccagcggggactttgacttctatgagctgatcctgtacaaccccaacggcaccaagaaggagaactggaaggacaaggacctgacagagtggaggttccagggcctggtgcccggcaggaaatatgtgctgtgggtggtgacccacagcggggacctgagcaacaaggtgacagctgagagcaggacagcccccagcccccccagcctgatgagctttgctgacatcgccaacaccagcctggccatcacctggaagggccccccagactggacagactacaatgactttgagctgcagtggctgcccagagatgccctgaccgtcttcaacccctacaacaacaggaagtctgagggccgcatcgtgtatggcctgcggcccggccgcagctaccagttcaacgtgaagacagtgtctggggacagctggaagacctacagcaagcccatcttcggctctgtgaggaccaagccagacaagatccagaacctgcactgccggccccagaacagcacagccatcgcctgctcctggatccccccagacagcgactttgatggctacagcattgagtgcaggaagatggacacccaggaggtggagttcagcaggaagctggagaaggagaagagcctgctgaacatcatgatgctggtgccccacaagcgctacctggtgtccatcaaggtgcagagcgctggcatgaccagcgaggtggtggaggacagcaccatcaccatgattgaccggcccccacctcctccaccccacatccgggtgaatgagaaggatgtgctgatcagcaagagcagcatcaacttcaccgtgaactgctcctggttcagtgacaccaacggggctgtgaagtacttcaccgtggtggtgcgggaggctgatggcagtgatgagctgaagccagagcagcagcaccccctgcccagctacctggagtaccgccacaatgccagcatccgggtgtaccagaccaactactttgccagcaaatgtgccgagaaccccaacagcaacagcaagagcttcaacatcaagctgggcgctgagatggagagcctgggcggcaaatgtgaccccacccagcagaagttctgtgatggccccctgaagccccacacagcctaccgcatcagcatccgggccttcacccagctgtttgatgaggacctgaaggagttcaccaagcccctgtacagcgacaccttcttcagcctgcccatcaccacagaaagtgagcccctgtttggagccatcgagggcgtgtctgctggcctcttcctgattggcatgctggtggccgtggtggccctgctgatctgccggcagaaggtgagccacggccgggagcggcccagcgcccggctgagcatccggcgggaccggcccctgtctgtgcacctgaacctgggccagaagggcaacaggaagaccagctgccccatcaagatcaaccagtttgagggccacttcatgaagctgcaggccgacagcaactacctgctgagcaaggagtatgaggagctgaaggatgtgggcaggaaccagagctgtgacatcgccctgctgcctgagaacagaggcaagaaccgctacaacaacatcctgccctatgatgccaccagggtgaagctgagcaatgtggatgatgacccctgcagcgactacatcaatgccagctacatccctggcaacaacttcagaagagagtacatcgtgacccagggccccctgcccggcaccaaggatgacttctggaagatggtgtgggagcagaatgtgcacaacatcgtgatggtgacccagtgtgtggagaagggccgggtgaagtgtgaccactactggccagctgaccaggacagcctgtactatggagacctgatcctgcagatgctgtctgagagcgtgctgcctgagtggaccatccgggagttcaagatctgtggggaggagcagctggatgcccacaggctcatccgccacttccactacacagtgtggccagaccatggagtgcctgagaccacccagagcctcatccagtttgtgaggacagtgcgggactacatcaacagaagccctggagctggccccaccgtggtgcactgcagcgctggggtgggccgcacaggcaccttcatcgccctggaccgcatcctgcagcagctggacagcaaggacagcgtggacatctatggagctgtgcatgacctgcggctgcaccgggtgcacatggtgcagacagagtgccagtatgtgtacctgcaccagtgtgtgagagatgtgctgcgggccaggaagctgcggtctgagcaggagaaccccctcttccccatctatgaaaatgtgaaccctgagtaccaccgggaccctgtgtacagccgccactag

SEQ ID NO: 83106 - DNA, 5724 bp, Artificial Sequence
  derived and/or modified sequence
atgctgagccacggcgccggcctggccctgtggatcaccctgagccttctccagactggattggcggagccggagcgttgtaacttcacattagccgagagcaaagccagctctcattccgtctccatacagtggcgaatcctggggagcccatgcaatttcagtctaatctactcatctgacacactaggggcagctctgtgtccgacatttcgaattgacaacaccacttacggttgcaacttgcaggacttgcaagctggaaccatctacaacttccgcattatttcgcttgatgaggaaaggactgtggtcttgcagactgacccccttccccctgcgcggtttggggttagcaaagagaagaccacatctacatctctgcatgtgtggtggactccaagcagcggtaaagttacttcctacgaagtgcagctgttcgacgagaataaccagaagatccagggcgttcagatccaggaaagcacatcatggaacgaatatactttcttcaacctgacagcaggctctaaatataatattgcgataactgccgtgagcggtggtaaaagatctttctcagtgtacaccaacggctctacagtgccttcacccgtgaaagacatcggaattagtaccaaggccaacagcctgctgatatcatggagtcatggctcaggtaatgtggagcggtatagactcatgttaatggacaaagggatactcgtccacggcggggtggtggataaacacgccactagctacgcttttcatggactcacccccggctacctctacaatctgactgtgatgaccgaagctgcagggctgcagaactaccgttggaagttggtgcgcaccgctcctatggaggtatcaaacctgaaagtgacaaacgacggctctctgaccagtcttaaggttaagtggcagaggcctccaggaaatgtcgactcttacaatataactttatcccataagggcaccatcaaggagagtagagtcctcgcaccctggatcacagagacccatttcaaggagcttgtgcctggacgcctgtatcaggtgaccgtttcttgtgttagtggggagctgtccgctcagaagatggccgttgggcgaacctttccgctcgctgttctgcagctacgggtcaagcatgccaacgaaactagcttgagcataatgtggcaaacccctgtagctgagtgggaaaaatatatcatttcattggccgaccgcgaccttctgctgattcataagagcttatcaaaggacgcaaaggagtttacatttacagacctcgtgcctggacggaagtacatggctacggtgaccagtatcagtggcgatttgaagaactcaagcagcgttaagggccggacagtaccagctcaggtgacagatcttcatgtagcgaatcagggcatgacctcttctctgtttactaactggacccaagcccagggcgacgtagagttctatcaagtgctccttatccatgagaacgttgtcataaaaaatgaatcaatttccagtgagacaagcagatacagctttcattccctcaagtccggatcgctttactccgtcgtggtcactacagtctctgggggaatctcgtcccggcaggtggtggtggaggggcggacggttccaagcagcgtatcaggagtaacggtcaataatagcgggagaaacgactacttgagtgtgtcttggcttctggctcccggggacgtcgataattacgaagttaccctgagccacgacggcaaggtagtgcagtcgttagtaatcgccaagagcgttcgtgaatgtagcttcagctccctgacccccggacggctttacactgttaccataactacaaggagcggcaagtatgagaatcatagcttctcccaggagcgtaccgtgccagataaagtccaaggggttagtgtaagtaatagtgccagatctgattacctgcgggtgtcttgggttcatgccactggggattttgaccattacgaagtgaccattaaaaataaaaacaacttcattcagactaagtcaattcccaagagcgagaatgaatgtgtgtttgtccagttagtaccaggacgcctctatagtgtcaccgtgactaccaagtcaggccagtatgaggcaaatgagcaggggaacggacggactatccccgaacccgtcaaggatctgaccctgcggaaccggagcacagaggatctgcacgtcacctggtcgggagctaatggagatgttgaccagtacgaaattcagttgctattcaatgatatgaaggtcttccccccatttcacctggtgaacaccgcaaccgaataccgattcaccagtctgacgccgggccgccagtacaagatcctggtgctgacaatatcaggcgatgtgcaacagtcagcgtttatcgaaggattcaccgttccctccgctgtgaaaaacatacacatctctcccaatggggccactgactctctcacggtgaattggacaccaggcggaggcgacgttgattcatatacagtgtctgcgttcaggcactcccagaaggtggattcacagaccatccccaagcatgtctttgagcatacattccatagactcgaagccggggaacagtatcaaataatgatagcctctgtaagcggttcactgaaaaaccagattaatgtcgtcggaaggactgtccccgcctcagtgcaaggcgtgattgcagataacgcatactcttcttatagcctgatcgtgagctggcagaaagcagcaggtgttgcagaaagatacgatatcctgttgctgaccgagaacggaattctgctcagaaatactagcgaacctgcgaccacaaagcagcataaatttgaggacctcacccccgggaaaaagtacaagattcagattctgacagtgtcagggggtctattcagcaaagaagctcagaccgagggtaggacggtccccgcagccgtcaccgatttgagaattacagaaaacagcacgagacacctaagttttcgttggaccgcctctgaaggtgagttgagctggtacaacatcttcctgtataatcccgatggaaacttgcaggagagagctcaggttgatccactggttcagtcctttagtttccagaacctgctgcagggcagaatgtacaaaatggtgattgttacgcactccggcgagcttagtaacgaaagtttcatatttggccgcactgtgcccgcctctgtgagtcatctcaggggatccaatcgaaacaccacagacagtctgtggttcaactggtccccagcgagtggcgactttgatttctacgaacttatcctttataaccccaacggcactaaaaaggaaaactggaaggataaggatctgaccgagtggcgctttcaggggttagtgccaggccggaagtacgtcctgtgggttgtcactcattccggcgacttaagtaacaaagttactgccgagtcccggacagcgccgagtcccccttccctgatgtctttcgccgatatagccaacacgtcactggccattacttggaaggggccccctgactggacagattacaacgacttcgagttacagtggctacctagagatgcactaacagtgtttaatccctacaacaaccgaaagtcagaagggcggattgtatacggactccgtccaggaagaagttaccagttcaacgtcaaaaccgtttctggtgacagttggaagacttattccaaacccattttcgggagcgtacgaacgaaaccagataagattcagaacctgcactgccgtccccagaacagcactgccattgcatgctcctggatccctccagactcagactttgatggatatagcatagagtgtagaaagatggatacccaagaggtagaattcagtagaaaactggagaaagagaaaagtctcctcaacatcatgatgttagttccccataagcgatacctcgtgtctatcaaggtccagtctgccgggatgacatccgaggtggtggaggactccacaatcactatgatcgatcggcctccaccccccccaccacacattcgagtgaatgagaaggatgtattgatttcaaagagttccatcaactttacagtgaattgcagttggttcagcgacaccaacggagccgtgaagtactttacagtggttgtgcgcgaagccgatggcaatgatgaactaaaacctgaacagcagcatccacttcctagctacctggagtatcgccacaatgcgtctataagagtctatcagacaaattactttgccagcaagtgtgccgaaaatcccaactccaactctaagagctttaacataaagttaggagccgagatggagtctctgggaggaaaatgtgaccctacgcagcagaagttctgcgatggaccattgaaacctcatactgcctacagaatctccatcagagccttcacccagctgttcgacgaagaccttaaggaattcacgaagccactgtacagcgacaccttcttttcactgccaattaccaccgagtctgagccattgtttggcgccatcgagggagttagcgcgggactctttctcatcggaatgctggtcgcagtggtcgctctcctcatctgtagacagaaagtctctcacggtagagagaggccaagcgcccggctctccattcggagagatcggcctttgtcagtccatctcaatttaggccagaagggaaaccgcaagacaagctgtcccataaagatcaatcagttcgagggccattttatgaaattgcaggctgattctaactacttgctgtctaaggagtacgaagagctgaaggatgtgggacgaaaccagagctgcgatattgccctgctccccgaaaatcgaggcaagaataggtataacaacatcctcccatatgacgccaccagagtgaaactgagcaatgtagatgacgatccctgttccgactatattaacgcctcctatatacccgggaataactttaggcgagagtacattgtaacacagggacccctccccgggacaaaagacgacttttggaaaatggtgtgggagcagaacgtccataatatcgtgatggttacccagtgcgtcgagaagggcagggtgaagtgcgaccactattggcctgcggatcaggacagcctgtactacggagatctcattttgcaaatgttgtccgagagcgttcttcctgagtggacaatccgcgagtttaagatttgtggtgaggagcagttggacgcccatagattgattcggcactttcattacaccgtgtggcctgatcacggggttccagagacgactcagtccctgatccagtttgttagaaccgtcagagattatatcaatcggtctcccggcgccggccctacagtggtacactgctctgcaggagtggggcggactggcacattcattgcactcgataggattcttcagcagctggactctaaagactccgtcgatatttatggcgccgttcacgatcttaggctgcatcgggtccatatggtgcagaccgaatgtcagtacgtgtatctacatcaatgtgtccgggatgtgctccgagccagaaaattgaggtcggaacaagaaaatccactgttcccaatttatgagaacgttaatccagaatatcacagagatccagtttatagtagacattag

SEQ ID NO: 83107 - DNA, 5724 bp, Artificial Sequence
  derived and/or modified sequence
atgctgagccacggcgccggcctggccctgtggatcaccctgagcctgctccagactgggctagccgagccagaacggtgcaacttcacactggcagaaagcaaagccagctctcattcggtttcaattcagtggcgcattctcggctccccatgcaatttcagtttaatctacagctcagatacactgggggcagcgttatgtcctacctttcgcatcgacaacacaacgtacggttgtaatctgcaggacctacaagccgggacaatctataacttccgcattatttcccttgacgaggagcgcactgtagtgctacagaccgatcctctgccaccagcgcggttcggtgttagcaaagagaagacaacgtctactagccttcatgtgtggtggacaccctcctctggcaaggtaacgtcctatgaggtgcagctgtttgatgaaaacaaccagaaaattcagggtgtgcagatccaagagtccacaagctggaacgagtataccttttttaacttgacggctgggagcaaatacaacatcgctattacggccgttagcggtgggaaaagatcctttagtgtgtataccaacggatccaccgtcccttctcctgttaaagatataggtatctcaactaaggcgaattccctactcatcagttggtcccacgggagcggtaatgtggagagatataggctgatgcttatggacaagggcattctcgttcacggaggggtggtagataaacacgccacttcctacgcatttcacggtcttacgccagggtatctttacaatctgaccgtcatgacagaggctgccgggctgcagaattacaggtggaaactcgtccgtacagctccaatggaagttagtaacctcaaggttacaaacgatggcagtctgaccagcctaaaagtcaaatggcagcgaccgcccggcaatgtggactcttacaacatcaccctttcccataagggtaccattaaagaatctagggtcctggctccatggatcacggagactcattttaaggaacttgtgcccggaagactctaccaggtaaccgtgagttgtgtgtccggggagctctccgctcagaaaatggcagttgggagaactttcccccttgctgttttacagttaagagtcaaacatgctaatgaaaccagcctttcgataatgtggcagactcccgtagcagagtgggagaagtacatcataagcctggccgaccgagacctgctgctgatacacaaaagcttgagtaaggatgctaaagagttcacatttacggatctggttccggggaggaagtatatggccaccgtcaccagtataagcggcgatcttaagaacagcagtagtgttaaagggagaacggtcccggcgcaagtgactgacctgcacgtggctaatcaggggatgacttcgtctttgtttaccaactggacacaggcgcaaggtgacgtggagttttatcaagtgcttcttatacatgaaaacgtggtcatcaagaacgaatccatcagcagcgaaacctctcgttattccttccatagcttgaagtcaggaagtctctacagcgtcgtagtaacaactgttagcgggggaatctccagtcggcaggtggtagtggagggaagaactgtcccaagctctgtgagcggcgtgacggtgaacaatagcggccgcaatgactacctctcagtctcatggctgctggctccgggggacgtggacaactatgaagtgactctgagccacgatggcaaagtagtgcaatcactcgtcattgctaagagtgtcagagagtgcagctttagttcattgaccccagggcggctgtatacggtgaccattacgacaagaagcggtaaatacgagaaccattcctttagccaagagagaacagtgccggacaaagtacagggagtgtcagtgtccaacagcgccaggagtgattatctgcgggtcagctgggtacatgcgaccggcgatttcgaccactacgaagtgacaattaagaataagaataacttcatacagaccaagagtattcctaagtcagagaatgaatgcgtattcgtgcaactcgtcccaggaagactttattcagtcacagtgaccacaaaatctggacagtatgaggccaatgagcagggcaacgggagaactattccggaacctgtcaaagatctcaccctgcgcaaccggtccaccgaggacctccatgtgacttggtccggggcgaacggagatgtggaccaatacgagattcaactcctgttcaacgatatgaaagtgtttcctcctttccatttggtaaacacggctacagaataccggttcacttctcttacccctgggagacagtataaaatactggtcctcaccataagcggggacgtacaacagagcgcttttattgaagggttcaccgttcccagcgccgtgaagaatatacacatctcgccaaacggagccacggacagcctcacggtgaactggacgcccggcggtggggacgtggactcatatacagtcagcgcttttagacacagccaaaaagttgatagtcagactattcccaagcacgtcttcgaacataccttccataggctggaagccggtgaacagtatcagatcatgatcgctagtgtgtctggctctttgaagaatcagattaacgtcgtgggccgcacagtgcccgctagcgtgcagggtgtcattgctgacaatgcctactcgtcctactccctgatcgtctcttggcaaaaggcagccggggtagccgaaaggtatgatatcttgctgcttactgaaaacgggatcctgctgaggaacacttcagagccagctacaaccaagcagcacaagttcgaggacctgactcccggaaaaaagtataagatacaaattctcactgttagcggaggactcttttccaaagaggcccagactgaagggagaaccgtcccagcagctgtaactgatctgcgcatcaccgagaactccacgcgtcacctgagcttcaggtggactgccagcgaaggtgagctgtcgtggtacaacatctttctatataatccagacggcaacctgcaggagcgggctcaggttgatcccctggtccaatcatttagctttcagaatcttttacaggggagaatgtataaaatggttattgttacacactccggtgagctgagcaacgaatcgtttatctttggtagaacagtgcccgccagtgtcagccacctccggggaagtaatcggaacacaactgactccctttggttcaactggtcaccagccagtggtgacttcgatttctacgagctgatcctctacaatcccaacggtaccaaaaaggagaactggaaggataaagatctgactgaatggcgatttcagggccttgtgcccgggcgcaagtatgtgttgtgggtggttacacattcaggcgacctgagcaacaaagtaacggcagagtctaggaccgctccgtccccacctagcctcatgtcatttgccgacatagccaatacttctctcgctatcacctggaagggcccaccggattggaccgattataacgactttgagttacagtggcttcctagagacgcccttaccgtctttaacccctataataaccgaaagagtgagggccgcatcgtgtatggtcttcgtccaggtcgaagctaccagttcaatgtgaagacagtgagcggtgatagctggaaaacttactctaaaccgatctttggtagcgtgcgtaccaagccagacaagattcaaaacctgcattgtagaccacagaacagcactgcaatcgcctgctcctggataccaccagacagcgattttgacgggtacagcattgaatgtagaaagatggatacacaggaggttgaattctcaagaaaactggaaaaggaaaaatccttgctgaacataatgatgctcgtgcctcacaagcgatatctggtttcaatcaaagtgcagtccgcagggatgacttccgaggttgtcgaggacagtaccatcaccatgatcgaccgccctcccccacccccaccgcatatccgcgttaacgaaaaagacgttcttataagcaaaagctctattaacttcaccgtgaattgttcttggttctcggacactaacggtgccgtgaagtattttactgtagttgtccgtgaggcggatggctccgacgaactgaagcctgaacagcagcacccactgccctcataccttgagtaccggcacaatgcctctatcagggtgtaccagacaaactacttcgcctcaaaatgtgctgagaaccccaactctaatagtaagagcttcaacattaaattgggagccgaaatggagagtctgggagggaaatgcgatcctacacagcaaaagttctgtgatggaccattgaagccacacaccgcttatcgcatttcaatcagagccttcacccagctgtttgacgaggacctgaaagaatttaccaaacccttgtatagtgatacattcttttcgctgcccattaccacagagtccgagcccttgttcggcgcaattgaaggagtcagcgccggattgtttcttattggtatgctcgtggcagttgtggccttgttaatatgcagacagaaggtgagccacggcagggagcggccttccgcgagactctctatccgacgcgataggcctctgagcgtccacctcaacctggggcaaaagggtaatcggaaaactagctgccccattaagataaaccaattcgaaggtcatttcatgaaactgcaggcagatagtaactacctactcagtaaggaatacgaggaattgaaagatgtgggccgcaatcagtcttgcgacattgctcttctgcccgaaaaccgtggcaagaaccgatataataatatactgccatatgacgccacacgcgtaaagctgagcaacgtggatgatgatccatgtagcgattacatcaacgcctcgtatatcccaggcaacaatttccgtagggagtacatcgtcacccaggggccccttcctgggacaaaggatgatttctggaaaatggtctgggaacagaacgtgcacaatatagtcatggtaactcagtgtgtggagaagggtcgagtcaaatgcgaccattactggccagctgaccaggactctctctattatggcgacctcattttacagatgctatccgagagcgtgctcccagagtggaccattagggagttcaaaatttgcggagaggagcagctggacgcccatcgcctcatcagacattttcactacacagtgtggcccgatcatggtgtgcccgaaaccacccagtccctgatccagtttgtcagaacagtgagggactatatcaatagatctccgggagctggcccgacagtcgtgcattgcagcgccggagtgggtagaacaggtacgtttatcgctttagaccggatattgcaacagctcgattccaaggactccgtggatatttacggggccgtgcatgatctgaggcttcacagggtgcacatggtacagaccgagtgccagtacgtctacctccatcagtgcgtaagagacgtcctaagggcaagaaaactccgctccgagcaagaaaaccccctcttccctatatacgaaaatgttaaccccgagtaccacagggaccccgtgtactctagacattag

SEQ ID NO: 83108 - DNA, 5723 bp, Artificial Sequence
  derived and/or modified sequence
atgctaagccacggtgctgggcttgctctatggattaccctgtctctgctgcagacgggcctggcagaaccagagaggtgcaatttcaccctggcagaatccaaggcaagttctcactcagtatccattcaatggagaattctcggatcaccctgtaatttttcacttatatattcatccgacacacttggggcagcactctgccccactttcaggatcgataatactacatacgggtgcaacttacaagacctgcaagcaggcacaatctacaattttaggataatcagtctcgatgaggagcgtacagtcgtgctccagactgacccactgcctccggctaggtttggggtgagcaaggagaagaccacttccactagcctacatgtgtggtggactccatccagcggaaaagttaccagttatgaggtacagttgttcgacgagaataatcagaagatccagggcgtccagatacaggagagtacatcgtggaacgaatatacgttttttaatcttaccgcgggatcaaaatacaacattgccattacggccgtcagcggaggtaagcggagcttcagcgtttacacaaatggaagcacggtcccttcacctgtgaaagatattggtatctctaccaaggcaaatagcctgctaatatcatggtctcacgggtccgggaacgtggagaggtacaggctgatgcttatggataagggcatactcgtgcacggcggagtcgtcgataagcacgcgacaagctatgcttttcacgggttgacaccaggttacctgtataacctcactgttatgacggaagcagccggattgcagaactaccgatggaaactcgtcaggacggctcccatggaggtgtcaaacctcaaggtgacaaatgatgggtcattaacttccctcaaagtgaagtggcagagaccacctgggaatgtggattcttacaacattacgctgtcccacaaaggaactataaaagagagtcgggtcctagcaccttggataactgaaactcattttaaggagcttgttcctggaaggctctatcaggtaacggtaagttgcgtctcgggcgagttgtctgcgcaaaaaatggctgttggaaggacgtttcctctcgcggtcctgcagctccgcgtgaagcacgcgaatgagacctcgctgagcattatgtggcagacacccgtggctgaatgggagaagtacatcatctccctggccgacagagacttgctgttaatccataaaagcctgagcaaggatgccaaggagttcacattcactgatctcgtacctggcagaaaatacatggctactgttacttccatctccggggatttgaaaaatagttcatcggtcaaaggtcggaccgtgcccgcacaggttactgatctgcacgtcgcaaaccagggtatgacatcaagcttattcactaactggactcaggcccagggcgatgtagagttttaccaggtgctgctgatccacgagaacgtcgtcatcaaaaatgagtccatcagttcggaaacctcccgatactcattccactcgttaaagtccgggtctttgtactccgttgtcgtaaccacagtttctggcggtatttcctcgagacaagtcgtagtcgaggggcgaacggtgccttctagcgtatccggtgtgaccgtgaacaattcaggccgaaatgattacttgtcagtgagttggctcttggctcctggggacgtggacaattacgaagtgaccctcagccatgatgggaaagtggtgcaaagtctcgtgatagcaaagtcagttcgagaatgttctttctcttcccttactcccggtaggttgtacactgttacaatcactacaaggtctggcaaatacgaaaaccattcatttagtcaagaaagaaccgtgcccgacaaagtccagggcgtctcagtgtccaattcagcacgctccgactacctccgcgtcagttgggtgcacgccacgggggattttgaccattatgaggtcactatcaaaaataaaaacaactttattcagaccaaaagtattcccaagagcgaaaatgagtgtgtgttcgtgcagttggtaccgggtagactttatagcgtgactgtcacaacaaaatcaggccaatatgaagctaacgagcaagggaacggccgaacaatcccagagccagtcaaggatctaacactgaggaaccgttccacggaagacctccacgtgacatggtccggcgcaaacggtgatgtggaccagtatgagattcagttgctctttaacgacatgaaagtgtttcccccattccacttggtcaatactgccacggagtatcgtttcacctccctgacaccaggcaggcagtacaaaatcctggtgctcaccatatcgggtgacgtgcagcagtcagcttttatcgagggcttcaccgtgccgagtgccgtgaaaaatattcacatctcaccaaacggagcaacggactcattaaccgtaaattggacccctggcggaggcgacgttgactcgtataccgtgtcagccttccgccattcgcaaaaggtagacagtcagaccattccaaaacacgtttttgagcatactttccatagactggaggccggagagcagtaccaaataatgatcgcgtcagtgtccggctcgctgaagaatcagatcaacgtcgtgggcaggacggtgccagcctctgtgcaaggtgtgattgcggataatgcctattcctcctactccctgattgtgtcctggcagaaggctgcaggtgtggcagagaggtatgatatactcctgctgacagaaaacggcatactgctgaggaacacttccgaacctgctactaccaaacagcataagttcgaggatctcacccctggcaagaaatataagatacagatccttaccgtcagcggcggtctgttctccaaggaggcgcagacagagggaagaactgtgccagctgctgttactgacctgaggatcaccgaaaatagtacgaggcacctgtcctttcggtggacagccagcgagggtgagttaagctggtataatatctttctctataatcccgacggaaacctgcaagagagggcccaggtcgaccccttggtccagtctttcagctttcagaatctgctgcaaggtcggatgtacaaaatggtgattgtcacccattcaggcgagttgtcaaacgaaagcttcattttcggtcggacagtgccggcttccgtaagtcatctccggggaagtaacagaaacaccaccgactcattatggtttaactggtctcctgcttccggcgacttcgatttctatgagctgatcttatataaccctaacggtacaaaaaaggaaaattggaaggacaaggacctcactgagtggcggtttcaaggactggtgccaggtcgaaagtacgtgctatgggtggtcacccactccggggatctgtccaataaagttaccgctgagtccagaactgcacccagtccgcctagtctgatgtctttcgcagacatcgccaacacatccctcgctataacatggaagggcccaccagactggacagattataacgacttcgaactacaatggctgcccagggatgccctcactgtgttcaacccatataacaaccgcaagagcgaaggcaggatagtttacggactcaggccgggaagaagctaccagtttaacgttaagaccgtcagtggcgactcctggaagacatattccaaacccatctttggaagcgtgcgcactaaaccagataaaattcaaaacttgcactgtagaccccagaactctactgctatcgcttgcagctggattccccctgatagtgattttgacggttacagtatcgaatgcagaaaaatggatacacaggaagtcgaattctcgaggaagctggagaaagagaaaagcctgctgaatatcatgatgctagttccacacaaacggtatcttgtctcaataaaagtccagtccgcgggaatgacttcagaggtggtagaagattcaacgatcactatgatagaccgccctcctcctccacccccacacatacgggtgaacgaaaaagacgtcctcataagcaaatcctctatcaattttaccgtgaattgtagctggttcagcgacaccaatggagccgtgaagtactttacagtggtcgtccgggaggccgacggaaatgacgaactgaagcctgagcagcaacaccccctcccctcttatttggaataccgacacaacgcctcgatccgggtgtaccagactaattacttcgcatccaaatgcgctgagaatcccaactctaattcaaaatccttcaatattaaactgggggcagagatggagtctctcggaggtaagtgtgaccctactcagcagaaattctgcgacgggcctctcaagcctcacacagcatacagaatctctattcgtgctttcactcaacttttcgatgaagaccttaaagagttcacaaagcccttgtactcggataccttcttctccttgccaatcaccaccgagtcagagcctctcttcggagcaattgaaggagtgagtgccggtttgtttctgattggcatgctagtcgccgtggtggcgctcctgatttgtagacagaaggtctcccatggacgggagagacccagtgcgcgactgtctattaggagagaccggccactgagcgtccatctcaacctaggccagaaggggaaccgcaaaacgtcatgccctattaagattaaccagtttgaagggcacttcatgaaactgcaggctgacagcaactatcttttgagtaaggagtacgaggagctcaaggacgtcggccgaaaccagtcctgcgatatcgccctgcttcccgaaaacagggggaaaaacaggtacaacaacatactcccctatgacgccacccgggtgaaactgtctaatgttgatgatgacccctgctcggattacatcaatgcatcctacattcccggtaacaatttcaggcgagagtatattgtaacacagggtccactgcccggtactaaggacgatttctggaaaatggtgtgggaacagaacgtccacaacattgtgatggttacacagtgcgtagaaaaaggtcgcgtcaaatgcgaccattactggccagccgaccaggattcactctattatggggatctgatcttgcaaatgctctctgagagcgttctgcccgagtggacaatacgcgagttcaaaatttgcggagaagagcagctagatgcacaccgactgatcagacatttccactacacagtgtggccagatcatggcgtccccgagactacccagagtttaatccagtttgtgaggacggttagagactatattaacagatcacctggcgcaggcccaacggtggtgcattgctcagccggtgtgggaaggacagggactttcattgctctggatcgaattctgcagcaattggactctaaggactcagtcgacatttatggggcagtgcacgacttgagactgcacagagtccacatggtgcagaccgaatgtcagtatgtgtacctccatcagtgcgttcgggatgtcctgcgggcaaggaaactccggagcgaacaggagaatcctctattccctatatacgagaatgtaaaccctgagtaccacagagacccagtgtacagccggcacta

SEQ ID NO: 83109 - DNA, 5723 bp, Artificial Sequence
  derived and/or modified sequence
atgctgagccacggcgcaggcctggccctctggattacacttagcctgcttcagaccggcctggcagagcctgagagatgtaactttactttagccgaatccaaggcgtcaagccactcagtctctatccaatggcgcattctcggatccccttgcaatttttctcttatttattcttcagacacactaggggctgccctatgcccgacattccgtattgacaacactacatacggatgtaacctgcaggacctgcaggccggaacaatctataattttcgaatcatcagcctggatgaggagcggaccgtggtgctccaaactgatcccctgccaccagctcgcttcggtgtttctaaagaaaaaacgactagtacctcactccatgtgtggtggacaccttcgtctgggaaagtgacttcttacgaggtacaattattcgacgagaacaatcaaaaaatccagggggtccaaattcaggaaagcacgtcgtggaacgagtatactttcttcaatctgactgccggttctaaatacaacatcgccatcactgccgtgtctggaggtaaacggtccttttcagtatacacaaacggcagcacagtcccttctcccgtaaaggacatcggcatcagcaccaaggccaacagcctacttatatcctggtctcacgggtccggtaacgtggagcgctatcggcttatgctcatggataaaggcatcctcgtgcacggaggcgttgtggacaaacacgctacctcctacgctttccatggacttactcccggttatctgtataatcttaccgttatgaccgaagccgcagggctacagaactacagatggaaattggttagaaccgcaccaatggaggtctctaacctgaaagtcacaaacgacgggtccctgactagtctgaaagtgaagtggcaacggcctcctggcaacgtcgacagttacaacatcacccttagccataaaggcacgataaaagaatccagagtcctagctccatggattaccgagacccactttaaggaactggtgcccggaaggctctaccaggtgactgtttcctgcgtatccggagaactttctgctcaaaagatggctgtgggacggacttttccccttgctgtgctgcagcttcgagtgaagcacgccaacgaaacgtcattgtcaattatgtggcaaacacccgtggccgagtgggagaagtacatcatttctctggctgatcgggacttgctgctgatccataaaagcctctccaaagacgctaaagagttcaccttcactgatcttgtgccgggaagaaaatacatggcaaccgtgacttccatctccggagaccttaaaaattcaagttccgtcaagggccgtacagtgcccgctcaggtgacagacctgcacgtagcgaaccagggaatgacatcatctttgtttaccaactggacacaggcgcagggtgatgtggaattttatcaggttcttctgatccatgaaaatgtcgtgatcaagaacgaatcaatctccagcgagacatccaggtattctttccatagcctcaagagcggctccctttattcagttgttgtcacgaccgtctcaggagggatctcgtctagacaggttgtggtggaagggaggaccgttccttcatctgtctccggggtgacagtgaacaactctggacggaacgattatttgtccgtttcttggctgctagccccaggagacgtggacaattacgaggtgacgttatctcatgacggcaaggttgtgcagagcctcgtgatcgccaaaagcgttcgtgaatgttccttcagctcactcacgcctggcagactgtacacagtgactatcactacacggagtggcaagtatgaaaaccactcctttagtcaagaaaggacagtgccagataaggtgcaaggcgtctctgtcagtaatagcgctaggagcgattatctgagggtgagctgggtgcacgccacaggtgatttcgaccactatgaagtcacaatcaaaaataagaataactttattcagaccaagtctattcctaaatcagaaaacgaatgtgtgtttgtgcagctggttccgggaaggctgtacagtgtaacagtcaccaccaagagcggccagtatgaagcaaatgaacagggcaatgggcgtacaatccctgaaccagtgaaggatctgactctgaggaacaggagtaccgaggacctacacgttacctggtccggcgctaatggcgatgtcgaccagtatgaaatccaacttctgtttaacgatatgaaagtattcccacccttccatctagttaacacagcgaccgagtaccgtttcacctcacttaccccaggaaggcagtacaaaattcttgtgttgacaattagcggagacgttcagcagtcagcgttcatagaaggcttcaccgttccctccgcagtcaagaacattcacatatctccaaacggcgcaaccgatagcctgactgtgaactggaccccgggaggaggggacgtggactcatataccgtgtcagcctttcgtcattcgcagaaagtcgactcccagactatccccaagcacgtttttgagcacacatttcatcggttggaggcgggtgaacagtaccagatcatgatcgcgagtgttagcggcagccttaaaaaccaaataaacgtggttggaagaacagtaccagctagcgtgcagggagttatagctgataacgcctacagttcttacagtctcatagtctcttggcaaaaggccgctggcgtagccgaacgatacgacattctgctgttaactgaaaacgggatactgctccgaaacacctctgagcctgctacgaccaagcagcacaagtttgaggatctaacgccaggcaaaaaatacaagatacagatcctgaccgtttctggaggattgttttcaaaggaggcacagacggaaggaagaacagtgccggctgccgtcactgatttgaggattaccgaaaatagcacgaggcatctgagcttccgttggacagcgagcgagggcgaattgtcctggtacaacattttcctctataatcccgacggcaacctgcaggaacgtgctcaggtggatcccctcgtgcagtccttcagtttccagaatctgcttcaggggaggatgtataagatggttattgtgacacactctggtgagttaagcaacgagagcttcatcttcgggagaacagtcccagccagtgttagtcatctgagaggcagcaatcgcaataccaccgactctctctggttcaattggagccctgcgtccggcgattttgatttttatgagctaattctgtataacccaaacgggaccaagaaagaaaattggaaagataaagaccttaccgagtggagattccagggcctggtaccaggccgtaaatacgtcctgtgggtggtgacccactcgggggacctgagcaacaaagttacagctgaaagccggaccgccccatcccccccttcactcatgagcttcgctgacatcgccaacaccagtctcgccataacatggaagggtccacctgattggacagattacaacgactttgaactgcaatggttgccaagagacgcccttaccgtttttaacccatataacaatcgaaagagtgaggggcgtatagtctacggacttagacccggaagaagttatcagttcaatgttaaaaccgtcagtggtgacagttggaagacctattcaaagcctatctttgggtcagtgcgcaccaaacctgataaaattcagaacctgcactgccgcccacagaatagtaccgccatcgcatgcagctggataccccctgacagtgacttcgacgggtatagcatagagtgcagaaaaatggatactcaggaggtggagttctcacgtaagctggagaaagagaagagcctgctgaatatcatgatgctcgtgcctcacaaacgatacttagtgtctatcaaagtccagagcgcagggatgaccagtgaagtagtagaggatagtaccattaccatgattgataggccaccgccaccaccccctcatatcagggtgaatgaaaaagatgttctaatcagcaagtcttccataaattttactgtgaattgctcatggttcagtgataccaacggagctgtcaagtactttacagttgtggtgagagaggccgatgggtcagacgagcttaaacctgagcagcaacaccctctgccaagctatctcgaatatcgtcacaatgcctccattcgtgtctaccagacaaattactttgccagcaaatgtgctgagaacccaaacagcaattctaagagttttaatattaaactcggagctgaaatggagagtctcggaggaaagtgcgacccaacacagcagaagttttgtgacggcccactgaagccacatacagcgtaccgtatcagtatccgggcttttacacaactctttgatgaggacctaaaagaattcaccaaaccactctattctgacacattcttttcactcccaatcaccacagaatcagaacccctgttcggtgcaatagaaggcgtgtccgctgggttgtttctgattgggatgctggttgcggtggtggctctgctgatctgcaggcaaaaagtgtctcatggccgagaaagaccttctgctcgtctctccataagaagggaccgacccctgtccgtgcatctcaacctggggcagaaggggaaccgcaagacctcgtgtccaatcaagatcaatcagtttgaaggccacttcatgaaactgcaggccgattccaactatctcctcagcaaggagtatgaggagttgaaggacgtggggagaaatcagtcatgtgatatcgctctgctacccgagaacagaggaaaaaaccgctataacaacatcttgccctatgacgcaacacgggttaagctatcaaatgtcgatgatgacccctgcagtgactacattaatgccagctacattccaggaaataattttaggcgggagtacatagtaacacagggacccttacctgggactaaagatgacttttggaagatggtttgggaacagaatgtccataatattgttatggttacacagtgcgttgagaaaggtcgcgtcaagtgcgatcactactggccagctgaccaagacagtctgtactatggcgatcttatactgcagatgctgagcgaatcagtccttcccgagtggactatccgagagttcaagatctgtggggaggagcagcttgacgcgcatcgactaatacgccacttccattataccgtgtggcctgaccacggcgttcctgaaacaacacaatcgctaattcagtttgtccggactgtacgggactatattaatcgctcccccggagcaggaccaacagtcgtccattgttctgctggggtaggcaggaccggcacattcatagccctggacagaatcctgcagcagctggattctaaggactctgttgatatttacggtgccgtgcacgacctgcgcctgcacagggtgcacatggtccagaccgagtgccagtatgtctacctgcatcaatgtgtgcgagacgtcctccgcgctcgcaagctgcgttccgaacaagaaaaccccctgttcccgatttatgagaatgttaatcccgagtaccatagagacccggtttattctaggcatta

SEQ ID NO: 83110 - DNA, 10363 bp, Artificial Sequence
  derived and/or modified sequence
atgctgagccatggagccgggttggccttgtggatcacactgagcctgctgcagactggactggcggagccagagagatgtaacttcaccctggcggagtccaaggcctccagccattctgtgtctatccagtggagaattttgggctcaccctgtaactttagcctcatctatagcagtgacaccctgggggccgcgttgtgccctacctttcggatagacaacaccacatacggatgtaaccttcaagatttacaagcaggaaccatctataacttcaggattatttctctggatgaagagagaacagtggtcttgcaaacagatcctttacctcctgctaggtttggagtcagtaaagagaagacgacttcaaccagcttgcatgtttggtggactccttcttccggaaaagtcacctcatatgaggtgcaattatttgatgaaaataaccaaaagatacagggggttcaaattcaagaaagtacttcatggaatgaatacacttttttcaatctcactgctggtagtaaatacaatattgccatcacagctgtttctggaggaaaacgttctttttcagtttataccaatggatcaacagtgccatctccagtgaaagatattggtatttccacaaaagccaattctctcctgatttcctggtcccatggttctgggaatgtggaacgataccggctgatgctaatggataaagggatcctagttcatggcggtgttgtggacaaacatgctacttcctatgcttttcacgggctgacccctggctacctctacaacctcactgttatgactgaggctgcagggctgcaaaactacaggtggaaactagtcaggacagcccccatggaagtctcaaatctgaaggtgacaaatgatggcagtttgacctctctaaaagtcaaatggcaaagacctcctggaaatgtggattcttacaatatcaccctgtctcacaaagggaccatcaaggaatccagagtattagcaccttggattactgaaactcactttaaagagttagtccccggtcgactttatcaagttactgtcagctgtgtctctggtgaactgtctgctcagaagatggcagtgggcagaacattccccctggctgtcctccagcttcgtgtcaaacatgccaatgaaacctcactgagtatcatgtggcagacccctgtagcagaatgggagaaatacatcatttccctagctgacagagacctcttactgatccacaagtcactctccaaagatgccaaagaattcacttttactgacctggtgcctggacgaaaatacatggctacagtcaccagtattagtggagacttaaaaaattcctcttcagtaaaaggaagaacagtgcctgcccaagtgactgacttgcatgtggccaaccaaggaatgaccagtagtctgtttactaactggacccaggcacaaggagacgtagaattttaccaagtcttactgatccatgaaaatgtggtcattaaaaatgaaagcatctccagtgagaccagcagatacagcttccactctctcaagtccggcagcctgtactccgtggtggtaacaacagtgagtggagggatctcttcccgacaagtggttgtggagggaagaacagtcccttccagtgtgagtggagtaacggtgaacaattccggtcgtaatgactacctcagcgtttcctggctgctggcgcccggagatgtggataactatgaggtaacattgtctcatgacggcaaggtggttcagtcccttgtcattgccaagtctgtcagagaatgttccttcagctccctcaccccaggccgcctctacaccgtgaccataactacaaggagtggcaagtatgaaaatcactccttcagccaagagcggacagtgcctgacaaagtccagggagtcagtgttagcaactcagccaggagtgactatttaagggtatcctgggtgcatgccactggagactttgatcactatgaagtcaccattaaaaacaaaaacaacttcattcaaactaaaagcattcccaagtcagaaaacgaatgtgtatttgttcagctagtccctggacggttgtacagtgtcactgttactacaaaaagtggacaatatgaagccaatgaacaagggaatgggagaacaattccagagcctgttaaggatctaacattgcgcaacaggagcactgaggacttgcatgtgacttggtcaggagctaatggggatgtcgaccaatatgagatccagctgctcttcaatgacatgaaagtatttcctccttttcaccttgtaaataccgcaaccgagtatcgatttacttccctaacaccaggccgccaatacaaaattcttgtcttgacgattagcggggatgtacagcagtcagccttcattgagggcttcacagttcctagtgctgtcaaaaatattcacatttctcccaatggagcaacagatagcctgacggtgaactggactcctggtgggggagacgttgattcctacacggtgtcggcattcaggcacagtcaaaaggttgactctcagactattcccaagcacgtctttgagcacacgttccacagactggaggccggggagcagtaccagatcatgattgcctcagtcagcgggtccctgaagaatcagataaatgtggttgggcggacagttccagcatctgtccaaggagtaattgcagacaatgcatacagcagttattccttaatagtaagttggcaaaaagctgctggtgtggcagaaagatatgatatcctgcttctaactgaaaatggaatccttctgcgcaacacatcagagccagccaccactaagcaacacaaatttgaagatctaacaccaggcaagaaatacaagatacagatcctaactgtcagtggaggcctctttagcaaggaagcccagactgaaggccgaacagtcccagcagctgtcaccgacctgaggatcacagagaactccaccaggcacctgtccttccgctggaccgcctcagagggggagctcagctggtacaacatctttttgtacaacccagatgggaatctccaggagagagctcaagttgacccactagtccagagcttctctttccagaacttgctacaaggcagaatgtacaagatggtgattgtaactcacagtggggagctgtctaatgagtctttcatatttggtagaacagtcccagcctctgtgagtcatctcagggggtccaatcggaacacgacagacagcctttggttcaactggagtccagcctctggggactttgacttttatgagctgattctctataatcccaatggcacaaagaaggaaaactggaaagacaaggacctgacggagtggcggtttcaaggccttgttcctggaaggaagtacgtgctgtgggtggtaactcacagtggagatctcagcaataaagtcacagcggagagcagaacagctccaagtcctcccagtcttatgtcatttgctgacattgcaaacacatccttggccatcacgtggaaagggcccccagactggacagactacaacgactttgagctgcagtggttgcccagagatgcacttactgtcttcaacccctacaacaacagaaaatcagaaggacgcattgtgtatggtcttcgtccagggagatcctatcaattcaacgtcaagactgtcagtggtgattcctggaaaacttacagcaaaccaatttttggatctgtgaggacaaagcctgacaagatacaaaacctgcattgccggcctcagaactccacggccattgcctgttcttggatccctcctgattctgactttgatggttatagtattgaatgccggaaaatggacacccaagaagttgagttttccagaaagctggagaaagaaaaatctctgctcaacatcatgatgctagtgccccataagaggtacctggtgtccatcaaagtgcagtcggccggcatgaccagcgaggtggttgaagacagcactatcacaatgatagaccgcccccctcctccacccccacacattcgtgtgaatgaaaaggatgtgctaattagcaagtcttccatcaactttactgtcaactgcagctggttcagcgacaccaatggagctgtgaaatacttcacagtggtggtgagagaggctgatggtaatgatgagctgaagccagaacagcagcaccctctcccttcctacctggagtacaggcacaatgcctccattcgggtgtatcagactaattattttgccagcaaatgtgccgaaaatcctaacagcaactccaagagttttaacattaagcttggagcagagatggagagcctaggtggaaaatgcgatcccactcagcaaaaattctgtgatggaccactgaagccacacactgcctacagaatcagcattcgagcttttacacagctctttgatgaggacctgaaggaattcacaaagccactctattcagacacatttttttctttacccatcactactgaatcagagcccttgtttggagctattgaaggtgtgagtgctggtctgtttttaattggcatgctagtggctgttgttgccttattgatctgcagacagaaagtgagccatggtcgagaaagaccctctgcccgtctgagcattcgtagggatcgaccattatctgtccacttaaacctgggccagaaaggtaaccggaaaacttcttgtccaataaaaataaatcagtttgaagggcatttcatgaagctacaggctgactccaactaccttctatccaaggaatacgaggagttaaaagacgtgggccgaaaccagtcatgtgacattgcactcttgccggagaatagagggaaaaatcgatacaacaatatattgccctatgatgccacgcgagtgaagctctccaatgtagatgatgatccttgctctgactacatcaatgccagctacatccctggcaacaacttcagaagagaatacattgtcactcagggaccgcttcctggcaccaaggatgacttctggaaaatggtgtgggaacaaaacgttcacaacatcgtcatggtgacccagtgtgttgagaagggccgagtaaagtgtgatcattactggccagcggaccaggattccctctactatggggacctcatcctgcagatgctctcagagtccgtcctgcctgagtggaccatccgggagtttaagatatgcggtgaggaacagcttgatgcacacagactcatccgccactttcactatacggtgtggccagaccatggagtcccagaaaccacccagtctctgatccagtttgtgagaactgtcagggactacatcaacagaagcccgggtgctgggcccactgtggtgcactgcagtgctggtgtgggtaggactggaacctttattgcattggaccgaatcctccagcagttagactccaaagactctgtggacatttatggagcagtgcacgacctaagacttcacagggttcacatggtccagactgagtgtcagtatgtctacctacatcagtgtgtaagagatgtcctcagagcaagaaagctacggagtgaacaagaaaaccccttgtttccaatctatgaaaatgtgaatccagagtatcacagagatccagtctattcaaggcattgagaatgtacctgaagagctcctggataaaaattattcactgtgtgatttgtttttaaaaacttgcttcatgccctacagaggtgccagctatttctgttgatactatgtataatttattaatctggagaatgtttaaaattttatataatttaaaggtaacagatattattgtacatagttgtattttgtagtttcttctgtaaatatgtatttttcataatgtttaatattaagctttatataatactatttttccacactaaagtgttcatgacttgttctacataaaactaattcaacctgtatgacaggactactggtaaaatgcatatggaggtggtggcagagacaatccttcaggccatgttttctacctgttttgatattcactggacaggaaaaagggcagggctagagagagcaaatactatggctagatttgctgcattgctgtcccatgaatctcgagagccaacagacatgtcctaacttgctattaggacaaatgtgacagtcaaaaaaaggattagagggagggagaaaaaagaattaagcagtaccaaagctgaactagatgcttgtgtctgaactagttgctctctctctcctttctccttccagggattcaagccaaagtggtcagctcagggatcatgtaacttgcagtgcaagcccaggatggtaggatgcagggttgagggttctgatagagaatgattccaaacagaagtgatgaattccttttgttaataagatgccagctatacccagactggaaacataacatgcaaagcactatctacagtgattagagatcctttcattgcattcatggtgtggagtgtgaacatccacacccatactgtaatgtatttatacacactagtttctgtctcattttcagtggtctccattcctagaaaagtcacaattatccattcctacttgatttcccattaaaagaatattatggtagcagattgtgcccctcattaaaaggcttaatgccaacattttcatagaaatgactacaaacatcatatatagtaaatttaaaaacaatagcaaaaacaaaaacagtggtcttcagtaaaattttcaaaacttcttttagtaaatcaatgaagtcaaaatgtcaagtaatcacccaaagttgcatttaataacaaaaggcactacatactgtaccaagtttatcttcaatatttgtgccttacttactttgactataacaaattccaatgagtcagaaagtatttccttcatcaaggtccagttccgacagcattcctgggaaaaatttgaaaggagtttgtacggaatcttcatagatacctgagaagatgagctggagatgtttgcctttttcacactacaaatttttctgtaataaacttgggaattagaggtcaagtttgttgatggcatagcttcctttgcataaagagtatatttcttttcaaagtatatatttttgtaacctaccataaagtccgtaagtgaatacaacgaatgtaattgacataataattgaaaatcattgactatacctaaaatagttctttataattaaataactctacacccaatctggaaatttttccaaggttatttgaagtttacaaaaatgtgaagcataatcataagcttcaaagattcacagtttcattgtgctcaatgctcttgtgaaatgacagtcttaagctctgattctgtatcaaggaactaagtgaatcttctggaaatgaaaaggaacaacatatgtgtaagtgcagtagatgtaccaccagcgagaaaatagaggtcagagatctacaacgtgtggcatccattagaaatcacctttcctacattgaaaagaaaaaagagaaaaagcagaattttacactaatgttgcttgatgcaaagcacattaatgcttggaaggatacattcattttcgacttttcattcactcagaaaacttctagtaagtatctgcaacctgctaggcactgttccagaatctacacatttctactcacataaagagaatcctcataaagttaggattgttgttactaccttcaattgagcttaaaagacagcctcatcaagggaatgggataactgagccagtctaggacagtggtcaccttccacaggccacacactggaaagtgctaatgctactttaatagcaaacctctggatctaggagagagagcaattaattgcacaaaccaggagttaaaaccataaaaaaaacctatgcatctgtaatagtaaataacactcacgtactctggcaacatctagggtagtatcagaattatgtaaatggacatgacagggaaaaatcgtaggtttttttagtctaatccaacccaggaaatgtttattcctaccctacacctaattttaaaccttcttagcaacaaatatttcactattcgctcctactcctgggaagactaaatatataattgacttatttattaaatttaggagaaaaaaaaagttttccttgacattcagctctattggatttatttccatttaattgcatcatgtgttatgtcttggtaaacactccatttcctgtcttggtgggcatcctgtctgtgtacctgtgcagtacactttaatcatcaagacttcaaagtgcttttgagctatcaaatcttgggagagtcccatctagcatcttaataattatttttccaagttcgttataattaactcctttaacctcatctcattaaatcaattttgtattgtcattctgttgttctctggaaagcagccaattgttcagctcttgaatcagaattttcaaagactcacctctcttacctgggcttgcacatatttgtcctaagtaattctctatcccttaaacctctgagtccctctgttttattacttgccccactcctcctacttgaatatgtttgttttcccagttgaatgtgatttttatctactgttcatattatcttttatacccatgagtataatttcatagtcctttcaggttccacatcatcaaagagatgaccataatttcacttttttttgaaatgaagtcttgctctgttgcccaggctggagtgcagtggcacaatctcagctcactacaacctccgcctcccaggttcaagcgattctgccttagcctcccaagtagctggaattacaggtgcctgccaccatgtctggctaatttttgtgtttttagtagagatggggtttcaccatgttggccaggctggtcttgaactcgtgaccttaggtgatccacccacctcaacctcccaaagtgctaggattacaagagtgagccaccgcacctggccaattcacttttaaatactaaaaggcacacagcacacagacattttcggggcagttttctttgggagggtctttgataaattttgtaatcacctctcggaagaaagcccaaaatgacatgtgaaaataatattaaaccatttaccagatgtccagcaatataaaaatagacctcacatgctacccttcacatgctgattctcttgccttgctgtttaaggatccagtttcttatgttaaacattttccttaccttttgcaataatattattggccatatactaaattctcattcacttagctttctaagaattctttgaggttggaatcctgaaatcataaagctaccagatctgcacaacagcagtggtagtatctgagcccaaactctgagacgctctagagttttagtttacaaacatgagccagaccaaacctgacctggtgaaaatcaataggtaataaactgcttgtatatgatagcagttcaagggctttctgggttccatttcactgaggaaatgaaaatataactgattagccaagacagagtggcaataaggaataactgatcctcctccaagttgcagtgagcaagccctcaagcctacctcattcctgaagagttgaaggagaaaatgccgtgctaattttctgccctgctatttttaacctgaaatttagaattacatcaggtattcaaagaatgttccctatcaaaggaaaatctgtaaacgatgactgcaaaaagcaagtgaaatgatgcaaagagaaaatatttgcaaaacagaatctaaccagacatcatcatgaagataaaatggcatctcttctgtgtggcctgggtgtgcttggacaatcctgtcacacgtttctattaggacatgttgcccttttgaggattcactctatgttggccagatggtttaactgattaaacaattgaatcaatttattttgctttttgaattgaccagatatttaactaaatgtactgggtttggcattttagacacactgccttagattcttgtagtgcatgatgactttgaaaatgtttggccattttagttaaaatgcagggtaacatttgatgcagccatgataacaggaaaaatctgttctgttctaaaaatgtttctagcaatagaagtatttctggctaagagaatactcttgacttgtagggaggctccctcggaataaatgtatgcaacacaaataaggcattttattttttaaaagattgtctatataagatacacttattaaataaagaaattgttggtgaatgctctgaaaa

SEQ ID NO: 83111 - DNA, 6581 bp, Artificial Sequence
  derived and/or modified sequence
aagcatgaacagttgctaagtggaaaatggaggctgaattttacatggtgattcttacctgcttgatcttcaggaactcagaagggtttcagattgtccatgtccagaaacaacagtgtcttttcaaaaatgagaaagtggtcgtgggctcatgcaacaggaccatccagaaccagcagtggatgtggactgaggatgaaaagctccttcatgttaaatctgcactgtgcttggccatctccaactcttcccgcggcccctcccgctcagccatcttggaccgctgttcccaggcaccccgatggacctgctatgatcaggaaggcttccttgaggtggaaaatgcctctctctttctccagaaacaaggctccagagtagtggtcaagaaggccaggaaatacctccatagctggatgaaaatagatgtcaacaaggagggaaaactggtcaatgaaagcctctgtttacaaaaagctggcctgggagcagaagtttcggtgaggagcactagaaacacggctccaccccagattctcactacctttaatgcagttccagatggcctggtattccttattaggaataccacagaggccttcatcagaaatgctgcagaaaactacagccaaaacagcagcgagaggcagcatcccaatctgcacatgactggaattacagacacatcatgggttttgtcgactactcagcccttctccagcaccactgaagagactggactggcggagccagagagatgtaacttcaccctggcggagtccaaggcctccagccattctgtgtctatccagtggagaattttgggctcaccctgtaactttagcctcatctatagcagtgacaccctgggggccgcgttgtgccctacctttcggatagacaacaccacatacggatgtaaccttcaagatttacaagcaggaaccatctataacttcaggattatttctctggatgaagagagaacagtggtcttgcaaacagatcctttacctcctgctaggtttggagtcagtaaagagaagacgacttcaaccagcttgcatgtttggtggactccttcttccggaaaagtcacctcatatgaggtgcaattatttgatgaaaataaccaaaagatacagggggttcaaattcaagaaagtacttcatggaatgaatacacttttttcaatctcactgctggtagtaaatacaatattgccatcacagctgtttctggaggaaaacgttctttttcagtttataccaatggatcaacagtgccatctccagtgaaagatattggtatttccacaaaagccaattctctcctgatttcctggtcccatggttctgggaatgtggaacgataccggctgatgctaatggataaagggatcctagttcatggcggtgttgtggacaaacatgctacttcctatgcttttcacgggctgacccctggctacctctacaacctcactgttatgactgaggctgcagggctgcaaaactacaggtggaaactagtcaggacagcccccatggaagtctcaaatctgaaggtgacaaatgatggcagtttgacctctctaaaagtcaaatggcaaagacctcctggaaatgtggattcttacaatatcaccctgtctcacaaagggaccatcaaggaatccagagtattagcaccttggattactgaaactcactttaaagagttagtccccggtcgactttatcaagttactgtcagctgtgtctctggtgaactgtctgctcagaagatggcagtgggcagaacatttccagacaaagttgcaaacctggaggcaaacaataatggcaggatgaggtctcttgtagtgagctggtcgccccctgctggagactgggagcagtatcggatcctactcttcaatgattctgtggtgctgctcaacatcactgtgggaaaggaagaaacacagtatgtcatggatgacacggggctcgtaccgggaagacagtatgaggtggaagtcattgttgagagtggaaatttgaagaattctgagcgttgccaaggcaggacagtccccctggctgtcctccagcttcgtgtcaaacatgccaatgaaacctcactgagtatcatgtggcagacccctgtagcagaatgggagaaatacatcatttccctagctgacagagacctcttactgatccacaagtcactctccaaagatgccaaagaattcacttttactgacctggtgcctggacgaaaatacatggctacagtcaccagtattagtggagacttaaaaaattcctcttcagtaaaaggaagaacagtgcctgcccaagtgactgacttgcatgtggccaaccaaggaatgaccagtagtctgtttactaactggacccaggcacaaggagacgtagaattttaccaagtcttactgatccatgaaaatgtggtcattaaaaatgaaagcatctccagtgagaccagcagatacagcttccactctctcaagtccggcagcctgtactccgtggtggtaacaacagtgagtggagggatctcttcccgacaagtggttgtggagggaagaacagtgcctgacaaagtccagggagtcagtgttagcaactcagccaggagtgactatttaagggtatcctgggtgcatgccactggagactttgatcactatgaagtcaccattaaaaacaaaaacaacttcattcaaactaaagcattcccaagtcagaaaacgaatgtgtatttgttcagctagtccctggacggttgtacagtgtcactgttactacaaaaagtggacaatatgaagccaatgaacaagggaatgggagaacaattccagagcctgttaaggatctaacattgcgcaacaggagcactgaggacttgcatgtgacttggtcaggagctaatggggatgtcgaccaatatgagatccagctgctcttcaatgacatgaaagtatttcctccttttcaccttgtaaataccgcaaccgagtatcgatttacttccctaacaccaggccgccaatacaaaattcttgtcttgacgattagcggggatgtacagcagtcagccttcattgagggcttcacagttcctagtgctgtcaaaaatattcacatttctcccaatggagcaacagatagcctgacggtgaactggactcctggtgggggagacgttgattcctacacggtgtcggcattcaggcacagtcaaaaggttgactctcagactattcccaagcacgtctttgagcacacgttccacagactggaggccggggagcagtaccagatcatgattgcctcagtcagcgggtccctgaagaatcagataaatgtggttgggcggacagttccagcatctgtccaaggagtaattgcagacaatgcatacagcagttattccttaatagtaagttggcaaaaagctgctggtgtggcagaaagatatgatatcctgcttctaactgaaaatggaatccttctgcgcaacacatcagagccagccaccactaagcaacacaaatttgaagatctaacaccaggcaagaaatacaagatacagatcctaactgtcagtggaggcctctttagcaaggaagcccagactgaaggccgaacagtcccagcagctgtcaccgacctgaggatcacagagaactccaccaggcacctgtccttccgctggaccgcctcagagggggagctcagctggtacaacatctttttgtacaacccagatgggaatctccaggagagagctcaagttgacccactagtccagagcttctctttccagaacttgctacaaggcagaatgtacaagatggtgattgtaactcacagtggggagctgtctaatgagtctttcatatttggtagaacagtcccagcctctgtgagtcatctcagggggtccaatcggaacacgacagacagcctttggttcaactggagtccagcctctggggactttgacttttatgagctgattctctataatcccaatggcacaaagaaggaaaactggaaagacaaggacctgacggagtggcggtttcaaggccttgttcctggaaggaagtacgtgctgtgggtggtaactcacagtggagatctcagcaataaagtcacagcggagagcagaacagctccaagtcctcccagtcttatgtcatttgctgacattgcaaacacatccttggccatcacgtggaaagggcccccagactggacagactacaacgactttgagctgcagtggttgcccagagatgcacttactgtcttcaacccctacaacaacagaaaatcagaaggacgcattgtgtatggtcttcgtccagggagatcctatcaattcaacgtcaagactgtcagtggtgattcctggaaaacttacagcaaaccaatttttggatctgtgaggacaaagcctgacaagatacaaaacctgcattgccggcctcagaactccacggccattgcctgttcttggatccctcctgattctgactttgatggttatagtattgaatgccggaaaatggacacccaagaagttgagttttccagaaagctggagaaagaaaaatctctgctcaacatcatgatgctagtgccccataagaggtacctggtgtccatcaaagtgcagtcggccggcatgaccagcgaggtggttgaagacagcactatcacaatgatagaccgcccccctcctccacccccacacattcgtgtgaatgaaaaggatgtgctaattagcaagtcttccatcaactttactgtcaactgcagctggttcagcgacaccaatggagctgtgaaatacttcacagtggtggtgagagaggctgatggcagtgatgagctgaagccagaacagcagcaccctctcccttcctacctggagtacaggcacaatgcctccattcgggtgtatcagactaattattttgccagcaaatgtgccgaaaatcctaacagcaactccaagagttttaacattaagcttggagcagagatggagagcctaggtggaaaatgcgatcccactcagcaaaaattctgtgatggaccactgaagccacacactgcctacagaatcagcattcgagcttttacacagctctttgatgaggacctgaaggaattcacaaagccactctattcagacacatttttttctttacccatcactactgaatcagagcccttgtttggagctattgaaggtgtgagtgctggtctgtttttaattggcatgctagtggctgttgttgccttattgatctgcagacagaaagtgagccatggtcgagaaagaccctctgcccgtctgagcattcgtagggatcgaccattatctgtccacttaaacctgggccagaaaggtaaccggaaaacttcttgtccaataaaaataaatcagtttgaagggcatttcatgaagctacaggctgactccaactaccttctatccaaggaatacgaggagttaaaagacgtgggccgaaaccagtcatgtgacattgcactcttgccggagaatagagggaaaaatcgatacaacaatatattgccctatgatgccacgcgagtgaagctctccaatgtagatgatgatccttgctctgactacatcaatgccagctacatccctggcaacaacttcagaagagaatacattgtcactcagggaccgcttcctggcaccaaggatgacttctggaaaatggtgtgggaacaaaacgttcacaacatcgtcatggtgacccagtgtgttgagaagggccgagtaaagtgtgatcattactggccagcggaccaggattccctctactatggggacctcatcctgcagatgctctcagagtccgtcctgcctgagtggaccatccgggagtttaagatatgcggtgaggaacagcttgatgcacacagactcatccgccactttcactatacggtgtggccagaccatggagtcccagaaaccacccagtctctgatccagtttgtgagaactgtcagggactacatcaacagaagcccgggtgctgggcccactgtggtgcactgcagtgctggtgtgggtaggactggaacctttattgcattggaccgaatcctccagcagttagactccaaagactctgtggacatttatggagcagtgcacgacctaagacttcacagggttcacatggtccagactgagtgtcagtatgtctacctacatcagtgtgtaagagatgtcctcagagcaagaaagctacggagtgaacaagaaaaccccttgtttccaatctatgaaaatgtgaatccagagtatcacagagatccagtctattcaaggcattgagaatgtacctgaagagctcctggataaaaattattcactgtgtgatttgtttttaaaaacttgcttcatgccctacagaggtgccagctatttctgttgatactatgtataatttattaatctggagaatgtttaaaattttatataatttaaaggtaacagatattattgt

SEQ ID NO: 83112 - DNA, 5839 bp, Artificial Sequence
  derived and/or modified sequence
tctcctctggatcttaactactgagcgcaatgctgagccatggagccgggttggccttgtggatcacactgagcctgctgcagactggactggcggagccagagagatgtaacttcaccctggcggagtccaaggcctccagccattctgtgtctatccagtggagaattttgggctcaccctgtaactttagcctcatctatagcagtgacaccctgggggccgcgttgtgccctacctttcggatagacaacaccacatacggatgtaaccttcaagatttacaagcaggaaccatctataacttcaggattatttctctggatgaagagagaacagtggtcttgcaaacagatcctttacctcctgctaggtttggagtcagtaaagagaagacgacttcaaccagcttgcatgtttggtggactccttcttccggaaaagtcacctcatatgaggtgcaattatttgatgaaaataaccaaaagatacagggggttcaaattcaagaaagtacttcatggaatgaatacacttttttcaatctcactgctggtagtaaatacaatattgccatcacagctgtttctggaggaaaacgttctttttcagtttataccaatggatcaacagtgccatctccagtgaaagatattggtatttccacaaaagccaattctctcctgatttcctggtcccatggttctgggaatgtggaacgataccggctgatgctaatggataaagggatcctagttcatggcggtgttgtggacaaacatgctacttcctatgcttttcacgggctgacccctggctacctctacaacctcactgttatgactgaggctgcagggctgcaaaactacaggtggaaactagtcaggacagcccccatggaagtctcaaatctgaaggtgacaaatgatggcagtttgacctctctaaaagtcaaatggcaaagacctcctggaaatgtggattcttacaatatcaccctgtctcacaaagggaccatcaaggaatccagagtattagcaccttggattactgaaactcactttaaagagttagtccccggtcgactttatcaagttactgtcagctgtgtctctggtgaactgtctgctcagaagatggcagtgggcagaacattccccctggctgtcctccagcttcgtgtcaaacatgccaatgaaacctcactgagtatcatgtggcagacccctgtagcagaatgggagaaatacatcatttccctagctgacagagacctcttactgatccacaagtcactctccaaagatgccaaagaattcacttttactgacctggtgcctggacgaaaatacatggctacagtcaccagtattagtggagacttaaaaaattcctcttcagtaaaaggaagaacagtgcctgcccaagtgactgacttgcatgtggccaaccaaggaatgaccagtagtctgtttactaactggacccaggcacaaggagacgtagaattttaccaagtcttactgatccatgaaaatgtggtcattaaaaatgaaagcatctccagtgagaccagcagatacagcttccactctctcaagtccggcagcctgtactccgtggtggtaacaacagtgagtggagggatctcttcccgacaagtggttgtggagggaagaacagtcccttccagtgtgagtggagtaacggtgaacaattccggtcgtaatgactacctcagcgtttcctggctgctggcgcccggagatgtggataactatgaggtaacattgtctcatgacggcaaggtggttcagtcccttgtcattgccaagtctgtcagagaatgttccttcagctccctcaccccaggccgcctctacaccgtgaccataactacaaggagtggcaagtatgaaaatcactccttcagccaagagcggacagtgcctgacaaagtccagggagtcagtgttagcaactcagccaggagtgactatttaagggtatcctgggtgcatgccactggagactttgatcactatgaagtcaccattaaaaacaaaaacaacttcattcaaactaaaagcattcccaagtcagaaaacgaatgtgtatttgttcagctagtccctggacggttgtacagtgtcactgttactacaaaaagtggacaatatgaagccaatgaacaagggaatgggagaacaattccagagcctgttaaggatctaacattgcgcaacaggagcactgaggacttgcatgtgacttggtcaggagctaatggggatgtcgaccaatatgagatccagctgctcttcaatgacatgaaagtatttcctccttttcaccttgtaaataccgcaaccgagtatcgatttacttccctaacaccaggccgccaatacaaaattcttgtcttgacgattagcggggatgtacagcagtcagccttcattgagggcttcacagttcctagtgctgtcaaaaatattcacatttctcccaatggagcaacagatagcctgacggtgaactggactcctggtgggggagacgttgattcctacacggtgtcggcattcaggcacagtcaaaaggttgactctcagactattcccaagcacgtctttgagcacacgttccacagactggaggccggggagcagtaccagatcatgattgcctcagtcagcgggtccctgaagaatcagataaatgtggttgggcggacagttccagcatctgtccaaggagtaattgcagacaatgcatacagcagttattccttaatagtaagttggcaaaaagctgctggtgtggcagaaagatatgatatcctgcttctaactgaaaatggaatccttctgcgcaacacatcagagccagccaccactaagcaacacaaatttgaagatctaacaccaggcaagaaatacaagatacagatcctaactgtcagtggaggcctctttagcaaggaagcccagactgaaggccgaacagtcccagcagctgtcaccgacctgaggatcacagagaactccaccaggcacctgtccttccgctggaccgcctcagagggggagctcagctggtacaacatctttttgtacaacccagatgggaatctccaggagagagctcaagttgacccactagtccagagcttctctttccagaacttgctacaaggcagaatgtacaagatggtgattgtaactcacagtggggagctgtctaatgagtctttcatatttggtagaacagtcccagcctctgtgagtcatctcagggggtccaatcggaacacgacagacagcctttggttcaactggagtccagcctctggggactttgacttttatgagctgattctctataatcccaatggcacaaagaaggaaaactggaaagacaaggacctgacggagtggcggtttcaaggccttgttcctggaaggaagtacgtgctgtgggtggtaactcacagtggagatctcagcaataaagtcacagcggagagcagaacagctccaagtcctcccagtcttatgtcatttgctgacattgcaaacacatccttggccatcacgtggaaagggcccccagactggacagactacaacgactttgagctgcagtggttgcccagagatgcacttactgtcttcaacccctacaacaacagaaaatcagaaggacgcattgtgtatggtcttcgtccagggagatcctatcaattcaacgtcaagactgtcagtggtgattcctggaaaacttacagcaaaccaatttttggatctgtgaggacaaagcctgacaagatacaaaacctgcattgccggcctcagaactccacggccattgcctgttcttggatccctcctgattctgactttgatggttatagtattgaatgccggaaaatggacacccaagaagttgagttttccagaaagctggagaaagaaaaatctctgctcaacatcatgatgctagtgccccataagaggtacctggtgtccatcaaagtgcagtcggccggcatgaccagcgaggtggttgaagacagcactatcacaatgatagaccgcccccctcctccacccccacacattcgtgtgaatgaaaaggatgtgctaattagcaagtcttccatcaactttactgtcaactgcagctggttcagcgacaccaatggagctgtgaaatacttcacagtggtggtgagagaggctgatggcagtgatgagctgaagccagaacagcagcaccctctcccttcctacctggagtacaggcacaatgcctccattcgggtgtatcagactaattattttgccagcaaatgtgccgaaaatcctaacagcaactccaagagttttaacattaagcttggagcagagatggagagcctaggtggaaaatgcgatcccactcagcaaaaattctgtgatggaccactgaagccacacactgcctacagaatcagcattcgagcttttacacagctctttgatgaggacctgaaggaattcacaaagccactctattcagacacatttttttctttacccatcactactgaatcagagcccttgtttggagctattgaaggtgtgagtgctggtctgtttttaattggcatgctagtggctgttgttgccttattgatctgcagacagaaagtgagccatggtcgagaaagaccctctgcccgtctgagcattcgtagggatcgaccattatctgtccacttaaacctgggccagaaaggtaaccggaaaacttcttgtccaataaaaataaatcagtttgaagggcatttcatgaagctacaggctgactccaactaccttctatccaaggaatacgaggagttaaaagacgtgggccgaaaccagtcatgtgacattgcactcttgccggagaatagagggaaaaatcgatacaacaatatattgccctatgatgccacgcgagtgaagctctccaatgtagatgatgatccttgctctgactacatcaatgccagctacatccctggcaacaacttcagaagagaatacattgtcactcagggaccgcttcctggcaccaaggatgacttctggaaaatggtgtgggaacaaaacgttcacaacatcgtcatggtgacccagtgtgttgagaagggccgagtaaagtgtgatcattactggccagcggaccaggattccctctactatggggacctcatcctgcagatgctctcagagtccgtcctgcctgagtggaccatccgggagtttaagatatgcggtgaggaacagcttgatgcacacagactcatccgccactttcactatacggtgtggccagaccatggagtcccagaaaccacccagtctctgatccagtttgtgagaactgtcagggactacatcaacagaagcccgggtgctgggcccactgtggtgcactgcagtgctggtgtgggtaggactggaacctttattgcattggaccgaatcctccagcagttagactccaaagactctgtggacatttatggagcagtgcacgacctaagacttcacagggttcacatggtccagactgagtgtcagtatgtctacctacatcagtgtgtaagagatgtcctcagagcaagaaagctacggagtgaacaagaaaaccccttgtttccaatctatgaaaatgtgaatccagagtatcacagagatccagtctattcaaggcattgagaatgtacctgaagagctcctggataaaaattattcactgtgtgatttgtttttaaaaacttgcttcatgccctacagaggtgcca

SEQ ID NO: 83113 - DNA, 5724 bp, Artificial Sequence
  derived and/or modified sequence
atgctgagccacggcgccggcctggccctgtggatcaccctgagcctgctgcagaccggcctggccgagcccgagagatgcaacttcaccctggccgagagcaaggccagcagccacagcgtgagcatccagtggagaatcctgggcagcccctgcaacttcagcctgatctacagcagcgacaccctgggcgccgccctgtgccccaccttcagaatcgacaacaccacctacggctgcaacctgcaggacctgcaggccggcaccatctacaacttcagaatcatcagcctggacgaggagagaaccgtggtgctgcagaccgaccccctgccccccgccagattcggcgtgagcaaggagaagaccaccagcaccagcctgcacgtgtggtggacccccagcagcggcaaggtgaccagctacgaggtgcagctgttcgacgagaacaaccagaagatccagggcgtgcagatccaggagagcaccagctggaacgagtacaccttcttcaacctgaccgccggcagcaagtacaacatcgccatcaccgccgtgagcggcggcaagagaagcttcagcgtgtacaccaacggcagcaccgtgcccagccccgtgaaggacatcggcatcagcaccaaggccaacagcctgctgatcagctggagccacggcagcggcaacgtggagagatacagactgatgctgatggacaagggcatcctggtgcacggcggcgtggtggacaagcacgccaccagctacgccttccacggcctgacccccggctacctgtacaacctgaccgtgatgaccgaggccgccggcctgcagaactacagatggaagctggtgagaaccgcccccatggaggtgagcaacctgaaggtgaccaacgacggcagcctgaccagcctgaaggtgaagtggcagagaccccccggcaacgtggacagctacaacatcaccctgagccacaagggcaccatcaaggagagcagagtgctggccccctggatcaccgagacccacttcaaggagctggtgcccggcagactgtaccaggtgaccgtgagctgcgtgagcggcgagctgagcgcccagaagatggccgtgggcagaaccttccccctggccgtgctgcagctgagagtgaagcacgccaacgagaccagcctgagcatcatgtggcagacccccgtggccgagtgggagaagtacatcatcagcctggccgacagagacctgctgctgatccacaagagcctgagcaaggacgccaaggagttcaccttcaccgacctggtgcccggcagaaagtacatggccaccgtgaccagcatcagcggcgacctgaagaacagcagcagcgtgaagggcagaaccgtgcccgcccaggtgaccgacctgcacgtggccaaccagggcatgaccagcagcctgttcaccaactggacccaggcccagggcgacgtggagttctaccaggtgctgctgatccacgagaacgtggtgatcaagaacgagagcatcagcagcgagaccagcagatacagcttccacagcctgaagagcggcagcctgtacagcgtggtggtgaccaccgtgagcggcggcatcagcagcagacaggtggtggtggagggcagaaccgtgcccagcagcgtgagcggcgtgaccgtgaacaacagcggcagaaacgactacctgagcgtgagctggctgctggcccccggcgacgtggacaactacgaggtgaccctgagccacgacggcaaggtggtgcagagcctggtgatcgccaagagcgtgagagagtgcagcttcagcagcctgacccccggcagactgtacaccgtgaccatcaccaccagaagcggcaagtacgagaaccacagcttcagccaggagagaaccgtgcccgacaaggtgcagggcgtgagcgtgagcaacagcgccagaagcgactacctgagagtgagctgggtgcacgccaccggcgacttcgaccactacgaggtgaccatcaagaacaagaacaacttcatccagaccaagagcatccccaagagcgagaacgagtgcgtgttcgtgcagctggtgcccggcagactgtacagcgtgaccgtgaccaccaagagcggccagtacgaggccaacgagcagggcaacggcagaaccatccccgagcccgtgaaggacctgaccctgagaaacagaagcaccgaggacctgcacgtgacctggagcggcgccaacggcgacgtggaccagtacgagatccagctgctgttcaacgacatgaaggtgttcccccccttccacctggtgaacaccgccaccgagtacagattcaccagcctgacccccggcagacagtacaagatcctggtgctgaccatcagcggcgacgtgcagcagagcgccttcatcgagggcttcaccgtgcccagcgccgtgaagaacatccacatcagccccaacggcgccaccgacagcctgaccgtgaactggacccccggcggcggcgacgtggacagctacaccgtgagcgccttcagacacagccagaaggtggacagccagaccatccccaagcacgtgttcgagcacaccttccacagactggaggccggcgagcagtaccagatcatgatcgccagcgtgagcggcagcctgaagaaccagatcaacgtggtgggcagaaccgtgcccgccagcgtgcagggcgtgatcgccgacaacgcctacagcagctacagcctgatcgtgagctggcagaaggccgccggcgtggccgagagatacgacatcctgctgctgaccgagaacggcatcctgctgagaaacaccagcgagcccgccaccaccaagcagcacaagttcgaggacctgacccccggcaagaagtacaagatccagatcctgaccgtgagcggcggcctgttcagcaaggaggcccagaccgagggcagaaccgtgcccgccgccgtgaccgacctgagaatcaccgagaacagcaccagacacctgagcttcagatggaccgccagcgagggcgagctgagctggtacaacatcttcctgtacaaccccgacggcaacctgcaggagagagcccaggtggaccccctggtgcagagcttcagcttccagaacctgctgcagggcagaatgtacaagatggtgatcgtgacccacagcggcgagctgagcaacgagagcttcatcttcggcagaaccgtgcccgccagcgtgagccacctgagaggcagcaacagaaacaccaccgacagcctgtggttcaactggagccccgccagcggcgacttcgacttctacgagctgatcctgtacaaccccaacggcaccaagaaggagaactggaaggacaaggacctgaccgagtggagattccagggcctggtgcccggcagaaagtacgtgctgtgggtggtgacccacagcggcgacctgagcaacaaggtgaccgccgagagcagaaccgcccccagcccccccagcctgatgagcttcgccgacatcgccaacaccagcctggccatcacctggaagggcccccccgactggaccgactacaacgacttcgagctgcagtggctgcccagagacgccctgaccgtgttcaacccctacaacaacagaaagagcgagggcagaatcgtgtacggcctgagacccggcagaagctaccagttcaacgtgaagaccgtgagcggcgacagctggaagacctacagcaagcccatcttcggcagcgtgagaaccaagcccgacaagatccagaacctgcactgcagaccccagaacagcaccgccatcgcctgcagctggatcccccccgacagcgacttcgacggctacagcatcgagtgcagaaagatggacacccaggaggtggagttcagcagaaagctggagaaggagaagagcctgctgaacatcatgatgctggtgccccacaagagatacctggtgagcatcaaggtgcagagcgccggcatgaccagcgaggtggtggaggacagcaccatcaccatgatcgacagacccccccccccccccccccacatcagagtgaacgagaaggacgtgctgatcagcaagagcagcatcaacttcaccgtgaactgcagctggttcagcgacaccaacggcgccgtgaagtacttcaccgtggtggtgagagaggccgacggcaacgacgagctgaagcccgagcagcagcaccccctgcccagctacctggagtacagacacaacgccagcatcagagtgtaccagaccaactacttcgccagcaagtgcgccgagaaccccaacagcaacagcaagagcttcaacatcaagctgggcgccgagatggagagcctgggcggcaagtgcgaccccacccagcagaagttctgcgacggccccctgaagccccacaccgcctacagaatcagcatcagagccttcacccagctgttcgacgaggacctgaaggagttcaccaagcccctgtacagcgacaccttcttcagcctgcccatcaccaccgagagcgagcccctgttcggcgccatcgagggcgtgagcgccggcctgttcctgatcggcatgctggtggccgtggtggccctgctgatctgcagacagaaggtgagccacggcagagagagacccagcgccagactgagcatcagaagagacagacccctgagcgtgcacctgaacctgggccagaagggcaacagaaagaccagctgccccatcaagatcaaccagttcgagggccacttcatgaagctgcaggccgacagcaactacctgctgagcaaggagtacgaggagctgaaggacgtgggcagaaaccagagctgcgacatcgccctgctgcccgagaacagaggcaagaacagatacaacaacatcctgccctacgacgccaccagagtgaagctgagcaacgtggacgacgacccctgcagcgactacatcaacgccagctacatccccggcaacaacttcagaagagagtacatcgtgacccagggccccctgcccggcaccaaggacgacttctggaagatggtgtgggagcagaacgtgcacaacatcgtgatggtgacccagtgcgtggagaagggcagagtgaagtgcgaccactactggcccgccgaccaggacagcctgtactacggcgacctgatcctgcagatgctgagcgagagcgtgctgcccgagtggaccatcagagagttcaagatctgcggcgaggagcagctggacgcccacagactgatcagacacttccactacaccgtgtggcccgaccacggcgtgcccgagaccacccagagcctgatccagttcgtgagaaccgtgagagactacatcaacagaagccccggcgccggccccaccgtggtgcactgcagcgccggcgtgggcagaaccggcaccttcatcgccctggacagaatcctgcagcagctggacagcaaggacagcgtggacatctacggcgccgtgcacgacctgagactgcacagagtgcacatggtgcagaccgagtgccagtacgtgtacctgcaccagtgcgtgagagacgtgctgagagccagaaagctgagaagcgagcaggagaaccccctgttccccatctacgagaacgtgaaccccgagtaccacagagaccccgtgtacagcagacactag

SEQ ID NO: 83114 - DNA, 5724 bp, Artificial Sequence
  derived and/or modified sequence
atgctgagccacggcgccggcctggccctgtggatcaccctgagcctgctgcagaccggcctggccgagcccgagagatgcaacttcaccctggccgagagcaaggccagcagccacagcgtgagcatccagtggagaatcctgggcagcccctgcaacttcagcctgatctacagcagcgacaccctgggcgccgccctgtgccccaccttcagaatcgacaacaccacctacggctgcaacctgcaggacctgcaggccggcaccatctacaacttcagaatcatcagcctggacgaggagagaaccgtggtgctgcagaccgaccccctgccccccgccagattcggcgtgagcaaggagaagaccaccagcaccagcctgcacgtgtggtggacccccagcagcggcaaggtgaccagctacgaggtgcagctgttcgacgagaacaaccagaagatccagggcgtgcagatccaggagagcaccagctggaacgagtacaccttcttcaacctgaccgccggcagcaagtacaacatcgccatcaccgccgtgagcggcggcaagagaagcttcagcgtgtacaccaacggcagcaccgtgcccagccccgtgaaggacatcggcatcagcaccaaggccaacagcctgctgatcagctggagccacggcagcggcaacgtggagagatacagactgatgctgatggacaagggcatcctggtgcacggcggcgtggtggacaagcacgccaccagctacgccttccacggcctgacccccggctacctgtacaacctgaccgtgatgaccgaggccgccggcctgcagaactacagatggaagctggtgagaaccgcccccatggaggtgagcaacctgaaggtgaccaacgacggcagcctgaccagcctgaaggtgaagtggcagagaccccccggcaacgtggacagctacaacatcaccctgagccacaagggcaccatcaaggagagcagagtgctggccccctggatcaccgagacccacttcaaggagctggtgcccggcagactgtaccaggtgaccgtgagctgcgtgagcggcgagctgagcgcccagaagatggccgtgggcagaaccttccccctggccgtgctgcagctgagagtgaagcacgccaacgagaccagcctgagcatcatgtggcagacccccgtggccgagtgggagaagtacatcatcagcctggccgacagagacctgctgctgatccacaagagcctgagcaaggacgccaaggagttcaccttcaccgacctggtgcccggcagaaagtacatggccaccgtgaccagcatcagcggcgacctgaagaacagcagcagcgtgaagggcagaaccgtgcccgcccaggtgaccgacctgcacgtggccaaccagggcatgaccagcagcctgttcaccaactggacccaggcccagggcgacgtggagttctaccaggtgctgctgatccacgagaacgtggtgatcaagaacgagagcatcagcagcgagaccagcagatacagcttccacagcctgaagagcggcagcctgtacagcgtggtggtgaccaccgtgagcggcggcatcagcagcagacaggtggtggtggagggcagaaccgtgcccagcagcgtgagcggcgtgaccgtgaacaacagcggcagaaacgactacctgagcgtgagctggctgctggcccccggcgacgtggacaactacgaggtgaccctgagccacgacggcaaggtggtgcagagcctggtgatcgccaagagcgtgagagagtgcagcttcagcagcctgacccccggcagactgtacaccgtgaccatcaccaccagaagcggcaagtacgagaaccacagcttcagccaggagagaaccgtgcccgacaaggtgcagggcgtgagcgtgagcaacagcgccagaagcgactacctgagagtgagctgggtgcacgccaccggcgacttcgaccactacgaggtgaccatcaagaacaagaacaacttcatccagaccaagagcatccccaagagcgagaacgagtgcgtgttcgtgcagctggtgcccggcagactgtacagcgtgaccgtgaccaccaagagcggccagtacgaggccaacgagcagggcaacggcagaaccatccccgagcccgtgaaggacctgaccctgagaaacagaagcaccgaggacctgcacgtgacctggagcggcgccaacggcgacgtggaccagtacgagatccagctgctgttcaacgacatgaaggtgttcccccccttccacctggtgaacaccgccaccgagtacagattcaccagcctgacccccggcagacagtacaagatcctggtgctgaccatcagcggcgacgtgcagcagagcgccttcatcgagggcttcaccgtgcccagcgccgtgaagaacatccacatcagccccaacggcgccaccgacagcctgaccgtgaactggacccccggcggcggcgacgtggacagctacaccgtgagcgccttcagacacagccagaaggtggacagccagaccatccccaagcacgtgttcgagcacaccttccacagactggaggccggcgagcagtaccagatcatgatcgccagcgtgagcggcagcctgaagaaccagatcaacgtggtgggcagaaccgtgcccgccagcgtgcagggcgtgatcgccgacaacgcctacagcagctacagcctgatcgtgagctggcagaaggccgccggcgtggccgagagatacgacatcctgctgctgaccgagaacggcatcctgctgagaaacaccagcgagcccgccaccaccaagcagcacaagttcgaggacctgacccccggcaagaagtacaagatccagatcctgaccgtgagcggcggcctgttcagcaaggaggcccagaccgagggcagaaccgtgcccgccgccgtgaccgacctgagaatcaccgagaacagcaccagacacctgagcttcagatggaccgccagcgagggcgagctgagctggtacaacatcttcctgtacaaccccgacggcaacctgcaggagagagcccaggtggaccccctggtgcagagcttcagcttccagaacctgctgcagggcagaatgtacaagatggtgatcgtgacccacagcggcgagctgagcaacgagagcttcatcttcggcagaaccgtgcccgccagcgtgagccacctgagaggcagcaacagaaacaccaccgacagcctgtggttcaactggagccccgccagcggcgacttcgacttctacgagctgatcctgtacaaccccaacggcaccaagaaggagaactggaaggacaaggacctgaccgagtggagattccagggcctggtgcccggcagaaagtacgtgctgtgggtggtgacccacagcggcgacctgagcaacaaggtgaccgccgagagcagaaccgcccccagcccccccagcctgatgagcttcgccgacatcgccaacaccagcctggccatcacctggaagggcccccccgactggaccgactacaacgacttcgagctgcagtggctgcccagagacgccctgaccgtgttcaacccctacaacaacagaaagagcgagggcagaatcgtgtacggcctgagacccggcagaagctaccagttcaacgtgaagaccgtgagcggcgacagctggaagacctacagcaagcccatcttcggcagcgtgagaaccaagcccgacaagatccagaacctgcactgcagaccccagaacagcaccgccatcgcctgcagctggatcccccccgacagcgacttcgacggctacagcatcgagtgcagaaagatggacacccaggaggtggagttcagcagaaagctggagaaggagaagagcctgctgaacatcatgatgctggtgccccacaagagatacctggtgagcatcaaggtgcagagcgccggcatgaccagcgaggtggtggaggacagcaccatcaccatgatcgacagacccccccccccccccccccacatcagagtgaacgagaaggacgtgctgatcagcaagagcagcatcaacttcaccgtgaactgcagctggttcagcgacaccaacggcgccgtgaagtacttcaccgtggtggtgagagaggccgacggcagcgacgagctgaagcccgagcagcagcaccccctgcccagctacctggagtacagacacaacgccagcatcagagtgtaccagaccaactacttcgccagcaagtgcgccgagaaccccaacagcaacagcaagagcttcaacatcaagctgggcgccgagatggagagcctgggcggcaagtgcgaccccacccagcagaagttctgcgacggccccctgaagccccacaccgcctacagaatcagcatcagagccttcacccagctgttcgacgaggacctgaaggagttcaccaagcccctgtacagcgacaccttcttcagcctgcccatcaccaccgagagcgagcccctgttcggcgccatcgagggcgtgagcgccggcctgttcctgatcggcatgctggtggccgtggtggccctgctgatctgcagacagaaggtgagccacggcagagagagacccagcgccagactgagcatcagaagagacagacccctgagcgtgcacctgaacctgggccagaagggcaacagaaagaccagctgccccatcaagatcaaccagttcgagggccacttcatgaagctgcaggccgacagcaactacctgctgagcaaggagtacgaggagctgaaggacgtgggcagaaaccagagctgcgacatcgccctgctgcccgagaacagaggcaagaacagatacaacaacatcctgccctacgacgccaccagagtgaagctgagcaacgtggacgacgacccctgcagcgactacatcaacgccagctacatccccggcaacaacttcagaagagagtacatcgtgacccagggccccctgcccggcaccaaggacgacttctggaagatggtgtgggagcagaacgtgcacaacatcgtgatggtgacccagtgcgtggagaagggcagagtgaagtgcgaccactactggcccgccgaccaggacagcctgtactacggcgacctgatcctgcagatgctgagcgagagcgtgctgcccgagtggaccatcagagagttcaagatctgcggcgaggagcagctggacgcccacagactgatcagacacttccactacaccgtgtggcccgaccacggcgtgcccgagaccacccagagcctgatccagttcgtgagaaccgtgagagactacatcaacagaagccccggcgccggccccaccgtggtgcactgcagcgccggcgtgggcagaaccggcaccttcatcgccctggacagaatcctgcagcagctggacagcaaggacagcgtggacatctacggcgccgtgcacgacctgagactgcacagagtgcacatggtgcagaccgagtgccagtacgtgtacctgcaccagtgcgtgagagacgtgctgagagccagaaagctgagaagcgagcaggagaaccccctgttccccatctacgagaacgtgaaccccgagtaccacagagaccccgtgtacagcagacactag

SEQ ID NO: 83115 - protein, 1907 aa, Artificial Sequence
  derived and/or modified sequence
MLSHGAGLALWITLSLLQTGLAEPERCNFTLAESKASSHSVSIQWRILGSPCNFSLIYSSDTLGAALCPTFRIDNTTYGCNLQDLQAGTIYNFRIISLDEERTVVLQTDPLPPARFGVSKEKTTSTSLHVWWTPSSGKVTSYEVQLFDENNQKIQGVQIQESTSWNEYTFFNLTAGSKYNIAITAVSGGKRSFSVYTNGSTVPSPVKDIGISTKANSLLISWSHGSGNVERYRLMLMDKGILVHGGVVDKHATSYAFHGLTPGYLYNLTVMTEAAGLQNYRWKLVRTAPMEVSNLKVTNDGSLTSLKVKWQRPPGNVDSYNITLSHKGTIKESRVLAPWITETHFKELVPGRLYQVTVSCVSGELSAQKMAVGRTFPDKVANLEANNNGRMRSLVVSWSPPAGDWEQYRILLFNDSVVLLNITVGKEETQYVMDDTGLVPGRQYEVEVIVESGNLKNSERCQGRTVPLAVLQLRVKHANETSLSIMWQTPVAEWEKYIISLADRDLLLIHKSLSKDAKEFTFTDLVPGRKYMATVTSISGDLKNSSSVKGRTVPAQVTDLHVANQGMTSSLFTNWTQAQGDVEFYQVLLIHENVVIKNESISSETSRYSFHSLKSGSLYSVVVTTVSGGISSRQVVVEGRTVPSSVSGVTVNNSGRNDYLSVSWLLAPGDVDNYEVTLSHDGKVVQSLVIAKSVRECSFSSLTPGRLYTVTITTRSGKYENHSFSQERTVPDKVQGVSVSNSARSDYLRVSWVHATGDFDHYEVTIKNKNNFIQTKSIPKSENECVFVQLVPGRLYSVTVTTKSGQYEANEQGNGRTIPEPVKDLTLRNRSTEDLHVTWSGANGDVDQYEIQLLFNDMKVFPPFHLVNTATEYRFTSLTPGRQYKILVLTISGDVQQSAFIEGFTVPSAVKNIHISPNGATDSLTVNWTPGGGDVDSYTVSAFRHSQKVDSQTIPKHVFEHTFHRLEAGEQYQIMIASVSGSLKNQINVVGRTVPAAVTDLRITENSTRHLSFRWTASEGELSWYNIFLYNPDGNLQERAQVDPLVQSFSFQNLLQGRMYKMVIVTHSGELSNESFIFGRTVPASVSHLRGSNRNTTDSLWFNWSPASGDFDFYELILYNPNGTKKENWKDKDLTEWRFQGLVPGRKYVLWVVTHSGDLSNKVTAESRTAPSPPSLMSFADIANTSLAITWKGPPDWTDYNDFELQWLPRDALTVFNPYNNRKSEGRIVYGLRPGRSYQFNVKTVSGDSWKTYSKPIFGSVRTKPDKIQNLHCRPQNSTAIACSWIPPDSDFDGYSIECRKMDTQEVEFSRKLEKEKSLLNIMMLVPHKRYLVSIKVQSAGMTSEVVEDSTITMIDRPPPPPPHIRVNEKDVLISKSSINFTVNCSWFSDTNGAVKYFTVVVREADGSDELKPEQQHPLPSYLEYRHNASIRVYQTNYFASKCAENPNSNSKSFNIKLGAEMESLGGKCDPTQQKFCDGPLKPHTAYRISIRAFTQLFDEDLKEFTKPLYSDTFFSLPITTESEPLFGAIEGVSAGLFLIGMLVAVVALLICRQKVSHGRERPSARLSIRRDRPLSVHLNLGQKGNRKTSCPIKINQFEGHFMKLQADSNYLLSKEYEELKDVGRNQSCDIALLPENRGKNRYNNILPYDATRVKLSNVDDDPCSDYINASYIPGNNFRREYIVTQGPLPGTKDDFWKMVWEQNVHNIVMVTQCVEKGRVKCDHYWPADQDSLYYGDLILQMLSESVLPEWTIREFKICGEEQLDAHRLIRHFHYTVWPDHGVPETTQSLIQFVRTVRDYINRSPGAGPTVVHCSAGVGRTGTFIALDRILQQLDSKDSVDIYGAVHDLRLHRVHMVQTECQYVYLHQCVRDVLRARKLRSEQENPLFPIYENVNPEYHRDPVYSRH

SEQ ID NO: 83116 - DNA, 5724 bp, Artificial Sequence
  derived and/or modified sequence
atgttgtcacatggtgcggggctggctttatggatcactctgtccctgctgcaaacgggcctcgccgaaccggagcgctgcaactttactctggccgagtctaaggcttcttctcattccgtttcaattcaatggagaatcctcggatccccctgcaatttcagcctgatatattcctctgataccctgggggctgccttgtgccctacctttcgtatcgacaataccacctatggatgcaatctgcaagatctccaggctggaacgatctacaattttcgcatcatcagtttggacgaagagcggactgttgtgcttcagactgatcctctgccccccgccaggtttggcgtgtccaaggagaagacgacctccacctccctccatgtgtggtggacaccttccagcggcaaggtgacgtcttacgaggttcagttattcgacgaaaacaaccagaaaattcaaggcgtgcagatacaagaatccacaagttggaatgagtacactttctttaacctgactgcagggagtaaatataacatcgcaataacagctgtcagcggaggcaaacggtccttcagtgtttacaccaacgggagtactgtgcccagccccgtgaaagatatcggaatttccacaaaagcaaatagcttgctcattagctggagtcacgggtccggaaacgtcgaaaggtataggttgatgctgatggataaaggtatccttgttcacggaggggtagtcgacaagcatgctacatcctacgccttccacggcctgacccccggttacctgtacaacctgaccgtcatgactgaggcagcggggcttcaaaactacaggtggaaacttgtgcgaacagcccctatggaggttagcaacctaaaggtcacaaatgatggcagcctcactagtctgaaggtcaaatggcagcgcccaccgggaaatgttgattcatacaatataacgctgagtcacaaggggactattaaagaatctcgcgttctcgctccatggattacagagactcatttcaaggagttggtgcctggtcggctgtatcaggtgacagtcagctgtgtgtccggggaattgagtgcccagaaaatggctgtgggccggaccttccctgataaggtggccaacctggaagccaacaacaacggccggatgcgcagtctggtggtgagttggtccccccccgccggtgattgggagcagtacaggatccttttgtttaacgactcagtcgtcctcctcaatataacagttggaaaagaagagacccagtacgttatggatgacacagggctggttcctggtaggcagtacgaagtagaagttatagtggaaagtggaaatctcaaaaacagcgagagatgtcagggcaggaccgtgcctttggccgtgctgcagctccgggttaaacacgcaaacgaaacttcactcagcatcatgtggcaaacacctgtggctgagtgggagaagtatatcatcagcctggctgaccgggatctgctcttgattcataaaagcctgtccaaagacgctaaggaatttacatttactgatctggtacccgggagaaagtacatggccacggttacaagcatcagtggagaccttaaaaatagttcctcagtaaagggaaggaccgtgccggcacaggtgacagatctccacgtggccaaccaagggatgacatcatcactcttcacaaactggacacaggctcaaggcgatgtcgagttctatcaggtgctgcttatccatgaaaacgttgttataaagaatgaaagcatcagcagcgaaacctcaaggtacagctttcacagtttgaagagcgggagcctgtacagcgtagtcgtcacgacagtaagcggcggcatctctagtcggcaagtagttgtagaaggccgcacagtaccatcatctgtgtccggggttacggttaataacagcggacgtaacgattacttaagcgtgagctggcttctcgcccctggagacgtcgacaattatgaagtcaccctgtcgcacgatggcaaggttgtacaatccctggtaatagccaagagtgtgcgggagtgctctttctcctcactgacacctgggcgtctgtatactgttactatcactacccgcagcgggaaatacgagaatcacagcttctcacaggagaggaccgttcctgacaaagttcagggagtgtctgttagcaactccgctcgaagtgactatctgcgggtgagctgggtgcatgcaacaggcgacttcgatcattacgaggtgaccatcaagaacaagaacaactttatccagactaagtcgatccccaagtccgagaacgaatgcgtcttcgtacagctagtgcctggcaggctctactccgtgactgtgacgaccaagagcggtcagtatgaagcgaatgaacaagggaatggacgtactattccagaaccagtgaaagatcttacactaaggaaccggagcaccgaagacctccacgtgacttggtcaggggcaaacggggatgtcgaccagtatgaaatacagctcctgttcaacgatatgaaggtcttccccccgttccaccttgtgaataccgctaccgaatatagatttacctccctcactcctgggcgtcagtataagatccttgttctaacaatttccggggacgttcagcagtctgcttttattgaaggctttacagtacctagcgcagtgaagaatatccatataagccctaacggtgcaacagactctcttactgtgaactggactcctggaggaggcgacgtcgattcctataccgtgagcgcctttagacacagccagaaagttgattctcagaccattcccaaacacgtgtttgagcacacatttcataggttagaagcaggcgaacagtatcagattatgattgcctctgtctccggatccctcaagaatcagataaatgtcgtgggacgtacagtccctgctgccgtcaccgacctgcggatcaccgagaattctacgcggcacctgtcttttcggtggactgcaagtgaaggggagctgtcctggtataacatctttttatacaatccagatggtaacttgcaggagcgggcgcaggtggatccactggtgcaaagtttcagttttcagaacttgttacaaggaaggatgtacaagatggtgatcgtgacacatagtggcgaacttagcaatgagtccttcatattcgggcgcacggtgcccgctagcgtatcacaccttaggggcagtaatcgaaacactactgactccttgtggttcaactggagcccggcatcaggcgactttgatttctatgaactgattctctacaatcccaatggcactaagaaggaaaactggaaggataaggatctgacggaatggaggtttcaaggactggttcctggacggaagtacgtcctctgggtcgtcactcactccggggatctgagcaataaggttacagccgagtcacgaaccgcacctagtcctccatctttgatgtcatttgctgacatcgccaacacctctttggctatcacctggaaaggccccccagattggacagactacaacgatttcgaactccagtggctgcctcgtgacgctctcaccgttttcaacccctacaacaaccggaaatcggagggccgtattgtttatggtctgagaccgggccgtagttaccagttcaacgtgaagacggtgagcggggactcatggaaaacctattctaaacccatcttcggcagcgtccgcactaaaccggataagatccagaacctgcactgcagacctcaaaatagtacggctattgcctgctcatggatccctcctgactccgactttgacggctactcgattgaatgtcggaagatggacacccaggaggtggaattcagtagaaaattagagaaagagaagagtctgctgaatataatgatgctggtcccccataagcgttacctcgtgtccatcaaagtgcagtcggctggaatgacctctgaagtggtggaggattcaacaatcactatgatcgatcgaccacccccgccaccaccgcacatacgcgtgaatgagaaggacgttctcatttcaaaaagttctatcaatttcacggttaattgtagttggttctctgatacaaacggcgctgtcaagtactttaccgtggtggtgagggaggctgatggatcagacgaactcaaacctgagcagcagcatccactcccgagttatttggagtatcgacacaacgcgtcgatcagggtttaccaaaccaactactttgcctcaaagtgcgccgagaatccaaactccaattccaaatccttcaatataaagcttggagccgaaatggagtccctggggggaaaatgtgatcctactcaacagaagttctgcgatggacccctgaaaccccacaccgcctacaggatctcaattcgagccttcacacaactttttgatgaggacctgaaggagttcaccaagcccctgtattcagacaccttctttagtctgcctatcacaacagagtccgagccactttttggggccattgagggcgtatccgccggactctttttaatcggcatgttagtagctgtggttgccctactcatatgccgccaaaaagtgtcccacggccgagagaggccaagcgccagactgagcatccggagagacaggccgctaagtgtgcacttgaacctggggcaaaagggtaaccgaaaaaccagctgccccattaaaattaatcagtttgagggtcacttcatgaaactgcaggctgacagtaactatctattgtccaaggagtatgaagaactgaaggacgtcggccgaaaccagtcatgcgacatcgctctgctcccggagaaccgcggcaagaataggtataacaacattctgccctatgacgccaccagagtgaagttgtcgaacgtcgatgacgatccatgcagcgactatattaatgcttcttacattccgggcaacaattttcgccgggaatatatcgtcacacagggacccctccctggcaccaaagacgatttttggaagatggtttgggaacagaacgtccacaatatcgtcatggttacccagtgcgtcgagaagggacgagtgaagtgcgaccactattggcccgcagatcaggacagtctctactacggcgacctgatcttacagatgctcagcgaatccgtactacccgaatggactatcagggagttcaagatctgtggagaagaacaattagacgcgcaccgtttgatccggcacttccattacaccgtctggccggatcacggcgtgcccgaaaccacacagagcctgatccagttcgtgcgcactgtgagggactacattaatcgctcccccggggctgggccaaccgtcgttcactgttccgcaggggtcggcagaacagggacttttattgctctcgacagaatcttacagcagttggacagcaaagatagcgttgatatttatggcgccgtacacgatttaaggttgcatcgagtgcacatggtccagacagagtgccagtatgtttatttacatcagtgcgttcgcgacgtactgcgcgcacggaaactgcggtctgaacaagagaatccactctttccaatctacgagaatgtcaaccccgagtaccaccgggaccccgtgtacagtcggcattag

SEQ ID NO: 83117 - DNA, 5724 bp, Artificial Sequence
  derived and/or modified sequence
atgctgagccacggggccggcctggccctgtggatcaccctgagcctgctgcagacaggcctggccgagcctgagcgctgcaacttcaccctggccgagagcaaggccagcagccacagcgtgtccatccagtggaggatcctgggcagcccctgcaacttcagcctcatctacagcagtgacaccctgggcgccgccctgtgccccaccttcagaattgacaacaccacctacggctgcaacctgcaggacctgcaggccggcaccatctacaacttccgcatcatcagcctggatgaggagaggacagtggtgctgcagacagaccccctgcccccagcccgcttcggcgtgtccaaggagaagaccaccagcaccagcctgcacgtgtggtggacccccagcagcggcaaggtgaccagctatgaggtgcagctgtttgatgagaacaaccagaagatccagggcgtgcagatccaggagagcacctcctggaatgagtacaccttcttcaacctgacagctggcagcaagtacaacatcgccatcacagctgtgtctgggggcaagaggagcttctctgtgtacaccaacggcagcacagtgcccagccctgtgaaggacatcggcatcagcaccaaggccaacagcctgctgatctcctggagccacggcagcggaaatgtggagcgctaccgcctgatgctgatggacaagggcatcctggtgcacggcggcgtggtggacaagcacgccaccagctatgccttccacggcctgaccccaggctacctgtacaacctgactgtgatgacagaggccgccggcctgcagaactaccgctggaagctggtgaggacagcccccatggaggtgagcaacctgaaggtgaccaatgatggcagcctgaccagcctgaaggtgaagtggcagaggcctcctggaaatgtggacagctacaacatcaccctgagccacaagggcaccatcaaggagagccgggtgctggccccctggatcacagagacccacttcaaggagctggtgcccggccgcctgtaccaggtgacagtgtcctgtgtgtctggagagctgagcgcccagaagatggctgtgggccgcaccttcccagacaaggtggccaacctggaggccaacaacaacggccgcatgaggagcctggtggtgtcctggagccccccagctggggactgggagcagtaccgcatcctgctcttcaatgacagcgtggtgctgctgaacatcaccgtgggcaaggaggagacccagtatgtgatggatgacaccggcctggtgcccggccggcagtatgaggtggaggtgattgtggagagcggcaacctgaagaacagcgagcgctgccagggccgcacagtgcccctggccgtgctgcagctgcgggtgaagcacgccaatgagaccagcctgagcatcatgtggcagacccctgtggccgagtgggagaagtacatcatcagcctggccgaccgggacctgctgctgatccacaagagcctgagcaaggatgccaaggagttcaccttcacagacctggtgcccggcaggaagtacatggccaccgtgaccagcatcagcggggacctgaagaacagcagctctgtgaagggccgcacagtgcctgcccaggtgacagacctgcacgtggccaaccagggcatgaccagcagcctcttcaccaactggacccaggcccagggagatgtggagttctaccaggtgctgctgattcatgaaaatgtggtgatcaagaatgaaagcatcagcagcgagaccagccgctacagcttccacagcctgaagagcggcagcctgtacagcgtggtggtgaccaccgtgtctgggggcatcagcagccggcaggtggtggtggagggccgcacagtgcccagctctgtgtctggagtgacagtgaacaacagcggcagaaatgactacctgtctgtgtcctggctgctggcccctggagatgtggacaactatgaggtgaccctgagccatgatggcaaggtggtgcagagcctggtgattgccaagtctgtgcgggagtgcagcttcagcagcctgaccccaggccgcctgtacacagtgaccatcaccaccaggtctgggaagtatgagaaccacagcttcagccaggagaggacagtgcctgacaaggtgcagggcgtgtctgtgagcaacagcgcccggagtgactacctgcgggtgtcctgggtgcacgccaccggggactttgaccactatgaggtgaccatcaagaacaagaacaacttcatccagaccaagagcatccccaagtcagaaaatgaatgtgtgtttgtgcagctggtgcccggccgcctgtacagcgtgacagtgaccaccaagagcggccagtatgaggccaatgagcagggcaatggccgcaccatccctgagcctgtgaaggacctgaccctgaggaacagaagcacagaggacctgcacgtgacctggagcggggccaatggagatgtggaccagtatgagatccagctgctcttcaatgacatgaaggtgttcccccccttccacctggtgaacacagccacagagtaccgcttcaccagcctgaccccaggccggcagtacaagatcctggtgctgaccatctctggagatgtgcagcagagcgccttcatcgagggcttcaccgtgcccagcgctgtgaagaacatccacatcagccccaacggggccacagacagcctgactgtgaactggaccccaggaggaggagatgtggacagctacacagtgtctgccttccgccacagccagaaggtggacagccagaccatccccaagcacgtgtttgagcacaccttccaccggctggaggccggggagcagtaccagatcatgattgcctctgtgtctggcagcctgaagaaccagatcaacgtggtgggccgcacagtgcctgctgctgtgacagacctgcgcatcacagagaacagcaccaggcacctgtccttccgctggacagccagcgagggggagctgtcctggtacaacatcttcctgtacaacccagatggcaacctgcaggagcgggcccaggtggaccccctggtgcagagcttctccttccagaacctgctgcagggccgcatgtacaagatggtgattgtgacccacagcggggagctgagcaatgaaagcttcatcttcggccgcacagtgcctgcctctgtgagccacctgcggggcagcaacagaaacaccacagacagcctgtggttcaactggagccctgccagcggggactttgacttctatgagctgatcctgtacaaccccaacggcaccaagaaggagaactggaaggacaaggacctgacagagtggaggttccagggcctggtgcccggcaggaaatatgtgctgtgggtggtgacccacagcggggacctgagcaacaaggtgacagctgagagcaggacagcccccagcccccccagcctgatgagctttgctgacatcgccaacaccagcctggccatcacctggaagggccccccagactggacagactacaatgactttgagctgcagtggctgcccagagatgccctgaccgtcttcaacccctacaacaacaggaagtctgagggccgcatcgtgtatggcctgcggcccggccgcagctaccagttcaacgtgaagacagtgtctggggacagctggaagacctacagcaagcccatcttcggctctgtgaggaccaagccagacaagatccagaacctgcactgccggccccagaacagcacagccatcgcctgctcctggatccccccagacagcgactttgatggctacagcattgagtgcaggaagatggacacccaggaggtggagttcagcaggaagctggagaaggagaagagcctgctgaacatcatgatgctggtgccccacaagcgctacctggtgtccatcaaggtgcagagcgctggcatgaccagcgaggtggtggaggacagcaccatcaccatgattgaccggcccccacctcctccaccccacatccgggtgaatgagaaggatgtgctgatcagcaagagcagcatcaacttcaccgtgaactgctcctggttcagtgacaccaacggggctgtgaagtacttcaccgtggtggtgcgggaggctgatggcagtgatgagctgaagccagagcagcagcaccccctgcccagctacctggagtaccgccacaatgccagcatccgggtgtaccagaccaactactttgccagcaaatgtgccgagaaccccaacagcaacagcaagagcttcaacatcaagctgggcgctgagatggagagcctgggcggcaaatgtgaccccacccagcagaagttctgtgatggccccctgaagccccacacagcctaccgcatcagcatccgggccttcacccagctgtttgatgaggacctgaaggagttcaccaagcccctgtacagcgacaccttcttcagcctgcccatcaccacagaaagtgagcccctgtttggagccatcgagggcgtgtctgctggcctcttcctgattggcatgctggtggccgtggtggccctgctgatctgccggcagaaggtgagccacggccgggagcggcccagcgcccggctgagcatccggcgggaccggcccctgtctgtgcacctgaacctgggccagaagggcaacaggaagaccagctgccccatcaagatcaaccagtttgagggccacttcatgaagctgcaggccgacagcaactacctgctgagcaaggagtatgaggagctgaaggatgtgggcaggaaccagagctgtgacatcgccctgctgcctgagaacagaggcaagaaccgctacaacaacatcctgccctatgatgccaccagggtgaagctgagcaatgtggatgatgacccctgcagcgactacatcaatgccagctacatccctggcaacaacttcagaagagagtacatcgtgacccagggccccctgcccggcaccaaggatgacttctggaagatggtgtgggagcagaatgtgcacaacatcgtgatggtgacccagtgtgtggagaagggccgggtgaagtgtgaccactactggccagctgaccaggacagcctgtactatggagacctgatcctgcagatgctgtctgagagcgtgctgcctgagtggaccatccgggagttcaagatctgtggggaggagcagctggatgcccacaggctcatccgccacttccactacacagtgtggccagaccatggagtgcctgagaccacccagagcctcatccagtttgtgaggacagtgcgggactacatcaacagaagccctggagctggccccaccgtggtgcactgcagcgctggggtgggccgcacaggcaccttcatcgccctggaccgcatcctgcagcagctggacagcaaggacagcgtggacatctatggagctgtgcatgacctgcggctgcaccgggtgcacatggtgcagacagagtgccagtatgtgtacctgcaccagtgtgtgagagatgtgctgcgggccaggaagctgcggtctgagcaggagaaccccctcttccccatctatgaaaatgtgaaccctgagtaccaccgggaccctgtgtacagccgccactag

SEQ ID NO: 83118 - DNA, 5724 bp, Artificial Sequence
  derived and/or modified sequence
atgctgagccacggcgccggcctggccctgtggatcaccctgagcctgctacagaccggcctcgctgagccggagcgttgtaacttcactctggccgaatccaaggcctcgtcacatagcgtgtctatacagtggcgcatattggggtctccatgcaacttttccctgatctacagctctgacaccctcggtgctgcactgtgtcccaccttccgtattgacaacactacatacggatgtaaccttcaggacctgcaggcgggaaccatttacaatttcagaatcattagtcttgatgaagaacgcaccgtcgtactccaaactgaccccctcccacccgcgaggtttggcgtcagtaaagaaaaaaccacctctacatctctgcatgtgtggtggaccccatcctctggaaaggtgaccagctacgaggtccagctgttcgacgagaataaccagaagattcaaggggtccaaatccaggagtccacatcttggaacgaatacacttttttcaacctcactgccggatccaagtacaatattgcaataacggcggtctccggaggcaaaaggtccttctcagtctatactaacggctctaccgtcccctctccagtgaaggacatcggcatttccactaaggccaactctcttctcatctcttggagccatggttccggcaatgtggaacggtatcgtctgatgcttatggataaaggcattcttgtgcacggcggcgtggtggacaagcatgcgactagctatgccttccacggcctgacacctgggtatttgtacaatctcacagttatgactgaggctgccggattgcagaattaccggtggaagctggttcgcaccgcccccatggaagtgtctaacctgaaggtcaccaacgatgggtccttaacctccctcaaagtgaaatggcagaggcctccaggaaacgtggatagctataatataaccctgtcacacaagggcactatcaaggaaagccgagtgctggccccctggatcacagagactcacttcaaggagctagtccccgggcggctgtatcaggtcacagtctcctgcgtgtcaggcgaactgagtgcacagaaaatggccgtcgggagaacctttcccgataaggtggcaaatcttgaggctaacaacaacggcagaatgcggagtctcgtcgtatcatggtcaccccctgctggggactgggagcagtacagaattctgttgtttaacgattccgtcgtgctcctgaacattactgtgggcaaagaagagacgcagtacgtgatggatgacacgggcctcgtccctggtcgacaatatgaggtggaagtgatcgtcgaatccgggaacctgaaaaactccgaacgttgtcagggcagaacggtcccgcttgccgtccttcaattgcgtgttaaacacgccaatgaaacctcgctgagtatcatgtggcaaaccccagttgctgagtgggagaagtatatcatctccctcgccgatagagacttgctgctgattcacaagagcctgagcaaagacgctaaagagttcactttcacagacctggttcctggccgaaagtatatggccacagtaacatccatcagcggggatttgaagaactcgagctctgttaaaggtcgcaccgttccggcacaggtgaccgacctgcacgttgccaatcagggtatgactagctcacttttcaccaactggacgcaggctcagggagatgtggagttctaccaagtcctcttaatacatgaaaacgtcgtcatcaaaaacgagtctatctccagcgagacctcaaggtacagttttcattcactgaaatctggcagcctctactctgttgttgtaaccacagttagtggtggaataagctcacggcaagtggtggtggagggtagaacagtgccgagtagcgtgtccggcgtgaccgtcaataattcaggccggaacgattacctgtctgttagctggctcctggctcctggggacgttgacaattacgaagtgacactgtcacatgacggcaaagtggtgcaatccctagttatagcgaagtccgttagggagtgctcattttcttccttgacccctggacgtttgtatactgtgacaatcactactcgctccggaaaatatgagaatcactctttttctcaggagcgaacggtgccagataaggtgcagggagttagtgtcagtaactccgctagaagtgactatttgcgcgtgtcctgggtgcacgctactggtgacttcgatcactatgaggttacaatcaaaaacaagaataactttattcagactaagagtataccaaaatcagagaatgagtgcgtctttgtgcagttggtgcccggccggttgtattccgtgacagttactacaaagtcgggacagtacgaggcaaacgagcagggcaatggaagaaccataccggagccggtaaaagaccttacgttgcgaaacagatctaccgaagatctgcacgtgacctggtccggagccaatggagatgtcgaccaatatgaaatccagttgctctttaatgacatgaaggtgttcccgccatttcatttggtgaacaccgctactgagtatcgtttcacaagtctgacaccgggtcgacagtataaaatccttgttctcacaatctctggtgacgttcaacagtccgcttttatcgagggatttaccgttccaagtgctgtcaaaaacatccacataagtccaaacggagctacagactccctgaccgtgaattggacccccggagggggcgatgtcgactcctacaccgtgtcagcttttcggcatagccaaaaggttgacagccagacaatcccaaagcacgtgttcgagcatacgttccacaggctggaagctggggagcagtaccagattatgatcgcctcagtgtccgggtccctgaaaaaccagatcaacgtcgtgggacggacagttccagcagccgtgaccgacctcagaatcactgagaattctacacggcatttgtcgtttaggtggaccgcaagcgagggagagctctcgtggtataacattttcttatataaccccgacggcaacctgcaggagagagcacaggtggacccgttggtccagtcattcagcttccaaaacctgttacaggggcgtatgtacaaaatggttattgtcacgcacagcggagagcttagcaacgaaagctttatcttcggcagaacagtgcctgcctcggtcagccatctcagagggtcaaataggaatactacagatagtctgtggttcaactggagccctgcaagcggggatttcgatttctatgaactcatcctgtataatcctaacggaacaaagaaagagaactggaaagataaagacctgaccgagtggagattccagggattggtccccggacgcaagtacgtactctgggtagtaacccacagcggtgacctgtctaacaaggtgactgccgaatcgaggacggcaccgtccccgccaagtctgatgagttttgcagacatcgccaacacctccttggccatcacctggaaggggcctcctgactggactgactacaacgattttgagttacaatggctgccacgcgatgctcttacagtttttaatccatacaataatcggaagtccgaagggcgaatagtatatggcttgagacctggtcggtcctaccaatttaatgttaaaactgtttctggggacagttggaagacttactctaagcctatcttcggcagcgtcaggactaagcccgataagatccaaaatctccattgtcgtccacagaacagtactgccattgcctgcagttggatcccccccgatagtgactttgacggctactccatagagtgtcgcaaaatggacacccaggaggtggaattttcacgtaagctggaaaaggaaaagagccttctaaatataatgatgctcgtcccacataagcgctacctggtgtctattaaagtccaaagcgctggcatgacttcggaagtcgtggaagattctactataacaatgatcgatcgtccgcctcctccgcctccacatatacgggtcaacgagaaggatgtgctaatctcgaagtcaagtatcaactttacggttaattgttcctggtttagcgacactaacggtgctgtgaagtatttcactgtggtcgtgagagaggccgacggatctgatgagctgaagcctgagcagcaacaccctttgccatcctatcttgaatatcggcataacgctagcattagggtctatcaaaccaactacttcgcatctaaatgcgcagagaacccaaatagcaacagtaaatcatttaacattaagctgggagccgagatggagtcattgggtggcaagtgcgatcccacccagcagaagttctgtgatgggccactcaaaccccacacagcttacagaatttctattagagccttcactcagctctttgatgaagacttgaaagagttcactaagcctctctatagcgacacattcttctcgcttcctatcacgaccgaaagcgaacccctctttggagccattgagggcgtgtcagccggcctgttcctgattggtatgctggtggcagtggtcgcgttgctaatttgccgacaaaaagtctcccatgggagggaaaggccctccgcgcgcctgtcaatccgacgtgaccggccactgtccgtacacctcaatttaggtcaaaagggcaacaggaaaacgagttgcccgattaagatcaaccagtttgaagggcactttatgaagctgcaggctgattccaactatcttctcagtaaggagtacgaggaactcaaggacgtcggaaggaaccagagttgcgatatcgcccttctcccggaaaatagaggcaaaaatagatacaacaacatcttgccttacgacgcgactcgggtcaagttgtctaatgttgatgatgacccgtgttcagattacatcaacgcctcctacattcctgggaataatttcaggcgtgaatacatcgtcacgcagggtcccctcccaggcactaaagacgatttttggaaaatggtctgggagcaaaacgtgcataatatagtgatggtcacacagtgtgtggagaagggtagggttaagtgtgatcactactggccagcagatcaggattccctttattacggggacctgattcttcaaatgttgtcggaatcagttctgcccgagtggaccattagggaattcaagatctgtggggaggaacagttggatgcccatagactgatccggcacttccattatactgtctggcctgatcacggtgtccccgagacaacccagtccctgatccagttcgtccggaccgtgagggattatatcaatcgtagccccggggcgggtcccacagtagttcattgcagcgcaggcgtggggcgtaccggaacttttatagctctcgaccgcatccttcagcaactcgactctaaggactccgtggatatatacggagccgtgcacgatctacggctgcaccgggtccatatggtgcagaccgaatgccagtatgtctatcttcaccaatgcgtacgggatgtgttaagggcaaggaaacttcgcagcgaacaggaaaacccgctctttccaatttacgaaaacgtcaacccagagtatcatcgcgatcccgtctactcccggcactag

SEQ ID NO: 83119 - DNA, 5723 bp, Artificial Sequence
  derived and/or modified sequence
atgttaagtcatggcgctgggcttgccttgtggattaccctttcactgctgcaaactggtctggccgaacctgaacgctgcaacttcacactagccgagtctaaagcctccagccactcggtgtcaatacagtggcgcatcttaggatccccttgtaactttagcttaatttacagtagcgatactctaggcgcagcgctgtgtcccacctttcgcatcgacaacaccacctatggctgcaacctgcaggatcttcaggcgggaacaatatacaacttccgaatcatatctttggacgaagaacgaacagtcgtcctccagaccgatcctctgccaccagcaagattcggcgtttccaaagaaaagaccaccagcacctccctgcatgtttggtggacacctagcagcggaaaagtcaccagctatgaagtgcaactcttcgatgaaaataatcagaaaatccagggggtgcaaattcaggagtcgaccagttggaatgagtacaccttctttaatctaactgcgggttccaaatataacatcgcgattacagctgtaagtggagggaaaaggagtttcagcgtctatacaaacggcagcaccgtgccctcacccgtgaaggatatcggaattagtaccaaggctaactccttactcatatcttggagtcacggtagcggtaacgtggaaaggtatcgcttgatgctaatggataagggaatcctggtccacggcggtgtggttgacaagcacgcaacatcttatgcattccatggccttacccccggttatctctacaatctcacagtcatgacagaggcggctggcctgcagaactacagatggaaattggtcagaacggcccctatggaagtatccaatctcaaggtaacaaatgacgggagtctgaccagccttaaggttaaatggcagagaccaccagggaacgtcgactcgtataacatcaccctgagccacaaagggaccattaaggaatcccgcgtcctcgctccctggatcaccgaaacacacttcaaagaactcgttcccggtaggctgtaccaagtcacagtctcttgtgtgtctggagaattgtctgctcagaagatggcggttggtcgcacatttcctgataaagttgcaaacctggaggctaacaataatgggcgtatgcgatcactggtcgtctcttggagtcccccagccggagactgggagcaataccggatcctgctcttcaatgactccgtggtcttacttaatattactgtcggtaaggaggagacccagtacgttatggatgataccggccttgtccccggaaggcaatacgaagtcgaggtgatcgtggagtctgggaacctgaagaactcagaacggtgccaggggagaacagtgcctttagcagttcttcaattgcgagtcaagcacgctaatgagactagcttgagtatcatgtggcagacaccggttgccgagtgggagaagtacataataagtctcgctgacagggatctgctactgattcataaatcactttccaaagatgctaaggaattcaccttcacagatctggtacccggacgaaaatacatggccaccgtaacgtccataagcggggacctcaaaaatagctcatctgtcaaaggtcggactgtacccgcacaggtcacagacctgcacgtcgccaatcagggaatgacaagcagtttgtttacaaattggacacaggctcagggtgatgtagaattttaccaagtgctcctgattcacgagaacgttgtcattaagaatgagtccatcagctctgaaacatcgaggtatagttttcattcccttaaatccgggagcctctactctgtggtagtcacaactgtctcagggggaataagttctcgccaggtggtggtggaaggacgaacagtgccatccagcgtgtcaggcgttacggtaaacaattcaggccgtaatgattacctgtcagtgtcgtggctgctcgcaccaggagatgtagataactacgaggtaacgctgtcccatgacggcaaggtggtccagtctctcgtcattgctaaaagcgtgagggagtgttcttttagttccttaactcctggacgactctacactgtgaccataaccactcgcagcggcaaatatgagaaccactcattctcacaggagcgaactgtcccggacaaggtgcaaggagtttcagtcagtaacagtgcaaggagcgattacctccgagtgtcttgggttcacgcgaccggcgatttcgaccactacgaagttacaataaaaaacaagaacaattttatccagaccaaatcaattcctaagtccgagaacgagtgtgtgtttgttcagctagtgcccggacgtctgtactcagtgactgtgaccactaagagcggtcagtatgaagccaacgagcaggggaatgggagaacgattccagagccagtgaaggacctgacattgcgaaacagatccactgaagatctccatgttacgtggtccggggctaacggggacgtggaccagtatgagatccagttgctgttcaacgatatgaaagtttttccgccttttcacctcgtgaacaccgccaccgagtaccgctttacaagcctcacccccggacggcagtacaaaatccttgtgctaacaatctccggagatgtccagcaatctgcctttatcgagggtttcacagtgccatcagctgtgaaaaatattcatatcagccctaacggagccactgatagtctcaccgttaattggacacctgggggtggtgatgtggattcctacacggtcagcgccttcaggcactcacagaaggtcgattcccagacgattcccaagcacgtgttcgagcacaccttccacaggctggaggccggagaacagtatcagatcatgattgccagtgtctctggaagtctaaaaaaccagatcaatgtagttggaagaaccgtcccggctgcagttactgacctgcgtatcaccgaaaactccaccagacatctgtcctttagatggacagcgagtgaaggagagttatcttggtataatatctttctgtataaccccgatggaaacctgcaggagagagctcaggtggaccccctggtccagtccttctctttccaaaacctgctgcagggtcggatgtataagatggtcattgtaacacattccggagagctcagtaacgaaagttttatctttggcaggacagttccggcatctgttagccatttaagaggctctaatcgaaatacaacagactcactgtggtttaattggtcacctgcatcaggagatttcgatttttacgagctgattctgtataaccccaacggtacgaaaaaagaaaattggaaggacaaagaccttacagaatggagatttcaggggcttgtgcctgggcgaaaatatgtcctctgggtagtgactcacagcggagacctgtccaacaaggtaaccgctgagagccgcaccgccccttcaccccctagcttaatgtccttcgccgatatcgccaacacttcccttgccatcacttggaaagggcctcccgactggactgactacaacgatttcgagctgcagtggttgccgcgagatgccttgaccgtgtttaatccttataacaaccgaaagtcagagggacggatcgtgtatggcctgagacccggacgctcgtaccagttcaatgtcaaaactgttagtggggactcatggaagacctacagtaagcctatctttggtagcgtaagaaccaaacccgataaaattcaaaatctgcattgccggccacagaatagcacggccattgcttgcagttggatcccaccagactccgactttgacggatattctattgagtgccgcaagatggatacgcaggaagtggaattttctaggaagctcgagaaggaaaagtcgctactgaacattatgatgctcgtcccccataaaagatacttggtgtcaatcaaggtccagtcagcagggatgacatcagaggtggtcgaggactcaactatcaccatgatagaccgtccgccaccacctcccccacatattagagtgaatgaaaaagatgtgctcatcagcaagtcctccatcaatttcactgtcaactgctcctggttctccgacactaatggagccgtgaaatattttactgtggtcgtgagggaagccgatggtagcgacgagttgaagcctgaacagcaacacccattgcctagctacctggaatacaggcataatgcaagcatccgcgtgtaccagactaattacttcgccagtaagtgtgcagagaatcccaactctaatagtaaatccttcaacataaaactgggtgcggagatggaatccttggggggaaagtgcgaccccactcagcaaaaattctgcgacggacccctcaaaccgcatactgcgtataggatctctatacgggcttttacccagctgttcgacgaagacctcaaggagtttacaaagccactatattccgataccttcttctctctccccatcactaccgagagcgagccactcttcggtgcaatcgaaggtgttagtgccggactctttctcatcggcatgctggtcgccgtggtggccctgctgatttgcaggcagaaggtttcccacggcagagagcggccaagtgcgagactaagtatcagacgtgatcgtcccctttccgtgcaccttaatctgggccagaaaggaaacagaaaaacctcatgccccattaagatcaaccaattcgaaggccatttcatgaaattacaggcagactccaattacttgctgtctaaggagtacgaggaacttaaggatgtgggaaggaatcaatcttgtgatattgccctcctgccagaaaaccggggtaaaaaccgttataacaatatattaccctatgacgcaacccgggtgaagttgagcaatgtcgatgacgacccctgttcagattacataaacgcatcgtacataccaggcaataacttccgacgggaatacattgttacccagggccctttacctggcacaaaggacgacttttggaagatggtgtgggagcagaacgtgcacaatattgttatggtgacgcagtgcgtggagaaagggagagtcaagtgcgaccattactggcctgctgaccaggatagcctctactatggggaccttatcctacagatgctttctgagtctgtcctgcctgagtggactatcagagaattcaagatctgtggggaggagcagctggacgctcaccgcctcatccgccactttcactataccgtctggccagatcacggtgtgccggagaccactcagtctttgatacagttcgtgcggaccgtgagagactatattaaccggagtcctggggcaggccctacagtggtccattgcagcgctggagtgggacgaaccggcacttttatcgccttagatagaatcctgcagcaactggattcaaaagatagcgtcgacatttatggcgcagtgcacgacctccgactgcaccgggtgcacatggttcagaccgagtgtcagtacgtgtatctgcatcagtgcgtgcgtgacgtgttgcgagccagaaagctccggtctgagcaggaaaatcccctatttcctatctacgaaaatgtcaaccccgagtaccacagggatcccgtgtactcacgacatta

SEQ ID NO: 83120 - DNA, 5839 bp, Artificial Sequence
  derived and/or modified sequence
tctcctctggatcttaactactgagcgcaatgctgagccatggagccgggttggccttgtggatcacactgagcctgctgcagactggactggcggagccagagagatgtaacttcaccctggcggagtccaaggcctccagccattctgtgtctatccagtggagaattttgggctcaccctgtaactttagcctcatctatagcagtgacaccctgggggccgcgttgtgccctacctttcggatagacaacaccacatacggatgtaaccttcaagatttacaagcaggaaccatctataacttcaggattatttctctggatgaagagagaacagtggtcttgcaaacagatcctttacctcctgctaggtttggagtcagtaaagagaagacgacttcaaccagcttgcatgtttggtggactccttcttccggaaaagtcacctcatatgaggtgcaattatttgatgaaaataaccaaaagatacagggggttcaaattcaagaaagtacttcatggaatgaatacacttttttcaatctcactgctggtagtaaatacaatattgccatcacagctgtttctggaggaaaacgttctttttcagtttataccaatggatcaacagtgccatctccagtgaaagatattggtatttccacaaaagccaattctctcctgatttcctggtcccatggttctgggaatgtggaacgataccggctgatgctaatggataaagggatcctagttcatggcggtgttgtggacaaacatgctacttcctatgcttttcacgggctgacccctggctacctctacaacctcactgttatgactgaggctgcagggctgcaaaactacaggtggaaactagtcaggacagcccccatggaagtctcaaatctgaaggtgacaaatgatggcagtttgacctctctaaaagtcaaatggcaaagacctcctggaaatgtggattcttacaatatcaccctgtctcacaaagggaccatcaaggaatccagagtattagcaccttggattactgaaactcactttaaagagttagtccccggtcgactttatcaagttactgtcagctgtgtctctggtgaactgtctgctcagaagatggcagtgggcagaacatttccagacaaagttgcaaacctggaggcaaacaataatggcaggatgaggtctcttgtagtgagctggtcgccccctgctggagactgggagcagtatcggatcctactcttcaatgattctgtggtgctgctcaacatcactgtgggaaaggaagaaacacagtatgtcatggatgacacggggctcgtaccgggaagacagtatgaggtggaagtcattgttgagagtggaaatttgaagaattctgagcgttgccaaggcaggacagtccccctggctgtcctccagcttcgtgtcaaacatgccaatgaaacctcactgagtatcatgtggcagacccctgtagcagaatgggagaaatacatcatttccctagctgacagagacctcttactgatccacaagtcactctccaaagatgccaaagaattcacttttactgacctggtgcctggacgaaaatacatggctacagtcaccagtattagtggagacttaaaaaattcctcttcagtaaaaggaagaacagtgcctgcccaagtgactgacttgcatgtggccaaccaaggaatgaccagtagtctgtttactaactggacccaggcacaaggagacgtagaattttaccaagtcttactgatccatgaaaatgtggtcattaaaaatgaaagcatctccagtgagaccagcagatacagcttccactctctcaagtccggcagcctgtactccgtggtggtaacaacagtgagtggagggatctcttcccgacaagtggttgtggagggaagaacagtcccttccagtgtgagtggagtaacggtgaacaattccggtcgtaatgactacctcagcgtttcctggctgctggcgcccggagatgtggataactatgaggtaacattgtctcatgacggcaaggtggttcagtcccttgtcattgccaagtctgtcagagaatgttccttcagctccctcaccccaggccgcctctacaccgtgaccataactacaaggagtggcaagtatgaaaatcactccttcagccaagagcggacagtgcctgacaaagtccagggagtcagtgttagcaactcagccaggagtgactatttaagggtatcctgggtgcatgccactggagactttgatcactatgaagtcaccattaaaaacaaaaacaacttcattcaaactaaaagcattcccaagtcagaaaacgaatgtgtatttgttcagctagtccctggacggttgtacagtgtcactgttactacaaaaagtggacaatatgaagccaatgaacaagggaatgggagaacaattccagagcctgttaaggatctaacattgcgcaacaggagcactgaggacttgcatgtgacttggtcaggagctaatggggatgtcgaccaatatgagatccagctgctcttcaatgacatgaaagtatttcctccttttcaccttgtaaataccgcaaccgagtatcgatttacttccctaacaccaggccgccaatacaaaattcttgtcttgacgattagcggggatgtacagcagtcagccttcattgagggcttcacagttcctagtgctgtcaaaaatattcacatttctcccaatggagcaacagatagcctgacggtgaactggactcctggtgggggagacgttgattcctacacggtgtcggcattcaggcacagtcaaaaggttgactctcagactattcccaagcacgtctttgagcacacgttccacagactggaggccggggagcagtaccagatcatgattgcctcagtcagcgggtccctgaagaatcagataaatgtggttgggcggacagtcccagcagctgtcaccgacctgaggatcacagagaactccaccaggcacctgtccttccgctggaccgcctcagagggggagctcagctggtacaacatctttttgtacaacccagatgggaatctccaggagagagctcaagttgacccactagtccagagcttctctttccagaacttgctacaaggcagaatgtacaagatggtgattgtaactcacagtggggagctgtctaatgagtctttcatatttggtagaacagtcccagcctctgtgagtcatctcagggggtccaatcggaacacgacagacagcctttggttcaactggagtccagcctctggggactttgacttttatgagctgattctctataatcccaatggcacaaagaaggaaaactggaaagacaaggacctgacggagtggcggtttcaaggccttgttcctggaaggaagtacgtgctgtgggtggtaactcacagtggagatctcagcaataaagtcacagcggagagcagaacagctccaagtcctcccagtcttatgtcatttgctgacattgcaaacacatccttggccatcacgtggaaagggcccccagactggacagactacaacgactttgagctgcagtggttgcccagagatgcacttactgtcttcaacccctacaacaacagaaaatcagaaggacgcattgtgtatggtcttcgtccagggagatcctatcaattcaacgtcaagactgtcagtggtgattcctggaaaacttacagcaaaccaatttttggatctgtgaggacaaagcctgacaagatacaaaacctgcattgccggcctcagaactccacggccattgcctgttcttggatccctcctgattctgactttgatggttatagtattgaatgccggaaaatggacacccaagaagttgagttttccagaaagctggagaaagaaaaatctctgctcaacatcatgatgctagtgccccataagaggtacctggtgtccatcaaagtgcagtcggccggcatgaccagcgaggtggttgaagacagcactatcacaatgatagaccgcccccctcctccacccccacacattcgtgtgaatgaaaaggatgtgctaattagcaagtcttccatcaactttactgtcaactgcagctggttcagcgacaccaatggagctgtgaaatacttcacagtggtggtgagagaggctgatggcagtgatgagctgaagccagaacagcagcaccctctcccttcctacctggagtacaggcacaatgcctccattcgggtgtatcagactaattattttgccagcaaatgtgccgaaaatcctaacagcaactccaagagttttaacattaagcttggagcagagatggagagcctaggtggaaaatgcgatcccactcagcaaaaattctgtgatggaccactgaagccacacactgcctacagaatcagcattcgagcttttacacagctctttgatgaggacctgaaggaattcacaaagccactctattcagacacatttttttctttacccatcactactgaatcagagcccttgtttggagctattgaaggtgtgagtgctggtctgtttttaattggcatgctagtggctgttgttgccttattgatctgcagacagaaagtgagccatggtcgagaaagaccctctgcccgtctgagcattcgtagggatcgaccattatctgtccacttaaacctgggccagaaaggtaaccggaaaacttcttgtccaataaaaataaatcagtttgaagggcatttcatgaagctacaggctgactccaactaccttctatccaaggaatacgaggagttaaaagacgtgggccgaaaccagtcatgtgacattgcactcttgccggagaatagagggaaaaatcgatacaacaatatattgccctatgatgccacgcgagtgaagctctccaatgtagatgatgatccttgctctgactacatcaatgccagctacatccctggcaacaacttcagaagagaatacattgtcactcagggaccgcttcctggcaccaaggatgacttctggaaaatggtgtgggaacaaaacgttcacaacatcgtcatggtgacccagtgtgttgagaagggccgagtaaagtgtgatcattactggccagcggaccaggattccctctactatggggacctcatcctgcagatgctctcagagtccgtcctgcctgagtggaccatccgggagtttaagatatgcggtgaggaacagcttgatgcacacagactcatccgccactttcactatacggtgtggccagaccatggagtcccagaaaccacccagtctctgatccagtttgtgagaactgtcagggactacatcaacagaagcccgggtgctgggcccactgtggtgcactgcagtgctggtgtgggtaggactggaacctttattgcattggaccgaatcctccagcagttagactccaaagactctgtggacatttatggagcagtgcacgacctaagacttcacagggttcacatggtccagactgagtgtcagtatgtctacctacatcagtgtgtaagagatgtcctcagagcaagaaagctacggagtgaacaagaaaaccccttgtttccaatctatgaaaatgtgaatccagagtatcacagagatccagtctattcaaggcattgagaatgtacctgaagagctcctggataaaaattattcactgtgtgatttgtttttaaaaacttgcttcatgccctacagaggtgcca

SEQ ID NO: 83121 - DNA, 5724 bp, Artificial Sequence
  derived and/or modified sequence
atgctgagccacggcgccggcctggccctgtggatcaccctgagcctgctgcagaccggcctggccgagcccgagagatgcaacttcaccctggccgagagcaaggccagcagccacagcgtgagcatccagtggagaatcctgggcagcccctgcaacttcagcctgatctacagcagcgacaccctgggcgccgccctgtgccccaccttcagaatcgacaacaccacctacggctgcaacctgcaggacctgcaggccggcaccatctacaacttcagaatcatcagcctggacgaggagagaaccgtggtgctgcagaccgaccccctgccccccgccagattcggcgtgagcaaggagaagaccaccagcaccagcctgcacgtgtggtggacccccagcagcggcaaggtgaccagctacgaggtgcagctgttcgacgagaacaaccagaagatccagggcgtgcagatccaggagagcaccagctggaacgagtacaccttcttcaacctgaccgccggcagcaagtacaacatcgccatcaccgccgtgagcggcggcaagagaagcttcagcgtgtacaccaacggcagcaccgtgcccagccccgtgaaggacatcggcatcagcaccaaggccaacagcctgctgatcagctggagccacggcagcggcaacgtggagagatacagactgatgctgatggacaagggcatcctggtgcacggcggcgtggtggacaagcacgccaccagctacgccttccacggcctgacccccggctacctgtacaacctgaccgtgatgaccgaggccgccggcctgcagaactacagatggaagctggtgagaaccgcccccatggaggtgagcaacctgaaggtgaccaacgacggcagcctgaccagcctgaaggtgaagtggcagagaccccccggcaacgtggacagctacaacatcaccctgagccacaagggcaccatcaaggagagcagagtgctggccccctggatcaccgagacccacttcaaggagctggtgcccggcagactgtaccaggtgaccgtgagctgcgtgagcggcgagctgagcgcccagaagatggccgtgggcagaaccttccccgacaaggtggccaacctggaggccaacaacaacggcagaatgagaagcctggtggtgagctggagcccccccgccggcgactgggagcagtacagaatcctgctgttcaacgacagcgtggtgctgctgaacatcaccgtgggcaaggaggagacccagtacgtgatggacgacaccggcctggtgcccggcagacagtacgaggtggaggtgatcgtggagagcggcaacctgaagaacagcgagagatgccagggcagaaccgtgcccctggccgtgctgcagctgagagtgaagcacgccaacgagaccagcctgagcatcatgtggcagacccccgtggccgagtgggagaagtacatcatcagcctggccgacagagacctgctgctgatccacaagagcctgagcaaggacgccaaggagttcaccttcaccgacctggtgcccggcagaaagtacatggccaccgtgaccagcatcagcggcgacctgaagaacagcagcagcgtgaagggcagaaccgtgcccgcccaggtgaccgacctgcacgtggccaaccagggcatgaccagcagcctgttcaccaactggacccaggcccagggcgacgtggagttctaccaggtgctgctgatccacgagaacgtggtgatcaagaacgagagcatcagcagcgagaccagcagatacagcttccacagcctgaagagcggcagcctgtacagcgtggtggtgaccaccgtgagcggcggcatcagcagcagacaggtggtggtggagggcagaaccgtgcccagcagcgtgagcggcgtgaccgtgaacaacagcggcagaaacgactacctgagcgtgagctggctgctggcccccggcgacgtggacaactacgaggtgaccctgagccacgacggcaaggtggtgcagagcctggtgatcgccaagagcgtgagagagtgcagcttcagcagcctgacccccggcagactgtacaccgtgaccatcaccaccagaagcggcaagtacgagaaccacagcttcagccaggagagaaccgtgcccgacaaggtgcagggcgtgagcgtgagcaacagcgccagaagcgactacctgagagtgagctgggtgcacgccaccggcgacttcgaccactacgaggtgaccatcaagaacaagaacaacttcatccagaccaagagcatccccaagagcgagaacgagtgcgtgttcgtgcagctggtgcccggcagactgtacagcgtgaccgtgaccaccaagagcggccagtacgaggccaacgagcagggcaacggcagaaccatccccgagcccgtgaaggacctgaccctgagaaacagaagcaccgaggacctgcacgtgacctggagcggcgccaacggcgacgtggaccagtacgagatccagctgctgttcaacgacatgaaggtgttcccccccttccacctggtgaacaccgccaccgagtacagattcaccagcctgacccccggcagacagtacaagatcctggtgctgaccatcagcggcgacgtgcagcagagcgccttcatcgagggcttcaccgtgcccagcgccgtgaagaacatccacatcagccccaacggcgccaccgacagcctgaccgtgaactggacccccggcggcggcgacgtggacagctacaccgtgagcgccttcagacacagccagaaggtggacagccagaccatccccaagcacgtgttcgagcacaccttccacagactggaggccggcgagcagtaccagatcatgatcgccagcgtgagcggcagcctgaagaaccagatcaacgtggtgggcagaaccgtgcccgccgccgtgaccgacctgagaatcaccgagaacagcaccagacacctgagcttcagatggaccgccagcgagggcgagctgagctggtacaacatcttcctgtacaaccccgacggcaacctgcaggagagagcccaggtggaccccctggtgcagagcttcagcttccagaacctgctgcagggcagaatgtacaagatggtgatcgtgacccacagcggcgagctgagcaacgagagcttcatcttcggcagaaccgtgcccgccagcgtgagccacctgagaggcagcaacagaaacaccaccgacagcctgtggttcaactggagccccgccagcggcgacttcgacttctacgagctgatcctgtacaaccccaacggcaccaagaaggagaactggaaggacaaggacctgaccgagtggagattccagggcctggtgcccggcagaaagtacgtgctgtgggtggtgacccacagcggcgacctgagcaacaaggtgaccgccgagagcagaaccgcccccagcccccccagcctgatgagcttcgccgacatcgccaacaccagcctggccatcacctggaagggcccccccgactggaccgactacaacgacttcgagctgcagtggctgcccagagacgccctgaccgtgttcaacccctacaacaacagaaagagcgagggcagaatcgtgtacggcctgagacccggcagaagctaccagttcaacgtgaagaccgtgagcggcgacagctggaagacctacagcaagcccatcttcggcagcgtgagaaccaagcccgacaagatccagaacctgcactgcagaccccagaacagcaccgccatcgcctgcagctggatcccccccgacagcgacttcgacggctacagcatcgagtgcagaaagatggacacccaggaggtggagttcagcagaaagctggagaaggagaagagcctgctgaacatcatgatgctggtgccccacaagagatacctggtgagcatcaaggtgcagagcgccggcatgaccagcgaggtggtggaggacagcaccatcaccatgatcgacagacccccccccccccccccccacatcagagtgaacgagaaggacgtgctgatcagcaagagcagcatcaacttcaccgtgaactgcagctggttcagcgacaccaacggcgccgtgaagtacttcaccgtggtggtgagagaggccgacggcagcgacgagctgaagcccgagcagcagcaccccctgcccagctacctggagtacagacacaacgccagcatcagagtgtaccagaccaactacttcgccagcaagtgcgccgagaaccccaacagcaacagcaagagcttcaacatcaagctgggcgccgagatggagagcctgggcggcaagtgcgaccccacccagcagaagttctgcgacggccccctgaagccccacaccgcctacagaatcagcatcagagccttcacccagctgttcgacgaggacctgaaggagttcaccaagcccctgtacagcgacaccttcttcagcctgcccatcaccaccgagagcgagcccctgttcggcgccatcgagggcgtgagcgccggcctgttcctgatcggcatgctggtggccgtggtggccctgctgatctgcagacagaaggtgagccacggcagagagagacccagcgccagactgagcatcagaagagacagacccctgagcgtgcacctgaacctgggccagaagggcaacagaaagaccagctgccccatcaagatcaaccagttcgagggccacttcatgaagctgcaggccgacagcaactacctgctgagcaaggagtacgaggagctgaaggacgtgggcagaaaccagagctgcgacatcgccctgctgcccgagaacagaggcaagaacagatacaacaacatcctgccctacgacgccaccagagtgaagctgagcaacgtggacgacgacccctgcagcgactacatcaacgccagctacatccccggcaacaacttcagaagagagtacatcgtgacccagggccccctgcccggcaccaaggacgacttctggaagatggtgtgggagcagaacgtgcacaacatcgtgatggtgacccagtgcgtggagaagggcagagtgaagtgcgaccactactggcccgccgaccaggacagcctgtactacggcgacctgatcctgcagatgctgagcgagagcgtgctgcccgagtggaccatcagagagttcaagatctgcggcgaggagcagctggacgcccacagactgatcagacacttccactacaccgtgtggcccgaccacggcgtgcccgagaccacccagagcctgatccagttcgtgagaaccgtgagagactacatcaacagaagccccggcgccggccccaccgtggtgcactgcagcgccggcgtgggcagaaccggcaccttcatcgccctggacagaatcctgcagcagctggacagcaaggacagcgtggacatctacggcgccgtgcacgacctgagactgcacagagtgcacatggtgcagaccgagtgccagtacgtgtacctgcaccagtgcgtgagagacgtgctgagagccagaaagctgagaagcgagcaggagaaccccctgttccccatctacgagaacgtgaaccccgagtaccacagagaccccgtgtacagcagacactag

SEQ ID NO: 83122 - protein, 327 aa, Artificial Sequence
  derived and/or modified sequence
MPIIPAFWEAEAGGSREEEFETSLANMIEKKLEPLSQDEDQHADLTQSRRPLTSCTIFLGYTSNLISSGIRETIRYLVQHNMVDVLVTTAGGVEEDLIKCLAPTYLGEFSLRGKELRENGINRIGNLLVPNENYCKFEDWLMPILDQMVMEQNTEGVKWTPSKMIARLGKEINNPESVYYWAQKNHIPVFSPALTDGSLGDMIFFHSYKNPGLVLDIVEDLRLINTQAIFAKCTGMIILGGGVVKHHIANANLMRNGADYAVYINTAQEFDGSDSGARPDEAVSWGKIRVDAQPVKVYADASLVFPLLVAETFAQKMDAFMHEKNED

SEQ ID NO: 83123 - DNA, 984 bp, Artificial Sequence
  derived and/or modified sequence
atgcctattatcccggcattctgggaggccgaagccggcggctcaagggaagaagagttcgaaacaagtctggcaaacatgattgaaaaaaaactggaaccgcttagccaggatgaggatcagcacgccgacctgacacaatcaagaagacccctcaccagctgcaccattttccttgggtacactagcaatctcatctcttcaggcattcgtgaaacaatccgatacctagttcagcataatatggtggatgtactggtgacaaccgctggaggcgtggaggaggatctgatcaagtgcctcgcccctacctacctgggggaattctccctccgcggtaaggaattaagggaaaatggaattaaccgaatcgggaatctgctcgtccctaacgaaaattattgcaaatttgaagattggcttatgccgattttagaccagatggtgatggaacagaatacagaaggcgtgaagtggacccccagcaagatgattgctcgcttgggcaaggagattaacaaccccgagagtgtttactactgggcccaaaagaatcacatacctgtattctcacctgcactcaccgatggtagcttaggagacatgatcttttttcatagctacaaaaatccggggctggtactcgacatcgtggaggaccttcgcctcattaacacccaggcaatctttgctaagtgcaccggcatgatcatcctcgggggcggtgttgtgaaacaccacattgccaatgccaatctgatgagaaatggcgctgattatgcagtgtacatcaataccgcccaggaattcgatgggtccgattccggcgcaaggcccgatgaggcagtttcatggggtaaaatcagagtggacgcgcagcctgtaaaagtctacgccgatgccagccttgtttttcctctgttagtggctgaaacgttcgcccagaagatggacgcctttatgcacgagaaaaatgaggactag

SEQ ID NO: 83124 - DNA, 984 bp, Artificial Sequence
  derived and/or modified sequence
atgcccatcatcccagccttctgggaggccgaggccggcggcagccgggaggaggagtttgagaccagcctggccaacatgattgagaagaagctggagcccctgagccaggatgaggaccagcacgccgacctgacccagagcagaagacccctgaccagctgcaccatcttcctgggctacaccagcaacctgatcagcagcggcatccgggagaccatccgctacctggtgcagcacaacatggtggatgtgctggtgaccacagctgggggcgtggaggaggacctgatcaagtgcctggcccccacctacctgggggagttcagcctgcggggcaaggagctgcgggagaatggcatcaaccgcatcggcaacctgctggtgcccaatgaaaactactgcaagtttgaggactggctgatgcccatcctggaccagatggtgatggagcagaacacagagggcgtgaagtggacccccagcaagatgattgcccggctgggcaaggagatcaacaaccctgagagcgtgtactactgggcccagaagaaccacatccctgtgttcagccctgccctgacagatggcagcctgggggacatgatcttcttccacagctacaagaaccctggcctggtgctggacatcgtggaggacctgcggctcatcaacacccaggccatctttgccaagtgcaccggcatgatcatcctgggcggcggcgtggtgaagcaccacatcgccaatgccaacctgatgagaaatggagctgactatgctgtgtacatcaacacagcccaggagtttgatggcagtgacagcggggcccggccagatgaggccgtgtcctggggcaagatccgggtggatgcccagcctgtgaaggtgtatgcagatgccagcctggtgttccccctgctggtggccgagacctttgcccagaagatggatgccttcatgcatgagaagaatgaagattag

SEQ ID NO: 83125 - DNA, 984 bp, Artificial Sequence
  derived and/or modified sequence
atgcccatcatccccgccttctgggaggccgaggccggcggcagcagggaggaagagttcgaaactagtctggctaacatgattgaaaagaagttagagcctctcagccaggacgaagatcagcacgccgatctcacccaatctcgccggcccctcacttcttgtaccatcttcctgggctacaccagtaatttaatttccagcggcattcgagagacgatccggtacctcgtgcagcacaatatggtggatgtgctggtaactacggcagggggagtggaagaggacttgatcaaatgtctggcccccacctacctgggcgagttctccctgcgtggcaaggagcttcgtgagaatggcatcaaccgcattggcaatctgctggttccaaatgagaattattgcaaatttgaagattggttgatgcctatcctggatcaaatggttatggagcaaaataccgaaggtgtgaagtggacgccctccaaaatgatcgctcgcttgggtaaggagattaataatccagagagcgtgtactattgggcacagaaaaatcacattcctgtgtttagtccggccctgacagacgggtcccttggggatatgatattctttcattcatacaagaatccaggcctggtgctggatatagttgaagatctcaggttgatcaacacccaggccatcttcgccaagtgtacaggcatgatcatcttgggcggcggggtagtgaagcaccacattgcgaatgcaaacttgatgcgaaatggcgccgattacgccgtctatatcaacacagcccaggagtttgacgggtcggattctggcgctcggcccgacgaagccgtgtcctgggggaagatccgggtggacgcccagcctgtaaaagtgtacgccgacgctagtctcgttttccctctcctcgtcgccgagacattcgctcagaagatggatgcgtttatgcacgaaaagaacgaggattag

SEQ ID NO: 83126 - DNA, 984 bp, Artificial Sequence
  derived and/or modified sequence
atgcccataattccagccttttgggaagccgaggccggtggatctcgggaggaggaatttgagacctcccttgctaatatgatcgagaagaagctggagccactgtctcaagatgaagatcagcatgccgacctgacacagtccagaagacccttaaccagctgtaccatatttttaggctacacctccaatctgatttctagcggaatccgcgaaacaatacgatacctagtgcagcataacatggtggacgtcctcgtgaccaccgctggaggggtagaagaggacctgatcaaatgcctggctcccacctatctgggcgagttcagccttaggggtaaggagctccgggagaacggaattaatcgtattggcaatctgctcgtgcccaacgaaaattactgtaagtttgaggattggttgatgccaatactagatcagatggtcatggaacagaacactgagggcgtcaagtggacaccctctaaaatgatcgccaggctgggaaaagagattaacaatcctgagtccgtttactattgggcccaaaagaatcatatcccagtgttttcacccgctttgaccgacgggtcactaggagacatgatcttttttcactcgtataagaaccccggtttagtcctggacattgtagaagacttgcgactgatcaatacccaagcaattttcgcgaaatgcactggtatgattatcctcgggggaggggttgtaaagcaccatatcgctaacgccaacctgatgaggaacggcgcagattacgccgtatacatcaacacggcccaggaattcgatggttctgattcaggggctagaccggatgaggctgtgtcatggggcaaaattagggtggacgctcagcccgttaaggtctatgcagatgccagcttagtctttccgctgctggttgctgaaacattcgcccaaaagatggacgcattcatgcatgagaagaatgaggactag

SEQ ID NO: 83127 - DNA, 984 bp, Artificial Sequence
  derived and/or modified sequence
atgcccatcatccccgccttctgggaggccgaggccggcggcagcagagaggaggagttcgagaccagcctggccaacatgatcgagaagaagctggagcccctgagccaggacgaggaccagcacgccgacctgacccagagcagaagacccctgaccagctgcaccatcttcctgggctacaccagcaacctgatcagcagcggcatcagagagaccatcagatacctggtgcagcacaacatggtggacgtgctggtgaccaccgccggcggcgtggaggaggacctgatcaagtgcctggcccccacctacctgggcgagttcagcctgagaggcaaggagctgagagagaacggcatcaacagaatcggcaacctgctggtgcccaacgagaactactgcaagttcgaggactggctgatgcccatcctggaccagatggtgatggagcagaacaccgagggcgtgaagtggacccccagcaagatgatcgccagactgggcaaggagatcaacaaccccgagagcgtgtactactgggcccagaagaaccacatccccgtgttcagccccgccctgaccgacggcagcctgggcgacatgatcttcttccacagctacaagaaccccggcctggtgctggacatcgtggaggacctgagactgatcaacacccaggccatcttcgccaagtgcaccggcatgatcatcctgggcggcggcgtggtgaagcaccacatcgccaacgccaacctgatgagaaacggcgccgactacgccgtgtacatcaacaccgcccaggagttcgacggcagcgacagcggcgccagacccgacgaggccgtgagctggggcaagatcagagtggacgcccagcccgtgaaggtgtacgccgacgccagcctggtgttccccctgctggtggccgagaccttcgcccagaagatggacgccttcatgcacgagaagaacgaggactag

SEQ ID NO: 83128 - DNA, 1172 bp, Artificial Sequence
  derived and/or modified sequence
agatttgcttttcccagcggggaagggaccggatctgaaaggagatgctctctgattcctaaaagggtgggggctggctgggcgcggtggcgcatgcctataatcccagcattttgggaagccgaggcgggtggatcaagagaagaggagttcgagacaagcctggccaacatgatcgagaagaagctggaaccactgtcacaggatgaagaccagcacgcggacctgacccagagccgccgcccacttaccagctgcaccattttcctgggatatacatccaacctcatcagttcaggcatccgtgagaccattcgctaccttgtgcagcacaacatggtggacgtattggtgaccacagctggcggcgtggaggaagacctcatcaagtgcctggcgcccacatacttgggcgagtttagcctcagggggaaggagctccgggagaacgggatcaataggatcggaaacctgctggtgcccaatgagaattactgcaagtttgaggactggctgatgcccattctggaccagatggtgatggagcagaacacagagggtgtaaagtggacgccttctaagatgatcgcccggctgggcaaggagatcaacaacccagagtccgtgtattactgggcccagaagaaccacatccctgtgtttagtcccgcacttacagacggctcgctgggcgacatgatcttcttccattcctacaagaacccgggcctggtcctggacatcgttgaggacctgaggctcatcaacacacaggccatctttgccaagtgcactgggatgatcattctgggcgggggcgtggtcaagcaccacattgccaatgccaacctcatgcggaacggggccgactacgctgtttacatcaacacagcccaggagtttgatggctctgactcaggtgcccgaccagacgaggctgtctcctggggcaagatccgggtggatgcacagcccgtcaaggtctatgctgacgcctccctggtcttccccctgcttgtggctgaaacctttgcccagaagatggatgccttcatgcatgagaagaacgaggactgagcggctgcggtcccaggaaggtcttaccccctcttctatttattaatttgcagacccagcccctcccctactttttggtcagctacgtctctaga

SEQ ID NO: 83129 - protein, 425 aa, Artificial Sequence
  derived and/or modified sequence
MGSKMNLIEHSHLPTTDEFSFSENLFGVLTEQVAGPLGQNLEVEPYSQYSNVQFPQVQPQISSSSYYSNLGFYPQQPEEWYSPGIYELRRMPAETLYQGETEVAEMPVTKKPRMGASAGRIKGDELCVVCGDRASGYHYNALTCEGCKGLLTEIQCKSKRLRKNVKQHADQTVNEDSEGRDLRQVTSTTKSCREKTELTPDQQTLLHFIMDSYNKQRMPQEITNKILKEEFSAEENFLILTEMATNHVQVLVEFTKKLPGFQTLDHEDQIALLKGSAVEAMFLRSAEIFNKKLPSGHSDLLEERIRNSGISDEYITPMFSFYKSIGELKMTQEEYALLTAIVILSPDRQYIKDREAVEKLQEPLLDVLQKLCKIHQPENPQHFACLLGRLTELRTFNHHHAEMLMSWRVNDHKFTPLLCEIWDVQ

SEQ ID NO: 83130 - DNA, 1278 bp, Artificial Sequence
  derived and/or modified sequence
atgggcagtaagatgaacctgatcgagcattcacacttgcctacgaccgatgagtttagcttctcagagaatctatttggcgtgttaaccgagcaagtggccggccctcttggtcagaatctggaggtcgagccatactcccaatattccaacgtacagtttccccaagtgcagcctcaaatatcctccagttcatattatagcaacctcggtttttaccctcaacagcctgaggagtggtattcgcctggaatttatgagctaaggcgcatgcccgcagagaccctgtaccagggagaaaccgaagtcgccgagatgcccgtcaccaagaagccacgcatgggtgcctccgctggcaggatcaagggagatgagctgtgcgtggtttgcggtgatagggcctccggataccactataatgccttgacctgcgaaggctgcaaagggcttctgaccgagatacagtgcaagagcaaacgcctccggaagaacgtgaaacagcatgccgatcagaccgtgaatgaggactcagagggccgggaccttaggcaggtgaccagcacaaccaaaagttgcagggaaaagaccgaactcactcctgaccagcagacccttttacatttcataatggatagctacaacaaacagcgcatgccgcaagaaatcactaacaagattcttaaggaggaattctctgctgaagagaatttcctgatccttaccgaaatggccacgaatcatgtgcaggttctagtggaattcacaaaaaagctgcctgggtttcagaccctggatcacgaggaccaaatagctttgcttaagggatccgctgtggaagctatgtttctgcgcagcgcagagatctttaacaagaaactcccttccggtcattccgatctgctagaggaacgaatccggaactctggtatctcagacgagtatatcacccctatgttctcgttttataagagcatcggagagctgaagatgacccaggaggagtacgctctgctgacagccattgtgatcctttctcccgatcgccaatacatcaaagatcgcgaggcagtggagaaattacaggagccactgctggatgtgctgcagaagctctgcaagattcaccaacctgagaaccctcagcacttcgcgtgccttctgggtcgcctgacggaactgaggactttcaatcaccatcacgccgaaatgttaatgtcatggcgcgtgaatgatcacaagtttactcctctgctatgtgaaatctgggatgtgcaatag

SEQ ID NO: 83131 - DNA, 1633 bp, Artificial Sequence
  derived and/or modified sequence
tcacctcattgtctccccgacttatcctaatgcgaaattggattctgagcatttgtagcaaaatcgctgggatctggagaggaagactcagtccagaatcctcccagggccttgaaagtccatctctgacccaaaacaatccaaggaggtagaagacatcgtagaaggagtgaaagaagaaaagaagacttagaaacatagctcaaagtgaacactgcttctcttagtttcctggatttcttctggacatttcctcaagatgaaacttcagacactttggagttttttttgaagaccaccataaagaaagtgcatttcaattgaaaaatttggatgggatcaaaaatgaatctcattgaacattcccatttacctaccacagatgaattttctttttctgaaaatttatttggtgttttaacagaacaagtggcaggtcctctgggacagaacctggaagtggaaccatactcgcaatacagcaatgttcagtttccccaagttcaaccacagatttcctcgtcatcctattattccaacctgggtttctacccccagcagcctgaagagtggtactctcctggaatatatgaactcaggcgtatgccagctgagactctctaccagggagaaactgaggtagcagagatgcctgtaacaaagaagccccgcatgggcgcgtcagcagggaggatcaaaggggatgagctgtgtgttgtttgtggagacagagcctctggataccactataatgcactgacctgtgaggggtgtaaaggcttgttaactgaaattcagtgtaaatctaagcgactgagaaaaaatgtgaagcagcatgcagatcagaccgtgaatgaagacagtgaaggtcgtgacttgcgacaagtgacctcgacaacaaagtcatgcagggagaaaactgaactcaccccagatcaacagactcttctacattttattatggattcatataacaaacagaggatgcctcaggaaataacaaataaaattttaaaagaagaattcagtgcagaagaaaattttctcattttgacggaaatggcaaccaatcatgtacaggttcttgtagaattcacaaaaaagctaccaggatttcagactttggaccatgaagaccagattgctttgctgaaagggtctgcggttgaagctatgttccttcgttcagctgagattttcaataagaaacttccgtctgggcattctgacctattggaagaaagaattcgaaatagtggtatctctgatgaatatataacacctatgtttagtttttataaaagtattggggaactgaaaatgactcaagaggagtatgctctgcttacagcaattgttatcctgtctccagatagacaatacataaaggatagagaggcagtagagaagcttcaggagccacttcttgatgtgctacaaaagttgtgtaagattcaccagcctgaaaatcctcaacactttgcctgtctcctgggtcgcctgactgaattacggacattcaatcatcaccacgctgagatgctgatgtcatggagagtaaacgaccacaagtttaccccacttctctgtgaaatctgggacgtgcagtgatggggattacaggggaggggtc

SEQ ID NO: 83132 - DNA, 1278 bp, Artificial Sequence
  derived and/or modified sequence
atgggcagcaagatgaacctgattgagcacagccacctgcccaccacagatgagttctccttcagcgagaacctgtttggagtgctgacagagcaggtggccggccccctgggccagaacctggaggtggagccctacagccagtacagcaatgtgcagttcccccaggtgcagccccagatcagcagcagcagctactacagcaacctgggcttctacccccagcagcctgaggagtggtacagccctggcatctatgagctgcggaggatgcctgctgagaccctgtaccagggcgagacagaggtggccgagatgcctgtgaccaagaagcccaggatgggcgccagcgctggccgcatcaagggagatgagctgtgtgtggtgtgtggggaccgggccagcggctaccactacaatgccctgacctgtgagggctgcaagggcctgctgacagagatccagtgcaagagcaagaggctgaggaagaatgtgaagcagcacgccgaccagacagtgaatgaagattctgagggccgggacctgcggcaggtgaccagcaccaccaagagctgccgggagaagacagagctgaccccagaccagcagaccctgctgcacttcatcatggacagctacaacaagcagaggatgccccaggagatcaccaacaagatcctgaaggaggagttctctgctgaggagaacttcctgatcctgacagagatggccaccaaccacgtgcaggtgctggtggagttcaccaagaagctgcccggcttccagaccctggaccacgaggaccagatcgccctgctgaagggcagcgctgtggaggccatgttcctgcggtctgctgagatcttcaacaagaagctgcccagcggccacagcgacctgctggaggagcgcatccggaacagcggcatcagtgatgagtacatcacccccatgttctccttctacaagagcattggagagctgaagatgacccaggaggagtatgccctgctgacagccatcgtcatcctgagcccagaccggcagtacatcaaggaccgggaggccgtggagaagctgcaggagcccctgctggatgtgctgcagaagctgtgcaagatccaccagcctgagaacccccagcactttgcctgcctgctgggccgcctgacagagctgcggaccttcaaccaccaccacgccgagatgctgatgtcctggagggtgaatgaccacaagttcacccccctgctgtgtgagatctgggatgtgcagtag

SEQ ID NO: 83133 - DNA, 1278 bp, Artificial Sequence
  derived and/or modified sequence
atgggcagcaagatgaacctgatcgagcacagccacctgcccaccactgacgaattctcctttagcgaaaacctgtttggtgtgctcaccgagcaagtggcaggccctttagggcagaatttggaagtcgagccctactctcagtacagcaatgtgcagtttccgcaggtccagcctcaaataagctcctctagctactattccaatctgggcttctaccctcaacaacctgaagagtggtacagccctggcatctacgagctacgacggatgcctgcggaaaccctctaccagggggagactgaagtggccgagatgccagtgactaagaaaccgaggatgggtgcatctgccggtaggatcaaaggggacgagttatgtgtggtgtgcggggaccgtgcatctggttaccactacaacgctctcacctgcgagggctgcaagggactactaaccgaaattcaatgcaaaagtaaacgtctgaggaaaaatgtgaaacagcatgcagatcagactgtcaacgaggactctgagggcagagacctcagacaagtgacaagtaccacgaagtcttgccgggagaaaactgagctaaccccggaccagcagactttgctccacttcatcatggattcttataacaagcagcggatgccgcaggagattaccaataagatcctgaaggaagaattcagtgctgaggagaatttcctgatcctaacagagatggctacaaaccatgttcaggtcctggtggaatttacaaagaagctgcctggattccagaccctggaccatgaggaccagattgcactactcaaaggatccgcggtggaggccatgtttctgaggtctgccgaaatctttaataaaaaattgcccagcgggcactctgatctgctagaggaacggattcggaatagcgggatctccgacgaatacattacacctatgttctctttctataagagcattggcgaattaaaaatgacgcaggaggaatacgccctgttgactgctatcgtgatactgagcccagaccggcaatacatcaaggacagggaggccgtggaaaaactgcaagaaccactcctggacgtactgcagaaactgtgcaaaattcaccaacctgagaatccacagcattttgcgtgcctactcggccggctaactgagctgagaacatttaaccatcatcatgcagaaatgttaatgagctggcgtgttaacgaccacaaattcacacctctgctatgtgagatatgggatgtgcagtag

SEQ ID NO: 83134 - DNA, 1278 bp, Artificial Sequence
  derived and/or modified sequence
atgggtagcaaaatgaatctgatcgagcattcacacctccccaccaccgacgaatttagcttttcagagaacctatttggcgttctgaccgagcaggtggctggccctttggggcaaaaccttgaagttgagccctacagccagtatagcaatgtgcagttcccccaagtgcaaccccagatctcatctagttcatattactccaacctgggtttctatccccagcagcctgaggagtggtattcacccggaatatatgagcttaggaggatgccagctgagacactataccaaggcgagactgaggtcgctgagatgcccgtgacaaaaaagccgcgaatgggtgccagtgccggaagaatcaagggggacgaactgtgcgtcgtatgtggggacagggcgagcgggtatcactacaacgcccttacgtgcgaaggctgcaagggtttactaactgagattcagtgtaagagtaaacgcctccggaagaatgttaagcagcacgccgatcagactgtgaatgaggattccgagggccgagacctgaggcaggtcacatccaccactaaaagctgtagggagaagaccgaattaacaccagatcaacagacacttttgcactttatcatggacagctataataagcaacgaatgcctcaggaaataacgaacaaaattctgaaggaagagttctcagccgaggaaaactttctgatactgactgagatggctacaaatcatgttcaggtgttggtggaattcaccaaaaagctgcctggcttccagaccctggaccatgaagatcagatcgccctcctcaaaggttccgcagtggaagccatgtttctgagatccgccgaaatctttaacaaaaagctgcctagcgggcatagcgatctcctagaagagagaatcagaaattctggcatctccgacgaatatattacacccatgtttagcttttataaatccattggcgagcttaagatgactcaggaagagtatgccctcttaaccgccatagtgattctgtccccagatcggcagtatattaaagaccgcgaagcagtagagaaactacaggagcccctactggatgtgctgcagaaactgtgtaaaattcaccagccagagaacccgcagcactttgcttgtctactcggacgactgacagagctaagaacctttaaccaccatcacgccgaaatgctcatgagctggcgggttaatgaccataagttcacaccccttttgtgcgaaatttgggacgtccagtag

SEQ ID NO: 83135 - DNA, 1278 bp, Artificial Sequence
  derived and/or modified sequence
atgggcagcaagatgaacctgatcgagcacagccacctgcccaccaccgacgagttcagcttcagcgagaacctgttcggcgtgctgaccgagcaggtggccggccccctgggccagaacctggaggtggagccctacagccagtacagcaacgtgcagttcccccaggtgcagccccagatcagcagcagcagctactacagcaacctgggcttctacccccagcagcccgaggagtggtacagccccggcatctacgagctgagaagaatgcccgccgagaccctgtaccagggcgagaccgaggtggccgagatgcccgtgaccaagaagcccagaatgggcgccagcgccggcagaatcaagggcgacgagctgtgcgtggtgtgcggcgacagagccagcggctaccactacaacgccctgacctgcgagggctgcaagggcctgctgaccgagatccagtgcaagagcaagagactgagaaagaacgtgaagcagcacgccgaccagaccgtgaacgaggacagcgagggcagagacctgagacaggtgaccagcaccaccaagagctgcagagagaagaccgagctgacccccgaccagcagaccctgctgcacttcatcatggacagctacaacaagcagagaatgccccaggagatcaccaacaagatcctgaaggaggagttcagcgccgaggagaacttcctgatcctgaccgagatggccaccaaccacgtgcaggtgctggtggagttcaccaagaagctgcccggcttccagaccctggaccacgaggaccagatcgccctgctgaagggcagcgccgtggaggccatgttcctgagaagcgccgagatcttcaacaagaagctgcccagcggccacagcgacctgctggaggagagaatcagaaacagcggcatcagcgacgagtacatcacccccatgttcagcttctacaagagcatcggcgagctgaagatgacccaggaggagtacgccctgctgaccgccatcgtgatcctgagccccgacagacagtacatcaaggacagagaggccgtggagaagctgcaggagcccctgctggacgtgctgcagaagctgtgcaagatccaccagcccgagaacccccagcacttcgcctgcctgctgggcagactgaccgagctgagaaccttcaaccaccaccacgccgagatgctgatgagctggagagtgaacgaccacaagttcacccccctgctgtgcgagatctgggacgtgcagtag

SEQ ID NO: 83136 - protein, 476 aa, Artificial Sequence
  derived and/or modified sequence
MGSKMNLIEHSHLPTTDEFSFSENLFGVLTEQVAGPLGQNLEVEPYSQYSNVQFPQVQPQISSSSYYSNLGFYPQQPEEWYSPGIYELRRMPAETLYQGETEVAEMPVTKKPRMGASAGRIKGDELCVVCGDRASGYHYNALTCEGCKGFFRRSITKNAVYKCKNGGNCVMDMYMRRKCQECRLRKCKEMGMLAECMYTGLLTEIQCKSKRLRKNVKQHADQTVNEDSEGRDLRQVTSTTKSCREKTELTPDQQTLLHFIMDSYNKQRMPQEITNKILKEEFSAEENFLILTEMATNHVQVLVEFTKKLPGFQTLDHEDQIALLKGSAVEAMFLRSAEIFNKKLPSGHSDLLEERIRNSGISDEYITPMFSFYKSIGELKMTQEEYALLTAIVILSPDRQYIKDREAVEKLQEPLLDVLQKLCKIHQPENPQHFACLLGRLTELRTFNHHHAEMLMSWRVNDHKFTPLLCEIWDVQ

SEQ ID NO: 83137 - DNA, 1431 bp, Artificial Sequence
  derived and/or modified sequence
atgggcagcaagatgaatctcattgaacattcccatctccctacaacagatgaatttagcttcagcgaaaacctcttcggagtcctgacagagcaggtcgccgggcctctaggacagaacctcgaggtggagccctacagtcagtacagcaacgtgcaatttccccaggtgcagcctcaaatttcatcgagttcctattacagtaacctcggtttctacccgcaacaaccagaggagtggtacagtcccggaatttatgagctgcgccgcatgccagctgaaaccttatatcagggcgaaactgaagttgccgagatgcccgtaacaaagaaaccccggatgggagcgagtgccgggcggatcaaaggcgatgaattgtgcgtggtttgtggggacagggccagtggatatcattataatgccctgacatgcgaaggatgtaaaggtttttttaggcggtccattacaaaaaatgctgtgtacaagtgtaaaaacggcggtaattgtgtgatggatatgtatatgagacggaagtgccaggaatgtaggctccgcaagtgcaaggaaatgggtatgttggccgagtgcatgtacactggtttgctcacggaaatacagtgtaaaagcaaaagactaaggaaaaatgttaagcagcacgctgatcagaccgtgaacgaggatagtgagggccgggatctcaggcaggtgacaagtacgaccaagagttgtcgggagaagaccgaactgacacccgatcaacaaacactgctccacttcatcatggacagttataacaagcaaagaatgccccaggaaattacgaacaagatcctgaaagaggaattttcagcagaagaaaactttctcatcctgacagaaatggctacgaatcacgtacaggtactggtggagtttacgaagaagctccccgggttccagacactcgaccacgaagatcagatcgccctgctgaagggctccgctgtggaggctatgttcttgcgtagcgccgaaatcttcaataaaaaattaccttctggccatagtgacttactcgaggaaaggataagaaactcagggattagcgatgaatacattactccaatgttctctttttataagagcattggcgagctgaagatgacacaggaagagtacgcgctgctgaccgcaatcgttatcctgtctccggatcgacagtacattaaggatcgcgaagctgtggaaaaactgcaggaacccctgttggacgttctccaaaagctttgcaagatccatcaacccgagaaccctcagcactttgcgtgtcttctgggaagattaaccgaattacgcaccttcaaccaccatcacgctgaaatgctgatgtcgtggcgggtgaacgatcacaaatttacacccttactatgcgagatttgggacgtgcagtag

SEQ ID NO: 83138 - DNA, 1778 bp, Artificial Sequence
  derived and/or modified sequence
tcacctcattgtctccccgacttatcctaatgcgaaattggattctgagcatttgtagcaaaatcgctgggatctggagaggaagactcagtccagaatcctcccagggccttgaaagtccatctctgacccaaaacaatccaaggaggtagaagacatcgtagaaggagtgaaagaagaaaagaagacttagaaacatagctcaaagtgaacactgcttctcttagtttcctggatttcttctggacatttcctcaagatgaaacttcagacactttggagttttttttgaagaccaccataaagaaagtgcatttcaattgaaaaatttggatgggatcaaaaatgaatctcattgaacattcccatttacctaccacagatgaattttctttttctgaaaatttatttggtgttttaacagaacaagtggcaggtcctctgggacagaacctggaagtggaaccatactcgcaatacagcaatgttcagtttccccaagttcaaccacagatttcctcgtcatcctattattccaacctgggtttctacccccagcagcctgaagagtggtactctcctggaatatatgaactcaggcgtatgccagctgagactctctaccagggagaaactgaggtagcagagatgcctgtaacaaagaagccccgcatgggcgcgtcagcagggaggatcaaaggggatgagctgtgtgttgtttgtggagacagagcctctggataccactataatgcactgacctgtgaggggtgtaaaggtttcttcaggagaagcattaccaaaaacgctgtgtacaagtgtaaaaacgggggcaactgtgtgatggatatgtacatgcgaagaaagtgtcaagagtgtcgactaaggaaatgcaaagagatgggaatgttggctgaatgtatgtatacaggcttgttaactgaaattcagtgtaaatctaagcgactgagaaaaaatgtgaagcagcatgcagatcagaccgtgaatgaagacagtgaaggtcgtgacttgcgacaagtgacctcgacaacaaagtcatgcagggagaaaactgaactcaccccagatcaacagactcttctacattttattatggattcatataacaaacagaggatgcctcaggaaataacaaataaaattttaaaagaagaattcagtgcagaagaaaattttctcattttgacggaaatggcaaccaatcatgtacaggttcttgtagaattcacaaaaaagctaccaggatttcagactttggaccatgaagaccagattgctttgctgaaagggtctgcggttgaagctatgttccttcgttcagctgagattttcaataagaaacttccgtctgggcattctgacctattggaagaaagaattcgaaatagtggtatctctgatgaatatataacacctatgtttagtttttataaaagtattggggaactgaaaatgactcaagaggagtatgctctgcttacagcaattgttatcctgtctccagatagacaatacataaaggatagagaggcagtagagaagcttcaggagccacttcttgatgtgctacaaaagttgtgtaagattcaccagcctgaaaatcctcaacactttgcctgtctcctgggtcgcctgactgaattacggacattcaatcatcaccacgctgagatgctgatgtcatggagagtaaacgaccacaagtttaccccacttctctgtgaaatctgggacgtgcagtgatggggattacaggg

SEQ ID NO: 83139 - DNA, 1431 bp, Artificial Sequence
  derived and/or modified sequence
atgggcagcaagatgaacctgattgagcacagccacctgcccaccacagatgagttctccttcagcgagaacctgtttggagtgctgacagagcaggtggccggccccctgggccagaacctggaggtggagccctacagccagtacagcaatgtgcagttcccccaggtgcagccccagatcagcagcagcagctactacagcaacctgggcttctacccccagcagcctgaggagtggtacagccctggcatctatgagctgcggaggatgcctgctgagaccctgtaccagggcgagacagaggtggccgagatgcctgtgaccaagaagcccaggatgggcgccagcgctggccgcatcaagggagatgagctgtgtgtggtgtgtggggaccgggccagcggctaccactacaatgccctgacctgtgagggctgcaagggcttcttccgccgcagcatcaccaagaatgctgtgtacaagtgcaagaatggaggcaactgtgtgatggacatgtacatgaggaggaagtgccaggagtgccgcctgaggaagtgcaaggagatgggcatgctggccgagtgcatgtacacaggcctgctgacagagatccagtgcaagagcaagaggctgaggaagaatgtgaagcagcacgccgaccagacagtgaatgaagacagcgagggccgggacctgcggcaggtgaccagcaccaccaagagctgccgggagaagacagagctgaccccagaccagcagaccctgctgcacttcatcatggacagctacaacaagcagaggatgccccaggagatcaccaacaagatcctgaaggaggagttctctgctgaggagaacttcctgatcctgacagagatggccaccaaccacgtgcaggtgctggtggagttcaccaagaagctgcccggcttccagaccctggaccacgaggaccagatcgccctgctgaagggcagcgctgtggaggccatgttcctgcggtctgctgagatcttcaacaagaagctgcccagcggccacagcgacctgctggaggagcgcatcagaaattctggcatcagtgatgagtacatcacccccatgttctccttctacaagagcatcggggagctgaagatgacccaggaggagtatgccctgctgacagccatcgtcatcctgagcccagaccggcagtacatcaaggaccgggaggccgtggagaagctgcaggagcccctgctggatgtgctgcagaagctgtgcaagatccaccagcctgagaacccccagcactttgcctgcctgctgggccgcctgacagagctgcggaccttcaaccaccaccacgccgagatgctgatgtcctggagggtgaatgaccacaagttcacccccctgctgtgtgagatctgggatgtgcagtag

SEQ ID NO: 83140 - DNA, 1431 bp, Artificial Sequence
  derived and/or modified sequence
atgggcagcaagatgaacctgatcgagcacagccacctgcccaccaccgacgagtttagtttttctgagaacctattcggcgtgcttaccgagcaggtggccgggcccctcggacagaacctggaggtcgagccatactctcagtatagtaatgtgcaatttccacaagtgcaaccccaaatcagctctagctcttattactcgaatttgggattttaccctcagcagccggaggaatggtacagtcccgggatctacgagctacgacgtatgcccgccgagacgctgtatcagggtgaaactgaggttgctgaaatgcccgtcaccaaaaagcctaggatgggggcctctgctggccggataaagggggatgagttgtgcgtggtttgtggtgaccgggcctcaggctatcactacaacgccctgacatgcgaggggtgcaagggcttttttcggcgatcaattactaaaaatgccgtctataagtgtaagaacggcggaaattgcgtcatggacatgtacatgagaaggaaatgtcaggagtgccgtttgcggaagtgtaaagagatggggatgctggccgagtgcatgtacacgggcctgcttacggagatacagtgcaaatcgaaaaggctgaggaaaaatgtgaagcagcacgccgatcagacggtgaacgaagactctgaaggacgtgacctgcgtcaggtgaccagtacaacgaaatcttgcagggagaagacggagctgacccccgaccagcagacgcttttgcatttcataatggacagttataataaacagcgtatgccgcaagaaatcactaataagatccttaaggaagaattctcagccgaagagaactttctcatccttacagaaatggccacgaatcatgtgcaggtgttagtcgaattcaccaaaaagttgccagggtttcagactcttgaccacgaagaccaaatcgctctgctcaagggatctgccgtcgaagcaatgtttcttagatcagcagaaattttcaacaagaaattgccaagtgggcatagcgatctcctggaagaacgaataagaaactctgggatttccgacgaatacatcacaccgatgttcagcttctacaaatccattggggagcttaagatgacacaggaagagtacgctttactgacagcaatcgtcatcctttcccccgaccgccagtatattaaggatagggaggccgtcgagaagctgcaggaaccgttgttagatgtcttacaaaagttatgcaaaatccaccaaccagagaatccacagcactttgcctgcctgctcggccggttgaccgaactgcggacatttaaccaccaccacgcggagatgctcatgagttggcgcgtcaatgatcacaaatttactccactgctgtgtgagatctgggacgttcagtag

SEQ ID NO: 83141 - DNA, 1431 bp, Artificial Sequence
  derived and/or modified sequence
atgggctctaagatgaacttaattgaacatagccacttacctacaactgatgagttttcgttctccgagaatctgtttggggtgctaactgaacaggtcgcaggcccactcggccagaaccttgaggtagagccctattctcaatactccaatgtccaattcccacaagtgcagccacagatctctagcagttcatattactctaacctgggcttctacccgcaacagccggaagagtggtacagccccggtatctatgagcttcgccgtatgcctgccgagactctgtatcagggagaaaccgaggtggccgaaatgccagttactaaaaaacctagaatgggggcttcggccggtcggatcaagggcgatgagctatgtgtggtgtgcggggatagagcttctggctaccattacaacgctttaacttgcgagggttgcaaggggttctttagacggtccataacgaagaatgctgtctataagtgcaagaacggcggaaactgcgtgatggacatgtacatgcgaaggaagtgtcaagagtgccgacttcgcaaatgtaaggagatgggcatgctggcggaatgtatgtataccgggctgctgacggagatccagtgtaagtctaaacgccttcggaagaatgttaagcagcatgcagatcagaccgttaacgaagatagcgagggccgtgatctgaggcaagtcacctccacaaccaagtcctgcagggaaaaaactgaattgaccccagaccagcagacccttctgcattttatcatggattcttacaataagcagagaatgccccaagagatcactaataagatcctaaaggaggaatttagcgcagaggagaatttcctcatacttacggagatggccaccaatcacgtgcaagtcttggtggaatttaccaaaaagttacccggttttcagaccctggatcacgaggatcaaatagctcttcttaagggcagtgctgttgaagcgatgtttctgcgcagtgccgaaattttcaacaagaaattaccctcgggacatagtgacttgcttgaagaacggatcagaaatagcgggatctctgatgagtatatcactcctatgttctctttctacaagagcatcggagagcttaaaatgacccaagaagagtacgccttgctgacggctattgtcatcctgagccccgatcgtcaatatatcaaggatagagaggctgtcgagaagcttcaagagcccctgctagacgtcttacagaagctgtgtaagattcaccagccggaaaacccgcaacattttgcttgcctactagggagactgacagagctccgaacttttaatcaccaccatgcagaaatgctcatgagctggagggtgaatgaccacaagttcacaccactgctgtgcgagatttgggatgtgcaatag

SEQ ID NO: 83142 - DNA, 1431 bp, Artificial Sequence
  derived and/or modified sequence
atgggcagcaagatgaacctgatcgagcacagccacctgcccaccaccgacgagttcagcttcagcgagaacctgttcggcgtgctgaccgagcaggtggccggccccctgggccagaacctggaggtggagccctacagccagtacagcaacgtgcagttcccccaggtgcagccccagatcagcagcagcagctactacagcaacctgggcttctacccccagcagcccgaggagtggtacagccccggcatctacgagctgagaagaatgcccgccgagaccctgtaccagggcgagaccgaggtggccgagatgcccgtgaccaagaagcccagaatgggcgccagcgccggcagaatcaagggcgacgagctgtgcgtggtgtgcggcgacagagccagcggctaccactacaacgccctgacctgcgagggctgcaagggcttcttcagaagaagcatcaccaagaacgccgtgtacaagtgcaagaacggcggcaactgcgtgatggacatgtacatgagaagaaagtgccaggagtgcagactgagaaagtgcaaggagatgggcatgctggccgagtgcatgtacaccggcctgctgaccgagatccagtgcaagagcaagagactgagaaagaacgtgaagcagcacgccgaccagaccgtgaacgaggacagcgagggcagagacctgagacaggtgaccagcaccaccaagagctgcagagagaagaccgagctgacccccgaccagcagaccctgctgcacttcatcatggacagctacaacaagcagagaatgccccaggagatcaccaacaagatcctgaaggaggagttcagcgccgaggagaacttcctgatcctgaccgagatggccaccaaccacgtgcaggtgctggtggagttcaccaagaagctgcccggcttccagaccctggaccacgaggaccagatcgccctgctgaagggcagcgccgtggaggccatgttcctgagaagcgccgagatcttcaacaagaagctgcccagcggccacagcgacctgctggaggagagaatcagaaacagcggcatcagcgacgagtacatcacccccatgttcagcttctacaagagcatcggcgagctgaagatgacccaggaggagtacgccctgctgaccgccatcgtgatcctgagccccgacagacagtacatcaaggacagagaggccgtggagaagctgcaggagcccctgctggacgtgctgcagaagctgtgcaagatccaccagcccgagaacccccagcacttcgcctgcctgctgggcagactgaccgagctgagaaccttcaaccaccaccacgccgagatgctgatgagctggagagtgaacgaccacaagttcacccccctgctgtgcgagatctgggacgtgcagtag

SEQ ID NO: 83143 - protein, 176 aa, Artificial Sequence
  derived and/or modified sequence
MARRHCFSYWLLVCWLVVTVAEALSTFYLQQHINLHMDKKRYLRLLEIHKIMRTLPTARSLHSPLHLPRGVRSQGPSPSQRHPGVPSIFFHEGPESILGFQTDLSSLQGVTTVFHSSHFIGHTVTLLIGISPEEDSREEAHLRKAEREEKPKHTEAKKSLSFRKKQQKDFCFIFRN

SEQ ID NO: 83144 - DNA, 531 bp, Artificial Sequence
  derived and/or modified sequence
atggctaggcgacattgcttttcctactggttgctggtgtgttggttagtagtgactgtggctgaggccttatctaccttttacttgcaacaacacatcaatctgcatatggataaaaagcgctatctgcgccttttggagattcacaaaatcatgcggacactcccaactgctcgatcgctgcattctcccttacatctacccaggggcgttcgtagccaaggcccatcgccaagtcagcgacatccgggagtccctagcattttctttcacgagggacctgaaagtatactggggtttcagactgacctaagctctctgcagggagtgactacggtgttccatagttcccattttattggccataccgtgacattgttgattggaatatcccctgaggaagattctagagaggaggcacatctacggaaagcggaacgcgaagagaagccaaagcacacagaggccaagaagtctctgagcttccgaaagaaacagcaaaaggacttctgctttatcttcaggaattag

SEQ ID NO: 83145 - DNA, 560 bp, Artificial Sequence
  derived and/or modified sequence
gactgctcagtagaagccatggctcgcagacactgcttctcctactggttactggtatgctggttggtggtaactgtggcagaagcactgtccactttctatctccagcagcatattaatttgcacatggacaagaagaggtatttacgcctcctggagattcacaaaataatgcggacgctaccgactgccagatctttacactcacccctccacctgccccgaggagtccggtcacaagggcccagcccatcacaaagacacccaggtgtcccttccatttttttccacgaaggcccagaatccattttaggtttccaaacagacctttcgtcccttcaaggtgtaaccaccgttttccattccagccattttattggccacaccgttaccttacttataggtatttccccagaagaagactccagagaggaagctcatctgaggaaagctgagagggaagagaaacccaaacatactgaagcaaaaaaaagcctatccttcagaaaaaagcaacaaaaagatttctgttttatctttcgaaactaaaactattggat

SEQ ID NO: 83146 - DNA, 531 bp, Artificial Sequence
  derived and/or modified sequence
atggcacgacgtcactgcttttcctactggttattggtttgttggcttgtcgtcacagtggccgaagccttatcaacattttatctccaacaacacattaaccttcacatggacaaaaaacgctatctgaggctcctcgagatccacaagattatgcgtaccctgcctacagccaggagcctacactccccacttcacctcccccggggcgttcgatcgcagggaccttcacccagccagcggcaccctggagtacccagcattttcttccacgagggccccgaatctattctcggttttcagaccgatctttctagtctgcagggcgtgactactgttttccattccagtcactttatcgggcatactgtaacgctactgatcggcattagccctgaggaggatagtcgcgaggaggcccatctcagaaaggccgagcgtgaggagaaacccaagcacacagaggcaaaaaaaagcttatccttccgcaaaaaacaacagaaagacttttgcttcatcttccgaaactag

SEQ ID NO: 83147 - DNA, 531 bp, Artificial Sequence
  derived and/or modified sequence
atggcacggagacattgcttctcttactggcttctcgtgtgctggctggtcgttaccgtggccgaagccctctctaccttttatctgcagcagcacatcaatctgcacatggacaaaaagcgttatctgcgactgctggaaatccacaaaatcatgaggactctgcccactgcccgctcgcttcactcacctttacatctgccccgtggagtgcgatctcaaggaccatctcctagccaacgtcaccctggtgtccctagcatattttttcacgaagggcccgagtccatcttaggcttccaaacagacctgagttctttacagggagttaccaccgtatttcatagctcacatttcattggccacaccgttacgctcctcataggtatttcacctgaggaagactctcgcgaagaagcccacctgcgcaaagctgaacgagaggaaaaaccaaagcataccgaagccaagaagtcactctcatttcgtaagaaacagcagaaggatttttgctttatttttcgcaattag

SEQ ID NO: 83148 - DNA, 1874 bp, Artificial Sequence
  derived and/or modified sequence
atcaggttcaacgcagtgactgctcagtagaagccatggctcgcagacactgcttctcctactggttactggtatgctggttggtggtaactgtggcagaaggacaagaagaggtatttacgcctcctggagattcacaaaataatgcggacgctaccgactgccagatctttacactcacccctccacctgccccgaggagtccggtcacaagggcccagcccatcacaaagacacccaggtgtcccttccatttttttccacgaaggcccagaatccattttaggtttccaaacagacctttcgtcccttcaaggtgtaaccaccgttttccattccagccattttattggccacaccgttaccttacttataggtatttccccagaagaagactccagagaggaagctcatctgaggaaagctgagagggaagagaaacccaaacatactgaagcaaaaaaaagcctatccttcagaaaaaagcaacaaaaagatttctgttttatctttcgaaactaaaactattggatttgaagattaagtatcctaaacatcactgactagaaactgttctctttgtcagcagtgaagatattggatcataggttattgatggttgcaaaattggacaataaccacgttatttttatcctcaacctcttatggtcacaggatatttatgcaaataaaatctttaaatgggtggctctagtaattcctatccatactaagatgctgagagaatccatctcctcctctaaattaaacaggatttaaataaattgagatcattataaaccacacgaagaaactgatgacaccgtttttatactcattggaaaacatacagagcaaggtgcattgacaaagtaaactttaaaagaaattataaagcttaaagcaattaaaaagttatgaggagtctgactgtagctaatactttaaagatataaactgacttgtctaacccaaataataataattattattattttcttggagacagaatttcactcttgttacccaggctggagtttagtggtgctgtctcggctcactgcaacctctgcctcccgggttcaagcaattctcttgcctcagcctcccaagtagctgggattataggtgctcgctaccaagcctggccaattttttgtatttttagtagagatggggtttcaccatgttggccaggctggtctcgaactcctgacctcaggtgatccacccacctcggcctcccagagtgctgggattacaggcatgagtcactgcgcccagccccaaataattacttttaaactatagtatctaaatttactttaatgttgacttcaactgatgcaaattaatttgataattttctcactgtttcccgttatcattacatagatgctggctaaaataatatacttcctctcaaacttttaacgtaattccaggttcaaaatgcctgattaaactgctacaagaatattctggtacctctagaactccacagagataagttcactcaactcttggaaccttgtattctcagggtgcaatatgagaaacaaatcccacagattgcattgattggttatttgttttggccactctgtaaaacacatcttcctgtttatgccacttatcttgcctgtaacataagaactttagttctgcatatgtggtcagtggtttgcactttttcctcccaagatctacatgcaaaagttgctgttgctgctgctgctacaaaaacagaaaaaaaaaaatcaggatgaagacatgaaaggactttgggaatggttgccctaaaaaaggaaagagagataaaatcatcatgctatgtttctttgctttattaaaatgatcaaaaaagaaaaaaa

SEQ ID NO: 83149 - DNA, 531 bp, Artificial Sequence
  derived and/or modified sequence
atggccagaagacactgcttcagctactggctgctggtgtgctggctggtggtgaccgtggccgaggccctgagcaccttctacctgcagcagcacatcaacctgcacatggacaagaagagatacctgagactgctggagatccacaagatcatgagaaccctgcccaccgccagaagcctgcacagccccctgcacctgcccagaggcgtgagaagccagggccccagccccagccagagacaccccggcgtgcccagcatcttcttccacgagggccccgagagcatcctgggcttccagaccgacctgagcagcctgcagggcgtgaccaccgtgttccacagcagccacttcatcggccacaccgtgaccctgctgatcggcatcagccccgaggaggacagcagagaggaggcccacctgagaaaggccgagagagaggagaagcccaagcacaccgaggccaagaagagcctgagcttcagaaagaagcagcagaaggacttctgcttcatcttcagaaactag

SEQ ID NO: 83150 - DNA, 531 bp, Artificial Sequence
  derived and/or modified sequence
atggcccgaagacattgtttttcttactggctgctcgtgtgttggctcgtcgtgacagttgcggaggctctgtctacgttttatctccagcagcatattaatctacacatggataagaagcggtatctgcggctcctggaaatccataagattatgcgaacactgcctacagccagaagcctccattcccctttgcacttaccccggggagttagaagccaggggcctagtccctcccagcgccacccaggggtgccctccatatttttccacgaaggaccggagagtattctgggttttcagacagacctctccagtctgcagggcgtcacgaccgtcttccattcatcgcactttatcggccacactgtgaccctgctgatcggtatctctccagaagaggactcacgagaggaggcccatctccgcaaagccgagcgagaggaaaagcctaaacatactgaggcaaaaaagtccctgtcgttccgtaaaaaacagcaaaaggacttttgttttatttttcggaactag

SEQ ID NO: 83151 - DNA, 531 bp, Artificial Sequence
  derived and/or modified sequence
atggcccggcggcactgcttctcctactggctgctggtgtgctggctggtggtgacagtggccgaggccctgagcaccttctacctgcagcagcacatcaacctgcacatggacaagaagcgctacctgcggctgctggagatccacaagatcatgaggaccctgcccacagcccggagcctgcacagccccctgcacctgccccggggcgtgcgcagccagggccccagccccagccagaggcaccctggggtgcccagcatcttcttccacgagggccctgagagcatcctgggcttccagacagacctgagcagcctgcagggcgtgaccaccgtcttccacagcagccacttcatcggccacacagtgaccctgctgattggcatcagccctgaggaggacagccgggaggaggcccacctgaggaaggccgagcgggaggagaagcccaagcacacagaggccaagaagagcctgtccttcaggaagaagcagcagaaggacttctgcttcatcttcagaaattag

SEQ ID NO: 83152 - DNA, 531 bp, Artificial Sequence
  derived and/or modified sequence
atggcccggcggcactgcttcagctactggctgctggtgtgctggttggtcgtgacagtcgcagaggccctatcaactttttacctacaacagcacattaatttgcatatggacaagaaacgctacctccgactgctggagatacacaaaataatgagaaccttgccaaccgctcgatccctgcacagccccctccacctcccccgtggcgtgagatcacagggtccttcccccagtcaacggcatcccggcgttccgtctatatttttccatgagggacctgaaagcattttggggtttcagactgacttgtcatcactccagggggtcactacagtgtttcacagctctcactttattggccataccgttacattactgattggtattagccccgaggaggatagccgagaggaggcacacctacgcaaagccgaacgagaggagaagccaaaacatacagaggccaaaaaatctttgtcctttcggaagaaacagcaaaaagacttttgctttatctttcggaattag

SEQ ID NO: 83153 - DNA, 1506 bp, Artificial Sequence
  derived and/or modified sequence
atggacgagaataacggacttcttctgctggagctgaatcctccgaacccatgggacctgcaacccaggagcccagaagagctcgccttcggagaggtgcagataacttatctaactcacgcttgtatggacctgaaactcggggataagcggatggtgttcgacccgtggctcatcggaccagcatttgctcggggttggtggctgctccacgagcccccttctgattggctagagcgcctatgccaggcagacctcatatacatctctcacctgcacagcgatcatctgagctaccccacactgaagaagctggctggacgtaggccagacatacccatctacgttggcaacaccgagcgccctgtattttggaatctaaaccagagcggtgtgcagctgactaatataaacgtcgtaccattcggaatctggcaacaagttgataaaaatttgagatttatgatactaatggacggagtccatcccgaaatggacacctgcatcatagtggaatacaagggccacaaaattttaaacatcgtcgactgcacccgacccaacggaggacgcctgcccatgaaagttgctttgatgatgtccgatttcgccggaggtgccagcgggttccctatgactttttctggagggaaattcactgaggaatggaaagcccagtttatcaaaacagaaaggaagaagctcctgaactacaaggcgaggttggtaaagaacctacagcccaggatttactgcccgttcgccggatactttgtcgaatcccacccaagtgataagtacattaaagagacaaacacaaaaaatgacccgaacgagctaaataacctgatcaaaaagaacagcgacgtgatcacctggactccacggccaggagccaccctggacctgggtagaatgcttaaagaccgcaccgacagcaaggggattattgagccccctgaaggcaccaaaatctataaggattcatgggacttcgagccctacctagagatcctcaacgcagcattgggtgacgaaatttttctgcattcatcttggatcaaagagtattttacctgggcgggtttcaaagactacaatttagttgtgaggatgattgaaacagacgaggatttcaatccctttccaggagggtacgactatctcgtggattttctcgatctttccttccctaaagagaggccacagagagaacacccctacgaggagattcattcacgcgtggatgtgatccgccacgttgtgaaaaacggtctcctgtgggatgagctgtatatcggcttccaaacacgtctccagcgtgatcccgatatatatcaccacctattctggaatcatttccagatcaaactgcccttgactccacccaattggaagagtttcctgatgtgttgtgagcaaaatggtcccgtgattttgcaattctcaactgaacgtactaacgaaccaaacaggaacaaattctcagtcgaaaacaaagcttag

SEQ ID NO: 83154 - RNA, 531 nt, Artificial Sequence
  derived and/or modified sequence
auggcacgacgucacugcuuuuccuacugguuauugguuuguuggcuugucgucacaguggccgaagccuuaucaacauuuuaucuccaacaacacauuaaccuucacauggacaaaaaacgcuaucugaggcuccucgagauccacaagauuaugcguacccugccuacagccaggagccuacacuccccacuucaccucccccggggcguucgaucgcagggaccuucacccagccagcggcacccuggaguacccagcauuuucuuccacgagggccccgaaucuauucucgguuuucagaccgaucuuucuagucugcagggcgugacuacuguuuuccauuccagucacuuuaucgggcauacuguaacgcuacugaucggcauuagcccugaggaggauagucgcgaggaggcccaucucagaaaggccgagcgugaggagaaacccaagcacacagaggcaaaaaaaagcuuauccuuccgcaaaaaacaacagaaagacuuuugcuucaucuuccgaaacuag

SEQ ID NO: 83155 - RNA, 531 nt, Artificial Sequence
  derived and/or modified sequence
auggcacggagacauugcuucucuuacuggcuucucgugugcuggcuggucguuaccguggccgaagcccucucuaccuuuuaucugcagcagcacaucaaucugcacauggacaaaaagcguuaucugcgacugcuggaaauccacaaaaucaugaggacucugcccacugcccgcucgcuucacucaccuuuacaucugccccguggagugcgaucucaaggaccaucuccuagccaacgucacccuggugucccuagcauauuuuuucacgaagggcccgaguccaucuuaggcuuccaaacagaccugaguucuuuacagggaguuaccaccguauuucauagcucacauuucauuggccacaccguuacgcuccucauagguauuucaccugaggaagacucucgcgaagaagcccaccugcgcaaagcugaacgagaggaaaaaccaaagcauaccgaagccaagaagucacucucauuucguaagaaacagcagaaggauuuuugcuuuauuuuucgcaauuag

SEQ ID NO: 83156 - protein, 482 aa, Artificial Sequence
  derived and/or modified sequence
MVMQFQGLENPIQISPHCSCTPSGFFMEMMSMKPAKGVLTEQVAGPLGQNLEVEPYSQYSNVQFPQVQPQISSSSYYSNLGFYPQQPEEWYSPGIYELRRMPAETLYQGETEVAEMPVTKKPRMGASAGRIKGDELCVVCGDRASGYHYNALTCEGCKGFFRRSITKNAVYKCKNGGNCVMDMYMRRKCQECRLRKCKEMGMLAECLLTEIQCKSKRLRKNVKQHADQTVNEDSEGRDLRQVTSTTKSCREKTELTPDQQTLLHFIMDSYNKQRMPQEITNKILKEEFSAEENFLILTEMATNHVQVLVEFTKKLPGFQTLDHEDQIALLKGSAVEAMFLRSAEIFNKKLPSGHSDLLEERIRNSGISDEYITPMFSFYKSIGELKMTQEEYALLTAIVILSPDRQYIKDREAVEKLQEPLLDVLQKLCKIHQPENPQHFACLLGRLTELRTFNHHHAEMLMSWRVNDHKFTPLLCEIWDVQ

SEQ ID NO: 83157 - DNA, 1449 bp, Artificial Sequence
  derived and/or modified sequence
atggtcatgcagtttcaaggccttgaaaaccctatacagatctccccacattgcagctgcacaccgagtggtttcttcatggaaatgatgtctatgaaaccagccaaaggggtgctaaccgagcaagtcgccggtccccttggccagaatttggaggtcgaaccgtactcacaatactctaacgtgcagtttccccaggtgcagccacagatcagttcgagcagctactatagtaaccttggtttctatccgcagcaaccagaggagtggtacagtcctggaatatacgaattaagaagaatgcctgcggaaacactgtatcagggggaaaccgaggtcgctgaaatgccagtcaccaaaaagccccgtatgggtgcatctgcaggtcggattaaaggtgatgagctatgtgtcgtgtgcggcgatcgggcctctggctatcactacaacgctttgacatgtgaaggctgtaaaggtttctttagacgctctataaccaaaaatgccgtgtacaagtgtaaaaatggaggcaactgcgtgatggatatgtatatgcgccgcaaatgccaggagtgcaggcttcgcaaatgcaaggaaatgggaatgttagcggagtgcctcctcacggagatccagtgcaaatccaaaaggctgcggaagaatgtaaaacagcacgcagaccaaaccgtgaacgaggacagtgaggggagagatctgcgtcaggtgacatcaaccaccaaaagctgtcgcgagaaaaccgagttgaccccggaccagcagactttgctgcacttcatcatggattcatataataagcagagaatgccacaggagattaccaacaagattctgaaagaagaattttcagccgaggaaaactttttgatcttgacagagatggcgacaaaccatgtgcaggtgctggtcgagttcaccaaaaagctgcctggattccagaccctcgaccatgaagaccagatagccctcctgaagggctctgccgtagaagccatgtttctccggagcgcagaaatcttcaacaaaaagcttcccagtggccactcggacctcctggaggaaaggattaggaacagcggtattagtgatgagtacataaccccgatgttttcattctataagtccataggggaactcaagatgacacaggaggaatatgcccttctcactgcgatcgtaattcttagtcccgatcgtcagtacatcaaagatcgggaggccgttgaaaaactgcaggagcccctcctcgacgtgttgcagaagttgtgtaagatccaccagcccgagaacccccagcattttgcgtgcctgcttggtaggctgacagaactcaggacctttaaccatcatcatgctgagatgttaatgtcctggagagtgaacgatcataaatttacccctctcctatgtgaaatctgggatgtccagtag

SEQ ID NO: 83158 - DNA, 1630 bp, Artificial Sequence
  derived and/or modified sequence
attttcagtggctgtgaataagctaagaatggtaatgcagtttcaggggttagaaaatccaattcaaattagtcctcactgcagctgtacgccgtcaggatttttcatggaaatgatgagtatgaagcccgcgaaaggtgttttaacagaacaagtggcaggtcctctgggacagaacctggaagtggaaccatactcgcaatacagcaatgttcagtttccccaagttcaaccacagatttcctcgtcatcctattattccaacctgggtttctacccccagcagcctgaagagtggtactctcctggaatatatgaactcaggcgtatgccagctgagactctctaccagggagaaactgaggtagcagagatgcctgtaacaaagaagccccgcatgggcgcgtcagcagggaggatcaaaggggatgagctgtgtgttgtttgtggagacagagcctctggataccactataatgcactgacctgtgaggggtgtaaaggtttcttcaggagaagcattaccaaaaacgctgtgtacaagtgtaaaaacgggggcaactgtgtgatggatatgtacatgcgaagaaagtgtcaagagtgtcgactaaggaaatgcaaagagatgggaatgttggctgaatgcttgttaactgaaattcagtgtaaatctaagcgactgagaaaaaatgtgaagcagcatgcagatcagaccgtgaatgaagacagtgaaggtcgtgacttgcgacaagtgacctcgacaacaaagtcatgcagggagaaaactgaactcaccccagatcaacagactcttctacattttattatggattcatataacaaacagaggatgcctcaggaaataacaaataaaattttaaaagaagaattcagtgcagaagaaaattttctcattttgacggaaatggcaaccaatcatgtacaggttcttgtagaattcacaaaaaagctaccaggatttcagactttggaccatgaagaccagattgctttgctgaaagggtctgcggttgaagctatgttccttcgttcagctgagattttcaataagaaacttccgtctgggcattctgacctattggaagaaagaattcgaaatagtggtatctctgatgaatatataacacctatgtttagtttttataaaagtattggggaactgaaaatgactcaagaggagtatgctctgcttacagcaattgttatcctgtctccagatagacaatacataaaggatagagaggcagtagagaagcttcaggagccacttcttgatgtgctacaaaagttgtgtaagattcaccagcctgaaaatcctcaacactttgcctgtctcctgggtcgcctgactgaattacggacattcaatcatcaccacgctgagatgctgatgtcatggagagtaaacgaccacaagtttaccccacttctctgtgaaatctgggacgtgcagtgatggggattacaggggaggggtctagctcctttttctctctcatattaatctgatgtataactttcctttatttcacttgtacccagtttcactcaagaaatcttgatgaatatttatgttgtaattacatgtgtaacttccacaactgtaaat

SEQ ID NO: 83159 - DNA, 1449 bp, Artificial Sequence
  derived and/or modified sequence
atggtgatgcagttccagggcctggagaaccccatccagatcagcccccactgcagctgcaccccatctggcttcttcatggagatgatgtccatgaagccagccaagggcgtgctgacagagcaggtggccggccccctgggccagaacctggaggtggagccctacagccagtacagcaatgtgcagttcccccaggtgcagccccagatcagcagcagcagctactacagcaacctgggcttctacccccagcagcctgaggagtggtacagccctggcatctatgagctgcggaggatgcctgctgagaccctgtaccagggcgagacagaggtggccgagatgcctgtgaccaagaagcccaggatgggcgccagcgctggccgcatcaagggagatgagctgtgtgtggtgtgtggggaccgggccagcggctaccactacaatgccctgacctgtgagggctgcaagggcttcttccgccgcagcatcaccaagaatgctgtgtacaagtgcaagaatggaggcaactgtgtgatggacatgtacatgaggaggaagtgccaggagtgccgcctgaggaagtgcaaggagatgggcatgctggctgaatgtctgctgacagagatccagtgcaagagcaagaggctgaggaagaatgtgaagcagcacgccgaccagacagtgaatgaagacagcgagggccgggacctgcggcaggtgaccagcaccaccaagagctgccgggagaagacagagctgaccccagaccagcagaccctgctgcacttcatcatggacagctacaacaagcagaggatgccccaggagatcaccaacaagatcctgaaggaggagttctctgctgaggagaacttcctgatcctgacagagatggccaccaaccacgtgcaggtgctggtggagttcaccaagaagctgcccggcttccagaccctggaccacgaggaccagatcgccctgctgaagggcagcgctgtggaggccatgttcctgcggtctgctgagatcttcaacaagaagctgcccagcggccacagcgacctgctggaggagcgcatcagaaattctggcatcagtgatgagtacatcacccccatgttctccttctacaagagcatcggggagctgaagatgacccaggaggagtatgccctgctgacagccatcgtcatcctgagcccagaccggcagtacatcaaggaccgggaggccgtggagaagctgcaggagcccctgctggatgtgctgcagaagctgtgcaagatccaccagcctgagaacccccagcactttgcctgcctgctgggccgcctgacagagctgcggaccttcaaccaccaccacgccgagatgctgatgtcctggagggtgaatgaccacaagttcacccccctgctgtgtgagatctgggatgtgcagtag

SEQ ID NO: 83160 - DNA, 1449 bp, Artificial Sequence
  derived and/or modified sequence
atggtgatgcagttccagggcctggagaaccccatccagatcagcccacattgttcatgtacaccatctggattcttcatggagatgatgtctatgaagccagccaagggggtcctaacagaacaggttgcggggcccctgggccagaatctggaggttgaaccttactcccaatattcgaacgtgcagtttccccaggtgcaaccacagatctccagctccagttattacagcaacctcggtttttaccctcagcaaccagaggagtggtattcgcctggaatttatgaattacggagaatgccggcagagacgctataccagggagaaactgaggtggccgagatgcctgtcaccaaaaagccacgcatgggcgcaagcgcgggtcgaataaagggagacgagctgtgtgtggtatgtggagatcgagcctctggctatcactacaatgcgctgacatgtgaaggctgtaaagggttctttagaagaagcattacgaagaacgctgtatataaatgtaagaacggcggcaactgcgtaatggacatgtacatgcggagaaaatgccaagagtgccgactgagaaagtgtaaagagatggggatgctggcagaatgcctacttactgaaatccagtgcaagagtaagaggttgaggaagaacgtgaaacagcacgccgaccaaaccgtgaacgaggatagcgagggacgagatctacggcaggttacgtctacaaccaaaagctgtcgtgagaagaccgaactgactcctgaccagcagacattactgcattttatcatggattcctataacaaacagagaatgccacaggaaataacaaacaagatcttgaaggaggagttttcagcagaagaaaattttctgattctgactgaaatggccacaaaccacgtgcaggtgctagtcgagtttacgaagaaactccctggctttcagaccctggatcatgaggatcagatagcacttcttaaaggatctgcagtggaggccatgtttcttaggagcgcagagatattcaacaaaaagcttcccagcgggcactcggatctcctggaggagcgcataagaaattccgggatcagcgatgaatatatcacccccatgttttcattctacaagagcattggcgagctgaaaatgacccaggaggagtatgctctgctgacggccattgttatcctctctcccgacagacagtacattaaggacagggaggcagtggaaaaactccaggaacctctgctcgacgtgttgcagaaactgtgtaaaattcaccagcctgaaaatcctcaacatttcgcttgcttgctggggcgtctgacagaactgcgaaccttcaaccaccatcacgccgaaatgcttatgtcgtggagagtcaatgatcacaagttcacccccttattgtgcgagatttgggacgttcagtag

SEQ ID NO: 83161 - DNA, 1449 bp, Artificial Sequence
  derived and/or modified sequence
atggtaatgcagttccaggggcttgaaaaccctattcaaatctctcctcactgtagctgcactccttcggggttcttcatggagatgatgagtatgaaacccgctaaaggggtgctcaccgagcaggtggccggacccttggggcagaaccttgaggtggagccctattcccagtacagcaacgttcagtttccccaggtgcagcctcagatctccagcagcagctattatagcaacctggggttctacccccagcagcctgaggagtggtatagtccaggcatctatgagttgcgaagaatgcccgcagagactctttaccagggcgagacagaagtggctgaaatgccagtgactaagaaaccacggatgggagcctctgcagggaggatcaagggagatgaactgtgcgtggtgtgtggcgaccgtgcatcaggataccattataatgcccttacctgcgaaggctgcaaggggtttttcaggaggtctatcaccaagaacgccgtgtacaagtgtaagaatggcggaaactgcgtaatggatatgtacatgcgcagaaagtgtcaagaatgtcgactgagaaagtgtaaagagatgggtatgctagccgaatgtctcctgactgagattcagtgcaaatcaaaaaggctgagaaaaaatgtcaagcagcatgccgaccagactgtgaatgaagactccgagggaagagacctccggcaagtgacttcgaccacaaaatcctgcagggaaaagaccgagctcacacctgaccagcaaaccctcctccatttcatcatggattcgtacaacaagcagagaatgccccaggaaatcacaaacaagattctcaaggaagagttctcagctgaagaaaacttcctcatattgaccgaaatggctacaaaccatgtgcaggtcctggttgagttcactaaaaagcttccaggattccagacgcttgaccacgaggatcaaattgctctgctcaaaggctcggcagtggaagcaatgtttctgcgatcagctgagattttcaacaaaaagttgcccagcggccactctgaccttctggaagaacgcatcagaaatagtggcatctctgacgaatatatcacccccatgttctctttttacaagtcgatcggcgagctgaaaatgacgcaagaggaatatgctcttcttactgctatcgtcattctgagtcccgacagacagtacattaaagatcgagaggccgtcgagaaactccaggagcccttattggacgtgttgcagaaattgtgcaagatccaccaacccgagaatccccaacacttcgcctgcttactcggcagattgaccgagttgcgcactttcaatcaccaccatgccgagatgcttatgtcatggcgggtgaatgatcacaagtttaccccactgctgtgcgaaatctgggatgtacagtag

SEQ ID NO: 83162 - DNA, 1449 bp, Artificial Sequence
  derived and/or modified sequence
atggtgatgcagttccagggcctggagaaccccatccagatcagcccccactgcagctgcacccccagcggcttcttcatggagatgatgagcatgaagcccgccaagggcgtgctgaccgagcaggtggccggccccctgggccagaacctggaggtggagccctacagccagtacagcaacgtgcagttcccccaggtgcagccccagatcagcagcagcagctactacagcaacctgggcttctacccccagcagcccgaggagtggtacagccccggcatctacgagctgagaagaatgcccgccgagaccctgtaccagggcgagaccgaggtggccgagatgcccgtgaccaagaagcccagaatgggcgccagcgccggcagaatcaagggcgacgagctgtgcgtggtgtgcggcgacagagccagcggctaccactacaacgccctgacctgcgagggctgcaagggcttcttcagaagaagcatcaccaagaacgccgtgtacaagtgcaagaacggcggcaactgcgtgatggacatgtacatgagaagaaagtgccaggagtgcagactgagaaagtgcaaggagatgggcatgctggccgagtgcctgctgaccgagatccagtgcaagagcaagagactgagaaagaacgtgaagcagcacgccgaccagaccgtgaacgaggacagcgagggcagagacctgagacaggtgaccagcaccaccaagagctgcagagagaagaccgagctgacccccgaccagcagaccctgctgcacttcatcatggacagctacaacaagcagagaatgccccaggagatcaccaacaagatcctgaaggaggagttcagcgccgaggagaacttcctgatcctgaccgagatggccaccaaccacgtgcaggtgctggtggagttcaccaagaagctgcccggcttccagaccctggaccacgaggaccagatcgccctgctgaagggcagcgccgtggaggccatgttcctgagaagcgccgagatcttcaacaagaagctgcccagcggccacagcgacctgctggaggagagaatcagaaacagcggcatcagcgacgagtacatcacccccatgttcagcttctacaagagcatcggcgagctgaagatgacccaggaggagtacgccctgctgaccgccatcgtgatcctgagccccgacagacagtacatcaaggacagagaggccgtggagaagctgcaggagcccctgctggacgtgctgcagaagctgtgcaagatccaccagcccgagaacccccagcacttcgcctgcctgctgggcagactgaccgagctgagaaccttcaaccaccaccacgccgagatgctgatgagctggagagtgaacgaccacaagttcacccccctgctgtgcgagatctgggacgtgcagtag

SEQ ID NO: 83163 - protein, 486 aa, Artificial Sequence
  derived and/or modified sequence
MVMQFQGLENPIQISPHCSCTPSGFFMEMMSMKPAKGVLTEQVAGPLGQNLEVEPYSQYSNVQFPQVQPQISSSSYYSNLGFYPQQPEEWYSPGIYELRRMPAETLYQGETEVAEMPVTKKPRMGASAGRIKGDELCVVCGDRASGYHYNALTCEGCKGFFRRSITKNAVYKCKNGGNCVMDMYMRRKCQECRLRKCKEMGMLAECMYTGLLTEIQCKSKRLRKNVKQHADQTVNEDSEGRDLRQVTSTTKSCREKTELTPDQQTLLHFIMDSYNKQRMPQEITNKILKEEFSAEENFLILTEMATNHVQVLVEFTKKLPGFQTLDHEDQIALLKGSAVEAMFLRSAEIFNKKLPSGHSDLLEERIRNSGISDEYITPMFSFYKSIGELKMTQEEYALLTAIVILSPDRQYIKDREAVEKLQEPLLDVLQKLCKIHQPENPQHFACLLGRLTELRTFNHHHAEMLMSWRVNDHKFTPLLCEIWDVQ

SEQ ID NO: 83164 - DNA, 1461 bp, Artificial Sequence
  derived and/or modified sequence
atggtaatgcagtttcaggggctggaaaatcctatccaaatctctccacattgcagctgtacacccagtgggttcttcatggagatgatgtcaatgaagccggcaaagggagtattgacagagcaagtcgcaggacccttgggccaaaaccttgaagtggagccatactctcaatattctaacgtccagttcccccaggttcagcctcaaatcagtagttcctcatactatagtaacttgggattctatccacaacagccggaggagtggtacagtccaggtatctacgagctgcggcgtatgcccgccgagacgctataccagggcgaaaccgaggtggcagaaatgcctgtaacaaaaaagccccggatgggcgcttctgccggaaggatcaaaggtgatgaactgtgcgtggtgtgtggtgatagagcatccggctaccattataacgctctgacctgtgaagggtgcaaaggcttttttcgtaggtccatcaccaaaaatgcagtttacaagtgtaaaaacggcggtaattgcgtcatggacatgtatatgcgtcgcaaatgtcaggagtgtcgacttcggaaatgtaaagagatggggatgctcgcagagtgcatgtatacaggcctgcttaccgagattcagtgtaaatcaaagagattacgtaagaatgtgaaacaacacgcagatcagacggtgaacgaagacagtgagggccgggatcttagacaagttacgtctactactaaatcctgccgagagaagacggaactgacccctgatcagcagactcttctccactttataatggactcttacaataagcagagaatgccacaggagataaccaataagatccttaaagaggagttttctgccgaagagaacttccttatcctgacggaaatggctaccaatcacgttcaggtgctggtggagttcaccaagaagctaccaggattccagactttggaccatgaagaccagatcgccctgttgaagggaagcgcagtagaggccatgttcctcagaagtgccgaaatcttcaataaaaagctaccgtccggccatagcgacctcctggaggagaggatacgcaacagcggaattagtgatgagtacatcacccccatgttctctttttataaatcaatcggcgaattgaaaatgactcaagaagagtacgccctattgaccgccatagtcatactgagcccagatcgacagtacatcaaagaccgagaagcagtggagaaactgcaagagcccctactggatgtactccagaaattgtgcaaaatccaccagcccgagaatcctcagcactttgcttgcctattgggcagactgacagaactccgcaccttcaaccatcaccatgccgagatgttaatgtcatggagggtcaatgaccacaaattcacgccattgctttgtgagatctgggacgtgcaatag

SEQ ID NO: 83165 - DNA, 1489 bp, Artificial Sequence
  derived and/or modified sequence
attttcagtggctgtgaataagctaagaatggtaatgcagtttcaggggttagaaaatccaattcaaattagtcctcactgcagctgtacgccgtcaggatttttcatggaaatgatgagtatgaagcccgcgaaaggtgttttaacagaacaagtggcaggtcctctgggacagaacctggaagtggaaccatactcgcaatacagcaatgttcagtttccccaagttcaaccacagatttcctcgtcatcctattattccaacctgggtttctacccccagcagcctgaagagtggtactctcctggaatatatgaactcaggcgtatgccagctgagactctctaccagggagaaactgaggtagcagagatgcctgtaacaaagaagccccgcatgggcgcgtcagcagggaggatcaaaggggatgagctgtgtgttgtttgtggagacagagcctctggataccactataatgcactgacctgtgaggggtgtaaaggtttcttcaggagaagcattaccaaaaacgctgtgtacaagtgtaaaaacgggggcaactgtgtgatggatatgtacatgcgaagaaagtgtcaagagtgtcgactaaggaaatgcaaagagatgggaatgttggctgaatgtatgtatacaggcttgttaactgaaattcagtgtaaatctaagcgactgagaaaaaatgtgaagcagcatgcagatcagaccgtgaatgaagacagtgaaggtcgtgacttgcgacaagtgacctcgacaacaaagtcatgcagggagaaaactgaactcaccccagatcaacagactcttctacattttattatggattcatataacaaacagaggatgcctcaggaaataacaaataaaattttaaaagaagaattcagtgcagaagaaaattttctcattttgacggaaatggcaaccaatcatgtacaggttcttgtagaattcacaaaaaagctaccaggatttcagactttggaccatgaagaccagattgctttgctgaaagggtctgcggttgaagctatgttccttcgttcagctgagattttcaataagaaacttccgtctgggcattctgacctattggaagaaagaattcgaaatagtggtatctctgatgaatatataacacctatgtttagtttttataaaagtattggggaactgaaaatgactcaagaggagtatgctctgcttacagcaattgttatcctgtctccagatagacaatacataaaggatagagaggcagtagagaagcttcaggagccacttcttgatgtgctacaaaagttgtgtaagattcaccagcctgaaaatcctcaacactttgcctgtctcctgggtcgcctgactgaattacggacattcaatcatcaccacgctgagatgctgatgtcatggagagtaaacgaccacaagtttaccccacttctctgtgaaatctgggacgtgcagtga

SEQ ID NO: 83166 - DNA, 1461 bp, Artificial Sequence
  derived and/or modified sequence
atggtgatgcagttccagggcctggagaaccccatccagatcagcccccactgcagctgcaccccatctggcttcttcatggagatgatgtccatgaagccagccaagggcgtgctgacagagcaggtggccggccccctgggccagaacctggaggtggagccctacagccagtacagcaatgtgcagttcccccaggtgcagccccagatcagcagcagcagctactacagcaacctgggcttctacccccagcagcctgaggagtggtacagccctggcatctatgagctgcggaggatgcctgctgagaccctgtaccagggcgagacagaggtggccgagatgcctgtgaccaagaagcccaggatgggcgccagcgctggccgcatcaagggagatgagctgtgtgtggtgtgtggggaccgggccagcggctaccactacaatgccctgacctgtgagggctgcaagggcttcttccgccgcagcatcaccaagaatgctgtgtacaagtgcaagaatggaggcaactgtgtgatggacatgtacatgaggaggaagtgccaggagtgccgcctgaggaagtgcaaggagatgggcatgctggccgagtgcatgtacacaggcctgctgacagagatccagtgcaagagcaagaggctgaggaagaatgtgaagcagcacgccgaccagacagtgaatgaagacagcgagggccgggacctgcggcaggtgaccagcaccaccaagagctgccgggagaagacagagctgaccccagaccagcagaccctgctgcacttcatcatggacagctacaacaagcagaggatgccccaggagatcaccaacaagatcctgaaggaggagttctctgctgaggagaacttcctgatcctgacagagatggccaccaaccacgtgcaggtgctggtggagttcaccaagaagctgcccggcttccagaccctggaccacgaggaccagatcgccctgctgaagggcagcgctgtggaggccatgttcctgcggtctgctgagatcttcaacaagaagctgcccagcggccacagcgacctgctggaggagcgcatcagaaattctggcatcagtgatgagtacatcacccccatgttctccttctacaagagcatcggggagctgaagatgacccaggaggagtatgccctgctgacagccatcgtcatcctgagcccagaccggcagtacatcaaggaccgggaggccgtggagaagctgcaggagcccctgctggatgtgctgcagaagctgtgcaagatccaccagcctgagaacccccagcactttgcctgcctgctgggccgcctgacagagctgcggaccttcaaccaccaccacgccgagatgctgatgtcctggagggtgaatgaccacaagttcacccccctgctgtgtgagatctgggatgtgcagtag

SEQ ID NO: 83167 - DNA, 1461 bp, Artificial Sequence
  derived and/or modified sequence
atggtgatgcagttccagggcctggagaaccccatccagatcagccctcattgttcatgtaccccgtccggcttcttcatggagatgatgtccatgaagcccgccaaaggcgtgctcacagagcaggtcgcaggacccctcggccagaatctggaggtggaaccttatagccagtattctaatgtacagtttcctcaggtccagccccagatttcaagcagttcctactactcaaatctcggtttttatccacagcaaccagaagaatggtattctcccggtatctatgaactgagacgcatgcccgccgagacactgtaccaaggagagaccgaggtagcagaaatgcctgtgaccaaaaaacccaggatgggagcgagcgctggccgtataaagggggacgaactgtgcgtggtatgcggggaccgggcttccggataccactacaatgcactgacttgcgagggatgtaagggttttttcagacgaagcatcaccaaaaatgccgtctacaagtgtaagaacggaggcaattgtgtcatggatatgtatatgaggcgcaagtgtcaggagtgtcgcctcaggaagtgtaaggaaatggggatgctcgcggagtgtatgtatactggcttgttgactgaaattcagtgtaaatccaagcgcctaaggaagaacgtgaagcagcatgccgatcagactgttaacgaggattcagaaggcagagatctgagacaggtgacgtcaactacaaaatcctgcagagaaaagactgaattgactccagatcagcagactttacttcacttcattatggattcatacaacaaacagcgcatgcctcaggagattacaaacaaaatcctcaaggaggagttctctgccgaggaaaacttcttgatcctcacagagatggcaaccaaccacgtgcaggttctggtcgaatttaccaagaagctgcctggtttccagactctggatcacgaagatcagatcgcgctgttgaagggatcggcggtggaggcaatgttcctgcgctcagccgaaatttttaacaaaaagttgccatcagggcattcggacttactggaggaacgcatcagaaattccggtatttctgatgaatacatcacacccatgttctcattttacaaatccatcggggaacttaagatgacacaagaggagtatgccttactgactgcaattgtgatactaagcccggatcggcaatatattaaggatcgagaggccgtggagaagctgcaggagcccctcctggacgtcctccagaagctttgcaagatccatcaacccgagaatcctcagcacttcgcctgtctcctggggcgcctaaccgagctccgcacatttaatcaccatcacgccgagatgcttatgagttggcgagtcaacgaccacaagtttacaccactcctgtgtgagatttgggacgtgcagtag

SEQ ID NO: 83168 - DNA, 1461 bp, Artificial Sequence
  derived and/or modified sequence
atggtgatgcagtttcaggggctcgagaaccccatccaaataagcccccattgttcctgtaccccctccggttttttcatggagatgatgtcaatgaaacccgctaaaggtgttctgaccgaacaggtcgcaggaccccttggacagaacttggaggtggaaccctattcccagtacagcaacgttcagttcccacaggtgcagccccagataagctcttcaagttactatagcaacctgggcttttaccctcagcagcctgaggagtggtactctcccggaatctacgaacttcgccgtatgccagccgaaaccctgtaccaaggagagacagaagtggctgaaatgccggtgacgaagaagccccgtatgggcgcttctgccggacggattaaaggagatgagctgtgcgttgtctgcggcgatcgggcaagtggttaccactacaacgctctgacatgtgaagggtgcaaggggttcttcaggcgcagtatcacaaaaaatgctgtttataagtgtaagaatggaggaaattgtgtcatggatatgtatatgagaaggaagtgccaggaatgtcgtcttagaaagtgcaaagaaatggggatgcttgcggaatgcatgtatactggactcctgaccgaaatccagtgtaaaagcaagagattacggaagaatgtaaagcagcatgctgatcagacagtcaatgaggacagcgagggtagagatctccggcaagtcacctccaccaccaaaagctgcagagaaaagacagaactcactcccgaccagcagacactcttacacttcatcatggacagctataacaaacagcggatgccccaggagatcacgaataaaattctgaaggaggagttctcggctgaagaaaattttctgatcctaaccgaaatggcaactaatcacgttcaggtgctcgtggagttcacaaagaagctgccgggattccaaacactggaccacgaggatcaaatagctctactaaaggggagcgctgtggaggccatgttcctcagatccgccgaaatttttaacaagaaactcccctcaggacattctgacttactcgaggaaaggatcagaaactcaggaatctccgacgagtatattacccccatgttttctttttataagtcaattggtgagctgaagatgacacaggaagagtatgccctgcttacagccatcgtaatcctgagcccggatcgccagtatattaaggatcgcgaagccgtggagaaactccaggaacccctgctcgacgtgttgcagaaactgtgtaagatccaccaaccagagaatcctcaacactttgcctgtctcctggggagactgaccgagctgcgcacattcaaccaccaccacgcggagatgctgatgtcttggcgagttaatgaccacaagtttacacccctcctctgtgagatctgggatgtccagtag

SEQ ID NO: 83169 - DNA, 1461 bp, Artificial Sequence
  derived and/or modified sequence
atggtgatgcagttccagggcctggagaaccccatccagatcagcccccactgcagctgcacccccagcggcttcttcatggagatgatgagcatgaagcccgccaagggcgtgctgaccgagcaggtggccggccccctgggccagaacctggaggtggagccctacagccagtacagcaacgtgcagttcccccaggtgcagccccagatcagcagcagcagctactacagcaacctgggcttctacccccagcagcccgaggagtggtacagccccggcatctacgagctgagaagaatgcccgccgagaccctgtaccagggcgagaccgaggtggccgagatgcccgtgaccaagaagcccagaatgggcgccagcgccggcagaatcaagggcgacgagctgtgcgtggtgtgcggcgacagagccagcggctaccactacaacgccctgacctgcgagggctgcaagggcttcttcagaagaagcatcaccaagaacgccgtgtacaagtgcaagaacggcggcaactgcgtgatggacatgtacatgagaagaaagtgccaggagtgcagactgagaaagtgcaaggagatgggcatgctggccgagtgcatgtacaccggcctgctgaccgagatccagtgcaagagcaagagactgagaaagaacgtgaagcagcacgccgaccagaccgtgaacgaggacagcgagggcagagacctgagacaggtgaccagcaccaccaagagctgcagagagaagaccgagctgacccccgaccagcagaccctgctgcacttcatcatggacagctacaacaagcagagaatgccccaggagatcaccaacaagatcctgaaggaggagttcagcgccgaggagaacttcctgatcctgaccgagatggccaccaaccacgtgcaggtgctggtggagttcaccaagaagctgcccggcttccagaccctggaccacgaggaccagatcgccctgctgaagggcagcgccgtggaggccatgttcctgagaagcgccgagatcttcaacaagaagctgcccagcggccacagcgacctgctggaggagagaatcagaaacagcggcatcagcgacgagtacatcacccccatgttcagcttctacaagagcatcggcgagctgaagatgacccaggaggagtacgccctgctgaccgccatcgtgatcctgagccccgacagacagtacatcaaggacagagaggccgtggagaagctgcaggagcccctgctggacgtgctgcagaagctgtgcaagatccaccagcccgagaacccccagcacttcgcctgcctgctgggcagactgaccgagctgagaaccttcaaccaccaccacgccgagatgctgatgagctggagagtgaacgaccacaagttcacccccctgctgtgcgagatctgggacgtgcagtag

SEQ ID NO: 83170 - protein, 440 aa, Artificial Sequence
  derived and/or modified sequence
MREADTLRPPQLMEVSADIISTVEFNHTGELLATGDKGGRVVIFQREPESKNAPHSQGEYDVYSTFQSHEPEFDYLKSLEIEEKINKIKWLPQQNAAHSLLSTNDKTIKLWKITERDKRPEGYNLKDEEGKLKDLSTVTSLQVPVLKPMDLMVEVSPRRIFANGHTYHINSISVNSDCETYMSADDLRINLWHLAITDRSFNIVDIKPANMEDLTEVITASEFHPHHCNLFVYSSSKGSLRLCDMRAAALCDKHSKLFEEPEDPSNRSFFSEIISSVSDVKFSHSGRYMLTRDYLTVKVWDLNMEARPIETYQVHDYLRSKLCSLYENDCIFDKFECAWNGSDSVIMTGAYNNFFRMFDRNTKRDVTLEASRESSKPRAVLKPRRVCVGGKRRRDDISVDSLDFTKKILHTAWHPAENIIAIAATNNLYIFQDKVNSDMH

SEQ ID NO: 83171 - DNA, 1323 bp, Artificial Sequence
  derived and/or modified sequence
atgcgcgaggctgacacactcaggcctccccagctcatggaggtcagcgcagatattatctcgaccgtggagttcaaccacaccggggaactacttgcaacgggggataaaggcggacgagtggtgattttccagagagaacccgaatccaagaacgcacctcattctcagggagagtacgatgtatacagcacatttcagtcacacgaacccgagttcgattatctgaagtctcttgagattgaagagaaaataaacaaaatcaaatggctgcctcagcagaatgcagctcacagtctgctgtcgactaacgacaaaaccataaagctgtggaaaatcactgagagagataagcgtccagagggctataacctgaaggacgaagagggcaaactgaaggatctttccacagtcacaagtctgcaggtacccgttttgaagcccatggacctcatggttgaggtgtcaccgcggcggatttttgctaatggtcacacataccatataaactccatcagcgtgaactcagattgcgaaacttatatgtcagctgacgacctcaggattaatctatggcacttagccattacggacaggtcatttaatatcgttgacatcaaacctgccaacatggaagaccttactgaggtgattaccgcctctgaatttcatccacaccactgtaatctctttgtatattcttcatccaagggatccctccggctatgcgatatgcgcgcagccgcattgtgcgacaagcatagcaagctctttgaggagccagaagatccatccaatagatcctttttttccgagatcatctcttcagtgagcgacgtgaagttttcccacagtggaagatacatgctcactagagattacctaaccgtgaaggtctgggacctgaatatggaggcccgccctatcgagacgtatcaagtccacgattatttaagatctaagctctgcagtctgtacgaaaatgactgtatcttcgataagttcgagtgcgcttggaatggcagcgactctgtgattatgacgggggcatacaacaatttcttccgcatgtttgaccgaaatacaaaaagggatgtgaccctcgaagctagcagagaaagctccaaacctcgtgctgtgctaaaacctaggcgggtgtgcgtgggtgggaaacgcagacgggatgatatcagcgtcgactcacttgacttcactaagaaaatacttcacactgcctggcaccccgctgaaaatatcattgctattgctgccaccaacaacctctacatttttcaggacaaagtgaattccgacatgcattag

SEQ ID NO: 83172 - DNA, 1323 bp, Artificial Sequence
  derived and/or modified sequence
atgcgagaggctgacactcttcgacctcctcagctaatggaggttagtgctgatatcatcagtactgtggaatttaatcatacgggagagctgctggccactggagacaaagggggacgggtggttatatttcaaagggaacccgagagtaagaatgcaccccattcccagggtgaatatgatgtgtactccacattccaaagtcacgaaccagagttcgattacttgaagagtctcgaaatcgaggagaagatcaacaaaattaaatggctgccgcagcagaatgctgcccactcgctgctgtccaccaacgataaaacaatcaaactgtggaaaatcaccgagcgagacaaacgcccggagggctacaacctcaaagacgaagagggcaagctgaaggatctgagtactgtgacttccctgcaagtccccgtcctcaaacccatggacctgatggttgaggtgtcacctaggagaattttcgctaacggtcacacctatcatatcaattctatttcggttaatagcgactgtgaaacttatatgtctgcagacgacttacggattaacctgtggcacctggccatcacagatcggtcctttaatatcgtggatatcaagcccgcaaacatggaagatctgactgaagtcataaccgcatctgaattccatccccaccactgtaacctgttcgtgtattcctctagcaagggctcactgaggctgtgcgacatgagggccgctgcactatgcgacaagcactcgaagctgttcgaggaacccgaggatccctccaatcgaagtttctttagcgagattatttctagcgtctcagacgtcaagttttcccattctgggagatatatgcttactcgcgactatcttactgtgaaggtgtgggaccttaacatggaagcaaggccaattgagacttatcaagtgcatgactatctgagatccaagttatgttctctgtacgaaaacgattgtattttcgataagttcgagtgcgcatggaacggtagcgattcggtcatcatgaccggcgcctacaacaacttcttccgaatgttcgatcgcaatacgaaaagggacgtgacattggaggctagcagggaaagttcgaaacctcgtgcagtgttgaagccaagacgagtatgtgtgggcgggaaacgcagaagagacgacatatcggttgacagccttgacttcaccaaaaaaatcctccacactgcttggcatcctgccgaaaacatcatagctatagcagccactaataacctctacattttccaggacaaagttaattcagatatgcattag

SEQ ID NO: 83173 - DNA, 1323 bp, Artificial Sequence
  derived and/or modified sequence
atgagggaggccgacaccctgcggcccccccagctgatggaggtgtctgctgacatcatcagcacagtggagttcaaccacactggagagctgctggccaccggggacaagggcggccgggtggtgatcttccagcgggagcctgagagcaagaatgccccccacagccagggcgagtatgatgtgtacagcaccttccagagccatgagcctgagtttgactacctgaagagcctggagattgaggagaagatcaacaagatcaagtggctgccccagcagaatgctgcccacagcctgctgagcaccaatgacaagaccatcaagctgtggaagatcacagagcgggacaagaggcctgagggctacaacctgaaggatgaggagggcaagctgaaggacctgagcacagtgaccagcctgcaggtgcctgtgctgaagcccatggacctgatggtggaggtgagcccccggcgcatctttgccaacggccacacctaccacatcaacagcatctctgtgaacagcgactgtgagacctacatgtctgcagatgacctgcgcatcaacctgtggcacctggccatcacagacaggagcttcaacatcgtggacatcaagccagccaacatggaggacctgacagaggtgatcacagccagcgagttccacccccaccactgcaacctgtttgtgtacagcagcagcaagggcagcctgcggctgtgtgacatgagagctgctgccctgtgtgacaagcacagcaagctgtttgaggagcctgaggaccccagcaacagaagcttcttcagcgagatcatcagctctgtgtctgatgtgaagttcagccacagcggccgctacatgctgacccgggactacctgactgtgaaggtgtgggacctgaacatggaggcccggcccatcgagacctaccaggtgcatgactacctgcggagcaagctgtgcagcctgtatgaaaatgactgcatctttgacaagtttgaatgtgcctggaatggaagtgacagcgtcatcatgaccggggcctacaacaacttcttcaggatgtttgacaggaacaccaagagagatgtgaccctggaggccagccgggagagcagcaagcccagggctgtgctgaagccccggcgggtgtgtgtgggcggcaagagaagaagagatgacatctctgtggacagcctggacttcaccaagaagatcctgcacacagcctggcaccctgctgagaacatcatcgccatcgccgccaccaacaacctgtacatcttccaggacaaggtgaacagcgacatgcactag

SEQ ID NO: 83174 - DNA, 1323 bp, Artificial Sequence
  derived and/or modified sequence
atgcgggaggccgacaccctgcggcccccccagctgatggaggtgagtgcggacattatttcgactgtcgaattcaaccacaccggcgagctgttagccaccggtgacaaagggggtcgggtagtgatattccagagagagcctgagagcaaaaatgccccccacagccagggcgaatacgacgtgtactcaacattccagtcacatgaaccagaatttgattacttaaaaagcttggagatagaagagaaaatcaacaagatcaaatggctgccacagcagaatgccgctcacagcttgctgagcacaaacgataaaaccataaagttgtggaagattaccgaaagggataagcgacctgaaggctataacttgaaagacgaggaaggaaagctaaaggatttatcaacggtcactagcttgcaggtgcccgtgctcaaaccaatggatctgatggtagaagtgagcccccgtagaatctttgctaacggccatacataccacatcaacagtatcagcgtcaattccgattgtgagacctacatgtccgccgatgatctgagaattaatctctggcatctggccatcactgaccggagctttaatatcgttgacatcaaacccgccaacatggaagacctgaccgaagtcattaccgcctctgaatttcatccccaccactgtaatctgtttgtgtacagtagcagtaaaggatctcttaggttgtgcgacatgcgcgccgcggccctgtgtgataaacactccaaactgttcgaggagcccgaggatcccagcaaccggagtttcttcagcgaaattataagcagtgtttctgacgtcaaattttctcactcaggacggtacatgctaaccagggactatctcactgtcaaggtctgggatttgaatatggaggcacgccctattgagacctatcaagtccacgattatctgaggtccaagctgtgcagcttgtatgaaaacgactgtatatttgacaaattcgaatgcgcctggaacgggagtgactccgtaattatgactggagcttataataactttttccgcatgtttgatcgaaacacaaaaagggatgtgaccttggaggctagcagagagtccagcaagccccgtgccgtattgaaaccgcgccgagtatgtgttggcggcaagcggcggagagacgacattagtgtcgacagcctcgattttacgaagaaaatcctccatactgcatggcatcctgccgagaatattattgcaattgctgccaccaacaacctgtacatttttcaagacaaggtgaattccgacatgcactag

SEQ ID NO: 83175 - DNA, 1323 bp, Artificial Sequence
  derived and/or modified sequence
atgcgggaggccgacaccctgcggcccccccagctgatggaggtgagcgctgatattatctctaccgtggaatttaatcatacaggagagcttttagcaacaggggacaagggagggcgggtggtgatctttcaacgcgagccagaatctaagaacgctccacactcgcagggcgaatacgacgtctactccacattccaaagccacgagcctgagtttgattaccttaaaagccttgagattgaggaaaagatcaacaagataaaatggttgccacagcagaatgccgcccacagcttgctctccactaacgataagactataaagctgtggaaaattacagagcgtgataaacgccccgaagggtacaatctgaaggacgaagaaggcaagctgaaggacctgtctaccgtcaccagcctgcaggtgcctgtgctgaagccgatggatctcatggtcgaagtcagcccacgccgcattttcgctaacggccatacttaccatatcaatagtatatcagttaattcggattgtgaaacatatatgtccgctgatgacttgaggatcaacctgtggcatctggcaatcaccgataggagttttaatatcgtggacatcaaacccgccaacatggaagacctcacagaggttattaccgcatctgagttccacccccatcattgcaatctctttgtttattcgtcctcaaaaggatcacttagactttgcgacatgagggctgccgctctctgtgataagcactccaagttgttcgaagagccggaggaccctagcaataggtcctttttcagcgagattataagtagcgtttccgatgtgaagttcagccactccgggcggtatatgctgacccgcgactacctgacggtcaaagtgtgggacctgaatatggaggcacgaccaatcgaaacttaccaggtgcacgattacttgaggagtaaactgtgctctctgtatgagaacgactgtatttttgataagttcgagtgcgcatggaatgggtcggacagcgtgattatgaccggcgcatacaataacttttttcggatgtttgaccggaatacaaagagggatgtgactctggaagcaagccgcgagtcaagcaagcccagagccgtgctcaaaccacggagagtttgtgttgggggaaaacgaaggcgtgatgatatatctgtggattctctggatttcacgaaaaaaatactccacacagcctggcatcccgccgaaaatattatcgccatcgctgcaactaacaacctgtacatctttcaggataaagttaactccgatatgcattag

SEQ ID NO: 83176 - DNA, 1323 bp, Artificial Sequence
  derived and/or modified sequence
atgcgagaagcggatacactccgcccacctcagctgatggaagtgagcgctgacattatttcaaccgttgagtttaaccataccggtgagctgttggcgactggggataagggcggtagagttgtgatcttccagagagagccagagagcaagaatgcacctcactctcagggggagtatgatgtgtattccactttccaatcccacgagccagagtttgattatctcaaatctctggagattgaggagaagatcaacaagatcaagtggctcccacaacagaacgctgcccattctctcctgagtactaacgacaagacaatcaagctgtggaaaattactgaaagggacaagcgtccggagggctataatctcaaggatgaagagggtaagttaaaagacctgtctaccgtgaccagtctacaggtaccagtgctcaaacctatggacctgatggttgaagtgtctcccagaaggatttttgcaaacgggcacacttaccacatcaacagcatctctgtcaacagcgattgcgaaacatacatgagtgccgacgatttgcggattaatctttggcacctagccatcaccgatagatcatttaacatagtggatataaagcctgccaatatggaggaccttacggaggttattaccgcctcggaattccacccccaccattgcaacctgttcgtctactcttcatctaaaggatccctgcgattatgcgatatgcgcgcagcagcactctgcgacaagcattcaaaactgttcgaggaacccgaagatccttctaacaggagttttttctccgaaatcatctcttccgtcagtgatgtgaaattcagccatagcggaaggtacatgcttacccgggattatctgacggtcaaggtctgggatctaaatatggaagccaggcccatcgagacctaccaggtacatgactatctacggagcaagctttgctctctgtacgagaacgattgtattttcgacaaatttgaatgtgcatggaacggctccgacagcgtcatcatgacaggcgcatacaataatttcttccgcatgtttgacagaaacacaaaacgcgacgtgaccttggaagctagtcgggagtcatctaaaccgcgagctgtactcaagcccaggcgagtgtgcgtgggaggtaaacgcaggagggacgacatctctgtggattctctggattttacaaagaaaattctccacacggcctggcaccccgcagagaatatcatagcaatcgctgccacgaacaatctctacatattccaggataaagtcaatagcgatatgcattag

SEQ ID NO: 83177 - DNA, 1323 bp, Artificial Sequence
  derived and/or modified sequence
atgagggaggctgacaccctgcggcctccgcagctgatggaggtatcggccgatattatcagtactgtggagtttaaccacaccggcgaacttctcgcgactggagacaaaggaggtagagtcgtcatttttcagcgggaaccggagtcgaagaatgcccctcacagtcagggagaatatgatgtctacagtacatttcaatctcacgagcccgagttcgactatctgaaatctttagaaatcgaggaaaagatcaataagattaagtggctcccccagcagaacgctgcccattctctactctccactaatgacaagactattaagctatggaagattacggaacgggataagcgtcctgaggggtacaacttaaaggatgaggaggggaagctcaaggacctgagtaccgttacttccttgcaggtcccggtgctcaagcctatggacttgatggttgaagtctccccaagaaggatttttgccaacggccacacgtaccatataaacagtatttccgtcaatagcgactgcgaaacatatatgtccgccgacgatctcaggattaacctctggcacctcgcgatcaccgataggtcatttaatatagtcgacatcaagccagccaatatggaggacctcacagaggttatcacggcaagcgagttccatccccaccactgcaacctctttgtgtattcctcgtccaaaggctcattacggctctgtgacatgagagccgcagcactatgtgacaagcattccaagctgttcgaggagcccgaggacccaagcaatcgcagtttcttcagcgaaatcatctccagcgtgagtgacgtcaagttcagccatagtggtcgctacatgctgacaagagattacctgacggtcaaagtctgggacttgaacatggaagccagaccaatcgaaacttatcaggtacatgattatttgaggtcaaagctctgcagcctgtatgaaaacgactgcatcttcgacaaatttgaatgtgcctggaacggcagcgatagcgtgataatgacaggggcatacaacaacttcttcaggatgttcgaccggaacaccaaacgcgacgtgacactagaagcaagtcgcgagagctctaagccacgtgctgtcctgaaacccaggagagtctgtgttgggggaaagcgccgacgcgatgacatctccgtagacagccttgattttactaaaaagattttacacaccgcatggcacccagcggagaacatcatcgccattgccgctaccaataatctctatatctttcaggacaaggtcaatagtgatatgcactag

SEQ ID NO: 83178 - DNA, 1780 bp, Artificial Sequence
  derived and/or modified sequence
gtgccagctcaatggggccgccgacctcgaagtttccgaagaagtaaaatagaaagaagaccttttttgaaatgacctgtgttagtcacctctctcaggatgcgtgaggcggacacgttgaggccacctcagctgatggaagtttccgctgacatcatctctaccgttgagttcaaccacacgggagagctgctggccacaggtgacaagggcggccgggtcgtcatcttccagcgggaaccagagagtaaaaatgcgccccacagccagggcgaatacgacgtgtacagcactttccagagccacgagccggagtttgactatctcaagagcctggagatagaggagaagatcaacaagatcaagtggctcccacagcagaacgccgcccactcactcctgtccaccaacgataaaactatcaaattatggaagattaccgaacgagataaaaggcccgaaggatacaacctgaaggatgaagaggggaaacttaaggacctgtccacggtgacgtcactgcaggtgccagtgctgaagcccatggatctgatggtggaggtgagccctcggaggatctttgccaatggccacacctaccacatcaactccatctccgtcaacagtgactgcgagacctacatgtcggcggatgacctgcgcatcaacctctggcacctggccatcaccgacaggagcttcaacatcgtggacatcaagccggccaacatggaggaccttacggaggtgatcacagcatctgagttccatccgcaccactgcaacctcttcgtctacagcagcagcaagggctccctgcggctctgcgacatgcgggcagctgccctgtgtgacaagcattccaagctctttgaagagcctgaggaccccagtaaccgctcattcttctcggaaatcatctcctccgtgtccgacgtgaagttcagccacagcggccgctacatgctcacccgggactaccttacagtcaaggtctgggacctgaacatggaggcaagacccatagagacctaccaggtccatgactaccttcggagcaagctctgttccctgtacgagaacgactgcattttcgacaagtttgaatgtgcctggaacgggagcgacagcgtcatcatgaccggggcctacaacaacttcttccgcatgttcgatcggaacaccaagcgggacgtgaccctggaggcctcgagggaaagcagcaagccccgggctgtgctcaagccacggcgcgtgtgcgtggggggcaagcgccggcgtgatgacatcagtgtggacagcttggacttcaccaagaagatcctgcacacggcctggcacccggctgagaacatcattgccatcgccgccaccaacaacctgtacatcttccaggacaaggtaaactctgacatgcactaggtatgtgcagttcccggcccctgccacccagcctcatgcaagtcatccccgacatgaccttcacgaccgcaatgcaaggaggggaagaaagtcacagcactgatgaggacagctgcagaggtggcagtgtgtggacacaggaagtttgggccccctccctgccccagctttcctaggccagaattgtgtttggcagtaattgtctgtttaaaaaaataaaaaggaaaggaagcgttcaccgccacaaatcataaaatggacatgactgtggagtcttacagttcagggttctttcattcacgtcccttcctgtctcggtctgcggtctttaccacatcaataggactttttatgcgtc

SEQ ID NO: 83179 - DNA, 1667 bp, Artificial Sequence
  derived and/or modified sequence
atcattcaaaggattcctgcggtggtgcagagctgcggcaaagggccctcgcccgtggggttcactctcatcacccagaagcagggagaagggcctgcggctgcaggcctggctgccacaccggcctccagacaacacacagcagaagtaaaatagaaagaagaccttttttgaaatgacctgtgttagtcacctctctcaggatgcgtgaggcggacacgttgaggccacctcagctgatggaagtttccgctgacatcatctctaccgttgagttcaaccacacgggagagctgctggccacaggtgacaagggcggccgggtcgtcatcttccagcgggaaccagagagtaaaaatgcgccccacagccagggcgaatacgacgtgtacagcactttccagagccacgagccggagtttgactatctcaagagcctggagatagaggagaagatcaacaagatcaagtggctcccacagcagaacgccgcccactcactcctgtccaccaacgataaaactatcaaattatggaagattaccgaacgagataaaaggcccgaaggatacaacctgaaggatgaagaggggaaacttaaggacctgtccacggtgacgtcactgcaggtgccagtgctgaagcccatggatctgatggtggaggtgagccctcggaggatctttgccaatggccacacctaccacatcaactccatctccgtcaacagtgactgcgagacctacatgtcggcggatgacctgcgcatcaacctctggcacctggccatcaccgacaggagcttcaacatcgtggacatcaagccggccaacatggaggaccttacggaggtgatcacagcatctgagttccatccgcaccactgcaacctcttcgtctacagcagcagcaagggctccctgcggctctgcgacatgcgggcagctgccctgtgtgacaagcattccaagctctttgaagagcctgaggaccccagtaaccgctcattcttctcggaaatcatctcctccgtgtccgacgtgaagttcagccacagcggccgctacatgctcacccgggactaccttacagtcaaggtctgggacctgaacatggaggcaagacccatagagacctaccaggtccatgactaccttcggagcaagctctgttccctgtacgagaacgactgcattttcgacaagtttgaatgtgcctggaacgggagcgacagcgtcatcatgaccggggcctacaacaacttcttccgcatgttcgatcggaacaccaagcgggacgtgaccctggaggcctcgagggaaagcagcaagccccgggctgtgctcaagccacggcgcgtgtgcgtggggggcaagcgccggcgtgatgacatcagtgtggacagcttggacttcaccaagaagatcctgcacacggcctggcacccggctgagaacatcattgccatcgccgccaccaacaacctgtacatcttccaggacaaggtaaactctgacatgcactaggtatgtgcagttcccggcccctgccacccagcctcatgcaagtcatccccgacatgaccttcacgaccgcaatgcaaggaggggaagaaagtcacagcactgatgaggacagctgcagaggtggcagtgtgtggacacagg

SEQ ID NO: 83180 - DNA, 1323 bp, Artificial Sequence
  derived and/or modified sequence
atgagagaggccgacaccctgagacccccccagctgatggaggtgagcgccgacatcatcagcaccgtggagttcaaccacaccggcgagctgctggccaccggcgacaagggcggcagagtggtgatcttccagagagagcccgagagcaagaacgccccccacagccagggcgagtacgacgtgtacagcaccttccagagccacgagcccgagttcgactacctgaagagcctggagatcgaggagaagatcaacaagatcaagtggctgccccagcagaacgccgcccacagcctgctgagcaccaacgacaagaccatcaagctgtggaagatcaccgagagagacaagagacccgagggctacaacctgaaggacgaggagggcaagctgaaggacctgagcaccgtgaccagcctgcaggtgcccgtgctgaagcccatggacctgatggtggaggtgagccccagaagaatcttcgccaacggccacacctaccacatcaacagcatcagcgtgaacagcgactgcgagacctacatgagcgccgacgacctgagaatcaacctgtggcacctggccatcaccgacagaagcttcaacatcgtggacatcaagcccgccaacatggaggacctgaccgaggtgatcaccgccagcgagttccacccccaccactgcaacctgttcgtgtacagcagcagcaagggcagcctgagactgtgcgacatgagagccgccgccctgtgcgacaagcacagcaagctgttcgaggagcccgaggaccccagcaacagaagcttcttcagcgagatcatcagcagcgtgagcgacgtgaagttcagccacagcggcagatacatgctgaccagagactacctgaccgtgaaggtgtgggacctgaacatggaggccagacccatcgagacctaccaggtgcacgactacctgagaagcaagctgtgcagcctgtacgagaacgactgcatcttcgacaagttcgagtgcgcctggaacggcagcgacagcgtgatcatgaccggcgcctacaacaacttcttcagaatgttcgacagaaacaccaagagagacgtgaccctggaggccagcagagagagcagcaagcccagagccgtgctgaagcccagaagagtgtgcgtgggcggcaagagaagaagagacgacatcagcgtggacagcctggacttcaccaagaagatcctgcacaccgcctggcaccccgccgagaacatcatcgccatcgccgccaccaacaacctgtacatcttccaggacaaggtgaacagcgacatgcactag

SEQ ID NO: 83181 - protein, 430 aa, Artificial Sequence
  derived and/or modified sequence
MGKRDTADIISTVEFNHTGELLATGDKGGRVVIFQREPESKNAPHSQGEYDVYSTFQSHEPEFDYLKSLEIEEKINKIKWLPQQNAAHSLLSTNDKTIKLWKITERDKRPEGYNLKDEEGKLKDLSTVTSLQVPVLKPMDLMVEVSPRRIFANGHTYHINSISVNSDCETYMSADDLRINLWHLAITDRSFNIVDIKPANMEDLTEVITASEFHPHHCNLFVYSSSKGSLRLCDMRAAALCDKHSKLFEEPEDPSNRSFFSEIISSVSDVKFSHSGRYMLTRDYLTVKVWDLNMEARPIETYQVHDYLRSKLCSLYENDCIFDKFECAWNGSDSVIMTGAYNNFFRMFDRNTKRDVTLEASRESSKPRAVLKPRRVCVGGKRRRDDISVDSLDFTKKILHTAWHPAENIIAIAATNNLYIFQDKVNSDMH

SEQ ID NO: 83182 - DNA, 1293 bp, Artificial Sequence
  derived and/or modified sequence
atgggcaagagggatacagcagacattatcagcaccgtggagtttaaccacaccggcgaactgctggccaccggagataaagggggccgtgtagtaatatttcagagagagcccgaatccaagaatgcaccacattctcagggtgagtacgatgtgtatagtacatttcagtctcatgagcccgaattcgactacctgaaaagcttagaaattgaagagaagatcaacaagattaagtggctcccccagcagaatgcagcccacagcctcttgagtaccaacgacaaaaccatcaagctgtggaagatcaccgaacgggacaagagaccagaaggttacaatctcaaagatgaggaaggcaagctgaaagatttgtcaactgtcacctcactgcaggttcccgtactgaagcccatggatctaatggtagaggtgtccccaaggagaattttcgcaaacggccatacgtatcacatcaacagtatcagcgtgaacagtgactgtgagacctatatgtcagccgacgacctacgcataaacctctggcacctggccattaccgaccgcagtttcaacattgtggatataaaacctgccaacatggaggatttgactgaggtcattaccgctagtgagtttcatccccatcactgcaatctctttgtgtattcttccagcaagggctccctgaggctttgcgacatgcgggccgccgccttgtgcgacaaacacagcaagctgttcgaggagccagaagaccctagcaacagatcatttttctctgagatcatttcctcggtgtctgatgtcaaatttagccactcaggtcggtacatgctcactcgggattaccttactgtcaaagtttgggacctgaacatggaagccaggcccatcgaaacatatcaggtgcatgactacctcaggagcaaactctgttccctatacgaaaatgattgtattttcgacaaattcgagtgtgcatggaacggctcagactctgtgattatgaccggtgcctataataatttctttagaatgttcgaccgaaacacgaaacgcgacgtgaccttagaagcaagccgggagtctagcaagcccagggccgtgctaaagccacgtcgggtttgtgtaggagggaagcggcgcagagacgacattagcgtggatagcctcgatttcacaaagaaaatcctgcacaccgcctggcaccctgcagagaacattattgccattgcggccaccaacaatctttacatctttcaggataaagtgaattcagacatgcactag

SEQ ID NO: 83183 - DNA, 1293 bp, Artificial Sequence
  derived and/or modified sequence
atgggcaagagggacacagctgacatcatcagcacagtggagttcaaccacactggagagctgctggccaccggggacaagggcggccgggtggtgatcttccagcgggagcctgagagcaagaatgccccccacagccagggcgagtatgatgtgtacagcaccttccagagccatgagcctgagtttgactacctgaagagcctggagattgaggagaagatcaacaagatcaagtggctgccccagcagaatgctgcccacagcctgctgagcaccaatgacaagaccatcaagctgtggaagatcacagagcgggacaagaggcctgagggctacaacctgaaggatgaggagggcaagctgaaggacctgagcacagtgaccagcctgcaggtgcctgtgctgaagcccatggacctgatggtggaggtgagcccccggcgcatctttgccaacggccacacctaccacatcaacagcatctctgtgaacagcgactgtgagacctacatgtctgcagatgacctgcgcatcaacctgtggcacctggccatcacagacaggagcttcaacatcgtggacatcaagccagccaacatggaggacctgacagaggtgatcacagccagcgagttccacccccaccactgcaacctgtttgtgtacagcagcagcaagggcagcctgcggctgtgtgacatgagagctgctgccctgtgtgacaagcacagcaagctgtttgaggagcctgaggaccccagcaacagaagcttcttcagcgagatcatcagctctgtgtctgatgtgaagttcagccacagcggccgctacatgctgacccgggactacctgactgtgaaggtgtgggacctgaacatggaggcccggcccatcgagacctaccaggtgcatgactacctgcggagcaagctgtgcagcctgtatgaaaatgactgcatctttgacaagtttgaatgtgcctggaatggaagtgacagcgtcatcatgaccggggcctacaacaacttcttcaggatgtttgacaggaacaccaagagagatgtgaccctggaggccagccgggagagcagcaagcccagggctgtgctgaagccccggcgggtgtgtgtgggcggcaagagaagaagagatgacatctctgtggacagcctggacttcaccaagaagatcctgcacacagcctggcaccctgctgagaacatcatcgccatcgccgccaccaacaacctgtacatcttccaggacaaggtgaacagcgacatgcactag

SEQ ID NO: 83184 - DNA, 1293 bp, Artificial Sequence
  derived and/or modified sequence
atgggcaagcgggacaccgccgacatcatcagcaccgtggagttcaaccacactggtgagctgctcgccactggggacaaaggggggcgagtggtcattttccaacgcgagcccgagagcaagaatgccccacactcccaaggagagtatgacgtctacagtactttccagtctcacgaacccgaattcgactaccttaaaagcctcgaaatcgaggagaagatcaacaaaatcaaatggctgccccagcagaacgctgcccactcgcttctgtcgacaaatgacaagaccatcaagctctggaaaattaccgaacgtgataagcgacctgagggctataacctgaaggacgaggagggtaagctgaaggatctgtcaactgtcacatccctgcaagtgcccgtactgaagccaatggatctgatggtagaagtcagcccccgtagaatttttgctaacgggcacacctatcacattaattctatctccgtgaattccgactgcgaaacctacatgtctgccgacgatctgcgtattaacctttggcatttggctatcaccgatcggagcttcaatattgtggatatcaagcccgccaacatggaagaccttaccgaggttatcacagcatccgaattccaccctcatcattgtaacctgtttgtctactcttcaagcaaaggctcgttacgcctgtgcgatatgagagccgcagctctgtgtgacaagcatagtaagttgtttgaagagcccgaggatcccagtaatagatcttttttcagcgagattataagttcagtctcagacgttaagtttagtcattctggccgatacatgctaacccgagattacttgaccgtcaaagtctgggaccttaacatggaggcacgtcctatcgagacctaccaagttcacgattatctgcggtcaaagttgtgtagcctgtatgagaacgactgtatctttgataaatttgagtgcgcctggaacggctcagattctgtcataatgaccggagcatataacaactttttccgaatgtttgaccggaacacaaagagggatgttactctcgaggccagccgcgagagcagcaaacccagggccgtcctgaagccaaggcgagtttgtgttggggggaaaaggaggcgcgacgatattagtgtcgatagtctcgactttacaaagaagatcctgcacactgcgtggcaccccgctgaaaatattatagccatcgcggcaactaacaatctatatatttttcaggacaaggtaaatagcgatatgcattag

SEQ ID NO: 83185 - DNA, 1293 bp, Artificial Sequence
  derived and/or modified sequence
atgggtaaacgcgacacagcggatatcatttctaccgtggagttcaatcataccggggagcttctggcgacaggcgacaagggtggcagagtcgtgatttttcagcgcgaaccagaatccaaaaacgcaccccattcccagggtgaatacgacgtttatagcacttttcaatctcacgagcccgagtttgattatctcaaatcactcgaaattgaggaaaagataaacaaaattaaatggctcccacagcaaaatgctgctcactctttgctgagcaccaatgacaaaactattaagctgtggaagattacggagagggacaagcgtcctgagggatacaatctgaaggatgaagagggcaaactaaaggacctgagtacggtcacttccctgcaggtcccggtgctcaaaccaatggatctgatggtggaagtgtcaccacggagaatttttgctaacgggcacacctaccacatcaactctatatccgtgaattctgattgtgaaacatacatgtcagccgacgatctgcgaataaacctctggcaccttgctataactgacaggtccttcaatattgtggatataaagcccgctaacatggaagatcttacagaagtgatcacagcctcagaattccaccctcatcattgtaatctgttcgtatactcatcctcaaaggggtctttaaggttgtgtgacatgcgtgccgctgccctgtgtgacaagcactcaaaactgtttgaagagccagaagacccctccaatcgatcctttttttctgaaattatcagcagcgtgagtgacgtgaagtttagccacagcggcaggtatatgcttacaagagattaccttactgttaaggtttgggatctgaatatggaagctagacctattgagacctaccaggtgcatgattatctgaggtcaaaactttgctctctctacgagaacgactgcatattcgataagttcgaatgcgcttggaatgggtccgattccgtaataatgacaggggcatataacaatttctttagaatgttcgatcggaacacaaagagggacgttacactggaagcctcacgggagagctctaagccgagggccgtgctcaaaccaaggagggtttgtgtcggcggaaaacggcgtcgcgacgatataagtgttgatagccttgatttcacaaagaagatcttgcacacagcttggcaccctgctgagaacatcatcgcgatcgctgctacgaacaatctgtatatcttccaggacaaggtgaactctgacatgcactag

SEQ ID NO: 83186 - DNA, 1832 bp, Artificial Sequence
  derived and/or modified sequence
atgtgttttgggggaaacagagagaaaggtgtggcctctccacttctgtggacaccccaaataggaagaagggtgcacacaaagcaccgcttcctccacgaagccctcctcaggcacatcgaggagaaccagctgcccaagctcttggctgctgcccttctgaggcctgcctgatttgggccacatagatctggttttggccattgactggcaacatggcagtagccaactgcagagccaccagggagcagcctcattctgattgagtataacgaagacgctgatgggaaagagagacacggctgacatcatctctaccgttgagttcaaccacacgggagagctgctggccacaggtgacaagggcggccgggtcgtcatcttccagcgggaaccagagagtaaaaatgcgccccacagccagggcgaatacgacgtgtacagcactttccagagccacgagccggagtttgactatctcaagagcctggagatagaggagaagatcaacaagatcaagtggctcccacagcagaacgccgcccactcactcctgtccaccaacgataaaactatcaaattatggaagattaccgaacgagataaaaggcccgaaggatacaacctgaaggatgaagaggggaaacttaaggacctgtccacggtgacgtcactgcaggtgccagtgctgaagcccatggatctgatggtggaggtgagccctcggaggatctttgccaatggccacacctaccacatcaactccatctccgtcaacagtgactgcgagacctacatgtcggcggatgacctgcgcatcaacctctggcacctggccatcaccgacaggagcttcaacatcgtggacatcaagccggccaacatggaggaccttacggaggtgatcacagcatctgagttccatccgcaccactgcaacctcttcgtctacagcagcagcaagggctccctgcggctctgcgacatgcgggcagctgccctgtgtgacaagcattccaagctctttgaagagcctgaggaccccagtaaccgctcattcttctcggaaatcatctcctccgtgtccgacgtgaagttcagccacagcggccgctacatgctcacccgggactaccttacagtcaaggtctgggacctgaacatggaggcaagacccatagagacctaccaggtccatgactaccttcggagcaagctctgttccctgtacgagaacgactgcattttcgacaagtttgaatgtgcctggaacgggagcgacagcgtcatcatgaccggggcctacaacaacttcttccgcatgttcgatcggaacaccaagcgggacgtgaccctggaggcctcgagggaaagcagcaagccccgggctgtgctcaagccacggcgcgtgtgcgtggggggcaagcgccggcgtgatgacatcagtgtggacagcttggacttcaccaagaagatcctgcacacggcctggcacccggctgagaacatcattgccatcgccgccaccaacaacctgtacatcttccaggacaaggtaaactctgacatgcactaggtatgtgcagttcccggcccctgccacccagcctcatgcaagtcatccccgacatgaccttcacgaccgcaatgcaaggaggggaagaaagtcacagcactgatgaggacagctgcagaggtggcagtgtgtggacacaggaagtttgggccccctccctgccccagctttcctaggccagaattgtgtttggcagtaattgtctgtttaaaaaaataaaaaggaaaggaagcgttcaccgccacaaatcataaaa

SEQ ID NO: 83187 - DNA, 1293 bp, Artificial Sequence
  derived and/or modified sequence
atgggcaagagagacaccgccgacatcatcagcaccgtggagttcaaccacaccggcgagctgctggccaccggcgacaagggcggcagagtggtgatcttccagagagagcccgagagcaagaacgccccccacagccagggcgagtacgacgtgtacagcaccttccagagccacgagcccgagttcgactacctgaagagcctggagatcgaggagaagatcaacaagatcaagtggctgccccagcagaacgccgcccacagcctgctgagcaccaacgacaagaccatcaagctgtggaagatcaccgagagagacaagagacccgagggctacaacctgaaggacgaggagggcaagctgaaggacctgagcaccgtgaccagcctgcaggtgcccgtgctgaagcccatggacctgatggtggaggtgagccccagaagaatcttcgccaacggccacacctaccacatcaacagcatcagcgtgaacagcgactgcgagacctacatgagcgccgacgacctgagaatcaacctgtggcacctggccatcaccgacagaagcttcaacatcgtggacatcaagcccgccaacatggaggacctgaccgaggtgatcaccgccagcgagttccacccccaccactgcaacctgttcgtgtacagcagcagcaagggcagcctgagactgtgcgacatgagagccgccgccctgtgcgacaagcacagcaagctgttcgaggagcccgaggaccccagcaacagaagcttcttcagcgagatcatcagcagcgtgagcgacgtgaagttcagccacagcggcagatacatgctgaccagagactacctgaccgtgaaggtgtgggacctgaacatggaggccagacccatcgagacctaccaggtgcacgactacctgagaagcaagctgtgcagcctgtacgagaacgactgcatcttcgacaagttcgagtgcgcctggaacggcagcgacagcgtgatcatgaccggcgcctacaacaacttcttcagaatgttcgacagaaacaccaagagagacgtgaccctggaggccagcagagagagcagcaagcccagagccgtgctgaagcccagaagagtgtgcgtgggcggcaagagaagaagagacgacatcagcgtggacagcctggacttcaccaagaagatcctgcacaccgcctggcaccccgccgagaacatcatcgccatcgccgccaccaacaacctgtacatcttccaggacaaggtgaacagcgacatgcactag

SEQ ID NO: 83188 - protein, 250 aa, Artificial Sequence
  derived and/or modified sequence
MDQEEGLKALDNIVTQFNAYEDFLDSQITTVDLYYLEDETLARQLVELGYRGTGERVKREDFEARKAAIEIARLAERAQQKTLTSAGKDLQDNFLTALAMREEDNRSGKLSLNQQETDAAHILKKQLASVIFIRDRNSHGQEISGYIDYAHRLKTEDFEVYFTGKKRLLPRPTDISFYNWDADIAVSNSSPNYQVIADNPEGLLFRYKRDRKILNVDPKAQPGDNSTRITILTELYVQAVIFDHISRRKT

SEQ ID NO: 83189 - DNA, 753 bp, Artificial Sequence
  derived and/or modified sequence
atggatcaggaagaggggctgaaggccttggacaatattgtcactcaattcaacgcctatgaagatttcctggactcgcagatcactactgtggacttgtactacctggaggatgaaaccctggcccgccagttggtggagctaggctaccgagggactggagagagagtgaaaagggaagattttgaagcaaggaaagcggctatagagattgcaagactggctgaaagagctcagcaaaagacgctaacaagtgctggtaaagacctacaagataattttctgacggccctggcaatgagagaagaagacaatcgcagtggaaaactgagtctaaatcaacaggagactgatgctgctcatatcttgaagaagcaactggcatccgtgatctttattcgtgacagaaattctcatgggcaagagatatcaggatacatcgactatgcccacaggctaaagacggaagattttgaagtctactttactggaaaaaaaagacttcttccaaggcctacagatataagcttttacaactgggacgctgatattgctgttagtaattcaagtcccaactatcaagtgattgccgataatccagaaggcttacttttcagatacaaaagagacagaaaaattcttaatgtggacccaaaggcgcagccaggtgacaactctactagaatcactatcctgacagaactctacgtacaagctgtcatttttgaccacatttccagaaggaagacttaa

SEQ ID NO: 83190 - DNA, 753 bp, Artificial Sequence
  derived and/or modified sequence
atggaccaggaggagggcctgaaggccctggacaacatcgtgacccagttcaacgcctacgaggacttcctggacagccagatcaccaccgtggacctgtactacctggaggacgagaccctggccagacagctggtggagctgggctacagaggcaccggcgagagagtgaagagagaggacttcgaggccagaaaggccgccatcgagatcgccagactggccgagagagcccagcagaagaccctgaccagcgccggcaaggacctgcaggacaacttcctgaccgccctggccatgagagaggaggacaacagaagcggcaagctgagcctgaaccagcaggagaccgacgccgcccacatcctgaagaagcagctggccagcgtgatcttcatcagagacagaaacagccacggccaggagatcagcggctacatcgactacgcccacagactgaagaccgaggacttcgaggtgtacttcaccggcaagaagagactgctgcccagacccaccgacatcagcttctacaactgggacgccgacatcgccgtgagcaacagcagccccaactaccaggtgatcgccgacaaccccgagggcctgctgttcagatacaagagagacagaaagatcctgaacgtggaccccaaggcccagcccggcgacaacagcaccagaatcaccatcctgaccgagctgtacgtgcaggccgtgatcttcgaccacatcagcagaagaaagacctag

SEQ ID NO: 83191 - DNA, 753 bp, Artificial Sequence
  derived and/or modified sequence
atggatcaagaagaaggactgaaagcactcgacaatatcgtcactcagtttaatgcttacgaggacttcctggacagtcaaataacaaccgtcgatctatattacctcgaagatgagactctagcccgccaactcgtggagttaggttaccgaggcaccggggaaagagtgaaacgggaggacttcgaagcacgaaaggcagccatagagatcgcccgtcttgccgagcgtgcacagcagaaaactctcacaagtgcaggaaaggacctccaggacaatttcctgacggctcttgccatgagggaagaggataaccgttctggtaagctctcgctgaatcagcaggagaccgacgcggctcacatcctaaagaaacagctcgccagcgtaatcttcatccgggaccgcaacagccatgggcaggagatcagcggctatatagattacgcgcatcggctaaaaacagaagatttcgaggtgtactttacaggaaaaaagcgccttctcccacgcccaaccgatatctccttctataattgggacgccgacatcgctgtgtcaaactcgtctccaaactatcaggtgattgccgacaaccccgaggggctgctttttcggtacaaaagagaccgaaagatactgaatgtcgatcctaaagcacagcccggcgacaactccacacgcataacaatcctcaccgagctgtacgttcaggccgtgatattcgaccacattagccgccggaagacatag

SEQ ID NO: 83192 - DNA, 753 bp, Artificial Sequence
  derived and/or modified sequence
atggaccaggaggagggcctgaaggccctggacaacatcgtgacccagttcaatgcctatgaggacttcctggacagccagatcaccaccgtggacctgtactacctggaggatgagaccctggcccggcagctggtggagctgggctaccggggcactggagagcgggtgaagcgggaggactttgaggccaggaaggccgccattgaaattgcccggctggccgagcgggcccagcagaagaccctgaccagcgctgggaaggacctgcaggacaacttcctgacagccctggccatgagggaggaggacaacagaagtggcaagctgagcctgaaccagcaggagacagatgctgcccacatcctgaagaagcagctggccagcgtcatcttcatccgggacaggaacagccacggccaggagatcagcggctacattgattatgcccaccggctgaagacagaggactttgaggtgtacttcaccgggaagaagaggctgctgccccggcccacagacatctccttctacaactgggatgctgacattgctgtgagcaacagcagccccaactaccaggtgattgctgacaaccctgagggcctgctcttccgctacaagagggacaggaagatcctgaatgtggaccccaaggcccagcccggggacaacagcacccgcatcaccatcctgacagagctgtatgtgcaggccgtcatctttgaccacatcagcaggaggaagacctag

SEQ ID NO: 83193 - DNA, 753 bp, Artificial Sequence
  derived and/or modified sequence
atggaccaggaggagggcctgaaggccctggacaacatcgtgacccagtttaatgcatacgaggacttcctggattctcagattactacagtggacctctattacctggaggacgagacccttgccaggcagcttgttgagcttggctacagggggacaggcgagcgagttaaacgcgaagacttcgaagccaggaaagccgccatcgaaattgctaggctggcagagcgagcacaacagaaaactcttacaagcgccggcaaagatttacaagataattttctcacagcattggctatgcgcgaggaggataatagatccggcaagttgtccctgaaccagcaggagaccgatgctgcacacattctgaagaaacagcttgcgtcggtcatctttatccgcgacagaaattctcacggacaggaaattagtggctacatagattatgctcaccggctaaaaaccgaggactttgaggtgtacttcactggcaaaaaaaggcttttaccacggcctactgatatttctttttataactgggatgctgatatcgcagtgagcaacagctctcccaactaccaggtgatcgcagacaaccctgaaggcctgctgtttaggtataaacgcgatcggaagatcctcaacgtggatcccaaagctcagcctggcgacaacagcacccgaataacaatactgactgaactgtacgtacaggctgttattttcgatcacatctcaagacggaagacgtag

SEQ ID NO: 83194 - DNA, 753 bp, Artificial Sequence
  derived and/or modified sequence
atggaccaggaggaagggcttaaagcactggataacatcgtaacacagttcaatgcctacgaagacttcctggactcacagataacaaccgtggacctctactatctggaggatgaaacgttggcacgacagctcgttgagctgggctatcggggaactggcgagagagtcaagcgggaagatttcgaagcccgtaaagcagcgatcgaaatcgccagattagcggagcgggcacaacagaaaactctgacttctgccggtaaggaccttcaggacaactttctgacggctttggcaatgagggaggaagacaatcgttccggaaaactatcgctcaatcagcaggaaaccgatgccgctcatattctgaagaagcagttggcttctgtcattttcattagagatcgtaattcccacggacaggaaatttctgggtatatcgattatgcacacagacttaagaccgaggattttgaggtatattttaccggaaagaaaaggttgctaccacgacccaccgatatttctttttataactgggatgctgacattgctgtgtccaacagttcaccaaactaccaggtgattgccgacaaccccgaagggttgttattcaggtataaacgggatagaaaaatcctcaacgtggaccctaaggcccagccgggtgataattctacacggattacaattttgaccgaactgtatgtccaggccgtgatattcgatcacatctcaaggcggaaaacatag

SEQ ID NO: 83195 - protein, 836 aa, Artificial Sequence
  derived and/or modified sequence
MHPLGLCNNNDEEDLYEYGWVGVVKLEQPELDPKPCLTVLGKAKRAVQRGATAVIFDVSENPEAIDQLNQGSEDPLKRPVVYVKGADAIKLMNIVNKQKVARARIQHRPPRQPTEYFDMGIFLAFFVVVSLVCLILLVKIKLKQRRSQNSMNRLAVQALEKMETRKFNSKSKGRREGSCGALDTLSSSSTSDCAICLEKYIDGEELRVIPCTHRFHRKCVDPWLLQHHTCPHCRHNIIEQKGNPSAVCVETSNLSRGRQQRVTLPVHYPGRVHRTNAIPAYPTRTSMDSHGNPVTLLTMDRHGEQSLYSPQTPAYIRSYPPLHLDHSLAAHRCGLEHRAYSPAHPFRRPKLSGRSFSKAACFSQYETMYQHYYFQGLSYPEQEGQSPPSLAPRGPARAFPPSGSGSLLFPTVVHVAPPSHLESGSTSSFSCYHGHRSVCSGYLADCPGSDSSSSSSSGQCHCSSSDSVVDCTEVSNQGVYGSCSTFRSSLSSDYDPFIYRSRSPCRASEAGGSGSSGRGPALCFEGSPPPEELPAVHSHGAGRGEPWPGPASPSGDQVSTCSLEMNYSSNSSLEHRGPNSSTSEVGLEASPGAAPDLRRTWKGGHELPSCACCCEPQPSPAGPSAGAAGSSTLFLGPHLYEGSGPAGGEPQSGSSQGLYGLHPDHLPRTDGVKYEGLPCCFYEEKQVARGGGGGSGCYTEDYSVSVQYTLTEEPPPGCYPGARDLSQRIPIIPEDVDCDLGLPSDCQGTHSLGSWGGTRGPDTPRPHRGLGATREEERALCCQARALLRPGCPPEEAGAVRANFPSALQDTQESSTTATEAAGPRSHSADSSSPGA

SEQ ID NO: 83196 - protein, 936 aa, Artificial Sequence
  derived and/or modified sequence
MRPRSGGRPGATGRRRRRLRRRPRGLRCSRLPPPPPLPLLLGLLLAAAGPGAARAKETAFVEVVLFESSPSGDYTTYTTGLTGRFSRAGATLSAEGEIVQMHPLGLCNNNDEEDLYEYGWVGVVKLEQPELDPKPCLTVLGKAKRAVQRGATAVIFDVSENPEAIDQLNQGSEDPLKRPVVYVKGADAIKLMNIVNKQKVARARIQHRPPRQPTEYFDMGIFLAFFVVVSLVCLILLVKIKLKQRRSQNSMNRLAVQALEKMETRKFNSKSKGRREGSCGALDTLSSSSTSDCAICLEKYIDGEELRVIPCTHRFHRKCVDPWLLQHHTCPHCRHNIIEQKGNPSAVCVETSNLSRGRQQRVTLPVHYPGRVHRTNAIPAYPTRTSMDSHGNPVTLLTMDRHGEQSLYSPQTPAYIRSYPPLHLDHSLAAHRCGLEHRAYSPAHPFRRPKLSGRSFSKAACFSQYETMYQHYYFQGLSYPEQEGQSPPSLAPRGPARAFPPSGSGSLLFPTVVHVAPPSHLESGSTSSFSCYHGHRSVCSGYLADCPGSDSSSSSSSGQCHCSSSDSVVDCTEVSNQGVYGSCSTFRSSLSSDYDPFIYRSRSPCRASEAGGSGSSGRGPALCFEGSPPPEELPAVHSHGAGRGEPWPGPASPSGDQVSTCSLEMNYSSNSSLEHRGPNSSTSEVGLEASPGAAPDLRRTWKGGHELPSCACCCEPQPSPAGPSAGAAGSSTLFLGPHLYEGSGPAGGEPQSGSSQGLYGLHPDHLPRTDGVKYEGLPCCFYEEKQVARGGGGGSGCYTEDYSVSVQYTLTEEPPPGCYPGARDLSQRIPIIPEDVDCDLGLPSDCQGTHSLGSWGGTRGPDTPRPHRGLGATREEERALCCQARALLRPGCPPEEAGAVRANFPSALQDTQESSTTATEAAGPRSHSADSSSPGA

SEQ ID NO: 83197 - DNA, 2511 bp, Artificial Sequence
  derived and/or modified sequence
atgcaccccctgggcctgtgcaacaacaacgacgaggaggacctgtacgagtacggctgggtgggcgtggtgaagctggagcagcccgagctggaccccaagccctgcctgaccgtgctgggcaaggccaagagagccgtgcagagaggcgccaccgccgtgatcttcgacgtgagcgagaaccccgaggccatcgaccagctgaaccagggcagcgaggaccccctgaagagacccgtggtgtacgtgaagggcgccgacgccatcaagctgatgaacatcgtgaacaagcagaaggtggccagagccagaatccagcacagaccccccagacagcccaccgagtacttcgacatgggcatcttcctggccttcttcgtggtggtgagcctggtgtgcctgatcctgctggtgaagatcaagctgaagcagagaagaagccagaacagcatgaacagactggccgtgcaggccctggagaagatggagaccagaaagttcaacagcaagagcaagggcagaagagagggcagctgcggcgccctggacaccctgagcagcagcagcaccagcgactgcgccatctgcctggagaagtacatcgacggcgaggagctgagagtgatcccctgcacccacagattccacagaaagtgcgtggacccctggctgctgcagcaccacacctgcccccactgcagacacaacatcatcgagcagaagggcaaccccagcgccgtgtgcgtggagaccagcaacctgagcagaggcagacagcagagagtgaccctgcccgtgcactaccccggcagagtgcacagaaccaacgccatccccgcctaccccaccagaaccagcatggacagccacggcaaccccgtgaccctgctgaccatggacagacacggcgagcagagcctgtacagcccccagacccccgcctacatcagaagctacccccccctgcacctggaccacagcctggccgcccacagatgcggcctggagcacagagcctacagccccgcccaccccttcagaagacccaagctgagcggcagaagcttcagcaaggccgcctgcttcagccagtacgagaccatgtaccagcactactacttccagggcctgagctaccccgagcaggagggccagagcccccccagcctggcccccagaggccccgccagagccttcccccccagcggcagcggcagcctgctgttccccaccgtggtgcacgtggccccccccagccacctggagagcggcagcaccagcagcttcagctgctaccacggccacagaagcgtgtgcagcggctacctggccgactgccccggcagcgacagcagcagcagcagcagcagcggccagtgccactgcagcagcagcgacagcgtggtggactgcaccgaggtgagcaaccagggcgtgtacggcagctgcagcaccttcagaagcagcctgagcagcgactacgaccccttcatctacagaagcagaagcccctgcagagccagcgaggccggcggcagcggcagcagcggcagaggccccgccctgtgcttcgagggcagccccccccccgaggagctgcccgccgtgcacagccacggcgccggcagaggcgagccctggcccggccccgccagccccagcggcgaccaggtgagcacctgcagcctggagatgaactacagcagcaacagcagcctggagcacagaggccccaacagcagcaccagcgaggtgggcctggaggccagccccggcgccgcccccgacctgagaagaacctggaagggcggccacgagctgcccagctgcgcctgctgctgcgagccccagcccagccccgccggccccagcgccggcgccgccggcagcagcaccctgttcctgggcccccacctgtacgagggcagcggccccgccggcggcgagccccagagcggcagcagccagggcctgtacggcctgcaccccgaccacctgcccagaaccgacggcgtgaagtacgagggcctgccctgctgcttctacgaggagaagcaggtggccagaggcggcggcggcggcagcggctgctacaccgaggactacagcgtgagcgtgcagtacaccctgaccgaggagcccccccccggctgctaccccggcgccagagacctgagccagagaatccccatcatccccgaggacgtggactgcgacctgggcctgcccagcgactgccagggcacccacagcctgggcagctggggcggcaccagaggccccgacacccccagaccccacagaggcctgggcgccaccagagaggaggagagagccctgtgctgccaggccagagccctgctgagacccggctgcccccccgaggaggccggcgccgtgagagccaacttccccagcgccctgcaggacacccaggagagcagcaccaccgccaccgaggccgccggccccagaagccacagcgccgacagcagcagccccggcgcctag

SEQ ID NO: 83198 - DNA, 1932 bp, Artificial Sequence
  derived and/or modified sequence
gtgcccagcgtgtggagaagcaccctgatggagagaagctgcggcagcagccccgtgctgaccggcttcaccggcagcgcctggacccccctgctgcagcaccacacctgcccccactgcagacacaacatcatcgagcagaagggcaaccccagcgccgtgtgcgtggagaccagcaacctgagcagaggcagacagcagagagtgaccctgcccgtgcactaccccggcagagtgcacagaaccaacgccatccccgcctaccccaccagaaccagcatggacagccacggcaaccccgtgaccctgctgaccatggacagacacggcgagcagagcctgtacagcccccagacccccgcctacatcagaagctacccccccctgcacctggaccacagcctggccgcccacagatgcggcctggagcacagagcctacagccccgcccaccccttcagaagacccaagctgagcggcagaagcttcagcaaggccgcctgcttcagccagtacgagaccatgtaccagcactactacttccagggcctgagctaccccgagcaggagggccagagcccccccagcctggcccccagaggccccgccagagccttcccccccagcggcagcggcagcctgctgttccccaccgtggtgcacgtggccccccccagccacctggagagcggcagcaccagcagcttcagctgctaccacggccacagaagcgtgtgcagcggctacctggccgactgccccggcagcgacagcagcagcagcagcagcagcggccagtgccactgcagcagcagcgacagcgtggtggactgcaccgaggtgagcaaccagggcgtgtacggcagctgcagcaccttcagaagcagcctgagcagcgactacgaccccttcatctacagaagcagaagcccctgcagagccagcgaggccggcggcagcggcagcagcggcagaggccccgccctgtgcttcgagggcagccccccccccgaggagctgcccgccgtgcacagccacggcgccggcagaggcgagccctggcccggccccgccagccccagcggcgaccaggtgagcacctgcagcctggagatgaactacagcagcaacagcagcctggagcacagaggccccaacagcagcaccagcgaggtgggcctggaggccagccccggcgccgcccccgacctgagaagaacctggaagggcggccacgagctgcccagctgcgcctgctgctgcgagccccagcccagccccgccggccccagcgccggcgccgccggcagcagcaccctgttcctgggcccccacctgtacgagggcagcggccccgccggcggcgagccccagagcggcagcagccagggcctgtacggcctgcaccccgaccacctgcccagaaccgacggcgtgaagtacgagggcctgccctgctgcttctacgaggagaagcaggtggccagaggcggcggcggcggcagcggctgctacaccgaggactacagcgtgagcgtgcagtacaccctgaccgaggagcccccccccggctgctaccccggcgccagagacctgagccagagaatccccatcatccccgaggacgtggactgcgacctgggcctgcccagcgactgccagggcacccacagcctgggcagctggggcggcaccagaggccccgacacccccagaccccacagaggcctgggcgccaccagagaggaggagagagccctgtgctgccaggccagagccctgctgagacccggctgcccccccgaggaggccggcgccgtgagagccaacttccccagcgccctgcaggacacccaggagagcagcaccaccgccaccgaggccgccggccccagaagccacagcgccgacagcagcagccccggcgcctag

SEQ ID NO: 83199 - DNA, 2811 bp, Artificial Sequence
  derived and/or modified sequence
atgagacccagaagcggcggcagacccggcgccaccggcagaagaagaagaagactgagaagaagacccagaggcctgagatgcagcagactgcccccccccccccccctgcccctgctgctgggcctgctgctggccgccgccggccccggcgccgccagagccaaggagaccgccttcgtggaggtggtgctgttcgagagcagccccagcggcgactacaccacctacaccaccggcctgaccggcagattcagcagagccggcgccaccctgagcgccgagggcgagatcgtgcagatgcaccccctgggcctgtgcaacaacaacgacgaggaggacctgtacgagtacggctgggtgggcgtggtgaagctggagcagcccgagctggaccccaagccctgcctgaccgtgctgggcaaggccaagagagccgtgcagagaggcgccaccgccgtgatcttcgacgtgagcgagaaccccgaggccatcgaccagctgaaccagggcagcgaggaccccctgaagagacccgtggtgtacgtgaagggcgccgacgccatcaagctgatgaacatcgtgaacaagcagaaggtggccagagccagaatccagcacagaccccccagacagcccaccgagtacttcgacatgggcatcttcctggccttcttcgtggtggtgagcctggtgtgcctgatcctgctggtgaagatcaagctgaagcagagaagaagccagaacagcatgaacagactggccgtgcaggccctggagaagatggagaccagaaagttcaacagcaagagcaagggcagaagagagggcagctgcggcgccctggacaccctgagcagcagcagcaccagcgactgcgccatctgcctggagaagtacatcgacggcgaggagctgagagtgatcccctgcacccacagattccacagaaagtgcgtggacccctggctgctgcagcaccacacctgcccccactgcagacacaacatcatcgagcagaagggcaaccccagcgccgtgtgcgtggagaccagcaacctgagcagaggcagacagcagagagtgaccctgcccgtgcactaccccggcagagtgcacagaaccaacgccatccccgcctaccccaccagaaccagcatggacagccacggcaaccccgtgaccctgctgaccatggacagacacggcgagcagagcctgtacagcccccagacccccgcctacatcagaagctacccccccctgcacctggaccacagcctggccgcccacagatgcggcctggagcacagagcctacagccccgcccaccccttcagaagacccaagctgagcggcagaagcttcagcaaggccgcctgcttcagccagtacgagaccatgtaccagcactactacttccagggcctgagctaccccgagcaggagggccagagcccccccagcctggcccccagaggccccgccagagccttcccccccagcggcagcggcagcctgctgttccccaccgtggtgcacgtggccccccccagccacctggagagcggcagcaccagcagcttcagctgctaccacggccacagaagcgtgtgcagcggctacctggccgactgccccggcagcgacagcagcagcagcagcagcagcggccagtgccactgcagcagcagcgacagcgtggtggactgcaccgaggtgagcaaccagggcgtgtacggcagctgcagcaccttcagaagcagcctgagcagcgactacgaccccttcatctacagaagcagaagcccctgcagagccagcgaggccggcggcagcggcagcagcggcagaggccccgccctgtgcttcgagggcagccccccccccgaggagctgcccgccgtgcacagccacggcgccggcagaggcgagccctggcccggccccgccagccccagcggcgaccaggtgagcacctgcagcctggagatgaactacagcagcaacagcagcctggagcacagaggccccaacagcagcaccagcgaggtgggcctggaggccagccccggcgccgcccccgacctgagaagaacctggaagggcggccacgagctgcccagctgcgcctgctgctgcgagccccagcccagccccgccggccccagcgccggcgccgccggcagcagcaccctgttcctgggcccccacctgtacgagggcagcggccccgccggcggcgagccccagagcggcagcagccagggcctgtacggcctgcaccccgaccacctgcccagaaccgacggcgtgaagtacgagggcctgccctgctgcttctacgaggagaagcaggtggccagaggcggcggcggcggcagcggctgctacaccgaggactacagcgtgagcgtgcagtacaccctgaccgaggagcccccccccggctgctaccccggcgccagagacctgagccagagaatccccatcatccccgaggacgtggactgcgacctgggcctgcccagcgactgccagggcacccacagcctgggcagctggggcggcaccagaggccccgacacccccagaccccacagaggcctgggcgccaccagagaggaggagagagccctgtgctgccaggccagagccctgctgagacccggctgcccccccgaggaggccggcgccgtgagagccaacttccccagcgccctgcaggacacccaggagagcagcaccaccgccaccgaggccgccggccccagaagccacagcgccgacagcagcagccccggcgcctag

SEQ ID NO: 83200 - DNA, 2511 bp, Artificial Sequence
  derived and/or modified sequence
atgcatcccctagggttgtgcaacaacaatgacgaagaagatctctatgaatatggctgggtaggtgtcgtgaagctggagcagcccgagttggacccaaagccctgtctaaccgtcctcgggaaggctaaacgcgccgtccagagaggggcaaccgccgtcatcttcgacgtatccgaaaatccggaagctatcgatcagctgaaccagggcagcgaagaccctctcaaaagaccagttgtttacgtgaagggcgctgatgcaataaagctgatgaacatcgtcaacaagcaaaaagtagcgagggctagaatccagcatcgccccccccgtcaaccgacagaatattttgacatggggatcttcctggccttcttcgtggtcgtgtcactggtgtgcctgatccttctggtgaagattaaattaaagcagcgacgtagccagaattcaatgaataggctcgccgtgcaggcactggaaaagatggagactcgaaagttcaattccaagagcaaaggaagacgggaaggatcctgcggcgctctggacaccttatcatcctcttccactagcgactgtgctatatgtctggagaagtatatcgatggcgaagagctacgcgtgatcccatgcacccacaggttccacaggaaatgtgtcgacccatggttgctgcagcatcacacctgtcctcattgcagacataatataatcgagcaaaagggtaacccatccgccgtgtgtgttgagaccagcaatctcagcaggggtcgccagcaaagagtgactcttcctgtgcattaccctggcagagtccaccgcaccaacgcaattcccgcttatcctacaagaacatccatggactctcatggcaatccagttacattgttgacaatggataggcatggcgagcaatctctgtactctccacagacaccggcctacatccgaagttacccacccctgcacttagaccacagcctcgccgcgcacaggtgtggattagaacacagggcttattctccagcccacccttttcggaggccaaaactgagcggcaggtcctttagcaaagcagcctgtttcagccagtacgaaaccatgtatcagcactactatttccagggactgtcctaccctgaacaggaaggccagagcccacctagtctggcgccacgggggcccgccagggcatttcccccctctggctccggcagcctgctcttccccacggtcgtccatgtggctccacccagtcacctggagtcgggtagtacatcttctttcagctgttaccacggacatcgctctgtgtgtagtggctatttagccgattgtccaggatctgactcctcgagttcttcctcgtcaggacagtgtcactgcagttcatcagactccgtcgtcgactgcaccgaggtttccaaccagggggtttatggtagctgttctacttttaggagttcactcagttctgattacgacccgttcatttacaggagcagaagtccatgcagagcatcagaagctggaggcagtgggagctccggcaggggacctgctttgtgttttgaaggctctccgccacccgaggagctcccggctgtgcattcgcacggggccgggagaggtgagccatggcctggccctgccagtcccagcggcgaccaggtgtctacttgttcactagagatgaactatagcagcaatagttcccttgaacacaggggccctaattcctcgacgtctgaggtcggcttagaggcatctcccggtgccgcacctgatctgagacgcacttggaaaggaggacacgagctgcctagctgtgcttgctgctgtgagccccagccgtcccccgccggaccatccgcaggggctgcaggaagcagcacactgtttctagggccccacctgtatgagggctccggcccagcaggaggcgaacctcaatcaggcagttctcaggggttgtatggtctgcacccagaccatctcccaagaaccgatggggtgaagtatgagggcctgccctgctgcttttacgaagaaaaacaagtagccaggggtggggggggcggctctggatgttacacggaagactattcagtctccgtgcagtacactctgactgaggagccccctcccgggtgctatcccggcgcgcgcgatttaagccagcgcattcctatcattccggaggacgtggactgcgatctgggcctgccctcagactgtcagggaacgcatagtctaggttcctgggggggaacgaggggaccagacactcctaggcctcatagaggattgggcgcgaccagggaggaagagcgtgctctttgttgccaggccagagccttgctgcgccccggttgcccacctgaagaggcaggggctgtacgtgccaactttccaagtgccttgcaagacactcaagaatccagcactaccgctaccgaagccgcaggaccgcgttctcactctgctgactcaagttcacccggcgcatag

SEQ ID NO: 83201 - DNA, 2511 bp, Artificial Sequence
  derived and/or modified sequence
atgcacccactgggcctgtgcaacaataacgatgaagaggacctctacgaatatggatgggtcggcgttgtaaagttggagcagcccgagttggacccaaaaccgtgccttaccgttctgggaaaggctaagagagccgtgcaacgcggtgccaccgcagtgatctttgacgtgagcgagaaccctgaagctattgaccagctgaatcaaggttcagaggatcccctcaagcgacccgtggtttacgtcaagggagctgacgcaattaagctgatgaatatagtgaacaagcaaaaagtggcacgggcgagaatccaacaccgtcctcccaggcaacctactgaatactttgacatgggcatcttcctcgccttctttgtggtggtcagtttggtatgtcttattctgctggtcaagatcaagctgaagcaacggaggtcacagaactccatgaatcgcctggcagtacaagctcttgaaaaaatggaaacccgcaagttcaactccaaatcaaaggggagaagagaggggtcgtgtggggctttggataccttaagcagctcaagtacaagcgattgcgccatatgtttggaaaagtacattgacggggaggagctgagggtgattccttgtacccatcgcttccatcgcaagtgcgtggacccgtggttgctgcaacatcacacatgcccccactgccggcataatattattgagcagaaggggaatcctagtgctgtatgcgtagagaccagtaatctgagtcgcgggagacaacagagagtgactctgcccgtccattatcctggccgggttcacagaacaaatgctatccccgcatacccaacacgcacatctatggattctcatggaaatcctgttacactcttaaccatggatcgccatggcgagcagtcactgtacagcccacagacccctgcttatatcagaagttaccctcccctgcatctggaccattcactggccgcacaccggtgcggtctggaacatcgagcttacagcccggcccaccctttcaggaggcccaagctgtccggcagatcgttcagcaaggccgcatgcttcagtcagtatgaaactatgtaccagcactattactttcagggtctctcctacccggagcaggagggccagtccccccccagtctggcaccccgcggtccggcacgcgctttccccccttccgggtcaggaagtctgcttttccctaccgtcgtccatgttgcacccccttcacatctggagagcgggagcactagctccttctcatgctatcatgggcatcggagcgtctgtagcggctacctcgccgactgcccaggatcggatagcagttcttcttcatcttcaggtcaatgccattgttcctcaagcgacagtgtggtggactgtaccgaagtttctaaccagggcgtgtacggcagctgttcaacattccgtagctcattgagctcagactacgatccctttatctataggtccaggtctccttgtcgggcctccgaagccggcggttcaggtagtagtgggcgggggcccgctttgtgttttgagggttcgcccccgccagaggagctgcccgccgtccattctcacggggcaggccgtggtgagccctggccgggtcccgcatccccctccggtgaccaggttagcacctgcagtcttgagatgaattatagctctaacagttccctggaacacagagggcccaacagctccacatctgaggtcggattggaggccagcccaggggccgctccggacctacgtcggacatggaaaggtggacacgagctgcccagctgtgcgtgttgttgtgaaccacagccgtcgcccgctggtcccagcgcgggggccgccggttcttcaacactcttcctgggcccgcatctgtatgaaggatcaggtcctgcagggggggaaccccagagcggctcctctcaggggttgtatggactacaccctgaccacctgccacggaccgatggtgttaagtacgagggtttgccatgttgtttttacgaagagaaacaggttgcccggggaggaggcggcggatccgggtgctatacagaggactattctgtttctgtgcagtatactctcacggaggaaccaccacccggctgttaccctggagctcgagatttaagccagcgcatacctatcatcccggaggatgtggactgcgacttgggcctgccttctgattgccagggcacacacagtctgggcagctggggcggcactcggggaccggatacaccccgccctcataggggccttggagctacccgggaagaagaacgcgctctgtgttgtcaggctcgcgcccttttacgcccaggctgcccacctgaggaggcgggtgccgtccgagccaattttccgtcggctttacaggatacgcaggaatcatccaccaccgctaccgaggccgctggccccagaagccactctgctgactcctcctcccctggcgcgtag

SEQ ID NO: 83202 - DNA, 2511 bp, Artificial Sequence
  derived and/or modified sequence
atgcatcccctgggtctctgtaataacaatgatgaggaggacctgtatgagtacggttgggttggcgtcgtcaagctggaacagcctgaattggatcccaaaccatgcctcacagtgctcggtaaggccaagagagccgttcagagaggagcaacagctgtcatcttcgacgtaagcgaaaaccctgaagcaatagatcagttaaatcaggggagcgaggacccactaaaacggcccgtggtttatgtcaaaggcgctgacgccattaagcttatgaatatcgtgaacaaacagaaggtagcgcgggctcggattcagcacaggccacctcggcagcctaccgagtacttcgatatgggcatttttctcgccttcttcgttgtcgtgtcactcgtgtgtctcattctgctggtaaaaataaaactcaaacagcgtaggtcccagaactcgatgaatcgcctggccgtacaagcactggaaaaaatggagactaggaaatttaattcaaagagcaagggcagaagagagggctcttgtggagcacttgatacactgtcaagctcttcaacttctgattgtgctatttgtctcgaaaaatacatcgacggggaggagctgcgggtgattccttgcacacaccgatttcacagaaagtgcgtggacccttggctactccagcaccatacttgtcctcattgtcggcacaatattatcgagcagaaggggaacccatctgctgtgtgtgtggagactagcaacttgagccgtggacgtcagcagagggtaaccctgcccgtgcattacccagggagggtgcaccgaaccaacgcgatcccagcttatcccacgcgcacctccatggactcacatggaaatccagtgacgcttttgactatggaccgacacggcgagcaaagtctgtattcccctcagacaccagcttatattaggtcctaccctcccctgcacctggatcacagcttagccgcgcatcgctgcggcctggaacatagggcgtacagccccgcacatccttttcgacgccctaagctgtcaggcaggtccttttcaaaggctgcgtgtttcagccaatatgagacgatgtatcagcactattacttccagggacttagttatccagagcaagaggggcaatctcctccatcgctcgcacccaggggtccggcccgagcattcccccctagtgggtctggctctcttctattccctaccgtcgtccacgtagcacctccatctcatctggagagtggaagtacttccagtttcagctgctaccatggccaccgaagtgtctgctccggttatttggccgactgtcctggtagcgactccagcagtagctcctcctctggccagtgtcattgctcctccagtgactccgtggtggattgtaccgaggtgtcaaaccagggcgtgtacggttcctgtagcaccttccgatcatccttgagctcagactatgacccctttatttacaggtcccgaagcccgtgccgagcgtccgaagccggaggcagcggcagtagtggccgggggcccgcattatgctttgaggggagtccacctcccgaagaacttccagcagttcactcacatggcgcaggaagaggtgaaccctggccgggccccgcatcgccctccggcgatcaggtgtctacatgctccctcgagatgaattacagtagtaacagcagtctggagcacagaggccctaactcctcaactagcgaagtgggattagaagctagccctggcgccgcgcccgatctgcggcgaacgtggaagggagggcacgaattgccaagttgcgcctgctgttgtgagccacagccttctccagccggccctagcgcgggcgctgccggcagtagcactctgtttctggggccccatttgtacgaggggtcaggccccgcggggggcgagccccaaagtggctctagccagggcctctatggcctgcatccggatcatctgccaagaacagacggggtgaaatacgaagggctcccatgttgcttctatgaagagaagcaagttgccagaggaggcgggggaggatctggatgctacactgaggattactccgtgtctgttcaatatactcttacagaggaaccaccccccggctgctatcctggggcgcgagatttatcccagagaatccccatcatccctgaggatgttgattgcgacctcggcctgccctcagattgccaggggacccactcgctcgggagctggggcgggacgaggggccccgacacccctcgaccacaccgggggctgggcgccaccagggaggaagaacgggccctttgttgccaggcccgagctctgcttagacctgggtgtccccctgaggaggctggagcagtgcgggctaattttccctcagcgttgcaggacacacaggaaagctctacgactgccacagaagcagccgggccacggtcacactcagctgatagttcttcccctggggcgtag

SEQ ID NO: 83203 - DNA, 1932 bp, Artificial Sequence
  derived and/or modified sequence
gtgccatcagtgtggcggtccaccctaatggaacgttcctgtggatccagtccagtcttgaccggatttaccggctctgcatggactcctctgctgcagcaccatacctgccctcactgcagacacaacattattgaacagaagggaaacccctctgcggtttgtgtggaaacgtccaacttgtctcgcggccgccagcagagggtgacactgcctgttcattaccccggcagagttcaccgcaccaatgcaatcccggcatatccgacacggacttctatggactcccacgggaaccccgtaactctgctgaccatggaccgtcatggggagcagtccctgtacagcccgcaaacccctgcctacatacgctcgtacccccctctgcaccttgatcatagcttggccgcccatcggtgtggccttgagcatagggcatattcccccgctcaccctttcaggcggcctaagttatcgggtcgcagtttcagcaaagcagcctgcttcagtcagtacgagaccatgtatcagcactactacttccaaggactatcataccctgagcaggagggtcagtcgccaccttccctggctccaagagggccagctcgcgcattccctccgtccggcagtggatcactactgttcccaactgtggtccacgtggcgcccccctcacacttagaaagcgggagcacgagtagcttcagctgttaccacgggcaccggtctgtctgcagcggctacctggccgattgtcccgggagtgactcttcttcctcatccagctctggccagtgccactgcagctccagtgactccgtggtggattgcaccgaggtttcaaatcagggcgtttacgggagctgtagcacctttcggagcagcctgagctccgactatgacccattcatttataggagccggtccccatgtcgagcaagcgaggccggaggttcgggatcctcaggacggggaccggctctctgtttcgagggaagtcctcctcccgaggagcttcctgctgtgcactcgcacggggctggaagaggcgaaccatggccaggtccagcttcacctagtggcgatcaggtgtcaacttgttcactggagatgaattattcaagcaacagcagcctagaacatcgaggccctaactcttccaccagcgaggtcggactcgaggcgtcacccggcgccgcgcctgatctgagaaggacgtggaaagggggacacgaattgccatcatgcgcctgctgttgcgagccacagccctctcccgcagggccttccgccggggccgcaggatcttcaactctgttcctggggcctcacctctacgaaggctccggaccagccggtggcgaaccccaaagtggttccagccaggggctttacgggcttcatcccgaccacttaccacgtacagacggcgtgaaatatgaaggacttccctgctgcttttatgaagagaaacaggtagcccgcggcggcgggggcggctctggctgctacactgaggactattccgtgtccgttcagtatacccttactgaggaacccccgcctggctgctaccccggggcccgcgacttgagccagaggattccaatcatcccagaggacgtcgattgtgacctcggtctaccctccgactgccagggcacccattcactgggttcttggggtggaactcgaggcccagacaccccacggccacacagaggcctgggggccacaagggaggaggagagagccctctgttgtcaagcccgcgccctgctccggcccgggtgcccacctgaggaggcgggggccgtacgagccaatttcccgtccgctctacaggatacccaggagtctagcaccaccgctaccgaagctgctggccctcgttctcactccgccgattcatcttctccgggagcttag

SEQ ID NO: 83204 - DNA, 2811 bp, Artificial Sequence
  derived and/or modified sequence
atgcggcctagaagtgggggtcgccccggagctacgggccgacgcaggcggagactccgaaggagaccccgggggctgcgttgctcccggctgcctccccctcctcctctcccgcttctgctgggtctcctcctggcggccgccggacccggagcagctagggccaaggaaacagcatttgtggaggtagtcctgttcgagtcctcaccatcgggcgactacactacctacaccaccggcctgacgggccgtttctcacgtgccggagctactctatcagctgagggcgaaatagtgcagatgcatccactgggcctctgcaataataatgacgaagaagacctgtacgaatacggatgggtgggagtagtaaaacttgaacaacccgagctagatcctaaaccgtgtctgaccgtcttgggaaaagccaagcgggcagtgcaaagaggcgcaaccgccgtgattttcgacgtgagcgaaaaccccgaggcaattgatcagttgaaccaggggagtgaggaccccctaaagcggcctgtggtgtacgtgaaaggtgcagatgcgatcaaactgatgaacatagttaacaagcagaaggtggcacgcgccagaatccagcaccggcctccaagacagccaaccgagtattttgatatgggtatctttttggcctttttcgtcgtggtatccctcgtgtgtctgatcctccttgtgaaaattaagctgaaacagcggaggtctcagaactccatgaacaggctcgctgttcaggccttggagaagatggagactcgaaagttcaacagcaagtccaaaggccggcgggaaggaagctgcggcgctctagatacactctccagctcatccacttccgattgtgccatatgcctggagaagtacattgatggggaggagttaagagtgattccgtgcacacaccggtttcaccgcaagtgtgtggatccatggctgctccagcatcatacatgtccccattgtagacacaacattattgagcaaaaagggaacccctccgccgtgtgcgtggagaccagtaatctttctagaggtaggcagcagcgcgtgactctgcctgtgcactacccgggaagggtccaccgcacaaacgccatccctgcctacccgactaggacttcgatggacagtcacggtaaccctgtcacactcctaactatggatcggcacggcgagcaatccttatactcgccccagacgcctgcatatatccggagttatccgcccctacacttggatcactccctggctgctcatcggtgtggccttgagcatcgtgcctacagcccagcccatccattcagacgtcctaagctttcaggccgcagcttttcgaaagcggcatgtttttcccagtatgaaactatgtaccaacactactactttcaaggactgagctaccctgaacaggaagggcagagccctcctagcctggcaccacgtggtcctgctcgggctttccccccgagcggtagcgggtcccttctgttcccaaccgtcgtgcatgttgcaccaccttcccacttagagtccggctcaacatctagcttcagctgctatcacggtcatagaagtgtctgcagcggctatttggcggattgccctggcagcgacagtagcagtagctctagctcaggtcagtgccactgctccagttctgacagtgttgtggactgcactgaggtctccaaccaaggagtgtacggctcttgctccactttccgtagttccctgtcctccgactacgacccttttatttatcggagtcgatctccctgtcgcgcttcagaggcgggcggctccggaagctctggccgcggccccgctttgtgtttcgagggaagccctccaccggaggagctccctgccgtgcactcacatggcgccggaaggggtgagccctggccgggcccagcctctccttcaggtgaccaggtcagcacctgtagtttggaaatgaactatagctctaacagtagcctggagcacaggggacccaattcttctacatctgaggtcggcttggaggcatcaccgggagccgccccggacctgcgtagaacttggaagggagggcatgagttgcccagctgcgcttgttgttgcgagccacagccatcaccagccggaccatctgctggcgccgctggctcttccaccttatttcttggtccccatctctacgagggatccggccccgccggaggtgaacctcagtccggctcctcacagggactgtatgggctccatccagaccacctcccaaggaccgatggcgtcaagtatgagggtcttccctgctgtttttatgaagagaagcaggtggcccgcggcggcggcgggggatctggctgctacacggaggattacagcgttagcgtgcagtatacacttactgaagagcccccacctggttgttacccaggggcccgggatctgtctcagcggatacctattatccctgaagacgtggactgtgatttgggtctgcctagcgattgccaaggaacccactccctgggcagctggggcggcactcgcggcccagatacaccacgtcctcataggggactgggagcaacgagagaggaggagagagctctttgttgccaggcgagagccctcctgcggcctggctgtccccccgaagaagctggtgctgttagagccaatttcccctctgcgcttcaggacacgcaagagtcctccactaccgcaaccgaagcagcgggtccacgctcacattcagctgactccagttcccctggtgcctag

SEQ ID NO: 83205 - DNA, 2511 bp, Artificial Sequence
  derived and/or modified sequence
atgcaccccctgggcctgtgcaacaacaatgatgaggaggacctgtatgaatatggctgggtgggcgtggtgaagctggagcagcctgagctggaccccaagccctgcctgactgtgctgggcaaggccaagagagctgtgcagagaggagccacagctgtgatctttgatgtgtctgagaaccctgaggccatcgaccagctgaaccagggcagcgaggaccccctgaagaggcctgtggtgtatgtgaagggagcagatgccatcaagctgatgaacatcgtgaacaagcagaaggtggcccgggcccgcatccagcacaggcctccccggcagcccacagagtactttgacatgggcatcttcctggccttctttgtggtggtgtccctggtgtgcctgatcctgctggtgaagatcaagctgaagcagaggaggagccagaacagcatgaaccggctggccgtgcaggccctggagaagatggagaccaggaagttcaacagcaagagcaagggccggcgggagggcagctgtggggccctggacaccctgagcagcagcagcaccagtgactgtgccatctgcctggagaagtacattgatggagaggagctgcgggtcatcccctgcacccaccgcttccacaggaaatgtgtggacccctggctgctgcagcaccacacctgcccccactgccgccacaacatcatcgagcagaagggcaaccccagcgctgtgtgtgtggagaccagcaacctgagccggggccggcagcagagggtgaccctgcctgtgcactacccaggccgggtgcacaggaccaatgccatcccagcctaccccaccaggacctccatggacagccacggcaaccctgtgaccctgctgaccatggacagacatggagagcagagcctgtacagcccccagaccccagcctacatccgcagctacccacccctgcacctggaccacagcctggccgcccaccgctgtggcctggagcaccgggcctacagccctgcccaccccttcagaagacccaagctgagcggccgctccttcagcaaggccgcctgcttcagccagtatgagaccatgtaccagcactactacttccagggcctgagctacccagagcaggagggccagagcccccccagcctggccccccggggccctgcccgggccttcccccccagcggcagcggcagcctgctcttccccaccgtggtgcacgtggccccacccagccacctggagagcggcagcaccagcagcttcagctgctaccacggccacaggtctgtgtgcagcggctacctggccgactgccccggcagtgacagcagcagcagcagcagcagcggccagtgccactgcagcagcagtgacagcgtggtggactgcacagaggtgagcaaccagggcgtgtatggcagctgcagcaccttccgcagcagcctgagcagtgactatgaccccttcatctaccgcagccgcagcccctgccgggccagcgaggccggcggcagcggcagcagcggccggggccctgccctgtgctttgagggcagccccccacctgaggagctgcctgctgtgcacagccatggagctggccgcggggagccctggccaggccctgccagccccagcggggaccaggtgtccacctgcagcctggagatgaactacagcagcaacagcagcctggagcaccggggccccaacagcagcaccagcgaggtgggcctggaggccagccctggagctgccccagacctgcggaggacctggaagggcggccacgagctgcccagctgtgcctgctgctgtgagccccagcccagccctgctggccccagcgctggagctgctggcagcagcaccctcttcctgggcccccacctgtatgagggcagcggccctgctggaggagagccccagagcggcagcagccagggcctgtatggcctgcacccagaccacctgcccaggacagatggagtgaagtatgagggcctgccctgctgcttctatgaggagaagcaggtggcccggggcggcggcggcggcagcggctgctacacagaggactacagcgtgtctgtgcagtacaccctgacagaggagcccccacctggctgctacccaggggcccgggacctgagccagaggatccccatcatcccagaagatgtggactgtgacctgggcctgcccagcgactgccagggcacccacagcctgggctcctggggcggcacccggggccctgacaccccccggccccaccggggcctgggcgccacccgggaggaggagcgggccctgtgctgccaggcccgggccctgctgcggcccggctgccccccagaggaggccggggctgtgcgggccaacttccccagcgccctgcaggacacccaggagagcagcaccacagccacagaagctgctggccccaggagccacagcgctgacagcagcagccctggggcctag

SEQ ID NO: 83206 - DNA, 1932 bp, Artificial Sequence
  derived and/or modified sequence
gtgcccagcgtgtggaggagcaccctgatggagaggagctgtggcagcagccctgtgctgaccggcttcaccggcagcgcctggacccccctgctgcagcaccacacctgcccccactgccgccacaacatcatcgagcagaagggcaaccccagcgctgtgtgtgtggagaccagcaacctgagccggggccggcagcagagggtgaccctgcctgtgcactacccaggccgggtgcacaggaccaatgccatcccagcctaccccaccaggacctccatggacagccacggcaaccctgtgaccctgctgaccatggacagacatggagagcagagcctgtacagcccccagaccccagcctacatccgcagctacccacccctgcacctggaccacagcctggccgcccaccgctgtggcctggagcaccgggcctacagccctgcccaccccttccggcggcccaagctgagcggccgctccttcagcaaggccgcctgcttcagccagtatgagaccatgtaccagcactactacttccagggcctgagctacccagagcaggagggccagagcccccccagcctggccccccggggccctgcccgggccttccccccatctggcagcggcagcctgctcttccccaccgtggtgcacgtggccccacccagccacctggagagcggcagcaccagcagcttcagctgctaccacggccacaggtctgtgtgcagcggctacctggccgactgccccggcagtgacagcagcagcagcagcagcagcggccagtgccactgcagcagcagtgacagcgtggtggactgcacagaggtgagcaaccagggcgtgtatggcagctgcagcaccttccgcagcagcctgagcagtgactatgaccccttcatctaccgcagccgcagcccctgccgggccagcgaggccggcggcagcggcagcagcggccggggccctgccctgtgctttgagggcagccccccacctgaggagctgcctgctgtgcacagccacggggccggccgcggggagccctggccaggccctgccagccccagcggggaccaggtgtccacctgcagcctggagatgaactacagcagcaacagcagcctggagcaccggggccccaacagcagcaccagcgaggtgggcctggaggccagccctggggccgccccagacctgcggaggacctggaagggcggccacgagctgcccagctgtgcctgctgctgtgagccccagcccagccctgctggccccagcgctggagctgctggcagcagcaccctcttcctgggcccccacctgtatgagggcagcggccctgctggaggagagccccagagcggcagcagccagggcctgtatggcctgcacccagaccacctgcccaggacagatggagtgaagtatgagggcctgccctgctgcttctatgaggagaagcaggtggcccggggcggcggcggcggcagcggctgctacacagaggactacagcgtgtctgtgcagtacaccctgacagaggagcccccacctggctgctacccaggggcccgggacctgagccagaggatccccatcatcccagaagatgtggactgtgacctgggcctgcccagcgactgccagggcacccacagcctgggctcctggggcggcacccggggccctgacaccccccggccccaccggggcctgggcgccacccgggaggaggagcgggccctgtgctgccaggcccgggccctgctgcggcccggctgccccccagaggaggccggggctgtgcgggccaacttccccagcgccctgcaggacacccaggagagcagcaccacagccacagaggccgccggccccaggagccacagcgctgacagcagcagccctggggcctag

SEQ ID NO: 83207 - DNA, 2811 bp, Artificial Sequence
  derived and/or modified sequence
atgaggcccaggtctgggggccggcctggggccaccggcagaagaagaagaaggctgcggcggcggccccggggcctgcgctgcagccggctgcccccacctccacccctgcccctgctgctgggcctgctgctggccgccgccggccctggggccgcccgggccaaggagacagcctttgtggaggtggtgctgtttgagagcagccccagcggggactacaccacctacaccaccggcctgaccggccgcttcagccgggccggggccaccctgtctgctgagggggagatcgtgcagatgcaccccctgggcctgtgcaacaacaatgatgaggaggacctgtatgaatatggctgggtgggcgtggtgaagctggagcagcctgagctggaccccaagccctgcctgactgtgctgggcaaggccaagagagctgtgcagagaggagccacagctgtgatctttgatgtgtctgagaaccctgaggccatcgaccagctgaaccagggcagcgaggaccccctgaagaggcctgtggtgtatgtgaagggagcagatgccatcaagctgatgaacatcgtgaacaagcagaaggtggcccgggcccgcatccagcacaggcctccccggcagcccacagagtactttgacatgggcatcttcctggccttctttgtggtggtgtccctggtgtgcctgatcctgctggtgaagatcaagctgaagcagaggaggagccagaacagcatgaaccggctggccgtgcaggccctggagaagatggagaccaggaagttcaacagcaagagcaagggccggcgggagggcagctgtggggccctggacaccctgagcagcagcagcaccagtgactgtgccatctgcctggagaagtacattgatggagaggagctgcgggtcatcccctgcacccaccgcttccacaggaaatgtgtggacccctggctgctgcagcaccacacctgcccccactgccgccacaacatcatcgagcagaagggcaaccccagcgctgtgtgtgtggagaccagcaacctgagccggggccggcagcagagggtgaccctgcctgtgcactacccaggccgggtgcacaggaccaatgccatcccagcctaccccaccaggacctccatggacagccacggcaaccctgtgaccctgctgaccatggacagacatggagagcagagcctgtacagcccccagaccccagcctacatccgcagctacccacccctgcacctggaccacagcctggccgcccaccgctgtggcctggagcaccgggcctacagccctgcccaccccttcagaagacccaagctgagcggccgctccttcagcaaggccgcctgcttcagccagtatgagaccatgtaccagcactactacttccagggcctgagctacccagagcaggagggccagagcccccccagcctggccccccggggccctgcccgggccttcccccccagcggcagcggcagcctgctcttccccaccgtggtgcacgtggccccacccagccacctggagagcggcagcaccagcagcttcagctgctaccacggccacaggtctgtgtgcagcggctacctggccgactgccccggcagtgacagcagcagcagcagcagcagcggccagtgccactgcagcagcagtgacagcgtggtggactgcacagaggtgagcaaccagggcgtgtatggcagctgcagcaccttccgcagcagcctgagcagtgactatgaccccttcatctaccgcagccgcagcccctgccgggccagcgaggccggcggcagcggcagcagcggccggggccctgccctgtgctttgagggcagccccccacctgaggagctgcctgctgtgcacagccatggagctggccgcggggagccctggccaggccctgccagccccagcggggaccaggtgtccacctgcagcctggagatgaactacagcagcaacagcagcctggagcaccggggccccaacagcagcaccagcgaggtgggcctggaggccagccctggagctgccccagacctgcggaggacctggaagggcggccacgagctgcccagctgtgcctgctgctgtgagccccagcccagccctgctggccccagcgctggagctgctggcagcagcaccctcttcctgggcccccacctgtatgagggcagcggccctgctggaggagagccccagagcggcagcagccagggcctgtatggcctgcacccagaccacctgcccaggacagatggagtgaagtatgagggcctgccctgctgcttctatgaggagaagcaggtggcccggggcggcggcggcggcagcggctgctacacagaggactacagcgtgtctgtgcagtacaccctgacagaggagcccccacctggctgctacccaggggcccgggacctgagccagaggatccccatcatcccagaagatgtggactgtgacctgggcctgcccagcgactgccagggcacccacagcctgggctcctggggcggcacccggggccctgacaccccccggccccaccggggcctgggcgccacccgggaggaggagcgggccctgtgctgccaggcccgggccctgctgcggcccggctgccccccagaggaggccggggctgtgcgggccaacttccccagcgccctgcaggacacccaggagagcagcaccacagccacagaagctgctggccccaggagccacagcgctgacagcagcagccctggggcctag

SEQ ID NO: 83208 - DNA, 2511 bp, Artificial Sequence
  derived and/or modified sequence
atgcaccccctgggcctgtgcaacaacaacgacgaggaggacctgtacgagtatggttgggtgggggtggttaagctagaacagccggagctggaccctaagccttgtctcactgtactcggcaaggccaaacgggccgtgcagaggggtgccaccgcagttatttttgacgtctccgagaatcctgaagctatagatcagctgaaccaggggagcgaagaccccctgaaaagaccagtggtctacgtgaagggagctgacgctatcaagcttatgaacatcgtgaataaacagaaagtggcaagggcaagaattcagcaccgacctcccaggcagccaactgaatactttgacatgggcatttttctagcctttttcgttgtcgtatccctcgtctgcctgattctgctcgtgaagatcaaactgaaacagagaaggtcacagaatagtatgaatcggttggcggtgcaagcactggagaaaatggaaacgagaaaattcaattcaaagtcaaagggacggcgggaaggcagttgtggcgcactagatacactttctagcagcagcacctccgactgcgcgatctgtttggagaaatacatagatggcgaggagcttagggttatcccctgtacgcaccgcttccacaggaagtgtgttgatccctggctgctccagcaccatacctgcccccattgcagacataacatcattgagcagaaaggcaatccttccgcagtctgcgtcgagacttcaaacctttctagagggcgacagcaacgggttaccctgcccgtacattaccccggacgtgtgcataggacaaacgccatccccgcctacccgactagaacctcaatggactctcacggcaatcctgtgacattactgaccatggatcggcatggggaacagagtctctacagccctcagacgccggcttatattagatcgtacccaccccttcacttggatcactccctggctgcgcaccgctgcggactggagcatagggcctatagccccgcacacccttttagacggccaaagctgagcggccgctctttctccaaagcggcttgtttcagccagtatgagacgatgtaccagcattattattttcaagggctgagctaccctgagcaagaggggcagagtccaccaagcctcgctccacgaggccccgcacgtgcatttccaccctccggatccggaagtctactgtttcccacagtggtgcacgtagcccccccctcccacctcgagtcaggttcaacgagctcattcagctgttaccatggccaccgtagcgtttgttccggttatctggctgactgccccggaagtgacagttcttcttctagctcctcgggtcagtgccattgctcttctagtgacagtgttgtcgattgtacagaggtcagcaatcaaggcgtgtacggctcttgctccaccttcaggtccagcctgagtagcgattatgatccctttatctacagatcaagatctccttgccgtgcaagcgaggctggaggcagtggaagttccggccggggccccgctctgtgcttcgagggctcaccacccccagaggagctgcccgccgtacactcacacggggccggcaggggggagccttggcccggtcctgcttccccatcgggcgatcaagtgtccacctgttcattagagatgaactattcatctaacagctctctggagcacagaggtccaaactcctcaacgagcgaggtcggcctcgaggcttccccaggggctgccccagatttgcgacgtacttggaaggggggacatgagcttccttcctgtgcatgctgttgtgagccacaacccagcccagctggtccgagtgccggggccgctggtagctccacgctttttttaggccctcacctgtatgaaggcagcgggcccgccggaggcgagccacagagtgggtcctcacagggactatatgggcttcaccccgaccacctgccacgcaccgacggagtgaagtatgagggcctgccatgctgtttctacgaagagaaacaggttgcgcgaggcggtggaggaggtagcggatgttacactgaagactatagcgtcagtgtccagtacactctaacagaagagcctcccccaggatgttatcctggcgctcgagatctcagccagcggatcccgattatacccgaggacgtggattgtgatctggggttgcccagtgactgtcaaggaacccactccctgggcagctggggcggcacgagagggccggataccccacgcccccaccgcgggctgggggcgacaagagaagaggaacgagccctgtgttgccaggccagggccctgctaaggcccggttgtcctcctgaagaagcgggggcagtccgagcaaatttccccagcgccctgcaagacacccaagaatcctcaaccactgctaccgaggctgctgggccacgctcccacagcgccgactcgtcgtcccccggcgcctag

SEQ ID NO: 83209 - DNA, 2511 bp, Artificial Sequence
  derived and/or modified sequence
atgcaccccctgggcctgtgcaacaacaacgacgaggaggacctgtacgagtatggttgggttggtgtggtgaagttggagcagcccgagctggatcccaaaccttgcctgacagtgctgggcaaagctaagagggccgtgcagagaggagcaaccgccgtaatcttcgatgtctcagagaaccccgaagccattgaccagctgaaccagggctccgaggacccattaaagagacctgtggtctacgtcaagggcgcggacgcaattaagctgatgaatatagtgaacaaacaaaaggtagcgcgcgccaggatccagcacaggcccccacgacagccaaccgagtacttcgatatgggcatttttctcgctttctttgtggtcgtgagtctcgtgtgcctcattctgcttgtaaagatcaagctgaagcagcggaggtcccagaatagcatgaatcgcctcgctgtgcaggcactcgagaaaatggagacccgtaaatttaatagcaaatctaaagggcggagggagggatcatgtggcgcactggatacactttcctcctcctcgacatccgactgtgcaatctgcctggaaaaatatatcgatggcgaagagctgcgggtgattccctgtactcaccggttccaccggaagtgcgtagatccttggctgttacagcaccatacttgtcctcactgcaggcacaacataatcgaacagaaaggtaatcccagcgccgtttgcgttgagacctcaaacctctccagaggcagacagcagagggtcacacttccagtgcattatccaggacgtgttcacaggaccaatgccataccggcttacccaacacgaacatccatggatagccatgggaaccccgtgaccctccttacaatggatagacacggagagcagtccttatattccccacagacccctgcctacattcgttcctatccccctttacatctggatcacagtctggcagctcatcgatgcggcctggagcacagggcctactctcccgcccaccccttccgtcgcccaaaactgtcaggaagaagtttctcaaaggctgcctgcttttcccagtacgaaacaatgtaccaacactattacttccagggcttgtcttatccagaacaggagggccagtcaccaccaagtctggcacccagaggccctgcgagggctttcccacctagcggatccggcagcctgctgttccctacagtagtgcacgtggcccctcctagccaccttgaaagcggcagtaccagttcctttagctgttatcatgggcaccgaagcgtttgtagcggatatctggcggactgccccggctccgatagctccagctcctctagctccgggcagtgtcactgctcttctagcgatagcgtggtcgactgtaccgaggtctccaatcagggcgtgtacggctcctgctctaccttcagatcatcactgtcttctgactacgacccctttatatatcggtcccgcagcccctgtcgtgcctccgaggcaggcgggagtgggagtagcggacgcgggcccgcgctttgcttcgaggggtcacctccacccgaggagttacccgcagtccacagtcatggcgcaggtaggggcgagccatggcccggacctgcctcacccagcggcgaccaggtgagtacttgttctctggagatgaactacagctctaactcttcactggaacatagaggccccaattcctctacaagtgaggttggtctggaagcatcaccaggagcagcccctgacctgcgacgaacatggaaaggaggacacgagctgccctcatgcgcttgttgctgtgagcctcagcccagccccgcgggaccctcggccggcgccgccggtagtagtacgctgtttttgggccctcacctgtacgagggcagtgggccagcgggaggcgagcctcaatctgggagttcacaggggctttatggactgcacccagatcacctgcccagaacagacggcgtcaaatacgagggacttccttgctgtttctacgaggagaagcaggttgctaggggcggtggcggtggtagcgggtgttataccgaagattacagcgtgtcagtgcagtacactctaaccgaggaaccgccacctggatgctaccccggtgctcgtgatctgagtcagagaatcccaattattcctgaagacgttgattgcgatttggggctgccaagtgactgtcagggtactcacagcctcggctcttggggcggaactcggggccccgacacgcccagaccccataggggactgggcgcaactagggaagaagagcgggctctgtgctgccaggcccgggctctacttcgaccgggctgtccccctgaagaggcaggggctgtgagagccaacttcccaagtgctctacaagacacccaggaaagctctactaccgcaacagaagcagcgggacccagaagccatagtgccgactcaagttcccccggcgcttag

SEQ ID NO: 83210 - DNA, 2511 bp, Artificial Sequence
  derived and/or modified sequence
atgcaccccctgggcctgtgcaacaacaacgacgaggaggacctgtacgagtatggatgggtaggagtggtgaaactggagcagccagaacttgatcccaaaccgtgtctcaccgtcctcggcaaagctaagcgcgcagtgcaaagaggcgccacagccgtaatctttgacgtgagcgagaaccccgaggcaatcgatcagttgaatcagggctctgaggaccctttgaagaggcccgtagtatacgtcaagggggccgatgcgataaagctgatgaacatagtgaataaacagaaggttgctagggctaggatccaacaccggccaccccgacagcccacggaatatttcgatatgggtatctttcttgcattcttcgtcgtagtgtccctcgtgtgtctgattctcttggtgaagatcaagctgaaacagaggagatctcagaactcaatgaaccgtctggcggtccaggctcttgagaagatggagaccaggaaatttaattctaagtccaaaggtcggcgcgaagggagctgtggagctctggatacactgagtagctcttccacatccgactgtgccatctgccttgagaagtacatcgacggcgaggagctccgggtgattccatgtacacatagatttcacaggaaatgtgtcgacccctggctcttgcagcaccacacctgcccccattgccggcacaatattatcgaacagaagggaaacccctctgccgtgtgcgtggagacaagtaaccttagccgggggagacagcagcgggtaactctgcccgtccactaccccgggagagttcatcgcacaaatgcgatcccggcctatcctacacgtacatccatggacagccatggcaatcctgtcaccctgctgaccatggacaggcatggggaacagagcctttactcacctcagacacccgcttatatcagatcttaccccccccttcatctagatcacagtctcgctgcacaccgctgcggcttggaacatagagcatacagccccgcgcaccccttcagacggcccaagctgagcgggcgctccttcagcaaggcagcctgttttagccagtacgagaccatgtaccagcactactacttccagggcttatcctaccctgagcaagaggggcagagcccccctagtctagcccccaggggacctgcacgggcatttccccccagcggctcaggttcactcctgttcccaacggtagtccatgttgcccccccctcacacctggagtctgggtcaacgagctccttttcctgctaccacgggcatagatccgtgtgtagtggctacttagccgactgtccggggtctgacagcagctcaagcagttcctcgggccagtgccactgcagtagttccgactcagtggtggactgtactgaggtgtctaatcagggggtctacggatcatgttctacctttcggagcagcttatcttctgactacgacccgtttatttataggtctcgatccccctgccgtgcaagcgaggcaggaggaagcgggtcatcaggacgaggtcccgcgttgtgcttcgagggttcaccacctcctgaagagctcccagccgtgcatagccacggcgccgggcgcggagagccatggcctggacctgccagtcctagcggggatcaggtctcaacctgttctctcgagatgaattactctagtaactctagcttagaacatcgcggacccaactcttcaacaagcgaagtcggcctggaggcttcacctggggcagcgcctgacctgagacgcacatggaaagggggtcacgagttgccatcctgcgcctgctgctgcgaacctcagcccagcccggccggaccatcagctggagccgcagggagttcaacactttttttggggcctcatttgtatgagggaagcggtcccgcaggaggggagccacagagtggttcgagtcagggtttgtacggcctgcacccggaccatctgccccgtaccgatggcgtgaaatacgagggactgccctgttgtttttacgaagagaagcaagtggccagaggagggggcgggggatctgggtgctatacagaggactactccgtgtctgtacagtacacattaaccgaggagccacccccaggatgttaccccggagcgagagatctttcacaacgaattcctatcattcccgaggacgttgattgtgatctgggcttgcccagcgattgtcagggtacacactctttgggttcttggggcggcacacgaggccccgatacacctcgcccacatcgcggcctgggcgccactagagaggaggaacgcgcgctatgctgccaagcccgtgctctgttgcgtcctgggtgtccacctgaggaggctggagctgttcgagcgaactttccctccgcgctccaggatacacaggagagttcaactaccgcgacagaagcggctggcccgcggtcccactctgcggattcctcatcccccggagcatag

SEQ ID NO: 83211 - DNA, 1932 bp, Artificial Sequence
  derived and/or modified sequence
gtgcccagcgtgtggcggagcaccctgatggagcggagctgcggcagttctcctgtgcttaccggtttcactggctctgcctggactccactactccagcaccacacatgtccgcactgccggcacaacattatcgaacagaaggggaatccatccgcggtatgtgtggagacaagtaacctgtcccgaggtcggcagcagcgggtgacccttccagttcattatcctgggcgggtgcataggaccaatgcaatcccagcttaccccactcgtaccagcatggattcccatggcaaccccgtcacgctgctgacaatggaccgccatggcgagcagagcctctattcacctcaaactccggcatacattagatcctatccacctttgcacttggatcacagtctggccgcgcaccgatgtggactggaacaccgcgcctacagtcctgcccacccttttcgccggcctaagctgagcggacgatccttcagcaaggctgcttgctttagtcagtacgagaccatgtatcagcattactacttccaagggctttcttatcctgagcaggaaggacagtcccccccctctctcgctcctagggggcctgcccgggcctttcccccgtcagggtctggttccctactgtttcccacagtggtacacgtcgcaccgcccagccacttagagtctggctccacttcttcattttcttgctaccatggccaccgcagcgtctgtagcggctacttagctgactgccccggaagcgacagcagctcttcctcttccagtggacagtgtcactgctcatctagtgactccgtagtggactgcactgaggtgagcaaccaaggagtatacgggtcctgcagcacattccgcagcagcctatcttcggactatgatccattcatctatcgttccaggtctccttgcagagcttcagaggcaggaggtagcggcagcagtggccgtggcccagccctgtgcttcgagggaagcccacccccggaagagttgccggccgttcacagccacggagccggcaggggagagccttggccaggcccggcttctccctcaggcgaccaggtatctacatgcagcctggaaatgaactactcaagtaacagctcactcgagcaccgcggtcctaatagctccacatccgaagtaggacttgaggcgtcaccaggggcagctcctgatctgaggagaacgtggaagggcgggcacgagctgccgtcttgtgcctgctgttgcgaacctcagccatcacccgccggtccaagcgccggtgcggctggcagttctaccttgttcctgggaccccatttgtatgagggcagcggccctgccggtggtgaaccacagagtgggtcatcccagggactttacggcttacatccggatcacctgccgcgcaccgatggggtcaagtacgaaggtcttccatgctgtttttatgaagagaagcaggttgctcggggtggcggaggcgggagcggatgctacacagaagactactctgtgagtgttcagtacacattaacagaggagccgccacctgggtgttaccctggcgcccgcgacttgagtcagcgaatcccaattattcccgaggacgttgattgcgacctgggactaccaagtgactgccagggaacccattcgctcgggtcctggggtggcacgcggggacccgacaccccccgtccccacagaggactcggagctacaagggaggaagaacgagcgctgtgttgtcaagcccgcgccctcttacgccccggatgtccgcctgaagaagctggggccgtccgggcaaactttcctagtgcacttcaggatacacaggagtctagtacaaccgccaccgaagccgctggccctcggagtcactccgcggacagttcctcccctggtgcctag

SEQ ID NO: 83212 - DNA, 2811 bp, Artificial Sequence
  derived and/or modified sequence
atgcggccccggagcggcggccggcccggcgccaccggccggcggaggcgcaggctgaggcgccgaccacgcggtcttaggtgcagtcgattaccgcccccccccccactgcccctgttgttaggcttgctgttagccgctgcgggcccgggtgctgcccgtgccaaggaaaccgcgtttgtggaagtcgttctcttcgaatcatcgccaagcggggactacaccacctacacaacaggtcttacagggcgctttagtagagcaggcgctaccctgagcgctgaaggcgaaatcgtgcaaatgcaccccctgggtctgtgcaataacaacgatgaagaagacctctacgaatatggatgggttggagtggtgaagctggagcagcccgagctggatcccaagccctgtcttactgtgcttggcaaagcgaaacgggcggtacaaaggggtgccaccgccgtcatattcgatgtatctgagaatccagaagcaatagaccagctgaatcaaggctcagaagatccactcaagcgccctgtcgtatacgtgaagggtgctgatgccatcaaactcatgaatatcgtgaacaaacagaaagtcgccagggcccgaatccaacatcgaccccccagacaacctaccgagtattttgacatgggtatatttctggcattttttgtcgttgtgagcctcgtttgtctgatccttctcgtcaaaattaaattaaaacagcgaaggtctcagaacagcatgaatagactggccgtgcaggctttagaaaaaatggagactcgtaaattcaattcgaagtccaaggggcgcagggaaggatcttgcggcgcattggacacattatcgtccagttcaaccagcgattgtgccatttgtctggagaaatatatagacggcgaggaactccgcgtcattccttgcacccatagattccacagaaaatgcgtagatccttggctgctgcagcaccacacctgtccgcactgcagacacaatatcattgagcaaaaagggaacccttcagccgtgtgcgtggagacaagcaatctttcccgaggcaggcagcaacgggtcacactgcccgtgcattaccctggacgggtgcaccgaaccaatgcgatccctgcttaccccactcgaacttcaatggacagccatggaaatccggtgactctgctaaccatggatcgccacggtgagcagagcttgtattctccacagacaccggcttatattagatcttacccgccccttcacttggatcatagtttggccgcccacaggtgcggcctagagcatcgcgcatactcccctgcccaccccttccgtcggcctaaactgtcagggcggagcttctcaaaagcagcgtgcttcagccaatacgaaaccatgtatcagcattattacttccaaggtctttcctaccctgagcaggaagggcagagccctccttcccttgcgcctcgtgggcctgccagggccttcccaccttcaggttctggcagcctgctgtttcctacagtggtgcacgtggctcccccttcacacctggaaagcggttctacgagttctttttcatgttaccacggccatcgctccgtgtgttccggctatctggccgattgcccaggtagcgacagcagctcctccagttcctcagggcagtgtcactgctctagctcggacagcgtcgtcgactgtacagaggtcagcaatcaaggagtgtacgggtcctgctcaacttttcgcagttccctctcttcggactacgatccctttatctacaggagccgtagcccttgtcgcgcatccgaagctgggggatccgggtcaagtggcagggggcctgccctgtgctttgagggatccccccctcctgaggagttaccagctgttcatagccacggagctggacgcggcgaaccctggcccgggcctgcctcgccatcaggcgatcaagtgtcaacctgttccctggaaatgaactactcgtcaaatagctcgctagagcataggggccctaactcaagtacgtctgaagtaggcctggaagcaagccctggtgccgcccccgacctgcgacggacttggaaggggggccatgagctccccagttgtgcttgctgctgcgagccacagccttctcccgctggccccagcgctggcgcagcgggatccagcaccctgttcctggggccccatctctacgaagggtccgggccggcaggtggagagccacaaagcgggtccagccagggcctttatggcttgcaccccgatcaccttcctaggacggacggagttaaatacgaagggcttccatgctgcttttacgaagagaaacaagtcgcacgtgggggcggcggaggatccggatgctacacagaagactatagcgtcagtgtccaatacactctgacggaagagcctccaccaggttgttatcccggcgcaagagatttgtcccagcggatcccaatcataccggaagacgtggattgcgatctcggcctgcctagcgattgtcaggggacacactctttgggctcctggggagggacgaggggccccgatacgccccggccacatcgcggattgggcgctactcgtgaggaagagagggcactgtgttgccaggctcgcgccctactaagaccaggatgtcccccagaggaagctggtgccgtccgggcaaacttcccaagtgctctgcaggacactcaggaatcctccaccacagcaactgaagcagccggcccgcgctcgcattctgccgacagctcttcccctggcgcctag

SEQ ID NO: 83213 - DNA, 2511 bp, Artificial Sequence
  derived and/or modified sequence
atgcaccccctcggcctttgcaataacaacgacgaagaggacctctacgaatacggctgggtgggggttgtgaagcttgagcagcctgaattagatccaaaaccatgcctgacagtacttggaaaagctaaacgggcagtccagcgaggagccacggccgtgatcttcgatgtttccgaaaaccctgaagccattgatcagttgaaccagggcagcgaggatcctctgaagagacccgtcgtctacgttaaaggggcagacgccatcaaactcatgaacatcgtgaataagcagaaggtggccagggcacgcattcaacaccggcctccaaggcagccaacagaatacttcgatatgggcatatttctggcattcttcgtagtggtctccctagtctgcctcattttgctggtgaagataaagttgaaacagaggagatcacaaaattccatgaaccggctggctgtgcaggctctggagaagatggagaccagaaaattcaacagtaaatcaaaaggtcgcagggagggctcctgcggcgctcttgatactctgtcctcatccagtacatcagactgcgccatatgcttagaaaagtacatcgacggggaggagctgcgcgtgatcccatgcactcatcgtttccatcgaaagtgcgtcgatccctggctcctccaacatcacacatgcccacactgtcggcataatatcatagagcaaaagggaaatccctctgcagtctgtgtcgagacatctaatctctcccgtggacgccaacagcgggtgaccttgcctgtccactacccgggtcgggttcatcggactaatgcaatccctgcttatccaacgcgtaccagcatggattcccacgggaatccagtgacactgttaactatggatcggcacggcgagcagagcctgtatagcccacagacacctgcctatataaggtcctatccccctttacatctggaccactcactggccgctcaccgatgcggcctggagcatagggcttattctccagctcatccttttagaagacccaaactgtccggaagaagtttcagcaaagccgcttgtttttcacagtacgaaaccatgtaccagcactattactttcaaggtctcagctaccccgaacaggagggccagtcccctccatctctggcaccccgaggaccggctagagcgttccccccatccggatcaggctctctgctgtttccaaccgtcgtgcatgtcgctcccccatctcacttggagtccggctccacaagtagcttttcctgttaccacggacatcgcagcgtctgctctggctacctggctgattgcccaggctctgattccagtagttcatcatcttcaggccagtgccactgcagctcaagcgattccgtagtggattgcactgaagtcagcaaccagggggtctacggtagttgcagcacgtttagaagctcccttagctcagactacgatccatttatttacagatcgaggtccccctgcagagcatcagaagctgggggtagcggctcatctggaaggggcccagcgctgtgttttgaaggcagtccacctcctgaggagctgcccgcagtacattcacatggggcagggaggggcgaaccgtggccagggccagccagcccttcaggcgatcaagtttcaacgtgctccctagagatgaattactcgagcaatagtagcctcgaacaccgcggtccaaattcatctacgtcggaggtgggactggaagcatcgccgggtgccgcacccgacttaagacggacctggaagggagggcacgaacttccatcttgtgcttgttgctgtgagccgcaaccaagtcccgcagggccaagcgccggtgccgcaggcagttcaaccctgtttctcggaccacacctctacgaagggtccgggcctgcaggtggagagccccagagcggctcatcccagggactttatggactccacccagatcatctccccaggaccgatggcgtcaagtacgagggtctgccttgctgcttttatgaggaaaagcaggtggctaggggtggaggaggcggatcgggttgctacacagaggattattccgtgtctgttcagtacactctgacagaagaacctccgccaggctgttatcctggggcaagggacctcagccagaggatccccataattcctgaggatgtcgattgcgacttggggttaccctccgactgccagggtacgcatagcctaggcagttggggtggcacccgcggacccgacaccccgagaccacataggggtcttggggctacgcgtgaggaagaacgtgcgctgtgctgtcaagccagagccttgctcaggcctggatgcccgcctgaggaggcgggagccgtgcgcgcaaactttccaagtgccctgcaggacacccaggaatccagtacaacagctacagaagccgctggacccagatctcactctgctgactcttcgagccctggtgcctag

SEQ ID NO: 83214 - DNA, 2511 bp, Artificial Sequence
  derived and/or modified sequence
atgcacccattaggactttgcaacaataatgacgaagaggacctatacgagtatggttgggtgggagtagtcaagctggaacagcccgagttggatccaaagccctgtctcacggtgctcggaaaggccaagagagctgtgcagaggggagcaactgctgtaatctttgacgtgtctgagaatcccgaggcaatagaccaattgaatcagggtagcgaagacccactaaagaggcctgtggtatacgtcaaaggcgctgacgccataaagctgatgaacatcgtcaacaaacagaaagttgctcgggctagaattcaacaccggccaccacgccagccaaccgagtatttcgacatgggaatcttccttgccttttttgttgtggtctccctggtgtgtctgatcctgctcgtgaaaattaagctgaaacagcgtaggtcacaaaatagcatgaatcgactcgccgtgcaggccttggaaaagatggagacaaggaaattcaacagtaaatctaagggaagaagggaaggctcttgtggtgcactggacactctgtcgtcaagcagcactagcgactgcgctatctgcctcgagaagtatatcgacggggaagagctgagagtaattccctgcacacacaggttccacaggaagtgcgtagacccttggctgctgcagcaccatacttgccctcattgtaggcacaatataatcgagcagaaggggaacccatcggccgtgtgcgttgagaccagtaacctgagtcggggacgacagcagagggttaccctgccggtgcattaccctgggagagtgcaccgcacaaacgcaatcccagcctatcctactaggacaagcatggatagccatggaaatcctgttacgttactgaccatggaccgtcatggtgaacagtctttgtatagtccgcagactcctgcatatatacgatcataccccccattgcatctagaccactcactggccgctcacaggtgcgggttagagcaccgggcttactcccctgcccacccctttcgccgacccaaacttagcggcaggtccttctcgaaggcggcatgtttcagccaatatgaaactatgtatcagcattactattttcagggcctgagctaccccgagcaggaagggcagtctcctccaagcctggctccacgtggcccagctagggcgtttcctcctagcgggagcggttctttgctgttccccacggtggtccacgttgcacccccaagccacctggaatcggggtccacttcgagttttagttgttatcatggtcacagaagcgtctgcagcggatatctggcagattgtcccggaagtgatagttcctcttcaagcagttctggtcagtgccactgctctagttccgatagcgtagtggattgtaccgaagtgtccaaccagggggtctacggctcatgctccactttccgaagcagtttgagttccgactatgacccattcatctatcgatcacgttctccttgcagagcgtccgaggctggcggatccggttcaagcggacggggtcccgctttgtgcttcgagggctcccccccacccgaggagctccccgctgtgcactcacatggcgcaggaagaggggagccctggccgggtcccgcaagcccctctggagaccaggtgtccacctgctctcttgaaatgaattactcctcaaactcttctctcgaacaccgtggacctaattcaagcactagcgaggtgggactcgaagccagccccggtgctgccccagacctgcgtcgtacatggaagggaggacatgaactgccctcatgcgcgtgctgctgcgaacctcaaccctcaccagctgggccttccgcaggcgcagctggatcatcgacgctcttcctagggccacacctctatgagggaagtggacctgccggaggcgagccccaatctggctcttcacaaggattgtatggcctgcacccagaccatctacccaggaccgatggcgtaaagtatgaggggttaccgtgttgtttctacgaggaaaagcaggtggccagaggcggaggaggaggaagcggctgctacaccgaagactacagcgtatcagtgcagtacactctgacagaggaacctccgcctggatgctacccgggagcgcgtgaccttagtcaacgtatccctatcatacccgaggatgttgactgcgacctgggacttcccagtgattgccaaggaacccacagtctgggttcttgggggggtacgagaggacctgataccccacgccctcaccggggactgggtgcaacccgggaagaagagcgcgcactgtgttgccaggctcgggctctgctccgtcctgggtgtcctcctgaggaggccggagcagtgcgagctaatttcccatccgctctccaggatactcaagagagtagcaccaccgctaccgaagccgctggccctagaagccattccgccgactcttcaagtcccggagcatag

SEQ ID NO: 83215 - DNA, 2511 bp, Artificial Sequence
  derived and/or modified sequence
atgcatccactggggctgtgcaataacaacgacgaagaagacttgtatgaatatggctgggtcggtgttgtaaagcttgaacaacctgaactcgaccccaaaccgtgcctaactgtgctcgggaaagcaaaacgggcagtgcagagaggtgctacagctgtcattttcgatgtttctgagaaccctgaggccattgatcagctgaaccagggctcagaagatcctctgaagagacctgttgtgtatgtgaaaggagccgatgccatcaagttaatgaatattgttaacaaacagaaagtcgctagagcacggattcaacacagacctcccaggcaacctacggagtatttcgatatgggaattttcttagccttctttgtcgtagtatccctggtatgtcttatcctactggtgaaaatcaaactcaaacaaaggcgctctcagaatagcatgaaccgcctggcagtacaggcactggagaagatggaaacccggaaatttaatagcaagtctaagggaaggcgagagggtagttgtggcgcactggacaccctctcttcctcctccacctccgattgtgcaatctgcctggaaaaatacattgacggtgaagagcttcgagtgattccatgcacacaccgcttccaccggaaatgtgtggacccctggctactgcagcatcatacctgcccccactgcagacacaatatcatcgaacagaaggggaacccctccgctgtatgcgtagaaacttctaacttgtctagaggacggcagcagcgtgtcacactgcccgtccactatcccggtagggttcacaggaccaacgccatacctgcatacccaacaagaacctctatggacagccacggcaaccctgtgactttgcttaccatggacagacacggtgaacagagcctctacagcccacagacgcctgcctacattcgcagctacccacctctccacctggatcatagccttgcggcacatcgttgcggccttgaacaccgcgcatacagtcctgctcatccttttcggagaccgaaattgtctggaagatcctttagcaaggcagcctgttttagccagtatgagactatgtatcagcattactatttccagggactctcctatccagagcaggaagggcagagtccccctagtctggcccctaggggtcctgctagagcttttccgccatctgggtccgggtccctcctctttccaacagtcgtgcacgtcgcacccccttcccatctagaaagcggctccaccagttcatttagctgctatcacggccaccgtagtgtttgttctggatatctcgcggactgtcccggaagcgactcgtcatccagcagcagtagcggacagtgccactgttctagctcggacagtgtcgtggattgtaccgaggtgtccaatcaaggcgtgtatggctcttgtagcacctttcggtcctcattgagttctgactatgacccctttatctaccgctcacgaagcccgtgtcgcgcatctgaggcaggaggttcaggtagctccggcagaggtcccgctttatgcttcgaaggatcaccccctcccgaggagctcccagcggtgcacagccatggagcaggaaggggcgaaccatggcctgggccagcaagtccatcaggcgatcaggtgtcaacctgtagcctggaaatgaattatagcagcaattcttcgctggagcatcggggtccaaattcctccacttccgaggtggggcttgaagcttccccgggtgcagcccctgaccttaggcgcacatggaaaggcggacacgaactccctagctgcgcatgctgttgtgaaccacagccctcacccgctggcccaagtgcaggcgcagctggaagctcaacgctttttctcggcccacatctgtatgagggctccgggccagctggaggggagcctcagagcggatcgtctcaagggttatatggtttacatccagatcacctgcctaggaccgacggtgtcaagtacgaaggactgccttgttgcttttacgaagaaaaacaagtcgctagaggcggagggggtggctctggttgctacacagaagattatagtgtgtctgtccagtataccctgacagaagaacctccccctggatgctatccgggagcaagagacttatcacagaggataccaatcattcctgaggatgtcgattgcgacttaggattaccaagcgattgtcaggggacacattccctgggttcctggggcggtactcgcggacccgacactcccaggccacaccgcggtctcggggcaacacgggaggaagagagggccctctgttgtcaggctagagctttactgcggccaggatgtccacccgaggaagcgggtgccgtgcgcgctaactttccttcggctctccaagacacacaggaatcatctaccaccgccacagaggcagctgggcctcgaagtcattccgcagattcctctagccctggcgcttag

SEQ ID NO: 83216 - DNA, 1932 bp, Artificial Sequence
  derived and/or modified sequence
gttccctcagtatggaggtctactctgatggaaaggtcatgtggctcttcacccgtcctgacaggctttacaggatctgcttggacgcctctcctgcagcatcatacctgccctcactgcagacacaacattattgagcaaaaaggaaacccttccgctgtatgtgtggagacatccaacctgtctagaggaaggcagcagcgggtgacactccctgtgcactacccgggacgggttcaccggactaacgcgattcctgcttatccgactagaacatctatggacagtcacggtaatcccgtaacgcttctgacgatggatcgacacggcgagcaatctctctattctcctcagacacccgcatatattagaagttatcccccactacatcttgaccactcactagccgctcacaggtgtggcctggaacacagagcctacagcccagctcacccctttcgacgcccaaagttgagtggaaggtctttcagtaaggccgcttgcttctctcagtatgagactatgtaccagcattattacttccaggggttgtcataccccgagcaggagggacagtctcccccaagcctggctcctcggggtccggctcgggcttttccgccttcgggtagtgggagccttttgtttcccactgtcgtgcacgtcgcgcctccgtctcatctagagagtgggtccacctctagttttagctgttatcatgggcaccggagcgtatgttcaggatatcttgccgattgtcctggtagtgactcctcctcaagttctagcagtggacagtgccattgcagttcttctgattccgtggtcgactgcacagaagtgtcaaatcagggggtctacggctcttgtagcacgttccgctcttccctatcatctgattatgaccctttcatctatcgctcccggtccccttgtagagccagcgaggccggtggcagtggatcctccggcaggggtccagctctatgcttcgaggggtctccccctcccgaagaactacctgccgtgcatagtcacggtgccggaaggggcgagccgtggcctggacctgctagtcctagcggcgatcaagtatccacctgtagcctggagatgaactactcttcgaatagctcattagagcaccgtggtccaaactcctccacttccgaagtcgggttggaggctagccctggcgctgccccagatctgaggcggacctggaaagggggacacgaattaccaagctgtgcctgctgttgtgagccacagccctcgcccgcaggaccatccgcaggagccgcagggagcagcacactgtttctggggccacatctgtacgagggcagcgggccagctggaggtgagccccagtcaggctctagtcaaggtctttatgggcttcacccagaccacctgcccaggactgacggagtcaagtatgagggcctgccctgttgtttctatgaggaaaagcaagtcgccaggggcggaggaggtgggtctggttgttacacggaagattacagcgtatccgtgcagtatacacttaccgaggagccacccccaggctgttatccaggagccagagatctgagtcagagaatcccgatcattcccgaagacgtggattgcgatttgggtctgccttctgactgccagggcacgcactcactagggagttgggggggaacaaggggccctgatacacctaggccacacaggggtctaggggctacgcgtgaagaggaacgcgcactgtgctgtcaagctcgagccctccttcggcctggctgtccacctgaggaagctggcgcagttcgcgcaaattttccttccgccctccaggacacacaggagtcgagcactacagcgactgaggccgcaggcccaaggagccactccgccgattccagctctcccggtgcctag

SEQ ID NO: 83217 - DNA, 2811 bp, Artificial Sequence
  derived and/or modified sequence
atgcggccacggagtggaggtagacccggtgccactggtaggcgcaggcggaggctgagaagacggccacgcggactgcgatgctcccgtctgcccccaccgccaccattaccattgctgctaggacttctgctagccgcagctggtccgggtgctgctcgcgctaaggaaaccgcattcgtagaggtcgtgctattcgaaagcagcccctctggcgactacactacctatacgactggcctgactggtaggttctcccgagcaggggctactctgtccgctgagggtgagatagtacagatgcatcctttgggcctgtgtaacaacaatgacgaagaagacctgtacgagtacggctgggtcggagtcgtaaagctcgaacaacctgagctcgacccaaagccctgcctcacagtgctgggtaaagccaagagggctgtccaacgcggtgccaccgccgtaattttcgacgtaagcgagaatccagaagcaatcgaccagctgaaccaaggctctgaggaccctctgaagcgccctgttgtctatgtgaaaggggctgacgccataaagctgatgaatatcgtgaacaaacagaaagtggccagagcccgtatccagcacaggcctccaagacagcccactgaatacttcgacatggggatattcctggcgttctttgtagtcgttagcttggtatgtctgatcctcctggtgaaaattaagttaaagcagcgcaggagccagaactcaatgaaccgactggcggtccaggctctcgagaagatggagacgcgtaagttcaatagcaagtccaagggtcgccgtgagggtagctgcggtgccttggacacgctctcctcgtcatcaacttccgattgcgctatttgcctggagaagtatatcgacggcgaggaattgagagttatcccctgtacccatcgcttccacaggaaatgcgtggacccctggcttcttcagcaccacacatgccctcactgcagacataacattatagagcagaaagggaatccttctgcagtatgcgtagagacttctaacctgagccggggtcgacagcagagggtcacactgcctgtgcattaccctggcagagtacataggaccaacgcgatccctgcgtacccaacgaggactagcatggatagtcatgggaacccagtcaccctcttaacaatggatcggcatggcgagcagtcactctattctccgcagaccccagcctatattcgttcctatccacccctgcacctcgatcactctctggccgcacaccggtgtggcttggaacatagagcctattcaccggcacatccctttagaaggcccaaacttagtggccgaagcttcagcaaagcggcatgtttctctcagtacgaaaccatgtaccagcactactactttcagggtctgtcttaccccgagcaggaagggcagtctcccccttccttggccccacggggtcctgctagagcctttcccccaagtggttccggtagtctcctcttccctacagtggtccatgtcgccccaccctcccacctggaatcagggtctacaagcagcttctcatgctaccatggacaccgctctgtctgtagtggatatctcgcagactgcccaggctccgattcatcttctagttcctcaagcggccagtgtcattgcagctcttccgattcggtcgttgattgcaccgaggtgtcaaaccagggggtgtacgggtcttgctccacgtttaggtcgagcctaagtagcgattacgatccattcatctacaggtcgcgcagtccctgcagagcgagtgaggcgggaggctcaggaagctccggacgtggcccagccctttgttttgaaggaagcccccctccagaggaactccctgccgtccattcgcacggggcagggaggggagagccatggcccggacccgcatcaccatcaggggatcaggtgtcaacctgcagcttagaaatgaattacagtagtaactcaagcctggaacaccgcggaccaaatagctccacttccgaggtgggtcttgaagctagcccaggggctgcaccggacctgagaagaacctggaagggaggccacgagctcccttcctgtgcgtgttgttgcgagccacagccgtcccctgccggaccctccgccggtgcagccggatcttcaactctcttcctgggcccacacctctatgaaggaagtggacctgccggaggtgagccgcagagcggctctagtcaggggctctatgggctccatcccgatcatctgccgaggaccgacggcgtgaaatatgaggggctgccttgttgcttctacgaggaaaagcaggtggcccgtggcggtggaggcggaagcggttgctacactgaggattacagtgtcagtgtgcagtacaccctgacggaggaaccaccaccaggatgctatcccggagccagagatttgagccagcggatccctatcattcccgaggacgtcgactgcgacttaggcctgccgtccgattgccaaggcacgcactctcttggttcttgggggggaacaagaggccctgatactcccaggccccataggggcctgggtgctacgagggaagaggagagggcactctgctgtcaggcccgagcgctgttgagacccggttgcccgccagaagaagcaggcgcagtacgagccaatttcccttcagcactccaagacactcaggaaagttctacaacagccactgaagccgcaggcccaagaagtcacagcgcagacagcagctccccaggcgcttag

SEQ ID NO: 83218 - DNA, 6541 bp, Artificial Sequence
  derived and/or modified sequence
gcggccgcggggcccggcgcggcgcgggccaaggagacggcgttcgtggaggtggtgctgttcgagtcgagcccaagcggcgattacaccacctacaccaccggcctcacgggccgcttctcgcgggccggggccacgctcagcgccgagggcgagatcgtgcagatgcacccactgggcctatgtaataacaatgacgaagaggacttgtatgaatatggctgggtaggagtggtgaagctggaacagccagaattggacccgaaaccatgcctcactgtcctaggcaaggccaagcgagcagtacagcggggagctactgcagtcatctttgatgtgtctgaaaacccagaagctattgatcagctgaaccagggctctgaagacccgctcaagaggccggtggtgtatgtgaagggtgcagatgccattaagctgatgaacatcgtcaacaagcagaaagtggctcgagcaaggatccagcaccgccctcctcgacaacccactgaatactttgacatggggattttcctggctttcttcgtcgtggtctccttggtctgcctcatcctccttgtcaaaatcaagctgaagcagcgacgcagtcagaattccatgaacaggctggctgtgcaggctctagagaagatggaaaccagaaagttcaactccaagagcaaggggcgccgggaggggagctgtggggccctggacacactcagcagcagctccacgtccgactgtgccatctgtctggagaagtacattgatggagaggagctgcgggtcatcccctgtactcaccggtttcacaggaagtgcgtggacccctggctgctgcagcaccacacctgcccccactgtcggcacaacatcatagaacaaaagggaaacccaagcgcggtgtgtgtggagaccagcaacctctcacgtggtcggcagcagagggtgaccctgccggtgcattaccccggccgcgtgcacaggaccaacgccatcccagcctaccctacgaggacaagcatggactcccacggcaaccccgtcaccttgctgaccatggaccggcacggggagcagagcctctattccccgcagacccccgcctacatccgcagctacccacccctccacctggaccacagcctggccgctcaccgctgcggcctggagcaccgggcctactccccagcccaccccttccgcaggcccaagttgagtggccgcagcttctccaaggcagcttgcttctcccagtatgagaccatgtaccagcactactacttccagggcctcagctacccggagcaggaggggcagtccccacctagcctcgcaccccggggcccggcccgtgcctttcctccgagcggcagtggcagcctgctcttccccaccgtggtgcacgtggccccgccctcccacctggagagcggcagcacgtccagcttcagctgctatcacggccaccgctcggtgtgcagtggctacctggccgactgcccaggcagcgacagcagcagcagcagcagctccggccagtgccactgttcctccagtgactctgtggtagactgcactgaggtcagcaaccagggcgtgtacgggagctgctccaccttccgcagctccctcagcagcgactatgaccccttcatctaccgcagccggagcccctgtcgtgccagtgaggcggggggctcgggcagctcgggccggggacctgccctgtgcttcgagggctccccgcctcccgaggagctcccggcggtgcacagtcatggtgctgggcggggcgagccttggccgggccctgcctctccctcgggggatcaggtgtccacctgcagcctggagatgaactacagcagcaactcctccctggagcacagggggcccaatagctctacctcagaagtggggctcgaggcttctcctggggccgcccctgacctcaggaggacctggaaggggggccacgagttgccgtcgtgtgcctgctgctgcgagccccagccctccccagccgggcctagcgccggagcagctggcagcagcaccttgttcctggggccccacctctacgagggctctggcccggcgggtggggagccccagtcaggaagctcccagggcttgtacggccttcaccccgaccatttgcccaggacagatggggtgaaatacgagggtctgccctgctgcttctatgaagagaagcaggtggcccgcgggggcggagggggcagcggctgctacactgaggactactcggtgagtgtgcagtacacgctcaccgaggaaccaccgcccggctgctaccccggggcccgggacctgagccagcgcatccccatcattccagaggatgtggactgtgatctgggcctgccctcggactgccaagggacccacagcctcggctcctggggtgggacgcgaggcccggataccccacggccccacaggggcctgggagcaacccgggaagaggagcgggctctgtgctgccaggctagggccctactgcggcctggctgccctccggaggaggcgggtgctgtcagggccaacttccctagtgccctccaggacactcaggagtccagcaccactgccactgaggctgcaggaccgagatctcactcagcagacagcagcagcccgggagcctgagctcaggaggaactcttacctggaaattgggaactgtatggagactccaaactgacttctttcaaaaaacaaaaacaaaaaatttttttagctttgacaaacacacaaaagtggtaataaagagagccctccttgtcaacccaaaatgtgagccccctgtggcaaaaccaccccctaccccattaacaaatcaacagacaaaattctccgagtcctttgcctcttttgataacatgttgttctgttttgtaaagtgtgtgtgcttggggttccgaggtgtgggattgagttctctgctttgtttttttttaagatattgtatgtaaatgtaaaaagttatttaaatatatattttaaagaaccctaactgccaacttttgctgaaaaagaaaaaaaaatcactgctgcattaaatgaaccacatcatgtgtagatactgttgtctccctgaagggagctcaggcctttgaaaagctcagggcttcacctgccttagaaaatgaaccagaaacttgaagtaaagctagttgataggggtacaggctctgaggagcagtgcaaaactgcctctttctttctcgtggcaaatcccaatgtacacgatttcaggtctcagacgccatgcctctccagcccacgcctttaggcaggtgatggcagcagctaggaatagggtgtacatgatccacagccctgcggagccaggtcaagccgctgctatgaaagctccagggtgatggggacgattctgcccagtgtcctcagtctgtcccctcaggtcatggtcccaagtgaaatgacagagttcacagccctggtcttggctgaggtccaggtcatagtaagggcatgttcttggggccctcgacctgaactctgaccctccgggcagggaagaggaggttgtcccctttggttgtcctggctttggagtcctttgcaaaaatattttgggccccctgccactggctgcagaaatggctcgacggggtgtgtggggacagacacccagaaggaatgtacttttgtggccttggtgtccgatggggctgggggagagtgctctccactgacccagcagcacacccatgtgcagtgcgcctgcatctgtgtgggggcagccacaccccttggctgctgcttccttgggctgcctttctgggggcatgtgactggacctacgaggtctgcactgagctccatttgaatgatacctttcctatcccatttcccccacggaagcaccgcttcagggttattcagtcctctgcctcatggctgaaattgctcatctcgtctgcagatgtctactatcctgtctacctaatgcactattatgtattgattctccatgagacagagagagagagagactatcagatagtttacacccaaagggtaggtttttgtatatttttccagccttttttattaaggggaaggggagagtttaaaaacccaaaccgttgtggttttaaggtgtttcatttttaaaagggagagagaatctatttaaagctatttcagatcagggattgtcatccttttttgtccaatgtattccttgttctttaaaaaaattttttttagaggaaactaatattagtctttgtgttcactaactcttctggtcacttgtatttatttattcattcattcatcagatatttgttgccatctgaaagaactggcccagtgggtctgaaagctcgcttgagaataggaaacttgagacctggccccctgtgggtaggagaacaaggaccacctgggttctccagtcttgaacgagaatctcactcttatcagaatgtttttcttaacctcagcgtatgatgaggaaatttacttatctctagctaggatttgacaaattccaacatcaaatgatcaaaacatttgccactgaggcttcactggtgagatccgttctccgtcctcgggtgcagtcccttgggggctgctcctcggactgcgccccgcacacctgttatcgagggtgtgagaagcgcctaagctggtgacatgtgatctgggacgccttcatttctcgggccaggagtagcagctgctaaggacagcagcttgcattgcgtggttttagggaagcagggtctggcttttaatatgaactgcaaaaagcagcttctcactgatatttttttgttgttgtttctggggggtttttttgttttgtttttaatgcctttgagtgcatattttcttcctcgtctgaaaccgaactcccaaagtggctttctttagccctggctggaaaaccacctctcaatagccttaagcaataaatagatgagtagagaatgtggcttcaactgggcttattaaagtaagtgtgtctagttttcacttgaacaagtgatagctgcagatggcgaaagaaacccatttaatttttgtagcttacaggtggtagaaacaaaaatgcaattttaaaaccttaaataccaaataccaaccattgccttttttttttttgagatggaattttgctcttgtcacccaggctggagtgcaatggcgcgatctcacctcactgcaacctctgcctcccgggtccaagtgattctcctgcctcagcctcccaagtagctgggattacaggcatgcgccaccacacccagctaattttgtatttttggtagagacagggtatctccatgttggtcaggctggtcttggattcccgacctcaggtgatccgcccacctcggcctcccaaagtgctgggattacaggcgtgagccaccatgcctgcccagcaataccaaccattgtcttttaaattcgtgttggcttctcagacagggagatcactggaataaaataaccgatggtcttattttgtcacacgtaaatcaaaagaaatgtcctctttgaagttgtaagactccaccaatgacagacacccttttcggtggactctgagtggtgtgtagtggttttatagccatggaaactaggagtatctcactttccactgagaacccctgcccccaatccctctaagttggggtgtggcagttgggcagggtcaagtgacccagccctggctgtaggacagccatatacagtgaagagttctagaaccagctaaaaatggaagtttgggtgtttaccaacaaggtacctctttatggatgcagccccagtaagctggctttaactctcagctccttccctgtctcctcctaatccaagcccttttataaaataaagccccttctgtcccactgctcacatacttatgtgctgctagtctctactcgaagttcgtgcaggactaatgcttttaaaatgaggtctaaaaaataattactagtcgagactattattctttaaacagaactgcctttttctactctttatgtaaactctttctattgtgttggtctaacaaggcactattttaaaattttttaatttttcccatagcacttaaaagagattttgtaaagaccttgctgtaaagattttgtaataaaatggtctaagggctctttttccaacattaccatttttaaaaaatgttttaaaagctagaagacaacttatgtatattctgtatatgtatagcagcacatttcatttatggaaatatgttctcagaatatttatttactaatatatttatcttaagccatgtcttatgttgagagtgtgacattgttggaataatcattgaaaatgactaacacaagaccctgtaaatacatgataattgcacacagattttacatatttgcagaccaaaaatgatttaaaacaagttgtagtcttctatggttttgtaacaaattgtacacatgactgtaaaaaaaaaatacaattttatcaagtatgtgtt

SEQ ID NO: 83219 - DNA, 2878 bp, Artificial Sequence
  derived and/or modified sequence
ttttctttccattttatttcctagatgcacccactgggcctatgtaataacaatgacgaagaggacttgtatgaatatggctgggtaggagtggtgaagctggaacagccagaattggacccgaaaccatgcctcactgtcctaggcaaggccaagcgagcagtacagcggggagctactgcagtcatctttgatgtgtctgaaaacccagaagctattgatcagctgaaccagggctctgaagacccgctcaagaggccggtggtgtatgtgaagggtgcagatgccattaagctgatgaacatcgtcaacaagcagaaagtggctcgagcaaggatccagcaccgccctcctcgacaacccactgaatactttgacatggggattttcctggctttcttcgtcgtggtctccttggtctgcctcatcctccttgtcaaaatcaagctgaagcagcgacgcagtcagaattccatgaacaggctggctgtgcaggctctagagaagatggaaaccagaaagttcaactccaagagcaaggggcgccgggaggggagctgtggggccctggacacactcagcagcagctccacgtccgactgtgccatctgtctggagaagtacattgatggagaggagctgcgggtcatcccctgtactcaccggtttcacaggaagtgcgtggacccctggctgctgcagcaccacacctgcccccactgtcggcacaacatcatagaacaaaagggaaacccaagcgcggtgtgtgtggagaccagcaacctctcacgtggtcggcagcagagggtgaccctgccggtgcattaccccggccgcgtgcacaggaccaacgccatcccagcctaccctacgaggacaagcatggactcccacggcaaccccgtcaccttgctgaccatggaccggcacggggagcagagcctctattccccgcagacccccgcctacatccgcagctacccacccctccacctggaccacagcctggccgctcaccgctgcggcctggagcaccgggcctactccccagcccaccccttccgcaggcccaagttgagtggccgcagcttctccaaggcagcttgcttctcccagtatgagaccatgtaccagcactactacttccagggcctcagctacccggagcaggaggggcagtccccacctagcctcgcaccccggggcccggcccgtgcctttcctccgagcggcagtggcagcctgctcttccccaccgtggtgcacgtggccccgccctcccacctggagagcggcagcacgtccagcttcagctgctatcacggccaccgctcggtgtgcagtggctacctggccgactgcccaggcagcgacagcagcagcagcagcagctccggccagtgccactgttcctccagtgactctgtggtagactgcactgaggtcagcaaccagggcgtgtacgggagctgctccaccttccgcagctccctcagcagcgactatgaccccttcatctaccgcagccggagcccctgtcgtgccagtgaggcggggggctcgggcagctcgggccggggacctgccctgtgcttcgagggctccccgcctcccgaggagctcccggcggtgcacagtcatggtgctgggcggggcgagccttggccgggccctgcctctccctcgggggatcaggtgtccacctgcagcctggagatgaactacagcagcaactcctccctggagcacagggggcccaatagctctacctcagaagtggggctcgaggcttctcctggggccgcccctgacctcaggaggacctggaaggggggccacgagttgccgtcgtgtgcctgctgctgcgagccccagccctccccagccgggcctagcgccggagcagctggcagcagcaccttgttcctggggccccacctctacgagggctctggcccggcgggtggggagccccagtcaggaagctcccagggcttgtacggccttcaccccgaccatttgcccaggacagatggggtgaaatacgagggtctgccctgctgcttctatgaagagaagcaggtggcccgcgggggcggagggggcagcggctgctacactgaggactactcggtgagtgtgcagtacacgctcaccgaggaaccaccgcccggctgctaccccggggcccgggacctgagccagcgcatccccatcattccagaggatgtggactgtgatctgggcctgccctcggactgccaagggacccacagcctcggctcctggggtgggacgcgaggcccggataccccacggccccacaggggcctgggagcaacccgggaagaggagcgggctctgtgctgccaggctagggccctactgcggcctggctgccctccggaggaggcgggtgctgtcagggccaacttccctagtgccctccaggacactcaggagtccagcaccactgccactgaggctgcaggaccgagatctcactcagcagacagcagcagcccgggagcctgagctcaggaggaactcttacctggaaattgggaactgtatggagactccaaactgacttctttcaaaaaacaaaaacaaaaaatttttttagctttgacaaacacacaaaagtggtaataaagagagccctccttgtcaacccaaaatgtgagccccctgtggcaaaaccaccccctaccccattaacaaatcaacagacaaaattctccgagtcctttgcctcttttgataacatgttgttctgttttgtaaagtgtgtgtgcttggggttccgaggtgtgggattgagttctctgctttgtttttttttaagatattgtatgtaaatgtaaaaagttattta

SEQ ID NO: 83220 - DNA, 6539 bp, Artificial Sequence
  derived and/or modified sequence
gcggccgcggggcccggcgcggcgcgggccaaggagacggcgttcgtggaggtggtgctgttcgagtcgagcccaagcggcgattacaccacctacaccaccggcctcacgggccgcttctcgcgggccggggccacgctcagcgccgagggcgagatcgtgcagatgcacccactgggcctatgtaataacaatgacgaagaggacttgtatgaatatggctgggtaggagtggtgaagctggaacagccagaattggacccgaaaccatgcctcactgtcctaggcaaggccaagcgagcagtacagcggggagctactgcagtcatctttgatgtgtctgaaaacccagaagctattgatcagctgaaccagggctctgaagacccgctcaagaggccggtggtgtatgtgaagggtgcagatgccattaagctgatgaacatcgtcaacaagcagaaagtggctcgagcaaggatccagcaccgccctcctcgacaacccactgaatactttgacatggggattttcctggctttcttcgtcgtggtctccttggtctgcctcatcctccttgtcaaaatcaagctgaagcagcgacgcagtcagaattccatgaacaggctggctgtgcaggctctagagaagatggaaaccagaaagttcaactccaagagcaaggggcgccgggaggggagctgtggggccctggacacactcagcagcagctccacgtccgactgtgccatctgtctggagaagtacattgatggagaggagctgcgggtcatcccctgtactcaccggtttcacaggaagtgcgtggacccctctgctgcagcaccacacctgcccccactgtcggcacaacatcatagaacaaaagggaaacccaagcgcggtgtgtgtggagaccagcaacctctcacgtggtcggcagcagagggtgaccctgccggtgcattaccccggccgcgtgcacaggaccaacgccatcccagcctaccctacgaggacaagcatggactcccacggcaaccccgtcaccttgctgaccatggaccggcacggggagcagagcctctattccccgcagacccccgcctacatccgcagctacccacccctccacctggaccacagcctggccgctcaccgctgcggcctggagcaccgggcctactccccagcccaccccttccgcaggcccaagttgagtggccgcagcttctccaaggcagcttgcttctcccagtatgagaccatgtaccagcactactacttccagggcctcagctacccggagcaggaggggcagtccccacctagcctcgcaccccggggcccggcccgtgcctttcctccgagcggcagtggcagcctgctcttccccaccgtggtgcacgtggccccgccctcccacctggagagcggcagcacgtccagcttcagctgctatcacggccaccgctcggtgtgcagtggctacctggccgactgcccaggcagcgacagcagcagcagcagcagctccggccagtgccactgttcctccagtgactctgtggtagactgcactgaggtcagcaaccagggcgtgtacgggagctgctccaccttccgcagctccctcagcagcgactatgaccccttcatctaccgcagccggagcccctgtcgtgccagtgaggcggggggctcgggcagctcgggccggggacctgccctgtgcttcgagggctccccgcctcccgaggagctcccggcggtgcacagtcatggtgctgggcggggcgagccttggccgggccctgcctctccctcgggggatcaggtgtccacctgcagcctggagatgaactacagcagcaactcctccctggagcacagggggcccaatagctctacctcagaagtggggctcgaggcttctcctggggccgcccctgacctcaggaggacctggaaggggggccacgagttgccgtcgtgtgcctgctgctgcgagccccagccctccccagccgggcctagcgccggagcagctggcagcagcaccttgttcctggggccccacctctacgagggctctggcccggcgggtggggagccccagtcaggaagctcccagggcttgtacggccttcaccccgaccatttgcccaggacagatggggtgaaatacgagggtctgccctgctgcttctatgaagagaagcaggtggcccgcgggggcggagggggcagcggctgctacactgaggactactcggtgagtgtgcagtacacgctcaccgaggaaccaccgcccggctgctaccccggggcccgggacctgagccagcgcatccccatcattccagaggatgtggactgtgatctgggcctgccctcggactgccaagggacccacagcctcggctcctggggtgggacgcgaggcccggataccccacggccccacaggggcctgggagcaacccgggaagaggagcgggctctgtgctgccaggctagggccctactgcggcctggctgccctccggaggaggcgggtgctgtcagggccaacttccctagtgccctccaggacactcaggagtccagcaccactgccactgaggctgcaggaccgagatctcactcagcagacagcagcagcccgggagcctgagctcaggaggaactcttacctggaaattgggaactgtatggagactccaaactgacttctttcaaaaaacaaaaacaaaaaatttttttagctttgacaaacacacaaaagtggtaataaagagagccctccttgtcaacccaaaatgtgagccccctgtggcaaaaccaccccctaccccattaacaaatcaacagacaaaattctccgagtcctttgcctcttttgataacatgttgttctgttttgtaaagtgtgtgtgcttggggttccgaggtgtgggattgagttctctgctttgtttttttttaagatattgtatgtaaatgtaaaaagttatttaaatatatattttaaagaaccctaactgccaacttttgctgaaaaagaaaaaaaaatcactgctgcattaaatgaaccacatcatgtgtagatactgttgtctccctgaagggagctcaggcctttgaaaagctcagggcttcacctgccttagaaaatgaaccagaaacttgaagtaaagctagttgataggggtacaggctctgaggagcagtgcaaaactgcctctttctttctcgtggcaaatcccaatgtacacgatttcaggtctcagacgccatgcctctccagcccacgcctttaggcaggtgatggcagcagctaggaatagggtgtacatgatccacagccctgcggagccaggtcaagccgctgctatgaaagctccagggtgatggggacgattctgcccagtgtcctcagtctgtcccctcaggtcatggtcccaagtgaaatgacagagttcacagccctggtcttggctgaggtccaggtcatagtaagggcatgttcttggggccctcgacctgaactctgaccctccgggcagggaagaggaggttgtcccctttggttgtcctggctttggagtcctttgcaaaaatattttgggccccctgccactggctgcagaaatggctcgacggggtgtgtggggacagacacccagaaggaatgtacttttgtggccttggtgtccgatggggctgggggagagtgctctccactgacccagcagcacacccatgtgcagtgcgcctgcatctgtgtgggggcagccacaccccttggctgctgcttccttgggctgcctttctgggggcatgtgactggacctacgaggtctgcactgagctccatttgaatgatacctttcctatcccatttcccccacggaagcaccgcttcagggttattcagtcctctgcctcatggctgaaattgctcatctcgtctgcagatgtctactatcctgtctacctaatgcactattatgtattgattctccatgagacagagagagagagagactatcagatagtttacacccaaagggtaggtttttgtatatttttccagccttttttattaaggggaaggggagagtttaaaaacccaaaccgttgtggttttaaggtgtttcatttttaaaagggagagagaatctatttaaagctatttcagatcagggattgtcatccttttttgtccaatgtattccttgttctttaaaaaaattttttttagaggaaactaatattagtctttgtgttcactaactcttctggtcacttgtatttatttattcattcattcatcagatatttgttgccatctgaaagaactggcccagtgggtctgaaagctcgcttgagaataggaaacttgagacctggccccctgtgggtaggagaacaaggaccacctgggttctccagtcttgaacgagaatctcactcttatcagaatgtttttcttaacctcagcgtatgatgaggaaatttacttatctctagctaggatttgacaaattccaacatcaaatgatcaaaacatttgccactgaggcttcactggtgagatccgttctccgtcctcgggtgcagtcccttgggggctgctcctcggactgcgccccgcacacctgttatcgagggtgtgagaagcgcctaagctggtgacatgtgatctgggacgccttcatttctcgggccaggagtagcagctgctaaggacagcagcttgcattgcgtggttttagggaagcagggtctggcttttaatatgaactgcaaaaagcagcttctcactgatatttttttgttgttgtttctggggggtttttttgttttgtttttaatgcctttgagtgcatattttcttcctcgtctgaaaccgaactcccaaagtggctttctttagccctggctggaaaaccacctctcaatagccttaagcaataaatagatgagtagagaatgtggcttcaactgggcttattaaagtaagtgtgtctagttttcacttgaacaagtgatagctgcagatggcgaaagaaacccatttaatttttgtagcttacaggtggtagaaacaaaaatgcaattttaaaaccttaaataccaaataccaaccattgccttttttttttttgagatggaattttgctcttgtcacccaggctggagtgcaatggcgcgatctcacctcactgcaacctctgcctcccgggtccaagtgattctcctgcctcagcctcccaagtagctgggattacaggcatgcgccaccacacccagctaattttgtatttttggtagagacagggtatctccatgttggtcaggctggtcttggattcccgacctcaggtgatccgcccacctcggcctcccaaagtgctgggattacaggcgtgagccaccatgcctgcccagcaataccaaccattgtcttttaaattcgtgttggcttctcagacagggagatcactggaataaaataaccgatggtcttattttgtcacacgtaaatcaaaagaaatgtcctctttgaagttgtaagactccaccaatgacagacacccttttcggtggactctgagtggtgtgtagtggttttatagccatggaaactaggagtatctcactttccactgagaacccctgcccccaatccctctaagttggggtgtggcagttgggcagggtcaagtgacccagccctggctgtaggacagccatatacagtgaagagttctagaaccagctaaaaatggaagtttgggtgtttaccaacaaggtacctctttatggatgcagccccagtaagctggctttaactctcagctccttccctgtctcctcctaatccaagcccttttataaaataaagccccttctgtcccactgctcacatacttatgtgctgctagtctctactcgaagttcgtgcaggactaatgcttttaaaatgaggtctaaaaaataattactagtcgagactattattctttaaacagaactgcctttttctactctttatgtaaactctttctattgtgttggtctaacaaggcactattttaaaattttttaatttttcccatagcacttaaaagagattttgtaaagaccttgctgtaaagattttgtaataaaatggtctaagggctctttttccaacattaccatttttaaaaaatgttttaaaagctagaagacaacttatgtatattctgtatatgtatagcagcacatttcatttatggaaatatgttctcagaatatttatttactaatatatttatcttaagccatgtcttatgttgagagtgtgacattgttggaataatcattgaaaatgactaacacaagaccctgtaaatacatgataattgcacacagattttacatatttgcagaccaaaaatgatttaaaacaagttgtagtcttctatggttttgtaacaaattgtacacatgactgtaaaaaaaaaatacaattttatcaagtatgtgtt

SEQ ID NO: 83221 - DNA, 6851 bp, Artificial Sequence
  derived and/or modified sequence
agatgaaagggccgcggcgcgacggccgggggagccgagctgagcctgcgacccacaaagccgccgccgccgccgccgtgatggggctgtgaggcgtccgcccgcgttcggtcctcagccggcccgcgactatgcccggccgcgcccgccctccgcgccctcccgccgcaggaccatgaggccgcgctcgggcgggcgcccaggggccacgggccgccgccgccgccgcctgcgccgccgcccccgcggcctccggtgcagccgcctgccgccgccgccgccgctgccgctgctgctcgggctgctgctggcggccgcggggcccggcgcggcgcgggccaaggagacggcgttcgtggaggtggtgctgttcgagtcgagcccaagcggcgattacaccacctacaccaccggcctcacgggccgcttctcgcgggccggggccacgctcagcgccgagggcgagatcgtgcagatgcacccactgggcctatgtaataacaatgacgaagaggacttgtatgaatatggctgggtaggagtggtgaagctggaacagccagaattggacccgaaaccatgcctcactgtcctaggcaaggccaagcgagcagtacagcggggagctactgcagtcatctttgatgtgtctgaaaacccagaagctattgatcagctgaaccagggctctgaagacccgctcaagaggccggtggtgtatgtgaagggtgcagatgccattaagctgatgaacatcgtcaacaagcagaaagtggctcgagcaaggatccagcaccgccctcctcgacaacccactgaatactttgacatggggattttcctggctttcttcgtcgtggtctccttggtctgcctcatcctccttgtcaaaatcaagctgaagcagcgacgcagtcagaattccatgaacaggctggctgtgcaggctctagagaagatggaaaccagaaagttcaactccaagagcaaggggcgccgggaggggagctgtggggccctggacacactcagcagcagctccacgtccgactgtgccatctgtctggagaagtacattgatggagaggagctgcgggtcatcccctgtactcaccggtttcacaggaagtgcgtggacccctggctgctgcagcaccacacctgcccccactgtcggcacaacatcatagaacaaaagggaaacccaagcgcggtgtgtgtggagaccagcaacctctcacgtggtcggcagcagagggtgaccctgccggtgcattaccccggccgcgtgcacaggaccaacgccatcccagcctaccctacgaggacaagcatggactcccacggcaaccccgtcaccttgctgaccatggaccggcacggggagcagagcctctattccccgcagacccccgcctacatccgcagctacccacccctccacctggaccacagcctggccgctcaccgctgcggcctggagcaccgggcctactccccagcccaccccttccgcaggcccaagttgagtggccgcagcttctccaaggcagcttgcttctcccagtatgagaccatgtaccagcactactacttccagggcctcagctacccggagcaggaggggcagtccccacctagcctcgcaccccggggcccggcccgtgcctttcctccgagcggcagtggcagcctgctcttccccaccgtggtgcacgtggccccgccctcccacctggagagcggcagcacgtccagcttcagctgctatcacggccaccgctcggtgtgcagtggctacctggccgactgcccaggcagcgacagcagcagcagcagcagctccggccagtgccactgttcctccagtgactctgtggtagactgcactgaggtcagcaaccagggcgtgtacgggagctgctccaccttccgcagctccctcagcagcgactatgaccccttcatctaccgcagccggagcccctgtcgtgccagtgaggcggggggctcgggcagctcgggccggggacctgccctgtgcttcgagggctccccgcctcccgaggagctcccggcggtgcacagtcatggtgctgggcggggcgagccttggccgggccctgcctctccctcgggggatcaggtgtccacctgcagcctggagatgaactacagcagcaactcctccctggagcacagggggcccaatagctctacctcagaagtggggctcgaggcttctcctggggccgcccctgacctcaggaggacctggaaggggggccacgagttgccgtcgtgtgcctgctgctgcgagccccagccctccccagccgggcctagcgccggagcagctggcagcagcaccttgttcctggggccccacctctacgagggctctggcccggcgggtggggagccccagtcaggaagctcccagggcttgtacggccttcaccccgaccatttgcccaggacagatggggtgaaatacgagggtctgccctgctgcttctatgaagagaagcaggtggcccgcgggggcggagggggcagcggctgctacactgaggactactcggtgagtgtgcagtacacgctcaccgaggaaccaccgcccggctgctaccccggggcccgggacctgagccagcgcatccccatcattccagaggatgtggactgtgatctgggcctgccctcggactgccaagggacccacagcctcggctcctggggtgggacgcgaggcccggataccccacggccccacaggggcctgggagcaacccgggaagaggagcgggctctgtgctgccaggctagggccctactgcggcctggctgccctccggaggaggcgggtgctgtcagggccaacttccctagtgccctccaggacactcaggagtccagcaccactgccactgaggctgcaggaccgagatctcactcagcagacagcagcagcccgggagcctgagctcaggaggaactcttacctggaaattgggaactgtatggagactccaaactgacttctttcaaaaaacaaaaacaaaaaatttttttagctttgacaaacacacaaaagtggtaataaagagagccctccttgtcaacccaaaatgtgagccccctgtggcaaaaccaccccctaccccattaacaaatcaacagacaaaattctccgagtcctttgcctcttttgataacatgttgttctgttttgtaaagtgtgtgtgcttggggttccgaggtgtgggattgagttctctgctttgtttttttttaagatattgtatgtaaatgtaaaaagttatttaaatatatattttaaagaaccctaactgccaacttttgctgaaaaagaaaaaaaaatcactgctgcattaaatgaaccacatcatgtgtagatactgttgtctccctgaagggagctcaggcctttgaaaagctcagggcttcacctgccttagaaaatgaaccagaaacttgaagtaaagctagttgataggggtacaggctctgaggagcagtgcaaaactgcctctttctttctcgtggcaaatcccaatgtacacgatttcaggtctcagacgccatgcctctccagcccacgcctttaggcaggtgatggcagcagctaggaatagggtgtacatgatccacagccctgcggagccaggtcaagccgctgctatgaaagctccagggtgatggggacgattctgcccagtgtcctcagtctgtcccctcaggtcatggtcccaagtgaaatgacagagttcacagccctggtcttggctgaggtccaggtcatagtaagggcatgttcttggggccctcgacctgaactctgaccctccgggcagggaagaggaggttgtcccctttggttgtcctggctttggagtcctttgcaaaaatattttgggccccctgccactggctgcagaaatggctcgacggggtgtgtggggacagacacccagaaggaatgtacttttgtggccttggtgtccgatggggctgggggagagtgctctccactgacccagcagcacacccatgtgcagtgcgcctgcatctgtgtgggggcagccacaccccttggctgctgcttccttgggctgcctttctgggggcatgtgactggacctacgaggtctgcactgagctccatttgaatgatacctttcctatcccatttcccccacggaagcaccgcttcagggttattcagtcctctgcctcatggctgaaattgctcatctcgtctgcagatgtctactatcctgtctacctaatgcactattatgtattgattctccatgagacagagagagagagagactatcagatagtttacacccaaagggtaggtttttgtatatttttccagccttttttattaaggggaaggggagagtttaaaaacccaaaccgttgtggttttaaggtgtttcatttttaaaagggagagagaatctatttaaagctatttcagatcagggattgtcatccttttttgtccaatgtattccttgttctttaaaaaaattttttttagaggaaactaatattagtctttgtgttcactaactcttctggtcacttgtatttatttattcattcattcatcagatatttgttgccatctgaaagaactggcccagtgggtctgaaagctcgcttgagaataggaaacttgagacctggccccctgtgggtaggagaacaaggaccacctgggttctccagtcttgaacgagaatctcactcttatcagaatgtttttcttaacctcagcgtatgatgaggaaatttacttatctctagctaggatttgacaaattccaacatcaaatgatcaaaacatttgccactgaggcttcactggtgagatccgttctccgtcctcgggtgcagtcccttgggggctgctcctcggactgcgccccgcacacctgttatcgagggtgtgagaagcgcctaagctggtgacatgtgatctgggacgccttcatttctcgggccaggagtagcagctgctaaggacagcagcttgcattgcgtggttttagggaagcagggtctggcttttaatatgaactgcaaaaagcagcttctcactgatatttttttgttgttgtttctggggggtttttttgttttgtttttaatgcctttgagtgcatattttcttcctcgtctgaaaccgaactcccaaagtggctttctttagccctggctggaaaaccacctctcaatagccttaagcaataaatagatgagtagagaatgtggcttcaactgggcttattaaagtaagtgtgtctagttttcacttgaacaagtgatagctgcagatggcgaaagaaacccatttaatttttgtagcttacaggtggtagaaacaaaaatgcaattttaaaaccttaaataccaaataccaaccattgccttttttttttttgagatggaattttgctcttgtcacccaggctggagtgcaatggcgcgatctcacctcactgcaacctctgcctcccgggtccaagtgattctcctgcctcagcctcccaagtagctgggattacaggcatgcgccaccacacccagctaattttgtatttttggtagagacagggtatctccatgttggtcaggctggtcttggattcccgacctcaggtgatccgcccacctcggcctcccaaagtgctgggattacaggcgtgagccaccatgcctgcccagcaataccaaccattgtcttttaaattcgtgttggcttctcagacagggagatcactggaataaaataaccgatggtcttattttgtcacacgtaaatcaaaagaaatgtcctctttgaagttgtaagactccaccaatgacagacacccttttcggtggactctgagtggtgtgtagtggttttatagccatggaaactaggagtatctcactttccactgagaacccctgcccccaatccctctaagttggggtgtggcagttgggcagggtcaagtgacccagccctggctgtaggacagccatatacagtgaagagttctagaaccagctaaaaatggaagtttgggtgtttaccaacaaggtacctctttatggatgcagccccagtaagctggctttaactctcagctccttccctgtctcctcctaatccaagcccttttataaaataaagccccttctgtcccactgctcacatacttatgtgctgctagtctctactcgaagttcgtgcaggactaatgcttttaaaatgaggtctaaaaaataattactagtcgagactattattctttaaacagaactgcctttttctactctttatgtaaactctttctattgtgttggtctaacaaggcactattttaaaattttttaatttttcccatagcacttaaaagagattttgtaaagaccttgctgtaaagattttgtaataaaatggtctaagggctctttttccaacattaccatttttaaaaaatgttttaaaagctagaagacaacttatgtatattctgtatatgtatagcagcacatttcatttatggaaatatgttctcagaatatttatttactaatatatttatcttaagccatgtcttatgttgagagtgtgacattgttggaataatcattgaaaatgactaacacaagaccctgtaaatacatgataattgcacacagattttacatatttgcagaccaaaaatgatttaaaacaagttgtagtcttctatggttttgtaacaaattgtacacatgactgtaaaaaaaaaatacaattttatcaagtatgtgtt

SEQ ID NO: 83222 - protein, 2069 aa, Artificial Sequence
  derived and/or modified sequence
MLKFKYGARNPLDAGAAEPIASRASRLNLFFQGKPPFMTQQQMSPLSREGILDALFVLFEECSQPALMKIKHVSNFVRKYSDTIAELQELQPSAKDFEVRSLVGCGHFAEVQVVREKATGDIYAMKVMKKKALLAQEQVSFFEEERNILSRSTSPWIPQLQYAFQDKNHLYLVMEYQPGGDLLSLLNRYEDQLDENLIQFYLAELILAVHSVHLMGYVHRDIKPENILVDRTGHIKLVDFGSAAKMNSNKMVNAKLPIGTPDYMAPEVLTVMNGDGKGTYGLDCDWWSVGVIAYEMIYGRSPFAEGTSARTFNNIMNFQRFLKFPDDPKVSSDFLDLIQSLLCGQKERLKFEGLCCHPFFSKIDWNNIRNSPPPFVPTLKSDDDTSNFDEPEKNSWVSSSPCQLSPSGFSGEELPFVGFSYSKALGILGRSESVVSGLDSPAKTSSMEKKLLIKSKELQDSQDKCHKMEQEMTRLHRRVSEVEAVLSQKEVELKASETQRSLLEQDLATYITECSSLKRSLEQARMEVSQEDDKALQLLHDIREQSRKLQEIKEQEYQAQVEEMRLMMNQLEEDLVSARRRSDLYESELRESRLAAEEFKRKATECQHKLLKAKDQGKPEVGEYAKLEKINAEQQLKIQELQEKLEKAVKASTEATELLQNIRQAKERAERELEKLQNREDSSEGIRKKLVEAEERRHSLENKVKRLETMERRENRLKDDIQTKSQQIQQMADKILELEEKHREAQVSAQHLEVHLKQKEQHYEEKIKVLDNQIKKDLADKETLENMMQRHEEEAHEKGKILSEQKAMINAMDSKIRSLEQRIVELSEANKLAANSSLFTQRNMKAQEEMISELRQQKFYLETQAGKLEAQNRKLEEQLEKISHQDHSDKNRLLELETRLREVSLEHEEQKLELKRQLTELQLSLQERESQLTALQAARAALESQLRQAKTELEETTAEAEEEIQALTAHRDEIQRKFDALRNSCTVITDLEEQLNQLTEDNAELNNQNFYLSKQLDEASGANDEIVQLRSEVDHLRREITEREMQLTSQKQTMEALKTTCTMLEEQVMDLEALNDELLEKERQWEAWRSVLGDEKSQFECRVRELQRMLDTEKQSRARADQRITESRQVVELAVKEHKAEILALQQALKEQKLKAESLSDKLNDLEKKHAMLEMNARSLQQKLETERELKQRLLEEQAKLQQQMDLQKNHIFRLTQGLQEALDRADLLKTERSDLEYQLENIQVLYSHEKVKMEGTISQQTKLIDFLQAKMDQPAKKKKGLFSRRKEDPALPTQVPLQYNELKLALEKEKARCAELEEALQKTRIELRSAREEAAHRKATDHPHPSTPATARQQIAMSAIVRSPEHQPSAMSLLAPPSSRRKESSTPEEFSRRLKERMHHNIPHRFNVGLNMRATKCAVCLDTVHFGRQASKCLECQVMCHPKCSTCLPATCGLPAEYATHFTEAFCRDKMNSPGLQTKEPSSSLHLEGWMKVPRNNKRGQQGWDRKYIVLEGSKVLIYDNEAREAGQRPVEEFELCLPDGDVSIHGAVGASELANTAKADVPYILKMESHPHTTCWPGRTLYLLAPSFPDKQRWVTALESVVAGGRVSREKAEADAKLLGNSLLKLEGDDRLDMNCTLPFSDQVVLVGTEEGLYALNVLKNSLTHVPGIGAVFQIYIIKDLEKLLMIAGEERALCLVDVKKVKQSLAQSHLPAQPDISPNIFEAVKGCHLFGAGKIENGLCICAAMPSKVVILRYNENLSKYCIRKEIETSEPCSCIHFTNYSILIGTNKFYEIDMKQYTLEEFLDKNDHSLAPAVFAASSNSFPVSIVQVNSAGQREEYLLCFHEFGVFVDSYGRRSRTDDLKWSRLPLAFAYREPYLFVTHFNSLEVIEIQARSSAGTPARAYLDIPNPRYLGPAISSGAIYLASSYQDKLRVICCKGNLVKESGTEHHRGPSTSRSSPNKRGPPTYNEHITKRVASSPAPPEGPSHPREPSTPHRYREGRTELRRDKSPGRPLEREKSPGRMLSTRRERSPGRLFEDSSRGRLPAGAVRTPLSQVNKVWDQSSV

SEQ ID NO: 83223 - DNA, 6210 bp, Artificial Sequence
  derived and/or modified sequence
atgctgaaatttaagtacggcgcaaggaatccactggacgctggtgccgcggaacctattgcctctcgcgcaagcaggctcaatctgtttttccagggaaagcctccctttatgacacagcagcagatgtctccactgtcccgagaggggatactcgatgcactctttgtcttattcgaagaatgcagtcaacccgcactgatgaaaatcaaacacgtctctaactttgtgagaaagtattcagacactattgccgaacttcaggagctgcaaccatccgcgaaggacttcgaggttcgcagcctggtgggatgcggccacttcgccgaagtgcaggtcgtgcgcgaaaaggctaccggggatatctacgcaatgaaagttatgaagaagaaggccctattggctcaggaacaggtttccttttttgaggaggagcggaatattctgtctagatccaccagtccatggattccccagctgcagtatgctttccaggacaagaatcatttgtacctggttatggaatatcagccaggcggggatcttctcagcctacttaaccgctatgaggatcagctggatgagaatctgattcagttttatttagccgagttaatactggccgtacattccgtacacttgatgggctacgtgcatcgcgacatcaagccggaaaatatcctagtggatagaacaggtcatatcaaactagttgactttggtagcgctgccaagatgaattcgaacaaaatggtcaacgctaaattaccgatagggactcctgactacatggcacccgaggttctcacagtgatgaatggtgacgggaagggcacttatggactggattgcgactggtggagtgtgggcgtgattgcctacgagatgatctatggccgcagtccttttgctgaaggaaccagtgctcggacatttaataacattatgaactttcaacggttcctgaagttccccgacgatccaaaagtcagttccgacttcctggacctaattcagtccctcctgtgtgggcagaaagagaggctgaagtttgaagggctgtgttgccatccattcttctcaaagattgactggaataacattagaaactcaccgccacccttcgttcccacgctgaagagcgacgacgatactagtaacttcgacgaaccagagaagaattcttgggtgtcatctagtccatgccagcttagccccagtggtttcagtggtgaggaactacccttcgttgggttctcgtatagcaaagcgctcggcattctgggccggtcagagagcgttgtctcggggttggattcccctgcaaaaacgagcagcatggaaaagaaattgctgattaagagcaaagagctacaagactctcaggacaagtgccacaagatggagcaggaaatgacccggcttcatcggcgagtcagcgaagtggaggccgttctgtcacagaaggaggtcgaactcaaagctagcgaaacccagagatcccttctggagcaggacctggcgacctatattaccgaatgttcctcactgaagcgctctctagagcaagcgaggatggaagtaagccaggaagacgacaaggcccttcagctcctgcatgacatccgagaacagtcacgcaagctgcaagagataaaggaacaggagtaccaggctcaggtggaagaaatgaggctgatgatgaatcagcttgaagaggatctggtttccgctcgccgaagaagcgatctgtatgaaagcgaactgagagaatctagactggccgccgaagaattcaagcgcaaagctactgaatgccaacacaaactcctgaaggcaaaggatcaggggaagcccgaagtgggcgagtacgctaaactggagaaaataaacgctgagcagcagttgaagatccaggaactccaggagaagttagaaaaggcagtcaaggcctctaccgaagcaaccgaactactgcagaacatcaggcaggcaaaggaacgcgccgagagggagctggaaaaattacagaatagagaggattcaagcgaaggcatccgtaagaaactggtcgaagctgaagaaaggaggcacagcctggaaaacaaagtcaaacgcttggagacaatggaaaggagggagaaccggctgaaggacgacatccagacgaagtcacagcagatccagcagatggccgataaaattcttgagctggaggagaaacatcgtgaagcacaagtgtccgctcagcacctcgaggtgcacctcaaacagaaagagcagcactatgaggagaaaataaaggtgctggataaccagataaaaaaagatctcgccgataaggagacactcgaaaacatgatgcagcgccacgaggaggaggcgcacgaaaaaggaaaaatcctgtctgagcaaaaggctatgataaacgctatggactctaaaattcgctccctggaacagcggattgtggagctcagtgaagccaataaacttgcagccaattcatccctcttcacgcagaggaatatgaaggcccaagaagagatgatatccgagttaaggcagcagaaattctatctggagacacaggctggaaagttggaggctcaaaacaggaagttggaggaacaattggaaaagatcagtcatcaagaccactctgacaagaatcgcctcctggagttagagacgcgtctgcgggaggtcagtcttgagcacgaggagcagaagctcgagcttaagcgccagctgaccgaactccagctgagcctgcaggagagagagtcacagctgactgcccttcaggcagcccgcgcagccttagagtcccagctgagacaggccaagacggagctggaggaaactacagccgaggcagaggaggagatccaggctctaactgcccatcgggacgagattcagcggaagtttgatgccctgagaaattcttgcacagttatcaccgatctcgaggaacaacttaatcaactcactgaggataacgctgagctgaacaaccagaatttttacctgagtaaacagcttgacgaggctagcggcgccaatgacgagatcgtgcaattacgcagtgaggttgaccatctgcgtagggaaattactgaaagggagatgcaactgacctctcagaaacagaccatggaggcattgaagaccacttgcaccatgctagaggagcaggtgatggatctggaggcattaaacgacgagctcctcgaaaaggagcgccagtgggaagcctggcggtcagtactgggcgatgagaagagccaattcgaatgtcgcgtcagggaactgcagagaatgttagacacggaaaaacagtcccgagctcgtgccgatcagcgcattactgagtcgaggcaggtagtggagctcgccgtaaaagagcacaaggcggagattctagcccttcaacaagcgttgaaagaacaaaagcttaaggccgaatctcttagcgataaactaaatgatctggagaaaaaacatgccatgctggaaatgaacgcacgatcactccagcagaagctcgaaactgaacgggaactgaagcagaggctgctcgaagagcaggccaagcttcagcagcagatggacctgcaaaaaaaccatatctttagattgacgcagggcctgcaggaagccctggaccgagcggacttgttgaagacagagaggtcagacttggaatatcagctagagaatatccaggtgttgtacagtcacgagaaggttaagatggaaggcactatcagccagcaaaccaaattaatagacttcctccaggctaagatggaccagcctgccaaaaaaaagaagggactgtttagcaggaggaaagaggatcccgccctacctacccaggttcctctccagtacaacgagcttaaactcgccttggagaaagagaaagcgagatgtgcagaactcgaggaagctctgcagaaaacaaggatcgaactacgctctgctcgcgaggaggcagcccaccgaaaagccaccgatcacccgcaccccagtacgcccgccactgccagacagcagattgctatgagcgccatcgttcgatcccctgagcatcagccatccgcaatgtcactgctggcaccccctagtagtagaaggaaagagagtagcacccctgaggagtttagccgtcgactgaaagagcgcatgcatcacaacatcccacaccggttcaacgtgggcctgaatatgagggccacgaagtgtgctgtgtgccttgacacggtgcactttggccggcaagcgagcaaatgcctggagtgccaagtaatgtgtcatccaaaatgcagtacctgcttgcctgctacttgcggactaccagccgagtatgctactcacttcaccgaagccttttgtcgcgataaaatgaattctccgggcctgcagactaaggaaccctccagtagccttcacctggagggctggatgaaagttccccggaacaacaaacggggacagcagggatgggacagaaagtacatagtgctggagggaagcaaggttttgatatatgataacgaagccagggaggcaggccaacgtccagtggaagaattcgagttgtgcctccctgacggagacgtgtctatccacggcgccgtcggagcttcagaactggccaacactgccaaggccgacgttccgtatatcctcaagatggaatctcaccctcacacaacctgttggcccgggaggaccctgtacctccttgcaccctccttcccggacaaacaaaggtgggttacagcccttgagtccgtggtagctggcggcagagtcagcagagagaaagccgaagcagacgctaagttgttggggaatagtttgctcaagctggaaggtgatgaccggctggacatgaattgcaccctcccctttagcgatcaagtagtcctcgtgggcacagaggagggtctatacgctctcaacgtgctcaaaaacagtctgacgcatgtgcctggcatcggcgctgtgttccaaatttacatcatcaaggacctcgagaagctcctaatgatcgcaggggaggaacgtgcactttgcctggttgatgttaaaaaagtgaagcagtccctggctcagagtcacctgcccgcccagcccgacatcagtccaaacatcttcgaggcagtgaaagggtgccatctgtttggagccggcaagatcgaaaacggtctatgcatctgtgccgccatgcctagcaaggtggtgatcctgcgctacaatgaaaatctaagcaaatactgtatccggaaggaaattgaaacctcagaaccctgctcatgcattcactttactaactattccatcctgataggaacaaataaattctatgaaatagatatgaagcaatatactctcgaagagttcttggacaagaatgaccacagcctggcaccggccgtgttcgctgcatccagcaactcctttcccgtcagtattgtgcaggtgaacagtgccggccagagggaggaatacctactgtgtttccatgaatttggggtgttcgttgattcttacggccgcagatcccgcaccgacgacctgaagtggtctagattacccctagcgtttgcctaccgggagccgtacttattcgtgacgcattttaactctctcgaagtgattgaaattcaagcccgaagctccgctggcacccccgcccgggcttacctggatatcccaaatccccggtatctgggcccggcaatttccagtggggctatttacctcgcctcctcttaccaagataagttgcgggtgatctgctgcaagggaaatctggtgaaagagagcggaaccgaacatcatcggggcccatccacctctaggtctagccctaataaaaggggccctccaacttacaatgagcacattactaaaagagtggcctcgtcaccagcacctcctgagggcccgagtcacccacgggaaccgtccacaccacacaggtacagggagggacgcactgagctccgccgagacaagtctccaggtcgccccctggagagagaaaagagccctggcagaatgctgagcacgcgtcgcgagcgatctccggggagactgttcgaggacagctcccgtggccgccttccggcaggtgccgtgcgtactccactgagtcaggttaataaggtctgggaccagtcatcagtgtag

SEQ ID NO: 83224 - DNA, 6210 bp, Artificial Sequence
  derived and/or modified sequence
atgctgaagttcaagtacggggccaggaaccccctggatgctggagctgctgagcccatcgccagccgggccagccggctgaacctcttcttccagggcaagccacccttcatgacccagcagcagatgagccccctgagccgggagggcatcctggatgccctgtttgtgctgtttgaagaatgttcccagcctgccctgatgaagatcaagcacgtgagcaactttgtgaggaagtacagcgacaccatcgccgagctgcaggagctgcagcccagcgccaaggactttgaggtgcgcagcctggtgggctgcggccactttgctgaggtgcaggtggtgcgggagaaggccactggagacatctatgccatgaaggtgatgaagaagaaggccctgctggcccaggagcaggtgtccttctttgaggaggagaggaacatcctgagccgcagcaccagcccctggatcccccagctgcagtatgccttccaggacaagaaccacctgtacctggtgatggagtaccagcccggcggggacctgctgagcctgctgaacagatatgaggaccagctggatgaaaatctcatccagttctacctggccgagctgatcctggccgtgcacagcgtgcacctgatgggctacgtgcaccgggacatcaagccagagaacatcctggtggacagaacaggccacatcaagctggtggactttggcagcgctgccaagatgaacagcaacaagatggtgaatgccaagctgcccatcggcaccccagactacatggcccctgaggtgctgactgtgatgaatggagatggcaagggcacctacggcctggactgtgactggtggagcgtgggcgtcatcgcctatgagatgatctacggccgcagcccctttgctgagggcaccagcgcccggaccttcaacaacatcatgaacttccagcgcttcctgaagttcccagatgaccccaaggtgtccagtgacttcctggacctgatccagagcctgctgtgtggccagaaggagcggctgaagtttgagggcctgtgctgccaccccttcttcagcaagattgactggaacaacatccggaacagccccccaccatttgtgcccaccctgaagagtgatgatgacaccagcaactttgatgagcctgagaagaacagctgggtgagcagcagcccctgccagctgagccccagcggcttcagcggggaggagctgccctttgtgggcttctcctacagcaaggccctgggcatcctgggccgctctgagagcgtggtgtctggcctggacagccctgccaagaccagctccatggagaagaagctgctgatcaagagcaaggagctgcaggacagccaggacaagtgccacaagatggagcaggagatgacccggctgcacagaagagtgtctgaggtggaggccgtgctgagccagaaggaggtggagctgaaggccagcgagacccagaggagcctgctggagcaggacctggccacctacatcacagaatgtagcagcctgaagaggagcctggagcaggccaggatggaggtgtcccaggaggatgacaaggccctgcagctgctgcatgacatccgggagcagagcaggaagctgcaggagatcaaggagcaggagtaccaggcccaggtggaggagatgaggctgatgatgaaccagctggaggaggacctggtgtctgcccggcggcggagtgacctgtatgaaagtgagctgcgggagagccggctggccgctgaggagttcaagaggaaggccacagagtgccagcacaagctgctgaaggccaaggaccagggcaagccagaggtgggggagtatgccaagctggagaagatcaatgctgagcagcagctgaagatccaggagctgcaggagaagctggagaaggctgtgaaggccagcacagaggccacagagctgctgcagaacatccggcaggccaaggagagagctgagcgggagctggagaagctgcagaaccgggaggacagcagcgagggcatcaggaagaagctggtggaggccgaggagcggcggcacagcctggagaacaaggtgaagaggctggagaccatggagcggcgggagaaccggctgaaggatgacatccagaccaagagccagcagatccagcagatggctgacaagatcctggagctggaggagaagcaccgggaggcccaggtgtctgcccagcacctggaggtgcacctgaagcagaaggagcagcactatgaggagaagatcaaggtgctggacaaccagatcaagaaggacctggccgacaaggagaccctggagaacatgatgcagagacatgaggaggaggcccacgagaagggcaagatcctgtctgagcagaaggccatgatcaatgccatggacagcaagatccgcagcctggagcagagaattgtggagctgtctgaggccaacaagctggccgccaacagcagcctcttcacccagaggaacatgaaggcccaggaggagatgatcagcgagctgcggcagcagaagttctacctggagacccaggccggcaagctggaggcccagaacaggaagctggaggagcagctggagaagatcagccaccaggaccacagcgacaagaaccggctgctggagctggagacccggctgcgggaggtgtccctggagcacgaggagcagaagctggagctgaagaggcagctgacagagctgcagctgagcctgcaggagcgggagagccagctgacagccctgcaggccgcccgggccgccctggagagccagctgcggcaggccaagacagagctggaggagaccacagctgaggccgaggaggagatccaggccctgacagcccacagagatgagatccagaggaagtttgatgccctgaggaacagctgcaccgtcatcacagacctggaggagcagctgaaccagctgacagaggacaatgctgagctgaacaaccagaacttctacctgagcaagcagctggatgaggccagcggggccaatgatgagatcgtgcagctgcggtctgaggtggaccacctgcggcgggagatcacagagcgggagatgcagctgaccagccagaagcagaccatggaggccctgaagaccacctgcaccatgctggaggagcaggtgatggacctggaggccctgaatgatgagctgctggagaaggagcggcagtgggaggcctggaggtctgtgctgggagatgagaagagccagtttgagtgccgggtgcgggagctgcagaggatgctggacacagagaagcagagccgggcccgggctgaccagaggatcacagagagccggcaggtggtggagctggccgtgaaggagcacaaggccgagatcctggccctgcagcaggccctgaaggagcagaagctgaaggccgagagcctgagtgacaagctgaatgacctggagaagaagcacgccatgctggagatgaatgcccggagcctgcagcagaagctggagacagagcgggagctgaagcagaggctgctggaggagcaggccaagctgcagcagcagatggacctgcagaagaaccacatcttccggctgacccagggcctgcaggaggccctggacagagctgacctgctgaagacagagaggagtgacctggagtaccagctggagaacatccaggtgctgtacagccatgagaaggtgaagatggagggcaccatcagccagcagaccaagctgattgacttcctgcaggccaagatggaccagcctgccaagaagaagaagggcctcttcagcaggaggaaggaggaccctgccctgcccacccaggtgcccctgcagtacaatgagctgaagctggccctggagaaggagaaggcccgctgtgccgagctggaggaggccctgcagaagacccgcatcgagctgcggagcgcccgggaggaggccgcccacaggaaggccacagaccacccccaccccagcaccccagccacagcccggcagcagatcgccatgtctgccatcgtgcgcagccctgagcaccagcccagcgccatgagcctgctggccccacccagcagcaggaggaaggagagcagcaccccagaggagttcagccggcggctgaaggagaggatgcaccacaacatcccccaccgcttcaacgtgggcctgaacatgagggccaccaagtgtgctgtgtgcctggacacagtgcacttcggccggcaggccagcaagtgcctggagtgccaggtgatgtgccaccccaagtgcagcacctgcctgcctgccacctgtggcctgcctgcagaatatgccacccacttcacagaggccttctgccgggacaagatgaacagccctggcctgcagaccaaggagcccagcagcagcctgcacctggagggctggatgaaggtgcccaggaacaacaagaggggccagcagggctgggacaggaagtacatcgtgctggagggcagcaaggtgctgatctatgacaatgaggcccgggaggccggccagaggcctgtggaggagtttgagctgtgcctgcctgatggagatgtgtccatccatggagctgtgggcgccagcgagctggccaacacagccaaggcagatgtgccctacatcctgaagatggagagccacccccacaccacctgctggccaggccgcaccctgtacctgctggcccccagcttcccagacaagcagcgctgggtgacagccctggagagcgtggtggccggcggccgggtgtcccgggagaaggccgaggctgatgccaagctgctgggcaacagcctgctgaagctggagggagatgaccggctggacatgaactgcaccctgcccttcagtgaccaggtggtgctggtgggcacagaggagggcctgtatgccctgaatgtgctgaagaacagcctgacccacgtgcccggcattggagctgtgttccagatctacatcatcaaggacctggagaagctgctgatgattgctggggaggagcgggccctgtgcctggtggatgtgaagaaggtgaagcagagcctggcccagagccacctgcctgcccagcctgacatcagccccaacatctttgaggccgtgaagggctgccacctgtttggagctgggaagattgaaaatggcctgtgcatctgtgccgccatgcccagcaaggtggtgatcctgcgctacaatgaaaacctgagcaagtactgcatcaggaaggagattgagaccagcgagccctgcagctgcatccacttcaccaactacagcatcctgattggcaccaacaagttctatgaaattgacatgaagcagtacaccctggaggagttcctggacaagaatgaccacagcctggccccagctgtgtttgctgccagcagcaacagcttccctgtgtccatcgtgcaggtgaacagcgctggccagcgggaggagtacctgctgtgcttccatgaatttggagtgtttgtggacagctatggccgccgcagcaggacagatgacctgaagtggagccggctgcccctggcctttgcctaccgggagccctacctgtttgtgacccacttcaacagcctggaggtgattgagatccaggcccggagcagcgctggcaccccagcccgggcctacctggacatccccaacccccgctacctgggccctgccatcagcagcggggccatctacctggccagcagctaccaggacaagctgcgggtcatctgctgcaagggcaacctggtgaaggagagcggcacagagcaccaccggggccccagcaccagccgcagcagccccaacaagaggggcccccccacctacaatgagcacatcaccaagagggtggccagcagccctgcccctcctgagggccccagccacccccgggagcccagcaccccccaccgctaccgggagggccgcacagagctgcggcgggacaagagccctggccggcccctggagcgggagaagagccctggccgcatgctgagcacccggcgggagaggagccctggccgcctgtttgaggacagcagccggggccgcctgcctgctggagctgtgaggacccccctgagccaggtgaacaaggtgtgggaccagagctctgtgtag

SEQ ID NO: 83225 - DNA, 6210 bp, Artificial Sequence
  derived and/or modified sequence
atgctgaagttcaagtacggcgcccggaaccccctggacgccggcgcagccgaacccatcgcctctcgggcgtcaagattgaacctgtttttccagggtaagcccccgtttatgactcagcaacagatgagcccactgagtcgcgaaggtattctagacgcactgttcgtactgttcgaggaatgttcccagccagcgctgatgaagattaagcacgtttcaaactttgtcagaaaatactccgacacgatcgctgaacttcaagaactgcagcctagtgccaaggacttcgaggtcaggtcactggtgggttgcggccactttgccgaagtgcaagtggtgagagaaaaggctacaggtgacatctacgctatgaaggtgatgaagaaaaaggctctgctggctcaagaacaggtcagctttttcgaggaggaacgaaacattctgtctagatccactagcccatggatacctcaactccaatatgcatttcaggataagaatcacctgtatctggtcatggagtatcaacctggcggcgatctgctcagccttctgaacaggtatgaagatcagctcgacgagaacctgatccagttctacctcgctgagctgattcttgcagtgcattcagtgcatctgatggggtatgttcacagagacatcaagccggaaaacattcttgtagatcggaccggacacatcaaactggtcgacttcggaagtgccgcaaagatgaactcaaacaagatggttaacgcgaaactccccattgggacgccagactatatggcccctgaagtcctgacagtaatgaatggtgacgggaaggggacatacgggctcgactgtgattggtggtccgttggcgtgattgcatacgaaatgatttatggtcgttccccatttgctgaaggcacaagcgctcggacgtttaacaacattatgaacttccaacgatttttgaagtttccagacgaccccaaggtgagctccgacttccttgacctgattcaatctctactgtgtggacagaaggaacgcctaaagttcgaaggcctgtgttgccacccattcttctccaagattgattggaataatattcggaactccccaccacctttcgtccccacactgaagtccgatgacgatacatccaacttcgacgagccagagaagaattcatgggtgtcatcatctccttgccagctatccccatccgggttcagcggcgaagaattgcccttcgtcggcttctcctacagcaaagccctggggatcctgggaaggagcgagtcggtggtgagcgggctggatagtccggctaagacttcctccatggagaaaaagctgctcataaagtccaaagagctgcaggatagccaagataagtgccacaaaatggaacaggaaatgactagactgcaccgacgagtgtccgaggtcgaagcagttctctcccagaaagaagtggagcttaaggctagtgaaacacagcgaagcctgctcgaacaggacctggccacctatatcactgaatgctcctctttgaagaggtctctggagcaggcaagaatggaagtttcccaagaagatgacaaagcgttacagcttctccatgacattagggagcagtcccggaagctccaagagatcaaggagcaggagtatcaggctcaggtggaggaaatgagacttatgatgaaccagctagaagaggacttagtgagcgcacgtagacgctcagacctctacgagagcgaactacgggaatcccggctcgctgccgaagaatttaaacgtaaagctactgagtgccagcacaagctcttgaaagcaaaagaccagggtaaacctgaagtaggtgagtacgcgaagctggaaaagatcaacgctgaacagcaactcaagatccaagagctccaggagaaactggaaaaagccgtgaaggctagcaccgaggcaacagaattactgcagaacattaggcaggccaaggaaagggctgagcgagaacttgagaaactccagaatagagaggattcatccgaaggtatacgtaagaagctggtggaagccgaagagagacggcacagtctagaaaacaaggtcaaacgcctcgagacgatggagaggcgggaaaacagactcaaggatgacatacagacgaaatcacagcagattcagcaaatggccgacaaaattcttgagctcgaggagaagcaccgagaagcccaagtcagtgctcagcacctggaagtccacctcaagcagaaagagcagcactacgaagagaaaatcaaggtccttgataatcaaattaagaaggacctcgccgataaagagacacttgaaaatatgatgcagcggcacgaggaagaagctcacgagaaaggtaagattctgtctgagcagaaagccatgattaatgccatggatagcaagatccggtctttggagcagcgaattgtggagctgtcggaagcaaataagctcgccgcaaattcttcactgttcacacagcgaaacatgaaggctcaggaggagatgatctctgaactgcgccagcagaagttctatcttgagactcaggctggaaagcttgaagcccagaataggaaacttgaagagcagttggaaaaaattagccatcaagatcattccgacaagaaccggctcctggagcttgaaactagactcagggaggtctccctagaacatgaagaacagaagcttgagctcaaacggcagctgaccgagctgcagctcagcttgcaggagcgggagagccagctgaccgctttacaggccgcacgtgcagcactggaaagtcaactccggcaagctaagacagagctggaggagaccaccgccgaagcagaggaggagattcaagccctgactgcccatcgggatgagatccagcgcaagtttgatgccctcaggaactcctgcacagtcatcaccgacctggaggagcagctaaaccagctgaccgaggataacgccgagctcaataaccagaacttctacttgtcaaagcagcttgatgaagcatccggcgccaatgatgagatcgtccaattacgaagcgaggtagaccacctgcgaagggaaataacagaacgggaaatgcagttgacgagccagaagcagacaatggaggccctgaagaccacctgtacaatgctcgaggagcaagtgatggaccttgaggccctgaatgacgagcttttagagaaagagcgacagtgggaagcctggagatcagtcctgggggacgaaaaatcgcagtttgagtgccgagtgcgagagcttcaacgtatgctcgacactgaaaagcagagtagagctcgggccgatcagcggatcactgaaagcagacaggtcgtcgaacttgctgtcaaggaacacaaggccgagattctcgcgctgcagcaggcgctgaaggaacaaaagctgaaagcagaatcgctgagtgacaaacttaacgacttagagaagaaacacgccatgctcgaaatgaacgctcggagcctccagcaaaagctggaaaccgaacgggagttaaaacagagattgctagaagaacaggccaaactgcagcagcagatggacttgcagaagaaccatatattcagactcacccagggtctgcaggaagcactggacagagccgatctgctcaaaacggagaggtccgacctggagtaccagcttgaaaatattcaggtgctctactctcacgaaaaggtgaaaatggaggggacaatatctcagcaaaccaagctgatagattttctgcaggccaagatggatcaacccgccaagaaaaagaagggcctgttcagccgacgcaaagaagatcctgccctgccgacacaggtaccattacaatataacgagctgaaactggccctggagaaagaaaaagcgcgctgtgcagagctcgaagaagcactccagaaaacgcgtatcgaactgcggtccgcacgcgaagaggccgcccaccgaaaggcgactgatcatccccacccttctacccccgccactgccagacagcagattgctatgtccgccatcgtccgatctccggagcatcagcccagcgcaatgtctcttctggccccaccttcctcccgtagaaaggagtcaagcacccctgaagaattttctaggcgtctgaaggagcggatgcaccataacatcccgcaccgattcaatgtgggtctgaacatgcgagcgaccaaatgcgctgtctgcctggataccgtgcattttgggaggcaggcttctaaatgcctcgagtgccaggtgatgtgccacccaaagtgctctacatgcttgccagccacttgtggtttgccagccgagtacgccacccatttcaccgaagccttctgcagagacaagatgaactctcctggcctgcagacgaaggagcccagttctagtctgcacctggaaggatggatgaaggtgcctaggaataacaagcgaggacagcaaggatgggatagaaagtacatcgtcctagaaggctccaaggtcttaatatacgataatgaggcacgcgaagccgggcagcgaccagtggaagagtttgaactctgcctcccagatggcgatgtgtcaattcatggcgctgtaggggcaagcgagttggctaacaccgccaaggcagacgtgccttacattctgaaaatggaatcacatcctcatactacctgctggcctggtcgtactctttacttactggccccatcctttcctgacaaacagagatgggtgaccgccctggaatccgtggtggccggcggacgggtttcaagggaaaaagcagaggccgacgcaaagttattgggcaattcattgctgaagctcgaaggggatgaccgcttggacatgaactgtactctgccattctccgatcaagtggtgctagtcggaaccgaggagggattatatgccttaaacgtattaaagaatagcctaacccatgtccctggcatcggcgccgtgtttcagatttatattatcaaggatctggaaaagcttctcatgatcgcaggtgaggagcgtgcactgtgtctggttgacgtcaaaaaagtgaaacaaagcttggcccagtcacatctgcccgcgcagcctgatatctctcctaacattttcgaagctgtgaagggttgtcatctgttcggggcaggcaaaatcgaaaatggactttgcatctgtgctgccatgcctagtaaagtggtgatcttacgctacaatgagaacctttctaaatattgcattcgcaaggagatcgaaacttcagaaccttgttcctgcatacactttactaactacagcattctcatcggcacaaataagttttacgagatagatatgaagcaatacacattggaggaattcttggacaaaaacgatcatagtctcgcacctgcagtgttcgccgcaagttctaattccttccccgtatcaattgtgcaggtcaactcggcgggccagcgggaagaatatttactgtgcttccacgaattcggagtgtttgttgatagctatggaaggaggtctagaaccgatgacctgaaatggtcaaggttacctctcgcattcgcctacagagagccttacctgtttgtcacacacttcaacagcctggaagtgattgagatccaggcccgttcaagcgccggtacccccgctagagcatacttggatataccgaaccctcgatacttaggcccagcaatttcctccggagcaatatacctggcctctagctaccaggacaagctcagggtgatttgttgcaagggaaacctcgtgaaggagtcaggaaccgagcaccaccgcggcccttctaccagtcggtccagccctaataaaagaggcccccctacatataacgagcatatcacaaagagagttgccagctctcccgcccctccagaagggccttcacatccacgggagcctagcacaccccataggtatcgcgaaggcaggactgagctgcggcgcgacaaatctccaggccgtcctctggagcgtgagaaaagccctggcagaatgctgagcactcggagagagaggagcccagggcgtttatttgaggactcttcacggggaaggttgcccgctggcgctgtccgtaccccgctgagccaggttaacaaagtctgggaccagtcaagtgtgtag

SEQ ID NO: 83226 - DNA, 6209 bp, Artificial Sequence
  derived and/or modified sequence
atgctgaagtttaaatatggggctcgaaatcccctggatgccggtgcggcagagccaatcgcaagcagagcatcacggctgaatctgttcttccagggaaaaccaccctttatgacacaacagcagatgagtcccctgtcccgcgaaggtatacttgatgcactgtttgtgctgtttgaggagtgtagccagccagctctgatgaaaattaaacacgtcagcaactttgtgcgaaaatactccgacactatcgcagagctacaggagctgcagccttccgcgaaagactttgaagtccgcagtctggtcgggtgcggacactttgcagaggtgcaggttgtacgcgaaaaggcaactggtgacatttatgccatgaaggtgatgaaaaagaaggcgctcctggctcaggaacaagtgagtttttttgaggaggaacgaaacattctgagccgctctacctccccctggattccccagttgcagtacgcctttcaagataagaatcacctatacttggttatggaatatcagccaggaggtgacctgctgtcactcctgaatcgctatgaggaccagcttgatgagaacctgattcaattctatctcgccgaactgattctggcagtccattctgtgcatttgatgggatacgttcacagggatatcaaacccgagaatattctggtggatcgcacggggcacatcaagcttgtcgactttgggtctgcagccaagatgaactctaacaaaatggtaaatgccaagctaccgatcggcacccccgactatatggccccagaggtccttacggtcatgaacggcgacgggaaggggacgtatggtctggattgcgactggtggtctgtgggggtaattgcctacgagatgatctatggacgatcaccttttgccgaaggaacatccgccagaacgttcaacaatattatgaatttccagcggttcttgaagtttcctgatgacccgaaggtcagttccgatttcctagacctgatccaatctctcttgtgtgggcagaaggaaagactgaaattcgagggcttatgttgtcaccccttcttcagcaagatcgactggaacaatatccgcaacagccccccacctttcgtgccaacgctcaaaagtgacgatgatacttctaattttgatgagcccgaaaaaaacagttgggtgagttcttcaccgtgccaacttagtccgtctggcttttccggcgaagagctcccttttgtggggttttcctatagtaaggcactgggaatccttggcaggtccgagtccgtagtgtccgggctggactcacctgccaagactagctccatggagaagaagttactgatcaaatccaaggagctgcaagacagccaggataaatgtcataaaatggagcaggagatgacacggctgcacaggagggtttcagaagtggaagctgtgctgagccaaaaagaggtcgaactgaaagcctctgagactcaaaggagcctcctggagcaggatctagccacatatattactgagtgctctagtctgaagcgcagtctcgaacaggcacgaatggaggtgtcacaggaagacgataaggccttgcagctgctacacgatatccgggagcagagtaggaagctgcaggaaattaaggagcaggaatatcaggcgcaggtggaagaaatgagacttatgatgaatcagcttgaggaggatctcgtgtccgcaaggagaagaagtgatctatacgagtctgagctgcgggaatcccgactggcagccgaggagtttaaaagaaaagcgaccgaatgccagcacaaactgctcaaagctaaggaccaagggaagccggaagtgggcgaatatgccaagcttgaaaaaattaatgccgaacaacagctcaaaatccaggaattgcaagagaagctagaaaaggccgtgaaggcttcaaccgaggccacagagctgctccagaatattcgccaagccaaggaacgcgcagagcgggagcttgaaaaactccagaaccgggaagactcgtctgaggggatcaggaagaaactcgtggaggctgaggaacgaagacattccctggagaacaaggtcaagaggctcgagacaatggagagacgcgaaaaccgccttaaagacgatatacaaaccaaatcccagcagatacaacaaatggctgacaaaatcctggagctagaggaaaaacacagagaggctcaggtctccgcacagcacctcgaagtccacttgaaacaaaaggagcagcattacgaagagaaaattaaagtgcttgacaaccaaatcaagaaggatttggccgataaggaaaccttagagaacatgatgcagcgtcatgaggaagaagctcacgaaaaaggaaagattcttagtgagcagaaagccatgatcaatgccatggactccaaaatcagatctttggaacagaggatagtggaactatctgaggcgaacaaactggctgcaaactcctccctattcacacagcggaacatgaaagcccaggaggagatgatcagcgaactccgccagcagaaattctatctcgaaactcaggccggaaaactggaagctcagaaccgcaagttggaagaacaactggagaaaatctcccatcaagaccattcggacaagaaccgactccttgaacttgaaacccggctgagggaagttagtctggagcacgaggaacagaaattagagttaaagaggcagttgactgaactccagttaagcctgcaggaaagagaaagccaattaacagcactgcaggctgctcgtgcagctctggagagccagttgcgccaggccaaaactgagctggaagaaactacagccgaggctgaggaagagattcaagctctgaccgcgcacagagacgagatccagagaaaatttgacgctctaaggaactcctgtacagttattaccgacctggaagagcagctgaaccaactgaccgaagataacgctgaactgaataatcagaacttctacttgtcaaaacagcttgatgaggcctctggcgcaaatgatgaaatcgtgcagcttagaagtgaagtggaccacctgcgacgagaaatcactgagcgagaaatgcaacttaccagccagaagcagacaatggaggctctcaagacaacttgcaccatgcttgaggagcaggttatggacctggaggccctaaatgacgagttactggaaaaagagaggcagtgggaggcttggagaagtgtccttggcgacgaaaagtcccagttcgagtgcagagttcgcgaattgcagcgtatgctggacaccgagaagcagagtagggccagggccgatcaacggatcactgagagtcgacaggttgtggagctggccgtgaaagagcacaaggccgagattcttgcactgcaacaggctttaaaagaacaaaagctaaaggcagaatcattgtcggataagctgaatgacctggagaagaaacatgccatgctcgagatgaacgctcggagtctccagcagaagcttgagaccgagagagaactgaaacagcgtttactggaggagcaggctaagttgcagcagcagatggacctccaaaagaaccacatcttccgcctgacacagggccttcaggaagctctggacagggccgatttactcaaaaccgagcggtcagatctggagtatcaactagagaacatccaggtactgtattcccatgaaaaggttaaaatggaggggaccatctcacagcagactaagctgattgactttttacaggccaagatggaccagccggcaaagaaaaagaaagggttgttctcacggagaaaagaggatcccgctttaccaacccaggttcctctgcaatataacgaattgaaactggcactagaaaaagagaaagccaggtgcgcagagctggaggaggctcttcaaaagactcgtatagaactgcggagtgctagagaagaagcagcccacagaaaggctaccgaccacccacatcctagtacgcctgctacagcgaggcagcagatcgccatgtcggccatcgtgagaagcccagaacaccagcctagcgccatgtccttgctggcaccaccaagcagccgcagaaaggaaagctctacgccagaggaatttagcaggagactcaaagagagaatgcaccacaacattccacaccggtttaatgtgggcctgaatatgcgagctaccaaatgcgcagtgtgtttggacacggtccacttcgggagacaggcgtcaaagtgtctggaatgccaggttatgtgtcatcctaaatgttctacctgccttccagccacgtgtgggttaccagcagagtatgccacacacttcaccgaggcgttctgtagagataagatgaattctcctggccttcagactaaagagccgagctcgagtctgcacctcgaaggctggatgaaagtgcccaggaataataaacgcggtcagcagggctgggaccgcaaatatatcgtgcttgagggctcaaaagtcctaatttacgataatgaggcacgggaggctggccaaagacctgttgaagaatttgagctgtgcttgcccgacggcgacgtgagcattcacggcgctgtgggcgctagcgagttggctaataccgcaaaggccgacgtgccatatatactgaagatggagagtcatccacatacaacgtgttggcctgggaggactctgtatcttctagctcctagtttcccagataagcagcggtgggtgaccgcactggaatctgttgttgccggtggccgtgtgtccagggagaaagcggaggccgatgccaagttacttgggaacagtttactgaagctggaaggcgatgacagactggacatgaactgcacgctcccatttagcgaccaggtggtgctggttggcaccgaggagggactctacgctctgaacgtgctgaaaaactcacttacacacgtcccaggaattggggcagtctttcagatctatatcataaaggacctagagaaattacttatgattgcaggagaagaaagagccctatgcctagttgacgttaaaaaggttaaacaaagccttgctcagtcgcacctgcccgcacagcccgatatatctccaaacattttcgaggcagttaaaggctgccacctattcggcgctggcaagattgagaatggtctatgcatctgtgccgctatgccctccaaggtggttattctgaggtataatgagaatttgagcaagtactgcatccgtaaggagatcgaaaccagcgaaccctgttcatgcattcatttcaccaactactcgattctgatcgggaccaataagttttatgaaattgatatgaagcaatacacgctggaagaatttctagataagaatgatcactctctcgcgccagctgttttcgctgcctcttcaaattcgttcccagtgagtattgtgcaggtgaacagtgcaggacagagagaagaatatttgctctgcttccatgaatttggggtgttcgttgattcttatgggcgaaggagtagaaccgatgacctcaaatggagccggctccccctggcgtttgcttaccgcgagccatacctcttcgtcacccacttcaacagccttgaggtgatcgagatccaggctagaagctctgccggaacgccagctagagcctacctcgacatcccaaatccccgatacttaggacccgcaatctcgtcgggagctatctatctggctagtagttaccaagataagcttagggtcatctgctgcaaggggaatttggtcaaggaaagcggcacagagcatcaccggggtccgagcaccagtcggtcgagccccaataaaaggggccctcccacatacaatgagcatattaccaaacgagtggcatccagccccgcacctccagagggaccctcacatcctcgggaaccctccacaccccaccgttatagagaagggagaacagagctgcgcagggataaaagcccagggaggcctttagaaagagaaaaatctccaggacgaatgctgtccactagacgggagcgatctccagggcgactgttcgaggatagtagcaggggccgattgcctgccggagcggtgagaacacccctaagtcaggtgaacaaggtgtgggatcagagctccgtcta

SEQ ID NO: 83227 - DNA, 8708 bp, Artificial Sequence
  derived and/or modified sequence
ggcgcggggcggaacagatcgcagacctgggggttcgcagagccgccagtggggagatgttgaagttcaaatatggagcgcggaatcctttggatgctggtgctgctgaacccattgccagccgggcctccaggctgaatctgttcttccaggggaaaccaccctttatgactcaacagcagatgtctcctctttcccgagaagggatattagatgccctctttgttctctttgaagaatgcagtcagcctgctctgatgaagattaagcacgtgagcaactttgtccggaagtattccgacaccatagctgagttacaggagctccagccttcggcaaaggacttcgaagtcagaagtcttgtaggttgtggtcactttgctgaagtgcaggtggtaagagagaaagcaaccggggacatctatgctatgaaagtgatgaagaagaaggctttattggcccaggagcaggtttcattttttgaggaagagcggaacatattatctcgaagcacaagcccgtggatcccccaattacagtatgcctttcaggacaaaaatcacctttatctggtcatggaatatcagcctggaggggacttgctgtcacttttgaatagatatgaggaccagttagatgaaaacctgatacagttttacctagctgagctgattttggctgttcacagcgttcatctgatgggatacgtgcatcgagacatcaagcctgagaacattctcgttgaccgcacaggacacatcaagctggtggattttggatctgccgcgaaaatgaattcaaacaagatggtgaatgccaaactcccgattgggaccccagattacatggctcctgaagtgctgactgtgatgaacggggatggaaaaggcacctacggcctggactgtgactggtggtcagtgggcgtgattgcctatgagatgatttatgggagatcccccttcgcagagggaacctctgccagaaccttcaataacattatgaatttccagcggtttttgaaatttccagatgaccccaaagtgagcagtgactttcttgatctgattcaaagcttgttgtgcggccagaaagagagactgaagtttgaaggtctttgctgccatcctttcttctctaaaattgactggaacaacattcgtaactctcctccccccttcgttcccaccctcaagtctgacgatgacacctccaattttgatgaaccagagaagaattcgtgggtttcatcctctccgtgccagctgagcccctcaggcttctcgggtgaagaactgccgtttgtggggttttcgtacagcaaggcactggggattcttggtagatctgagtctgttgtgtcgggtctggactcccctgccaagactagctccatggaaaagaaacttctcatcaaaagcaaagagctacaagactctcaggacaagtgtcacaagatggagcaggaaatgacccggttacatcggagagtgtcagaggtggaggctgtgcttagtcagaaggaggtggagctgaaggcctctgagactcagagatccctcctggagcaggaccttgctacctacatcacagaatgcagtagcttaaagcgaagtttggagcaagcacggatggaggtgtcccaggaggatgacaaagcactgcagcttctccatgatatcagagagcagagccggaagctccaagaaatcaaagagcaggagtaccaggctcaagtggaagaaatgaggttgatgatgaatcagttggaagaggatcttgtctcagcaagaagacggagtgatctctacgaatctgagctgagagagtctcggcttgctgctgaagaattcaagcggaaagcgacagaatgtcagcataaactgttgaaggctaaggatcaagggaagcctgaagtgggagaatatgcgaaactggagaagatcaatgctgagcagcagctcaaaattcaggagctccaagagaaactggagaaggctgtaaaagccagcacggaggccaccgagctgctgcagaatatccgccaggcaaaggagcgagccgagagggagctggagaagctgcagaaccgagaggattcttctgaaggcatcagaaagaagctggtggaagctgaggaacgccgccattctctggagaacaaggtaaagagactagagaccatggagcgtagagaaaacagactgaaggatgacatccagacaaaatcccaacagatccagcagatggctgataaaattctggagctcgaagagaaacatcgggaggcccaagtctcagcccagcacctagaagtgcacctgaaacagaaagagcagcactatgaggaaaagattaaagtgttggacaatcagataaagaaagacctggctgacaaggagacactggagaacatgatgcagagacacgaggaggaggcccatgagaagggcaaaattctcagcgaacagaaggcgatgatcaatgctatggattccaagatcagatccctggaacagaggattgtggaactgtctgaagccaataaacttgcagcaaatagcagtctttttacccaaaggaacatgaaggcccaagaagagatgatttctgaactcaggcaacagaaattttacctggagacacaggctgggaagttggaggcccagaaccgaaaactggaggagcagctggagaagatcagccaccaagaccacagtgacaagaatcggctgctggaactggagacaagattgcgggaggtcagtctagagcacgaggagcagaaactggagctcaagcgccagctcacagagctacagctctccctgcaggagcgcgagtcacagttgacagccctgcaggctgcacgggcggccctggagagccagcttcgccaggcgaagacagagctggaagagaccacagcagaagctgaagaggagatccaggcactcacggcacatagagatgaaatccagcgcaaatttgatgctcttcgtaacagctgtactgtaatcacagacctggaggagcagctaaaccagctgaccgaggacaacgctgaactcaacaaccaaaacttctacttgtccaaacaactcgatgaggcttctggcgccaacgacgagattgtacaactgcgaagtgaagtggaccatctccgccgggagatcacggaacgagagatgcagcttaccagccagaagcaaacgatggaggctctgaagaccacgtgcaccatgctggaggaacaggtcatggatttggaggccctaaacgatgagctgctagaaaaagagcggcagtgggaggcctggaggagcgtcctgggtgatgagaaatcccagtttgagtgtcgggttcgagagctgcagagaatgctggacaccgagaaacagagcagggcgagagccgatcagcggatcaccgagtctcgccaggtggtggagctggcagtgaaggagcacaaggctgagattctcgctctgcagcaggctctcaaagagcagaagctgaaggccgagagcctctctgacaagctcaatgacctggagaagaagcatgctatgcttgaaatgaatgcccgaagcttacagcagaagctggagactgaacgagagctcaaacagaggcttctggaagagcaagccaaattacagcagcagatggacctgcagaaaaatcacattttccgtctgactcaaggactgcaagaagctctagatcgggctgatctactgaagacagaaagaagtgacttggagtatcagctggaaaacattcaggttctctattctcatgaaaaggtgaaaatggaaggcactatttctcaacaaaccaaactcattgattttctgcaagccaaaatggaccaacctgctaaaaagaaaaagggtttatttagtcgacggaaagaggaccctgctttacccacacaggttcctctgcagtacaatgagctgaagctggccctggagaaggagaaagctcgctgtgcagagctagaggaagcccttcagaagacccgcatcgagctccggtccgcccgggaggaagctgcccaccgcaaagcaacggaccacccacacccatccacgccagccaccgcgaggcagcagatcgccatgtccgccatcgtgcggtcgccagagcaccagcccagtgccatgagcctgctggccccgccatccagccgcagaaaggagtcttcaactccagaggaatttagtcggcgtcttaaggaacgcatgcaccacaatattcctcaccgattcaacgtaggactgaacatgcgagccacaaagtgtgctgtgtgtctggataccgtgcactttggacgccaggcatccaaatgtctcgaatgtcaggtgatgtgtcaccccaagtgctccacgtgcttgccagccacctgcggcttgcctgctgaatatgccacacacttcaccgaggccttctgccgtgacaaaatgaactccccaggtctccagaccaaggagcccagcagcagcttgcacctggaagggtggatgaaggtgcccaggaataacaaacgaggacagcaaggctgggacaggaagtacattgtcctggagggatcaaaagtcctcatttatgacaatgaagccagagaagctggacagaggccggtggaagaatttgagctgtgccttcccgacggggatgtatctattcatggtgccgttggtgcttccgaactcgcaaatacagccaaagcagatgtcccatacatactgaagatggaatctcacccgcacaccacctgctggcccgggagaaccctctacttgctagctcccagcttccctgacaaacagcgctgggtcaccgccttagaatcagttgtcgcaggtgggagagtttctagggaaaaagcagaagctgatgctaaactgcttggaaactccctgctgaaactggaaggtgatgaccgtctagacatgaactgcacgctgcccttcagtgaccaggtggtgttggtgggcaccgaggaagggctctacgccctgaatgtcttgaaaaactccctaacccatgtcccaggaattggagcagtcttccaaatttatattatcaaggacctggagaagctactcatgatagcaggagaagagcgggcactgtgtcttgtggacgtgaagaaagtgaaacagtccctggcccagtcccacctgcctgcccagcccgacatctcacccaacatttttgaagctgtcaagggctgccacttgtttggggcaggcaagattgagaacgggctctgcatctgtgcagccatgcccagcaaagtcgtcattctccgctacaacgaaaacctcagcaaatactgcatccggaaagagatagagacctcagagccctgcagctgtatccacttcaccaattacagtatcctcattggaaccaataaattctacgaaatcgacatgaagcagtacacgctcgaggaattcctggataagaatgaccattccttggcacctgctgtgtttgccgcctcttccaacagcttccctgtctcaatcgtgcaggtgaacagcgcagggcagcgagaggagtacttgctgtgtttccacgaatttggagtgttcgtggattcttacggaagacgtagccgcacagacgatctcaagtggagtcgcttacctttggcctttgcctacagagaaccctatctgtttgtgacccacttcaactcactcgaagtaattgagatccaggcacgctcctcagcagggacccctgcccgagcgtacctggacatcccgaacccgcgctacctgggccctgccatttcctcaggagcgatttacttggcgtcctcataccaggataaattaagggtcatttgctgcaagggaaacctcgtgaaggagtccggcactgaacaccaccggggcccgtccacctcccgcagcagccccaacaagcgaggcccacccacgtacaacgagcacatcaccaagcgcgtggcctccagcccagcgccgcccgaaggccccagccacccgcgagagccaagcacaccccaccgctaccgcgaggggcggaccgagctgcgcagggacaagtctcctggccgccccctggagcgagagaagtcccccggccggatgctcagcacgcggagagagcggtcccccgggaggctgtttgaagacagcagcaggggccggctgcctgcgggagccgtgaggaccccgctgtcccaggtgaacaaggtctgggaccagtcttcagtataaatctcagccagaaaaaccaactcctcatcttgatctgcaggaaaacaccaaacacactatggaactctgctgatggggacccaagcgcccacgtgctcagccaccctctggctcagcggggcccagacccacctcggcacggacacccctgtctccaggaggggcaggtggctgaggctcttcggagctgtcagcgcccggtgcctgccctgggcacctccctgcagtcatctctttgcactttgttactctttcaaagcattcacaaacttttgtacctagctctagcctgtaccagttagttcatcaaaggaaaccaaccgggatgctaactacaacatggttagaatcctaattagctactttaagatcctaggattggttggtttttcttttttttttctctttgtttctttcctttttttttttttttttttaagacaacagaattcttaatagatttgaatagcgacgtatttcctgttgtagtcatttttagctcgaccacatcatcaggtctttgccaccgaggcatagtgtagaacagtcccggtcagttggccaacctcccgcagccaagtaggttcatccttgttcctgttcattctcatagatggccctgctttccccagggtgacatcgtagccaaatgtttactgttttcattgccttttatggccttgacgacttcccctcccaccagctgagaatgtatggaggtcatcggggcctcagctcggaggcagtgacttggggccaagggacctcgagacgctttccttccccaccccccagcgtcatctccccagcctgctgttcccgctttccatatagctttggccaggaaagcatgcaatagacttgctcggagcccagcactcctgggtctcggggtcggggaggggacgggggcacccacttccttgtctgtgacggcgtgttgttccccactctgggatggggaagaggcccgtcgggagttctgcatggcagttcactgcatgtgctgcccccttgggttgctctgccaatgtattaataccatcccatagctcctgccaaatcgagaccctctgacgacttgccgactaactggccaccacaagctgcagtctgtagcactgaacaaacaaaaaacaaaacgctcaagccttacgaccagagaaggatttcagcaaaccaccacctcccactcagtgtcccctccaaacttcacacttccctgcctgcagaggatgactctgttcacacccaatccagcgcggttctaccccacgaaactgtgactttccaaatgagcctttccctagggctagacctaagaccaggaagtttgagaaagcagccgcagctcaactcttccagctccgccagggttgggaagtccttaggtgcagtgcggctcccactgggtctgcggaccctcctattagagtacgaaattcctggcaactggtacagaaccaacctagaggctttgcagttggcaagctaactcgcggccttatttctgcctttaatctcccacaaggcatctgttgctttgggtcctccacgactcttaggcccgcctcaacaacccaggcacctcctaggtaggctcaaaggtagacccgtttccaccgcagcaggtgaacatgaccgtgttttcaactgtgtccacagttcagatccctttccagattgcaacctggcctgcatcccagctccttcctgctcgtgtcttaacctaagtgctttcttgtttgaaacgcctacaaacctccatgtggtagctcctttggcaaatgtcctgctgtggcgttttatgtgttgcttggagtctgtggggtcgtactccctcccctcccgtccccagggcagatttgattgaatgtttgctgaagttttgtctcttggtccacagtatttggaaaggtcactgaaaatgggtctttcagtcttggcatttcatttaggatctccatgagaaatgggcttcttgagccctgaaaatgtatattgtgtgtctcatctgtgaactgctttctgctatatagaactagctcaaaagactgtacatatttacaagaaactttatattcgtaaaaaaaaaaagaggaaattgaattggtttctacttttttattgtaaaaggtgcatttttcaacacttacttttggtttcaatggtggtagttgtggacagccatcttcactggagggtggggagctccgtgtgaccaccaagatgccagcaggatataccgtaacacgaaattgctgtcaaaagcttattagcatcaatcaagattctaggtctccaaaagtacaggctttttcttcattaccttttttattcagaacgaggaagagaacacaaggaatgattcaagatccaccttgagaggaatgaactttgttgttgaacaattagtgaaataaagcaatgatctaaactaat

SEQ ID NO: 83228 - DNA, 6210 bp, Artificial Sequence
  derived and/or modified sequence
atgctgaagttcaagtacggcgccagaaaccccctggacgccggcgccgccgagcccatcgccagcagagccagcagactgaacctgttcttccagggcaagccccccttcatgacccagcagcagatgagccccctgagcagagagggcatcctggacgccctgttcgtgctgttcgaggagtgcagccagcccgccctgatgaagatcaagcacgtgagcaacttcgtgagaaagtacagcgacaccatcgccgagctgcaggagctgcagcccagcgccaaggacttcgaggtgagaagcctggtgggctgcggccacttcgccgaggtgcaggtggtgagagagaaggccaccggcgacatctacgccatgaaggtgatgaagaagaaggccctgctggcccaggagcaggtgagcttcttcgaggaggagagaaacatcctgagcagaagcaccagcccctggatcccccagctgcagtacgccttccaggacaagaaccacctgtacctggtgatggagtaccagcccggcggcgacctgctgagcctgctgaacagatacgaggaccagctggacgagaacctgatccagttctacctggccgagctgatcctggccgtgcacagcgtgcacctgatgggctacgtgcacagagacatcaagcccgagaacatcctggtggacagaaccggccacatcaagctggtggacttcggcagcgccgccaagatgaacagcaacaagatggtgaacgccaagctgcccatcggcacccccgactacatggcccccgaggtgctgaccgtgatgaacggcgacggcaagggcacctacggcctggactgcgactggtggagcgtgggcgtgatcgcctacgagatgatctacggcagaagccccttcgccgagggcaccagcgccagaaccttcaacaacatcatgaacttccagagattcctgaagttccccgacgaccccaaggtgagcagcgacttcctggacctgatccagagcctgctgtgcggccagaaggagagactgaagttcgagggcctgtgctgccaccccttcttcagcaagatcgactggaacaacatcagaaacagccccccccccttcgtgcccaccctgaagagcgacgacgacaccagcaacttcgacgagcccgagaagaacagctgggtgagcagcagcccctgccagctgagccccagcggcttcagcggcgaggagctgcccttcgtgggcttcagctacagcaaggccctgggcatcctgggcagaagcgagagcgtggtgagcggcctggacagccccgccaagaccagcagcatggagaagaagctgctgatcaagagcaaggagctgcaggacagccaggacaagtgccacaagatggagcaggagatgaccagactgcacagaagagtgagcgaggtggaggccgtgctgagccagaaggaggtggagctgaaggccagcgagacccagagaagcctgctggagcaggacctggccacctacatcaccgagtgcagcagcctgaagagaagcctggagcaggccagaatggaggtgagccaggaggacgacaaggccctgcagctgctgcacgacatcagagagcagagcagaaagctgcaggagatcaaggagcaggagtaccaggcccaggtggaggagatgagactgatgatgaaccagctggaggaggacctggtgagcgccagaagaagaagcgacctgtacgagagcgagctgagagagagcagactggccgccgaggagttcaagagaaaggccaccgagtgccagcacaagctgctgaaggccaaggaccagggcaagcccgaggtgggcgagtacgccaagctggagaagatcaacgccgagcagcagctgaagatccaggagctgcaggagaagctggagaaggccgtgaaggccagcaccgaggccaccgagctgctgcagaacatcagacaggccaaggagagagccgagagagagctggagaagctgcagaacagagaggacagcagcgagggcatcagaaagaagctggtggaggccgaggagagaagacacagcctggagaacaaggtgaagagactggagaccatggagagaagagagaacagactgaaggacgacatccagaccaagagccagcagatccagcagatggccgacaagatcctggagctggaggagaagcacagagaggcccaggtgagcgcccagcacctggaggtgcacctgaagcagaaggagcagcactacgaggagaagatcaaggtgctggacaaccagatcaagaaggacctggccgacaaggagaccctggagaacatgatgcagagacacgaggaggaggcccacgagaagggcaagatcctgagcgagcagaaggccatgatcaacgccatggacagcaagatcagaagcctggagcagagaatcgtggagctgagcgaggccaacaagctggccgccaacagcagcctgttcacccagagaaacatgaaggcccaggaggagatgatcagcgagctgagacagcagaagttctacctggagacccaggccggcaagctggaggcccagaacagaaagctggaggagcagctggagaagatcagccaccaggaccacagcgacaagaacagactgctggagctggagaccagactgagagaggtgagcctggagcacgaggagcagaagctggagctgaagagacagctgaccgagctgcagctgagcctgcaggagagagagagccagctgaccgccctgcaggccgccagagccgccctggagagccagctgagacaggccaagaccgagctggaggagaccaccgccgaggccgaggaggagatccaggccctgaccgcccacagagacgagatccagagaaagttcgacgccctgagaaacagctgcaccgtgatcaccgacctggaggagcagctgaaccagctgaccgaggacaacgccgagctgaacaaccagaacttctacctgagcaagcagctggacgaggccagcggcgccaacgacgagatcgtgcagctgagaagcgaggtggaccacctgagaagagagatcaccgagagagagatgcagctgaccagccagaagcagaccatggaggccctgaagaccacctgcaccatgctggaggagcaggtgatggacctggaggccctgaacgacgagctgctggagaaggagagacagtgggaggcctggagaagcgtgctgggcgacgagaagagccagttcgagtgcagagtgagagagctgcagagaatgctggacaccgagaagcagagcagagccagagccgaccagagaatcaccgagagcagacaggtggtggagctggccgtgaaggagcacaaggccgagatcctggccctgcagcaggccctgaaggagcagaagctgaaggccgagagcctgagcgacaagctgaacgacctggagaagaagcacgccatgctggagatgaacgccagaagcctgcagcagaagctggagaccgagagagagctgaagcagagactgctggaggagcaggccaagctgcagcagcagatggacctgcagaagaaccacatcttcagactgacccagggcctgcaggaggccctggacagagccgacctgctgaagaccgagagaagcgacctggagtaccagctggagaacatccaggtgctgtacagccacgagaaggtgaagatggagggcaccatcagccagcagaccaagctgatcgacttcctgcaggccaagatggaccagcccgccaagaagaagaagggcctgttcagcagaagaaaggaggaccccgccctgcccacccaggtgcccctgcagtacaacgagctgaagctggccctggagaaggagaaggccagatgcgccgagctggaggaggccctgcagaagaccagaatcgagctgagaagcgccagagaggaggccgcccacagaaaggccaccgaccacccccaccccagcacccccgccaccgccagacagcagatcgccatgagcgccatcgtgagaagccccgagcaccagcccagcgccatgagcctgctggccccccccagcagcagaagaaaggagagcagcacccccgaggagttcagcagaagactgaaggagagaatgcaccacaacatcccccacagattcaacgtgggcctgaacatgagagccaccaagtgcgccgtgtgcctggacaccgtgcacttcggcagacaggccagcaagtgcctggagtgccaggtgatgtgccaccccaagtgcagcacctgcctgcccgccacctgcggcctgcccgccgagtacgccacccacttcaccgaggccttctgcagagacaagatgaacagccccggcctgcagaccaaggagcccagcagcagcctgcacctggagggctggatgaaggtgcccagaaacaacaagagaggccagcagggctgggacagaaagtacatcgtgctggagggcagcaaggtgctgatctacgacaacgaggccagagaggccggccagagacccgtggaggagttcgagctgtgcctgcccgacggcgacgtgagcatccacggcgccgtgggcgccagcgagctggccaacaccgccaaggccgacgtgccctacatcctgaagatggagagccacccccacaccacctgctggcccggcagaaccctgtacctgctggcccccagcttccccgacaagcagagatgggtgaccgccctggagagcgtggtggccggcggcagagtgagcagagagaaggccgaggccgacgccaagctgctgggcaacagcctgctgaagctggagggcgacgacagactggacatgaactgcaccctgcccttcagcgaccaggtggtgctggtgggcaccgaggagggcctgtacgccctgaacgtgctgaagaacagcctgacccacgtgcccggcatcggcgccgtgttccagatctacatcatcaaggacctggagaagctgctgatgatcgccggcgaggagagagccctgtgcctggtggacgtgaagaaggtgaagcagagcctggcccagagccacctgcccgcccagcccgacatcagccccaacatcttcgaggccgtgaagggctgccacctgttcggcgccggcaagatcgagaacggcctgtgcatctgcgccgccatgcccagcaaggtggtgatcctgagatacaacgagaacctgagcaagtactgcatcagaaaggagatcgagaccagcgagccctgcagctgcatccacttcaccaactacagcatcctgatcggcaccaacaagttctacgagatcgacatgaagcagtacaccctggaggagttcctggacaagaacgaccacagcctggcccccgccgtgttcgccgccagcagcaacagcttccccgtgagcatcgtgcaggtgaacagcgccggccagagagaggagtacctgctgtgcttccacgagttcggcgtgttcgtggacagctacggcagaagaagcagaaccgacgacctgaagtggagcagactgcccctggccttcgcctacagagagccctacctgttcgtgacccacttcaacagcctggaggtgatcgagatccaggccagaagcagcgccggcacccccgccagagcctacctggacatccccaaccccagatacctgggccccgccatcagcagcggcgccatctacctggccagcagctaccaggacaagctgagagtgatctgctgcaagggcaacctggtgaaggagagcggcaccgagcaccacagaggccccagcaccagcagaagcagccccaacaagagaggcccccccacctacaacgagcacatcaccaagagagtggccagcagccccgccccccccgagggccccagccaccccagagagcccagcaccccccacagatacagagagggcagaaccgagctgagaagagacaagagccccggcagacccctggagagagagaagagccccggcagaatgctgagcaccagaagagagagaagccccggcagactgttcgaggacagcagcagaggcagactgcccgccggcgccgtgagaacccccctgagccaggtgaacaaggtgtgggaccagagcagcgtgtag

SEQ ID NO: 83229 - protein, 244 aa, Artificial Sequence
  derived and/or modified sequence
MEDMNEYSNIEEFAEGSKINASKNQQDDGKMFIGGLSWDTSKKDLTEYLSRFGEVVDCTIKTDPVTGRSRGFGFVLFKDAASVDKVLELKEHKLDGKLIDPKRAKALKGKEPPKKVFVGGLSPDTSEEQIKEYFGAFGEIENIELPMDTKTNERRGFCFITYTDEEPVKKLLESRYHQIGSGKCEIKVAQPKEVYRQQQQQQKGGRGAAAGGRGGTRGRGRGQQSTYGKASRGGGNHQNNYQPY

SEQ ID NO: 83230 - DNA, 735 bp, Artificial Sequence
  derived and/or modified sequence
atggaagacatgaatgaatattctaacatagaagaattcgccgaaggttccaagatcaatgcgagcaagaaccaacaagatgatggaaagatgttcatcggtggattgtcttgggatacaagcaaaaaagacctgaccgagtacctgagtcggtttggcgaggtggtggactgcaccattaagacagacccagtgactggccgctctagaggcttcgggttcgtactctttaaagacgctgcgtctgtggacaaggtactggagctaaaggagcataaactggatggcaaactgattgaccctaagagggccaaagccctaaaagggaaagaaccaccaaagaaagtttttgtgggcgggctctctcccgatactagtgaggagcaaatcaaagagtattttggtgcctttggcgagatcgagaacatcgaactgcctatggacaccaaaaccaatgagcggagagggttctgcttcatcacctacaccgatgaggaaccagtgaaaaagctgttggaaagtcggtatcaccaaattggtagcggaaagtgcgaaattaaggttgcacaacccaaagaagtgtacaggcagcagcaacaacaacagaaaggtggacgtggcgcagcagctggaggtagaggcggcacacgaggtcgaggccgagggcagcagagcacctatggaaaagcctctaggggggggggaaaccaccagaataactaccagccttattag

SEQ ID NO: 83231 - DNA, 1120 bp, Artificial Sequence
  derived and/or modified sequence
gatctcttccgccgccattttaaatccagctccatacaacgctccgccgccgctgctgccgcgacccggactgcgcgccagcacccccctgccgacagctccgtcactatggaggatatgaacgagtacagcaatatagaggaattcgcagagggatccaagatcaacgcgagcaagaatcagcaggatgacggtaaaatgtttattggaggcttgagctgggatacaagcaaaaaagatctgacagagtacttgtctcgatttggggaagttgtagactgcacaattaaaacagatccagtcactgggagatcaagaggatttggatttgtgcttttcaaagatgctgctagtgttgataaggttttggaactgaaagaacacaaactggatggcaaattgatagatcccaaaagggccaaagctttaaaagggaaagaacctcccaaaaaggtttttgtgggtggattgagcccggatacttctgaagaacaaattaaagaatattttggagcctttggagagattgaaaatattgaacttcccatggatacaaaaacaaatgaaagaagaggattttgttttatcacatatactgatgaagagccagtaaaaaaattgttagaaagcagataccatcaaattggttctgggaagtgtgaaatcaaagttgcacaacccaaagaggtatataggcagcaacagcaacaacaaaaaggtggaagaggtgctgcagctggtggacgaggtggtacgaggggtcgtggccgaggccaacagagcacttatggcaaggcatctcgagggggtggcaatcaccaaaacaattaccagccatactaaaggagaacattggagaaaacaggaggagatgttaaagtaacccatcttgcaggacgacattgaagattggtcttctgttgatctaagatgattattttgtaaaagactttctagtgtacaagacaccattgtgtccaactgtatatagctgccaattagttttctttgtttttactttgtcctttgctatctgtgttatgactcaatgtggatttgtttatacacattttatttgtatcatttcatgttaaacctcaaataaatgcttccttatgtg

SEQ ID NO: 83232 - DNA, 735 bp, Artificial Sequence
  derived and/or modified sequence
atggaggacatgaatgagtacagcaacatcgaggagtttgctgagggcagcaagatcaatgccagcaagaaccagcaggatgatggcaagatgtttattggaggcctgtcctgggacaccagcaagaaggacctgacagagtacctgagcagatttggagaggtggtggactgcaccatcaagacagatcctgtgacaggccgcagccggggcttcggctttgtgctcttcaaggatgctgcctctgtggacaaggtgctggagctgaaggagcacaagctggatggcaagctgattgaccccaagagggccaaggccctgaagggcaaggagccccccaagaaggtgtttgtgggcggcctgagcccagacaccagcgaggagcagatcaaggagtactttggagcctttggagaaattgaaaatattgagctgcccatggacaccaagaccaatgaaagaagaggcttctgcttcatcacctacacagatgaggagcctgtgaagaagctgctggagagccgctaccaccagatcggcagcgggaaatgtgagatcaaggtggcccagcccaaggaggtgtaccggcagcagcagcagcagcagaagggcggccgcggggctgctgctgggggccggggcggcacccggggccggggccggggccagcagagcacctacggcaaggccagcagaggaggcggcaaccaccagaacaactaccagccctactag

SEQ ID NO: 83233 - DNA, 735 bp, Artificial Sequence
  derived and/or modified sequence
atggaggacatgaacgagtacagcaacatcgaggagttcgccgagggctccaagatcaatgcttccaagaatcagcaagacgatggtaagatgtttatcggcggactgtcctgggacacatccaaaaaagatctaactgaataccttagtcgattcggcgaggtggtagattgcactattaagaccgaccctgtgaccgggcgctccaggggctttgggtttgttcttttcaaggacgcagcatctgtagacaaggttttagagttaaaggaacacaaattggatgggaagctcattgatcccaaacgggcaaaagctctgaaaggcaaggagcctcccaagaaggtctttgtgggaggtctgagtccggacacctctgaagaacaaatcaaggaatactttggcgctttcggcgagattgaaaacatcgaactgccaatggacaccaaaacaaacgaacgcagaggattttgttttataacctataccgacgaagaaccagtgaaaaagcttttagagagtcggtaccaccaaattggttctggcaagtgcgaaattaaggtggcccagcctaaggaggtgtacagacagcagcaacagcaacagaagggcggccgaggcgcggccgctggcgggagagggggtacacgcggccgcggcagggggcagcagagcacctatggaaaggccagccgcggcggggggaaccaccaaaacaactaccagccatattag

SEQ ID NO: 83234 - DNA, 735 bp, Artificial Sequence
  derived and/or modified sequence
atggaagatatgaatgaatacagtaacatagaggagttcgccgagggttccaagattaacgcatccaagaaccaacaagatgacggcaaaatgtttatcggcggtctcagttgggatacgtcaaaaaaggatctcacagagtacttatcccgctttggggaggtggtcgactgtaccataaagacagacccggtcacaggcagatcccgcggattcggctttgtcctatttaaggatgctgcctccgtggataaagtcctcgagttgaaggaacataagttggatggcaaactcatagatccaaagcgtgccaaagccctgaaaggcaaagagccccctaaaaaggtcttcgtcgggggacttagtccagacacttctgaagagcagattaaggaatatttcggagcttttggtgagatcgaaaatattgaactcccaatggacactaagaccaacgagaggcggggattctgcttcattacttacaccgatgaagagcccgtcaagaagctcttggagtcgcggtaccaccagataggcagtggaaagtgtgagattaaggtggcccaaccgaaggaagtatatcggcagcagcagcaacagcagaaagggggtcggggagcagccgcaggtggaagaggagggacacgcggtcgcggacgcggacagcagagcacgtatggtaaggcctctagaggcggagggaaccaccagaataattatcagccgtattag

SEQ ID NO: 83235 - DNA, 735 bp, Artificial Sequence
  derived and/or modified sequence
atggaggacatgaacgagtacagcaacatcgaggagttcgccgagggcagcaagatcaacgccagcaagaaccagcaggacgacggcaagatgttcatcggcggcctgagctgggacaccagcaagaaggacctgaccgagtacctgagcagattcggcgaggtggtggactgcaccatcaagaccgaccccgtgaccggcagaagcagaggcttcggcttcgtgctgttcaaggacgccgccagcgtggacaaggtgctggagctgaaggagcacaagctggacggcaagctgatcgaccccaagagagccaaggccctgaagggcaaggagccccccaagaaggtgttcgtgggcggcctgagccccgacaccagcgaggagcagatcaaggagtacttcggcgccttcggcgagatcgagaacatcgagctgcccatggacaccaagaccaacgagagaagaggcttctgcttcatcacctacaccgacgaggagcccgtgaagaagctgctggagagcagataccaccagatcggcagcggcaagtgcgagatcaaggtggcccagcccaaggaggtgtacagacagcagcagcagcagcagaagggcggcagaggcgccgccgccggcggcagaggcggcaccagaggcagaggcagaggccagcagagcacctacggcaaggccagcagaggcggcggcaaccaccagaacaactaccagccctactag

SEQ ID NO: 83236 - protein, 335 aa, Artificial Sequence
  derived and/or modified sequence
MALKWTSVLLLIHLGCYFSSGSCGKVLVWTGEYSHWMNMKTILKELVQRGHEVTVLASSASILFDPNDAFTLKLEVYPTSLTKTEFENIIMQQVKRWSDIQKDSFWLYFSQEQEILWEFHDIFRNFCKDVVSNKKVMKKLQESRFDIIFADAFFPCGELLAALLNIPFVYSLCFTPGYTIERHSGGLIFPPSYIPVVMSKLSDQMTFMERVKNMIYVLYFDFWFQMCDMKKWDQFYSEVLGRPTTLFETMGKADIWLMRNSWSFQFPHPFLPNIDFVGGLHCKPAKPLPKEMEEFVQSSGENGVVVFSLGSVISNMTAERANVIATALAKIPQKI

SEQ ID NO: 83237 - DNA, 1008 bp, Artificial Sequence
  derived and/or modified sequence
atggccctgaagtggaccagcgtgctgctgctgatccacctgggctgctacttcagcagcggcagctgcggcaaggtgctggtgtggaccggcgagtacagccactggatgaacatgaagaccatcctgaaggagctggtgcagagaggccacgaggtgaccgtgctggccagcagcgccagcatcctgttcgaccccaacgacgccttcaccctgaagctggaggtgtaccccaccagcctgaccaagaccgagttcgagaacatcatcatgcagcaggtgaagagatggagcgacatccagaaggacagcttctggctgtacttcagccaggagcaggagatcctgtgggagttccacgacatcttcagaaacttctgcaaggacgtggtgagcaacaagaaggtgatgaagaagctgcaggagagcagattcgacatcatcttcgccgacgccttcttcccctgcggcgagctgctggccgccctgctgaacatccccttcgtgtacagcctgtgcttcacccccggctacaccatcgagagacacagcggcggcctgatcttcccccccagctacatccccgtggtgatgagcaagctgagcgaccagatgaccttcatggagagagtgaagaacatgatctacgtgctgtacttcgacttctggttccagatgtgcgacatgaagaagtgggaccagttctacagcgaggtgctgggcagacccaccaccctgttcgagaccatgggcaaggccgacatctggctgatgagaaacagctggagcttccagttcccccaccccttcctgcccaacatcgacttcgtgggcggcctgcactgcaagcccgccaagcccctgcccaaggagatggaggagttcgtgcagagcagcggcgagaacggcgtggtggtgttcagcctgggcagcgtgatcagcaacatgaccgccgagagagccaacgtgatcgccaccgccctggccaagatcccccagaagatctag

SEQ ID NO: 83238 - DNA, 1008 bp, Artificial Sequence
  derived and/or modified sequence
atggctctgaagtggactagcgtcctgctgctcattcatttggggtgttacttttccagcggctcctgcgggaaggtgctagtgtggacaggagagtactcacactggatgaacatgaagactatcctgaaagagctggtgcagcgcggtcatgaagtcacagtgctggcctcctccgcttctatactcttcgatcctaatgacgcattcacactcaaactggaggtttatcccacaagtctgaccaaaaccgagttcgaaaacatcattatgcagcaggtgaagaggtggtctgatatccagaaggattcattctggctatatttcagtcaggaacaggaaatcctttgggagttccacgatatcttcagaaacttctgtaaagatgtcgtgtctaacaagaaagtgatgaaaaagcttcaggagagcaggttcgacattattttcgctgacgctttctttccctgtggggagttactcgctgcactgctgaatattccatttgtatactctttatgcttcacccctgggtataccattgagagacattcaggggggctcatattcccacctagctacattccagtagtgatgtcaaagttgtcggaccagatgaccttcatggagcgagttaagaatatgatctacgttctctattttgacttctggttccaaatgtgcgacatgaagaaatgggatcaattctattcagaggtgctgggccggcccactaccttatttgaaactatgggcaaagcggacatctggctgatgcgcaatagttggagcttccaatttccgcaccccttcctccctaatattgattttgtcggtggcctgcactgtaaacctgctaagcctcttcctaaagagatggaggaatttgtccagtccagtggtgaaaacggggtcgtagtgttttctctgggctccgttatctccaacatgaccgctgagagggccaacgtgattgccactgctctggcgaagatcccacaaaaaatttag

SEQ ID NO: 83239 - DNA, 1008 bp, Artificial Sequence
  derived and/or modified sequence
atggccctgaagtggacctctgtgctgctgctgatccacctgggctgctacttcagcagcggcagctgtgggaaggtgctggtgtggacaggagagtacagccactggatgaacatgaagaccatcctgaaggagctggtgcagaggggccacgaggtgacagtgctggccagcagcgccagcatcctgtttgaccccaatgatgccttcaccctgaagctggaggtgtaccccaccagcctgaccaagacagaatttgagaacatcatcatgcagcaggtgaagcgctggagcgacatccagaaggacagcttctggctgtacttcagccaggagcaggagatcctgtgggagttccatgacatcttcaggaacttctgcaaggatgtggtgagcaacaagaaggtgatgaagaagctgcaggagagcagatttgacatcatctttgctgatgccttcttcccctgtggggagctgctggccgccctgctgaacatcccctttgtgtacagcctgtgcttcaccccaggctacaccatcgagcggcacagcggcggcctcatcttcccccccagctacatccctgtggtgatgagcaagctgagtgaccagatgaccttcatggagcgggtgaagaacatgatctacgtgctgtactttgacttctggttccagatgtgtgacatgaagaagtgggaccagttctacagcgaggtgctgggccggcccaccaccctgtttgagaccatgggcaaggctgacatctggctgatgagaaattcctggagcttccagttcccccaccccttcctgcccaacatcgactttgtgggcggcctgcactgcaagccagccaagcccctgcccaaggagatggaggagtttgtgcagagcagtggagaaaatggagtggtggtgttcagcctgggcagcgtcatcagcaacatgacagctgagcgggccaacgtcatcgccacagccctggccaagatcccccagaagatctag

SEQ ID NO: 83240 - DNA, 1008 bp, Artificial Sequence
  derived and/or modified sequence
atggccctgaagtggaccagcgtgctgctgctgatccacctgggctgttacttcagttctgggagttgcgggaaagttttagtgtggaccggcgagtatagccactggatgaacatgaaaacaatacttaaggagctcgtgcaacgaggacatgaggtgactgtcctggctagctctgcttccatattgttcgaccctaatgatgcatttactctaaaactggaggtttacccgaccagcctgacaaagactgagtttgagaacatcataatgcagcaggtcaaaagatggagcgatatccagaaagactcgttctggctctatttcagccaggagcaggaaatcctgtgggagtttcacgatatttttcgcaatttttgtaaagacgtggtgtctaataagaaagtaatgaagaaactgcaggagagccggttcgatataatctttgcagacgctttctttccttgcggggaactcctggctgccctgctgaacatccctttcgtatactcactatgctttacgcccggatacacaatcgaacggcactcaggcggtttgatttttcctccaagctacatacccgtagtgatgagtaaactcagtgaccagatgaccttcatggaacgtgttaaaaatatgatttatgtactttactttgatttctggttccagatgtgtgatatgaagaagtgggatcaattttacagtgaagtcctcggtaggcccaccacacttttcgagacaatgggcaaggctgacatttggctcatgcggaattcttggagcttccagttcccccaccccttccttcctaatattgacttcgtcggtggactgcactgtaaacctgcaaagccgctgcctaaagagatggaggaatttgttcagtctagcggcgaaaatggtgtcgtggtgttttccctagggtctgtgatcagcaatatgaccgcggaaagagctaacgtaatcgcaacagctctggcaaagataccgcagaaaatatag

SEQ ID NO: 83241 - DNA, 1008 bp, Artificial Sequence
  derived and/or modified sequence
atggccttgaagtggacctcggtgcttcttctgatacacttgggctgttatttcagttctggctcgtgtgggaaagtcctagtgtggaccggtgagtacagccattggatgaatatgaaaaccatcctgaaggagttggtccaaagaggacacgaggtcactgttctcgcatccagcgcctcgatcttattcgatcccaacgacgcatttacactgaagctggaagtgtatccaacctcactgaccaagaccgagttcgagaatatcattatgcagcaggtaaagagatggtctgacattcagaaagacagtttttggctgtacttctcccaggagcaggaaatcctatgggaattccacgatatttttcgcaacttttgtaaggacgtggtgtctaataagaaggttatgaagaagctccaggaaagccggttcgacatcatcttcgctgatgccttcttcccttgcggtgagctgctcgccgcactgctcaatattccatttgtctactccctatgtttcactccagggtatacgatcgagcggcacagtggaggtctgatttttccccctagctatattccagtggtgatgtcgaaactatcggatcagatgacattcatggagcgggtcaagaacatgatctacgtcctgtacttcgatttctggtttcagatgtgcgatatgaaaaagtgggatcagttctacagtgaggtcttagggaggcctactaccctctttgagaccatgggtaaggctgacatttggctgatgagaaacagctggtcttttcagttcccccaccctttccttccgaatattgattttgttgggggtctgcactgcaagccggctaagcccctgcctaaagaaatggaagaattcgttcagagtagtggcgagaatggcgtggtagtcttcagcttggggtcagtgatatcaaacatgacagcagagagagctaacgtgatcgccaccgcgcttgcaaagatcccgcagaaaatatag

SEQ ID NO: 83242 - DNA, 1525 bp, Artificial Sequence
  derived and/or modified sequence
ggatggctctgaagtggacttcagttcttctgctgatacatctcggttgttactttagctctgggagttgtggaaaggtgctggtgtggaccggtgaatacagccattggatgaatatgaagacaatcctgaaagagcttgttcagagaggtcatgaggtgactgtactggcatcttcagcttccattctttttgatcccaatgacgcattcactcttaaactcgaagtttatcctacatctttaactaaaactgaatttgagaatatcatcatgcaacaggttaagagatggtcagacattcaaaaagatagcttttggttatatttttcacaagaacaagaaatcctgtgggaatttcatgacatatttagaaacttctgtaaagatgtagtttcaaataagaaagttatgaaaaaactacaagagtcaagatttgacatcatttttgcagatgctttttttccttgtggtgagctgctggctgcgctacttaacataccgtttgtgtacagtctctgcttcactcctggctacacaattgaaaggcacagtggaggactgattttccctccttcctacatacctgttgttatgtcaaaattaagtgatcaaatgactttcatggagagggtaaaaaacatgatctatgtgctttattttgacttttggttccaaatgtgtgatatgaagaagtgggatcagttttacagtgaagttttaggaagacccactaccttatttgagacaatggggaaagctgacatatggcttatgcgaaactcctggagttttcaatttcctcatccattcttaccaaacattgattttgttggaggactccactgcaaacctgccaaacccctacctaaggaaatggaggaatttgtacagagctctggtgaaaatggtgttgtggtgttttctctggggtcagtgataagtaacatgacagcagaaagggccaacgtaattgcaacagcccttgccaagatcccacaaaagatataaagagaatgttatgaaattatcaataattcaacatgatcaaccagtaaagcccctgcatcgagcagtcttctggattgaatttgtgatgtgccacaaaggagccaaacaccttcgagttgcagcccgtgacctcacctggttccagtaccactctttggatgtgattgggtttctgctggcctgtgtggcaactgtgatatttgtcgtcacaaagttttgtctgttttgtttctggaagtttgctagaaaagggaagaagggaaaaagagattagttatgtctgacatttgaagctggaaaaccagatagatgggttgacatcagtttattccagcaagaaagaaaagattgttatgcaagatttctttcttcctgtgacaaaaaaaaaaacttttcaaaatctaccttgtcaagtaaaaatttgtttttcagagatttaccacccaggtaatggttagaaatattctgtggcaatgaagaaaacactagggaaaataaaaaataatataaagcca

SEQ ID NO: 83243 - protein, 1743 aa, Artificial Sequence
  derived and/or modified sequence
MSAGGRDEERRKLADIIHHWNANRLDLFEISQPTEDLEFHGVMRFYFQDKAAGNFATKCIRVSSTATTQDVIETLAEKFRPDMRMLSSPKYSLYEVHVSGERRLDIDEKPLVVQLNWNKDDREGRFVLKNENDAIPPKAQSNGPEKQEKEGVIQNFKRTLSKKEKKEKKKREKEALRQASDKDDRPFQGEDVENSRLAAEVYKDMPETSFTRTISNPEVVMKRRRQQKLEKRMQEFRSSDGRPDSGGTLRIYADSLKPNIPYKTILLSTTDPADFAVAEALEKYGLEKENPKDYCIARVMLPPGAQHSDEKGAKEIILDDDECPLQIFREWPSDKGILVFQLKRRPPDHIPKKTKKHLEGKTPKGKERADGSGYGSTLPPEKLPYLVELSPDGSDSRDKPKLYRLQLSVTEVGTEKLDDNSIQLFGPGIQPHHCDLTNMDGVVTVTPRSMDAETYVEGQRISETTMLQSGMKVQFGASHVFKFVDPSQDHALAKRSVDGGLMVKGPRHKPGIVQETTFDLGGDIHSGTALPTSKSTTRLDSDRVSSASSTAERGMVKPMIRVEQQPDYRRQESRTQDASGPELILPASIEFRESSEDSFLSAIINYTNSSTVHFKLSPTYVLYMACRYVLSNQYRPDISPTERTHKVIAVVNKMVSMMEGVIQKQKNIAGALAFWMANASELLNFIKQDRDLSRITLDAQDVLAHLVQMAFKYLVHCLQSELNNYMPAFLDDPEENSLQRPKIDDVLHTLTGAMSLLRRCRVNAALTIQLFSQLFHFINMWLFNRLVTDPDSGLCSHYWGAIIRQQLGHIEAWAEKQGLELAADCHLSRIVQATTLLTMDKYAPDDIPNINSTCFKLNSLQLQALLQNYHCAPDEPFIPTDLIENVVTVAENTADELARSDGREVQLEEDPDLQLPFLLPEDGYSCDVVRNIPNGLQEFLDPLCQRGFCRLIPHTRSPGTWTIYFEGADYESHLLRENTELAIPLRKEPEIITVTLKKQNGMGLSIVAAKGAGQDKLGIYVKSVVKGGAADDGRLAAGDQLLSVDGRSLVGLSQERAAELMTRTSSVVTLEVAKQGAIYHGLATLLNQPSPMMQRISDRRGSGKPRPKSEGFELYNNSTQNGSPESPQLPWAEYSEPKKLPGDDRLMKNRADHRSSPNVANQPPSPGGKSAYASGTTAKITSVSTGNLCTEEQTPPPRPEAYPIPTQTYTREYFTFPASKSQDRMAPPQNQWPNYEEKPHMHTDSNHSSIAIQRVTRSQEELREDKAYQLERHRIEAAMDRKSDSDMWINQSSSLDSSTSSQEHLNHSSKSVTPASTLTKSGPGRWKTPAAIPATPVAVSQPIRTDLPPPPPPPPVHYAGDFDGMSMDLPLPPPPSANQIGLPSAQVAAAERRKREEHQRWYEKEKARLEEERERKRREQERKLGQMRTQSLNPAPFSPLTAQQMKPEKPSTLQRPQETVIRELQPQQQPRTIERRDLQYITVSKEELSSGDSLSPDPWKRDAKEKLEKQQQMHIVDMLSKEIQELQSKPDRSAEESDRLRKLMLEWQFQKRLQESKQKDEDDEEEEDDDVDTMLIMQRLEAERRARLQDEERRRQQQLEEMRKREAEDRARQEEERRRQEEERTKRDAEEKRRQEEGYYSRLEAERRRQHDEAARRLLEPEAPGPNSYPGSTGAAVGAHDACRDAKEKRSKSQDADSPGSSGAPENLTFKERQRLFSQGQDVSNKVKASRKLTELENELNTK

SEQ ID NO: 83244 - DNA, 5232 bp, Artificial Sequence
  derived and/or modified sequence
atgagcgccgggggccgggatgaggagcggaggaaattggccgatataattcaccattggaatgctaaccgcctggacctctttgagatctcccagccaactgaagatcttgagttccatggcgtaatgcggttctatttccaggataaggccgctggtaattttgctacaaagtgcatccgagtgagcagtactgctactactcaagacgttatcgagactttagccgaaaagttccgtcccgatatgcgcatgttgtcttccccaaagtactctctatacgaggtgcacgttagcggggagcgccggctggatatcgatgagaagcccctggtggtacagttgaattggaataaagacgacagggagggccgatttgtactgaagaacgaaaatgacgccatccctcctaaagcacagtctaacggccccgagaaacaggagaaagagggggtgatccagaattttaaaagaacattaagcaaaaaggagaagaaggaaaaaaagaaaagagagaaggaggcactacggcaagcctcagataaggatgatcgtccttttcagggtgaggatgtagagaacagtcgcctggccgctgaagtctacaaggatatgcccgaaacctcctttacacggacaattagcaaccccgaggtggtgatgaaacggcgcaggcagcagaagcttgagaaaaggatgcaggaattccgtagctcagacgggcgacccgacagcggaggtaccctccgaatttacgccgactctcttaagcccaacatcccttacaagaccatacttctatcaactaccgatcctgccgatttcgccgtcgccgaagcactggagaagtatggtttggaaaaagaaaatcccaaagattactgtatcgcacgtgttatgctaccccctggtgctcagcattcggacgagaagggtgccaaagaaattattctggacgatgacgaatgcccgctccagatcttcagggaatggccctccgacaagggtattttagtgttccagttaaagcgtaggccccccgatcacatcccgaagaagactaagaagcacctggagggcaagactccaaaggggaaggagcgggcagacggaagcggctacggttcaaccttacctcctgagaaactcccttatctcgtcgaattgagcccagacggaagcgactctcgggacaagccaaagctatacaggcttcagctgagtgtgacagaagttgggacagagaaactcgacgataattccatccaactgttcggtccaggaattcagccccatcactgcgatcttaccaatatggatggcgttgttacagtaactccaaggtcaatggacgccgagacctacgtagaagggcagaggatttccgaaacaaccatgttgcagtctggcatgaaggtgcagtttggggcctcccatgtgttcaagtttgttgatccctctcaggatcatgcactggccaagcgctctgtggatggtggtttgatggtgaaaggcccccggcacaagccaggcatagtgcaggaaactacctttgacctggggggcgacattcattcgggcaccgcgctacccacctccaaatctactacgagactcgactctgatcgcgtaagctctgcttcttcgacagcggaacggggcatggtcaaaccgatgattagggttgaacagcagcccgactaccgccgacaggagagtagaacccaggatgctagcggacccgaactcatcctccctgctagtattgaatttcgcgagagttccgaagacagcttcttatctgccattataaattacaccaactcatctactgttcactttaagctgagtcctacatacgtgctctacatggcttgccgatatgttctgtccaatcagtatcgtccagacatttcccctacagagagaacacataaggtgattgccgtagtcaacaaaatggtgagtatgatggagggtgttatacagaaacagaagaatattgcaggtgctctggccttctggatggccaacgcatcagagctcctaaacttcattaagcaggacagggacttaagtaggatcacactggacgcacaggatgtactggcacacctagtgcaaatggctttcaaatacctcgtgcactgtctccagagcgagctgaacaattacatgccggcctttttagacgatcccgaggaaaacagtctgcaaaggccaaagatcgatgatgtactgcacaccctgacgggcgcgatgtccctgctgaggagatgcagggtcaatgccgcgctgactattcagcttttctcacagttattccacttcattaacatgtggcttttcaaccggctggtcaccgaccctgattctggcttatgcagtcactattggggtgctatcataaggcagcaactgggccacattgaagcatgggccgagaagcagggattagaattggctgctgactgtcatctctccagaatcgttcaggctacgacactgctgaccatggataagtatgctcctgacgacattcccaacatcaactctacttgctttaaactcaattccttacaactacaggctctgctacagaattatcattgcgctcctgacgaacctttcattcctactgatttaatagagaacgttgtgacagtggccgaaaatactgcggatgaactcgcgcggagcgacggaagggaggtgcagttagaagaggaccccgatttgcagctacccttcctgctgcctgaggacggatattcatgtgatgtcgttagaaacattccaaatgggctccaggagtttcttgacccactgtgtcagagggggttctgcaggctgataccccataccaggagccccggaacatggacgatctatttcgagggcgccgattatgaaagtcatctgttacgtgaaaatactgaactggcaattcctctcaggaaagaaccagagattattaccgtaacactgaagaaacagaacggaatggggttgtctattgtggccgcgaagggagctggacaggataagctgggtatatatgtgaaatcagtggtgaaggggggggcggcagatgatgggcggcttgcagctggcgaccagctgcttagcgtcgacggcagatctttagtggggctttctcaggaacgcgctgcagaactgatgacccggacgtcctcagtagttaccctggaagtagcgaagcaaggggcaatttaccacggtctcgcaaccctgctaaaccaaccctcacccatgatgcagagaatcagtgatagacgtggcagtggaaaaccccgccccaagtctgaaggctttgagctgtataacaacagcacccagaatggctctccagagagtccacagctgccctgggcggaatacagtgaaccgaagaaattgcccggagacgaccgacttatgaagaacagggcagaccacaggtccagccctaatgttgcaaaccaaccgccttctcctggcgggaagagtgcatatgcatccggtactacggccaaaataacaagcgtttcaacgggcaacctgtgcacagaggaacaaacccccccacctcgaccagaggcctatcctatcccaacccagacttatacaagggaatacttcacttttcccgccagtaagagtcaagatcggatggcaccgccccagaatcagtggcctaactatgaggagaagccccatatgcatacggatagcaatcactctagcatcgccatccagagagtcaccaggtcccaggaggaattaagggaggacaaagcttaccagctggagagacacaggatcgaggccgctatggacagaaagtcggatagcgacatgtggatcaatcagagtagtagcctagactcatccacctcctcacaagaacacttgaaccattcttctaaatccgtgaccccggcctctaccctgactaaatctggccccggacggtggaagactcccgccgccatcccggctacacccgtcgctgtatctcagcccattcgcacggacttacctcctccaccccccccccctcctgtgcattacgccggagactttgatgggatgagcatggacctccccctaccccctccaccatcagccaatcagattgggttgccatctgctcaagttgcagcggctgagcggaggaagcgagaagaacatcaaaggtggtatgaaaaagagaaagctaggctggaggaggagagggagcggaagcggagagagcaagaacgcaaactgggccagatgcggacccagagccttaatcctgcgccttttagccctctgaccgcacagcagatgaaaccagagaaaccatccactttgcagcggccacaggagaccgtcatccgcgagctgcaaccccaacaacaaccacgaacaatcgagagacgcgacctccaatatataactgtctctaaggaagaactgtcctctggcgacagcctgtcccctgatccgtggaagagagacgccaaggagaaacttgagaagcagcagcagatgcatatcgttgatatgttatcaaaagaaattcaggagctgcagagtaagcctgatcgatctgccgaggagtccgaccgactgcgcaaactcatgcttgaatggcagttccagaagagactccaagaaagtaagcagaaggatgaagatgacgaagaggaagaagacgacgatgtggatacaatgctgattatgcaacgactggaagccgaacgcagggcacgactgcaggatgaagaaaggcggcggcagcaacaactggaagaaatgcgcaagcgcgaggctgaggacagggctcgccaagaggaggagaggcgtagacaggaagaagagagaaccaaaagggacgcggaggagaaacggcgtcaggaggaggggtactatagtcgtctggaggccgaacggaggagacagcatgacgaggccgcacgccgcttgttagagccagaagccccaggccctaactcctaccctggaagcaccggagccgccgttggtgctcacgatgcatgccgggacgcaaaagagaagcggtccaagtcccaggatgctgattctccgggctcctcaggagcccctgagaacctcaccttcaaagaaagacagaggttgttctctcagggacaggatgtcagtaataaggtgaaggctagtaggaagttaaccgagttagaaaacgagctgaatactaaatag

SEQ ID NO: 83245 - DNA, 5232 bp, Artificial Sequence
  derived and/or modified sequence
atgtctgctgggggcagagatgaggagaggaggaagctggccgacatcatccaccactggaatgccaaccggctggacctgtttgagatcagccagcccacagaggacctggagttccacggcgtgatgaggttctacttccaggacaaggccgccggcaactttgccaccaagtgcatccgggtgagcagcacagccaccacccaggacgtcatcgagaccctggccgagaagttccggccagacatgaggatgctgagcagccccaagtacagcctgtatgaggtgcacgtgtctggagagcggcggctggacattgatgagaagcccctggtggtgcagctgaactggaacaaggatgaccgggagggccgctttgtgctgaagaatgaaaatgatgccatcccccccaaggcccagagcaatggacctgagaagcaggagaaggagggcgtcatccagaacttcaagaggaccctgagcaagaaggagaagaaggagaagaagaagcgggagaaggaggccctgcggcaggccagtgacaaggatgaccggcccttccagggagaagatgtggagaacagccggctggccgctgaggtgtacaaggacatgcctgagaccagcttcaccaggaccatcagcaaccctgaggtggtgatgaagagaagacggcagcagaagctggagaagaggatgcaggagttccgcagcagtgatggccgcccagattctgggggcaccctgcgcatctatgctgacagcctgaagcccaacatcccctacaagaccatcctgctgagcaccacagatcctgctgactttgctgtggccgaggccctggagaagtatggcctggagaaggagaaccccaaggactactgcatcgcccgggtgatgctgcccccaggggcccagcacagtgatgagaagggggccaaggagatcatcctggatgatgatgagtgccccctgcagatcttccgggagtggcccagcgacaagggcatcctggtgttccagctgaagaggcggcccccagaccacatccccaagaagaccaagaagcacctggagggcaagacccccaagggcaaggagcgggcagatggcagcggctacggcagcaccctgcccccagagaagctgccctacctggtggagctgagcccagatggcagtgacagccgggacaagcccaagctgtaccgcctgcagctgtctgtgacagaggtgggcacagagaagctggatgacaacagcatccagctgtttggacctggcatccagccccaccactgtgacctgaccaacatggatggagtggtgacagtgacccccaggtccatggatgctgagacctacgtggagggccagaggatcagcgagaccaccatgctgcagagcggcatgaaggtgcagtttggagccagccacgtgttcaagtttgtggaccccagccaggaccacgccctggccaagaggtctgtggatggcggcctgatggtgaagggccccaggcacaagccaggcatcgtgcaggagaccacctttgacctgggcggggacatccacagcggcacagccctgcccaccagcaagagcaccacccggctggacagcgacagagtgagcagcgccagcagcacagctgagcggggcatggtgaagcccatgatccgggtggagcagcagcctgactaccgccggcaggagagcaggacccaggatgccagcggccctgagctgatcctgcctgccagcattgagttccgggagagcagcgaggacagcttcctgagcgccatcatcaactacaccaacagcagcacagtgcacttcaagctgagccccacctacgtgctgtacatggcctgccgctacgtgctgagcaaccagtacagaccagacatcagccccacagagaggacccacaaggtgattgctgtggtgaacaagatggtgtccatgatggagggcgtcatccagaagcagaagaacattgctggggccctggccttctggatggccaatgccagcgagctgctgaacttcatcaagcaggaccgggacctgagccgcatcaccctggatgcccaggatgtgctggcccacctggtgcagatggccttcaagtacctggtgcactgcctgcagagcgagctgaacaactacatgcctgccttcctggatgatcctgaggagaacagcctgcagaggcccaagattgatgatgtgctgcacaccctgactggagccatgagcctgctgcggcgctgccgggtgaatgctgccctgaccatccagctgttcagccagctgttccacttcatcaacatgtggctgttcaaccggctggtgacagatcctgacagcggcctgtgcagccactactggggcgccatcatccggcagcagctgggccacatcgaggcctgggccgagaagcagggcctggagctggccgctgactgccacctgagccgcatcgtgcaggccaccaccctgctgaccatggacaagtatgccccagatgacatccccaacatcaacagcacctgcttcaagctgaacagcctgcagctgcaggccctgctgcagaactaccactgtgccccagatgagcccttcatccccacagacctgattgaaaatgtggtgacagtggctgaaaatacagcagatgagctggcccggagtgatggccgggaggtgcagctggaggaggaccctgacctgcagctgcccttcctgctgcctgaagatggctacagctgtgatgtggtgaggaacatccccaacggcctgcaggagttcctggaccccctgtgccagaggggcttctgccgcctcatcccccacaccaggagccctggcacctggaccatctactttgaaggagctgactatgagagccacctgctgagagaaaatacagagctggccatccccctgaggaaggagcctgagatcatcaccgtgaccctgaagaagcagaatggcatgggcctgagcatcgtggccgccaagggggccggccaggacaagctgggcatctacgtgaagtctgtggtgaagggcggcgctgctgatgatggccgcctggccgccggggaccagctgctgtctgtggatggccgcagcctggtgggcctgagccaggagagagctgctgagctgatgaccaggaccagctctgtggtgaccctggaggtggccaagcagggcgccatctaccacggcctggccaccctgctgaaccagcccagccccatgatgcagaggatcagtgacagaagaggcagcggcaagccccggcccaagtctgagggctttgagctgtacaacaacagcacccagaatggcagccctgagagcccccagctgccctgggccgagtacagcgagcccaagaagctgcctggagatgaccggctgatgaagaacagagctgaccacaggagcagccccaacgtggccaaccagccccccagccctgggggcaagagcgcctatgccagcggcaccacagccaagatcacctctgtgtccactggaaacctgtgcacagaggagcagaccccaccacccaggcctgaggcctaccccatccccacccagacctacacccgggagtacttcaccttccctgccagcaagagccaggacaggatggccccaccccagaaccagtggcccaactatgaggagaagccccacatgcacacagacagcaaccacagcagcatcgccatccagagggtgaccaggagccaggaggagctgcgggaggacaaggcctaccagctggagcggcacagaattgaagctgccatggacaggaagagtgacagcgacatgtggatcaaccagagcagcagcctggacagcagcaccagcagccaggagcacctgaaccacagcagcaagtctgtgaccccagccagcaccctgaccaagagcggccctggccgctggaagaccccagctgccatcccagccacccctgtggccgtgtcccagcccatcagaacagacctgcccccacctcctcctcctcctcctgtgcactacgccggggactttgatggcatgtccatggacctgcccctgcccccaccacccagcgccaaccagatcggcctgcccagcgcccaggtggccgctgctgagaggaggaagcgggaggagcaccagcgctggtatgagaaggagaaggcccggctggaggaggagcgggagaggaagagaagagagcaggagaggaagctgggccagatgaggacccagagcctgaacccagcccccttcagccccctgacagcccagcagatgaagccagagaagcccagcaccctgcagaggccccaggagaccgtcatccgggagctgcagccccagcagcagcccaggaccattgaaagaagagacctgcagtacatcaccgtgtccaaggaggagctgagcagcggggacagcctgagcccagacccctggaagagagatgccaaggagaagctggagaagcagcagcagatgcacatcgtggacatgctgagcaaggagatccaggagctgcagagcaagccagacagatctgctgaggagagtgaccggctgaggaagctgatgctggagtggcagttccagaagaggctgcaggagagcaagcagaaggatgaagatgatgaggaggaggaggatgatgatgtggacaccatgctgatcatgcagaggctggaggccgagcggcgggcccggctgcaggatgaggagcggcggcggcagcagcagctggaggagatgaggaagcgggaggccgaggaccgggcccggcaggaggaggagcggcggcggcaggaggaggagaggaccaagagagatgctgaggagaagaggcggcaggaggagggctactacagccggctggaggccgagcggcggcggcagcatgatgaggccgcccggcggctgctggagcctgaggcccctggccccaacagctacccaggcagcactggagctgctgtgggcgcccatgatgcctgcagagatgccaaggagaagaggagcaagagccaggatgctgacagccctggcagcagcggggcccctgagaacctgaccttcaaggagcggcagaggctcttcagccagggccaggatgtgagcaacaaggtgaaggccagcaggaagctgacagagctggagaatgagctgaacaccaagtag

SEQ ID NO: 83246 - DNA, 7461 bp, Artificial Sequence
  derived and/or modified sequence
gcggccgcggaggcggaggcagccgcggaggcggaggcggccggcggggggtggcgaggggcgccgggcccccgcggacctgtcgtcctcggcccgtcctccggccccggccccgcgcggctgaggaggcgcggccaggaccatgtcggcgggcggccgtgacgaggagcggcggaagctggccgacatcatccaccactggaacgccaaccggctggacctgttcgagatcagccagccgaccgaggatttggagttccatggagtgatgagattttattttcaagataaagctgctggaaactttgcaacaaaatgtattcgggtctctagtactgccaccactcaagatgtaatcgaaacgctcgcggagaaatttcgacctgatatgcgaatgctgtcctctcccaagtattcactctatgaagtgcatgtcagcggagaaagaagattggatatagatgagaaacctctagttgtacaactgaattggaacaaagatgatcgggaaggcagatttgttcttaagaatgagaatgacgccattcctcctaaggctcaaagtaatggacctgaaaagcaggaaaaagaaggggttatccagaacttcaagagaactctctcaaagaaagaaaagaaggaaaaaaagaagagagaaaaagaggcattgcgacaggcatctgataaagatgatagacctttccaaggggaggatgttgaaaattctcgactggctgctgaggtttacaaagacatgccggaaaccagctttactcgaaccatttctaatcctgaggtggttatgaaacgacggaggcagcaaaaattggaaaagagaatgcaggaatttcggagctcagatgggcggcctgattcaggtggaacattgagaatttatgcagatagtttaaaaccaaatattccctacaagacaatcctgctgtctactacagatcctgcagactttgctgtggctgaagctttagagaagtatggtctggaaaaagaaaaccctaaggattactgcatcgcccgggttatgcttcctcctggagcccagcattctgatgaaaagggtgctaaagaaattattcttgatgatgatgagtgtcctttacaaatcttcagggaatggccaagtgacaaagggattttagtctttcagttgaagaggaggccaccagaccacatcccaaagaaaaccaagaaacacttggaaggcaagacacccaagggaaaggagagagctgacgggtctggctatggctccacccttcctccggagaagctgccctatttagtagagttaagcccagatggttctgactctagagataagccaaagctttaccgccttcagttaagtgttactgaagttgggacagaaaagttggatgacaactctatccagttgtttggcccaggaattcagccccatcactgtgaccttaccaacatggatggagtggtcactgtgacgcccagaagtatggacgcagaaacctacgtggaaggccagcgcatctcagaaaccaccatgctgcagagtggcatgaaagtgcagtttggggcgtcccatgtatttaagtttgtggaccccagtcaggatcatgctcttgcaaaaagatctgtggatggaggcctgatggttaagggcccaagacataaacctggaattgttcaggagacaacttttgatttgggaggagatattcatagtgggacagcattaccgacaagcaagagcaccactaggctggacagcgacagagtgtcgtctgcctctagcacagccgagcggggaatggtgaagccgatgatcagagtagaacagcagccagattatcgcaggcaagaaagcagaacacaggatgcttctgggcctgagctgatactacctgcaagcattgaattcagggaaagttctgaagattcatttttgtctgccattataaattatactaatagctctacagtccactttaagttgtcccctacatatgtattatatatggcatgccggtatgtattgtccaaccagtacagacctgacatcagccctacagagcgcacacataaagtcattgcagtcgtcaacaagatggtgagcatgatggagggtgtcatccagaaacagaagaatattgcaggggcacttgccttctggatggcaaatgcatctgaacttctcaacttcattaagcaagaccgagaccttagtcggatcacactggatgctcaagatgttttagcacatttggttcaaatggcatttaaatacttggttcactgtcttcaatcagaacttaataattacatgccagcctttctagatgaccctgaagagaacagtctgcaacgaccaaaaatagatgatgtgctgcacacgctcacaggagccatgtccttgctacgacgctgcagagtcaatgccgccctgaccatccagctcttctctcagctcttccacttcatcaatatgtggctgttcaatagattggtgaccgacccagattcggggctgtgctcccattactggggtgcgattatccgtcagcagttgggccatattgaagcctgggctgagaagcaggggctggaactggctgcggactgtcatctgagcaggatcgtgcaggcaacgactttgcttaccatggataagtatgcacctgatgacattccaaatataaacagcacctgctttaagttaaattcattacaacttcaagccttattacagaactatcactgtgcacctgatgagccttttatcccaacggatcttatagaaaatgtagtgactgtggctgaaaacactgccgatgagctggcccgcagtgatggaagggaagtgcagttggaggaggatcctgatctgcagctgccgtttcttttgccagaagatggttattcttgtgatgttgtcagaaacattccaaatggtttacaagaatttttagaccctctgtgccagagaggattttgcaggttaattcctcacacacgttcaccaggtacttggacaatatattttgaaggtgcagattatgaaagtcaccttctgcgtgagaacacagagctggcaattcctctgaggaaagaacctgaaataatcactgtgaccctaaaaaagcagaatggaatgggccttagcattgttgcagcaaagggtgctggtcaagataaactaggaatctatgtgaagtcggttgtgaaaggaggtgctgcagatgatggacgtctagctgcaggtgatcagctcctcagtgtggatggacgaagtctggttggactctctcaggaaagggcggcagaactcatgacaagaacaagctctgtggtgacactggaagtagcaaagcagggtgccatctaccacggtctggccacccttctcaatcagccatcccccatgatgcagagaatttcagatcgtcgtggctcaggtaaaccccgaccaaagagtgaaggctttgagctctataataattcaactcaaaatgggtctcctgagagtcctcagctgccttgggcagaatatagtgaaccaaagaaattgcctggtgatgacagactgatgaaaaatagagctgatcaccgttccagccccaacgtagcaaatcagcctcctagtcctggagggaaaagtgcatatgcctctggaacaacagcgaagataacatctgtctctactggaaacctctgcactgaggagcagacgcctccgcctagacctgaagcctaccccatccccactcagacgtacaccagagagtattttaccttcccagcttccaaatcccaggatcggatggctcctcctcagaaccagtggccaaattatgaggaaaagccacatatgcacacagatagtaatcattccagtattgcaattcagcgtgttacacgttcccaagaagaacttcgagaagataaagcttaccaacttgagcggcatcgaatagaggcagctatggaccgaaagtctgatagtgatatgtggataaatcagagctcctcactggactccagtacctctagccaggagcatctgaaccattcctctaagtcggtcacccctgcttccacactgaccaaaagtggccctggccgttggaaaacaccagcagccataccggccacccctgtggccgtctcccagccaatccgaacagacctgcctccgccacccccgccacctccagtccactatgccggtgatttcgatggaatgtccatggatttgcctctcccaccacccccttccgccaaccagatagggctgccgtctgcgcaggtggctgctgctgaacggagaaagagagaagaacatcagcgttggtatgagaaggagaaggcccgcctggaggaggagcgggagaggaagcggagagagcaggagaggaagttgggccagatgcgcactcagtccttaaaccctgctccgttttctcccctgactgcacagcagatgaagcccgaaaagccttccacactccagcggccacaggaaacagtcattcgggagctgcagcctcagcagcagccccgcacgatcgagcgcagagacttgcagtacattacagtcagcaaagaggagctttcctcgggggacagtctgtcccccgacccgtggaagcgggacgccaaggagaagctggagaagcagcagcagatgcacatcgtggacatgctgagcaaggagatccaggagctccagagcaaaccggaccgcagcgccgaggagagcgaccggctgcgcaagctcatgctggagtggcagttccagaagagactccaggagtcgaagcagaaggacgaagatgacgaggaggaggaggacgatgatgtggacaccatgctgatcatgcagcgcctggaggctgaacgaagagcgaggttgcaggacgaggagcggaggcggcagcagcagttagaagagatgcgcaagcgggaagcggaagaccgagcgaggcaagaggaagagcgccggcggcaggaggaggagcgaacaaaacgagacgctgaagaaaagaggcgacaggaagaagggtattacagccgcctggaagccgagaggcgcagacagcacgacgaggcggcgcgcaggttgctggagcccgaggcgcccggaccaaactcttacccaggatctactggagcagctgttggagcccatgacgcctgtcgggatgcaaaagagaagcgctctaaaagccaagatgcagattcacctggaagttctggggcccctgaaaacttgacattcaaggaacgccagcgtcttttttcacaaggtcaagatgtatccaataaagtgaaagcttctcgtaaattaacagaactggagaatgaactgaacacaaagtgaaagaaaatgaggagaacactttgtatttaccccaaaatcttttcagttgtgggtttgtaggtgcgagtttgaagaggaaaagaggaagggggttatatttctaagtgatttacaatttctgtttctaaaattgttgggatttagaaatgtttcaattccaagaaattttattttactttaccatgagattgccatttatgtaatttaaacactgtctagtttcttaattatctaactcacacgagggtaagttttttgttggtttcttttttggagtcctgagttcaaaggggacagaactaagggcaggagaagagaatggatgtgtcttctctcccatcttcccctcatcatcgaccgaggagcacaaagaagttctgtttctgtttttttcagaaactttattttagctgtcaagcagagaatagcttgaactattcagactattgttggcactgtttagtagtgaccacacgctcttctacccgggaaggaacatatgacgacatgctcctcccatgtcccctgatggtgtctgttcccacaatatccttctagtctgcatcgtgaagtggcttaggccaaagcttcctgtgtgatgacgcacgtccgagactgttccatctcattcctcgcaaatttgagctcttctgatcaattctaaatatttgattaattttaattctgaaagaaaattttgaggatttaagcttaggggattttatttttataaataccagattattgttagacttaataaatcactgttaaatttaaagatgacagttaccttggaaagttcactaatacttcgctccaaggcgtctgtaaaagaagatatctttattggagcaatgttcatgtgactgggaatgacagaagaatgggagatgagtagggacccctcaagcacagctgtcactcagaaattttaaatttgaaaaagaaatcgattttcatctgtatgccgtcaaggaaggaattcagttacagggcatctgtaacttaaatattgtaagaataactcatatggaagttcaagctatttttatactataatagagttatttaattttaatttgttgaattattagttaccactgtcatttcttcagctatggatatgtggctgatgttggggagacggacctcagtgtgttttatattgtctggtgttaagatgataaattactttgtgattacaagcaaattttctatttgacaaagcccttggtggagtccaaatgatttttctgtaccatattgttctcttacacatacgtatgttaggaaaataggcacactttcaaagagaatgttctcttacacatacgtatgttaggaaaatagacacattttcaaagagaatgttctcttacatatgttaggaaaataggcacactttcaaagagaggtataggggctttttactgccttcgaaatcacttttaataaaagttgtatgataaatcattaaaaatgcgagtgtaaatatttttttttacctctatcagggtttttatttgaaagtgtgctcttaccatttccttgtttgagtaagagagtgaatggttctgagtgtttaggaaggatttgcttgcttgcagcagaagttctaggaaaagcaggcacctcccaaatatcttgaggacactggcagccttatggtgactaaatccacactttctttaaagagatgcagatgaattacttttctgttaatatatagaaaaatacacaggagaacatgcagatacatgtaaatatctacatacagggatatttgtatgtgtggttgtgaaacccatacacaagtggatttggccatctttgggcagtgaggtcaaatgtgaatatgtgtaaaagtgcttttcagaactgcattactatgagaaaacatcaaaactgctgtagttttccatttctactgtatttcagttgcaacctatttttaataaactttgtatgtatttaagtgtatttgctattgttttgaaagtgctgacaaagtttatatttgtaacatcagccttcctcgcccatctctttccatctgtctcttcttcattaaacacttactgagtatg

SEQ ID NO: 83247 - DNA, 5232 bp, Artificial Sequence
  derived and/or modified sequence
atgagcgccggcggccgggacgaggagcggcggaagctggccgacatcatacatcactggaacgccaatcgtctggatctgtttgaaattagccagccgactgaggacctggagtttcacggagtcatgcgattttattttcaggataaagcggctgggaactttgccactaagtgtatcagagtctccagtaccgccaccacccaggatgtcattgagactctcgctgagaagtttagaccggatatgcgtatgctgtcgagcccaaagtacagcctgtacgaggtgcacgtaagcggcgagagaaggttggacatcgatgagaagccattagttgttcagctcaactggaataaggatgaccgggagggccgctttgtgcttaagaacgagaacgacgccatcccacctaaggcgcaatcaaacgggccagaaaagcaggaaaaggagggcgttatacagaacttcaagcggactctttctaagaaggagaagaaggagaaaaaaaaaagagagaaggaggctctccgacaggcctctgataaagacgatcggcccttccaaggggaagatgtggaaaatagtcgacttgctgctgaagtttacaaggatatgcccgaaacctctttcacccgaactatttccaatcccgaggtcgtgatgaagcgccgacgtcaacagaaactagaaaagaggatgcaggagttccggtcatctgacggcagaccagactccggtgggactttgcgaatctatgctgactccctgaaaccgaatatcccctataaaactatccttctgtctactactgatcccgccgactttgccgtggccgaagcccttgaaaagtatggtctggagaaagaaaaccctaaagactactgtatcgcccgcgtgatgctgcctcctggggctcagcactccgatgagaagggcgccaaggagattatactggacgatgatgaatgtccgcttcagatttttcgtgaatggcccagcgataagggaattcttgtctttcagcttaagaggagacccccggatcacatccctaaaaaaacgaagaagcatctggaggggaagacccctaaaggcaaggaacgcgccgacggatctggctatggtagtaccttaccaccggaaaagctcccttacctggtcgagctcagccctgatgggagcgactcgcgggacaagcccaagctgtatcgcctgcaactgagtgttacagaggtggggaccgagaagctggacgataattctatccaactttttggtccgggtattcagccacaccactgtgacctgacgaatatggatggtgtcgtgacagttacccccagaagcatggacgccgaaacttacgtcgaaggtcaacgaatcagtgagaccaccatgctccagagtgggatgaaggttcagtttggggcatctcatgtgttcaagttcgtagaccctagccaggatcacgctttggccaaacgatctgtagatggcggactgatggtgaaagggccccgccataaacccggcattgtgcaagagactactttcgacctgggaggggatatccattccggaaccgctctgcccacctccaagtctaccaccagattggactccgacagagtttcttctgcttcatccactgccgagcggggaatggtgaagcccatgattcgggttgaacagcagccagactaccgccgacaggagtcaaggacccaggacgccagcggccctgaacttattctccccgcaagcatcgagtttcgggagagtagcgaagattcctttctgtccgctatcattaactacaccaatagcagcactgtgcatttcaaactctctcccacctacgtcctctacatggcttgtagatacgtgctgtcgaatcagtaccgccccgacatctcccctactgagagaacgcataaagtgatagctgtagtgaacaagatggtgagcatgatggaaggagtgatccagaagcagaaaaatatcgccggtgccctggccttctggatggccaatgcttctgaattgctgaatttcatcaagcaggatcgtgacctgagcaggatcacactggacgcccaggacgttctggcccatctagtgcagatggcctttaagtatctggtccactgtttgcaatccgagctcaataattatatgcccgcttttcttgacgaccctgaagaaaactcccttcaacgacccaagattgatgatgttctccataccctgacgggcgccatgtctctacttcgacgctgcagggtcaatgcggccctgacaatacagctcttttcccagttgtttcacttcatcaatatgtggctgttcaaccggttggttaccgatcccgacagtggcctttgctcccattattggggcgcaatcatacggcaacagctgggtcatattgaggcttgggctgaaaaacaaggtctcgaactagcggcagattgccacctatcgaggatcgtccaggctactacacttctcaccatggataagtacgccccagacgatattcccaacatcaactccacttgtttcaaattgaactccctgcaactgcaagccctgttgcagaactatcattgcgcacctgatgaaccttttatcccaactgacctgatcgagaacgtggtgaccgtggccgagaacaccgctgacgagcttgcacgcagcgatggacgcgaagtgcaactggaggaggacccagacttgcagttgccattccttctgcccgaagatggctatagttgcgatgtggtgcgtaacatcccaaacgggctccaggagtttctggaccctctgtgtcagcgtggcttctgccgactgattcctcatacacggagcccgggaacgtggacaatttactttgagggggcggactatgaatcccacctgctccgtgaaaacaccgagctggctatccctcttcggaaagagcctgaaattatcacagtgacgctgaagaaacagaatggaatgggcctgagcattgtcgcggcgaaaggggccggacaggacaagttaggaatatacgtgaaaagcgtggtaaaaggaggggccgcagacgacggccggctcgcagctggtgaccagcttctgagcgtggacggcaggtccttagtgggactctctcaggagagggccgctgaactgatgacccgcacctctagcgtcgtcacactggaggttgcaaagcagggcgctatctaccatggtctggccacgctcctgaatcaacccagccccatgatgcagaggatctcagataggagagggtcaggcaaaccgcggccaaaatctgaagggttcgaactctacaataacagcactcagaatggatcccccgagagccctcaactcccttgggcagagtacagcgaaccgaaaaaactgcccggagatgataggctgatgaaaaatcgggcggaccatcggagttcaccaaacgtcgcgaaccaaccaccatctcctggcggaaagtcggcatacgctagcggcaccaccgcaaaaatcacctccgtgtcaaccgggaacctgtgcaccgaagagcagacccccccgccgcgtcccgaagcttaccccatcccaacccagacgtacacgcgcgaatactttactttccctgcaagcaagtctcaggatagaatggccccaccgcagaaccagtggcctaattatgaagaaaagcctcatatgcatacagattcaaatcattcttccatcgctattcagcgagttactagatcccaggaggagcttcgtgaagataaagcatatcagctggagcgacatagaatcgaagcagcaatggaccggaaatcagacagcgatatgtggatcaatcaaagtagttctttagattcttcaacatcatcacaggaacaccttaatcactcgagcaagtcagtgacacctgcctctactttaactaagtccgggcctgggcggtggaaaacccctgccgccatccccgctactcctgtggccgtctcacagcccattcgtaccgatctgccaccgcctccaccccccccgccagtacactatgccggggatttcgacggcatgagtatggacctccctctgccaccccccccttcagctaaccaaattggactcccctcagcacaggtggcagccgctgagaggcgcaaaagagaggaacatcagcgctggtacgagaaggagaaggcccggttggaggaggaaagggagagaaagaggagagagcaagagaggaaactagggcagatgaggacccaaagtctaaaccccgctcctttcagtccccttacagcacagcagatgaagccagaaaagccatcaaccctccagcggccacaggagactgtcatcagggagctgcagccgcagcagcagccgcggaccatcgaaaggagagaccttcagtatatcacagtgtcaaaggaagaactatcttctggggattccctctccccagacccctggaagcgggatgctaaggagaagctcgagaagcagcaacagatgcatatagtggacatgttgagcaaagagatccaggagttacagagtaagccggatcggtcagctgaagagtctgaccgtctgcgaaagttgatgcttgagtggcagttccaaaagaggctccaggagtccaaacaaaaggacgaagatgacgaggaagaggaggacgatgatgtggacacaatgttaatcatgcagcggctggaggccgagagacgggctcggctgcaggacgaagaacgacgcagacagcagcagctggaagaaatgcgcaagcgcgaggccgaagacagagcaagacaggaggaagagcgacgccggcaagaggaggagcgcacgaagcgagatgcagaggagaagagaaggcaggaggaaggctattatagccggctggaggccgaacgacggaggcaacatgacgaagctgcccggcgactgttggaaccggaggcccctggtcctaactcatacccaggcagtacaggggcggcagtgggcgcacacgatgcatgtcgagatgccaaggagaagcgctcaaaatcccaagacgcagatagcccaggcagttccggcgcccctgaaaacttaacctttaaagagaggcagagattgttctctcagggacaggacgttagcaacaaggtgaaggcaagcagaaaattaactgaactggagaatgaattgaacactaagtag

SEQ ID NO: 83248 - DNA, 5231 bp, Artificial Sequence
  derived and/or modified sequence
atgtctgccggtggcagggacgaagagcggaggaagctggctgacattatccatcactggaatgcaaacaggctagacctgttcgaaatctcccagcctaccgaggacctggagtttcacggggtgatgcgcttctatttccaggacaaggccgctgggaactttgcaaccaaatgtatcagagtgagctctaccgccacaacacaggatgttatcgaaaccctagccgaaaagtttaggcctgacatgcggatgctatcttccccaaaatactcattatatgaagtccacgtgtctggggaacgaaggttggatatcgacgagaagccgcttgtcgttcagctgaactggaacaaggatgatagagagggtagatttgtcctaaagaatgaaaatgacgccatcccacccaaggctcagagcaatggaccggagaagcaggaaaaggaaggcgtcatccagaacttcaagaggacactcagcaaaaaagagaagaaagagaaaaagaaacgggagaaggaggcactgcgacaggcctcggacaaggatgatagaccctttcagggggaagatgtggagaactcccgcttggcggctgaggtgtataaggacatgccagaaacctcttttacacgaacaatcagcaatccagaggtggtcatgaaacgcagacggcagcagaagctcgaaaaacgcatgcaggagttccgcagcagtgacgggcgaccggatagtggcggaaccctccgaatatatgccgacagcctgaagccaaatatcccatataaaaccatcctgttatcgaccactgacccggctgacttcgccgtggctgaagcattggagaagtacggccttgaaaaggagaacccaaaggactactgtatcgcaagagtaatgctgcctcccggagcacaacactcggacgaaaagggtgcaaaagagattattttggacgacgacgagtgcccactacagatctttagggagtggccctccgataagggtattctcgtgttccagctgaagcgcaggcctcccgatcacatccccaagaaaacaaagaagcacctggaggggaaaacccccaaaggtaaggagcgggctgacggaagtggatacggctcgacactgcctcccgagaaattgccttaccttgtcgagctgtcccctgatgggtcagattccagggacaagcctaaactttataggcttcagctctccgtgactgaggtgggcactgaaaaactggatgacaacagcatacaattgtttggccctggaattcaaccccatcattgcgacctgactaacatggacggggtcgtgacagtgactccacgtagcatggatgccgagacgtatgtggaaggccagaggatcagcgaaactaccatgctgcagtctggaatgaaggtgcaattcggtgcgtcccacgtttttaagtttgtggatccttcacaggatcacgccctggcaaagagatctgtagatggcggtctgatggtgaaaggtcccaggcataagcccggaattgtgcaggaaacgacttttgacctggggggtgacattcactcgggaaccgcactacccacgagtaagtcaacgacccgtctggatagcgacagggtgtcctcagcttcttcgactgcagagcgaggtatggttaaacccatgatcagagttgagcagcagcctgattaccggaggcaggaatctagaacacaggatgcctctggcccagagctgattctccccgcttcaattgagtttagggagagtagcgaggatagtttccttagcgccatcatcaattacactaactcttccaccgtccactttaaactctcacccacgtacgttctgtatatggcctgtagatacgtgctaagcaatcaatatagaccagatattagccccacggagcggacacacaaagtgatcgccgtagttaataagatggttagtatgatggaaggcgtcattcagaaacagaagaatatagccggtgccctggccttttggatggctaacgcaagtgaattactcaactttatcaaacaagacagggatcttagtaggattacattggatgctcaagacgtgctcgcccatctagtgcagatggctttcaaatacctggtgcattgtctgcagagtgagctgaataactatatgccggctttcctggacgatccagaggaaaattccctgcagaggcccaagattgacgatgttctgcatactttaactggcgctatgagcctgctccgacgctgcagagtaaatgccgctctgactatacagctattttcccaattatttcacttcattaatatgtggctgtttaatcgcctggtcacagatcccgatagcggcttatgttcacattactggggggctatcattcgccaacagctgggacacattgaggcctgggcagagaagcagggactggaacttgctgccgactgtcatctatccaggatcgtgcaggctacaactctgctgacgatggataagtatgcccctgatgatattccaaatattaattccacgtgtttcaagctgaattcattacagttgcaggcccttctccaaaattaccactgcgctccagatgagcccttcatcccaacagatcttattgagaatgtggtgacagttgccgagaacactgccgacgagttggctcgcagcgacggcagggaggtgcagctcgaagaggaccctgacctccagctgccattcctattaccagaagatgggtactcttgcgatgttgtcaggaatatccctaatgggctccaagagtttttggaccctctgtgccagcggggattctgtcggcttatccctcacaccaggagtcccggtacttggaccatttactttgaaggcgcagattacgaatcacatttattacgcgaaaacactgagctcgctatcccgctgcggaaggagcctgaaatcatcaccgtaaccctgaaaaagcagaacgggatgggcctgagtattgttgctgctaaaggggctggacaggacaagctgggcatctacgtgaaatctgttgtgaagggcggagccgctgacgatggaagacttgctgcaggtgatcagctcctttctgtcgacgggagatccttggttggcttaagccaggagcgagccgcagaattgatgacgcgcaccagctctgtggttacattggaagtcgctaaacagggagccatctatcacggtctggcaaccctcctgaaccagccgtcccccatgatgcagcgcattagtgaccggcgtgggtccggcaaacccagacccaagagtgagggcttcgagctctataataatagtactcaaaatggctccccagagtcccctcagttgccatgggcagaatacagtgagcccaaaaaactccctggggatgatagactgatgaagaatagagcagaccatcggagtagccccaatgtcgcaaaccagcccccatctcctggaggaaaatccgcttacgcatctggcacgactgcaaaaataacctccgtatctactggcaacctttgtacagaggagcagacaccacctccccgtcccgaggcttaccccatacctacacagacctacacgagagagtacttcacattcccggctagtaaaagccaagaccgaatggccccacctcaaaatcagtggcctaactatgaagagaaacctcacatgcacaccgatagcaatcacagctcaattgctattcaaagagtaacaagaagccaggaggagctccgggaagataaagcataccagctggagcggcatcgaatcgaagctgccatggatagaaagagcgatagtgatatgtggatcaatcaaagttcaagtctggactccagtacatctagccaggaacacttgaatcactcatcgaagagcgttacccccgcatcaacgttgaccaaaagtggcccaggcagatggaagacccctgccgctatcccagccacccccgtggccgttagtcaacccataagaaccgacttacctccacctccaccaccaccacctgtacattacgccggtgactttgacggcatgtctatggacctcccattgcccccacccccttctgcaaaccagatcggattgccgagcgcccaggtcgcggctgcagaaagaaggaaacgggaggagcatcagaggtggtatgaaaaggagaaagctcgcctggaagaggaaagagaacggaagagaagggagcaggagcgcaaactcgggcagatgcgtacgcagagcctcaatcccgctcccttctcccctcttacagcccaacagatgaagcctgaaaagcccagcaccctccagcggcctcaggaaacagttattcgggagctgcagcctcagcagcagccacggaccatcgagcgtcgcgacttgcagtacatcaccgtgtcgaaggaggagctctcaagcggagactcactcagtccggacccgtggaaacgggatgcaaaggaaaagctcgagaagcagcagcagatgcacattgtggacatgctaagtaaagaaatccaggaactgcagagtaaaccagaccgatccgctgaggagtccgacaggctgaggaaactgatgctggagtggcagttccaaaaaagacttcaagaatctaaacaaaaagacgaagatgacgaagaggaagaagatgacgatgtggatacgatgttgatcatgcagaggctggaggcggagaggagagcacgcttacaagacgaggagaggagacgacagcagcagttagaagaaatgcgcaagcgtgaggcagaggacagagcacgccaagaggaggagcggcgacgccaggaagaagaaagaacaaagcgcgacgctgaggagaagcgcagacaggaagaagggtattactcacggttagaagccgagaggaggcggcagcacgacgaagcggcaaggaggctgctggagccggaagcccctggccctaatagctacccaggcagcacaggtgccgctgtgggtgctcacgacgcgtgccgggacgcaaaagaaaagcggagcaaatcccaggacgccgattcacccggtagtagtggtgctccggagaacctcaccttcaaagaacggcaaagactgttttctcaggggcaagatgtgtccaacaaggttaaagcaagccgaaaactgacagaactggagaacgagttaaataccaagta

SEQ ID NO: 83249 - DNA, 5232 bp, Artificial Sequence
  derived and/or modified sequence
atgagcgccggcggcagagacgaggagagaagaaagctggccgacatcatccaccactggaacgccaacagactggacctgttcgagatcagccagcccaccgaggacctggagttccacggcgtgatgagattctacttccaggacaaggccgccggcaacttcgccaccaagtgcatcagagtgagcagcaccgccaccacccaggacgtgatcgagaccctggccgagaagttcagacccgacatgagaatgctgagcagccccaagtacagcctgtacgaggtgcacgtgagcggcgagagaagactggacatcgacgagaagcccctggtggtgcagctgaactggaacaaggacgacagagagggcagattcgtgctgaagaacgagaacgacgccatcccccccaaggcccagagcaacggccccgagaagcaggagaaggagggcgtgatccagaacttcaagagaaccctgagcaagaaggagaagaaggagaagaagaagagagagaaggaggccctgagacaggccagcgacaaggacgacagacccttccagggcgaggacgtggagaacagcagactggccgccgaggtgtacaaggacatgcccgagaccagcttcaccagaaccatcagcaaccccgaggtggtgatgaagagaagaagacagcagaagctggagaagagaatgcaggagttcagaagcagcgacggcagacccgacagcggcggcaccctgagaatctacgccgacagcctgaagcccaacatcccctacaagaccatcctgctgagcaccaccgaccccgccgacttcgccgtggccgaggccctggagaagtacggcctggagaaggagaaccccaaggactactgcatcgccagagtgatgctgccccccggcgcccagcacagcgacgagaagggcgccaaggagatcatcctggacgacgacgagtgccccctgcagatcttcagagagtggcccagcgacaagggcatcctggtgttccagctgaagagaagaccccccgaccacatccccaagaagaccaagaagcacctggagggcaagacccccaagggcaaggagagagccgacggcagcggctacggcagcaccctgccccccgagaagctgccctacctggtggagctgagccccgacggcagcgacagcagagacaagcccaagctgtacagactgcagctgagcgtgaccgaggtgggcaccgagaagctggacgacaacagcatccagctgttcggccccggcatccagccccaccactgcgacctgaccaacatggacggcgtggtgaccgtgacccccagaagcatggacgccgagacctacgtggagggccagagaatcagcgagaccaccatgctgcagagcggcatgaaggtgcagttcggcgccagccacgtgttcaagttcgtggaccccagccaggaccacgccctggccaagagaagcgtggacggcggcctgatggtgaagggccccagacacaagcccggcatcgtgcaggagaccaccttcgacctgggcggcgacatccacagcggcaccgccctgcccaccagcaagagcaccaccagactggacagcgacagagtgagcagcgccagcagcaccgccgagagaggcatggtgaagcccatgatcagagtggagcagcagcccgactacagaagacaggagagcagaacccaggacgccagcggccccgagctgatcctgcccgccagcatcgagttcagagagagcagcgaggacagcttcctgagcgccatcatcaactacaccaacagcagcaccgtgcacttcaagctgagccccacctacgtgctgtacatggcctgcagatacgtgctgagcaaccagtacagacccgacatcagccccaccgagagaacccacaaggtgatcgccgtggtgaacaagatggtgagcatgatggagggcgtgatccagaagcagaagaacatcgccggcgccctggccttctggatggccaacgccagcgagctgctgaacttcatcaagcaggacagagacctgagcagaatcaccctggacgcccaggacgtgctggcccacctggtgcagatggccttcaagtacctggtgcactgcctgcagagcgagctgaacaactacatgcccgccttcctggacgaccccgaggagaacagcctgcagagacccaagatcgacgacgtgctgcacaccctgaccggcgccatgagcctgctgagaagatgcagagtgaacgccgccctgaccatccagctgttcagccagctgttccacttcatcaacatgtggctgttcaacagactggtgaccgaccccgacagcggcctgtgcagccactactggggcgccatcatcagacagcagctgggccacatcgaggcctgggccgagaagcagggcctggagctggccgccgactgccacctgagcagaatcgtgcaggccaccaccctgctgaccatggacaagtacgcccccgacgacatccccaacatcaacagcacctgcttcaagctgaacagcctgcagctgcaggccctgctgcagaactaccactgcgcccccgacgagcccttcatccccaccgacctgatcgagaacgtggtgaccgtggccgagaacaccgccgacgagctggccagaagcgacggcagagaggtgcagctggaggaggaccccgacctgcagctgcccttcctgctgcccgaggacggctacagctgcgacgtggtgagaaacatccccaacggcctgcaggagttcctggaccccctgtgccagagaggcttctgcagactgatcccccacaccagaagccccggcacctggaccatctacttcgagggcgccgactacgagagccacctgctgagagagaacaccgagctggccatccccctgagaaaggagcccgagatcatcaccgtgaccctgaagaagcagaacggcatgggcctgagcatcgtggccgccaagggcgccggccaggacaagctgggcatctacgtgaagagcgtggtgaagggcggcgccgccgacgacggcagactggccgccggcgaccagctgctgagcgtggacggcagaagcctggtgggcctgagccaggagagagccgccgagctgatgaccagaaccagcagcgtggtgaccctggaggtggccaagcagggcgccatctaccacggcctggccaccctgctgaaccagcccagccccatgatgcagagaatcagcgacagaagaggcagcggcaagcccagacccaagagcgagggcttcgagctgtacaacaacagcacccagaacggcagccccgagagcccccagctgccctgggccgagtacagcgagcccaagaagctgcccggcgacgacagactgatgaagaacagagccgaccacagaagcagccccaacgtggccaaccagccccccagccccggcggcaagagcgcctacgccagcggcaccaccgccaagatcaccagcgtgagcaccggcaacctgtgcaccgaggagcagacccccccccccagacccgaggcctaccccatccccacccagacctacaccagagagtacttcaccttccccgccagcaagagccaggacagaatggcccccccccagaaccagtggcccaactacgaggagaagccccacatgcacaccgacagcaaccacagcagcatcgccatccagagagtgaccagaagccaggaggagctgagagaggacaaggcctaccagctggagagacacagaatcgaggccgccatggacagaaagagcgacagcgacatgtggatcaaccagagcagcagcctggacagcagcaccagcagccaggagcacctgaaccacagcagcaagagcgtgacccccgccagcaccctgaccaagagcggccccggcagatggaagacccccgccgccatccccgccacccccgtggccgtgagccagcccatcagaaccgacctgccccccccccccccccccccccccgtgcactacgccggcgacttcgacggcatgagcatggacctgcccctgccccccccccccagcgccaaccagatcggcctgcccagcgcccaggtggccgccgccgagagaagaaagagagaggagcaccagagatggtacgagaaggagaaggccagactggaggaggagagagagagaaagagaagagagcaggagagaaagctgggccagatgagaacccagagcctgaaccccgcccccttcagccccctgaccgcccagcagatgaagcccgagaagcccagcaccctgcagagaccccaggagaccgtgatcagagagctgcagccccagcagcagcccagaaccatcgagagaagagacctgcagtacatcaccgtgagcaaggaggagctgagcagcggcgacagcctgagccccgacccctggaagagagacgccaaggagaagctggagaagcagcagcagatgcacatcgtggacatgctgagcaaggagatccaggagctgcagagcaagcccgacagaagcgccgaggagagcgacagactgagaaagctgatgctggagtggcagttccagaagagactgcaggagagcaagcagaaggacgaggacgacgaggaggaggaggacgacgacgtggacaccatgctgatcatgcagagactggaggccgagagaagagccagactgcaggacgaggagagaagaagacagcagcagctggaggagatgagaaagagagaggccgaggacagagccagacaggaggaggagagaagaagacaggaggaggagagaaccaagagagacgccgaggagaagagaagacaggaggagggctactacagcagactggaggccgagagaagaagacagcacgacgaggccgccagaagactgctggagcccgaggcccccggccccaacagctaccccggcagcaccggcgccgccgtgggcgcccacgacgcctgcagagacgccaaggagaagagaagcaagagccaggacgccgacagccccggcagcagcggcgcccccgagaacctgaccttcaaggagagacagagactgttcagccagggccaggacgtgagcaacaaggtgaaggccagcagaaagctgaccgagctggagaacgagctgaacaccaagtag

SEQ ID NO: 83250 - protein, 275 aa, Artificial Sequence
  derived and/or modified sequence
MWIDFFTYSSMSEEVTYADLQFQNSSEMEKIPEIGKFGEKAPPAPSHVWRPAALFLTLLCLLLLIGLGVLASMFHVTLKIEMKKMNKLQNISEELQRNISLQLMSNMNISNKIRNLSTTLQTIATKLCRELYSKEQEHKCKPCPRRWIWHKDSCYFLSDDVQTWQESKMACAAQNASLLKINNKNALEFIKSQSRSYDYWLGLSPEEDSTRGMRVDNIINSSAWVIRNAPDLNNMYCGYINRLYVQYYHCTYKKRMICEKMANPVQLGSTYFREA

SEQ ID NO: 83251 - DNA, 828 bp, Artificial Sequence
  derived and/or modified sequence
atgtggatcgacttctttacctattccagcatgagcgaggaggtgacatacgcagacctccagtttcagaactcttctgagatggaaaaaatacccgaaatcggcaagttcggcgagaaagctccccccgcacctagccacgtttggcgcccggccgccctgtttttgaccttgctgtgcttattgcttcttattggactgggagtcctcgcttcaatgttccatgttacccttaagatagaaatgaaaaagatgaacaagctgcaaaacatatccgaagagctacagcgaaacatctcactgcagttgatgagcaacatgaacatatcaaataagattaggaacctatcaaccacacttcaaacaatcgctaccaagctctgtagggagctctatagcaaggaacaggagcacaaatgtaaaccttgcccgagacggtggatctggcataaagactcttgctattttctgtcagacgacgtccaaacatggcaggagagcaaaatggcatgtgcagcacagaacgcctcactgttaaaaatcaataataaaaatgcacttgagttcatcaagtcacagtcaaggtcttacgactattggctcggactgtcccctgaggaagactccaccaggggaatgagggttgacaatataatcaactcgagtgcctgggtcatccgcaacgcgcctgatctaaacaatatgtattgcggatacatcaacaggctgtatgtgcagtactaccactgcacatataagaaaaggatgatctgcgagaagatggctaacccagtgcagcttggaagcacctatttccgggaggcttag

SEQ ID NO: 83252 - DNA, 828 bp, Artificial Sequence
  derived and/or modified sequence
atgtggattgacttcttcacctacagctccatgtctgaggaggtgacctacgccgacctgcagttccagaacagcagcgagatggagaagatccctgagatcggcaagtttggagagaaggcccccccagcccccagccacgtgtggaggcctgctgccctcttcctgaccctgctgtgcctgctgctgctgattggcctgggcgtgctggcctccatgtttcatgtgaccctgaagattgagatgaagaagatgaacaagctgcagaacatcagcgaggagctgcagaggaacatcagcctgcagctgatgagcaacatgaacatcagcaacaagatccggaacctgagcaccaccctgcagaccatcgccaccaagctgtgccgggagctgtacagcaaggagcaggagcacaagtgcaagccctgcccccggcgctggatctggcacaaggacagctgctacttcctgagtgatgatgtgcagacctggcaggagagcaagatggcctgtgccgcccagaatgccagcctgctgaagatcaacaacaagaatgccctggagttcatcaagagccagagccgctcctatgactactggctgggcctgagccctgaggaggacagcacccggggcatgagggtggacaacatcatcaacagcagcgcctgggtgatcagaaatgccccagacctgaacaacatgtactgcggctacatcaaccggctgtatgtgcagtactaccactgcacctacaagaagaggatgatctgtgagaagatggccaaccctgtgcagctgggcagcacctacttccgggaggcctag

SEQ ID NO: 83253 - DNA, 828 bp, Artificial Sequence
  derived and/or modified sequence
atgtggatcgacttcttcacctacagcagcatgagcgaggaggtgacttatgctgacctacagttccagaatagcagtgagatggagaagattccagaaattgggaagttcggggaaaaagccccccccgctccctctcacgtttggcgccctgcagctctgttcctgaccctgctctgcttgctgctgctgatagggcttggcgtgctggcctctatgtttcacgtcacacttaaaattgagatgaagaagatgaacaaacttcaaaatatcagtgaggagctgcaacgtaacatttctctgcagctcatgagcaacatgaacatcagtaacaaaatcagaaacctgtcaacaaccctacagaccatagccaccaagctctgcagagagctttattctaaagaacaggagcataaatgtaagccctgtcctagacgctggatatggcacaaagattcgtgttacttcctgtctgatgatgtccagacctggcaggagtcgaagatggcgtgcgctgctcagaatgccagtctgcttaaaatcaacaacaaaaacgccctggagttcatcaaaagccagagccggagttatgactactggctcggcctgagtccagaagaagatagcacaagaggtatgcgtgtggacaacataatcaattcctctgcctgggtcatacgcaatgccccagatctgaataacatgtactgtgggtatatcaaccgactttacgttcagtactatcactgtacttataagaagcgcatgatctgtgagaagatggcaaacccggtacagctggggagtacttactttcgcgaagcctag

SEQ ID NO: 83254 - DNA, 828 bp, Artificial Sequence
  derived and/or modified sequence
atgtggatcgacttcttcacgtactctagcatgtctgaggaagtcacttatgccgatcttcagttccagaattccagcgaaatggagaagattcccgaaattggcaaatttggggaaaaggctccccctgcccctagtcacgtgtggcggcctgccgctctgttccttacgctgctttgtctgctgttgctcataggccttggagtccttgcctcaatgtttcatgtcacattgaagattgagatgaagaaaatgaacaagctacagaacatcagtgaggaactgcagcgcaatattagcctccagctgatgagtaatatgaacattagcaataagatcaggaacctcagtaccacactgcagaccatcgccacaaagctctgccgggagctgtacagcaaggagcaagagcacaagtgcaagccatgtccgcgaagatggatttggcacaaagatagttgttactttttgagcgatgatgtccagacctggcaagagagcaaaatggcctgcgcagctcagaatgcctccctgctgaaaatcaacaacaaaaacgcattggaattcatcaagtctcagtcgagatcctacgattattggctgggactgtctccggaggaggatagcactcgagggatgcgagttgacaacatcattaactcctcggcgtgggtgattcgaaatgcccctgatctgaacaacatgtactgtggctacatcaatcgcctctacgtgcagtattatcactgtacttacaaaaaacggatgatctgcgagaagatggcgaatcccgtgcagctgggtagtacctactttcgcgaggcgtag

SEQ ID NO: 83255 - DNA, 1549 bp, Artificial Sequence
  derived and/or modified sequence
tttgcagacatatgggtgattggtacagtaggtttataaacagaagtttaaacttgtaagcttaagcttccgtttataaacagaagtttaaaattataggtcctgtttaacattcagctctgttaactcactcatctttttgtgtttttacactttgtcaagatttctttacatattcatcaatgtctgaagaagttacttatgcagatcttcaattccagaactccagtgagatggaaaaaatcccagaaattggcaaatttggggaaaaagcacctccagctccctctcatgtatggcgtccagcagccttgtttctgactcttctgtgccttctgttgctcattggattgggagtcttggcaagcatgtttcacgtaactttgaagatagaaatgaaaaaaatgaacaaactacaaaacatcagtgaagagctccagagaaatatttctctacaactgatgagtaacatgaatatctccaacaagatcaggaacctctccaccacactgcaaacaatagccaccaaattatgtcgtgagctatatagcaaagaacaagagcacaaatgtaagccttgtccaaggagatggatttggcataaggacagctgttatttcctaagtgatgatgtccaaacatggcaggagagtaaaatggcctgtgctgctcagaatgccagcctgttgaagataaacaacaaaaatgcattggaatttataaaatcccagagtagatcatatgactattggctgggattatctcctgaagaagattccactcgtggtatgagagtggataatataatcaactcctctgcctgggttataagaaacgcacctgacttaaataacatgtattgtggatatataaatagactatatgttcaatattatcactgcacttataaaaaaagaatgatatgtgagaagatggccaatccagtgcagcttggttctacatattttagggaggcatgaggcatcaatcaaatacatttaaggagtgtagggggtgggggttctaggctataggtaaatttaaatattttctggttgacaattagttgagtttgtctgaagacctgggattttatcatgcagatgaaacatccaggtagcaagcttcagagagaatagactgtgaatgttaatgccagagaggtataatgaagcatgtcccacctcccactttccatcatggcctgaaccctggaggaagaggaagtccattcagatagttgtggggggccttcgaattttcattttcatttacgttcttccccttctggccaagatttgccagaggcaacatcaaaaaccagcaaattttaattttgtcccacagcgttgctagggtggcatggctccccatctcgggtccatcctatacttccatgggactccctatggctgaaggccttatgagtcaaaggacttatagccaattgattgttctaggccaggtaagaatggatatggacatgcatttattacctcttaaaattattattttaagtaaaagccaataaacaaaaacgaaaaggcaa

SEQ ID NO: 83256 - DNA, 1428 bp, Artificial Sequence
  derived and/or modified sequence
ggaagaacagcctttcaaatttgacttctgcatgtggatagatttctttacatattcatcaatgtctgaagaagttacttatgcagatcttcaattccagaactccagtgagatggaaaaaatcccagaaattggcaaatttggggaaaaagcacctccagctccctctcatgtatggcgtccagcagccttgtttctgactcttctgtgccttctgttgctcattggattgggagtcttggcaagcatgtttcacgtaactttgaagatagaaatgaaaaaaatgaacaaactacaaaacatcagtgaagagctccagagaaatatttctctacaactgatgagtaacatgaatatctccaacaagatcaggaacctctccaccacactgcaaacaatagccaccaaattatgtcgtgagctatatagcaaagaacaagagcacaaatgtaagccttgtccaaggagatggatttggcataaggacagctgttatttcctaagtgatgatgtccaaacatggcaggagagtaaaatggcctgtgctgctcagaatgccagcctgttgaagataaacaacaaaaatgcattggaatttataaaatcccagagtagatcatatgactattggctgggattatctcctgaagaagattccactcgtggtatgagagtggataatataatcaactcctctgcctgggttataagaaacgcacctgacttaaataacatgtattgtggatatataaatagactatatgttcaatattatcactgcacttataaaaaaagaatgatatgtgagaagatggccaatccagtgcagcttggttctacatattttagggaggcatgaggcatcaatcaaatacatttaaggagtgtagggggtgggggttctaggctataggtaaatttaaatattttctggttgacaattagttgagtttgtctgaagacctgggattttatcatgcagatgaaacatccaggtagcaagcttcagagagaatagactgtgaatgttaatgccagagaggtataatgaagcatgtcccacctcccactttccatcatggcctgaaccctggaggaagaggaagtccattcagatagttgtggggggccttcgaattttcattttcatttacgttcttccccttctggccaagatttgccagaggcaacatcaaaaaccagcaaattttaattttgtcccacagcgttgctagggtggcatggctccccatctcgggtccatcctatacttccatgggactccctatggctgaaggccttatgagtcaaaggacttatagccaattgattgttctaggccaggtaagaatggatatggacatgcatttattacctcttaaaattattattttaagtaaaagccaataaacaaaaacgaaaaggcaa

SEQ ID NO: 83257 - DNA, 828 bp, Artificial Sequence
  derived and/or modified sequence
atgtggatcgacttcttcacctacagcagcatgagcgaggaggtgacctacgccgacctgcagttccagaacagcagcgagatggagaagatccccgagatcggcaagttcggcgagaaggccccccccgcccccagccacgtgtggagacccgccgccctgttcctgaccctgctgtgcctgctgctgctgatcggcctgggcgtgctggccagcatgttccacgtgaccctgaagatcgagatgaagaagatgaacaagctgcagaacatcagcgaggagctgcagagaaacatcagcctgcagctgatgagcaacatgaacatcagcaacaagatcagaaacctgagcaccaccctgcagaccatcgccaccaagctgtgcagagagctgtacagcaaggagcaggagcacaagtgcaagccctgccccagaagatggatctggcacaaggacagctgctacttcctgagcgacgacgtgcagacctggcaggagagcaagatggcctgcgccgcccagaacgccagcctgctgaagatcaacaacaagaacgccctggagttcatcaagagccagagcagaagctacgactactggctgggcctgagccccgaggaggacagcaccagaggcatgagagtggacaacatcatcaacagcagcgcctgggtgatcagaaacgcccccgacctgaacaacatgtactgcggctacatcaacagactgtacgtgcagtactaccactgcacctacaagaagagaatgatctgcgagaagatggccaaccccgtgcagctgggcagcacctacttcagagaggcctag

SEQ ID NO: 83258 - protein, 372 aa, Artificial Sequence
  derived and/or modified sequence
MAAPVPWACCAVLAAAAAVVYAQRHSPQEAPHVQYERLGSDVTLPCGTANWDAAVTWRVNGTDLAPDLLNGSQLVLHGLELGHSGLYACFHRDSWHLRHQVLLHVGLPPREPVLSCRSNTYPKGFYCSWHLPTPTYIPNTFNVTVLHGSKIMVCEKDPALKNRCHIRYMHLFSTIKYKVSISVSNALGHNATAITFDEFTIVKPDPPENVVARPVPSNPRRLEVTWQTPSTWPDPESFPLKFFLRYRPLILDQWQHVELSDGTAHTITDAYAGKEYIIQVAAKDNEIGTWSDWSVAAHATPWTEEPRHLTTEAQAAETTTSTTSSLAPPPTTKICDPGELGSGGGPSAPFLVSVPITLALAAAAATASSLLI

SEQ ID NO: 83259 - protein, 256 aa, Artificial Sequence
  derived and/or modified sequence
MAAPVPWACCAVLAAAAAVVYAQRHSPQEAPHVQYERLGSDVTLPCGTANWDAAVTWRVNGTDLAPDLLNGSQLVLHGLELGHSGLYACFHRDSWHLRHQVLLHVGLPPREPVLSCRSNTYPKGFYCSWHLPTPTYIPNTFNVTVLHGSKIMVCEKDPALKNRCHIRYMHLFSTIKYKVSISVSNALGHNATAITFDEFTIVKPDPPENVVARPVPSNPRRLEVTWQTPSTWPDPESFPLKFFLRYRPLILDQWQH

SEQ ID NO: 83260 - DNA, 1119 bp, Artificial Sequence
  derived and/or modified sequence
atggccgctcctgtaccctgggcctgctgcgcggtgctcgcggcagccgcagcagtggtgtatgcccagagacactccccccaggaggcccctcacgtccaatatgagcggttagggagcgatgtgaccctcccctgtggtaccgctaattgggacgcagccgtgacttggcgggtcaatggcactgatctggctcccgacttgctgaacggctcacaacttgtcctgcatggcttagaattggggcattctggcctctacgcatgtttccatcgggactcatggcaccttcggcatcaggtgctgctgcacgtaggtctgccccctagagagccagtgctttcatgtcggtcaaacacttatccaaaggggttctactgcagctggcatctgccaacccccacttacattcccaacaccttcaatgtaacagttctgcatggctcaaagatcatggtctgcgagaaggatcctgcccttaaaaatcgctgtcacatccgctacatgcaccttttcagcactattaagtacaaagttagcatttctgtaagcaatgctctgggacacaacgccaccgccattacctttgatgagttcacaattgtcaagccagacccacccgaaaacgtggtggcacgcccagtcccttccaatccgcgtagactcgaggttacttggcaaaccccaagcacatggcctgatccggagagctttcccttgaagttctttctgcgctaccggccgttgattttggaccagtggcagcacgtcgaactgtcagacggaacagcacacactatcacagacgcctatgcagggaaggaatacattatccaggtggcggccaaggacaacgagataggcacctggtccgattggtccgtggctgcgcacgcaactccttggactgaggagcctcgccacctgaccacggaggctcaggctgcggagaccacaactagcacaaccagcagtctggctccaccccccaccacaaaaatctgtgatccaggcgaactcgggagcgggggagggccgtccgctccctttttagtgtccgttcctataacactggccctagccgcggccgccgccactgcatctagcttgctcatctag

SEQ ID NO: 83261 - DNA, 1119 bp, Artificial Sequence
  derived and/or modified sequence
atggccgcccctgtgccatgggcctgttgcgcggtgctggccgccgcagcagcagtcgtctacgcccaaaggcattcaccccaggaggcccctcacgtgcagtacgaacggcttggttctgacgttacgctgccctgcggcactgcaaattgggacgcagcggtgacttggcgcgtcaatgggaccgacctggcccccgatctgctgaatggaagccaattggtcttacacgggcttgaattggggcactctggcttgtatgcctgttttcaccgcgattcgtggcacctccgccaccaggtgctgctgcacgttggcttacctccgcgcgagccagtcctctcttgtcggagcaacacatatcccaaaggcttttactgttcatggcacctgcccacaccgacctacatccctaatacttttaacgtcactgttttacatggctcaaagattatggtatgtgaaaaggatccagctctgaaaaacaggtgccatatccgatacatgcacctgttcagcacaataaagtataaggttagcattagcgtgagcaacgctctgggtcataatgcgactgctatcacatttgacgagttcacaatcgtgaaaccggatccgcctgagaacgttgtcgctcggccagtacccagtaaccctcgacggcttgaggtcacttggcagacccccagcacgtggcccgaccctgagagttttcctctgaagttctttttgcgatataggccgctaattctggatcagtggcagcacgtggaactgtctgatggaacagcccacacaatcactgacgcgtatgccggcaaggagtacatcattcaagtggctgctaaagataacgagattggaacctggagcgactggagcgtggcagcacacgctactccctggaccgaagaacctcgacatctaaccaccgaggcccaggctgcagagaccacaacaagcacaacctcctcactagctcccccacctacaaccaaaatctgcgaccctggggaattgggaagcggcggaggtccttctgccccatttttagtgtccgtgccaatcacacttgcactggcagccgctgccgctactgcttctagcctgttgatatag

SEQ ID NO: 83262 - DNA, 1119 bp, Artificial Sequence
  derived and/or modified sequence
atggccgcccctgtgccctgggcctgctgtgctgtgctggccgctgctgctgctgtggtgtatgcccagaggcacagcccccaggaggccccccacgtgcagtatgagcggctgggcagtgatgtgaccctgccctgtggcacagccaactgggatgctgctgtgacctggagggtgaatggaacagacctggccccagacctgctgaatggcagccagctggtgctgcacggcctggagctgggccacagcggcctgtatgcctgcttccaccgggacagctggcacctgcggcaccaggtgctgctgcacgtgggcctgcccccccgggagcctgtgctgagctgccgcagcaacacctaccccaagggcttctactgctcctggcacctgcccacccccacctacatccccaacaccttcaacgtgacagtgctgcacggcagcaagatcatggtgtgtgagaaggaccctgccctgaagaaccgctgccacatccgctacatgcacctgttcagcaccatcaagtacaaggtgtccatctctgtgtccaatgccctgggccacaatgccacagccatcacctttgatgagttcaccatcgtgaagccagaccccccagaaaatgtggtggcccggcctgtgcccagcaacccccggcggctggaggtgacctggcagacccccagcacctggccagaccctgagagcttccccctgaagttcttcctgcgctaccggcccctcatcctggaccagtggcagcacgtggagctgagtgatggaacagcccacaccatcacagatgcctatgctgggaaggagtacatcatccaggtggccgccaaggacaatgaaattggcacctggagcgactggagcgtggccgcccacgccaccccctggacagaggagcccaggcacctgaccacagaggcccaggccgctgagaccaccaccagcaccaccagcagcctggcccccccacccaccaccaagatctgtgaccctggagagctgggcagcggcggcggccccagcgcccccttcctggtgtctgtgcccatcaccctggccctggccgctgctgctgccacagccagcagcctgctgatctag

SEQ ID NO: 83263 - DNA, 1119 bp, Artificial Sequence
  derived and/or modified sequence
atggccgcccccgtgccctgggcctgctgcgccgtgctggccgccgccgccgccgtggtctatgcacagcggcacagtccccaggaggcaccgcacgtgcagtatgaaaggctcggctctgatgtaacactcccttgcggcaccgctaactgggatgcggctgtgacctggagggtaaatggtaccgacctggcgcctgacctccttaacggcagccagctggtgctacacggccttgaactcggccattcgggactctatgcatgctttcaccgcgactcttggcatctcagacatcaggtgctgttgcacgtgggtctccccccccgcgagccggtgctgtcttgtaggtcaaacacctaccccaagggattctattgtagttggcatctcccgacccccacttacattcctaacacatttaatgtgactgtgttacatggctccaagataatggtgtgtgagaaggatccggccttgaaaaatcgctgccatattcggtacatgcacctctttagtacgattaaatataaagtaagcatatctgtgtccaatgccctcgggcataatgctaccgctataacctttgacgagttcaccattgtcaagcctgatcctcctgagaacgtggttgctaggccagttccctctaatccccggcgtctggaagtcacttggcagacaccctctacatggcctgatcctgaaagctttccactgaagttttttctgcggtaccgacctctgatcttagaccagtggcagcacgtggaattatcagatgggactgcacacacgataacagatgcctacgccgggaaagaatatatcatccaggtggctgccaaggataatgaaattggtacttggtctgattggtctgtggctgcccatgccactccctggacagaagaaccacggcacctcactactgaagctcaagcggcggagacgactacctcaacaacgagctcactcgcacccccacccacaactaagatttgtgacccaggtgagttaggtagtgggggggggccaagcgctccttttctggtgtcagtgccaattacccttgcattagctgccgctgctgccaccgcttctagcctacttatctag

SEQ ID NO: 83264 - DNA, 1119 bp, Artificial Sequence
  derived and/or modified sequence
atggccgcccccgtgccctgggcctgctgcgccgtgctggccgccgctgcagcagtcgtgtacgcgcagcgccactctccacaagaagctccccacgtgcagtatgaacgcttaggttccgatgtgaccctgccatgtggcaccgccaactgggacgccgcagtgacttggagagtgaacggcactgacctggcgccagacctactcaacggatcccaacttgtacttcacggcctggaacttggtcattctggattatacgcctgctttcatcgcgattcctggcacttacgccatcaggttctgctccatgtaggactccctccccgggagcccgtgctgtcatgccgatctaatacctacccaaaaggcttttactgcagctggcacctgcccacccccacatatattccaaacacattcaatgtgacagtgctccatggaagtaagatcatggtctgcgagaaggacccagccctgaagaatcggtgtcacatccgctatatgcatctgttctctaccatcaagtacaaagtgtcaatatccgtttcaaatgcactgggacataatgccaccgccatcacattcgatgaattcactatcgttaagccagatccaccagagaacgtagtcgcccgccctgtgccctccaaccctaggagactggaggtcacatggcagacaccctcaacatggcccgaccccgaatcctttccgctcaagttttttcttagatacagaccgctgatcctcgaccagtggcagcatgtagagttgtctgacggaactgctcataccattacagatgcctatgcagggaaggagtacattatccaggtggccgcgaaggacaatgaaatcggcacctggagtgactggtccgtggctgcccacgccacaccatggacagaggaaccacgccacctgacgacagaggcacaagcagctgagacaaccacaagcacaacatcctccctggccccacctcccaccacgaagatctgtgatcctggggaactcggcagcggggggggaccaagcgccccctttcttgtcagtgtcccaattacactggccctcgccgcagcagcagcaactgcttcctctctcctgatctag

SEQ ID NO: 83265 - DNA, 1119 bp, Artificial Sequence
  derived and/or modified sequence
atggccgctccagtaccttgggcatgttgcgcagttctggctgcagcagccgcagtggtgtacgctcagcggcactcccctcaggaagccccacacgtgcagtacgagcggctgggatccgatgtcaccctgccgtgcggtaccgccaattgggacgccgcagtgacatggcgcgttaatggaacagacctcgcgcctgacttgttaaatgggtctcagctcgtgctgcatggattagagctaggccattccggcctttacgcctgctttcaccgggacagctggcaccttagacatcaggtgctgttacatgtaggtctccccccaagggaaccggtgctgagctgtcgcagcaacacctatccaaaggggttctattgttcttggcatctgcccaccccaacatatatccccaacacgttcaacgttaccgtcctacatggaagtaagatcatggtctgtgagaaggatccagcactgaagaatcggtgccatatcagatatatgcacctcttctcgactatcaaatacaaggtgagtattagcgtctctaacgctctgggccataatgcaacagccatcactttcgacgagttcaccatagtgaagccagatcccccagagaatgtcgttgcacgcccagtgccgagcaatccaaggcggctagaggtgacctggcagacaccctcaacatggccggacccagagtccttccctcttaaattctttctacgttatcggccactgatcctggaccagtggcagcacgtggaactatccgatgggaccgcccacaccatcactgatgcttatgcgggaaaggagtacattattcaggtggcggcaaaggataacgagatcggtacgtggtctgactggtcggtggccgctcatgccactccttggacggaggaaccaagacatctgaccaccgaggcgcaagctgccgaaactacaacatccaccaccagcagtttggcaccaccgccaactactaagatctgcgaccccggagagttaggctccggcggaggcccaagcgccccatttctggtctcagtcccaatcactttagccctggccgcagctgcggctaccgcgagcagtttattgatttag

SEQ ID NO: 83266 - DNA, 1119 bp, Artificial Sequence
  derived and/or modified sequence
atggcagcccctgtcccttgggcgtgctgcgcagtgttagctgctgctgcggctgtggtttacgcccagcgccactcaccccaggaggcccctcatgtacagtacgagcgactcggaagcgacgtcacactgccctgtggcactgccaattgggatgcagccgtcacatggagggtgaacgggaccgatctggccccagatctcctgaatggatcccagttagtcctgcatggcctcgaattagggcactccgggctttacgcctgcttccatcgcgactcctggcatctaaggcaccaagtcctgctgcacgtagggctgcccccacgggaacctgtgctttcctgcaggtctaacacataccctaaaggcttctactgttcctggcacttgcccacgccaacctatatccccaacacctttaacgtcaccgtcctgcacggcagcaaaatcatggtttgcgaaaaagatcccgctctcaagaacaggtgtcacatcagatatatgcatctgttttccactataaagtacaaggtgagtatctctgtatccaacgccttggggcataatgccacagccatcacttttgacgaatttactatcgttaagccagacccacccgaaaatgtggtggcaagacccgtaccttctaaccctaggagactggaggtgacctggcagacccccagcacttggcccgacccagagtctttccccttaaagttcttccttcgctacaggccactgattctcgaccagtggcagcatgtagaactttctgacgggactgctcacaccataacagatgcgtatgctggcaaggagtacatcatccaagtagctgcaaaagacaacgagatcggcacctggagtgactggagcgtggcagcccacgccaccccctggaccgaggaacccagacatctcacgacggaggcacaggcggctgaaaccaccacctcgactacctcctctctggcaccaccaccaacgactaagatatgcgacccaggagaattagggtctggcggaggcccatcagccccattcctagtatcagtccctatcacactggccttagccgcagctgccgctacagcctcttcactgttgatctag

SEQ ID NO: 83267 - DNA, 1910 bp, Artificial Sequence
  derived and/or modified sequence
gcggcggcagcggaggcggcggctccagccggcgcggcgcgaggctcggcggtgggatccggcgggcggtgctagctccgcgctccctgcctcgctcgctgccgggggcggtcggaaggcgcggcgcgaagcccgggtggcccgagggcgcgatggctgctcctgtcccgtgggcctgctgtgctgtgcttgccgccgccgccgcagttgtctacgcccagagacacagtccacaggaggcaccccatgtgcagtacgagcgcctgggctctgacgtgacactgccatgtgggacagcaaactgggatgctgcggtgacgtggcgggtaaatgggacagacctggcccctgacctgctcaacggctctcagctggtgctccatggcctggaactgggccacagtggcctctacgcctgcttccaccgtgactcctggcacctgcgccaccaagtcctgctgcatgtgggcttgccgccgcgggagcctgtgctcagctgccgctccaacacttaccccaagggcttctactgcagctggcatctgcccacccccacctacattcccaacaccttcaatgtgactgtgctgcatggctccaaaattatggtctgtgagaaggacccagccctcaagaaccgctgccacattcgctacatgcacctgttctccaccatcaagtacaaggtctccataagtgtcagcaatgccctgggccacaatgccacagctatcacctttgacgagttcaccattgtgaagcctgatcctccagaaaatgtggtagcccggccagtgcccagcaaccctcgccggctggaggtgacgtggcagaccccctcgacctggcctgaccctgagtcttttcctctcaagttctttctgcgctaccgacccctcatcctggaccagtggcagcatgtggagctgtccgacggcacagcacacaccatcacagatgcctacgccgggaaggagtacattatccaggtggcagccaaggacaatgagattgggacatggagtgactggagcgtagccgcccacgctacgccctggactgaggaaccgcgacacctcaccacggaggcccaggctgcggagaccacgaccagcaccaccagctccctggcacccccacctaccacgaagatctgtgaccctggggagctgggcagcggcgggggaccctcggcacccttcttggtcagcgtccccatcactctggccctggctgccgctgccgccactgccagcagtctcttgatctgagcccggcaccccatgaggacatgcagagcacctgcagaggagcaggaggccggagctgagcctgcagaccccggtttctattttgcacacgggcaggaggaccttttgcattctcttcagacacaatttgtggagaccccggcgggcccgggcctgccgccccccagccctgccgcaccaagctggccctccttcctccctcaggggaggtgggccatgcagctaacccacccaccaaagaccccctcaccctggccccttgggctggaccctccaatgccagcgactcccaggagcccttgggggacgtgaggggagcctctcacatccgatttctcctcctgccccagcctcctgtctatcccagggtctctgttgccaccatcagattataagctcctgatgctgggggggcccagccatccccctccccccagcacccacaattttcagtcccctcccctctgccctgttttgtatacccctcccctgaccctgctcctatcccacagtatttaatgccctgtcagtcccttctagtctgactcaatggtaacttgctgtatttgaattttttatagatgtatatacagggtggggggagtgggcggttctcattaaacgtcaccatttcatgag

SEQ ID NO: 83268 - DNA, 2052 bp, Artificial Sequence
  derived and/or modified sequence
ctgaagagccggtgcagagcgggcggcggcggcggcggcagcggaggcggcggctccagccggcgcggcgcgaggctcggcggtgggatccggcgggcggtgctagctccgcgctccctgcctcgctcgctgccgggggcggtcggaaggcgcggcgcgaagcccgggtggcccgagggcgcgactctagccttgtcacctcatcttgcccccttggttttggaagtcctgaagagttggtctggaggaggaggaggacattgatgtgcttggtgtgtggccagtggtgaagagatggctgctcctgtcccgtgggcctgctgtgctgtgcttgccgccgccgccgcagttgtctacgcccagagacacagtccacaggaggcaccccatgtgcagtacgagcgcctgggctctgacgtgacactgccatgtgggacagcaaactgggatgctgcggtgacgtggcgggtaaatgggacagacctggcccctgacctgctcaacggctctcagctggtgctccatggcctggaactgggccacagtggcctctacgcctgcttccaccgtgactcctggcacctgcgccaccaagtcctgctgcatgtgggcttgccgccgcgggagcctgtgctcagctgccgctccaacacttaccccaagggcttctactgcagctggcatctgcccacccccacctacattcccaacaccttcaatgtgactgtgctgcatggctccaaaattatggtctgtgagaaggacccagccctcaagaaccgctgccacattcgctacatgcacctgttctccaccatcaagtacaaggtctccataagtgtcagcaatgccctgggccacaatgccacagctatcacctttgacgagttcaccattgtgaagcctgatcctccagaaaatgtggtagcccggccagtgcccagcaaccctcgccggctggaggtgacgtggcagaccccctcgacctggcctgaccctgagtcttttcctctcaagttctttctgcgctaccgacccctcatcctggaccagtggcagcatgtggagctgtccgacggcacagcacacaccatcacagatgcctacgccgggaaggagtacattatccaggtggcagccaaggacaatgagattgggacatggagtgactggagcgtagccgcccacgctacgccctggactgaggaaccgcgacacctcaccacggaggcccaggctgcggagaccacgaccagcaccaccagctccctggcacccccacctaccacgaagatctgtgaccctggggagctgggcagcggcgggggaccctcggcacccttcttggtcagcgtccccatcactctggccctggctgccgctgccgccactgccagcagtctcttgatctgagcccggcaccccatgaggacatgcagagcacctgcagaggagcaggaggccggagctgagcctgcagaccccggtttctattttgcacacgggcaggaggaccttttgcattctcttcagacacaatttgtggagaccccggcgggcccgggcctgccgccccccagccctgccgcaccaagctggccctccttcctccctcaggggaggtgggccatgcagctaacccacccaccaaagaccccctcaccctggccccttgggctggaccctccaatgccagcgactcccaggagcccttgggggacgtgaggggagcctctcacatccgatttctcctcctgccccagcctcctgtctatcccagggtctctgttgccaccatcagattataagctcctgatgctgggggggcccagccatccccctccccccagcacccacaattttcagtcccctcccctctgccctgttttgtatacccctcccctgaccctgctcctatcccacagtatttaatgccctgtcagtcccttctagtctgactcaatggtaacttgctgtatttgaattttttatagatgtatatacagggtggggggagtgggcggttctcattaaacgtcaccatttcatgag

SEQ ID NO: 83269 - DNA, 1119 bp, Artificial Sequence
  derived and/or modified sequence
atggccgcccccgtgccctgggcctgctgcgccgtgctggccgccgccgccgccgtggtgtacgcccagagacacagcccccaggaggccccccacgtgcagtacgagagactgggcagcgacgtgaccctgccctgcggcaccgccaactgggacgccgccgtgacctggagagtgaacggcaccgacctggcccccgacctgctgaacggcagccagctggtgctgcacggcctggagctgggccacagcggcctgtacgcctgcttccacagagacagctggcacctgagacaccaggtgctgctgcacgtgggcctgccccccagagagcccgtgctgagctgcagaagcaacacctaccccaagggcttctactgcagctggcacctgcccacccccacctacatccccaacaccttcaacgtgaccgtgctgcacggcagcaagatcatggtgtgcgagaaggaccccgccctgaagaacagatgccacatcagatacatgcacctgttcagcaccatcaagtacaaggtgagcatcagcgtgagcaacgccctgggccacaacgccaccgccatcaccttcgacgagttcaccatcgtgaagcccgacccccccgagaacgtggtggccagacccgtgcccagcaaccccagaagactggaggtgacctggcagacccccagcacctggcccgaccccgagagcttccccctgaagttcttcctgagatacagacccctgatcctggaccagtggcagcacgtggagctgagcgacggcaccgcccacaccatcaccgacgcctacgccggcaaggagtacatcatccaggtggccgccaaggacaacgagatcggcacctggagcgactggagcgtggccgcccacgccaccccctggaccgaggagcccagacacctgaccaccgaggcccaggccgccgagaccaccaccagcaccaccagcagcctggcccccccccccaccaccaagatctgcgaccccggcgagctgggcagcggcggcggccccagcgcccccttcctggtgagcgtgcccatcaccctggccctggccgccgccgccgccaccgccagcagcctgctgatctag

SEQ ID NO: 83270 - protein, 221 aa, Artificial Sequence
  derived and/or modified sequence
MPVMRLFPCFLQLLAGLALPAVPPQQWALSAGNGSSEVEVVPFQEVWGRSYCRALERLVDVVSEYPSEVEHMFSPSCVSLLRCTGCCGDENLHCVPVETANVTMQLLKIRSGDRPSYVELTFSQHVRCECRHSPGRQSPDMPGDFRADAPSFLPPRRSLPMLFRMEWGCALTGSQSAVWPSSPVPEEIPRMHPGRNGKKQQRKPLREKMKPERCGDAVPRR

SEQ ID NO: 83271 - protein, 149 aa, Artificial Sequence
  derived and/or modified sequence
MPVMRLFPCFLQLLAGLALPAVPPQQWALSAGNGSSEVEVVPFQEVWGRSYCRALERLVDVVSEYPSEVEHMFSPSCVSLLRCTGCCGDENLHCVPVETANVTMQLLKIRSGDRPSYVELTFSQHVRCECRPLREKMKPERCGDAVPRR

SEQ ID NO: 83272 - DNA, 666 bp, Artificial Sequence
  derived and/or modified sequence
atgcccgtgatgagactgttcccctgcttcctgcagctgctggccggcctggccctgcccgccgtgcccccccagcagtgggccctgagcgccggcaacggcagcagcgaggtggaggtggtgcccttccaggaggtgtggggcagaagctactgcagagccctggagagactggtggacgtggtgagcgagtaccccagcgaggtggagcacatgttcagccccagctgcgtgagcctgctgagatgcaccggctgctgcggcgacgagaacctgcactgcgtgcccgtggagaccgccaacgtgaccatgcagctgctgaagatcagaagcggcgacagacccagctacgtggagctgaccttcagccagcacgtgagatgcgagtgcagacacagccccggcagacagagccccgacatgcccggcgacttcagagccgacgcccccagcttcctgccccccagaagaagcctgcccatgctgttcagaatggagtggggctgcgccctgaccggcagccagagcgccgtgtggcccagcagccccgtgcccgaggagatccccagaatgcaccccggcagaaacggcaagaagcagcagagaaagcccctgagagagaagatgaagcccgagagatgcggcgacgccgtgcccagaagatag

SEQ ID NO: 83273 - DNA, 450 bp, Artificial Sequence
  derived and/or modified sequence
atgcccgtgatgagactgttcccctgcttcctgcagctgctggccggcctggccctgcccgccgtgcccccccagcagtgggccctgagcgccggcaacggcagcagcgaggtggaggtggtgcccttccaggaggtgtggggcagaagctactgcagagccctggagagactggtggacgtggtgagcgagtaccccagcgaggtggagcacatgttcagccccagctgcgtgagcctgctgagatgcaccggctgctgcggcgacgagaacctgcactgcgtgcccgtggagaccgccaacgtgaccatgcagctgctgaagatcagaagcggcgacagacccagctacgtggagctgaccttcagccagcacgtgagatgcgagtgcagacccctgagagagaagatgaagcccgagagatgcggcgacgccgtgcccagaagatag

SEQ ID NO: 83274 - DNA, 666 bp, Artificial Sequence
  derived and/or modified sequence
atgccagtgatgaggttgtttccttgtttcctgcagctcttggcagggcttgccctgcctgccgtccctccacaacaatgggcgttaagtgccggcaacggaagctcagaggtggaggtagtgcctttccaagaggtgtggggcagaagctactgccgggccctagaacggctcgtggatgtagtctccgaatatcccagtgaagtcgagcatatgtttagtcccagttgcgtttctctcctgaggtgcaccggctgttgtggagacgaaaatcttcactgcgtcccagtggaaactgctaatgttacaatgcaactgctcaagattcgttccggggatagaccgagttacgttgaactaaccttttcccagcacgtgagatgcgaatgccggcactctcccggacgacagagtccggatatgcccggggattttcgggccgatgccccatcatttctgccacctcgccgttcactacctatgctcttccgcatggaatggggatgtgccctgaccgggagccagagtgcagtgtggccctctagcccagtcccagaggagatcccgcgcatgcaccccggacgaaacggaaaaaagcagcaacggaaacctcttcgcgaaaagatgaagcctgagagatgtggagatgctgtacctagaaggtag

SEQ ID NO: 83275 - DNA, 450 bp, Artificial Sequence
  derived and/or modified sequence
atgcctgtaatgcgcctgtttccctgctttttacagctactggccggcttggctctgccagctgtgccccctcagcagtgggccctatctgcaggtaatggcagtagtgaagtggaagttgtaccctttcaggaagtgtggggtcgctcttattgtcgagcattggagcgcctggtggacgtcgtaagtgagtacccatctgaagtcgagcacatgttctctccatcatgcgtgagcctgctaagatgcaccggttgctgcggcgatgagaatctgcactgcgtcccggtggaaacagcgaacgtgacgatgcagctgctgaaaatacgtagtggcgaccgcccatcctacgtggaactaaccttctcacagcacgtgcgttgtgagtgtaggcccctgagagaaaagatgaagccagagcggtgtggagacgctgtgcctcgtagatag

SEQ ID NO: 83276 - DNA, 666 bp, Artificial Sequence
  derived and/or modified sequence
atgcctgtgatgaggctcttcccctgcttcctgcagctgctggccggcctggccctgcctgctgtgcccccccagcagtgggccctgtctgctggaaatggcagcagcgaggtggaggtggtgcccttccaggaggtgtggggccgcagctactgccgggccctggagcggctggtggatgtggtgtctgagtaccccagcgaggtggagcacatgttcagccccagctgtgtgtccctgctgcgctgcaccggctgctgcggagatgagaacctgcactgtgtgcctgtggagacagccaacgtgaccatgcagctgctgaagatccgcagcggggaccggcccagctatgtggagctgaccttcagccagcacgtgcgctgtgaatgtcgccacagccctggccggcagagcccagacatgcctggggacttccgggcagatgcccccagcttcctgcccccccggcgcagcctgcccatgctgttcaggatggagtggggctgtgccctgaccggcagccagagcgctgtgtggcccagcagccctgtgcctgaggagatccccaggatgcaccctggaagaaatggcaagaagcagcagaggaagcccctgcgggagaagatgaagccagagcgctgtggagatgctgtgcccaggaggtag

SEQ ID NO: 83277 - DNA, 450 bp, Artificial Sequence
  derived and/or modified sequence
atgcctgtgatgaggctcttcccctgcttcctgcagctgctggccggcctggccctgcctgctgtgcccccccagcagtgggccctgtctgctggaaatggcagcagcgaggtggaggtggtgcccttccaggaggtgtggggccgcagctactgccgggccctggagcggctggtggatgtggtgtctgagtaccccagcgaggtggagcacatgttcagccccagctgtgtgtccctgctgcgctgcaccggctgctgcggagatgagaacctgcactgtgtgcctgtggagacagccaacgtgaccatgcagctgctgaagatccgcagcggggaccggcccagctatgtggagctgaccttcagccagcacgtgcgctgtgaatgtcggcccctgcgggagaagatgaagccagagcgctgtggagatgctgtgcccaggaggtag

SEQ ID NO: 83278 - DNA, 666 bp, Artificial Sequence
  derived and/or modified sequence
atgcccgtgatgcggctgttcccctgcttcctgcagctgctggccggactggctttaccggccgtccccccccagcagtgggctctcagcgcaggaaacggcagctccgaagtggaagtagttccttttcaggaggtgtggggcaggtcttactgtcgagccctggaaagactcgtggatgttgtgtctgagtacccgtcagaggtggagcacatgttttcccctagttgcgtatccctgcttcgatgcacaggctgctgtggcgatgagaatctgcactgtgtgcccgtggagactgctaacgtgacaatgcaactattgaaaatacgaagcggtgatagaccaagctatgtcgagcttactttctcccagcacgtccggtgcgagtgcaggcattctcctggccggcagagtccagatatgcccggggacttcagagctgatgctccctcgttcctaccgccccgtcgatctctgcccatgctttttagaatggagtgggggtgtgctctgaccggcagccaaagtgcagtgtggccgtcctcccctgtcccagaggagattccccggatgcaccccgggagaaacggaaagaagcagcagagaaaaccattacgggagaagatgaaacctgaacggtgcggagatgccgtccctagacgatag

SEQ ID NO: 83279 - DNA, 450 bp, Artificial Sequence
  derived and/or modified sequence
atgcccgtgatgcggctgttcccctgcttcctgcagctgctggccgggctggctctacctgccgtgccgccccagcaatgggcgctctccgccgggaacggttcttccgaagtggaggtggtgcccttccaggaggtttggggtcgcagttactgtcgggcactcgagcgacttgtggatgttgtatccgaatacccctccgaggtcgaacacatgttctccccgtcatgtgtttctctgctgcggtgtacggggtgctgtggagacgaaaatctccattgtgtgccggttgaaaccgccaatgtaaccatgcagctgctaaaaataagaagcggggacaggccctcatatgtcgagcttacttttagccagcatgtgaggtgtgagtgcagacccttacgggagaaaatgaagccagagaggtgcggggacgcagttcctagaagatag

SEQ ID NO: 83280 - DNA, 666 bp, Artificial Sequence
  derived and/or modified sequence
atgcccgtgatgcgactgttcccgtgcttcttgcagctgctagcaggcctcgcgctccctgcggtgcccccacagcagtgggccctgtcggccggaaatggctcctctgaagtggaggtcgttccattccaggaagtgtgggggagatcttattgccgcgctctagagcgtctcgtggatgttgtatccgaatacccaagcgaggttgagcacatgttcagcccatcctgtgtgagcttactgaggtgcacagggtgttgtggcgacgagaacctccactgcgtccccgttgaaaccgcaaacgttaccatgcaactgctgaaaattagatcaggcgaccgccctagttacgtggaactgacgttcagtcagcacgtcagatgcgagtgcagacatagcccagggagacagtccccagatatgcctggcgattttcgagctgatgccccttccttcctcccccctcgtcgctccttgcctatgctgtttcgtatggagtggggatgtgccctcactggcagtcaatctgcagtttggcccagttcacccgtgccagaagaaatccctcgcatgcaccccggtagaaacggcaaaaaacagcagcggaagccactgcgggagaaaatgaaaccagaacgatgcggagatgcagtcccaagaagatag

SEQ ID NO: 83281 - DNA, 450 bp, Artificial Sequence
  derived and/or modified sequence
atgccagtcatgagactgtttccctgctttctccagctgttggctggactcgccttgcctgccgttcccccacagcagtgggctctctctgccggaaatggttcgtccgaggtcgaagtggttccctttcaggaagtgtgggggagaagctactgtagagctctcgaaaggctggtggacgtggtctcagagtaccccagcgaagtcgagcacatgttttcccccagctgtgtgtccctcctcagatgtacaggatgttgcggggacgaaaacctgcattgtgtgccagtggaaaccgccaatgtgacgatgcagttgctgaaaattagaagtggcgaccgaccaagctatgttgaactgacttttagccagcatgtcagatgtgagtgtcggccattgagggagaaaatgaagcccgaaagatgtggcgacgctgttccaagaagatag

SEQ ID NO: 83282 - DNA, 666 bp, Artificial Sequence
  derived and/or modified sequence
atgccggtcatgaggctgttcccttgcttcctgcagctcctggccgggctggcgctgcctgctgtgcccccccagcagtgggccttgtctgctgggaacggctcgtcagaggtggaagtggtacccttccaggaagtgtggggccgcagctactgccgggcgctggagaggctggtggacgtcgtgtccgagtaccccagcgaggtggagcacatgttcagcccatcctgtgtctccctgctgcgctgcaccggctgctgcggcgatgagaatctgcactgtgtgccggtggagacggccaatgtcaccatgcagctcctaaagatccgttctggggaccggccctcctacgtggagctgacgttctctcagcacgttcgctgcgaatgccgccacagccctgggaggcagagcccagacatgcctggtgacttcagggctgatgctccctccttcctcccaccccgtcgctcactccccatgttgttccggatggagtggggctgtgccctgacaggcagccagtccgctgtctggccatcatctcctgtccctgaggaaattcccagaatgcaccctggaaggaacggaaaaaagcagcaaagaaagcctctgcgggagaagatgaagccggaaaggtgcggcgatgctgttccccggaggtaa

SEQ ID NO: 83283 - DNA, 1699 bp, Artificial Sequence
  derived and/or modified sequence
aaacccaggcgcggaccggctgcagtctcagaagggagctgctgtctgcggaggaaactgcatcgacggacggccgcccagctacgggaggacctggagtggcactgggcgcccgacggaccatccccgggacccgcctgcccctcggcgccccgccccgccgggccgctccccgtcgggttccccagccacagccttacctacgggctcctgactccgcaaggcttccagaagatgctcgaaccaccggccggggcctcggggcagcagtgagggaggcgtccagccccccactcagctcttctcctcctgtgccaggggctccccgggggatgagcatggtggttttccctcggagccccctggctcgggacgtctgagaagatgccggtcatgaggctgttcccttgcttcctgcagctcctggccgggctggcgctgcctgctgtgcccccccagcagtgggccttgtctgctgggaacggctcgtcagaggtggaagtggtacccttccaggaagtgtggggccgcagctactgccgggcgctggagaggctggtggacgtcgtgtccgagtaccccagcgaggtggagcacatgttcagcccatcctgtgtctccctgctgcgctgcaccggctgctgcggcgatgagaatctgcactgtgtgccggtggagacggccaatgtcaccatgcagctcctaaagatccgttctggggaccggccctcctacgtggagctgacgttctctcagcacgttcgctgcgaatgccggcctctgcgggagaagatgaagccggaaaggtgcggcgatgctgttccccggaggtaacccaccccttggaggagagagaccccgcacccggctcgtgtatttattaccgtcacactcttcagtgactcctgctggtacctgccctctatttattagccaactgtttccctgctgaatgcctcgctcccttcaagacgaggggcagggaaggacaggaccctcaggaattcagtgccttcaacaacgtgagagaaagagagaagccagccacagacccctgggagcttccgctttgaaagaagcaagacacgtggcctcgtgaggggcaagctaggccccagaggccctggaggtctccaggggcctgcagaaggaaagaagggggccctgctacctgttcttgggcctcaggctctgcacagacaagcagcccttgctttcggagctcctgtccaaagtagggatgcggatcctgctggggccgccacggcctggctggtgggaaggccggcagcgggcggaggggatccagccacttccccctcttcttctgaagatcagaacattcagctctggagaacagtggttgcctgggggcttttgccactccttgtcccccgtgatctcccctcacactttgccatttgcttgtactgggacattgttctttccggccaaggtgccaccaccctgccccccctaagagacacatacagagtgggccccgggctggagaaagagctgcctggatgagaaacagctcagccagtggggatgaggtcaccaggggaggagcctgtgcgtcccagctgaaggcagtggcaggggagcaggttccccaagggccctggcacccccacaagctgtccctgcagggccatctgactgccaagccagattctcttgaataaagtattctagt

SEQ ID NO: 83284 - protein, 410 aa, Artificial Sequence
  derived and/or modified sequence
MPTTIEREFEELDTQRRWQPLYLEIRNESHDYPHRVAKFPENRNRNRYRDVSPYDHSRVKLQNAENDYINASLVDIEEAQRSYILTQGPLPNTCCHFWLMVWQQKTKAVVMLNRIVEKESVKCAQYWPTDDQEMLFKETGFSVKLLSEDVKSYYTVHLLQLENINYIENLWITLYLKLLMLDVKRSLKSGETRTISHFHYTTWPDFGVPESPASFLNFLFKVRESGSLNPDHGPAVIHCSAGIGRSGTFSLVDTCLVLMEKGDDINIKQVLLNMRKYRMGLIQTPDQLRFSYMAIIEGAKCIKGDSSIQKRWKELSKEDLSPAFDHSPNKIMTEKYNGNRIGLEEEKLTGDRCTGLSSKMQDTMEENSESALRKRIREDRKATTAQKVQQMKQRLNENERKRKRPRLTDT

SEQ ID NO: 83285 - DNA, 1233 bp, Artificial Sequence
  derived and/or modified sequence
atgccaacaaccatcgaaagagagttcgaggagcttgatacacagaggagatggcagcccctatatctggagatcagaaacgagtcccacgactatccccaccgcgtcgccaaatttcccgaaaatagaaatagaaaccgctaccgggatgtctctccttacgaccattctagagttaaactgcagaacgccgaaaatgactacataaatgcgtcattggtagatatcgaagaggcacagagaagctatatcttgactcaaggccccctccctaatacttgctgtcatttctggttgatggtctggcagcagaaaacaaaagcagtcgtgatgctgaaccgtatcgtcgagaaagaaagtgtaaaatgtgctcaatactggcctacagacgatcaggaaatgctgtttaaagaaacaggcttctccgtcaaactcctctcagaggacgtgaagagctattatacagttcacttgctccaacttgagaacataaactacatcgaaaatctatggatcactctgtacctgaagctcttgatgctggacgtaaaacgctctttaaagagcggcgaaacaaggaccatctctcattttcactatacgacctggccggacttcggagtgcctgagagcccagctagcttcctgaacttccttttcaaggtgcgtgaatccgggtctctaaaccctgaccacgggcccgccgtgattcattgttcagcaggcataggtagatcgggcacattctctcttgttgacacctgcttggtgctgatggagaaaggcgacgacatcaacattaaacaagtattgctgaacatgcgcaagtaccggatgggcttaatccagacccctgatcagttgcggtttagctacatggccattatcgagggtgccaaatgtattaagggcgatagcagtatccagaaaaggtggaaggagctaagcaaagaagaccttagccctgccttcgatcactcccccaacaagatcatgactgaaaaatataacggtaacaggataggcctggaggaagaaaagttgacgggggatcgatgtacgggcctgtcgtccaaaatgcaggacaccatggaagaaaattccgagtctgctctcaggaagagaatccgtgaggaccgaaaggctaccaccgctcagaaagtacaacagatgaagcaacgccttaatgagaatgagaggaaacgaaaacgccctcgactcactgacacgtag

SEQ ID NO: 83286 - DNA, 1233 bp, Artificial Sequence
  derived and/or modified sequence
atgcccaccaccatcgagcgggagtttgaggagctggacacccagaggcgctggcagcccctgtacctggagatcagaaatgaaagccatgactacccccaccgggtggccaagttcccagaaaatagaaacagaaaccgctacagagatgtgagcccctatgaccacagccgggtgaagctgcagaatgcagaaaatgactacatcaatgccagcctggtggacatcgaggaggcccagaggagctacatcctgacccagggccccctgcccaacacctgctgccacttctggctgatggtgtggcagcagaagaccaaggctgtggtgatgctgaacagaattgtggagaaggagagcgtgaagtgtgcccagtactggcccacagatgaccaggagatgctgttcaaggagaccggcttctctgtgaagctgctgtctgaagatgtgaagagctactacacagtgcacctgctgcagctggagaacatcaactacatcgagaacctgtggatcaccctgtacctgaagctgctgatgctggatgtgaagaggagcctgaagtctggagagaccaggaccatcagccacttccactacaccacctggccagactttggagtgcctgagagccctgccagcttcctgaacttcctgttcaaggtgcgggagagcggcagcctgaacccagaccacggccctgctgtgatccactgcagcgctggcatcggccgcagcggcaccttcagcctggtggacacctgcctggtgctgatggagaagggagatgacatcaacatcaagcaggtgctgctgaacatgaggaagtacaggatgggcctcatccagaccccagaccagctgcgcttctcctacatggccatcatcgagggcgccaagtgcatcaagggggacagcagcatccagaagcgctggaaggagctgagcaaggaggacctgagccctgcctttgaccacagccccaacaagatcatgacagagaagtacaatggaaacagaattggcctggaggaggagaagctgactggagaccgctgcaccggcctgagcagcaagatgcaggacaccatggaggagaacagcgagagcgccctgaggaagaggatccgggaggacaggaaggccaccacagcccagaaggtgcagcagatgaagcagaggctgaatgaaaatgaaaggaagaggaagaggccccggctgacagacacctag

SEQ ID NO: 83287 - DNA, 1233 bp, Artificial Sequence
  derived and/or modified sequence
atgcccaccaccatcgagcgggagttcgaggagctggacacccagcgaaggtggcagcccctgtacttggagattaggaatgagtcgcacgattacccccaccgtgtggctaagttcccagagaatagaaataggaataggtaccgagacgtgtctccatatgaccattcgagagtgaagcttcagaatgcagaaaatgactacattaacgccagcctcgtcgatatagaggaagcccagagaagttacatcttaacccaggggccattgcccaatacctgctgccacttctggctgatggtgtggcaacagaagacaaaggcggttgtgatgcttaacaggatcgtggaaaaggagtctgtgaagtgcgcgcagtattggccaaccgatgaccaggagatgctgtttaaagaaaccggtttcagtgtgaagcttctgtcagaggacgttaagtcttactacaccgtgcaccttctgcaactggaaaatatcaattacatcgaaaacctgtggatcactctctacttgaagttgctgatgctcgacgtcaaacgcagcctcaagtctggagaaactcggaccatttcacatttccactatacaacctggcctgattttggggtgcccgagagtcccgcctcctttctgaatttcttgtttaaagtgcgggagagcggatctctaaatccggaccacgggccggctgttattcattgttccgccggtatcggccgcagtgggaccttcagcctagtggatacctgccttgtgttaatggagaaaggtgacgatatcaacatcaaacaagtccttttaaatatgcggaagtatcggatgggattaatacagacaccagaccaattgaggttcagctatatggccattattgaaggggctaagtgcatcaaaggagacagcagcatacagaaacgttggaaagagttgagcaaggaagacctgagcccagcattcgatcactccccaaacaaaattatgaccgaaaaatacaacgggaataggattggtttagaggaggagaagctcacgggtgatagatgtaccggactaagctccaaaatgcaggatactatggaggagaattctgaatcagctctccgcaagcggattcgcgaagatagaaaggccaccactgcacagaaagtgcagcagatgaaacagcgattgaacgagaacgagaggaagaggaaacggccccgcctgaccgacacatag

SEQ ID NO: 83288 - DNA, 1233 bp, Artificial Sequence
  derived and/or modified sequence
atgccaacaaccatcgagcgggaatttgaagagctggatacgcagcgcagatggcagcccctgtacctagaaattcgaaacgaaagtcacgactacccccacagggtggctaaattcccagagaacaggaataggaataggtaccgtgacgtgagtccctatgaccattcgcgcgtgaagctgcagaatgcagagaacgattacataaacgcaagcttggttgatattgaagaggctcagaggagttatattctgacacagggtcctctaccaaacacatgctgccacttctggctgatggtgtggcagcagaaaacaaaggcagtggttatgttgaatcgaatcgtggagaaagaaagcgtcaaatgcgcgcagtactggcccacagacgaccaagagatgctctttaaggaaacaggctttagcgttaagctcctttctgaagacgtgaaaagctattatacagtgcatctgctgcagttggagaacattaactatatcgaaaacctctggatcacactgtatctcaaactcttgatgcttgacgtaaagcggagtttaaagtcgggggagaccagaacgatttcccactttcactacaccacatggcccgactttggggtgccggagtccccagcttcatttctaaacttcctattcaaggttcgagaaagcggctcactaaaccctgaccacgggccagccgtgattcattgcagcgccggtattggccgaagtggcacgtttagtttggtcgacacgtgtctggtgctgatggagaagggggacgatattaacattaagcaagtgctgctaaatatgagaaagtatcgtatgggcctcatccagacgcctgaccagctgagattctcctacatggccatcatcgaaggagctaaatgcattaagggtgatagttctatccagaagcggtggaaggagttgagtaaagaggaccttagcccagccttcgatcattctccaaacaagatcatgaccgagaaatacaacggcaacaggatcgggttggaagaggagaagctgacgggggatagatgtactggtcttagttctaaaatgcaggacaccatggaggagaacagtgagagtgccttgcggaagcggataagggaggacaggaaagctacaacagctcagaaagtgcagcagatgaaacagcgactgaacgaaaacgaacggaagcgaaagcgcccacggttgacagacacatag

SEQ ID NO: 83289 - DNA, 1648 bp, Artificial Sequence
  derived and/or modified sequence
ctccccggatcgtgcggggcctgagcctctccgccggcgcaggctctgctcgcgccagctcgctcccgcagccatgcccaccaccatcgagcgggagttcgaagagttggatactcagcgtcgctggcagccgctgtacttggaaattcgaaatgagtcccatgactatcctcatagagtggccaagtttccagaaaacagaaatcgaaacagatacagagatgtaagcccatatgatcacagtcgtgttaaactgcaaaatgctgagaatgattatattaatgccagtttagttgacatagaagaggcacaaaggagttacatcttaacacagggtccacttcctaacacatgctgccatttctggcttatggtttggcagcagaagaccaaagcagttgtcatgctgaaccgcattgtggagaaagaatcggttaaatgtgcacagtactggccaacagatgaccaagagatgctgtttaaagaaacaggattcagtgtgaagctcttgtcagaagatgtgaagtcgtattatacagtacatctactacaattagaaaatatcaattatattgagaacttgtggatcacactgtatttgaaattattaatgctggatgttaaaaggtcactaaaaagtggtgaaaccagaacaatatctcactttcattatactacctggccagattttggagtccctgaatcaccagcttcatttctcaatttcttgtttaaagtgagagaatctggctccttgaaccctgaccatgggcctgcggtgatccactgtagtgcaggcattgggcgctctggcaccttctctctggtagacacttgtcttgttttgatggaaaaaggagatgatattaacataaaacaagtgttactgaacatgagaaaataccgaatgggtcttattcagaccccagatcaactgagattctcatacatggctataatagaaggagcaaaatgtataaagggagattctagtatacagaaacgatggaaagaactttctaaggaagacttatctcctgcctttgatcattcaccaaacaaaataatgactgaaaaatacaatgggaacagaataggtctagaagaagaaaaactgacaggtgaccgatgtacaggactttcctctaaaatgcaagatacaatggaggagaacagtgagagtgctctacggaaacgtattcgagaggacagaaaggccaccacagctcagaaggtgcagcagatgaaacagaggctaaatgagaatgaacgaaaaagaaaaaggccaagattgacagacacctaatattcatgacttgagaatattctgcagctataaattttgaaccattgatgtgcaaagcaagacctgaagcccactccggaaactaaagtgaggctcgctaaccctctagattgcctcacagttgtttgtttacaaagtaaactttacatccaggggatgaagagcacccaccagcagaagactttgcagaacctttaattggatgtgttaagtgtttttaatgagtgtatgaaatgtagaaagatgtacaagaaataaattaggggagattactttgtattgtactgccattcctactgtatttttatactttttggcagcattaaatatttttgttaaata

SEQ ID NO: 83290 - DNA, 1233 bp, Artificial Sequence
  derived and/or modified sequence
atgcccaccaccatcgagagagagttcgaggagctggacacccagagaagatggcagcccctgtacctggagatcagaaacgagagccacgactacccccacagagtggccaagttccccgagaacagaaacagaaacagatacagagacgtgagcccctacgaccacagcagagtgaagctgcagaacgccgagaacgactacatcaacgccagcctggtggacatcgaggaggcccagagaagctacatcctgacccagggccccctgcccaacacctgctgccacttctggctgatggtgtggcagcagaagaccaaggccgtggtgatgctgaacagaatcgtggagaaggagagcgtgaagtgcgcccagtactggcccaccgacgaccaggagatgctgttcaaggagaccggcttcagcgtgaagctgctgagcgaggacgtgaagagctactacaccgtgcacctgctgcagctggagaacatcaactacatcgagaacctgtggatcaccctgtacctgaagctgctgatgctggacgtgaagagaagcctgaagagcggcgagaccagaaccatcagccacttccactacaccacctggcccgacttcggcgtgcccgagagccccgccagcttcctgaacttcctgttcaaggtgagagagagcggcagcctgaaccccgaccacggccccgccgtgatccactgcagcgccggcatcggcagaagcggcaccttcagcctggtggacacctgcctggtgctgatggagaagggcgacgacatcaacatcaagcaggtgctgctgaacatgagaaagtacagaatgggcctgatccagacccccgaccagctgagattcagctacatggccatcatcgagggcgccaagtgcatcaagggcgacagcagcatccagaagagatggaaggagctgagcaaggaggacctgagccccgccttcgaccacagccccaacaagatcatgaccgagaagtacaacggcaacagaatcggcctggaggaggagaagctgaccggcgacagatgcaccggcctgagcagcaagatgcaggacaccatggaggagaacagcgagagcgccctgagaaagagaatcagagaggacagaaaggccaccaccgcccagaaggtgcagcagatgaagcagagactgaacgagaacgagagaaagagaaagagacccagactgaccgacacctag

SEQ ID NO: 83291 - protein, 545 aa, Artificial Sequence
  derived and/or modified sequence
MQSISKQTLQMDVNKLNITLLRIFRQGVAAALGLLPQQVHINRLIGKKNSIELFVSPINRKTGISDALPSEEVLRSLNINVLHQSLSQFGITEVSPEKNVLQGQHEADKIWSKEGFYAVVIFLSIFVIIVTCLMILYRLKERFQLSLRQDKEKNQEIHLSPITLQPALSEAKTVHSMVQPEQAPKVLNVVVDPQGRGAPEIKATTATSVCPSPFKMKPIGLQERRGSNVSLTLDMSSLGNIEPFVSIPTPREKVAMEYLQSASRILTRSQLRDVVASSHLLQSEFMEIPMNFVDPKEIDIPRHGTKNRYKTILPNPLSRVCLRPKNVTDSLSTYINANYIRGYSGKEKAFIATQGPMINTVDDFWQMVWQEDSPVIVMITKLKEKNEKCVLYWPEKRGIYGKVEVLVISVNECDNYTIRNLVLKQGSHTQHVKHYWYTSWPDHKTPDSAQPLLQLMLDVEEDRLASQGRGPVVVHCSAGIGRTGCFIATSIGCQQLKEEGVVDALSIVCQLRMDRGGMVQTSEQYEFVHHALCLYESRLSAETVQ

SEQ ID NO: 83292 - protein, 412 aa, Artificial Sequence
  derived and/or modified sequence
MILYRLKERFQLSLRQDKEKNQEIHLSPITLQPALSEAKTVHSMVQPEQAPKVLNVVVDPQGRGAPEIKATTATSVCPSPFKMKPIGLQERRGSNVSLTLDMSSLGNIEPFVSIPTPREKVAMEYLQSASRILTRSQLRDVVASSHLLQSEFMEIPMNFVDPKEIDIPRHGTKNRYKTILPNPLSRVCLRPKNVTDSLSTYINANYIRGYSGKEKAFIATQGPMINTVDDFWQMVWQEDSPVIVMITKLKEKNEKCVLYWPEKRGIYGKVEVLVISVNECDNYTIRNLVLKQGSHTQHVKHYWYTSWPDHKTPDSAQPLLQLMLDVEEDRLASQGRGPVVVHCSAGIGRTGCFIATSIGCQQLKEEGVVDALSIVCQLRMDRGGMVQTSEQYEFVHHALCLYESRLSAETVQ

SEQ ID NO: 83293 - protein, 198 aa, Artificial Sequence
  derived and/or modified sequence
MILYRLKERFQLSLRQDKEKNQEIHLSPITLQPALSEAKTVHSMVQPEQAPKVLNVVVDPQGRGAPEIKATTATSVCPSPFKMKPIGLQERRGSNVSLTLDMSSLGNIEPFVSIPTPREKVAMEYLQSASRILTRSQLRDVVASSHLLQSEFMEIPMNFVDPKEIDIPRHGTKNRYKTILPNPLSRVCLRPKNVTDSL

SEQ ID NO: 83294 - DNA, 1638 bp, Artificial Sequence
  derived and/or modified sequence
atgcagagcatcagcaagcagaccctgcagatggacgtgaacaagctgaacatcaccctgctgagaatcttcagacagggcgtggccgccgccctgggcctgctgccccagcaggtgcacatcaacagactgatcggcaagaagaacagcatcgagctgttcgtgagccccatcaacagaaagaccggcatcagcgacgccctgcccagcgaggaggtgctgagaagcctgaacatcaacgtgctgcaccagagcctgagccagttcggcatcaccgaggtgagccccgagaagaacgtgctgcagggccagcacgaggccgacaagatctggagcaaggagggcttctacgccgtggtgatcttcctgagcatcttcgtgatcatcgtgacctgcctgatgatcctgtacagactgaaggagagattccagctgagcctgagacaggacaaggagaagaaccaggagatccacctgagccccatcaccctgcagcccgccctgagcgaggccaagaccgtgcacagcatggtgcagcccgagcaggcccccaaggtgctgaacgtggtggtggacccccagggcagaggcgcccccgagatcaaggccaccaccgccaccagcgtgtgccccagccccttcaagatgaagcccatcggcctgcaggagagaagaggcagcaacgtgagcctgaccctggacatgagcagcctgggcaacatcgagcccttcgtgagcatccccacccccagagagaaggtggccatggagtacctgcagagcgccagcagaatcctgaccagaagccagctgagagacgtggtggccagcagccacctgctgcagagcgagttcatggagatccccatgaacttcgtggaccccaaggagatcgacatccccagacacggcaccaagaacagatacaagaccatcctgcccaaccccctgagcagagtgtgcctgagacccaagaacgtgaccgacagcctgagcacctacatcaacgccaactacatcagaggctacagcggcaaggagaaggccttcatcgccacccagggccccatgatcaacaccgtggacgacttctggcagatggtgtggcaggaggacagccccgtgatcgtgatgatcaccaagctgaaggagaagaacgagaagtgcgtgctgtactggcccgagaagagaggcatctacggcaaggtggaggtgctggtgatcagcgtgaacgagtgcgacaactacaccatcagaaacctggtgctgaagcagggcagccacacccagcacgtgaagcactactggtacaccagctggcccgaccacaagacccccgacagcgcccagcccctgctgcagctgatgctggacgtggaggaggacagactggccagccagggcagaggccccgtggtggtgcactgcagcgccggcatcggcagaaccggctgcttcatcgccaccagcatcggctgccagcagctgaaggaggagggcgtggtggacgccctgagcatcgtgtgccagctgagaatggacagaggcggcatggtgcagaccagcgagcagtacgagttcgtgcaccacgccctgtgcctgtacgagagcagactgagcgccgagaccgtgcagtag

SEQ ID NO: 83295 - DNA, 1638 bp, Artificial Sequence
  derived and/or modified sequence
atgcaatctatctctaaacaaactctgcagatggacgtcaataagcttaacatcactcttctacgcatctttcgccagggtgttgctgccgcactggggctgctgcctcagcaagtgcacattaatcgcttgataggcaaaaaaaactcgatagaacttttcgttagcccaatcaatcgcaagaccggtatttccgacgctctgcctagcgaggaggttctgcgaagcctgaatattaatgtcctccatcagtccctgtctcagtttggcattacagaggtgagccccgaaaagaatgtcttgcaaggacagcacgaggcagacaagatatggagtaaggaaggtttctatgcggttgtgatttttttgtccatattcgtaatcattgtgacttgcctgatgatcctctacaggctgaaggaacgatttcaactgtcactccgtcaggataaagagaaaaaccaagaaatccacctgtcaccaattactctccagccagcattaagtgaagccaagactgttcattctatggtgcagccagaacaggcaccaaaggttctgaatgtggtcgtggatccacaggggaggggcgcccccgagataaaggccacaaccgcgacatccgtctgcccttcccctttcaagatgaagcctataggcctacaggaaaggagaggctctaatgtgtctctcaccctggacatgagctctctcggaaacatcgagcccttcgtgagcatccccacacccagggagaaggtggcgatggagtacctgcagagtgccagtcgaatcctgacacggagtcagctgcgagacgtggttgcaagtagccacctcctgcagtctgagtttatggaaattcctatgaatttcgtggatccaaaggaaatcgacattccacgccatggcacaaagaaccgatataaaaccattctccccaatcctctgtccagggtctgcctgagacctaaaaatgtgaccgatagcctgtctacatacattaatgccaattatattagagggtattcgggcaaggagaaggccttcatcgcgacccagggacctatgattaacacagtggatgacttctggcagatggtttggcaagaggacagtcctgtcattgtgatgatcaccaagctcaaagagaagaacgagaaatgtgtgctatactggcccgaaaaaagggggatatacggcaaagtcgaggtgctggtaattagtgtcaatgaatgcgataattatactatacgcaacctggttttgaagcagggcagtcacactcagcacgtcaaacactattggtacacatcctggccggaccacaagacccccgattcggcgcagcccttgctgcagttgatgttagacgtcgaggaagataggttggccagtcagggccgcggacctgtcgtggttcattgtagcgccggaatcggaaggacaggctgctttatagcaacttcaatcggttgccagcaactgaaggaagagggagtggtggacgccctttccatcgtatgtcagttgcgtatggaccgcggcggcatggtccagacatccgaacaatatgaattcgtacatcacgctttgtgtttatacgaatccagactttccgccgagaccgtgcagtag

SEQ ID NO: 83296 - DNA, 1638 bp, Artificial Sequence
  derived and/or modified sequence
atgcagagcatcagcaagcagaccctgcagatggatgtgaacaagctgaacatcaccctgctgcgcatcttccggcagggcgtggccgccgccctgggcctgctgccccagcaggtgcacatcaaccggctgattggcaagaagaacagcattgagctgtttgtgagccccatcaacaggaagacaggcatcagtgatgccctgcccagcgaggaggtgctgcggagcctgaacatcaacgtgctgcaccagagcctgagccagtttggcatcacagaggtgtccccagagaagaatgtgctgcagggccagcatgaagctgacaagatctggagcaaggagggcttctatgctgtggtgatcttcctgagcatcttcgtcatcatcgtgacctgcctgatgatcctgtaccgcctgaaggagcgcttccagctgagcctgcggcaggacaaggagaagaaccaggagatccacctgagccccatcaccctgcagcctgccctgtctgaggccaagacagtgcacagcatggtgcagcctgagcaggcccccaaggtgctgaatgtggtggtggacccccagggccgcggggcccctgagatcaaggccaccacagccacctctgtgtgccccagccccttcaagatgaagcccatcggcctgcaggagcggcggggcagcaatgtgtccctgaccctggacatgagcagcctgggcaacatcgagccctttgtgtccatccccaccccccgggagaaggtggccatggagtacctgcagagcgccagccgcatcctgaccaggagccagctgagagatgtggtggccagcagccacctgctgcagagcgagttcatggagatccccatgaactttgtggaccccaaggagattgacatccccaggcatggcaccaagaaccgctacaagaccatcctgcccaaccccctgagccgggtgtgcctgcggcccaagaatgtgacagacagcctgagcacctacatcaatgccaactacatccggggctacagcggcaaggagaaggccttcatcgccacccagggccccatgatcaacacagtggatgacttctggcagatggtgtggcaggaggacagccctgtgattgtgatgatcaccaagctgaaggagaagaatgagaagtgtgtgctgtactggccagagaagaggggcatctacggcaaggtggaggtgctggtgatctctgtgaatgaatgtgacaactacaccatccggaacctggtgctgaagcagggcagccacacccagcacgtgaagcactactggtacacctcctggccagaccacaagaccccagacagcgcccagcccctgctgcagctgatgctggatgtggaggaggaccggctggccagccagggccggggccctgtggtggtgcactgcagcgctggcatcggccgcacaggctgcttcatcgccaccagcatcggctgccagcagctgaaggaggagggcgtggtggatgccctgagcatcgtgtgccagctgaggatggaccggggcggcatggtgcagaccagcgagcagtatgaatttgtgcaccacgccctgtgcctgtatgagagccggctgtctgctgagaccgtgcagtag

SEQ ID NO: 83297 - DNA, 1638 bp, Artificial Sequence
  derived and/or modified sequence
atgcagagcatcagcaagcagaccctgcagatggacgtgaacaagctcaatataactctgctccgcatctttcgccaaggcgtagctgcagccctgggcctattgccccagcaggttcacatcaatcggcttatcggaaaaaagaatagcattgaactgtttgtcagcccaatcaatcggaagactgggatctcagatgctttgccgagcgaggaggtgctgcgctccctgaacatcaatgtcctgcatcagtcactaagccagttcgggattactgaggtgagtccagagaaaaatgtgctacagggtcaacacgaggccgacaaaatctggtcgaaggagggattctacgcagtcgtaatctttctctccatcttcgttattatagtgacttgcctcatgatcttgtaccgcctgaaagaaagatttcagcttagcctgcgtcaagacaaggagaaaaatcaggaaatccacctctcaccgatcaccttgcagccagctctgagtgaagccaaaacagtccactcaatggtgcaacccgagcaggcaccaaaagtgctgaacgtcgtagttgacccccaggggcggggcgccccggaaattaaggctacaaccgccacttctgtgtgtccaagtccttttaagatgaaacctattggattacaggaaagacggggaagtaacgtgagcctgacactggacatgtccagcctcggaaatatcgaaccattcgtgtcaatccctacccctcgcgagaaagttgccatggagtacttgcaaagcgccagccgtatactgactagaagtcagcttcgcgatgttgtcgcgtcctcccatctgcttcaaagcgagttcatggagatcccaatgaacttcgtggaccctaaggagatcgacattccaaggcacggcactaagaatcgttataagacaattctgcccaaccccctaagccgggtctgtctgcgcccaaagaacgtcactgacagtctgagcacgtatattaacgcaaattacattcgaggttacagcggaaaagagaaggctttcatcgccacgcaaggtcccatgatcaacactgtagacgatttctggcaaatggtgtggcaggaagactccccagtcattgtcatgatcacgaagctgaaggaaaaaaatgagaagtgtgtgttgtactggccagagaaacggggaatttatggtaaggtcgaggtgctggtgatttctgtaaatgagtgtgataattacactatccggaatttagttctcaagcaaggttcccacacccaacatgtcaagcattactggtatacctcatggccagatcacaaaacccccgacagcgcccagccactgctgcagcttatgttagacgtcgaggaggaccgcttggccagtcagggacgcggccctgtggtggtccactgttccgccggcatcggtcgaacaggctgcttcatagccacctccataggttgtcagcaattgaaagaggagggcgtggtggacgccttgtcgatcgtctgtcagctgaggatggatcgtggagggatggtgcagacctcggaacagtacgaatttgttcaccacgccctgtgcctctacgaatcccgcctgtcagcggagaccgtgcagtag

SEQ ID NO: 83298 - DNA, 2037 bp, Artificial Sequence
  derived and/or modified sequence
aaacagtaccaggcggttacctccaggtgactaaatgaggcttcatctcagcacacaagcttagaaagctttacgattagtcctgcttgctatggtaaggaaataacacaaagaagagtgcaaatggaagtcgacttcatcacaacatgcagtcaatttccaaacagacactgcaaatggatgtaaacaagctgaacataaccttgcttcggatcttccgccaaggagtggctgcagctttaggactcttaccccagcaagtgcacatcaatcgcctcattggaaagaagaacagtattgaactgtttgtgtctcccataaaccgaaaaacaggaatttctgatgctctgccctctgaggaagttcttcgttcacttaatatcaatgttttgcatcaaagtttatcccagtttggaattacagaagtctctcctgagaaaaatgttttacaagggcagcatgaagcggacaaaatctggagcaaagaaggattttatgctgttgtcatttttctcagcatctttgttattatagtaacgtgtttgatgattctttacagattaaaagaaagatttcagctttccttaagacaagacaaagagaaaaaccaggagatccacctatcgcccatcacattacagccagcactgtccgaggcaaagacagtccacagcatggtccaacctgagcaggccccaaaggtactgaatgttgtcgtggaccctcaaggccgaggtgctcctgagatcaaagctaccaccgctacctctgtttgcccttctcctttcaaaatgaagcccataggacttcaagagagaagagggtccaacgtatctcttacattggacatgagtagcttggggaacattgaaccctttgtgtctataccaacaccacgggagaaggtagcaatggagtatctgcagtcagccagccgaattctcacaaggtctcagctgagggacgtcgtggcaagttcacatttactccaaagtgaattcatggaaataccaatgaactttgtggatcccaaagaaattgatattccgcgtcatggaactaaaaatcgctataagaccattttaccaaatcccctcagcagagtgtgtttaagaccaaaaaatgtaaccgattcattgagcacctacattaatgctaattatattaggggctacagtggcaaggagaaagccttcattgccacgcagggccccatgatcaacaccgtggatgatttctggcagatggtttggcaggaagacagccctgtgattgttatgatcacaaaactcaaagaaaaaaatgagaaatgtgtgctatactggccggaaaagagagggatatatggaaaagttgaggttctggttatcagtgtaaatgaatgtgataactacaccattcgaaaccttgtcttaaagcaaggaagccacacccaacatgtgaagcattactggtacacctcatggcctgatcacaagactccagacagtgcccagcccctcctacagctcatgctggatgtagaagaagacagacttgcttcccagggccgagggcctgtggttgtccactgcagtgcaggaataggtagaacagggtgttttattgctacatccattggctgtcaacagctgaaagaagaaggagttgtggatgcactaagcattgtctgccagcttcgtatggatagaggtggaatggtgcaaaccagtgagcagtatgaatttgtgcaccatgctctgtgcctgtatgagagcagactttcagcagagactgtccagtgagtcattgaagacttgtcagaccatcaatctcttggggtgattaatcaaattacccacccaaggcttctagaaggagcttcctgcaatggaaggaaggagaagctctgaagcccatgtatggcatggattgtggaagactgggcaacatatttaagatttccagctccttgtgtatatgaatgcatttgtaagcatcccccaaattattctgaaggttttttgatgatggaggtatgataggtttatcacacag

SEQ ID NO: 83299 - DNA, 1638 bp, Artificial Sequence
  derived and/or modified sequence
atgcagtccatttctaaacagaccttgcagatggatgtcaataaactgaacattaccctgctccgcatcttccgccagggagtagccgcagctctcggcttgctcccacagcaagtgcacataaaccggctcataggcaaaaaaaatagcattgaactgttcgtctcaccaattaaccgcaagacgggaatctcagatgctttgccgagcgaagaagtgttgagaagtttgaatatcaacgtcctgcaccagtctctcagccagtttgggattactgaagtgtcaccagaaaagaacgtgctgcaggggcagcatgaggcagacaaaatttggtccaaggaaggcttttacgctgtcgtgatatttctctccatcttcgtcatcattgtcacttgtctgatgatcctttacaggctcaaggagagatttcagctgtctctgcgccaggataaggagaagaatcaggaaatccacctctccccaatcaccttacagcccgctctctccgaggcgaaaaccgttcacagtatggtgcagcccgagcaagccccaaaggttcttaacgtagtggtcgatccacagggccgtggggctcctgaaatcaaggctaccacagctacgagcgtgtgcccttccccttttaaaatgaaacccattgggctgcaagagcggagggggtcaaacgtcagcctaacgcttgatatgagttcattgggtaacatagagccttttgtgtctatccccacaccaagagagaaagtagccatggaatacctgcagtctgcttcccgcattctcacaagatctcagctgagggacgtggtcgcatcatctcatctcctccaatcggaattcatggagattcccatgaattttgtggatccgaaggagattgacattcctagacacggaacgaagaacaggtacaagacaattcttcctaaccccctcagtcgggtatgcttaagacctaagaacgtgacggatagtctttctacatacattaacgccaactatatacggggatatagtggtaaggagaaggcttttattgcaactcaaggccctatgataaacaccgttgatgacttttggcaaatggtgtggcaggaagattcccccgtgatcgtcatgataacaaaactgaaagagaaaaatgaaaaatgtgtgttgtattggcccgagaagagaggcatttacggcaaagttgaagtattagtcatctcagtgaatgaatgtgataattatacaatccgcaatttagtgctcaaacagggctcccacacacaacacgtaaaacattattggtatacaagctggcccgatcataagacgcctgattccgcccagcccctgctgcagttaatgctcgacgtggaagaagataggttagcgtcacagggcagagggcctgtcgtagtgcactgttcagcagggattggcaggaccggatgctttatagcaactagcatcgggtgtcagcaactcaaggaagagggcgtggtcgacgccttgagtatcgtatgtcagctacgcatggatcggggagggatggtgcagacgagtgaacagtatgagtttgtccaccatgctctgtgcctctatgagtctaggctgtccgccgagacagtccaatag

SEQ ID NO: 83300 - protein, 451 aa, Artificial Sequence
  derived and/or modified sequence
MNQKNVLQGQHEADKIWSKEGFYAVVIFLSIFVIIVTCLMILYRLKERFQLSLRQDKEKNQEIHLSPITLQPALSEAKTVHSMVQPEQAPKVLNVVVDPQGRGAPEIKATTATSVCPSPFKMKPIGLQERRGSNVSLTLDMSSLGNIEPFVSIPTPREKVAMEYLQSASRILTRSQLRDVVASSHLLQSEFMEIPMNFVDPKEIDIPRHGTKNRYKTILPNPLSRVCLRPKNVTDSLSTYINANYIRGYSGKEKAFIATQGPMINTVDDFWQMVWQEDSPVIVMITKLKEKNEKCVLYWPEKRGIYGKVEVLVISVNECDNYTIRNLVLKQGSHTQHVKHYWYTSWPDHKTPDSAQPLLQLMLDVEEDRLASQGRGPVVVHCSAGIGRTGCFIATSIGCQQLKEEGVVDALSIVCQLRMDRGGMVQTSEQYEFVHHALCLYESRLSAETVQ

SEQ ID NO: 83301 - DNA, 1356 bp, Artificial Sequence
  derived and/or modified sequence
atgaaccagaagaacgtgctgcagggccagcacgaggccgacaagatctggagcaaggagggcttctacgccgtggtgatcttcctgagcatcttcgtgatcatcgtgacctgcctgatgatcctgtacagactgaaggagagattccagctgagcctgagacaggacaaggagaagaaccaggagatccacctgagccccatcaccctgcagcccgccctgagcgaggccaagaccgtgcacagcatggtgcagcccgagcaggcccccaaggtgctgaacgtggtggtggacccccagggcagaggcgcccccgagatcaaggccaccaccgccaccagcgtgtgccccagccccttcaagatgaagcccatcggcctgcaggagagaagaggcagcaacgtgagcctgaccctggacatgagcagcctgggcaacatcgagcccttcgtgagcatccccacccccagagagaaggtggccatggagtacctgcagagcgccagcagaatcctgaccagaagccagctgagagacgtggtggccagcagccacctgctgcagagcgagttcatggagatccccatgaacttcgtggaccccaaggagatcgacatccccagacacggcaccaagaacagatacaagaccatcctgcccaaccccctgagcagagtgtgcctgagacccaagaacgtgaccgacagcctgagcacctacatcaacgccaactacatcagaggctacagcggcaaggagaaggccttcatcgccacccagggccccatgatcaacaccgtggacgacttctggcagatggtgtggcaggaggacagccccgtgatcgtgatgatcaccaagctgaaggagaagaacgagaagtgcgtgctgtactggcccgagaagagaggcatctacggcaaggtggaggtgctggtgatcagcgtgaacgagtgcgacaactacaccatcagaaacctggtgctgaagcagggcagccacacccagcacgtgaagcactactggtacaccagctggcccgaccacaagacccccgacagcgcccagcccctgctgcagctgatgctggacgtggaggaggacagactggccagccagggcagaggccccgtggtggtgcactgcagcgccggcatcggcagaaccggctgcttcatcgccaccagcatcggctgccagcagctgaaggaggagggcgtggtggacgccctgagcatcgtgtgccagctgagaatggacagaggcggcatggtgcagaccagcgagcagtacgagttcgtgcaccacgccctgtgcctgtacgagagcagactgagcgccgagaccgtgcagtag

SEQ ID NO: 83302 - DNA, 1356 bp, Artificial Sequence
  derived and/or modified sequence
atgaaccagaagaacgtccttcaaggtcagcatgaagccgataagatatggtccaaagaggggttttacgccgtggtgatttttctgtccattttcgtcattatcgttacgtgtctgatgatcctgtaccgcctgaaagaacgattccagctgtccttacgccaggataaagagaaaaaccaagagatccatctcagtccaatcaccctccaacctgccctgtccgaggccaagacagtccattctatggtgcagcccgagcaggcgcccaaggtgttaaacgtcgtcgtcgatccacaagggcggggtgcgccggagataaaagctaccaccgctaccagcgtatgtccctctccgtttaagatgaagccaatcgggctgcaggagaggaggggtagcaacgtcagcctcacattggacatgtcgtcactcggaaacattgaaccatttgtgtctatcccaacccctcgcgagaaggtcgcaatggaatatctacagtccgcttctcgcatcctcacacgctcacagctcagggacgttgttgcctcttcacacttactgcagtctgagttcatggaaatccccatgaactttgtcgacccgaaggagatcgatattccgcggcacgggacaaagaacagatacaaaaccatcctgccaaatcctttgtcgagggtgtgtcttagaccaaaaaacgttacagactctctttctacctatatcaacgccaactacataagaggttattctggcaaagagaaagcctttattgcaacccaaggtccgatgataaacaccgtggatgatttctggcagatggtttggcaagaggactccccagtgatagtgatgataactaaactgaaagagaagaacgagaagtgtgtcctgtattggcctgaaaagagaggaatctacggaaaggtagaagtgctggtgatttccgttaacgaatgcgacaattacaccattaggaacctggtgcttaagcagggctcacatactcaacacgttaagcactactggtacacttcttggcccgatcacaagacccccgactctgcccagcccctgctgcagctgatgctcgatgtggaagaggaccgcctggcgtctcagggcagaggacccgttgttgtacactgcagcgctggaataggtcgaactggctgctttatagccacctctattggatgccagcaactaaaagaggagggagtggtggacgccctgtcgatcgtttgccaattgcgaatggacaggggcggaatggtgcagacttccgagcaatacgagttcgtgcatcatgcgctgtgcctctacgaatcccgtctctctgcggaaacagtgcagtag

SEQ ID NO: 83303 - DNA, 1356 bp, Artificial Sequence
  derived and/or modified sequence
atgaaccagaagaatgtgctgcagggccagcatgaagctgacaagatctggagcaaggagggcttctatgctgtggtgatcttcctgagcatcttcgtcatcatcgtgacctgcctgatgatcctgtaccgcctgaaggagcgcttccagctgagcctgcggcaggacaaggagaagaaccaggagatccacctgagccccatcaccctgcagcctgccctgtctgaggccaagacagtgcacagcatggtgcagcctgagcaggcccccaaggtgctgaatgtggtggtggacccccagggccgcggggcccctgagatcaaggccaccacagccacctctgtgtgccccagccccttcaagatgaagcccatcggcctgcaggagcggcggggcagcaatgtgtccctgaccctggacatgagcagcctgggcaacatcgagccctttgtgtccatccccaccccccgggagaaggtggccatggagtacctgcagagcgccagccgcatcctgaccaggagccagctgagagatgtggtggccagcagccacctgctgcagagcgagttcatggagatccccatgaactttgtggaccccaaggagattgacatccccaggcatggcaccaagaaccgctacaagaccatcctgcccaaccccctgagccgggtgtgcctgcggcccaagaatgtgacagacagcctgagcacctacatcaatgccaactacatccggggctacagcggcaaggagaaggccttcatcgccacccagggccccatgatcaacacagtggatgacttctggcagatggtgtggcaggaggacagccctgtgattgtgatgatcaccaagctgaaggagaagaatgagaagtgtgtgctgtactggccagagaagaggggcatctacggcaaggtggaggtgctggtgatctctgtgaatgaatgtgacaactacaccatccggaacctggtgctgaagcagggcagccacacccagcacgtgaagcactactggtacacctcctggccagaccacaagaccccagacagcgcccagcccctgctgcagctgatgctggatgtggaggaggaccggctggccagccagggccggggccctgtggtggtgcactgcagcgctggcatcggccgcacaggctgcttcatcgccaccagcatcggctgccagcagctgaaggaggagggcgtggtggatgccctgagcatcgtgtgccagctgaggatggaccggggcggcatggtgcagaccagcgagcagtatgaatttgtgcaccacgccctgtgcctgtatgagagccggctgtctgctgagaccgtgcagtag

SEQ ID NO: 83304 - DNA, 1356 bp, Artificial Sequence
  derived and/or modified sequence
atgaaccagaagaacgtgctgcagggccagcacgaggccgacaagatttggagcaaagaggggttctacgctgtggtgatcttcctctctattttcgtcattatagtaacgtgcttgatgatcctgtacagacttaaggaaaggtttcagttaagccttaggcaggacaaagagaagaaccaggagattcatctcagtcccattacattgcagccagccctgtccgaagccaagacagtccacagtatggtgcagccagaacaggcccccaaagtgctgaacgtggtagtggatccacagggaagaggggcccccgaaatcaaggcaactaccgccaccagcgtctgcccctcaccattcaagatgaaaccaatcggcctccaggagagacgtggctccaacgtgtccctgacattggacatgagctctcttggtaacatcgaaccattcgtttccattccaactcctcgggaaaaagtagccatggaatacttacaatcggcatctaggattctcacacgcagccagttgagggacgttgtcgcatcctcccatctgctgcagagcgagtttatggagattccaatgaattttgtggatcccaaagaaatagacataccacgacacggcaccaagaaccgttacaaaaccatccttcccaacccgctgagtcgcgtctgcctgcggcccaaaaatgtgactgatagcctctcaacgtacattaatgctaactatattcggggatactccggtaaagagaaagcttttatagccactcaggggccaatgatcaatactgtggacgacttttggcagatggtgtggcaggaggactctcctgtcatcgtgatgatcactaagctgaaagaaaagaacgagaagtgtgtgttgtattggccggagaaacgcggcatttacggtaaagtggaggtattggtgatttccgtgaatgaatgtgacaattataccatccggaatctggtcctgaagcagggcagccatacccaacacgtaaaacactattggtatacttcttggcccgaccacaagacgccagactcagcccaacccctcctacaacttatgctggacgtcgaagaggatcggctggcctctcagggaaggggtcctgttgtcgtccactgttccgctggcattggccgtacaggttgtttcattgctacctctatcgggtgtcagcagctgaaggaggagggggtggtcgatgccctgagcattgtttgtcagctccggatggacaggggcgggatggtgcaaacctctgaacagtatgagttcgtccatcatgctctgtgcctgtatgaaagtcgactttccgccgagacggtgcagtag

SEQ ID NO: 83305 - DNA, 2458 bp, Artificial Sequence
  derived and/or modified sequence
atgaaccagaaaaatgttttacaagggcagcatgaagcggacaaaatctggagcaaagaaggattttatgctgttgtcatttttctcagcatctttgttattatagtaacgtgtttgatgattctttacagattaaaagaaagatttcagctttccttaagacaagacaaagagaaaaaccaggagatccacctatcgcccatcacattacagccagcactgtccgaggcaaagacagtccacagcatggtccaacctgagcaggccccaaaggtactgaatgttgtcgtggaccctcaaggccgaggtgctcctgagatcaaagctaccaccgctacctctgtttgcccttctcctttcaaaatgaagcccataggacttcaagagagaagagggtccaacgtatctcttacattggacatgagtagcttggggaacattgaaccctttgtgtctataccaacaccacgggagaaggtagcaatggagtatctgcagtcagccagccgaattctcacaaggtctcagctgagggacgtcgtggcaagttcacatttactccaaagtgaattcatggaaataccaatgaactttgtggatcccaaagaaattgatattccgcgtcatggaactaaaaatcgctataagaccattttaccaaatcccctcagcagagtgtgtttaagaccaaaaaatgtaaccgattcattgagcacctacattaatgctaattatattaggggctacagtggcaaggagaaagccttcattgccacgcagggccccatgatcaacaccgtggatgatttctggcagatggtttggcaggaagacagccctgtgattgttatgatcacaaaactcaaagaaaaaaatgagaaatgtgtgctatactggccggaaaagagagggatatatggaaaagttgaggttctggttatcagtgtaaatgaatgtgataactacaccattcgaaaccttgtcttaaagcaaggaagccacacccaacatgtgaagcattactggtacacctcatggcctgatcacaagactccagacagtgcccagcccctcctacagctcatgctggatgtagaagaagacagacttgcttcccagggccgagggcctgtggttgtccactgcagtgcaggaataggtagaacagggtgttttattgctacatccattggctgtcaacagctgaaagaagaaggagttgtggatgcactaagcattgtctgccagcttcgtatggatagaggtggaatggtgcaaaccagtgagcagtatgaatttgtgcaccatgctctgtgcctgtatgagagcagactttcagcagagactgtccagtgagtcattgaagacttgtcagaccatcaatctcttggggtgattaatcaaattacccacccaaggcttctagaaggagcttcctgcaatggaaggaaggagaagctctgaagcccatgtatggcatggattgtggaagactgggcaacatatttaagatttccagctccttgtgtatatgaatgcatttgtaagcatcccccaaattattctgaaggttttttgatgatggaggtatgataggtttatcacacagcctaaggcagattttgttttgtctgtactgactctatctgccacacagaatgtatgtatgtaatattcagtaataaatgtcatcaggtgatgactggatgagctgctgaagacattcgtattatgtgttagatgctttaatgtttgcaaaatctgtcttgtgaatggactgtcagctgttaaactgttcctgttttgaagtgctattacctttctcagttaccagaatcttgctgctaaagttgcaagtgattgataatggatttttaacagagaagtctttgtttttgaaaaacaaaaatcaaaaacagtaactattttatatggaaatgtgtcttgataatattacctattaaatgtgtatttatagtccctcctatcaaacaattacagagcacaatgattgtcattgggtatatatgtatttactctctattattgggcataaaggtggcttctgctccagaactctatccactgtatttccacatcgtgagtcattttactttaaaagggaaaaacaaatttgtagcaactctgaagtatcaagagttttaactacttgtctctcttttgctaagaagggatttttgaatatgctatctacctggaatctctctctcaacaaaaggtatatgccttcaggaatgatataatctgtcccattttcgaggctccttataaggacatttccatgtatgtccttacatttctgaaagctttcaatcttcaagagacaaaaaaaattaaaataactaccctcagcaaacactagctgttctgctcatatatgaatttttaatgcagcaatgttgactttgtttcatactgccaataaactcttaatact

SEQ ID NO: 83306 - DNA, 2818 bp, Artificial Sequence
  derived and/or modified sequence
acttaaaacagagtaaggaaatcagaaacaatttcctccacacagaaaagaacagaactctcttacctatgaaccaggtagtttccaagagagacgctgagggatgtttagaaagcctgggacctgcagatgccatgtcaggcacgcttgctcctgcataggagactaaataatctcgatatataaggatggcagtctgttgtcttagatcagtttgagaagcagctctggcagcggggggtgtaggtgtgttgcactacactgaatggaataaggctaaaaatatgtttagtgtctgataagaacgccagttttctcaagctctcatttaacgtcggactttctgttttgcttttaaagaaaaatgttttacaagggcagcatgaagcggacaaaatctggagcaaagaaggattttatgctgttgtcatttttctcagcatctttgttattatagtaacgtgtttgatgattctttacagattaaaagaaagatttcagctttccttaagacaagacaaagagaaaaaccaggagatccacctatcgcccatcacattacagccagcactgtccgaggcaaagacagtccacagcatggtccaacctgagcaggccccaaaggtactgaatgttgtcgtggaccctcaaggccgaggtgctcctgagatcaaagctaccaccgctacctctgtttgcccttctcctttcaaaatgaagcccataggacttcaagagagaagagggtccaacgtatctcttacattggacatgagtagcttggggaacattgaaccctttgtgtctataccaacaccacgggagaaggtagcaatggagtatctgcagtcagccagccgaattctcacaaggtctcagctgagggacgtcgtggcaagttcacatttactccaaagtgaattcatggaaataccaatgaactttgtggatcccaaagaaattgatattccgcgtcatggaactaaaaatcgctataagaccattttaccaaatcccctcagcagagtgtgtttaagaccaaaaaatgtaaccgattcattgagcacctacattaatgctaattatattaggggctacagtggcaaggagaaagccttcattgccacgcagggccccatgatcaacaccgtggatgatttctggcagatggtttggcaggaagacagccctgtgattgttatgatcacaaaactcaaagaaaaaaatgagaaatgtgtgctatactggccggaaaagagagggatatatggaaaagttgaggttctggttatcagtgtaaatgaatgtgataactacaccattcgaaaccttgtcttaaagcaaggaagccacacccaacatgtgaagcattactggtacacctcatggcctgatcacaagactccagacagtgcccagcccctcctacagctcatgctggatgtagaagaagacagacttgcttcccagggccgagggcctgtggttgtccactgcagtgcaggaataggtagaacagggtgttttattgctacatccattggctgtcaacagctgaaagaagaaggagttgtggatgcactaagcattgtctgccagcttcgtatggatagaggtggaatggtgcaaaccagtgagcagtatgaatttgtgcaccatgctctgtgcctgtatgagagcagactttcagcagagactgtccagtgagtcattgaagacttgtcagaccatcaatctcttggggtgattaatcaaattacccacccaaggcttctagaaggagcttcctgcaatggaaggaaggagaagctctgaagcccatgtatggcatggattgtggaagactgggcaacatatttaagatttccagctccttgtgtatatgaatgcatttgtaagcatcccccaaattattctgaaggttttttgatgatggaggtatgataggtttatcacacagcctaaggcagattttgttttgtctgtactgactctatctgccacacagaatgtatgtatgtaatattcagtaataaatgtcatcaggtgatgactggatgagctgctgaagacattcgtattatgtgttagatgctttaatgtttgcaaaatctgtcttgtgaatggactgtcagctgttaaactgttcctgttttgaagtgctattacctttctcagttaccagaatcttgctgctaaagttgcaagtgattgataatggatttttaacagagaagtctttgtttttgaaaaacaaaaatcaaaaacagtaactattttatatggaaatgtgtcttgataatattacctattaaatgtgtatttatagtccctcctatcaaacaattacagagcacaatgattgtcattgggtatatatgtatttactctctattattgggcataaaggtggcttctgctccagaactctatccactgtatttccacatcgtgagtcattttactttaaaagggaaaaacaaatttgtagcaactctgaagtatcaagagttttaactacttgtctctcttttgctaagaagggatttttgaatatgctatctacctggaatctctctctcaacaaaaggtatatgccttcaggaatgatataatctgtcccattttcgaggctccttataaggacatttccatgtatgtccttacatttctgaaagctttcaatcttcaagagacaaaaaaaattaaaataactaccctcagcaaacactagctgttctgctcatatatgaatttttaatgcagcaatgttgactttgtttcatactgccaataaactcttaatactaaatactga

SEQ ID NO: 83307 - DNA, 1603 bp, Artificial Sequence
  derived and/or modified sequence
aaaagtaaagaggtagtacagcacgtaatccagggtgctgatgttgtgggaggggacttaaaacagagtaaggaaatcagaaacaatttcctccacacagaaaagaacagaactctcttacctatgaaccagaaaaatgttttacaagggcagcatgaagcggacaaaatctggagcaaagaaggattttatgctgttgtcatttttctcagcatctttgttattatagtaacgtgtttgatgattctttacagattaaaagaaagatttcagctttccttaagacaagacaaagagaaaaaccaggagatccacctatcgcccatcacattacagccagcactgtccgaggcaaagacagtccacagcatggtccaacctgagcaggccccaaaggtactgaatgttgtcgtggaccctcaaggccgaggtgctcctgagatcaaagctaccaccgctacctctgtttgcccttctcctttcaaaatgaagcccataggacttcaagagagaagagggtccaacgtatctcttacattggacatgagtagcttggggaacattgaaccctttgtgtctataccaacaccacgggagaaggtagcaatggagtatctgcagtcagccagccgaattctcacaaggtctcagctgagggacgtcgtggcaagttcacatttactccaaagtgaattcatggaaataccaatgaactttgtggatcccaaagaaattgatattccgcgtcatggaactaaaaatcgctataagaccattttaccaaatcccctcagcagagtgtgtttaagaccaaaaaatgtaaccgattcattgagcacctacattaatgctaattatattaggggctacagtggcaaggagaaagccttcattgccacgcagggccccatgatcaacaccgtggatgatttctggcagatggtttggcaggaagacagccctgtgattgttatgatcacaaaactcaaagaaaaaaatgagaaatgtgtgctatactggccggaaaagagagggatatatggaaaagttgaggttctggttatcagtgtaaatgaatgtgataactacaccattcgaaaccttgtcttaaagcaaggaagccacacccaacatgtgaagcattactggtacacctcatggcctgatcacaagactccagacagtgcccagcccctcctacagctcatgctggatgtagaagaagacagacttgcttcccagggccgagggcctgtggttgtccactgcagtgcaggaataggtagaacagggtgttttattgctacatccattggctgtcaacagctgaaagaagaaggagttgtggatgcactaagcattgtctgccagcttcgtatggatagaggtggaatggtgcaaaccagtgagcagtatgaatttgtgcaccatgctctgtgcctgtatgagagcagactttcagcagagactgtccagtgagtcattgaagacttgtcagaccatcaatctcttggggtgattaatcaaattacccacccaaggcttctagaaggagcttcctgcaatggaaggaaggagaagctctgaagcccatgtatggcat

SEQ ID NO: 83308 - DNA, 1024 bp, Artificial Sequence
  derived and/or modified sequence
acttgtttcacttttgtttaaaagtaaagaggtagtacagcacgtaatccagggtgctgatgttgtgggaggggacttaaaacagagtaaggaaatcagaaacaatttcctccacacagaaaagaacagaactctcttacctatgaaccaggtagtttccaagagagacgctgagggatgtttagaaagcctgggacctgcagatgccatgtcaggcacgcttgctcctgcataggagactaaataatctcgatatataaggatggcagtctgttgtcttagatcagtttgagaagcagctctggcagcggggggtgtagaaaaatgttttacaagggcagcatgaagcggacaaaatctggagcaaagaaggattttatgctgttgtcatttttctcagcatctttgttattatagtaacgtgtttgatgattctttacagattaaaagaaagatttcagctttccttaagacaagacaaagagaaaaaccaggagatccacctatcgcccatcacattacagccagcactgtccgaggcaaagacagtccacagcatggtccaacctgagcaggccccaaaggtactgaatgttgtcgtggaccctcaaggccgaggtgctcctgagatcaaagctaccaccgctacctctgtttgcccttctcctttcaaaatgaagcccataggacttcaagagagaagagggtccaacgtatctcttacattggacatgagtagcttggggaacattgaaccctttgtgtctataccaacaccacgggagaaggtagcaatggagtatctgcagtcagccagccgaattctcacaaggtctcagctgagggacgtcgtggcaagttcacatttactccaaagtgaattcatggaaataccaatgaactttgtggatcccaaagaaattgatattccgcgtcatggaactaaaaatcgctataagaccattttaccaaatcccctcagcagagtgtgtttaagaccaaaaaatgtaaccgattcattgag

SEQ ID NO: 83309 - DNA, 1356 bp, Artificial Sequence
  derived and/or modified sequence
atgaaccaaaaaaatgtgttgcagggacaacacgaggccgacaagatctggagcaaggagggcttctatgcggtggttatattcctgtccatctttgtgatcattgtaacctgtttgatgatcctgtaccgactgaaggaaagattccaactgtctctccgacaggataaggagaagaatcaagagatacacctctctcctattacgctgcaacccgcactcagcgaggcaaagactgtgcactccatggtgcagcctgagcaggcgccaaaggtcctcaacgtagttgtggatccgcagggtcgcggagctcctgagatcaaggctacaaccgctacatccgtctgcccatctccgtttaagatgaagcctattgggctgcaggagcgaagagggtctaatgttagtcttaccctcgatatgtcgagtctgggcaatatagagcctttcgtgagcatcccaacgcctagggagaaggtggccatggaataccttcaatcagccagccggattttgaccagaagtcagcttcgggatgtagtcgcctcgagccacctgctacagtctgagttcatggagattccgatgaactttgtggatccaaaggagatcgacatcccccgacacggcacgaaaaaccgttacaaaaccatcctcccgaatcctctttccagagtttgtctgagacccaaaaatgttacggactcccttagcacctatatcaatgccaactacatccgagggtacagcggaaaggagaaggccttcatcgcgactcaagggccaatgattaatacagtggatgatttctggcagatggtttggcaagaagactcaccagtgattgtgatgattacaaagctgaaggagaaaaacgagaagtgcgttctgtattggcccgaaaaaaggggaatctatgggaaggtggaagtactggtaatatctgtcaacgagtgcgacaattatactatccgaaacttagtgttgaagcaggggtcacacacacagcatgttaaacactactggtacaccagttggcccgaccacaaaactcctgattccgcgcagcctctgttgcagctcatgctcgatgtcgaggaagacaggctcgcatcccaagggcgaggccctgtggttgtacactgtagcgcaggaataggaagaactggctgcttcatagccacaagcatcggatgccagcaactgaaggaggagggcgtggtggacgcactaagtattgtgtgtcaactgagaatggaccggggtggcatggtacagacctctgagcaatacgaattcgttcaccacgcattgtgcctctatgagtcacgtctgtctgcagaaaccgtgcagtag

SEQ ID NO: 83310 - protein, 320 aa, Artificial Sequence
  derived and/or modified sequence
MNPPSQEIEELPRRRCCRRGTQIVLLGLVTAALWAGLLTLLLLWHWDTTQSLKQLEERAARNVSQVSKNLESHHGDQMAQKSQSTQISQELEELRAEQQRLKSQDLELSWNLNGLQADLSSFKSQELNERNEASDLLERLREEVTKLRMELQVSSGFVCNTCPEKWINFQRKCYYFGKGTKQWVHARYACDDMEGQLVSIHSPEEQDFLTKHASHTGSWIGLRNLDLKGEFIWVDGSHVDYSNWAPGEPTSRSQGEDCVMMRGSGRWNDAFCDRKLGAWVCDRLATCTPPASEGSAESMGPDSRPDPDGRLPTPSAPLHS

SEQ ID NO: 83311 - DNA, 963 bp, Artificial Sequence
  derived and/or modified sequence
atgaacccccccagccaggagatcgaggagctgcccagaagaagatgctgcagaagaggcacccagatcgtgctgctgggcctggtgaccgccgccctgtgggccggcctgctgaccctgctgctgctgtggcactgggacaccacccagagcctgaagcagctggaggagagagccgccagaaacgtgagccaggtgagcaagaacctggagagccaccacggcgaccagatggcccagaagagccagagcacccagatcagccaggagctggaggagctgagagccgagcagcagagactgaagagccaggacctggagctgagctggaacctgaacggcctgcaggccgacctgagcagcttcaagagccaggagctgaacgagagaaacgaggccagcgacctgctggagagactgagagaggaggtgaccaagctgagaatggagctgcaggtgagcagcggcttcgtgtgcaacacctgccccgagaagtggatcaacttccagagaaagtgctactacttcggcaagggcaccaagcagtgggtgcacgccagatacgcctgcgacgacatggagggccagctggtgagcatccacagccccgaggagcaggacttcctgaccaagcacgccagccacaccggcagctggatcggcctgagaaacctggacctgaagggcgagttcatctgggtggacggcagccacgtggactacagcaactgggcccccggcgagcccaccagcagaagccagggcgaggactgcgtgatgatgagaggcagcggcagatggaacgacgccttctgcgacagaaagctgggcgcctgggtgtgcgacagactggccacctgcaccccccccgccagcgagggcagcgccgagagcatgggccccgacagcagacccgaccccgacggcagactgcccacccccagcgcccccctgcacagctag

SEQ ID NO: 83312 - DNA, 963 bp, Artificial Sequence
  derived and/or modified sequence
atgaatccaccaagtcaggagattgaagaattgcctaggaggagatgctgcagaaggggcacccagattgttcttttaggcctagtcaccgcagccctgtgggctgggttgttaaccctcctgctactttggcactgggacactacccagtcactgaaacagctggaagagcgcgcggcacgtaatgtttcacaggtgagcaagaacctggaaagtcatcatggggatcagatggcacagaagtcacagtccacccagatttcacaagagctcgaggagttacgtgcagagcagcaacgattaaagagccaggatttagagttaagctggaatctaaacggactacaggctgacctgagttcttttaaatcacaagaactgaatgaaagaaatgaggcatccgatctccttgagcgattgcgcgaagaggtcaccaaactgaggatggagctgcaagtgtcaagtgggttcgtgtgtaacacatgtcccgagaagtggattaattttcagcgcaagtgctactacttcggcaaaggtaccaagcagtgggtgcacgctcggtacgcttgcgacgacatggaagggcagctggtgtcaatccacagtcctgaggagcaggatttccttactaaacatgcgtctcacacaggtagttggattggcctccgcaacctggatctgaagggagaatttatctgggtagacgggagccatgtcgattattcaaactgggcacccggagagccaacctcccgctctcagggtgaggattgtgtcatgatgcgaggaagcggacggtggaatgacgctttttgcgaccgcaagttgggcgcctgggtgtgcgataggctggctacatgtacaccacctgcatcagaagggagtgccgaatccatgggccccgactccagacccgaccctgatgggaggctcccaactccctctgcccctctgcattcctag

SEQ ID NO: 83313 - DNA, 1398 bp, Artificial Sequence
  derived and/or modified sequence
atgaatcctccaagccaggagatcgaggagcttcccaggaggcggtgttgcaggcgtgggactcagatcgtgctgctggggctggtgaccgccgctctgtgggctgggctgctgactctgcttctcctgtggcactgggacaccacacagagtctaaaacagctggaagagagggctgcccggaacgtctctcaagtttccaagaacttggaaagccaccacggtgaccagatggcgcagaaatcccagtccacgcagatttcacaggaactggaggaacttcgagctgaacagcagagattgaaatctcaggacttggagctgtcctggaacctgaacgggcttcaagcagatctgagcagcttcaagtcccaggaattgaacgagaggaacgaagcttcagatttgctggaaagactccgggaggaggtgacaaagctaaggatggagttgcaggtgtccagcggctttgtgtgcaacacgtgccctgaaaagtggatcaatttccaacggaagtgctactacttcggcaagggcaccaagcagtgggtccacgcccggtatgcctgtgacgacatggaagggcagctggtcagcatccacagcccggaggagcaggacttcctgaccaagcatgccagccacaccggctcctggattggccttcggaacttggacctgaagggggagtttatctgggtggatgggagccacgtggactacagcaactgggctccaggggagcccaccagccggagccagggcgaggactgcgtgatgatgcggggctccggtcgctggaacgacgccttctgcgaccgtaagctgggcgcctgggtgtgcgaccggctggccacatgcacgccgccagccagcgaaggttccgcggagtccatgggacctgattcaagaccagaccctgacggccgcctgcccaccccctctgcccctctccactcttgagcatggatacagccaggcccagagcaagaccctgaagacccccaaccacggcctaaaagcctctttgtggctgaaaggtccctgtgacattttctgccacccaaacggaggcagctgacacatctcccgctcctctatggcccctgccttcccaggagtacaccccaacagcaccctctccagatgggagtgcccccaacagcaccctctccagatgagagtacaccccaacagcaccctctccagatgagagtacaccccaacagcaccctctccagatgagagtacaccccaacagcaccctctccagatgcagccccatctcctcagcaccccaggacctgagtatccccagctcaggtggtgagtcctcctgtccagcctgcatcaataaaatggggcagtgatggcctcccacatttgtccccttcttgg

SEQ ID NO: 83314 - DNA, 963 bp, Artificial Sequence
  derived and/or modified sequence
atgaacccccccagccaggagattgaggagctgccccggcggcgctgctgccggcggggcacccagatcgtgctgctgggcctggtgacagctgccctgtgggccggcctgctgaccctgctgctgctgtggcactgggacaccacccagagcctgaagcagctggaggagagagctgccagaaatgtgtcccaggtgtccaagaacctggagagccaccacggggaccagatggcccagaagagccagagcacccagatcagccaggagctggaggagctgcgggcagagcagcagaggctgaagagccaggacctggagctgtcctggaacctgaatggcctgcaggccgacctgagcagcttcaagagccaggagctgaatgaaagaaatgaggccagtgacctgctggagcggctgcgggaggaggtgaccaagctgaggatggagctgcaggtgagcagcggctttgtgtgcaacacctgcccagagaagtggatcaacttccagaggaagtgctactactttgggaagggcaccaagcagtgggtgcacgcccgctatgcctgtgatgacatggagggccagctggtgtccatccacagccctgaggagcaggacttcctgaccaagcacgccagccacacaggctcctggattggcctgaggaacctggacctgaagggggagttcatctgggtggatggcagccacgtggactacagcaactgggcccctggagagcccaccagccgcagccagggcgaggactgtgtgatgatgaggggcagcggccgctggaatgatgccttctgtgacaggaagctgggcgcctgggtgtgtgaccggctggccacctgcaccccaccagccagcgagggcagcgctgagagcatgggccctgacagcaggccagaccctgatggccgcctgcccaccccatctgcccccctgcacagctag

SEQ ID NO: 83315 - DNA, 963 bp, Artificial Sequence
  derived and/or modified sequence
atgaacccccccagccaggagatcgaggagctgccccggcggcggtgctgccgcagaggaactcagatcgtcctgctgggtttagtgacagcagccctatgggcaggattactcacactgttgctgctgtggcactgggacaccacacagtccctgaagcagctcgaggagagggccgcaagaaacgtctctcaggtttctaagaatttggagtctcaccatggcgaccaaatggcacaaaagtcccagtccacccagatctctcaggaacttgaggaattaagagccgagcagcagaggctgaagagtcaagacctggaactatcgtggaacctgaatggtctccaagcagatctgagcagcttcaagtcccaggaactgaacgagaggaatgaagcatccgacctgctggaacgtctccgcgaggaagtgacgaagcttaggatggagctccaggtttcgagcggtttcgtgtgcaatacctgccccgaaaagtggatcaacttccaaagaaagtgctactatttcggtaagggaaccaagcagtgggtccatgcccgctatgcctgtgatgatatggagggccagctggtatcaatccactccccagaggaacaggactttctcactaagcacgcttctcataccggctcatggatcggtttaaggaatcttgatcttaaaggcgagtttatttgggtggatgggtctcacgtggattattctaattgggcgcccggagaacccacttcccgcagccaaggggaggactgtgttatgatgaggggaagcggtcgctggaatgatgcattttgtgaccgcaagctgggtgcttgggtatgtgacagactcgccacttgcacaccacccgccagtgaaggttcggctgagagcatgggccccgattcgcgaccagacccagacggccgcctgccgactccttcggccccgcttcatagctag

SEQ ID NO: 83316 - DNA, 963 bp, Artificial Sequence
  derived and/or modified sequence
atgaatcctccgtcacaagagattgaagagttgcctcggagacgctgctgcagacgagggacccagattgtactgctggggctggtgacagcggctctgtgggcagggctcctaaccctcctgcttttgtggcattgggacactacccaaagtctgaagcagctcgaagaacgggcagcgagaaacgtgtctcaggttagtaaaaacctggagtctcatcatggggaccaaatggcgcagaagtcccaaagcactcaaatttctcaggaactggaagaattgagagccgagcagcaacgtctgaagtcccaggatctggaacttagctggaacctcaacgggctgcaggcagatctaagctcattcaaaagccaggaactgaatgaacgaaacgaggcttccgaccttcttgaacggcttcgggaggaagtcaccaagctgcggatggagttgcaggtttcttccgggttcgtgtgtaacacatgccccgagaaatggattaattttcagcgcaaatgttattattttggtaagggaactaaacaatgggttcacgcaaggtacgcctgtgatgacatggagggacagctggtgagtatccacagtcccgaggagcaagacttcctcacgaagcatgcatcccataccggaagttggataggactgcgcaacctcgatttaaagggtgaattcatctgggtggatggatcacacgtggactattccaattgggctcctggtgaaccaactagcagaagccagggtgaagactgcgtgatgatgagaggaagtggtagatggaacgatgccttttgcgacagaaagctgggcgcttgggtgtgcgaccgtctggctacctgtactccacctgcaagcgaaggaagtgctgagagcatgggccctgactcccgccctgaccccgatgggcgactgccaactccaagcgccccacttcactcctag

SEQ ID NO: 83317 - DNA, 279 bp, Artificial Sequence
  derived and/or modified sequence
atgttccccttttattcatgttggcgcactggcctgctccttctgctgttagccgtggcagtgcgtgaaagctggcagacagaggaaaagacttgcgacctggtgggggagaagggcaaggaatcagagaaagaattagctctggtaaagcgcctgaaacccttattcaataagtctttcgagagcaccgtgggccagggctcagacacatacatctatatttttcgagtatgtcgggaggctggaaatcacacctctggcgctggtcttgtccagtag

SEQ ID NO: 83318 - DNA, 330 bp, Artificial Sequence
  derived and/or modified sequence
atgtttcctttctattcctgctggcgcactggcctgcttctcttgcttctggcggtggccgtgcgagaatcttggcagaccgaagagaagacatgcgatttggtcggcgagaagggcaaggagtccgagaaggagctggccctagtcaagcgactcaagcccctattcaacaagagctttgagagcactgtcggacagggatcagatacatacatctatatatttagagtctgtcgtgaagccgggaaccatactagcggagccggccttgttcagattaacaagtcaaacgggaaggagacagtggttggccgactgaatgaaacctag

SEQ ID NO: 83319 - DNA, 279 bp, Artificial Sequence
  derived and/or modified sequence
atgttccccttctacagctgctggaggacaggcctgctgctgctgctgctggccgtggccgtgcgggagagctggcagacagaggagaagacctgtgacctggtgggggagaagggcaaggagagcgagaaggagctggccctggtgaagaggctgaagcccctcttcaacaagagctttgagagcacagtgggccagggcagtgacacctacatctacatcttccgggtgtgccgggaggccggcaaccacaccagcggggccggcctggtgcagtag

SEQ ID NO: 83320 - DNA, 330 bp, Artificial Sequence
  derived and/or modified sequence
atgttccccttctacagctgctggaggacaggcctgctgctgctgctgctggccgtggccgtgcgggagagctggcagacagaggagaagacctgtgacctggtgggggagaagggcaaggagagcgagaaggagctggccctggtgaagaggctgaagcccctcttcaacaagagctttgagagcacagtgggccagggcagtgacacctacatctacatcttccgggtgtgccgggaggccggcaaccacaccagcggggccggcctggtgcagatcaacaagagcaatggcaaggagaccgtggtgggccgcctgaatgagacctag

SEQ ID NO: 83321 - DNA, 720 bp, Artificial Sequence
  derived and/or modified sequence
caatttgttgtcattgatttgtagtgtaaaagacaactgtacttatgggaagtctagaaacccttgagatttgtgacctgtagaggccaaagaggtttcagaagactacatcaagccatcaaacagtaaagaggcaaggatggctccacccaagctgtcatcattcttttttaagttctttcatttccctcttcccaactttgtagtttgttctgaaagactcacctatacattagactacaagttacatataaatgaattttctgctgcagatgctcttgttacagagatattaaaatgtactatgtgttgcatatgccagagaatcttgtactttctggataattaaaataccatcgatttattacacattcatacgctttatctctttcctctctctcctgatcctacctgccctccccaacacacactctctcccaaaggatgttccctttctacagctgctggaggactggactgctactactactcctggctgtggcagtgagagaatcctggcagacagaagaaaaaacttgcgacttggtaggagaaaagggtaaagagtcagagaaagagttggctctagtgaagaggctgaaaccactgtttaataaaagctttgagagcactgtgggccagggttcagacacatacatctacatcttcagggtgtgccgggaagctggcaaccacacttctggggcaggcctggtgcaa

SEQ ID NO: 83322 - DNA, 596 bp, Artificial Sequence
  derived and/or modified sequence
agagtggggcacagcgaggcgctagggggaacgctggcctctgaaactagctctgggaccggggtctgcggccggcccctagctggccccgtctcccatccccagaagggtattcactggggattctgagctttggctactccagtttcccacgacactgtaaaagacaactgtacttatgggaagtctagaaacccttgagatttgtgacctgtagaggccaaagaggtttcagaagactacatcaagccatcaaacagtaaagaggatgttccctttctacagctgctggaggactggactgctactactactcctggctgtggcagtgagagaatcctggcagacagaagaaaaaacttgcgacttggtaggagaaaagggtaaagagtcagagaaagagttggctctagtgaagaggctgaaaccactgtttaataaaagctttgagagcactgtgggccagggttcagacacatacatctacatcttcagggtgtgccgggaagctggcaaccacacttctggggcaggcctggtgcaaatcaacaaaagtaatgggaaggagacagtggtagggagactcaacgagactc

SEQ ID NO: 83323 - DNA, 279 bp, Artificial Sequence
  derived and/or modified sequence
atgttccccttctacagctgctggcggaccggcctgctgctgctgctcctggccgtcgctgtaagggagtcctggcagaccgaggaaaaaacatgcgacctggtcggagagaagggtaaggaatccgaaaaggagttagcgcttgtgaaaaggctgaagcctcttttcaataaaagcttcgagtcgaccgtgggacaggggagcgatacctacatatatatctttcgcgtatgcagggaagcaggcaaccatacttccggagccggcttagtgcagtag

SEQ ID NO: 83324 - DNA, 330 bp, Artificial Sequence
  derived and/or modified sequence
atgttccccttctacagctgctggcggaccggcctgctgctgctgcttctcgccgtcgccgtgagggagtcgtggcagactgaggaaaaaacttgcgacctcgtgggtgagaagggaaaagagtcggagaaagaactggccctggtgaaaagactgaagcccctatttaacaagagttttgagagtaccgtggggcaggggtctgatacctacatctatattttccgtgtctgccgtgaggcaggcaaccacacaagtggggcagggttggttcagatcaacaagtccaacgggaaggagactgtagtgggacggctgaatgagacctag

SEQ ID NO: 83325 - DNA, 279 bp, Artificial Sequence
  derived and/or modified sequence
atgttcccattctattcatgttggcggaccggactgctcttgctgcttctggccgttgcggtaagagagtcctggcagacagaggaaaaaacgtgtgacctcgtcggcgagaaaggcaaggaatccgagaaggagctggcactggtgaaacgcctgaagcccctattcaacaagtccttcgaatcgacagtgggtcaggggagcgacacctacatctacatttttagagtatgtcgagaagcgggaaaccatacaagcggagcgggtctcgttcagtag

SEQ ID NO: 83326 - DNA, 330 bp, Artificial Sequence
  derived and/or modified sequence
atgttcccgttctattcctgttggcgtaccggcctgttacttctgctcttagcagtggctgtgagggagagctggcagacggaggagaagacctgcgatttagtcggtgagaaggggaaggagagcgagaaagagctggcattagtgaagcgtctgaaacctctttttaacaagtcgttcgaatctaccgtgggccagggcagcgacacctatatctacatctttcgtgtgtgccgggaggcaggaaaccacacctccggagcaggactggtgcaaatcaacaaatctaatggaaaggagactgttgtgggccgactcaatgaaacgtag

SEQ ID NO: 83327 - DNA, 279 bp, Artificial Sequence
  derived and/or modified sequence
atgttccccttctacagctgctggagaaccggcctgctgctgctgctgctggccgtggccgtgagagagagctggcagaccgaggagaagacctgcgacctggtgggcgagaagggcaaggagagcgagaaggagctggccctggtgaagagactgaagcccctgttcaacaagagcttcgagagcaccgtgggccagggcagcgacacctacatctacatcttcagagtgtgcagagaggccggcaaccacaccagcggcgccggcctggtgcagtag

SEQ ID NO: 83328 - DNA, 330 bp, Artificial Sequence
  derived and/or modified sequence
atgttccccttctacagctgctggagaaccggcctgctgctgctgctgctggccgtggccgtgagagagagctggcagaccgaggagaagacctgcgacctggtgggcgagaagggcaaggagagcgagaaggagctggccctggtgaagagactgaagcccctgttcaacaagagcttcgagagcaccgtgggccagggcagcgacacctacatctacatcttcagagtgtgcagagaggccggcaaccacaccagcggcgccggcctggtgcagatcaacaagagcaacggcaaggagaccgtggtgggcagactgaacgagacctag

SEQ ID NO: 83329 - protein, 479 aa, Artificial Sequence
  derived and/or modified sequence
MVHSSMGAPEIRMSKPLEAEKQGLDSPSEHTDTERNGPDTNHQNPQNKTSPFSVSPTGPSTKIKAEDPSGDSAPAAPLPPQPAQPHLPQAQLMLTGSQLAGDIQQLLQLQQLVLVPGHHLQPPAQFLLPQAQQSQPGLLPTPNLFQLPQQTQGALLTSQPRAGLPTQAVTRPTLPDPHLSHPQPPKCLEPPSHPEEPSDLEELEQFARTFKQRRIKLGFTQGDVGLAMGKLYGNDFSQTTISRFEALNLSFKNMCKLKPLLEKWLNDAETMSVDSSLPSPNQLSSPSLGFDGLPGRRRKKRTSIETNVRFALEKSFLANQKPTSEEILLIAEQLHMEKEVIRVWFCNRRQKEKRINPCSAAPMLPSPGKPASYSPHMVTPQGGAGTLPLSQASSSLSTTVTTLSSAVGTLHPSRTAGGGGGGGGAAPPLNSIPSVTPPPPATTNSTNPSPQGSHSAIGLSGLNPSTGPGLWWNPAPYQP

SEQ ID NO: 83330 - protein, 474 aa, Artificial Sequence
  derived and/or modified sequence
MGAPEIRMSKPLEAEKQGLDSPSEHTDTERNGPDTNHQNPQNKTSPFSVSPTGPSTKIKAEDPSGDSAPAAPLPPQPAQPHLPQAQLMLTGSQLAGDIQQLLQLQQLVLVPGHHLQPPAQFLLPQAQQSQPGLLPTPNLFQLPQQTQGALLTSQPRAGLPTQAVTRPTLPDPHLSHPQPPKCLEPPSHPEEPSDLEELEQFARTFKQRRIKLGFTQGDVGLAMGKLYGNDFSQTTISRFEALNLSFKNMCKLKPLLEKWLNDAETMSVDSSLPSPNQLSSPSLGFDGLPGRRRKKRTSIETNVRFALEKSFLANQKPTSEEILLIAEQLHMEKEVIRVWFCNRRQKEKRINPCSAAPMLPSPGKPASYSPHMVTPQGGAGTLPLSQASSSLSTTVTTLSSAVGTLHPSRTAGGGGGGGGAAPPLNSIPSVTPPPPATTNSTNPSPQGSHSAIGLSGLNPSTGPGLWWNPAPYQP

SEQ ID NO: 83331 - DNA, 1440 bp, Artificial Sequence
  derived and/or modified sequence
atggtccactcttccatgggcgcccccgaaatccggatgtcgaagccccttgaggcggagaaacaaggattagacagcccctccgaacacaccgatacagagcgcaacggcccggataccaatcatcaaaatccccagaacaaaacatcccccttcagtgtctcccctacaggcccctcaactaaaataaaggcagaggaccctagcggcgattcagccccggccgcccctctgccacctcagcccgcacaaccacacctcccacaggctcaactgatgctcaccggaagccagttggcaggcgacattcaacagttgttgcagctgcagcagcttgtgttggtccccggccaccatctccagcctccagcccaattcctgcttccacaggcgcagcagagtcagcctggacttctgcccactccaaacctttttcagctgccccagcagacccagggcgctctgctcactagccagccaagggctgggctgccaacccaggctgtaaccagacccacactcccagaccctcacctttcacatccacagcctcccaagtgcctggagcctcctagccatcctgaggagccatctgacctggaggaacttgagcagttcgctagaacatttaaacagaggagaatcaagctcggtttcacccaaggtgacgttggcttggctatgggcaaactgtacggcaacgatttcagccagaccaccatcagccgattcgaggcacttaacctctctttcaaaaatatgtgcaagttgaagccacttctggagaaatggctaaacgacgctgagacgatgtccgtggatagcagcctgccttcacccaatcagttatctagcccatccctggggtttgacggcctgcccggccggcggagaaaaaaacgcaccagcatcgaaacgaacgtgaggttcgcactagagaaatcgttcctcgctaaccagaaacccacttctgaagaaatcctgctgatcgcagagcagcttcacatggaaaaggaggtgataagggtatggttttgtaaccgacgccaaaaggagaagaggattaacccatgttctgctgccccaatgcttccatcacctggaaagccggcttcttatagtccgcatatggtgactcctcaagggggcgcaggcaccctccctttatcacaggcatcttccagcctgagcaccactgtcacaactttaagcagtgccgtcggaacattgcacccctcaaggacagctggaggtggaggaggtggagggggagcagcgcccccactaaactcaattccctctgttacgccacccccacctgctactaccaattccaccaacccttctcctcaagggtcacatagtgcaattgggctgtccggcctgaacccttccacaggacccgggttatggtggaaccctgccccgtatcaaccgtag

SEQ ID NO: 83332 - DNA, 1425 bp, Artificial Sequence
  derived and/or modified sequence
atgggggctccagaaatcaggatgtcaaagccgcttgaggcggaaaagcaaggactggatagtccttctgaacatactgataccgaacgaaacggccctgacactaaccaccaaaacccccaaaacaagacatccccgttcagcgtgagtcccacaggcccgagcactaaaatcaaggcggaagacccatcgggtgactctgctccggccgcgcctctgccacctcagccagcccagccccaccttccccaagcccaactgatgcttacaggatcccagctcgccggcgacatccagcagctgctgcagctccaacaactggtacttgtgcctggccatcatctgcaacctcctgcccaatttttgctgccccaggcccaacagtcacagcccggccttctgccaaccccaaacctctttcaactgccacagcaaacacagggggcactcttaacaagccaaccaagagccggtctgcctactcaggccgtaacccggccaactcttcccgatcctcacttgagccatcctcagccacctaagtgtttggagccaccttctcaccctgaggagccttcagacttagaagagctggagcaattcgccaggactttcaagcagcgcagaattaagctgggctttacacaaggcgacgtgggtctggccatggggaagctgtatggcaatgatttttcccagacaaccatctccagattcgaggcgctcaacctgtcttttaaaaatatgtgcaagctaaagcctctgttggaaaaatggctcaacgacgctgagacgatgtcggtggattcatcactcccttccccaaaccagctctccagtcccagtctcggttttgatggcctacctgggagacgtaggaaaaaaaggacctcaattgagaccaacgtgagatttgcccttgaaaagtctttcctggctaaccagaagcccacctccgaggagattctcctgattgccgagcaactgcacatggagaaggaggtgatcagagtgtggttttgcaatagacggcaaaaagagaagagaatcaatccatgctccgccgcccctatgctcccatccccgggtaaacctgcctcgtatagcccacatatggtaactccgcaaggcggtgcaggaactctgccactcagccaggcttcctcatcactgtccacaacggtgacgacattaagcagtgcagtagggactctgcacccctcccgcacagccggcggcgggggcggggggggtggcgctgcgccgccgctgaattctattccttctgtaactccacccccgcccgcaaccacaaatagcacaaaccctagccctcagggtagccactctgctatagggctctccggtctgaatccatctactggcccaggcctgtggtggaatcctgccccctaccagccttag

SEQ ID NO: 83333 - DNA, 1440 bp, Artificial Sequence
  derived and/or modified sequence
atggtgcacagctccatgggcgcccctgagatccgcatgagcaagcccctggaggccgagaagcagggcctggacagccccagcgagcacacagacacagaaagaaatggaccagacaccaaccaccagaacccccagaacaagaccagccccttctctgtgagccccaccggccccagcaccaagatcaaggccgaggaccccagcggggacagcgccccagctgcccccctgcccccccagcctgcccagccccacctgccccaggcccagctgatgctgaccggcagccagctggccggggacatccagcagctgctgcagctgcagcagctggtgctggtgcccggccaccacctgcagcccccagcccagttcctgctgccccaggcccagcagagccagcccggcctgctgcccacccccaacctcttccagctgccccagcagacccagggcgccctgctgaccagccagccccgggccggcctgcccacccaggccgtgacccggcccaccctgcctgacccccacctgagccacccccagccccccaagtgcctggagccccccagccaccctgaggagcccagcgacctggaggagctggagcagtttgcccggaccttcaagcagaggcgcatcaagctgggcttcacccagggagatgtgggcctggccatgggcaagctgtatggaaatgacttcagccagaccaccatcagcagatttgaggccctgaacctgtccttcaagaacatgtgcaagctgaagcccctgctggagaagtggctgaatgatgctgagaccatgtctgtggacagcagcctgcccagccccaaccagctgagcagccccagcctgggctttgatggcctgcccggcagaagaaggaagaagaggaccagcattgagaccaacgtgcgctttgccctggagaagagcttcctggccaaccagaagcccaccagcgaggagatcctgctgattgctgagcagctgcacatggagaaggaggtgatccgggtgtggttctgcaacagacggcagaaggagaagaggatcaacccctgcagcgctgcccccatgctgcccagccctgggaagccagccagctacagcccccacatggtgaccccccagggcggggccggcaccctgcccctgagccaggccagcagcagcctgagcaccaccgtgaccaccctgagcagcgctgtgggcaccctgcaccccagcaggacagctgggggcggcggcggcggcggcggggccgccccacccctgaacagcatccccagcgtgaccccacctcctccagccaccaccaacagcaccaaccccagcccccagggcagccacagcgccatcggcctgagcggcctgaaccccagcacaggccctggcctgtggtggaacccagccccctaccagccctag

SEQ ID NO: 83334 - DNA, 1425 bp, Artificial Sequence
  derived and/or modified sequence
atgggcgcccctgagatccgcatgagcaagcccctggaggccgagaagcagggcctggacagccccagcgagcacacagacacagaaagaaatggaccagacaccaaccaccagaacccccagaacaagaccagccccttctctgtgagccccaccggccccagcaccaagatcaaggccgaggaccccagcggggacagcgccccagctgcccccctgcccccccagcctgcccagccccacctgccccaggcccagctgatgctgaccggcagccagctggccggggacatccagcagctgctgcagctgcagcagctggtgctggtgcccggccaccacctgcagcccccagcccagttcctgctgccccaggcccagcagagccagcccggcctgctgcccacccccaacctcttccagctgccccagcagacccagggcgccctgctgaccagccagcccagggctggcctgcccacccaggccgtgacccggcccaccctgcctgacccccacctgagccacccccagccccccaagtgcctggagccccccagccaccctgaggagcccagcgacctggaggagctggagcagtttgcccggaccttcaagcagaggcgcatcaagctgggcttcacccagggagatgtgggcctggccatgggcaagctgtatggaaatgacttcagccagaccaccatcagcagatttgaggccctgaacctgtccttcaagaacatgtgcaagctgaagcccctgctggagaagtggctgaatgatgctgagaccatgtctgtggacagcagcctgcccagccccaaccagctgagcagccccagcctgggctttgatggcctgcctggaagaagaaggaagaagaggaccagcattgagaccaacgtgcgctttgccctggagaagagcttcctggccaaccagaagcccaccagcgaggagatcctgctgattgctgagcagctgcacatggagaaggaggtgatccgggtgtggttctgcaacagacggcagaaggagaagaggatcaacccctgcagcgctgcccccatgctgcccagccctgggaagccagccagctacagcccccacatggtgaccccccagggcggggccggcaccctgcccctgagccaggccagcagcagcctgagcaccaccgtgaccaccctgagcagcgctgtgggcaccctgcaccccagcaggacagctgggggcggcggcggcggcggcggggccgccccacccctgaacagcatccccagcgtgaccccacctcctccagccaccaccaacagcaccaaccccagcccccagggcagccacagcgccatcggcctgagcggcctgaaccccagcactggacctggcctgtggtggaacccagccccctaccagccctag

SEQ ID NO: 83335 - DNA, 1440 bp, Artificial Sequence
  derived and/or modified sequence
atggtgcacagcagcatgggcgcccccgagatccggatgagcaagcccctcgaagcagaaaaacagggacttgattccccatctgaacatactgacacagagcgaaacggccctgataccaatcaccaaaatcctcagaacaagacatcccccttcagcgtgagccctaccgggcccagtaccaaaattaaggctgaagacccgtcaggagactctgctcccgccgcccccctgcctccacagcccgcgcagccccacctgccccaagcgcagcttatgctcacagggtcacaactggccggagacatccagcagctcctgcagctgcagcagctcgtgctggtgcccggacaccaccttcagcctccggctcagtttctcctaccgcaggctcagcagagccaaccaggactgctccctactcctaatctgttccagctgccccagcagacacaaggggcccttctgacatcccaacctcgggccggcctgcccacacaggctgttaccaggcccaccctgccggatcctcacttgtcgcacccccagcccccaaaatgcttggaaccaccttctcacccagaggagccctctgacttggaggaactggagcagttcgctcggacgtttaaacagcgtagaatcaaattgggttttacgcagggggacgtgggtcttgctatgggaaagctgtatggaaacgacttctctcagacgaccatctctcggtttgaagcactcaatctgagttttaagaatatgtgcaagttgaagcctctcctagagaaatggcttaacgatgccgaaacgatgtctgtggatagcagcctgccgtccccaaaccagctgtcttccccctccttgggctttgacggccttcctggcaggcggaggaagaaacgaacaagcattgaaactaacgtgcgtttcgccctagagaagagttttctggccaaccagaagcctacctcggaggagattttacttatagctgaacagctgcacatggaaaaagaagtgatccgggtatggttttgtaatagacggcagaaggagaagcgaatcaacccgtgttccgccgcaccaatgctgccatctccagggaagccagcgagttacagcccccatatggtgactccacagggaggagccgggacactgccgttgagccaggcttcaagcagtctatctactacggtgactacactgtctagcgcggtggggaccctgcacccatcccgcactgccggcggcggagggggtggggggggtgcagctccaccgttaaactctatcccctctgtcactccccccccgcctgcgactaccaacagcactaaccctagtccccagggctctcatagcgccattggccttagcggcctcaatccatcaaccgggcccggactgtggtggaatcccgcaccataccagccttag

SEQ ID NO: 83336 - DNA, 1425 bp, Artificial Sequence
  derived and/or modified sequence
atgggcgcccccgagatccggatgagcaagcccctggaggccgagaaacagggactggattcgcctagcgaacacactgatactgagcgcaatggccctgatacaaatcatcagaatccccagaataagacatctcccttctcggtgtctccaaccggaccttcaactaaaattaaagcggaggatccatctggtgactccgcacctgctgcccccctcccaccccagcctgcccaaccacacctgcctcaggcccaactaatgctgaccggttcacagctggctggagacatacaacaactcctccaactccagcagctcgtcctggttccagggcatcacttgcaaccacccgcacagtttcttcttccccaggcccagcagtcacaacccggactcctgcctactccaaatcttttccaattaccccaacaaacccaaggcgccttactcacatcccagccccgagcaggccttccaacacaagcggtaactcgacccaccctacccgatcctcacttatcgcaccctcagccgccaaaatgcctggagccacccagccaccccgaggagcctagcgatctcgaggaattagagcaatttgcccgaacctttaaacagcgcaggattaaactcggctttacgcagggcgatgtgggcctggctatggggaaactgtacgggaatgatttcagccagactactatctcccgtttcgaggcactgaacctcagctttaaaaacatgtgcaaattgaaacctctgctggagaagtggctgaacgacgcagagactatgtctgttgattcttcacttccctctccaaaccagttgagtagtccatctttaggcttcgacggcctgccaggccgccgcaggaaaaaacgtacatcaatcgaaaccaacgttcggtttgccctggagaagagctttctggctaatcagaagcccacttcagaggagattcttttaatcgcagaacaactgcacatggagaaagaggtgatccgtgtctggttttgtaaccgtagacagaaagagaaacgtattaacccttgcagcgcagccccgatgcttccaagtcccggtaaacccgcctcctactctccacacatggtcacccctcagggcggggcaggcactctaccactctcccaagcttcctcatcactcagcacgaccgtgacgaccctgagttccgccgtgggtacattacatcctagcagaaccgcaggcgggggaggcggcgggggcggcgccgcacccccattgaacagcatccccagcgtcacccccccacctccagccacgacgaactccactaacccctccccgcaaggcagtcactctgccattggcttgtctggcctaaatcctagcacaggacccgggctgtggtggaatccagccccataccagccttag

SEQ ID NO: 83337 - DNA, 4536 bp, Artificial Sequence
  derived and/or modified sequence
ggctcggcccccagagagggtggggagatgacacagttgttcccccagccctggcggggcgggcagcatggttcactccagcatgggggctccagaaataagaatgtctaagcccctggaggccgagaagcaaggtctggactccccatcagagcacacagacaccgaaagaaatggaccagacactaatcatcagaacccccaaaataagacctccccattctccgtgtccccaactggccccagtacaaagatcaaggctgaagaccccagtggcgattcagccccagcagcacccctgccccctcagccggcccagcctcatctgccccaggcccaactcatgttgacgggcagccagctagctggggacatacagcagctcctccagctccagcagctggtgcttgtgccaggccaccacctccagccacctgctcagttcctgctaccgcaggcccagcagagccagccaggcctgctaccgacaccaaatctattccagctacctcagcaaacccagggagctcttctgacctcccagccccgggccgggcttcccacacaggccgtgacccgccctacgctgcccgacccgcacctctcgcacccgcagccccccaaatgcttggagccaccatcccaccccgaggagcccagtgatctggaggagctggagcaattcgcccgcaccttcaagcaacgccgcatcaagctgggcttcacgcagggtgatgtgggcctggccatgggcaagctctacggcaacgacttcagccagacgaccatttcccgcttcgaggccctcaacctgagcttcaagaacatgtgcaaactcaagcccctcctggagaagtggctcaacgatgcagagactatgtctgtggactcaagcctgcccagccccaaccagctgagcagccccagcctgggtttcgacggcctgcccggccggagacgcaagaagaggaccagcatcgagacaaacgtccgcttcgccttagagaagagttttctagcgaaccagaagcctacctcagaggagatcctgctgatcgccgagcagctgcacatggagaaggaagtgatccgcgtctggttctgcaaccggcgccagaaggagaaacgcatcaacccctgcagtgcggcccccatgctgcccagcccagggaagccggccagctacagcccccatatggtcacaccccaagggggcgcggggaccttaccgttgtcccaagcttccagcagtctgagcacaacagttactaccttatcctcagctgtggggacgctccaccccagccggacagctggagggggtgggggcgggggcggggctgcgccccccctcaattccatcccctctgtcactcccccacccccggccaccaccaacagcacaaaccccagccctcaaggcagccactcggctatcggcttgtcaggcctgaaccccagcacgggccctggcctctggtggaaccctgccccttaccagccttgatggcagcgggaatctggtgctgggggcagccggtgcagccccggggagccctggcctggtgacctcgccgctcttcttgaatcatgctgggctgcccctgctcagcaccccgcctggtgtgggcctggtctcagcagcggctgcggctgtggcagcctccatctccagcaagtctcctggcctctcctcctcatcctcttcatcctcatcctcctcctcctccacttgcagcgagacggcagcacagacccctggaggtccaggggggcccgaggcagggtccaaacctgagtgagggccagccatgcctcccctcccattcctctggtccctgccttggtcccttgcctgggaagagggcgaggaggccagtggtggggacgcagagggtcctcagagcaggagtgacaagggaggaaagaccaaaaaaacaaccaaccaaaaaaaaaaaaaaaaaggaaagaaactaaccaacaaaagagaaaaccaaaaataatcacaacagaaaccagctgccccaaaggaaccagaggtgaaaaacaaacaaaaaaaaaccaaaaacaaaccaaaaaaaaaaaaaacccacaaaatcaaacaaaccaaaaaaccagtcgcgagccagacctcagcgtgctcaccctcactgctacgacgccaaataaaaaccccagccaggggcggagaagcctccagcaggtcagacctcatgccaccgagccctggctgtgggaccaacccccaaccctgcctcccccgtgggggctacagaaggaaaaagagaagatgccagcttcctaatcccagcccccagccctgggccagcgaagacagggcacagcctgggcagatgggctggggcttagcaccacccaccaaatgttcttttccagaaggtgaaagagaaagggcctgaacaaccttacaccaaatattcagtagcttcatccaaaggatgtacagaatttttagcattgtgctcaacagaatgtgtccctaccatgtgtccccttctcccctggcccccagctctccccacctgggcagggggtcttgctttaacctcctccctccccccagcaggggagagttcaagggaaggcctgcggacaacttttcatcccctgttcctccctcttttcccctttgaagggtgggctaggccattttgccaagttctagctctcacaagtccctcctcaaccctgtcaccctcctctgctctggaactgactccctccccagcctatgggaaggtggaaatttcaggcaagaggggatgaagacattcagttgagggcattcagttgtctttttccatcctgtctgtttccctgaaaaaaaaaaaaattcatattccagtgcctatccgtgggatccttcacgttctttgacattaaccagaaaccaaaaagagaactcacctcgcttttcccaccctgtgcccctctggtactggcgaatgcctctccctccccccacatgcacgcacgcacacaccccagtggtggggttcctcgagatggcatccccatcagggtccatgtggtggggacagtgccacagcctgtggtccccatctgagagggcgcggtggtggccaccactcccacaagacctccacaactcttggctggaccctgtgtttgaccagccccggacacgtctccactgacgacggacagaggagagacaccactgggagccaccctgccctcctgctattgtggaggccaacaaagttttgaaccgaaaaccaaaaaaacagaaacaaacaaacaataaatttaaactagaaaaaaaatttatatatatatataaacatatatatatatatatatataaaagggaaagaagatgaggactcttcaagaataagatggaaccgcgaggcggagccaagcccctgcaccggtggtccaggcccttgttccccaaggcggatggaaggacggatgcttctttctcttcacaaatacctcatggacgttgtctttgggaaagccggagggggcggctggggcagggcctgtccctcggccagggcagatggaagcgggtgggcggggctgagagagggtatcagggacaggggtgaagagccccaaactcccctcccaaatcaactgaaaaagctttaaaaaaagacaggaaaaaaaggagtaagaaagcaaaaagaacagatgaaggaaaacttaacaacttttgggtggtttgattcctcctttgatttctttttcggttctcttttgtctgacctctctcctcccctccttcctctctcctcccctccttcctctctcctctcctccttcctgtctcctctctctccctttgctctcctctcttctctctcaatcttgttctttctgtgtctctcctcaaaccaaagtgttgcagtgaaggacacgagccattgaaatcagggtggggcctgacagccgtagtgtggcccctgccccttgttgggcaggagcagagagagaggagagccctgagaccgcagggctttggcctgggcagcttccactttctgccggacactctgaggagaggcagatggagctccaggcctcagcgttctcttttttccttgtctcccttctcccacccgggaaatgaaactgttgggctgggcgacggaggcagcagagactcggccattgcaggggcctctgggtgccttgtccgggcagtggtgaagtagccgcccctcccaccccggcacgatggggcctggcacctcgtctacccaacctcaccggaatgtaagcatctccgctgaacgactccctgcccttaccctacctctgagtttgtccatgtttatttcctgaagagagaagggactggcaagagggcttgggccccagcccaagggtggagagggggccaagggctcctgaccaaataggaaggacatttgagcagagcaaaatgaaaggaattacaaccaaaaaccccctccgagaagacaggcagcatggaaggcatggtggagatgactcaaacaaaaactatgattctagacc

SEQ ID NO: 83338 - DNA, 1928 bp, Artificial Sequence
  derived and/or modified sequence
tggcggggcgggcagcatggttcactccagcatgggggctccagaaataagaatgtctaagcccctggaggccgagaagcaaggtctggactccccatcagagcacacagacaccgaaagaaatggaccagacactaatcatcagaacccccaaaataagacctccccattctccgtgtccccaactggccccagtacaaagatcaaggctgaagaccccagtggcgattcagccccagcagcacccctgccccctcagccggcccagcctcatctgccccaggcccaactcatgttgacgggcagccagctagctggggacatacagcagctcctccagctccagcagctggtgcttgtgccaggccaccacctccagccacctgctcagttcctgctaccgcaggcccagcagagccagccaggcctgctaccgacaccaaatctattccagctacctcagcaaacccagggagctcttctgacctcccagccccgggccgggcttcccacacaggccgtgacccgccctacgctgcccgacccgcacctctcgcacccgcagccccccaaatgcttggagccaccatcccaccccgaggagcccagtgatctggaggagctggagcaattcgcccgcaccttcaagcaacgccgcatcaagctgggcttcacgcagggtgatgtgggcctggccatgggcaagctctacggcaacgacttcagccagacgaccatttcccgcttcgaggccctcaacctgagcttcaagaacatgtgcaaactcaagcccctcctggagaagtggctcaacgatgcagagactatgtctgtggactcaagcctgcccagccccaaccagctgagcagccccagcctgggtttcgacggcctgcccggccggagacgcaagaagaggaccagcatcgagacaaacgtccgcttcgccttagagaagagttttctagcgaaccagaagcctacctcagaggagatcctgctgatcgccgagcagctgcacatggagaaggaagtgatccgcgtctggttctgcaaccggcgccagaaggagaaacgcatcaacccctgcagtgcggcccccatgctgcccagcccagggaagccggccagctacagcccccatatggtcacaccccaagggggcgcggggaccttaccgttgtcccaagcttccagcagtctgagcacaacagttactaccttatcctcagctgtggggacgctccaccccagccggacagctggagggggtgggggcgggggcggggctgcgccccccctcaattccatcccctctgtcactcccccacccccggccaccaccaacagcacaaaccccagccctcaaggcagccactcggctatcggcttgtcaggcctgaaccccagcacgggccctggcctctggtggaaccctgccccttaccagccttgatggcagcgggaatctggtgctgggggcagccggtgcagccccggggagccctggcctggtgacctcgccgctcttcttgaatcatgctgggctgcccctgctcagcaccccgcctggtgtgggcctggtctcagcagcggctgcggctgtggcagcctccatctccagcaagtctcctggcctctcctcctcatcctcttcatcctcatcctcctcctcctccacttgcagcgagacggcagcacagacccctggaggtccaggggggcccgaggcagggtccaaacctgagtgagggccagccatgcctcccctcccattcctctggtccctgccttggtcccttgcctgggaagagggcgaggaggccagtggtggggacgcagagggtcctcagagcaggagtgacaagggaggaaagaccaaaaaaacaaccaaccaaaaaaaaaaaaaaaaaggaaagaaactaacc

SEQ ID NO: 83339 - DNA, 1440 bp, Artificial Sequence
  derived and/or modified sequence
atggttcatagtagtatgggagctccggaaatccgcatgtcgaagccactggaggccgaaaagcaggggttggattccccatctgagcacaccgacaccgagcgcaacggacccgacaccaatcatcagaaccctcagaacaaaacgtcaccattctctgtctcacctacagggcctagtacaaagattaaggcagaggacccgtcaggcgattctgcccctgccgctcctttgccccctcagccggctcaaccacacctgccacaagctcaattaatgctgacgggtagtcagctggcgggagatatccagcaactcctgcagcttcaacagctcgttctggtgcctggccatcaccttcagccaccagcccagttccttctgcctcaggctcagcagtcccagcccggattgctgcccacgccaaatcttttccaactccctcagcagacccagggggcacttctgaccagccaacctcgcgcaggcctcccaacccaagccgttacgcgcccaacactccccgacccccacctttcccatccccaacccccaaagtgcctggaacctcctagtcacccagaggagccctctgaccttgaggagctagagcagtttgctagaaccttcaaacaacgcaggataaaactgggctttacacagggggatgtgggcctggccatgggtaagctgtatggaaacgatttctcccagactaccattagccgcttcgaggctttgaatttgagttttaaaaacatgtgcaaactcaagcccctgttggagaagtggttgaatgatgctgagactatgtccgtggatagcagtctccccagtccgaaccaactctctagcccaagcctcggattcgatggtctgcccggacggcgaagaaagaagagaacttctatcgagactaatgtgagatttgctctcgagaaatcatttttggccaatcagaaaccaacaagcgaagaaatcctcctgattgcagagcagctgcatatggagaaagaggtcatacgggtgtggttctgcaatcggaggcaaaaagagaaacgtatcaacccgtgtagtgccgctcccatgttgccaagccccggaaaaccggctagttattcacctcacatggttaccccgcagggaggagccggaactttgcctctctcccaggcttccagctcactgtctacaaccgtgactactttgtcttccgcagtcggcactctgcacccttctcgcactgcgggaggcggtggcggtgggggaggcgctgcaccacccctgaacagtataccatccgtgactcctcccccacccgctactactaacagcacaaatccttctccacaggggagccattctgcaattggcctgtcaggcctcaacccctccacaggcccaggcctgtggtggaaccccgctccgtaccagccatag

SEQ ID NO: 83340 - DNA, 1425 bp, Artificial Sequence
  derived and/or modified sequence
atgggggctcccgaaattagaatgagcaaacccctcgaagccgagaagcagggtctggatagtccctccgaacatacggataccgagcggaacggaccagatacgaatcaccagaacccccagaacaagacaagtcccttcagcgtgtcaccgacaggcccatccaccaaaatcaaagcggaagacccatcaggggacagcgccccagcagccccactccctccacagcccgcacagccacatcttcctcaggcgcagttaatgctgacaggcagccagctcgccggtgacattcagcagctactccagctgcaacaactggttttggtgcctggtcaccaccttcaaccacccgcacagtttcttctgccccaggctcagcagtcccaacctgggctgctgcccactcctaatctcttccagttgccccagcaaacccaaggcgcactgctcacttcacaaccgcgagccggacttcccacacaggctgtgactcggcctacactgcccgatccccacctgtcccatccccaacctccgaagtgtcttgagcccccttcccatcccgaggagccgagcgatctagaagagcttgagcagttcgccaggacattcaagcagaggcgcataaagctcgggtttactcagggggacgtgggcctggccatgggcaagctgtacggaaacgatttttcacagaccaccatcagtcgtttcgaagccctgaatttgagctttaagaatatgtgcaagctaaagcctctccttgagaagtggctgaatgatgctgagactatgagtgtggatagctcattgcctagtcctaatcagctttccagcccatcattggggtttgatggcttaccaggaaggagacgcaaaaaacggacgtcgatcgagacgaacgtgagatttgccctcgagaaaagcttcttggccaatcagaaaccaacctctgaagagatcttactgatcgctgagcagctgcatatggagaaggaagtgattagagtgtggttttgcaacagaaggcagaaagagaagaggataaacccctgttctgctgcccctatgctcccctcccctggaaaaccggcatcgtacagtccgcacatggtcacaccacagggcggagcaggaacacttcctctgagccaagcatcttctagtcttagtacgacggttacaaccctgtcgtccgcagtgggcacgcttcaccctagcagaaccgccggaggcggtggcggaggaggcggagcagctcccccattgaactcaataccctctgtcacacccccaccacctgcaacaactaattctactaacccttctccacagggtagccatagcgcaatcgggttgtctgggctgaatccgtcaaccggtcctgggttgtggtggaatccagcaccttatcagccatag

SEQ ID NO: 83341 - DNA, 1440 bp, Artificial Sequence
  derived and/or modified sequence
atggtgcacagcagcatgggcgcccccgagatcagaatgagcaagcccctggaggccgagaagcagggcctggacagccccagcgagcacaccgacaccgagagaaacggccccgacaccaaccaccagaacccccagaacaagaccagccccttcagcgtgagccccaccggccccagcaccaagatcaaggccgaggaccccagcggcgacagcgcccccgccgcccccctgcccccccagcccgcccagccccacctgccccaggcccagctgatgctgaccggcagccagctggccggcgacatccagcagctgctgcagctgcagcagctggtgctggtgcccggccaccacctgcagccccccgcccagttcctgctgccccaggcccagcagagccagcccggcctgctgcccacccccaacctgttccagctgccccagcagacccagggcgccctgctgaccagccagcccagagccggcctgcccacccaggccgtgaccagacccaccctgcccgacccccacctgagccacccccagccccccaagtgcctggagccccccagccaccccgaggagcccagcgacctggaggagctggagcagttcgccagaaccttcaagcagagaagaatcaagctgggcttcacccagggcgacgtgggcctggccatgggcaagctgtacggcaacgacttcagccagaccaccatcagcagattcgaggccctgaacctgagcttcaagaacatgtgcaagctgaagcccctgctggagaagtggctgaacgacgccgagaccatgagcgtggacagcagcctgcccagccccaaccagctgagcagccccagcctgggcttcgacggcctgcccggcagaagaagaaagaagagaaccagcatcgagaccaacgtgagattcgccctggagaagagcttcctggccaaccagaagcccaccagcgaggagatcctgctgatcgccgagcagctgcacatggagaaggaggtgatcagagtgtggttctgcaacagaagacagaaggagaagagaatcaacccctgcagcgccgcccccatgctgcccagccccggcaagcccgccagctacagcccccacatggtgaccccccagggcggcgccggcaccctgcccctgagccaggccagcagcagcctgagcaccaccgtgaccaccctgagcagcgccgtgggcaccctgcaccccagcagaaccgccggcggcggcggcggcggcggcggcgccgccccccccctgaacagcatccccagcgtgaccccccccccccccgccaccaccaacagcaccaaccccagcccccagggcagccacagcgccatcggcctgagcggcctgaaccccagcaccggccccggcctgtggtggaaccccgccccctaccagccctag

SEQ ID NO: 83342 - DNA, 1425 bp, Artificial Sequence
  derived and/or modified sequence
atgggcgcccccgagatcagaatgagcaagcccctggaggccgagaagcagggcctggacagccccagcgagcacaccgacaccgagagaaacggccccgacaccaaccaccagaacccccagaacaagaccagccccttcagcgtgagccccaccggccccagcaccaagatcaaggccgaggaccccagcggcgacagcgcccccgccgcccccctgcccccccagcccgcccagccccacctgccccaggcccagctgatgctgaccggcagccagctggccggcgacatccagcagctgctgcagctgcagcagctggtgctggtgcccggccaccacctgcagccccccgcccagttcctgctgccccaggcccagcagagccagcccggcctgctgcccacccccaacctgttccagctgccccagcagacccagggcgccctgctgaccagccagcccagagccggcctgcccacccaggccgtgaccagacccaccctgcccgacccccacctgagccacccccagccccccaagtgcctggagccccccagccaccccgaggagcccagcgacctggaggagctggagcagttcgccagaaccttcaagcagagaagaatcaagctgggcttcacccagggcgacgtgggcctggccatgggcaagctgtacggcaacgacttcagccagaccaccatcagcagattcgaggccctgaacctgagcttcaagaacatgtgcaagctgaagcccctgctggagaagtggctgaacgacgccgagaccatgagcgtggacagcagcctgcccagccccaaccagctgagcagccccagcctgggcttcgacggcctgcccggcagaagaagaaagaagagaaccagcatcgagaccaacgtgagattcgccctggagaagagcttcctggccaaccagaagcccaccagcgaggagatcctgctgatcgccgagcagctgcacatggagaaggaggtgatcagagtgtggttctgcaacagaagacagaaggagaagagaatcaacccctgcagcgccgcccccatgctgcccagccccggcaagcccgccagctacagcccccacatggtgaccccccagggcggcgccggcaccctgcccctgagccaggccagcagcagcctgagcaccaccgtgaccaccctgagcagcgccgtgggcaccctgcaccccagcagaaccgccggcggcggcggcggcggcggcggcgccgccccccccctgaacagcatccccagcgtgaccccccccccccccgccaccaccaacagcaccaaccccagcccccagggcagccacagcgccatcggcctgagcggcctgaaccccagcaccggccccggcctgtggtggaaccccgccccctaccagccctag

SEQ ID NO: 83343 - protein, 467 aa, Artificial Sequence
  derived and/or modified sequence
MVHSSMGAPEIRMSKPLEAEKQGLDSPSEHTDTERNGPDTNHQNPQNKTSPFSVSPTGPSTKIKAEDPSGDSAPAAPLPPQPAQPHLPQAQLMLTGSQLAGDIQQLLQLQQLVLVPGHHLQPPAQFLLPQAQQSQPGLLPTPNLFQLPQQTQGALLTSQPRAGLPTQAVTRPTLPDPHLSHPQPPKCLEPPSHPEEPSDLEELEQFARTFKQRRIKLGFTQGDVGLAMGKLYGNDFSQTTISRFEALNLSFKNMCKLKPLLEKWLNDAETMSVDSSLPSPNQLSSPSLGFDGLPGRRRKKRTSIETNVRFALEKSFLANQKPTSEEILLIAEQLHMEKEVIRVWFCNRRQKEKRINPCSAAPMLPSPGKPASYSPHMVTPQGGAGTLPLSQASSSLSTTVTTLSSAVGTLHPSRTAGGGGGGGGAAPPLNSIPSVTPPPPATTNSTNPSPQGSHSAIGLSGLNPSTG

SEQ ID NO: 83344 - DNA, 1404 bp, Artificial Sequence
  derived and/or modified sequence
atggtgcacagctcgatgggggccccggagatcagaatgtctaaacctttggaggctgagaagcagggattggactcccccagcgaacacacagataccgaacgcaacgggcctgacacgaatcatcagaatccacagaataaaacaagtccgttctcagtcagccccaccggaccatctactaagatcaaagcggaggatccgagcggtgattcggccccagccgcacctctcccgccgcagcctgcccagccccacctcccccaggcccagctcatgctgaccgggtcccagctagccggcgatatccagcagttgctgcaactccagcagttagtgctggttcctggacaccaccttcagccgccagcccagttccttctgccccaagcgcaacaatcccaaccaggccttctgccaacccccaatctttttcagttgcctcagcaaacacagggtgcgttactgaccagtcagccaagggcaggattgccgacgcaagcggtgactcggccaactctgcctgatccacatctgtctcaccctcaacctcctaagtgtctcgagcccccttcccacccggaggagccatcagatttggaggaactggaacagttcgcaagaacgttcaaacagcgacgaattaaacttggttttactcagggcgatgtagggcttgccatgggcaaactgtatggtaacgattttagtcagaccaccatttctagattcgaagccctaaacctgtcctttaagaatatgtgcaaactgaagcctctactcgaaaaatggctcaatgatgcagaaacaatgagtgtagattcatctctgcccagcccaaatcaactgtccagcccatccctaggtttcgatggtttgcccggcagacgacggaaaaaaaggacgtccattgaaactaatgtgcggtttgccctggagaaaagctttctagcgaatcagaagccaacttccgaagagatacttctgattgccgagcagctacacatggaaaaggaggtgatccgtgtttggttctgtaatagacggcaaaaagagaagagaatcaacccctgttccgctgctccaatgttgccttcccctggaaagccagcaagctactctccacacatggtcactccccagggaggggcaggaactctcccactgagccaggcctcttccagtcttagtacaacggtcacaacactgagcagcgccgtgggtacattgcatcctagtaggacggcagggggaggagggggcggcggcggagccgctcctccactaaactcgatcccttcagtgactccgcctcccccagccacaacgaatagcaccaacccttcaccgcaaggaagtcattccgcgataggactgagcggcctcaatccaagtaccggttag

SEQ ID NO: 83345 - DNA, 1404 bp, Artificial Sequence
  derived and/or modified sequence
atggtgcacagctccatgggcgcccctgagatccgcatgagcaagcccctggaggccgagaagcagggcctggacagccccagcgagcacacagacacagaaagaaatggaccagacaccaaccaccagaacccccagaacaagaccagccccttctctgtgagccccaccggccccagcaccaagatcaaggccgaggaccccagcggggacagcgccccagctgcccccctgcccccccagcctgcccagccccacctgccccaggcccagctgatgctgaccggcagccagctggccggggacatccagcagctgctgcagctgcagcagctggtgctggtgcccggccaccacctgcagcccccagcccagttcctgctgccccaggcccagcagagccagcccggcctgctgcccacccccaacctcttccagctgccccagcagacccagggcgccctgctgaccagccagccccgggccggcctgcccacccaggccgtgacccggcccaccctgcctgacccccacctgagccacccccagccccccaagtgcctggagccccccagccaccctgaggagcccagcgacctggaggagctggagcagtttgcccggaccttcaagcagaggcgcatcaagctgggcttcacccagggagatgtgggcctggccatgggcaagctgtatggaaatgacttcagccagaccaccatcagcagatttgaggccctgaacctgtccttcaagaacatgtgcaagctgaagcccctgctggagaagtggctgaatgatgctgagaccatgtctgtggacagcagcctgcccagccccaaccagctgagcagccccagcctgggctttgatggcctgcccggcagaagaaggaagaagaggaccagcattgagaccaacgtgcgctttgccctggagaagagcttcctggccaaccagaagcccaccagcgaggagatcctgctgattgctgagcagctgcacatggagaaggaggtgatccgggtgtggttctgcaacagacggcagaaggagaagaggatcaacccctgcagcgctgcccccatgctgcccagccctgggaagccagccagctacagcccccacatggtgaccccccagggcggggccggcaccctgcccctgagccaggccagcagcagcctgagcaccaccgtgaccaccctgagcagcgctgtgggcaccctgcaccccagcaggacagctgggggcggcggcggcggcggcggggccgccccacccctgaacagcatccccagcgtgaccccacctcctccagccaccaccaacagcaccaaccccagcccccagggcagccacagcgccatcggcctgagcggcctgaaccccagcactggatag

SEQ ID NO: 83346 - DNA, 1404 bp, Artificial Sequence
  derived and/or modified sequence
atggtgcacagcagcatgggcgcccccgagatccggatgagcaagcccctcgaagccgaaaagcaagggctagacagtcctagtgagcacaccgacacagaacgtaacgggcctgatactaaccatcagaacccccagaacaagacatctcccttcagcgtgtcacctaccgggccaagtacgaagataaaggctgaggacccatcaggcgattctgcaccggctgcgcctttgccaccccaacctgcccagcctcacctcccacaggcacagctgatgcttacaggatcccaactggccggagatatccagcaattattgcaacttcaacagctcgtgctggtcccaggccaccatctgcagccccccgcgcagttcctccttccccaagcccagcagtcccagcctgggttgctaccaaccccgaatctgttccagctcccccagcaaacacagggtgccctcctgacgagccaacctagggctggattacctacgcaggccgttacgagacccacattgccagatcctcatctctctcacccgcaacctcctaagtgcctcgagcctccatcgcaccccgaggaaccatcagacctggaggagttggagcaatttgcccgaacctttaagcaacgtaggataaagctcggttttactcagggtgacgttggcttggcaatgggcaagctgtacggaaatgacttcagccagactactatttcgcgattcgaggccctgaatctgtcttttaaaaatatgtgtaagcttaaacccctcctcgaaaagtggctgaacgatgccgagaccatgagcgtggattcttctcttccctccccaaaccaactgtcctccccctctcttgggtttgatggtctgcctggtcgcagacgtaaaaaacggaccagtattgagactaacgttcgattcgctttggaaaagagcttcctggcaaatcagaaacctaccagtgaggagatcctgctcatagctgaacaattgcacatggagaaggaagtaataagggtatggttctgtaaccggcggcagaaagagaagagaatcaacccatgcagtgcagcacccatgctgccaagtccagggaagcctgcttcttactctccacacatggtcaccccgcaaggcggcgccggaactttgcccctgtcacaggcctcgtcaagcttatccacgacagtgacaaccttatcaagcgccgtggggactctgcacccgagtcgcaccgctggtggggggggggggggcggaggcgctgcacctccactgaacagcattcccagtgtcacacctccaccacccgctacaacaaacagcactaacccatccccacagggctctcactccgcaatcggcctgtccggactgaacccaagtaccggctag

SEQ ID NO: 83347 - DNA, 1703 bp, Artificial Sequence
  derived and/or modified sequence
ggcccccagagagggtggggagatgacacagttgttcccccagccctggcggggcgggcagcatggttcactccagcatgggggctccagaaataagaatgtctaagcccctggaggccgagaagcaaggtctggactccccatcagagcacacagacaccgaaagaaatggaccagacactaatcatcagaacccccaaaataagacctccccattctccgtgtccccaactggccccagtacaaagatcaaggctgaagaccccagtggcgattcagccccagcagcacccctgccccctcagccggcccagcctcatctgccccaggcccaactcatgttgacgggcagccagctagctggggacatacagcagctcctccagctccagcagctggtgcttgtgccaggccaccacctccagccacctgctcagttcctgctaccgcaggcccagcagagccagccaggcctgctaccgacaccaaatctattccagctacctcagcaaacccagggagctcttctgacctcccagccccgggccgggcttcccacacaggccgtgacccgccctacgctgcccgacccgcacctctcgcacccgcagccccccaaatgcttggagccaccatcccaccccgaggagcccagtgatctggaggagctggagcaattcgcccgcaccttcaagcaacgccgcatcaagctgggcttcacgcagggtgatgtgggcctggccatgggcaagctctacggcaacgacttcagccagacgaccatttcccgcttcgaggccctcaacctgagcttcaagaacatgtgcaaactcaagcccctcctggagaagtggctcaacgatgcagagactatgtctgtggactcaagcctgcccagccccaaccagctgagcagccccagcctgggtttcgacggcctgcccggccggagacgcaagaagaggaccagcatcgagacaaacgtccgcttcgccttagagaagagttttctagcgaaccagaagcctacctcagaggagatcctgctgatcgccgagcagctgcacatggagaaggaagtgatccgcgtctggttctgcaaccggcgccagaaggagaaacgcatcaacccctgcagtgcggcccccatgctgcccagcccagggaagccggccagctacagcccccatatggtcacaccccaagggggcgcggggaccttaccgttgtcccaagcttccagcagtctgagcacaacagttactaccttatcctcagctgtggggacgctccaccccagccggacagctggagggggtgggggcgggggcggggctgcgccccccctcaattccatcccctctgtcactcccccacccccggccaccaccaacagcacaaaccccagccctcaaggcagccactcggctatcggcttgtcaggcctgaaccccagcacggggtaagtgggtgcacgtgggaagctgtggggagaagcagggtcgctgctgcttctagggtggggagcggcaccccagttatgttggcaggtccctgcccctgctaatgcctctgctttgcctcttgcagaagcacaatggtggggttgagctccgggctgagtccagccctcatgagcaacaaccctttggccactatccaaggtgcgtgctgcctcatgtcacacccatcgtcaccagccc

SEQ ID NO: 83348 - DNA, 1404 bp, Artificial Sequence
  derived and/or modified sequence
atggtgcatagttctatgggcgcacccgagatcagaatgtcaaaaccattagaggcagagaaacagggcctggatagcccatctgagcacacggacaccgaaaggaacgggccagacaccaaccaccagaacccacaaaataagacaagcccatttagcgtctccccaacaggacctagtacaaaaataaaggctgaagaccctagtggagactccgcccctgcagccccactcccaccgcagcctgcccagcctcacctgcctcaggcacagctgatgctgaccggctcccagttggcaggcgacattcagcagcttctgcaactacaacagctagtgctggtgccagggcaccacctccaaccaccagcccaatttctgctgccccaggcccagcagtcccaacctgggctgttaccaaccccgaacctgtttcagttgccacaacaaacccagggggctctcctgacatcccagcccagagccggactgcccactcaggctgtcacccgacccactcttcccgacccacacctcagccacccccagcctccaaagtgtctcgaacctccgtcccatccggaggagccttcggatctggaagagttggagcagtttgcacggaccttcaagcagagacgcattaagttggggttcacccaaggagacgttggtttggcaatgggcaaattgtacggaaacgacttcagtcagaccaccatctccaggtttgaggcactaaacctctcattcaagaacatgtgtaaattgaagcccctcctggagaaatggttgaacgacgccgagaccatgagcgtggactcttctcttccctcaccaaatcaactgtcatctccatccctgggctttgatggcctgccgggtcgcaggcgtaagaaaaggacaagcattgaaacaaatgtgaggtttgctctggaaaaaagcttcctagccaaccagaagccgaccagcgaggaaattctcttgattgccgagcaactccacatggagaaagaagtcattcgggtgtggttttgtaacagaaggcaaaaagagaaacgcatcaacccatgcagcgcggcacccatgctgccctcgccgggaaaacctgcgagttattccccacatatggtaaccccccagggcggagctggtacactgcccttaagccaggcatcaagctctctgagtaccactgtcaccactctcagtagtgcagtggggaccctgcaccctagccgtacagccggtgggggtggcggaggcggaggcgctgcaccaccgcttaacagcatcccttctgtcactcccccaccacccgcaacaaccaactcaacaaatccaagtccacagggctctcacagtgccattggcctgtccgggttaaatccatccaccggctag

SEQ ID NO: 83349 - DNA, 1404 bp, Artificial Sequence
  derived and/or modified sequence
atggtgcacagcagcatgggcgcccccgagatcagaatgagcaagcccctggaggccgagaagcagggcctggacagccccagcgagcacaccgacaccgagagaaacggccccgacaccaaccaccagaacccccagaacaagaccagccccttcagcgtgagccccaccggccccagcaccaagatcaaggccgaggaccccagcggcgacagcgcccccgccgcccccctgcccccccagcccgcccagccccacctgccccaggcccagctgatgctgaccggcagccagctggccggcgacatccagcagctgctgcagctgcagcagctggtgctggtgcccggccaccacctgcagccccccgcccagttcctgctgccccaggcccagcagagccagcccggcctgctgcccacccccaacctgttccagctgccccagcagacccagggcgccctgctgaccagccagcccagagccggcctgcccacccaggccgtgaccagacccaccctgcccgacccccacctgagccacccccagccccccaagtgcctggagccccccagccaccccgaggagcccagcgacctggaggagctggagcagttcgccagaaccttcaagcagagaagaatcaagctgggcttcacccagggcgacgtgggcctggccatgggcaagctgtacggcaacgacttcagccagaccaccatcagcagattcgaggccctgaacctgagcttcaagaacatgtgcaagctgaagcccctgctggagaagtggctgaacgacgccgagaccatgagcgtggacagcagcctgcccagccccaaccagctgagcagccccagcctgggcttcgacggcctgcccggcagaagaagaaagaagagaaccagcatcgagaccaacgtgagattcgccctggagaagagcttcctggccaaccagaagcccaccagcgaggagatcctgctgatcgccgagcagctgcacatggagaaggaggtgatcagagtgtggttctgcaacagaagacagaaggagaagagaatcaacccctgcagcgccgcccccatgctgcccagccccggcaagcccgccagctacagcccccacatggtgaccccccagggcggcgccggcaccctgcccctgagccaggccagcagcagcctgagcaccaccgtgaccaccctgagcagcgccgtgggcaccctgcaccccagcagaaccgccggcggcggcggcggcggcggcggcgccgccccccccctgaacagcatccccagcgtgaccccccccccccccgccaccaccaacagcaccaaccccagcccccagggcagccacagcgccatcggcctgagcggcctgaaccccagcaccggctag

SEQ ID NO: 83350 - protein, 901 aa, Artificial Sequence
  derived and/or modified sequence
MSGPGNKRAAGDGGSGPPEKKLSREEKTTTTLIEPIRLGGISSTEEMDLKVLQFKNKKLAERLEQRQACEDELRERIEKLEKRQATDDATLLIVNRYWAQLDETVEALLRCHESQGELSSAPEAPGTQEGPTCDGTPLPEPGTSELRDPLLMQLRPPLSEPALAFVVALGASSSEEVELELQGRMEFSKAAVSRVVEASDRLQRRVEELCQRVYSRGDSEPLSEAAQAHTRELGRENRRLQDLATQLQEKHHRISLEYSELQDKVTSAETKVLEMETTVEDLQWDIEKLRKREQKLNKHLAEALEQLNSGYYVSGSSSGFQGGQITLSMQKSDELGLQKKLRTEVIQLEDTLAQVRKEYEMLRIEFEQNLAANEQAGPINREMRHLISSLQNHNHQLKGDAQRYKRKLREVQAEIGKLRAQASGSAHSTPNLGHPEDSGVSAPAPGKEEGGPGPVSTPDNRKEMAPVPGTTTTTTSVKKEELVPSEEDFQGITPGAQGPSSRGREPEARPKRELQEREGPSLGPPPVASALSRADREKAKVEETKRKESELLKGLRAELKKAQESQKEMKLLLDMYKSAPKEQRDKVQLMAAERKAKAEVDELRSRIRELEERDRRESKKIADEDALRRIRQAEEQIEHLQRKLGATKQEEEALLSEMDVTGQAFEDMQEQNGRLLQQLREKDDANFKLMSERIKANQIHKLLREEKDELGEQVLGLKSQVDAQLLTVQKLEEKERALQGSLGGVEKELTLRSQALELNKRKAVEAAQLAEDLKVQLEHVQTRLREIQPCLAESRAAREKESFNLKRAQEDISRLRRKLEKQRKVEVYADADEILQEEIKEYKARLTCPCCNTRKKDAVLTKCFHVFCFECVRGRYEARQRKCPKCNAAFGAHDFHRIYIS

SEQ ID NO: 83351 - DNA, 2706 bp, Artificial Sequence
  derived and/or modified sequence
atgagcggccccggcaacaagagagccgccggcgacggcggcagcggcccccccgagaagaagctgagcagagaggagaagaccaccaccaccctgatcgagcccatcagactgggcggcatcagcagcaccgaggagatggacctgaaggtgctgcagttcaagaacaagaagctggccgagagactggagcagagacaggcctgcgaggacgagctgagagagagaatcgagaagctggagaagagacaggccaccgacgacgccaccctgctgatcgtgaacagatactgggcccagctggacgagaccgtggaggccctgctgagatgccacgagagccagggcgagctgagcagcgcccccgaggcccccggcacccaggagggccccacctgcgacggcacccccctgcccgagcccggcaccagcgagctgagagaccccctgctgatgcagctgagaccccccctgagcgagcccgccctggccttcgtggtggccctgggcgccagcagcagcgaggaggtggagctggagctgcagggcagaatggagttcagcaaggccgccgtgagcagagtggtggaggccagcgacagactgcagagaagagtggaggagctgtgccagagagtgtacagcagaggcgacagcgagcccctgagcgaggccgcccaggcccacaccagagagctgggcagagagaacagaagactgcaggacctggccacccagctgcaggagaagcaccacagaatcagcctggagtacagcgagctgcaggacaaggtgaccagcgccgagaccaaggtgctggagatggagaccaccgtggaggacctgcagtgggacatcgagaagctgagaaagagagagcagaagctgaacaagcacctggccgaggccctggagcagctgaacagcggctactacgtgagcggcagcagcagcggcttccagggcggccagatcaccctgagcatgcagaagagcgacgagctgggcctgcagaagaagctgagaaccgaggtgatccagctggaggacaccctggcccaggtgagaaaggagtacgagatgctgagaatcgagttcgagcagaacctggccgccaacgagcaggccggccccatcaacagagagatgagacacctgatcagcagcctgcagaaccacaaccaccagctgaagggcgacgcccagagatacaagagaaagctgagagaggtgcaggccgagatcggcaagctgagagcccaggccagcggcagcgcccacagcacccccaacctgggccaccccgaggacagcggcgtgagcgcccccgcccccggcaaggaggagggcggccccggccccgtgagcacccccgacaacagaaaggagatggcccccgtgcccggcaccaccaccaccaccaccagcgtgaagaaggaggagctggtgcccagcgaggaggacttccagggcatcacccccggcgcccagggccccagcagcagaggcagagagcccgaggccagacccaagagagagctgcaggagagagagggccccagcctgggccccccccccgtggccagcgccctgagcagagccgacagagagaaggccaaggtggaggagaccaagagaaaggagagcgagctgctgaagggcctgagagccgagctgaagaaggcccaggagagccagaaggagatgaagctgctgctggacatgtacaagagcgcccccaaggagcagagagacaaggtgcagctgatggccgccgagagaaaggccaaggccgaggtggacgagctgagaagcagaatcagagagctggaggagagagacagaagagagagcaagaagatcgccgacgaggacgccctgagaagaatcagacaggccgaggagcagatcgagcacctgcagagaaagctgggcgccaccaagcaggaggaggaggccctgctgagcgagatggacgtgaccggccaggccttcgaggacatgcaggagcagaacggcagactgctgcagcagctgagagagaaggacgacgccaacttcaagctgatgagcgagagaatcaaggccaaccagatccacaagctgctgagagaggagaaggacgagctgggcgagcaggtgctgggcctgaagagccaggtggacgcccagctgctgaccgtgcagaagctggaggagaaggagagagccctgcagggcagcctgggcggcgtggagaaggagctgaccctgagaagccaggccctggagctgaacaagagaaaggccgtggaggccgcccagctggccgaggacctgaaggtgcagctggagcacgtgcagaccagactgagagagatccagccctgcctggccgagagcagagccgccagagagaaggagagcttcaacctgaagagagcccaggaggacatcagcagactgagaagaaagctggagaagcagagaaaggtggaggtgtacgccgacgccgacgagatcctgcaggaggagatcaaggagtacaaggccagactgacctgcccctgctgcaacaccagaaagaaggacgccgtgctgaccaagtgcttccacgtgttctgcttcgagtgcgtgagaggcagatacgaggccagacagagaaagtgccccaagtgcaacgccgccttcggcgcccacgacttccacagaatctacatcagctag

SEQ ID NO: 83352 - DNA, 924 bp, Artificial Sequence
  derived and/or modified sequence
atgaagctgctgctggacatgtacaagagcgcccccaaggagcagagagacaaggtgcagctgatggccgccgagagaaaggccaaggccgaggtggacgagctgagaagcagaatcagagagctggaggagagagacagaagagagagcaagaagatcgccgacgaggacgccctgagaagaatcagacaggccgaggagcagatcgagcacctgcagagaaagctgggcgccaccaagcaggaggaggaggccctgctgagcgagatggacgtgaccggccaggccttcgaggacatgcaggagcagaacggcagactgctgcagcagctgagagagaaggacgacgccaacttcaagctgatgagcgagagaatcaaggccaaccagatccacaagctgctgagagaggagaaggacgagctgggcgagcaggtgctgggcctgaagagccaggtggacgcccagctgctgaccgtgcagaagctggaggagaaggagagagccctgcagggcagcctgggcggcgtggagaaggagctgaccctgagaagccaggccctggagctgaacaagagaaaggccgtggaggccgcccagctggccgaggacctgaaggtgcagctggagcacgtgcagaccagactgagagagatccagccctgcctggccgagagcagagccgccagagagaaggagagcttcaacctgaagagagcccaggaggacatcagcagactgagaagaaagctggagaagcagagaaaggtggaggtgtacgccgacgccgacgagatcctgcaggaggagatcaaggagtacaaggtgggcctgtgggccaagctgtgccccatccacctgagaatcgtggacgccggcctgctgagactggtggagagcctgggcaccctggaggtgatgtag

SEQ ID NO: 83353 - DNA, 2706 bp, Artificial Sequence
  derived and/or modified sequence
atgtccggaccagggaacaaacgcgctgctggggacgggggaagcggccctcccgagaagaaactctcaagagaggagaagacaacaactaccctcattgagcctattaggctcggcggtatatctagcaccgaggagatggatctcaaggtgttgcagttcaagaataagaagctggcagaacggctggaacagaggcaagcgtgtgaggatgagcttagagaacggattgagaagctggaaaaacggcaggctacagacgatgctacgctgttaatagttaatcgctactgggcgcagttagacgaaacagtggaggctctgctgagatgccatgagtctcagggtgaattgagctctgctcctgaagccccaggaactcaagagggccctacctgcgatggaacacctctgcctgaacctggcacgtcagaactgagggatccactgctgatgcagctccgtcctccactgtcggagcccgctcttgcattcgtggtcgccctcggcgcctcctcctccgaagaagttgaactggagcttcaagggcgaatggagttctccaaggcagcggtctctcgcgtagtggaagcatccgaccgactgcaacgtcgcgtggaagaactgtgccagcgcgtgtactctcgcggagactccgaacccctatcagaggccgctcaagcccatacccgcgaacttggcagggagaaccggcgcctgcaagatctcgctactcagcttcaggagaaacaccacaggatctccctagagtactccgagctccaggacaaagtaacttcggccgagaccaaggtgctcgagatggagacaaccgttgaagacctgcagtgggacatagagaagctcaggaaacgcgagcagaagcttaataagcacctggcagaagccctcgaacagctaaacagcggctactacgtaagtgggtcatcgtctgggtttcaagggggtcagattactctttctatgcagaagtcagacgagctgggactgcagaagaaattgaggacagaggtcattcagcttgaagatacattggcacaggtgaggaaggaatatgagatgctgagaatcgagtttgagcaaaacctcgccgccaacgagcaggctggccctatcaaccgcgagatgcgccaccttatttcctcactgcaaaatcacaaccatcagctgaagggggacgcccagaggtacaaaagaaagctgagggaggtacaggccgaaattggcaaattacgggcccaggcatccggcagtgcgcacagtacacccaacctgggacaccctgaggactcaggcgtgagtgcacctgcgcctggtaaggaggaaggcgggcctgggccagtgtctacccctgataatcgcaaagaaatggccccggtgccggggacaacgaccacgactacatcggtgaaaaaggaggagcttgtgcctagtgaggaggacttccaaggaattacaccaggggctcagggcccttcttcacgtggccgggagcctgaggcccggccaaagagggaattacaggagagggagggaccttctctgggtcctcccccggttgcctcggccctgtcaagggctgatagagagaaggccaaagttgaggaaactaagagaaaagagagtgagctgttgaaagggctgagggccgagctcaagaaagcacaggaaagtcaaaaagagatgaaactgctgctcgacatgtacaagtcagcccctaaggagcagcgggacaaggttcaactgatggccgctgagcggaaggctaaagcagaggtcgacgagctgcggtctagaatcagggaactggaggagcgagaccgacgcgaaagcaaaaagatagccgacgaggacgcactaagacgaattaggcaggccgaggaacagatagagcacctgcagcgtaagctgggtgcaaccaagcaggaggaagaggcactcctctcagaaatggatgttaccggacaagcttttgaagatatgcaggagcagaacggccgcttactccagcagctgcgggaaaaggacgacgcaaacttcaaactaatgagtgagcggatcaaagctaatcagatacataaactgcttcgcgaggaaaaggatgagctgggagagcaggtgcttggcctgaaatctcaggtggatgcccagctccttaccgtccaaaaactagaggaaaaagaaagagcactgcaaggttcattgggaggtgtggaaaaggagctcacacttcgctcccaggctttagaattgaacaaacgcaaggctgtagaggccgctcaactggccgaggatttgaaagtgcaattggagcacgtgcagacacggttgcgcgaaatacagccctgtctggccgagagtagggccgccagagagaaagagtcattcaaccttaaacgagcccaggaggatatttcccgcctaagaagaaagctggagaagcagagaaaagtcgaggtgtatgctgacgccgacgaaattctccaggaggagataaaagagtacaaagcccgcctcacctgcccctgctgcaatactcgaaagaaagacgccgtcctgacaaagtgtttccacgtcttctgttttgagtgtgtaaggggacgctacgaggcacggcagcgaaagtgtcctaaatgcaatgcagcttttggcgcccatgatttccaccgtatttatatatcctag

SEQ ID NO: 83354 - DNA, 924 bp, Artificial Sequence
  derived and/or modified sequence
atgaagttgctgttggatatgtacaaaagtgccccaaaggagcagcgcgacaaagtccagctcatggccgctgaaaggaaggcgaaagctgaggtagatgagttacgttccagaattagggagcttgaagaacgcgatcggcgagaatccaaaaaaatagccgatgaggatgctcttcgtcggatccgccaggcagaggagcaaattgaacatttgcagcgcaaactcggggccaccaaacaagaggaggaggcgcttctgtccgagatggatgttactgggcaggcgttcgaagacatgcaggagcagaacggtcggctgctccagcagctccgtgaaaaggatgatgcaaacttcaagctgatgtctgagcgaattaaggccaatcaaatacacaagctgcttcgtgaggagaaagatgagctaggcgagcaggtcctcgggctaaagtcgcaggtggatgcgcagctattgaccgtacagaagttagaggagaaggagcgggcactgcagggcagccttgggggcgttgaaaaggagctgacacttcgttcgcaagcgcttgagctgaataagagaaaagccgtcgaagcagctcaactcgccgaagacctgaaggtgcagctcgagcacgtccagactagacttcgtgagattcagccatgcctggccgagtctagggcagcccgggaaaaagaaagctttaatctcaaacgagcccaggaagatatttcaagactacgcagaaagctcgagaaacaaaggaaggtggaggtgtatgccgacgcagatgagatcttacaagaagagatcaaggaatacaaagtcggcctgtgggccaaactctgtcctattcatttgcgaattgtggatgcgggcctgctcaggctggtcgagtctttaggcaccttggaagtgatgtag

SEQ ID NO: 83355 - DNA, 2706 bp, Artificial Sequence
  derived and/or modified sequence
atgagcggccctggcaacaagagagctgctggagatggcggcagcggccccccagagaagaagctgagccgggaggagaagaccaccaccaccctgattgagcccatccggctgggcggcatcagcagcacagaggagatggacctgaaggtgctgcagttcaagaacaagaagctggccgagcggctggagcagaggcaggcctgtgaagatgagctgcgggagagaattgagaagctggagaagaggcaggccacagatgatgccaccctgctgattgtgaaccgctactgggcccagctggatgagaccgtggaggccctgctgcgctgccacgagagccagggcgagctgagcagcgcccctgaggcccctggcacccaggagggccccacctgtgatggcacccccctgcctgagcccggcaccagcgagctgcgggaccccctgctgatgcagctgcggccccccctgtctgagcccgccctggcctttgtggtggccctgggcgccagcagcagcgaggaggtggagctggagctgcagggccgcatggagttcagcaaggctgctgtgtcccgggtggtggaggccagtgaccggctgcagaggagagtggaggagctgtgccagagggtgtacagcagaggagacagcgagcccctgtctgaggccgcccaggcccacacccgggagctgggccgggagaacagaaggctgcaggacctggccacccagctgcaggagaagcaccaccgcatcagcctggagtacagcgagctgcaggacaaggtgaccagcgctgagaccaaggtgctggagatggagaccaccgtggaggacctgcagtgggacatcgagaagctgaggaagcgggagcagaagctgaacaagcacctggccgaggccctggagcagctgaacagcggctactacgtgtctggcagcagcagcggcttccagggcggccagatcaccctgtccatgcagaagagtgatgagctgggcctgcagaagaagctgaggacagaggtgatccagctggaggacaccctggcccaggtgaggaaggagtatgagatgctgcgcatcgagtttgagcagaacctggccgccaatgagcaggccggccccatcaaccgggagatgaggcacctgatcagcagcctgcagaaccacaaccaccagctgaagggagatgcccagcgctacaagaggaagctgcgggaggtgcaggccgagatcggcaagctgcgggcccaggccagcggcagcgcccacagcacccccaacctgggccaccctgaggacagcggcgtgtctgccccagcccctgggaaggaggagggcggccctggccctgtgtccaccccagacaacaggaaggagatggcccctgtgcccggcaccaccaccaccaccacctctgtgaagaaggaggagctggtgcccagcgaggaggacttccagggcatcacccctggggcccagggccccagcagccggggccgggagcctgaggcccggcccaagcgggagctgcaggagcgggagggccccagcctgggccccccacctgtggccagcgccctgagcagagctgaccgggagaaggccaaggtggaggagaccaagaggaaggagagcgagctgctgaagggcctgcgggcagagctgaagaaggcccaggagagccagaaggagatgaagctgctgctggacatgtacaagagcgcccccaaggagcagagggacaaggtgcagctgatggctgctgagaggaaggccaaggccgaggtggatgagctgcggagccgcatccgggagctggaggagcgggacagaagagagagcaagaagattgctgatgaagatgccctgcggcgcatccggcaggccgaggagcagatcgagcacctgcagaggaagctgggcgccaccaagcaggaggaggaggccctgctgtctgagatggatgtgacaggccaggcctttgaggacatgcaggagcagaatggccgcctgctgcagcagctgcgggagaaggatgatgccaacttcaagctgatgtctgagcgcatcaaggccaaccagatccacaagctgctgcgggaggagaaggatgagctgggggagcaggtgctgggcctgaagagccaggtggatgcccagctgctgactgtgcagaagctggaggagaaggagcgggccctgcagggcagcctgggcggcgtggagaaggagctgaccctgcggagccaggccctggagctgaacaagaggaaggctgtggaggccgcccagctggccgaggacctgaaggtgcagctggagcacgtgcagacccggctgcgggagatccagccctgcctggccgagagccgggccgcccgggagaaggagagcttcaacctgaagagggcccaggaggacatcagccggctgcggaggaagctggagaagcagaggaaggtggaggtgtatgcagatgctgatgagatcctgcaggaggagatcaaggagtacaaggcccggctgacctgcccctgctgcaacaccaggaagaaggatgctgtgctgaccaagtgcttccacgtgttctgctttgaatgtgtgcggggccgctatgaggcccggcagaggaagtgccccaagtgcaatgctgccttcggggcccatgacttccaccgcatctacatctcctag

SEQ ID NO: 83356 - DNA, 924 bp, Artificial Sequence
  derived and/or modified sequence
atgaagctgctgctggacatgtacaagagcgcccccaaggagcagagggacaaggtgcagctgatggctgctgagaggaaggccaaggccgaggtggatgagctgcggagccgcatccgggagctggaggagcgggacagaagagagagcaagaagattgctgatgaagatgccctgcggcgcatccggcaggccgaggagcagatcgagcacctgcagaggaagctgggcgccaccaagcaggaggaggaggccctgctgtctgagatggatgtgacaggccaggcctttgaggacatgcaggagcagaatggccgcctgctgcagcagctgcgggagaaggatgatgccaacttcaagctgatgtctgagcgcatcaaggccaaccagatccacaagctgctgcgggaggagaaggatgagctgggggagcaggtgctgggcctgaagagccaggtggatgcccagctgctgactgtgcagaagctggaggagaaggagcgggccctgcagggcagcctgggcggcgtggagaaggagctgaccctgcggagccaggccctggagctgaacaagaggaaggctgtggaggccgcccagctggccgaggacctgaaggtgcagctggagcacgtgcagacccggctgcgggagatccagccctgcctggccgagagccgggccgcccgggagaaggagagcttcaacctgaagagggcccaggaggacatcagccggctgcggaggaagctggagaagcagaggaaggtggaggtgtatgcagatgctgatgagatcctgcaggaggagatcaaggagtacaaggtgggcctgtgggccaagctgtgccccatccacctgagaattgtggatgctggcctgctgcggctggtggagagcctgggcaccctggaggtgatgtag

SEQ ID NO: 83357 - DNA, 2706 bp, Artificial Sequence
  derived and/or modified sequence
atgagcggccccggcaacaagcgggccgccggcgacggcggcagcggccccccagagaaaaagttgtcacgtgaagagaaaacaacaactaccctgattgagcccatcaggctgggtggaatcagcagtacagaggaaatggaccttaaggttctgcagttcaagaacaagaagttggcagagagacttgagcaaaggcaagcatgcgaggatgaactaagggagcggattgagaagttagaaaaacgacaggcaacagacgatgccaccctcctgatcgtgaaccggtattgggctcagctggacgaaacagtggaagcactgctgagatgtcacgagagtcagggagagttaagttccgccccagaggcaccaggaacacaggaggggcccacttgcgatggtaccccccttcccgagccaggcacgagcgaactgcgggaccccctcctgatgcagctgcggccacctctctctgagcccgctctggccttcgtggtggccctgggggcttcctcgagcgaggaagtggaactggaactgcagggacgcatggaatttagtaaggccgcagttagcagagtggttgaagccagcgatcgactgcagaggcgggtagaggagctgtgccaacgcgtgtactcacggggcgacagcgaacctctgagcgaagcggcacaggcacacacacgggaactcggcagggagaataggcgactgcaggacctggccacccaactacaggagaaacaccacaggattagcctggagtattcagagcttcaggacaaagtcacctctgccgaaacgaaggtgctagagatggaaactactgtggaagatctacaatgggatatcgagaagctgcgaaagagggagcagaaactgaacaagcatctggcagaagccctggagcagctgaactcgggatactacgtctccggcagttcgtccggatttcaggggggacaaatcaccctgagcatgcagaaatctgacgagctgggcctgcaaaagaagctcaggactgaggtgatccaactggaggacaccctcgcccaggtccggaaagagtacgaaatgctgaggattgaattcgagcagaaccttgccgctaacgagcaggccgggccaattaatcgggaaatgcggcaccttattagctccctgcaaaatcataatcaccagcttaagggggatgctcagcgctacaaaagaaaactgagagaagttcaagctgagatcggaaaactgagggctcaggcttccggttccgcacactcaaccccaaatcttggccaccccgaagatagtggagtctctgcccctgcccctgggaaggaggaaggcggcccaggtcccgtaagtacgcctgataataggaaagagatggcccctgtccctggcaccaccactaccactaccagtgtcaagaaggaggagcttgtgccgtctgaagaggacttccagggcattactcccggggctcaaggcccgagttctaggggacgagaaccagaagctcggccaaagcgcgagttacaagagcgcgagggaccctctctaggacctcccccggttgctagtgctctgtctagagccgatcgggaaaaagccaaagttgaggagaccaagcggaaggaatctgagctgcttaagggactgagggctgaattgaaaaaggctcaagagtcccaaaaggaaatgaagctactcctggacatgtataaatctgctccaaaggagcagcgagataaagtacagctgatggcagcagaacgaaaagcaaaggccgaggtcgatgagctgagatcccggattagagagctcgaagagcgagatcgccgcgaatccaaaaagattgcggatgaggatgccctgcggagaatcagacaggctgaggaacaaatcgaacatctgcagaggaagcttggggccacaaagcaggaggaggaggctctgctctccgagatggatgtcacaggccaagcattcgaggatatgcaagaacagaatggtaggttgctgcagcaactgcgcgagaaagacgacgcaaatttcaaactgatgtccgagcgtattaaggcgaaccagatccacaagttactgcgtgaggagaaggacgaactcggagaacaggttctggggctgaagtcccaggtggacgcccaattactcactgttcagaaactcgaggaaaaagagcgtgcccttcaaggcagccttggcggcgttgagaaagagctcacccttaggagtcaggctcttgaactgaataaacgaaaggccgttgaggccgcccaattagcagaagatctgaaggtacagctcgagcacgtgcagacccggctgcgcgagatccagccttgcttggctgagagtagggccgcgagggagaaggagtccttcaacttgaaaagagctcaggaagacatttctcgcctgaggcgaaagttggagaaacagcgaaaggtggaggtttacgccgatgccgacgaaatcctccaggaagaaattaaggagtacaaggcaagattaacttgcccttgttgcaacaccagaaagaaagacgctgtgctcactaagtgcttccacgtcttttgttttgagtgtgttaggggccgctatgaggctagacagaggaagtgccccaagtgcaatgctgcctttggcgcccacgacttccacagaatctacattagctag

SEQ ID NO: 83358 - DNA, 924 bp, Artificial Sequence
  derived and/or modified sequence
atgaagctgctgctggacatgtacaagagcgcccccaaggagcagcgcgacaaagtgcagcttatggctgcagagcggaaggcgaaagccgaagtcgacgaattgcgttcacgtataagagaactggaagaacgagacagaagagagagtaagaaaattgcagacgaagatgcactgcgaaggatccgccaggctgaggagcagattgagcacctgcagcgcaagttaggggctacgaagcaggaggaggaggccctgctgtctgaaatggatgtaactggccaggccttcgaggatatgcaggaacagaatgggagactactccagcaactgcgggagaaggatgatgccaactttaagctcatgtcagaacggattaaggccaaccaaatccataagctactgcgcgaagaaaaagatgaactaggagaacaggtcctgggcctgaagtcacaagtcgacgcacagcttttgacagttcaaaagctcgaggaaaaagagcgggccctgcaagggagcctcggcggcgttgagaaggagctgacactcagaagccaggcgctagaattaaataagcgcaaggctgtggaggccgcccagttagctgaagacctcaaggtgcagttagagcacgtgcagacaaggctgcgggagattcagccctgcctggcagagtcacgggcagcaagggagaaagaatcttttaatctcaagcgagcccaggaggatatctctcgactccgtaggaaacttgaaaaacaaaggaaggttgaggtctatgccgacgccgacgagatcctgcaggaggagataaaggagtataaggtgggcttgtgggcaaagctgtgtcccattcatctccggatcgtcgatgccggccttctgcgcttggtcgaatccctgggtacactggaagtcatgtag

SEQ ID NO: 83359 - DNA, 2706 bp, Artificial Sequence
  derived and/or modified sequence
atgtctggcccaggaaacaagagggccgcaggggacgggggatccggcccacctgaaaagaagctgtcaagagaggaaaaaactactacaactctgatcgaacctattcgattgggcggaatctcctcaactgaggagatggatctgaaggtcctgcagtttaaaaataagaaactcgctgaacgcctggagcagaggcaggcatgcgaggacgaactcagggagagaatcgaaaagctggagaagcgccaagcgactgacgacgctactcttttgatcgtgaatagatactgggcgcagctggatgagacagtggaagccctgctgcgatgtcatgaatcgcagggcgaactgtcatccgctcctgaagctccgggtacccaggaaggtccaacctgtgacggaacacccctgcccgaacctgggactagcgaattgcgggaccccctgcttatgcagctccgccctcctttgtccgaacccgcactggcattcgtagtagcgttaggcgcttcttcctccgaggaagtggaactggagctgcaagggagaatggagtttagcaaggctgccgtctctagggtggtggaggcgtctgatcgactgcagcgcagagtcgaggagctctgccagcgcgtctacagcaggggggatagtgagccactgtccgaagcagctcaggcccatactcgcgaactaggcagagagaatcggaggttgcaggacttggctacacagcttcaagagaaacaccaccgaattagcctggagtattccgagctacaggacaaagtgacctcagcagagactaaggtccttgaaatggaaaccacggtagaggatttgcagtgggatatagaaaagcttcgtaagagggagcagaagcttaataagcacctggcagaagcactggagcagttgaatagcggttattatgtctccggctcctctagtggttttcaaggagggcagataacactctccatgcagaagtccgatgaactgggcctgcagaaaaagttgcgcacggaggttatccagctggaagacactctcgctcaagtcagaaaagagtatgagatgctacgcatagagtttgagcagaacctagccgcaaatgagcaggcaggacccattaatagagagatgcgccacttgatctcaagtctgcaaaaccataaccaccagctgaagggcgacgcccagcgatataagagaaagctcagggaggtacaggcggagatagggaagctccgggcacaggccagtggatcagcacacagtactcccaatctaggtcaccccgaggacagcggggtatctgcacctgcgcctggaaaggaggagggcggtccgggacccgtttccactcccgataatcgtaaagagatggcccctgttccaggcactaccaccacaacaacctctgtgaagaaagaagaacttgttccctctgaagaagacttccaggggattaccccaggcgcacaaggcccaagctctaggggaagggagcccgaggcaaggcctaagagagaactgcaagaaagggagggacccagtctaggcccaccaccagttgcctccgctctgagccgtgctgatcgcgagaaagcgaaggtagaagagactaagagaaaagagtctgaactgcttaaaggactgcgtgcagagcttaagaaagcccaggagagccagaaggaaatgaagctgctactggacatgtacaaatctgcccctaaagaacaaagggataaggtccagcttatggcagccgagcgtaaagccaaggctgaggttgatgagctgcggagccgaatacgtgaactcgaggagcgggatagaagggagtcaaaaaagattgccgatgaggatgctctgagaaggattcggcaggccgaagagcagattgaacacctgcaaagaaaactgggagctaccaagcaggaggaggaggcgttgctttctgagatggacgtgaccggacaagcattcgaagatatgcaagaacaaaatggtagactgctgcagcaactccgcgagaaggatgacgccaatttcaagctcatgtctgaacgcatcaaggccaaccagattcacaaactgctccgtgaggaaaaggatgagctgggcgaacaggtattgggcttaaagagtcaagttgatgcccagctccttacagtgcagaagctcgaggaaaaagagcgagctctgcagggtagtttgggcggagtggagaaagaacttacactgcgatcccaggcccttgaactcaataagcggaaggcagttgaggcagctcagcttgctgaggatctgaaggtacagctggagcatgtccagacccggcttagggagattcagccttgcctggccgagtcccgcgctgctcgggagaaggagtctttcaatctcaagcgggcacaggaggatatctctaggctgaggcggaagttggaaaagcaaagaaaggtggaggtgtatgccgatgcggatgagattcttcaggaagagataaaggagtacaaagccagactcacctgtccatgttgcaacacccgcaaaaaggatgcagtgctaacaaaatgcttccacgttttttgtttcgaatgcgtccggggaagatacgaagcccgacagcggaagtgccccaaatgcaacgccgctttcggcgcacacgactttcacagaatctacattagttag

SEQ ID NO: 83360 - DNA, 924 bp, Artificial Sequence
  derived and/or modified sequence
atgaagctgctgttagatatgtacaaaagcgcccctaaagagcaaagggataaagttcaactgatggccgcagagcgtaaggctaaggcggaagtggatgaactgcggagtaggatcagagagctggaggagcgggaccgccgtgagagtaagaaaatcgccgatgaagatgccctgagacggatacgacaggccgaagagcagatagagcatctgcaaaggaagctaggcgcaacgaaacaggaagaggaggcccttttgtcagagatggatgtcaccggccaggccttcgaggacatgcaggagcagaacggtcgtttgctgcagcagcttagggaaaaagacgacgctaatttcaagctgatgagcgagcgaattaaggcaaatcaaattcacaaactgctgagagaggagaaggatgaactgggggaacaggttctggggctgaagtcacaggtcgatgctcaactgttgacagttcaaaaactcgaggagaaagaacgagctctccagggctctttggggggagtggagaaggaattaacgcttaggtctcaggcgcttgaactgaataagagaaaggctgtcgaagccgcacagcttgccgaagatcttaaggtgcaactggagcacgtgcagacacgtctgcgcgaaatccaaccctgtctggcagagtctagggctgccagggaaaaagagtcatttaacctgaagagagcacaggaagatatctcccgcctcagaaggaaattggagaaacaacggaaagtggaggtgtacgcggacgcagacgagattctgcaggaagaaatcaaagaatacaaagttggattgtgggcaaagctgtgccctatacacctgcggatcgtggacgctggtctgctgcgattggtggaatctttaggaacccttgaagtgatgtag

SEQ ID NO: 83361 - DNA, 3930 bp, Artificial Sequence
  derived and/or modified sequence
agtgacgtccggtgaaatccaagatggcggcgctaggctgaccctcctgctggtgacggaagtaccgcctcctcccgtttgacgcccctcaggggaccctgcatcgctccagccgccgcggccatgtctgggccaggcaacaaacgcgccgccggcgacgggggctcagggcccccggaaaagaagctgagtcgtgaggagaagaccaccacgactcttatcgagcccattcgtcttggaggcatctcttccacggaggagatggacctgaaggtactacagttcaagaacaagaaactggcagagcggctggaacaacggcaggcttgtgaagatgaactccgagaacgaattgagaagttggagaagcggcaggccacagatgatgccacactcctcatcgtcaatcgctactgggcccagctggatgaaactgtggaagcccttctccgatgccatgagagccagggggagctgtcttcagcgcctgaggcacctgggacccaggaggggccaacatgtgatgggactcctctcccagagccggggacatcagagctgagagaccccttgctgatgcagctgcggccccctctcagtgagccggccttggcttttgtggtggcactgggtgccagcagcagtgaggaggtggagctggagctgcaaggccgaatggagttctccaaggcagctgtgtctcgtgtggtagaggcctcagaccgcctacagcgccgggtggaggaactctgtcagcgagtgtacagccgaggggacagtgagcccctcagtgaggcggctcaggcacacacccgagagctgggccgtgagaaccggcgactgcaggacttggccactcagctgcaggagaaacaccaccgcatctcattggagtactccgagctccaggataaagtgacatcggcagagaccaaggtgctggagatggagacaacagtggaggacttgcagtgggacatcgagaagctgcggaagcgagagcaaaagctcaataagcacctggcagaggccttagagcagcttaactctggctactatgtatctgggagctcctcaggcttccaggggggccagatcacactcagcatgcagaagagcgacgagctggggctgcagaagaagctacgcacagaggtcattcagctggaggacacgctggcccaggtacgcaaggagtatgagatgctgcgcatcgagtttgagcagaatctggcggccaacgagcaggcggggcccatcaaccgtgagatgcgccacctgattagtagtcttcaaaaccacaaccaccagctaaaaggggacgcccagcgatacaagcggaagcttcgagaagtacaagctgagattggcaagctccgggcccaggccagtggctctgcccactccacccccaacctgggccacccagaggattctggcgtcagtgccccagccccagggaaagaggagggtgggccaggccctgtcagtacccccgacaacagaaaggagatggctccagtgcctggcaccaccactactaccacttcagtgaagaaggaggagctggtcccctctgaagaggacttccagggtataacccctggggcccagggcccttcctcccggggccgagaacctgaggccaggcccaagcgggagcttcaggaacgggaaggtcccagcctaggacctccacctgtagcctccgctctctcaagggctgatcgggagaaggccaaggtggaagaaaccaagcggaaggaatcagaactcctcaagggtctccgagcagagctcaagaaggcccaggagagccagaaggagatgaaactgctgctggatatgtacaagtcagcgcccaaggagcagcgggataaggtgcagctcatggcagcggaacgcaaggctaaggccgaggttgatgagctgcggagccgcatccgggaattggaggagagggatcgaagggagagcaagaagatcgcggatgaggatgccctgcggcgcattcggcaggcagaggagcagatagaacacctgcagcgcaagctgggtgccaccaagcaggaggaggaggctctgctctcagagatggatgtgacaggtcaggcttttgaggacatgcaggaacagaacgggcggctgctacagcagttgcgggaaaaggatgatgccaactttaagctaatgtcagagcggatcaaggccaaccagattcacaagctgctgcgggaggagaaggatgagttgggcgagcaggtccttggcctcaagtcccaggtggatgcccagctgctgactgtgcagaagctagaggagaaggagcgagccttgcagggcagcctcgggggtgtggagaaggagctgacgctgcgcagccaagccctggagctcaacaagcggaaggctgtagaagccgcccagctggccgaggacctgaaggtgcagctggagcacgtgcagactcggctgcgggagatccagccctgcctggcagagagccgggctgctcgtgagaaagagagcttcaacctcaagagggctcaggaggacatctcacggctgcggcgcaagctggaaaagcagaggaaggtggaggtctacgcagatgccgacgaaatcctccaggaggagatcaaggagtacaaggcgcggttgacctgcccctgctgtaacacccgcaagaaggatgcagtccttaccaagtgcttccacgttttctgcttcgagtgcgtgcggggccgctatgaggcccgccagaggaagtgccccaagtgcaacgcggcctttggtgcccacgacttccatcgtatctacatcagctgaacctgaaactcaggggactctggaacaccatggaccctgggggctgtgcccccatctcctccccaccccaggtctagtggccccaccctccattccggaccccatgggcccagcccctgcccatctagttggtttggggaccctggtgcatgctagtgggcatgggatcagccaagcttcgttccatcttttcctaaaggtcagagctgcagcctagggggcactgccctacagaaaaggtctgcctgagaggcctgaggagcccagagcacttgactgagcttcccggaaactggccctaacctgtctgtctccgtggatgcatcctaaccctaaggaaaattccccaggctgtgatctaccctagagaaggctcgctccctgcctactggctcacaaatgaggaccagtgagccatgtccttgttccttgtttgagactgggctgcaggccccaggaagactttccttcacccaccatccccctaacctcggcagggcttctgtcctgtggagttccctggacaccttggtctggctcttgtgccaagggctgaaggaggtaccctcttggcagatgggggcatcacttgcttcctttgggaagctctaaggttgctgcagtcaccttcctcatcttgcaggtgctgaaccaacatcatcagtttctattctaatcaggccccttcccaatctccatttctctgccaagcccatttacccccacctcatgcatcccaaggctctactgggtccctggacctaaccctgctttcatcctggtggccttaactacagtggaggtggaacttcccaggaggggaagggacagaccagccccagccgctgggccaacttccaatcattccagctagaagagcttccccctgacaccctgtgactgagcctgtgtcctgtctgcctgcccagccatgctccatcggctgtgagggcagtgcccggagaggccagagggttggagctgcagggacccgtttggacccacagcctctgttctagagatgcttgtataggctgttaattgtgatgaataaacgttcaaccctcggcctgcagccagagtagccaggccgcgcacccc

SEQ ID NO: 83362 - DNA, 1745 bp, Artificial Sequence
  derived and/or modified sequence
gaaatccaagatggcggcgctaggctgaccctcctgctggtgacggaagtaccgcctcctcccgtttgacgcccctcagaagaggacttccagggtataacccctggggcccagggcccttcctcccggggccgagaacctgaggccaggcccaagcgggagcttcaggaacgggaaggtcccagcctaggacctccacctgtagcctccgctctctcaagggctgatcgggagaaggccaaggtggaagaaaccaagcggaaggaatcagaactcctcaagggtctccgagcagagctcaagaaggcccaggagagccagaaggagatgaaactgctgctggatatgtacaagtcagcgcccaaggagcagcgggataaggtgcagctcatggcagcggaacgcaaggctaaggccgaggttgatgagctgcggagccgcatccgggaattggaggagagggatcgaagggagagcaagaagatcgcggatgaggatgccctgcggcgcattcggcaggcagaggagcagatagaacacctgcagcgcaagctgggtgccaccaagcaggaggaggaggctctgctctcagagatggatgtgacaggtcaggcttttgaggacatgcaggaacagaacgggcggctgctacagcagttgcgggaaaaggatgatgccaactttaagctaatgtcagagcggatcaaggccaaccagattcacaagctgctgcgggaggagaaggatgagttgggcgagcaggtccttggcctcaagtcccaggtggatgcccagctgctgactgtgcagaagctagaggagaaggagcgagccttgcagggcagcctcgggggtgtggagaaggagctgacgctgcgcagccaagccctggagctcaacaagcggaaggctgtagaagccgcccagctggccgaggacctgaaggtgcagctggagcacgtgcagactcggctgcgggagatccagccctgcctggcagagagccgggctgctcgtgagaaagagagcttcaacctcaagagggctcaggaggacatctcacggctgcggcgcaagctggaaaagcagaggaaggtggaggtctacgcagatgccgacgaaatcctccaggaggagatcaaggagtacaaggtggggctgtgggccaagttgtgccctatccacctgagaattgtagatgcaggattgctgagactagtggagagtctggggaccctggaagtaatgtagggcagcagaaagtgggcagcacagtggtcacagagtcaaatgctgtttgctgtacatgtactgtgagccaggcacagtgcttggctgggtgtgggttgggaggctaggaactggccctggtctctgacttcttgaaactgacagtcaggggaggaggcagccaagtaattctctcatcccagatgtgtaatatgatggcagaggccagaggggctgaggggactcaggggaggcccttcccctggccctggggtcagcaggcttcctggagtgaatgtcaccacagcagacctgaagaataggccagacgtggctgtgaggaacgggagtgagtagctttaggcaaagggaacagcagatgtggacgcttgagcggaggggttgctgggacagcaccggaggttgtaatcagaggagccaatgtggagaggttgggccgtgtcacctcctgaagagtgcggtacgccaggttgagacctcaaagggttttaaac

SEQ ID NO: 83363 - DNA, 204 bp, Artificial Sequence
  derived and/or modified sequence
atggggtcccgcaactcttcttcggcgggttccggcagcggcgacccttctgagggccttccccgacgaggtgccggactgagacgttccgaggaagaagaagaagaggacgaggacgtggatctggcccagcggccatccgaggtgggagccggtaggcgatgcagcaagtttacgatccactcggggccattggggctttag

SEQ ID NO: 83364 - protein, 317 aa, Artificial Sequence
  derived and/or modified sequence
MQEGELAISPISPVAAMPPLGTHVQARCEAQINLLGEGGICKLPGRLRIQPALWSREDVLHWLRWAEQEYSLPCTAEHGFEMNGRALCILTKDDFRHRAPSSGDVLYELLQYIKTQRRALVCGPFFGGIFRLKTPTQHSPVPPEEVTGPSQMDTRRGHLLQPPDPGLTSNFGHLDDPGLARWTPGKEESLNLCHCAELGCRTQGVCSFPAMPQAPIDGRIADCRLLWDYVYQLLLDTRYEPYIKWEDKDAKIFRVVDPNGLARLWGNHKNRVNMTYEKMSRALRHYYKLNIIKKEPGQKLLFRNGLQLIFIFIWSFQ

SEQ ID NO: 83365 - DNA, 954 bp, Artificial Sequence
  derived and/or modified sequence
atgcaggaaggcgagctagccattagcccaatcagccccgtggctgccatgccacccctcggtacacacgttcaagctcggtgcgaggcgcagattaaccttctgggcgagggaggcatctgcaagttgccagggaggctgcgcattcagcccgctttatggagcagggaggatgtactccattggctacggtgggccgagcaggaatactcgctgccttgcaccgcagagcacggcttcgagatgaacgggagggctctctgcattttaaccaaagacgacttcagacaccgagcaccttcaagcggtgacgttctctacgaacttctgcaatacatcaagacccagcgtagagcgctggtgtgtgggccattttttggcggaatctttcgcctcaaaacacctacacaacactctccagtccccccggaggaggtgaccggcccctcccagatggacacccgcagaggccatctcctccaaccccccgatcccgggctgacaagtaattttggtcacctcgacgatcccggtttggctcgctggaccccaggaaaagaggagagcctcaacctgtgtcactgcgcagaactggggtgccggacccaaggtgtatgcagttttcccgctatgccccaggctccaattgacggtcggatagcggactgtcgtctcttgtgggattacgtctaccagctgctgttagacactaggtacgagccatatattaagtgggaagataaggacgctaagatcttccgggttgtcgacccaaatggattggctcgactgtggggcaaccataagaatcgggtgaacatgacttatgagaagatgagccgagcgttaagacactattacaaactgaacatcattaaaaaagagcctggccaaaagctactctttcggaacggacttcagctgattttcatctttatttggtcctttcagtag

SEQ ID NO: 83366 - DNA, 954 bp, Artificial Sequence
  derived and/or modified sequence
atgcaggagggggagctggccatcagccccatcagccctgtggccgccatgccacccctgggcacccacgtgcaggcccgctgtgaggcccagatcaacctgctgggggagggcggcatctgcaagctgcccggccgcctgcgcatccagcctgccctgtggagcagagaagatgtgctgcactggctgcgctgggccgagcaggagtacagcctgccctgcacagctgagcacggctttgagatgaatggccgggccctgtgcatcctgaccaaggatgacttccgccaccgggcccccagcagtggagatgtgctgtatgagctgctgcagtacatcaagacccagaggcgggccctggtgtgtggccccttcttcggcggcatcttccggctgaagacccccacccagcacagccctgtgcccccagaggaggtgacaggccccagccagatggacacccggcggggccacctgctgcagcccccagaccccggcctgaccagcaactttggccacctggatgatcctggcctggcccgctggacccctgggaaggaggagagcctgaacctgtgccactgtgccgagctgggctgcaggacccagggcgtgtgcagcttccctgccatgccccaggcccccattgatggaagaattgctgactgccgcctgctgtgggactatgtgtaccagctgctgctggacaccaggtatgagccctacatcaagtgggaggacaaggatgccaagatcttccgggtggtggaccccaacggcctggcccggctgtggggcaaccacaagaacagagtgaacatgacctatgagaagatgagccgggccctgcggcactactacaagctgaacatcatcaagaaggagcccggccagaagctgctcttcagaaatggcctgcagctgatcttcatcttcatctggagcttccagtag

SEQ ID NO: 83367 - DNA, 954 bp, Artificial Sequence
  derived and/or modified sequence
atgcaggagggcgagctggccatcagccccatcagccccgtggccgccatgcctcccctcgggacacacgtacaggcgagatgcgaggcccagataaatctgctgggagagggtggaatctgcaaactgcccggacgcttgcgcatacagcctgcactgtggtctagggaggatgtgctccactggttgcgatgggcagaacaggaatacagcttaccctgtactgctgagcacgggttcgagatgaatggcagagcgttatgtatcctcaccaaggatgattttcgccatcgggccccgtcaagcggagacgtgctttacgaactgctgcagtacatcaagacccagcgccgggctctggtttgcgggcccttcttcggtgggatcttcaggctgaaaacccccactcagcattcaccagtaccacctgaggaggtgacaggaccttcccagatggatactagacggggtcacctattgcagccgcccgatccgggtctgacatcaaacttcggacacctggatgaccccgggctggcgcgttggacacccgggaaggaagaaagcctcaacctctgtcactgtgccgagcttggttgtaggacccagggggtttgttctttcccagcaatgcctcaggcaccgattgatgggcgcatcgcagactgtcggttgctgtgggactatgtgtaccagctgcttctggacacaagatatgaaccctacataaagtgggaggataaggatgccaagatctttagggtggtggatcccaacggcctagcaaggctgtggggtaaccacaagaaccgggtgaacatgacatacgagaagatgtctcgtgctctgcgacattactataagctgaatattatcaagaaagagcccggacagaaactgctgttccgcaacggactccagttgattttcatctttatctggagcttccaatag

SEQ ID NO: 83368 - DNA, 954 bp, Artificial Sequence
  derived and/or modified sequence
atgcaggagggggaacttgccatttcccccatttcacccgttgccgcaatgccgcctctaggaacacacgttcaggcccgatgcgaagcacagattaatctgcttggagaggggggtatttgtaagctgccagggcgactgaggattcagcctgccctctggtccagagaggatgtcctgcactggctgcgctgggccgagcaagagtactcactgccatgtactgccgaacatgggtttgaaatgaatggacgggcactttgtatcctcacaaaagatgattttcgtcatcgtgctccatcctccggagacgtcctgtacgaactgctgcagtacatcaaaactcagagaagagccctggtgtgcgggcctttttttggtgggatctttagacttaagaccccgacacaacactctcccgtgcctccagaggaagtgacgggcccaagccaaatggatacaagacggggacacctgctgcagcccccagatcccggactgacctccaattttggacacctcgacgatccaggccttgcccgttggacccccggtaaagaagagtccctgaacctgtgtcactgcgcagagcttggctgtcgcacacagggagtttgctctttccctgcgatgccacaagcacccatcgacggccgtatcgctgactgtaggttgttgtgggattacgtatatcagctactgctcgacaccaggtacgagccatatattaaatgggaagataaagatgccaaaatttttagggtggtcgatccgaacggactcgcaaggttgtgggggaaccataagaatcgggtgaatatgacctatgagaaaatgtcccgcgctctgcggcattattataagttgaatatcattaaaaaggagcccggacaaaagctgctgttccgaaatggtcttcagctaatttttattttcatttggagctttcaatag

SEQ ID NO: 83369 - DNA, 954 bp, Artificial Sequence
  derived and/or modified sequence
atgcaggagggcgagctggccatcagccccatcagccccgtggccgccatgccccccctgggcacccacgtgcaggccagatgcgaggcccagatcaacctgctgggcgagggcggcatctgcaagctgcccggcagactgagaatccagcccgccctgtggagcagagaggacgtgctgcactggctgagatgggccgagcaggagtacagcctgccctgcaccgccgagcacggcttcgagatgaacggcagagccctgtgcatcctgaccaaggacgacttcagacacagagcccccagcagcggcgacgtgctgtacgagctgctgcagtacatcaagacccagagaagagccctggtgtgcggccccttcttcggcggcatcttcagactgaagacccccacccagcacagccccgtgccccccgaggaggtgaccggccccagccagatggacaccagaagaggccacctgctgcagccccccgaccccggcctgaccagcaacttcggccacctggacgaccccggcctggccagatggacccccggcaaggaggagagcctgaacctgtgccactgcgccgagctgggctgcagaacccagggcgtgtgcagcttccccgccatgccccaggcccccatcgacggcagaatcgccgactgcagactgctgtgggactacgtgtaccagctgctgctggacaccagatacgagccctacatcaagtgggaggacaaggacgccaagatcttcagagtggtggaccccaacggcctggccagactgtggggcaaccacaagaacagagtgaacatgacctacgagaagatgagcagagccctgagacactactacaagctgaacatcatcaagaaggagcccggccagaagctgctgttcagaaacggcctgcagctgatcttcatcttcatctggagcttccagtag

SEQ ID NO: 83370 - DNA, 1800 bp, Artificial Sequence
  derived and/or modified sequence
gcgcacaacctctcttgagacagggggagctgagacagatggaaagggtgatgggtgggcaggcaccaaccccggagcacccagaggcccaggaaaaggtgtcagtcgggatctccgagtagtctggccctgctcaggagagcacagccgctctgatggtggtgcgacggttccggacctgtggggcctcagcggggccaaacggcaggccgagacagtatcggggccgggaaggtcactcacccctaaagggagaggcaccatgcgaggccccttcctatcctatgtgcggagactcacagggtccttcctggtcctgggctcgggaccgtgagagacgcagttggttccgagttcaggactaggggtccccttagatcctcagatcctgcagaatcccggctctgccccagtgggagccaaggccaggtcgccagagggactgtccgccggctggaggctgtgtgcaggacccacgcctcccaggctagcgagcgggcagcgccccggtgctgcgctcccacggggccggcccctgccctgccctgccctgctcctagcccgcagcggcgcaagtggaaccgcatcccgctctttcgttttcgtttcccggaaggatagcgattaccggagcgcctcgcgcgcctgcccgcctgcggaggacccgggcgcacacgccttggcgcttctcgaaagagatttcctcccacgcgaccttccagttctcggagccaggttaggggtttggcggaggaggactgcggggcgcgggcctagggccccagcagccacagccaggggagcgctcaagacagaaagccggtggcttcctcacctccacctgtaatgcaggagggagaattggctatttctcctataagccctgtggcagccatgcctcccctaggcacccacgtgcaagccagatgtgaagctcaaattaacctgctgggtgaaggggggatctgcaagctgccaggaagactccgcatccagcccgcactgtggagcagggaggacgtgctgcactggctgcgctgggcagagcaggagtactctctgccatgcaccgcggagcacgggttcgagatgaacggacgcgccctctgcatcctcaccaaggacgacttccggcaccgtgcgcccagctcaggtgacgtcctgtatgagctgctccagtacatcaagacccagcggcgagccctggtgtgtgggcccttttttggagggatcttcaggctgaagacgcccacccagcactctccagtccccccggaagaggtgactggcccctctcagatggacacccgaaggggccacctgctgcagccaccagacccagggcttaccagcaacttcggccacctggatgaccctggcctggcaaggtggacccctggcaaggaggagtccctcaacttatgtcactgtgcagagctcggctgcaggacccagggggtctgttccttccccgcgatgccgcaggcccccattgacggcaggatcgctgactgccgcctgctgtgggattacgtgtatcagctgctccttgatacccgatatgagccctacatcaagtgggaagacaaggacgccaagatcttccgagttgtggatccaaatgggctcgccagactctggggaaatcacaagaaccgggtgaacatgacctacgagaagatgtctcgtgccctgcgccactattataagcttaatatcattaagaaggaaccggggcagaaactcctgttcagaaatggacttcagctgatcttcatattcatatggagtttccagtga

SEQ ID NO: 83371 - protein, 286 aa, Artificial Sequence
  derived and/or modified sequence
MQEGELAISPISPVAAMPPLGTHVQARCEAQINLLGEGGICKLPGRLRDVLYELLQYIKTQRRALVCGPFFGGIFRLKTPTQHSPVPPEEVTGPSQMDTRRGHLLQPPDPGLTSNFGHLDDPGLARWTPGKEESLNLCHCAELGCRTQGVCSFPAMPQAPIDGRIADCRLLWDYVYQLLLDTRYEPYIKWEDKDAKIFRVVDPNGLARLWGNHKNRVNMTYEKMSRALRHYYKLNIIKKEPGQKLLFRFLKTPGKMVQDKHSHLEPLESQEQDRIEFKDKRPEISP

SEQ ID NO: 83372 - protein, 190 aa, Artificial Sequence
  derived and/or modified sequence
MDTRRGHLLQPPDPGLTSNFGHLDDPGLARWTPGKEESLNLCHCAELGCRTQGVCSFPAMPQAPIDGRIADCRLLWDYVYQLLLDTRYEPYIKWEDKDAKIFRVVDPNGLARLWGNHKNRVNMTYEKMSRALRHYYKLNIIKKEPGQKLLFRFLKTPGKMVQDKHSHLEPLESQEQDRIEFKDKRPEISP

SEQ ID NO: 83373 - DNA, 861 bp, Artificial Sequence
  derived and/or modified sequence
atgcaggagggtgagttagccatatcacctattagtccagtggctgctatgccccccctcggtactcatgtgcaggccaggtgcgaagcccaaataaatctgctgggggagggtggcatttgcaagttgcctggaaggctcagagatgtcctgtatgaattattgcagtacataaaaacccagaggagagccctggtttgcgggcccttcttcggggggatcttccgacttaagaccccaacccaacacagtcctgtgcctccagaggaagtgaccggcccatcccaaatggatacaagaagaggacatctcctgcagccaccggatcccggattaaccagtaattttggccacttagatgatccaggactcgcccggtggacccccggtaaggaagaatccttgaatctgtgccattgtgcagagctgggctgcaggacgcagggggtgtgttctttcccagcgatgccccaggccccgattgacggtcgtattgcggattgtcggctgttatgggattacgtgtaccagctgctgctcgatactcgctatgagccctacatcaagtgggaggacaaggacgccaagatcttcagggtagttgatcccaacgggcttgcccgactttggggtaaccacaagaaccgcgtgaacatgacttatgaaaagatgagccgggcactgaggcactattacaaactgaatattataaaaaaggaacctggacaaaagcttcttttccgttttttaaagacccctggaaagatggtccaggacaaacattctcatctcgagcctctcgaatctcaggagcaagatcggatcgagtttaaggataaacgccctgaaatctcaccttag

SEQ ID NO: 83374 - DNA, 861 bp, Artificial Sequence
  derived and/or modified sequence
atgcaggagggggagctggccatcagccccatcagccctgtggccgccatgccacccctgggcacccacgtgcaggcccgctgtgaggcccagatcaacctgctgggggagggcggcatctgcaagctgcccggccgcctgagagatgtgctgtatgagctgctgcagtacatcaagacccagaggcgggccctggtgtgtggccccttctttggaggcatcttccggctgaagacccccacccagcacagccctgtgcccccagaggaggtgacaggccccagccagatggacacccggcggggccacctgctgcagcccccagaccccggcctgaccagcaactttggccacctggatgaccccggcctggcccgctggaccccaggcaaggaggagagcctgaacctgtgccactgtgccgagctgggctgcaggacccagggcgtgtgcagcttccctgccatgccccaggcccccattgatggaagaattgctgactgccgcctgctgtgggactatgtgtaccagctgctgctggacaccaggtatgagccctacatcaagtgggaggacaaggatgccaagatcttccgggtggtggaccccaacggcctggcccggctgtggggcaaccacaagaacagagtgaacatgacctatgagaagatgagccgggccctgcggcactactacaagctgaacatcatcaagaaggagcccggccagaagctgctcttccgcttcctgaagaccccaggcaagatggtgcaggacaagcacagccacctggagcccctggagagccaggagcaggacagaattgagttcaaggacaagaggcctgagatcagcccctag

SEQ ID NO: 83375 - DNA, 861 bp, Artificial Sequence
  derived and/or modified sequence
atgcaggagggcgagctggccatcagccccatcagccccgtggccgctatgccccctctcgggactcacgttcaggctcgctgcgaggcccaaattaaccttttgggtgagggagggatctgcaagcttccaggtcgcctgagagacgtgctctatgaacttctgcagtatataaaaacacagcgccgggctctagtatgtggaccattctttggcggtatatttaggctaaagactcctacacagcacagtcctgtaccccccgaggaagtaactgggcccagccagatggacacgagacgtggacaccttctgcaaccaccggaccccggactgacttctaactttgggcacctagacgatccagggctcgctagatggactccgggcaaggaagagtccctgaatctgtgtcactgcgccgagctgggctgtcgaacccagggcgtctgctcattccccgcaatgcctcaagcccctatagacgggcgaattgcagattgtagacttttgtgggactatgtataccagctgcttttggacactcgctatgagccctacatcaagtgggaggacaaggacgcaaaaatttttcgcgtagtcgacccaaacggtcttgccaggttatggggcaaccataaaaatagggttaatatgacctacgagaagatgagcagggctctgcgccattattataagctgaacattattaaaaaagagcccggccagaaactccttttcagattcctaaagacacccggtaaaatggtgcaggacaaacatagccacttggagcccctggagtctcaggagcaggacagaattgaatttaaagacaaacgcccagaaatttcgccttag

SEQ ID NO: 83376 - DNA, 861 bp, Artificial Sequence
  derived and/or modified sequence
atgcaggaaggcgaactcgctatttcccccatttcacccgtagctgcgatgccacccctgggcacgcacgttcaggcacgctgcgaggcgcagatcaatttattaggggagggaggaatttgcaagcttccaggaaggctgagggatgtcctctatgaactcctgcagtatattaagacacagagacgggcactcgtgtgtggcccattctttgggggtatctttcggcttaagacaccgacccagcatagcccagtgccccctgaggaagtgaccggtccaagccagatggatactcgccgagggcatctcctgcagccaccggacccgggattgacatcaaacttcggccacctcgacgatcccggactcgccagatggacccccggaaaggaagaaagtttgaacctgtgtcattgtgccgaacttgggtgtcgaacccagggagtttgctctttccctgctatgcctcaggccccaatagacggacgcattgctgactgccgtctcttatgggattacgtgtaccagcttctccttgacacacgctatgaaccatacataaaatgggaagacaaggacgccaagattttcagagtggtggacccaaacggcctggcgcgactctggggcaaccacaaaaatagggtgaatatgacttatgaaaaaatgagtcgagccttgcgccactactataagcttaatataatcaaaaaagaacccggacagaaattgctgtttcgtttcttaaagactcccggtaagatggttcaggataaacactctcacctcgaacctcttgagtctcaggaacaggatcgtatcgagttcaaagataagagacctgagataagcccatag

SEQ ID NO: 83377 - DNA, 861 bp, Artificial Sequence
  derived and/or modified sequence
atgcaggagggcgagctggccatcagccccatcagccccgtggccgccatgccccccctgggcacccacgtgcaggccagatgcgaggcccagatcaacctgctgggcgagggcggcatctgcaagctgcccggcagactgagagacgtgctgtacgagctgctgcagtacatcaagacccagagaagagccctggtgtgcggccccttcttcggcggcatcttcagactgaagacccccacccagcacagccccgtgccccccgaggaggtgaccggccccagccagatggacaccagaagaggccacctgctgcagccccccgaccccggcctgaccagcaacttcggccacctggacgaccccggcctggccagatggacccccggcaaggaggagagcctgaacctgtgccactgcgccgagctgggctgcagaacccagggcgtgtgcagcttccccgccatgccccaggcccccatcgacggcagaatcgccgactgcagactgctgtgggactacgtgtaccagctgctgctggacaccagatacgagccctacatcaagtgggaggacaaggacgccaagatcttcagagtggtggaccccaacggcctggccagactgtggggcaaccacaagaacagagtgaacatgacctacgagaagatgagcagagccctgagacactactacaagctgaacatcatcaagaaggagcccggccagaagctgctgttcagattcctgaagacccccggcaagatggtgcaggacaagcacagccacctggagcccctggagagccaggagcaggacagaatcgagttcaaggacaagagacccgagatcagcccctag

SEQ ID NO: 83378 - DNA, 2157 bp, Artificial Sequence
  derived and/or modified sequence
gcgcacaacctctcttgagacagggggagctgagacagatggaaagggtgatgggtgggcaggcaccaaccccggagcacccagaggcccaggaaaaggtgtcagtcgggatctccgagtagtctggccctgctcaggagagcacagccgctctgatggtggtgcgacggttccggacctgtggggcctcagcggggccaaacggcaggccgagacagtatcggggccgggaaggtcactcacccctaaagggagaggcaccatgcgaggccccttcctatcctatgtgcggagactcacagggtccttcctggtcctgggctcgggaccgtgagagacgcagttggttccgagttcaggactaggggtccccttagatcctcagatcctgcagaatcccggctctgccccagtgggagccaaggccaggtcgccagagggactgtccgccggctggaggctgtgtgcaggacccacgcctcccaggctagcgagcgggcagcgccccggtgctgcgctcccacggggccggcccctgccctgccctgccctgctcctagcccgcagcggcgcaagtggaaccgcatcccgctctttcgttttcgtttcccggaaggatagcgattaccggagcgcctcgcgcgcctgcccgcctgcggaggacccgggcgcacacgccttggcgcttctcgaaagagatttcctcccacgcgaccttccagttctcggagccaggttaggggtttggcggaggaggactgcggggcgcgggcctagggccccagcagccacagccaggggagcgctcaagacagaaagccggtggcttcctcacctccacctgtaatgcaggagggagaattggctatttctcctataagccctgtggcagccatgcctcccctaggcacccacgtgcaagccagatgtgaagctcaaattaacctgctgggtgaaggggggatctgcaagctgccaggaagactccgtgacgtcctgtatgagctgctccagtacatcaagacccagcggcgagccctggtgtgtgggcccttttttggagggatcttcaggctgaagacgcccacccagcactctccagtccccccggaagaggtgactggcccctctcagatggacacccgaaggggccacctgctgcagccaccagacccagggcttaccagcaacttcggccacctggatgaccctggcctggcaaggtggacccctggcaaggaggagtccctcaacttatgtcactgtgcagagctcggctgcaggacccagggggtctgttccttccccgcgatgccgcaggcccccattgacggcaggatcgctgactgccgcctgctgtgggattacgtgtatcagctgctccttgatacccgatatgagccctacatcaagtgggaagacaaggacgccaagatcttccgagttgtggatccaaatgggctcgccagactctggggaaatcacaagaaccgggtgaacatgacctacgagaagatgtctcgtgccctgcgccactattataagcttaatatcattaagaaggaaccggggcagaaactcctgttcagatttctaaagactccgggaaagatggtccaggacaagcacagccacctggagccgctggagagccaggagcaggacagaatagagttcaaggacaagaggccagaaatctctccgtgaggggcaggtggactccaggcacccggtaccgatggggcagggaccgagtctcccatgaaggcagactcctcctcccagcagagcagcaggatccccagccagactctgtacccacaggattacagccattgcttgggaaggctgggaggcctcccatccaggacactgggggcaggagtgtcatcttttgggcagggcaatcctggggctaaatgaggtacaggggaatggactctcccctactgcacccctgggagaggaagccaggcaccgatagagcacccagccccacccctgtaaatggaatttaccagatgaagggaatgaagtccctcactgagcctcagatttcctcacctgtgaaatgggctgaggcaggaaatgggaaaaagtgttagtgcttccaggcggcactgacagcctcagtaacaataaaaacaatggtagctg

SEQ ID NO: 83379 - DNA, 1186 bp, Artificial Sequence
  derived and/or modified sequence
cacacgccttggcgcttctcgaaagagatttcctcccacgcgaccttccagttctcggagccaggttaggggtttggcggaggaggactgcggggcgcgggcctagggccccagcagccacagccaggggagcgctcaagacagaaagccggtggcttcctcacctccacctgtaatgcaggtgacgtcctgtatgagctgctccagtacatcaagacccagcggcgagccctggtgtgtgggcccttttttggagggatcttcaggctgaagacgcccacccagcactctccagtccccccggaagaggtgactggcccctctcagatggacacccgaaggggccacctgctgcagccaccagacccagggcttaccagcaacttcggccacctggatgaccctggcctggcaaggtggacccctggcaaggaggagtccctcaacttatgtcactgtgcagagctcggctgcaggacccagggggtctgttccttccccgcgatgccgcaggcccccattgacggcaggatcgctgactgccgcctgctgtgggattacgtgtatcagctgctccttgatacccgatatgagccctacatcaagtgggaagacaaggacgccaagatcttccgagttgtggatccaaatgggctcgccagactctggggaaatcacaagaaccgggtgaacatgacctacgagaagatgtctcgtgccctgcgccactattataagcttaatatcattaagaaggaaccggggcagaaactcctgttcagatttctaaagactccgggaaagatggtccaggacaagcacagccacctggagccgctggagagccaggagcaggacagaatagagttcaaggacaagaggccagaaatctctccgtgaggggcaggtggactccaggcacccggtaccgatggggcagggaccgagtctcccatgaaggcagactcctcctcccagcagagcagcaggatccccagccagactctgtacccacaggattacagccattgcttgggaaggctgggaggcctcccatccaggacactgggggcaggagtgtcatcttttgggcagggcaatcctggggctaaatgaggtacaggggaatggactctcccctactgcacccctgggagaggaagccaggcaccgatagagcacccag

SEQ ID NO: 83380 - protein, 264 aa, Artificial Sequence
  derived and/or modified sequence
MQEGELAISPISPVAAMPPLGTHVQARCEAQINLLGEGGICKLPGRLRIQPALWSREDVLHWLRWAEQEYSLPCTAEHGFEMNGRALCILTKDDFRHRAPSSGDVLYELLQYIKTQRRALVCGPFFGGIFRLKTPTQHSPVPPEDCRLLWDYVYQLLLDTRYEPYIKWEDKDAKIFRVVDPNGLARLWGNHKNRVNMTYEKMSRALRHYYKLNIIKKEPGQKLLFRFLKTPGKMVQDKHSHLEPLESQEQDRIEFKDKRPEISP

SEQ ID NO: 83381 - DNA, 795 bp, Artificial Sequence
  derived and/or modified sequence
atgcaggagggcgagctggcaatttctccaatctcaccagtggcagctatgccaccactaggaacccacgtgcaagccaggtgtgaagcccagattaacttactgggagaagggggcatctgtaagctgcccggtaggttaaggatccagcccgcgctttggagtagggaagacgtgttgcactggcttcgttgggccgagcaggagtacagtttaccatgtacagcagaacacggctttgagatgaacgggcgggccctctgcatattgaccaaggacgacttccgccacagggctcctagctccggcgatgtgctgtatgagctgcttcagtacatcaaaacacagcgcagagctctcgtctgtgggccattcttcggaggaatcttccgcctcaagactcctacccagcacagcccagtgccacccgaagattgtcggctgctttgggattatgtctaccagctgttactagatacgcgctatgaaccatatattaagtgggaggataaagacgctaagatcttccgtgttgtcgacccaaacggattagccagactgtgggggaatcacaaaaacagagtgaacatgacttacgagaagatgagtcgagccctccgacattactataagcttaatatcatcaagaaggaacctgggcagaaacttctgttcagatttctaaaaacacctggtaaaatggtccaggacaagcactcccatctggagcctctggaatcccaggaacaggaccggattgagtttaaagataagagacctgaaatttcgccttag

SEQ ID NO: 83382 - DNA, 795 bp, Artificial Sequence
  derived and/or modified sequence
atgcaggagggggagctggccatcagccccatcagccctgtggccgccatgccacccctgggcacccacgtgcaggcccgctgtgaggcccagatcaacctgctgggggagggcggcatctgcaagctgcccggccgcctgcgcatccagcctgccctgtggagcagagaagatgtgctgcactggctgcgctgggccgagcaggagtacagcctgccctgcacagctgagcacggctttgagatgaatggccgggccctgtgcatcctgaccaaggatgacttccgccaccgggcccccagcagtggagatgtgctgtatgagctgctgcagtacatcaagacccagaggcgggccctggtgtgtggccccttcttcggcggcatcttccggctgaagacccccacccagcacagccctgtgcccccagaggactgccgcctgctgtgggactatgtgtaccagctgctgctggacaccaggtatgagccctacatcaagtgggaggacaaggatgccaagatcttccgggtggtggaccccaacggcctggcccggctgtggggcaaccacaagaacagagtgaacatgacctatgagaagatgagccgggccctgcggcactactacaagctgaacatcatcaagaaggagcccggccagaagctgctcttccgcttcctgaagaccccaggcaagatggtgcaggacaagcacagccacctggagcccctggagagccaggagcaggacagaattgagttcaaggacaagaggcctgagatcagcccctag

SEQ ID NO: 83383 - DNA, 795 bp, Artificial Sequence
  derived and/or modified sequence
atgcaggagggcgagctggccatcagccccatcagccccgtggccgcaatgccccctctcgggactcacgtgcaggcgagatgtgaagcccagattaatctgctgggggaggggggaatttgcaagttacccggtcgactccgcattcaaccggcgttatggtcgcgagaagatgtgctgcattggctgcggtgggcggagcaagaatactccctcccgtgtacagctgaacatggatttgagatgaatggtagagcgctctgcatcctgacgaaagacgattttcgtcatagagccccaagctcaggggacgtcctctatgagctgctgcagtacatcaagacccaacggagggcgctcgtttgcgggccctttttcggaggcatattcaggctgaaaacccccactcagcatagtccggtaccccccgaggattgtagactattgtgggattatgtctatcagctactgctcgatacccggtatgagccatacatcaaatgggaagacaaagacgcaaagatcttcagagtagttgatcctaacggactggcccgtctctggggaaatcacaagaacagggtgaatatgacctatgaaaagatgtccagggctctcaggcactactacaaattaaatatcatcaagaaggaaccgggacagaagctgctgttccgcttcctcaaaactcccggcaagatggtccaggacaaacactcccatttggagccccttgaatctcaggaacaagataggattgaattcaaggataagagacccgaaattagcccttag

SEQ ID NO: 83384 - DNA, 795 bp, Artificial Sequence
  derived and/or modified sequence
atgcaggaaggggagttggccatatctcctatttcaccagtcgcagcaatgccgcctctgggaacacacgtacaggctcgctgtgaagcccagatcaatttgctcggtgagggcggaatttgcaaactgccgggtcgcctcaggatccagccagccctgtggagccgcgaggatgttctgcactggctgcggtgggcggaacaggaatattcattgccctgtactgccgagcatggattcgagatgaacgggagagctttgtgcatcctgactaaagacgacttcaggcaccgggctcctagctccggcgacgttctgtacgaacttcttcaatatatcaagacacaaaggagagccctcgtctgtggcccatttttcggtggtatttttaggctgaaaacccctacacagcattcccctgtacccccagaggattgtaggctgttatgggactacgtctatcaactgcttttggataccagatacgagccctacatcaagtgggaagacaaggatgccaaaatttttagagtcgttgacccaaacggcttggcacgtctgtggggcaaccacaaaaatcgagtgaatatgacatacgagaagatgtccagagcacttcgccactattataagttgaatataatcaaaaaggagcctggacagaaactgcttttccgctttttgaagacacctggaaaaatggtccaggataagcattcccatctagagcccttggagagccaggagcaggaccgtatcgagttcaaggataaacgtccagagatctccccatag

SEQ ID NO: 83385 - DNA, 795 bp, Artificial Sequence
  derived and/or modified sequence
atgcaggagggcgagctggccatcagccccatcagccccgtggccgccatgccccccctgggcacccacgtgcaggccagatgcgaggcccagatcaacctgctgggcgagggcggcatctgcaagctgcccggcagactgagaatccagcccgccctgtggagcagagaggacgtgctgcactggctgagatgggccgagcaggagtacagcctgccctgcaccgccgagcacggcttcgagatgaacggcagagccctgtgcatcctgaccaaggacgacttcagacacagagcccccagcagcggcgacgtgctgtacgagctgctgcagtacatcaagacccagagaagagccctggtgtgcggccccttcttcggcggcatcttcagactgaagacccccacccagcacagccccgtgccccccgaggactgcagactgctgtgggactacgtgtaccagctgctgctggacaccagatacgagccctacatcaagtgggaggacaaggacgccaagatcttcagagtggtggaccccaacggcctggccagactgtggggcaaccacaagaacagagtgaacatgacctacgagaagatgagcagagccctgagacactactacaagctgaacatcatcaagaaggagcccggccagaagctgctgttcagattcctgaagacccccggcaagatggtgcaggacaagcacagccacctggagcccctggagagccaggagcaggacagaatcgagttcaaggacaagagacccgagatcagcccctag

SEQ ID NO: 83386 - DNA, 1488 bp, Artificial Sequence
  derived and/or modified sequence
gtttcccggaaggatagcgattaccggagcgcctcgcgcgcctgcccgcctgcggaggacccgggcgcacacgccttggcgcttctcgaaagagatttcctcccacgcgaccttccagttctcggagccaggttaggggtttggcggaggaggactgcggggcgcgggcctagggccccagcagccacagccaggggagcgctcaagacagaaagccggtggcttcctcacctccacctgtaatgcaggagggagaattggctatttctcctataagccctgtggcagccatgcctcccctaggcacccacgtgcaagccagatgtgaagctcaaattaacctgctgggtgaaggggggatctgcaagctgccaggaagactccgcatccagcccgcactgtggagcagggaggacgtgctgcactggctgcgctgggcagagcaggagtactctctgccatgcaccgcggagcacgggttcgagatgaacggacgcgccctctgcatcctcaccaaggacgacttccggcaccgtgcgcccagctcaggtgacgtcctgtatgagctgctccagtacatcaagacccagcggcgagccctggtgtgtgggcccttttttggagggatcttcaggctgaagacgcccacccagcactctccagtccccccggaagactgccgcctgctgtgggattacgtgtatcagctgctccttgatacccgatatgagccctacatcaagtgggaagacaaggacgccaagatcttccgagttgtggatccaaatgggctcgccagactctggggaaatcacaagaaccgggtgaacatgacctacgagaagatgtctcgtgccctgcgccactattataagcttaatatcattaagaaggaaccggggcagaaactcctgttcagatttctaaagactccgggaaagatggtccaggacaagcacagccacctggagccgctggagagccaggagcaggacagaatagagttcaaggacaagaggccagaaatctctccgtgaggggcaggtggactccaggcacccggtaccgatggggcagggaccgagtctcccatgaaggcagactcctcctcccagcagagcagcaggatccccagccagactctgtacccacaggattacagccattgcttgggaaggctgggaggcctcccatccaggacactgggggcaggagtgtcatcttttgggcagggcaatcctggggctaaatgaggtacaggggaatggactctcccctactgcacccctgggagaggaagccaggcaccgatagagcacccagccccacccctgtaaatggaatttaccagatgaagggaatgaagtccctcactgagcctcagatttcctcacctgtgaaatgggctgaggcaggaaatgggaaaaagtgttagtgcttccaggcggcactgacagcctcagtaacaataaaaacaatggtagctga

SEQ ID NO: 83387 - DNA, 573 bp, Artificial Sequence
  derived and/or modified sequence
atggacaccaggagaggccatctgctacagcctccagatcctggtctgacttccaacttcgggcacctcgacgacccggggttagccagatggaccccaggcaaggaagagagtctgaatctttgccactgcgccgaactgggatgccgaacacagggggtgtgttccttccccgccatgccgcaggcgcctatagatggaagaattgccgattgcagattgctatgggattatgtatatcagttgttgctcgacactcgctatgaaccatacatcaagtgggaggacaaagatgccaagatcttccgcgttgtcgaccctaacggactcgcaaggctatggggcaatcataagaacagagttaacatgacttacgaaaaaatgagtcgtgccttacgtcactactacaagctgaatatcatcaaaaaggagccaggccagaaactccttttccgtttcctgaaaacacctggcaaaatggtgcaggataagcacagccatctggaaccgctggagtctcaggagcaggataggatagaatttaaggacaaaaggcctgagatctcaccgtag

SEQ ID NO: 83388 - DNA, 573 bp, Artificial Sequence
  derived and/or modified sequence
atggacacccggcggggccacctgctgcagcccccagaccccggcctgaccagcaactttggccacctggatgaccccggcctggcccgctggaccccaggcaaggaggagagcctgaacctgtgccactgtgccgagctgggctgcaggacccagggcgtgtgcagcttccctgccatgccccaggcccccattgatggaagaattgctgactgccgcctgctgtgggactatgtgtaccagctgctgctggacaccaggtatgagccctacatcaagtgggaggacaaggatgccaagatcttccgggtggtggaccccaacggcctggcccggctgtggggcaaccacaagaacagagtgaacatgacctatgagaagatgagccgggccctgcggcactactacaagctgaacatcatcaagaaggagcccggccagaagctgctcttccgcttcctgaagaccccaggcaagatggtgcaggacaagcacagccacctggagcccctggagagccaggagcaggacagaattgagttcaaggacaagaggcctgagatcagcccctag

SEQ ID NO: 83389 - DNA, 573 bp, Artificial Sequence
  derived and/or modified sequence
atggacacccggcggggccacctgctgcagccccccgaccccggcctgacctctaatttcggtcatttggacgatccaggactggctcggtggacgccgggaaaggaggagagcctgaatctgtgccactgtgcagagctcgggtgcaggacacagggcgtgtgttccttccctgcgatgcctcaggcccctatcgatggtcgaatcgccgactgtcgcttgttgtgggattacgtctatcagttgttgttagacactcggtacgagccttacatcaaatgggaggataaagacgctaagatattcagggttgtcgatccaaatggtctggccaggctgtggggcaatcacaagaatcgcgtgaatatgacctacgaaaagatgtccagagcactgagacattattacaaactcaacataattaagaaggagccaggtcaaaagctgttgttccggtttctcaagactcccggcaaaatggtgcaagacaaacactcacacctcgagcctctggaatctcaggagcaggatcgcattgaattcaaggataagcgccctgaaatatccccctag

SEQ ID NO: 83390 - DNA, 573 bp, Artificial Sequence
  derived and/or modified sequence
atggacacccgtagggggcatttgttgcagccaccagacccgggactgacttcaaatttcggccatctggacgaccccggactcgctagatggacaccaggcaaagaggaatcattaaatctttgtcattgtgctgagctgggctgcagaacccagggggtatgcagctttcctgctatgccccaagcccctatcgatggcaggattgctgattgtcgactcctgtgggactatgtgtaccagctcctactggacacaaggtacgagccatacatcaaatgggaggacaaagacgcaaagatctttagagtcgtcgatcctaatggacttgctcgcctgtggggtaatcacaaaaatagagttaacatgacgtacgaaaagatgtcacgcgcattgaggcattattataagctgaacataatcaaaaaggaacctggtcagaagttgctgttccgctttttaaagacaccagggaagatggtccaggacaagcacagccatctcgaaccactagagtctcaggaacaggatcgcattgagttcaaggacaagaggcctgaaatctccccatag

SEQ ID NO: 83391 - DNA, 573 bp, Artificial Sequence
  derived and/or modified sequence
atggacaccagaagaggccacctgctgcagccccccgaccccggcctgaccagcaacttcggccacctggacgaccccggcctggccagatggacccccggcaaggaggagagcctgaacctgtgccactgcgccgagctgggctgcagaacccagggcgtgtgcagcttccccgccatgccccaggcccccatcgacggcagaatcgccgactgcagactgctgtgggactacgtgtaccagctgctgctggacaccagatacgagccctacatcaagtgggaggacaaggacgccaagatcttcagagtggtggaccccaacggcctggccagactgtggggcaaccacaagaacagagtgaacatgacctacgagaagatgagcagagccctgagacactactacaagctgaacatcatcaagaaggagcccggccagaagctgctgttcagattcctgaagacccccggcaagatggtgcaggacaagcacagccacctggagcccctggagagccaggagcaggacagaatcgagttcaaggacaagagacccgagatcagcccctag

SEQ ID NO: 83392 - protein, 1293 aa, Artificial Sequence
  derived and/or modified sequence
MAMGDDKSFDDEESVDGNRPSSAASAFKVPAPKTSGNPANSARKPGSAGGPKVGGASKEGGAGAVDEDDFIKAFTDVPSIQIYSSRELEETLNKIREILSDDKHDWDQRANALKKIRSLLVAGAAQYDCFFQHLRLLDGALKLSAKDLRSQVVREACITVAHLSTVLGNKFDHGAEAIVPTLFNLVPNSAKVMATSGCAAIRFIIRHTHVPRLIPLITSNCTSKSVPVRRRSFEFLDLLLQEWQTHSLERHAAVLVETIKKGIHDADAEARVEARKTYMGLRNHFPGEAETLYNSLEPSYQKSLQTYLKSSGSVASLPQSDRSSSSSQESLNRPFSSKWSTANPSTVAGRVSAGSSKASSLPGSLQRSRSDIDVNAAAGAKAHHAAGQSVRSGRLGAGALNAGSYASLEDTSDKLDGTASEDGRVRAKLSAPLAGMGNAKADSRGRSRTKMVSQSQPGSRSGSPGRVLTTTALSTVSSGVQRVLVNSASAQKRSKIPRSQGCSREASPSRLSVARSSRIPRPSVSQGCSREASRESSRDTSPVRSFQPLASRHHSRSTGALYAPEVYGASGPGYGISQSSRLSSSVSAMRVLNTGSDVEEAVADALKKPARRRYESYGMHSDDDANSDASSACSERSYSSRNGSIPTYMRQTEDVAEVLNRCASSNWSERKEGLLGLQNLLKNQRTLSRVELKRLCEIFTRMFADPHGKVFSMFLETLVDFIQVHKDDLQDWLFVLLTQLLKKMGADLLGSVQAKVQKALDVTRESFPNDLQFNILMRFTVDQTQTPSLKVKVAILKYIETLAKQMDPGDFINSSETRLAVSRVITWTTEPKSSDVRKAAQSVLISLFELNTPEFTMLLGALPKTFQDGATKLLHNHLRNTGNGTQSSMGSPLTRPTPRSPANWSSPLTSPTNTSQNTLSPSAFDYDTENMNSEDIYSSLRGVTEAIQNFSFRSQEDMNEPLKRDSKKDDGDSMCGGPGMSDPRAGGDATDSSQTALDNKASLLHSMPTHSSPRSRDYNPYNYSDSISPFNKSALKEAMFDDDADQFPDDLSLDHSDLVAELLKELSNHNERVEERKIALYELMKLTQEESFSVWDEHFKTILLLLLETLGDKEPTIRALALKVLREILRHQPARFKNYAELTVMKTLEAHKDPHKEVVRSAEEAASVLATSISPEQCIKVLCPIIQTADYPINLAAIKMQTKVIERVSKETLNLLLPEIMPGLIQGYDNSESSVRKACVFCLVAVHAVIGDELKPHLSQLTGSKMKLLNLYIKRAQTGSGGADPTTDVSGQS

SEQ ID NO: 83393 - DNA, 3882 bp, Artificial Sequence
  derived and/or modified sequence
atggcgatgggggacgacaagagttttgacgacgaggaatctgtggatggtaacaggcccagttcagccgccagcgccttcaaagtacctgcccctaaaacttcaggaaatcccgctaatagtgcacggaagccagggtctgcgggagggcctaaggtgggaggagcaagtaaggagggaggtgcaggcgcagtggacgaagacgattttataaaagccttcacggatgtaccaagtatacagatatactcttctcgggagctggaagaaaccctgaataagatcagagagatcctttccgatgataagcatgattgggatcagcgcgcaaatgcgctgaagaagatccgtagccttttggtcgccggagcagcccagtacgactgtttcttccagcacctgcgactgcttgatggagccttgaagctttccgcgaaggacctgcgtagccaggttgtccgcgaagcttgtattactgtcgctcatttgtccaccgttctagggaacaaatttgaccacggtgctgaggcaattgttccaaccctgttcaacctcgtgcctaactccgccaaggttatggccacatcgggatgtgccgctattaggtttattatcagacacacccacgtcccacgcctcatacccctgatcacaagcaactgtaccagtaagtccgtacctgtgcggcggcgcagctttgaattcttggatctcttgctgcaggaatggcaaactcactccctggagcggcacgcggccgtgctggtcgaaacaatcaaaaagggaatacatgatgcagacgccgaagccagggtagaggctcgaaagacatatatgggtttaagaaaccactttcctggtgaagccgagactctgtataactccctggagcctagctaccagaagagcctgcagacatatctaaagagcagcggttctgtggctagcctgccccaatccgatagatctagtagctcatctcaagaatccctgaatagacccttcagctccaagtggagcacagccaatccgtcaaccgtggctgggagagtctcagcggggtcttcaaaggcgtcctccctgccgggcagcctccagcggagcaggtccgatatcgatgtgaacgctgctgccggtgccaaagcacatcatgccgcaggacagtccgtgaggagtggtcgactcggagctggagcattgaacgctgggtcatacgccagtctggaggatacaagcgataaattggacgggaccgcctctgaagatggcagggtccgcgccaaattatcagctcctctggctggcatggggaatgctaaggctgatagtcggggcaggtcacggacaaaaatggtcagtcagtcgcaaccagggtctcgctctggttccccaggcagggttctgaccacaacagccctctccaccgtcagttcgggcgtgcagagagtgcttgtcaattctgctagcgcccagaagcgttccaagataccacggtcacaggggtgcagtagagaggcctcacctagcaggctttctgtagcgcgcagctcccgtatcccccgaccttcagtgtcccagggatgcagcagggaggcatccagagaaagttccagagatacatctcctgtgcggtccttccagccccttgcttcacgacaccactctaggtctaccggggccctctacgctcctgaggtgtatggcgcttccgggcccggatatggaatctcacagagctccagattgagctcaagtgtgtctgccatgcgtgtgctgaacacgggttcagatgtggaagaagccgtcgccgacgcactaaagaaacccgcgaggcgtaggtatgaatcctatgggatgcactccgacgatgacgccaactctgacgcctcctccgcctgctcagaaagaagttactctagccggaacggcagtatccccacatacatgcgccagaccgaagacgtcgctgaggtgctgaatcgatgtgcgtcctcgaactggtccgaaagaaaggaaggcttactgggtctacaaaacttactaaaaaatcaacgtaccctgagtcgcgtcgagcttaagcggctctgcgaaattttcactcggatgttcgcagacccccacggaaaggtcttcagcatgttcttagagacactggtggattttattcaggtacacaaggatgatcttcaagattggcttttcgtgctgctgacccagctgctgaaaaaaatgggcgcggatctgctgggcagcgttcaagctaaggttcagaaggctctcgacgtgacacgcgagtctttcccaaatgatttacagttcaacatcctgatgcgcttcaccgtagaccagacccagactccatccctcaaggttaaggtcgctattctcaaatacattgagaccctagctaagcagatggatccaggtgattttatcaacagtagtgagacaaggctggcagtgtcgcgagttattacttggacaactgagccaaagtcttccgatgttcggaaagctgctcaatccgttttgattagcctctttgaactgaacactccagaatttaccatgcttctgggggcactgcccaagaccttccaggatggagcaacaaagctgctgcataatcatctgcgtaatacaggtaacggcacccaaagtagtatgggaagcccacttactcgtcccacacctaggtccccagctaactggtcttcccctctgacttcgcctaccaacactagccagaataccctctccccaagcgcattcgattacgacactgagaacatgaactcagaggacatttattcctctttacggggtgtcaccgaggcgattcagaactttagctttcgctcccaggaagatatgaatgagccactgaaaagagattctaagaaggacgatggcgactccatgtgcgggggccccggtatgtcagatccgcgagctggtggcgatgccaccgattccagccagacggctctcgataacaaggcttcactcctgcattcaatgccgacgcactctagtccacgaagccgggattataacccatataactactcagactccatttcccccttcaacaaaagtgcactcaaggaagctatgtttgatgacgatgccgaccagtttcctgacgatttatccctggatcactcggacttggtggcagaactcctgaaggaattgtctaatcacaacgaaagggtagaggagcgcaagatcgcactatacgagctgatgaaactgacgcaggaagagagtttttcagtgtgggacgaacactttaaaactatcctgctcctgctgctggagaccttaggcgataaagaaccaaccatacgagccctggcattaaaggtcctgcgtgaaatcctgcgacaccagcccgctcgtttcaagaattacgccgagcttacggtcatgaaaacactagaggcccacaaggacccacataaggaagtcgtgcgatcagctgaagaagcagcttccgttctagctacgtccatctcacccgaacagtgtatcaaggtcctgtgccctatcatccagactgctgattatccaatcaatcttgcagctattaaaatgcagactaaagtaattgagcgcgtttctaaagaaacacttaatctccttttaccggagataatgcctggactcattcaggggtatgacaactccgagtcttccgtgaggaaggcatgtgtgttctgtctggtggccgtccatgcggtgatcggtgacgaattgaagcctcatctgagccaattaactggttctaaaatgaaacttctaaatctctacatcaagagggctcagaccggctcaggtggggccgatcccaccactgatgtttccggccaatcttag

SEQ ID NO: 83394 - DNA, 3882 bp, Artificial Sequence
  derived and/or modified sequence
atggccatgggagatgacaagagctttgatgatgaggagagcgtggatggcaaccggcccagcagcgctgccagcgccttcaaggtgcctgcccccaagaccagcggcaacccagccaacagcgccaggaagccaggcagcgctgggggccccaaggtgggcggggccagcaaggagggcggggccggggctgtggatgaagatgacttcatcaaggccttcacagatgtgcccagcatccagatctacagcagccgggagctggaggagaccctgaacaagatccgggagatcctgagtgatgacaagcatgactgggaccagagggccaatgccctgaagaagatccgcagcctgctggtggccggggccgcccagtatgactgcttcttccagcacctgcggctgctggatggagccctgaagctgagcgccaaggacctgcggagccaggtggtgcgggaggcctgcatcaccgtggcccacctgagcacagtgctgggcaacaagtttgaccatggagctgaggccatcgtgcccaccctcttcaacctggtgcccaacagcgccaaggtgatggccaccagcggctgtgccgccatccgcttcatcatccgccacacccacgtgcccaggctcatccccctcatcaccagcaactgcaccagcaagtctgtgcctgtgagaagaagaagctttgagttcctggacctgctgctgcaggagtggcagacccacagcctggagagacatgctgctgtgctggtggagaccatcaagaagggcatccatgatgctgatgctgaggcccgggtggaggccaggaagacctacatgggcctgaggaaccacttccctggagaggccgagaccctgtacaacagcctggagcccagctaccagaagagcctgcagacctacctgaagagcagcggctctgtggccagcctgccccagagcgacaggagcagcagcagcagccaggagagcctgaaccggcccttcagcagcaagtggagcacagccaaccccagcacagtggccggccgggtgtctgctggcagcagcaaggccagcagcctgcccggcagcctgcagaggagcagaagtgacattgatgtgaatgctgctgctggggccaaggcccaccacgccgccggccagagcgtgcgcagcggccgcctgggcgctggggccctgaatgccggcagctatgccagcctggaggacaccagtgacaagctggatggaacagcctctgaagatggccgggtgcgggccaagctgagcgcccccctggccggcatgggaaatgccaaggctgacagccggggccgcagcaggaccaagatggtgtcccagagccagcccggcagccgcagcggcagccctggccgggtgctgaccaccacagccctgagcacagtgagcagcggcgtgcagagggtgctggtgaacagcgccagcgcccagaagaggagcaagatccccaggagccagggctgcagccgggaggccagccccagccggctgtctgtggcccggagcagccgcatcccccggcccagcgtgtcccagggctgcagccgggaggccagccgggagagcagccgggacaccagccctgtgcgctccttccagcccctggccagccgccaccacagccgcagcactggagccctgtatgcccctgaggtgtatggagccagcggccctggctacggcatcagccagagcagccggctgagcagctctgtgtctgccatgagggtgctgaacacaggcagtgatgtggaggaggccgtggctgatgccctgaagaagccagcccggcggcgctatgagagctatggcatgcacagtgatgatgatgccaacagtgatgccagcagcgcctgcagcgagaggagctacagcagcagaaatggcagcatccccacctacatgaggcagacagaagatgtggccgaggtgctgaacagatgtgccagcagcaactggagcgagaggaaggagggcctgctgggcctgcagaacctgctgaagaaccagaggaccctgagccgggtggagctgaagaggctgtgtgagatcttcaccaggatgtttgctgacccccacggcaaggtgttctccatgttcctggagaccctggtggacttcatccaggtgcacaaggatgacctgcaggactggctgtttgtgctgctgacccagctgctgaagaagatgggcgctgacctgctgggctctgtgcaggccaaggtgcagaaggccctggatgtgacccgggagagcttccccaatgacctgcagttcaacatcctgatgaggttcaccgtggaccagacccagacccccagcctgaaggtgaaggtggccatcctgaagtacatcgagaccctggccaagcagatggaccccggggacttcatcaacagcagcgagacccggctggccgtgtccagggtcatcacctggaccacagagcccaagagcagtgatgtgaggaaggccgcccagagcgtgctgatcagcctgtttgagctgaacaccccagagttcaccatgctgctgggcgccctgcccaagaccttccaggatggagccaccaagctgctgcacaaccacctgagaaatactggaaatggcacccagagctccatgggcagccccctgacccggcccacccccaggagccctgccaactggagcagccccctgaccagccccaccaacaccagccagaacaccctgagccccagcgcctttgattatgacacagagaacatgaacagcgaggacatctacagcagcctgcggggcgtgacagaggccatccagaacttctccttccgcagccaggaggacatgaatgagcccctgaagagggacagcaagaaggatgatggagacagcatgtgtggcggccctggcatgtctgaccccagggctggaggagatgccacagacagcagccagacagccctggacaacaaggccagcctgctgcacagcatgcccacccacagcagccccaggagccgggactacaacccctacaactacagcgacagcatcagccccttcaacaagagcgccctgaaggaggccatgtttgatgatgatgctgaccagttcccagatgacctgagcctggaccacagcgacctggtggccgagctgctgaaggagctgagcaaccacaatgaaagagtggaggagaggaagatcgccctgtatgagctgatgaagctgacccaggaggagagcttctctgtgtgggatgagcacttcaagaccatcctgctgctgctgctggagaccctgggggacaaggagcccaccatccgggccctggccctgaaggtgctgcgggagatcctgcggcaccagcctgcccgcttcaagaactatgcagagctgactgtgatgaagaccctggaggcccacaaggacccccacaaggaggtggtgcgctctgctgaggaggccgcctctgtgctggccaccagcatcagccctgagcagtgcatcaaggtgctgtgccccatcatccagacagctgactaccccatcaacctggccgccatcaagatgcagaccaaggtgattgagcgggtgtccaaggagaccctgaacctgctgctgcctgagatcatgcctggcctcatccagggctatgacaacagcgagagctctgtgaggaaggcctgtgtgttctgcctggtggccgtgcatgctgtgattggagatgagctgaagccccacctgagccagctgaccggcagcaagatgaagctgctgaacctgtacatcaagagggcccagacaggcagcggcggcgctgaccccaccacagatgtgtctggccagagctag

SEQ ID NO: 83395 - DNA, 3882 bp, Artificial Sequence
  derived and/or modified sequence
atggccatgggcgacgacaagagcttcgacgacgaggagagcgtggacggaaatcggcctagttccgctgcctctgcttttaaagtccctgctccgaagacgtctggtaaccccgccaacagtgccaggaaacccgggagcgcagggggccccaaagtgggaggcgcttcaaaggaaggcggtgcaggcgccgtggacgaagacgatttcatcaaggcatttacagacgtcccctccatccagatttacagctctcgcgagctggaggaaaccttaaacaagattcgcgagatactgagtgatgacaagcatgactgggaccaaagggctaacgccttgaagaaaattagatctcttttggtagccggggccgcacaatacgattgtttttttcaacacttgagactgctcgacggggcgctaaaattaagtgctaaggaccttcgatcccaggtcgtgagagaagcctgtattaccgtagcccatctgagtacggtgctgggcaacaaatttgatcacggagccgaggccattgtgccaaccctgtttaacctagtgccaaactcagcaaaggttatggctacatcaggatgcgccgcaatccgctttattattcggcacacacacgtgcccaggctcattcctcttatcactagtaactgcaccagcaaaagcgtccccgtacggaggcgatcattcgaatttctcgacctgttgctgcaggaatggcagactcattccctggagaggcacgctgccgtgctcgttgagacaattaaaaagggtatccatgatgcagatgcagaggcccgtgtcgaagcgaggaaaacatatatgggtctgcggaatcacttccccggggaggccgagaccctgtataactccctggagccctcgtaccagaagtcactccagacgtacctgaagagttccgggtccgtggcctctctccctcaatccgaccgcagttcctccagcagtcaggagagcctgaatcggcccttcagcagcaaatggtctaccgccaatcctagcactgtcgcgggcagagtgtccgctgggagtagcaaagcctcaagtctgcccggatccctgcagaggtcccggagcgacattgatgtgaatgctgccgctggagctaaagcgcatcatgccgctgggcaatctgtgcggtcgggtagacttggcgccggagccttaaatgctggcagttacgcgtctctcgaggacacatccgataaactggatggcaccgctagcgaggacggcagggtccgagcgaaacttagcgcacccttggccggtatgggcaacgctaaagctgacagtagagggaggtcccgcaccaagatggtgagtcaatcccaaccaggcagtcgatcaggttcacctggaagagtcctcactactaccgctctatctacagtctcatccggcgtgcagagggtcctagttaattctgcaagcgcgcagaagcgtagtaaaatcccgaggtcacagggttgctccagagaggcatccccttcacggctttccgtagctcggagctcaaggatcccccgcccttctgtatctcaggggtgctcccgggaagctagcagagaatccagtcgagacacctctcctgtgcgctcctttcagcctcttgcgtcgcgccatcacagccgaagtacaggtgctctctacgcaccagaagtatatggagcaagtggcccagggtatggaatctcccaatcatctaggctgtctagctccgtgtcagccatgcgggtgctgaacacaggatctgatgtggaagaggccgtcgccgatgccctaaagaaaccggctcgtaggcggtacgaaagttacggaatgcatagtgacgacgatgcaaattccgacgcctcttctgcctgctcggagaggtcttatagttccaggaacggctccatacccacttacatgagacagactgaagacgtggcagaggtgttgaacaggtgcgccagttccaactggtctgaacgaaaagaagggctcttggggttacagaacctactcaaaaatcagcgaaccctgtcccgggttgagttaaaaagactgtgtgaaatctttactaggatgtttgctgacccccatggaaaggtcttttcaatgtttctggagacactcgtggacttcatacaggttcacaaggatgacctgcaggattggctgtttgtgctactcacgcaactgctgaagaaaatgggcgcagacctgttgggtagcgtacaagctaaagtccagaaagctctggacgttacccgggagtcttttccaaatgatctccagttcaacattctgatgaggttcacggtcgatcaaacccaaacccctagtctgaaagtgaaagtggccatcctgaagtatatcgagacactcgccaaacagatggacccaggagacttcatcaatagtagcgaaacgaggttggcagtgtccagggtgataacatggaccacagagcccaagagcagcgatgtgcgaaaggcggctcagagcgtcttaatatctttatttgagctgaacacgcccgagtttacgatgttacttggtgccctcccaaagacttttcaagacggtgccactaagctactgcacaaccatctgcgaaacacaggcaacggcacacaaagcagtatgggaagccccttaacacggcccactccacgttcacctgccaactggagttcgcccttaacctctcccaccaacacttcacagaacaccctttcccctagcgccttcgattatgacaccgagaatatgaatagtgaagatatctacagctccctccggggtgtgacagaagcaatccagaacttttccttcaggtcccaggaggatatgaacgagccactgaagcgagactcaaagaaggatgatggtgactccatgtgcgggggcccgggcatgtcagaccccagggcgggcggcgatgcaacggacagcagccagactgccctggataataaagcctctctgcttcacagtatgcctacccactcatcgccaagaagcagggattataatccctataactattcagattcgatcagtccattcaacaaaagtgctttgaaggaggctatgtttgacgacgacgcagaccagttcccggacgatttgtctttggatcatagcgatctggtggcagagctgctgaaggaactttcaaatcacaacgaacgtgtggaggaacgcaagatcgccctctacgaactgatgaagctgactcaggaagagtcattttctgtgtgggatgagcactttaaaacaatactgttactgctgctcgaaaccctcggtgacaaagagccaaccatcagagcgcttgccctcaaggtgttacgcgaaatcttacgccatcaacccgcccggtttaaaaactacgctgaactgacagtgatgaaaacattggaggctcataaggacccccacaaggaagtcgttcgttctgccgaagaggccgcttctgtactggccaccagtattagccctgagcagtgcattaaagtactgtgtcccattatccaaaccgcggattatcccataaacctggccgcaattaaaatgcagactaaggttatcgagcgcgttagcaaagagacactgaaccttctcctgcccgagattatgcccgggcttatccagggatacgataattcagagtcctccgtccggaaagcttgcgtcttctgtctagttgccgttcacgcagttattggggatgagctgaagccccatttgagccagctgacaggctcaaaaatgaaactgcttaacctgtacatcaaaagagcccaaacaggcagcgggggagcggaccctaccacagacgtctctggacagagttag

SEQ ID NO: 83396 - DNA, 3882 bp, Artificial Sequence
  derived and/or modified sequence
atggctatgggtgatgataaatcattcgatgacgaagaatctgttgacggaaacagaccttcctcggctgcaagtgcctttaaagtgcctgcacccaagaccagtggtaaccctgccaatagtgcacgtaaacccggaagtgccggtggccctaaagttggcggtgccagcaaagaaggaggcgcaggcgcagtggacgaggacgatttcattaaagcgtttactgacgttccgtctattcagatttatagtagccgcgaacttgaggaaaccctcaacaagattagagagattctgtcagatgataaacacgattgggaccagcgcgctaacgccctcaaaaaaattcggagtctgctcgtggccggagcggctcagtacgattgcttcttccagcacttacggttgctagacggcgcactgaagctcagcgctaaggaccttcgctcccaagtcgtacgtgaagcctgcatcacggtggcacacctgtctacagtgcttgggaataagtttgaccatggtgctgaggctattgtccccactctctttaaccttgtgcccaacagtgccaaagtgatggctacgtcaggctgcgctgcgattcgcttcattatccgacatacacatgttcccaggctgataccccttatcacctccaactgtacatccaagtctgttcccgtcagacgcaggagttttgaattcttagacctgttgttgcaagagtggcagacacactccctggaaaggcacgcggctgtcctggtggagactattaagaaaggcatccacgatgccgatgcggaggcccgtgtcgaagccagaaagacatacatggggctgagaaaccattttcctggagaagcagaaaccttatacaactcattggagccaagttatcagaagagtcttcagacttacctcaaatctagcggttccgtcgccagtctaccacagagcgaccgtagtagttccagctctcaggagtccttgaacagacccttctccagcaaatggtccactgccaacccctccactgtcgcgggacgggttagtgctggctccagcaaggccagttctctaccagggtctcttcagcgctcaaggtctgacattgatgtcaatgcagcggcaggggctaaagcccaccacgcagccggacaatcggtcagatcgggccgactcggtgccggagccctgaacgcgggtagctatgcaagcctggaagacactagcgataaacttgatggtactgcatctgaagatgggagggtgcgggcaaaattgtcagctcctctggccggtatgggtaacgcgaaggctgattcaagaggcagatctcgaaccaaaatggttagccaatctcagccgggtagccgatccggaagtcccggacgcgtcctaacgactaccgctctctctaccgtttcttccggggtgcaaagagtgttagtgaactccgcttccgcccaaaagaggagtaaaataccaaggagtcaaggctgttctagagaagcctcccctagtagactatcagttgcacggtctagtcgcatccccagaccctccgtgtcccagggctgctctcgcgaagctagtagggaaagttcgcgcgatacatcccccgtccggtcatttcagccgttggccagtcgccaccacagcaggagtaccggtgcgctctacgctccggaggtatacggagccagcggccctgggtacgggatcagccagtcttcgagattgtctagttctgtatccgccatgcgcgtgctgaataccggctctgacgtggaggaggccgtggccgacgccctgaagaagcccgcacgcaggaggtacgagagctatggtatgcactcagatgatgatgccaattcggacgctagttcggcgtgctcagaacgttcctacagctcacgcaacggctccatccctacttatatgcgccaaacagaggacgtggcagaggtgttaaatcggtgcgctagctctaattggtccgaaagaaaagagggattgctgggtctacagaatctgctgaaaaaccagaggacgctcagtcgggtggagctcaagcgactgtgtgaaatcttcacgcggatgttcgccgacccccacggcaaggttttttccatgttcctggagacattggtcgatttcatccaagtgcacaaggacgacctccaagactggctgtttgtcctcctgacccagctgttgaagaagatgggggcagatctgctgggaagtgttcaggctaaagtccagaaagccctggatgtcacccgcgagagtttccctaacgacctccagttcaacatcctaatgcggtttaccgtggaccaaacgcagacccccagcctgaaagttaaggtggctattttgaagtacattgaaacattggctaaacaaatggaccccggagattttataaattcaagtgaaacacgcttagctgtcagccgtgtgattacatggaccactgagcctaagtcaagtgatgtacgaaaagccgctcaatccgtgctgatttcgctgtttgagttgaacaccccagaattcaccatgctgttgggggcacttcccaagacgttccaggacggtgccacaaagctcctacataaccatctgaggaataccggaaatggcactcagtcgtccatgggcagtccacttactaggcccacgcccagaagtccggcaaactggtcatcaccactgacttcgcctacaaatacgtcccagaacaccctatccccttccgccttcgactatgacaccgagaatatgaacagcgaggatatttattcctcactgaggggtgtgactgaagcaattcagaatttttccttcaggagccaggaagacatgaacgagcctctgaaaagggattcgaagaaagacgatggggactcaatgtgcgggggtccaggcatgagcgacccgagagctggtggggatgccacggactcatctcagactgctttagataacaaagctagtctccttcactcaatgccaacacatagctctccccgatctcgggattacaacccatataactattccgattctataagtccgttcaataaaagcgcactcaaggaggccatgtttgatgacgatgccgatcagttccctgacgatttaagcttggatcacagcgacctggtggcagagctattgaaagagctcagtaatcataatgaacgggtggaggagcgtaagattgctctctacgagctgatgaaactgacacaggaggagtcattttccgtgtgggatgagcacttcaaaaccatcttgctgctcttactagagaccctgggggataaagagccgactatcagggccctggctctgaaggtgctccgcgaaatactccggcatcaacccgctcgctttaaaaactacgccgagctgacagtcatgaagacactggaggcacacaaggacccccacaaagaggtggttagatctgccgaagaggctgcttccgtcctcgcgacctcaatttctccagaacagtgcatcaaggtcctgtgtcccatcatccagaccgcagactaccctataaatctggcagctatcaagatgcagaccaaagtcattgaacgcgtttccaaagagacacttaacctgctcctgcctgagattatgcccggactgattcaaggctacgataactccgaatctagcgttaggaaagcctgcgtgttttgccttgtggctgtacacgctgtcatcggcgatgagctgaagccacacctatcacagttgacagggtccaaaatgaaattgctcaacctatacatcaaaagggcccaaacagggtctggcggtgcggatccaacaactgatgtcagtggccaatcttag

SEQ ID NO: 83397 - DNA, 5972 bp, Artificial Sequence
  derived and/or modified sequence
attgctactgattacatggatatctttagggaagcagaaaatgattgctgaacacatgccttgtgttttgatgattgcattaaaagtcccccagcgggatggcatttattggctctcagagcttttcttagattaaatttcaggcagccagtacaaggagaaacatcataacctgtatccaacagcatatgtgcagctaaagagtaatcttaatcaagtccttctaggctgtgctaaataaacgagggttttcagcaagaccccagacttttattttgaagtggagtagcagctgttggctattgcggtgcagagctgcagcgaggcctgggtcacacagtgctccgggtgtctgcaggctgcaggccgagcccagtggcgcaggcactgagctgtacttatttgctgtgctatttgacctcttggtttcagagagctccctggaccatctaatggctatgggagatgataaaagcttcgatgatgaagaatcagtggatggaaataggccatcatcagctgcatcagccttcaaggttcctgcacctaaaacatccggaaatcctgccaacagtgcaaggaagcctggttcagcaggtggccctaaggttggaggtgcttctaaggaaggaggtgctggagcagttgatgaagatgattttataaaagcttttacagatgtcccttctattcagatttattctagtcgagaactcgaagaaacattaaataaaatcagggaaattttgtcagatgataaacatgactgggatcagcgtgccaatgcactgaagaaaattcgatcactgcttgttgctggagctgcacagtatgattgcttttttcaacatttacgattgttggatggagcacttaaactttcagctaaggatcttagatcccaggtggttagagaagcttgtattactgtagcccacctttcaacagttttgggaaacaagtttgatcatggcgctgaagccattgtacctacactttttaatctcgtccccaatagtgcaaaagtcatggcaacttctggatgtgcagcaatcagatttatcattcggcatactcatgtacccagacttatacctttaataacaagcaattgcacatcaaaatcagttcccgtgaggagacgttcatttgaatttttagatttattgttgcaagagtggcagactcattcattggaaagacatgcagccgtcttggttgaaactattaaaaagggaattcatgatgctgacgctgaggccagagtggaggcaagaaagacatacatgggtcttagaaaccactttcctggtgaagctgaaacattatataattcccttgagccatcttatcagaagagtcttcaaacttacttaaagagttctggcagtgtagcatctcttccacaatcagacaggtcctcatccagctcacaggaaagtctcaatcgccctttttcttccaaatggtctacagcaaatccatcaactgtggctggaagagtatcagcaggcagcagcaaagccagttcccttccaggaagcctgcagcgttcacgaagtgacattgatgtgaatgctgctgcaggtgccaaggcacatcatgctgctggacagtctgtgcgaagcgggcgcttaggtgcaggtgccctgaatgcaggttcctatgcgtcactagaggatacttctgacaagctggatggaacagcatctgaagatggccgggtgagagcaaaactttcagcaccacttgctggcatgggaaatgccaaggcagattctagaggaagaagtcgaacaaaaatggtgtctcaatcacagcctggtagccggtctgggtctccaggaagagttctgaccacaacagccctgtccactgtgagctctggtgttcaaagagtcctggtcaattcagcctcagcacaaaaaagaagcaagataccacggagccagggctgtagcagagaggctagtccatctaggctttcagtggcccgaagcagtcgtattcctcgaccaagtgtgagtcaaggatgcagccgggaagctagtcgggagagcagcagagacacaagtcctgttcgctcttttcagcccctcgcctccagacaccattccagatcaactggtgccctctacgcccccgaagtgtatggggcctcaggtccaggttatgggatcagccaatcaagtcgactgtcgtcttctgttagtgccatgcgagtcctgaacacaggttctgatgtggaggaggcggtggcagatgccttgaaaaaaccagctcgaagaagatatgaatcatatggaatgcattcagatgatgacgccaacagcgatgcatctagtgcttgttcagaacgctcctatagttctcgaaatggtagtattcctacatatatgaggcagacggaagatgtggcagaagtcctcaatagatgtgctagttccaattggtcagaaaggaaagaaggcctcctaggtctgcagaacttattaaaaaatcagagaacactaagtcgagttgaactgaaaagattatgtgaaattttcacaagaatgtttgctgaccctcatggcaaggtattcagcatgtttttggagactctagtggatttcatacaagtccacaaagatgatcttcaagattggttgtttgtactgctgacacaactactaaaaaaaatgggtgctgatttgcttggatctgttcaggcaaaagttcagaaagcccttgatgttacaagagagtcttttccaaatgatcttcagttcaatattctaatgagatttacagttgatcagacccagacaccaagcttaaaggtgaaggttgctatccttaaatacatagaaactctggccaaacagatggatccaggagattttataaattccagtgaaactcgcctagcagtgtctcgggtcatcacttggacaacagaacccaaaagttctgatgttcggaaggcagcacagtcagtgctgatttcattatttgaactcaataccccagagtttacaatgttattaggagctttaccaaaaacttttcaggatggtgctaccaagcttcttcataatcaccttcgaaacactggcaatggaacccagagttccatggggagtcctttgacaagaccaacaccacgatcaccagctaactggtccagtcctcttacttctcctaccaatacatcacagaatactttatctccaagtgcatttgattatgacacagaaaatatgaactctgaagatatttatagctctcttagaggtgtcactgaagcaatccagaatttcagcttccgtagccaagaagatatgaatgagccattgaaaagggattctaaaaaagatgatggcgattcaatgtgtggtggtcctgggatgtctgacccaagagcaggaggtgatgctactgactcaagtcaaacagctcttgataataaagcttcattgctccattcaatgcctactcactcctctccacgctctcgagactataatccatataactattcagatagcatcagtcccttcaacaagtctgccctcaaggaagccatgtttgatgatgatgctgaccagtttcctgacgatctttccctagatcattctgacctagttgcagagttgttgaaggagctgtctaaccataatgagcgtgtagaagaaagaaaaattgccctctatgaacttatgaaactgacacaggaagaatcttttagtgtttgggatgaacacttcaaaacaatattgcttttattgcttgaaacgcttggagataaagagcctacaatcagggctttggcattaaaggttttaagagaaatcctaaggcatcaaccagcaagatttaaaaactatgcagaattgactgtcatgaaaacattggaagcacataaagatcctcataaggaggtggtgagatctgctgaggaagcggcatcagtgttggccacttcaattagtccagagcagtgcatcaaagtgctttgtcctatcattcaaactgcagactacccaattaatctggctgcaatcaaaatgcaaacaaaagtgatagagagagtgtccaaggaaaccctaaacctgcttttgccagagattatgccaggtctaatacagggttatgataattcagagagcagtgttcggaaagcttgtgtcttctgcctggtggctgttcatgcggtaattggtgatgaactaaaaccacatctcagtcaacttactggcagtaaaatgaagctactgaatctttacatcaaacgtgcacaaacaggttctggaggagctgatcccactactgatgtttctggacaaagttagtgaagctcatcacagcgaaccaggtctctcaaaagaaaggacagatagaccaccctcatcaatgaaaggaagttctcaaacacatcctttggaacttactattgtttcccagttttagttttttgtttcgtttcgttttgtattttctgtaacagaggactatcctcagtctgcatgtaacttttatgatagttattccaaattcaagaagaagcagtattaacatcaattgatcgacacaaagtaatttttaatttaattcatcatttcacatgtttgtactttgtcttcccattaacctttgccagtgttatgattgtataaatttttttaaatgctggttaaacaggaatgcttaaagctttaaaagtttaacagtctaaaacatttttgcttttattcaactgcagaataatatttttattgctactttgagttttgtttcgtatcatgtcctatgctagaaatatttaaatgatgtgaaacaaagcaggactaatttgaactacagctggactccgtttgtgtgatggtgatacatgtcattagttgcaacttctttggggtgatctatagtttgaaaactaaaacctcaaagacagatgttacagaatcagccagttctgtaaaactgatattgtctattggttattgatcttgccatctttatttaaaaccatgtcccttctatgatcccttaagaaagctgcaccaaatcatctgcctgttttttcttgatacttactgaaatagaaggttttattgcagggtttattttggtttgtttatatctttgttgtgaatgatgcttttttgtatttattaatatcaaattcacttatgaataaacttgataatggaaacggacaaaaaaaatcaagtgcgtgtgtgtccttgaccgtcttctgtttctcacgtaataaacaaattatcgagacatgggagtgaccagcaccttttctttaaatggtggaacctggtttccttttaccatgaaattgtcttacttgaaaatattgatcctgatgagagagaagatggtgccaaggctgtctttgtataatgggctcaaattctctacctcttcagggctaatacttttaactgagctgctgcctatagtgtcttttggaaaactacttaaagggtgattttctgttactttttagcaaatttttttaatcacctcttgctacacccattcttttcatgtgcagccgactcaaaaattaccagttttggtgaaaggctaaattagataatttggaaccaggatactaatgatttctcatctttacttttttttaatcctaatataaagtgaatttgattgaaaaggcaaatagctattagggaagcagtttgccattgttgcagagttatctgtactttgtttaactgaaaaaaatgtagaaatatatgtaaagaatttaagacaagagtactgaatggatgatttgtcataggctttcccctttctttctgttctagcagcaggaaaagtttctctatatcctctccctctacctgtaacaattttgttttctactgttaattacattgtgtatttatagttctatgcttactgttgtgcatatactggcaataaaactgtacataacattacttgaaaaagtt

SEQ ID NO: 83398 - DNA, 3882 bp, Artificial Sequence
  derived and/or modified sequence
atggccatgggcgacgacaagagcttcgacgacgaggagagcgtggacggcaacagacccagcagcgccgccagcgccttcaaggtgcccgcccccaagaccagcggcaaccccgccaacagcgccagaaagcccggcagcgccggcggccccaaggtgggcggcgccagcaaggagggcggcgccggcgccgtggacgaggacgacttcatcaaggccttcaccgacgtgcccagcatccagatctacagcagcagagagctggaggagaccctgaacaagatcagagagatcctgagcgacgacaagcacgactgggaccagagagccaacgccctgaagaagatcagaagcctgctggtggccggcgccgcccagtacgactgcttcttccagcacctgagactgctggacggcgccctgaagctgagcgccaaggacctgagaagccaggtggtgagagaggcctgcatcaccgtggcccacctgagcaccgtgctgggcaacaagttcgaccacggcgccgaggccatcgtgcccaccctgttcaacctggtgcccaacagcgccaaggtgatggccaccagcggctgcgccgccatcagattcatcatcagacacacccacgtgcccagactgatccccctgatcaccagcaactgcaccagcaagagcgtgcccgtgagaagaagaagcttcgagttcctggacctgctgctgcaggagtggcagacccacagcctggagagacacgccgccgtgctggtggagaccatcaagaagggcatccacgacgccgacgccgaggccagagtggaggccagaaagacctacatgggcctgagaaaccacttccccggcgaggccgagaccctgtacaacagcctggagcccagctaccagaagagcctgcagacctacctgaagagcagcggcagcgtggccagcctgccccagagcgacagaagcagcagcagcagccaggagagcctgaacagacccttcagcagcaagtggagcaccgccaaccccagcaccgtggccggcagagtgagcgccggcagcagcaaggccagcagcctgcccggcagcctgcagagaagcagaagcgacatcgacgtgaacgccgccgccggcgccaaggcccaccacgccgccggccagagcgtgagaagcggcagactgggcgccggcgccctgaacgccggcagctacgccagcctggaggacaccagcgacaagctggacggcaccgccagcgaggacggcagagtgagagccaagctgagcgcccccctggccggcatgggcaacgccaaggccgacagcagaggcagaagcagaaccaagatggtgagccagagccagcccggcagcagaagcggcagccccggcagagtgctgaccaccaccgccctgagcaccgtgagcagcggcgtgcagagagtgctggtgaacagcgccagcgcccagaagagaagcaagatccccagaagccagggctgcagcagagaggccagccccagcagactgagcgtggccagaagcagcagaatccccagacccagcgtgagccagggctgcagcagagaggccagcagagagagcagcagagacaccagccccgtgagaagcttccagcccctggccagcagacaccacagcagaagcaccggcgccctgtacgcccccgaggtgtacggcgccagcggccccggctacggcatcagccagagcagcagactgagcagcagcgtgagcgccatgagagtgctgaacaccggcagcgacgtggaggaggccgtggccgacgccctgaagaagcccgccagaagaagatacgagagctacggcatgcacagcgacgacgacgccaacagcgacgccagcagcgcctgcagcgagagaagctacagcagcagaaacggcagcatccccacctacatgagacagaccgaggacgtggccgaggtgctgaacagatgcgccagcagcaactggagcgagagaaaggagggcctgctgggcctgcagaacctgctgaagaaccagagaaccctgagcagagtggagctgaagagactgtgcgagatcttcaccagaatgttcgccgacccccacggcaaggtgttcagcatgttcctggagaccctggtggacttcatccaggtgcacaaggacgacctgcaggactggctgttcgtgctgctgacccagctgctgaagaagatgggcgccgacctgctgggcagcgtgcaggccaaggtgcagaaggccctggacgtgaccagagagagcttccccaacgacctgcagttcaacatcctgatgagattcaccgtggaccagacccagacccccagcctgaaggtgaaggtggccatcctgaagtacatcgagaccctggccaagcagatggaccccggcgacttcatcaacagcagcgagaccagactggccgtgagcagagtgatcacctggaccaccgagcccaagagcagcgacgtgagaaaggccgcccagagcgtgctgatcagcctgttcgagctgaacacccccgagttcaccatgctgctgggcgccctgcccaagaccttccaggacggcgccaccaagctgctgcacaaccacctgagaaacaccggcaacggcacccagagcagcatgggcagccccctgaccagacccacccccagaagccccgccaactggagcagccccctgaccagccccaccaacaccagccagaacaccctgagccccagcgccttcgactacgacaccgagaacatgaacagcgaggacatctacagcagcctgagaggcgtgaccgaggccatccagaacttcagcttcagaagccaggaggacatgaacgagcccctgaagagagacagcaagaaggacgacggcgacagcatgtgcggcggccccggcatgagcgaccccagagccggcggcgacgccaccgacagcagccagaccgccctggacaacaaggccagcctgctgcacagcatgcccacccacagcagccccagaagcagagactacaacccctacaactacagcgacagcatcagccccttcaacaagagcgccctgaaggaggccatgttcgacgacgacgccgaccagttccccgacgacctgagcctggaccacagcgacctggtggccgagctgctgaaggagctgagcaaccacaacgagagagtggaggagagaaagatcgccctgtacgagctgatgaagctgacccaggaggagagcttcagcgtgtgggacgagcacttcaagaccatcctgctgctgctgctggagaccctgggcgacaaggagcccaccatcagagccctggccctgaaggtgctgagagagatcctgagacaccagcccgccagattcaagaactacgccgagctgaccgtgatgaagaccctggaggcccacaaggacccccacaaggaggtggtgagaagcgccgaggaggccgccagcgtgctggccaccagcatcagccccgagcagtgcatcaaggtgctgtgccccatcatccagaccgccgactaccccatcaacctggccgccatcaagatgcagaccaaggtgatcgagagagtgagcaaggagaccctgaacctgctgctgcccgagatcatgcccggcctgatccagggctacgacaacagcgagagcagcgtgagaaaggcctgcgtgttctgcctggtggccgtgcacgccgtgatcggcgacgagctgaagccccacctgagccagctgaccggcagcaagatgaagctgctgaacctgtacatcaagagagcccagaccggcagcggcggcgccgaccccaccaccgacgtgagcggccagagctag

SEQ ID NO: 83399 - protein, 376 aa, Artificial Sequence
  derived and/or modified sequence
MVPFIYLQAHFTLCSGWSSTYRDLRKGVYVPYTQGKWEGELGTDLVSIPHGPNVTVRANIAAITESDKFFINGSNWEGILGLAYAEIARLCGAGFPLNQSEVLASVGGSMIIGGIDHSLYTGSLWYTPIRREWYYEVIIVRVEINGQDLKMDCKEYNYDKSIVDSGTTNLRLPKKVFEAAVKSIKAASSTEKFPDGFWLGEQLVCWQAGTTPWNIFPVISLYLMGEVTNQSFRITILPQQYLRPVEDVATSQDDCYKFAISQSSTGTVMGAVIMEGFYVVFDRARKRIGFAVSACHVHDEFRTAAVEGPFVTLDMEDCGYNIPQTDESTLMTIAYVMAAICALFMLPLCLMVCQWCCLRCLRQQHDDFADDISLLK

SEQ ID NO: 83400 - DNA, 639 bp, Artificial Sequence
  derived and/or modified sequence
atgatcataggcgggatcgatcacagtctctacacaggatccctgtggtatacacccattagaagagagtggtactacgaggtaatcatcgtacgcgttgagatcaatgggcaagatctaaagatggattgcaaggagtataactacgacaagagcatcgtcgactccgggactactaacctgcggttgccaaaaaaagtgtttgaggcagccgtgaagagtatcaaggcagcctcatctactgaaaaatttccagacggcttttggttaggcgagcagctagtgtgttggcaggctggtacaacaccttggaacatcttccctgttatctctctgtatcttatgggggaagtcactaatcagagcttcagaattactattctgcctcagcaatatctgcgatggaagatgtggccacggcccaaaaccactgtaacttgccacctgacggtaattcacgggcactgttatggcagttgctatcacgggggtctgctcctcagtctgataggccccgaaaacgagctggccctattgtccgcattggcgatgtgcactatgtcttctggtaggcagcgctggaaggcatgccacttaggacatggccggctctggcttcagcattccacagacagatag

SEQ ID NO: 83401 - DNA, 1131 bp, Artificial Sequence
  derived and/or modified sequence
atggtccctttcatttatctgcaggcgcacttcacactgtgcagcggctggtccagcacctaccgtgacttgcgcaagggagtgtatgtgccgtatactcagggaaagtgggagggagagctcgggactgatctggtttcaatacctcacgggcctaacgtgactgtgcgtgctaacatcgccgccatcacagagtcagataaatttttcattaacggctcgaattgggagggcatcctcggcctcgcttacgccgaaattgccaggctctgcggagccggttttcccttaaaccaaagtgaggtattagcaagcgtaggtgggtctatgatcatcggagggatagatcatagtctgtacaccggcagcctgtggtacactccaattaggagagagtggtactacgaagtgatcatagtgcgtgtagagatcaatggtcaggatctaaagatggattgtaaggagtataattacgacaaatccattgtagacagtggcacaaccaatctgcgcttgccgaaaaaggtgtttgaggccgctgtgaagagcatcaaggcagcctcatcaaccgaaaagttccccgacggattctggctcggcgagcagctggtttgttggcaggccggaacgactccttggaatatcttcccagtaataagcctctacctcatgggtgaagtcaccaaccagagctttcgcatcacaatcttgccccaacagtaccttagacccgtggaagatgtcgccacctctcaagatgattgttataagttcgctatttctcaatcctccacaggtacagtcatgggcgcagtgatcatggaggggttttacgtagtattcgaccgcgccagaaagcggattggctttgcagtttcagcctgccacgtgcacgatgagttccgtaccgcggccgttgaggggcccttcgtgaccctggacatggaggattgtgggtacaacatccctcagactgacgagagcacacttatgaccatcgcatacgtcatggcagccatttgtgccctgttcatgctaccgttgtgcctgatggtttgccagtggtgctgccttagatgcttgcgtcagcagcacgacgatttcgccgacgacattagtctcttaaaatag

SEQ ID NO: 83402 - DNA, 639 bp, Artificial Sequence
  derived and/or modified sequence
atgatcattggaggcatcgaccacagcctgtacacaggcagcctgtggtacacccccatcagaagagagtggtactatgaggtgatcatcgtgcgggtggagatcaatggccaggacctgaagatggactgcaaggagtacaactatgacaagagcatcgtggacagcggcaccaccaacctgcggctgcccaagaaggtgtttgaggccgctgtgaagagcatcaaggccgccagcagcacagagaagttcccagatggcttctggctgggggagcagctggtgtgctggcaggccggcaccaccccctggaacatcttccctgtgatcagcctgtacctgatgggagaggtgaccaaccagagcttccgcatcaccatcctgccccagcagtacctgcgctggaagatgtggccccggcccaagaccaccgtgacctgccacctgaccgtcatccacggccactgctacggcagctgctaccacggcggcctgctgctgagcctcatcggcccagaaaatgagctggccctgctgagcgccctggccatgtgcaccatgagcagcggccggcagcgctggaaggcctgccacctgggccacggccgcctgtggctgcagcacagcacagacagatag

SEQ ID NO: 83403 - DNA, 1131 bp, Artificial Sequence
  derived and/or modified sequence
atggtgcccttcatctacctgcaggcccacttcaccctgtgcagcggctggagcagcacctacagagacctgaggaagggcgtgtatgtgccctacacccagggcaagtgggagggggagctgggcacagacctggtgtccatcccccacggccccaacgtgacagtgcgggccaacattgctgccatcacagaaagtgacaagttcttcatcaatggcagcaactgggagggcatcctgggcctggcctatgcagaaattgcccggctgtgtggggccggcttccccctgaaccagagcgaggtgctggcctctgtgggcggctccatgatcatcggcggcatcgaccacagcctgtacacaggcagcctgtggtacacccccatccggcgggagtggtactatgaagtcatcatcgtgcgggtggagatcaatggccaggacctgaagatggactgcaaggagtacaactatgacaagagcatcgtggacagcggcaccaccaacctgcggctgcccaagaaggtgtttgaagctgctgtgaagagcatcaaggccgccagcagcacagagaagttcccagatggcttctggctgggggagcagctggtgtgctggcaggccggcaccaccccctggaacatcttccctgtgatcagcctgtacctgatgggagaggtgaccaaccagagcttccgcatcaccatcctgccccagcagtacctgcggcctgtggaggatgtggccaccagccaggatgactgctacaagtttgccatcagccagagcagcactggaacagtgatgggcgctgtgatcatggagggcttctacgtggtgtttgaccgggccaggaagagaattggatttgctgtgtctgcctgccacgtgcatgatgagttcagaacagctgctgtggagggcccctttgtgaccctggacatggaggactgtggctacaacatcccccagacagatgagagcaccctgatgaccatcgcctacgtgatggccgccatctgtgccctcttcatgctgcccctgtgcctgatggtgtgccagtggtgctgcctgcgctgcctgcggcagcagcatgatgactttgctgatgacatcagcctgctgaagtag

SEQ ID NO: 83404 - DNA, 639 bp, Artificial Sequence
  derived and/or modified sequence
atgatcatcggcggcatcgaccacagcctgtacaccggcagcctgtggtatactcccatccgcagggagtggtactatgaggtgataatcgttcgggtcgaaattaatggacaggatctgaagatggattgtaaggagtacaactatgacaagtccatcgtcgacagtggcacaaccaaccttcgtctgcccaaaaaggtgtttgaagctgccgtgaagtcgattaaggccgcgagttctaccgagaagttccccgacggtttctggctgggcgaacagcttgtgtgttggcaggcaggcacaacaccgtggaatatctttccagtcatatctctttacctgatgggcgaggtgacaaaccagtcatttaggattactattctgccacaacagtacttgagatggaaaatgtggccaaggcccaagaccacagtgacctgtcatctcaccgtaatccacggacactgctatggatcgtgctatcacggcggacttctgcttagcctaattggccccgaaaacgaactggccctccttagcgccctggccatgtgtaccatgtccagtgggcggcagcggtggaaggcctgccacctgggccatgggcgtctgtggctgcaacacagtacagaccggtag

SEQ ID NO: 83405 - DNA, 1131 bp, Artificial Sequence
  derived and/or modified sequence
atggtgcccttcatctacctgcaggcccacttcaccctgtgcagcggttggagcagcacataccgcgaccttcgaaagggcgtgtacgtgccctatacccagggcaaatgggaaggagaactgggcacagatctggtgagcatccctcacgggcctaacgttacagtccgagccaacattgctgccatcacagaatcagataaatttttcattaacgggtccaactgggaaggcatcctcggactggcttacgccgaaattgccaggctatgtggggcgggcttccctctaaaccagagcgaggtgctggcatctgtaggaggctccatgatcattggtgggattgaccactcactgtacactggcagcttgtggtatacgccaatccgcagagagtggtattacgaagtaattatcgtgagagtggagatcaacgggcaggatctgaaaatggattgtaaggaatataattacgataagtccattgttgatagtggcactacaaacctgcggctgccaaaaaaagtattcgaggctgccgtgaagtcaataaaagctgcatccagcactgaaaagtttccagatggcttttggctcggcgagcaactggtctgctggcaagccggtaccactccctggaatatctttcccgtgatctccttgtacctgatgggggaagtcaccaaccagagctttcgcataactatactgccccagcagtacctgcgacccgtggaggatgtggctactagccaggacgactgctataaatttgcaatttcacaatcatcaacaggcacggtgatgggcgccgtgatcatggaggggttttatgtcgtttttgatcgggctcgcaaacggataggttttgccgtctcggcatgccacgtccacgatgaatttcgcacagccgccgtcgaaggaccgttcgtaaccctggacatggaagattgcgggtataacattccgcagacggatgaatcaacattgatgactatcgcttatgtgatggctgccatttgtgcactgtttatgctgcctctgtgcttgatggtgtgtcagtggtgctgtcttaggtgcctcaggcagcagcatgacgatttcgccgacgacatatccctcctgaagtag

SEQ ID NO: 83406 - DNA, 639 bp, Artificial Sequence
  derived and/or modified sequence
atgattatagggggaatagatcactccctctacaccggcagcctgtggtatactcccatccgtcgcgaatggtattacgaagtaataatcgtccgcgtggagataaacggccaagatctgaagatggactgcaaagagtataattacgataaaagcattgtggatagtggcactacgaacctgcgcctgcccaaaaaggtcttcgaagcagccgtgaagagcattaaagctgcctcttcaactgagaaattccccgatggcttctggcttggagaacagctggtgtgttggcaggctggcactactccttggaatattttccccgtgatctccctatatctgatgggcgaagtgactaaccagagctttaggataacgatcctcccccagcagtatctgcgctggaaaatgtggccgcgaccgaaaacaacggtcacctgccaccttaccgttatccacgggcattgctatggatcgtgttaccatggtggattgctgcttagcctgatagggccagagaatgaacttgcactactctcggcgctcgcaatgtgcacaatgagctccggtaggcaacgatggaaggcttgtcatcttggacacggcaggctgtggctgcagcactccaccgatcgttag

SEQ ID NO: 83407 - DNA, 1131 bp, Artificial Sequence
  derived and/or modified sequence
atggttccatttatctatctgcaagctcactttactctgtgttccggttggtcttcaacatatagggacttacgtaaaggcgtctacgtgccttacacccagggaaagtgggaaggagagctgggaactgatctggtgagtatcccacatggacccaacgtgacagtccgagctaatatagctgctatcacagaatcagataaattctttatcaatggttcaaactgggagggaattttaggcctcgcttacgcagagattgccagactgtgcggcgctggcttccctcttaaccaaagcgaagtcttagctagtgtaggagggtctatgatcattggaggtattgaccacagcttatacacaggttcactctggtacacacctattagaagagagtggtattatgaagttatcatcgtcagggtggaaattaacggtcaggacctcaaaatggattgcaaggagtacaactatgataaaagtatcgtggactcgggaaccaccaatttgaggctcccaaagaaagttttcgaggcggcagtgaaaagcatcaaggccgcatctagtaccgagaagtttcctgatggcttttggctcggtgagcagttggtgtgttggcaagctggcacgaccccctggaatatcttccccgtgatttccctgtacctcatgggcgaagtcacaaaccagtctttccgaatcactattctgccccaacagtatctgcggcctgtggaagacgttgcaaccagccaagatgattgttataagtttgccatcagccaatcatctacaggtacggtaatgggagctgtgatcatggaaggcttctatgtcgtgttcgatagggcgcgtaagcgcatcggctttgctgtatctgcgtgtcatgtgcacgacgagttcagaaccgcagccgtcgagggtcccttcgtcacgttggatatggaagactgcggatacaatataccccagacggatgagtccacattgatgacgatcgcttatgtgatggctgcgatctgcgccttattcatgttgcctctctgtctgatggtgtgccagtggtgttgccttcgttgtctgagacagcagcacgacgacttcgccgacgacatttccttactgaaatag

SEQ ID NO: 83408 - DNA, 1236 bp, Artificial Sequence
  derived and/or modified sequence
aatagataggagagcaagcctcaccaatggttcccttcatctatctgcaagcccactttacactctgttctgggtggtccagcacataccgggacctccggaagggtgtgtatgtgccctacacccagggcaagtgggaaggggagctgggcaccgacctggtaagcatcccccatggccccaacgtcactgtgcgtgccaacattgctgccatcactgaatcagacaagttcttcatcaacggctccaactgggaaggcatcctggggctggcctatgctgagattgccaggctttgtggtgctggcttccccctcaaccagtctgaagtgctggcctctgtcggagggagcatgatcattggaggtatcgaccactcgctgtacacaggcagtctctggtatacacccatccggcgggagtggtattatgaggtgatcattgtgcgggtggagatcaatggacaggatctgaaaatggactgcaaggagtacaactatgacaagagcattgtggacagtggcaccaccaaccttcgtttgcccaagaaagtgtttgaagctgcagtcaaatccatcaaggcagcctcctccacggagaagttccctgatggtttctggctaggagagcagctggtgtgctggcaagcaggcaccaccccttggaacattttcccagtcatctcactctacctaatgggtgaggttaccaaccagtccttccgcatcaccatccttccgcagcaatacctgcggccagtggaagatgtggccacgtcccaagacgactgttacaagtttgccatctcacagtcatccacgggcactgttatgggagctgttatcatggagggcttctacgttgtctttgatcgggcccgaaaacgaattggctttgctgtcagcgcttgccatgtgcacgatgagttcaggacggcagcggtggaaggcccttttgtcaccttggacatggaagactgtggctacaacattccacagacagatgagtcaaccctcatgaccatagcctatgtcatggctgccatctgcgccctcttcatgctgccactctgcctcatggtgtgtcagtggtgctgcctccgctgcctgcgccagcagcatgatgactttgctgatgacatctccctgctgaagtgaggaggcccatgggcagaagatagagattcccctggaccacacctccgtggttcactttggtcacaagtaggagacacag

SEQ ID NO: 83409 - DNA, 639 bp, Artificial Sequence
  derived and/or modified sequence
atgatcatcggcggcatcgaccacagcctgtacaccggcagcctgtggtacacccccatcagaagagagtggtactacgaggtgatcatcgtgagagtggagatcaacggccaggacctgaagatggactgcaaggagtacaactacgacaagagcatcgtggacagcggcaccaccaacctgagactgcccaagaaggtgttcgaggccgccgtgaagagcatcaaggccgccagcagcaccgagaagttccccgacggcttctggctgggcgagcagctggtgtgctggcaggccggcaccaccccctggaacatcttccccgtgatcagcctgtacctgatgggcgaggtgaccaaccagagcttcagaatcaccatcctgccccagcagtacctgagatggaagatgtggcccagacccaagaccaccgtgacctgccacctgaccgtgatccacggccactgctacggcagctgctaccacggcggcctgctgctgagcctgatcggccccgagaacgagctggccctgctgagcgccctggccatgtgcaccatgagcagcggcagacagagatggaaggcctgccacctgggccacggcagactgtggctgcagcacagcaccgacagatag

SEQ ID NO: 83410 - DNA, 1131 bp, Artificial Sequence
  derived and/or modified sequence
atggtgcccttcatctacctgcaggcccacttcaccctgtgcagcggctggagcagcacctacagagacctgagaaagggcgtgtacgtgccctacacccagggcaagtgggagggcgagctgggcaccgacctggtgagcatcccccacggccccaacgtgaccgtgagagccaacatcgccgccatcaccgagagcgacaagttcttcatcaacggcagcaactgggagggcatcctgggcctggcctacgccgagatcgccagactgtgcggcgccggcttccccctgaaccagagcgaggtgctggccagcgtgggcggcagcatgatcatcggcggcatcgaccacagcctgtacaccggcagcctgtggtacacccccatcagaagagagtggtactacgaggtgatcatcgtgagagtggagatcaacggccaggacctgaagatggactgcaaggagtacaactacgacaagagcatcgtggacagcggcaccaccaacctgagactgcccaagaaggtgttcgaggccgccgtgaagagcatcaaggccgccagcagcaccgagaagttccccgacggcttctggctgggcgagcagctggtgtgctggcaggccggcaccaccccctggaacatcttccccgtgatcagcctgtacctgatgggcgaggtgaccaaccagagcttcagaatcaccatcctgccccagcagtacctgagacccgtggaggacgtggccaccagccaggacgactgctacaagttcgccatcagccagagcagcaccggcaccgtgatgggcgccgtgatcatggagggcttctacgtggtgttcgacagagccagaaagagaatcggcttcgccgtgagcgcctgccacgtgcacgacgagttcagaaccgccgccgtggagggccccttcgtgaccctggacatggaggactgcggctacaacatcccccagaccgacgagagcaccctgatgaccatcgcctacgtgatggccgccatctgcgccctgttcatgctgcccctgtgcctgatggtgtgccagtggtgctgcctgagatgcctgagacagcagcacgacgacttcgccgacgacatcagcctgctgaagtag

SEQ ID NO: 83411 - protein, 1477 aa, Artificial Sequence
  derived and/or modified sequence
MEPRMESCLAQVLQKDVGKRLQVGQELIDYFSDKQKSADLEHDQTMLDKLVDGLATSWVNSSNYKVVLLGMDILSALVTRLQDRFKAQIGTVLPSLIDRLGDAKDSVREQDQTLLLKIMDQAANPQYVWDRMLGGFKHKNFRTREGICLCLIATLNASGAQTLTLSKIVPHICNLLGDPNSQVRDAAINSLVEIYRHVGERVRADLSKKGLPQSRLNVIFTKFDEVQKSGNMIQSANDKNFDDEDSVDGNRPSSASSTSSKAPPSSRRNVGMGTTRRLGSSTLGSKSSAAKEGAGAVDEEDFIKAFDDVPVVQIYSSRDLEESINKIREILSDDKHDWEQRVNALKKIRSLLLAGAAEYDNFFQHLRLLDGAFKLSAKDLRSQVVREACITLGHLSSVLGNKFDHGAEAIMPTIFNLIPNSAKIMATSGVVAVRLIIRHTHIPRLIPVITSNCTSKSVAVRRRCFEFLDLLLQEWQTHSLERHISVLAETIKKGIHDADSEARIEARKCYWGFHSHFSREAEHLYHTLESSYQKALQSHLKNSDSIVSLPQSDRSSSSSQESLNRPLSAKRSPTGSTTSRASTVSTKSVSTTGSLQRSRSDIDVNAAASAKSKVSSSSGTTPFSSAAALPPGSYASLESRHMREDMEYIGLDSGRIRTRRQSSGSATNVASTPDNRGRSRAKVVSQSQPGSRSSSPGKLLGSGYGGLTGGSSRGPPVTPSSEKRSKIPRSQGCSRETSPNRIGLDRFGLGQPGRIPGSVNAMRVLSTSTDLEAAVADALLLGDSRSKKPVRRRYEPYGMYSDDDANSDASSVCSERSYGSRNGGIPHYLRQTEDVAEVLNHCASSNWSERKEGLLGLQNLLKSQRTLSRVELKRLCEIFTRMFADPHSKRVFSMFLETLVDFIIIHKDDLQDWLFVLLTQLLKKMGADLLGSVQAKVQKALDVTRDSFPFDQQFNILMRFIVDQTQTPNLKVKVAILKYIESLARQMDPTDFVNSSETRLAVSRIITWTTEPKSSDVRKAAQIVLISLFELNTPEFTMLLGALPKTFQDGATKLLHNHLKNSSNTSVGSPSNTIGRTPSRHTSSRTSPLTSPTNCSHGGLSPSMLDYDTENLNSEEIYSSLRGVTEAIEKFSFRSQEDLNEPIKRDGKKECDIVSRDGGAASPATEGRGGSEVEGGRTALDNKTSLLNTQPPRAFPGPRARDYNPYPYSDAINTYDKTALKEAVFDDDMEQLRDVPIDHSDLVADLLKELSNHNERVEERKGALLELLKITREDSLGVWEEHFKTILLLLLETLGDKDHSIRALALRVLREILRNQPARFKNYAELTIMKTLEAHKDSHKEVVRAAEEAASTLASSIHPEQCIKVLCPIIQTADYPINLAAIKMQTKVVERIAKESLLQLLVDIIPGLLQGYDNTESSVRKASVFCLVAIYSVIGEDLKPHLAQLTGSKMKLLNLYIKRAQTTNSNSSSSSDVSTHS

SEQ ID NO: 83412 - DNA, 4434 bp, Artificial Sequence
  derived and/or modified sequence
atggagccccgcatggagtcttgtctggcacaggtgctgcagaaggacgttggaaagcggcttcaggtgggccaggaactgatcgactactttagtgataagcagaagtccgccgacctggaacacgatcaaaccatgctggacaagctcgtggatgggctagctacaagctgggttaactcttccaactacaaagtcgtactgctcggaatggacatactgtctgccttagtcacgcggctccaggataggtttaaagcccaaatcggaacagtcctgcccagcctgattgatagactgggagacgctaaggacagtgttagggaacaggatcaaacgttgctgctgaagataatggatcaggccgcaaatccccagtacgtatgggacaggatgctgggtggattcaagcacaagaatttccggacacgggaagggatctgtttgtgtttgatcgccactctgaatgcgtctggagcacagaccctgactctgtctaagatcgtgccccatatctgtaacttactgggcgatccaaactctcaggtgcgggatgcagccattaattctctcgtggaaatctaccgccacgtaggggaaagagttagagccgacctctcgaagaaaggtctgcctcagtctaggctgaacgtcattttcaccaaatttgacgaggtgcaaaaatcgggcaatatgatccagagcgcaaacgataaaaacttcgacgacgaagattccgtggacggaaaccgacctagctcggcttctagtaccagctcaaaagcacctccatccagtaggcgcaatgtcgggatgggcacaacaaggagactgggcagctctacactaggcagcaagtctagcgcggcaaaggagggtgccggggctgtcgacgaagaggatttcatcaaggcctttgatgacgttcccgttgtccagatttactcatctagagatctggaagagtcaatcaataaaattcgtgagatattgtccgatgataagcatgactgggagcagagagtgaatgcactgaaaaaaatcagaagcttgcttttggccggggccgccgagtacgacaattttttccagcacctgaggctattagatggggcatttaagttgtccgcgaaagacctgagatcccaggttgtacgggaggcttgcatcactctcggccacctgtcttctgtgctgggcaataaatttgaccatggggccgaagcgatcatgcccacaatcttcaatctgattccaaacagcgcaaaaattatggcaacttccggggttgtagccgtgcggctgatcatccggcacacacacattcccagacttattcccgtgatcacaagcaactgtacttcaaagtccgtggctgtgcgcaggagatgctttgaattcttggacctcctgctccaggaatggcagactcatagcctggagcgccacatcagtgtattggctgagacgataaagaagggaatacacgacgccgactctgaggcccgcatcgaggcgcgcaagtgctattggggtttccatagccatttcagtcgagaggccgagcacttgtaccacacgctcgagtcgtcttaccagaaggccctgcagtctcatctaaagaatagcgactctatcgtttctctgccccagagcgacaggagcagtagttcgtctcaggaatcattgaacagacctctgtccgcaaaacggtcacccacaggatcaacaacgagcagggcaagcaccgttagtacaaagtccgtttctactactggcagtttgcagaggtcaagatccgatatcgatgttaatgccgccgcaagcgcaaagtcaaaggtctcctccagttcagggaccacccccttttcttccgccgctgcactgcctcccggttcttacgcgagcttagagtccagacatatgagggaggatatggaatacatagggctggacagtggccgcattcgtacacgtcgccagtcatccggatcagccaccaatgtggcctcgacacccgataaccgtggccgcagccgggccaaggttgttagccagtctcaaccgggatcccggagctcatctccgggcaagctgctgggctctgggtacggtggtctgacaggtgggtcatcccggggcccaccagtgaccccctccagcgagaaacgatccaaaatccccagatctcagggttgctcaagagagacctcccccaatcggattggcttggaccgattcggcctcggacagcctgggcgtattcccgggtctgtgaacgcgatgcgtgtgctgagcacaagcacagacctggaggccgctgtcgccgacgctctcctgttaggagactcccgcagtaaaaagccagtgcggcgccgctatgaaccctatgggatgtattccgacgatgacgctaattccgacgccagctccgtgtgtagcgagagaagctacggtagtcgaaatggtggcataccccattatcttcgccagactgaagacgtggctgaggtcctcaaccactgcgcttcaagtaactggtccgaaagaaaggaaggtctgctaggtttacagaacctgctgaaaagccagcgcacactaagcagagttgaactgaagcgattgtgcgaaatctttactcggatgttcgctgatcctcatagtaagagagtcttcagtatgtttctggagactcttgtcgatttcatcataattcacaaagacgacctgcaggattggctgtttgtgctgctcactcagttgctcaagaagatgggagcggacctcctcggatcagtgcaggctaaggttcagaaggctctggatgtgaccagagacagcttcccatttgaccaacagtttaatatcctgatgcggttcatcgttgaccagacccagactcccaatcttaaggtgaaggtggcgatacttaaatatatcgaatcactggctcgtcaaatggaccccacagacttcgtaaatagctccgaaacgagattggcagtttccagaatcatcacatggactaccgaacctaaatcctccgacgtcagaaaggccgcccagatcgttcttatctcactttttgagttgaacacacccgagttcaccatgctactaggggctctccccaaaaccttccaggatggcgcgacgaaactgctccacaatcacctcaagaattcttccaatacgtctgtgggttcacccagcaacacaatcggtagaacaccctccaggcacacatcatcacgcacgtctccgctcactagccccactaactgctcacacggaggcttgtctccatccatgttggattacgacactgaaaacctaaacagcgaggagatctacagctcattgaggggtgtcaccgaagctatagaaaagtttagctttcgtagccaggaggacctgaatgagcctatcaagcgcgatgggaagaaggagtgcgatattgtaagccgtgatggcggagcagcaagtcctgccaccgaagggaggggcggtagcgaagtggaaggtggcaggactgccttagacaacaaaacgtcactgcttaacacccagccaccccgcgcctttccgggccctagagcaagggactataacccctacccctattctgacgcaatcaatacatacgataaaacagctctgaaagaagcagtcttcgatgacgacatggagcagctgcgcgacgtgccaatagatcacagcgatctggtggctgacctcttgaaggagctgagtaaccacaacgagcgcgttgaggaacgaaaaggagcccttctcgaattgcttaaaattacacgagaagactctctgggagtttgggaagagcatttcaagaccatcctcctactcctgctggagactctgggagacaaggaccactctatcagagcgctggccctgagagtactgagagaaatcctcaggaaccagcctgcccgcttcaagaactacgccgaactgaccatcatgaaaactctggaagctcacaaagacagccataaggaggtggtgagggccgccgaagaggcagcgagtacacttgcaagtagcattcatccagagcagtgcattaaagtactctgccccataatacagaccgccgattatccaattaatcttgccgcgattaaaatgcagaccaaagtggtcgaacgaattgccaaggagtctctgcttcagctgctggtggatatcatccccggacttctacaaggatacgacaatacagagagtagcgtacgtaaggcctccgtattttgtctggttgccatctactcagtaataggtgaggatctgaagccccacttagcccagctcactgggagtaaaatgaaactgctgaacctttacatcaaacgcgcgcagaccaccaactccaactcgagcagtagctctgatgtatccactcactcctag

SEQ ID NO: 83413 - DNA, 4434 bp, Artificial Sequence
  derived and/or modified sequence
atggagcccaggatggagagctgcctggcccaggtgctgcagaaggatgtgggcaagaggctgcaggtgggccaggagctgattgactacttcagtgacaagcagaagtctgctgacctggagcatgaccagaccatgctggacaagctggtggatggcctggccacctcctgggtgaacagcagcaactacaaggtggtgctgctgggcatggacatcctgagcgccctggtgacccggctgcaggaccgcttcaaggcccagattggaacagtgctgcccagcctgattgaccggctgggagatgccaaggacagcgtgcgggagcaggaccagaccctgctgctgaagatcatggaccaggccgccaacccccagtatgtgtgggacaggatgctgggcggcttcaagcacaagaacttccgcacccgggagggcatctgcctgtgcctgattgccaccctgaatgccagcggggcccagaccctgaccctgagcaagatcgtgccccacatctgcaacctgctgggggaccccaacagccaggtgagagatgctgccatcaacagcctggtggagatctacagacatgtgggggagcgggtgcgggctgacctgagcaagaagggcctgccccagagccggctgaatgtcatcttcaccaagtttgatgaggtgcagaagagcggcaacatgatccagagcgccaatgacaagaactttgatgatgaggacagcgtggatggcaaccggcccagcagcgccagcagcaccagcagcaaggccccacccagcagcagaagaaatgtgggcatgggcaccacccggcggctgggcagcagcaccctgggcagcaagagcagcgctgccaaggagggcgctggagctgtggatgaggaggacttcatcaaggcctttgatgatgtgcctgtggtgcagatctacagcagccgggacctggaggagagcatcaacaagatccgggagatcctgagtgatgacaagcatgactgggagcagagggtgaatgccctgaagaagatccgcagcctgctgctggccggggctgctgaatatgacaacttcttccagcacctgcggctgctggatggagccttcaagctgagcgccaaggacctgcggagccaggtggtgcgggaggcctgcatcaccctgggccacctgagctctgtgctgggcaacaagtttgaccatggagctgaggccatcatgcccaccatcttcaacctgatccccaacagcgccaagatcatggccaccagcggcgtggtggccgtgcggctcatcatccgccacacccacatccccaggctcatccctgtgatcaccagcaactgcaccagcaagtctgtggccgtgagaagacgctgctttgagttcctggacctgctgctgcaggagtggcagacccacagcctggagcggcacatctctgtgctggccgagaccatcaagaagggcatccatgatgctgacagcgaggcccgcatcgaggccaggaagtgctactggggcttccacagccacttcagccgggaggccgagcacctgtaccacaccctggagagcagctaccagaaggccctgcagagccacctgaagaacagcgacagcatcgtgtccctgccccagagcgacaggagcagcagcagcagccaggagagcctgaaccggcccctgagcgccaagaggagccccaccggcagcaccaccagccgggccagcacagtgtccaccaagtctgtgtccaccaccggcagcctgcagaggagcagaagtgacattgatgtgaatgctgctgccagcgccaagagcaaggtgagcagcagcagcggcaccacccccttcagcagcgctgctgccctgcccccaggcagctatgccagcctggagagccgccacatgagggaggacatggagtacatcggcctggacagcggccgcatccgcacccggcggcagagcagcggcagcgccaccaacgtggccagcaccccagacaacagaggccgcagccgggccaaggtggtgtcccagagccagcccggcagccgcagcagcagccctgggaagctgctgggcagcggctacggcggcctgaccggcggcagcagccggggcccccctgtgacccccagcagcgagaagaggagcaagatccccaggagccagggctgcagccgggagaccagccccaaccgcatcggcctggacagatttggcctgggccagcccggccgcatccctggctctgtgaatgccatgagggtgctgagcaccagcacagacctggaggccgctgtggctgatgccctgctgctgggggacagccgcagcaagaagcctgtgagaagaagatatgagccctacggcatgtacagtgatgatgatgccaacagtgatgccagctctgtgtgcagcgagaggagctatggcagcagaaatggaggcatcccccactacctgcggcagacagaagatgtggccgaggtgctgaaccactgtgccagcagcaactggagcgagaggaaggagggcctgctgggcctgcagaacctgctgaagagccagaggaccctgagccgggtggagctgaagaggctgtgtgagatcttcaccaggatgtttgctgacccccacagcaagagggtcttctccatgttcctggagaccctggtggacttcatcatcatccacaaggatgacctgcaggactggctgtttgtgctgctgacccagctgctgaagaagatgggcgctgacctgctgggctctgtgcaggccaaggtgcagaaggccctggatgtgacccgggacagcttcccctttgaccagcagttcaacatcctgatgaggttcatcgtggaccagacccagacccccaacctgaaggtgaaggtggccatcctgaagtacatcgagagcctggcccggcagatggaccccacagactttgtgaacagcagcgagacccggctggccgtgagccgcatcatcacctggaccacagagcccaagagcagtgatgtgaggaaggccgcccagatcgtgctgatcagcctgtttgagctgaacaccccagagttcaccatgctgctgggcgccctgcccaagaccttccaggatggagccaccaagctgctgcacaaccacctgaagaacagcagcaacacctctgtgggcagccccagcaacaccatcggccgcacccccagccgccacaccagcagcaggaccagccccctgaccagccccaccaactgcagccatggaggcctgagccccagcatgctggactatgacacagagaacctgaacagcgaggagatctacagcagcctgcggggcgtgacagaggccatcgagaagttctccttccgcagccaggaggacctgaatgagcccatcaagagagatggcaagaaggaatgtgacatcgtgtccagagatggaggagctgccagccctgccacagagggccggggcggcagcgaggtggagggcggccgcacagccctggacaacaagaccagcctgctgaacacccagcccccccgggccttccctggcccccgggcccgggactacaacccctacccctacagtgatgccatcaacacctatgacaagacagccctgaaggaggccgtgtttgatgatgacatggagcagctgagagatgtgcccatcgaccacagcgacctggtggccgacctgctgaaggagctgagcaaccacaatgaaagagtggaggagaggaaaggagccctgctggagctgctgaagatcacccgggaggacagcctgggcgtgtgggaggagcacttcaagaccatcctgctgctgctgctggagaccctgggggacaaggaccacagcatccgggccctggccctgcgggtgctgcgggagatcctgaggaaccagcctgcccgcttcaagaactatgcagagctgaccatcatgaagaccctggaggcccacaaggacagccacaaggaggtggtgcgggctgctgaggaggccgccagcaccctggccagcagcatccaccctgagcagtgcatcaaggtgctgtgccccatcatccagacagctgactaccccatcaacctggccgccatcaagatgcagaccaaggtggtggagcgcatcgccaaggagagcctgctgcagctgctggtggacatcatccctggcctgctgcagggctatgacaacacagagagctctgtgaggaaggcctctgtgttctgcctggtggccatctacagcgtcatcggggaggacctgaagccccacctggcccagctgaccggcagcaagatgaagctgctgaacctgtacatcaagagggcccagaccaccaacagcaacagcagcagcagcagtgatgtgtccacccacagctag

SEQ ID NO: 83414 - DNA, 4434 bp, Artificial Sequence
  derived and/or modified sequence
atggagccccggatggagagctgcctggcccaggtgctgcagaaggacgtgggaaaacgcctccaggtgggccaggagctgattgactatttctcggacaagcaaaagtcagctgacctggaacatgaccagaccatgctcgacaagttagttgatgggttagccacctcctgggtgaattcctcaaactacaaggtagtcctgctgggaatggacattctgagcgcacttgtcaccaggctacaggacagattcaaggcccagatcggcaccgttttaccatctctgatcgacaggctcggggacgccaaagactctgtgcgagagcaagaccagaccttgctgctgaagattatggaccaggcggccaaccctcagtatgtctgggacaggatgctgggcggttttaaacacaagaacttcagaacacgcgaggggatctgcctgtgtctgattgctaccttaaatgcatctggggcccagacactcaccctgtcaaagatcgtaccacacatttgtaacctcctgggcgaccccaactcacaagttagagacgctgctataaattcactggtagagatatacaggcacgttggggagcgagtgcgggctgatctgagtaagaagggcctacctcagtcaagacttaacgtgatttttactaagttcgatgaggtccaaaaatccggtaacatgatacagtcggcaaatgataaaaactttgatgatgaggattctgttgacggaaacaggcccagctcagcatccagcacctcctcaaaagcaccaccatcctcccgtcgaaatgtcggtatgggcaccacccgccgattgggaagttcgacactgggttccaagtcatccgctgctaaggagggtgccggcgccgttgatgaggaggactttataaaagcatttgacgacgtcccggtcgtgcagatctactcatctcgcgacctcgaggagtcaattaataagatacgtgaaatcctttcagatgataaacatgactgggagcaacgcgtcaatgcccttaagaaaatccggagcctactactagcgggcgctgccgaatacgacaatttcttccagcacttgagattgctcgatggagcttttaaactttcagccaaagatctccggtcgcaggtagtgcgcgaagcttgcatcactctgggccacctatcaagcgtgttaggaaataaatttgatcacggagctgaggctatcatgccaactatcttcaatctaatcccaaattccgcaaaaatcatggcaacaagtggagtggtagccgtccgactgatcatcaggcacacacacatccccagactaatcccagtgatcacctccaattgtacatccaagtccgtcgctgtgcggcgtcggtgtttcgagtttctggatctgctgctgcaggagtggcagacacactccctggagagacatataagcgttctggctgaaaccatcaaaaaaggaatccacgacgcagacagcgaagccagaattgaggcccgtaagtgctactggggctttcacagtcacttttcccgtgaggcggaacatctttaccacaccctggagtccagctaccaaaaagccttgcagagccacttgaagaacagcgactctattgtaagcctcccccagagcgatcggtcctcgtctagttcccaagagtcattaaatcgccctctgagtgctaagaggtccccaacagggagtactacctctcgggcctctacagtgagcacaaagtcggtatctacaacaggctccttgcaacgatctaggagcgacatagatgtgaacgctgccgcctccgccaagagcaaggtttcctcgtcttccggaacgactcccttctccagtgccgctgccctcccacctggcagctatgctagccttgaatcccgccatatgagggaggatatggaatacatcggcctggactctggcaggatcagaacccgacggcagtcatccggaagcgcaactaatgtcgcttctacccctgataatcggggacggtcccgggctaaagtcgttagtcaatcccagcctggcagccggtccagctcacctgggaaactcctcgggtccgggtacggcgggttgaccggcggctcttccaggggcccgcctgtgacccccagttccgagaaaagatccaagattccacgctcacagggttgctccagagagacctctccaaacaggattgggctggacagattcggtctcggccagccaggcaggattccggggtccgtcaatgcgatgcgggtcctctccacctctaccgaccttgaggccgccgtggctgatgctttgctgctgggcgactctcggagcaagaagccggtaagacgaagatacgaaccctacgggatgtatagcgatgacgacgccaatagtgatgcctcatccgtgtgcagcgagaggagctacgggtcacggaacggaggcataccgcattatttgcggcagaccgaagacgtcgccgaggtgcttaaccactgtgcaagctcaaattggtccgagcggaaggaggggctgctgggattgcaaaacctgctgaagtctcagcggacattgtctcgggtagagctaaagagactctgcgagatatttaccagaatgttcgcggacccacattctaagcgcgtattctccatgtttctcgaaactctggtggattttattattatccacaaagacgatctacaggattggttgtttgtcctgttaactcagttactgaagaagatgggcgccgatctcctgggctctgtccaggcaaaggtccagaaagcactggatgtgacgagggattcattcccatttgatcagcagtttaacatcctaatgcgcttcatagttgatcaaacccaaaccccaaacttaaaggttaaggtcgccatcctcaaatacatagaaagtcttgctagacaaatggacccgaccgattttgtgaattcttcagaaactaggctagccgtgtccaggataattacatggaccacagaacccaagtccagcgatgtacgcaaagctgctcagattgtcctgatctctctctttgaactcaacacacccgaattcaccatgctgcttggagctctgcctaagaccttccaggacggagccaccaaacttctgcataatcacctgaagaacagctcgaatacctcagtggggtctcctagcaacactattggtcgaactccatccagacatacaagctcgcggacatcacccctgacatcaccgactaactgcagccacgggggactatctccgtcaatgttggactatgacaccgaaaacctgaattccgaggagatctatagtagcctccggggagtcactgaggcaatagagaaattcagctttagatcgcaggaggatttaaatgaaccaatcaagagggacggaaagaaggaatgtgacattgtgtccagggacggtggggccgctagccctgccacagagggtcggggcggaagcgaggtcgagggagggaggacggcactcgacaacaaaacctcactgttgaacactcaacccccacgcgcctttccaggaccacgcgcacgggattacaatccgtacccatacagcgacgcaataaacacatatgataaaacggccctgaaagaagctgtctttgatgacgatatggagcagctgagagatgttccaatcgatcattcggaccttgtggcagatctgctgaaggagctgagcaaccataacgagcgggtcgaggagcgcaagggtgccttgttggagctccttaagattactcgagaggatagccttggtgtgtgggaggagcacttcaagaccatcctccttctgctattggagactcttggtgacaaggatcattccataagggccctagctctgcgtgtcctgcgggagattctgcgaaaccagccagctaggttcaaaaattacgctgagctcaccattatgaagacacttgaggcacacaaggactctcataaggaggttgtgagggcagccgaagaggcggctagcactctggcgtcaagtattcaccctgagcagtgtataaaagtgctgtgtccaataatacagactgcggattatccgatcaacctggctgccataaaaatgcagaccaaagttgtcgagcgcatcgccaaggaatctttactccagctcctagtggacatcatacccggcctgttgcagggttacgataacactgaatccagcgttcgtaaagccagcgtgttctgcctggtcgcaatttacagcgtgattggggaggatctgaagccacatctcgctcagctgaccgggtccaagatgaaactcctcaatttatacatcaagagggcgcaaactactaacagcaattccagctcatctagcgatgtctctacacactcttag

SEQ ID NO: 83415 - DNA, 4434 bp, Artificial Sequence
  derived and/or modified sequence
atggaaccaagaatggaatcctgtttggcgcaagtgttacagaaagatgttggcaaacgcctacaggtcggccaggaactgatagactatttctctgacaaacagaagtctgccgacctggagcacgaccagaccatgttagacaagctcgtggacggtctggccacgtcctgggtgaactccagcaattataaggtcgtcctgctgggcatggacattctatccgcgttagtgacgaggctgcaagatagatttaaggcacagattgggacagtcctgccatctctgattgaccgattgggcgacgcaaaggattccgtgcgagaacaggatcagaccctgcttttgaagattatggatcaggccgctaacccccaatacgtctgggacaggatgctgggcggattcaagcacaagaattttagaactagggagggcatctgtctctgtcttatcgcgacgctgaacgcttcaggggcacaaacactcacattatcgaagatcgtgccacacatatgtaacctactaggcgaccctaactcacaggtaagggatgccgctattaattccttagttgagatctaccgtcatgtgggcgagcgggtgcgcgcagacttgagcaagaaggggctgccgcaatcaagattaaatgttatctttacaaagttcgacgaagtccagaaatctggtaatatgattcagtctgctaacgacaaaaactttgatgatgaagattccgtcgatggcaaccgtcccagctcagccagctccaccagcagtaaggcaccgcctagcagtagacgcaacgtgggaatgggaaccaccaggcgtttgggcagcagtacccttggatctaagtcctctgccgctaaggagggagcaggtgcagtagacgaagaagattttatcaaggcatttgacgacgtcccggtcgtgcaaatctatagttcacgagatttagaagagtccattaacaaaatacgagagatcctaagcgacgacaaacacgattgggaacagagagtgaatgccttgaagaagataaggtctctactacttgcaggagctgctgagtacgacaatttctttcagcatctgcgtttgttggacggggctttcaagctttccgcaaaggatttgaggtctcaagtggttcgagaagcttgcattacacttggccacctaagtagtgtgctcggaaacaaatttgaccacggggctgaggccatcatgccaactatatttaaccttatccctaactcagcgaagatcatggccacaagcggagtggtggccgttcgcctcatcattaggcacacccatattccgagacttataccagtcatcacaagtaattgcacctctaagagcgtcgccgttagacgacgttgctttgaattccttgatctgctactccaggagtggcagacacacagtttagagcgccatattagcgtgcttgctgagaccattaagaaaggtatccatgacgcagactctgaggccagaatcgaggccagaaagtgctactggggatttcattctcacttctccagggaagccgagcacctgtaccacacgcttgagtcctcatatcaaaaggccctgcagagtcacctgaagaactctgacagcattgtttccctccctcagagcgataggtcttccagttccagtcaggaaagcctaaatcgccctttgtccgcaaaacgttccccaacagggtccaccacttcgcgggcatccacggtctcaactaaaagtgtcagcacaactgggagtctccagcgatcccggtccgatattgacgtgaacgcagccgcatcagcaaaaagcaaggtctcatccagctccgggacgacccccttttctagcgcagcagctctcccgcctgggagctatgcttcacttgagagtcgccatatgcgagaagacatggaatacatcggattggattccggccgaattagaacccgaaggcagtcatccggctccgccacgaatgtggcgagcaccccggacaaccggggtaggtccagggcaaaggtggtgtctcagagtcagcccggatctaggtcctcttcaccagggaagttgctggggtccggttatgggggactgacaggtggctctagccggggacccccagtcactcccagttctgagaagagatctaagatccctagatcacaggggtgtagtagagagacatctcctaaccgcatagggctggaccgcttcggcctcggccaaccaggcagaattcctgggtctgtaaatgccatgcgggtgttatccaccagtacagacctagaggctgctgtggcagatgccctgcttctcggtgactctaggagcaagaaaccagtccgaaggagatatgagccctatggaatgtattcggacgatgatgcaaactcagacgcctctagcgtttgttccgagcggagctacgggtctaggaacgggggtatcccacactacctaagacagacagaagatgttgccgaggtcctgaatcattgtgcaagttctaactggtctgaacgtaaggaaggcctcctcgggctgcagaatttactcaaatcacaacgcaccctgtctagggtcgagctcaagcgcttgtgtgagattttcacaaggatgttcgcggatccccactccaagcgggtgttttccatgtttctggagaccctggtggacttcatcatcatccacaaggatgacctgcaagattggctttttgtgctgctgacccagttactaaagaaaatgggcgctgacttgctcggatctgtgcaggcgaaagtccaaaaagcattagatgtcactcgcgactcattcccgttcgatcagcagttcaatattctcatgcgttttatcgtggatcagactcaaactccaaacttaaaggttaaagtagccattctgaagtacatcgaaagtttggccagacagatggaccctacggactttgtaaattcaagcgaaaccaggctggcagtctcacggattataacatggactaccgagcccaagagctcagatgtgagaaaagcggctcagattgtccttattagcttattcgagttaaataccccggagtttaccatgttactgggagctcttccaaagacatttcaggatggggcaactaaactcctgcataaccacctgaaaaacagctctaatacctccgtgggaagtccttcaaacacaattgggcgaactccctcacgccatacatcatcccgcacatccccactgacctctcccaccaactgcagtcatggagggcttagcccttcgatgctcgactacgatacagagaacctcaacagcgaagaaatatattctagcctcaggggagtcactgaggctattgagaaattttcctttcgttcccaggaggatctcaatgaacctatcaaaagggatggaaagaaggaatgtgatatcgtgtccagggacggtggggctgcctctccggcaacagaaggacgcggagggtctgaagttgagggaggcagaaccgctctggataacaagaccagcctgttgaacactcagcctcctcgggcttttccaggcccaagagccagggattataatccctacccatatagcgatgcaattaatacctatgacaagacagctctgaaagaagctgtgtttgatgacgacatggaacagctgcgtgacgtgccgatcgaccactctgaccttgtcgccgacctcctcaaggaattgagtaaccacaatgaaagagtggaggagcggaagggtgcactcctggaactacttaagatcactagggaggactccctcggtgtgtgggaggagcacttcaaaactatcttgctcctcttgctcgagactcttggagataaagatcatagcataagggcactggccctgagggtcctccgggaaatcctccgtaatcagccagcccgattcaagaattacgctgagctgaccatcatgaagacgctggaggcccataaggattcgcataaggaagttgtgagggcagccgaggaagctgcatccaccctagcgtcctcaattcaccccgaacagtgtatcaaggtgctatgccctataattcagaccgcggactaccccattaatctggcggctataaagatgcagactaaagtcgtcgagcggattgccaaggaatccctgttgcagctcctcgtggacataatcccgggtttactgcagggttacgacaataccgaaagcagcgtcaggaaagccagcgtattttgcttagtggccatatactctgtgataggagaggatctgaaacctcatttagcccagcttaccggaagcaagatgaagctgctgaatctgtatatcaaacgcgcacagacaaccaattctaactcatcctccagctctgatgtatcaacgcatagctag

SEQ ID NO: 83416 - DNA, 3967 bp, Artificial Sequence
  derived and/or modified sequence
ttacaaaatttgatgaagtccagaaatctggaaacatgatacaatctgcaaatgataaaaatttcgacgatgaagattctgtggatggtaacagaccttcctctgctagttctacatcatccaaggctccaccaagttctcggagaaacgttggaatgggaaccacccgccggcttggttcatccacccttggatccaagtcttcagctgcaaaagaaggagctggtgctgttgatgaagaggattttattaaagcatttgatgatgtacctgtagtacagatttattccagccgagaccttgaggaatccataaacaaaattagggaaatattatctgatgacaagcatgattgggagcagagagtaaatgctctaaaaaagattagatctttacttttggctggtgctgctgagtatgataacttctttcaacatttgcgtcttttggatggagcctttaaactctctgctaaggacctgcggtctcaggtagtgcgggaggcttgtatcacgttggggcatctgtcatcagttctggggaataagtttgaccatggagctgaagccattatgccaactatctttaatttaattccaaacagtgccaaaattatggccacatctggtgttgtagctgttaggttaattattcggcacacacacatccctaggttaatacctgtcataacaagcaactgtacctctaagtctgtcgcagttagaaggcgctgttttgaatttttagatttgcttttacaagaatggcagacacattcactagaacgacacatatcagtattagctgaaacaataaagaagggaatacatgatgctgattccgaagcaagaatagaagccagaaaatgttactggggtttccacagtcacttcagcagagaagcagagcacttgtaccacaccttggagtcctcctaccagaaagccctgcagtcccacctgaagaactcagacagcatagtgtctctgcctcagtcagaccgctcatcttccagctctcaagagagtctaaatcgtccgctgtctgccaaaagaagtcctactggaagtaccacatctagagcttctacagttagtaccaaatctgtgtcaacgactgggtccctccagcgatctcgaagtgatattgatgtgaacgcagcagccagtgccaaatccaaagtctcctcatcttcgggcacgacgcctttcagctctgcagcagctttgcctccagggtcatacgcatccttaggtcggatccgcacaagacggcaaagctctgggagtgccaccaacgtcgcctctacacctgataaccggggccgcagtcgcgctaaagtggtttcacagtcccagcgatccagatctgctaatcctgctggtgctggcagccggtcaagttccccaggaaaattgttgggaagtggttatggtggacttactgggggctcctcacgaggcccacctgtgacaccgtcttcagaaaagcgaagcaagattcccaggagccagggatgtagccgggaaacaagtccaaaccgaataggattagatcggtttgggcttggccagccaggaagaatacctggttctgtgaatgccatgagagttctgagcacaagtacagatcttgaagctgctgttgctgatgctttgctgttaggagactccaggagcaagaagaagcctgtgaggaggagatatgagccgtatgggatgtattctgacgatgatgccaacagtgatgcctcaagtgtttgctctgagcgctcatatggctccaggaatggtggcattccccattatctgcggcagactgaggatgtagcagaagttctcaaccactgtgctagttcaaactggtcagaaaggaaagaagggcttctgggcctgcagaacttactgaagagccaaagaacactgagtcgagttgaactgaaaaggttgtgtgagatcttcactcggatgtttgctgaccctcatagcaagattgctgattcagaagcagaatgtgaggataaagaaggaaatttgtttccatcagaagtctcttgtacagtgagttttcagtatgtttttggagactcttgtggattttataataattcataaggatgatttacaagactggctttttgttcttctcacacaattacttaagaaaatgggagcagatttacttggatctgtgcaagcaaaagttcaaaaggctctagatgtcacaagggactcctttccatttgatcaacaatttaacattttgatgagatttattgtggatcaaactcaaactccaaacctcaaggtcaaagttgcaatcctgaaatacattgagtctctggccagacagatggatccaacagattttgtaaactctagtgagacaaggcttgctgtttctagaatcataacctggacaacagaaccaaagagttcagacgtgagaaaggcagcacagattgtgctaatctctctgtttgaattgaatactcctgaatttaccatgttacttggtgccttgccaaaaacattccaggatggtgccaccaaactcctgcacaaccacctcaagaattccagtaacaccagtgtgggctctccaagcaatacgattggccggacgccctcccgacacaccagcagcaggaccagccccctgacctcacccaccaactgttcccatgggggtctgtctccaagcatgctggactatgatacagagaacctgaactctgaagaaatctatagttctctacgtggagttacagaagccattgaaaagtttagttttcgaagccaagaagatctgaatgagccaattaaacgagatggcaaaaaggagtgtgatattgtgtcccgcgatgggggcgctgcctcccctgccactgagggccgggggggtagtgaagtagaaggaggccggacagctctggataacaagacctcactactcaacacccagcctccgcgcgccttcccggggccgcgggcgcgagactacaacccgtacccctactcagatgccatcaacacctacgacaagaccgccctgaaagaggctgtgttcgatgacgacatggagcagcttcgagacgtgcccatcgaccattctgacctggtggctgaccttctgaaagagctgtccaaccacaatgagcgagtggaggaacggaagggagccctgctggagctgctcaagatcacgcgggaagacagccttggtgtctgggaggagcacttcaagaccattctgctcctgctgctggagacccttggagacaaagaccattcaattcgagcactggcgttaagagttttgagggaaattctgagaaatcaaccagcaagatttaaaaactacgccgagctgacgattatgaagactctggaagcccacaaagactcccataaggaggtggtgagagcggctgaggaggctgcgtccacactggccagttccatccacccggagcagtgcatcaaggtgctctgccccatcatccagacggccgactaccccatcaaccttgctgccatcaagatgcagaccaaagtcgtcgagaggatcgcaaaggagtcattgctgcagctccttgtcgacatcatcccaggcttgctgcagggttatgacaacaccgaaagtagtgtgcgtaaggccagcgtgttttgcttagtggcaatttattccgtaatcggagaagacctgaaacctcaccttgcacagctcacagggagcaagatgaagctactaaacttatacataaagagggcccagaccaccaacagcaacagcagctcctcctccgatgtctccacgcacagctaatggcagtacctgtctcttgtgtagacctagaagcaatcggtggtgcctctcagagacctttccccacccccttcatcggctgcccagtcagtacaaggaggcccacaaatatttattacaatcagtattttggtccctt

SEQ ID NO: 83417 - DNA, 7907 bp, Artificial Sequence
  derived and/or modified sequence
tttttttttttttaatccccgcaccaagcgcttaacctcattggggtggaggagaaggcggcggctctctggtccgcagcggcaacagtaacgaaaaacagggctaatggactgctgaattatgaagtatttcagacccagtagtagaacatcactctgccactcactcctttatctcctactagttatttaaattggacttttaatatcctaccagctgctcttcagacacacatggtgcattgttgccattccccagattgcatctttgaaacacaggctcttagtaaccttcagcgaacaaagaggcaacctcccagatacgtctgctgggagggagtcatcgtgactgccctctagcttttgctggatctggatttgaattccactatggagcctcgcatggagtcctgcctggcgcaggtgttgcagaaggatgtggggaaacgattgcaggttggccaagaactgatagactatttctcagacaaacagaagtctgctgaccttgagcatgaccagaccatgttagataaacttgtggatggacttgctacctcttgggtgaactctagcaattacaaggtggttctgctgggcatggacatcctgtccgccctggtgacccggctgcaggatcggttcaaggcgcagatcggcacagtgctgccaagtctaatagacagactaggagatgctaaagactctgtgagggagcaggaccaaactctgctgctaaagatcatggatcaagctgctaatccccagtacgtatgggacagaatgcttggaggcttcaaacacaagaatttccgtactcgagaaggcatctgtctctgccttatagcaacactcaatgcctctggagcacagactttaacactaagcaagattgtgccacatatatgcaacttacttggagatccaaacagccaggttcgagatgcagcaataaacagcttagtggaaatttacagacatgtaggagaacgtgtgagggcagatctcagtaaaaaaggattgccacagtcccggttgaatgtaatttttacaaaatttgatgaagtccagaaatctggaaacatgatacaatctgcaaatgataaaaatttcgacgatgaagattctgtggatggtaacagaccttcctctgctagttctacatcatccaaggctccaccaagttctcggagaaacgttggaatgggaaccacccgccggcttggttcatccacccttggatccaagtcttcagctgcaaaagaaggagctggtgctgttgatgaagaggattttattaaagcatttgatgatgtacctgtagtacagatttattccagccgagaccttgaggaatccataaacaaaattagggaaatattatctgatgacaagcatgattgggagcagagagtaaatgctctaaaaaagattagatctttacttttggctggtgctgctgagtatgataacttctttcaacatttgcgtcttttggatggagcctttaaactctctgctaaggacctgcggtctcaggtagtgcgggaggcttgtatcacgttggggcatctgtcatcagttctggggaataagtttgaccatggagctgaagccattatgccaactatctttaatttaattccaaacagtgccaaaattatggccacatctggtgttgtagctgttaggttaattattcggcacacacacatccctaggttaatacctgtcataacaagcaactgtacctctaagtctgtcgcagttagaaggcgctgttttgaatttttagatttgcttttacaagaatggcagacacattcactagaacgacacatatcagtattagctgaaacaataaagaagggaatacatgatgctgattccgaagcaagaatagaagccagaaaatgttactggggtttccacagtcacttcagcagagaagcagagcacttgtaccacaccttggagtcctcctaccagaaagccctgcagtcccacctgaagaactcagacagcatagtgtctctgcctcagtcagaccgctcatcttccagctctcaagagagtctaaatcgtccgctgtctgccaaaagaagtcctactggaagtaccacatctagagcttctacagttagtaccaaatctgtgtcaacgactgggtccctccagcgatctcgaagtgatattgatgtgaacgcagcagccagtgccaaatccaaagtctcctcatcttcgggcacgacgcctttcagctctgcagcagctttgcctccagggtcatacgcatccttagagtccagacacatgagggaagacatggagtacataggcctggactcaggtcggatccgcacaagacggcaaagctctgggagtgccaccaacgtcgcctctacacctgataaccggggccgcagtcgcgctaaagtggtttcacagtcccagcctggcagccggtcaagttccccaggaaaattgttgggaagtggttatggtggacttactgggggctcctcacgaggcccacctgtgacaccgtcttcagaaaagcgaagcaagattcccaggagccagggatgtagccgggaaacaagtccaaaccgaataggattagatcggtttgggcttggccagccaggaagaatacctggttctgtgaatgccatgagagttctgagcacaagtacagatcttgaagctgctgttgctgatgctttgctgttaggagactccaggagcaagaagcctgtgaggaggagatatgagccgtatgggatgtattctgacgatgatgccaacagtgatgcctcaagtgtttgctctgagcgctcatatggctccaggaatggtggcattccccattatctgcggcagactgaggatgtagcagaagttctcaaccactgtgctagttcaaactggtcagaaaggaaagaagggcttctgggcctgcagaacttactgaagagccaaagaacactgagtcgagttgaactgaaaaggttgtgtgagatcttcactcggatgtttgctgaccctcatagcaagagagttttcagtatgtttttggagactcttgtggattttataataattcataaggatgatttacaagactggctttttgttcttctcacacaattacttaagaaaatgggagcagatttacttggatctgtgcaagcaaaagttcaaaaggctctagatgtcacaagggactcctttccatttgatcaacaatttaacattttgatgagatttattgtggatcaaactcaaactccaaacctcaaggtcaaagttgcaatcctgaaatacattgagtctctggccagacagatggatccaacagattttgtaaactctagtgagacaaggcttgctgtttctagaatcataacctggacaacagaaccaaagagttcagacgtgagaaaggcagcacagattgtgctaatctctctgtttgaattgaatactcctgaatttaccatgttacttggtgccttgccaaaaacattccaggatggtgccaccaaactcctgcacaaccacctcaagaattccagtaacaccagtgtgggctctccaagcaatacgattggccggacgccctcccgacacaccagcagcaggaccagccccctgacctcacccaccaactgttcccatgggggtctgtctccaagcatgctggactatgatacagagaacctgaactctgaagaaatctatagttctctacgtggagttacagaagccattgaaaagtttagttttcgaagccaagaagatctgaatgagccaattaaacgagatggcaaaaaggagtgtgatattgtgtcccgcgatgggggcgctgcctcccctgccactgagggccgggggggtagtgaagtagaaggaggccggacagctctggataacaagacctcactactcaacacccagcctccgcgcgccttcccggggccgcgggcgcgagactacaacccgtacccctactcagatgccatcaacacctacgacaagaccgccctgaaagaggctgtgttcgatgacgacatggagcagcttcgagacgtgcccatcgaccattctgacctggtggctgaccttctgaaagagctgtccaaccacaatgagcgagtggaggaacggaagggagccctgctggagctgctcaagatcacgcgggaagacagccttggtgtctgggaggagcacttcaagaccattctgctcctgctgctggagacccttggagacaaagaccattcaattcgagcactggcgttaagagttttgagggaaattctgagaaatcaaccagcaagatttaaaaactacgccgagctgacgattatgaagactctggaagcccacaaagactcccataaggaggtggtgagagcggctgaggaggctgcgtccacactggccagttccatccacccggagcagtgcatcaaggtgctctgccccatcatccagacggccgactaccccatcaaccttgctgccatcaagatgcagaccaaagtcgtcgagaggatcgcaaaggagtcattgctgcagctccttgtcgacatcatcccaggcttgctgcagggttatgacaacaccgaaagtagtgtgcgtaaggccagcgtgttttgcttagtggcaatttattccgtaatcggagaagacctgaaacctcaccttgcacagctcacagggagcaagatgaagctactaaacttatacataaagagggcccagaccaccaacagcaacagcagctcctcctccgatgtctccacgcacagctaatggcagtacctgtctcttgtgtagacctagaagcaatcggtggtgcctctcagagacctttccccacccccttcatcggctgcccagtcagtacaaggaggcccacaaatatttattacaatcagtattttggtcccttccagcttttctgtagaatcttactggtattgaatgtaaaggaagcaaggcctgtattgcagtcttcatacaaaacaaaaggaataagaacagaaaagagccatactgaaacatgtcttgtacagcctgctgagatggcgaaaccctgtgtgtggggtgcagtttttaaaaatcagagcgctctagccactacttggtagaaagtagcattttttttttcagttaataacatatttgggggtggggtggggtgttactttgtgttcttcctccttagcctattttcttgtgcgtatggtctgtgtggggcccctttcacagctgacaccacgaaaggtgatatatctttaagttgtgttctgagacctactaaaaatgggaatcaagtcttggcaagaacagtctgaagatggccttttaacaaacgctgggaattttgcttgtcatatccagactggaggccgactgccctggctttcagcgtagaattgggagtgcaccctgacagtctccttccagctctccctaatcgactccaccgacaaggtccctaccccagagcttccatgcaaaggaattcttcaagtttaaatctggacacaaaaataagataaatgtatggcatcatttagggatgcctgagatggcagttcatgaagcacagaagataaagaagaagtctttcatctttactgctgagatccttgggaacactgttgtcatgggggctctgccaagaccctcatctctgggctacacggtgattcagattgagcaccaacttgtttcctcccctcaaagttctgcctaagccgttcagttctaacatggtctcagttaatctggtaaatggcatctttaccatcttagttctgacttctcagtttaatgtgggattaagagccaagaaaagcctagagagactggatatcacaattttttttaattttataaactgaagtagttccttgaatgtctgttgatgaaatagtcactgtttaaggaaaaaagtaattatgaggtgtagcagattgcagaaaaacaggattagaaacacacttaaaaagaacacacatttagagtctctcttcctcctcagcgaaccactaggccccctttttaaaaacacctttagagcctaattactccaataaaagtaactagaggtttggagtctggttaaataaattctgagtaaaattcttaagccaaatggaaattcttaatgcaatcatgaggacttctattgtctcttactgttgtattagatcctataaattgaactgatttttccataaggaaaatgcttcttttgagattaattctaataacgtatttgctattgcagtgcagagcccactgcaactgctaggactgaaagcagaggctgggtgccagagcacgtgattcttaacatcatttccacagacccctctgccctgaccctctgcattggatgcaggaagctgggaaagactgatgttgatttggaaacatgggctgaaaatgaaggccccatagtgcataggaacagtaaagccagggtgctgacgtgtgtgtgtgtgtgtgtgtgtgtgtgtgtgtgtgtgtggtgttgtgtgtgtttgtgcgtgcaccctacacatgtgtggtacctcactgctgctgtttagggaacttgagggacgcgtttcaaggggttgggtattactgacgagctttggctcaaaatatagcaggaccaggtcttttgttgataagtactgtttgtttattaatatgtcattaatggtatttcttttttacactctacaagtgaattagggagtctcttgttgacccctttgttgcaggaatgtgcgtcgggctaggttatccatgagtttctttattcctaatgcagttagaaagacctttctccttgagctctttgactcccagaaggtaccccagtccccagtgtacttagaaaggatctcgaacattgctggacgtcctcatagtactcacaaagggctagccttgaatgtcactcgcccagtcttcagtctcctgacttagagatacaatcacgtcacaggtctcttggcctcaatctgaaaactgctgccgccgcgccgaggagactcgcatgccgccaccacctcactgggagggcgccgagcccaccgtcgccccctagaccctgacagctgcagctgccttgccttgccgccgcctccctgcagggcccctgttccaatgaaaaacagaacacaaaagagcagagcacctaagcctgtctctgcctccctgtctaccggactggccagggcccaagacccccgctgctccactgcggggctgggcgggctgactccctgcttcctccaagctgctgcctcccctgcagccagggtctgggcagggtgcagccggtcctcggggcacgcagcttccttcaagtacactgtgtgtgcttcccggacctgcggcgatgccacgggcctgccttttctatgcgcctcactagcttaccaccctgtgcaggtaatgcaactgactttgtctcatcagtctttttctttccctgccaccctttatttatcaagcgtaatgttacactttaaaggacagcaaataagaactttgtagaatcccaccaggactttgctaacaataatgtttggaaataaagaagtgctctgaaaaaatatcagccaccaaaatagttatgttggcactgtgttcacacgcatggtccccacacccccaggttgggtgggtttttttgttttttgggtttttttgggggggggggctttttcatgttacatccatatctgtatttatatcttatttgtttcactttcaagtgtatcatggcaaatgtacagatttttttgttaataatgtgctaggatttgctaaaaaagaaaaaaaaaaaacccttttgagtttgccctagaataaatgagacttaattc

SEQ ID NO: 83418 - DNA, 4434 bp, Artificial Sequence
  derived and/or modified sequence
atggagcccagaatggagagctgcctggcccaggtgctgcagaaggacgtgggcaagagactgcaggtgggccaggagctgatcgactacttcagcgacaagcagaagagcgccgacctggagcacgaccagaccatgctggacaagctggtggacggcctggccaccagctgggtgaacagcagcaactacaaggtggtgctgctgggcatggacatcctgagcgccctggtgaccagactgcaggacagattcaaggcccagatcggcaccgtgctgcccagcctgatcgacagactgggcgacgccaaggacagcgtgagagagcaggaccagaccctgctgctgaagatcatggaccaggccgccaacccccagtacgtgtgggacagaatgctgggcggcttcaagcacaagaacttcagaaccagagagggcatctgcctgtgcctgatcgccaccctgaacgccagcggcgcccagaccctgaccctgagcaagatcgtgccccacatctgcaacctgctgggcgaccccaacagccaggtgagagacgccgccatcaacagcctggtggagatctacagacacgtgggcgagagagtgagagccgacctgagcaagaagggcctgccccagagcagactgaacgtgatcttcaccaagttcgacgaggtgcagaagagcggcaacatgatccagagcgccaacgacaagaacttcgacgacgaggacagcgtggacggcaacagacccagcagcgccagcagcaccagcagcaaggccccccccagcagcagaagaaacgtgggcatgggcaccaccagaagactgggcagcagcaccctgggcagcaagagcagcgccgccaaggagggcgccggcgccgtggacgaggaggacttcatcaaggccttcgacgacgtgcccgtggtgcagatctacagcagcagagacctggaggagagcatcaacaagatcagagagatcctgagcgacgacaagcacgactgggagcagagagtgaacgccctgaagaagatcagaagcctgctgctggccggcgccgccgagtacgacaacttcttccagcacctgagactgctggacggcgccttcaagctgagcgccaaggacctgagaagccaggtggtgagagaggcctgcatcaccctgggccacctgagcagcgtgctgggcaacaagttcgaccacggcgccgaggccatcatgcccaccatcttcaacctgatccccaacagcgccaagatcatggccaccagcggcgtggtggccgtgagactgatcatcagacacacccacatccccagactgatccccgtgatcaccagcaactgcaccagcaagagcgtggccgtgagaagaagatgcttcgagttcctggacctgctgctgcaggagtggcagacccacagcctggagagacacatcagcgtgctggccgagaccatcaagaagggcatccacgacgccgacagcgaggccagaatcgaggccagaaagtgctactggggcttccacagccacttcagcagagaggccgagcacctgtaccacaccctggagagcagctaccagaaggccctgcagagccacctgaagaacagcgacagcatcgtgagcctgccccagagcgacagaagcagcagcagcagccaggagagcctgaacagacccctgagcgccaagagaagccccaccggcagcaccaccagcagagccagcaccgtgagcaccaagagcgtgagcaccaccggcagcctgcagagaagcagaagcgacatcgacgtgaacgccgccgccagcgccaagagcaaggtgagcagcagcagcggcaccacccccttcagcagcgccgccgccctgccccccggcagctacgccagcctggagagcagacacatgagagaggacatggagtacatcggcctggacagcggcagaatcagaaccagaagacagagcagcggcagcgccaccaacgtggccagcacccccgacaacagaggcagaagcagagccaaggtggtgagccagagccagcccggcagcagaagcagcagccccggcaagctgctgggcagcggctacggcggcctgaccggcggcagcagcagaggcccccccgtgacccccagcagcgagaagagaagcaagatccccagaagccagggctgcagcagagagaccagccccaacagaatcggcctggacagattcggcctgggccagcccggcagaatccccggcagcgtgaacgccatgagagtgctgagcaccagcaccgacctggaggccgccgtggccgacgccctgctgctgggcgacagcagaagcaagaagcccgtgagaagaagatacgagccctacggcatgtacagcgacgacgacgccaacagcgacgccagcagcgtgtgcagcgagagaagctacggcagcagaaacggcggcatcccccactacctgagacagaccgaggacgtggccgaggtgctgaaccactgcgccagcagcaactggagcgagagaaaggagggcctgctgggcctgcagaacctgctgaagagccagagaaccctgagcagagtggagctgaagagactgtgcgagatcttcaccagaatgttcgccgacccccacagcaagagagtgttcagcatgttcctggagaccctggtggacttcatcatcatccacaaggacgacctgcaggactggctgttcgtgctgctgacccagctgctgaagaagatgggcgccgacctgctgggcagcgtgcaggccaaggtgcagaaggccctggacgtgaccagagacagcttccccttcgaccagcagttcaacatcctgatgagattcatcgtggaccagacccagacccccaacctgaaggtgaaggtggccatcctgaagtacatcgagagcctggccagacagatggaccccaccgacttcgtgaacagcagcgagaccagactggccgtgagcagaatcatcacctggaccaccgagcccaagagcagcgacgtgagaaaggccgcccagatcgtgctgatcagcctgttcgagctgaacacccccgagttcaccatgctgctgggcgccctgcccaagaccttccaggacggcgccaccaagctgctgcacaaccacctgaagaacagcagcaacaccagcgtgggcagccccagcaacaccatcggcagaacccccagcagacacaccagcagcagaaccagccccctgaccagccccaccaactgcagccacggcggcctgagccccagcatgctggactacgacaccgagaacctgaacagcgaggagatctacagcagcctgagaggcgtgaccgaggccatcgagaagttcagcttcagaagccaggaggacctgaacgagcccatcaagagagacggcaagaaggagtgcgacatcgtgagcagagacggcggcgccgccagccccgccaccgagggcagaggcggcagcgaggtggagggcggcagaaccgccctggacaacaagaccagcctgctgaacacccagccccccagagccttccccggccccagagccagagactacaacccctacccctacagcgacgccatcaacacctacgacaagaccgccctgaaggaggccgtgttcgacgacgacatggagcagctgagagacgtgcccatcgaccacagcgacctggtggccgacctgctgaaggagctgagcaaccacaacgagagagtggaggagagaaagggcgccctgctggagctgctgaagatcaccagagaggacagcctgggcgtgtgggaggagcacttcaagaccatcctgctgctgctgctggagaccctgggcgacaaggaccacagcatcagagccctggccctgagagtgctgagagagatcctgagaaaccagcccgccagattcaagaactacgccgagctgaccatcatgaagaccctggaggcccacaaggacagccacaaggaggtggtgagagccgccgaggaggccgccagcaccctggccagcagcatccaccccgagcagtgcatcaaggtgctgtgccccatcatccagaccgccgactaccccatcaacctggccgccatcaagatgcagaccaaggtggtggagagaatcgccaaggagagcctgctgcagctgctggtggacatcatccccggcctgctgcagggctacgacaacaccgagagcagcgtgagaaaggccagcgtgttctgcctggtggccatctacagcgtgatcggcgaggacctgaagccccacctggcccagctgaccggcagcaagatgaagctgctgaacctgtacatcaagagagcccagaccaccaacagcaacagcagcagcagcagcgacgtgagcacccacagctag

SEQ ID NO: 83419 - DNA, 423 bp, Artificial Sequence
  derived and/or modified sequence
atgctggtcaaattgaacagccaagctaggttgtcatctatggtgaagaaggtgaggttaccgtctcgttgtgagcctcccggaacaacatgcacagttagcgggtggggcactaccacgtcgcctgatgtcacgtttccttcggatctaatgtgcgtcgatgtgaagttaatctccccccaagactgtaccaaggtctataaggatcttctggagaattccatgctgtgtgctgggattccagattcaaagaagaatgcatgcaatggagattcaggtggcccactggtctgccggggtaccctccaaggtttggtgtcatggggcactttcccttgcggccagcctaacgacccaggtgtgtacactcaggtttgcaaatttacgaagtggataaatgatacgatgaagaagcatcgctag

SEQ ID NO: 83420 - DNA, 423 bp, Artificial Sequence
  derived and/or modified sequence
atgctagtcaaactcaattcacaggcaagacttagttccatggtcaagaaagtgcgactgccatctagatgcgagcccccaggtacgacatgcacggttagcggttgggggaccacaacgtcgccagatgtcacctttccttcagatttgatgtgcgtggacgtcaagttaattagtcctcaggattgcactaaagtttataaggatcttcttgagaactctatgttgtgtgcaggtatcccagatagcaagaagaatgcctgtaacggagatagcggcggacctctcgtatgtcgcgggacactgcaaggccttgtgtcctgggggacctttccctgtggacagcccaatgatcccggcgtctacacccaggtgtgcaagttcactaaatggataaacgatactatgaagaagcataggtag

SEQ ID NO: 83421 - DNA, 423 bp, Artificial Sequence
  derived and/or modified sequence
atgctggtaaagcttaactcccaggcaagattgagctccatggttaagaaagtgagactgccttcaagatgtgagcccccaggtacaacgtgcaccgtttcagggtggggtaccacaacctctcccgacgtaacttttccgtctgatttgatgtgcgttgatgtgaaactgattagcccacaggactgcactaaggtttacaaagacctccttgaaaactctatgctttgcgccggcattcctgatagcaaaaaaaacgcctgcaatggcgacagcggaggaccccttgtatgtcgtggcaccctgcagggccttgttagttggggaacattcccttgtgggcaacctaatgatcctggcgtgtacactcaggtctgtaagtttacaaagtggataaatgatacaatgaaaaaacatagatag

SEQ ID NO: 83422 - DNA, 423 bp, Artificial Sequence
  derived and/or modified sequence
atgctggtgaagctgaacagccaggccagactgagcagcatggtgaagaaggtgagactgcccagcagatgcgagccccccggcaccacctgcaccgtgagcggctggggcaccaccaccagccccgacgtgaccttccccagcgacctgatgtgcgtggacgtgaagctgatcagcccccaggactgcaccaaggtgtacaaggacctgctggagaacagcatgctgtgcgccggcatccccgacagcaagaagaacgcctgcaacggcgacagcggcggccccctggtgtgcagaggcaccctgcagggcctggtgagctggggcaccttcccctgcggccagcccaacgaccccggcgtgtacacccaggtgtgcaagttcaccaagtggatcaacgacaccatgaagaagcacagatag

SEQ ID NO: 83423 - DNA, 423 bp, Artificial Sequence
  derived and/or modified sequence
atgttggttaaactaaatagtcaagcacgactcagctctatggtgaaaaaagttcgtctgccaagccggtgcgagccccctggaaccacatgtactgtgtctggctgggggaccaccactagcccagacgtcacattcccttccgatctcatgtgtgtcgatgtgaagttgatttcgccacaggattgtactaaggtgtacaaggacttactggaaaattccatgctttgtgccggaattcctgattcaaaaaagaatgcatgtaacggagatagcggcgggcccctggtgtgtcgcggcacactgcagggcctggtgtcttgggggacgtttccatgcgggcaacccaacgatcccggggtctacacacaggtgtgcaagttcaccaagtggatcaacgacacaatgaagaagcacagatag

SEQ ID NO: 83424 - DNA, 423 bp, Artificial Sequence
  derived and/or modified sequence
atgctggtgaagctgaacagccaggcccggctgagctccatggtgaagaaggtgcggctgcccagccgctgtgagcccccaggcaccacctgcaccgtgtctggctggggcaccaccaccagcccagatgtgaccttccccagcgacctgatgtgtgtggatgtgaagctgatcagcccccaggactgcaccaaggtgtacaaggacctgctggagaacagcatgctgtgtgccggcatcccagacagcaagaagaatgcctgcaatggagacagcggcggccccctggtgtgccggggcaccctgcagggcctggtgtcctggggcaccttcccctgtggccagcccaatgaccccggggtgtacacccaggtgtgcaagttcaccaagtggatcaatgacaccatgaagaagcacaggtag

SEQ ID NO: 83425 - DNA, 423 bp, Artificial Sequence
  derived and/or modified sequence
atgctggtgaagctgaacagccaggcccggctgagcagcatggtgaaaaaggtgagactgccatcccgctgtgagccccctggaaccacatgcaccgtgtcagggtggggtaccaccacttccccagacgttaccttccctagcgatctgatgtgtgttgatgtgaaactgatcagcccacaggactgtaccaaggtgtacaaggatctcctcgaaaacagcatgctttgtgctggcatcccagacagtaaaaagaacgcatgcaatggcgacagtgggggtcctctggtttgccgcgggacattgcagggtttggtctcctggggaacctttccatgcggccaacctaacgatcccggggtgtatactcaggtgtgcaaattcaccaaatggatcaacgatactatgaaaaaacaccggtag

SEQ ID NO: 83426 - RNA, 423 nt, Artificial Sequence
  derived and/or modified sequence
augcuagucaaacucaauucacaggcaagacuuaguuccauggucaagaaagugcgacugccaucuagaugcgagcccccagguacgacaugcacgguuagcgguugggggaccacaacgucgccagaugucaccuuuccuucagauuugaugugcguggacgucaaguuaauuaguccucaggauugcacuaaaguuuauaaggaucuucuugagaacucuauguugugugcagguaucccagauagcaagaagaaugccuguaacggagauagcggcggaccucucguaugucgcgggacacugcaaggccuuguguccugggggaccuuucccuguggacagcccaaugaucccggcgucuacacccaggugugcaaguucacuaaauggauaaacgauacuaugaagaagcauagguag

SEQ ID NO: 83427 - RNA, 423 nt, Artificial Sequence
  derived and/or modified sequence
augcugguaaagcuuaacucccaggcaagauugagcuccaugguuaagaaagugagacugccuucaagaugugagcccccagguacaacgugcaccguuucagggugggguaccacaaccucucccgacguaacuuuuccgucugauuugaugugcguugaugugaaacugauuagcccacaggacugcacuaagguuuacaaagaccuccuugaaaacucuaugcuuugcgccggcauuccugauagcaaaaaaaacgccugcaauggcgacagcggaggaccccuuguaugucguggcacccugcagggccuuguuaguuggggaacauucccuugugggcaaccuaaugauccuggcguguacacucaggucuguaaguuuacaaaguggauaaaugauacaaugaaaaaacauagauag

SEQ ID NO: 83428 - protein, 332 aa, Artificial Sequence
  derived and/or modified sequence
MKGDTRHLNGEEDAGGREDSILVNGACSDQSSDSPPILEAIRTPEIRGRRSSSRLSKREVSSLLSYTQDLTGDGDGEDGDGSDTPVMPKLFRETRTRSESPASLRRRATASAGTPWPSPPSSYLTIDLTDDTEDTHGTPQSSSTPYARLAQDSQQGGMESPQVEADSGDGDSSEYQDGKEFGIGDLVWGKIKGFSWWPAMVVSWKATSKRQAMSGMRWVQWFGDGKFSEVSADKLVALGLFSQHFNLATFNKLVSYRKAMYHALERTRLEDAQLTTQPPLTTAPHPSASRQIAITTAKTEGMKIRAENKWLQMLPTTRAAWKEKPRVLPPSL

SEQ ID NO: 83429 - protein, 728 aa, Artificial Sequence
  derived and/or modified sequence
MKGDTRHLNGEEDAGGREDSILVNGACSDQSSDSPPILEAIRTPEIRGRRSSSRLSKREVSSLLSYTQDLTGDGDGEDGDGSDTPVMPKLFRETRTRSESPASLRRRATASAGTPWPSPPSSYLTIDLTDDTEDTHGTPQSSSTPYARLAQDSQQGGMESPQVEADSGDGDSSEYQDGKEFGIGDLVWGKIKGFSWWPAMVVSWKATSKRQAMSGMRWVQWFGDGKFSEVSADKLVALGLFSQHFNLATFNKLVSYRKAMYHALEKARVRAGKTFPSSPGDSLEDQLKPMLEWAHGGFKPTGIEGLKPNNTQPENKTRRRTADDSATSDYCPAPKRLKTNCYNNGKDRGDEDQSREQMASDVANNKSSLEDGCLSCGRKNPVSFHPLFEGGLCQTCRDRFLELFYMYDDDGYQSYCTVCCEGRELLLCSNTSCCRCFCVECLEVLVGTGTAAEAKLQEPWSCYMCLPQRCHGVLRRRKDWNVRLQAFFTSDTGLEYEAPKLYPAIPAARRRPIRVLSLFDGIATGYLVLKELGIKVGKYVASEVCEESIAVGTVKHEGNIKYVNDVRNITKKNIEEWGPFDLVIGGSPCNDLSNVNPARKGLYEGTGRLFFEFYHLLNYSRPKEGDDRPFFWMFENVVAMKVGDKRDISRFLECNPVMIDAIKVSAAHRARYFWGNLPGMNRIFGFPVHYTDVSNMGRGARQKLLGRSWSVPVIRHLFAPLKDYFACE

SEQ ID NO: 83430 - DNA, 999 bp, Artificial Sequence
  derived and/or modified sequence
atgaaaggggatacacgccacctgaacggcgaggaagatgctggtggaagggaggattcgattctggtgaacggagcttgctcagaccaatctagcgattccccgcccatcctggaggctatccgtaccccggagattcgaggacgccggagtagctctcgcctgtcaaagagggaggtgtcgtccctgctgagctatactcaggacctgactggggacggggacggtgaggacggagatggctcggatactccagttatgccgaagctattcagagagactcgcaccagatcagagtctcccgctagtctgaggagacgcgctacggcctcagcaggcaccccctggccaagcccgccttcaagttatctcaccatagacctcaccgatgataccgaggatacccacgggacgccgcagtcctcaagtactccatacgcacgattggcccaggactctcaacaaggtggtatggagtccccccaggtagaggcagactccggggacggcgacagtagcgagtaccaagacgggaaggagtttggcattggggacctagtgtggggaaagattaagggcttttcttggtggccagccatggtggtgagctggaaggcaacctctaagaggcaggcaatgtcaggcatgaggtgggtgcagtggtttggggacggtaaattcagtgaagtaagcgccgataaactggtggccttggggcttttcagtcagcattttaacctggccacattcaacaaactagtgagttaccgcaaagcaatgtaccacgccttagaacgaacgcggctggaagatgctcagctgactacacagcccccgcttaccacagcccctcacccctccgccagccggcaaatcgccataacaaccgccaagactgaaggcatgaaaattagggcagagaataagtggctccagatgctgcccacaacgagggccgcttggaaggagaagcctcgagttctgccaccctccttgtag

SEQ ID NO: 83431 - DNA, 999 bp, Artificial Sequence
  derived and/or modified sequence
atgaagggggacaccaggcacctgaatggagaggaggatgctgggggccgggaggacagcatcctggtgaatggagcctgcagcgaccagagcagtgacagcccccccatcctggaggccatccgcaccccagagatccggggcagaagaagcagcagccggctgagcaagcgggaggtgagcagcctgctgagctacacccaggacctgactggagatggagatggagaagatggagatggcagtgacacccctgtgatgcccaagctgttccgggagaccaggaccaggtctgagagccctgccagcctgcggcggcgggccacagccagcgctggcaccccctggcccagcccccccagcagctacctgaccatcgacctgacagatgacacagaggacacccacggcaccccccagagcagcagcaccccctatgcccggctggcccaggacagccagcagggcggcatggagagcccccaggtggaggccgacagcggagatggagacagcagcgagtaccaggacggcaaggagtttggaattggagacctggtgtggggcaagatcaagggcttctcctggtggccagccatggtggtgtcctggaaggccaccagcaagaggcaggccatgagcggcatgcgctgggtgcagtggtttggagatggcaagttcagcgaggtgtctgctgacaagctggtggccctgggcctcttcagccagcacttcaacctggccaccttcaacaagctggtgtcctacaggaaggccatgtaccacgccctggagaggacccggctggaggatgcccagctgaccacccagccccccctgaccacagccccccaccccagcgccagccggcagatcgccatcaccacagccaagacagagggcatgaagatccgggcagagaacaagtggctgcagatgctgcccaccaccagggctgcctggaaggagaagccccgggtgctgccccccagcctgtag

SEQ ID NO: 83432 - DNA, 999 bp, Artificial Sequence
  derived and/or modified sequence
atgaagggcgacacccggcacctgaacggcgaggaggacgccggcggtagggaagactcaatcctggtaaacggggcatgttctgaccagagttccgatagcccccccatactcgaggccattagaactcctgagattaggggccggagatctagcagtcggttgtcaaagagagaagtgagcagtctcctttcttacacacaggatctcaccggtgatggagacggcgaggatggagatggcagcgatacccctgtgatgcccaagctgttccgcgagactaggacacggtcagaaagccctgcttccctgagacggcgtgccacagccagcgctggaacgccttggcccagcccaccttcgtcttacctgacaattgatctgacagatgacacagaggacacccatggcaccccgcagtcatctagtaccccttatgccagactcgcccaggactcccagcagggcggaatggagtctccccaggtggaggccgacagcggggacggcgattcctcagagtaccaggatggcaaggagtttgggataggagacctggtgtggggaaaaattaaaggcttctcttggtggcccgctatggtggtcagttggaaagctacctcaaagaggcaggcaatgtctgggatgcgatgggtgcagtggtttggagacgggaagttttctgaggtatctgccgataaactggttgctttaggtctgttctctcagcatttcaacctggcgacctttaataagttagtgagctaccgcaaggcaatgtaccacgctcttgagcggaccaggcttgaggacgcacagttgaccactcagcccccgttaacaaccgcaccacatccaagcgctagccgtcaaatcgccattaccacagctaaaaccgaaggaatgaagatcagagcagaaaacaagtggttgcagatgctgcctactaccagggcggcttggaaagagaaacctagagtactgccaccctccctgtag

SEQ ID NO: 83433 - DNA, 999 bp, Artificial Sequence
  derived and/or modified sequence
atgaagggagatacacgacacttgaacggcgaagaggacgcagggggacgcgaggacagtatactggtcaatggcgcatgtagcgaccagagcagcgattcacccccaattctggaggccatccggactcctgaaatcagagggcgtcggtcctcttctcgactctccaaaagggaagtcagctccctgctatcctacacgcaggatctgacaggcgatggggacggagaggatggagatggcagcgatactccggttatgcccaaactattccgcgaaacaagaacacgctctgaatcaccagcaagtcttcgtcgcagggccactgcaagtgctggaacaccctggcccagtcccccttcttcctacttaactatcgacctgacagacgatacagaggacacgcacggcacaccccagagcagttcaacgccatatgctcgcttggcacaagatagtcagcaagggggtatggagagcccccaggtcgaagctgactccggcgatggtgattccagtgaataccaggacggcaaagagttcggtattggcgatctcgtgtggggaaaaataaagggcttttcttggtggcccgctatggttgtgtcttggaaagccacgtccaagcggcaggccatgagcggcatgagatgggtccagtggtttggggacggcaaattctctgaagtgtctgctgataagttggtggctctgggcctgttttcccagcacttcaatctggcaacttttaacaagctggtgagttatcgcaaagcaatgtaccacgctttggaaagaacaagactagaagacgcgcagttgaccacccaaccacccctcaccacagcccctcatccaagcgcctctaggcagatcgctatcacaacagccaaaaccgagggcatgaaaattagagcagagaacaaatggctgcagatgctacccaccacccgggcagcttggaaggagaagccacgagttctcccccctagcctatag

SEQ ID NO: 83434 - DNA, 999 bp, Artificial Sequence
  derived and/or modified sequence
atgaagggcgacaccagacacctgaacggcgaggaggacgccggcggcagagaggacagcatcctggtgaacggcgcctgcagcgaccagagcagcgacagcccccccatcctggaggccatcagaacccccgagatcagaggcagaagaagcagcagcagactgagcaagagagaggtgagcagcctgctgagctacacccaggacctgaccggcgacggcgacggcgaggacggcgacggcagcgacacccccgtgatgcccaagctgttcagagagaccagaaccagaagcgagagccccgccagcctgagaagaagagccaccgccagcgccggcaccccctggcccagcccccccagcagctacctgaccatcgacctgaccgacgacaccgaggacacccacggcaccccccagagcagcagcaccccctacgccagactggcccaggacagccagcagggcggcatggagagcccccaggtggaggccgacagcggcgacggcgacagcagcgagtaccaggacggcaaggagttcggcatcggcgacctggtgtggggcaagatcaagggcttcagctggtggcccgccatggtggtgagctggaaggccaccagcaagagacaggccatgagcggcatgagatgggtgcagtggttcggcgacggcaagttcagcgaggtgagcgccgacaagctggtggccctgggcctgttcagccagcacttcaacctggccaccttcaacaagctggtgagctacagaaaggccatgtaccacgccctggagagaaccagactggaggacgcccagctgaccacccagccccccctgaccaccgccccccaccccagcgccagcagacagatcgccatcaccaccgccaagaccgagggcatgaagatcagagccgagaacaagtggctgcagatgctgcccaccaccagagccgcctggaaggagaagcccagagtgctgccccccagcctgtag

SEQ ID NO: 83435 - protein, 694 aa, Artificial Sequence
  derived and/or modified sequence
MKGDTRHLNGEEDAGGREDSILVNGACSDQSSDSPPILEAIRTPEIRGRRSSSRLSKREVSSLLSYTQSLRRRATASAGTPWPSPPSSYLTIDLTDDTEDTHGTPQSSSTPYARLAQDSQQGGMESPQVEADSGDGDSSEYQDGKEFGIGDLVWGKIKGFSWWPAMVVSWKATSKRQAMSGMRWVQWFGDGKFSEVSADKLVALGLFSQHFNLATFNKLVSYRKAMYHALEKARVRAGKTFPSSPGDSLEDQLKPMLEWAHGGFKPTGIEGLKPNNTQPENKTRRRTADDSATSDYCPAPKRLKTNCYNNGKDRGDEDQSREQMASDVANNKSSLEDGCLSCGRKNPVSFHPLFEGGLCQTCRDRFLELFYMYDDDGYQSYCTVCCEGRELLLCSNTSCCRCFCVECLEVLVGTGTAAEAKLQEPWSCYMCLPQRCHGVLRRRKDWNVRLQAFFTSDTGLEYEAPKLYPAIPAARRRPIRVLSLFDGIATGYLVLKELGIKVGKYVASEVCEESIAVGTVKHEGNIKYVNDVRNITKKNIEEWGPFDLVIGGSPCNDLSNVNPARKGLYEGTGRLFFEFYHLLNYSRPKEGDDRPFFWMFENVVAMKVGDKRDISRFLECNPVMIDAIKVSAAHRARYFWGNLPGMNRIFGFPVHYTDVSNMGRGARQKLLGRSWSVPVIRHLFAPLKDYFACE

SEQ ID NO: 83436 - DNA, 2085 bp, Artificial Sequence
  derived and/or modified sequence
atgaagggcgataccaggcacctgaacggagaagaggatgccgggggtcgagaggactccattttggtaaacggtgcttgctccgaccagtcctctgactctccccctatactggaagccatccgaacgccagaaattcgtggccggcgctccagctctaggttgtccaaaagggaggtgtcgtcccttctctcctacactcagtctctcagaagaagagcgaccgcttccgctgggactccatggcccagcccgccatcatcttacctgacaatcgacctcacagacgatactgaggacacccacggcacaccccagtctagttctaccccctacgctaggttggctcaggactctcagcagggcggcatggaaagtccacaggtcgaggccgactccggcgacggagactcttcagagtatcaggacggaaaagaatttggaatcggggatctggtgtggggaaaaatcaaagggttttcctggtggcccgctatggtggttagttggaaggccactagcaaacgtcaagctatgagcggcatgcgctgggtccagtggtttggtgacgggaagttcagcgaggtcagcgcggacaaactcgtggccctgggcttatttagtcagcactttaaccttgctacatttaataagctggtcagttaccgcaaggctatgtaccacgccctagaaaaagcccgggttcgggcgggaaagacctttcctagctctcccggcgactctctggaggaccagctgaagcctatgctggagtgggcacacggtggtttcaagcccaccggcatagagggactcaagcctaataatacccagcctgagaataaaacccgacggaggaccgctgacgacagcgcaacaagcgattattgtcccgcgcctaagcgcctgaagaccaattgttacaataacggaaaggataggggcgacgaagatcaatccagagagcagatggcatccgatgtggccaacaacaaatcttccctcgaggacgggtgcttatcatgtggtcggaaaaacccagtgagtttccatcccctgtttgagggtggtctgtgccagacttgtcgggataggttcctagagctcttctacatgtacgacgacgacgggtaccagtcttattgcacagtgtgctgcgaggggcgggaacttttgttatgtagcaatacttcctgctgtaggtgcttctgtgtggaatgtttagaggtcctggtcggcactggcaccgcagctgaggctaagctgcaggaaccgtggtcttgttatatgtgcctgcctcagcggtgtcacggtgtacttcggaggagaaaggattggaatgtgcggttacaggcctttttcacgagtgataccggcctcgagtatgaagccccaaagttatatccagcgattccggctgccaggcgcaggcctatcagagttctgtcgctgttcgatgggattgctacggggtacctggttctcaaggaactggggatcaaagtcggaaagtacgtcgcctctgaagtgtgcgaggaaagcatagccgtgggcaccgttaaacacgagggaaatatcaaatacgtaaacgacgttagaaatattacaaagaagaatatcgaagaatggggccctttcgacctggttatcggcggctcaccttgtaacgacctgagcaacgttaaccctgcgaggaagggcctgtatgagggaactggacgtctgttctttgaattttatcacctgctgaattactcgagacctaaagagggggacgataggccatttttctggatgttcgagaatgtggtggcaatgaaagtcggcgataagagggacataagtagatttcttgaatgcaatcccgtcatgatcgacgccattaaagtcagcgccgctcacagagcccggtatttttgggggaacctgcctggcatgaaccggatttttggctttcccgttcactataccgacgtcagtaacatgggccgcggggccaggcagaagttactgggaagatcctggtctgtcccagtgatcagacaccttttcgcaccccttaaggattatttcgcctgcgaatag

SEQ ID NO: 83437 - DNA, 2085 bp, Artificial Sequence
  derived and/or modified sequence
atgaagggggacaccaggcacctgaatggagaggaggatgctgggggccgggaggacagcatcctggtgaatggagcctgcagcgaccagagcagtgacagcccccccatcctggaggccatccgcaccccagagatccggggcagaagaagcagcagccggctgagcaagcgggaggtgagcagcctgctgagctacacccagagcctgcggcggcgggccacagccagcgctggcaccccctggcccagcccccccagcagctacctgaccatcgacctgacagatgacacagaggacacccacggcaccccccagagcagcagcaccccctatgcccggctggcccaggacagccagcagggcggcatggagagcccccaggtggaggccgacagcggagatggagacagcagcgagtaccaggacggcaaggagtttggaattggagacctggtgtggggcaagatcaagggcttctcctggtggccagccatggtggtgtcctggaaggccaccagcaagaggcaggccatgagcggcatgcgctgggtgcagtggtttggagatggcaagttcagcgaggtgtctgctgacaagctggtggccctgggcctcttcagccagcacttcaacctggccaccttcaacaagctggtgtcctacaggaaggccatgtaccacgccctggagaaggcccgggtgcgggccggcaagaccttccccagcagccctggggacagcctggaggaccagctgaagcccatgctggagtgggcccatggaggcttcaagcccactggaattgagggcctgaagcccaacaacacccagcctgagaacaagaccaggagaagaacagcagatgattctgccaccagtgactactgcccagcccccaagaggctgaagaccaactgctacaacaacgggaaggacagaggagatgaggaccagagccgggagcagatggccagtgatgtggccaacaacaagagcagcctggaggatggctgcctgagctgtggcaggaagaaccctgtgtccttccaccccctgtttgagggcggcctgtgccagacctgccgggaccgcttcctggagctgttctacatgtatgatgatgatggctaccagagctactgcaccgtgtgctgtgagggccgggagctgctgctgtgcagcaacaccagctgctgccgctgcttctgtgtggagtgcctggaggtgctggtgggcaccggcacagctgctgaggccaagctgcaggagccctggagctgctacatgtgcctgccccagcgctgccacggcgtgctgcggcggaggaaggactggaatgtgcggctgcaggccttcttcaccagtgacaccggcctggagtatgaggcccccaagctgtacccagccatcccagctgcccggcggcggcccatccgggtgctgagcctgtttgatggcatcgccaccggctacctggtgctgaaggagctgggcatcaaggtgggcaagtatgtggccagcgaggtgtgtgaggagagcattgctgtgggcaccgtgaagcatgagggcaacatcaagtatgtgaatgatgtgaggaacatcaccaagaagaacatcgaggagtggggcccctttgacctggtgattggaggcagcccctgcaatgacctgagcaatgtgaacccagccaggaagggcctgtatgagggcaccggccgcctcttctttgagttctaccacctgctgaactacagccggcccaaggagggagatgaccggcccttcttctggatgtttgaaaatgtggtggccatgaaggtgggggacaagagggacatcagccgcttcctggagtgcaaccctgtgatgattgatgccatcaaggtgtctgctgcccaccgggcccgctacttctggggcaacctgcccggcatgaaccgcatcttcggcttccctgtgcactacacagatgtgagcaacatgggccgcggggcccggcagaagctgctgggccgctcctggagcgtgcctgtgatccgccacctgtttgcccccctgaaggactactttgcctgtgagtag

SEQ ID NO: 83438 - DNA, 2085 bp, Artificial Sequence
  derived and/or modified sequence
atgaagggcgacacccggcacctgaacggcgaggaggacgccggcggacgagaggactctatacttgttaatggcgcctgctctgatcaatcatcagacagccccccaatcctcgaggccattagaacgcccgaaatccgaggccgacgttcgagtagtcgcctaagcaaacgcgaagtgagttcactgctgtcttacacacaatcactaaggcgccgggctactgcaagtgccggcacgccatggccttctcctccttcttcataccttacaatagatctgactgatgacaccgaggatacacacgggacgccgcagagtagttcaaccccctacgcgcgactggctcaggacagtcagcaggggggcatggagtcccctcaggttgaagcggactctggcgacggcgattctagtgaataccaggacgggaaagaatttggcatcggcgacctggtgtggggaaaaatcaaggggtttagctggtggccagccatggtcgtgtcttggaaagccacgtcaaagaggcaagcgatgtccggcatgcgctgggtccagtggttcggggatggaaaattttcagaggtgtctgcagacaagctggtcgctctgggactgttttcacagcatttcaatctagcaactttcaataaactcgtttcttaccggaaagccatgtaccacgcactcgaaaaagctcgtgtgcgcgccggaaagaccttcccctccagtcccggtgattccttggaagaccaactgaagccaatgctcgagtgggctcacggaggtttcaagcccaccggaatcgaaggattgaagccaaacaacacacagccagaaaacaagaccaggcggagaaccgccgatgattcagcaacttcagactactgccccgccccaaagcgacttaagacgaattgttacaacaacgggaaagataggggcgacgaagatcagagtcgcgaacagatggcgagcgacgtcgccaacaataagtcaagcctggaagacggttgcttgagctgcggaaggaaaaatcctgtctcttttcacccattgtttgaggggggtctctgccagacatgccgtgatcggtttctagaattgttttacatgtacgacgacgacggatatcaatcctactgtactgtgtgctgcgaaggtagggagctcttgctctgctctaatacttcttgctgtcgatgcttctgcgtggagtgtctggaggttctggtgggtaccgggacagccgcagaagccaaactgcaggaaccctggagttgctatatgtgtctacctcagagatgtcatggagtcttgaggagacgtaaagattggaacgtacgtctgcaggcatttttcacttctgacacggggcttgaatacgaggccccaaagctgtaccctgcaataccagcagcccggcggaggcccattcgagtacttagcctctttgacggaattgccaccgggtacctggtgttgaaggagttggggataaaagtgggaaaatacgttgcatctgaagtctgcgaggagtctatagctgtcggtaccgtcaaacacgaagggaacattaagtatgtgaacgatgtccgtaatatcacgaagaaaaatatcgaggaatggggacccttcgatctggtcatcggcggttccccatgtaatgacctttccaatgttaaccctgctcgaaagggcctgtatgaggggacaggcagactgttttttgaattctaccacctcctaaattacagccgccctaaagaaggcgacgatcggccgttcttttggatgttcgagaacgtggtcgcaatgaaggtgggagataaaagggacatcagtcgcttcctagagtgcaatccagtaatgattgatgctataaaagtctccgcggcgcaccgagcccggtacttctggggcaacctccctggaatgaataggatctttggatttccggttcactacacagacgtaagcaacatgggccggggcgctaggcagaagctgctcggacgttcatggagcgtgccagtgattcgtcacctctttgccccgttgaaggactacttcgcttgcgaatag

SEQ ID NO: 83439 - DNA, 2085 bp, Artificial Sequence
  derived and/or modified sequence
atgaaaggtgatacccgccatttaaacggggaagaagatgcgggaggcagggaagattccatcctggtaaatggggcttgctccgaccaatcctccgactcacctccgattctcgaggccataaggactcctgagatcaggggccgacgctcctccagtcgcttgtcgaagagagaagtttcttcactcctgtcatacacgcaatccctgcgaagacgcgctaccgctagtgctggtaccccctggccatctccgccaagctcttatctgaccatcgaccttacagacgacacggaggacacccacggaaccccccaatcctcttccactccctacgccaggctggcccaggatagccagcagggcggtatggagagcccccaggtcgaggccgactcaggagacggagatagcagcgagtaccaggatggaaaagagttcggtatcggggatttggtttggggtaagattaaaggcttcagttggtggcctgcaatggtggtgtcatggaaagctacgtccaagagacaggcgatgtccggaatgaggtgggttcagtggttcggagacgggaagttctccgaggtctccgctgataaacttgtggcgcttggcctgtttagccagcacttcaatctcgcaactttcaacaaattagtgagctaccgcaaggcaatgtaccacgcgctggagaaggccagggtgcgtgctggcaagaccttccccagctcacctggcgacagcctagaggaccaactaaaacctatgctggaatgggcgcacgggggttttaaacccacagggatcgaagggcttaagcccaacaacacccaaccggaaaacaagacccgacggaggaccgcagacgatagcgcaacgagcgactattgccctgccccaaagcgcctcaaaacaaattgctacaacaatgggaaagaccgtggggacgaggaccagagtagagagcagatggccagcgatgtagcaaataataagtccagtctggaggacgggtgcctgtcctgcggtcgcaagaacccggtttcctttcaccccctctttgagggcggattatgccagacttgtcgagatcgattcttggaactcttttacatgtacgacgacgacgggtatcagtcttattgcactgtgtgctgtgagggcagagaactacttctgtgcagcaacacttcatgttgcaggtgcttctgcgtggagtgtttagaagtgctggttggtaccggcacagctgccgaagctaagctgcaagaaccttggtcctgctatatgtgcctgcctcagcgctgtcacggggtgctgcggaggaggaaagattggaacgtcagattgcaggctttttttacctccgatactggattagagtacgaggcgccaaagctataccctgcgatacctgccgctaggaggagacccatcagggttctcagcctcttcgacgggattgcaacagggtacctggtcttgaaagaactgggaatcaaggttggcaaatatgtggcaagcgaggtttgcgaggaaagcattgccgtggggacagtgaaacatgagggaaacattaaatatgtgaatgatgtacgcaacatcacgaagaagaacatcgaggagtgggggccatttgacttggtaatcggcggaagcccatgtaacgacctgtctaacgtgaaccctgctaggaaagggctgtatgaagggaccggccgtctgttctttgagttttatcatttactgaactactcacgaccaaaggagggagatgacagaccatttttttggatgtttgaaaatgtggtggctatgaaggtgggcgataagcgggacatatcccggttcctggaatgcaatcccgtaatgatcgatgccatcaaggttagtgccgctcaccgggctcgctacttttggggcaacctcccaggaatgaatcgcatcttcgggtttccggttcattacacagatgtgtctaatatgggccgtggtgcacgtcagaaactgctggggagatcatggagtgttcctgtaatcagacatctgtttgcccctctgaaagactactttgcctgcgaatag

SEQ ID NO: 83440 - DNA, 2085 bp, Artificial Sequence
  derived and/or modified sequence
atgaagggcgacaccagacacctgaacggcgaggaggacgccggcggcagagaggacagcatcctggtgaacggcgcctgcagcgaccagagcagcgacagcccccccatcctggaggccatcagaacccccgagatcagaggcagaagaagcagcagcagactgagcaagagagaggtgagcagcctgctgagctacacccagagcctgagaagaagagccaccgccagcgccggcaccccctggcccagcccccccagcagctacctgaccatcgacctgaccgacgacaccgaggacacccacggcaccccccagagcagcagcaccccctacgccagactggcccaggacagccagcagggcggcatggagagcccccaggtggaggccgacagcggcgacggcgacagcagcgagtaccaggacggcaaggagttcggcatcggcgacctggtgtggggcaagatcaagggcttcagctggtggcccgccatggtggtgagctggaaggccaccagcaagagacaggccatgagcggcatgagatgggtgcagtggttcggcgacggcaagttcagcgaggtgagcgccgacaagctggtggccctgggcctgttcagccagcacttcaacctggccaccttcaacaagctggtgagctacagaaaggccatgtaccacgccctggagaaggccagagtgagagccggcaagaccttccccagcagccccggcgacagcctggaggaccagctgaagcccatgctggagtgggcccacggcggcttcaagcccaccggcatcgagggcctgaagcccaacaacacccagcccgagaacaagaccagaagaagaaccgccgacgacagcgccaccagcgactactgccccgcccccaagagactgaagaccaactgctacaacaacggcaaggacagaggcgacgaggaccagagcagagagcagatggccagcgacgtggccaacaacaagagcagcctggaggacggctgcctgagctgcggcagaaagaaccccgtgagcttccaccccctgttcgagggcggcctgtgccagacctgcagagacagattcctggagctgttctacatgtacgacgacgacggctaccagagctactgcaccgtgtgctgcgagggcagagagctgctgctgtgcagcaacaccagctgctgcagatgcttctgcgtggagtgcctggaggtgctggtgggcaccggcaccgccgccgaggccaagctgcaggagccctggagctgctacatgtgcctgccccagagatgccacggcgtgctgagaagaagaaaggactggaacgtgagactgcaggccttcttcaccagcgacaccggcctggagtacgaggcccccaagctgtaccccgccatccccgccgccagaagaagacccatcagagtgctgagcctgttcgacggcatcgccaccggctacctggtgctgaaggagctgggcatcaaggtgggcaagtacgtggccagcgaggtgtgcgaggagagcatcgccgtgggcaccgtgaagcacgagggcaacatcaagtacgtgaacgacgtgagaaacatcaccaagaagaacatcgaggagtggggccccttcgacctggtgatcggcggcagcccctgcaacgacctgagcaacgtgaaccccgccagaaagggcctgtacgagggcaccggcagactgttcttcgagttctaccacctgctgaactacagcagacccaaggagggcgacgacagacccttcttctggatgttcgagaacgtggtggccatgaaggtgggcgacaagagagacatcagcagattcctggagtgcaaccccgtgatgatcgacgccatcaaggtgagcgccgcccacagagccagatacttctggggcaacctgcccggcatgaacagaatcttcggcttccccgtgcactacaccgacgtgagcaacatgggcagaggcgccagacagaagctgctgggcagaagctggagcgtgcccgtgatcagacacctgttcgcccccctgaaggactacttcgcctgcgagtag

SEQ ID NO: 83441 - DNA, 3634 bp, Artificial Sequence
  derived and/or modified sequence
gcgccctgcacggccgccagccggcctcccgccagccagccccgacccgcggctccgccgcccagccgcgccccagccagccctgcggcaggaaagcatgaagggagacaccaggcatctcaatggagaggaggacgccggcgggagggaagactcgatcctcgtcaacggggcctgcagcgaccagtcctccgactcgcccccaatcctggaggctatccgcaccccggagatcagaggccgaagatcaagctcgcgactctccaagagggaggtgtccagtctgctaagctacacacagtccctgagacggcgggcaacagcatcggcaggaacgccatggccgtcccctcccagctcttaccttaccatcgacctcacagacgacacagaggacacacatgggacgccccagagcagcagtaccccctacgcccgcctagcccaggacagccagcaggggggcatggagtccccgcaggtggaggcagacagtggagatggagacagttcagagtatcaggatgggaaggagtttggaataggggacctcgtgtggggaaagatcaagggcttctcctggtggcccgccatggtggtgtcttggaaggccacctccaagcgacaggctatgtctggcatgcggtgggtccagtggtttggcgatggcaagttctccgaggtctctgcagacaaactggtggcactggggctgttcagccagcactttaatttggccaccttcaataagctcgtctcctatcgaaaagccatgtaccatgctctggagaaagctagggtgcgagctggcaagaccttccccagcagccctggagactcattggaggaccagctgaagcccatgttggagtgggcccacgggggcttcaagcccactgggatcgagggcctcaaacccaacaacacgcaaccagagaacaagactcgaagacgcacagctgacgactcagccacctctgactactgccccgcacccaagcgcctcaagacaaattgctataacaacggcaaagaccgaggggatgaagatcagagccgagaacaaatggcttcagatgttgccaacaacaagagcagcctggaagatggctgtttgtcttgtggcaggaaaaaccccgtgtccttccaccctctctttgagggggggctctgtcagacatgccgggatcgcttccttgagctgttttacatgtatgatgacgatggctatcagtcttactgcactgtgtgctgcgagggccgagagctgctgctttgcagcaacacgagctgctgccggtgtttctgtgtggagtgcctggaggtgctggtgggcacaggcacagcggccgaggccaagcttcaggagccctggagctgttacatgtgtctcccgcagcgctgtcatggcgtcctgcggcgccggaaggactggaacgtgcgcctgcaggccttcttcaccagtgacacggggcttgaatatgaagcccccaagctgtaccctgccattcccgcagcccgaaggcggcccattcgagtcctgtcattgtttgatggcatcgcgacaggctacctagtcctcaaagagttgggcataaaggtaggaaagtacgtcgcttctgaagtgtgtgaggagtccattgctgttggaaccgtgaagcacgaggggaatatcaaatacgtgaacgacgtgaggaacatcacaaagaaaaatattgaagaatggggcccatttgacttggtgattggcggaagcccatgcaacgatctctcaaatgtgaatccagccaggaaaggcctgtatgagggtacaggccggctcttcttcgaattttaccacctgctgaattactcacgccccaaggagggtgatgaccggccgttcttctggatgtttgagaatgttgtagccatgaaggttggcgacaagagggacatctcacggttcctggagtgtaatccagtgatgattgatgccatcaaagtttctgctgctcacagggcccgatacttctggggcaacctacccgggatgaacaggatctttggctttcctgtgcactacacagacgtgtccaacatgggccgtggtgcccgccagaagctgctgggaaggtcctggagcgtgcctgtcatccgacacctcttcgcccctctgaaggactactttgcatgtgaatagttccagccaggccccaagcccactggggtgtgtggcagagccaggacccaggaggtgtgattcctgaaggcatccccaggccctgctcttcctcagctgtgtgggtcataccgtgtacctcagttccctcttgctcagtgggggcagagccacctgactcttgcaggggtagcctgaggtgccgcctccttgtgcacaaatcagacctggctgcttggagcagcctaacacggtgctcattttttcttctcctaaaactttaaaacttgaagtaggtagcaacgtggctttttttttttcccttcctgggtctaccactcagagaaacaatggctaagataccaaaaccacagtgccgacagctctccaatactcaggttaatgctgaaaaatcatccaagacagttattgcaagagtttaatttttgaaaactggctactgctctgtgtttacagacgtgtgcagttgtaggcatgtagctacaggacatttttaagggcccaggatcgttttttcccagggcaagcagaagagaaaatgttgtatatgtcttttacccggcacattccccttgcctaaatacaagggctggagtctgcacgggacctattagagtattttccacaatgatgatgatttcagcagggatgacgtcatcatcacattcagggctattttttcccccacaaacccaagggcaggggccactcttagctaaatccctccccgtgactgcaatagaaccctctggggagctcaggaaggggtgtgctgagttctataatataagctgccatatattttgtagacaagtatggctcctccatatctccctcttccctaggagaggagtgtgaagcaaggagcttagataagacaccccctcaaacccattccctctccaggagacctaccctccacaggcacaggtccccagatgagaagtctgctaccctcatttctcatctttttactaaactcagaggcagtgacagcagtcagggacagacatacatttctcataccttccccacatctgagagatgacagggaaaactgcaaagctcggtgctccctttggagattttttaatccttttttattccataagaagtcgtttttagggagaacgggaattcagacaagctgcatttcagaaatgctgtcataatggtttttaacaccttttactcttcttactggtgctattttgtagaataaggaacaacgttgacaagttttgtggggctttttatacactttttaaaatctcaaacttctatttttatgtttaacgttttcattaaaattttttttgtaactggagccacgacgtaacaaatatggggaaaaaactgtgccttgtttcaacagtttttgctaatttttaggctgaaagatgacggatgcctagagtttaccttatgtttaattaaaatcagtatttgtct

SEQ ID NO: 83442 - protein, 200 aa, Artificial Sequence
  derived and/or modified sequence
MALLLCFVLLCGVVDFARSLSITTPEEMIEKAKGETAYLPCKFTLSPEDQGPLDIEWLISPADNQKVDQVIILYSGDKIYDDYYPDLKGRVHFTSNDLKSGDASINVTNLQLSDIGTYQCKVKKAPGVANKKIHLVVLGKMCHLQRAVRPLPEATSAVIIHPWGPCLLPTWKDIPRLSITKYQVKTLNALLRVRLSHLLR

SEQ ID NO: 83443 - DNA, 603 bp, Artificial Sequence
  derived and/or modified sequence
atggccttgctgctctgcttcgtactgctgtgtggcgttgtggattttgcccggagtctctccatcacaactcccgaagagatgatcgagaaagctaagggtgagacagcctacctgccatgcaaatttaccctgagtcccgaggaccagggtcctctggatattgaatggcttatctctccagccgacaatcaaaaagtggaccaggttatcatcttgtactcaggagataagatctatgatgactattatcccgatttgaaggggagggtgcatttcacctctaacgatctgaaatcgggagacgctagcatcaacgtgaccaacctccagctgtctgacattggcacctaccagtgcaaggtgaagaaggcaccaggagtcgccaataagaagattcatttggtcgttttgggtaaaatgtgtcatttgcagcgggccgtacgacctctgccggaagccaccagtgccgtaattatccatccttggggtccctgcctgttgccgacttggaaagacattccccgcttatccatcacaaagtatcaggtgaaaaccctgaacgccctgctgagggtccgcctgtcccaccttttgaggtag

SEQ ID NO: 83444 - DNA, 603 bp, Artificial Sequence
  derived and/or modified sequence
atggccctgctgctgtgctttgtgctgctgtgtggggtggtggactttgcccggagcctgagcatcaccaccccagaggagatgattgagaaggccaagggggagacagcctacctgccctgcaagttcaccctgagccctgaggaccagggccccctggacatcgagtggctgatcagccctgctgacaaccagaaggtggaccaggtgatcatcctgtacagcggggacaagatctatgatgactactacccagacctgaagggccgggtgcacttcaccagcaatgacctgaagtctggagatgccagcatcaacgtgaccaacctgcagctgagtgacatcggcacctaccagtgcaaggtgaagaaggcccctggggtggccaacaagaagatccacctggtggtgctgggcaagatgtgccacctgcagagagctgtgcggcccctgcctgaggccaccagcgctgtgatcatccacccctggggcccctgcctgctgcccacctggaaggacatcccccggctgagcatcaccaagtaccaggtgaagaccctgaatgccctgctgcgggtgcggctgagccacctgctgaggtag

SEQ ID NO: 83445 - DNA, 603 bp, Artificial Sequence
  derived and/or modified sequence
atggccctgctgctgtgcttcgtgctgctgtgcggcgtggtggactttgcgaggtccctatccatcactacacctgaagaaatgatagaaaaggcaaagggagagaccgcctatttgccctgcaaattcacactatcgcccgaagaccagggaccccttgacattgagtggctgattagtcctgccgataaccaaaaggtcgaccaagtgattatcctgtacagtggtgacaaaatctacgatgattactacccggatttgaaaggcagggtccacttcacatctaacgatttgaaatccggcgacgccagcatcaacgtgaccaatctgcaattgtccgacataggcacataccagtgtaaggtgaagaaagcccctggggtggcgaataagaagatacatctagtcgtcttaggcaagatgtgtcatctgcagcgggcagtccgcccactcccggaggccaccagcgccgtgataatccacccttgggggccatgcctgctccccacctggaaagacatccctcgactgagtatcaccaaatatcaggttaagactctcaatgcactgctccgagtgagactctcccatttacttaggtag

SEQ ID NO: 83446 - DNA, 603 bp, Artificial Sequence
  derived and/or modified sequence
atggccctgctcctgtgtttcgtgttactctgtggggtggtggacttcgctaggtctttgtccatcacaaccccagaggaaatgatcgagaaggcaaaaggtgagacggcatacctcccctgtaaatttactctgtctccagaagatcaggggccattggacatagaatggctaatttctcctgctgacaatcagaaggttgaccaggtgatcatactatattctggggacaaaatttatgatgattactaccccgatttgaaggggcgtgtgcacttcactagcaacgatctgaagtcaggcgatgccagtatcaacgtgactaatttgcagctgtccgacattgggacttatcagtgtaaagtcaaaaaagcaccgggagtcgctaacaagaagatccatctagtggtacttggcaagatgtgtcatctgcaaagagctgtgagacctctccccgaggccacctctgccgtcatcattcacccatggggcccttgcttgctgcctacatggaaagacattcccagactctccatcactaagtatcaagttaagactctgaacgccctgctgagagtccgcctcagtcacctgctcagatag

SEQ ID NO: 83447 - DNA, 603 bp, Artificial Sequence
  derived and/or modified sequence
atggcgctcctgctgtgcttcgtgctcctgtgcggagtagtggatttcgccagaagtttgagtatcactactcctgaagagatgattgaaaaagccaaaggggaaactgcctatctgccatgcaaatttacgcttagtcccgaagaccagggaccgctggacatcgagtggctgatatcaccagctgataatcagaaggtggatcaagtgattattttatattctggagacaaaatttatgatgactactatccagatctgaaaggccgagtacattttacgagtaatgatctcaaatctggtgatgcatcaataaatgtaacgaatttacaactgtcagatattggcacatatcagtgcaaagtgaaaaaagctcctggtgttgcaaataagaagattcatctggtagttcttgggaagatgtgccacctccaaagagccgtacgtccactgccagaagctacatcggcagtaatcattcatccctggggtccatgtctccttccaacatggaaggatattccaagactcagtataaccaagtaccaagtgaagactttgaacgcactcctcagagtccgactctcccacctgctaaggtag

SEQ ID NO: 83448 - DNA, 603 bp, Artificial Sequence
  derived and/or modified sequence
atggccctgctgctgtgcttcgtgctgctgtgcggcgtggtggacttcgccagaagcctgagcatcaccacccccgaggagatgatcgagaaggccaagggcgagaccgcctacctgccctgcaagttcaccctgagccccgaggaccagggccccctggacatcgagtggctgatcagccccgccgacaaccagaaggtggaccaggtgatcatcctgtacagcggcgacaagatctacgacgactactaccccgacctgaagggcagagtgcacttcaccagcaacgacctgaagagcggcgacgccagcatcaacgtgaccaacctgcagctgagcgacatcggcacctaccagtgcaaggtgaagaaggcccccggcgtggccaacaagaagatccacctggtggtgctgggcaagatgtgccacctgcagagagccgtgagacccctgcccgaggccaccagcgccgtgatcatccacccctggggcccctgcctgctgcccacctggaaggacatccccagactgagcatcaccaagtaccaggtgaagaccctgaacgccctgctgagagtgagactgagccacctgctgagatag

SEQ ID NO: 83449 - protein, 89 aa, Artificial Sequence
  derived and/or modified sequence
MALLLCFVLLCGVVDFARSLSITTPEEMIEKAKGETAYLPCKFTLSPEDQGPLDIEWLISPADNQKVDQVGRCATSKEPYVHCQKLHRQ

SEQ ID NO: 83450 - DNA, 270 bp, Artificial Sequence
  derived and/or modified sequence
atggcgctgctgctgtgttttgtcctgttgtgcggagtggttgacttcgccaggagtcttagcattacaactcctgaggaaatgatagagaaggcgaaaggggagaccgcttatctgccatgcaagtttactctcagcccagaggaccagggccctctggatattgagtggctgatttctcctgctgacaaccagaaggtcgatcaagtcggcaggtgcgctacatcaaaagagccttacgtgcattgtcaaaaactacatcggcagtag

SEQ ID NO: 83451 - DNA, 270 bp, Artificial Sequence
  derived and/or modified sequence
atggccctgctgctgtgctttgtgctgctgtgtggggtggtggactttgcccggagcctgagcatcaccaccccagaggagatgattgagaaggccaagggggagacagcctacctgccctgcaagttcaccctgagccctgaggaccagggccccctggacatcgagtggctgatcagccctgctgacaaccagaaggtggaccaggtgggccgctgtgccaccagcaaggagccctacgtgcactgccagaagctgcaccggcagtag

SEQ ID NO: 83452 - DNA, 270 bp, Artificial Sequence
  derived and/or modified sequence
atggccctgctgctgtgcttcgtgctgctgtgcggcgtggtggacttcgctcggtccttgagtatcacaacaccggaagaaatgattgagaaagcaaagggggaaacagcctatctcccgtgtaagtttaccctgagccccgaagaccaggggcctctcgacattgagtggttgattagtcccgccgataatcagaaggtggaccaggtgggtcggtgcgccacctccaaagagccctatgttcactgccagaaattgcacagacagtag

SEQ ID NO: 83453 - DNA, 270 bp, Artificial Sequence
  derived and/or modified sequence
atggccctgctgctctgctttgtcctactttgtggagttgtggactttgcgaggtctctcagcatcacaacccctgaggagatgatagagaaggccaagggagaaacagcctatctgccttgtaaatttaccctatctccagaggatcaaggtcctctcgacatcgaatggctcatttccccagccgacaaccaaaaagtggatcaagtgggacggtgcgctacaagtaaggagccctatgtacactgtcaaaagctccatcgacagtag

SEQ ID NO: 83454 - DNA, 270 bp, Artificial Sequence
  derived and/or modified sequence
atggcgctcctgctgtgcttcgtgctcctgtgcggagtagtggatttcgccagaagtttgagtatcactactcctgaagagatgattgaaaaagccaaaggggaaactgcctatctgccatgcaaatttacgcttagtcccgaagaccagggaccgctggacatcgagtggctgatatcaccagctgataatcagaaggtggatcaagtgggaagatgtgccacctccaaagagccgtacgtccactgccagaagctacatcggcagtaa

SEQ ID NO: 83455 - DNA, 270 bp, Artificial Sequence
  derived and/or modified sequence
atggccctgctgctgtgcttcgtgctgctgtgcggcgtggtggacttcgccagaagcctgagcatcaccacccccgaggagatgatcgagaaggccaagggcgagaccgcctacctgccctgcaagttcaccctgagccccgaggaccagggccccctggacatcgagtggctgatcagccccgccgacaaccagaaggtggaccaggtgggcagatgcgccaccagcaaggagccctacgtgcactgccagaagctgcacagacagtag

SEQ ID NO: 83456 - protein, 352 aa, Artificial Sequence
  derived and/or modified sequence
MALLLCFVLLCGVVDFARSLSITTPEEMIEKAKGETAYLPCKFTLSPEDQGPLDIEWLISPADNQKVDQVIILYSGDKIYDDYYPDLKGRVHFTSNDLKSGDASINVTNLQLSDIGTYQCKVKKAPGVANKKIHLVVLVKPSGARCYVDGSEEIGSDFKIKCEPKEGSLPLQYEWQKLSDSQKMPTSWLAEMTSSVISVKNASSEYSGTYSCTVRNRVGSDQCLLRLNVVPPSNKAGLIAGAIIGTLLALALIGLIIFCCRKKRREEKYEKEVHHDIREDVPPPKSRTSTARSYIGSNHSSLGSMSPSNMEGYSKTQYNQVPSEDFERTPQSPTLPPAKFKYPYKTDGITVV

SEQ ID NO: 83457 - DNA, 1059 bp, Artificial Sequence
  derived and/or modified sequence
atggcccttctgctctgtttcgtgctgctgtgcggagtggtggattttgcccggtcactaagcatcacgactccagaagagatgatcgagaaggccaagggtgagacagcatacctgccatgcaagtttaccttgtcccccgaggatcagggcccgttagatatcgagtggttgatctccccggctgataaccaaaaagtggatcaggtgattatcctttatagcggtgataagatttatgacgactactatcctgatctcaagggtagggtgcattttacatcaaacgacctgaaatccggtgatgcctctattaacgtgacaaacctgcagctttcggacattggcacttaccagtgtaaggtcaaaaaggcccctggcgttgccaacaaaaagatacatcttgtagtccttgtgaagccctcaggggcccggtgctatgtggatggatcagaggagatcggttccgactttaagattaaatgcgagccgaaggagggctcgttgccactgcagtacgaatggcaaaagttgtccgattcccagaagatgccgacctcttggttggccgagatgacctccagtgtgatatcagtaaagaacgcctcaagcgagtactccggtacatattcatgcaccgtccgcaaccgcgtcggctcagatcagtgtctgttacgcctgaacgttgtgccaccttccaataaggctgggctgatcgcaggcgcgattattggcacactcctggcgctggcacttataggcctgataattttctgttgcaggaagaaacgacgggaggagaaatatgagaaagaagtccatcatgatatcagggaggacgttccgcctcccaaatccaggaccagcactgccaggagctacattggctctaaccacagctcccttgggagcatgtcgccctcgaatatggaaggttacagcaagacacagtacaatcaggtcccaagtgaggatttcgagcgcacaccgcagtctcccactctgccacccgccaaattcaagtacccttacaaaactgatggtatcaccgttgtgtag

SEQ ID NO: 83458 - DNA, 1059 bp, Artificial Sequence
  derived and/or modified sequence
atggccctgctgctgtgctttgtgctgctgtgtggggtggtggactttgcccggagcctgagcatcaccaccccagaggagatgattgagaaggccaagggggagacagcctacctgccctgcaagttcaccctgagccctgaggaccagggccccctggacatcgagtggctgatcagccctgctgacaaccagaaggtggaccaggtgatcatcctgtacagcggggacaagatctatgatgactactacccagacctgaagggccgggtgcacttcaccagcaatgacctgaagtctggagatgccagcatcaacgtgaccaacctgcagctgagtgacatcggcacctaccagtgcaaggtgaagaaggcccctggggtggccaacaagaagatccacctggtggtgctggtgaagcccagcggggcccgctgctacgtggatggcagcgaggagatcggcagtgacttcaagatcaagtgtgagcccaaggagggcagcctgcccctgcagtatgagtggcagaagctgagtgacagccagaagatgcccacctcctggctggccgagatgaccagcagcgtcatctctgtgaagaatgccagcagcgagtacagcggcacctacagctgcaccgtgaggaacagagtgggcagtgaccagtgcctgctgcggctgaatgtggtgccccccagcaacaaggccggcctgattgctggggccatcatcggcaccctgctggccctggccctgattggcctcatcatcttctgctgcaggaagaagaggcgggaggagaagtatgagaaggaggtgcaccacgacatcagagaagatgtgcccccacccaagagcaggaccagcacagcccggagctacatcggcagcaaccacagcagcctgggctccatgagccccagcaacatggagggctacagcaagacccagtacaaccaggtgcccagcgaggactttgagaggaccccccagagccccaccctgcccccagccaagttcaagtacccctacaagacagatggcatcaccgtggtgtag

SEQ ID NO: 83459 - DNA, 1059 bp, Artificial Sequence
  derived and/or modified sequence
atggccctgctgctgtgcttcgtgctgctgtgcggcgtggtggacttcgctcgttccttgagcattacaactcccgaagaaatgatcgagaaagcaaagggggagactgcttacctgccctgcaagtttaccctgtcccctgaagatcaaggaccccttgatattgaatggctgatcagccctgccgataaccagaaagtcgaccaagtcataattctctacagtggggataaaatctacgatgactactatcctgatctgaaggggcgagtgcatttcaccagtaatgatctcaaatccggcgacgcatcgataaacgtaacaaacttacagttgtccgacattggcacctatcagtgtaaggtgaagaaggcgcccggagtggccaacaagaagatccacctggtggtgttggtaaagcccagcggcgcaagatgttacgtggatggaagcgaggaaattgggtctgacttcaaaattaagtgcgagcccaaggaggggtcactgccattgcagtacgagtggcagaaactttctgattcccagaagatgcctacctcatggctcgcagagatgacaagctctgttatctccgtgaagaacgccagctctgaatactcagggacatactcgtgcactgtgcggaaccgcgtcggctctgaccagtgtctcctgcgactcaatgtcgtgccacctagcaacaaggctgggctgattgccggggccatcatcggcaccttactggccctggccttgatcggcctgatcatcttttgttgtaggaagaagcggagagaagaaaagtacgaaaaagaagtccatcacgatataagagaggacgtaccaccccctaagtcccgaaccagtaccgcaagatcttatatcggttcgaatcattcatcgctgggaagtatgagtccttccaacatggagggctacagcaaaactcagtacaaccaggtccctagcgaggacttcgagaggaccccacaatctcccacactacccccagctaaatttaaatacccatacaaaacagacgggataactgttgtgtag

SEQ ID NO: 83460 - DNA, 1059 bp, Artificial Sequence
  derived and/or modified sequence
atggcactactattgtgttttgtgctgctgtgtggtgtcgtagatttcgctcgctccctatcaatcactacccccgaagagatgattgagaaggccaagggggaaacagcctacttgccatgtaagtttacactatccccagaagatcaggggcctctggacatagagtggttgatatctccagcggacaaccagaaggtcgaccaggtcatcatcctgtattctggtgataaaatctacgacgactactacccagacctcaaggggagggttcatttcactagcaacgatctgaaaagcggagacgcaagcataaatgtgactaatctccaactgagtgatattgggacctaccaatgtaaggtcaagaaagctcccggagtggctaacaagaaaattcacctcgtagtcctggtgaagccttctggggctcgatgttatgtggatggctccgaggagatcggcagcgattttaaaattaagtgtgagcctaaggagggatcacttccactgcagtatgaatggcagaagctgtcggattcccagaaaatgcccacgtcttggttggccgagatgacatcttctgtaatctctgtgaaaaacgccagctctgagtattctgggacatacagttgcactgtgcggaacagggtgggttccgatcagtgcctgctgaggcttaatgtggtgcccccaagtaacaaggccggtctgattgccggagccatcataggcaccctgttggctctggccctgatcgggctgatcatcttctgctgccgcaagaagcgccgagaggaaaaatacgaaaaagaggtgcaccacgacatcagagaggatgtgcccccacccaagtctcgaacctccacagctcgcagttatattggctccaatcacagtagcctaggtagtatgagcccttctaacatggaaggatactccaaaacacagtataaccaagtgcccagcgaagacttcgagcgaacacctcagagccccacactgcccccagcaaagttcaaatacccatacaaaaccgatggaataacagtggtctag

SEQ ID NO: 83461 - DNA, 1445 bp, Artificial Sequence
  derived and/or modified sequence
atggcgctcctgctgtgcttcgtgctcctgtgcggagtagtggatttcgccagaagtttgagtatcactactcctgaagagatgattgaaaaagccaaaggggaaactgcctatctgccatgcaaatttacgcttagtcccgaagaccagggaccgctggacatcgagtggctgatatcaccagctgataatcagaaggtggatcaagtgattattttatattctggagacaaaatttatgatgactactatccagatctgaaaggccgagtacattttacgagtaatgatctcaaatctggtgatgcatcaataaatgtaacgaatttacaactgtcagatattggcacatatcagtgcaaagtgaaaaaagctcctggtgttgcaaataagaagattcatctggtagttcttgttaagccttcaggtgcgagatgttacgttgatggatctgaagaaattggaagtgactttaagataaaatgtgaaccaaaagaaggttcacttccattacagtatgagtggcaaaaattgtctgactcacagaaaatgcccacttcatggttagcagaaatgacttcatctgttatatctgtaaaaaatgcctcttctgagtactctgggacatacagctgtacagtcagaaacagagtgggctctgatcagtgcctgttgcgtctaaacgttgtccctccttcaaataaagctggactaattgcaggagccattataggaactttgcttgctctagcgctcattggtcttatcatcttttgctgtcgtaaaaagcgcagagaagaaaaatatgaaaaggaagttcatcacgatatcagggaagatgtgccacctccaaagagccgtacgtccactgccagaagctacatcggcagtaatcattcatccctggggtccatgtctccttccaacatggaaggatattccaagactcagtataaccaagtaccaagtgaagactttgaacgcactcctcagagtccgactctcccacctgctaagttcaagtacccttacaagactgatggaattacagttgtataaatatggactactgaagaatctgaagtattgtattatttgactttattttaggcctctagtaaagacttaaatgttttttaaaaaaagcacaaggcacagagattagagcagctgtaagaacacatctactttatgcaatggcattagacatgtaagtcagatgtcatgtcaaaattagtacgagccaaattctttgttaaaaaaccctatgtatagtgacactgatagttaaaagatgttttattatattttcaataactaccactaacaaatttttaacttttcatatgcatattctgatatgtggtcttttaggaaaagtatggttaatagttgatttttcaaaggaaattttaaaattcttacgttctgtttaatgtttttgc

SEQ ID NO: 83462 - DNA, 1059 bp, Artificial Sequence
  derived and/or modified sequence
atggccctgctgctgtgcttcgtgctgctgtgcggcgtggtggacttcgccagaagcctgagcatcaccacccccgaggagatgatcgagaaggccaagggcgagaccgcctacctgccctgcaagttcaccctgagccccgaggaccagggccccctggacatcgagtggctgatcagccccgccgacaaccagaaggtggaccaggtgatcatcctgtacagcggcgacaagatctacgacgactactaccccgacctgaagggcagagtgcacttcaccagcaacgacctgaagagcggcgacgccagcatcaacgtgaccaacctgcagctgagcgacatcggcacctaccagtgcaaggtgaagaaggcccccggcgtggccaacaagaagatccacctggtggtgctggtgaagcccagcggcgccagatgctacgtggacggcagcgaggagatcggcagcgacttcaagatcaagtgcgagcccaaggagggcagcctgcccctgcagtacgagtggcagaagctgagcgacagccagaagatgcccaccagctggctggccgagatgaccagcagcgtgatcagcgtgaagaacgccagcagcgagtacagcggcacctacagctgcaccgtgagaaacagagtgggcagcgaccagtgcctgctgagactgaacgtggtgccccccagcaacaaggccggcctgatcgccggcgccatcatcggcaccctgctggccctggccctgatcggcctgatcatcttctgctgcagaaagaagagaagagaggagaagtacgagaaggaggtgcaccacgacatcagagaggacgtgcccccccccaagagcagaaccagcaccgccagaagctacatcggcagcaaccacagcagcctgggcagcatgagccccagcaacatggagggctacagcaagacccagtacaaccaggtgcccagcgaggacttcgagagaaccccccagagccccaccctgccccccgccaagttcaagtacccctacaagaccgacggcatcaccgtggtgtag

SEQ ID NO: 83463 - protein, 294 aa, Artificial Sequence
  derived and/or modified sequence
MNNQKQQKPTLSGQRFKTRKRDEKERFDPTQFQDCIIQGLTETGTDLEAVAKFLDASGAKLDYRRYAETLFDILVAGGMLAPGGTLADDMMRTDVCVFAAQEDLETMQAFAQVFNKLIRRYKYLEKGFEDEVKKLLLFLKGFSESERNKLAMLTGVLLANGTLNASILNSLYNENLVKEGVSAAFAVKLFKSWINEKDINAVAASLRKVSMDNRLMELFPANKQSVEHFTKYFTEAGLKELSEYVRNQQTIGARKELQKELQEQMSRGDPFKDIILYVKEEMKKNNIPEPVVIG

SEQ ID NO: 83464 - DNA, 1260 bp, Artificial Sequence
  derived and/or modified sequence
atgaacaaccagaagcagcagaagcccaccctgagcggccagagattcaagaccagaaagagagacgagaaggagagattcgaccccacccagttccaggactgcatcatccagggcctgaccgagaccggcaccgacctggaggccgtggccaagttcctggacgccagcggcgccaagctggactacagaagatacgccgagaccctgttcgacatcctggtggccggcggcatgctggcccccggcggcaccctggccgacgacatgatgagaaccgacgtgtgcgtgttcgccgcccaggaggacctggagaccatgcaggccttcgcccaggtgttcaacaagctgatcagaagatacaagtacctggagaagggcttcgaggacgaggtgaagaagctgctgctgttcctgaagggcttcagcgagagcgagagaaacaagctggccatgctgaccggcgtgctgctggccaacggcaccctgaacgccagcatcctgaacagcctgtacaacgagaacctggtgaaggagggcgtgagcgccgccttcgccgtgaagctgttcaagagctggatcaacgagaaggacatcaacgccgtggccgccagcctgagaaaggtgagcatggacaacagactgatggagctgttccccgccaacaagcagagcgtggagcacttcaccaagtacttcaccgaggccggcctgaaggagctgagcgagtacgtgagaaaccagcagaccatcggcgccagaaaggagctgcagaaggagctgcaggagcagatgagcagaggcgaccccttcaaggacatcatcctgtacgtgaaggaggagatgaagaagaacaacatccccgagcccgtggtgatcggcatcgtgtggagcagcgtgatgagcaccgtggagtggaacaagaaggaggagctggtggccgagcaggccatcaagcacctgaagcagtacagccccctgctggccgccttcaccacccagggccagagcgagctgaccctgctgctgaagatccaggagtactgctacgacaacatccacttcatgaaggccttccagaagatcgtggtgctgttctacaaggccgaggtgctgagcgaggagcccatcctgaagtggtacaaggacgcccacgtggccaagggcaagagcgtgttcctggagcagatgaagaagttcgtggagtggctgaagaacgccgaggaggagagcgagagcgaggccgaggagggcgactag

SEQ ID NO: 83465 - DNA, 885 bp, Artificial Sequence
  derived and/or modified sequence
atgaacaaccagaagcagcagaagcccaccctgagcggccagagattcaagaccagaaagagagacgagaaggagagattcgaccccacccagttccaggactgcatcatccagggcctgaccgagaccggcaccgacctggaggccgtggccaagttcctggacgccagcggcgccaagctggactacagaagatacgccgagaccctgttcgacatcctggtggccggcggcatgctggcccccggcggcaccctggccgacgacatgatgagaaccgacgtgtgcgtgttcgccgcccaggaggacctggagaccatgcaggccttcgcccaggtgttcaacaagctgatcagaagatacaagtacctggagaagggcttcgaggacgaggtgaagaagctgctgctgttcctgaagggcttcagcgagagcgagagaaacaagctggccatgctgaccggcgtgctgctggccaacggcaccctgaacgccagcatcctgaacagcctgtacaacgagaacctggtgaaggagggcgtgagcgccgccttcgccgtgaagctgttcaagagctggatcaacgagaaggacatcaacgccgtggccgccagcctgagaaaggtgagcatggacaacagactgatggagctgttccccgccaacaagcagagcgtggagcacttcaccaagtacttcaccgaggccggcctgaaggagctgagcgagtacgtgagaaaccagcagaccatcggcgccagaaaggagctgcagaaggagctgcaggagcagatgagcagaggcgaccccttcaaggacatcatcctgtacgtgaaggaggagatgaagaagaacaacatccccgagcccgtggtgatcggctag

SEQ ID NO: 83466 - DNA, 1260 bp, Artificial Sequence
  derived and/or modified sequence
atgaataatcagaagcagcagaagccaaccctgtctggccaacgctttaaaacccgaaagagggatgagaaagagagattcgatcccacccagttccaagattgcatcatccaggggctgacagagactggaaccgatctcgaagccgtggcaaagtttttagatgcgtctggtgcgaagttagactaccggcgttacgcagagactctgttcgacatactggtggctggcggtatgctggcgcctggggggacactggccgatgatatgatgagaactgatgtctgtgtttttgccgcacaggaagacctggaaaccatgcaagcatttgctcaggtctttaataaactgattcgccgctacaagtacctggagaagggattcgaggatgaagtgaaaaagctgcttctgttcctcaagggtttttcggagtccgaaaggaacaaactagccatgctaaccggtgtactattagcaaacggcacgcttaacgcctccatcttgaactcactgtataacgagaacctcgttaaagagggcgtctccgccgccttcgccgtgaaactttttaagtcgtggatcaatgagaaggacatcaatgctgtggccgcttcactccgcaaagtttctatggacaatcggctcatggagttgttcccagctaataagcaatctgtagaacactttaccaagtatttcaccgaagccggcctgaaggagctgtccgagtacgttagaaatcagcagacaatcggagcgcggaaggaactccagaaagagctgcaggagcagatgtccaggggtgaccccttcaaggatattatcttgtacgtgaaggaggaaatgaaaaaaaacaacatccctgaaccagtggtgattgggatcgtgtggtcatccgtcatgtccactgtggagtggaacaaaaaggaggagcttgtcgccgagcaggccattaaacacttaaaacagtactctcccctcctggccgcttttacaactcaaggccagtctgagttgacgctgttgctgaaaatccaggagtattgctacgacaatatacatttcatgaaggcttttcagaaaatcgtagtactcttctacaaggccgaggttctgtcagaggagccaatcttgaaatggtacaaagatgcgcacgtggctaagggtaaaagcgtgtttttggagcagatgaaaaagtttgtcgagtggctgaaaaacgccgaggaggagtcggagtcagaggccgaagagggggattag

SEQ ID NO: 83467 - DNA, 885 bp, Artificial Sequence
  derived and/or modified sequence
atgaataaccaaaagcagcaaaagcctaccttgagtgggcaacgctttaagactagaaaacgcgatgagaaggaacggttcgatcctactcagtttcaggattgtattatccaaggattgacggagaccggaaccgacctggaggctgtggctaagtttctggatgcatccggagccaagcttgactaccggagatatgccgagaccctctttgacattttggtggctggtggcatgttagctccaggcggtactctcgccgacgatatgatgcgcaccgacgtgtgcgtttttgccgcacaggaagatcttgagactatgcaagcgttcgcgcaggtgttcaacaaactgatccgcaggtacaaatacttggagaagggatttgaggacgaggtgaagaagctgctcttattcttaaaagggttttcggaatccgagaggaacaagctcgctatgttaacaggggttttactggcgaacggcactctgaacgcctctatcttgaatagcctttataacgaaaatttggtcaaagagggcgtatcagctgcgtttgctgtgaagctttttaagtcctggataaatgagaaggatatcaacgcagtcgcagcttcactgcggaaggtgagcatggacaacagactgatggaattatttccagccaacaagcagagcgttgagcactttactaagtactttacggaagccggtcttaaggaattgtccgagtacgtgcgcaaccagcagactatcggagccaggaaggaactccagaaagaattacaggagcagatgagtaggggtgatccatttaaggacatcatcctatatgtgaaagaagaaatgaagaaaaacaatatccccgagcccgtggtgatcggctag

SEQ ID NO: 83468 - DNA, 1260 bp, Artificial Sequence
  derived and/or modified sequence
atgaacaaccagaagcagcagaagcccaccctgagcggccagcgcttcaagaccaggaagagagatgagaaggagagatttgaccccacccagttccaggactgcatcatccagggcctgacagaaacaggaacagacctggaggccgtggccaagttcctggatgccagcggggccaagctggactaccgccgctatgcagagaccctgtttgacatcctggtggccggcggcatgctggcccctgggggcaccctggctgatgacatgatgaggacagatgtgtgtgtgtttgctgcccaggaggacctggagaccatgcaggcctttgcccaggtgttcaacaagctgatccgccgctacaagtacctggagaagggctttgaagatgaggtgaagaagctgctgctcttcctgaagggcttcagcgagagcgagaggaacaagctggccatgctgactggagtgctgctggccaacggcaccctgaatgccagcatcctgaacagcctgtacaatgaaaacctggtgaaggagggcgtgtctgctgcctttgctgtgaagctgttcaagtcctggatcaatgagaaggacatcaatgctgtggccgccagcctgaggaaggtgtccatggacaaccggctgatggagctgtttcctgccaacaagcagagcgtggagcacttcaccaagtacttcacagaggccggcctgaaggagctgtctgaatatgtgaggaaccagcagaccatcggggccaggaaggagctgcagaaggagctgcaggagcagatgagcagaggagaccccttcaaggacatcatcctgtatgtgaaggaggagatgaagaagaacaacatccctgagcctgtggtgattggaattgtgtggagctctgtgatgagcacagtggagtggaacaagaaggaggagctggtggccgagcaggccatcaagcacctgaagcagtacagccccctgctggccgccttcaccacccagggccagagcgagctgaccctgctgctgaagatccaggagtactgctatgacaacatccacttcatgaaggccttccagaagatcgtggtgctcttctacaaggccgaggtgctgtctgaggagcccatcctgaagtggtacaaggatgcccacgtggccaagggcaagtctgtgttcctggagcagatgaagaagtttgtggagtggctgaagaatgctgaggaggagagcgagagcgaggccgaggagggggactag

SEQ ID NO: 83469 - DNA, 885 bp, Artificial Sequence
  derived and/or modified sequence
atgaacaaccagaagcagcagaagcccaccctgagcggccagcgcttcaagaccaggaagagagatgagaaggagagatttgaccccacccagttccaggactgcatcatccagggcctgacagaaacaggaacagacctggaggccgtggccaagttcctggatgccagcggggccaagctggactaccgccgctatgcagagaccctgtttgacatcctggtggccggcggcatgctggcccctgggggcaccctggctgatgacatgatgaggacagatgtgtgtgtgtttgctgcccaggaggacctggagaccatgcaggcctttgcccaggtgttcaacaagctgatccgccgctacaagtacctggagaagggctttgaagatgaggtgaagaagctgctgctcttcctgaagggcttcagcgagagcgagaggaacaagctggccatgctgactggagtgctgctggccaacggcaccctgaatgccagcatcctgaacagcctgtacaatgaaaacctggtgaaggagggcgtgtctgctgcctttgctgtgaagctgttcaagtcctggatcaatgagaaggacatcaatgctgtggccgccagcctgaggaaggtgtccatggacaaccggctgatggagctgtttcctgccaacaagcagagcgtggagcacttcaccaagtacttcacagaggccggcctgaaggagctgtctgaatatgtgaggaaccagcagaccatcggggccaggaaggagctgcagaaggagctgcaggagcagatgagcagaggagaccccttcaaggacatcatcctgtatgtgaaggaggagatgaagaagaacaacatccctgagcctgtggtgattggatag

SEQ ID NO: 83470 - DNA, 1260 bp, Artificial Sequence
  derived and/or modified sequence
atgaacaaccagaagcagcagaagcccaccctgagcggccagcggtttaagactcggaagcgagatgagaaggaaaggttcgatcccactcaatttcaggattgcatcatccagggcttaacagagaccggaactgatttggaagcagtcgccaagtttttagacgctagcggagctaagctggactatcgcagatatgcagaaaccttatttgacatactcgttgcaggcggcatgctggcccctggaggaacccttgcggacgatatgatgaggaccgacgtgtgcgtatttgccgcacaggaggatctggaaaccatgcaggcttttgcacaggtgttcaataaactgatacgccgctacaaatatcttgagaagggatttgaggatgaggtgaagaaattgctgttgttcctaaagggatttagtgaatccgagaggaataagctggcaatgctgactggtgtgctcctggctaacggcacgctgaacgcctctattttgaatagcctgtataacgagaatctggtcaaggagggtgtctcagccgcttttgcagttaagctattcaaaagctggataaacgagaaagatatcaacgcagtcgcggctagccttcggaaggtatctatggataaccgcctcatggaattgtttccagcgaacaagcaatctgtggagcactttaccaagtactttactgaggctgggctcaaagaactgagtgaatacgttcggaaccaacaaaccattggcgctcggaaggagctccagaaagaactgcaggagcagatgagcaggggcgatcccttcaaggacattattctgtatgtcaaagaagagatgaagaaaaacaacataccagagccggtggtgatcggcattgtgtggtctagtgtcatgagtacagttgagtggaacaagaaagaagagctggtcgctgagcaggccattaaacaccttaagcagtattcccccttgctggccgcctttacaacacagggccagtctgagttaaccttattgctcaaaatacaggagtattgttatgataacatccattttatgaaggcctttcagaaaatcgtggtcctcttctataaggcagaggtgctgtccgaggagcccatcctgaaatggtataaagatgctcatgttgccaaaggaaagtctgtgttcttggaacaaatgaagaaattcgtcgagtggctgaagaatgccgaagaggagtccgaaagcgaagccgaagagggggattag

SEQ ID NO: 83471 - DNA, 885 bp, Artificial Sequence
  derived and/or modified sequence
atgaacaaccagaagcagcagaagcccaccctgagcggccagcggttcaagacccgcaaacgggacgagaaggagcgattcgacccgacacagttccaggactgcatcattcagggccttaccgagactggcaccgacttggaggcggtggcaaagtttctggacgcctctggtgcaaagctggattacaggagatatgctgagacactcttcgacattcttgtggccggggggatgttagcccccggcgggacattagcagatgacatgatgagaacagacgtatgcgtgtttgccgctcaggaggacctggaaaccatgcaggcattcgcccaggtgttcaataagctaattaggagatataaatatctggagaaaggttttgaggatgaagtgaagaagctcctgctttttctgaagggctttagcgagtcagaaagaaacaagctggctatgctcactggagttctcttggctaacggaaccctgaatgcgtctatcctgaattcactctataatgagaatctagtgaaggaaggagtatctgccgcattcgccgtaaagctgtttaagtcctggatcaacgaaaaagacatcaatgcagtggcggcttccctgcggaaggtgagcatggataatcgcctcatggaacttttccccgccaacaaacagagcgtggagcatttcacgaagtactttacagaagccgggctcaaggaactgagcgagtacgtgaggaaccagcagacaattggagctcggaaggagcttcagaaggagctacaggagcaaatgtctagaggggacccgtttaaggacatcattctttacgtgaaggaagagatgaagaaaaacaatattcccgagcctgttgtcatcggctag

SEQ ID NO: 83472 - DNA, 1260 bp, Artificial Sequence
  derived and/or modified sequence
atgaacaatcagaaacagcagaaaccgacactgtcagggcagagatttaagaccaggaagagggatgagaaggaacgtttcgaccctactcagtttcaggactgtataattcagggtctgacagaaaccggcactgacttggaagctgtggctaaattcctggatgccagtggagcaaagttagattataggagatatgctgagacgctgtttgatattctcgtggccggagggatgctggccccaggtggcactctggctgacgacatgatgcggacagatgtttgtgttttcgcggctcaggaagatctggaaactatgcaggcgttcgcacaagtatttaacaagcttattcgccgttacaaatacttggagaagggattcgaggacgaagtgaagaagttattattatttcttaagggctttagcgaaagtgagaggaacaagctggccatgctcaccggagtgctactcgccaatggcactctgaacgccagcatcctcaacagcctgtacaacgagaacctcgttaaggagggggtcagtgctgcgttcgccgtcaagttatttaagagttggatcaacgagaaggatatcaacgcggtggccgcaagtctgaggaaggtctctatggacaaccggcttatggagctctttccggcaaacaaacagtctgtagagcacttcaccaaatacttcaccgaggctggtctcaaggaactgtccgagtatgtgcgcaatcagcaaactatcggtgctcgaaaagaactacagaaagaacttcaagagcaaatgtcccggggtgaccctttcaaagacataatcctctacgtgaaggaagagatgaagaaaaataacatccctgagccggttgtcatcggaattgtgtggtcgagcgtaatgtccacagtggagtggaacaagaaggaggagttggtggcagagcaggcaatcaaacacctaaagcagtacagccccctcttggcggcattcactactcagggccagagcgagttgaccttgttgctgaagattcaggagtattgctatgataatattcactttatgaaagcattccaaaagatcgtcgttcttttctacaaggccgaagtgctgtctgaagagcctattttgaagtggtataaagatgcccatgtggccaagggcaagtctgtttttctggagcagatgaaaaaatttgtggagtggctgaaaaatgccgaagaggaaagcgaatccgaggctgaagaaggtgattag

SEQ ID NO: 83473 - DNA, 885 bp, Artificial Sequence
  derived and/or modified sequence
atgaataatcagaagcaacaaaaaccaacattgagtggccaacgtttcaaaacccgcaaacgcgacgaaaaggagaggttcgatcccacccagtttcaggactgcatcatacagggtcttacggagactgggacagatcttgaagcggtcgccaagttcttagatgcttccggggctaaattagattataggagatatgctgagacccttttcgacattctcgttgcgggaggcatgcttgccccagggggtaccctggctgacgacatgatgcgcacagatgtatgcgtgttcgcagctcaagaggaccttgagacaatgcaagccttcgctcaggtgtttaacaagctcattcgacgctacaagtacttggagaaaggttttgaggatgaggttaagaagctgcttctgtttctcaagggattctctgagtccgaaaggaacaaattggcgatgctgactggcgtcctgctcgcaaatgggacgctaaatgcgagcatcctgaactctctttacaatgaaaacctggttaaagagggagtttctgccgcatttgcagtaaaattatttaaaagctggattaatgagaaagacatcaatgccgtggcagcttccctgcggaaggtatcaatggacaatcgtctcatggagctcttcccggcaaacaagcagtctgtggaacatttcactaagtacttcacagaagcagggctaaaagagctgagcgagtatgtgcgcaaccagcaaacgattggggctcggaaggaactgcaaaaggagctgcaggaacagatgagtagaggcgatcccttcaaggacataattttatatgttaaggaagaaatgaaaaaaaataatatccccgaacctgtggtgatcggctag

SEQ ID NO: 83474 - protein, 419 aa, Artificial Sequence
  derived and/or modified sequence
MNNQKQQKPTLSGQRFKTRKRDEKERFDPTQFQDCIIQGLTETGTDLEAVAKFLDASGAKLDYRRYAETLFDILVAGGMLAPGGTLADDMMRTDVCVFAAQEDLETMQAFAQVFNKLIRRYKYLEKGFEDEVKKLLLFLKGFSESERNKLAMLTGVLLANGTLNASILNSLYNENLVKEGVSAAFAVKLFKSWINEKDINAVAASLRKVSMDNRLMELFPANKQSVEHFTKYFTEAGLKELSEYVRNQQTIGARKELQKELQEQMSRGDPFKDIILYVKEEMKKNNIPEPVVIGIVWSSVMSTVEWNKKEELVAEQAIKHLKQYSPLLAAFTTQGQSELTLLLKIQEYCYDNIHFMKAFQKIVVLFYKAEVLSEEPILKWYKDAHVAKGKSVFLEQMKKFVEWLKNAEEESESEAEEGD

SEQ ID NO: 83475 - protein, 451 aa, Artificial Sequence
  derived and/or modified sequence
MYGAPGAPAQSASVTVVRSLRRPPPQATGVSFMNNQKQQKPTLSGQRFKTRKRDEKERFDPTQFQDCIIQGLTETGTDLEAVAKFLDASGAKLDYRRYAETLFDILVAGGMLAPGGTLADDMMRTDVCVFAAQEDLETMQAFAQVFNKLIRRYKYLEKGFEDEVKKLLLFLKGFSESERNKLAMLTGVLLANGTLNASILNSLYNENLVKEGVSAAFAVKLFKSWINEKDINAVAASLRKVSMDNRLMELFPANKQSVEHFTKYFTEAGLKELSEYVRNQQTIGARKELQKELQEQMSRGDPFKDIILYVKEEMKKNNIPEPVVIGIVWSSVMSTVEWNKKEELVAEQAIKHLKQYSPLLAAFTTQGQSELTLLLKIQEYCYDNIHFMKAFQKIVVLFYKAEVLSEEPILKWYKDAHVAKGKSVFLEQMKKFVEWLKNAEEESESEAEEGD

SEQ ID NO: 83476 - DNA, 1356 bp, Artificial Sequence
  derived and/or modified sequence
atgtacggcgcccccggcgcccccgcccagagcgccagcgtgaccgtggtgagaagcctgagaagaccccccccccaggccaccggcgtgagcttcatgaacaaccagaagcagcagaagcccaccctgagcggccagagattcaagaccagaaagagagacgagaaggagagattcgaccccacccagttccaggactgcatcatccagggcctgaccgagaccggcaccgacctggaggccgtggccaagttcctggacgccagcggcgccaagctggactacagaagatacgccgagaccctgttcgacatcctggtggccggcggcatgctggcccccggcggcaccctggccgacgacatgatgagaaccgacgtgtgcgtgttcgccgcccaggaggacctggagaccatgcaggccttcgcccaggtgttcaacaagctgatcagaagatacaagtacctggagaagggcttcgaggacgaggtgaagaagctgctgctgttcctgaagggcttcagcgagagcgagagaaacaagctggccatgctgaccggcgtgctgctggccaacggcaccctgaacgccagcatcctgaacagcctgtacaacgagaacctggtgaaggagggcgtgagcgccgccttcgccgtgaagctgttcaagagctggatcaacgagaaggacatcaacgccgtggccgccagcctgagaaaggtgagcatggacaacagactgatggagctgttccccgccaacaagcagagcgtggagcacttcaccaagtacttcaccgaggccggcctgaaggagctgagcgagtacgtgagaaaccagcagaccatcggcgccagaaaggagctgcagaaggagctgcaggagcagatgagcagaggcgaccccttcaaggacatcatcctgtacgtgaaggaggagatgaagaagaacaacatccccgagcccgtggtgatcggcatcgtgtggagcagcgtgatgagcaccgtggagtggaacaagaaggaggagctggtggccgagcaggccatcaagcacctgaagcagtacagccccctgctggccgccttcaccacccagggccagagcgagctgaccctgctgctgaagatccaggagtactgctacgacaacatccacttcatgaaggccttccagaagatcgtggtgctgttctacaaggccgaggtgctgagcgaggagcccatcctgaagtggtacaaggacgcccacgtggccaagggcaagagcgtgttcctggagcagatgaagaagttcgtggagtggctgaagaacgccgaggaggagagcgagagcgaggccgaggagggcgactag

SEQ ID NO: 83477 - DNA, 1356 bp, Artificial Sequence
  derived and/or modified sequence
atgtacggcgctcctggtgccccagcacagtctgccagcgtgactgtagttcggtcgctgcggcgcccccctccccaggctacaggggtttcgtttatgaacaaccagaagcagcaaaagcccaccctgtccgggcagcggttcaaaacaaggaagagagacgagaaggaacggttcgatccaacgcagttccaggattgtatcattcagggtttaactgaaaccgggactgacctagaagcagtagcgaaatttctcgacgcctcaggagcaaaacttgattatcgcaggtatgccgagaccctgttcgatattctcgtcgctggcggcatgcttgctccaggtgggacattggccgacgacatgatgcggacagacgtctgtgtatttgcggcgcaggaagaccttgagaccatgcaggccttcgcccaggttttcaataaactcatccggaggtataagtacctggagaagggctttgaagatgaagtaaaaaaattattactgttcctgaaaggattcagcgagtcagaacgcaacaagcttgccatgctgactggggtgctactggctaatgggacactcaatgctagcatcctcaactctctttataatgaaaatctggtcaaagaaggtgtgagtgccgccttcgctgtgaagctgttcaaatcctggatcaatgaaaaggacataaacgccgtcgctgccagcctgcggaaggtgtctatggacaaccggctaatggagctgtttcctgcgaataaacagagcgtggaacacttcaccaagtatttcaccgaagccggcctgaaggagctgtcggaatacgtcagaaaccagcaaaccatcggggctaggaaagagctgcagaaggaactccaggagcagatgagccggggcgacccattcaaggacattatcctgtacgtgaaggaagaaatgaagaagaataatatccctgagccggttgtgattggtatcgtgtggtccagtgtgatgagcacagttgagtggaacaaaaaggaagaactcgtggcagagcaggcaataaaacacctcaaacagtattctcccctgctcgcagcatttaccactcaggggcagtccgagttgacactgttactgaagattcaggaatattgttacgataatatacattttatgaaagcctttcagaaaattgtcgtgttgttctacaaagccgaggtactgagcgaagagcctatcctcaagtggtacaaagatgcgcatgttgcaaagggaaagtccgtcttcctggaacaaatgaaaaagttcgtcgaatggctgaagaacgctgaggaggaaagcgaatcagaagccgaagagggtgattag

SEQ ID NO: 83478 - DNA, 1356 bp, Artificial Sequence
  derived and/or modified sequence
atgtacggggcccctggggccccagcccagagcgcctctgtgacagtggtgcgcagcctgcggcggcccccaccccaggccaccggggtgtccttcatgaacaaccagaagcagcagaagcccaccctgagcggccagcgcttcaagaccaggaagagagatgagaaggagagatttgaccccacccagttccaggactgcatcatccagggcctgacagaaacaggaacagacctggaggccgtggccaagttcctggatgccagcggggccaagctggactaccgccgctatgcagagaccctgtttgacatcctggtggccggcggcatgctggcccctgggggcaccctggctgatgacatgatgaggacagatgtgtgtgtgtttgctgcccaggaggacctggagaccatgcaggcctttgcccaggtgttcaacaagctgatccgccgctacaagtacctggagaagggctttgaagatgaggtgaagaagctgctgctcttcctgaagggcttcagcgagagcgagaggaacaagctggccatgctgactggagtgctgctggccaacggcaccctgaatgccagcatcctgaacagcctgtacaatgaaaacctggtgaaggagggcgtgtctgctgcctttgctgtgaagctgttcaagtcctggatcaatgagaaggacatcaatgctgtggccgccagcctgaggaaggtgtccatggacaaccggctgatggagctgtttcctgccaacaagcagagcgtggagcacttcaccaagtacttcacagaggccggcctgaaggagctgtctgaatatgtgaggaaccagcagaccatcggggccaggaaggagctgcagaaggagctgcaggagcagatgagcagaggagaccccttcaaggacatcatcctgtatgtgaaggaggagatgaagaagaacaacatccctgagcctgtggtgattggaattgtgtggagctctgtgatgagcacagtggagtggaacaagaaggaggagctggtggccgagcaggccatcaagcacctgaagcagtacagccccctgctggccgccttcaccacccagggccagagcgagctgaccctgctgctgaagatccaggagtactgctatgacaacatccacttcatgaaggccttccagaagatcgtggtgctcttctacaaggccgaggtgctgtctgaggagcccatcctgaagtggtacaaggatgcccacgtggccaagggcaagtctgtgttcctggagcagatgaagaagtttgtggagtggctgaagaatgctgaggaggagagcgagagcgaggccgaggagggggactag

SEQ ID NO: 83479 - DNA, 1356 bp, Artificial Sequence
  derived and/or modified sequence
atgtacggcgcccccggcgcccccgcccagagcgccagcgtgaccgtggtcaggtctctgaggcgccccccaccacaagccacaggcgtctcatttatgaataatcagaaacaacagaaaccaaccctgtctggccagaggttcaagactcggaagcgggacgagaaggagcggttcgatcccactcagtttcaagattgtatcatccaagggttgactgagaccggtactgacctcgaggcggtggccaaattcctggacgcctccggcgctaagcttgactaccgcagatacgccgaaaccctgttcgatattcttgtggccggcggcatgctcgcccctggggggactctggctgacgacatgatgagaactgacgtttgcgtcttcgccgcacaggaagacctggagacaatgcaggcattcgctcaggtgttcaataagttgataaggcgatataagtatttagaaaagggctttgaagacgaagtcaaaaagctcctccttttccttaaaggattctccgagtccgagcgcaacaagctcgctatgttgaccggcgtgcttctggcaaatggaacgctgaacgcctcgatccttaattccctgtataacgagaacctggtcaaggagggggtgtccgccgctttcgccgtgaagctctttaaatcctggatcaacgagaaggatattaatgctgtggccgccagcttaagaaaggtgtctatggataaccgtctaatggaattgttccccgctaacaagcagtctgtcgaacattttacgaagtactttaccgaggccgggctcaaggagctgagcgagtatgtgagaaatcagcaaacgatcggggcccgcaaggaactgcagaaggaacttcaggagcagatgagccgaggcgacccgttcaaggatattatcctgtatgtaaaagaagaaatgaagaaaaataatattccggagccggtggttatcggaatcgtatggtcttcagtgatgtccaccgtagagtggaataaaaaagaggaactggtggctgaacaagcgattaagcacctgaaacagtatagtccactgttagccgctttcacaactcaggggcagagcgagctgacccttctcttgaaaatccaggagtattgttatgataatatccatttcatgaaggcgttccagaagatcgtcgtcctgttttataaagccgaggtcttaagcgaagagcctatcctgaaatggtacaaagacgcccacgtagccaaaggcaaaagcgtctttctggaacagatgaagaagttcgtagaatggctgaaaaatgctgaggaggagtccgagagtgaggccgaggaaggagattag

SEQ ID NO: 83480 - DNA, 1075 bp, Artificial Sequence
  derived and/or modified sequence
gacttccggtgctggaggagggggccggcggcgagggactccaggaggacgcgtccaacttcgagaccggcgggggccggctccgctcttccaacccctccatgtgtgaagagggcggacgacgcagcgggggaagaaaaataagctagtctaggacaagtgtccaggcgacgtggaacccaggtgtcttttatgaataatcaaaagcagcaaaagccaacgctatcaggccagcgttttaaaactagaaaaagagatgaaaaagagaggtttgaccctactcagtttcaagactgtattattcaaggcttaactgaaaccggtactgatttggaagcagtagctaagtttcttgatgcttctggagcaaaacttgattaccgtcgatatgcagaaacactctttgacattctggtggctggtggaatgctggccccaggtggtacactggcagatgacatgatgcgtacagatgtctgcgtgtttgcagcccaagaagatctagagaccatgcaagcatttgctcaggtttttaacaagttaatcaggcgctacaaatacctggagaaaggttttgaagatgaagtaaaaaagctgctgctgttcttgaagggtttttcagagtcggagaggaacaagctagctatgttgactggtgttcttctggctaatggaacacttaatgcatccattcttaatagcctttataatgaaaatttggttaaagaaggagtttcagcagcttttgctgtgaagctctttaaatcatggataaatgaaaaagatatcaatgcagtagctgcaagtcttcggaaagtcagcatggataacagactgatggaactctttcctgccaataagcaaagtgttgaacacttcacaaaatattttactgaggcaggcttgaaagagctttcagaatatgttcggaatcagcaaaccatcggagctcgtaaggagctccagaaagaacttcaagaacagatgtcccgtggtgatccatttaaggatataattttatatgtcaaggaggagatgaaaaaaaacaacatcccagagccagttgtcatcggaa

SEQ ID NO: 83481 - DNA, 1356 bp, Artificial Sequence
  derived and/or modified sequence
atgtatggcgcacccggtgctccagctcagtctgcgagtgtgaccgtggtgaggtctcttcgaagaccacccccacaggccactggcgtttccttcatgaacaatcaaaaacagcagaaacccaccctatccggacagcgatttaagacccgtaagcgtgacgagaaagagcggttcgatcctacccagtttcaagactgtataattcagggtcttactgagaccgggacggacctggaggccgttgccaagtttcttgatgcaagcggagccaagctggactacagaagatatgccgagaccctgttcgatattctcgtggccggtgggatgctggccccagggggtacgctggccgatgacatgatgagaactgacgtgtgcgttttcgccgctcaggaggatctggagacaatgcaggcatttgcacaggtctttaataaactgatcagaaggtataaatatttggaaaaagggtttgaggacgaagtcaagaagttactcctgtttctcaaaggcttctccgagagcgagcggaacaaattagcaatgttgactggagtactgcttgccaatggaacgttaaatgcaagtattctcaatagcttatacaatgagaatttggtcaaagagggggtctccgcagccttcgcagtgaagctttttaagtcctggattaacgaaaaggacatcaacgcagtggcggcaagtctccgaaaggttagcatggacaacaggcttatggagctgtttcccgctaataagcagagcgtcgaacactttactaagtacttcactgaggctggtctgaaggagctaagcgaatacgtccgcaatcagcagactatcggggctcgtaaggaactgcagaaggagctgcaggaacaaatgagtcgcggagacccattcaaggatatcattctgtacgtgaaggaggagatgaaaaagaataatatccccgagcctgtggttatcggcatcgtctggtcatctgtcatgagcacggtcgaatggaacaagaaagaggagctggtcgccgagcaggctattaagcaccttaagcagtattcacccctcctggccgcattcaccacccagggccagagcgaattgacccttctgttgaaaatacaggagtattgttacgacaatatccattttatgaaagcttttcagaagattgtggtcctcttctacaaagcggaagtgctatccgaggagccaatcttaaaatggtacaaagatgcccacgtggccaaaggcaagtctgtgtttctggagcagatgaagaagttcgtggagtggcttaagaatgctgaagaggaaagcgaaagtgaagccgaagagggcgactag

SEQ ID NO: 83482 - DNA, 873 bp, Artificial Sequence
  derived and/or modified sequence
aggagacaccgccgcagttgccggtacatcggggatttctggctctttcctcttcgccttaaattcgggtgtcttttatgaataatcaaaagcagcaaaagccaacgctatcaggccagcgttttaaaactagaaaaagagatgaaaaagagaggtttgaccctactcagtttcaagactgtattattcaaggcttaactgaaaccggtactgatttggaagcagtagctaagtttcttgatgcttctggagcaaaacttgattaccgtcgatatgcagaaacactctttgacattctggtggctggtggaatgctggccccaggtttttaacaagttaatcaggcgctacaaatacctggagaaaggttttgaagatgaagtaaaaaagctgctgctgttcttgaagggtttttcagagtcggagaggaacaagctagctatgttgactggtgttcttctggctaatggaacacttaatgcatccattcttaatagcctttataatgaaaatttggttaaagaaggagtttcagcagcttttgctgtgaagctctttaaatcatggataaatgaaaaagatatcaatgcagtagctgcaagtcttcggaaagtcagcatggataacagactgatggaactctttcctgccaataagcaaagtgttgaacacttcacaaaatattttactgaggcaggcttgaaagagctttcagaatatgttcggaatcagcaaaccatcggagctcgtaaggagctccagaaagaacttcaagaacagatgtcccgtggtgatccatttaaggatataattttatatgtcaaggaggagatgaaaaaaacaacatcccagagccagttgtcatcggaatag

SEQ ID NO: 83483 - DNA, 1473 bp, Artificial Sequence
  derived and/or modified sequence
accaccgctgcggccgccgcctccgccgctgctttcgctggagggcgggcggatgtacggggcgcctggggccccggcgcaaagcgcctcagtgactgtggtccgctcgttgcggcggccgccaccgcaggcgacaggggtgtcttttatgaataatcaaaagcagcaaaagccaacgctatcaggccagcgttttaaaactagaaaaagagatgaaaaagagaggtttgaccctactcagtttcaagactgtattattcaaggcttaactgaaaccggtactgatttggaagcagtagctaagtttcttgatgcttctggagcaaaacttgattaccgtcgatatgcagaaacactctttgacattctggtggctggtggaatgctggccccaggtggtacactggcagatgacatgatgcgtacagatgtctgcgtgtttgcagcccaagaagatctagagaccatgcaagcatttgctcaggtttttaacaagttaatcaggcgctacaaatacctggagaaaggttttgaagatgaagtaaaaaagctgctgctgttcttgaagggtttttcagagtcggagaggaacaagctagctatgttgactggtgttcttctggctaatggaacacttaatgcatccattcttaatagcctttataatgaaaatttggttaaagaaggagtttcagcagcttttgctgtgaagctctttaaatcatggataaatgaaaaagatatcaatgcagtagctgcaagtcttcggaaagtcagcatggataacagactgatggaactctttcctgccaataagcaaagtgttgaacacttcacaaaatattttactgaggcaggcttgaaagagctttcagaatatgttcggaatcagcaaaccatcggagctcgtaaggagctccagaaagaacttcaagaacagatgtcccgtggtgatccatttaaggatataattttatatgtcaaggaggagatgaaaaaaaacaacatcccagagccagttgtcatcggaatagtctggtcaagtgtaatgagcactgtggaatggaacaaaaaagaggagcttgtagcagagcaagccatcaagcacttgaagcaatacagccctctacttgctgcctttactactcaaggtcagtctgagctgactctgttactgaagattcaggagtattgctatgacaacattcatttcatgaaagccttccagaaaatagtggtgcttttttataaagctgaagtcctgagcgaggagcccattttgaagtggtataaagatgcacatgttgcaaaggggaagagtgttttccttgagcaaatgaaaaagtttgtagaatggctcaaaaatgctgaagaagaatctgaatctgaagctgaagaaggtgactgaattttgaaactacaccctcagtaaagcaaacaggagttgtagataaaatgtcatgtctcatgtgt

SEQ ID NO: 83484 - protein, 423 aa, Artificial Sequence
  derived and/or modified sequence
MVSFMNNQKQQKPTLSGQRFKTRKRDEKERFDPTQFQDCIIQGLTETGTDLEAVAKFLDASGAKLDYRRYAETLFDILVAGGMLAPGGTLADDMMRTDVCVFAAQEDLETMQAFAQVFNKLIRRYKYLEKGFEDEVKKLLLFLKGFSESERNKLAMLTGVLLANGTLNASILNSLYNENLVKEGVSAAFAVKLFKSWINEKDINAVAASLRKVSMDNRLMELFPANKQSVEHFTKYFTEAGLKELSEYVRNQQTIGARKELQKELQEQMSRGDPFKDIILYVKEEMKKNNIPEPVVIGIVWSSVMSTVEWNKKEELVAEQAIKHLKQYSPLLAAFTTQGQSELTLLLKIQEYCYDNIHFMKAFQKIVVLFYKAEVLSEEPILKWYKDAHVAKGKSVFLEQMKKFVEWLKNAEEESESEAEEGD

SEQ ID NO: 83485 - protein, 162 aa, Artificial Sequence
  derived and/or modified sequence
MNNQKQQKPTLSGQRFKTRKRDEKERFDPTQFQDCIIQGLTETGTDLEAVAKFLDASGAKLDYRRYAETLFDILVAGGMLAPGGTLADDMMRTDVCVFAAQEDLETMQAFAQVFNKLIRRYKYLEKGFEDEVKKLLLFLKGFSESERNKLAMLTGVLLANGT

SEQ ID NO: 83486 - protein, 155 aa, Artificial Sequence
  derived and/or modified sequence
MNNQKQQKPTLSGQRFKTRKRDEKERFDPTQFQDCIIQGLTETGTDLEAVAKFLDASGAKLDYRRYAETLFDILVAGGMLAPGGTLADDMMRTDVCVFAAQEDLETMQAFAQVFNKLIRRYKYLEKGFEDEVKKLLLFLKGFSESERNKLAMLTG

SEQ ID NO: 83487 - protein, 216 aa, Artificial Sequence
  derived and/or modified sequence
MNNQKQQKPTLSGQRFKTRKRDEKERFDPTQFQDCIIQGLTETGTDLEAVAKFLDASGAKLDYRRYAETLFDILVAGGMLAPGGTLADDMMRTDVCVFAAQEDLETMQAFAQVFNKLIRRYKYLEKGFEDEVKKLLLFLKGFSESERNKLAMLTGVLLANGTLNASILNSLYNENLVKEGVSAAFAVKLFKSWINEKDINAVAASLRKVSMDNRLM

SEQ ID NO: 83488 - DNA, 1272 bp, Artificial Sequence
  derived and/or modified sequence
atggtgagcttcatgaacaaccagaagcagcagaagcccaccctgagcggccagagattcaagaccagaaagagagacgagaaggagagattcgaccccacccagttccaggactgcatcatccagggcctgaccgagaccggcaccgacctggaggccgtggccaagttcctggacgccagcggcgccaagctggactacagaagatacgccgagaccctgttcgacatcctggtggccggcggcatgctggcccccggcggcaccctggccgacgacatgatgagaaccgacgtgtgcgtgttcgccgcccaggaggacctggagaccatgcaggccttcgcccaggtgttcaacaagctgatcagaagatacaagtacctggagaagggcttcgaggacgaggtgaagaagctgctgctgttcctgaagggcttcagcgagagcgagagaaacaagctggccatgctgaccggcgtgctgctggccaacggcaccctgaacgccagcatcctgaacagcctgtacaacgagaacctggtgaaggagggcgtgagcgccgccttcgccgtgaagctgttcaagagctggatcaacgagaaggacatcaacgccgtggccgccagcctgagaaaggtgagcatggacaacagactgatggagctgttccccgccaacaagcagagcgtggagcacttcaccaagtacttcaccgaggccggcctgaaggagctgagcgagtacgtgagaaaccagcagaccatcggcgccagaaaggagctgcagaaggagctgcaggagcagatgagcagaggcgaccccttcaaggacatcatcctgtacgtgaaggaggagatgaagaagaacaacatccccgagcccgtggtgatcggcatcgtgtggagcagcgtgatgagcaccgtggagtggaacaagaaggaggagctggtggccgagcaggccatcaagcacctgaagcagtacagccccctgctggccgccttcaccacccagggccagagcgagctgaccctgctgctgaagatccaggagtactgctacgacaacatccacttcatgaaggccttccagaagatcgtggtgctgttctacaaggccgaggtgctgagcgaggagcccatcctgaagtggtacaaggacgcccacgtggccaagggcaagagcgtgttcctggagcagatgaagaagttcgtggagtggctgaagaacgccgaggaggagagcgagagcgaggccgaggagggcgactag

SEQ ID NO: 83489 - DNA, 1272 bp, Artificial Sequence
  derived and/or modified sequence
atggtgtcctttatgaataaccagaagcagcagaaacctacactgtctgggcagcgctttaaaacgcgaaagcgcgacgagaaggagaggtttgaccctacacagttccaggattgcatcattcagggcttgaccgagaccggtacggacctggaagccgtagccaagttcctcgacgcttccggagccaagttggactacaggcgctacgctgaaacgttgttcgacatactcgtggccgggggtatgttggccccgggaggtacattggccgatgacatgatgcgtaccgatgtctgtgtatttgccgcccaggaggacctggaaactatgcaggccttcgcccaggtttttaataagctgattagacgttacaagtatcttgaaaaagggtttgaggatgaggtcaagaagctcctgctgttccttaagggattcagcgagagcgaacgcaacaaactggccatgctaaccggagtgttgctggctaacggaaccctcaatgcttcgattctgaatagcctttataacgagaacctggtgaaggaaggggtgtctgctgcctttgcggtgaaactttttaagtcatggatcaatgaaaaggatatcaatgccgtggccgcgagcttaaggaaggtgtccatggataatcgtctgatggagctgttcccggctaataagcagtctgtggaacacttcactaaatattttaccgaagccggcttaaaagagttgagtgagtacgtgagaaatcaacaaaccattggggctagaaaagaactgcagaaggaactgcaggaacagatgtcgcgaggggatcccttcaaggacataattctgtacgttaaggaggagatgaaaaaaaacaatatccctgagcctgttgttattggaatagtctggtctagcgtgatgtccaccgtggagtggaataaaaaagaggagctggtcgccgagcaagccatcaagcacttgaagcaatactctcccctgctggccgccttcacaacccagggccaatccgagctgacattgcttctgaagatccaggagtattgttatgataacattcacttcatgaaagctttccaaaagatagttgttctgttctacaaagcagaagtgcttagtgaggaaccaattttgaagtggtataaagacgctcacgtggccaaaggaaaatcagtatttcttgagcagatgaagaagtttgtcgaatggcttaagaacgcggaagaggagtccgagtctgaagccgaggagggggactag

SEQ ID NO: 83490 - DNA, 1272 bp, Artificial Sequence
  derived and/or modified sequence
atggtgtccttcatgaacaaccagaagcagcagaagcccaccctgagcggccagcgcttcaagaccaggaagagagatgagaaggagagatttgaccccacccagttccaggactgcatcatccagggcctgacagaaacaggaacagacctggaggccgtggccaagttcctggatgccagcggggccaagctggactaccgccgctatgcagagaccctgtttgacatcctggtggccggcggcatgctggcccctgggggcaccctggctgatgacatgatgaggacagatgtgtgtgtgtttgctgcccaggaggacctggagaccatgcaggcctttgcccaggtgttcaacaagctgatccgccgctacaagtacctggagaagggctttgaagatgaggtgaagaagctgctgctcttcctgaagggcttcagcgagagcgagaggaacaagctggccatgctgactggagtgctgctggccaacggcaccctgaatgccagcatcctgaacagcctgtacaatgaaaacctggtgaaggagggcgtgtctgctgcctttgctgtgaagctgttcaagtcctggatcaatgagaaggacatcaatgctgtggccgccagcctgaggaaggtgtccatggacaaccggctgatggagctgtttcctgccaacaagcagagcgtggagcacttcaccaagtacttcacagaggccggcctgaaggagctgtctgaatatgtgaggaaccagcagaccatcggggccaggaaggagctgcagaaggagctgcaggagcagatgagcagaggagaccccttcaaggacatcatcctgtatgtgaaggaggagatgaagaagaacaacatccctgagcctgtggtgattggaattgtgtggagctctgtgatgagcacagtggagtggaacaagaaggaggagctggtggccgagcaggccatcaagcacctgaagcagtacagccccctgctggccgccttcaccacccagggccagagcgagctgaccctgctgctgaagatccaggagtactgctatgacaacatccacttcatgaaggccttccagaagatcgtggtgctcttctacaaggccgaggtgctgtctgaggagcccatcctgaagtggtacaaggatgcccacgtggccaagggcaagtctgtgttcctggagcagatgaagaagtttgtggagtggctgaagaatgctgaggaggagagcgagagcgaggccgaggagggggactag

SEQ ID NO: 83491 - DNA, 1272 bp, Artificial Sequence
  derived and/or modified sequence
atggtgagcttcatgaacaaccagaagcagcagaagcccaccctgtccggccagagattcaagacacgtaaacgtgatgaaaaggagaggtttgatcctacacaattccaggattgcatcatccaaggtttgaccgagacaggcacggatcttgaggcagtagccaaattccttgacgcctctggcgcgaaacttgattaccgcagatatgccgagactttatttgacatactggtcgccggtggcatgttggcccccggcggcacactggccgatgatatgatgcgcactgatgtctgcgttttcgcggcccaggaggaccttgaaacgatgcaagctttcgcccaggtgtttaacaaattaataaggcgctacaagtacctggaaaagggctttgaggacgaagttaagaagctcttgctctttctcaaaggatttagcgaaagtgaaagaaataaactggccatgcttacaggtgttctgctggctaatgggaccctgaacgcctcaatactgaattccctgtataatgaaaatctcgtgaaggaaggtgtttctgctgcttttgccgtgaaactgtttaagtcctggatcaatgaaaaagacattaacgccgttgccgctagcctgcgaaaggtatccatggacaaccggctgatggagctgttccccgctaataagcagtcggtcgaacacttcaccaagtactttactgaggcgggattaaaagaactgtccgagtatgtgcgaaatcaacagaccatcggagctagaaaagagctccagaaagagttacaggaacagatgagccggggcgatccatttaaggatattattttatatgtgaaagaagaaatgaagaagaacaatatacccgaacccgtggtgattggtattgtatggtctagcgtcatgtctacggtcgaatggaataaaaaggaggagctcgtggccgagcaggctatcaaacacctgaaacagtactcacccctgctggcggcttttaccactcagggccaatctgaacttacactccttcttaagatccaggagtattgctacgacaatatccacttcatgaaagctttccagaagattgtggtcttgttttataaagcagaagttctgtcagaggaaccaatcctgaagtggtacaaggacgctcacgtcgccaagggcaaatccgtatttttggagcagatgaaaaagttcgtcgaatggttgaagaacgctgaggaagagtcggagtcggaagcggaagaaggagactag

SEQ ID NO: 83492 - DNA, 2455 bp, Artificial Sequence
  derived and/or modified sequence
cgggtggggaggtggggtccgggtgtgcgccgcggcgctggctgcgaaggcagtggccgaggcgggctccctctgggccgtgcccggcctggctaacaaagccgccgcggcctctgttgtgtgatggtgtcttttatgaataatcaaaagcagcaaaagccaacgctatcaggccagcgttttaaaactagaaaaagagatgaaaaagagaggtttgaccctactcagtttcaagactgtattattcaaggcttaactgaaaccggtactgatttggaagcagtagctaagtttcttgatgcttctggagcaaaacttgattaccgtcgatatgcagaaacactctttgacattctggtggctggtggaatgctggccccaggtggtacactggcagatgacatgatgcgtacagatgtctgcgtgtttgcagcccaagaagatctagagaccatgcaagcatttgctcaggtttttaacaagttaatcaggcgctacaaatacctggagaaaggttttgaagatgaagtaaaaaagctgctgctgttcttgaagggtttttcagagtcggagaggaacaagctagctatgttgactggtgttcttctggctaatggaacacttaatgcatccattcttaatagcctttataatgaaaatttggttaaagaaggagtttcagcagcttttgctgtgaagctctttaaatcatggataaatgaaaaagatatcaatgcagtagctgcaagtcttcggaaagtcagcatggataacagactgatggaactctttcctgccaataagcaaagtgttgaacacttcacaaaatattttactgaggcaggcttgaaagagctttcagaatatgttcggaatcagcaaaccatcggagctcgtaaggagctccagaaagaacttcaagaacagatgtcccgtggtgatccatttaaggatataattttatatgtcaaggaggagatgaaaaaaaacaacatcccagagccagttgtcatcggaatagtctggtcaagtgtaatgagcactgtggaatggaacaaaaaagaggagcttgtagcagagcaagccatcaagcacttgaagcaatacagccctctacttgctgcctttactactcaaggtcagtctgagctgactctgttactgaagattcaggagtattgctatgacaacattcatttcatgaaagccttccagaaaatagtggtgcttttttataaagctgaagtcctgagcgaggagcccattttgaagtggtataaagatgcacatgttgcaaaggggaagagtgttttccttgagcaaatgaaaaagtttgtagaatggctcaaaaatgctgaagaagaatctgaatctgaagctgaagaaggtgactgaattttgaaactacaccctcagtaaagcaaacaggagttgtagataaaatgtcatgtctcatgtgtcctggttcttacatcttcctacctccctgtatcaagcatgatataagggctttcatggcaaattttattttaactgtttctatggttgctggaaatgttgggtttagtttctaaaaccatgttttaagtagctacaggagctatagatttgaatctaatgttgcattagtcttttcagttatcttctacctcctgtattttctactgtaataatgtaatttaaggccttccacaatgaacagttcactttattccctgggttttctataaacagttttaaggatatgatttggttaaaaaataatttgttataaaaattctgtttgcaaattaaactggaaaagtatccagagtctcaaaaggcaatgatttgtgagataatatggcatgcccggagccctgctcatcaatgaaaaacccatatgtaataatcgaattcatttaacatgaatcttgagtacgtggaccattgcttgcatgttaactttttgttttgttttgttttgttttgttttgcatttttaactccagatatcctaaagctcaattgtttggtctctggttttcatccttagagaagccatggagaacagacttgaaaagtttaggaaatcataatgtggcagaggtggtgggaagaagaaagttgagctttttccccttgagaaacttctgcatttagtttctatctttccaggcaaaacaaatgggtattcttttcatacaaccattttcaaatgaaccttagaaaagtcttaacatttaaggtattttatgcacagaatacacttagattgataggaaagaactcgtaatggagtttgagtaaagaaaatgactgatgtactaaacccagtaaaaattgttgaaaatgttaaaggtcagcatgttctaattgggaatctagatatagcttagatttcctattggcttagagtatttgctataacaaatgaagtgcaatgacaattatatattcctactcggtcatactg

SEQ ID NO: 83493 - DNA, 3383 bp, Artificial Sequence
  derived and/or modified sequence
gacttccggtgctggaggagggggccggcggcgagggactccaggaggacgcgtccaacttcgagaccggcgggggccggctccgctcttccaacccctccatgtgtgaagagggcggacgacgcagcgggggaagaaaaataagctagtctaggacaagtgtccaggcgacgtggaacccagtaagggaataaagaagactggaaacgtctctcccctcccctatcccagtccctcaccctaatccgcgcgcaatagaaaaggcggaagcgcctgtccacgatcagggcggggcaaggggaagaaatctcgcgataggagagcggtccgggcgggggtggcacctctccctcctcctggcgttagttccggtcgcagaggagacaccgccgcagttgccggtacatcggggatttctggctctttcctcttcgccttaaattcgggtgtcttttatgaataatcaaaagcagcaaaagccaacgctatcaggccagcgttttaaaactagaaaaagagatgaaaaagagaggtttgaccctactcagtttcaagactgtattattcaaggcttaactgaaaccggtactgatttggaagcagtagctaagtttcttgatgcttctggagcaaaacttgattaccgtcgatatgcagaaacactctttgacattctggtggctggtggaatgctggccccaggtggtacactggcagatgacatgatgcgtacagatgtctgcgtgtttgcagcccaagaagatctagagaccatgcaagcatttgctcaggtttttaacaagttaatcaggcgctacaaatacctggagaaaggttttgaagatgaagtaaaaaagctgctgctgttcttgaagggtttttcagagtcggagaggaacaagctagctatgttgactggtgttcttctggctaatggaacacttaatgcatccattcttaatagcctttataatgaaaatttggttaaagaaggagtttcagcagcttttgctgtgaagctctttaaatcatggataaatgaaaaagatatcaatgcagtagctgcaagtcttcggaaagtcagcatggataacagactgatggaactctttcctgccaataagcaaagtgttgaacacttcacaaaatattttactgaggcaggcttgaaagagctttcagaatatgttcggaatcagcaaaccatcggagctcgtaaggagctccagaaagaacttcaagaacagatgtcccgtggtgatccatttaaggatataattttatatgtcaaggaggagatgaaaaaaaacaacatcccagagccagttgtcatcggaatagtctggtcaagtgtaatgagcactgtggaatggaacaaaaaagaggagcttgtagcagagcaagccatcaagcacttgaagcaatacagccctctacttgctgcctttactactcaaggtcagtctgagctgactctgttactgaagattcaggagtattgctatgacaacattcatttcatgaaagccttccagaaaatagtggtgcttttttataaagctgaagtcctgagcgaggagcccattttgaagtggtataaagatgcacatgttgcaaaggggaagagtgttttccttgagcaaatgaaaaagtttgtagaatggctcaaaaatgctgaagaagaatctgaatctgaagctgaagaaggtgactgaattttgaaactacaccctcagtaaagcaaacaggagttgtagataaaatgtcatgtctcatgtgtcctggttcttacatcttcctacctccctgtatcaagcatgatataagggctttcatggcaaattttattttaactgtttctatggttgctggaaatgttgggtttagtttctaaaaccatgttttaagtagctacaggagctatagatttgaatctaatgttgcattagtcttttcagttatcttctacctcctgtattttctactgtaataatgtaatttaaggccttccacaatgaacagttcactttattccctgggttttctataaacagttttaaggatatgatttggttaaaaaataatttgttataaaaattctgtttgcaaattaaactggaaaagtatccagagtctcaaaaggcaatgatttgtgagataatatggcatgcccggagccctgctcatcaatgaaaaacccatatgtaataatcgaattcatttaacatgaatcttgagtacgtggaccattgcttgcatgttaactttttgttttgttttgttttgttttgttttgcatttttaactccagatatcctaaagctcaattgtttggtctctggttttcatccttagagaagccatggagaacagacttgaaaagtttaggaaatcataatgtggcagaggtggtgggaagaagaaagttgagctttttccccttgagaaacttctgcatttagtttctatctttccaggcaaaacaaatgggtattcttttcatacaaccattttcaaatgaaccttagaaaagtcttaacatttaaggtattttatgcacagaatacacttagattgataggaaagaactcgtaatggagtttgagtaaagaaaatgactgatgtactaaacccagtaaaaattgttgaaaatgttaaaggtcagcatgttctaattgggaatctagatatagcttagatttcctattggcttagagtatttgctataacaaatgaagtgcaatgacaattatatattcctactcggtcatactggactggcttcgttctcttaatatactcagtaatgactcaagcctctggctattaacataccctagttgccgttttttaattgccatgagccaaatacttcttggtatacaattgatccatttattttaatggctgccttttcattttcatcttttcttgctgctacccatctatgtatgtagtcattggggggaaaatgtagccacattttttatgggaagactttgtgttaaaagtgaacattttgaaggtttttaactggtgaaactagcctggaataatgccaccagagactgagtggaaatcgccccttttgaaggtgccattcttatgagccaaaagtttgtcatttaaaagttcattttgagggaataacatgtaatataatttgaaataaaggtatagtaaccttaaaaagaacattataactgattgttgtgaatggggtgaatttgttaaaatgagtaactttgataaagtttttcatgcacaggcaaaatgtattcactagatttctacgtagtgatctgcttttactttgtaatttgtagttctcaaaagacttttttttaaaaaaataaagtccatacttacacttaggctttata

SEQ ID NO: 83494 - DNA, 557 bp, Artificial Sequence
  derived and/or modified sequence
aatttgaagggtttcttgtagagagaaatgcacattttgacgtacatttgattcaagtgcagggtgtcttttatgaataatcaaaagcagcaaaagccaacgctatcaggccagcgttttaaaactagaaaaagagatgaaaaagagaggtttgaccctactcagtttcaagactgtattattcaaggcttaactgaaaccggtactgatttggaagcagtagctaagtttcttgatgcttctggagcaaaacttgattaccgtcgatatgcagaaacactctttgacattctggtggctggtggaatgctggccccaggtggtacactggcagatgacatgatgcgtacagatgtctgcgtgtttgcagcccaagaagatctagagaccatgcaagcatttgctcaggtttttaacaagttaatcaggcgctacaaatacctggagaaaggttttgaagatgaagtaaaaaagctgctgctgttcttgaagggtttttcagagtcggagaggaacaagctagctatgttgactggtgttcttctggctaatggaac

SEQ ID NO: 83495 - DNA, 1272 bp, Artificial Sequence
  derived and/or modified sequence
atggtgagcttcatgaataatcaaaagcagcagaagcctacactgtctggacagcgttttaaaacccggaaacgtgatgaaaaggaacgatttgacccgacccagtttcaggactgtattattcagggcctgacagagaccggaactgatttagaagccgtggccaagtttctggacgcaagtggagcaaagctcgactaccgaagatacgccgaaactcttttcgatatcttagttgccggaggcatgctcgcacctggtggcactttagccgacgacatgatgaggaccgatgtgtgcgtgttcgcggcacaggaggatctggaaactatgcaagctttcgctcaagtgtttaataagcttatccgaagatacaaatatctggaaaaaggctttgaagacgaagtcaagaagctactcctattcctgaagggcttcagcgagtccgagcgcaacaagttggcaatgttgaccggggttcttttggccaacggtacattaaacgcctcaatcttgaactccctctacaatgagaatttagtcaaagagggggtcagcgccgcttttgctgttaaactcttcaaatcttggatcaatgagaaagatataaacgcagtagcagccagccttcgcaaggttagcatggacaataggctaatggaactcttcccagctaacaaacagtctgtggagcactttaccaaatacttcacagaggcagggcttaaggagctatccgagtacgtgcgtaatcagcaaactatcggggcaaggaaggagttacaaaaagagctccaagagcaaatgtctaggggagatcccttcaaggatattatactctatgtcaaggaagaaatgaaaaaaaataatattccagaaccagttgtgatcgggatcgtttggtcctcagtcatgagtaccgttgagtggaacaagaaggaagagctggtggccgaacaggctattaagcacctcaaacagtacagccccttactcgccgctttcaccacccaagggcaatccgaacttacactgctgctgaaaatccaggaatactgttacgacaatatccattttatgaaggcatttcaaaagatcgtggtactgttctataaggccgaggtcctgtcggaagaaccaattctcaagtggtacaaggatgctcacgtcgctaaaggtaagtcggtttttttggaacagatgaaaaagtttgtcgagtggttgaagaacgcagaagaggagagtgaatccgaagccgaagagggagattag

SEQ ID NO: 83496 - DNA, 578 bp, Artificial Sequence
  derived and/or modified sequence
agaaagaaaaggtatcagtacagaaaagaagagtcagaaaataccgtgcaaaggcacattcagaacgtaaccaggatagctggagccaggattcaaggagagagggtgtcttttatgaataatcaaaagcagcaaaagccaacgctatcaggccagcgttttaaaactagaaaaagagatgaaaaagagaggtttgaccctactcagtttcaagactgtattattcaaggcttaactgaaaccggtactgatttggaagcagtagctaagtttcttgatgcttctggagcaaaacttgattaccgtcgatatgcagaaacactctttgacattctggtggctggtggaatgctggccccaggtggtacactggcagatgacatgatgcgtacagatgtctgcgtgtttgcagcccaagaagatctagagaccatgcaagcatttgctcaggtttttaacaagttaatcaggcgctacaaatacctggagaaaggttttgaagatgaagtaaaaaagctgctgctgttcttgaagggtttttcagagtcggagaggaacaagctagctatgttgactgg

SEQ ID NO: 83497 - protein, 408 aa, Artificial Sequence
  derived and/or modified sequence
MIPGNRMLMVVLLCQVLLGGASHASLIPETGKKKVAEIQGHAGGRRSGQSHELLRDFEATLLQMFGLRRRPQPSKSAVIPDYMRDLYRLQSGEEEEEQIHSTGLEYPERPASRANTVRSFHHEEHLENIPGTSENSAFRFLFNLSSIPENEVISSAELRLFREQVDQGPDWERGFHRINIYEVMKPPAEVVPGHLITRLLDTRLVHHNVTRWETFDVSPAVLRWTREKQPNYGLAIEVTHLHQTRTHQGQHVRISRSLPQGSGNWAQLRPLLVTFGHDGRGHALTRRRRAKRSPKHHSQRARKKNKNCRRHSLYVDFSDVGWNDWIVAPPGYQAFYCHGDCPFPLADHLNSTNHAIVQTLVNSVNSSIPKACCVPTELSAISMLYLDEYDKVVLKNYQEMVVEGCGCR

SEQ ID NO: 83498 - protein, 110 aa, Artificial Sequence
  derived and/or modified sequence
MIPGNRMLMVVLLCQVLLGGASHASLIPETGKKKVAEIQGHAGGRRSGQSHELLRDFEATLLQMFGLRRRPQPSKSAVIPDYMRDLYRLQSGEEEEEQIHSTGLEYPERP

SEQ ID NO: 83499 - protein, 1038 aa, Artificial Sequence
  derived and/or modified sequence
MTSSLQRPWRVPWLPWTILLVSTAAASQNQERLCAFKDPYQQDLGIGESRISHENGTILCSKGSTCYGLWEKSKGDINLVKQGCWSHIGDPQECHYEECVVTTTPPSIQNGTYRFCCCSTDLCNVNFTENFPPPDTTPLSPPHSFNRDETIIIALASVSVLAVLIVALCFGYRMLTGDRKQGLHSMNMMEAAASEPSLDLDNLKLLELIGRGRYGAVYKGSLDERPVAVKVFSFANRQNFINEKNIYRVPLMEHDNIARFIVGDERVTADGRMEYLLVMEYYPNGSLCKYLSLHTSDWVSSCRLAHSVTRGLAYLHTELPRGDHYKPAISHRDLNSRNVLVKNDGTCVISDFGLSMRLTGNRLVRPGEEDNAAISEVGTIRYMAPEVLEGAVNLRDCESALKQVDMYALGLIYWEIFMRCTDLFPGESVPEYQMAFQTEVGNHPTFEDMQVLVSREKQRPKFPEAWKENSLAVRSLKETIEDCWDQDAEARLTAQCAEERMAELMMIWERNKSVSPTVNPMSTAMQNERNLSHNRRVPKIGPYPDYSSSSYIEDSIHHTDSIVKNISSEHSMSSTPLTIGEKNRNSINYERQQAQARIPSPETSVTSLSTNTTTTNTTGLTPSTGMTTISEMPYPDETNLHTTNVAQSIGPTPVCLQLTEEDLETNKLDPKEVDKNLKESSDENLMEHSLKQFSGPDPLSSTSSSLLYPLIKLAVEATGQQDFTQTANGQACLIPDVLPTQIYPLPKQQNLPKRPTSLPLNTKNSTKEPRLKFGSKHKSNLKQVETGVAKMNTINAAEPHVVTVTMNGVAGRNHSVNSHAATTQYANGTVLSGQTTNIVTHRAQEMLQNQFIGEDTRLNINSSPDEHEPLLRREQQAGHDEGVLDRLVDRRERPLEGGRTNSNNNNSNPCSEQDVLAQGVPSTAADPGPSKPRRAQRPNSLDLSATNVLDGSSIQIGESTQDGKSGSGEKIKKRVKTPYSLKRWRPSTWVISTESLDCEVNNNGSNRAVHSKSSTAVYLAEGGTATTMVSKDIGMNCL

SEQ ID NO: 83500 - DNA, 3117 bp, Artificial Sequence
  derived and/or modified sequence
atgaccagtagcttgcagcgaccctggagagtcccctggctgccatggacgattcttctcgtcagtacagccgctgcctcccagaatcaagaaagactgtgcgcattcaaggacccgtaccagcaagatcttgggataggggagtcaagaatcagccacgagaatggaactattctctgttcaaaaggttccacctgttatggtttgtgggaaaaaagcaaaggcgatattaatttggtgaagcaaggatgctggtcccacatcggagatccacaggaatgccactacgaagagtgtgtggtgaccacaacaccgccctcaattcagaatgggacttacagattctgttgctgttccaccgatttgtgtaacgtaaatttcaccgagaacttcccccccccagatacgacacccttgagccctcctcacagtttcaacagagatgagactatcatcattgctctggcttcagtcagtgtccttgcagtgttaattgtcgcactgtgcttcgggtataggatgctgactggggaccggaaacaggggttacattccatgaatatgatggaagcagcggccagcgaaccttctctcgacctcgacaatttaaagcttcttgagcttattggccgcggtaggtacggagccgtctacaagggctccctcgacgagaggcctgtcgccgtcaaagtgttcagtttcgcaaacaggcagaacttcatcaatgagaagaacatatatcgagtgcctctaatggagcatgataatattgcacggttcatcgtgggtgatgaacgggtcaccgcagacggcagaatggaatatctcctggtcatggagtactatccgaacggatccctgtgtaaatacctgtctctacacacatccgactgggtaagtagttgtcgcctggctcactctgtgactcgaggcctggcctacttgcatacggagctccctcggggcgaccattacaagcctgctatttcacacagagacctgaactcccgcaacgtcctggtgaaaaatgatggcacttgcgtcatatcggacttcggattgagcatgcgcctaaccgggaaccgtctggtgcgcccgggagaagaggacaatgcagcgatctcagaggttggaactatacggtatatggccccagaagtgctcgagggagctgtcaacctgcgcgattgcgaatccgccctgaagcaggtggacatgtacgccctgggtcttatctactgggaaattttcatgaggtgcacagacctcttccccggggagtccgtgcccgagtatcaaatggcttttcaaacagaggtcgggaaccaccctacatttgaggacatgcaggttctagtctcccgagagaagcagagacccaaatttcccgaggcatggaaggagaacagcctcgcagtcaggtctcttaaagaaaccatcgaggactgctgggatcaagatgctgaagcccgcctgacagcccagtgtgccgaggagcggatggccgagctaatgatgatatgggagcggaacaagtcagtttctccgaccgttaaccctatgagcacggctatgcagaacgagcggaacctgagccacaatagaagggtgccaaaaatcggaccgtatcctgattactcctccagctcatacatcgaagacagtattcaccacactgactccattgtgaagaatatcagcagtgaacactccatgtcatctacccctttgaccataggcgaaaagaaccggaactctatcaactacgagcgccagcaggcacaggcccgcattccatcccccgagacatccgtgacgagcttgagtacaaatacgacaacaactaacacaactggcctgactcccagcacaggaatgacaactatctcagagatgccctaccccgacgagaccaacctgcatactacaaacgtcgctcagagcattgggcccactcctgtgtgtctccaactgaccgaagaggatctggagaccaataaactggacccaaaggaggtggataagaatctgaaggagtcctccgacgaaaacctgatggagcattcactcaaacagttttctggccccgaccccctgtctagtacctcctctagcctgttataccccctgatcaagttagctgtggaagcaacagggcagcaggacttcactcagacggctaatggccaggcttgtctgatccctgatgtgcttcccacccagatttatcctcttccaaagcagcagaacctacccaaacgcccaacctcattgccgctcaatacaaagaacagcacgaaggagccgagacttaaatttggatccaaacataagagtaacctaaagcaggtggagacaggagtggccaagatgaacaccataaatgcagcagagccccacgtcgtcacagtgaccatgaatggggtggccggcaggaaccacagcgttaactcacacgcggccacgacccaatacgctaacggcacagtcctgtctggacagaccactaatatagtgacacatagggcccaagaaatgctccagaatcagttcatcggagaagacacacgcctaaacattaacagctcgcctgacgagcacgagccccttctccgtagggaacaacaagcaggccacgacgaaggggtgctggaccgcttggtggatcggagagaacgtccactggaaggagggcggactaattcaaataataataactccaatccatgcagcgagcaggatgtactcgcccagggagtgccatccaccgctgctgacccaggcccatcgaaacctcgaagggctcagagacctaattcgcttgatctgtccgccaccaacgtcttggatggttcaagcattcaaattggcgaatctacgcaagacggaaaaagcggaagtggtgagaagattaagaagcgagttaagactccatactcccttaaacgatggcgacccagtacctgggtgatctccactgagtctttagactgtgaggtgaataacaacggctctaatagagctgttcatagtaaatctagtactgcggtctacctcgctgaaggcgggacagcgaccactatggtttctaaagatattgggatgaactgcctgtag

SEQ ID NO: 83501 - DNA, 3117 bp, Artificial Sequence
  derived and/or modified sequence
atgaccagcagcctgcagaggccctggagggtgccctggctgccctggaccatcctgctggtgtccacagctgctgccagccagaaccaggagcggctgtgtgccttcaaggacccctaccagcaggacctgggcatcggggagagccgcatcagccatgaaaatggcaccatcctgtgcagcaagggcagcacctgctacggcctgtgggagaagagcaagggggacatcaacctggtgaagcagggctgctggagccacatcggggacccccaggagtgccactatgaggagtgtgtggtgaccaccaccccacccagcatccagaatggcacctaccgcttctgctgctgcagcacagacctgtgcaatgtgaacttcacagagaacttccccccaccagacaccacccccctgagccccccccacagcttcaacagagatgagaccatcatcatcgccctggcctctgtgtctgtgctggccgtgctgattgtggccctgtgcttcggctacaggatgctgaccggggacaggaagcagggcctgcacagcatgaacatgatggaggccgccgccagcgagcccagcctggacctggacaacctgaagctgctggagctgattggccggggccgctacggggctgtgtacaagggcagcctggatgagaggcctgtggccgtgaaggtgttctcctttgccaaccggcagaacttcatcaatgagaagaacatctacagagtgcccctgatggagcatgacaacatcgcccgcttcatcgtgggagatgagcgggtgacagcagatggccgcatggagtacctgctggtgatggagtactaccccaacggcagcctgtgcaagtacctgagcctgcacaccagtgactgggtgagcagctgccgcctggcccacagcgtgacccggggcctggcctacctgcacacagagctgcccaggggggaccactacaagccagccatcagccaccgggacctgaacagcagaaatgtgctggtgaagaatgatggcacctgtgtgatcagtgactttggcctgtccatgaggctgactggaaaccggctggtgcggcctggagaagaagataatgctgccatcagcgaggtgggcaccatccgctacatggcccctgaggtgctggagggcgctgtgaacctgcgggactgtgagagcgccctgaagcaggtggacatgtatgccctgggcctcatctactgggagatcttcatgcgctgcacagacctcttccctggagagagcgtgcctgagtaccagatggccttccagacagaggtgggcaaccaccccacctttgaggacatgcaggtgctggtgtcccgggagaagcagaggcccaagtttcctgaggcctggaaggagaacagcctggccgtgcgcagcctgaaggagaccatcgaggactgctgggaccaggatgctgaggcccggctgacagcccagtgtgccgaggagaggatggccgagctgatgatgatctgggagaggaacaagtctgtgagccccaccgtgaaccccatgagcacagccatgcagaatgaaagaaacctgagccacaacagaagagtgcccaagattggcccctacccagactacagcagcagcagctacattgaagattccatccaccacacagacagcatcgtgaagaacatcagcagcgagcacagcatgagcagcacccccctgaccatcggggagaagaacagaaacagcatcaactatgagcggcagcaggcccaggcccgcatccccagccctgagacctctgtgaccagcctgagcaccaacaccaccaccaccaacaccaccggcctgacccccagcacaggcatgaccaccatcagcgagatgccctacccagatgagaccaacctgcacaccaccaacgtggcccagagcatcggccccacccctgtgtgcctgcagctgacagaggaggacctggagaccaacaagctggaccccaaggaggtggacaagaacctgaaggagagcagtgatgagaacctgatggagcacagcctgaagcagttcagcggccctgaccccctgagcagcaccagcagcagcctgctgtaccccctcatcaagctggccgtggaggccaccggccagcaggacttcacccagacagccaacggccaggcctgcctgatcccagatgtgctgcccacccagatctaccccctgcccaagcagcagaacctgcccaagaggcccaccagcctgcccctgaacaccaagaacagcaccaaggagccccggctgaagtttggcagcaagcacaagagcaacctgaagcaggtggagaccggggtggccaagatgaacaccatcaatgctgctgagccccacgtggtgacagtgaccatgaatggagtggccggcaggaaccacagcgtgaacagccacgccgccaccacccagtatgccaatggaacagtgctgagcggccagaccaccaacatcgtgacccaccgggcccaggagatgctgcagaaccagttcatcggggaggacacccggctgaacatcaacagcagcccagatgaacatgagcccctgctgcggcgggagcagcaggccggccatgatgagggcgtgctggaccggctggtggaccggcgggagcggcccctggagggcggccgcaccaacagcaacaacaacaacagcaacccctgcagcgagcaggatgtgctggcccagggcgtgcccagcacagctgctgaccccggccccagcaagccccggcgggcccagaggcccaacagcctggacctgagcgccaccaacgtgctggatggcagcagcatccagatcggggagagcacccaggacggcaagagcggcagcggggagaagatcaagaagagggtgaagaccccctacagcctgaagcgctggaggcccagcacctgggtgatcagcacagagagcctggactgtgaggtgaacaacaacggcagcaacagagctgtgcacagcaagagcagcacagctgtgtacctggccgagggcggcacagccaccaccatggtgtccaaggacatcggcatgaactgcctgtag

SEQ ID NO: 83502 - DNA, 3117 bp, Artificial Sequence
  derived and/or modified sequence
atgaccagcagcctgcagcggccctggcgggtgccctggctgccctggaccatactgctggtgtctactgccgcggcctcgcagaaccaggagaggctatgtgccttcaaggacccttaccagcaggacttaggaatcggcgagtctaggatctctcatgagaatggcaccattctctgctcaaaggggtccacttgttacggtttatgggagaagtcgaaaggcgacataaacctggtgaagcaagggtgctggtcacacattggcgacccccaagagtgtcactacgaggagtgtgtagtcaccactacacctccaagcattcaaaatggaacgtatcggttctgttgttgctccaccgatctgtgtaatgtgaattttacggagaacttcccccctcccgacaccacccccttatcacctccacacagtttcaacagagatgagactatcatcatcgcgctcgccagcgtgtcagtcctcgcagttctcatagtggcattgtgttttggctataggatgctcacaggcgacaggaaacagggtttgcatagcatgaatatgatggaggctgcggccagcgagccatccctggacctggacaatctaaagctgctcgagctcattggccgaggcaggtatggagctgtttataagggttctctggacgagaggcctgtggcggtcaaggtctttagctttgccaatcgacagaactttattaatgaaaagaacatttatcgcgtgccgctgatggagcatgataacatagcccgctttatagtgggtgatgagcgcgttactgctgatggtaggatggaatacctactggtgatggagtactacccaaatgggtccttgtgtaagtacctgtcactgcacacatctgactgggtgtccagctgccggcttgcccattcagtgactaggggactggcttatctgcatactgaattgcctcggggcgatcattataaacctgcaataagccatcgcgacttgaattcccgcaatgtcctcgtgaaaaacgacggcacatgcgtcatctctgattttggacttagcatgcgcctgactggcaatcgtctcgtacggcccggggaagaagataatgcagcaatttcagaagtcggtacaataagatacatggccccggaagttttggagggagcagtaaacttaagggactgtgaaagtgcacttaagcaggtagacatgtatgcactggggttaatttattgggagattttcatgcggtgtactgacctgttcccaggggaatctgtgccagagtaccagatggcatttcaaactgaggtgggcaaccaccccaccttcgaagatatgcaggtgctggtgtcgcgtgaaaagcaacggcctaagttcccagaggcgtggaaggagaatagcttggccgtccgatccctgaaagaaaccatagaagactgctgggatcaggacgcagaggccaggctgacggcacagtgcgccgaggaaaggatggctgagctgatgatgatttgggaaagaaataaaagtgtctcccccacagttaaccccatgtccaccgccatgcagaatgagcggaaccttagccacaacagacgggtgccaaaaatcggaccttatcccgactatagctcctcgagctacattgaggactccattcaccacaccgactcaatagtgaaaaatatcagtagcgagcactcaatgtcttctaccccgctaacaatcggagagaagaatcgcaacagcattaattacgaaagacagcaagcccaggcccggattccatcccctgaaacctccgtaactagcctcagtactaataccacaactacaaatactaccggcctgaccccctcaactggcatgactacaatttccgagatgccttacccagacgaaaccaatctgcatacaactaatgttgcccagagtatagggccaaccccagtgtgtctgcaactgactgaggaggaccttgagacgaacaaactggacccgaaagaggtggataagaacctgaaggagtcaagcgatgaaaatttaatggagcactccctcaagcaattctccggcccagatcccctgtccagtacttccagttcccttctgtacccattaattaagctagcagtggaggccacaggacaacaggatttcacgcagacagctaatggccaggcatgtttaatacccgatgttcttcctacccagatttatcccctgccaaagcaacagaatctgccaaagaggcctaccagtctgccactgaataccaagaactcgaccaaggagccccgcttgaaattcggaagcaagcacaagagcaaccttaagcaggtcgagaccggagtggctaagatgaacacaattaacgctgcagaaccacatgtcgttactgtgacaatgaacggcgtggccgggagaaatcactcagttaatagccacgccgcaactactcagtacgcaaatggaaccgttttgagcggccaaaccacgaacatcgtgacacacagagctcaggaaatgctccagaaccaatttataggagaagatacccggcttaacattaatagcagccccgatgagcatgaaccactgctccgtcgggagcagcaggcaggccatgatgaaggcgttctcgatagactcgtcgataggcgcgaaaggcccttagagggcggacgaaccaatagtaacaacaacaactcaaacccgtgttctgagcaggacgttctggcacaaggggttccttcaaccgctgccgaccctggtccttctaaacctagacgagctcagagacccaacagcctggacctcagcgctaccaacgtcctggatgggtccagtatccaaataggggagtctactcaggatgggaaaagcgggagcggcgaaaaaatcaagaagcgcgtgaagacaccctactccctcaagcgctggcggccttctacttgggtgatctcgaccgagagcctggactgcgaggtgaacaacaatggctccaacagagcggtacactccaaatctagcaccgccgtgtacctcgctgaagggggtaccgccactacaatggttagcaaggacatcggtatgaactgcctatag

SEQ ID NO: 83503 - DNA, 3117 bp, Artificial Sequence
  derived and/or modified sequence
atgacgagttcactccagcgcccttggcgtgtcccttggctgccctggaccattctgttggtctcaaccgccgctgcatctcagaaccaggaaagactctgcgcgtttaaagatccctaccaacaagatttggggataggcgagtcgcggatctcccacgaaaatgggactatcctgtgttctaagggatctacctgttacggcctttgggagaagtccaaaggagacatcaaccttgtgaagcaaggttgctggtcccacataggtgaccctcaagaatgccactatgaggagtgtgttgtcaccactacccccccttcaatccagaatggaacttacaggttctgttgctgctccactgacctttgtaatgttaattttactgaaaactttccccctcctgacacaactccgcttagtcctccccacagcttcaaccgagacgagacgatcattatcgctcttgcttccgtaagtgtcctcgccgtcttgattgtcgccctgtgcttcggctacaggatgctgactggggatcgcaagcagggtttacattcaatgaacatgatggaggctgctgcttccgaaccgtccctcgatctggataatctgaagctactggagttgatcggaagagggaggtacggcgctgtatacaagggcagcctggatgaaagacctgtcgcggtgaaggtgttctcctttgctaataggcaaaactttataaacgaaaaaaatatctaccgggtgcccctaatggagcacgacaacatcgcccgattcatcgtgggagatgaacgagtgacagctgacggccgaatggagtacttgctggtcatggagtactatccaaatgggtccctgtgtaagtatctgtctctgcataccagcgattgggtctcttcctgtcggctggcccactcagtaacaaggggtctggcgtacttgcacaccgagctgccacgaggtgatcattataagccagctatctcgcaccgcgatctcaacagcaggaatgtactcgtgaaaaatgacgggacttgcgttatctcggattttggcctgtccatgaggctgaccgggaatagactggtgagacctggggaagaggacaatgcagctatttctgaggttggtactatcagatatatggcacctgaggttctcgagggtgccgttaatttgcgcgactgtgaatctgcactgaagcaagtcgacatgtatgctcttgggctcatctactgggagatcttcatgcgatgcacagacttattccctggtgaatctgtgccggaataccagatggcctttcaaactgaggttggtaaccatccaacatttgaggacatgcaagttctggtgagtcgagagaaacaacggcctaagtttcctgaggcttggaaagagaactctctggccgtaagaagcctaaaggaaactatagaggattgctgggaccaggacgcagaagccagactcaccgctcaatgcgccgaggagagaatggcagagctgatgatgatctgggagcgcaataaaagcgtttcccctaccgtgaacccaatgagcactgctatgcagaatgagcggaacttaagtcacaatagacgcgtgcccaagattggtccataccctgactacagctcctcctcatacatcgaagactctatccaccatacggatagcatagtgaagaacatttcttcagagcattcaatgtcctctacccccctgaccatcggcgagaaaaatcggaactctataaactacgagcggcagcaagctcaggcaagaattccatctccagagactagtgtaactagcctgagcactaacacaaccactaccaatactactgggttgaccccctctacggggatgaccactatatctgaaatgccctatcctgacgagacaaatctgcatactacgaatgttgcccagtctattggccctacaccagtttgcctgcaacttactgaagaagacctggagaccaataagctagaccctaaagaggtggacaaaaatctgaaggagagttccgacgagaatctcatggaacactcgctcaagcagtttagcggaccggatcctctctcctctacctctagcagcttgttgtatcccttaattaagctggcagttgaagccacggggcagcaggattttacccaaactgcaaacgggcaggcctgcctaattccagacgttctgccaactcagatctatccgctgcccaagcagcagaatctcccaaagcggcctacctcccttcctttaaacacaaagaattccactaaagaaccccgactgaagttcggaagcaaacacaagagcaatctgaagcaagtggaaacgggagtggctaagatgaacaccattaacgctgcggagcctcatgtggtgaccgtgaccatgaatggcgttgccggacgaaatcactccgtgaactctcatgctgcaactacccagtatgctaatggcactgttctgagcggccagacgacaaatatagtgacgcacagagcgcaggaaatgctccaaaatcagtttatcggagaagatactaggctgaacatcaactcttctcccgacgagcatgagccgctacttcgccgtgaacaacaagctggacatgacgagggagtgttggatcgtctcgtggatcgacgcgaacggccattggagggcggacgtaccaattccaataacaataattctaacccttgctccgaacaggacgtgttggcccagggagtccccagcaccgctgctgatccagggcctagtaagcctagacgggctcaacgacccaactcgctcgatttgtcagctaccaacgtgctggacggttcgtcgattcagatcggggagtccactcaggatgggaagtcaggtagcggggaaaagattaaaaaacgggtcaagaccccttacagccttaagaggtggaggccgagcacttgggtgattagcactgaatcgctcgattgcgaagtgaacaataatggctccaacagggctgtacattctaaatcctcaaccgccgtctacctggctgaagggggtacagccacaaccatggtgtccaaggacatcggtatgaactgtctctag

SEQ ID NO: 83504 - DNA, 11461 bp, Artificial Sequence
  derived and/or modified sequence
ggaagcaccgaagcgaaacttaaggaatcctgccttcccggagccgcgggcgatgcgactagggctgccgggcgccgccgccgcccgtccggcttcgtccttcccggcagtcgggaactagttctgaccctcgccccccgaccccggatcgaatccccgccctccgcaccctggatatgttttctcccagacctggatatttttttgatatcgtgaaactacgagggaaataatttgggggatttcttcttggctccctgctttccccacagacatgccttccgtttggagggccgcggcaccccgtccgaggcgaaggaacccccccagccgcgagggagagaaatgaagggaatttctgcagcggcatgaaagctctgcagctaggtcctctcatcagccatttgtcctttcaaactgtattgtgatacgggcaggatcagtccacgggagagaagacgagcctcccggctgtttctccgccggtctacttcccatatttcttttctttgccctcctgattcttggctggcccagggatgacttcctcgctgcagcggccctggcgggtgccctggctaccatggaccatcctgctggtcagcactgcggctgcttcgcagaatcaagaacggctatgtgcgtttaaagatccgtatcagcaagaccttgggataggtgagagtagaatctctcatgaaaatgggacaatattatgctcgaaaggtagcacctgctatggcctttgggagaaatcaaaaggggacataaatcttgtaaaacaaggatgttggtctcacattggagatccccaagagtgtcactatgaagaatgtgtagtaactaccactcctccctcaattcagaatggaacataccgtttctgctgttgtagcacagatttatgtaatgtcaactttactgagaattttccacctcctgacacaacaccactcagtccacctcattcatttaaccgagatgagacaataatcattgctttggcatcagtctctgtattagctgttttgatagttgccttatgctttggatacagaatgttgacaggagaccgtaaacaaggtcttcacagtatgaacatgatggaggcagcagcatccgaaccctctcttgatctagataatctgaaactgttggagctgattggccgaggtcgatatggagcagtatataaaggctccttggatgagcgtccagttgctgtaaaagtgttttcctttgcaaaccgtcagaattttatcaacgaaaagaacatttacagagtgcctttgatggaacatgacaacattgcccgctttatagttggagatgagagagtcactgcagatggacgcatggaatatttgcttgtgatggagtactatcccaatggatctttatgcaagtatttaagtctccacacaagtgactgggtaagctcttgccgtcttgctcattctgttactagaggactggcttatcttcacacagaattaccacgaggagatcattataaacctgcaatttcccatcgagatttaaacagcagaaatgtcctagtgaaaaatgatggaacctgtgttattagtgactttggactgtccatgaggctgactggaaatagactggtgcgcccaggggaggaagataatgcagccataagcgaggttggcactatcagatatatggcaccagaagtgctagaaggagctgtgaacttgagggactgtgaatcagctttgaaacaagtagacatgtatgctcttggactaatctattgggagatatttatgagatgtacagacctcttcccaggggaatccgtaccagagtaccagatggcttttcagacagaggttggaaaccatcccacttttgaggatatgcaggttctcgtgtctagggaaaaacagagacccaagttcccagaagcctggaaagaaaatagcctggcagtgaggtcactcaaggagacaatcgaagactgttgggaccaggatgcagaggctcggcttactgcacagtgtgctgaggaaaggatggctgaacttatgatgatttgggaaagaaacaaatctgtgagcccaacagtcaatccaatgtctactgctatgcagaatgaacgcaacctgtcacataataggcgtgtgccaaaaattggtccttatccagattattcttcctcctcatacattgaagactctatccatcatactgacagcatcgtgaagaatatttcctctgagcattctatgtccagcacacctttgactataggggaaaaaaaccgaaattcaattaactatgaacgacagcaagcacaagctcgaatccccagccctgaaacaagtgtcaccagcctctccaccaacacaacaaccacaaacaccacaggactcacgccaagtactggcatgactactatatctgagatgccatacccagatgaaacaaatctgcataccacaaatgttgcacagtcaattgggccaacccctgtctgcttacagctgacagaagaagacttggaaaccaacaagctagacccaaaagaagttgataagaacctcaaggaaagctctgatgagaatctcatggagcactctcttaaacagttcagtggcccagacccactgagcagtactagttctagcttgctttacccactcataaaacttgcagtagaagcaactggacagcaggacttcacacagactgcaaatggccaagcatgtttgattcctgatgttctgcctactcagatctatcctctccccaagcagcagaaccttcccaagagacctactagtttgcctttgaacaccaaaaattcaacaaaagagccccggctaaaatttggcagcaagcacaaatcaaacttgaaacaagtcgaaactggagttgccaagatgaatacaatcaatgcagcagaacctcatgtggtgacagtcaccatgaatggtgtggcaggtagaaaccacagtgttaactcccatgctgccacaacccaatatgccaatgggacagtactatctggccaaacaaccaacatagtgacacatagggcccaagaaatgttgcagaatcagtttattggtgaggacacccggctgaatattaattccagtcctgatgagcatgagcctttactgagacgagagcaacaagctggccatgatgaaggtgttctggatcgtcttgtggacaggagggaacggccactagaaggtggccgaactaattccaataacaacaacagcaatccatgttcagaacaagatgttcttgcacagggtgttccaagcacagcagcagatcctgggccatcaaagcccagaagagcacagaggcctaattctctggatctttcagccacaaatgtcctggatggcagcagtatacagataggtgagtcaacacaagatggcaaatcaggatcaggtgaaaagatcaagaaacgtgtgaaaactccctattctcttaagcggtggcgcccctccacctgggtcatctccactgaatcgctggactgtgaagtcaacaataatggcagtaacagggcagttcattccaaatccagcactgctgtttaccttgcagaaggaggcactgctacaaccatggtgtctaaagatataggaatgaactgtctgtgaaatgttttcaagcctatggagtgaaattattttttgcatcatttaaacatgcagaagatgtttaaaaataaaaaaaaaactgctttatcctcctgtcagcaccccctcccacccctgcaacaaagacttgctttaaatagatttcagctatgcagaaaaatttagcttatgcttccatatttttaaattttgttttttaagttttgcacttttgtttagtctcgctaaagttatatttgtctgttatgaccacagagttatatgtgtgtgtatcaaaagtggtctcaaaatatttttttaagaaaaaaagcaaaaacaatgtattgctgataatcagtttggaccagtttcttaaggtcattaaaacagaagcaaattaagacaggtttgactgcagtggtgtctggtatccatgttttatttctgggcacaagctagtttttatgttgatacgttcctgaacatattatcttgttggacatcttttctcttgtgttttgtttgaatgtgcaatagtttataggccacaaataagctttcttgtaagctctcttcctaacagggcacatattcttccataatataaacacttttctgccccatctcccatacttttgaaggtcagttctatgacagtgaattttgcacaggagaagcagctacctgatttcttactttctctctccttatcatggagaatacagaaacattgtctgaaagggctctaaagaaggaactaccaaaacctgacttgaaatgccatttcttttaaccttccaaatcctaaatgtttccttcaaggcatcttaataaacttatttgcttctggttttgggagttcataagagagaatagaacaaaatacaggacatcaaatattagccatttcccattttattttatttttctatgtaggttcatgttccatgttcatttatttaagaaatacatttttattggtaagcttatagagctacacttatggaatttttaagtaggtaaataaatggttaagacaaaatagtgttatagccttcattctctgaataggccatctttgactcataaaattacccttactgtttattataacttcagaagtaatttatagttctgaacctatagtatcttttaccctgttcccaagcaaagactggtgactttatctgaaaatgattcctcttcccatgacctaaaacactgtgaggaaaaatcattcaagtggcatgccaagtccctatgaaggaagggctgctatcaaacctaccttttttgagcaaactgagactaaacttctctcttttcaaaattgtgttatcttccttaatcctattttcataatttttccttttgccagtttttcacattatctttgatatgtgagcaacatttattatttacattagagtataccttttagtaataaaatgacttgaaatcatattatttttaaaagccctttgcttctttcattacttataatctcctctaaaacaacctctgcatgttttttttaaataaagcactttctgtcaaataatggacttttttctaaacagaaattattttctattaatttgcaaactgatgatttcacttttttttacttttttttcgattatcagagtacttagtaaatgttatatagtttagttctaagatagttccagggattaaaaggttaagaggaaaacacaaatcaccaaatttctgatttatgtttttatctcctgaacaatattttctcactcatattcctctatcttatcacttagctaaagacagcctaaatttcccaattttctgtccaaaatatttgtgatttacttgtatataagccttctcatttgccatgtgctgtgatcttacaagttagatgttactatacctaccatttattcagctggattgctgaacacagttctggattcatagaattaagaatatcttgttagtgcccaggatttccacgttttgtgttttattggcccttttctttattcagccccttaatctattttcagtcttctggcacgtaatttttttcacagttattattcttctattaacaaattatttttatctttcctagtacattttcacttagttctcttgcccttaaatatctttcacatgcattttaggatattcttttcaaatatttgtaggacaactttgaatcaaaataaattatgttccttctccaatttgaagcattgaggataaatgaccatttgaggtctaactgatcttttcctgccagaagagttatcttacgttctgctatatttgtatttgggccagttgattgtaggttgtccaacattttttaatattgggaaaattatgataaaatgctttaaaaattaatatgccagattaaaataactgaatagtttactatttcattcaagcatgtttaaaacaaataatttcctttcaccagtttttcttagtaaactcctgaaaaagtaggaaaggtggaaagtatatatcatttttataaattttaaattgtacatcagacttttaaaatctgtaatatacaagcaagcaaaattattttaaatgacttaattgtatgctaatactcatctgataataaatgcttcttaaagttgacatttaactgctatcacaaagttttatatgtagaaaagtggggtccttttgaataaaagatcattcaactaaaaatattaaaatttatttcactggatggtaatgtaaccttaaaagcatcataataggtaaagtctaatattagttcccttaacaaaatcctaactgtataccagaattaggtcactgaaagaacttgatttgaattacgtttagacaaaaatgatttaattgtaaattcttaaaactttctaaatgcataattggcaaaaaaaaaaacccactgttaccagtgtaggaagttacaagaaggcacatactgaatgctgaagtatacatatgctatttctcttaaacctcagagcaaccatatgagcattgtaattaatattcccattttacagatgaggaaactgaagctaagagaagctaagtaatatgcccaaggtccacatctagtaacagacaaagctgggatttcagtctatgtctgcctctctccacatctctttcatccataccacactgcctacatgccatatgacaggatgtgtaatgggctaacgtttatttaaaaagttcaggccaggtgcagtggcttatgcctataatccccgcactttgggaggccgagccgggtggatcatgaggtcagacgttcaacaccagcctggccaagatggtgaaaccccgtctctattaaaaatattttttaaaaattaactgagcgtggtggtgggcgcctgtagtcccagctactcaggaggctaaggcaggagaatctcttgaacccgagaggtggaggttgcagtgagctgagatcgcgccactgcactgcagcctaggcgacagagcaagactgcctcaaaaaaaaaacataaaaattcagtcactatactctggcacaattttcatttgtatatgagccaaaccacataccttaatgatttgggaagttaggcaaatatgagatatgtagacatatctatgctgattgttgcttgagaaataattactaattctagacaaaactcaatcctgtatcttccatcatgaatcttaaaatcatttcacttcactcctaacatttcttacattgcagaactaatggtaaagtaaattttacggaaaaagttaagatagctttgggaacagagacctttccctaaattgattccatagcagatttgggggaattaacaaagaatttcagtctcatcaatcctttgaatccatcttcaaaacttctgcttttaataactttagaaaatttactaatctatagaactaattgagtaggatataggaaggatacaaggatataatgtcctttttataaaagtttagtatagcttctttacatgtatccacttgttccagaaaatgtgcattggttctgaatgtgaaaatatttaaagagagaaaggaacactcaagtaagtgtgggcttcagtgggaattatcacaaaacattggcaagtatttttatttaaattattttcaaatttgacttctacagccaagtggaattggtaggctgtagctgttacactgaaatttctagtctttgtaagtgcctcctgaaagtcatttaaaatggaaaaatatttcaatgagcttttccttttttcatatttatggacatgaatattttattggagatcattaactcctagaatttgagattatatttccatacaacattttataaagttatgttgaacttactacctgttatgtgcaggttattatgtaactattcacagattgcttcatatattgctttatcttcccatctaacttcttaaagttaaaatccggacacacatgttgattatctagaccagtcattctggaaattgtaacactcccacataaaccccaggagactttttcagaatgcaatgtttctaaatgtactgttactggcagtttactctccagcatataaggttgcattttaacttttagattatgaactgtgcaaactttacccaaaactatcttgcatgattccctcctaaatatattccttgattaagtaaatctggcaaatcactgtttgagctagttacataaaatttgttatcaagagaaggcttttctacaagtttccagattaacataaagaaaagagggaatcacagggcatttaagtgcaccttcccattactttccttaaatcacctcatagttaggctgggcgcggtggctcacgcctgtaatcccagcactttgggaggccgagacggtggatcacgaggtcaggggactgagatcatcctggctaacacgatgaaacctcatctctactaaaaatacaaataattagccaggcatggtggcacgcgcctgtagtcccagctactcgggaggcagagacaggagaatcgtttgcacccgggaggcggaggttgttgcagtgagccgagatcgcgccaatgcactccagcctgggctacagagtgagactccatctcaaaaaaaaacaaaaaaaatcacctcatagtttatgtctgacttactccaaacctcagttatctgatttgtagtctgtgtcaggaaagttttcttcatatctattctgtctccctcctctttgattttaaatttttttcttttacccagtaggacaaaaaagagcagttggtcatcatccccaatattcttagtcttcagtatgcttcaggcctctcaatgaacacttaagtctcaattcttcagacaaaattgcttaagctcttctcctcagtcctattttaatgactttatatttaagaatatagaattatattttcttttatattcaaattcattactccagttaagtaatagtttgatagtttgatagaatcgagagttaagatgtttctatttgaaagtggattcaaccatcagaccaccagcaaatcggcacttaatttttgtgttatctaacattttctattgtggaattttatgattttatattctcattagttataactaaaaagccatgcacacagaattgtatatcattttgccattaaaattttttaacatattgcagcaagcttagttttatgattgagccacaaccttttacatattttttgtatgaaatattaaacactaaatgcaagattaactttcaaaagcaaaccctacattaatcaggtattatctatggacatttttgtagaccacttttgaaatacttattattttgcaacatagactggactatacaactttcatttaacttttaggtgactgatttaagttgagtgtgcatatagagaaaaacctagaaatttatctcatggcagatacatttgaaagtacttcagaagaatttatgctgtatattaaaactaggctcaaaataaatctatcgtatctttaaaagtccaattctgttattactgtgatgtttgtagtgttactattaaacattgtgaacatacacatttttaaaacaacttgaaacccattttaaaatctgggtaagagagaaggaatcttcagaacaaaatcacatcattagggtgtccagtttatgattgaatttttaagcaaattactgtatttgaaactacaacttgatttggttttcagttttaaaaggcaacatgtgggttttatccattttatttatacctttagatttcagaaacatcttcatgttttagatgcattctacagacatcatgttacttaaaaactcagggcccctttcatccctttgtacactgaaaaagttcaattgttagcaagtaagcaattagatccagttgaatatttaaagtgtttgttgcacagttcatttaatgtttcatcttatttgactttttcacatagatataatatcagatttcattaattataaaaagttgcccagttctgtaattactgaacagagggaatgactcaactaattggctacatgttgcaacaaatttaggcctttagagttgaagcactgacttaaaacgacttacatttctgttctttggtcaaatgaccatacatgatatgggacaaattgtttcattttgtttgttttttaataagggaacttggtaaagtagttcctgtcagataggattttctcaagagacaatttaacgttataaagccttctaaaagtgaactaaatattttataactttagtaatagcttggatggttttgagaaaataacctgtatttatcacattgtcaaacagaatttttctttgaatcagacaagttcaagctctaaattgatgtgctatatacttaaaatcctaggaagttatctgtaaccagtctcttgtctcaggctcttcaccttgttaccaatcctcgtaagtatgtaaaggaaacatatttttaaagaagcttaacagtaagaaaaaattactaaaagatgcaattcaaagataggtcccagtttaacactgaattgcttgacttctgtggcttttctttttctggccacatttatttatttaagcaatttttgtatgccttgttatttcatttccatagagattatattgtatcagtgtttatgtaagctggaatcatcctcagttttttgctgataatttttcaaataaagatacatggataattgtaaaatacactaactcttagggtgttgtagtagctgaaacatggagatgcgtagctgtcatgctttttctgaatggacaggagaaacataagctacggagtattcacttctgaggatgcttttccggaaaaagaaaggctagaaaatactcgcacttcctcagaaccctctttcttgttaacgggtatcttttgttggtgtgttttgctcttacattacagatagactatcatatatgactttatgaataatttcagttattttgcttttgtataagctgtctgaagccttgctatgctgtataagttgtgtttgatggatcagtgtgagtataaaataaagcaaatcacttttcttttgtattatctatggatgccactatgaaagctgacattaagccactaaagagttttctatgaataagtgtaagtaaatgctttgatatatataaacctaaataaaaagattgtattgatacagagacattggagaaggagattttaaggcagttctttaggtttaaaaaggcttgctgtaaaatggtgcgttattccgtttattaaagatcatattaatgacaata

SEQ ID NO: 83505 - DNA, 3117 bp, Artificial Sequence
  derived and/or modified sequence
atgaccagcagcctgcagagaccctggagagtgccctggctgccctggaccatcctgctggtgagcaccgccgccgccagccagaaccaggagagactgtgcgccttcaaggacccctaccagcaggacctgggcatcggcgagagcagaatcagccacgagaacggcaccatcctgtgcagcaagggcagcacctgctacggcctgtgggagaagagcaagggcgacatcaacctggtgaagcagggctgctggagccacatcggcgacccccaggagtgccactacgaggagtgcgtggtgaccaccaccccccccagcatccagaacggcacctacagattctgctgctgcagcaccgacctgtgcaacgtgaacttcaccgagaacttccccccccccgacaccacccccctgagccccccccacagcttcaacagagacgagaccatcatcatcgccctggccagcgtgagcgtgctggccgtgctgatcgtggccctgtgcttcggctacagaatgctgaccggcgacagaaagcagggcctgcacagcatgaacatgatggaggccgccgccagcgagcccagcctggacctggacaacctgaagctgctggagctgatcggcagaggcagatacggcgccgtgtacaagggcagcctggacgagagacccgtggccgtgaaggtgttcagcttcgccaacagacagaacttcatcaacgagaagaacatctacagagtgcccctgatggagcacgacaacatcgccagattcatcgtgggcgacgagagagtgaccgccgacggcagaatggagtacctgctggtgatggagtactaccccaacggcagcctgtgcaagtacctgagcctgcacaccagcgactgggtgagcagctgcagactggcccacagcgtgaccagaggcctggcctacctgcacaccgagctgcccagaggcgaccactacaagcccgccatcagccacagagacctgaacagcagaaacgtgctggtgaagaacgacggcacctgcgtgatcagcgacttcggcctgagcatgagactgaccggcaacagactggtgagacccggcgaggaggacaacgccgccatcagcgaggtgggcaccatcagatacatggcccccgaggtgctggagggcgccgtgaacctgagagactgcgagagcgccctgaagcaggtggacatgtacgccctgggcctgatctactgggagatcttcatgagatgcaccgacctgttccccggcgagagcgtgcccgagtaccagatggccttccagaccgaggtgggcaaccaccccaccttcgaggacatgcaggtgctggtgagcagagagaagcagagacccaagttccccgaggcctggaaggagaacagcctggccgtgagaagcctgaaggagaccatcgaggactgctgggaccaggacgccgaggccagactgaccgcccagtgcgccgaggagagaatggccgagctgatgatgatctgggagagaaacaagagcgtgagccccaccgtgaaccccatgagcaccgccatgcagaacgagagaaacctgagccacaacagaagagtgcccaagatcggcccctaccccgactacagcagcagcagctacatcgaggacagcatccaccacaccgacagcatcgtgaagaacatcagcagcgagcacagcatgagcagcacccccctgaccatcggcgagaagaacagaaacagcatcaactacgagagacagcaggcccaggccagaatccccagccccgagaccagcgtgaccagcctgagcaccaacaccaccaccaccaacaccaccggcctgacccccagcaccggcatgaccaccatcagcgagatgccctaccccgacgagaccaacctgcacaccaccaacgtggcccagagcatcggccccacccccgtgtgcctgcagctgaccgaggaggacctggagaccaacaagctggaccccaaggaggtggacaagaacctgaaggagagcagcgacgagaacctgatggagcacagcctgaagcagttcagcggccccgaccccctgagcagcaccagcagcagcctgctgtaccccctgatcaagctggccgtggaggccaccggccagcaggacttcacccagaccgccaacggccaggcctgcctgatccccgacgtgctgcccacccagatctaccccctgcccaagcagcagaacctgcccaagagacccaccagcctgcccctgaacaccaagaacagcaccaaggagcccagactgaagttcggcagcaagcacaagagcaacctgaagcaggtggagaccggcgtggccaagatgaacaccatcaacgccgccgagccccacgtggtgaccgtgaccatgaacggcgtggccggcagaaaccacagcgtgaacagccacgccgccaccacccagtacgccaacggcaccgtgctgagcggccagaccaccaacatcgtgacccacagagcccaggagatgctgcagaaccagttcatcggcgaggacaccagactgaacatcaacagcagccccgacgagcacgagcccctgctgagaagagagcagcaggccggccacgacgagggcgtgctggacagactggtggacagaagagagagacccctggagggcggcagaaccaacagcaacaacaacaacagcaacccctgcagcgagcaggacgtgctggcccagggcgtgcccagcaccgccgccgaccccggccccagcaagcccagaagagcccagagacccaacagcctggacctgagcgccaccaacgtgctggacggcagcagcatccagatcggcgagagcacccaggacggcaagagcggcagcggcgagaagatcaagaagagagtgaagaccccctacagcctgaagagatggagacccagcacctgggtgatcagcaccgagagcctggactgcgaggtgaacaacaacggcagcaacagagccgtgcacagcaagagcagcaccgccgtgtacctggccgagggcggcaccgccaccaccatggtgagcaaggacatcggcatgaactgcctgtag

SEQ ID NO: 83506 - protein, 228 aa, Artificial Sequence
  derived and/or modified sequence
MAAPQDVHVRICNQEIVKFDLEVKALIQDIRDCSGPLSALTELNTKVKEKFQQLRHRIQDLEQLAKEQDKESEKQLLLQEVENHKKQMLSNQASWRKANLTCKIAIDNLEKAELLQGGDLLRQRKTTKESLAQTSSTITESLMGISRMMAQQVQQSEEAMQSLVTSSRTILDANEEFKSMSGTIQLGRKLITKYNRRELTDKLLIFLALALFLATVLYIVKKRLFPFL

SEQ ID NO: 83507 - DNA, 687 bp, Artificial Sequence
  derived and/or modified sequence
atggccgccccccaggacgtgcacgtgagaatctgcaaccaggagatcgtgaagttcgacctggaggtgaaggccctgatccaggacatcagagactgcagcggccccctgagcgccctgaccgagctgaacaccaaggtgaaggagaagttccagcagctgagacacagaatccaggacctggagcagctggccaaggagcaggacaaggagagcgagaagcagctgctgctgcaggaggtggagaaccacaagaagcagatgctgagcaaccaggccagctggagaaaggccaacctgacctgcaagatcgccatcgacaacctggagaaggccgagctgctgcagggcggcgacctgctgagacagagaaagaccaccaaggagagcctggcccagaccagcagcaccatcaccgagagcctgatgggcatcagcagaatgatggcccagcaggtgcagcagagcgaggaggccatgcagagcctggtgaccagcagcagaaccatcctggacgccaacgaggagttcaagagcatgagcggcaccatccagctgggcagaaagctgatcaccaagtacaacagaagagagctgaccgacaagctgctgatcttcctggccctggccctgttcctggccaccgtgctgtacatcgtgaagaagagactgttccccttcctgtag

SEQ ID NO: 83508 - DNA, 687 bp, Artificial Sequence
  derived and/or modified sequence
atggcggctccgcaggatgtgcatgtccgaatctgtaatcaggagatcgtcaaattcgatctggaggttaaagcccttatccaggacattcgtgactgttctggccccctgtccgctctcacagagttaaacacaaaggtgaaagagaagtttcaacaacttagacataggattcaggaccttgaacagctcgccaaagaacaggataaggagtcggagaaacagctccttctgcaagaggttgaaaaccataagaagcagatgctgtctaatcaggcctcctggagaaaggccaatctcacatgcaagatagctattgacaatttggagaaggcggagctgctgcaaggtggagatctcctgcgccagcgcaaaacaacaaaggaaagcctggctcagaccagctccaccataactgaatccctcatgggtatctcacgcatgatggcccaacaggtccagcaatctgaggaagctatgcaatcgttggtcacatcttcgaggacaattctggacgccaacgaggagtttaagtccatgtccggtactatacagctgggtcggaaactaataactaagtataaccggcgcgagctcacagacaaactgctgatctttttggcattggcactctttctcgctaccgtgctgtacatcgtgaagaagcgcctgttcccttttctctag

SEQ ID NO: 83509 - DNA, 687 bp, Artificial Sequence
  derived and/or modified sequence
atggccgccccccaggatgtgcacgtgcgcatctgcaaccaggagatcgtgaagtttgacctggaggtgaaggccctgatccaggacatccgggactgcagcggccccctgagcgccctgacagagctgaacaccaaggtgaaggagaagttccagcagctgcggcaccgcatccaggacctggagcagctggccaaggagcaggacaaggagagcgagaagcagctgctgctgcaggaggtggagaaccacaagaagcagatgctgagcaaccaggcctcctggaggaaggccaacctgacctgcaagatcgccatcgacaacctggagaaggccgagctgctgcagggcggggacctgctgcggcagaggaagaccaccaaggagagcctggcccagaccagcagcaccatcacagagagcctgatgggcatcagcaggatgatggcccagcaggtgcagcagagcgaggaggccatgcagagcctggtgaccagcagcaggaccatcctggatgccaatgaggagttcaagtccatgagcggcaccatccagctgggcaggaagctgatcaccaagtacaacagaagagagctgacagacaagctgctgatcttcctggccctggccctcttcctggccaccgtgctgtacatcgtgaagaagaggctcttccccttcctgtag

SEQ ID NO: 83510 - DNA, 687 bp, Artificial Sequence
  derived and/or modified sequence
atggccgccccccaggacgtgcacgtgcggatctgcaaccaggagatagtgaagttcgacctcgaagtgaaagctcttattcaggatattagggattgttctggacccctctcggccctcacagagctgaataccaaggttaaagaaaagtttcagcagttgaggcataggatacaggaccttgagcagctggcaaaggaacaggacaaagaatcagaaaagcagttactgctgcaggaggtagaaaaccataagaagcagatgctttctaaccaggcttcgtggagaaaggctaacctgacttgtaaaattgccatcgataaccttgaaaaagcagagctgcttcagggtggcgatctgctgaggcagaggaaaaccaccaaagaatcgctggcccagacttcaagcactatcacagagtctttgatgggcatctccaggatgatggcccagcaagttcagcagtccgaggaggccatgcaatcccttgtgaccagttcccggacgattcttgatgcaaacgaagaatttaaatctatgtctggcaccatccagttggggagaaagctcatcacgaagtacaaccggagggaattaactgataaactgctgatttttctggcactggccctcttcctagccactgtgctgtatatcgttaagaaaaggctatttccatttctttag

SEQ ID NO: 83511 - DNA, 687 bp, Artificial Sequence
  derived and/or modified sequence
atggccgctcctcaagacgttcacgtgcgaatctgcaaccaagaaatcgtgaagttcgatcttgaggtgaaggccttgatccaggatattagggactgctccggcccactgtcggcgttgacagagcttaatacaaaggttaaagaaaaattccagcagcttcggcataggatccaggaccttgagcagttagctaaggagcaagataaggagtccgagaaacagcttttgttacaggaggttgagaatcacaaaaagcagatgctatcaaaccaagccagctggaggaaagctaacctcacctgcaaaatagcaatcgacaatctcgaaaaagccgagctcctgcagggcggagacctcctgcgccagcggaagactaccaaagagtctctcgcccagacctcaagcacaatcaccgagtccttgatgggcattagcaggatgatggcccagcaggtgcagcagtccgaggaggccatgcaatcactggtgacaagctccaggacaatcctggatgcaaatgaagaattcaagtccatgagcggcacaattcagctcggtcgaaagctgataacgaagtacaacagacgggagcttactgataagttgttgatctttctggcactggccctctttctcgcaacagtgttgtacatcgttaagaagcggttattcccatttttgtag

SEQ ID NO: 83512 - DNA, 1184 bp, Artificial Sequence
  derived and/or modified sequence
cctgccgctgcccgtagccggcgtccccaacatggcggctccccaagacgtccacgtccggatctgtaaccaagagattgtcaaatttgacctggaggtgaaggcgcttattcaggatatccgtgattgttcaggacccttaagtgctcttactgaactgaatactaaagtaaaagagaaatttcaacagttgcgtcacagaatacaggacctggagcagttggctaaagagcaagacaaagaatcagagaaacaacttctactccaggaagtggagaatcacaaaaagcagatgctcagcaatcaggcctcatggaggaaagctaatctcacctgcaaaattgcaatcgacaatctagagaaagcagaacttcttcagggaggagatctcttaaggcaaaggaaaaccaccaaagagagcctggcccagacatccagtaccatcactgagagcctcatggggatcagcaggatgatggcccagcaggtccagcagagcgaggaggccatgcagtctctagtcacttcttcacgaacgatcctggatgcaaatgaagaatttaagtccatgtcgggcaccatccagctgggccggaagcttatcacaaaatacaatcgccgggagctgacggacaagcttctcatcttccttgcgctagccctgtttcttgctacggtcctctatattgtgaaaaagcggctctttccatttttgtgagatcccaaaggtgccagttctggccctttcagctcctgtttcaggatctgtcctggttcctgagctctaggctgctaagctgagccacacacccctccgtttgcaccagttgcctgcaggttggatggaacacagtgccccacttttctgcaagtagctggcttgtaaagggtgaacagagccatgggaggaaggtctggcattgggatgccgccctggggacatacgaaccgcctccttccaccattgtgcactatgggaggccgctgctgcgtggagcacttaaagtccagcctccaggaccggatgcccctcctgtctcccgctcccatcgtgcccttaaatgccagatctggtggagggaagagagaagaggtaggaagaaaggtgatgaaaactcctggtcattccttgaataaacttgattttatttaatagaataaaatgtatttgattttgtaagata

SEQ ID NO: 83513 - protein, 244 aa, Artificial Sequence
  derived and/or modified sequence
MSAAAYMDFVAAQCLVSISNRAAVPEHGVAPDAERLRLPEREVTKEHGDPGDTWKDYCTLVTIAKSLLDLNKYRPIQTPSVCSDSLESPDEDMGSDSDVTTESGSSPSHSPEERQDPGSAPSPLSLLHPGVAAKGKHASEKRHKCPYSGCGKVYGKSSHLKAHYRVHTGERPFPCTWPDCLKKFSRSDELTRHYRTHTGEKQFRCPLCEKRFMRSDHLTKHARRHTEFHPSMIKRSKKALANAL

SEQ ID NO: 83514 - DNA, 5185 bp, Artificial Sequence
  derived and/or modified sequence
tgacataatggggtttttttaattatagattcacactgcatttattcatcacccctgtcctctcatccataactcaaatttactaccagcaacacaaaatacaaagatgtgtccagtttcactacagctcttcgcgtttacaagtgtcgagcgcttgctttcggaacgcccttgtgattggccgagccaatgccagtgacatcaaccaacttacttttgattggaaggctggttgctgggactgtagcgtttgcaggaagtcacttaactgtttgggagctggaaaaccgaagctgaagttctcttttgccataggaacgagcgcaactgactaggaaagatgtgtcccaaagctccgcaagctggaacgtgagccaggaggcccggaccggccacgggaccgcgaggcactccgaaagtgtgcggctgccccttccctgcctcccagctgttacccttttaaatgtcagtgttcgaggctgtaggggtagcacgaggcagcgaaacggaacagtcggattggccgcacgcctcagttctagacgcacctctccaccgaaggccgttctgactggcagggggagaaagtaaacagagttgaatcaccctccccactggccaattggagggggtttggtttgtgacgtgatgggattctgcgaaattgttactgagcaagagaatgccggaacggtgcggaccggccggagcaggggttcagaagccgtcagtggactcgggaaaaagtgtctcttagacctggcgctcggcgggaccctcgccacccgcgtcggggtgatcgggtgaatgtcctggggctttggctcgacggcgaggcggccgagggcgtgcacctctcttgcagtttcctctcccagcgcctcgggggcgttttcagtcgaataaacttgcgaccgccacgtgtggcatctttccaagggagccggctcagaggggccggcgcgcccgtcgggggatcgcggccggcgcggggcaggggcggcggctagaggcggcggcgcggcggagcccggggccgtggatgctgcgtgcggaggcgctgccggttacgtaaagatgaggggctgaggtcgcctcggcgctcctgcgagtcggaagcgccccgcgcccccgcccccttggccgccgcgccgtgccgcgccgcgccgcgctcgtcgtccgaggccagggcagggcgagccgaacctccgcagccaccgccaagtttgtccgcgccgcctgggctgccgtcgcccgcaccatgtccgcggccgcctacatggacttcgtggctgcccagtgtctggtttccatttcgaaccgcgctgcggtgccggagcatggggtcgctccggacgccgagcggctgcgactacctgagcgcgaggtgaccaaggagcacggtgacccgggggacacctggaaggattactgcacactggtcaccatcgccaagagcttgttggacctgaacaagtaccgacccatccagaccccctccgtgtgcagcgacagtctggaaagtccagatgaggatatgggatccgacagcgacgtgaccaccgaatctgggtcgagtccttcccacagcccggaggagagacaggatcctggcagcgcgcccagcccgctctccctcctccatcctggagtggctgcgaaggggaaacacgcctccgaaaagaggcacaagtgcccctacagtggctgtgggaaagtctatggaaaatcctcccatctcaaagcccattacagagtgcatacaggtgaacggccctttccctgcacgtggccagactgccttaaaaagttctcccgctcagacgagctgacccgccactaccggacccacactggggaaaagcagttccgctgtccgctgtgtgagaagcgcttcatgaggagtgaccacctcacaaagcacgcccggcggcacaccgagttccaccccagcatgatcaagcgatcgaaaaaggcgctggccaacgctttgtgaggtgctgcccgtggaagccagggagggatggaccccgaaaggagaaaagtactcccaggaaacagacgcgtgaaaactgagccccagaagaggcacacttgacggcacaggaagtcactgctctttggtcaatattctgattttcctctccctgcattgtttttaaaaagcacattgtagcctaagatcaaagtcaacaacactcggtccccttgaagaggcaactctctgaacccgtctctgactgttggagggaaggcaaatgcttttgggttttttggtttttgtttttgtttttttttctccttttatttttttgcgggggagggtagggagtgggtgggggggaggggggtaaggccaagactggggtagaattttaaagattcaacactggtgtacatatgtccgctgggtgagttgacctgtggcctcgcacagtgattctgggccctttatgcttgctgtctctcagaattgttttcttaccttttaatgtaatgacgagtgtgcttcagtttgtttagcaaaaccactctcttgaatcacgttaacttttgagattaaaaaaaaaaacgccatagcacagctgtctttatgcaagcaagagcacatctactccagcatgatctgtcatctaaagacttgaaaacaaaaaacagttacttatagtcaatgggtaagcagagtctgaatttatactaatcaagacaaacctttgaaaggttacactaagtacagaacttttaaaccttgctttgtatgagttgtactttttgaacataagctgcacttttattttctaatgcagaggatgaataagttaaatacatgctttgaggatagaagcagatgttctgtttggcaccacgttataatctgcttattttacaatatacacgtttccctaagaaatcatggcagagatgtgagggcagaatatacacaacagatgctgaaggagaaggagggtagtgttttgcaaaagaaaaagaaaagaaccaacagaattttaactctattaacttttccaaattttcctatgcttttagttaacatcattattgtatcctaatgccactaggggagagagcttttgactctgttgggttttatttgaatgtgtgcataacagtaatgagatctggaaacacctattttttggggaaaaaggtttgttggtctccttcctgtgttcctacaaaactcccactctcaggtgcaagagttatgtagaaggaaagggagctgaaataggaacagaaaaatcaacccctataactagtgaacaccaagggaaaataccacaatgatttcagaggagactctgcaaaatcgtcccttgtggagaatgcaggcaacatggaatactaggaatgaaatcacatcactgtatcttttacatcaatagcctcaccactaatatatcttgtatctaggtgtctataatggctgaaaccactacatccatctatgccatttacctgaaaacttaactgtggcctttatgaggccagaaaagtgaactgagttttcgtagttaagacctcaaatgaggggagtcagcagtgatcatgggggaaatgtttacattttttttttcttcagaagtaacgctttctgatgattttatctgatatttaaaacagggagctatggtgcactctagtttatacttgcgctctgaaatgtgtaaacatagggtgcctacctatttcacctgacccatactcgtttctgattcagaatcagtgtgggctcctgcagtgggcgcgggtcacggctgactccaacttccaatacaacagccatcactagcacagtgtttttttgtttaaccaacgtagttgtattagtagttctataaagagaactgcttttaacattagggactgggagcagtccatgggataaaaaggaaagtgttttctcacgagaaaacatgtcaggaaaaataaagaacactttctacctctgtttcagatttttgaaacacttattttaaaccaaattttaatttctgtgtccaaaataagttttaaggacatctgttcttccatacgaaataggttaggctgcctatttctcactgagctcatggaatggttctgcttatgatactctgcacgctgccttttagtgagtgaggagtttggggttgcctagcaacttgctaacttgtaaaaagtcatctttccctcacagaaagaaacgaaagaaagcaaagcaaagtcagtgaaagacaatctttatagtttcaggagtaaatctaaatgtggcttttgtcaagcacttagatggatataaatgcagcaacttgttttaaaaaaatgcacaatttacttcccaaaaaagttgttacttgccttttcaagttgttgacaaacacacatttgatattctcttatatgttatagtaatgtaacgtataaactcaagcctttttattctttgtgattaaatcctgttttaaaatgtcacaaaacaggaaccagcattctaattagatttactatatcaagatatggttcaaataggactactagagttcattgaacactaaaactatgaaacaattactttttatattaaaaagaccatggatttaacttatgaaaatccaaatgcaggatagtaatttttgtttacttttttaaccaaactgaatttttgaaagactattgcaggtgtttaaaaagaaagaaaagttgttttatctaatactgtaagtagttgtcatattctggaaaatttaatagttttagagttaagatatctcctctctttggttagggaagaagaaagcccttcaccattgtggaatgatgccctggctttaaggtttagctccacatcatgcttctcttgagaattctatttggtagttacaattacagaaactgattagtttgtcagtttgcagatagatttagcacagtactcatcactcggatagattgagatgttctttcacatcagatgatctgtaacactgtaagatactgatctttacaactgtttaatcagttttatttttgtacagtattagtgacctaagttattttgctgtcccgtttttgtaaatcaaatgaaattataaaagaggattctgacagtaggtattttgtacatatgtatatatgttgtccaaataaaaataataaatgataaagactgaattgttctagc

SEQ ID NO: 83515 - DNA, 735 bp, Artificial Sequence
  derived and/or modified sequence
atgagtgcagccgcctatatggattttgtggctgcacagtgcttggtgagcattagcaatcgagccgccgtgcccgagcatggagtcgcacctgatgctgagcggctgcgactaccggagagggaggtaactaaggaacacggcgatcctggcgacacatggaaggattattgtactctcgttaccatcgcaaagtcgctgctcgacctcaataagtaccggcctatccagactccctccgtctgcagcgacagcttagaatcccccgatgaggacatgggttctgacagcgacgttacaacggaatcaggtagctcgccatcacattctcccgaagagaggcaggatcctgggtccgcccccagtccgttatccttgctgcaccccggtgtggccgcaaaaggcaagcacgcctcggaaaagcgccataagtgtccatatagcggctgtgggaaggtgtatggcaagtcctcacacctgaaagcgcactatagggtgcatactggagagcggcccttcccttgtacttggccagactgtcttaagaaattttcacggtcggatgagcttacaaggcactatcgtacccatacgggtgagaaacagtttagatgtccgctttgcgaaaaaagattcatgcggtctgaccacttgaccaagcatgccagacgacataccgagttccatccatctatgatcaagcgttctaaaaaggcactagcaaatgcgctctag

SEQ ID NO: 83516 - DNA, 735 bp, Artificial Sequence
  derived and/or modified sequence
atgtctgctgctgcctacatggactttgtggccgcccagtgcctggtgtccatcagcaacagagctgctgtgcctgagcacggcgtggccccagatgctgagcggctgcggctgcctgagcgggaggtgaccaaggagcacggggaccccggggacacctggaaggactactgcaccctggtgaccatcgccaagagcctgctggacctgaacaagtaccggcccatccagacccccagcgtgtgcagcgacagcctggagagcccagatgaggacatgggcagtgacagtgatgtgaccacagaaagtggcagcagccccagccacagccctgaggagcggcaggaccccggcagcgcccccagccccctgagcctgctgcaccctggggtggccgccaagggcaagcacgccagcgagaagaggcacaagtgcccctacagcggctgtgggaaggtgtatggcaagagcagccacctgaaggcccactacagagtgcacactggagagcggcccttcccctgcacctggccagactgcctgaagaagttcagcagaagtgatgagctgaccaggcactaccgcacccacactggagagaagcagttccgctgccccctgtgtgagaagcgcttcatgagaagtgaccacctgaccaagcacgcccggcggcacacagagttccaccccagcatgatcaagaggagcaagaaggccctggccaatgccctgtag

SEQ ID NO: 83517 - DNA, 735 bp, Artificial Sequence
  derived and/or modified sequence
atgagcgccgccgcctacatggacttcgtggccgcccagtgcctggtaagcatcagtaatagagcagccgtaccggagcatggggtagcccccgacgcggaacgtctacgattgccggaaagagaagttactaaagaacacggtgatcccggcgacacttggaaagattactgtactcttgtaacgatagcgaagtctttgttggatttgaacaagtataggccaattcaaaccccctctgtctgttccgacagcctcgagtcccctgacgaggacatggggtctgacagtgatgtcacgaccgagtccggttccagcccatctcattcgcctgaggagcggcaagatcccggaagcgctcccagccccctgtcacttctccaccccggagtcgcagccaagggtaaacatgctagtgagaagcgtcacaaatgtccctactccgggtgcgggaaagtatacggaaaaagctcccatctcaaggcgcattacagagtccacaccggtgaacgtccattcccttgcacctggcccgattgtctgaaaaagttcagtcgctccgacgagcttacacgacattaccgtacacatacaggagaaaaacaatttaggtgccctctgtgtgaaaagaggttcatgcgatctgatcatctcaccaaacacgctcgaagacatacagaattccacccaagcatgatcaagcgaagcaaaaaggctctggcaaacgcactgtag

SEQ ID NO: 83518 - DNA, 735 bp, Artificial Sequence
  derived and/or modified sequence
atgagtgcggctgcatacatggattttgttgctgctcagtgtctggtgtcaatttctaaccgagctgcagtgccggaacatggcgtggctcctgacgccgaaagactacgtctcccagagcgcgaagtaaccaaagagcacggggacccgggtgatacgtggaaggactactgcacactcgtgactatagccaaatctttactcgatctcaataagtaccggccaatccagaccccatctgtatgctccgattcgttggaaagtccagatgaggatatgggctccgacagtgacgtgacaaccgagtccggaagttcacccagccactctcccgaggaaagacaagacccgggtagcgccccatctccgctgagcttgttacacccaggagttgcagctaagggaaaacacgcctcagaaaagagacataagtgcccctattcaggctgtggtaaagtgtacggcaaatccagccatctgaaagcacattatcgagtacacacaggcgagagacctttcccttgcacctggcccgattgtcttaagaagttcagtcgatccgatgaattgactaggcactatagaactcataccggggagaaacaattcagatgccccctgtgcgagaaacgcttcatgagatcggatcacctgacaaagcacgctagacgccacacggaatttcatccctcgatgatcaaacgctctaaaaaggccctagcgaatgcgctctag

SEQ ID NO: 83519 - DNA, 735 bp, Artificial Sequence
  derived and/or modified sequence
atgagcgccgccgcctacatggacttcgtggccgcccagtgcctggtgagcatcagcaacagagccgccgtgcccgagcacggcgtggcccccgacgccgagagactgagactgcccgagagagaggtgaccaaggagcacggcgaccccggcgacacctggaaggactactgcaccctggtgaccatcgccaagagcctgctggacctgaacaagtacagacccatccagacccccagcgtgtgcagcgacagcctggagagccccgacgaggacatgggcagcgacagcgacgtgaccaccgagagcggcagcagccccagccacagccccgaggagagacaggaccccggcagcgcccccagccccctgagcctgctgcaccccggcgtggccgccaagggcaagcacgccagcgagaagagacacaagtgcccctacagcggctgcggcaaggtgtacggcaagagcagccacctgaaggcccactacagagtgcacaccggcgagagacccttcccctgcacctggcccgactgcctgaagaagttcagcagaagcgacgagctgaccagacactacagaacccacaccggcgagaagcagttcagatgccccctgtgcgagaagagattcatgagaagcgaccacctgaccaagcacgccagaagacacaccgagttccaccccagcatgatcaagagaagcaagaaggccctggccaacgccctgtag

SEQ ID NO: 83520 - protein, 162 aa, Artificial Sequence
  derived and/or modified sequence
MKETIMNQEKLAKLQAQVRIGGKGTARRKKKVVHRTATADDKKLQFSLKKLGVNNISGIEEVNMFTNQGTVIHFNNPKVQASLAANTFTITGHAETKQLTEMLPSILNQLGADSLTSLRRLAEALPKQSVDGKAPLATGEDDDDEVPDLVENFDEASKNEAN

SEQ ID NO: 83521 - DNA, 590 bp, Artificial Sequence
  derived and/or modified sequence
ctttatctttgatatttcctatttttaaaaaaacttatctgtgaattgatttaatgattgtgtatataaatctgccaaaattatttcaatggatgaaacaatgaatcagtacctatttatatgctgccaaggcacacctataattttttaaatgatgataagagtagcctaaagcagtgagcagacatctcagaaatttcagtgtaagtggttttaacttgcaacatgatgccaaaaaacttagaacagggagctgccatcttgcatccccgtgtgtgtgcacctaatctcagctggttccccccagaccccctgagcaccaaccctagtcccccgcgcagccccttatccgctgcgacaagatgaaagaaacaatcatgaaccaggaaaaactcgccaaactgcaggcaaaagtgcccattggtggaactgctcacagaaagaaggtggttcacagaacagccacagcaaatgataaaaaacgtcagttctccttaaagaagttagaaatctctggcattgaagaggtgaatatgtttacaaaccaagcaacagtgatccgttgacctgcaggtgacctcgaggggggg

SEQ ID NO: 83522 - DNA, 489 bp, Artificial Sequence
  derived and/or modified sequence
atgaaggagaccattatgaaccaggaaaaactggcaaagctacaggcccaggtacggataggtggaaaaggcactgctagacgcaagaagaaagttgtacacagaaccgctacagctgatgataaaaaattacagttcagtcttaaaaaattaggagtgaataacatctccggtatcgaggaggtgaacatgtttacgaatcaggggactgtgattcattttaataaccccaaagtgcaggctagtctggcagctaataccttcaccattacaggtcacgcggaaactaaacagcttacagaaatgctcccatctattctgaaccagctgggtgccgactcattaacctctttaaggcgcctggccgaggcccttcccaagcagagtgtcgacggtaaagcaccactggccaccggcgaggatgacgacgatgaagtgccagatctggtggagaatttcgatgaggcgtcgaaaaacgaggcgaactag

SEQ ID NO: 83523 - DNA, 489 bp, Artificial Sequence
  derived and/or modified sequence
atgaaggagaccatcatgaaccaggagaagctggccaagctgcaggcccaggtgcgcatcggcggcaaaggaacagcccggaggaagaagaaggtggtgcacaggacagccacagcagatgacaagaagctgcagttcagcctgaagaagctgggcgtgaacaacatctctggaattgaggaggtgaacatgttcaccaaccagggcaccgtcatccacttcaacaaccccaaggtgcaggccagcctggccgccaacaccttcaccatcactggacatgctgagaccaagcagctgacagagatgctgcccagcatcctgaaccagctgggcgctgacagcctgaccagcctgcggcggctggccgaggccctgcccaagcagagcgtggatggcaaggcccccctggccaccggggaggatgatgatgatgaggtgcctgacctggtggagaactttgatgaggccagcaagaatgaggccaactag

SEQ ID NO: 83524 - DNA, 489 bp, Artificial Sequence
  derived and/or modified sequence
atgaaggagaccatcatgaaccaggagaagctggccaagctgcaggcacaggtgcgaatcggtggcaagggcaccgctcggaggaagaaaaaagtcgttcatagaacagctacagccgatgacaagaagctccagttctctctgaagaagctgggagtcaacaatatcagcggtatcgaagaggttaacatgtttactaaccaagggaccgtgattcattttaataaccccaaagtacaggccagtctcgctgccaacaccttcacaatcactgggcatgctgaaaccaaacagctgacggagatgctgcccagcattctcaatcagctcggggctgattccctaacttctctcagaaggctcgctgaagctctgccaaagcaatccgtggatggcaaggctcccctggcaacaggggaagacgatgatgacgaggtcccagatctcgtcgagaattttgatgaggcttcaaagaacgaggctaattag

SEQ ID NO: 83525 - DNA, 489 bp, Artificial Sequence
  derived and/or modified sequence
atgaaagagaccatcatgaaccaggagaagctggctaaactccaggctcaggttagaatcggcggaaaaggcaccgctcgccgtaagaagaaggtggtccataggacggccacggcagacgataagaaactccagttcagcctgaagaaactgggcgtcaataacatttctggaatcgaggaggttaatatgtttaccaaccagggtactgtcatccacttcaataatccaaaggtgcaggcatcattggccgctaacactttcaccattactgggcatgcggaaaccaagcagctgactgagatgctgccttcgatcctgaatcaactaggcgctgattccctgacatctctccggagactggcagaagcattaccaaaacaaagcgtggacggcaaggcacctctcgctaccggagaggatgatgatgatgaggtgcccgatctggttgagaacttcgatgaagcttctaaaaatgaagcaaactag

SEQ ID NO: 83526 - DNA, 897 bp, Artificial Sequence
  derived and/or modified sequence
cttgaaggaagtggccttgtgtcacttccggcctccctttagctgccatcttgcgtccccgcgtgtgtgcgcctaatctcaggtggtccacccgagaccccttgagcaccaaccctagtcccccgcgcggccccttattcgctccgacaagatgaaagaaacaatcatgaaccaggaaaaactcgccaaactgcaggcacaagtgcgcattggtgggaaaggaactgctcgcagaaagaagaaggtggttcatagaacagccacagcagatgacaaaaaacttcagttctccttaaagaagttaggggtaaacaatatctctggtattgaagaggtgaatatgtttacaaaccaaggaacagtgatccactttaacaaccctaaagttcaggcatctctggcagcgaacactttcaccattacaggccatgctgagacaaagcagctgacagaaatgctacccagcatcttaaaccagcttggtgcggatagtctgactagtttaaggagactggccgaagctctgcccaaacaatctgtggatggaaaagcaccacttgctactggagaggatgatgatgatgaagttccagatcttgtggagaattttgatgaggcttccaagaatgaggcaaactgaattgagtcaacttctgaagataaaacctgaagaagttactgggagctgctattttatattatgactgctttttaagaaatttttgtttatggatctgataaaatctagatctctaatatttttaagcccaagccccttggacactgcagctcttttcagtttttgcttatacacaattcattctttgcagctaattaagccgaagaagcctgggaatcaagtttgaaacaaagattaataaagttctttgcctagta

SEQ ID NO: 83527 - DNA, 489 bp, Artificial Sequence
  derived and/or modified sequence
atgaaggagaccatcatgaaccaggagaagctggccaagctgcaggcccaggtgagaatcggcggcaagggcaccgccagaagaaagaagaaggtggtgcacagaaccgccaccgccgacgacaagaagctgcagttcagcctgaagaagctgggcgtgaacaacatcagcggcatcgaggaggtgaacatgttcaccaaccagggcaccgtgatccacttcaacaaccccaaggtgcaggccagcctggccgccaacaccttcaccatcaccggccacgccgagaccaagcagctgaccgagatgctgcccagcatcctgaaccagctgggcgccgacagcctgaccagcctgagaagactggccgaggccctgcccaagcagagcgtggacggcaaggcccccctggccaccggcgaggacgacgacgacgaggtgcccgacctggtggagaacttcgacgaggccagcaagaacgaggccaactag

SEQ ID NO: 83528 - protein, 481 aa, Artificial Sequence
  derived and/or modified sequence
MDIKNSPSSLNSPSSYNCSQSILPLEHGSIYIPSSYVDSHHEYPAMTFYSPAVMNYSIPSNVTNLEGGPGRQTTSPNVLWPTPGHLSPLVVHRQLSHLYAEPQKSPWCEARSLEHTLPVNRETLKRKVSGNRCASPVTGPGSKRDAHFCAVCSDYASGYHYGVWSCEGCKAFFKRSIQGHNDYICPATNQCTIDKNRRKSCQACRLRKCYEVGMVKCGSRRERCGYRLVRRQRSADEQLHCAGKAKRSGGHAPRVRELLLDALSPEQLVLTLLEAEPPHVLISRPSAPFTEASMMMSLTKLADKELVHMISWAKKIPGFVELSLFDQVRLLESCWMEVLMMGLMWRSIDHPGKLIFAPDLVLDRDEGKCVEGILEIFDMLLATTSRFRELKLQHKEYLCVKAMILLNSSMYPLVTATQDADSSRKLAHLLNAVTDALVWVIAKSGISSQQQSMRLANLLMLLSHVRHARWGEKQFIHLKLS

SEQ ID NO: 83529 - DNA, 1446 bp, Artificial Sequence
  derived and/or modified sequence
atggacatcaagaacagccccagcagcctgaacagccccagcagctacaactgcagccagagcatcctgcccctggagcacggcagcatctacatccccagcagctacgtggacagccaccacgagtaccccgccatgaccttctacagccccgccgtgatgaactacagcatccccagcaacgtgaccaacctggagggcggccccggcagacagaccaccagccccaacgtgctgtggcccacccccggccacctgagccccctggtggtgcacagacagctgagccacctgtacgccgagccccagaagagcccctggtgcgaggccagaagcctggagcacaccctgcccgtgaacagagagaccctgaagagaaaggtgagcggcaacagatgcgccagccccgtgaccggccccggcagcaagagagacgcccacttctgcgccgtgtgcagcgactacgccagcggctaccactacggcgtgtggagctgcgagggctgcaaggccttcttcaagagaagcatccagggccacaacgactacatctgccccgccaccaaccagtgcaccatcgacaagaacagaagaaagagctgccaggcctgcagactgagaaagtgctacgaggtgggcatggtgaagtgcggcagcagaagagagagatgcggctacagactggtgagaagacagagaagcgccgacgagcagctgcactgcgccggcaaggccaagagaagcggcggccacgcccccagagtgagagagctgctgctggacgccctgagccccgagcagctggtgctgaccctgctggaggccgagcccccccacgtgctgatcagcagacccagcgcccccttcaccgaggccagcatgatgatgagcctgaccaagctggccgacaaggagctggtgcacatgatcagctgggccaagaagatccccggcttcgtggagctgagcctgttcgaccaggtgagactgctggagagctgctggatggaggtgctgatgatgggcctgatgtggagaagcatcgaccaccccggcaagctgatcttcgcccccgacctggtgctggacagagacgagggcaagtgcgtggagggcatcctggagatcttcgacatgctgctggccaccaccagcagattcagagagctgaagctgcagcacaaggagtacctgtgcgtgaaggccatgatcctgctgaacagcagcatgtaccccctggtgaccgccacccaggacgccgacagcagcagaaagctggcccacctgctgaacgccgtgaccgacgccctggtgtgggtgatcgccaagagcggcatcagcagccagcagcagagcatgagactggccaacctgctgatgctgctgagccacgtgagacacgccagatggggcgagaagcagttcatccacctgaagctgagctag

SEQ ID NO: 83530 - DNA, 1419 bp, Artificial Sequence
  derived and/or modified sequence
atggacatcaagaacagccccagcagcctgaacagccccagcagctacaactgcagccagagcatcctgcccctggagcacggcagcatctacatccccagcagctacgtggacagccaccacgagtaccccgccatgaccttctacagccccgccgtgatgaactacagcatccccagcaacgtgaccaacctggagggcggccccggcagacagaccaccagccccaacgtgctgtggcccacccccggccacctgagccccctggtggtgcacagacagctgagccacctgtacgccgagccccagaagagcccctggtgcgaggccagaagcctggagcacaccctgcccgtgaacagagagaccctgaagagaaaggtgagcggcaacagatgcgccagccccgtgaccggccccggcagcaagagagacgcccacttctgcgccgtgtgcagcgactacgccagcggctaccactacggcgtgtggagctgcgagggctgcaaggccttcttcaagagaagcatccagggccacaacgactacatctgccccgccaccaaccagtgcaccatcgacaagaacagaagaaagagctgccaggcctgcagactgagaaagtgctacgaggtgggcatggtgaagtgcggcagcagaagagagagatgcggctacagactggtgagaagacagagaagcgccgacgagcagctgcactgcgccggcaaggccaagagaagcggcggccacgcccccagagtgagagagctgctgctggacgccctgagccccgagcagctggtgctgaccctgctggaggccgagcccccccacgtgctgatcagcagacccagcgcccccttcaccgaggccagcatgatgatgagcctgaccaagctggccgacaaggagctggtgcacatgatcagctgggccaagaagatccccggcttcgtggagctgagcctgttcgaccaggtgagactgctggagagctgctggatggaggtgctgatgatgggcctgatgtggagaagcatcgaccaccccggcaagctgatcttcgcccccgacctggtgctggacagagacgagggcaagtgcgtggagggcatcctggagatcttcgacatgctgctggccaccaccagcagattcagagagctgaagctgcagcacaaggagtacctgtgcgtgaaggccatgatcctgctgaacagcagcatgtaccccctggtgaccgccacccaggacgccgacagcagcagaaagctggcccacctgctgaacgccgtgaccgacgccctggtgtgggtgatcgccaagagcggcatcagcagccagcagcagagcatgagactggccaacctgctgatgctgctgagccacgtgagacacgccagatacgccccctag

SEQ ID NO: 83531 - DNA, 1446 bp, Artificial Sequence
  derived and/or modified sequence
atggatattaagaattctccctcaagtctgaattcaccaagttcttacaattgcagtcagtccattctccctctcgagcacggcagcatttatattccctcatcgtacgtagactcacatcatgaatatcccgctatgactttctacagcccggccgttatgaattatagcatcccctccaatgtgacaaatttggagggcgggcctgggcgtcagacaacgtctcctaatgtgctttggccaacaccaggtcatctctcacccttggtagtacataggcagcttagtcacctttacgcagaaccccagaagtcaccatggtgcgaagctcgcagcctggaacacaccttgccagtgaacagggagactctgaaacgaaaggtctccgggaaccgatgcgcgagtccggtaaccggccccggcagtaagagggacgcccatttctgcgcagtgtgcagcgattatgcgagcggctatcactacggcgtgtggtcttgtgagggttgtaaagctttttttaagaggtcgatccaaggacacaacgattatatctgtccagcaacaaatcagtgtacgattgacaaaaaccggcgcaaaagttgtcaagcatgcaggctaagaaagtgctatgaagtcggaatggtcaaatgtggtagcaggcgggagcggtgcgggtaccggttggtacgaagacagcggtcagccgatgaacagctgcattgcgcgggcaaggccaaaaggtctggggggcatgccccgcgcgtccgggagttgttgctcgacgcattgtcccccgagcaattggtcctcacccttcttgaagcagaacccccccatgtgctgatttcaagaccgagcgccccatttactgaagctagtatgatgatgagtcttaccaagctagcagacaaagagctggtgcacatgatcagttgggcgaaaaaaattcccggattcgtggaactctctctgtttgatcaggtccgcctgctggagtcctgctggatggaagtcctcatgatgggcttaatgtggcgtagtattgaccacccaggcaagcttattttcgctcctgatttggtgctggaccgcgatgagggcaagtgcgtggaggggattcttgagatattcgacatgttactggcaacaactagccgcttcagggaactgaaacttcagcataaggagtacctgtgtgtgaaggccatgattctgcttaatagctctatgtatcccctagtgactgctacacaagacgcagattcatctcggaaactggcacacctccttaacgcagtcaccgacgcccttgtttgggtaatcgcgaaatccggtatcagttcccagcaacagtctatgaggctggctaatctactcatgctcttgtcccacgttagacatgcccgctggggagaaaagcagtttatccatcttaaactgtcatag

SEQ ID NO: 83532 - DNA, 1419 bp, Artificial Sequence
  derived and/or modified sequence
atggatattaagaactcgccttcaagccttaactctcccagcagttacaattgttcccagtctatcttgccactggaacacgggtcaatctatattccttcgtcttacgtggactctcaccatgagtatcccgcaatgacattttattcgccagcagtaatgaactattcgattccatctaacgttactaatcttgaaggcgggcctggccgccagaccaccagcccaaatgtattgtggccaaccccgggccatctctcacccctggtggttcaccggcagctgtcacacctgtacgctgaacctcaaaagtctccgtggtgcgaggcacggagtttagaacatacgctacccgtgaatcgggagaccctgaaaagaaaagtaagcggcaaccgctgtgcttcaccagttaccggaccagggtcaaagcgagacgcacatttttgtgcggtatgttctgattacgcctcgggttaccattatggagtctggtcctgtgagggctgcaaggccttcttcaagaggtctatccaaggccacaatgactacatctgccccgctacaaatcagtgtactatcgacaaaaaccgtcggaagtcctgccaggcatgtcgattgcgtaaatgttacgaggtggggatggttaaatgcgggagcagacgtgagcgctgcggctacaggctggtccggcgacagcgaagcgcggacgagcagctgcactgcgcgggcaaggccaagcgctccggggggcacgcgcccagggtaagagaactccttttggacgccctgagccctgagcaattagtgttgactctgctggaggccgaaccccctcatgtcctcatcagccgccctagtgcgcctttcacagaagcatctatgatgatgtcactgactaaacttgccgataaggaattagttcatatgattagctgggcaaagaaaatccccgggtttgtggagctaagcctattcgatcaggtgcggctgctcgaatcctgttggatggaagtgttgatgatgggcttaatgtggaggtcaattgatcacccaggcaagcttatctttgccccagatctggttcttgacagggacgaaggcaagtgtgtagagggtatcttagaaatctttgatatgctcctggccaccacttcgagattccgcgagctgaagttgcagcataaggagtacttatgcgtcaaggcgatgattctcctgaacagcagtatgtatcctttggtcacagctacacaagacgccgactcaagccgcaagctcgcacacctcctaaacgcagtgacggatgcactggtgtgggttatagccaaatccggaatcagttctcagcagcagagcatgcggcttgccaatttattgatgctgttgtcccacgtacgtcacgccagatacgctccatag

SEQ ID NO: 83533 - DNA, 1446 bp, Artificial Sequence
  derived and/or modified sequence
atggatatcaagaattctccctcctccctgaactcaccttcaagctataattgctcacagagcattctcccacttgaacacggctccatctacattccctcttcgtacgtagacagccaccatgagtacccagctatgaccttctactctcccgctgtcatgaactactctataccctctaacgtaactaacctcgagggcggcccgggacgacagaccacgagcccaaacgtgctgtggccaacccccggccatctgtcacccttggtcgtgcacagacagttgtcacacctctacgccgagccacaaaaaagcccttggtgcgaagccaggagtttggagcatacgctcccagttaatagggagactttgaaacggaaagtgtctgggaaccggtgcgccagtcccgttactggaccaggatccaaaagagatgcacatttttgcgccgtatgtagcgattatgcctctggataccactacggtgtgtggagctgcgagggctgcaaagcctttttcaagcgatcaatacagggccacaacgactatatctgtcccgctactaaccagtgtacaatcgacaagaatagacggaagagctgccaggcctgccgccttcgtaaatgctacgaggtgggcatggtcaagtgtggatcccggagagagcggtgtggatacagactcgtgagacgccagagatctgccgatgagcagttgcactgtgccggaaaagcaaaacgatccggcggacacgctcctagagtgagagaattgcttcttgatgcattatctcctgaacagctcgtgctgactctccttgaagccgagcctcctcacgtgctgatttctcgcccctcagccccgtttaccgaggcttcgatgatgatgtctctgacaaaattagcggataaggaactcgtgcatatgatttcatgggcgaagaaaatcccggggttcgtggaactgagcctatttgatcaggtgcggctgcttgagagctgttggatggaggttctcatgatgggcttaatgtggaggtctatcgaccacccaggcaaattaatcttcgcacccgatctcgtgctggatagggatgagggtaagtgcgtcgaaggcattctcgaaattttcgatatgctactggccacaaccagtcggttccgcgagctgaaattacaacataaagagtacctgtgcgtgaaggccatgatcttgctgaattcgagtatgtaccctctggtgacagcaacccaggacgcagacagctcgaggaagcttgcacatctcctaaatgcagttacggatgctcttgtttgggtaatcgccaagtccggcatttcctcccagcagcagtctatgcgtctggccaatctgctcatgttgctgagtcatgtgaggcacgctaggtggggggaaaagcagttcatccacttaaaactgagctag

SEQ ID NO: 83534 - DNA, 1914 bp, Artificial Sequence
  derived and/or modified sequence
ctcggtctttaaaaggaagaaggggcttatcgttaagtcgcttgtgatcttttcagtttctccagctgctggctttttggacacccactcccccgccaggaggcagttgcaagcgcggaggctgcgagaaataactgcctcttgaaacttgcagggcgaagagcaggcggcgagcgctgggccggggagggaccacccgagctgcgacgggctctggggctgcggggcagggctggcgcccggagcctgagctgcaggaggtgcgctcgctttcctcaacaggtggcggcggggcgcgcgccgggagaccccccctaatgcgggaaaagcacgtgtccgcattttagagaaggcaaggccggtgtgtttatctgcaagccattatacttgcccacgaatctttgagaacattataatgacctttgtgcctcttcttgcaaggtgttttctcagctgttatctcaagacatggatataaaaaactcaccatctagccttaattctccttcctcctacaactgcagtcaatccatcttacccctggagcacggctccatatacataccttcctcctatgtagacagccaccatgaatatccagccatgacattctatagccctgctgtgatgaattacagcattcccagcaatgtcactaacttggaaggtgggcctggtcggcagaccacaagcccaaatgtgttgtggccaacacctgggcacctttctcctttagtggtccatcgccagttatcacatctgtatgcggaacctcaaaagagtccctggtgtgaagcaagatcgctagaacacaccttacctgtaaacagagagacactgaaaaggaaggttagtgggaaccgttgcgccagccctgttactggtccaggttcaaagagggatgctcacttctgcgctgtctgcagcgattacgcatcgggatatcactatggagtctggtcgtgtgaaggatgtaaggccttttttaaaagaagcattcaaggacataatgattatatttgtccagctacaaatcagtgtacaatcgataaaaaccggcgcaagagctgccaggcctgccgacttcggaagtgttacgaagtgggaatggtgaagtgtggctcccggagagagagatgtgggtaccgccttgtgcggagacagagaagtgccgacgagcagctgcactgtgccggcaaggccaagagaagtggcggccacgcgccccgagtgcgggagctgctgctggacgccctgagccccgagcagctagtgctcaccctcctggaggctgagccgccccatgtgctgatcagccgccccagtgcgcccttcaccgaggcctccatgatgatgtccctgaccaagttggccgacaaggagttggtacacatgatcagctgggccaagaagattcccggctttgtggagctcagcctgttcgaccaagtgcggctcttggagagctgttggatggaggtgttaatgatggggctgatgtggcgctcaattgaccaccccggcaagctcatctttgctccagatcttgttctggacagggatgaggggaaatgcgtagaaggaattctggaaatctttgacatgctcctggcaactacttcaaggtttcgagagttaaaactccaacacaaagaatatctctgtgtcaaggccatgatcctgctcaattccagtatgtaccctctggtcacagcgacccaggatgctgacagcagccggaagctggctcacttgctgaacgccgtgaccgatgctttggtttgggtgattgccaagagcggcatctcctcccagcagcaatccatgcgcctggctaacctcctgatgctcctgtcccacgtcaggcatgcgagatggggagaaaagcaattcattcatttgaagttatcttag

SEQ ID NO: 83535 - DNA, 5458 bp, Artificial Sequence
  derived and/or modified sequence
atggatataaaaaactcaccatctagccttaattctccttcctcctacaactgcagtcaatccatcttacccctggagcacggctccatatacataccttcctcctatgtagacagccaccatgaatatccagccatgacattctatagccctgctgtgatgaattacagcattcccagcaatgtcactaacttggaaggtgggcctggtcggcagaccacaagcccaaatgtgttgtggccaacacctgggcacctttctcctttagtggtccatcgccagttatcacatctgtatgcggaacctcaaaagagtccctggtgtgaagcaagatcgctagaacacaccttacctgtaaacagagagacactgaaaaggaaggttagtgggaaccgttgcgccagccctgttactggtccaggttcaaagagggatgctcacttctgcgctgtctgcagcgattacgcatcgggatatcactatggagtctggtcgtgtgaaggatgtaaggccttttttaaaagaagcattcaaggacataatgattatatttgtccagctacaaatcagtgtacaatcgataaaaaccggcgcaagagctgccaggcctgccgacttcggaagtgttacgaagtgggaatggtgaagtgtggctcccggagagagagatgtgggtaccgccttgtgcggagacagagaagtgccgacgagcagctgcactgtgccggcaaggccaagagaagtggcggccacgcgccccgagtgcgggagctgctgctggacgccctgagccccgagcagctagtgctcaccctcctggaggctgagccgccccatgtgctgatcagccgccccagtgcgcccttcaccgaggcctccatgatgatgtccctgaccaagttggccgacaaggagttggtacacatgatcagctgggccaagaagattcccggctttgtggagctcagcctgttcgaccaagtgcggctcttggagagctgttggatggaggtgttaatgatggggctgatgtggcgctcaattgaccaccccggcaagctcatctttgctccagatcttgttctggacagggatgaggggaaatgcgtagaaggaattctggaaatctttgacatgctcctggcaactacttcaaggtttcgagagttaaaactccaacacaaagaatatctctgtgtcaaggccatgatcctgctcaattccagtatgtaccctctggtcacagcgacccaggatgctgacagcagccggaagctggctcacttgctgaacgccgtgaccgatgctttggtttgggtgattgccaagagcggcatctcctcccagcagcaatccatgcgcctggctaacctcctgatgctcctgtcccacgtcaggcatgcgaggtacgcgccctaaggagctgctctgcttgggcttgggatgggattatgtgctccacggagggtgaagtgatttgggaaaagtgtctgcaagttaaggaaaatgaatgcctgaaagggaatggggaatttgtcagttcacacacctgtaagcaaagatgggcacagagtgggcatggaaggaatgtcatgtggtatcttacaggctctgcatggcagccagtggtggctcatgggtttttcaattgctggggtttatagcctgtttatggagtcctaaaaggggcagttcctcccctaacacgaactgccacccctgtttacaccacccagggctgaggccctgaggccactttttgtggagaggctaagacccgctcccctagatggcccctcgagctggtgatgcgaagaagtgcacaaatgcttccctaagagttgttctttcggtggcatcaggaaattaaggataagacttaagagaagtggtggacccagcagatttaggaaggcagggctgtaggtagggcatgtttctgatcaggaaacgtaattgtgtgtgctgatgaagagggtgtgcagtggtggctactgttggtacaatgatgctcagtgcttggtgtcacccacgatgagggtagccttgccctggagctggaggaggggaggggagggtggaaggtaattaactggtcactgaggaggcaagtctagaggctgtggagaaggacaatatacacctcgagaatcttaagtgagatgaagacctctgcctttcccctttaatgattgctcagcacatagccatttgcagaacagatcctgtgtttgtagattccttcattgtgaatttatctgcttgctaaaatttatttgtaaccccaaaatcaatatttgtggtgtttttgaggtcatgaacagagtggcagaaattttgagttgccctttatgtacagtcccagctgagatggaacaagcagctgctctcatactgtcaacaagtgtcctttacttggtctacttagtgccatggttttacatttttgtgcttttggtgacttcactgtttaaaatgcccccctggtgtggtgctgaagacctgtctagtgttcctcggtgtgaaaaagctgtgatgtgccttatggagaaagtatgtgttaagctttgctcgggtgtgagttatagtgctgctggccatgagttcaatgttaatgagtcaatggtatttatcacataaggcatctttagaaagaaacacacataaaacaaggttttgtattgatcagctgatgaagatgtggccagaggcttgcaggaacctaaccctgtatttcccctatgagtgaggattcagtgttcacagtgactttacggaacataattaccgcaaacaatgaggattgattgtcctatgtgtcaggccattgtaggtgtgtggtgggacacagaggctgacaagacatcgtccttgcccttgagcctaaattatcagggggagctggatgcacgagccatggataaatgggctgggggaagagtgggtttaggggtggggtagactggctctgagcaaagagagccggggaaggcttcggggttcctgtggctgcctcggaggagggaatctcagcacctttttgtccccatagtaacaagggcatggaacatctgctcaacatgaagtgcaaaaatgtggtcccagtgtatgacctgctgctggagatgctgaatgcccacgtgcttcgcgggtgcaagtcctccatcacggggtccgagtgcagcccggcagaggacagtaaaagcaaagagggctcccagaacccacagtctcagtgacgcctggccctgaggtgaactggcccacagaggtcacaggctgaagcgtgaactccagtgtgtcaggagcctgggcttcatctttctgctgtgtggtccctcatttggtgatggcaggcttggtcatgtaccatccttccctccaccttcccaactctcaggagtcggtgtgaggaagccatagtttcccttgttagcagagggcacatttgaatgcagcgtttccacactcaatggcctcataggatctcagtgtggtctttcttactttccttcttccttcctcccctttgtgaaacatcttaaaggttttggaatgaatggtggaaatctgacttggaagggctgcgaatcagaaaggggagaggaagtgacacgcttacagaagtgggctaacccttcttgtgtggcacacactacccttccctctgagagttgacctttgctgttttccggaccactccattgtaagattgaaaacccctgtggcaattgcgtacttacctcccaggcctgtggggactgatcatatcatatgatgcttattctgtcaaaggccagagggactgtggttaagctgggatgtgagtcatgttctctccctgaccttgctgccagctgcacacagatttgtccctctcgatttgtattcacagagcctgccaataatttggggtatgtgtgtatgagcgtgtgatcattttcatgcaggactgtgggagatacaaatctcgctgcttctggagctgctcttccttaaacctgttgtcccatggggccagcgtgggtgctggagaaaggccgtgtttgcaggaatggggttctctcctgtgggtgtgggtgacagccacagtgtttccctggggcaatgtggatgcagtttccatcttgtacaacctcataagtagcagccacaattgccccatcagtcaccacaagtagtcagggatactttgggctgtggatgtgtgcagtgtgctgttttatggatggatgagtagctatgcaccccagtgtgtcagctctggggccacactgtatagccttgatgagtacgccccttgaacaagacccagtttgtgaactctccttaaagagaaatatttagggataattatttatagcaagaaagaattcttttacacttgagagctcttttaaaaatattttcttattggaaaatttatatggtgggcagggtgaaaaagaaacagtaaaaatattagttcttattccaagtggaacataaataggacatgaagaagggcacctctgaaatgacaactttaactcaccttttaaaagatgtgaaatttccagttttggatacacggtgaatatgtaaaatgagtaacagcatactatggaagccagcaattaaataatcatgtttcattattgcagtaacgttttaaacaattaccttgtgatatgatattaaatatattttctttttgaaaatatgttcactttgggtagcacatcctgtatttactaagtcattaggaagactgcattcagtgttaccaagactggtttttgctagtaagacctcgaataatccataattttgatattggtgcaattttactataagttgagcttagctgtttcagaaatgcttggacaagtacctagagaacacactgatgtctgtgttctgaggcagtctgaagttattcttagagactcagttacagctttagtaagatttagtacaggcaggataagcttggtttcataggaaccagggaaccagtgttagtgtcagcttctttcctcctggtcagcctagaatcccccactcccaatagaggggtttggaagctggagagtaggaagtaagaggcaaagaaggcagccttcagcaactcattatctgccagtgaaattctattaaatgtatttttaaaagagattaccaggtaacaaaaacataaaaaaccaaaacaaggccagatgtggtggctcacgcctgtaatcccagcactttgggaggccgaggtgggcgaaccacttgagcccatgagtttgactccaggctgggcaacatggaaaccctgtcctacaaaagatacaaaaattagccaggcgtggtggtgcaggcctgtagttccagctacctgggaggctgaggtgggaggatcacctgagcctggggagatcaaggctgcagtccattgcactccagcctgggtgacagagggagaccctgtctc

SEQ ID NO: 83536 - DNA, 1883 bp, Artificial Sequence
  derived and/or modified sequence
atggatataaaaaactcaccatctagccttaattctccttcctcctacaactgcagtcaatccatcttacccctggagcacggctccatatacataccttcctcctatgtagacagccaccatgaatatccagccatgacattctatagccctgctgtgatgaattacagcattcccagcaatgtcactaacttggaaggtgggcctggtcggcagaccacaagcccaaatgtgttgtggccaacacctgggcacctttctcctttagtggtccatcgccagttatcacatctgtatgcggaacctcaaaagagtccctggtgtgaagcaagatcgctagaacacaccttacctgtaaacagagagacactgaaaaggaaggttagtgggaaccgttgcgccagccctgttactggtccaggttcaaagagggatgctcacttctgcgctgtctgcagcgattacgcatcgggatatcactatggagtctggtcgtgtgaaggatgtaaggccttttttaaaagaagcattcaaggacataatgattatatttgtccagctacaaatcagtgtacaatcgataaaaaccggcgcaagagctgccaggcctgccgacttcggaagtgttacgaagtgggaatggtgaagtgtggctcccggagagagagatgtgggtaccgccttgtgcggagacagagaagtgccgacgagcagctgcactgtgccggcaaggccaagagaagtggcggccacgcgccccgagtgcgggagctgctgctggacgccctgagccccgagcagctagtgctcaccctcctggaggctgagccgccccatgtgctgatcagccgccccagtgcgcccttcaccgaggcctccatgatgatgtccctgaccaagttggccgacaaggagttggtacacatgatcagctgggccaagaagattcccggctttgtggagctcagcctgttcgaccaagtgcggctcttggagagctgttggatggaggtgttaatgatggggctgatgtggcgctcaattgaccaccccggcaagctcatctttgctccagatcttgttctggacagggatgaggggaaatgcgtagaaggaattctggaaatctttgacatgctcctggcaactacttcaaggtttcgagagttaaaactccaacacaaagaatatctctgtgtcaaggccatgatcctgctcaattccagtatgtaccctctggtcacagcgacccaggatgctgacagcagccggaagctggctcacttgctgaacgccgtgaccgatgctttggtttgggtgattgccaagagcggcatctcctcccagcagcaatccatgcgcctggctaacctcctgatgctcctgtcccacgtcaggcatgcgagatggggagaaaagcaattcattcatttgaagttatcttagtgccaagagtcatgtgaaaatgtcccttgcatgtgggcaatgaaagatttgcagacgatataaaacccagactacctcataaaagagttttgggaatacactgagctttgagtgaaagaagctgcagtggcctccctggagatggggagcaaaccagcttaaaggcccttatcctgaggaagagacaaaaattgacatgcacaatattaagctttgaaatgcagaccacacttcctttcactgcaactttgacttgtcccgcatctctacttaagggcagaaaaggcctctcaaacactcacctcatttggaatgaagatggagactcttttgcctgaagcaacgatggagcagtgaccctctaatcaactcggtggcctaaagaaaaatcttgggtaacattttcacttcagtttccctctgggatcattgtaatc

SEQ ID NO: 83537 - DNA, 1446 bp, Artificial Sequence
  derived and/or modified sequence
atggacatcaagaacagccccagcagcctgaacagccccagcagctacaactgcagccagagcatcctgcccctggagcacggcagcatctacatccccagcagctatgtggacagccaccacgagtacccagccatgaccttctacagccctgctgtgatgaactacagcatccccagcaatgtgaccaacctggagggcggccctggccggcagaccaccagccccaacgtgctgtggcccaccccaggccacctgagccccctggtggtgcaccggcagctgagccacctgtatgcagagccccagaagagcccctggtgtgaggcccggagcctggagcacaccctgcctgtgaaccgggagaccctgaagaggaaggtgtctggcaacagatgtgccagccctgtgacaggccctggcagcaagagagatgcccacttctgtgctgtgtgcagcgactatgccagcggctaccactatggagtgtggagctgtgagggctgcaaggccttcttcaagaggagcatccagggccacaatgactacatctgcccagccaccaaccagtgcaccatcgacaagaacagaaggaagagctgccaggcctgccgcctgaggaagtgctatgaggtgggcatggtgaagtgtggcagccggcgggagcgctgtggctaccgcctggtgcggcggcagaggtctgcagatgagcagctgcactgtgccggcaaggccaagaggtctgggggccacgccccccgggtgcgggagctgctgctggatgccctgagccctgagcagctggtgctgaccctgctggaggccgagccccctcatgtgctgatcagccggcccagcgcccccttcacagaggcctccatgatgatgagcctgaccaagctggccgacaaggagctggtgcacatgatctcctgggccaagaagatccctggctttgtggagctgagcctgtttgaccaggtgcggctgctggagagctgctggatggaggtgctgatgatgggcctgatgtggaggagcattgaccaccctgggaagctgatctttgccccagacctggtgctggacagagatgagggcaaatgtgtggagggcatcctggagatctttgacatgctgctggccaccaccagccgcttccgggagctgaagctgcagcacaaggagtacctgtgtgtgaaggccatgatcctgctgaacagctccatgtaccccctggtgacagccacccaggatgctgacagcagcaggaagctggcccacctgctgaatgctgtgacagatgccctggtgtgggtgattgccaagagcggcatcagcagccagcagcagagcatgaggctggccaacctgctgatgctgctgagccacgtgagacatgcccgctggggcgagaagcagttcatccacctgaagctgtcctag

SEQ ID NO: 83538 - DNA, 1419 bp, Artificial Sequence
  derived and/or modified sequence
atggacatcaagaacagccccagcagcctgaacagccccagcagctacaactgcagccagagcatcctgcccctggagcacggcagcatctacatccccagcagctatgtggacagccaccacgagtacccagccatgaccttctacagccctgctgtgatgaactacagcatccccagcaatgtgaccaacctggagggcggccctggccggcagaccaccagccccaacgtgctgtggcccaccccaggccacctgagccccctggtggtgcaccggcagctgagccacctgtatgcagagccccagaagagcccctggtgtgaggcccggagcctggagcacaccctgcctgtgaaccgggagaccctgaagaggaaggtgtctggcaacagatgtgccagccctgtgacaggccctggcagcaagagagatgcccacttctgtgctgtgtgcagcgactatgccagcggctaccactatggagtgtggagctgtgagggctgcaaggccttcttcaagaggagcatccagggccacaatgactacatctgcccagccaccaaccagtgcaccatcgacaagaacagaaggaagagctgccaggcctgccgcctgaggaagtgctatgaggtgggcatggtgaagtgtggcagccggcgggagcgctgtggctaccgcctggtgcggcggcagaggtctgcagatgagcagctgcactgtgccggcaaggccaagaggtctgggggccacgccccccgggtgcgggagctgctgctggatgccctgagccctgagcagctggtgctgaccctgctggaggccgagccccctcatgtgctgatcagccggcccagcgcccccttcacagaggcctccatgatgatgagcctgaccaagctggccgacaaggagctggtgcacatgatctcctgggccaagaagatccctggctttgtggagctgagcctgtttgaccaggtgcggctgctggagagctgctggatggaggtgctgatgatgggcctgatgtggaggagcattgaccaccctgggaagctgatctttgccccagacctggtgctggacagagatgagggcaaatgtgtggagggcatcctggagatctttgacatgctgctggccaccaccagccgcttccgggagctgaagctgcagcacaaggagtacctgtgtgtgaaggccatgatcctgctgaacagctccatgtaccccctggtgacagccacccaggatgctgacagcagcaggaagctggcccacctgctgaatgctgtgacagatgccctggtgtgggtgattgccaagagcggcatcagcagccagcagcagagcatgaggctggccaacctgctgatgctgctgagccacgtgagacatgcccgctatgccccctag

SEQ ID NO: 83539 - DNA, 1446 bp, Artificial Sequence
  derived and/or modified sequence
atggacatcaagaacagccccagcagcctgaacagccccagcagctacaattgttcccaatctatcctgccgctcgaacacggttcaatatacattccatcgagctacgttgattcgcaccacgaatatccagccatgacgttttattcacccgctgtcatgaactattcaatccccagtaacgtgacaaatctagaagggggtcctgggcgccagacgacttctccaaacgtgctgtggcctacacctggtcatctctcccctcttgtggtgcaccggcagctgtcccacttgtacgcggaaccacagaaaagcccttggtgcgaggccagaagcttggagcacacactgcccgtcaaccgggagacactgaaaagaaaagtctccggtaaccggtgcgcatctccagttaccgggccaggcagtaagagggacgctcatttctgcgccgtgtgttcggactatgcaagcggatatcattacggtgtgtggtcttgtgagggttgcaaggccttcttcaagcggagtatccagggtcataatgattatatctgtcctgccaccaatcagtgcacgatcgataagaatcgaagaaaaagctgccaagcatgcaggctgaggaagtgttatgaagtcggcatggtgaagtgcggctctcggagggagagatgcggatatcgccttgtcagaaggcagcgctctgccgatgaacagctgcactgtgctgggaaagccaagagatcaggaggccatgccccgcgggtcagagagttactcttagatgccctgtctcccgagcagcttgttctgactctcctggaggcggaacctcctcacgtacttatctccagacctagtgcacccttcacagaggcgtccatgatgatgtctctcaccaagctggcagataaagaactcgtgcacatgatctcttgggctaaaaagattcccggcttcgtggaactttcactgttcgaccaggtaaggctcttagagagctgctggatggaggtgctgatgatgggcttaatgtggagatccatagaccaccccggaaaactgatatttgctcccgaccttgtgctggatcgcgatgaaggcaaatgcgttgaaggcatccttgagatctttgatatgttactggcaaccacatctcgtttccgtgaattaaaattgcagcacaaggaatatttgtgcgtgaaagccatgattctccttaattcttctatgtaccctcttgttaccgcaacacaggatgcggacagttcccgcaagttagcgcacctgctcaatgctgttacagacgctcttgtttgggtcatcgcaaagtccggaatttcctctcagcagcagtctatgaggctggcaaacttgctgatgcttctgagccacgtgaggcatgccagatggggggaaaagcaattcatccatctgaaactgagttag

SEQ ID NO: 83540 - DNA, 1419 bp, Artificial Sequence
  derived and/or modified sequence
atggacatcaagaacagccccagcagcctgaacagccccagcagctataattgtagccaatcgatcctgccattggaacacggaagtatatatatcccctcctcatatgtcgacagccatcacgagtatccagctatgacattctattctcccgccgtgatgaattattccattccctccaatgtaactaaccttgaggggggccccggtcgacagacgacaagtccaaacgtgctgtggccaacaccagggcacttatctcctctagtggtacaccggcagctttcccacctttatgctgagcctcaaaaaagcccttggtgcgaagccagatcacttgaacatacgctgcctgtcaaccgtgagaccttaaagaggaaagtatcggggaatcgttgcgcctcgcccgttacggggcccggatctaagcgggatgcccatttttgcgccgtgtgttctgattatgcttctggataccactacggagtgtggtcctgtgagggatgtaaagccttctttaagcgttctatccagggccataacgactatatctgcccagccaccaaccagtgcacgattgacaagaataggcggaaatcgtgccaggcctgtcgcctcagaaagtgctacgaagtgggtatggtaaagtgcggaagtaggcgcgagaggtgtggatatcgtctggtgcggcgtcagagaagcgcggacgagcagctgcattgcgcaggcaaagctaagcgatcaggtggacatgctccgagggtcagagagttgctgctagacgcattgtcgccagagcagttggtccttaccctcctggaggcagaaccaccccacgtattgattagccgcccatctgctccttttacagaggcttcgatgatgatgtcactgacgaaactggcagacaaagaacttgtgcatatgatctcctgggccaagaaaatccctggattcgtagagctctctctattcgaccaggttagattattagagtcctgctggatggaggtgcttatgatgggcttaatgtggcgttctattgatcacccagggaagctgatctttgctcccgacttagtgctggatagagatgagggaaagtgcgtcgaggggattctggaaattttcgacatgctgcttgctactacgagtcggttccgtgagctcaaactacagcataaagagtacctctgcgtgaaagcaatgatacttctgaacagcagcatgtatccgctcgtcacagctacccaggacgctgacagctcccggaaactcgcacacctgttgaacgcagtgactgatgccctggtttgggttatagccaaatctggtatatcttcccagcaacagtcgatgcgtctggccaacctgctgatgcttctgagccacgtcaggcacgcccggtatgctccctag

SEQ ID NO: 83541 - DNA, 1446 bp, Artificial Sequence
  derived and/or modified sequence
atggacatcaagaacagccccagcagcctgaacagccccagcagctacaactgttcccagagcatcttgcccttggagcatggcagcatttacattccttccagttacgtagatagtcatcacgagtatcctgccatgacattttactcccctgcggtgatgaactactccattccaagcaatgttactaatctggagggcggccccggccgccagactacgtcacccaatgttctgtggcccacaccaggacatctctccccacttgttgtccaccgccagttaagccacttatatgcagaaccccagaagtctccttggtgtgaggctcgatcactggagcataccctgccagtgaatcgggagactctgaagcggaaagtttcaggcaataggtgtgcgtcgccagtgaccggcccaggcagcaaacgtgacgcccacttttgtgctgtgtgctccgactacgcaagcggatatcattatggagtgtggtcttgtgaaggctgtaaagcattttttaagcgctccatccaaggccataatgattacatatgtcctgcaacaaaccagtgcacaatagataaaaatcgtaggaaatcttgtcaagcctgccgcttgagaaaatgttatgaggtggggatggttaagtgtggatctcgtagagaacgctgcggatatcgactggtgcgacggcagcgcagtgctgatgagcagctgcactgcgctgggaaggcaaagaggagcggtggacatgccccgagggtgcgagagctgttgctggatgcgctgtctccagaacagctggtgttaaccctcctcgaagccgagcctcctcacgtcttgataagtcggcctagcgcacccttcacagaagcatccatgatgatgtcactgacaaaattggccgacaaggagttggtgcacatgattagctgggcaaagaaaattcccggatttgtcgagttgtctctcttcgatcaagtgagacttctcgaaagttgttggatggaagtacttatgatgggactcatgtggcgtagtattgatcaccccggaaaattgatttttgcccctgatctggtgctggacagagacgaagggaaatgcgttgaaggaatcctagaaatttttgatatgttactcgcgacaacatctcggtttcgggaactcaagcttcagcacaaggaatatctgtgcgttaaggcaatgattttgctgaacagtagcatgtacccccttgtgacggccactcaggacgcagacagttcccgaaagttagcacacttgctgaatgctgtgacagacgccttggtctgggttattgcaaaatctggcataagttctcaacagcagtccatgagactcgcgaacctactcatgctcctttcccacgttaggcacgcgaggtggggcgagaaacaattcatccacttgaagctgagctag

SEQ ID NO: 83542 - DNA, 1446 bp, Artificial Sequence
  derived and/or modified sequence
atggacataaagaattctccctcctctttgaacagtcccagtagttacaattgcagccagtccatactgcccctggagcatggatctatttatattccatccagttatgtggactcccatcacgagtaccccgcaatgactttttacagccctgccgtgatgaattacagcattcctagtaacgtgactaatctggaaggaggacccggtcggcagaccaccagccccaacgtcttgtggccaacacctggacacttaagccctctcgtcgtacacaggcagctaagccatctctacgccgagcctcagaaaagcccatggtgtgaggccagatccctggaacacaccctgcctgtgaatcgcgagacactgaaaagaaaggtaagtggaaataggtgtgctagtccagtgaccggaccaggcagtaaaagggatgctcacttttgcgctgtttgttctgactatgcatcaggctaccactacggcgtatggtcctgtgaagggtgcaaggccttttttaaacggagcattcagggacataacgactacatctgcccagccactaatcagtgcacaatagataaaaacagacggaagtcctgccaagcctgccgtctgagaaaatgttatgaagtgggcatggtgaaatgcggatcccgtcgagaaagatgtgggtacagactggtgagacgccagaggtctgcggacgaacagcttcattgtgctggaaaggcgaaaagaagcgggggacatgcccctagggtgcgcgagttgctgctcgacgccctgtctcctgagcagttggtgctaaccttgctagaggcggaacccccacacgtgctaatcagtcgaccgtcagctccttttaccgaagcctcaatgatgatgtccctaaccaagttagcggataaagagttggtccatatgattagttgggctaagaaaattccaggatttgtggaactttcactttttgatcaggtgagacttttggaatcttgctggatggaagtcctaatgatggggctgatgtggagaagcattgaccacccgggtaagcttattttcgcgcctgacctggttctcgatcgtgacgaaggcaagtgtgtggaaggaatcctcgaaatttttgatatgttgctggctacgacgtccagatttagggagctgaagcttcagcacaaagagtacctatgtgtcaaggcaatgattctgctgaattcctctatgtaccctctggtgactgctacacaagatgctgattcatctcggaaattggcccatctgctgaatgcagtgacggacgccctcgtttgggtgatagccaagtccgggattagttcgcagcaacaatctatgcggctcgcgaacttattgatgctgctgagccatgtcaggcacgctcgctggggcgaaaagcagttcatacacctgaagctttcatag

SEQ ID NO: 83543 - DNA, 1419 bp, Artificial Sequence
  derived and/or modified sequence
atggatatcaaaaactcccctagctccctcaactcgccaagttcatataattgctcacaatctatactgccactggagcacgggtcaatctacatccccagcagttacgtcgattcccaccacgagtacccagccatgactttctattctcccgctgtgatgaactacagcatcccttccaacgtaaccaacctggaagggggtccgggtaggcagactacttcccctaacgtgttgtggcctacaccagggcacctcagccccttagtcgtgcaccgccagctttctcacctgtatgcagaaccacagaagagtccgtggtgcgaggcgagatcactcgagcacacgcttcctgttaatcgcgagacccttaagcggaaagttagcggaaacaggtgtgcttcaccagtgactggcccagggagtaagcgggatgcccacttttgtgctgtgtgcagcgattacgccagcggctaccactacggcgtttggtcctgcgaaggatgcaaggcgttcttcaaacgaagcattcagggccataacgattatatttgtcctgccaccaaccagtgcaccattgataagaatagacgcaagtcgtgccaggcctgccggctccggaaatgctacgaggtgggtatggtgaaatgtggtagcagacgtgaacgttgtggctatagattagtgcgcaggcagcgaagtgccgatgaacagctgcactgcgcgggtaaggccaaacggtcgggaggtcatgctcctcgggttcgcgaactgctgctggatgcgctatcccctgaacagctggtgctcacactgcttgaggcggagcccccacatgttctcatcagccgacctagtgccccattcacggaggctagcatgatgatgtccctgacaaaattagccgataaagaattagtacacatgatctcctgggcaaaaaagatcccaggttttgtcgaacttagtctatttgatcaggtgcgcctgctcgaatcttgttggatggaggtgctgatgatgggcctgatgtggaggagtatcgatcaccccggtaaactgatcttcgcacccgatctcgtgctcgaccgggatgagggcaagtgtgtagaaggcatcttggagatttttgatatgttgctggcgactaccagtcggttcagggagctgaagctgcagcacaaggaatacttgtgtgtcaaggctatgatccttttaaacagcagcatgtacccgctggtgacggcaacacaggatgcggattcctcacggaagctggcgcacctcctgaacgccgtcactgacgctcttgtgtgggtcattgcgaagtctgggataagcagccagcaacagtctatgaggctggccaacctgctcatgctactctctcacgtacggcacgccagatacgccccttag

SEQ ID NO: 83544 - DNA, 1446 bp, Artificial Sequence
  derived and/or modified sequence
atggacataaagaactcgccatccagcctaaattccccaagctcatacaattgctcccaatcaatcctgccactggagcacggttcaatttacatcccgtcgagttatgttgatagtcatcatgagtaccccgctatgaccttttacagcccagcggtaatgaactatagcatcccatcaaacgtcacaaacctggaggggggacccggacgacagactacatctccaaacgttctgtggccaactccgggacacctctctccactcgtcgtccacaggcagttgtcccacctgtatgccgagccacagaagtcaccctggtgcgaagcccgttcgttggaacacaccttacctgtaaaccgggaaactcttaaacggaaagtcagcggtaaccgttgcgcttcccccgttacagggccaggaagtaagagggacgcccatttctgcgcggtctgctccgactacgcatcagggtaccactacggagtatggtcttgtgagggctgcaaagccttttttaagcgttcaatccaggggcacaatgattacatctgccccgcaaccaaccagtgtacaatcgataagaatcggaggaagtcatgccaggcttgcaggctgagaaagtgctacgaagtgggtatggttaagtgtggttctcgacgggagaggtgtggctaccgcctggtgagacggcagcgttccgccgatgaacagctgcattgtgcaggcaaagcaaaacgatcaggcggacacgcacccagggtgagagaactcttgcttgacgcactgtcccctgaacaactggttctcactctactggaggctgagcctcctcatgtcctaataagtagacccagtgctcctttcactgaggcctcaatgatgatgtctctcacgaaattggccgacaaggaattagttcatatgatctcatgggctaagaaaattccagggttcgtagagctttctctattcgaccaagtgagactcctcgagagttgttggatggaagtgctgatgatgggactcatgtggagaagtatcgaccatcccggaaagcttatatttgctcccgatcttgtcctcgacagagatgagggaaaatgcgtggagggtatcctggaaattttcgatatgctgctggccaccacaagccggttcagggagctgaagttgcaacacaaggagtacctgtgcgtcaaggccatgatcctcctaaattcgagcatgtatccactggttacagcaactcaggacgcagactctagccgaaagctggctcatttattgaatgccgtgaccgacgcgctagtttgggttattgcaaagtcaggaatctctagtcaacaacagtctatgcggctggctaacctgctgatgctcctgagccacgtgagacacgccagatggggtgagaagcagttcatccacctcaaactgtcatag

SEQ ID NO: 83545 - protein, 1050 aa, Artificial Sequence
  derived and/or modified sequence
MAAVKKEGGALSEAMSLEGDEWELSKENVQPLRQGRIMSTLQGALAQESACNNTLQQQKRAFEYEIRFYTGNDPLDVWDRYISWTEQNYPQGGKESNMSTLLERAVEALQGEKRYYSDPRFLNLWLKLGRLCNEPLDMYSYLHNQGIGVSLAQFYISWAEEYEARENFRKADAIFQEGIQQKAEPLERLQSQHRQFQARVSRQTLLALEKEEEEEVFESSVPQRSTLAELKSKGKKTARAPIIRVGGALKAPSQNRGLQNPFPQQMQNNSRITVFDENADEASTAELSKPTVQPWIAPPMPRAKENELQAGPWNTGRSLEHRPRGNTASLIAVPAVLPSFTPYVEETARQPVMTPCKIEPSINHILSTRKPGKEEGDPLQRVQSHQQASEEKKEKMMYCKEKIYAGVGEFSFEEIRAEVFRKKLKEQREAELLTSAEKRAEMQKQIEEMEKKLKEIQTTQQERTGDQQEETMPTKETTKLQIASESQKIPGMTLSSSVCQVNCCARETSLAENIWQEQPHSKGPSVPFSIFDEFLLSEKKNKSPPADPPRVLAQRRPLAVLKTSESITSNEDVSPDVCDEFTGIEPLSEDAIITGFRNVTICPNPEDTCDFARAARFVSTPFHEIMSLKDLPSDPERLLPEEDLDVKTSEDQQTACGTIYSQTLSIKKLSPIIEDSREATHSSGFSGSSASVASTSSIKCLQIPEKLELTNETSENPTQSPWCSQYRRQLLKSLPELSASAELCIEDRPMPKLEIEKEIELGNEDYCIKREYLICEDYKLFWVAPRNSAELTVIKVSSQPVPWDFYINLKLKERLNEDFDHFCSCYQYQDGCIVWHQYINCFTLQDLLQHSEYITHEITVLIIYNLLTIVEMLHKAEIVHGDLSPRCLILRNRIHDPYDCNKNNQALKIVDFSYSVDLRVQLDVFTLSGFRTVQILEGQKILANCSSPYQVDLFGIADLAHLLLFKEHLQVFWDGSFWKLSQNISELKDGELWNKFFVRILNANDEATVSVLGELAAEMNGVFDTTFQSHLNKALWKVGKLTSPGALLFQ

SEQ ID NO: 83546 - protein, 1064 aa, Artificial Sequence
  derived and/or modified sequence
MAAVKKEGGALSEAMSLEGDEWELSKENVQPLRQGRIMSTLQGALAQESACNNTLQQQKRAFEYEIRFYTGNDPLDVWDRWVFLFHKDNRNINRYISWTEQNYPQGGKESNMSTLLERAVEALQGEKRYYSDPRFLNLWLKLGRLCNEPLDMYSYLHNQGIGVSLAQFYISWAEEYEARENFRKADAIFQEGIQQKAEPLERLQSQHRQFQARVSRQTLLALEKEEEEEVFESSVPQRSTLAELKSKGKKTARAPIIRVGGALKAPSQNRGLQNPFPQQMQNNSRITVFDENADEASTAELSKPTVQPWIAPPMPRAKENELQAGPWNTGRSLEHRPRGNTASLIAVPAVLPSFTPYVEETARQPVMTPCKIEPSINHILSTRKPGKEEGDPLQRVQSHQQASEEKKEKMMYCKEKIYAGVGEFSFEEIRAEVFRKKLKEQREAELLTSAEKRAEMQKQIEEMEKKLKEIQTTQQERTGDQQEETMPTKETTKLQIASESQKIPGMTLSSSVCQVNCCARETSLAENIWQEQPHSKGPSVPFSIFDEFLLSEKKNKSPPADPPRVLAQRRPLAVLKTSESITSNEDVSPDVCDEFTGIEPLSEDAIITGFRNVTICPNPEDTCDFARAARFVSTPFHEIMSLKDLPSDPERLLPEEDLDVKTSEDQQTACGTIYSQTLSIKKLSPIIEDSREATHSSGFSGSSASVASTSSIKCLQIPEKLELTNETSENPTQSPWCSQYRRQLLKSLPELSASAELCIEDRPMPKLEIEKEIELGNEDYCIKREYLICEDYKLFWVAPRNSAELTVIKVSSQPVPWDFYINLKLKERLNEDFDHFCSCYQYQDGCIVWHQYINCFTLQDLLQHSEYITHEITVLIIYNLLTIVEMLHKAEIVHGDLSPRCLILRNRIHDPYDCNKNNQALKIVDFSYSVDLRVQLDVFTLSGFRTVQILEGQKILANCSSPYQVDLFGIADLAHLLLFKEHLQVFWDGSFWKLSQNISELKDGELWNKFFVRILNANDEATVSVLGELAAEMNGVFDTTFQSHLNKALWKVGKLTSPGALLFQ

SEQ ID NO: 83547 - protein, 933 aa, Artificial Sequence
  derived and/or modified sequence
MAAVKKEGGALSEAMSLEGDEWELSKENVQPLRQGRIMSTLQGALAQESACNNTLQQQKRAFEYEIRFYTGNDPLDVWDRYISWTEQNYPQGGKESNMSTLLERAVEALQGENFWKADAIFQEGIQQKAEPLERLQSQHRQFQARVSRQTLLALEKEEEEEVFESSVPQRSTLAELKSKGKKTARAPIIRVGGALKAPSQNRGLQNPFPQQMQNNSRITVFDENADEASTAELSKPTVQPWIAPPMPRAKENELQAGPWNTGRSLEHRPRGNTASLIAVPAVLPSFTPYVEETARQPVMTPCKIEPSINHILSTRKPGKEEGDPLQRVQSHQQASEEKKEKMMYCKEKIYAGVGEFSFEEIRAEVFRKKLKEQREAELLTSAEKRAEMQKQIEEMEKKLKEIQTTQQERTGDQQEETMPTKETTKLQIASESQKIPGMTLSSSVCQVNCCARETSLAENIWQEQPHSKVSLSLGPSVPFSIFDEFLLSEKKNKSPPADPPRVLAQRRPLAVLKTSESITSNEDVSPDVCDEFTGIEPLSEDAIITGFRNVTICPNPEDTREATHSSGFSGSSASVASTSSIKCLQIPEKLELTNETSENPTQSPWCSQYRRQLLKSLPELSASAELCIEDRPMPKLEIEKEIELGNEDYCIKREYLICEDYKLFWVAPRNSAELTVIKVSSQPVPWDFYINLKLKERLNEDFDHFCSCYQYQDGCIVWHQYINCFTLQDLLQHSEYITHEITVLIIYNLLTIVEMLHKAEIVHGDLSPRCLILRNRIHDPYDCNKNNQALKIVDFSYSVDLRVQLDVFTLSGFRTVQILEGQKILANCSSPYQVDLFGIADLAHLLLFKEHLQVFWDGSFWKLSQNISELKDGELWNKFFVRILNANDEATVSVLGELAAEMNGVFDTTFQSHLNKALWKVGKLTSPGALLFQ

SEQ ID NO: 83548 - DNA, 3153 bp, Artificial Sequence
  derived and/or modified sequence
atggcagctgtgaagaaagaggggggggctcttagcgaggcgatgagcctggaaggagatgaatgggaactctcaaaagagaacgtacagccattgcggcagggtcggatcatgtctaccctgcaaggcgctctcgcccaagagtcagcatgtaacaacactttgcagcagcaaaaaagggcattcgaatacgagattcggttttacaccggaaacgatcctctcgacgtgtgggataggtacatcagctggactgagcaaaactatcctcagggtggaaaggagagcaacatgagcaccctcctggagcgggcagtcgaagccctgcagggagaaaagcgatattattcagatcccagattcctgaatctgtggctaaaattggggagactttgtaacgaaccactggacatgtattcctatctgcacaaccagggcattggtgtctctctggctcagttctacatatcatgggcagaggaatacgaggcgcgcgagaatttcagaaaggcagatgccatctttcaggaagggatccagcagaaggccgagccattggagaggcttcagtcccagcaccgtcagtttcaggctcgagtatctcgccagactctgcttgcactggaaaaagaagaagaagaggaggtgtttgaaagcagcgtgccccagaggagcaccctggctgagctaaagagcaaagggaaaaaaacagcacgtgcgccaataatccgtgtgggtggggcattaaaggcccctagtcagaatcgtggattgcagaacccgttcccccagcagatgcaaaacaacagcaggattacagtctttgacgagaacgccgatgaagcctccacagccgagctgagcaagccaacagtgcagccctggatagcacctcccatgcctcgggccaaagaaaatgagctgcaggcgggtccctggaatacagggcgctctctggaacataggccgcgtggcaacacagcatccttaatagccgtgccagctgtcctcccttccttcaccccttatgttgaggaaaccgcacggcaacccgttatgactccctgcaaaattgagccaagcattaaccacatcctttccacacgcaagcccggaaaggaagagggcgaccctctgcagcgagtgcagagtcaccagcaagcttcggaggaaaaaaaggaaaagatgatgtactgcaaagagaagatttacgccggtgtgggagagttttcatttgaggaaatcagggccgaggtcttcaggaagaagctaaaggaacagagggaggccgagctgctgactagcgctgagaagcgagcagagatgcagaagcagattgaagaaatggaaaaaaaacttaaggagatccagactacgcagcaagaacgaacaggagaccagcaggaagaaactatgccaactaaagagaccactaagctgcagattgcttcggagagtcagaagattcctggcatgacactgagtagtagcgtatgtcaagtgaactgctgcgctcgcgaaacctcccttgccgagaacatttggcaggaacagccccacagtaagggcccatccgtgccattttccattttcgacgaattcctactgagcgagaagaagaacaaaagcccaccggcagacccacctcgcgtgcttgcccagagaaggcctctcgcagtcctaaagacctcagaaagcatcacctcgaatgaggacgtaagtccagatgtttgtgatgaattcacgggcattgaacccttatcagaagacgccattataacaggattccgtaatgttactatttgccccaatcctgaggatacttgtgatttcgctagagctgcaagatttgtgagtacccccttccacgaaattatgagccttaaggatcttccatccgatcctgagcgcctgctgccagaggaggaccttgacgttaagacatccgaggatcagcagacggcttgtggaacaatttatagccagactctatctatcaagaagctttcaccaatcatcgaggacagccgtgaggcaacacattctagcgggttctccggtagcagtgcttcagtagcttctacatcaagcatcaagtgtctgcagatcccagagaagctagaactaacgaatgagacaagcgaaaatcctacacaaagcccatggtgttctcagtacaggaggcagttgcttaaaagcctacccgagctctccgcaagtgcagaattatgcatagaggaccgccctatgcccaaactagagattgaaaaggagattgaattaggaaatgaggactattgtatcaagagggagtacttgatttgcgaggattacaaacttttctgggtggcaccgcgcaattccgccgaactcactgtcatcaaagtgagctctcagcctgtgccctgggacttctatattaaccttaagttgaaagagcgcctcaatgaggattttgaccatttttgctcctgctatcagtaccaggatgggtgtatcgtatggcaccaatatataaattgcttcactctgcaagacctgttacagcatagtgagtacattacacatgagattacagtgctgattatctataacctgctgaccatcgtcgaaatgcttcacaaggctgagatagttcatggagatcttagtccaaggtgcctgatcttaagaaacaggattcatgatccttacgactgcaataagaataaccaggccctgaaaattgtggatttctcatacagcgtcgatctccgcgtgcaactggatgtgttcacactcagcggctttagaacagttcagatactggagggccagaagatcttggctaactgctcaagtccctaccaggtggacctcttcggcatagctgacctggcgcatctcctgttgttcaaagagcatttacaggtgttttgggacggaagcttctggaagctatcccagaacatttctgaactcaaggacggcgaactctggaacaagtttttcgttcggatcctgaatgcaaatgatgaagcaacagtaagcgttttaggggagctggctgctgaaatgaacggagtctttgataccacattccagtcacatctgaataaagcgctatggaaagttggcaagctaacctcacccggtgcattgctatttcagtag

SEQ ID NO: 83549 - DNA, 3195 bp, Artificial Sequence
  derived and/or modified sequence
atggccgctgtcaaaaaggagggaggcgcactgtccgaagccatgtccctggagggcgatgagtgggagctcagcaaggaaaacgttcaaccacttcggcagggtaggatcatgtctaccctccagggtgctctagctcaagagtcggcctgtaacaatactctgcagcagcagaaacgggcattcgagtacgagatccgcttctatactggcaacgaccctctggatgtatgggacaggtgggtgtttctgtttcacaaggataacagaaatatcaaccgttatatctcatggacagagcagaattatcctcagggcggcaaggagtccaacatgagcactctgcttgagagggccgtcgaggctcttcagggtgagaagcggtactattccgaccctagattcctgaacttgtggctgaagcttggccgtctgtgcaacgaacctctggacatgtactcctatctgcacaaccagggaatcggggtctcgctcgcccaattctatatcagctgggcagaagagtacgaggcgcgcgaaaattttcggaaggcagatgccattttccaggaaggaattcagcagaaagctgaacccttggaacggttgcagagccaacaccggcagttccaagccagagtttcaagacagactctcctggcactggagaaggaagaagaggaggaagtttttgagtctagcgtgccacaacggagtactctcgccgagttgaaatcaaaagggaagaagacggctcgcgcaccgattataagagtaggaggtgccctcaaggctccaagccagaatcgcgggctccagaatcccttcccccaacagatgcagaacaatagcaggatcacagtgttcgacgagaacgccgacgaggcgtccactgctgagttgtctaagcctaccgtacagccctggatcgccccaccaatgcctcgggccaaagaaaatgagttgcaggctggaccatggaatacagggagatccctggagcacaggcccaggggaaatacggctagtctgatcgccgtgcctgccgtgctcccgtctttcactccttacgtcgaggaaacagcccgacagccagtcatgactccttgtaagattgaaccctctataaaccacattctgagtacccgaaagcctggcaaggaagagggtgatccgctgcaacgcgtacaaagtcatcaacaggcttccgaggagaaaaaggagaagatgatgtattgcaaagagaagatctacgccggtgttggagaattctccttcgaggaaattcgagcagaagtgtttcgaaaaaagttaaaggagcaacgcgaagcggagctactgaccagcgccgagaaacgagcagaaatgcagaagcaaatcgaagagatggaaaaaaaactgaaagaaatccagaccacgcagcaggagcggacaggcgaccagcaggaagaaactatgccaaccaaggaaacaacgaagttgcagatcgcttccgagagtcaaaaaatccccggcatgacattatctagttcggtttgtcaagtgaattgctgcgctagggagaccagccttgcagagaatatttggcaggagcagccccactctaaaggcccttccgtgccattcagcattttcgacgagttcttacttagcgagaagaagaacaagtcaccaccggcagatcccccacgcgtcctagcccagcgccgccctcttgcagtgcttaaaacaagtgagagtatcaccagtaatgaggacgtatcgcccgatgtatgcgacgagtttacagggatcgaaccgctgtcagaggacgccatcatcaccggattccgaaacgtgaccatttgtcccaacccggaagatacatgcgactttgcgagagcagctcgctttgtaagtactcccttccacgagattatgtctcttaaagatttgccatccgacccagaaaggttgctccctgaggaggatcttgacgtcaagaccagcgaggatcagcagacagcttgcggcaccatttacagccaaacgctttcaataaaaaaactcagtccaattattgaggactccagggaggcgactcacagtagtggattctccggctcatcagccagtgttgcatcaacatcctccattaagtgcttgcagatccctgaaaagttggagctcaccaatgagacatctgaaaatcccacacagtctccctggtgctctcagtacagaagacagctgctcaaatctttgccagagctatcagcttctgcagaactgtgcatcgaggaccgaccaatgcctaagctggaaattgagaaggagatagaattagggaacgaggattattgcatcaagagggaatacctgatctgcgaggattataagctcttctgggtcgccccgcgcaacagcgccgaacttactgtgataaaggtttcatcccagccagtgccttgggatttctatattaacctgaagctgaaagagagacttaacgaagacttcgatcacttttgttcttgttaccaataccaggacggatgtatagtgtggcaccagtatatcaactgttttacgttgcaagatctgttgcaacactccgagtatataactcacgaaattaccgtgctgattatttacaacttactgacaatagttgaaatgctgcataaggccgagatagtgcacggcgacctttcgccccgctgcttgatcctgcgcaacagaattcacgacccttacgactgcaacaagaacaaccaggcactgaaaatagtggactttagttactccgttgatctcagagtgcagctcgatgtgttcactctcagcggcttccgcactgtccagatcctggaaggccagaaaatcttagccaactgcagtagcccttaccaggtggatttgtttggaattgctgacctggcccacctgcttctcttcaaagagcacctccaggtgttttgggacggctcattctggaagctatcccaaaacatctccgagctgaaggacggcgaactgtggaacaaattcttcgttcgtatcctcaacgccaatgacgaggccacagtttccgttttgggagagctcgccgcagaaatgaacggggtgttcgatacaacctttcagtctcacctcaataaggcattatggaaggttggcaagctgacttcccctggtgccctgctgttccaatag

SEQ ID NO: 83550 - DNA, 2802 bp, Artificial Sequence
  derived and/or modified sequence
atggccgcagtgaagaaagaaggtggtgccctttcagaggccatgagcctggaaggtgatgagtgggagctgagcaaggagaacgttcagccactgcgtcaggggcgaattatgagcacacttcagggagccttagcccaggaatctgcatgcaataacacactgcaacagcagaagagggcctttgagtacgaaatccgcttttacacagggaacgaccctctggatgtttgggaccgatacatctcatggacagagcagaactaccctcaggggggcaaagaaagcaacatgagcactctgctcgaaagggctgtggaggctctgcagggtgaaaacttctggaaggctgacgccatatttcaagaaggcatccagcagaaagccgagcccctcgagaggcttcagagtcagcatcggcaatttcaggccagggtcagccgccaaaccctcctcgccctcgaaaaggaggaagaggaggaggttttcgagtccagtgtccctcaacgatccacactggcagagctcaagtccaaaggcaagaagaccgcaagggcccctatcatccgcgttggaggagccctcaaagcaccatcacaaaatcgcgggctgcagaacccctttccccagcagatgcaaaataactcgaggatcaccgtgtttgatgagaacgccgatgaagcgtctactgcagagctaagtaaacccactgtgcagccatggattgccccccccatgcctcgtgccaaagagaatgaactgcaggccggaccgtggaataccggcagaagcttagagcacagaccgcgcgggaacaccgcgagtctcattgctgtacctgctgtgctcccgtctttcaccccttacgtggaagagaccgctcggcaacccgtcatgaccccctgcaagattgagccaagcatcaaccacattctgtcaactcgcaaacctggcaaggaggagggggatcctctccagagggtgcagtcccaccagcaggccagtgaagagaaaaaggagaagatgatgtattgcaaggaaaagatttacgcaggagttggagagttttcgttcgaggagattcgggccgaagtatttaggaagaagttgaaggaacagagagaggctgagttgcttacatcggcagagaagcgggctgagatgcagaaacaaattgaggagatggagaaaaagcttaaggaaattcagaccacacaacaggagaggactggcgaccagcaggaggagacgatgcctacaaaagaaaccactaaattacaaattgccagtgagtctcagaagatacccggaatgactttgagctccagcgtttgccaggtgaattgctgcgcccgcgagacaagtcttgccgagaacatctggcaggaacagcctcactccaaggtgtcactttcactcggcccctcagtcccattcagcattttcgacgagtttttgctgagcgagaagaagaacaagtctcctcctgccgatccgccacgggtcttagcccagcggcggcccctggccgtgctgaaaacctctgagtctataacctctaatgaagacgtgagtcccgacgtgtgcgatgagtttactggcatcgagccgctttcagaagacgccatcattactggattcaggaacgtaaccatatgtcccaatcctgaagatacacgcgaggctacacacagtagtggctttagtggttccagtgcctctgttgccagtacatcgagcatcaaatgtctgcaaattccagaaaaactcgaactgaccaacgagacatctgaaaaccccacccagtcaccctggtgttcacagtaccggaggcagctcctgaagtctctccctgagttaagcgcctcagctgagctgtgcatcgaagatcgacccatgccaaaactcgagatcgagaaggagatcgagttaggaaacgaggactactgcatcaagagagaatatctgatctgcgaggattataagctgttctgggtagcccccagaaacagtgccgagctgaccgtcattaaagtgtcttcccagcctgtcccctgggacttttacattaatcttaagctcaaggaacgcttgaacgaggacttcgatcatttctgttcctgttatcagtaccaagacggatgcatcgtgtggcaccaatatatcaattgtttcacactgcaggatctcctgcagcactctgagtacatcacccatgagatcaccgtcctgattatctataacctgctgactatcgtggaaatgctacacaaggctgaaatcgtgcacggggacctgtccccgcgatgtctcatcctaagaaaccggatccacgatccctacgactgtaataagaataatcaagccctgaagatagtagacttttcctatagtgttgacctccgggttcagctggacgtctttacactttcaggattccgcacagtgcagatacttgagggacagaagattttagctaactgttccagtccctaccaagtggatttatttggaatagccgatttagcacatctgttgctgtttaaggagcacctccaggtcttttgggatggtagcttctggaaactttctcaaaatatttccgagctgaaagacggggagctatggaacaagttcttcgttaggatcttgaatgcaaacgatgaagctactgtgtctgtgctcggcgagctggccgcggagatgaatggcgtgtttgacacgacatttcagagccatctgaataaagctttgtggaaagttggaaagcttacaagtcctggcgccctcctctttcaatag

SEQ ID NO: 83551 - DNA, 3153 bp, Artificial Sequence
  derived and/or modified sequence
atggctgctgtgaagaaggagggcggggccctgtctgaggccatgagcctggagggagatgagtgggagctgagcaaagaaaatgtgcagcccctgcggcagggccgcatcatgagcaccctgcagggcgccctggcccaggagagcgcctgcaacaacaccctgcagcagcagaagagggcctttgaatatgagatccgcttctacacaggaaatgaccccctggatgtgtgggaccgctacatctcctggacagagcagaactacccccagggcggcaaggagagcaacatgagcaccctgctggagagagctgtggaggccctgcagggcgagaagcgctactacagcgacccccgcttcctgaacctgtggctgaagctgggccgcctgtgcaatgagcccctggacatgtacagctacctgcacaaccagggcattggagtgtccctggcccagttctacatctcctgggccgaggagtatgaggcccgggagaacttcaggaaggcagatgccatcttccaggagggcatccagcagaaggccgagcccctggagcggctgcagagccagcaccggcagttccaggcccgggtgtcccggcagaccctgctggccctggagaaggaggaggaggaggaggtgtttgagagctctgtgccccagaggagcaccctggccgagctgaagagcaagggcaagaagacagcccgggcccccatcatccgggtgggcggggccctgaaggcccccagccagaacagaggcctgcagaaccccttcccccagcagatgcagaacaacagccgcatcaccgtgtttgatgaaaatgctgatgaggccagcacagctgagctgagcaagcccaccgtgcagccctggatcgccccacccatgccccgggccaaggaaaatgagctgcaggccggcccctggaacacaggccgcagcctggagcaccggccccggggcaacacagccagcctgattgctgtgcctgctgtgctgcccagcttcaccccctacgtggaggagacagcccggcagcctgtgatgaccccctgcaagattgagcccagcatcaaccacatcctgagcaccaggaagccaggcaaggaggagggggaccccctgcagagggtgcagagccaccagcaggccagcgaggagaagaaggagaagatgatgtactgcaaggagaagatctatgccggcgtgggggagttctcctttgaggagatccgggcagaggtgttcaggaagaagctgaaggagcagcgggaggccgagctgctgaccagcgctgagaagagagctgagatgcagaagcagatcgaggagatggagaagaagctgaaggagatccagaccacccagcaggagaggactggagaccagcaggaggagaccatgcccaccaaggagaccaccaagctgcagatcgccagcgagagccagaagatccctggcatgaccctgagcagctctgtgtgccaggtgaactgctgtgcccgggagaccagcctggccgagaacatctggcaggagcagccccacagcaagggccccagcgtgcccttcagcatctttgatgagttcctgctgtctgagaagaagaacaagagccccccagctgaccccccccgggtgctggcccagaggcggcccctggccgtgctgaagaccagcgagagcatcaccagcaatgaagatgtgtccccagatgtgtgtgatgagttcaccggcatcgagcccctgtctgaagatgccatcatcaccggcttcagaaatgtgaccatctgccccaaccctgaggacacctgtgactttgcccgggccgccaggtttgtgtccacccccttccacgagatcatgagcctgaaggacctgcccagcgaccctgagcggctgctgcctgaggaggacctggatgtgaagaccagcgaggaccagcagacagcctgtggcaccatctacagccagaccctgagcatcaagaagctgagccccatcatcgaggacagccgggaggccacccacagcagcggcttcagcggcagcagcgcctctgtggccagcaccagcagcatcaagtgcctgcagatccctgagaagctggagctgaccaatgagaccagcgagaaccccacccagagcccctggtgcagccagtaccgccggcagctgctgaagagcctgcctgagctgagcgccagcgctgagctgtgcatcgaggaccggcccatgcccaagctggagattgagaaggagattgagctgggcaatgaagactactgcatcaagcgggagtacctgatctgtgaggactacaagctgttctgggtggcccccaggaacagcgctgagctgaccgtcatcaaggtgagcagccagcctgtgccctgggacttctacatcaacctgaagctgaaggagcggctgaatgaagattttgaccacttctgcagctgctaccagtaccaggacggctgcatcgtgtggcaccagtacatcaactgcttcaccctgcaggacctgctgcagcacagcgagtacatcacccatgagatcaccgtgctgatcatctacaacctgctgaccatcgtggagatgctgcacaaggccgagatcgtgcacggggacctgagcccccgctgcctgatcctgaggaaccgcatccatgacccctatgactgcaacaagaacaaccaggccctgaagatcgtggacttctcctacagcgtggacctgcgggtgcagctggatgtgttcaccctgagcggcttcagaacagtgcagatcctggagggccagaagatcctggccaactgcagcagcccctaccaggtggacctgtttggaattgctgacctggcccacctgctgctcttcaaggagcacctgcaggtgttctgggatggcagcttctggaagctgagccagaacatcagcgagctgaaggatggagagctgtggaacaagttctttgtgcgcatcctgaatgccaatgatgaggccaccgtgtctgtgctgggggagctggccgctgagatgaatggagtgtttgacaccaccttccagagccacctgaacaaggccctgtggaaggtgggcaagctgaccagccctggggccctgctcttccagtag

SEQ ID NO: 83552 - DNA, 3195 bp, Artificial Sequence
  derived and/or modified sequence
atggctgctgtgaagaaggagggcggggccctgtctgaggccatgagcctggagggagatgagtgggagctgagcaaagaaaatgtgcagcccctgcggcagggccgcatcatgagcaccctgcagggcgccctggcccaggagagcgcctgcaacaacaccctgcagcagcagaagagggcctttgaatatgagatccgcttctacacaggaaatgaccccctggatgtgtgggaccgctgggtgttcctgttccacaaggacaacagaaacatcaaccgctacatctcctggacagagcagaactacccccagggcggcaaggagagcaacatgagcaccctgctggagagagctgtggaggccctgcagggcgagaagcgctactacagcgacccccgcttcctgaacctgtggctgaagctgggccgcctgtgcaatgagcccctggacatgtacagctacctgcacaaccagggcattggagtgtccctggcccagttctacatctcctgggccgaggagtatgaggcccgggagaacttcaggaaggcagatgccatcttccaggagggcatccagcagaaggccgagcccctggagcggctgcagagccagcaccggcagttccaggcccgggtgtcccggcagaccctgctggccctggagaaggaggaggaggaggaggtgtttgagagctctgtgccccagaggagcaccctggccgagctgaagagcaagggcaagaagacagcccgggcccccatcatccgggtgggcggggccctgaaggcccccagccagaacagaggcctgcagaaccccttcccccagcagatgcagaacaacagccgcatcaccgtgtttgatgaaaatgctgatgaggccagcacagctgagctgagcaagcccaccgtgcagccctggatcgccccacccatgccccgggccaaggaaaatgagctgcaggccggcccctggaacacaggccgcagcctggagcaccggccccggggcaacacagccagcctgattgctgtgcctgctgtgctgcccagcttcaccccctacgtggaggagacagcccggcagcctgtgatgaccccctgcaagattgagcccagcatcaaccacatcctgagcaccaggaagccaggcaaggaggagggggaccccctgcagagggtgcagagccaccagcaggccagcgaggagaagaaggagaagatgatgtactgcaaggagaagatctatgccggcgtgggggagttctcctttgaggagatccgggcagaggtgttcaggaagaagctgaaggagcagcgggaggccgagctgctgaccagcgctgagaagagagctgagatgcagaagcagatcgaggagatggagaagaagctgaaggagatccagaccacccagcaggagaggactggagaccagcaggaggagaccatgcccaccaaggagaccaccaagctgcagatcgccagcgagagccagaagatccctggcatgaccctgagcagctctgtgtgccaggtgaactgctgtgcccgggagaccagcctggccgagaacatctggcaggagcagccccacagcaagggccccagcgtgcccttcagcatctttgatgagttcctgctgtctgagaagaagaacaagagccccccagctgaccccccccgggtgctggcccagaggcggcccctggccgtgctgaagaccagcgagagcatcaccagcaatgaagatgtgtccccagatgtgtgtgatgagttcaccggcatcgagcccctgtctgaagatgccatcatcaccggcttcagaaatgtgaccatctgccccaaccctgaggacacctgtgactttgcccgggccgccaggtttgtgtccacccccttccacgagatcatgagcctgaaggacctgcccagcgaccctgagcggctgctgcctgaggaggacctggatgtgaagaccagcgaggaccagcagacagcctgtggcaccatctacagccagaccctgagcatcaagaagctgagccccatcatcgaggacagccgggaggccacccacagcagcggcttcagcggcagcagcgcctctgtggccagcaccagcagcatcaagtgcctgcagatccctgagaagctggagctgaccaatgagaccagcgagaaccccacccagagcccctggtgcagccagtaccgccggcagctgctgaagagcctgcctgagctgagcgccagcgctgagctgtgcatcgaggaccggcccatgcccaagctggagattgagaaggagattgagctgggcaatgaagactactgcatcaagcgggagtacctgatctgtgaggactacaagctgttctgggtggcccccaggaacagcgctgagctgaccgtcatcaaggtgagcagccagcctgtgccctgggacttctacatcaacctgaagctgaaggagcggctgaatgaagattttgaccacttctgcagctgctaccagtaccaggacggctgcatcgtgtggcaccagtacatcaactgcttcaccctgcaggacctgctgcagcacagcgagtacatcacccatgagatcaccgtgctgatcatctacaacctgctgaccatcgtggagatgctgcacaaggccgagatcgtgcacggggacctgagcccccgctgcctgatcctgaggaaccgcatccatgacccctatgactgcaacaagaacaaccaggccctgaagatcgtggacttctcctacagcgtggacctgcgggtgcagctggatgtgttcaccctgagcggcttcagaacagtgcagatcctggagggccagaagatcctggccaactgcagcagcccctaccaggtggacctgtttggaattgctgacctggcccacctgctgctcttcaaggagcacctgcaggtgttctgggatggcagcttctggaagctgagccagaacatcagcgagctgaaggatggagagctgtggaacaagttctttgtgcgcatcctgaatgccaatgatgaggccaccgtgtctgtgctgggggagctggccgctgagatgaatggagtgtttgacaccaccttccagagccacctgaacaaggccctgtggaaggtgggcaagctgaccagccctggggccctgctcttccagtag

SEQ ID NO: 83553 - DNA, 2802 bp, Artificial Sequence
  derived and/or modified sequence
atggctgctgtgaagaaggagggcggggccctgtctgaggccatgagcctggagggagatgagtgggagctgagcaaagaaaatgtgcagcccctgcggcagggccgcatcatgagcaccctgcagggcgccctggcccaggagagcgcctgcaacaacaccctgcagcagcagaagagggcctttgaatatgagatccgcttctacacaggaaatgaccccctggatgtgtgggaccgctacatctcctggacagagcagaactacccccagggcggcaaggagagcaacatgagcaccctgctggagagagctgtggaggccctgcagggcgagaacttctggaaggcagatgccatcttccaggagggcatccagcagaaggccgagcccctggagcggctgcagagccagcaccggcagttccaggcccgggtgtcccggcagaccctgctggccctggagaaggaggaggaggaggaggtgtttgagagctctgtgccccagaggagcaccctggccgagctgaagagcaagggcaagaagacagcccgggcccccatcatccgggtgggcggggccctgaaggcccccagccagaacagaggcctgcagaaccccttcccccagcagatgcagaacaacagccgcatcaccgtgtttgatgaaaatgctgatgaggccagcacagctgagctgagcaagcccaccgtgcagccctggatcgccccacccatgccccgggccaaggaaaatgagctgcaggccggcccctggaacacaggccgcagcctggagcaccggccccggggcaacacagccagcctgattgctgtgcctgctgtgctgcccagcttcaccccctacgtggaggagacagcccggcagcctgtgatgaccccctgcaagattgagcccagcatcaaccacatcctgagcaccaggaagccaggcaaggaggagggggaccccctgcagagggtgcagagccaccagcaggccagcgaggagaagaaggagaagatgatgtactgcaaggagaagatctatgccggcgtgggggagttctcctttgaggagatccgggcagaggtgttcaggaagaagctgaaggagcagcgggaggccgagctgctgaccagcgctgagaagagagctgagatgcagaagcagatcgaggagatggagaagaagctgaaggagatccagaccacccagcaggagaggactggagaccagcaggaggagaccatgcccaccaaggagaccaccaagctgcagatcgccagcgagagccagaagatccctggcatgaccctgagcagctctgtgtgccaggtgaactgctgtgcccgggagaccagcctggccgagaacatctggcaggagcagccccacagcaaggtgtccctgagcctgggccccagcgtgcccttcagcatctttgatgagttcctgctgtctgagaagaagaacaagagccccccagctgaccccccccgggtgctggcccagaggcggcccctggccgtgctgaagaccagcgagagcatcaccagcaatgaagatgtgtccccagatgtgtgtgatgagttcaccggcatcgagcccctgtctgaagatgccatcatcaccggcttcagaaatgtgaccatctgccccaaccctgaggacacccgggaggccacccacagcagcggcttcagcggcagcagcgcctctgtggccagcaccagcagcatcaagtgcctgcagatccctgagaagctggagctgaccaatgagaccagcgagaaccccacccagagcccctggtgcagccagtaccgccggcagctgctgaagagcctgcctgagctgagcgccagcgctgagctgtgcattgaagatcggcccatgcccaagctggagattgagaaggagattgagctgggcaatgaagactactgcatcaagcgggagtacctgatctgtgaggactacaagctgttctgggtggcccccagaaattctgctgagctgaccgtcatcaaggtgagcagccagcctgtgccctgggacttctacatcaacctgaagctgaaggagcggctgaatgaagattttgaccacttctgcagctgctaccagtaccaggacggctgcatcgtgtggcaccagtacatcaactgcttcaccctgcaggacctgctgcagcacagcgagtacatcacccatgagatcaccgtgctgatcatctacaacctgctgaccatcgtggagatgctgcacaaggccgagatcgtgcatggagacctgagcccccgctgcctgatcctgaggaaccgcatccatgacccctatgactgcaacaagaacaaccaggccctgaagatcgtggacttctcctacagcgtggacctgcgggtgcagctggatgtgttcaccctgagcggcttcagaacagtgcagatcctggagggccagaagatcctggccaactgcagcagcccctaccaggtggacctgtttggaattgctgacctggcccacctgctgctcttcaaggagcacctgcaggtgttctgggatggcagcttctggaagctgagccagaacatcagcgagctgaaggatggagagctgtggaacaagttctttgtgcgcatcctgaatgccaatgatgaggccaccgtgtctgtgctgggggagctggccgctgagatgaatggagtgtttgacaccaccttccagagccacctgaacaaggccctgtggaaggtgggcaagctgaccagccctggggccctgctcttccagtag

SEQ ID NO: 83554 - DNA, 3153 bp, Artificial Sequence
  derived and/or modified sequence
atggccgccgtgaagaaggagggcggcgccctgagcgaggccatgtccctggaaggggacgagtgggaactgagcaaggagaacgtgcagcccctccgacagggaaggatcatgagtacgcttcagggtgcccttgcacaggagtctgcttgcaacaacactttgcagcagcagaaaagagcgtttgaatatgagattcgcttctacaccgggaacgacccactggatgtgtgggaccggtacatctcctggacagagcagaactatccccagggcggcaaggaaagtaacatgtccacattactggagcgcgcggtggaagcgctgcagggcgagaaaagatactacagtgaccccaggttcctcaatctctggctgaaactgggacggctctgcaacgagcctctcgacatgtattcctatctgcataatcagggcataggggtcagtcttgcacagttctacatctcatgggccgaggagtacgaggcaagagagaacttccgaaaggccgacgccatcttccaagaggggattcagcagaaggcggaacccctggaacgactgcagtctcaacatagacagttccaggcccgtgtgtccaggcaaaccctgctggcattggaaaaagaagaagaggaggaggtattcgaatcaagtgttcctcagcgttcaacactggcagagctaaaatccaaaggaaagaaaactgcaagggctcctattatccgggtcggcggcgccctgaaggcgccaagccaaaatcgtggcttgcaaaatccctttccacagcaaatgcagaataattcacggatcacagtatttgacgaaaacgctgatgaggcatccacggctgagctttccaagccaaccgtacaaccttggatcgcaccgcccatgcctcgcgcaaaagagaatgagctgcaagcaggaccctggaacaccggcaggtccctggagcatcggcctagaggcaacacagccagtttgatagcagtacccgcggttctacccagctttactccatatgtcgaagaaaccgcgaggcagcctgtgatgaccccttgcaagatcgaaccctcaattaaccatattctttccacaagaaagcctggaaaagaggaaggggaccctctgcagagagtgcagtcccatcagcaagcgagtgaggagaagaaagagaaaatgatgtactgcaaggagaaaatctatgccggtgtaggagagttcagtttcgaggagatacgtgcagaagtttttagaaagaagctcaaggaacagcgagaggccgagctgctgacctccgcagagaaaagggccgagatgcaaaagcaaattgaggaaatggagaagaagctgaaggagattcagactacccaacaggaacgcaccggggaccagcaagaagagacaatgccaaccaaggaaacaacaaaactgcagattgcctccgaatcgcagaagattccaggaatgacactgtcttccagtgtatgtcaggtcaattgttgcgcccgcgagactagcttggctgaaaatatctggcaagagcagccccatagcaaggggccgagcgttccattctctatattcgatgaatttctgttatcagaaaagaagaacaagtctccacccgccgatcctcctcgagttctcgcacagaggagacccctggcggtgctcaaaacctccgaatctattacatccaacgaagatgtctcccccgacgtgtgcgacgaattcaccggcatagagcccctttctgaagacgctataatcaccgggttccgcaatgtgaccatctgccctaaccccgaagatacgtgcgatttcgcgcgagctgcaaggttcgtatccactcccttccatgagattatgagcctgaaggatcttccctctgatccagagagactattacccgaagaggatctggacgtaaaaacgtcggaagatcaacagactgcctgcggaacaatctacagccaaaccctgagcataaaaaagctctctcctatcatcgaggactcacgggaggccactcattcatctgggttttctggaagctccgctagtgtggcgtccacctcatctattaaatgcctgcagatacccgaaaagctggaactgactaatgagacctctgagaatcctactcaatcgccctggtgttcccagtaccggaggcagttactcaagagcttgccagaattatccgctagtgccgagctctgcatcgaagaccggcctatgcctaaactggagatcgagaaggagatagagcttggaaacgaggactactgtatcaagcgggagtatctaatctgcgaggactacaaactcttctgggttgccccaaggaactctgctgagctgaccgttattaaagttagtagtcagcccgtgccttgggacttctatatcaacttgaaacttaaggaaaggttaaatgaggactttgaccatttctgctcatgctatcagtaccaagatggttgtattgtttggcaccagtacataaattgttttactctgcaggatttacttcagcattcagagtacattacccacgaaatcaccgttctcatcatctataatctgctgactatcgtggagatgctccacaaggccgagatcgtgcatggagacctctcccctaggtgtctgatcctgagaaacagaattcatgacccatacgactgcaacaaaaacaaccaagcccttaaaattgtcgactttagttacagcgtggacttgcgcgtacagctggacgtgttcaccctgtcgggtttccgtacagtccagattttggaagggcagaagatactggcgaattgttcttccccctatcaggtggacctttttggtatcgcagatctggcccacttactactgttcaaggagcatctgcaggtgttctgggacgggtctttctggaaactgtctcagaatatatctgaactgaaagatggggaactgtggaataagttcttcgttcgaattctcaatgctaacgacgaagctacagtgtctgtactgggagaacttgcggctgaaatgaatggcgtttttgacactacttttcaaagtcacctgaataaggccctttggaaggttggcaagcttacctccccaggggctctcctgttccagtag

SEQ ID NO: 83555 - DNA, 3195 bp, Artificial Sequence
  derived and/or modified sequence
atggccgccgtgaagaaggagggcggcgccctgagcgaggccatgagccttgagggcgacgagtgggagctatccaaggagaatgtgcaacctttgagacagggaaggataatgagcactcttcagggcgccctcgcacaggaatcggcctgtaacaataccttacagcagcagaaaagagcgttcgagtacgagattcggttctataccgggaacgaccctttagatgtttgggatcgatgggtttttcttttccacaaagacaaccgcaacattaacagatatattagctggaccgagcagaactacccacaggggggaaaagagtcaaatatgtccacactgcttgagcgggctgtcgaggcactgcagggtgaaaagcgttattattccgaccccagatttcttaatctgtggttgaaattagggaggctttgcaacgagcctctggatatgtactcatacttgcataaccaggggataggggtcagccttgcccagttctacatctcttgggccgaggaatatgaagctcgcgagaactttcggaaagcagatgccattttccaggagggaattcagcagaaggcagagcctctggagaggttacaatcccaacatcgccagtttcaggcaagagtgtccagacagaccttgcttgcattggaaaaggaggaggaggaagaggtctttgagtctagtgtcccccaacgatcgaccctagccgaacttaagtcaaagggtaagaaaacggccagggccccaataatcagggtgggtggcgctttgaaagctccatcccaaaatcgtgggttgcagaatccattcccacagcagatgcagaacaactctagaatcaccgtatttgatgagaatgcagacgaggcctccacagcagagctgagcaaaccaaccgttcaaccatggatcgcacctcccatgcccagggctaaggaaaacgagcttcaagcggggccttggaacacaggtcggagtctggaacaccgaccccggggtaacacagccagcctgattgccgtgcccgcagttctgccctcattcacaccatatgttgaagaaacagcccgacagccagttatgacaccttgtaagattgaacctagtatcaaccatatactgtccacaaggaaacccgggaaggaggagggcgatcccctgcaacgcgtccagagtcaccaacaggcttcggaggaaaaaaaagagaaaatgatgtactgtaaggaaaaaatttacgcaggggtcggcgaatttagctttgaagagatccgggctgaggtcttccggaagaaattaaaagaacagcgcgaggcggagctgctcacctctgctgagaaacgggctgaaatgcaaaagcagatcgaggagatggagaaaaagctgaaggagatccagaccactcagcaggagcggaccggtgatcagcaggaggagaccatgcctaccaaggagacaacaaagctgcaaattgcttccgagtcccagaaaataccaggaatgaccctgtcttctagtgtgtgccaggtgaactgttgtgccagggaaacttctcttgccgaaaacatatggcaggaacagccgcactctaagggacctagcgtcccattctccatcttcgacgaattcctcttgtctgaaaagaaaaacaagagcccccctgcagatccacctcgagtcctcgctcagaggaggccgctggcagttctgaaaaccagcgagagtataacaagtaatgaggacgtgagccctgacgtttgcgatgaattcacaggaattgagcctctatcagaagatgcaatcatcaccggtttcagaaatgtcactatttgccccaaccctgaagatacgtgtgactttgccagagctgcgcgcttcgtgagcacacctttccacgaaataatgagcctgaaggacctcccctccgatcccgagaggctcctgcccgaggaggatttagatgttaagactagcgaagatcagcagacggcatgtggtaccatttactcacaaaccttgtccattaagaaactatcgccaattatagaggattctagagaggctacacatagcagcggcttttctgggtcttccgcctccgtcgccagcacatccagcattaaatgtttacagatccccgagaagttagaacttacaaacgaaacatccgagaatccaacccaaagcccctggtgcagtcagtatcgccgccagttgctgaagagcctcccggaattatcagcatctgccgagttgtgcattgaggatcgacctatgcccaaactcgagattgagaaggagatagagctcgggaacgaggattactgtatcaagagagagtacttaatatgtgaggactataagctattctgggttgctccccggaacagcgccgaactgactgttattaaagtcagttctcagcccgtgccctgggacttttacataaatctcaagctgaaagagcgactcaatgaggacttcgaccatttctgttcgtgttaccagtatcaggacgggtgcatcgtatggcaccagtacatcaactgtttcactttgcaggatctcctacagcactccgagtatatcactcatgagatcactgtactgatcatttataatctgctgaccattgtcgaaatgctgcacaaagccgaaatcgtccacggagaccttagcccaagatgtctaattttgagaaaccgaattcacgatccatatgattgcaacaagaataaccaggcccttaaaatcgtggattttagctactcagtggatctgagagtgcaattagacgtattcacactcagcggctttcggaccgtacagattttagaagggcagaaaatccttgccaactgctcctctccataccaagtggacctgttcggcatagctgacctcgcacacttgcttctatttaaggaacaccttcaagtcttttgggacggcagcttttggaagctgtctcaaaacatcagcgagctgaaggatggggagctgtggaacaaatttttcgttaggattcttaatgcaaacgatgaggcaacagtcagcgtcctgggcgagctggcggctgaaatgaatggagtgttcgacacgacctttcagtcccatctcaacaaagccctgtggaaagtcggcaagctaacaagcccaggggccctcctgttccaatag

SEQ ID NO: 83556 - DNA, 2802 bp, Artificial Sequence
  derived and/or modified sequence
atggccgccgtgaagaaggagggcggcgccctgagcgaggccatgtctctggaaggggacgagtgggaactctccaaagagaacgttcaaccgttacgccaaggcaggattatgagtacactgcaaggagcattagcccaggagtccgcatgcaacaatacactccagcagcagaagcgtgcattcgaatacgaaatcagattctatacaggaaacgatccactggatgtctgggataggtacattagttggaccgagcagaattatccacagggaggcaaggagtcaaatatgagcaccctccttgaacgggccgtggaagccctccagggcgaaaacttttggaaggccgatgccatatttcaggaggggatccagcagaaggcagaacccttggaacggctccaatcgcagcatagacagtttcaggctagagtatcaagacagactctgctggccctggaaaaagaggaggaagaagaggtgtttgaatcctcagttccgcaacggagcactctggcagagttgaagagtaaagggaagaagactgccagggccccgatcatccgcgtgggcggggcgctgaaggcacctagccagaaccgcggacttcaaaacccctttccacagcagatgcaaaacaattcccgaataactgtcttcgacgagaacgctgatgaggcttcgacagccgaattgagcaagccaaccgtacagccctggatagcgccgcctatgccccgcgcgaaggagaacgaactacaggcgggcccctggaacaccggccgctcattggaacaccgtccacggggaaataccgcctcactgattgcggtccccgctgtcctaccttcctttacgccttatgtggaggagacggctaggcagccggttatgacgccatgtaagattgagccatcaattaaccacattctatccaccagaaaaccagggaaggaggagggagaccccctgcagcgggtacagagccatcagcaggcctccgaagagaaaaaagagaaaatgatgtactgtaaggagaaaatttatgccggggtcggcgagttttccttcgaggagatccgcgcagaagtgtttcgaaaaaagctaaaagaacagcgcgaagctgagctactgacatccgccgagaagcgagcagaaatgcagaagcagatcgaggagatggaaaagaagctaaaggagattcagacaacacagcaggaacgcactggagaccaacaggaggagactatgccaactaaagagaccactaaactgcagattgcgtcagagtctcaaaagatccccgggatgacgctcagcagcagtgtctgccaggtgaactgctgtgctcgtgagacgtccctggcagaaaacatctggcaggaacaacctcattccaaggtgagtttgagcctcggcccctcagtgcctttctcaatatttgacgaatttctcctgtcagagaaaaaaaataaatccccacccgccgatccaccaagggtcctggcccagcgacggcctcttgccgtcctgaaaaccagtgagagtatcacctcaaacgaggatgtctctcccgatgtctgcgacgagttcaccgggattgagcctctctccgaagacgcaatcattactggctttcgcaacgtcacgatatgccctaacccggaagataccagggaggcgacacactcttctggcttctctgggagctccgctagcgtggcatccacgagctccatcaaatgtcttcaaatccctgaaaaactcgagttgaccaacgagacatccgagaacccaacccaatcaccttggtgctctcagtaccggcggcaattgctcaaatctcttccagaactcagcgccagcgccgaactttgtatagaggaccgcccgatgcccaagctggaaattgagaaagagatcgaactcgggaacgaggattattgtatcaagagagagtatctgatctgtgaggactataaacttttttgggtcgccccacgcaattccgcagagcttacggtgattaaagtgagctctcaaccggtgccctgggacttttatataaatctgaagctgaaggaacggctgaacgaagattttgaccatttctgttcgtgctatcagtaccaggatggctgtattgtctggcatcagtacatcaactgttttactttgcaggacctgcttcagcatagtgagtatatcactcatgagattaccgttttgatcatatacaacctcctcacaattgtcgaaatgctgcacaaagcagaaatcgtgcatggcgacctctcaccacgctgcctgatcctccgcaaccgcattcacgacccttacgactgcaacaagaataaccaggctctcaagattgttgatttttcatatagcgttgacctgcgcgtccagctggacgttttcacactttcgggtttcaggacagtccaaatacttgagggacagaaaatactggcaaactgttcctcgccctatcaggttgatcttttcggaattgccgacttggctcatctgctcctgttcaaggaacacttgcaggtgttctgggatggaagcttttggaagctgtcacagaacatcagtgaactcaaggatggcgagctgtggaacaaattcttcgtgagaatcctaaacgcaaatgacgaggcaacagtgtctgtcctgggcgaactcgcggcagagatgaacggcgtgttcgatacaaccttccagtcccatctgaacaaggccctctggaaagtgggaaagctaacctcgcctggcgcactcctgttccagtag

SEQ ID NO: 83557 - DNA, 3153 bp, Artificial Sequence
  derived and/or modified sequence
atggctgccgtcaagaaggaggggggagccttatctgaggcaatgtcgcttgagggtgacgagtgggagctttccaaagagaacgtgcagccccttcgccagggtagaatcatgtccactctgcagggggcactggctcaggaatctgcttgcaataacaccctgcaacagcagaagcgcgcttttgaatatgagatccggttttacacaggcaatgaccctttggatgtatgggacagatatatttcttggactgagcagaactacccccaaggtggtaaagagagcaacatgtcaacacttctggaacgagctgttgaggctctgcagggggagaaacggtattactccgaccctcgttttcttaacctgtggcttaagctcggacgtctgtgtaatgagccccttgatatgtatagctacctgcacaaccaggggattggcgtttccctcgcccagttctacatttcatgggctgaagagtacgaggctcgtgagaacttccgtaaagcagatgccatatttcaggagggtatccagcagaaggctgaaccgctggagcgcttgcaaagccagcatagacagttccaggccagggtcagtcggcagactttgctggccctcgaaaaggaggaagaggaagaagtatttgaatccagcgttccacaacgctccacactagccgagttgaagtctaaaggtaagaagaccgccagagccccaatcatccgtgtcggaggcgctctcaaggcccctagccagaacagaggcctgcagaacccctttccccaacagatgcaaaacaattccaggattacggtgtttgacgagaatgccgacgaagctagcaccgccgagttatctaaaccaacggttcagccatggatcgcccctccaatgccccgagcgaaagagaatgaactgcaagccggaccatggaacacaggtcggtctctagaacaccgaccgcgagggaataccgcatctctcattgctgtcccagcagtgttaccatctttcacgccctacgtcgaagaaaccgcacggcaacctgtgatgactccttgtaagatagaaccaagtatcaatcacatcctctctacacgtaagccagggaaggaggaaggtgatcccctgcagcgggtgcagagccatcaacaggccagcgaggagaaaaaggaaaagatgatgtactgtaaagagaagatctatgcgggagtcggcgagttctcttttgaagaaatccgggctgaggtgttccgtaagaagctgaaggagcaacgagaggccgagctgcttacatcagctgagaagcgggctgagatgcagaagcagattgaagagatggagaagaagttgaaggagattcagaccactcagcaggagcggacaggcgaccaacaagaggagacaatgccaactaaagagacaactaaactccagattgcgagcgagagccaaaaaattcccggaatgactctgtcaagctctgtgtgccaggtaaactgttgtgcccgagagacatccctggccgaaaacatctggcaggaacagcctcactctaagggccctagcgtgccatttagcatcttcgacgaattcctcctgagcgaaaagaaaaataagagcccacctgcagatccaccgagggtgttggcccagaggaggcccctggctgtgctgaaaacatcggagtccatcacctccaacgaggatgtgtcccctgacgtgtgcgacgaatttacagggatcgaacccctctccgaagatgctataattactggcttccgtaatgtgactatatgtcccaatccagaggacacatgtgattttgctagagcggctaggttcgttagcacaccctttcacgaaatcatgtccctcaaagacctgccttcagaccctgagcgcctcctgccagaggaagatttagacgtgaaaacatccgaagatcagcaaaccgcatgcgggactatctactcccagacccttagtatcaaaaagctgtccccaattattgaggactccagggaagccactcatagcagtggcttctccggatcctctgccagcgtcgccagtacaagctctataaagtgtctgcaaatccccgaaaagctcgaactgactaacgaaaccagcgaaaatcccacccaatccccatggtgcagccagtacaggaggcagctgctgaagagcttaccagagctatcagctagtgcagaactgtgcatagaagacaggccaatgcctaagctggaaattgaaaaagaaattgagctcggcaacgaggactattgcatcaagcgtgagtacttaatttgcgaagactacaaactgttttgggtagcccctagaaacagcgcggagttaaccgtgatcaaggtgtcgtctcagcctgttccctgggacttctatatcaacctcaaacttaaggaacgtcttaatgaagattttgatcacttctgttcatgttaccaataccaggacggttgcatcgtctggcatcagtatatcaactgttttaccctccaggatctgctgcagcatagtgagtacatcactcacgaaatcacagtgctcatcatttacaacctcctcacaattgtcgagatgttacacaaagcggagatcgtccacggggacctgagtcccaggtgcctgattcttcggaatcgtatacatgatccttatgattgtaacaaaaataaccaagccttgaaaattgttgacttttcatactccgttgatctgagagtccagcttgacgtgttcactctttcggggtttaggaccgttcagatcctcgagggacaaaagattctcgcgaactgtagctcaccttatcaggtagatctttttggaatagccgatctggcacacttgctgctctttaaagagcacctgcaggtgttttgggacggctcattctggaagctgagtcagaatatttcagaactaaaggacggagagctttggaataaattcttcgtcaggatcctgaatgccaacgacgaagccacggtttccgtgctgggggagttagctgctgagatgaatggcgtgttcgatactaccttccagagccatcttaataaggctctttggaaagtgggaaagctaacctcccctggagccctgctctttcagtag

SEQ ID NO: 83558 - DNA, 3195 bp, Artificial Sequence
  derived and/or modified sequence
atggccgcagtcaagaaagagggcggagctctctcagaggctatgagccttgagggagacgagtgggaactgtctaaggagaacgtacagccactgaggcaggggcgaatcatgagtacattgcagggcgcactcgcccaggagagtgcctgtaacaataccctgcagcagcagaagcgcgcatttgaatatgagatccggttctacaccggaaatgatcccctcgatgtctgggacaggtgggtcttcctgtttcataaagataaccgtaacatcaatcgatatatcagctggaccgaacaaaattaccctcagggtgggaaagagagtaatatgtctacactgttagagcgggcagtcgaagccctacaaggggagaagagatactattcagatccgaggttcctaaatctgtggctgaaacttggccgtttgtgcaacgagccactagatatgtactcctacctgcacaaccaaggaataggggtgtcactcgcacagttctacatttcttgggcagaagaatacgaagccagggagaatttcagaaaggccgacgccatattccaggaaggaatacagcagaaagctgaaccgctggagcgcttgcagtcccagcaccgtcagttccaagccagggtgtctagacagacgctgttagccctggagaaagaggaggaagaggaagtgttcgagagtagtgtgcctcaaaggagcactctggctgagcttaaaagcaagggaaagaagacagctcgtgcacccatcattcgggtggggggagctttaaaggcgccatcccagaaccgcggacttcaaaatccttttccccaacaaatgcagaataacagtcgtattacggttttcgatgagaacgccgacgaagctagcacggctgagctgtcaaagccaacggttcagccatggatcgcaccacctatgcctagagctaaggaaaatgagctgcaagcaggcccttggaacacaggtaggtccctagaacatagaccacggggaaacactgctagcttgattgcggtgccagccgtgctgccaagctttacaccatatgtggaagaaactgcaagacaacctgtgatgacaccgtgtaaaatcgagccctcgattaatcacatattaagcacccgaaaacccggaaaggaggaaggggaccccctgcagagagtgcagagtcaccaacaggcctctgaggagaagaaagaaaaaatgatgtactgcaaagagaagatttacgcaggcgtcggggaattctcgtttgaggagatacgggcagaagtgtttcggaagaagcttaaagagcagcgggaagctgagcttcttacctctgccgagaagagggcggagatgcaaaagcagatcgaggagatggagaagaaactaaaagagattcagaccacccagcaagagcgtactggcgaccagcaagaggaaacaatgccaactaaggaaaccacaaaattacagatcgcttctgaaagccaaaagattccaggcatgactctgagcagctcagtttgtcaggttaactgctgtgccagagagactagcctggccgaaaatatctggcaggagcagccccattccaaaggaccttcagttcccttttcaatttttgatgaattcttgttatcagagaaaaaaaacaaaagccctcccgcagaccctccgagagttttggcacaacgacgccctctagcggttctgaagaccagcgagagcattactagtaatgaggacgtgagtcctgatgtttgtgacgaattcaccggtatagagcctttgagtgaagatgctattattaccgggttcaggaatgtgacaatttgcccgaaccctgaggacacgtgtgacttcgctagggccgcaaggtttgtgtctacaccattccacgagatcatgtccctcaaggaccttcctagcgatcctgagcggctgttacccgaggaagatcttgacgtcaaaacgagtgaggatcagcagacggcctgcggcacaatttattcacaaacgttgagcattaaaaagctctccccaattatcgaggacagccgggaggccacccactccagtggcttctccgggagttcggccagcgtagcaagtacctcctccataaagtgtttgcagattcccgagaaattagagttaacaaacgaaacctccgagaatcccacccagtcaccatggtgctcccaatacaggcggcaattgttgaagtctcttccagagctgtccgcaagtgccgagctgtgcattgaagaccgtcccatgcctaaactggagatcgaaaaggagatagaactgggtaatgaggactactgtattaaacgggagtacctgatctgcgaggattacaaactcttttgggtggctccaagaaatagcgccgaactgacagtgatcaaagtgagttcacagcctgtcccctgggacttttacatcaatctgaagctcaaggaacgattgaatgaagattttgaccacttttgtagttgctaccaataccaagacgggtgtatcgtgtggcatcagtatattaactgtttcactcttcaggacctcctccagcactccgagtatattactcatgagattacagtgctcattatctacaacttgctgaccattgttgaaatgttacataaggcggaaattgtgcatggcgacctgtcgccgagatgcctaatactacggaataggatacacgacccttatgattgtaacaagaacaaccaggcactcaaaattgttgattttagttattctgtggatctgcgtgtgcagctggatgtgttcacgctgtccgggttccggacagtccagatcctggaaggtcaaaaaattttggctaactgttcgagtccctaccaggttgacttattcggcattgcagacctcgctcacttactgctgtttaaggaacatcttcaggtgttctgggatggcagcttttggaagctgtctcaaaacatcagtgaactcaaggacggggaactgtggaacaagttcttcgtgaggatcctgaatgctaatgatgaagctacagtgtcagttctcggggagttagccgctgagatgaacggagtgttcgacaccaccttccagtcacatctaaataaagccctctggaaggtgggcaagctcacgtctcccggtgcgttgctgtttcaatag

SEQ ID NO: 83559 - DNA, 2802 bp, Artificial Sequence
  derived and/or modified sequence
atggctgcggtcaaaaaggagggtggggcattatctgaagctatgtcattagagggggatgagtgggagctgtccaaagagaacgtgcaaccattacggcaggggagaatcatgtctactctccagggggctctggcccaggaatctgcatgcaataatacgcttcagcagcagaagcgagcattcgaatacgagataagattctatacaggcaacgatcctctggacgtctgggaccgctatatatcatggaccgagcagaactacccacagggcggtaaagagagtaacatgtcaacgcttctagagagagctgtcgaagcccttcaaggggaaaatttttggaaggcggatgcaatcttccaggaaggcatccagcagaaggccgaacctttggagagactgcagagccagcatagacagtttcaggcgcgagtgagtagacaaaccctcctggctttggaaaaagaggaagaggaggaagtttttgagtctagcgtgccccagagaagcactttggccgaactgaaatcgaaaggtaaaaagaccgcacgcgctcccatcatcagggttggcggtgcgttgaaggccccttcccagaaccggggtctgcagaacccatttccccaacagatgcagaataattcaaggatcaccgtcttcgacgaaaacgctgacgaggcctccaccgccgagctgtctaaacccaccgtgcagccttggatagcgcctcccatgccacgagctaaagagaacgaactgcaggctgggccatggaataccgggaggtcattggagcacagacctagaggaaataccgcctcactgattgccgtacctgccgtgttgccctcatttactccttatgtcgaagaaacggctaggcagccggtcatgaccccctgtaagattgagccctcgataaaccacatcctctcaactaggaagcctggaaaggaggagggcgacccactgcagcgggtccaatcccaccagcaagcgagcgaggagaagaaagaaaagatgatgtactgcaaagagaaaatctatgctggagtcggagagttctcattcgaggaaatccgtgctgaggtttttagaaagaaactgaaagagcaacgggaggcagagcttctgaccagcgcggaaaagcgtgctgagatgcagaagcagatcgaagaaatggagaagaagctgaaagaaatacagaccacacagcaggaaaggactggagatcaacaagaagaaacaatgcctaccaaagagacaaccaagttgcagatcgcttccgagtcgcagaaaatcccaggcatgaccttgtccagctcagtgtgccaggtcaattgctgtgccagagaaacgagcctggcagaaaacatctggcaggagcagcctcattctaaggtgtccctctctctcggcccaagtgtgcctttctctattttcgacgaatttctcttatctgagaaaaagaataaatcaccacccgcagaccccccaagggtcctggcccagaggaggcctcttgctgtactgaaaacctccgagtcaatcacttccaacgaggacgtatccccagatgtctgtgatgaattcaccggtatagagccgctgagcgaggacgctattattactggctttagaaatgtgacaatatgccctaatcctgaggacacacgggaagcaactcactcaagtgggttttccggttcttcagcctctgttgcctccacctcctcgattaagtgtctccagatcccagaaaaattggaactgacaaacgagaccagcgagaatcccacacaatctccctggtgcagccaataccgccgacagttactcaagagtttgccagaactgtcagcatctgctgaactgtgcattgaggacaggccaatgccgaagctcgagattgaaaaagagatcgaactgggcaatgaagactactgtattaagcgagaataccttatctgcgaggactacaagctgttctgggtcgcgccacgtaacagcgccgaactgacggtcattaaagtgagcagccaacctgtgccttgggacttttatatcaacctaaagttaaaggaaaggcttaacgaggactttgatcatttctgctcgtgttaccagtaccaggacggctgtatagtgtggcatcaatatataaattgtttcacgctccaggatctactgcagcattctgaatacataacgcatgagatcacagttcttattatctataacctgctgacaattgttgaaatgctacacaaggctgagatcgtgcacggagacctctctccaaggtgtttgatccttcgaaataggattcatgacccgtatgattgcaacaagaataatcaggcccttaaaatcgtggatttcagctattcggttgatctgagggttcagttagacgtatttactctcagcggctttaggacagtacagatactcgagggccaaaaaattttagccaattgttcctccccctatcaggtggatctgttcggcatcgccgacctggcccacttgttgctgttcaaagagcatctccaggtcttctgggatggaagcttctggaagctctcccagaacatttcagaactcaaggacggagagttatggaataagttctttgttcggatcttgaatgcgaatgacgaagccaccgtcagcgtgctgggggaactcgcggctgagatgaatggtgtctttgacacgacgttccaatcacacttgaacaaggccttgtggaaggtcggaaaattgacaagcccgggagcccttctgtttcagtag

SEQ ID NO: 83560 - DNA, 3725 bp, Artificial Sequence
  derived and/or modified sequence
gaccgcgcgggaccgttaaatttgaaacttggcggctaggggtgtgggcttgaggtggccggtttgttagggagtcgtgtacgtgccttggtcgcttctgtagctccgagggcaggttgcggaagaaagcccaggcggtctgtggcccagaggaaaggcctgcagcaggacgaggacctgagccaggaatgcaggatggcggcggtgaagaaggaagggggtgctctgagtgaagccatgtccctggagggagatgaatgggaactgagtaaagaaaatgtacaacctttaaggcaagggcggatcatgtccacgcttcagggagcactggcacaagaatctgcctgtaacaatactcttcagcagcagaaacgggcatttgaatatgaaattcgattttacactggaaatgaccctctggatgtttgggataggtatatcagctggacagagcagaactatcctcaaggtgggaaggagagtaatatgtcaacgttattagaaagagctgtagaagcactacaaggagaaaaacgatattatagtgatcctcgatttctcaatctctggcttaaattagggcgtttatgcaatgagcctttggatatgtacagttacttgcacaaccaagggattggtgtttcacttgctcagttctatatctcatgggcagaagaatatgaagctagagaaaactttaggaaagcagatgcgatatttcaggaagggattcaacagaaggctgaaccactagaaagactacagtcccagcaccgacaattccaagctcgagtgtctcggcaaactctgttggcacttgagaaagaagaagaggaggaagtttttgagtcttctgtaccacaacgaagcacactagctgaactaaagagcaaagggaaaaagacagcaagagctccaatcatccgtgtaggaggtgctctcaaggctccaagccagaacagaggactccaaaatccatttcctcaacagatgcaaaataatagtagaattactgtttttgatgaaaatgctgatgaggcttctacagcagagttgtctaagcctacagtccagccatggatagcaccccccatgcccagggccaaagagaatgagctgcaagcaggcccttggaacacaggcaggtccttggaacacaggcctcgtggcaatacagcttcactgatagctgtacccgctgtgcttcccagtttcactccatatgtggaagagactgcacgacagccagttatgacaccatgtaaaattgaacctagtataaaccacatcctaagcaccagaaagcctggaaaggaagaaggagatcctctacaaagggttcagagccatcagcaagcgtctgaggagaagaaagagaagatgatgtattgtaaggagaagatttatgcaggagtaggggaattctcctttgaagaaattcgggctgaagttttccggaagaaattaaaagagcaaagggaagccgagctattgaccagtgcagagaagagagcagaaatgcagaaacagattgaagagatggagaagaagctaaaagaaatccaaactactcagcaagaaagaacaggtgatcagcaagaagagacgatgcctacaaaggagacaactaaactgcaaattgcttccgagtctcagaaaataccaggaatgactctatccagttctgtttgtcaagtaaactgttgtgccagagaaacttcacttgcggagaacatttggcaggaacaacctcattctaaaggtcccagtgtacctttctccatttttgatgagtttcttctttcagaaaagaagaataaaagtcctcctgcagatcccccacgagttttagctcaacgaagaccccttgcagttctcaaaacctcagaaagcatcacctcaaatgaagatgtgtctccagatgtttgtgatgaatttacaggaattgaacccttgagcgaggatgccattatcacaggcttcagaaatgtaacaatttgtcctaacccagaagacacttgtgactttgccagagcagctcgttttgtatccactccttttcatgagataatgtccttgaaggatctcccttctgatcctgagagactgttaccggaagaagatctagatgtaaagacctctgaggaccagcagacagcttgtggcactatctacagtcagactctcagcatcaagaagctgagcccaattattgaagacagtcgtgaagccacacactcctctggcttctctggttcttctgcctcggttgcaagcacctcctccatcaaatgtcttcaaattcctgagaaactagaacttactaatgagacttcagaaaaccctactcagtcaccatggtgttcacagtatcgcagacagctactgaagtccctaccagagttaagtgcctctgcagagttgtgtatagaagacagaccaatgcctaagttggaaattgagaaggaaattgaattaggtaatgaggattactgcattaaacgagaatacctaatatgtgaagattacaagttattctgggtggcgccaagaaactctgcagaattaacagtaataaaggtatcttctcaacctgtcccatgggacttttatatcaacctcaagttaaaggaacgtttaaatgaagattttgatcatttttgcagctgttatcaatatcaagatggctgtattgtttggcaccaatatataaactgcttcacccttcaggatcttctccaacacagtgaatatattacccatgaaataacagtgttgattatttataaccttttgacaatagtggagatgctacacaaagcagaaatagtccatggtgacttgagtccaaggtgtctgattctcagaaacagaatccacgatccctatgattgtaacaagaacaatcaagctttgaagatagtggacttttcctacagtgttgaccttagggtgcagctggatgtttttaccctcagcggctttcggactgtacagatcctggaaggacaaaagatcctggctaactgttcttctccctaccaggtagacctgtttggtatagcagatttagcacatttactattgttcaaggaacacctacaggtcttctgggatgggtccttctggaaacttagccaaaatatttctgagctaaaagatggtgaattgtggaataaattctttgtgcggattctgaatgccaatgatgaggccacagtgtctgttcttggggagcttgcagcagaaatgaatggggtttttgacactacattccaaagtcacctgaacaaagccttatggaaggtagggaagttaactagtcctggggctttgctctttcagtgagctaggcaatcaagtctcacagattgctgcctcagagcaatggttgtattgtggaacactgaaactgtatgtgctgtaatttaatttaggacacatttagatgcactaccattgctgttctactttttggtacaggtatattttgacgtcactgatattttttatacagtgatatacttactcatggccttgtctaacttttgtgaagaactattttattctaaacagactcattacaaatggttaccttgttatttaacccatttgtctctacttttccctgtacttttcccatttgtaatttgtaaaatgttctcttatgatcaccatgtattttgtaaataataaaatagtatctgttaaatttgtgcttctaa

SEQ ID NO: 83561 - DNA, 3628 bp, Artificial Sequence
  derived and/or modified sequence
gtgtgggcttgaggtggccggtttgttagggagtcgtgtacgtgccttggtcgcttctgtagctccgagggcaggttgcggaagaaagcccaggcggtctgtggcccagaggaaaggcctgcagcaggacgaggacctgagccaggaatgcaggatggcggcggtgaagaaggaagggggtgctctgagtgaagccatgtccctggagggagatgaatgggaactgagtaaagaaaatgtacaacctttaaggcaagggcggatcatgtccacgcttcagggagcactggcacaagaatctgcctgtaacaatactcttcagcagcagaaacgggcatttgaatatgaaattcgattttacactggaaatgaccctctggatgtttgggataggtgggtctttttatttcacaaggacaatagaaacattaacaggtatatcagctggacagagcagaactatcctcaaggtgggaaggagagtaatatgtcaacgttattagaaagagctgtagaagcactacaaggagaaaaacgatattatagtgatcctcgatttctcaatctctggcttaaattagggcgtttatgcaatgagcctttggatatgtacagttacttgcacaaccaagggattggtgtttcacttgctcagttctatatctcatgggcagaagaatatgaagctagagaaaactttaggaaagcagatgcgatatttcaggaagggattcaacagaaggctgaaccactagaaagactacagtcccagcaccgacaattccaagctcgagtgtctcggcaaactctgttggcacttgagaaagaagaagaggaggaagtttttgagtcttctgtaccacaacgaagcacactagctgaactaaagagcaaagggaaaaagacagcaagagctccaatcatccgtgtaggaggtgctctcaaggctccaagccagaacagaggactccaaaatccatttcctcaacagatgcaaaataatagtagaattactgtttttgatgaaaatgctgatgaggcttctacagcagagttgtctaagcctacagtccagccatggatagcaccccccatgcccagggccaaagagaatgagctgcaagcaggcccttggaacacaggcaggtccttggaacacaggcctcgtggcaatacagcttcactgatagctgtacccgctgtgcttcccagtttcactccatatgtggaagagactgcacgacagccagttatgacaccatgtaaaattgaacctagtataaaccacatcctaagcaccagaaagcctggaaaggaagaaggagatcctctacaaagggttcagagccatcagcaagcgtctgaggagaagaaagagaagatgatgtattgtaaggagaagatttatgcaggagtaggggaattctcctttgaagaaattcgggctgaagttttccggaagaaattaaaagagcaaagggaagccgagctattgaccagtgcagagaagagagcagaaatgcagaaacagattgaagagatggagaagaagctaaaagaaatccaaactactcagcaagaaagaacaggtgatcagcaagaagagacgatgcctacaaaggagacaactaaactgcaaattgcttccgagtctcagaaaataccaggaatgactctatccagttctgtttgtcaagtaaactgttgtgccagagaaacttcacttgcggagaacatttggcaggaacaacctcattctaaaggtcccagtgtacctttctccatttttgatgagtttcttctttcagaaaagaagaataaaagtcctcctgcagatcccccacgagttttagctcaacgaagaccccttgcagttctcaaaacctcagaaagcatcacctcaaatgaagatgtgtctccagatgtttgtgatgaatttacaggaattgaacccttgagcgaggatgccattatcacaggcttcagaaatgtaacaatttgtcctaacccagaagacacttgtgactttgccagagcagctcgttttgtatccactccttttcatgagataatgtccttgaaggatctcccttctgatcctgagagactgttaccggaagaagatctagatgtaaagacctctgaggaccagcagacagcttgtggcactatctacagtcagactctcagcatcaagaagctgagcccaattattgaagacagtcgtgaagccacacactcctctggcttctctggttcttctgcctcggttgcaagcacctcctccatcaaatgtcttcaaattcctgagaaactagaacttactaatgagacttcagaaaaccctactcagtcaccatggtgttcacagtatcgcagacagctactgaagtccctaccagagttaagtgcctctgcagagttgtgtatagaagacagaccaatgcctaagttggaaattgagaaggaaattgaattaggtaatgaggattactgcattaaacgagaatacctaatatgtgaagattacaagttattctgggtggcgccaagaaactctgcagaattaacagtaataaaggtatcttctcaacctgtcccatgggacttttatatcaacctcaagttaaaggaacgtttaaatgaagattttgatcatttttgcagctgttatcaatatcaagatggctgtattgtttggcaccaatatataaactgcttcacccttcaggatcttctccaacacagtgaatatattacccatgaaataacagtgttgattatttataaccttttgacaatagtggagatgctacacaaagcagaaatagtccatggtgacttgagtccaaggtgtctgattctcagaaacagaatccacgatccctatgattgtaacaagaacaatcaagctttgaagatagtggacttttcctacagtgttgaccttagggtgcagctggatgtttttaccctcagcggctttcggactgtacagatcctggaaggacaaaagatcctggctaactgttcttctccctaccaggtagacctgtttggtatagcagatttagcacatttactattgttcaaggaacacctacaggtcttctgggatgggtccttctggaaacttagccaaaatatttctgagctaaaagatggtgaattgtggaataaattctttgtgcggattctgaatgccaatgatgaggccacagtgtctgttcttggggagcttgcagcagaaatgaatggggtttttgacactacattccaaagtcacctgaacaaagccttatggaaggtagggaagttaactagtcctggggctttgctctttcagtgagctaggcaatcaagtctcacagattgctgcctcagagcaatggttgtattgtggaacactgaaactgtatgtgctgtaatttaatttaggacacatttagatgcactaccattgctgttctactttttggtacaggtatattttgacgtcactgatattttttatacagtgatatacttactcatggccttgtctaacttttgtgaagaactattttattctaaacagactcattacaaatggttaccttgttatttaacccatttgtctctacttttc

SEQ ID NO: 83562 - DNA, 3347 bp, Artificial Sequence
  derived and/or modified sequence
accgttaaatttgaaacttggcggctaggggtgtgggcttgaggtggccggtttgttagggagtcgtgtacgtgccttggtcgcttctgtagctccgagggcaggttgcggaagaaagcccaggcggtctgtggcccagaggaaaggcctgcagcaggacgaggacctgagccaggaatgcaggatggcggcggtgaagaaggaagggggtgctctgagtgaagccatgtccctggagggagatgaatgggaactgagtaaagaaaatgtacaacctttaaggcaagggcggatcatgtccacgcttcagggagcactggcacaagaatctgcctgtaacaatactcttcagcagcagaaacgggcatttgaatatgaaattcgattttacactggaaatgaccctctggatgtttgggataggtatatcagctggacagagcagaactatcctcaaggtgggaaggagagtaatatgtcaacgttattagaaagagctgtagaagcactacaaggagaaaacttctggaaagcagatgcgatatttcaggaagggattcaacagaaggctgaaccactagaaagactacagtcccagcaccgacaattccaagctcgagtgtctcggcaaactctgttggcacttgagaaagaagaagaggaggaagtttttgagtcttctgtaccacaacgaagcacactagctgaactaaagagcaaagggaaaaagacagcaagagctccaatcatccgtgtaggaggtgctctcaaggctccaagccagaacagaggactccaaaatccatttcctcaacagatgcaaaataatagtagaattactgtttttgatgaaaatgctgatgaggcttctacagcagagttgtctaagcctacagtccagccatggatagcaccccccatgcccagggccaaagagaatgagctgcaagcaggcccttggaacacaggcaggtccttggaacacaggcctcgtggcaatacagcttcactgatagctgtacccgctgtgcttcccagtttcactccatatgtggaagagactgcacgacagccagttatgacaccatgtaaaattgaacctagtataaaccacatcctaagcaccagaaagcctggaaaggaagaaggagatcctctacaaagggttcagagccatcagcaagcgtctgaggagaagaaagagaagatgatgtattgtaaggagaagatttatgcaggagtaggggaattctcctttgaagaaattcgggctgaagttttccggaagaaattaaaagagcaaagggaagccgagctattgaccagtgcagagaagagagcagaaatgcagaaacagattgaagagatggagaagaagctaaaagaaatccaaactactcagcaagaaagaacaggtgatcagcaagaagagacgatgcctacaaaggagacaactaaactgcaaattgcttccgagtctcagaaaataccaggaatgactctatccagttctgtttgtcaagtaaactgttgtgccagagaaacttcacttgcggagaacatttggcaggaacaacctcattctaaagtctctctttctctaggtcccagtgtacctttctccatttttgatgagtttcttctttcagaaaagaagaataaaagtcctcctgcagatcccccacgagttttagctcaacgaagaccccttgcagttctcaaaacctcagaaagcatcacctcaaatgaagatgtgtctccagatgtttgtgatgaatttacaggaattgaacccttgagcgaggatgccattatcacaggcttcagaaatgtaacaatttgtcctaacccagaagacactcgtgaagccacacactcctctggcttctctggttcttctgcctcggttgcaagcacctcctccatcaaatgtcttcaaattcctgagaaactagaacttactaatgagacttcagaaaaccctactcagtcaccatggtgttcacagtatcgcagacagctactgaagtccctaccagagttaagtgcctctgcagagttgtgtatagaagacagaccaatgcctaagttggaaattgagaaggaaattgaattaggtaatgaggattactgcattaaacgagaatacctaatatgtgaagattacaagttattctgggtggcgccaagaaactctgcagaattaacagtaataaaggtatcttctcaacctgtcccatgggacttttatatcaacctcaagttaaaggaacgtttaaatgaagattttgatcatttttgcagctgttatcaatatcaagatggctgtattgtttggcaccaatatataaactgcttcacccttcaggatcttctccaacacagtgaatatattacccatgaaataacagtgttgattatttataaccttttgacaatagtggagatgctacacaaagcagaaatagtccatggtgacttgagtccaaggtgtctgattctcagaaacagaatccacgatccctatgattgtaacaagaacaatcaagctttgaagatagtggacttttcctacagtgttgaccttagggtgcagctggatgtttttaccctcagcggctttcggactgtacagatcctggaaggacaaaagatcctggctaactgttcttctccctaccaggtagacctgtttggtatagcagatttagcacatttactattgttcaaggaacacctacaggtcttctgggatgggtccttctggaaacttagccaaaatatttctgagctaaaagatggtgaattgtggaataaattctttgtgcggattctgaatgccaatgatgaggccacagtgtctgttcttggggagcttgcagcagaaatgaatggggtttttgacactacattccaaagtcacctgaacaaagccttatggaaggtagggaagttaactagtcctggggctttgctctttcagtgagctaggcaatcaagtctcacagattgctgcctcagagcaatggttgtattgtggaacactgaaactgtatgtgctgtaatttaatttaggacacatttagatgcactaccattgctgttctactttttggtacaggtatattttgacgtcactgatattttttatacagtgatatacttactcatggccttgtctaacttttgtgaagaactattttattctaaacagactcattacaaatggttaccttgttatttaacccatttgtctctacttttccctgtacttttcccatttgtaatttgtaaaatgttctcttatgatcaccatgtattttgtaaataataaaatagtatctgtt

SEQ ID NO: 83563 - DNA, 3153 bp, Artificial Sequence
  derived and/or modified sequence
atggccgccgtgaagaaggagggcggcgccctgagcgaggccatgagcctggagggcgacgagtgggagctgagcaaggagaacgtgcagcccctgagacagggcagaatcatgagcaccctgcagggcgccctggcccaggagagcgcctgcaacaacaccctgcagcagcagaagagagccttcgagtacgagatcagattctacaccggcaacgaccccctggacgtgtgggacagatacatcagctggaccgagcagaactacccccagggcggcaaggagagcaacatgagcaccctgctggagagagccgtggaggccctgcagggcgagaagagatactacagcgaccccagattcctgaacctgtggctgaagctgggcagactgtgcaacgagcccctggacatgtacagctacctgcacaaccagggcatcggcgtgagcctggcccagttctacatcagctgggccgaggagtacgaggccagagagaacttcagaaaggccgacgccatcttccaggagggcatccagcagaaggccgagcccctggagagactgcagagccagcacagacagttccaggccagagtgagcagacagaccctgctggccctggagaaggaggaggaggaggaggtgttcgagagcagcgtgccccagagaagcaccctggccgagctgaagagcaagggcaagaagaccgccagagcccccatcatcagagtgggcggcgccctgaaggcccccagccagaacagaggcctgcagaaccccttcccccagcagatgcagaacaacagcagaatcaccgtgttcgacgagaacgccgacgaggccagcaccgccgagctgagcaagcccaccgtgcagccctggatcgccccccccatgcccagagccaaggagaacgagctgcaggccggcccctggaacaccggcagaagcctggagcacagacccagaggcaacaccgccagcctgatcgccgtgcccgccgtgctgcccagcttcaccccctacgtggaggagaccgccagacagcccgtgatgaccccctgcaagatcgagcccagcatcaaccacatcctgagcaccagaaagcccggcaaggaggagggcgaccccctgcagagagtgcagagccaccagcaggccagcgaggagaagaaggagaagatgatgtactgcaaggagaagatctacgccggcgtgggcgagttcagcttcgaggagatcagagccgaggtgttcagaaagaagctgaaggagcagagagaggccgagctgctgaccagcgccgagaagagagccgagatgcagaagcagatcgaggagatggagaagaagctgaaggagatccagaccacccagcaggagagaaccggcgaccagcaggaggagaccatgcccaccaaggagaccaccaagctgcagatcgccagcgagagccagaagatccccggcatgaccctgagcagcagcgtgtgccaggtgaactgctgcgccagagagaccagcctggccgagaacatctggcaggagcagccccacagcaagggccccagcgtgcccttcagcatcttcgacgagttcctgctgagcgagaagaagaacaagagcccccccgccgacccccccagagtgctggcccagagaagacccctggccgtgctgaagaccagcgagagcatcaccagcaacgaggacgtgagccccgacgtgtgcgacgagttcaccggcatcgagcccctgagcgaggacgccatcatcaccggcttcagaaacgtgaccatctgccccaaccccgaggacacctgcgacttcgccagagccgccagattcgtgagcacccccttccacgagatcatgagcctgaaggacctgcccagcgaccccgagagactgctgcccgaggaggacctggacgtgaagaccagcgaggaccagcagaccgcctgcggcaccatctacagccagaccctgagcatcaagaagctgagccccatcatcgaggacagcagagaggccacccacagcagcggcttcagcggcagcagcgccagcgtggccagcaccagcagcatcaagtgcctgcagatccccgagaagctggagctgaccaacgagaccagcgagaaccccacccagagcccctggtgcagccagtacagaagacagctgctgaagagcctgcccgagctgagcgccagcgccgagctgtgcatcgaggacagacccatgcccaagctggagatcgagaaggagatcgagctgggcaacgaggactactgcatcaagagagagtacctgatctgcgaggactacaagctgttctgggtggcccccagaaacagcgccgagctgaccgtgatcaaggtgagcagccagcccgtgccctgggacttctacatcaacctgaagctgaaggagagactgaacgaggacttcgaccacttctgcagctgctaccagtaccaggacggctgcatcgtgtggcaccagtacatcaactgcttcaccctgcaggacctgctgcagcacagcgagtacatcacccacgagatcaccgtgctgatcatctacaacctgctgaccatcgtggagatgctgcacaaggccgagatcgtgcacggcgacctgagccccagatgcctgatcctgagaaacagaatccacgacccctacgactgcaacaagaacaaccaggccctgaagatcgtggacttcagctacagcgtggacctgagagtgcagctggacgtgttcaccctgagcggcttcagaaccgtgcagatcctggagggccagaagatcctggccaactgcagcagcccctaccaggtggacctgttcggcatcgccgacctggcccacctgctgctgttcaaggagcacctgcaggtgttctgggacggcagcttctggaagctgagccagaacatcagcgagctgaaggacggcgagctgtggaacaagttcttcgtgagaatcctgaacgccaacgacgaggccaccgtgagcgtgctgggcgagctggccgccgagatgaacggcgtgttcgacaccaccttccagagccacctgaacaaggccctgtggaaggtgggcaagctgaccagccccggcgccctgctgttccagtag

SEQ ID NO: 83564 - DNA, 3195 bp, Artificial Sequence
  derived and/or modified sequence
atggccgccgtgaagaaggagggcggcgccctgagcgaggccatgagcctggagggcgacgagtgggagctgagcaaggagaacgtgcagcccctgagacagggcagaatcatgagcaccctgcagggcgccctggcccaggagagcgcctgcaacaacaccctgcagcagcagaagagagccttcgagtacgagatcagattctacaccggcaacgaccccctggacgtgtgggacagatgggtgttcctgttccacaaggacaacagaaacatcaacagatacatcagctggaccgagcagaactacccccagggcggcaaggagagcaacatgagcaccctgctggagagagccgtggaggccctgcagggcgagaagagatactacagcgaccccagattcctgaacctgtggctgaagctgggcagactgtgcaacgagcccctggacatgtacagctacctgcacaaccagggcatcggcgtgagcctggcccagttctacatcagctgggccgaggagtacgaggccagagagaacttcagaaaggccgacgccatcttccaggagggcatccagcagaaggccgagcccctggagagactgcagagccagcacagacagttccaggccagagtgagcagacagaccctgctggccctggagaaggaggaggaggaggaggtgttcgagagcagcgtgccccagagaagcaccctggccgagctgaagagcaagggcaagaagaccgccagagcccccatcatcagagtgggcggcgccctgaaggcccccagccagaacagaggcctgcagaaccccttcccccagcagatgcagaacaacagcagaatcaccgtgttcgacgagaacgccgacgaggccagcaccgccgagctgagcaagcccaccgtgcagccctggatcgccccccccatgcccagagccaaggagaacgagctgcaggccggcccctggaacaccggcagaagcctggagcacagacccagaggcaacaccgccagcctgatcgccgtgcccgccgtgctgcccagcttcaccccctacgtggaggagaccgccagacagcccgtgatgaccccctgcaagatcgagcccagcatcaaccacatcctgagcaccagaaagcccggcaaggaggagggcgaccccctgcagagagtgcagagccaccagcaggccagcgaggagaagaaggagaagatgatgtactgcaaggagaagatctacgccggcgtgggcgagttcagcttcgaggagatcagagccgaggtgttcagaaagaagctgaaggagcagagagaggccgagctgctgaccagcgccgagaagagagccgagatgcagaagcagatcgaggagatggagaagaagctgaaggagatccagaccacccagcaggagagaaccggcgaccagcaggaggagaccatgcccaccaaggagaccaccaagctgcagatcgccagcgagagccagaagatccccggcatgaccctgagcagcagcgtgtgccaggtgaactgctgcgccagagagaccagcctggccgagaacatctggcaggagcagccccacagcaagggccccagcgtgcccttcagcatcttcgacgagttcctgctgagcgagaagaagaacaagagcccccccgccgacccccccagagtgctggcccagagaagacccctggccgtgctgaagaccagcgagagcatcaccagcaacgaggacgtgagccccgacgtgtgcgacgagttcaccggcatcgagcccctgagcgaggacgccatcatcaccggcttcagaaacgtgaccatctgccccaaccccgaggacacctgcgacttcgccagagccgccagattcgtgagcacccccttccacgagatcatgagcctgaaggacctgcccagcgaccccgagagactgctgcccgaggaggacctggacgtgaagaccagcgaggaccagcagaccgcctgcggcaccatctacagccagaccctgagcatcaagaagctgagccccatcatcgaggacagcagagaggccacccacagcagcggcttcagcggcagcagcgccagcgtggccagcaccagcagcatcaagtgcctgcagatccccgagaagctggagctgaccaacgagaccagcgagaaccccacccagagcccctggtgcagccagtacagaagacagctgctgaagagcctgcccgagctgagcgccagcgccgagctgtgcatcgaggacagacccatgcccaagctggagatcgagaaggagatcgagctgggcaacgaggactactgcatcaagagagagtacctgatctgcgaggactacaagctgttctgggtggcccccagaaacagcgccgagctgaccgtgatcaaggtgagcagccagcccgtgccctgggacttctacatcaacctgaagctgaaggagagactgaacgaggacttcgaccacttctgcagctgctaccagtaccaggacggctgcatcgtgtggcaccagtacatcaactgcttcaccctgcaggacctgctgcagcacagcgagtacatcacccacgagatcaccgtgctgatcatctacaacctgctgaccatcgtggagatgctgcacaaggccgagatcgtgcacggcgacctgagccccagatgcctgatcctgagaaacagaatccacgacccctacgactgcaacaagaacaaccaggccctgaagatcgtggacttcagctacagcgtggacctgagagtgcagctggacgtgttcaccctgagcggcttcagaaccgtgcagatcctggagggccagaagatcctggccaactgcagcagcccctaccaggtggacctgttcggcatcgccgacctggcccacctgctgctgttcaaggagcacctgcaggtgttctgggacggcagcttctggaagctgagccagaacatcagcgagctgaaggacggcgagctgtggaacaagttcttcgtgagaatcctgaacgccaacgacgaggccaccgtgagcgtgctgggcgagctggccgccgagatgaacggcgtgttcgacaccaccttccagagccacctgaacaaggccctgtggaaggtgggcaagctgaccagccccggcgccctgctgttccagtag

SEQ ID NO: 83565 - DNA, 2802 bp, Artificial Sequence
  derived and/or modified sequence
atggccgccgtgaagaaggagggcggcgccctgagcgaggccatgagcctggagggcgacgagtgggagctgagcaaggagaacgtgcagcccctgagacagggcagaatcatgagcaccctgcagggcgccctggcccaggagagcgcctgcaacaacaccctgcagcagcagaagagagccttcgagtacgagatcagattctacaccggcaacgaccccctggacgtgtgggacagatacatcagctggaccgagcagaactacccccagggcggcaaggagagcaacatgagcaccctgctggagagagccgtggaggccctgcagggcgagaacttctggaaggccgacgccatcttccaggagggcatccagcagaaggccgagcccctggagagactgcagagccagcacagacagttccaggccagagtgagcagacagaccctgctggccctggagaaggaggaggaggaggaggtgttcgagagcagcgtgccccagagaagcaccctggccgagctgaagagcaagggcaagaagaccgccagagcccccatcatcagagtgggcggcgccctgaaggcccccagccagaacagaggcctgcagaaccccttcccccagcagatgcagaacaacagcagaatcaccgtgttcgacgagaacgccgacgaggccagcaccgccgagctgagcaagcccaccgtgcagccctggatcgccccccccatgcccagagccaaggagaacgagctgcaggccggcccctggaacaccggcagaagcctggagcacagacccagaggcaacaccgccagcctgatcgccgtgcccgccgtgctgcccagcttcaccccctacgtggaggagaccgccagacagcccgtgatgaccccctgcaagatcgagcccagcatcaaccacatcctgagcaccagaaagcccggcaaggaggagggcgaccccctgcagagagtgcagagccaccagcaggccagcgaggagaagaaggagaagatgatgtactgcaaggagaagatctacgccggcgtgggcgagttcagcttcgaggagatcagagccgaggtgttcagaaagaagctgaaggagcagagagaggccgagctgctgaccagcgccgagaagagagccgagatgcagaagcagatcgaggagatggagaagaagctgaaggagatccagaccacccagcaggagagaaccggcgaccagcaggaggagaccatgcccaccaaggagaccaccaagctgcagatcgccagcgagagccagaagatccccggcatgaccctgagcagcagcgtgtgccaggtgaactgctgcgccagagagaccagcctggccgagaacatctggcaggagcagccccacagcaaggtgagcctgagcctgggccccagcgtgcccttcagcatcttcgacgagttcctgctgagcgagaagaagaacaagagcccccccgccgacccccccagagtgctggcccagagaagacccctggccgtgctgaagaccagcgagagcatcaccagcaacgaggacgtgagccccgacgtgtgcgacgagttcaccggcatcgagcccctgagcgaggacgccatcatcaccggcttcagaaacgtgaccatctgccccaaccccgaggacaccagagaggccacccacagcagcggcttcagcggcagcagcgccagcgtggccagcaccagcagcatcaagtgcctgcagatccccgagaagctggagctgaccaacgagaccagcgagaaccccacccagagcccctggtgcagccagtacagaagacagctgctgaagagcctgcccgagctgagcgccagcgccgagctgtgcatcgaggacagacccatgcccaagctggagatcgagaaggagatcgagctgggcaacgaggactactgcatcaagagagagtacctgatctgcgaggactacaagctgttctgggtggcccccagaaacagcgccgagctgaccgtgatcaaggtgagcagccagcccgtgccctgggacttctacatcaacctgaagctgaaggagagactgaacgaggacttcgaccacttctgcagctgctaccagtaccaggacggctgcatcgtgtggcaccagtacatcaactgcttcaccctgcaggacctgctgcagcacagcgagtacatcacccacgagatcaccgtgctgatcatctacaacctgctgaccatcgtggagatgctgcacaaggccgagatcgtgcacggcgacctgagccccagatgcctgatcctgagaaacagaatccacgacccctacgactgcaacaagaacaaccaggccctgaagatcgtggacttcagctacagcgtggacctgagagtgcagctggacgtgttcaccctgagcggcttcagaaccgtgcagatcctggagggccagaagatcctggccaactgcagcagcccctaccaggtggacctgttcggcatcgccgacctggcccacctgctgctgttcaaggagcacctgcaggtgttctgggacggcagcttctggaagctgagccagaacatcagcgagctgaaggacggcgagctgtggaacaagttcttcgtgagaatcctgaacgccaacgacgaggccaccgtgagcgtgctgggcgagctggccgccgagatgaacggcgtgttcgacaccaccttccagagccacctgaacaaggccctgtggaaggtgggcaagctgaccagccccggcgccctgctgttccagtag

SEQ ID NO: 83566 - protein, 282 aa, Artificial Sequence
  derived and/or modified sequence
MLPLLRCVPRVLGSSVAGLRAAAPASPFRQLLQPAPRLCTRPFGLLSVRAGSERRPGLLRPRGPCACGCGCGSLHTDGDKAFVDFLSDEIKEERKIQKHKTLPKMSGGWELELNGTEAKLVRKVAGEKITVTFNINNSIPPTFDGEEEPSQGQKVEEQEPELTSTPNFVVEVIKNDDGKKALVLDCHYPEDEVGQEDEAESDIFSIREVSFQSTGESEWKDTNYTLNTDSLDWALYDHLMDFLADRGVDNTFADELVELSTALEHQEYITFLEDLKSFVKSQ

SEQ ID NO: 83567 - DNA, 849 bp, Artificial Sequence
  derived and/or modified sequence
atgttgcctctgttacggtgcgtgcctcgagtgctcggttcaagcgtggccgggttgagagctgccgcccccgcctcaccatttcgccagctgttgcagcccgctccccgactgtgcacacgccctttcggtttgttgtcagtccgcgccggtagcgaacgcagacccgggctgctaagaccgcgcgggccctgcgcttgtgggtgtggatgtggcagcctccacacggacggggataaggcctttgtggattttctgagcgacgaaatcaaggaggaacgcaagattcagaaacacaagacactaccaaaaatgagtgggggatgggagttggaactaaacggcaccgaggctaaactggtgcgcaaagtggcaggagagaaaattaccgtgacctttaacatcaacaatagcatacctcccacattcgatggagaggaagagcccagccagggccagaaagtcgaagagcaggaacctgaactgacctccaccccaaatttcgtggtagaggtcattaagaatgacgatggcaagaaagctctggttttggactgccattacccagaggatgaagtcgggcaagaggatgaggcggaatctgacatcttttcgatccgggaagtgagcttccaatctacaggcgaatccgagtggaaggacactaactacacattgaataccgatagtctcgactgggctttgtatgaccacctgatggattttctggctgaccgaggcgtggataacacgtttgctgatgaactagtggaattgtccaccgctctcgaacaccaagaatatatcaccttcctggaagatctgaagagcttcgttaaaagtcagtag

SEQ ID NO: 83568 - DNA, 849 bp, Artificial Sequence
  derived and/or modified sequence
atgctgcccctgctgcgctgtgtgccccgggtgctgggcagctctgtggccggcctgcgggccgccgccccagccagccccttccggcagctgctgcagcctgccccccggctgtgcacccggcccttcggcctgctgtctgtgcgggccggcagcgagcggcggcccggcctgctgcggccccggggcccctgtgcctgtggctgcggctgcggcagcctgcacacagatggagacaaggcctttgtggacttcctgagtgatgagatcaaggaggagaggaagatccagaagcacaagaccctgcccaagatgtctgggggctgggagctggagctgaatggaacagaggccaagctggtgaggaaggtggccggggagaagatcaccgtgaccttcaacatcaacaacagcatcccccccacctttgatggagaggaggagcccagccagggccagaaggtggaggagcaggagcctgagctgaccagcacccccaactttgtggtggaggtgatcaagaatgatgatggcaagaaggccctggtgctggactgccactacccagaagatgaggtgggccaggaggatgaagctgagagtgacatcttcagcatccgggaggtgtccttccagagcactggagagagcgagtggaaggacaccaactacaccctgaacacagacagcctggactgggccctgtatgaccacctgatggacttcctggccgacagaggagtggacaacacctttgctgatgagctggtggagctgagcacagccctggagcaccaggagtacatcaccttcctggaggacctgaagagctttgtgaagagccagtag

SEQ ID NO: 83569 - DNA, 849 bp, Artificial Sequence
  derived and/or modified sequence
atgctgcccctgctgcggtgcgtgccccgggtgctgggcagcagcgtggccggcctgcgggccgctgcacctgcaagccctttcagacagctgttacagcctgcacctcggctctgcactagaccattcggcttgctgtcagtgagggctggaagtgagaggaggcctggactcttgcgccctagaggcccatgtgcttgcgggtgcggctgtggatctctccacaccgatggggacaaggcctttgtggattttctgtccgacgaaattaaggaagaaaggaagatccagaagcacaagaccttgcccaagatgtccggaggatgggagcttgagttgaacggaactgaggcgaaactcgtgcggaaggtggcaggtgaaaaaataaccgttacattcaatatcaataactcaattccccccacgtttgatggcgaggaggagccgtcacaaggtcagaaggtagaagaacaggaaccggaattaaccagcacgccaaatttcgtggtggaagtgattaaaaacgacgatggtaagaaggcgctcgtcctggattgccattacccagaagacgaggtcgggcaggaggacgaagccgaaagtgacatcttctccatcagggaagtgtcttttcagagtaccggtgagtcagaatggaaggacactaattacactctgaacacagactcgttagactgggccctctacgatcatcttatggatttcttggccgaccgaggagttgataacacatttgccgacgagctggtggagttatccaccgccctggaacaccaggagtacataaccttcctcgaggatctaaagagcttcgtcaagtcacaatag

SEQ ID NO: 83570 - DNA, 849 bp, Artificial Sequence
  derived and/or modified sequence
atgttgccccttctgcggtgcgtgcctagagtgctaggctcttccgtggctggcctgcgggcagctgctccggcttctccattccgccagctccttcagccagctcctcggctatgtacccgccctttcggcctactttctgtacgggcaggttcagaaaggcgacccggactgcttcggcctaggggaccctgcgcctgcggctgtggctgtggatcattacataccgatggcgacaaggccttcgtcgattttcttagtgatgagatcaaggaggagcggaagatccaaaagcacaagaccttgccaaagatgtctggtggatgggagctggagttgaatggaaccgaggccaaactggtgcggaaagtggcaggagagaaaatcactgtaacctttaatatcaacaatagcattccacccacttttgatggtgaggaagaaccatcccaggggcaaaaggtagaagaacaggagcccgagctgactagtactcctaactttgtggtcgaggtgattaaaaacgatgatggaaagaaggctctcgtgttagactgccattatccagaagatgaagtcggacaggaggatgaagctgaatctgacatcttcagcattcgtgaagtgtcattccaaagcacgggcgaatctgagtggaaagacactaactatacgctgaacacagactcactggattgggccttgtacgaccatctgatggacttcctggctgatcgaggggtggataacacgttcgctgacgaacttgtggaactcagcacagctttagagcatcaggagtacatcaccttcctcgaggacttaaaatcatttgttaagtctcaatag

SEQ ID NO: 83571 - DNA, 1163 bp, Artificial Sequence
  derived and/or modified sequence
ccggcggcgcctcaggtcgcggggcgcctaggcctgggttgtcctttgcatctgcacgtgttcgcagtcgtttccgcgatgctgcctctgctgcgctgcgtgccccgtgtgctgggctcctccgtcgccggcctccgcgctgccgcgcccgcctcgcctttccggcagctcctgcagccggcaccccggctgtgcacccggcccttcgggctgctcagcgtgcgcgcaggttccgagcggcggccgggcctcctgcggcctcgcggaccctgcgcctgtggctgtggctgcggctcgctgcacaccgacggagacaaagcttttgttgatttcctgagtgatgaaattaaggaggaaagaaaaattcagaagcataaaaccctccctaagatgtctggaggttgggagctggaactgaatgggacagaagcgaaattagtgcggaaagttgccggggaaaaaatcacggtcactttcaacattaacaacagcatcccaccaacatttgatggtgaggaggaaccctcgcaagggcagaaggttgaagaacaggagcctgaactgacatcaactcccaatttcgtggttgaagttataaagaatgatgatggcaagaaggcccttgtgttggactgtcattatccagaggatgaggttggacaagaagacgaggctgagagtgacatcttctctatcagggaagttagctttcagtccactggcgagtctgaatggaaggatactaattatacactcaacacagattccttggactgggccttatatgaccacctaatggatttccttgccgaccgaggggtggacaacacttttgcagatgagctggtggagctcagcacagccctggagcaccaggagtacattacttttcttgaagacctcaagagttttgtcaagagccagtagagcagacagatgctgaaagccatagtttcatggcaggctttggccagtgaacaaatcctactctgaagctagacatgtgctttgaaatgattatcatcctaatatcatgggggaaaaaataccaaatttaaattatatgttttgtgttctcatttattatcatttttttctgtacaaatctattatttctagatttttgtataacatgatagacataaaattggtttatctcctcc

SEQ ID NO: 83572 - DNA, 849 bp, Artificial Sequence
  derived and/or modified sequence
atgctgcccctgctgagatgcgtgcccagagtgctgggcagcagcgtggccggcctgagagccgccgcccccgccagccccttcagacagctgctgcagcccgcccccagactgtgcaccagacccttcggcctgctgagcgtgagagccggcagcgagagaagacccggcctgctgagacccagaggcccctgcgcctgcggctgcggctgcggcagcctgcacaccgacggcgacaaggccttcgtggacttcctgagcgacgagatcaaggaggagagaaagatccagaagcacaagaccctgcccaagatgagcggcggctgggagctggagctgaacggcaccgaggccaagctggtgagaaaggtggccggcgagaagatcaccgtgaccttcaacatcaacaacagcatcccccccaccttcgacggcgaggaggagcccagccagggccagaaggtggaggagcaggagcccgagctgaccagcacccccaacttcgtggtggaggtgatcaagaacgacgacggcaagaaggccctggtgctggactgccactaccccgaggacgaggtgggccaggaggacgaggccgagagcgacatcttcagcatcagagaggtgagcttccagagcaccggcgagagcgagtggaaggacaccaactacaccctgaacaccgacagcctggactgggccctgtacgaccacctgatggacttcctggccgacagaggcgtggacaacaccttcgccgacgagctggtggagctgagcaccgccctggagcaccaggagtacatcaccttcctggaggacctgaagagcttcgtgaagagccagtag

SEQ ID NO: 83573 - protein, 1210 aa, Artificial Sequence [sequence omitted]

SEQ ID NO: 83574 - protein, 1260 aa, Artificial Sequence
  derived and/or modified sequence
RSKDPKSQTLAMMCEVMPTINEDTPMSQRGSQSSGSDSDSHFEQLMVNMLDERDRLLDTLRETQESLSLAQQRLQDVIYDRDSLQRQLNSALPQDIESLTGGLAGSKGADPPEFAALTKELNACREQLLEKEEEISELKAERNNTRLLLEHLECLVSRHERSLRMTVVKRQAQSPSGVSSEVEVLKALKSLFEHHKALDEKVRERLRVSLERVSALEEELAAANQEIVALREQNVHIQRKMASSEGSTESEHLEGMEPGQKVHEKRLSNGSIDSTDETSQIVELQELLEKQNYEMAQMKERLAALSSRVGEVEQEAETARKDLIKTEEMNTKYQRDIREAMAQKEDMEERITTLEKRYLSAQRESTSIHDMNDKLENELANKEAILRQMEEKNRQLQERLELAEQKLQQTMRKAETLPEVEAELAQRIAALTKAEERHGNIEERMRHLEGQLEEKNQELQRARQREKMNEEHNKRLSDTVDRLLTESNERLQLHLKERMAALEEKNVLIQESETFRKNLEESLHDKERLAEEIEKLRSELDQLKMRTGSLIEPTIPRTHLDTSAELRYSVGSLVDSQSDYRTTKVIRRPRRGRMGVRRDEPKVKSLGDHEWNRTQQIGVLSSHPFESDTEMSDIDDDDRETIFSSMDLLSPSGHSDAQTLAMMLQEQLDAINKEIRLIQEEKESTELRAEEIENRVASVSLEGLNLARVHPGTSITASVTASSLASSSPPSGHSTPKLTPRSPAREMDRMGVMTLPSDLRKHRRKIAVVEEDGREDKATIKCETSPPPTPRALRMTHTLPSSYHNDARSSLSVSLEPESLGLGSANSSQDSLHKAPKKKGIKSSIGRLFGKKEKARLGQLRGFMETEAAAQESLGLGKLGTQAEKDRRLKKKHELLEEARRKGLPFAQWDGPTVVAWLELWLGMPAWYVAACRANVKSGAIMSALSDTEIQREIGISNPLHRLKLRLAIQEMVSLTSPSAPPTSRTPSGNVWVTHEEMENLAAPAKTKESEEGSWAQCPVFLQTLAYGDMNHEWIGNEWLPSLGLPQYRSYFMECLVDARMLDHLTKKDLRVHLKMVDSFHRTSLQYGIMCLKRLNYDRKELERRREASQHEIKDVLVWSNDRVIRWIQAIGLREYANNILESGVHGSLIALDENFDYSSLALLLQIPTQNTQANARQILEREYNNLLALGTERRLDESDDKNFRRGSTWRRQFPPREVHGISMMPGSSETLPAGFRLTTTSGQSRKMTTDDGVFSVYST

SEQ ID NO: 83575 - DNA, 3633 bp, Artificial Sequence
  derived and/or modified sequence
atgatgtgcgaggtgatgcccaccatcaacgaggacacccccatgagccagagaggcagccagagcagcggcagcgacagcgacagccacttcgagcagctgatggtgaacatgctggacgagagagacagactgctggacaccctgagagagacccaggagagcctgagcctggcccagcagagactgcaggacgtgatctacgacagagacagcctgcagagacagctgaacagcgccctgccccaggacatcgagagcctgaccggcggcctggccggcagcaagggcgccgacccccccgagttcgccgccctgaccaaggagctgaacgcctgcagagagcagctgctggagaaggaggaggagatcagcgagctgaaggccgagagaaacaacaccagactgctgctggagcacctggagtgcctggtgagcagacacgagagaagcctgagaatgaccgtggtgaagagacaggcccagagccccagcggcgtgagcagcgaggtggaggtgctgaaggccctgaagagcctgttcgagcaccacaaggccctggacgagaaggtgagagagagactgagagtgagcctggagagagtgagcgccctggaggaggagctggccgccgccaaccaggagatcgtggccctgagagagcagaacgtgcacatccagagaaagatggccagcagcgagggcagcaccgagagcgagcacctggagggcatggagcccggccagaaggtgcacgagaagagactgagcaacggcagcatcgacagcaccgacgagaccagccagatcgtggagctgcaggagctgctggagaagcagaactacgagatggcccagatgaaggagagactggccgccctgagcagcagagtgggcgaggtggagcaggaggccgagaccgccagaaaggacctgatcaagaccgaggagatgaacaccaagtaccagagagacatcagagaggccatggcccagaaggaggacatggaggagagaatcaccaccctggagaagagatacctgagcgcccagagagagagcaccagcatccacgacatgaacgacaagctggagaacgagctggccaacaaggaggccatcctgagacagatggaggagaagaacagacagctgcaggagagactggagctggccgagcagaagctgcagcagaccatgagaaaggccgagaccctgcccgaggtggaggccgagctggcccagagaatcgccgccctgaccaaggccgaggagagacacggcaacatcgaggagagaatgagacacctggagggccagctggaggagaagaaccaggagctgcagagagccagacagagagagaagatgaacgaggagcacaacaagagactgagcgacaccgtggacagactgctgaccgagagcaacgagagactgcagctgcacctgaaggagagaatggccgccctggaggagaagaacgtgctgatccaggagagcgagaccttcagaaagaacctggaggagagcctgcacgacaaggagagactggccgaggagatcgagaagctgagaagcgagctggaccagctgaagatgagaaccggcagcctgatcgagcccaccatccccagaacccacctggacaccagcgccgagctgagatacagcgtgggcagcctggtggacagccagagcgactacagaaccaccaaggtgatcagaagacccagaagaggcagaatgggcgtgagaagagacgagcccaaggtgaagagcctgggcgaccacgagtggaacagaacccagcagatcggcgtgctgagcagccaccccttcgagagcgacaccgagatgagcgacatcgacgacgacgacagagagaccatcttcagcagcatggacctgctgagccccagcggccacagcgacgcccagaccctggccatgatgctgcaggagcagctggacgccatcaacaaggagatcagactgatccaggaggagaaggagagcaccgagctgagagccgaggagatcgagaacagagtggccagcgtgagcctggagggcctgaacctggccagagtgcaccccggcaccagcatcaccgccagcgtgaccgccagcagcctggccagcagcagcccccccagcggccacagcacccccaagctgacccccagaagccccgccagagagatggacagaatgggcgtgatgaccctgcccagcgacctgagaaagcacagaagaaagatcgccgtggtggaggaggacggcagagaggacaaggccaccatcaagtgcgagaccagccccccccccacccccagagccctgagaatgacccacaccctgcccagcagctaccacaacgacgccagaagcagcctgagcgtgagcctggagcccgagagcctgggcctgggcagcgccaacagcagccaggacagcctgcacaaggcccccaagaagaagggcatcaagagcagcatcggcagactgttcggcaagaaggagaaggccagactgggccagctgagaggcttcatggagaccgaggccgccgcccaggagagcctgggcctgggcaagctgggcacccaggccgagaaggacagaagactgaagaagaagcacgagctgctggaggaggccagaagaaagggcctgcccttcgcccagtgggacggccccaccgtggtggcctggctggagctgtggctgggcatgcccgcctggtacgtggccgcctgcagagccaacgtgaagagcggcgccatcatgagcgccctgagcgacaccgagatccagagagagatcggcatcagcaaccccctgcacagactgaagctgagactggccatccaggagatggtgagcctgaccagccccagcgccccccccaccagcagaacccccagcggcaacgtgtgggtgacccacgaggagatggagaacctggccgcccccgccaagaccaaggagagcgaggagggcagctgggcccagtgccccgtgttcctgcagaccctggcctacggcgacatgaaccacgagtggatcggcaacgagtggctgcccagcctgggcctgccccagtacagaagctacttcatggagtgcctggtggacgccagaatgctggaccacctgaccaagaaggacctgagagtgcacctgaagatggtggacagcttccacagaaccagcctgcagtacggcatcatgtgcctgaagagactgaactacgacagaaaggagctggagagaagaagagaggccagccagcacgagatcaaggacgtgctggtgtggagcaacgacagagtgatcagatggatccaggccatcggcctgagagagtacgccaacaacatcctggagagcggcgtgcacggcagcctgatcgccctggacgagaacttcgactacagcagcctggccctgctgctgcagatccccacccagaacacccaggccagcagattcctgaaggagaacaccatcaccagctggccctgggagctgaagggcgactggatgaaggtgatgaccagaaccagcgacgtggaccagcccggcgagggcagcttcctgctggtgaagtacatggagagcgcctag

SEQ ID NO: 83576 - DNA, 3783 bp, Artificial Sequence
  derived and/or modified sequence
agaagcaaggaccccaagagccagaccctggccatgatgtgcgaggtgatgcccaccatcaacgaggacacccccatgagccagagaggcagccagagcagcggcagcgacagcgacagccacttcgagcagctgatggtgaacatgctggacgagagagacagactgctggacaccctgagagagacccaggagagcctgagcctggcccagcagagactgcaggacgtgatctacgacagagacagcctgcagagacagctgaacagcgccctgccccaggacatcgagagcctgaccggcggcctggccggcagcaagggcgccgacccccccgagttcgccgccctgaccaaggagctgaacgcctgcagagagcagctgctggagaaggaggaggagatcagcgagctgaaggccgagagaaacaacaccagactgctgctggagcacctggagtgcctggtgagcagacacgagagaagcctgagaatgaccgtggtgaagagacaggcccagagccccagcggcgtgagcagcgaggtggaggtgctgaaggccctgaagagcctgttcgagcaccacaaggccctggacgagaaggtgagagagagactgagagtgagcctggagagagtgagcgccctggaggaggagctggccgccgccaaccaggagatcgtggccctgagagagcagaacgtgcacatccagagaaagatggccagcagcgagggcagcaccgagagcgagcacctggagggcatggagcccggccagaaggtgcacgagaagagactgagcaacggcagcatcgacagcaccgacgagaccagccagatcgtggagctgcaggagctgctggagaagcagaactacgagatggcccagatgaaggagagactggccgccctgagcagcagagtgggcgaggtggagcaggaggccgagaccgccagaaaggacctgatcaagaccgaggagatgaacaccaagtaccagagagacatcagagaggccatggcccagaaggaggacatggaggagagaatcaccaccctggagaagagatacctgagcgcccagagagagagcaccagcatccacgacatgaacgacaagctggagaacgagctggccaacaaggaggccatcctgagacagatggaggagaagaacagacagctgcaggagagactggagctggccgagcagaagctgcagcagaccatgagaaaggccgagaccctgcccgaggtggaggccgagctggcccagagaatcgccgccctgaccaaggccgaggagagacacggcaacatcgaggagagaatgagacacctggagggccagctggaggagaagaaccaggagctgcagagagccagacagagagagaagatgaacgaggagcacaacaagagactgagcgacaccgtggacagactgctgaccgagagcaacgagagactgcagctgcacctgaaggagagaatggccgccctggaggagaagaacgtgctgatccaggagagcgagaccttcagaaagaacctggaggagagcctgcacgacaaggagagactggccgaggagatcgagaagctgagaagcgagctggaccagctgaagatgagaaccggcagcctgatcgagcccaccatccccagaacccacctggacaccagcgccgagctgagatacagcgtgggcagcctggtggacagccagagcgactacagaaccaccaaggtgatcagaagacccagaagaggcagaatgggcgtgagaagagacgagcccaaggtgaagagcctgggcgaccacgagtggaacagaacccagcagatcggcgtgctgagcagccaccccttcgagagcgacaccgagatgagcgacatcgacgacgacgacagagagaccatcttcagcagcatggacctgctgagccccagcggccacagcgacgcccagaccctggccatgatgctgcaggagcagctggacgccatcaacaaggagatcagactgatccaggaggagaaggagagcaccgagctgagagccgaggagatcgagaacagagtggccagcgtgagcctggagggcctgaacctggccagagtgcaccccggcaccagcatcaccgccagcgtgaccgccagcagcctggccagcagcagcccccccagcggccacagcacccccaagctgacccccagaagccccgccagagagatggacagaatgggcgtgatgaccctgcccagcgacctgagaaagcacagaagaaagatcgccgtggtggaggaggacggcagagaggacaaggccaccatcaagtgcgagaccagccccccccccacccccagagccctgagaatgacccacaccctgcccagcagctaccacaacgacgccagaagcagcctgagcgtgagcctggagcccgagagcctgggcctgggcagcgccaacagcagccaggacagcctgcacaaggcccccaagaagaagggcatcaagagcagcatcggcagactgttcggcaagaaggagaaggccagactgggccagctgagaggcttcatggagaccgaggccgccgcccaggagagcctgggcctgggcaagctgggcacccaggccgagaaggacagaagactgaagaagaagcacgagctgctggaggaggccagaagaaagggcctgcccttcgcccagtgggacggccccaccgtggtggcctggctggagctgtggctgggcatgcccgcctggtacgtggccgcctgcagagccaacgtgaagagcggcgccatcatgagcgccctgagcgacaccgagatccagagagagatcggcatcagcaaccccctgcacagactgaagctgagactggccatccaggagatggtgagcctgaccagccccagcgccccccccaccagcagaacccccagcggcaacgtgtgggtgacccacgaggagatggagaacctggccgcccccgccaagaccaaggagagcgaggagggcagctgggcccagtgccccgtgttcctgcagaccctggcctacggcgacatgaaccacgagtggatcggcaacgagtggctgcccagcctgggcctgccccagtacagaagctacttcatggagtgcctggtggacgccagaatgctggaccacctgaccaagaaggacctgagagtgcacctgaagatggtggacagcttccacagaaccagcctgcagtacggcatcatgtgcctgaagagactgaactacgacagaaaggagctggagagaagaagagaggccagccagcacgagatcaaggacgtgctggtgtggagcaacgacagagtgatcagatggatccaggccatcggcctgagagagtacgccaacaacatcctggagagcggcgtgcacggcagcctgatcgccctggacgagaacttcgactacagcagcctggccctgctgctgcagatccccacccagaacacccaggccaacgccagacagatcctggagagagagtacaacaacctgctggccctgggcaccgagagaagactggacgagagcgacgacaagaacttcagaagaggcagcacctggagaagacagttcccccccagagaggtgcacggcatcagcatgatgcccggcagcagcgagaccctgcccgccggcttcagactgaccaccaccagcggccagagcagaaagatgaccaccgacgacggcgtgttcagcgtgtacagcacctag

SEQ ID NO: 83577 - DNA, 3633 bp, Artificial Sequence
  derived and/or modified sequence
atgatgtgcgaagtgatgccgacaattaacgaggatacacctatgtctcagaggggttcacaatccagcgggagcgattcagattcgcactttgaacagcttatggttaatatgttagatgagcgcgatagactgctcgatacactgagggagacacaagaatcacttagcttggcccaacagcgcctgcaggacgtgatatatgacagggacagccttcagaggcagctcaatagcgccctccctcaagatatcgagtcgttaactggagggctcgccggttccaagggcgcagatccgccagaattcgcagcgttgaccaaagaactgaacgcttgtcgagagcagttactcgaaaaggaggaagaaatatcggagctgaaagccgaacgcaacaacacacggcttctccttgaacacctggagtgcttggtaagccggcacgagcgcagcttgaggatgacagtggttaagcggcaggcacagtccccgtcaggtgtgtcatctgaagtagaggtgctgaaagccctgaaaagtttgtttgaacatcataaagctctggatgagaaagttcgcgagagacttcgtgtctctcttgaacgggtgagcgcactcgaggaagagttagccgccgccaatcaggaaatcgtggccttgcgtgaacagaatgtgcacattcagaggaagatggcatcgtcagagggctcaacagaaagtgaacacttggaagggatggaaccaggacagaaggtgcacgagaagagactctctaatggctcaattgatagcaccgatgagacttcacagatcgtagaactacaggagctgctggagaagcaaaactacgaaatggcccagatgaaagagagattagcagcgctgtcctctcgcgttggtgaggttgaacaggaggccgaaactgctcgaaaggacctgattaagaccgaggagatgaacactaagtaccagcgggacattagggaggccatggcccaaaaggaggacatggaagaaagaatcacaacactggagaaacgctacctttcagcccagcgtgagagtaccagtatccatgatatgaatgataagttagagaacgagctggccaataaggaggccatcctcagacaaatggaggagaaaaaccgacagctgcaggagagactagagcttgccgaacagaagctgcagcagaccatgagaaaggccgaaacactgcctgaggtcgaggctgagctggctcaaagaatcgcagctttgacaaaggctgaggagaggcacggcaacatcgaggagaggatgagacacctggaaggccagttggaagagaagaatcaggaattgcagagggctcggcagcgggagaagatgaatgaagaacataataaacggctgagcgacaccgtcgatcggctgttgacggagagcaatgaacgcctgcagcttcaccttaaagaacgcatggccgcactggaggaaaagaacgtgcttattcaggagtccgaaacgtttcgaaaaaatcttgaagagagtcttcatgataaggaaagacttgcagaggagatcgagaaactgcgctcagaactggaccagctcaaaatgcgcaccggtagtctaattgaacctacaattcctcggactcacctagatacctccgcggagcttcgctattcggttggatcactggtggatagccagagcgattaccgcaccacaaaagtaattagacgaccaagaagggggaggatgggggtgcggcgcgacgagccaaaggtgaagagcctgggtgatcatgagtggaatcggacccagcaaatcggtgttcttagcagccaccccttcgagtctgatacagaaatgtctgacatcgacgatgatgatagagagaccatcttctctagtatggatctcctctctccgtctgggcattctgatgcacagacactcgctatgatgctccaggagcagttggatgccattaataaggagatccggctcatccaggaagagaaagagagcacagagctgcgcgctgaagagatcgagaaccgggtcgcaagcgtttccctggaagggcttaacttggccagagtacacccaggaacgtcaattaccgccagcgtcacagcttcaagtctcgcctcttcatctccaccaagcggacatagcacccctaaacttactccacggtccccggccagggagatggatcgcatgggcgtgatgactctgcccagtgatctgcgtaaacacaggcggaaaattgccgtcgtggaggaagacgggagggaggacaaagccactatcaaatgcgaaaccagccccccacccacacccagggctctccgaatgactcacactctgccctcatcttatcataacgacgcccggtcctccctgagcgtgtccctcgaacctgaatcgctcgggcttgggagtgccaacagcagtcaggactcattgcacaaggctcccaagaaaaaaggtatcaaatcctctatcggtcggctgttcggaaagaaggagaaggcccggctgggacaactcaggggtttcatggagaccgaggccgccgctcaggaatccctgggattggggaaactcggcacacaggccgaaaaagacagacgcctgaagaagaaacacgagttgctcgaggaagcacggaggaaaggcctcccgttcgcacagtgggatggacccaccgtggttgcctggttagagctttggctggggatgcctgcttggtatgtggccgcttgcagagccaatgtcaaaagcggggctattatgagtgccctgagcgacactgagattcagagagaaattggtatctcgaatcccctccaccgtctgaaacttcgcctggctatccaggaaatggtatcactcacgagcccatcagcaccccctacctcacggacaccttctgggaacgtctgggtgacccacgaggagatggaaaacctcgctgcacccgctaagaccaaagaatcggaggagggttcatgggcccaatgcccagttttcctgcagacacttgcctatggggacatgaatcacgaatggattggaaatgaatggctgccttctttggggctaccgcagtatcgctcatacttcatggaatgcttggttgatgctagaatgcttgatcacctgaccaagaaggatttacgggtccacctgaagatggtcgactctttccaccggaccagcctgcaatacggcataatgtgtcttaaacgcttaaactatgaccgcaaggagctcgagcgtcggagagaagcgagccaacacgagatcaaagacgtcctggtttggagcaacgaccgcgtcattaggtggattcaggccatcggactcagggagtatgccaataacatcctcgaatctggggtccacggctcgctaatcgctctggacgaaaatttcgactacagtagtttggccctattgctccagatacccactcagaacacacaggctagccgctttcttaaagagaataccattactagctggccctgggaactgaaaggcgactggatgaaggtgatgactcgcacctcagacgtggatcagcctggagagggttcattcttgctggtgaagtatatggagagcgcgtag

SEQ ID NO: 83578 - DNA, 3783 bp, Artificial Sequence
  derived and/or modified sequence
aggtctaaggatcctaagagtcaaacgctggctatgatgtgtgaggtaatgccaactatcaacgaagacacgcctatgtctcaacggggcagccagtcaagcggatctgattccgactctcactttgaacaactgatggttaatatgctcgatgagcgggaccggttgctggacacacttcgggagacgcaagagagcttatccttggcacagcagcgcttacaggatgtaatatacgaccgagactcattgcagagacagctcaactcagcgctgccccaggacattgagtcactgaccggaggcctggccggttccaaaggtgcagaccccccagaatttgctgcgctgactaaagagcttaatgcatgtagggaacagctgcttgagaaggaggaggaaatctctgagctcaaggcagagagaaacaatacacgtctgctccttgagcacttggagtgcctggtcagcagacacgagcggagcctccggatgaccgtagtgaaacgccaagctcaatctccaagcggagtgtcctcagaggtggaagtccttaaagctcttaaatctctctttgaacaccataaggccctggacgagaaggtgcgggagcggcttcgtgtgtctcttgaacgggtgagcgcgctcgaagaggaactagccgccgccaaccaggaaatcgtagcattacgagagcaaaacgtgcatatccaaagaaaaatggcctcctcagagggcagcaccgagtccgagcatcttgagggcatggagccaggacagaaggttcacgagaagaggctctctaatggatccattgatagcacagacgagacaagtcagatagtcgaactacaggagctactcgaaaaacaaaattatgagatggctcaaatgaaggagaggttggcagcgttgtcctctagggtgggagaggtcgagcaggaagcggaaactgcccggaaagatttaatcaagacagaggaaatgaatactaagtaccagcgcgacattagggaggccatggcccagaaggaggatatggaggaacggattaccaccctagagaaacgatacttgtcggcccagagggagagtacatcgatccacgatatgaatgacaaactggaaaacgagctggcaaataaagaggccatcctgcgccaaatggaagaaaagaaccggcagctccaggagcgcttagagttggcagaacagaaattacagcagaccatgcgtaaggcagagacgctgcccgaggttgaggctgagctagcacaaagaatagctgctcttaccaaggctgaggaacgacacggcaatatcgaagaaaggatgcggcacctggaaggacagttggaggagaaaaaccaagagttgcaaagggcaaggcagagagaaaagatgaacgaggagcataacaaaagactgtctgataccgtggatcgattgctcacagaaagcaacgagcgcctccagcttcatttgaaggagcgtatggcagctctggaagagaagaacgttttaatccaggaaagtgaaaccttcaggaaaaatctggaggagtcacttcacgataaagagcggctcgcggaggagatagagaaacttcggtccgaacttgatcaattgaaaatgcgaaccggctcattgattgaacccactattccaagaacacacctggacacgagtgcggagctaaggtacagcgttgggagtctggtggactctcagagcgattacaggacaacgaaggtaattaggcggcctaggcgtggcagaatgggagtgcgaagggacgagcctaaggtgaaatccctgggggatcatgaatggaatagaacacagcagatcggcgtattaagtagtcatccattcgagtccgacactgagatgagcgacatcgacgacgatgacagagagaccatattctcgtctatggatctgctctctcctagtggtcatagcgacgcacagactctggcgatgatgctccaggagcagctggacgccatcaacaaagaaattcggttgatccaggaagaaaaggagtctacagagctgcgggccgaggagatagaaaatagggttgcttccgtgtcattagaggggttgaacctcgcccgggtccatccagggacatccatcacagccagcgtgacagcaagctcgctggcttcctcctcgccgccatctggtcactcaactccgaagctgactcctaggtctcccgcacgcgaaatggacagaatgggcgtcatgactctgccgtctgatctgcggaaacatcgccgcaaaatcgcggtcgtggaggaagacggcagagaggacaaggccacaatcaagtgtgagacatcaccaccccccacccctcgtgctctaagaatgacacatacattgccttcttcctaccacaacgatgccaggtcgtccttgagcgtgagtctggagcctgagtcactggggctcggaagcgctaactcttcccaagactcacttcacaaagccccaaagaagaaaggaattaaaagctcaattgggcgactgtttggtaagaaggaaaaggccagactggggcagctgcgtggtttcatggagacagaagcggccgcacaggaatccctggggctaggcaagctgggaacacaagcagaaaaggaccgccgactgaaaaagaaacacgagctgctagaggaagcccgcagaaaaggtctgccttttgctcagtgggatggccccacagtggtggcgtggttggagctgtggctcggcatgcccgcctggtatgtcgctgcctgtcgagctaatgtgaaatctggagctataatgtcagcattaagtgatacggagatccagcgggagattggtattagcaaccccctgcacagactgaagcttagattggctatacaagagatggtcagcctgactagtcctagcgcccctcctacctcaagaacacctagcggcaatgtgtgggtgactcacgaagagatggaaaacctggcggcacccgccaagactaaagaatcggaggagggaagctgggcccagtgcccagtgttcctgcagacgctagcctacggagacatgaatcacgagtggataggcaatgagtggctgcctagcttgggcctgccacagtacagatcctattttatggaatgcttggtggacgcccggatgctcgatcatctcacaaagaaggacctgagggtgcatcttaaaatggtggattcctttcatcgcacttccctgcagtatggaattatgtgcctgaaaaggctaaactacgaccgcaaagaattggagcgccgccgagaggccagccagcacgagataaaggacgtgctggtgtggagtaacgaccgtgttattcgctggatccaggccattggtctgcgagagtacgctaataatattcttgagtcaggcgtccacggctcactcatcgccctggatgaaaattttgactattctagtctcgctctgcttctgcagattcccacccagaacacacaggcgaatgcccgacagattctggagagagagtacaacaatctgctggctctaggtactgagcggcggctcgacgagtctgatgataaaaacttcaggcgcggcagcacctggcgccgccaattccctccgcgagaggtgcacggtatcagcatgatgcctgggtctagcgaaacattgcccgcaggctttcgcctgaccactacttctggacagtcacggaaaatgacgactgatgatggggtcttttccgtgtacagcacatag

SEQ ID NO: 83579 - DNA, 3633 bp, Artificial Sequence
  derived and/or modified sequence
atgatgtgtgaggtgatgcccaccatcaatgaagacacccccatgagccagaggggcagccagagcagcggcagtgacagcgacagccactttgagcagctgatggtgaacatgctggatgagcgggaccggctgctggacaccctgcgggagacccaggagagcctgagcctggcccagcagaggctgcaggatgtgatctatgaccgggacagcctgcagaggcagctgaacagcgccctgccccaggacatcgagagcctgactggaggcctggccggcagcaaaggagctgaccccccagagtttgctgccctgaccaaggagctgaatgcctgccgggagcagctgctggagaaggaggaggagatcagcgagctgaaggccgagaggaacaacacccggctgctgctggagcacctggagtgcctggtgtccagacatgagaggagcctgaggatgacagtggtgaagaggcaggcccagagccccagcggcgtgtcctctgaggtggaggtgctgaaggccctgaagagcctgtttgagcaccacaaggccctggatgagaaggtgcgggagcggctgcgggtgtccctggagcgggtgtctgccctggaggaggagctggccgccgccaaccaggagatcgtggccctgcgggagcagaatgtgcacatccagaggaagatggccagcagcgagggcagcacagaaagtgagcacctggagggcatggagcccggccagaaggtgcatgagaagaggctgagcaatggcagcattgacagcacagatgagaccagccagatcgtggagctgcaggagctgctggagaagcagaactatgagatggcccagatgaaggagcggctggccgccctgagcagccgggtgggggaggtggagcaggaggccgagacagccaggaaggacctgatcaagacagaggagatgaacaccaagtaccagagggacatccgggaggccatggcccagaaggaggacatggaggagcgcatcaccaccctggagaagcgctacctgagcgcccagcgggagagcaccagcatccatgacatgaatgacaagctggagaatgagctggccaacaaggaggccatcctgcggcagatggaggagaagaaccggcagctgcaggagcggctggagctggccgagcagaagctgcagcagaccatgaggaaggccgagaccctgcctgaggtggaggccgagctggcccagagaattgctgccctgaccaaggccgaggagagacatggcaacatcgaggagaggatgaggcacctggagggccagctggaggagaagaaccaggagctgcagagggcccggcagcgggagaagatgaatgaggagcacaacaagaggctgagtgacacagtggaccggctgctgacagagagcaatgaaaggctgcagctgcacctgaaggagaggatggccgccctggaggagaagaatgtgctgatccaggagagcgagaccttcaggaagaacctggaggagagcctgcatgacaaggagcggctggccgaggagattgagaagctgcggtctgagctggaccagctgaagatgaggacaggcagcctcatcgagcccaccatccccaggacccacctggacaccagcgctgagctgcgctacagcgtgggcagcctggtggacagccagagcgactaccgcaccaccaaggtgatccggcggccccggcggggccgcatgggcgtgagaagagatgagcccaaggtgaagagcctgggggaccacgagtggaacagaacccagcagatcggcgtgctgagcagccacccctttgaaagtgacacagagatgtctgacattgatgatgatgaccgggagaccatcttcagctccatggacctgctgagccccagcggccacagtgatgcccagaccctggccatgatgctgcaggagcagctggatgccatcaacaaggagatccgcctcatccaggaggagaaggagagcacagagctgcgggcagaggagattgagaacagagtggcctctgtgtccctggagggcctgaacctggcccgggtgcaccctggcaccagcatcacagcctctgtgacagccagcagcctggccagcagcagcccccccagcggccacagcacccccaagctgacccccaggagccctgcccgggagatggacaggatgggcgtgatgaccctgcccagcgacctgaggaagcacaggaggaagattgctgtggtggaggaggatggccgggaggacaaggccaccatcaagtgtgagaccagccccccacccaccccccgggccctgaggatgacccacaccctgcccagcagctaccacaatgatgcccggagcagcctgtctgtgtccctggagcctgagagcctgggcctgggcagcgccaacagcagccaggacagcctgcacaaggcccccaagaagaagggcatcaagagcagcatcggccgcctgtttgggaagaaggagaaggcccggctgggccagctgcggggcttcatggagacagaagctgctgcccaggagagcctgggcctgggcaagctgggcacccaggccgagaaggaccggcggctgaagaagaagcatgagctgctggaggaggcccggaggaagggcctgccctttgcccagtgggatggccccaccgtggtggcctggctggagctgtggctgggcatgcctgcctggtacgtggccgcctgccgggccaacgtgaagagcggggccatcatgtctgccctgagtgacacagagatccagcgggagatcggcatcagcaaccccctgcaccggctgaagctgcggctggccatccaggagatggtgtccctgaccagccccagcgccccacccaccagcaggaccccatctggaaatgtgtgggtgacccatgaggagatggagaacctggccgccccagccaagaccaaggagagcgaggagggctcctgggcccagtgccctgtgttcctgcagaccctggcctacggggacatgaaccacgagtggattggaaatgagtggctgcccagcctgggcctgccccagtaccgcagctacttcatggagtgcctggtggatgccaggatgctggaccacctgaccaagaaggacctgcgggtgcacctgaagatggtggacagcttccacaggaccagcctgcagtatggcatcatgtgcctgaagaggctgaactatgacaggaaggagctggagcggcggcgggaggccagccagcacgagatcaaggatgtgctggtgtggagcaatgacagagtcatccgctggatccaggccatcggcctgcgggagtatgccaacaacatcctggagagcggcgtgcacggcagcctgattgccctggatgaaaattttgactacagcagcctggccctgctgctgcagatccccacccagaacacccaggccagccgcttcctgaaggagaacaccatcacctcctggccctgggagctgaagggggactggatgaaggtgatgaccaggaccagtgatgtggaccagcccggggagggcagcttcctgctggtgaagtacatggagagcgcctag

SEQ ID NO: 83580 - DNA, 3783 bp, Artificial Sequence
  derived and/or modified sequence
cgcagcaaggaccccaagagccagaccctggccatgatgtgtgaggtgatgcccaccatcaatgaagacacccccatgagccagaggggcagccagagcagcggcagtgacagcgacagccactttgagcagctgatggtgaacatgctggatgagcgggaccggctgctggacaccctgcgggagacccaggagagcctgagcctggcccagcagaggctgcaggacgtcatctatgaccgggacagcctgcagaggcagctgaacagcgccctgccccaggacatcgagagcctgaccggcggcctggccggcagcaaaggagctgaccccccagagtttgctgccctgaccaaggagctgaatgcctgccgggagcagctgctggagaaggaggaggagatcagcgagctgaaggccgagaggaacaacacccggctgctgctggagcacctggagtgcctggtgtccagacatgagaggagcctgaggatgacagtggtgaagaggcaggcccagagccccagcggcgtgagcagcgaggtggaggtgctgaaggccctgaagagcctgtttgagcaccacaaggccctggatgagaaggtgcgggagcggctgcgggtgtccctggagcgggtgtctgccctggaggaggagctggccgccgccaaccaggagatcgtggccctgcgggagcagaatgtgcacatccagaggaagatggccagcagcgagggcagcacagagagcgagcacctggagggcatggagcccggccagaaggtgcatgagaagaggctgagcaatggcagcattgacagcacagatgagaccagccagatcgtggagctgcaggagctgctggagaagcagaactatgagatggcccagatgaaggagcggctggccgccctgagcagccgggtgggggaggtggagcaggaggccgagacagccaggaaggacctgatcaagacagaggagatgaacaccaagtaccagagggacatccgggaggccatggcccagaaggaggacatggaggagcgcatcaccaccctggagaagcgctacctgagcgcccagcgggagagcaccagcatccatgacatgaatgacaagctggagaatgagctggccaacaaggaggccatcctgcggcagatggaggagaagaaccggcagctgcaggagcggctggagctggccgagcagaagctgcagcagaccatgaggaaggccgagaccctgcctgaggtggaggccgagctggcccagagaattgctgccctgaccaaggccgaggagcggcacggcaacatcgaggagaggatgaggcacctggagggccagctggaggagaagaaccaggagctgcagagggcccggcagcgggagaagatgaatgaggagcacaacaagaggctgagtgacacagtggaccggctgctgacagagagcaatgaaaggctgcagctgcacctgaaggagaggatggccgccctggaggagaagaatgtgctgatccaggagagcgagaccttcaggaagaacctggaggagagcctgcatgacaaggagcggctggccgaggagattgagaagctgcggtctgagctggaccagctgaagatgaggacaggcagcctgattgagcccaccatccccaggacccacctggacaccagcgctgagctgcgctacagcgtgggcagcctggtggacagccagagcgactaccgcaccaccaaggtgatcagaagaccccggcggggccgcatgggcgtgagaagagatgagcccaaggtgaagagcctgggggaccacgagtggaacagaacccagcagattggagtgctgagcagccacccctttgaaagtgacacagagatgtctgacattgatgatgatgaccgggagaccatcttcagctccatggacctgctgagccccagcggccacagtgatgcccagaccctggccatgatgctgcaggagcagctggatgccatcaacaaggagatccgcctcatccaggaggagaaggagagcacagagctgcgggcagaggagattgaaaatagagtggcctctgtgtccctggagggcctgaacctggcccgggtgcaccctggcaccagcatcacagcctctgtgacagccagcagcctggccagcagcagccccccatctggccacagcacccccaagctgacccccaggagccctgcccgggagatggacaggatgggcgtgatgaccctgcccagcgacctgaggaagcacaggaggaagattgctgtggtggaggaggatggaagagaggacaaggccaccatcaagtgtgagaccagccccccacccaccccccgggccctgaggatgacccacaccctgcccagcagctaccacaatgatgcccggagcagcctgtctgtgtccctggagcctgagagcctgggcctgggcagcgccaacagcagccaggacagcctgcacaaggcccccaagaagaagggcatcaagagcagcatcggccgcctgtttgggaagaaggagaaggcccggctgggccagctgcggggcttcatggagacagaggccgccgcccaggagagcctgggcctgggcaagctgggcacccaggccgagaaggaccggcggctgaagaagaagcatgagctgctggaggaggcccggaggaagggcctgccctttgcccagtgggatggccccaccgtggtggcctggctggagctgtggctgggcatgcctgcctggtacgtggccgcctgccgggccaacgtgaagagcggggccatcatgtctgccctgagtgacacagagatccagcgggagatcggcatcagcaaccccctgcaccggctgaagctgcggctggccatccaggagatggtgtccctgaccagccccagcgccccacccaccagcaggacccccagcggaaatgtgtgggtgacccatgaggagatggagaacctggccgccccagccaagaccaaggagagcgaggagggctcctgggcccagtgccctgtgttcctgcagaccctggcctatggagacatgaaccacgagtggattggaaatgagtggctgcccagcctgggcctgccccagtaccgcagctacttcatggagtgcctggtggatgccaggatgctggaccacctgaccaagaaggacctgcgggtgcacctgaagatggtggacagcttccacaggaccagcctgcagtatggcatcatgtgcctgaagaggctgaactatgacaggaaggagctggagaggagaagagaggccagccagcacgagatcaaggatgtgctggtgtggagcaatgacagagtcatccgctggatccaggccatcggcctgcgggagtatgccaacaacatcctggagagcggcgtgcacggcagcctcatcgccctggatgagaactttgactacagcagcctggccctgctgctgcagatccccacccagaacacccaggccaatgcccggcagatcctggagcgggagtacaacaacctgctggccctgggcacagagcggcggctggatgaaagtgatgacaagaacttcagaagaggcagcacctggaggcggcagtttcctccccgggaggtgcacggcatctccatgatgcctggcagcagcgagaccctgcctgctggcttccggctgaccaccaccagcggccagagcaggaagatgaccacagatgatggagtcttctctgtgtacagcacctag

SEQ ID NO: 83581 - DNA, 3633 bp, Artificial Sequence
  derived and/or modified sequence
atgatgtgcgaggtgatgcccaccatcaacgaggacacccccatgtcacagaggggcagccaatctagcggtagtgacagtgattctcactttgaacagctcatggtgaacatgctagacgagcgtgatcgcctgctcgacaccctgcgtgaaacgcaggagtccctatctctcgcacagcagaggctccaggatgtcatctacgaccgggattccctgcaaaggcaactcaactccgccctgccccaggacatcgagagtctgaccggcgggcttgccgggagtaagggcgccgatccccccgaattcgccgctctgacgaaagagctaaacgcttgtcgcgagcagttgctcgagaaggaggaagagataagtgagctgaaggccgagagaaataacactaggcttctgctagagcaccttgaatgtctggtgagcaggcacgagcggagtctgcgaatgacagtggtcaagcgccaggcccaatcaccctccggagtttctagtgaggttgaagtcctgaaggcacttaaaagcttattcgaacaccataaagcattagacgaaaaagtccgagaaagactgcgggttagccttgagcgagtgagcgcgctagaagaagagcttgcggcagccaaccaagagattgtggctcttcgcgagcagaacgtgcatattcagcgcaagatggcctctagcgaaggaagcactgagtccgaacacctggaaggcatggaacctggacagaaagttcacgagaagaggctgtctaatggcagcatcgatagcactgacgagacttctcagattgttgagctgcaggaattgctggaaaagcagaattacgagatggctcagatgaaggagagactcgctgcactctctagccgggtgggagaggtagagcaagaggctgagactgcgcgaaaagacctgattaagaccgaggaaatgaatacgaagtaccagcgtgacattcgggaggctatggcccagaaagaggatatggaggagcgaattacaacactcgagaagagatacttgtcggcacagcgagaatccacatccatccacgacatgaacgacaaattggagaacgagttggcgaacaaagaggccatcttaagacaaatggaggagaaaaacaggcaactgcaagagaggttagagctggccgagcagaagctccagcaaacaatgcggaaggctgaaaccctcccggaggtagaggcggagttggctcaacggatcgcggctctcactaaagccgaagaaagacacggcaatatcgaggagagaatgcgccacctcgaagggcagttagaggagaagaatcaggaattgcagcgagcccggcagagagaaaagatgaatgaagaacacaataaaaggttgtctgatacagtggatcgcctgctgacagagtctaacgagagactgcagcttcatctcaaagaaagaatggccgcactggaggagaagaacgtgctgatacaggagtcggaaacttttcgcaaaaatctggaggaaagtctgcatgataaggagagactggcagaggagattgaaaaactgcggtctgagctggatcaactgaagatgagaactggtagccttatcgagccgacaatccctaggacacatctggatacttcagcagagctgagatatagtgtggggtctcttgtcgacagtcagtctgactaccgaacaaccaaggtgataagaaggccccgtaggggcagaatgggcgtcaggcgagacgaacccaaagtaaagagccttggcgaccacgagtggaataggacacaacagataggagttctttctagccaccctttcgagagtgatactgaaatgtctgacatagatgatgatgacagggaaacgattttcagcagtatggatttgctgtctcccagtggccactctgacgctcagacactggccatgatgctgcaggaacagctggacgcaatcaacaaagaaatccgcctgattcaggaggagaaagagtctaccgaattgcgtgcagaggagatcgaaaatcgcgttgcgtctgtgagcctggaagggctcaacttggcccgcgtccaccccggcaccagcatcaccgcatctgtcacggcctcctcgctagcctcttcaagtccaccatctgggcatagcacacccaagttgacccctaggagcccggcccgggagatggacaggatgggagttatgactctgccgtctgacttacgtaagcaccggcggaagatcgctgtggttgaggaggatggcagagaggataaggctactatcaagtgtgagacgtctcccccacccacacctcgagctcttaggatgactcatactctgccaagtagttatcacaatgatgccagaagtagcctcagcgtgtcattggagcccgagtctctgggattggggtcagcaaacagctcgcaggattcgctccataaggctcccaagaaaaagggcatcaaaagcagtatcggtaggcttttcggcaaaaaagagaaggcaaggctgggacagctgagaggctttatggagaccgaagctgcagcccaagaaagcttgggcctagggaagctaggaacgcaggctgaaaaggaccgtcgcttaaagaaaaaacatgagctactggaggaggctagaaggaagggactgcccttcgctcagtgggacggacctacagttgttgcttggctggagctctggttaggcatgccagcatggtatgtggccgcctgtcgagcaaacgtgaagtccggggctatcatgtctgcgctgtccgacaccgagattcagcgggagattggaatttcgaaccccttacatagactgaagctgagactggccattcaggaaatggtgtccctgaccagccccagcgcaccacccacctcccgtactccatctgggaatgtgtgggtcacacatgaggagatggagaacctcgctgcccccgcaaagacaaaggagagcgaggagggctcatgggcccagtgtccagtattcctgcagaccttagcatatggagacatgaaccacgagtggatcggtaacgaatggttaccaagtctgggccttccgcaatacaggtcctactttatggagtgcctcgtggatgcacgaatgctggatcacctgacaaagaaggatttacgcgtgcatctgaagatggtagatagcttccatagaacctccttgcagtacggcattatgtgcctgaagagactcaactacgacaggaaagagttggagcggcggagagaagctagccagcacgagattaaggacgtgctggtttggtccaatgacagagtcatccgatggatccaggcaatcggactcagggagtacgccaacaatatcctcgagtccggggtgcacggctcacttatagccctcgatgagaactttgactattcaagcctggcactgctactgcagatccccacacaaaacactcaagcctctcgcttcctgaaagagaacacgattactagctggccttgggagcttaagggagactggatgaaagtcatgacaagaaccagcgacgtagatcagccaggcgaaggaagctttctccttgtgaagtatatggagtccgcttag

SEQ ID NO: 83582 - DNA, 3783 bp, Artificial Sequence
  derived and/or modified sequence
cggagcaaggaccccaagagccagaccctggccatgatgtgcgaggtgatgcctaccattaatgaggatacgcctatgagccagaggggtagccagagctctggcagtgatagcgactcacacttcgaacaactgatggtgaatatgctggacgaacgagaccgtttgcttgatacactgagagagacgcaggagtctctgtctttagcccaacagcggttacaggacgtgatctatgaccgagacagcttgcagagacaactaaacagtgctctcccccaggacatcgaaagcctgacaggcgggctagcgggctctaaaggagccgacccgcctgaattcgccgccctgaccaaggaacttaatgcttgtagggaacagctgctggagaaggaagaggagatcagcgagctgaaagccgagcgcaataatacacggctgctgctagaacacctcgagtgtctggtatcacgacatgaacggtctctgagaatgactgtggtgaagcgtcaggctcaaagtccttccggcgtgagttcggaggtcgaagtgttgaaggctctcaagagcctttttgagcaccataaggccctggatgaaaaggttagggagcggctgagggtatcacttgaaagagtgtccgcgctggaagaagagctcgccgccgccaaccaagagatcgtggcccttagagaacaaaacgttcacatccaaaggaagatggcctccagcgagggcagtacagagtccgagcatctggagggtatggagccaggacaaaaagtgcatgaaaagcggctcagcaatgggagcatcgacagcaccgatgagacctcacaaattgtggagctccaggaactcctcgaaaaacagaattatgaaatggcacagatgaaagagaggctcgccgcactctcgtccagagtcggcgaggtggagcaggaagccgagaccgcgaggaaggacctgatcaagacggaagagatgaatacaaaatatcagagggacattagggaggccatggcgcagaaggaggacatggaggaacggataactactcttgaaaagcggtacctgtcagcccaacgggagagcacttctattcatgacatgaacgataagttagagaacgaactcgctaataaggaggccatcctgaggcaaatggaggaaaaaaatagacaactgcaggaacgtcttgaactcgcagaacagaagctgcagcagacaatgcgtaaagcagagaccctacccgaggtggaggctgagttagcccaacgcatagccgccttgacaaaggcagaggagcgacatgggaatatcgaagagcgaatgagacacttggaggggcagttagaagaaaaaaatcaggaactacaacgagcaaggcaaagggagaagatgaacgaggaacataacaaaagactttcagacacggtggaccggctgctaacagaatctaatgagcgcctgcagcttcatttaaaggagcgtatggcagctttggaagaaaaaaatgtgctcatccaagagagcgagactttccgcaaaaacttggaggagtccctccacgacaaggaacgactggcagaggagatagaaaagctccgctccgagctggatcagctgaaaatgcgtaccggatcgctaatcgagccaactattccacgaacacatttggacacatcagctgagctacggtactccgtcgggtcattagttgattcccagagtgactatcgaacgacaaaagtgatccggcggcccaggaggggacggatgggggtgcgccgtgatgagcctaaggttaagagccttggagaccacgaatggaatcgcacgcagcagattggagtcctcagctcccacccattcgagtctgacacagaaatgtccgatattgacgatgatgaccgcgaaaccatcttcagctccatggacctgttatccccatctggtcattccgacgctcagacgctggctatgatgctacaagagcagttggatgccattaataaggaaataagattaatccaggaagagaaggagtcgacagagctgcgagccgaggagattgagaacagggtagcctcagtgtcactggaggggctcaatctcgcacgtgtgcacccaggaacatctatcaccgcttccgtcacagccagctcattggcttcatccagccccccaagtggtcattcaactcctaagctcacacctcgctcaccagcccgagaaatggatcggatgggcgtaatgacactaccatcagatctgagaaaacatcggcgaaagatcgccgtagtcgaggaggatgggcgcgaggataaggcaacgattaagtgtgagaccagcccgccaccaactccaagagcgctgagaatgacccacacactgccctcatcctatcataatgatgctagatcttctctgtcagtcagtttggaacccgagtccctcggactcggatctgcgaactccagccaagatagtctacacaaagcaccaaagaagaagggaataaagtctagtatcggaaggttgtttggaaagaaggaaaaggccagactgggccaactccgtggattcatggagacagaagccgcggcacaagaaagtcttggtctggggaagctggggactcaggcggaaaaagatcgaagattaaagaagaagcacgaactgctggaagaggctaggaggaagggcctgccctttgcacagtgggatggacccaccgtggtggcatggctggagctgtggttggggatgcccgcctggtatgtggcagcttgtcgcgctaacgtgaagtctggcgctattatgtccgctctctccgacaccgagattcagagggagatcggcatctctaatccccttcataggctgaagttgcggctagcaattcaagagatggtgtcattgacctctccgagcgctccacccacctcccggacccccagtggtaacgtttgggtaactcacgaggaaatggagaacttggccgctccagcaaagacaaaagagtctgaagaggggtcctgggcacaatgccctgtgttcctgcagaccttggcctacggagatatgaaccacgagtggatcggcaacgagtggttaccaagccttggtctgccccagtatcgctcttatttcatggagtgcctcgtggacgccagaatgttggatcatctgactaagaaggatctgagagtccacttaaaaatggtggactccttccacagaacctccttgcagtacggtatcatgtgcctgaaacgcttgaattacgatcgcaaagagctcgagcgacgcagggaagctagtcaacacgaaataaaagacgttctcgtgtggtcaaatgatagagtgatccgttggattcaggccattggacttcgtgagtacgccaacaacatccttgagtccggggtacacggcagtctgattgcgctggacgagaatttcgattactcaagcctggcactcctgcttcagattcctactcagaacacccaagctaacgctcgtcagattctggagagggagtataataatttgttggcactgggcaccgagcgccggctggatgagagcgatgataaaaatttcagacgaggatctacttggcgccgccagttccctcctagggaggtccatggcataagtatgatgccggggtcgtccgagacgctgccggcaggttttcggctgacgacaactagcggccagtcccgtaaaatgaccacagacgacggggttttttcagtgtactcaacatag

SEQ ID NO: 83583 - DNA, 5512 bp, Artificial Sequence
  derived and/or modified sequence
tccgccccggggctccagctgcacgcggggagctgcggctgttctggcaaaggggccgcggctgctttaagagccgcctccccctctcctcctttgacaatggtctgaaccgagctttgcttcccaaagcaaaatttgtaatatgccatttttccgatggacgcttctccttttggctgctgacggagccacgggaagatgccgagctcctgccacgccaccgggccggggcacgttccgggagggcgccggggcacgcgtgtgtctgagctgcctttctcctcccgttgctagggaaatggtccaggagtgctgggtgtgagcctcccttctcctcaagccggagactgcggttgtcattgatcaattgaagaagcaaggacccgaaatcacagacattagcaatgatgtgtgaagtgatgcccacgattaatgaggacaccccaatgagccaaagggggtcccaaagcagtggctcggactcagactcccattttgagcagctgatggtgaatatgctagatgaaagggatcgtcttctagacacccttcgggagacccaggaaagcctctcacttgcccagcaaagacttcaggatgtcatctatgaccgagactcactccagagacagctcaattcagccctgccacaggatatcgaatccctaacaggagggctggctggttctaagggggctgatccaccggaatttgctgcactgacaaaagaattaaatgcctgcagggaacaacttctagaaaaggaagaagaaatctctgaacttaaagctgaaagaaacaacacaagactattactggagcatttggagtgccttgtgtcacgacatgaaagatcactaagaatgacggtggtaaaacggcaagcccagtctccctcaggagtatccagtgaagttgaagttctcaaggcactgaaatctttgtttgagcaccacaaggccttggatgaaaaggtaagggagcgactgagggtttctttagaaagagtctctgcactggaagaagaactagctgctgctaatcaggagattgttgccttgcgtgaacaaaatgttcatatacaaagaaaaatggcatcaagcgagggatccacagagtcagaacatcttgaagggatggaacctggacagaaagtccatgagaagcgtttgtccaatggttctatagactcaaccgatgaaactagtcaaatagttgaactacaagaattgcttgaaaagcaaaactatgaaatggcccagatgaaagaacgtttagcagccctttcttcccgagtgggagaggtggaacaggaagcagagacagcaagaaaggatctcattaaaacagaagaaatgaacaccaagtatcaaagggacattagggaggccatggcacaaaaggaagatatggaagaaagaattacaacccttgaaaagcgttacctcagtgctcagagagaatctacctccatacatgacatgaatgataaactagaaaatgagttagcaaataaagaagctatcctgcggcagatggaagagaaaaacagacagttacaagaacgtcttgagctagctgaacaaaagttgcagcagaccatgagaaaggctgaaaccttgcctgaagtagaggctgaactggctcagagaattgcagccctaaccaaggctgaagagagacatggaaatattgaagaacgtatgagacatttagagggtcaacttgaagagaagaatcaagaacttcaaagagctaggcaaagagagaaaatgaatgaggagcataacaagagattatcggatacggttgatagacttctgactgaatccaatgaacgcctacaactacacttaaaggaaagaatggctgctctagaagaaaagaatgttttaattcaagaatcagaaactttcagaaagaatcttgaagaatctttacatgataaggaaagattagcagaagaaattgaaaagctgagatctgaacttgaccaattgaaaatgagaactggctctttaattgaacccacaataccaagaactcatctagacacctcagctgagttgcggtactcagtgggatccctagtggacagccagtctgattacagaacaactaaagtaataagaagaccaaggagaggccgcatgggtgtgcgaagagatgagccaaaggtgaaatctcttggggatcacgagtggaatagaactcaacagattggagtactaagcagccacccttttgaaagtgacactgaaatgtctgatattgatgatgatgacagagaaacaatttttagctcaatggatcttctctctccaagtggtcattccgatgcccagacgctagccatgatgcttcaggaacaattggatgccatcaacaaagaaatcaggctaattcaggaagaaaaagaatctacagagttgcgtgctgaagaaattgaaaatagagtggctagtgtgagcctcgaaggcctgaatttggcaagggtccacccaggtacctccattactgcctctgttacagcttcatcgctggccagttcatctccccccagtggacactcaactccaaagctcacccctcgaagccctgccagggaaatggatcggatgggagtcatgacactgccaagtgatctgaggaaacatcggagaaagattgcagttgtggaagaagatggtcgagaggacaaagcaacaattaaatgtgaaacttctcctcctcctacccctagagccctcagaatgactcacactctcccttcttcctaccacaatgatgctcgaagtagtttatctgtctctcttgagccagaaagcctcgggcttggtagtgccaacagcagccaagactctcttcacaaagcccccaagaagaaaggaatcaagtcttcaataggacgtttgtttggtaaaaaagaaaaagctcgacttgggcagctccgaggctttatggagactgaagctgcagctcaggagtccctggggttaggcaaactcggaactcaagctgagaaggatcgaagactaaagaaaaagcatgaacttcttgaagaagctcggagaaagggattaccttttgcccagtgggatgggccaactgtggtcgcatggctagagctttggttgggaatgcctgcgtggtacgtggcagcctgccgagccaacgtgaagagtggtgccatcatgtctgctttatctgacactgagatccagagagaaattggaatcagcaatccactgcatcgcttaaaacttcgattagcaatccaggagatggtttccctaacaagtccttcagctcctccaacatctcgaactccttcaggcaacgtttgggtgactcatgaagaaatggaaaatcttgcagctccagcaaaaacgaaagaatctgaggaaggaagctgggcccagtgtccggtttttctacagaccctggcttatggagatatgaatcatgagtggattggaaatgaatggcttcccagcttggggttacctcagtacagaagttactttatggaatgcttggtagatgcaagaatgttagatcacctaacaaaaaaagatctccgtgtccatttaaaaatggtggatagtttccatcgaacaagtttacaatatggaattatgtgcttaaagaggttgaattatgacagaaaagaactagaaagaagacgggaagcaagccaacatgaaataaaagacgtgttggtgtggagcaatgaccgagttattcgctggatacaagcaattggacttcgagaatatgcaaataatatacttgagagcggtgtgcatggctcacttatagccctggatgaaaactttgactacagcagcttagctttattattacagattccaacacagaacacccaggcaagcagattcttgaaagagaatacaataacctcttggccctgggaactgaaaggcgactggatgaaagtgatgacaagaacttcagacgtggatcaacctggagaaggcagtttcctcctcgtgaagtacatggaatcagcatgatgcctgggtcctcagaaacattaccagctggatttaggttaaccacaacctctgggcagtcaagaaaaatgacaacagatgatggcgtcttttcagtctactctacctaaagtgcactaccatctaagaagacgagcagtgaaaacctttgtgaaaactgaattctaaggaaataatgacgtcatgacttattaaaagctgaaaaatgtgatttttggggggagtcagatattacatttgattagtttactacaaattgtaataaaatgcttaagtcatttgaataataaacatcatctacatcataaactctgtacaacagatgcttttatgaaatgaagccagttgtttttcatgttttattgtaatatactaggcatttatgtattaccgtgcatttctttttaaatgtgtaagtcttatgtaaatggatataaatatgattttttaaaaaataaaatatatggttcatggagtctcgagtgcaaacatttgacaattccaagtactgtttgtattttaccattccaccatttttacagtttttggattgttaatagtcaaatcaatatgtttccttgaagcatgtttcatgcttcaacgtgtttctccttcaagtctgtcaatacttaaagctgaacaacctgcctctgatcatgtaaaaaagaatgatttaacctggaaccggagccaaaaatagagctttaaaggcaatcagggatgtcctatatctttagaaatagcactgtgatggcttgatctccttttcaatacaaaacaaagccaagctgtttacaagggtcaaaagcaattatttaaaaatttatattaaaaaaccataatcttctcttgttacctgtggaccaagaaaaaaaaaaagataaaaaaacttctttactaagaaccacatgttcattcaaatatcttgaaatgccagccagtactggacagtgaatgtcaaccaccgcagagtctgaggctcatttccactagagaaaacgaaacccaagatacctttcccttttgtcaatgtaacagggcattagccagactcatgtctaatgttataagcttttagccgagatggccttgttgcgacttccctgaagtcagttttatcagaggaaataaatgaaagacagaatgattaacatatatagtgtataaaagtatagaagagtaatctcttccctgtggctttatttggtggtgttactgttgtttattctttgtttatatgggagattcaaagtaaagcctatttaataataccatttatctaactgctgattttctgctgcttgatcttattaagcgcaagacctgtcattagtaatttcttttctgtattttaatttgctatgtttgcacgtacattacatttgttttgatgtctatttttatttaacagattcagtcaaaaggtaatgataacagaaaccctttccattgtcaataaaaaaaataataattcc

SEQ ID NO: 83584 - DNA, 3783 bp, Artificial Sequence
  derived and/or modified sequence
agaagcaaggacccgaaatcacagacattagcaatgatgtgtgaagtgatgcccacgattaatgaggacaccccaatgagccaaagggggtcccaaagcagtggctcggactcagactcccattttgagcagctgatggtgaatatgctagatgaaagggatcgtcttctagacacccttcgggagacccaggaaagcctctcacttgcccagcaaagacttcaggatgtcatctatgaccgagactcactccagagacagctcaattcagccctgccacaggatatcgaatccctaacaggagggctggctggttctaagggggctgatccaccggaatttgctgcactgacaaaagaattaaatgcctgcagggaacaacttctagaaaaggaagaagaaatctctgaacttaaagctgaaagaaacaacacaagactattactggagcatttggagtgccttgtgtcacgacatgaaagatcactaagaatgacggtggtaaaacggcaagcccagtctccctcaggagtatccagtgaagttgaagttctcaaggcactgaaatctttgtttgagcaccacaaggccttggatgaaaaggtaagggagcgactgagggtttctttagaaagagtctctgcactggaagaagaactagctgctgctaatcaggagattgttgccttgcgtgaacaaaatgttcatatacaaagaaaaatggcatcaagcgagggatccacagagtcagaacatcttgaagggatggaacctggacagaaagtccatgagaagcgtttgtccaatggttctatagactcaaccgatgaaactagtcaaatagttgaactacaagaattgcttgaaaagcaaaactatgaaatggcccagatgaaagaacgtttagcagccctttcttcccgagtgggagaggtggaacaggaagcagagacagcaagaaaggatctcattaaaacagaagaaatgaacaccaagtatcaaagggacattagggaggccatggcacaaaaggaagatatggaagaaagaattacaacccttgaaaagcgttacctcagtgctcagagagaatctacctccatacatgacatgaatgataaactagaaaatgagttagcaaataaagaagctatcctgcggcagatggaagagaaaaacagacagttacaagaacgtcttgagctagctgaacaaaagttgcagcagaccatgagaaaggctgaaaccttgcctgaagtagaggctgaactggctcagagaattgcagccctaaccaaggctgaagagagacatggaaatattgaagaacgtatgagacatttagagggtcaacttgaagagaagaatcaagaacttcaaagagctaggcaaagagagaaaatgaatgaggagcataacaagagattatcggatacggttgatagacttctgactgaatccaatgaacgcctacaactacacttaaaggaaagaatggctgctctagaagaaaagaatgttttaattcaagaatcagaaactttcagaaagaatcttgaagaatctttacatgataaggaaagattagcagaagaaattgaaaagctgagatctgaacttgaccaattgaaaatgagaactggctctttaattgaacccacaataccaagaactcatctagacacctcagctgagttgcggtactcagtgggatccctagtggacagccagtctgattacagaacaactaaagtaataagaagaccaaggagaggccgcatgggtgtgcgaagagatgagccaaaggtgaaatctcttggggatcacgagtggaatagaactcaacagattggagtactaagcagccacccttttgaaagtgacactgaaatgtctgatattgatgatgatgacagagaaacaatttttagctcaatggatcttctctctccaagtggtcattccgatgcccagacgctagccatgatgcttcaggaacaattggatgccatcaacaaagaaatcaggctaattcaggaagaaaaagaatctacagagttgcgtgctgaagaaattgaaaatagagtggctagtgtgagcctcgaaggcctgaatttggcaagggtccacccaggtacctccattactgcctctgttacagcttcatcgctggccagttcatctccccccagtggacactcaactccaaagctcacccctcgaagccctgccagggaaatggatcggatgggagtcatgacactgccaagtgatctgaggaaacatcggagaaagattgcagttgtggaagaagatggtcgagaggacaaagcaacaattaaatgtgaaacttctcctcctcctacccctagagccctcagaatgactcacactctcccttcttcctaccacaatgatgctcgaagtagtttatctgtctctcttgagccagaaagcctcgggcttggtagtgccaacagcagccaagactctcttcacaaagcccccaagaagaaaggaatcaagtcttcaataggacgtttgtttggtaaaaaagaaaaagctcgacttgggcagctccgaggctttatggagactgaagctgcagctcaggagtccctggggttaggcaaactcggaactcaagctgagaaggatcgaagactaaagaaaaagcatgaacttcttgaagaagctcggagaaagggattaccttttgcccagtgggatgggccaactgtggtcgcatggctagagctttggttgggaatgcctgcgtggtacgtggcagcctgccgagccaacgtgaagagtggtgccatcatgtctgctttatctgacactgagatccagagagaaattggaatcagcaatccactgcatcgcttaaaacttcgattagcaatccaggagatggtttccctaacaagtccttcagctcctccaacatctcgaactccttcaggcaacgtttgggtgactcatgaagaaatggaaaatcttgcagctccagcaaaaacgaaagaatctgaggaaggaagctgggcccagtgtccggtttttctacagaccctggcttatggagatatgaatcatgagtggattggaaatgaatggcttcccagcttggggttacctcagtacagaagttactttatggaatgcttggtagatgcaagaatgttagatcacctaacaaaaaaagatctccgtgtccatttaaaaatggtggatagtttccatcgaacaagtttacaatatggaattatgtgcttaaagaggttgaattatgacagaaaagaactagaaagaagacgggaagcaagccaacatgaaataaaagacgtgttggtgtggagcaatgaccgagttattcgctggatacaagcaattggacttcgagaatatgcaaataatatacttgagagcggtgtgcatggctcacttatagccctggatgaaaactttgactacagcagcttagctttattattacagattccaacacagaacacccaggcaaatgcaaggcagattcttgaaagagaatacaataacctcttggccctgggaactgaaaggcgactggatgaaagtgatgacaagaacttcagacgtggatcaacctggagaaggcagtttcctcctcgtgaagtacatggaatcagcatgatgcctgggtcctcagaaacattaccagctggatttaggttaaccacaacctctgggcagtcaagaaaaatgacaacagatgatggcgtcttttcagtctactctacctaa

SEQ ID NO: 83585 - DNA, 3633 bp, Artificial Sequence
  derived and/or modified sequence
atgatgtgcgaggtgatgccgacaatcaacgaggatacccccatgagccagagaggcagccaatcatcaggctctgacagtgatagtcattttgaacagttaatggttaacatgcttgacgagcgcgatcgactgctagacactctacgggagacccaggagtctctcagcttggcacagcagcgccttcaggacgtgatctatgacagagattctctgcagagacagttaaattccgcattgccccaagatattgaaagtctcaccggcggtctggctgggtccaaaggggctgacccacctgagttcgccgctctgactaaggagttgaatgcctgtagagagcagttactggagaaggaagaggagatttccgagcttaaggccgaaagaaataacactcgccttctgctggagcacctggaatgtctggtgtcccgccatgaacgttcccttcgaatgaccgtggtgaagagacaggcccagtcaccgagtggtgtgagttcggaggtggaagtactaaaggccctcaagtctctctttgaacatcacaaggctctggatgaaaaggtacgggagaggctgcgggtgagcttggagcgcgtaagtgccttggaggaggaactcgccgcagcaaaccaagagattgttgccttgcgggaacaaaacgtccacattcagcgcaaaatggccagctccgagggttccacggaatctgaacacttagaaggaatggaaccaggccaaaaagtccatgagaaaagattatctaacggttccatagatagtaccgacgaaacttcgcaaatcgtcgagcttcaagagctactcgaaaagcagaattatgaaatggcccagatgaaagagcgcttagctgccctgtcttctagggttggcgaggttgaacaggaggccgagacagctcgcaaggatctgatcaaaaccgaggaaatgaatacaaagtatcagcgtgacattcgggaggccatggcccagaaggaagacatggaggaaagaatcaccaccctggagaagcgttatctgtctgcacagcgcgaaagcactagcattcacgatatgaatgataagctcgagaacgaactagccaacaaagaggcaatactcagacagatggaagagaaaaatcgacagttacaagagagattggaattagcggagcaaaaactgcagcagactatgcggaaggcagaaacccttccagaagtggaagccgagctggctcagcgaatcgccgctcttaccaaagcagaagaacgccatggaaatattgaggagaggatgagacatttggagggtcagcttgaggagaagaaccaagaattacaacgggctcgccagagagaaaagatgaatgaagagcacaataaacgtttgtctgacaccgttgataggttgctcacagaatcaaacgagcggctccagctccatcttaaggagaggatggctgccctcgaggagaagaacgtgctgatacaggaaagtgaaactttcagaaagaacctcgaggagtcccttcacgataaagagaggctggccgaggagattgagaaactgaggtcggaactggatcagctgaagatgagaaccggcagcctaattgaaccaaccatccctcgcacacacctggataccagcgccgagttgcggtacagcgtgggaagcctggtggactctcagtcggattataggactactaaggtgattcgtaggccaagaaggggccgtatgggcgtgcgaagggacgagcccaaagtgaagagcttaggcgaccacgaatggaatcggacacagcagataggcgtactgtcctctcacccatttgagagtgacacagaaatgtcagatatcgatgacgatgaccgcgagactatcttctctagtatggatctgctctcaccttctggacactcagacgcccagactttggcaatgatgcttcaagaacaactggacgctatcaacaaagagattcggctcatacaggaggagaaggaatctacagagctgagggccgaagagatcgaaaatagggttgcctccgtgtcgctcgaaggcttaaatctagctcgtgtccatccaggcacaagtatcactgcatcggttactgcaagtagcctggcctcctccagccctccaagcggacactcgactcctaaactgacccccagatcacccgcacgggagatggatagaatgggcgtaatgacgctcccttccgatctcaggaagcataggcggaaaatcgccgtggttgaggaagatgggagggaggacaaagcaacaataaagtgtgagacatctccgcctccaacacccagggcgcttaggatgacccacacgctaccgagctcctaccacaacgatgccaggtccagcttgagtgtgtctttagaacctgagagccttggtttgggctctgccaactcgtcccaagatagcctccacaaggcaccaaaaaaaaagggtatcaaaagcagcattggtcggctgtttggaaagaaggaaaaagccaggctgggccagctcagaggattcatggaaacagaggccgctgcacaggagagcctaggcctcggaaagctgggaactcaggccgagaaagacaggaggttgaagaaaaaacatgagctcctggaggaggccagacgaaaaggccttccttttgcacagtgggatggcccaacagttgtggcatggttggaactctggctcgggatgccggcttggtacgtggcagcatgccgggctaatgtgaagtctggggctataatgagtgcgctcagcgatacggaaatccagcgggaaataggaatcagtaatcctctccaccgcctgaaactgaggctggctatccaggaaatggtttctctcacttctccatctgcccctcctacttcccgcaccccaagcggaaacgtgtgggtgacacacgaggagatggaaaatctagcagctcctgccaagactaaagaatccgaggagggttcctgggcccagtgtccagtcttccttcaaaccctggcgtacggcgatatgaatcacgagtggatcgggaatgagtggctgcccagccttggactaccccagtaccgatcctatttcatggagtgccttgtggacgcgagaatgctggatcatctcactaaaaaagacctgcgggtccatctcaaaatggtggattccttccatcgcacatcgctgcagtacggaattatgtgtctgaagagactgaactacgaccgcaaggagctggagaggcgcagggaagcctcccagcacgaaatcaaagatgttctggtctggtctaatgacagggtaatcaggtggattcaggcaatcgggctccgagaatatgcaaacaacatcctggaaagtggagtccacggatccctgatcgccttggatgaaaactttgattactcgtctttggccctcctcctccagatccctacgcagaatactcaagcgagtagatttctcaaggagaacactataacttcctggccatgggaactaaaaggcgactggatgaaagtgatgacgagaacttcagacgttgatcagccaggagagggctcgttcctcttggtgaagtatatggagagtgcttag

SEQ ID NO: 83586 - DNA, 3783 bp, Artificial Sequence
  derived and/or modified sequence
cggagtaaggaccctaaaagccagactctggccatgatgtgcgaagtgatgcccacaataaacgaggacacacccatgtcccagaggggatctcagtcctccggaagcgactccgactctcacttcgagcagctgatggtcaatatgctggatgagagagataggctgctcgataccctgcgagagactcaggagagcctcagtctagcccagcagcgcctgcaggatgtgatctatgatcgagactctcttcaaagacagctgaacagtgcgctcccccaagacatcgagtccctaaccgggggtctcgcaggtagcaaaggagccgatcctcccgaatttgccgctctgacaaaggaactgaacgcctgtagggagcagctgttagaaaaggaggaagagataagcgagctgaaagctgagcgtaacaacactcgcctgttactggaacacctggagtgtttggtgtcgcgccacgagcggtccctgaggatgacagtggttaagcgacaagcacaaagtccatccggcgtgtcatctgaagtcgaagtgcttaaagcactcaagagtttgtttgagcaccacaaggccctggacgagaaggtgagagagcgacttcgggtgtcgttggaacgcgtctctgcgcttgaagaggaactagctgccgctaatcaggagattgtagctttaagggaacaaaacgtccatatacagagaaagatggcctcgtctgaagggagcaccgagtctgagcatcttgaggggatggaaccgggtcagaaggtacacgaaaagagattgagtaacggcagcatcgattctacggacgagacatcacaaatagtggaactacaggagttgctagagaaacagaattacgaaatggcgcagatgaaagagcgactggctgccctgtcctcgcgcgtgggggaagtggagcaggaagctgaaacagccaggaaggatcttattaagactgaggaaatgaacacgaaataccagagggacatacgcgaagctatggcacagaaagaggatatggaagaaagaatcactacgcttgagaagcggtacttgagcgctcagcgagaatcaacatccatacatgatatgaacgataagttagaaaacgagctggccaacaaggaagcgatcctgagacagatggaggagaaaaatagacagctccaggagcgtctggaactggccgagcagaagttgcagcagaccatgagaaaggccgagactctgcccgaggtcgaagcggaactcgcccagagaatcgcggctctaactaaggccgaagagagacatggaaatatcgaggagcggatgcgccatctcgaggggcagcttgaagaaaagaatcaggaactacagcgggctcgccaaagagaaaagatgaacgaagagcataacaagaggctctcagacactgtggaccgattgctgacagaatctaacgaacgccttcagttgcacctgaaggagaggatggctgctttggaagagaaaaacgtgctgatccaggaatcagagacgttccgcaagaacctagaggagtcactgcacgacaaagaacggctcgctgaggagatcgaaaagctgcgtagtgagctcgaccagctcaagatgaggactggatcccttattgaacccacaatcccacggacccacctggatacttctgccgagctccggtatagtgttggaagcctggtcgactcacaaagcgactaccggaccacaaaggttattaggaggccccgacgaggcagaatgggtgtgaggcgtgatgaacctaaagtgaagagcctgggcgatcatgagtggaaccgcacacagcagataggggtgttatcctctcatcctttcgaaagcgataccgagatgtccgacattgatgatgacgaccgggaaacaatcttctcctctatggatctactcagccccagtggccattctgatgctcagacactagccatgatgttgcaggagcagctcgacgccatcaataaagaaattcggctcatccaggaggagaaagagtcgactgaactccgcgcagaggagatcgagaacagagtcgccagtgtatcgcttgaggggctgaaccttgcccgagtccacccaggtacaagcataacagccagtgtgactgcctcctccctcgcgagtagtagcccaccatccggccactccacacccaagctcaccccacggagtccagctagagagatggatcgtatgggagtgatgacactcccttcagaccttcggaagcatagacgaaaaatcgctgtggtcgaagaagatgggcgagaagacaaggctacaatcaaatgtgagacatcacctcctcccacaccccgtgccctgcggatgactcatactctgcccagctcttaccataacgatgccaggtcatccctgtcagtgtcgctggagcctgaatctctcggcctcggcagcgcaaactccagtcaagactctttgcataaagccccaaaaaagaaaggcataaagtcctccatcggacggctgtttggtaagaaggaaaaagcgaggctgggacagctgcgtgggttcatggaaactgaggccgctgcacaagaatctctgggactcggcaagttgggcacacaagccgagaaagacagaaggctgaagaaaaaacacgagctgctggaagaagctaggcgtaaaggactcccttttgctcaatgggacggtcccactgtggttgcttggctggaactctggctcggcatgccggcatggtacgtcgccgcatgcagagctaacgtaaagtccggcgcaattatgtcggctctgagcgatacggagatccagagggaaatcggaatttccaatcccctgcatcgtctgaaactgcgtctggcaattcaagagatggtcagtctaacatcccccagtgcacccccaaccagtagaactccctctggcaatgtgtgggtcacccatgaagaaatggaaaatctcgccgctccagctaagactaaggaaagcgaagagggcagttgggcccagtgccctgtgtttctgcaaacgcttgcctatggagacatgaaccacgagtggatcggcaatgagtggctgccgagcttaggtctccctcaatatagaagctattttatggagtgccttgtcgacgcaaggatgctggaccacctgactaaaaaggacctgagggtccatctgaaaatggtggacagtttccatcgtacgagcctccagtacggtataatgtgtctgaaacggttgaactacgatcggaaggagctggaacgcaggcgagaagcatcccagcacgaaataaaggatgtcctggtctggtctaacgatagagtcattcgctggattcaagctattggcttgagagagtacgcaaacaacatattggagagcggagtgcatggtagcctcatcgctctcgatgagaactttgactactcctctctagccctgctgttgcagattccaacacagaatacacaggccaacgcccgtcaaatcctggagcgggagtataacaacctgttagcactgggcactgaacgccgtctggacgagtccgacgataaaaattttaggcgcggttctacgtggaggcggcagttccctccgagagaagtccatggtatatctatgatgcctggttcatcagaaaccctgcctgcaggttttcggctgacgacgacatcaggccaatcccgaaaaatgaccaccgatgatggggtgttctccgtttactccacatag

SEQ ID NO: 83587 - protein, 1232 aa, Artificial Sequence
  derived and/or modified sequence
MMCEVMPTINEDTPMSQRGSQSSGSDSDSHFEQLMVNMLDERDRLLDTLRETQESLSLAQQRLQDVIYDRDSLQRQLNSALPQEFAALTKELNACREQLLEKEEEISELKAERNNTRLLLEHLECLVSRHERSLRMTVVKRQAQSPSGVSSEVEVLKALKSLFEHHKALDEKVRERLRVSLERVSALEEELAAANQEIVALREQNVHIQRKMASSEGSTESEHLEGMEPGQKVHEKRLSNGSIDSTDETSQIVELQELLEKQNYEMAQMKERLAALSSRVGEVEQEAETARKDLIKTEEMNTKYQRDIREAMAQKEDMEERITTLEKRYLSAQRESTSIHDMNDKLENELANKEAILRQMEEKNRQLQERLELAEQKLQQTMRKAETLPEVEAELAQRIAALTKAEERHGNIEERMRHLEGQLEEKNQELQRARQREKMNEEHNKRLSDTVDRLLTESNERLQLHLKERMAALEEKNVLIQESETFRKNLEESLHDKERLAEEIEKLRSELDQLKMRTGSLIEPTIPRTHLDTSAELRYSVGSLVDSQSDYRTTKVIRRPRRGRMGVRRDEPKVKSLGDHEWNRTQQIGVLSSHPFESDTEMSDIDDDDRETIFSSMDLLSPSGHSDAQTLAMMLQEQLDAINKEIRLIQEEKESTELRAEEIENRVASVSLEGLNLARVHPGTSITASVTASSLASSSPPSGHSTPKLTPRSPAREMDRMGVMTLPSDLRKHRRKIAVVEEDGREDKATIKCETSPPPTPRALRMTHTLPSSYHNDARSSLSVSLEPESLGLGSANSSQDSLHKAPKKKGIKSSIGRLFGKKEKARLGQLRGFMETEAAAQESLGLGKLGTQAEKDRRLKKNTSGHELLEEARRKGLPFAQWDGPTVVAWLELWLGMPAWYVAACRANVKSGAIMSALSDTEIQREIGISNPLHRLKLRLAIQEMVSLTSPSAPPTSRTPSGNVWVTHEEMENLAAPAKTKESEEGSWAQCPVFLQTLAYGDMNHEWIGNEWLPSLGLPQYRSYFMECLVDARMLDHLTKKDLRVHLKMVDSFHRTSLQYGIMCLKRLNYDRKELERRREASQHEIKDVLVWSNDRVIRWIQAIGLREYANNILESGVHGSLIALDENFDYSSLALLLQIPTQNTQARQILEREYNNLLALGTERRLDESDDKNFRRGSTWRRQFPPREVHGISMMPGSSETLPAGFRLTTTSGQSRKMTTDDGVFSVYST

SEQ ID NO: 83588 - protein, 1235 aa, Artificial Sequence
  derived and/or modified sequence
MMCEVMPTINEDTPMSQRGSQSSGSDSDSHFEQLMVNMLDERDRLLDTLRETQESLSLAQQRLQDVIYDRDSLQRQLNSALPQEFAALTKELNACREQLLEKEEEISELKAERNNTRLLLEHLECLVSRHERSLRMTVVKRQAQSPSGVSSEVEVLKALKSLFEHHKALDEKVRERLRVSLERVSALEEELAAANQEIVALREQNVHIQRKMASSEGSTESEHLEGMEPGQKVHEKRLSNGSIDSTDETSQIVELQELLEKQNYEMAQMKERLAALSSRVGEVEQEAETARKDLIKTEEMNTKYQRDIREAMAQKEDMEERITTLEKRYLSAQRESTSIHDMNDKLENELANKEAILRQMEEKNRQLQERLELAEQKLQQTMRKAETLPEVEAELAQRIAALTKAEERHGNIEERMRHLEGQLEEKNQELQRARQREKMNEEHNKRLSDTVDRLLTESNERLQLHLKERMAALEEKNVLIQESETFRKNLEESLHDKERLAEEIEKLRSELDQLKMRTGSLIEPTIPRTHLDTSAELRYSVGSLVDSQSDYRTTKVIRRPRRGRMGVRRDEPKVKSLGDHEWNRTQQIGVLSSHPFESDTEMSDIDDDDRETIFSSMDLLSPSGHSDAQTLAMMLQEQLDAINKEIRLIQEEKESTELRAEEIENRVASVSLEGLNLARVHPGTSITASVTASSLASSSPPSGHSTPKLTPRSPAREMDRMGVMTLPSDLRKHRRKIAVVEEDGREDKATIKCETSPPPTPRALRMTHTLPSSYHNDARSSLSVSLEPESLGLGSANSSQDSLHKAPKKKGIKSSIGRLFGKKEKARLGQLRGFMETEAAAQESLGLGKLGTQAEKDRRLKKKVIRHELLEEARRKGLPFAQWDGPTVVAWLELWLGMPAWYVAACRANVKSGAIMSALSDTEIQREIGISNPLHRLKLRLAIQEMVSLTSPSAPPTSRTPSGNVWVTHEEMENLAAPAKTKESEEGSWAQCPVFLQTLAYGDMNHEWIGNEWLPSLGLPQYRSYFMECLVDARMLDHLTKKDLRVHLKMVDSFHRKKRTSLQYGIMCLKRLNYDRKELERRREASQHEIKDVLVWSNDRVIRWIQAIGLREYANNILESGVHGSLIALDENFDYSSLALLLQIPTQNTQARQILEREYNNLLALGTERRLDESDDKNFRRGSTWRRQFPPREVHGISMMPGSSETLPAGFRLTTTSGQSRKMTTDDGVFSVYST

SEQ ID NO: 83589 - DNA, 3699 bp, Artificial Sequence
  derived and/or modified sequence
atgatgtgcgaggtgatgcccaccatcaacgaggacacccccatgagccagagaggcagccagagcagcggcagcgacagcgacagccacttcgagcagctgatggtgaacatgctggacgagagagacagactgctggacaccctgagagagacccaggagagcctgagcctggcccagcagagactgcaggacgtgatctacgacagagacagcctgcagagacagctgaacagcgccctgccccaggagttcgccgccctgaccaaggagctgaacgcctgcagagagcagctgctggagaaggaggaggagatcagcgagctgaaggccgagagaaacaacaccagactgctgctggagcacctggagtgcctggtgagcagacacgagagaagcctgagaatgaccgtggtgaagagacaggcccagagccccagcggcgtgagcagcgaggtggaggtgctgaaggccctgaagagcctgttcgagcaccacaaggccctggacgagaaggtgagagagagactgagagtgagcctggagagagtgagcgccctggaggaggagctggccgccgccaaccaggagatcgtggccctgagagagcagaacgtgcacatccagagaaagatggccagcagcgagggcagcaccgagagcgagcacctggagggcatggagcccggccagaaggtgcacgagaagagactgagcaacggcagcatcgacagcaccgacgagaccagccagatcgtggagctgcaggagctgctggagaagcagaactacgagatggcccagatgaaggagagactggccgccctgagcagcagagtgggcgaggtggagcaggaggccgagaccgccagaaaggacctgatcaagaccgaggagatgaacaccaagtaccagagagacatcagagaggccatggcccagaaggaggacatggaggagagaatcaccaccctggagaagagatacctgagcgcccagagagagagcaccagcatccacgacatgaacgacaagctggagaacgagctggccaacaaggaggccatcctgagacagatggaggagaagaacagacagctgcaggagagactggagctggccgagcagaagctgcagcagaccatgagaaaggccgagaccctgcccgaggtggaggccgagctggcccagagaatcgccgccctgaccaaggccgaggagagacacggcaacatcgaggagagaatgagacacctggagggccagctggaggagaagaaccaggagctgcagagagccagacagagagagaagatgaacgaggagcacaacaagagactgagcgacaccgtggacagactgctgaccgagagcaacgagagactgcagctgcacctgaaggagagaatggccgccctggaggagaagaacgtgctgatccaggagagcgagaccttcagaaagaacctggaggagagcctgcacgacaaggagagactggccgaggagatcgagaagctgagaagcgagctggaccagctgaagatgagaaccggcagcctgatcgagcccaccatccccagaacccacctggacaccagcgccgagctgagatacagcgtgggcagcctggtggacagccagagcgactacagaaccaccaaggtgatcagaagacccagaagaggcagaatgggcgtgagaagagacgagcccaaggtgaagagcctgggcgaccacgagtggaacagaacccagcagatcggcgtgctgagcagccaccccttcgagagcgacaccgagatgagcgacatcgacgacgacgacagagagaccatcttcagcagcatggacctgctgagccccagcggccacagcgacgcccagaccctggccatgatgctgcaggagcagctggacgccatcaacaaggagatcagactgatccaggaggagaaggagagcaccgagctgagagccgaggagatcgagaacagagtggccagcgtgagcctggagggcctgaacctggccagagtgcaccccggcaccagcatcaccgccagcgtgaccgccagcagcctggccagcagcagcccccccagcggccacagcacccccaagctgacccccagaagccccgccagagagatggacagaatgggcgtgatgaccctgcccagcgacctgagaaagcacagaagaaagatcgccgtggtggaggaggacggcagagaggacaaggccaccatcaagtgcgagaccagccccccccccacccccagagccctgagaatgacccacaccctgcccagcagctaccacaacgacgccagaagcagcctgagcgtgagcctggagcccgagagcctgggcctgggcagcgccaacagcagccaggacagcctgcacaaggcccccaagaagaagggcatcaagagcagcatcggcagactgttcggcaagaaggagaaggccagactgggccagctgagaggcttcatggagaccgaggccgccgcccaggagagcctgggcctgggcaagctgggcacccaggccgagaaggacagaagactgaagaagaacaccagcggccacgagctgctggaggaggccagaagaaagggcctgcccttcgcccagtgggacggccccaccgtggtggcctggctggagctgtggctgggcatgcccgcctggtacgtggccgcctgcagagccaacgtgaagagcggcgccatcatgagcgccctgagcgacaccgagatccagagagagatcggcatcagcaaccccctgcacagactgaagctgagactggccatccaggagatggtgagcctgaccagccccagcgccccccccaccagcagaacccccagcggcaacgtgtgggtgacccacgaggagatggagaacctggccgcccccgccaagaccaaggagagcgaggagggcagctgggcccagtgccccgtgttcctgcagaccctggcctacggcgacatgaaccacgagtggatcggcaacgagtggctgcccagcctgggcctgccccagtacagaagctacttcatggagtgcctggtggacgccagaatgctggaccacctgaccaagaaggacctgagagtgcacctgaagatggtggacagcttccacagaaccagcctgcagtacggcatcatgtgcctgaagagactgaactacgacagaaaggagctggagagaagaagagaggccagccagcacgagatcaaggacgtgctggtgtggagcaacgacagagtgatcagatggatccaggccatcggcctgagagagtacgccaacaacatcctggagagcggcgtgcacggcagcctgatcgccctggacgagaacttcgactacagcagcctggccctgctgctgcagatccccacccagaacacccaggccagacagatcctggagagagagtacaacaacctgctggccctgggcaccgagagaagactggacgagagcgacgacaagaacttcagaagaggcagcacctggagaagacagttcccccccagagaggtgcacggcatcagcatgatgcccggcagcagcgagaccctgcccgccggcttcagactgaccaccaccagcggccagagcagaaagatgaccaccgacgacggcgtgttcagcgtgtacagcacctag

SEQ ID NO: 83590 - DNA, 3708 bp, Artificial Sequence
  derived and/or modified sequence
atgatgtgcgaggtgatgcccaccatcaacgaggacacccccatgagccagagaggcagccagagcagcggcagcgacagcgacagccacttcgagcagctgatggtgaacatgctggacgagagagacagactgctggacaccctgagagagacccaggagagcctgagcctggcccagcagagactgcaggacgtgatctacgacagagacagcctgcagagacagctgaacagcgccctgccccaggagttcgccgccctgaccaaggagctgaacgcctgcagagagcagctgctggagaaggaggaggagatcagcgagctgaaggccgagagaaacaacaccagactgctgctggagcacctggagtgcctggtgagcagacacgagagaagcctgagaatgaccgtggtgaagagacaggcccagagccccagcggcgtgagcagcgaggtggaggtgctgaaggccctgaagagcctgttcgagcaccacaaggccctggacgagaaggtgagagagagactgagagtgagcctggagagagtgagcgccctggaggaggagctggccgccgccaaccaggagatcgtggccctgagagagcagaacgtgcacatccagagaaagatggccagcagcgagggcagcaccgagagcgagcacctggagggcatggagcccggccagaaggtgcacgagaagagactgagcaacggcagcatcgacagcaccgacgagaccagccagatcgtggagctgcaggagctgctggagaagcagaactacgagatggcccagatgaaggagagactggccgccctgagcagcagagtgggcgaggtggagcaggaggccgagaccgccagaaaggacctgatcaagaccgaggagatgaacaccaagtaccagagagacatcagagaggccatggcccagaaggaggacatggaggagagaatcaccaccctggagaagagatacctgagcgcccagagagagagcaccagcatccacgacatgaacgacaagctggagaacgagctggccaacaaggaggccatcctgagacagatggaggagaagaacagacagctgcaggagagactggagctggccgagcagaagctgcagcagaccatgagaaaggccgagaccctgcccgaggtggaggccgagctggcccagagaatcgccgccctgaccaaggccgaggagagacacggcaacatcgaggagagaatgagacacctggagggccagctggaggagaagaaccaggagctgcagagagccagacagagagagaagatgaacgaggagcacaacaagagactgagcgacaccgtggacagactgctgaccgagagcaacgagagactgcagctgcacctgaaggagagaatggccgccctggaggagaagaacgtgctgatccaggagagcgagaccttcagaaagaacctggaggagagcctgcacgacaaggagagactggccgaggagatcgagaagctgagaagcgagctggaccagctgaagatgagaaccggcagcctgatcgagcccaccatccccagaacccacctggacaccagcgccgagctgagatacagcgtgggcagcctggtggacagccagagcgactacagaaccaccaaggtgatcagaagacccagaagaggcagaatgggcgtgagaagagacgagcccaaggtgaagagcctgggcgaccacgagtggaacagaacccagcagatcggcgtgctgagcagccaccccttcgagagcgacaccgagatgagcgacatcgacgacgacgacagagagaccatcttcagcagcatggacctgctgagccccagcggccacagcgacgcccagaccctggccatgatgctgcaggagcagctggacgccatcaacaaggagatcagactgatccaggaggagaaggagagcaccgagctgagagccgaggagatcgagaacagagtggccagcgtgagcctggagggcctgaacctggccagagtgcaccccggcaccagcatcaccgccagcgtgaccgccagcagcctggccagcagcagcccccccagcggccacagcacccccaagctgacccccagaagccccgccagagagatggacagaatgggcgtgatgaccctgcccagcgacctgagaaagcacagaagaaagatcgccgtggtggaggaggacggcagagaggacaaggccaccatcaagtgcgagaccagccccccccccacccccagagccctgagaatgacccacaccctgcccagcagctaccacaacgacgccagaagcagcctgagcgtgagcctggagcccgagagcctgggcctgggcagcgccaacagcagccaggacagcctgcacaaggcccccaagaagaagggcatcaagagcagcatcggcagactgttcggcaagaaggagaaggccagactgggccagctgagaggcttcatggagaccgaggccgccgcccaggagagcctgggcctgggcaagctgggcacccaggccgagaaggacagaagactgaagaagaaggtgatcagacacgagctgctggaggaggccagaagaaagggcctgcccttcgcccagtgggacggccccaccgtggtggcctggctggagctgtggctgggcatgcccgcctggtacgtggccgcctgcagagccaacgtgaagagcggcgccatcatgagcgccctgagcgacaccgagatccagagagagatcggcatcagcaaccccctgcacagactgaagctgagactggccatccaggagatggtgagcctgaccagccccagcgccccccccaccagcagaacccccagcggcaacgtgtgggtgacccacgaggagatggagaacctggccgcccccgccaagaccaaggagagcgaggagggcagctgggcccagtgccccgtgttcctgcagaccctggcctacggcgacatgaaccacgagtggatcggcaacgagtggctgcccagcctgggcctgccccagtacagaagctacttcatggagtgcctggtggacgccagaatgctggaccacctgaccaagaaggacctgagagtgcacctgaagatggtggacagcttccacagaaagaagagaaccagcctgcagtacggcatcatgtgcctgaagagactgaactacgacagaaaggagctggagagaagaagagaggccagccagcacgagatcaaggacgtgctggtgtggagcaacgacagagtgatcagatggatccaggccatcggcctgagagagtacgccaacaacatcctggagagcggcgtgcacggcagcctgatcgccctggacgagaacttcgactacagcagcctggccctgctgctgcagatccccacccagaacacccaggccagacagatcctggagagagagtacaacaacctgctggccctgggcaccgagagaagactggacgagagcgacgacaagaacttcagaagaggcagcacctggagaagacagttcccccccagagaggtgcacggcatcagcatgatgcccggcagcagcgagaccctgcccgccggcttcagactgaccaccaccagcggccagagcagaaagatgaccaccgacgacggcgtgttcagcgtgtacagcacctag

SEQ ID NO: 83591 - DNA, 3699 bp, Artificial Sequence
  derived and/or modified sequence
atgatgtgcgaggtgatgcccaccattaatgaagatacacctatgtcacagcgtgggtcccagtcttccggcagcgattcagactcgcattttgaacaactgatggtcaacatgctcgatgagcgtgatcgtctactcgatacgctcagggaaacccaggagtccctaagcctagctcaacagcgcctccaggacgttatctacgaccgcgattctctgcagcggcagctgaactccgcactccctcaagagttcgctgccctgacaaaagagctcaatgcttgtcgagaacaactccttgagaaggaggaggagatttccgagctgaaagctgagagaaacaatactcggctcttgctggagcacttagaatgtcttgtcagtcgccacgaaagatctctgcgtatgacagtagtcaagcgtcaggctcagagccctagtggggtgtcctccgaggtggaggtgctgaaagccttgaaatcactcttcgaacatcataaggctctagatgaaaaggtacgggaaaggctcagggtcagccttgagagagtgtcagcccttgaggaggagctggccgctgccaaccaagagatagtcgctttaagagagcaaaacgtgcacatccagcgtaagatggcctcctcagaagggtcaacggagagtgagcacttggaaggtatggaacctggccagaaggtacacgagaaacggttgagtaatggctccatcgactccaccgatgagacttcacagattgtggaacttcaggagctccttgaaaaacagaactatgagatggcccagatgaaggaacggctggccgccctaagctcaagagtcggggaggtcgagcaagaggcggaaactgccaggaaggacttgatcaagaccgaggaaatgaatacgaagtatcagagagatatacgcgaggccatggcccagaaggaagacatggaagagcgcatcactaccctagagaaaagatatctatccgcacaacgcgagagtacctcaattcacgatatgaatgacaagctggagaacgagctagctaacaaagaggcaattctgcgccagatggaggagaagaatcgacagctgcaggagagactcgagctggcggaacagaagctgcagcaaactatgcggaaggctgagaccctgcctgaggtcgaggctgagttagcacagcgcattgccgcgttgacaaaagccgaggagcggcacggtaacatcgaggagaggatgcgccatcttgaaggccagctggaggaaaagaaccaagagcttcaacgagccaggcagagggagaagatgaatgaagagcataacaagagattgagtgacactgtggaccggcttctaaccgaatccaatgagaggctgcagctccatctgaaagaacgcatggccgcattggaggaaaagaatgttcttatccaggagagcgagacatttagaaaaaatctggaagaaagtctccacgataaggagagactggccgaggagatcgaaaagttacggagtgagttggatcagctcaagatgcggacaggcagtctaatcgagccaacaataccaagaactcatttggatacttccgctgaacttagatattccgtcggctccctggtcgattcccagagtgactaccgtacaactaaggtgattcgacgcccgcgcagaggccgcatgggagtgaggcgtgatgagcccaaggtgaagagtttgggcgaccacgagtggaataggacacagcagataggcgtactatcctctcatccctttgagtctgataccgaaatgtctgacatagatgacgatgatagggaaacaatattttcgtcaatggaccttctttctccctcgggacactctgatgcgcagacactggctatgatgttacaggagcaactggacgccataaataaggagatacggttaattcaggaggagaaggagagcacagagctgagagccgaagagattgaaaatagggtggctagcgtttcattggaagggctcaatttggctcgggtgcatccaggcacaagcatcacagctagcgtcaccgcttcctcgctggcgagcagctcaccaccttctgggcacagtacacccaagttaaccccgcgcagtcctgcccgcgagatggaccgcatgggtgtgatgacactgccatctgacctcaggaagcacaggcggaaaattgcagtggtcgaagaggacggtcgcgaagataaggccaccataaaatgcgagacatctccgccccccaccccccgcgcccttcggatgacccataccctgccttctagttaccacaacgatgctaggagctcgctgtcagtatccctagagccagagagtctagggttggggagtgcaaactcaagtcaggactcactccataaagctccaaagaagaaagggatcaagagttccatagggcgcctctttggcaaaaaagagaaagcccgcctcgggcagctacgaggcttcatggagacggaggccgccgcacaggaatccctcgggctgggcaagttggggacccaggccgagaaagacaggaggctgaaaaaaaacaccagtggccacgaactgctcgaagaggcgcggagaaaagggttacccttcgcacagtgggacggccccactgtggtcgcctggttggagctttggctgggcatgccagcctggtatgtggctgcttgccgggcgaatgtcaaatcaggggccataatgagcgccctgtctgataccgagattcaacgcgagattggaatctcaaatccactccacagactgaaactgcggctggccattcaggagatggtgtcgctgaccagccctagcgccccacccacctccagaactcctagcgggaacgtgtgggtgacccatgaagaaatggagaatctggcggctcccgctaagaccaaagagtccgaggagggatcgtgggctcagtgccccgtgttcctgcaaactctcgcctacggtgatatgaatcacgagtggataggtaatgaatggctgccttcactaggactgccgcagtatcgcagctacttcatggagtgtctcgtcgatgccagaatgctggatcacttgacgaagaaagatcttcgtgttcacctgaagatggtggactctttccatcgtactagtttacagtatgggataatgtgtctgaagaggctcaactacgaccgaaaggagttagagcgcagacgggaagcaagccagcacgagatcaaggatgtgctggtctggtccaacgatcgggtcattcgttggattcaggcaattggactccgggagtatgcaaacaatatcctagagagtggagtccatggttctctgatcgctctcgatgagaatttcgactacagctctctggcccttctcctccagatccctacccagaacacccaggccagacagatcctcgaacgggaatataataatctcctggccttagggacggagcggcggcttgatgagtccgacgataagaacttcaggcgaggatctacttggcgccgacagttcccaccacgcgaggtacatggcataagtatgatgcctggatcctctgaaaccttgccagcaggtttcaggctcacgaccacctccgggcagagccgaaaaatgaccactgatgacggcgtgttctccgtgtacagtacctag

SEQ ID NO: 83592 - DNA, 3708 bp, Artificial Sequence
  derived and/or modified sequence
atgatgtgcgaagtgatgcccaccattaacgaggacactccaatgtcccagcgcgggagccagtcttctggatccgactctgattcccacttcgaacagttgatggtcaatatgctggacgagagggaccgcctgctcgatactctccgtgaaacccaagaaagtttgtccttggcacagcagcgtttacaagatgtgatttacgacagggactccctgcagaggcaactgaactccgccctgccgcaggagttcgccgccctcactaaagaattgaatgcctgcagagaacagctgctcgagaaggaggaagagatctccgaattgaaggccgagaggaacaacactcggctcctgctagagcacttagagtgcctggttagccggcatgagcgatccctccgcatgacggtggtcaagagacaagcccagtcaccttcaggagtgagctcagaggtggaggttcttaaagctttaaagtctctgtttgaacaccacaaggccttagatgagaaggtgagggagaggctaagagtttcacttgaaagagtctccgctctggaagaagaacttgccgcggccaatcaagagatcgtcgcattgcgagaacagaacgttcatatccaacgcaaaatggcctcttcggagggctcgacggagtcagagcatttggagggtatggagccaggacaaaaagtgcatgagaagcggttgtcgaacggatctatagactctacggatgagacttctcagattgtcgaactgcaagagcttctggaaaaacagaattatgaaatggcccagatgaaagagaggctcgctgcactgagttctcgcgtcggcgaggtggagcaggaggccgaaacagcgcgcaaagatttgattaagaccgaggagatgaatacgaagtatcagagagacatcagggaggcgatggcccaaaaagaagatatggaggaacgcattaccacattggaaaagcggtacctgtctgctcagcgagaatccacaagtatccatgacatgaatgacaagctggagaacgagctggccaacaaggaggctattctgcgacagatggaggaaaaaaatcgtcagcttcaagagcgcttagagctggccgagcagaagctgcagcaaaccatgaggaaggcagagacactcccagaggtagaggctgagctggctcagcgcatcgcagcactcaccaaggctgaagagagacacgggaatatcgaggagagaatgagacatctggagggccaactggaggaaaagaatcaggaattgcaaagggccaggcagcgggaaaagatgaatgaggagcataacaagcgcctgtctgatactgtggacaggctgctgaccgaaagtaacgagaggctgcagttacacctcaaagaaagaatggctgccttagaggaaaagaacgtcctgatccaggaaagcgaaacttttcgcaagaatctggaggaatctttacatgacaaggagcgactcgcagaggaaatcgagaagttgaggtcagaactggatcagcttaagatgcgcacgggaagtctgattgaaccgaccattcccaggacgcaccttgacacgagcgccgaattgcgatattcggtcggaagtctagtcgattcgcagtcagattaccgtacaacaaaagttattcggagaccccggcgtggcaggatgggcgttagacgggatgaaccaaaagtcaagagcctgggcgaccacgagtggaacaggacccagcaaataggggtactgtcgagccatccttttgaaagtgatacagaaatgtccgacatcgacgacgacgatagggaaacaattttctcttctatggatctgctctctcccagcggccattctgacgcacaaacactagccatgatgttgcaggagcagctcgacgcgatcaataaggaaatccgcttgatccaggaagagaaggagagtactgagctaagagctgaggaaattgagaacagagtcgcatcagtgtcccttgaaggcctgaatttagctcgcgtgcacccgggcacgtctatcaccgcatctgttaccgcttcatcattagcgtccagctcacctccttccggtcatagtactccaaagttaacgcctcggtcaccagcaagagagatggatcgcatgggcgtgatgaccttaccgtctgatctacgcaaacatagaagaaagattgcagtggtggaagaggacgggagagaagataaggccaccatcaagtgtgagacctccccccctccaaccccccgcgcactacggatgactcacactctccccagttcttatcataatgacgccaggtcatctctgagtgtgtccctggaacccgagagtttgggcctgggatcagctaattctagccaggattccttgcataaggctccaaaaaagaaaggcataaagagttctatcggccggctgttcggaaaaaaggaaaaagcacggctgggccaactgagggggttcatggaaactgaggccgccgcgcaagagagtctgggtttggggaagctgggcacccaagctgagaaagataggcgactgaagaaaaaagtgattcgccacgagttgctcgaggaagcacgcagaaaggggctaccctttgcccagtgggatggtcctaccgtcgtggcttggcttgagttatggttagggatgcccgcttggtacgtagctgcttgccgcgcgaacgtgaagtctggggccattatgtctgctctctccgataccgaaattcagcgggaaatagggatatccaacccgctgcaccggctgaagctccgtcttgcaatccaggagatggtgtctctcactagcccaagcgcacctccaacaagtcgcactccctctgggaacgtgtgggtgactcatgaggaaatggaaaaccttgccgcaccagctaaaaccaaggagagcgaggagggctcttgggcacagtgccctgtgtttctgcaaaccttggcttacggggatatgaatcacgagtggattgggaatgaatggttacccagcctcggcttaccccagtacagatcttacttcatggagtgtctggtggatgctaggatgcttgaccatctgacaaagaaagatttacgcgtccatcttaaaatggtcgacagcttccatcgcaagaaaaggactagcctccaatacggcataatgtgcttgaaaagactgaactatgaccgcaaagagctggaacgccgcagagaggcctcacaacatgaaatcaaggacgtgttggtgtggtccaacgatcgtgtcatacgctggattcaggctatcggcttgcgcgagtatgccaacaacattttagaatctggagtgcacgggtccttgatcgcccttgacgaaaactttgattattcctctctagctcttctgctgcagatccctacccaaaatacacaggctagacaaattctagagcgggaatacaacaatttgctcgctctcggtactgagaggagactagacgagtcagacgacaagaactttcgacgtggaagcacttggagacggcagttcccaccccgggaggtgcatggtatttcgatgatgcctgggtcatcagagacccttccagcaggatttaggctgacgactacctccgggcagagccgaaagatgacgaccgacgatggcgtcttctcagtatactccacctag

SEQ ID NO: 83593 - DNA, 3699 bp, Artificial Sequence
  derived and/or modified sequence
atgatgtgtgaggtgatgcccaccatcaatgaagacacccccatgagccagaggggcagccagagcagcggcagtgacagcgacagccactttgagcagctgatggtgaacatgctggatgagcgggaccggctgctggacaccctgcgggagacccaggagagcctgagcctggcccagcagaggctgcaggatgtgatctatgaccgggacagcctgcagaggcagctgaacagcgccctgccccaggagtttgctgccctgaccaaggagctgaatgcctgccgggagcagctgctggagaaggaggaggagatcagcgagctgaaggccgagaggaacaacacccggctgctgctggagcacctggagtgcctggtgtccagacatgagaggagcctgaggatgacagtggtgaagaggcaggcccagagccccagcggcgtgtcctctgaggtggaggtgctgaaggccctgaagagcctgtttgagcaccacaaggccctggatgagaaggtgcgggagcggctgcgggtgtccctggagcgggtgtctgccctggaggaggagctggccgccgccaaccaggagatcgtggccctgcgggagcagaatgtgcacatccagaggaagatggccagcagcgagggcagcacagaaagtgagcacctggagggcatggagcccggccagaaggtgcatgagaagaggctgagcaatggcagcattgacagcacagatgagaccagccagatcgtggagctgcaggagctgctggagaagcagaactatgagatggcccagatgaaggagcggctggccgccctgagcagccgggtgggggaggtggagcaggaggccgagacagccaggaaggacctgatcaagacagaggagatgaacaccaagtaccagagggacatccgggaggccatggcccagaaggaggacatggaggagcgcatcaccaccctggagaagcgctacctgagcgcccagcgggagagcaccagcatccatgacatgaatgacaagctggagaatgagctggccaacaaggaggccatcctgcggcagatggaggagaagaaccggcagctgcaggagcggctggagctggccgagcagaagctgcagcagaccatgaggaaggccgagaccctgcctgaggtggaggccgagctggcccagagaattgctgccctgaccaaggccgaggagagacatggcaacatcgaggagaggatgaggcacctggagggccagctggaggagaagaaccaggagctgcagagggcccggcagcgggagaagatgaatgaggagcacaacaagaggctgagtgacacagtggaccggctgctgacagagagcaatgaaaggctgcagctgcacctgaaggagaggatggccgccctggaggagaagaatgtgctgatccaggagagcgagaccttcaggaagaacctggaggagagcctgcatgacaaggagcggctggccgaggagattgagaagctgcggtctgagctggaccagctgaagatgaggacaggcagcctcatcgagcccaccatccccaggacccacctggacaccagcgctgagctgcgctacagcgtgggcagcctggtggacagccagagcgactaccgcaccaccaaggtgatccggcggccccggcggggccgcatgggcgtgagaagagatgagcccaaggtgaagagcctgggggaccacgagtggaacagaacccagcagatcggcgtgctgagcagccacccctttgaaagtgacacagagatgtctgacattgatgatgatgaccgggagaccatcttcagctccatggacctgctgagccccagcggccacagtgatgcccagaccctggccatgatgctgcaggagcagctggatgccatcaacaaggagatccgcctcatccaggaggagaaggagagcacagagctgcgggcagaggagattgagaacagagtggcctctgtgtccctggagggcctgaacctggcccgggtgcaccctggcaccagcatcacagcctctgtgacagccagcagcctggccagcagcagcccccccagcggccacagcacccccaagctgacccccaggagccctgcccgggagatggacaggatgggcgtgatgaccctgcccagcgacctgaggaagcacaggaggaagattgctgtggtggaggaggatggccgggaggacaaggccaccatcaagtgtgagaccagccccccacccaccccccgggccctgaggatgacccacaccctgcccagcagctaccacaatgatgcccggagcagcctgtctgtgtccctggagcctgagagcctgggcctgggcagcgccaacagcagccaggacagcctgcacaaggcccccaagaagaagggcatcaagagcagcatcggccgcctgtttgggaagaaggagaaggcccggctgggccagctgcggggcttcatggagacagaagctgctgcccaggagagcctgggcctgggcaagctgggcacccaggccgagaaggaccggcggctgaagaagaacaccagcggccacgagctgctggaggaggcccggaggaagggcctgccctttgcccagtgggatggccccaccgtggtggcctggctggagctgtggctgggcatgcctgcctggtacgtggccgcctgccgggccaacgtgaagagcggggccatcatgtctgccctgagtgacacagagatccagcgggagatcggcatcagcaaccccctgcaccggctgaagctgcggctggccatccaggagatggtgtccctgaccagccccagcgccccacccaccagcaggacccccagcggaaatgtgtgggtgacccatgaggagatggagaacctggccgccccagccaagaccaaggagagcgaggagggctcctgggcccagtgccctgtgttcctgcagaccctggcctatggagacatgaaccacgagtggattggaaatgagtggctgcccagcctgggcctgccccagtaccgcagctacttcatggagtgcctggtggatgccaggatgctggaccacctgaccaagaaggacctgcgggtgcacctgaagatggtggacagcttccacaggaccagcctgcagtatggcatcatgtgcctgaagaggctgaactatgacaggaaggagctggagaggagaagagaggccagccagcacgagatcaaggatgtgctggtgtggagcaatgacagagtcatccgctggatccaggccatcggcctgcgggagtatgccaacaacatcctggagagcggcgtgcacggcagcctcatcgccctggatgagaactttgactacagcagcctggccctgctgctgcagatccccacccagaacacccaggcccggcagatcctggagcgggagtacaacaacctgctggccctgggcacagagcggcggctggatgaaagtgatgacaagaacttcagaagaggcagcacctggaggcggcagtttcctccccgggaggtgcacggcatctccatgatgcctggcagcagcgagaccctgcctgctggcttccggctgaccaccaccagcggccagagcaggaagatgaccacagatgatggagtcttctctgtgtacagcacctag

SEQ ID NO: 83594 - DNA, 3708 bp, Artificial Sequence
  derived and/or modified sequence
atgatgtgtgaggtgatgcccaccatcaatgaagacacccccatgagccagaggggcagccagagcagcggcagtgacagcgacagccactttgagcagctgatggtgaacatgctggatgagcgggaccggctgctggacaccctgcgggagacccaggagagcctgagcctggcccagcagaggctgcaggatgtgatctatgaccgggacagcctgcagaggcagctgaacagcgccctgccccaggagtttgctgccctgaccaaggagctgaatgcctgccgggagcagctgctggagaaggaggaggagatcagcgagctgaaggccgagaggaacaacacccggctgctgctggagcacctggagtgcctggtgtccagacatgagaggagcctgaggatgacagtggtgaagaggcaggcccagagccccagcggcgtgtcctctgaggtggaggtgctgaaggccctgaagagcctgtttgagcaccacaaggccctggatgagaaggtgcgggagcggctgcgggtgtccctggagcgggtgtctgccctggaggaggagctggccgccgccaaccaggagatcgtggccctgcgggagcagaatgtgcacatccagaggaagatggccagcagcgagggcagcacagaaagtgagcacctggagggcatggagcccggccagaaggtgcatgagaagaggctgagcaatggcagcattgacagcacagatgagaccagccagatcgtggagctgcaggagctgctggagaagcagaactatgagatggcccagatgaaggagcggctggccgccctgagcagccgggtgggggaggtggagcaggaggccgagacagccaggaaggacctgatcaagacagaggagatgaacaccaagtaccagagggacatccgggaggccatggcccagaaggaggacatggaggagcgcatcaccaccctggagaagcgctacctgagcgcccagcgggagagcaccagcatccatgacatgaatgacaagctggagaatgagctggccaacaaggaggccatcctgcggcagatggaggagaagaaccggcagctgcaggagcggctggagctggccgagcagaagctgcagcagaccatgaggaaggccgagaccctgcctgaggtggaggccgagctggcccagagaattgctgccctgaccaaggccgaggagagacatggcaacatcgaggagaggatgaggcacctggagggccagctggaggagaagaaccaggagctgcagagggcccggcagcgggagaagatgaatgaggagcacaacaagaggctgagtgacacagtggaccggctgctgacagagagcaatgaaaggctgcagctgcacctgaaggagaggatggccgccctggaggagaagaatgtgctgatccaggagagcgagaccttcaggaagaacctggaggagagcctgcatgacaaggagcggctggccgaggagattgagaagctgcggtctgagctggaccagctgaagatgaggacaggcagcctcatcgagcccaccatccccaggacccacctggacaccagcgctgagctgcgctacagcgtgggcagcctggtggacagccagagcgactaccgcaccaccaaggtgatccggcggccccggcggggccgcatgggcgtgagaagagatgagcccaaggtgaagagcctgggggaccacgagtggaacagaacccagcagatcggcgtgctgagcagccacccctttgaaagtgacacagagatgtctgacattgatgatgatgaccgggagaccatcttcagctccatggacctgctgagccccagcggccacagtgatgcccagaccctggccatgatgctgcaggagcagctggatgccatcaacaaggagatccgcctcatccaggaggagaaggagagcacagagctgcgggcagaggagattgagaacagagtggcctctgtgtccctggagggcctgaacctggcccgggtgcaccctggcaccagcatcacagcctctgtgacagccagcagcctggccagcagcagcccccccagcggccacagcacccccaagctgacccccaggagccctgcccgggagatggacaggatgggcgtgatgaccctgcccagcgacctgaggaagcacaggaggaagattgctgtggtggaggaggatggccgggaggacaaggccaccatcaagtgtgagaccagccccccacccaccccccgggccctgaggatgacccacaccctgcccagcagctaccacaatgatgcccggagcagcctgtctgtgtccctggagcctgagagcctgggcctgggcagcgccaacagcagccaggacagcctgcacaaggcccccaagaagaagggcatcaagagcagcatcggccgcctgtttgggaagaaggagaaggcccggctgggccagctgcggggcttcatggagacagaagctgctgcccaggagagcctgggcctgggcaagctgggcacccaggccgagaaggaccggcggctgaagaagaaggtgatcagacatgagctgctggaggaggcccggaggaagggcctgccctttgcccagtgggatggccccaccgtggtggcctggctggagctgtggctgggcatgcctgcctggtacgtggccgcctgccgggccaacgtgaagagcggggccatcatgtctgccctgagtgacacagagatccagcgggagatcggcatcagcaaccccctgcaccggctgaagctgcggctggccatccaggagatggtgtccctgaccagccccagcgccccacccaccagcaggacccccagcggaaatgtgtgggtgacccatgaggagatggagaacctggccgccccagccaagaccaaggagagcgaggagggctcctgggcccagtgccctgtgttcctgcagaccctggcctatggagacatgaaccacgagtggattggaaatgagtggctgcccagcctgggcctgccccagtaccgcagctacttcatggagtgcctggtggatgccaggatgctggaccacctgaccaagaaggacctgcgggtgcacctgaagatggtggacagcttccacaggaagaagaggaccagcctgcagtatggcatcatgtgcctgaagaggctgaactatgacaggaaggagctggagcggcggcgggaggccagccagcacgagatcaaggatgtgctggtgtggagcaatgacagagtcatccgctggatccaggccatcggcctgcgggagtatgccaacaacatcctggagagcggcgtgcacggcagcctgattgccctggatgaaaattttgactacagcagcctggccctgctgctgcagatccccacccagaacacccaggcccggcagatcctggagcgggagtacaacaacctgctggccctgggcacagaaagaaggctggatgaaagtgatgacaagaacttccggcggggcagcacctggaggcggcagttccccccccgggaggtgcacggcatctccatgatgcctggcagcagcgagaccctgcctgctggcttccggctgaccaccaccagcggccagagcaggaagatgaccacagatgatggagtcttctctgtgtacagcacctag

SEQ ID NO: 83595 - DNA, 3699 bp, Artificial Sequence
  derived and/or modified sequence
atgatgtgcgaggtgatgcccaccatcaacgaggacacccccatgtcacagcggggatctcagagttccgggtctgactccgattctcacttcgagcagttgatggttaatatgctggacgaaagggatcgtctcctcgataccctgagggaaactcaggaatcgttgagcttggcccaacaacggctgcaagacgtgatctatgatcgcgattcactgcaaaggcagctgaatagcgcactgccacaggagtttgcggctcttacaaaggaactgaatgcgtgtagagagcagcttctggaaaaggaggaagagattagtgaactgaaagccgaaagaaataatacccgtcttctgctagagcatctcgaatgcctcgtgagccgccatgagcggtctttaagaatgactgtcgtaaaacggcaagcacagtctccctctggggtgtcaagcgaggttgaagtgcttaaagcactcaaatcactgttcgagcatcacaaagctttggatgaaaaagtgagagaaagactgagagtcagtctagaaagggtttctgcactggaggaagaattagctgccgcgaaccaggagattgtcgctctgagggagcaaaatgtgcacatccagcggaaaatggcatcaagcgaaggcagtacagagtccgagcaccttgaaggcatggaacccggacaaaaagtccacgagaaacggctgtccaatggctccattgacagcaccgacgagaccagccagattgtagaacttcaagaactgctggaaaaacagaattacgaaatggctcagatgaaggagagactcgccgcactttcgtcccgggtgggtgaggtggaacaagaagctgagacggcgaggaaggaccttatcaaaactgaggagatgaatacgaagtatcagagagatatccgggaagcaatggcacagaaggaggacatggaggaacgaatcaccacactggaaaaaagatacttaagtgcacagagggagtctactagcatacacgacatgaacgataagcttgaaaacgaactggcgaataaggaagcaatactgcggcagatggaggagaaaaatagacagctgcaagagcgtttagagctagcagagcagaaactgcagcagaccatgaggaaagccgagactctacctgaggttgaggcagagctcgcccagagaattgccgctctcactaaagccgaggagcggcacgggaacatcgaggaaaggatgagacacttggaaggccagctagaagagaagaaccaggagctgcagagagcccggcagcgcgagaaaatgaacgaggagcacaataaaaggctgtctgacactgtggatcggcttctcactgaatcgaatgaacggctgcagctgcacctcaaggagaggatggccgccctcgaagagaaaaacgttctgattcaagaaagcgaaaccttcagaaagaacttggaggaatccctgcatgacaaagagagactggccgaggagatcgagaagctgcgcagcgagctggaccagcttaagatgaggactggttctttaatcgagcccactattcctcgaacacatttggacacctctgctgagctccgatattcggtgggttccctggttgacagtcagtctgactacagaactacaaaggtcatacggagaccccgcagaggacggatgggtgtaagaagagacgaacccaaggttaaaagtcttggcgaccacgagtggaacagaactcaacagatcggggtgctgagttcccatcctttcgaaagtgatacagagatgagcgatatagatgacgatgatagagaaaccatcttctcttccatggacttgctgtcacctagtgggcatagtgacgctcagacactcgccatgatgctccaggaacagctggacgcaattaacaaagagatccgcctgatccaagaggaaaaggaaagcacagaattgagagcggaggaaatcgaaaatcgggtggccagcgtttcgctggagggactcaacctggctcgggtacatcccgggacctctattacggcttcggtgacggcaagttccctcgcatcatcttctccgcctagcggtcattcgacaccaaagttgacccctcggtccccagcgcgcgagatggaccgcatgggggtgatgaccctcccttcagatctcaggaaacacagacgcaagattgcagtggtcgaagaggatgggagggaggataaggcaacaatcaagtgcgagacaagtcccccacccacgccacgcgcccttaggatgacgcatacattgccctcaagctatcacaatgatgctagatcaagcctgagcgtctctcttgaacctgagagtttagggctaggatccgccaatagctcacaggactccctgcacaaagcccccaagaaaaagggaatcaaatcctcaattgggaggctttttggtaaaaaggagaaggcacgattggggcagctgcgtggcttcatggaaaccgaggcggccgcacaggaatcgctgggccttggtaaacttggaacccaggctgaaaaggatcggaggctgaaaaaaaatacaagcgggcatgagcttctcgaagaagccaggaggaaggggctcccgttcgcacaatgggatggtcctaccgtggtggcctggctggagctctggcttggcatgcccgcatggtacgttgccgcttgtcgggctaatgtgaaatcaggagcaatcatgtccgcactgagtgacactgagattcaacgcgaaatcgggatcagtaacccgctgcaccgcctaaagcttaggcttgccatccaggagatggtgtcactcactagcccctcagcaccccctacgagtcggacacccagtgggaatgtgtgggtgacccatgaggaaatggagaacctagctgcccctgctaaaactaaagagtcagaagagggctcctgggcgcagtgtcccgtttttcttcagaccttggcctatggggacatgaatcacgaatggattggtaacgaatggctgcctagcctcggactgccccagtacagatcttacttcatggaatgtttagtcgacgcccgtatgcttgatcatctgaccaaaaaagacctgagggtgcatctgaagatggtagacagctttcaccgtaccagtctccaatatggtattatgtgtctcaaacggttgaattacgataggaaggagctcgaacgccggcgcgaagccagtcagcatgagattaaagacgtgctcgtgtggagcaacgaccgtgtgattcggtggattcaggcgattggcttacgcgagtatgccaataatatactggagtcgggggtgcacgggtccctcattgcacttgatgagaattttgattatagctccctggccctcttgctccagatacctacccagaatacccaggcacggcagattctggagagagagtacaacaacctgcttgcactcggtaccgaaagacgtctagatgaaagcgatgacaagaacttccgaaggggttccacatggcgaaggcagtttccaccaagggaagtacacggcatctcaatgatgccagggtccagtgagacactccccgcaggcttccggctgaccacaacgagcggccagtcccggaagatgaccactgatgacggagtgtttagcgtgtacagcacttag

SEQ ID NO: 83596 - DNA, 3708 bp, Artificial Sequence
  derived and/or modified sequence
atgatgtgcgaggtgatgcccaccatcaacgaggacacccccatgagtcagcgcgggagccagtcaagtggatctgacagtgattcccactttgagcagctcatggtgaacatgcttgacgagcgggataggttgctggataccttgcgcgaaacccaggagtcgctgtcactggcacagcaacgccttcaagacgtgatctatgacagagattcgctgcagcgccagcttaatagcgcgttgccacaagaattcgcggcgctcacaaaggaactcaacgcctgccgtgaacagctcctcgaaaaggaggaagaaatttctgaactcaaggccgaaaggaacaatacccgcctccttctggagcacctggaatgcctggtctcccggcacgagagaagtcttcggatgacggtggtgaaaagacaggcacagtcgccttccggtgtttcgtccgaggtagaggtactgaaagccctcaagtcacttttcgaacatcacaaggcgctcgacgagaaagtaagagagcgtctgagagtgtctctggagcgcgtgagcgctctcgaggaagaattagcagccgcaaatcaagagatcgtcgcactgcgcgaacaaaatgttcacattcagagaaaaatggcatcctcagagggctcaaccgaatccgagcacctggaggggatggagcccggccaaaaagtccatgaaaaacggctcagcaatgggagcatcgatagcaccgatgagacgtctcagattgttgaactgcaagaattgctggagaagcagaactatgaaatggctcaaatgaaggaaagattggccgctctcagcagccgggtgggcgaggtggagcaggaggccgaaacagcccgcaaggatcttattaaaacggaagaaatgaatacaaagtatcaaagggacatcagagaggctatggctcagaaggaggacatggaagagcgtattaccactctggaaaagagatacctttctgctcagcgcgagtctacaagcatacacgacatgaatgataaattggagaatgagttagcaaacaaagaagccatcttaaggcagatggaggagaaaaacaggcaactacaggagcgcctggagctggcagagcagaagctccagcaaaccatgcgaaaggcggagaccctgcctgaagtggaagccgagttggcacagaggattgccgctctaactaaagccgaggaaagacatggaaatatcgaagagagaatgagacatctggaaggccagctagaagagaaaaaccaggaactgcagagggctcgccaaagagagaaaatgaacgaggagcataataaacgtctgagcgatacggtagacagattactgacagagtcaaatgagcgactccagctgcatctgaaggagcggatggccgccctggaggaaaaaaacgtactaattcaggagagtgagacgtttcggaagaacctggaagaatcccttcacgataaggagaggctcgcagaggagatagagaagcttagaagcgaactcgatcagcttaagatgagaacaggctctctgattgagccgaccattcctaggacccacctggatacctctgctgagcttaggtattctgtaggctctttggtcgattcccaatccgattacaggactacaaaggtgatacggaggccaaggaggggaaggatgggtgtcagacgcgatgagcccaaggtgaagtccctcggcgatcacgagtggaatagaacccagcagattggcgtgttatcgagccatcccttcgagtcagacactgagatgtcagatatcgatgacgatgatcgtgagacaattttctccagtatggatctcctcagcccaagtggccacagtgatgcacagaccttagcaatgatgctgcaagaacagcttgatgcaatcaataaggagatccgcttaattcaggaggaaaaggaatccacagagctccgggctgaagagatagagaatcgcgtcgccagcgtgagtctggaaggccttaatctggcacgcgttcaccctgggacctcaattacagcgtctgtgactgccagctcactggcatcaagcagcccacccagcgggcattcaaccccgaagctaaccccaagatctccggcgagagaaatggaccgaatgggtgtgatgactctgccatctgacctgaggaagcataggaggaagattgcggtcgtggaggaagacgggcgagaagataaagccacaattaagtgtgagacaagccctccccccacaccgagagctctgcgcatgacccacaccctgccttctagctaccacaacgacgcgcggtcctcgctgagcgtgagtctcgagcccgagtcattgggcctcggcagtgctaactcaagccaagattccctgcacaaagccccaaagaagaagggcatcaaatcttcaatagggagactgttcggcaaaaaggagaaggctagacttggacagctaagagggttcatggagaccgaggccgctgcccaagagagtctgggtctgggcaagctcggaacccaagctgagaaggatagacgtctgaagaaaaaagttatcaggcacgagctgctcgaagaggctagaagaaagggactcccctttgcccagtgggatggtcccacagtcgtggcatggttggagctatggcttggcatgcctgcatggtatgtggccgcatgcagagccaatgttaagagcggcgcgataatgagcgcattgagcgataccgagattcaaagggaaattggaatctccaacccactccacagactcaagctccggctggctatccaagagatggtgtcccttacatcaccaagcgccccacccacttcacggactccgagtgggaatgtttgggtcacacacgaggaaatggagaatttagcagctcctgccaagaccaaggaaagcgaagaaggatcatgggctcaatgccctgtgtttctccagaccctcgcctacggggatatgaatcacgaatggataggaaatgagtggctccccagtctcggtctaccgcagtacagaagctactttatggagtgtctggtggacgcccggatgttggaccatctgaccaagaaagacctgcgcgtccacctgaaaatggtggattctttccataggaagaagcggacgagtctgcagtacggcatcatgtgtctcaagagacttaactacgatagaaaagagctcgagagacgacgggaagcctcccagcatgagatcaaggacgtactggtgtggtcaaatgacagggtcataagatggatccaagcaataggtcttcgagagtacgctaacaatattctcgaatccggagtccacggtagcttaatcgcccttgatgaaaactttgattatagcagcctggctcttcttctacagatccctactcagaatacacaggctcgtcagatcctggaaagagaatataacaacctgctagctctgggcactgaaagacgactagacgagtctgatgataaaaactttcgcaggggaagcacgtggagacgccagttcccgccaagggaggtgcacgggatcagtatgatgcccgggagtagtgagaccttacctgcaggatttagacttaccacaacatccgggcagagcagaaagatgacgacagacgatggcgtgttttctgtatactccacttag

SEQ ID NO: 83597 - DNA, 4727 bp, Artificial Sequence
  derived and/or modified sequence
aaatttgtaatatgccatttttccgatggacgcttctccttttggctgctgacggagccacgggaagatgccgagctcctgccacgccaccgggccggggcacgttccgggagggcgccggggcacgcgtgtgtctgagctgcctttctcctcccgttgctagggaaatggtccaggagtgctgggtgtgagcctcccttctcctcaagccggagactgcggttgtcattgatcaattgaagaagcaaggacccgaaatcacagacattagcaatgatgtgtgaagtgatgcccacgattaatgaggacaccccaatgagccaaagggggtcccaaagcagtggctcggactcagactcccattttgagcagctgatggtgaatatgctagatgaaagggatcgtcttctagacacccttcgggagacccaggaaagcctctcacttgcccagcaaagacttcaggatgtcatctatgaccgagactcactccagagacagctcaattcagccctgccacaggaatttgctgcactgacaaaagaattaaatgcctgcagggaacaacttctagaaaaggaagaagaaatctctgaacttaaagctgaaagaaacaacacaagactattactggagcatttggagtgccttgtgtcacgacatgaaagatcactaagaatgacggtggtaaaacggcaagcccagtctccctcaggagtatccagtgaagttgaagttctcaaggcactgaaatctttgtttgagcaccacaaggccttggatgaaaaggtaagggagcgactgagggtttctttagaaagagtctctgcactggaagaagaactagctgctgctaatcaggagattgttgccttgcgtgaacaaaatgttcatatacaaagaaaaatggcatcaagcgagggatccacagagtcagaacatcttgaagggatggaacctggacagaaagtccatgagaagcgtttgtccaatggttctatagactcaaccgatgaaactagtcaaatagttgaactacaagaattgcttgaaaagcaaaactatgaaatggcccagatgaaagaacgtttagcagccctttcttcccgagtgggagaggtggaacaggaagcagagacagcaagaaaggatctcattaaaacagaagaaatgaacaccaagtatcaaagggacattagggaggccatggcacaaaaggaagatatggaagaaagaattacaacccttgaaaagcgttacctcagtgctcagagagaatctacctccatacatgacatgaatgataaactagaaaatgagttagcaaataaagaagctatcctgcggcagatggaagagaaaaacagacagttacaagaacgtcttgagctagctgaacaaaagttgcagcagaccatgagaaaggctgaaaccttgcctgaagtagaggctgaactggctcagagaattgcagccctaaccaaggctgaagagagacatggaaatattgaagaacgtatgagacatttagagggtcaacttgaagagaagaatcaagaacttcaaagagctaggcaaagagagaaaatgaatgaggagcataacaagagattatcggatacggttgatagacttctgactgaatccaatgaacgcctacaactacacttaaaggaaagaatggctgctctagaagaaaagaatgttttaattcaagaatcagaaactttcagaaagaatcttgaagaatctttacatgataaggaaagattagcagaagaaattgaaaagctgagatctgaacttgaccaattgaaaatgagaactggctctttaattgaacccacaataccaagaactcatctagacacctcagctgagttgcggtactcagtgggatccctagtggacagccagtctgattacagaacaactaaagtaataagaagaccaaggagaggccgcatgggtgtgcgaagagatgagccaaaggtgaaatctcttggggatcacgagtggaatagaactcaacagattggagtactaagcagccacccttttgaaagtgacactgaaatgtctgatattgatgatgatgacagagaaacaatttttagctcaatggatcttctctctccaagtggtcattccgatgcccagacgctagccatgatgcttcaggaacaattggatgccatcaacaaagaaatcaggctaattcaggaagaaaaagaatctacagagttgcgtgctgaagaaattgaaaatagagtggctagtgtgagcctcgaaggcctgaatttggcaagggtccacccaggtacctccattactgcctctgttacagcttcatcgctggccagttcatctccccccagtggacactcaactccaaagctcacccctcgaagccctgccagggaaatggatcggatgggagtcatgacactgccaagtgatctgaggaaacatcggagaaagattgcagttgtggaagaagatggtcgagaggacaaagcaacaattaaatgtgaaacttctcctcctcctacccctagagccctcagaatgactcacactctcccttcttcctaccacaatgatgctcgaagtagtttatctgtctctcttgagccagaaagcctcgggcttggtagtgccaacagcagccaagactctcttcacaaagcccccaagaagaaaggaatcaagtcttcaataggacgtttgtttggtaaaaaagaaaaagctcgacttgggcagctccgaggctttatggagactgaagctgcagctcaggagtccctggggttaggcaaactcggaactcaagctgagaaggatcgaagactaaagaaaaacacatctgggcatgaacttcttgaagaagctcggagaaagggattaccttttgcccagtgggatgggccaactgtggtcgcatggctagagctttggttgggaatgcctgcgtggtacgtggcagcctgccgagccaacgtgaagagtggtgccatcatgtctgctttatctgacactgagatccagagagaaattggaatcagcaatccactgcatcgcttaaaacttcgattagcaatccaggagatggtttccctaacaagtccttcagctcctccaacatctcgaactccttcaggcaacgtttgggtgactcatgaagaaatggaaaatcttgcagctccagcaaaaacgaaagaatctgaggaaggaagctgggcccagtgtccggtttttctacagaccctggcttatggagatatgaatcatgagtggattggaaatgaatggcttcccagcttggggttacctcagtacagaagttactttatggaatgcttggtagatgcaagaatgttagatcacctaacaaaaaaagatctccgtgtccatttaaaaatggtggatagtttccatcgaacaagtttacaatatggaattatgtgcttaaagaggttgaattatgacagaaaagaactagaaagaagacgggaagcaagccaacatgaaataaaagacgtgttggtgtggagcaatgaccgagttattcgctggatacaagcaattggacttcgagaatatgcaaataatatacttgagagcggtgtgcatggctcacttatagccctggatgaaaactttgactacagcagcttagctttattattacagattccaacacagaacacccaggcaaggcagattcttgaaagagaatacaataacctcttggccctgggaactgaaaggcgactggatgaaagtgatgacaagaacttcagacgtggatcaacctggagaaggcagtttcctcctcgtgaagtacatggaatcagcatgatgcctgggtcctcagaaacattaccagctggatttaggttaaccacaacctctgggcagtcaagaaaaatgacaacagatgatggcgtcttttcagtctactctacctaaagtgcactaccatctaagaagacgagcagtgaaaacctttgtgaaaactgaattctaaggaaataatgacgtcatgacttattaaaagctgaaaaatgtgatttttggggggagtcagatattacatttgattagtttactacaaattgtaataaaatgcttaagtcatttgaataataaacatcatctacatcataaactctgtacaacagatgcttttatgaaatgaagccagttgtttttcatgttttattgtaatatactaggcatttatgtattaccgtgcatttctttttaaatgtgtaagtcttatgtaaatggatataaatatgattttttaaaaaataaaatatatggttcatggagtctcgagtgcaaacatttgacaattccaagtactgtttgtattttaccattccaccatttttacagtttttggattgttaatagtcaaatcaatatgtttccttgaagcatgtttcatgcttcaacgtgtttctccttcaagtctgtcaatacttaaagctgaacaacctgcctctgatcatgtaaaaaagaatgatttaacctggaaccggagccaaaaatagagctttaaaggcaatcagggatgtcctatatctttagaaatagcactgtgatggcttgatctccttttcaatacaaaacaaagccaagctgtttacaagggtcaaaagcaattatttaaaaatttatattaaaaaaccataatcttctcttgttacctgtggacc

SEQ ID NO: 83598 - DNA, 3708 bp, Artificial Sequence
  derived and/or modified sequence
atgatgtgtgaagtgatgcccacgattaatgaggacaccccaatgagccaaagggggtcccaaagcagtggctcggactcagactcccattttgagcagctgatggtgaatatgctagatgaaagggatcgtcttctagacacccttcgggagacccaggaaagcctctcacttgcccagcaaagacttcaggatgtcatctatgaccgagactcactccagagacagctcaattcagccctgccacaggaatttgctgcactgacaaaagaattaaatgcctgcagggaacaacttctagaaaaggaagaagaaatctctgaacttaaagctgaaagaaacaacacaagactattactggagcatttggagtgccttgtgtcacgacatgaaagatcactaagaatgacggtggtaaaacggcaagcccagtctccctcaggagtatccagtgaagttgaagttctcaaggcactgaaatctttgtttgagcaccacaaggccttggatgaaaaggtaagggagcgactgagggtttctttagaaagagtctctgcactggaagaagaactagctgctgctaatcaggagattgttgccttgcgtgaacaaaatgttcatatacaaagaaaaatggcatcaagcgagggatccacagagtcagaacatcttgaagggatggaacctggacagaaagtccatgagaagcgtttgtccaatggttctatagactcaaccgatgaaactagtcaaatagttgaactacaagaattgcttgaaaagcaaaactatgaaatggcccagatgaaagaacgtttagcagccctttcttcccgagtgggagaggtggaacaggaagcagagacagcaagaaaggatctcattaaaacagaagaaatgaacaccaagtatcaaagggacattagggaggccatggcacaaaaggaagatatggaagaaagaattacaacccttgaaaagcgttacctcagtgctcagagagaatctacctccatacatgacatgaatgataaactagaaaatgagttagcaaataaagaagctatcctgcggcagatggaagagaaaaacagacagttacaagaacgtcttgagctagctgaacaaaagttgcagcagaccatgagaaaggctgaaaccttgcctgaagtagaggctgaactggctcagagaattgcagccctaaccaaggctgaagagagacatggaaatattgaagaacgtatgagacatttagagggtcaacttgaagagaagaatcaagaacttcaaagagctaggcaaagagagaaaatgaatgaggagcataacaagagattatcggatacggttgatagacttctgactgaatccaatgaacgcctacaactacacttaaaggaaagaatggctgctctagaagaaaagaatgttttaattcaagaatcagaaactttcagaaagaatcttgaagaatctttacatgataaggaaagattagcagaagaaattgaaaagctgagatctgaacttgaccaattgaaaatgagaactggctctttaattgaacccacaataccaagaactcatctagacacctcagctgagttgcggtactcagtgggatccctagtggacagccagtctgattacagaacaactaaagtaataagaagaccaaggagaggccgcatgggtgtgcgaagagatgagccaaaggtgaaatctcttggggatcacgagtggaatagaactcaacagattggagtactaagcagccacccttttgaaagtgacactgaaatgtctgatattgatgatgatgacagagaaacaatttttagctcaatggatcttctctctccaagtggtcattccgatgcccagacgctagccatgatgcttcaggaacaattggatgccatcaacaaagaaatcaggctaattcaggaagaaaaagaatctacagagttgcgtgctgaagaaattgaaaatagagtggctagtgtgagcctcgaaggcctgaatttggcaagggtccacccaggtacctccattactgcctctgttacagcttcatcgctggccagttcatctccccccagtggacactcaactccaaagctcacccctcgaagccctgccagggaaatggatcggatgggagtcatgacactgccaagtgatctgaggaaacatcggagaaagattgcagttgtggaagaagatggtcgagaggacaaagcaacaattaaatgtgaaacttctcctcctcctacccctagagccctcagaatgactcacactctcccttcttcctaccacaatgatgctcgaagtagtttatctgtctctcttgagccagaaagcctcgggcttggtagtgccaacagcagccaagactctcttcacaaagcccccaagaagaaaggaatcaagtcttcaataggacgtttgtttggtaaaaaagaaaaagctcgacttgggcagctccgaggctttatggagactgaagctgcagctcaggagtccctggggttaggcaaactcggaactcaagctgagaaggatcgaagactaaagaaaaaggttataaggcatgaacttcttgaagaagctcggagaaagggattaccttttgcccagtgggatgggccaactgtggtcgcatggctagagctttggttgggaatgcctgcgtggtacgtggcagcctgccgagccaacgtgaagagtggtgccatcatgtctgctttatctgacactgagatccagagagaaattggaatcagcaatccactgcatcgcttaaaacttcgattagcaatccaggagatggtttccctaacaagtccttcagctcctccaacatctcgaactccttcaggcaacgtttgggtgactcatgaagaaatggaaaatcttgcagctccagcaaaaacgaaagaatctgaggaaggaagctgggcccagtgtccggtttttctacagaccctggcttatggagatatgaatcatgagtggattggaaatgaatggcttcccagcttggggttacctcagtacagaagttactttatggaatgcttggtagatgcaagaatgttagatcacctaacaaaaaaagatctccgtgtccatttaaaaatggtggatagtttccatcgaaaaaaaagaacaagtttacaatatggaattatgtgcttaaagaggttgaattatgacagaaaagaactagaaagaagacgggaagcaagccaacatgaaataaaagacgtgttggtgtggagcaatgaccgagttattcgctggatacaagcaattggacttcgagaatatgcaaataatatacttgagagcggtgtgcatggctcacttatagccctggatgaaaactttgactacagcagcttagctttattattacagattccaacacagaacacccaggcaaggcagattcttgaaagagaatacaataacctcttggccctgggaactgaaaggcgactggatgaaagtgatgacaagaacttcagacgtggatcaacctggagaaggcagtttcctcctcgtgaagtacatggaatcagcatgatgcctgggtcctcagaaacattaccagctggatttaggttaaccacaacctctgggcagtcaagaaaaatgacaacagatgatggcgtcttttcagtctactctacctaa

SEQ ID NO: 83599 - DNA, 3699 bp, Artificial Sequence
  derived and/or modified sequence
atgatgtgtgaggtcatgcccaccattaatgaggacacacccatgtcacagcgcggatcacagtccagcggctcagattccgactcccactttgagcagctcatggtgaatatgcttgacgaaagagacagactgctagacaccctccgagagacacaggagagcctgtctctggcccagcagagacttcaggacgtaatatatgatagggattcgttacaaaggcagctaaactctgctctcccccaggagtttgccgcattgaccaaggagctgaacgcatgccgggagcaactcctggagaaggaggaagagatcagtgaacttaaagccgaacgtaataacacccggctgttgttggagcacctcgagtgcctagtgagtaggcatgagcggagtctgcgtatgacggttgtaaaacgacaagcccagtctccctctggcgtcagctcggaggtcgaggtccttaaagcgctaaagagcctctttgagcatcataaggccctggatgaaaaggtaagggaaaggctacgcgtgtctttggagcgggtgagtgcccttgaggaggagctggccgctgcaaatcaggaaatagtggcattaagggagcagaacgtgcatatccagaggaagatggcttcctccgagggatcaaccgagagtgagcatttggagggcatggagcctggtcaaaaggtacatgaaaagcgtttgagcaatggcagcattgacagcacagacgagacttctcagatcgtggaattgcaggaactactggaaaagcagaattatgagatggcacagatgaaggagaggctcgccgcactgagctctcgtgttggggaggtggagcaggaggcagagaccgctagaaaagacctgattaagaccgaagagatgaataccaagtaccagagagacatccgcgaggccatggcccagaaggaggatatggaggagaggataactacactcgaaaaaagatacttgtctgctcagagagaaagtacttcaattcacgatatgaatgataagcttgagaatgaactggctaacaaggaagcgatcctccgccagatggaggaaaagaatcgccagttgcaggagaggctggaactggcagaacagaagctgcagcagacaatgagaaaggccgagacactgcccgaggtcgaagccgaattggcgcagaggatcgcagcgctgaccaaggccgaggaacgtcacggcaacattgaagagcggatgagacacctggaaggtcagctagaagagaaaaatcaggagctgcagagggcaagacagcgggaaaagatgaacgaggaacataacaaacgcctgtcggatacggtggatcggctgctcaccgaaagcaatgaaagactccagcttcatctaaaagaaagaatggccgctctcgaggagaaaaacgttctgatccaagagtccgaaacatttagaaagaatctcgaggaatcattgcatgataaagagcgccttgcagaggaaattgagaaattacggtccgaactcgaccagttgaaaatgagaacagggagtctcatcgaaccgacgattcctaggacacacctggatacgtccgctgaattgcggtactcggtggggagtctagttgacagccagagcgactaccgcacaactaaagtgatccgcaggcccaggagaggcagaatgggagtccgcagagatgagcccaaggtgaagagtctcggagaccacgagtggaataggactcaacagataggggtgctttcttcccacccatttgaatcagataccgagatgagcgatatcgacgacgatgaccgagagaccatattctccagcatggacttgctatctccttccggacactcagatgcgcagacgctggccatgatgctgcaagagcagctagatgccatcaacaaagagatccgactgattcaggaagaaaaagaatccacagagcttcgagctgaggagatcgagaaccgggttgcatctgtgagtctcgaagggttgaaccttgctagagtacacccaggcactagtataaccgcgtctgtaactgcttcgagtctggcttcttcatcccctccctcgggacactccactcccaaactgacaccaaggtctcccgcaagggagatggaccgtatgggggtgatgaccctgccttctgacctgcgcaaacatcgaagaaaaattgccgtggtggaagaggacggcagagaggacaaggcaacaataaaatgtgagacaagtccaccaccaacaccacgtgccctgaggatgacccacaccctacctagttcataccacaacgatgccaggagttcattaagtgtgagcctggagccagaatccttgggactagggtcggctaattcctcacaggattcgctgcacaaagctccaaagaagaaggggattaaatcatccattggcaggctgtttggtaagaaagaaaaagcccgactcgggcagctgaggggctttatggaaaccgaggctgcggctcaggagtccctggggttgggaaaactgggaacacaagctgagaaagataggcgcctgaaaaaaaatacgagcggtcacgagctgcttgaggaggcccgacggaaggggctgccattcgcacagtgggatgggccaaccgtggtcgcatggctggaactgtggttaggcatgcccgcatggtacgtcgcggcttgtagagccaacgttaagagcggcgcaatcatgagtgccctgagcgatactgaaattcagagggaaattgggatttctaacccgttgcataggctaaaattgcggcttgccatacaggagatggttagcctgacctcccccagcgcaccccctacatcccggactccatccggaaacgtgtgggtgacccacgaagaaatggagaatttggctgccccagccaaaacgaaggagtcggaggagggcagttgggcacaatgtcctgtttttctccagactctcgcatacggggatatgaaccacgagtggattggcaacgaatggctgccgagtcttggactgccccagtaccgcagttatttcatggagtgtctcgtggatgcccgaatgctggatcacttaacaaagaaagatcttagggttcacctcaagatggtcgactcttttcacagaacgtctctgcagtatgggataatgtgtttaaaacgactaaactacgataggaaagagctggaacgccgaagggaagcatctcaacatgaaatcaaggacgtgttggtgtggagcaatgaccgcgttatccggtggatccaagctataggactgcgcgagtatgcaaataacattctggaatccggcgtgcatgggagcttgattgctcttgacgaaaactttgactactcatcactggcactactgctacaaatccccacccagaatacccaggcaagacagatactggaaagagagtacaacaatctactggctttgggcacagagagacggctggacgagagcgatgataagaacttccggagaggctctacctggaggagacagttccctcccagagaagtgcacggaatttcaatgatgccaggcagcagtgaaacgctgcctgctggatttcggctgactaccactagcgggcagagtaggaagatgaccacggacgacggcgtattttccgtctactctacttag

SEQ ID NO: 83600 - DNA, 3708 bp, Artificial Sequence
  derived and/or modified sequence
atgatgtgcgaagtaatgccgaccataaatgaagatacccccatgagccagcggggttctcagtcaagcggcagtgatagcgattcccactttgagcagctgatggtgaatatgttagacgagcgggatagactcttagacactcttcgtgagacccaagaatctctgagcctagcgcaacagaggctccaggatgttatttatgacagggattctcttcagagacagctcaatagcgcattgcctcaggagtttgccgcactgacaaaagagttaaatgcttgcagagaacagctactcgaaaaggaggaggaaatatctgagttgaaggctgaacggaataacactcgcctgttgctcgaacaccttgaatgccttgtcagtcgtcatgaaaggtccttgaggatgactgtggtgaaacggcaggcacaaagtccatccggagtttccagtgaggtagaggtgcttaaagccttgaaaagcctgtttgagcaccacaaagccctagatgaaaaggtaagagaaagactgcgtgtgtctctggaaagggtgagtgctttggaggaagagctggccgcagctaaccaggagatcgtggcactgagggaacagaatgtgcatatccagcggaaaatggcttcgtctgaaggtagcacggagagcgaacatcttgagggaatggagccaggacagaaagtgcacgagaaaagactttcgaacggaagcattgacagcacagacgaaacaagccaaattgtggaacttcaggaactcctcgagaagcagaactatgagatggcccagatgaaggaaaggctggcagctctctcctcgcgcgtgggtgaggttgagcaggaagcagagacggctcgcaaagatctgatcaaaacggaagagatgaatacaaagtatcagagggatatccgggaggctatggcacagaaggaggatatggaagaacgtatcacaaccctggaaaagcggtatctttccgcccagagggagtccaccagtatccacgatatgaacgacaaactagagaacgagttggcgaacaaggaggcgattctccggcaaatggaggaaaaaaaccgccagctgcaagagcggttggagctggccgaacagaagctgcagcagaccatgcgcaaggccgaaacactcccagaggtcgaagccgaattagctcagaggattgccgctctcactaaggcagaggagcgccacggcaatatagaggagcgaatgaggcatctcgaaggccagctggaagagaaaaatcaagagttgcagcgggctaggcagcgtgagaagatgaacgaggaacataataagagactcagtgatactgttgacagactcctaactgagagcaacgagagattgcagttacacctgaaggaacggatggcggcattggaagagaagaatgtgctgatccaggagtctgagactttcagaaaaaatcttgaagagtccttacacgataaggagcgacttgccgaggaaattgagaaactgcggtccgaactggaccagctcaaaatgaggactggcagcctgatcgagcccacgatccccaggacccaccttgatacttccgcagagcttcgatacagcgtgggctccctggtcgacagtcagtccgactatcggaccactaaggtgattagaaggccacgccgaggcaggatgggtgttcgcagggacgaacccaaggtcaagagccttggtgatcacgaatggaaccggactcagcagatcggagtcctgtcttcccacccatttgagtctgacaccgaaatgagtgatattgacgacgacgatcgggaaaccattttcagctccatggacctgctttctccaagcggtcactccgacgcccagaccttggctatgatgctccaggagcagctcgatgccataaataaagaaattagactgatccaggaggagaaagagtccaccgaactgagagcagaagaaatcgagaacagggtggcatccgtcagtttggagggtctcaatcttgctcgggtgcacccaggcacttccatcaccgcaagcgttaccgcgtcaagtttagccagtagtagccccccttccggacactctactccaaagctgacacctaggtcgccggcaagggagatggacagaatgggcgttatgaccctcccgagcgatctccgcaaacaccgccgaaagattgcagtcgtcgaggaggatggcagggaggataaagcaaccatcaagtgcgagactagcccgccacctacgccacgagcgttgagaatgacccatacacttcccagtagctaccacaacgatgcgagaagcagcctgtctgtaagcctggagccagagagtcttggtttgggctcagctaactcgagccaggattcgctccacaaagctcccaaaaaaaaagggatcaaaagctcaatcgggaggctgttcggaaaaaaagaaaaagccagactcgggcagttacgcggttttatggagacagaggcagccgctcaggagtctcttggcctcggaaagcttgggacccaggctgaaaaggaccgacgcctgaaaaagaaggtaattcggcatgagctcctcgaggaggccaggaggaaagggctgccctttgcgcagtgggatggccctaccgtcgtcgcttggctggagttgtggctcggcatgcctgcttggtacgtggccgcttgtagggcaaatgttaaatcaggggctattatgtcagcactgtcagatacggagatccagcgggagatcgggatctctaaccctctgcataggctgaaactgaggctagctattcaggaaatggtgagccttacgtctccctcagcaccccctaccagtagaacaccttcgggaaacgtctgggtgacccatgaggaaatggagaacctggctgctccagcaaaaactaaggagtctgaagagggcagttgggctcagtgtccggtctttcttcagactctagcttacggcgatatgaatcatgaatggatcggaaacgaatggctcccctccttggggctgccccagtatcgatcatattttatggagtgtctcgtcgatgccagaatgctagatcatctgaccaagaaggaccttcgggtccacctcaagatggttgactcctttcataggaagaagaggacgagcctccagtatggcatcatgtgtttgaagcgcctgaattatgaccggaaggaactggaaaggcgtagagaagcaagccaacacgaaatcaaagacgtcctggtgtggtccaatgatcgggttatcaggtggattcaggccattggtctccgcgaatatgccaataatattcttgagtccggtgttcatgggtctttgattgctctcgacgagaattttgattactccagtcttgcacttctgctccagattcccacccagaacacgcaggcccgtcagattctggagcgggagtataacaacctgctcgcactcggaactgagcgcagactcgacgagtccgatgataaaaactttcgaagagggtcaacctggcgaagacagttcccacctcgtgaagtgcacgggatttctatgatgcccggttcctctgagacactcccagcaggattccgacttacaaccacaagtggccaatcccgaaaaatgactaccgacgacggggtgttctctgtgtactccacctag

SEQ ID NO: 83601 - protein, 1236 aa, Artificial Sequence
  derived and/or modified sequence
MMCEVMPTINEDTPMSQRGSQSSGSDSDSHFEQLMVNMLDERDRLLDTLRETQESLSLAQQRLQDVIYDRDSLQRQLNSALPQDIESLTGGLAGSKGADPPEFAALTKELNACREQLLEKEEEISELKAERNNTRLLLEHLECLVSRHERSLRMTVVKRQAQSPSGVSSEVEVLKALKSLFEHHKALDEKVRERLRVSLERVSALEEELAAANQEIVALREQNVHIQRKMASSEGSTESEHLEGMEPGQKVHEKRLSNGSIDSTDETSQIVELQELLEKQNYEMAQMKERLAALSSRVGEVEQEAETARKDLIKTEEMNTKYQRDIREAMAQKEDMEERITTLEKRYLSAQRESTSIHDMNDKLENELANKEAILRQMEEKNRQLQERLELAEQKLQQTMRKAETLPEVEAELAQRIAALTKAEERHGNIEERMRHLEGQLEEKNQELQRARQREKMNEEHNKRLSDTVDRLLTESNERLQLHLKERMAALEEKNVLIQESETFRKNLEESLHDKERLAEEIEKLRSELDQLKMRTGSLIEPTIPRTHLDTSAELRYSVGSLVDSQSDYRTTKVIRRPRRGRMGVRRDEPKVKSLGDHEWNRTQQIGVLSSHPFESDTEMSDIDDDDRETIFSSMDLLSPSGHSDAQTLAMMLQEQLDAINKEIRLIQEEKESTELRAEEIENRVASVSLEGLNLARVHPGTSITASVTASSLASSSPPSGHSTPKLTPRSPAREMDRMGVMTLPSDLRKHRRKIAVVEEDGREDKATIKCETSPPPTPRALRMTHTLPSSYHNDARSSLSVSLEPESLGLGSANSSQDSLHKAPKKKGIKSSIGRLFGKKEKARLGQLRGFMETEAAAQESLGLGKLGTQAEKDRRLKKKHELLEEARRKGLPFAQWDGPTVVAWLELWLGMPAWYVAACRANVKSGAIMSALSDTEIQREIGISNPLHRLKLRLAIQEMVSLTSPSAPPTSRTKESEEGSWAQCPVFLQTLAYGDMNHEWIGNEWLPSLGLPQYRSYFMECLVDARMLDHLTKKDLRVHLKMVDSFHRTSLQYGIMCLKRLNYDRKELERRREASQHEIKDVLVWSNDRVIRWIQAIGLREYANNILESGVHGSLIALDENFDYSSLALLLQIPTQNTQARQILEREYNNLLALGTERRLDESDDKNFRRGSTWRRQFPPREVHGISMMPGSSETLPAGFRLTTTSGQSRKMTTDVASSRLQRLDNSTVRTYSC

SEQ ID NO: 83602 - DNA, 3711 bp, Artificial Sequence
  derived and/or modified sequence
atgatgtgcgaggtgatgcccaccatcaacgaggacacccccatgagccagagaggcagccagagcagcggcagcgacagcgacagccacttcgagcagctgatggtgaacatgctggacgagagagacagactgctggacaccctgagagagacccaggagagcctgagcctggcccagcagagactgcaggacgtgatctacgacagagacagcctgcagagacagctgaacagcgccctgccccaggacatcgagagcctgaccggcggcctggccggcagcaagggcgccgacccccccgagttcgccgccctgaccaaggagctgaacgcctgcagagagcagctgctggagaaggaggaggagatcagcgagctgaaggccgagagaaacaacaccagactgctgctggagcacctggagtgcctggtgagcagacacgagagaagcctgagaatgaccgtggtgaagagacaggcccagagccccagcggcgtgagcagcgaggtggaggtgctgaaggccctgaagagcctgttcgagcaccacaaggccctggacgagaaggtgagagagagactgagagtgagcctggagagagtgagcgccctggaggaggagctggccgccgccaaccaggagatcgtggccctgagagagcagaacgtgcacatccagagaaagatggccagcagcgagggcagcaccgagagcgagcacctggagggcatggagcccggccagaaggtgcacgagaagagactgagcaacggcagcatcgacagcaccgacgagaccagccagatcgtggagctgcaggagctgctggagaagcagaactacgagatggcccagatgaaggagagactggccgccctgagcagcagagtgggcgaggtggagcaggaggccgagaccgccagaaaggacctgatcaagaccgaggagatgaacaccaagtaccagagagacatcagagaggccatggcccagaaggaggacatggaggagagaatcaccaccctggagaagagatacctgagcgcccagagagagagcaccagcatccacgacatgaacgacaagctggagaacgagctggccaacaaggaggccatcctgagacagatggaggagaagaacagacagctgcaggagagactggagctggccgagcagaagctgcagcagaccatgagaaaggccgagaccctgcccgaggtggaggccgagctggcccagagaatcgccgccctgaccaaggccgaggagagacacggcaacatcgaggagagaatgagacacctggagggccagctggaggagaagaaccaggagctgcagagagccagacagagagagaagatgaacgaggagcacaacaagagactgagcgacaccgtggacagactgctgaccgagagcaacgagagactgcagctgcacctgaaggagagaatggccgccctggaggagaagaacgtgctgatccaggagagcgagaccttcagaaagaacctggaggagagcctgcacgacaaggagagactggccgaggagatcgagaagctgagaagcgagctggaccagctgaagatgagaaccggcagcctgatcgagcccaccatccccagaacccacctggacaccagcgccgagctgagatacagcgtgggcagcctggtggacagccagagcgactacagaaccaccaaggtgatcagaagacccagaagaggcagaatgggcgtgagaagagacgagcccaaggtgaagagcctgggcgaccacgagtggaacagaacccagcagatcggcgtgctgagcagccaccccttcgagagcgacaccgagatgagcgacatcgacgacgacgacagagagaccatcttcagcagcatggacctgctgagccccagcggccacagcgacgcccagaccctggccatgatgctgcaggagcagctggacgccatcaacaaggagatcagactgatccaggaggagaaggagagcaccgagctgagagccgaggagatcgagaacagagtggccagcgtgagcctggagggcctgaacctggccagagtgcaccccggcaccagcatcaccgccagcgtgaccgccagcagcctggccagcagcagcccccccagcggccacagcacccccaagctgacccccagaagccccgccagagagatggacagaatgggcgtgatgaccctgcccagcgacctgagaaagcacagaagaaagatcgccgtggtggaggaggacggcagagaggacaaggccaccatcaagtgcgagaccagccccccccccacccccagagccctgagaatgacccacaccctgcccagcagctaccacaacgacgccagaagcagcctgagcgtgagcctggagcccgagagcctgggcctgggcagcgccaacagcagccaggacagcctgcacaaggcccccaagaagaagggcatcaagagcagcatcggcagactgttcggcaagaaggagaaggccagactgggccagctgagaggcttcatggagaccgaggccgccgcccaggagagcctgggcctgggcaagctgggcacccaggccgagaaggacagaagactgaagaagaagcacgagctgctggaggaggccagaagaaagggcctgcccttcgcccagtgggacggccccaccgtggtggcctggctggagctgtggctgggcatgcccgcctggtacgtggccgcctgcagagccaacgtgaagagcggcgccatcatgagcgccctgagcgacaccgagatccagagagagatcggcatcagcaaccccctgcacagactgaagctgagactggccatccaggagatggtgagcctgaccagccccagcgccccccccaccagcagaaccaaggagagcgaggagggcagctgggcccagtgccccgtgttcctgcagaccctggcctacggcgacatgaaccacgagtggatcggcaacgagtggctgcccagcctgggcctgccccagtacagaagctacttcatggagtgcctggtggacgccagaatgctggaccacctgaccaagaaggacctgagagtgcacctgaagatggtggacagcttccacagaaccagcctgcagtacggcatcatgtgcctgaagagactgaactacgacagaaaggagctggagagaagaagagaggccagccagcacgagatcaaggacgtgctggtgtggagcaacgacagagtgatcagatggatccaggccatcggcctgagagagtacgccaacaacatcctggagagcggcgtgcacggcagcctgatcgccctggacgagaacttcgactacagcagcctggccctgctgctgcagatccccacccagaacacccaggccagacagatcctggagagagagtacaacaacctgctggccctgggcaccgagagaagactggacgagagcgacgacaagaacttcagaagaggcagcacctggagaagacagttcccccccagagaggtgcacggcatcagcatgatgcccggcagcagcgagaccctgcccgccggcttcagactgaccaccaccagcggccagagcagaaagatgaccaccgacgtggccagcagcagactgcagagactggacaacagcaccgtgagaacctacagctgctag

SEQ ID NO: 83603 - DNA, 366 bp, Artificial Sequence
  derived and/or modified sequence
atgatgtgcgaggtgatgcccaccatcaacgaggacacccccatgagccagagaggcagccagagcagcggcagcgacagcgacagccacttcgagcagctgatggtgaacatgctggacgagagagacagactgctggacaccctgagagagacccaggagagcctgagcctggcccagcagagactgcaggacgtgatctacgacagagacagcctgcagagacagctgaacagcgccctgccccaggacatcgagagcctgaccggcggcctggccggcagcaagggcgccgacccccccgagttcgccgccctgaccaaggagctgaacgcctgcagagagcagctgctggagaaggagtag

SEQ ID NO: 83604 - DNA, 3711 bp, Artificial Sequence
  derived and/or modified sequence
atgatgtgtgaagtgatgcccacaataaacgaggacacaccgatgagccagcgagggtcgcaatcttctggctccgattccgattcacacttcgaacagttgatggttaatatgctcgacgaacgcgaccgcctgttagacactttgcgcgaaacacaggagtctctgtccctagcacagcagaggttacaggatgtcatatatgatagggacagcctccagcggcaactcaatagcgccctccctcaggacatagagtcactgaccggtggtctggccggatccaagggtgccgacccgccagagtttgccgccttaaccaaggagctaaatgcctgccgagagcagttactggaaaaagaagaagagatctcggagttgaaggcggagaggaacaatacacgcctcctactggagcatctggagtgcctggtctcaaggcacgaacggagcctgagaatgacggtggtcaagaggcaggcccagtctccttcaggcgtctcaagtgaggtggaagtgcttaaagccctgaaatctcttttcgagcaccataaagccctagacgagaaggttcgcgagaggctgagagtatctctcgaaagagtatctgctcttgaggaagaactggccgcagcaaaccaggaaattgtggctctgagggagcagaacgtccacattcaacggaagatggcctcctctgagggctcaactgaatctgaacatctggagggaatggagcctggtcagaaggtgcacgagaagaggctctctaatgggtctatcgattccaccgatgagacatcccagatagttgaactgcaggaactactggagaagcagaactatgagatggctcagatgaaggaacgactcgccgccctaagctcgagggtgggcgaggtcgagcaggaagctgaaacagcgcggaaagaccttattaagacggaggagatgaataccaagtaccagcgcgatattagagaggctatggctcagaaggaggacatggaggagcggatcaccactctggagaagcggtacctgtctgctcagcgcgagtctacatccatacacgacatgaacgacaaactcgaaaatgagctggcaaacaaagaggctatcctgcggcaaatggaggagaaaaaccgtcagctgcaggagcgcctggaacttgccgagcagaaacttcagcagaccatgcggaaggccgagaccctgcccgaggtcgaggccgagctggcccagcgcatcgcggccctgacaaaggccgaagaacgccacggcaatattgaggaacgcatgcggcacctggaaggacagctggaagagaagaatcaggaactccagcgggccaggcagcgggaaaaaatgaatgaggaacacaataagcggttgtccgataccgtggatagacttttaactgaatccaatgagcgcttacagttacatctaaaagaaagaatggccgcccttgaggagaagaatgttttgattcaagagtccgagacatttagaaagaacttggaggagtcactgcacgacaaggagcgcctcgcagaagagattgagaagttaaggtccgaattggaccagctcaagatgcggaccggatcactgatcgagcccaccatacctcgaacacacctggacacaagcgccgaactcaggtacagtgttgggtcactggtggactcccaatccgattaccgtacaacaaaggtgattcggaggccacgcagggggcgtatgggcgtccgcagagacgaaccaaaggttaagtctctgggggaccacgagtggaatagaactcagcagatcggtgtgctctcgtcacacccctttgagtccgacactgagatgtcagatatcgatgatgacgatcgggagacgatcttctctagtatggacctgttgtctccgagcggacacagtgacgcccagacgctggctatgatgctgcaggagcagctcgacgctatcaacaaagagattaggctgatccaggaggaaaaagaatcgacggagctgcgagcggaggagatagagaatagagtggccagcgttagtcttgaaggactgaatctggcccgggtgcacccaggcaccagcattaccgcctctgtgacggcatcgagcttagcctcctcatcaccacccagtgggcattctacccccaaactgaccccacgctcccctgcgagggaaatggaccgcatgggggtaatgactcttccctcagacctacggaagcaccggaggaagattgccgtagttgaagaggatgggagggaagacaaagctacgatcaagtgtgaaacatcgcccccccccactccacgtgccctccgcatgacccatacgctgccaagctcttatcacaatgatgctcggtccagtctgagcgtgtcactggagccagaatctctgggactgggtagtgccaatagctcccaggactctttgcacaaagctccaaaaaaaaaaggcatcaaatcatcaatcggacgattgtttggtaagaaggagaaagcccgccttgggcagctgcgcggctttatggaaaccgaagcagcagctcaagagagcctggggcttgggaaactaggcacgcaagctgaaaaagatcgtagacttaagaagaagcacgagttgctggaagaggccaggcgtaaggggctgccctttgcgcagtgggacggccccacggtcgtggcctggctcgaactatggctggggatgccagcctggtatgtggctgcgtgccgggctaacgtgaagtctggcgcgattatgtctgccctgagcgacacagagatccagcgggagattggcatctccaatccactgcacaggctcaagttgagattggctatccaggaaatggtgtctcttacctcaccttcagcccctccaacctcgcgcactaaggagtcagaggaaggctcttgggcccagtgccccgttttcttgcagacattagcatacggggacatgaaccacgaatggatcggtaatgaatggctgcccagcctggggctgccgcagtatagatcttacttcatggagtgcctggtcgacgcacgcatgttggaccacctaaccaaaaaagatctcagagtccaccttaagatggtcgattccttccaccgaaccagccttcagtatggaatcatgtgcctgaagaggctgaattatgataggaaggaactagaaaggcgacgcgaagctagccagcacgagattaaagatgtgctggtgtggagcaatgatagagtgatccggtggatccaagccattgggctgcgcgaatatgccaataatattctggaatctggcgtgcatggcagtttgattgcactcgatgagaacttcgattactcctcactcgcacttttgttgcagatccccactcagaacactcaggcccggcagattctggagcgcgagtataataacctgctggcacttggaacggaacgtcggttagacgagagcgatgataagaactttcggagagggagcacatggcgtcgccagtttccacccagggaggtgcacgggatcagcatgatgcccggatcttcagaaacacttccggccggtttccgtttaactaccacgtcaggtcagtcccggaaaatgactacagacgtggctagcagcaggctccaaagactggataatagcacggtgaggacttacagttgctag

SEQ ID NO: 83605 - DNA, 366 bp, Artificial Sequence
  derived and/or modified sequence
atgatgtgcgaagtgatgccaaccatcaacgaggatacgcctatgagccagcggggatcccagtcgagcggatctgacagcgactcacattttgagcaactcatggtgaatatgctcgacgagcgcgatcggctgctggatacactgcgagaaacccaggagagtctttcactcgcacagcaaagactccaggatgttatttacgacagggactccctgcagaggcagctcaatagcgcgctgccccaagacattgaaagtctgaccggtgggctcgccggttccaagggcgccgacccaccagaatttgctgcacttaccaaagagttgaacgcttgtcgggagcagctcctggagaaagagtag

SEQ ID NO: 83606 - DNA, 3711 bp, Artificial Sequence
  derived and/or modified sequence
atgatgtgtgaggtgatgcccaccatcaatgaagacacccccatgagccagaggggcagccagagcagcggcagtgacagcgacagccactttgagcagctgatggtgaacatgctggatgagcgggaccggctgctggacaccctgcgggagacccaggagagcctgagcctggcccagcagaggctgcaggatgtgatctatgaccgggacagcctgcagaggcagctgaacagcgccctgccccaggacatcgagagcctgactggaggcctggccggcagcaaaggagctgaccccccagagtttgctgccctgaccaaggagctgaatgcctgccgggagcagctgctggagaaggaggaggagatcagcgagctgaaggccgagaggaacaacacccggctgctgctggagcacctggagtgcctggtgtccagacatgagaggagcctgaggatgacagtggtgaagaggcaggcccagagccccagcggcgtgtcctctgaggtggaggtgctgaaggccctgaagagcctgtttgagcaccacaaggccctggatgagaaggtgcgggagcggctgcgggtgtccctggagcgggtgtctgccctggaggaggagctggccgccgccaaccaggagatcgtggccctgcgggagcagaatgtgcacatccagaggaagatggccagcagcgagggcagcacagaaagtgagcacctggagggcatggagcccggccagaaggtgcatgagaagaggctgagcaatggcagcattgacagcacagatgagaccagccagatcgtggagctgcaggagctgctggagaagcagaactatgagatggcccagatgaaggagcggctggccgccctgagcagccgggtgggggaggtggagcaggaggccgagacagccaggaaggacctgatcaagacagaggagatgaacaccaagtaccagagggacatccgggaggccatggcccagaaggaggacatggaggagcgcatcaccaccctggagaagcgctacctgagcgcccagcgggagagcaccagcatccatgacatgaatgacaagctggagaatgagctggccaacaaggaggccatcctgcggcagatggaggagaagaaccggcagctgcaggagcggctggagctggccgagcagaagctgcagcagaccatgaggaaggccgagaccctgcctgaggtggaggccgagctggcccagagaattgctgccctgaccaaggccgaggagagacatggcaacatcgaggagaggatgaggcacctggagggccagctggaggagaagaaccaggagctgcagagggcccggcagcgggagaagatgaatgaggagcacaacaagaggctgagtgacacagtggaccggctgctgacagagagcaatgaaaggctgcagctgcacctgaaggagaggatggccgccctggaggagaagaatgtgctgatccaggagagcgagaccttcaggaagaacctggaggagagcctgcatgacaaggagcggctggccgaggagattgagaagctgcggtctgagctggaccagctgaagatgaggacaggcagcctcatcgagcccaccatccccaggacccacctggacaccagcgctgagctgcgctacagcgtgggcagcctggtggacagccagagcgactaccgcaccaccaaggtgatccggcggccccggcggggccgcatgggcgtgagaagagatgagcccaaggtgaagagcctgggggaccacgagtggaacagaacccagcagatcggcgtgctgagcagccacccctttgaaagtgacacagagatgtctgacattgatgatgatgaccgggagaccatcttcagctccatggacctgctgagccccagcggccacagtgatgcccagaccctggccatgatgctgcaggagcagctggatgccatcaacaaggagatccgcctcatccaggaggagaaggagagcacagagctgcgggcagaggagattgagaacagagtggcctctgtgtccctggagggcctgaacctggcccgggtgcaccctggcaccagcatcacagcctctgtgacagccagcagcctggccagcagcagcccccccagcggccacagcacccccaagctgacccccaggagccctgcccgggagatggacaggatgggcgtgatgaccctgcccagcgacctgaggaagcacaggaggaagattgctgtggtggaggaggatggccgggaggacaaggccaccatcaagtgtgagaccagccccccacccaccccccgggccctgaggatgacccacaccctgcccagcagctaccacaatgatgcccggagcagcctgtctgtgtccctggagcctgagagcctgggcctgggcagcgccaacagcagccaggacagcctgcacaaggcccccaagaagaagggcatcaagagcagcatcggccgcctgtttgggaagaaggagaaggcccggctgggccagctgcggggcttcatggagacagaagctgctgcccaggagagcctgggcctgggcaagctgggcacccaggccgagaaggaccggcggctgaagaagaagcatgagctgctggaggaggcccggaggaagggcctgccctttgcccagtgggatggccccaccgtggtggcctggctggagctgtggctgggcatgcctgcctggtacgtggccgcctgccgggccaacgtgaagagcggggccatcatgtctgccctgagtgacacagagatccagcgggagatcggcatcagcaaccccctgcaccggctgaagctgcggctggccatccaggagatggtgtccctgaccagccccagcgccccacccaccagcaggaccaaggagagcgaggagggctcctgggcccagtgccctgtgttcctgcagaccctggcctatggagacatgaaccacgagtggattggaaatgagtggctgcccagcctgggcctgccccagtaccgcagctacttcatggagtgcctggtggatgccaggatgctggaccacctgaccaagaaggacctgcgggtgcacctgaagatggtggacagcttccacaggaccagcctgcagtatggcatcatgtgcctgaagaggctgaactatgacaggaaggagctggagaggagaagagaggccagccagcacgagatcaaggatgtgctggtgtggagcaatgacagagtcatccgctggatccaggccatcggcctgcgggagtatgccaacaacatcctggagagcggcgtgcacggcagcctcatcgccctggatgagaactttgactacagcagcctggccctgctgctgcagatccccacccagaacacccaggcccggcagatcctggagcgggagtacaacaacctgctggccctgggcacagagcggcggctggatgaaagtgatgacaagaacttcagaagaggcagcacctggaggcggcagtttcctccccgggaggtgcacggcatctccatgatgcctggcagcagcgagaccctgcctgctggcttccggctgaccaccaccagcggccagagcaggaagatgaccacagatgtggccagcagccggctgcagaggctggacaacagcacagtgaggacctacagctgctag

SEQ ID NO: 83607 - DNA, 366 bp, Artificial Sequence
  derived and/or modified sequence
atgatgtgtgaggtgatgcccaccatcaatgaagacacccccatgagccagaggggcagccagagcagcggcagtgacagcgacagccactttgagcagctgatggtgaacatgctggatgagcgggaccggctgctggacaccctgcgggagacccaggagagcctgagcctggcccagcagaggctgcaggatgtgatctatgaccgggacagcctgcagaggcagctgaacagcgccctgccccaggacatcgagagcctgactggaggcctggccggcagcaaaggagctgaccccccagagtttgctgccctgaccaaggagctgaatgcctgccgggagcagctgctggagaaggagtag

SEQ ID NO: 83608 - DNA, 3711 bp, Artificial Sequence
  derived and/or modified sequence
atgatgtgcgaggtgatgcccaccatcaacgaggacacccccatgagccaaagggggagccagtcatcaggatccgactccgacagccacttcgaacagctcatggtgaacatgctggacgaaagggacaggctgttggacaccctcagagagactcaggagagtctaagtctggctcagcagcggctccaggatgtgatatacgatagggactccctgcaacgccagcttaatagcgcgctgccacaagatattgagagtctgaccggaggcctggccggctctaagggcgccgatcctcccgagttcgcagccctcaccaaagaactaaacgcctgtcgcgagcagttgcttgagaaagaggaagagatttctgagctgaaggcagagcgaaataatacacggctcctactggaacatctagagtgcctcgtgtctcgccacgagcggtctcttcgcatgacagtcgtcaagaggcaggctcagtcaccctctggggttagcagtgaagtggaagtgttgaaggctctcaaaagcctgtttgaacaccacaaggccctggatgagaaggtccgggaacggctgcgagtgagtctagagagagtgtcagcacttgaggaagagctggctgccgcaaatcaggaaatcgtagccctgagggagcaaaacgtgcatatccagcgtaagatggcctcctcagaaggctcgactgagtctgagcacttggagggcatggaacccggccagaaggtgcacgagaaacggctaagcaatgggagcattgattcgaccgacgagacatcacaaatagtcgagctccaggagttgttggagaagcagaactacgagatggcccaaatgaaagaaaggctggctgccttatcttcaagggtcggggaggtcgaacaagaagccgagaccgcccggaaagatctgatcaaaaccgaggaaatgaatactaaatatcagagagacatcagagaggccatggctcaaaaggaggacatggaggagcggattactacactcgaaaagagatatttatctgcccaaagagagagtacctccattcatgacatgaacgataagcttgaaaatgaactggcgaacaaagaagctatcctccgccagatggaggagaaaaacagacaactgcaggagcggctcgagttagctgagcagaagcttcagcagacaatgcggaaagctgagaccttacccgaagtggaggctgagctggctcaacggattgcagcccttacaaaagcagaagagcgtcatggaaacatagaggaacgtatgcggcacctggagggccagctcgaggaaaaaaaccaggagcttcagcgcgctaggcagagagagaaaatgaatgaggaacataacaaaaggctgagcgacacggtcgaccgattactcacagaaagcaacgagaggcttcagctgcacttaaaagaaaggatggccgccctcgaggagaagaatgtcctgatccaggaaagcgaaacttttaggaaaaacctggaggagtctctgcatgacaaggagcgcctcgccgaagagatagaaaagctcagaagcgaacttgaccagcttaagatgcggaccggctccctcattgagcccacaatcccaagaacccatctggacacctcagcagaactcagatactctgtcgggagcctggtagatagtcagtccgattatcgcaccactaaggtgatccggaggcctcggagggggcgaatgggtgttcgaagagacgagcctaaggtcaagagtctaggggaccatgagtggaaccggactcagcaaatcggtgtattgagttctcaccctttcgaatccgacactgaaatgagtgacatagacgacgatgacagggagactattttttcatccatggacctgttgtcccctagcggacattccgacgcccagaccctggcaatgatgcttcaggaacagcttgatgctattaataaagaaattcggcttattcaagaggaaaaggaatctactgaactccgagctgaggaaatagaaaatcgggtagcaagtgtttccctggaaggattgaatctggcccgcgtccaccctggaacatcaataacagcctctgttacggcgtcatcgcttgctagttcctctcctccctctggccatagcacccctaaactgaccccccgcagccctgctcgcgaaatggaccgtatgggagtaatgactttaccttctgacctaagaaagcacaggcggaaaattgctgtggtggaggaagacggtcgagaggataaagccaccataaagtgtgagaccagcccgccccccacaccgcgcgcattgcgcatgacacataccctaccttctagctaccataacgacgctagaagcagtttaagtgtttctcttgaacctgagtccttgggcctgggctctgctaatagcagtcaggacagcctgcataaggcccccaagaaaaaggggataaaatccagtataggccggttattcggaaagaaggagaaggccagactgggacagctgcgcggctttatggagaccgaagctgcagctcaggagtcgcttggactggggaagctgggcacccaagccgaaaaagatcgacggttgaaaaagaaacacgaattattggaggaggccagacggaagggtctgcccttcgctcagtgggatgggccaaccgtggtcgcttggctcgagctatggctgggcatgccagcgtggtatgtggccgcctgccgagcgaatgtgaaaagcggggcgataatgtccgccctgtccgatacggaaattcagagagaaatcggaatatccaatccattgcaccgcttaaagttaaggctggccattcaggaaatggtctcgctaacaagtccatcagcacctcctaccagccggaccaaggaatcagaagaggggagttgggcgcaatgccctgtctttttacagactctagcttatggtgacatgaaccacgaatggattggaaacgagtggctcccctcccttggacttccccagtaccgctcttatttcatggagtgtctggtggatgctcggatgcttgatcatctgacaaagaaggacctgcgtgtgcatttgaagatggttgactctttccaccggaccagtctgcagtacgggattatgtgccttaaacggcttaactacgaccgcaaagaactcgagcggagaagggaagcttcacagcacgagattaaggacgtgctggtttggtcaaacgaccgggttatccggtggattcaggccattggcctgcgcgaatacgctaataacatcctggagtcaggcgtccatggctctctgattgccctggatgagaattttgactattcatccctggctctcctgttgcagattcccacccaaaacacccaggcccggcaaatcctggagagagagtataataacctgctagccctggggaccgaacgaagacttgacgagtcggatgacaagaattttagacgcgggagtacctggcggaggcagtttcccccacgcgaggtgcacggcatcagcatgatgcctgggtccagcgaaactcttccagccggatttaggcttaccaccacttcagggcagagtcgaaaaatgactaccgacgtcgcctcatctagacttcagcggctggacaactcaacggttcgcacgtactcttgttag

SEQ ID NO: 83609 - DNA, 366 bp, Artificial Sequence
  derived and/or modified sequence
atgatgtgcgaggtgatgcccaccatcaacgaggacacccccatgagtcagagaggtagccagtcttcaggctccgattccgacagtcacttcgagcagctgatggttaacatgttagacgaaagagaccgcctccttgatacactgagggaaacacaggagtccctgagcctggcacagcagcgattacaagacgtcatctatgacagggactctctgcagagacagctgaatagcgccttgccacaggatatagaaagtttaactggagggctggcgggttcaaagggtgcggaccccccagagttcgcggcattaacaaaggaactcaatgcttgtagggagcagctgttagagaaagaatag

SEQ ID NO: 83610 - DNA, 3976 bp, Artificial Sequence
  derived and/or modified sequence
cgatggacgcttctccttttggctgctgacggagccacgggaagatgccgagctcctgccacgccaccgggccggggcacgttccgggagggcgccggggcacgcgtgtgtctgagctgcctttctcctcccgttgctagggaaatggtccaggagtgctgggtgtgagcctcccttctcctcaagccggagactgcggttgtcattgatcaattgaagaagcaaggacccgaaatcacagacattagcaatgatgtgtgaagtgatgcccacgattaatgaggacaccccaatgagccaaagggggtcccaaagcagtggctcggactcagactcccattttgagcagctgatggtgaatatgctagatgaaagggatcgtcttctagacacccttcgggagacccaggaaagcctctcacttgcccagcaaagacttcaggatgtcatctatgaccgagactcactccagagacagctcaattcagccctgccacaggatatcgaatccctaacaggagggctggctggttctaagggggctgatccaccggaatttgctgcactgacaaaagaattaaatgcctgcagggaacaacttctagaaaaggaagaagaaatctctgaacttaaagctgaaagaaacaacacaagactattactggagcatttggagtgccttgtgtcacgacatgaaagatcactaagaatgacggtggtaaaacggcaagcccagtctccctcaggagtatccagtgaagttgaagttctcaaggcactgaaatctttgtttgagcaccacaaggccttggatgaaaaggtaagggagcgactgagggtttctttagaaagagtctctgcactggaagaagaactagctgctgctaatcaggagattgttgccttgcgtgaacaaaatgttcatatacaaagaaaaatggcatcaagcgagggatccacagagtcagaacatcttgaagggatggaacctggacagaaagtccatgagaagcgtttgtccaatggttctatagactcaaccgatgaaactagtcaaatagttgaactacaagaattgcttgaaaagcaaaactatgaaatggcccagatgaaagaacgtttagcagccctttcttcccgagtgggagaggtggaacaggaagcagagacagcaagaaaggatctcattaaaacagaagaaatgaacaccaagtatcaaagggacattagggaggccatggcacaaaaggaagatatggaagaaagaattacaacccttgaaaagcgttacctcagtgctcagagagaatctacctccatacatgacatgaatgataaactagaaaatgagttagcaaataaagaagctatcctgcggcagatggaagagaaaaacagacagttacaagaacgtcttgagctagctgaacaaaagttgcagcagaccatgagaaaggctgaaaccttgcctgaagtagaggctgaactggctcagagaattgcagccctaaccaaggctgaagagagacatggaaatattgaagaacgtatgagacatttagagggtcaacttgaagagaagaatcaagaacttcaaagagctaggcaaagagagaaaatgaatgaggagcataacaagagattatcggatacggttgatagacttctgactgaatccaatgaacgcctacaactacacttaaaggaaagaatggctgctctagaagaaaagaatgttttaattcaagaatcagaaactttcagaaagaatcttgaagaatctttacatgataaggaaagattagcagaagaaattgaaaagctgagatctgaacttgaccaattgaaaatgagaactggctctttaattgaacccacaataccaagaactcatctagacacctcagctgagttgcggtactcagtgggatccctagtggacagccagtctgattacagaacaactaaagtaataagaagaccaaggagaggccgcatgggtgtgcgaagagatgagccaaaggtgaaatctcttggggatcacgagtggaatagaactcaacagattggagtactaagcagccacccttttgaaagtgacactgaaatgtctgatattgatgatgatgacagagaaacaatttttagctcaatggatcttctctctccaagtggtcattccgatgcccagacgctagccatgatgcttcaggaacaattggatgccatcaacaaagaaatcaggctaattcaggaagaaaaagaatctacagagttgcgtgctgaagaaattgaaaatagagtggctagtgtgagcctcgaaggcctgaatttggcaagggtccacccaggtacctccattactgcctctgttacagcttcatcgctggccagttcatctccccccagtggacactcaactccaaagctcacccctcgaagccctgccagggaaatggatcggatgggagtcatgacactgccaagtgatctgaggaaacatcggagaaagattgcagttgtggaagaagatggtcgagaggacaaagcaacaattaaatgtgaaacttctcctcctcctacccctagagccctcagaatgactcacactctcccttcttcctaccacaatgatgctcgaagtagtttatctgtctctcttgagccagaaagcctcgggcttggtagtgccaacagcagccaagactctcttcacaaagcccccaagaagaaaggaatcaagtcttcaataggacgtttgtttggtaaaaaagaaaaagctcgacttgggcagctccgaggctttatggagactgaagctgcagctcaggagtccctggggttaggcaaactcggaactcaagctgagaaggatcgaagactaaagaaaaagcatgaacttcttgaagaagctcggagaaagggattaccttttgcccagtgggatgggccaactgtggtcgcatggctagagctttggttgggaatgcctgcgtggtacgtggcagcctgccgagccaacgtgaagagtggtgccatcatgtctgctttatctgacactgagatccagagagaaattggaatcagcaatccactgcatcgcttaaaacttcgattagcaatccaggagatggtttccctaacaagtccttcagctcctccaacatctcgaactaaagaatctgaggaaggaagctgggcccagtgtccggtttttctacagaccctggcttatggagatatgaatcatgagtggattggaaatgaatggcttcccagcttggggttacctcagtacagaagttactttatggaatgcttggtagatgcaagaatgttagatcacctaacaaaaaaagatctccgtgtccatttaaaaatggtggatagtttccatcgaacaagtttacaatatggaattatgtgcttaaagaggttgaattatgacagaaaagaactagaaagaagacgggaagcaagccaacatgaaataaaagacgtgttggtgtggagcaatgaccgagttattcgctggatacaagcaattggacttcgagaatatgcaaataatatacttgagagcggtgtgcatggctcacttatagccctggatgaaaactttgactacagcagcttagctttattattacagattccaacacagaacacccaggcaaggcagattcttgaaagagaatacaataacctcttggccctgggaactgaaaggcgactggatgaaagtgatgacaagaacttcagacgtggatcaacctggagaaggcagtttcctcctcgtgaagtacatggaatcagcatgatgcctgggtcctcagaaacattaccagctggatttaggttaaccacaacctctgggcagtcaagaaaaatgacaacagatgttgcttcatcaagactgcagaggttagacaactccactgttcgcacatactcatgttgaccagccactcaaagg

SEQ ID NO: 83611 - DNA, 574 bp, Artificial Sequence
  derived and/or modified sequence
aagatgctgtagcgtcctcaccggctgccagcaggttggttcttccggccaattgaagcaagcaaagaggcttgcagaaaggccgggaggagaaaaatggggaaatggtccaggagtgctgggtgtgagcctcccttctcctcaagccggagactgcggttgtcattgatcaattgaagaagcaaggacccgaaatcacagacattagcaatgatgtgtgaagtgatgcccacgattaatgaggacaccccaatgagccaaagggggtcccaaagcagtggctcggactcagactcccattttgagcagctgatggtgaatatgctagatgaaagggatcgtcttctagacacccttcgggagacccaggaaagcctctcacttgcccagcaaagacttcaggatgtcatctatgaccgagactcactccagagacagctcaattcagccctgccacaggatatcgaatccctaacaggagggctggctggttctaagggggctgatccaccggaatttgctgcactgacaaaagaattaaatgcctgcagggaacaacttctagaaaaggaag

SEQ ID NO: 83612 - DNA, 3711 bp, Artificial Sequence
  derived and/or modified sequence
atgatgtgcgaggttatgcccactataaatgaggatactcctatgtcacaacgcggaagccagtccagcggctccgactcagactctcacttcgaacagttgatggtcaacatgcttgacgagagggatcgcctgctcgatacactgcgcgagactcaagagtccttgtcccttgcacagcagaggctgcaggacgttatctacgacagggacagcttgcagagacagttaaattctgccttaccacaggacattgaaagcctcaccggaggattagcaggcagcaaaggggcagatcctcccgagtttgccgctcttacgaaggaattaaacgcatgcagagagcagctgctggaaaaggaggaggagatctcagagctcaaggcggagagaaataacactcggcttttgctggaacacctagagtgtttagtttctcggcacgagcgctcactgcggatgaccgttgttaaaagacaggcacaaagtccttccggggtcagcagcgaggtggaggtcctgaaagccctgaagagtctattcgaacaccacaaagctcttgacgagaaagtgcgagaaagactgcgcgttagcctggaacgcgtgagcgccctggaggaagagctcgcagcggctaaccaagaaattgtcgccctgcgtgagcagaacgtccacattcagagaaagatggcgagcagtgaaggctccacagaaagcgaacatcttgaaggtatggaaccaggacagaaggtgcacgaaaaaagactcagtaacggcagcatagacagcacggacgaaacttcccagattgtcgagctgcaggagctcctggaaaagcaaaactatgaaatggcccagatgaaagaaagactggccgctctctctagcagggtgggagaggttgaacaggaggctgagaccgccagaaaggatctcatcaaaaccgaggagatgaacacaaagtatcagcgggacattagagaggctatggctcagaaagaggatatggaggagcgaataaccactttggaaaagaggtacctcagtgcccaacgcgagtctacctctatccatgacatgaacgataaactggaaaacgaactcgcgaacaaggaggccatcctgcgtcaaatggaggagaagaaccggcagctccaagaacgcctggaactggcggagcagaagctgcagcagacaatgcgaaaggccgaaactctgccggaagtcgaggcggaactcgcccagaggattgcagctctaacaaaggccgaagagagacacggtaatatcgaggagaggatgcgtcacctggaggggcaactggaggaaaagaaccaagagctgcagcgcgctcgccagcgggaaaaaatgaacgaagagcacaacaagcggctttctgatactgtggacagactactgacagagtctaatgagaggcttcagctgcacctcaaggagaggatggctgctcttgaggagaaaaacgtcctcattcaggagagtgagacatttagaaaaaacctggaggagtctttgcatgataaggaacgtcttgcggaagaaattgagaagctacggtccgaactagatcagcttaaaatgcgcaccggaagtttgattgagccaaccattcccagaacacacctcgataccagcgccgagctccgctactcagtgggatcattagttgacagtcagagcgactaccgtactaccaaagtgattcgcaggcctcggaggggcaggatgggagtcaggagagacgagcccaaagttaagtctctgggtgaccatgaatggaaccgcacccaacaaattggagtgctctctagtcatccattcgagagcgatacggaaatgagtgatatcgacgacgacgacagagaaactattttttcatctatggatttattaagccctagcggacactcagacgctcagacattagctatgatgcttcaggaacagttggacgcaatcaataaggagatcagattaatacaggaggagaaggagtcgacagagctgcgcgcagaggaaatcgagaacagggtggcaagtgtgtcattggaggggctgaatctggccagagtgcatccaggcaccagcattacagcctcagtgacggcaagctccctggccagctccagtccgccttctggtcactctaccccaaagctgacgcccagatcacctgccagagagatggatcgcatgggtgtaatgaccctcccttccgacttacgtaaacatcgtaggaaaatcgccgttgtggaggaagacggccgtgaagacaaagccaccatcaagtgtgaaacgtccccacctcctactcccagagcattgcgaatgacacatacgctgccaagttcttaccacaacgatgcacgatcaagcctgtcagtctcactcgaacccgagtctctgggcttagggagtgcaaatagttcgcaggattcacttcataaggctccaaagaagaaggggattaagagctcaattgggcgactcttcggaaagaaggaaaaagccaggctgggacagctgcgtggattcatggaaaccgaggccgcagcccaggagagtctggggctcgggaagctgggaacacaagctgaaaaggatagaagacttaagaaaaaacatgagctcctcgaggaagcccgtaggaagggtttaccgtttgcccagtgggacggaccgacagttgtggcctggctggagctgtggttgggaatgcccgcatggtacgtggctgcttgtagggccaatgtgaaaagcggcgctattatgagcgctctcagcgacacagagatccaacgcgagattggcataagcaacccactgcaccgcctgaagctaaggctggctatccaggagatggtttccttaacgagccctagcgcacctcccacctcacgcacaaaagagtccgaggaggggtcctgggcccagtgccccgtgtttctgcaaacactggcttatggtgacatgaatcacgagtggatagggaatgagtggctcccttcactgggcctaccccagtaccgctcttacttcatggagtgtctcgtggacgcacgcatgttggatcatctgaccaaaaaagatctcagagtccacctgaagatggtcgactcatttcatagaacctcattacagtatggtatcatgtgcctcaagcgattgaattacgatagaaaagaactcgagcggaggcgcgaggcaagccagcatgaaattaaagacgtcctggtgtggagcaatgaccgggtgataaggtggatacaagctattggtctcagagagtacgcaaacaatatcttagagtctggtgtccacggctctctcattgctctagatgaaaactttgactattcatccttggccctgctgctgcaaatccccacccaaaacacacaggccaggcagatcttggaacgcgagtacaataacctgttagccctcggcaccgagcgacgcctggacgagtctgatgacaaaaatttccggaggggttcaacttggcggagacagtttccgcctcgggaggtgcacgggataagcatgatgccaggctccagcgagacgctgcctgctggattccggctgacaaccacttccgggcagtcgaggaaaatgaccacagacgttgcaagctctagactgcagcgccttgataacagcactgtgcgtacctactcgtgctag

SEQ ID NO: 83613 - DNA, 366 bp, Artificial Sequence
  derived and/or modified sequence
atgatgtgcgaggtcatgcctacaatcaatgaggacacccctatgagtcagcggggttcccagtcttccgggagcgactcagattctcattttgagcagctgatggtgaacatgctggacgagcgcgatcgacttctcgacacgctccgggaaacccaagaatctctgtcactggcacaacaaaggctccaagacgtgatttatgaccgagattcccttcaaaggcagctgaacagtgccctgccacaggatattgagtccctaactggcggtctggccggttcaaagggagcggatccgcctgaatttgctgccctcactaaggagcttaacgcatgcagagagcaacttttggagaaagagtag

SEQ ID NO: 83614 - protein, 1251 aa, Artificial Sequence
  derived and/or modified sequence
MMCEVMPTINEDTPMSQRGSQSSGSDSDSHFEQLMVNMLDERDRLLDTLRETQESLSLAQQRLQDVIYDRDSLQRQLNSALPQDIESLTGGLAGSKGADPPEFAALTKELNACREQLLEKEEEISELKAERNNTRLLLEHLECLVSRHERSLRMTVVKRQAQSPSGVSSEVEVLKALKSLFEHHKALDEKVRERLRVSLERVSALEEELAAANQEIVALREQNVHIQRKMASSEGSTESEHLEGMEPGQKVHEKRLSNGSIDSTDETSQIVELQELLEKQNYEMAQMKERLAALSSRVGEVEQEAETARKDLIKTEEMNTKYQRDIREAMAQKEDMEERITTLEKRYLSAQRESTSIHDMNDKLENELANKEAILRQMEEKNRQLQERLELAEQKLQQTMRKAETLPEVEAELAQRIAALTKAEERHGNIEERMRHLEGQLEEKNQELQRARQREKMNEEHNKRLSDTVDRLLTESNERLQLHLKERMAALEEKNVLIQESETFRKNLEESLHDKERLAEEIEKLRSELDQLKMRTGSLIEPTIPRTHLDTSAELRYSVGSLVDSQSDYRTTKVIRRPRRGRMGVRRDEPKVKSLGDHEWNRTQQIGVLSSHPFESDTEMSDIDDDDRETIFSSMDLLSPSGHSDAQTLAMMLQEQLDAINKEIRLIQEEKESTELRAEEIENRVASVSLEGLNLARVHPGTSITASVTASSLASSSPPSGHSTPKLTPRSPAREMDRMGVMTLPSDLRKHRRKIAVVEEDGREDKATIKCETSPPPTPRALRMTHTLPSSYHNDARSSLSVSLEPESLGLGSANSSQDSLHKAPKKKGIKSSIGRLFGKKEKARLGQLRGFMETEAAAQESLGLGKLGTQAEKDRRLKKKHELLEEARRKGLPFAQWDGPTVVAWLELWLGMPAWYVAACRANVKSGAIMSALSDTEIQREIGISNPLHRLKLRLAIQEMVSLTSPSAPPTSRTPSGNVWVTHEEMENLAAPAKTKESEEGSWAQTLAYGDMNHEWIGNEWLPSLGLPQYRSYFMECLVDARMLDHLTKKDLRVHLKMVDSFHRTSLQYGIMCLKRLNYDRKELERRREASQHEIKDVLVWSNDRVIRWIQAIGLREYANNILESGVHGSLIALDENFDYSSLALLLQIPTQNTQARQILEREYNNLLALGTERRLDESDDKNFRRGSTWRRQFPPREVHGISMMPGSSETLPAGFRLTTTSGQSRKMTTDVASSRLQRLDNSTVRTYSC

SEQ ID NO: 83615 - protein, 121 aa, Artificial Sequence
  derived and/or modified sequence
MMCEVMPTINEDTPMSQRGSQSSGSDSDSHFEQLMVNMLDERDRLLDTLRETQESLSLAQQRLQDVIYDRDSLQRQLNSALPQDIESLTGGLAGSKGADPPEFAALTKELNACREQLLEKE

SEQ ID NO: 83616 - DNA, 3756 bp, Artificial Sequence
  derived and/or modified sequence
atgatgtgcgaggtgatgcccaccatcaacgaggacacccccatgagccagagaggcagccagagcagcggcagcgacagcgacagccacttcgagcagctgatggtgaacatgctggacgagagagacagactgctggacaccctgagagagacccaggagagcctgagcctggcccagcagagactgcaggacgtgatctacgacagagacagcctgcagagacagctgaacagcgccctgccccaggacatcgagagcctgaccggcggcctggccggcagcaagggcgccgacccccccgagttcgccgccctgaccaaggagctgaacgcctgcagagagcagctgctggagaaggaggaggagatcagcgagctgaaggccgagagaaacaacaccagactgctgctggagcacctggagtgcctggtgagcagacacgagagaagcctgagaatgaccgtggtgaagagacaggcccagagccccagcggcgtgagcagcgaggtggaggtgctgaaggccctgaagagcctgttcgagcaccacaaggccctggacgagaaggtgagagagagactgagagtgagcctggagagagtgagcgccctggaggaggagctggccgccgccaaccaggagatcgtggccctgagagagcagaacgtgcacatccagagaaagatggccagcagcgagggcagcaccgagagcgagcacctggagggcatggagcccggccagaaggtgcacgagaagagactgagcaacggcagcatcgacagcaccgacgagaccagccagatcgtggagctgcaggagctgctggagaagcagaactacgagatggcccagatgaaggagagactggccgccctgagcagcagagtgggcgaggtggagcaggaggccgagaccgccagaaaggacctgatcaagaccgaggagatgaacaccaagtaccagagagacatcagagaggccatggcccagaaggaggacatggaggagagaatcaccaccctggagaagagatacctgagcgcccagagagagagcaccagcatccacgacatgaacgacaagctggagaacgagctggccaacaaggaggccatcctgagacagatggaggagaagaacagacagctgcaggagagactggagctggccgagcagaagctgcagcagaccatgagaaaggccgagaccctgcccgaggtggaggccgagctggcccagagaatcgccgccctgaccaaggccgaggagagacacggcaacatcgaggagagaatgagacacctggagggccagctggaggagaagaaccaggagctgcagagagccagacagagagagaagatgaacgaggagcacaacaagagactgagcgacaccgtggacagactgctgaccgagagcaacgagagactgcagctgcacctgaaggagagaatggccgccctggaggagaagaacgtgctgatccaggagagcgagaccttcagaaagaacctggaggagagcctgcacgacaaggagagactggccgaggagatcgagaagctgagaagcgagctggaccagctgaagatgagaaccggcagcctgatcgagcccaccatccccagaacccacctggacaccagcgccgagctgagatacagcgtgggcagcctggtggacagccagagcgactacagaaccaccaaggtgatcagaagacccagaagaggcagaatgggcgtgagaagagacgagcccaaggtgaagagcctgggcgaccacgagtggaacagaacccagcagatcggcgtgctgagcagccaccccttcgagagcgacaccgagatgagcgacatcgacgacgacgacagagagaccatcttcagcagcatggacctgctgagccccagcggccacagcgacgcccagaccctggccatgatgctgcaggagcagctggacgccatcaacaaggagatcagactgatccaggaggagaaggagagcaccgagctgagagccgaggagatcgagaacagagtggccagcgtgagcctggagggcctgaacctggccagagtgcaccccggcaccagcatcaccgccagcgtgaccgccagcagcctggccagcagcagcccccccagcggccacagcacccccaagctgacccccagaagccccgccagagagatggacagaatgggcgtgatgaccctgcccagcgacctgagaaagcacagaagaaagatcgccgtggtggaggaggacggcagagaggacaaggccaccatcaagtgcgagaccagccccccccccacccccagagccctgagaatgacccacaccctgcccagcagctaccacaacgacgccagaagcagcctgagcgtgagcctggagcccgagagcctgggcctgggcagcgccaacagcagccaggacagcctgcacaaggcccccaagaagaagggcatcaagagcagcatcggcagactgttcggcaagaaggagaaggccagactgggccagctgagaggcttcatggagaccgaggccgccgcccaggagagcctgggcctgggcaagctgggcacccaggccgagaaggacagaagactgaagaagaagcacgagctgctggaggaggccagaagaaagggcctgcccttcgcccagtgggacggccccaccgtggtggcctggctggagctgtggctgggcatgcccgcctggtacgtggccgcctgcagagccaacgtgaagagcggcgccatcatgagcgccctgagcgacaccgagatccagagagagatcggcatcagcaaccccctgcacagactgaagctgagactggccatccaggagatggtgagcctgaccagccccagcgccccccccaccagcagaacccccagcggcaacgtgtgggtgacccacgaggagatggagaacctggccgcccccgccaagaccaaggagagcgaggagggcagctgggcccagaccctggcctacggcgacatgaaccacgagtggatcggcaacgagtggctgcccagcctgggcctgccccagtacagaagctacttcatggagtgcctggtggacgccagaatgctggaccacctgaccaagaaggacctgagagtgcacctgaagatggtggacagcttccacagaaccagcctgcagtacggcatcatgtgcctgaagagactgaactacgacagaaaggagctggagagaagaagagaggccagccagcacgagatcaaggacgtgctggtgtggagcaacgacagagtgatcagatggatccaggccatcggcctgagagagtacgccaacaacatcctggagagcggcgtgcacggcagcctgatcgccctggacgagaacttcgactacagcagcctggccctgctgctgcagatccccacccagaacacccaggccagacagatcctggagagagagtacaacaacctgctggccctgggcaccgagagaagactggacgagagcgacgacaagaacttcagaagaggcagcacctggagaagacagttcccccccagagaggtgcacggcatcagcatgatgcccggcagcagcgagaccctgcccgccggcttcagactgaccaccaccagcggccagagcagaaagatgaccaccgacgtggccagcagcagactgcagagactggacaacagcaccgtgagaacctacagctgctag

SEQ ID NO: 83617 - DNA, 3756 bp, Artificial Sequence
  derived and/or modified sequence
atgatgtgtgaagttatgccaacgatcaacgaggacactccaatgagccagagagggtcacagtcctcgggtagcgatagtgatagtcatttcgaacagttgatggtgaacatgctggacgagcgagatcgtctcttagacacgctgagagagacgcaggaaagtctttctctggctcagcagagactccaggacgtgatatacgatagggactctctccagaggcagctgaactctgctctccctcaggacattgagtcattgacaggaggactggccgggtccaaaggcgccgaccctcccgagtttgccgccctaaccaaggaactgaacgcatgtagagagcagctcctcgaaaaggaagaagaaatttctgaattgaaggcggaacgaaacaatacacggctcctcctagagcacctggaatgtcttgtgagccgacatgagagaagtctgagaatgaccgtggtgaaaagacaagcacagagtccctctggggtcagctcagaagtcgaggttctgaaggctctgaagtcccttttcgaacatcataaagcattggacgagaaggtaagagagaggctgagagtgtcgctggaaagggtttctgccttagaggaagagctggccgctgctaatcaagagatcgttgctctccgggagcagaacgtgcatattcagcgtaaaatggcaagtagcgaagggtcaaccgagtcagaacacctggagggaatggagccaggacagaaagtgcacgagaagagattgagcaatggtagtatagactccaccgatgagacgagtcagatcgtcgagctgcaagaacttttagaaaagcaaaactacgagatggcccagatgaaggagcgccttgcagctttgagtagtagagtgggcgaggtggaacaggaagcagaaacagctcgcaaagatctaattaaaactgaggaaatgaataccaaatatcaacgtgatattagagaagccatggctcagaaagaagacatggaagaaagaataaccaccttagaaaagcggtacctaagcgcccagcgggagtcaaccagcattcatgacatgaacgataaactcgagaacgaattggctaacaaagaagccattctgaggcagatggaggaaaaaaatcggcagctgcaggagaggctggagctggccgagcagaaactgcagcagaccatgcgaaaagccgagacattgcctgaggttgaggcagagctggcgcagcgaattgcggcccttacaaaagctgaggagcgccatggcaacattgaggaacgcatgagacacttggaggggcagttggaggagaagaatcaggagctccaaagggccagacagagagagaagatgaatgaggaacataataaacgccttagtgatactgtagacagactcctgacggagagcaacgagcggctgcagctgcacctaaaggaacgaatggctgccttagaggaaaaaaacgtgcttattcaggaaagcgagactttccgaaagaatctagaagagagcctccatgacaaggagcggctggcagaggagattgagaaactgcgttctgagctcgatcagctgaaaatgaggacaggttccctgatagagccaaccattccccggacgcatcttgacacgtctgctgaacttcgctattctgtgggttccctggtcgactctcaatctgactaccggacgaccaaggttattcgaaggccgaggcgtgggagaatgggcgtgaggcgggatgagccaaaggtgaagagcctcggtgatcatgaatggaatcgaacccaacagattggcgtgctttccagtcacccttttgagagcgataccgagatgtcagacattgatgatgacgaccgcgaaactatctttagctctatggatctgctttctccatccggacatagtgatgcccagaccttggctatgatgctgcaggaacagctagacgcaattaataaggagatccgcctcattcaggaagagaaagagagtaccgagttacgcgcagaggagatcgaaaatcgggtggcaagtgtctcactcgagggtttgaacctcgcccgcgtgcaccccgggaccagcattaccgccagtgtgaccgcaagctcactcgcttcttccagccctccgagcgggcattcgacccctaagttaacaccaaggtcacccgcacgcgaaatggaccggatgggagtgatgacgctgccaagtgatctcaggaagcaccggcggaaaattgctgtggtggaagaagatgggcgcgaggacaaagccaccattaagtgtgagacttccccaccccccacacctagagcactacgcatgacccacactttgccctcaagttaccataatgacgcgcgcagctctctgagtgtgagcctggagccagaaagtctgggtctgggttctgcaaactcatcccaggactcactgcacaaagctcccaagaaaaagggcattaagtcatctatcggtagattgttcggaaagaaggagaaggcacgactcgggcagttgaggggctttatggaaactgaagctgccgcccaagaatcactgggtctgggaaaacttggcactcaggctgagaaagatcgcagactgaaaaagaaacatgagctcttggaggaggcccgtcgaaaggggcttccctttgcccaatgggatggaccaacagtggttgcctggctggagttatggttaggcatgccagcctggtatgtcgcggcatgcagggctaacgtgaaaagcggggccattatgtcagcactgagcgacactgaaattcagcgagagatagggattagtaacccactgcatcgcttgaaactgaggctcgcaatacaggagatggtgtctttaaccagcccctcagccccaccaacgagccggacaccctccggaaacgtatgggttactcatgaagaaatggaaaatcttgccgccccagccaaaactaaagagtcagaggaaggctcctgggcacaaactctggcctacggggacatgaatcacgagtggattggaaacgaatggctcccctcattggggttaccacaataccggtcttatttcatggagtgtctcgtggatgctaggatgctcgaccaccttacaaagaaagatctgcgagtacacctgaaaatggtcgattcctttcaccgtaccagcctacaatacggcatcatgtgtctcaagcgactgaattatgaccgtaaagaactggaaagaagaagagaggcgagccagcatgaaatcaaagatgttctggtatggagcaatgatcgcgttatcagatggatacaggccattggtctccgggaatatgccaataacatcctggagagcggggtccatggctcactaatcgctcttgacgagaattttgattattcctccctggcccttcttctgcagatccccacgcagaatactcaagcacgtcagatactagaacgagaatacaataatctcctggctcttgggacagagaggcgactggacgagtctgacgacaagaatttcaggaggggatctacgtggcggagacagtttccgcccagagaggtacacgggatttctatgatgcccggctctagtgaaacgctacctgctggttttcgcctgacgactacgtccgggcagtccaggaaaatgactaccgatgtggccagttctcggctgcaaaggctggacaattctacagttagaacctattcttgttag

SEQ ID NO: 83618 - DNA, 3756 bp, Artificial Sequence
  derived and/or modified sequence
atgatgtgtgaggtgatgcccaccatcaatgaagacacccccatgagccagaggggcagccagagcagcggcagtgacagcgacagccactttgagcagctgatggtgaacatgctggatgagcgggaccggctgctggacaccctgcgggagacccaggagagcctgagcctggcccagcagaggctgcaggatgtgatctatgaccgggacagcctgcagaggcagctgaacagcgccctgccccaggacatcgagagcctgactggaggcctggccggcagcaaaggagctgaccccccagagtttgctgccctgaccaaggagctgaatgcctgccgggagcagctgctggagaaggaggaggagatcagcgagctgaaggccgagaggaacaacacccggctgctgctggagcacctggagtgcctggtgtccagacatgagaggagcctgaggatgacagtggtgaagaggcaggcccagagccccagcggcgtgtcctctgaggtggaggtgctgaaggccctgaagagcctgtttgagcaccacaaggccctggatgagaaggtgcgggagcggctgcgggtgtccctggagcgggtgtctgccctggaggaggagctggccgccgccaaccaggagatcgtggccctgcgggagcagaatgtgcacatccagaggaagatggccagcagcgagggcagcacagaaagtgagcacctggagggcatggagcccggccagaaggtgcatgagaagaggctgagcaatggcagcattgacagcacagatgagaccagccagatcgtggagctgcaggagctgctggagaagcagaactatgagatggcccagatgaaggagcggctggccgccctgagcagccgggtgggggaggtggagcaggaggccgagacagccaggaaggacctgatcaagacagaggagatgaacaccaagtaccagagggacatccgggaggccatggcccagaaggaggacatggaggagcgcatcaccaccctggagaagcgctacctgagcgcccagcgggagagcaccagcatccatgacatgaatgacaagctggagaatgagctggccaacaaggaggccatcctgcggcagatggaggagaagaaccggcagctgcaggagcggctggagctggccgagcagaagctgcagcagaccatgaggaaggccgagaccctgcctgaggtggaggccgagctggcccagagaattgctgccctgaccaaggccgaggagagacatggcaacatcgaggagaggatgaggcacctggagggccagctggaggagaagaaccaggagctgcagagggcccggcagcgggagaagatgaatgaggagcacaacaagaggctgagtgacacagtggaccggctgctgacagagagcaatgaaaggctgcagctgcacctgaaggagaggatggccgccctggaggagaagaatgtgctgatccaggagagcgagaccttcaggaagaacctggaggagagcctgcatgacaaggagcggctggccgaggagattgagaagctgcggtctgagctggaccagctgaagatgaggacaggcagcctcatcgagcccaccatccccaggacccacctggacaccagcgctgagctgcgctacagcgtgggcagcctggtggacagccagagcgactaccgcaccaccaaggtgatccggcggccccggcggggccgcatgggcgtgagaagagatgagcccaaggtgaagagcctgggggaccacgagtggaacagaacccagcagatcggcgtgctgagcagccacccctttgaaagtgacacagagatgtctgacattgatgatgatgaccgggagaccatcttcagctccatggacctgctgagccccagcggccacagtgatgcccagaccctggccatgatgctgcaggagcagctggatgccatcaacaaggagatccgcctcatccaggaggagaaggagagcacagagctgcgggcagaggagattgagaacagagtggcctctgtgtccctggagggcctgaacctggcccgggtgcaccctggcaccagcatcacagcctctgtgacagccagcagcctggccagcagcagcccccccagcggccacagcacccccaagctgacccccaggagccctgcccgggagatggacaggatgggcgtgatgaccctgcccagcgacctgaggaagcacaggaggaagattgctgtggtggaggaggatggccgggaggacaaggccaccatcaagtgtgagaccagccccccacccaccccccgggccctgaggatgacccacaccctgcccagcagctaccacaatgatgcccggagcagcctgtctgtgtccctggagcctgagagcctgggcctgggcagcgccaacagcagccaggacagcctgcacaaggcccccaagaagaagggcatcaagagcagcatcggccgcctgtttgggaagaaggagaaggcccggctgggccagctgcggggcttcatggagacagaagctgctgcccaggagagcctgggcctgggcaagctgggcacccaggccgagaaggaccggcggctgaagaagaagcatgagctgctggaggaggcccggaggaagggcctgccctttgcccagtgggatggccccaccgtggtggcctggctggagctgtggctgggcatgcctgcctggtacgtggccgcctgccgggccaacgtgaagagcggggccatcatgtctgccctgagtgacacagagatccagcgggagatcggcatcagcaaccccctgcaccggctgaagctgcggctggccatccaggagatggtgtccctgaccagccccagcgccccacccaccagcaggaccccatctggaaatgtgtgggtgacccatgaggagatggagaacctggccgccccagccaagaccaaggagagcgaggagggctcctgggcccagaccctggcctacggggacatgaaccacgagtggattggaaatgagtggctgcccagcctgggcctgccccagtaccgcagctacttcatggagtgcctggtggatgccaggatgctggaccacctgaccaagaaggacctgcgggtgcacctgaagatggtggacagcttccacaggaccagcctgcagtatggcatcatgtgcctgaagaggctgaactatgacaggaaggagctggagcggcggcgggaggccagccagcacgagatcaaggatgtgctggtgtggagcaatgacagagtcatccgctggatccaggccatcggcctgcgggagtatgccaacaacatcctggagagcggcgtgcacggcagcctgattgccctggatgaaaattttgactacagcagcctggccctgctgctgcagatccccacccagaacacccaggcccggcagatcctggagcgggagtacaacaacctgctggccctgggcacagaaagaaggctggatgaaagtgatgacaagaacttccggcggggcagcacctggaggcggcagttccccccccgggaggtgcacggcatctccatgatgcctggcagcagcgagaccctgcctgctggcttccggctgaccaccaccagcggccagagcaggaagatgaccacagatgtggccagcagccggctgcagaggctggacaacagcacagtgaggacctacagctgctag

SEQ ID NO: 83619 - DNA, 3756 bp, Artificial Sequence
  derived and/or modified sequence
atgatgtgcgaggtgatgcccaccatcaacgaggacacccccatgtcacaacgggggagtcagtctagcgggtccgactccgactcacattttgagcagctgatggttaatatgctggatgagcgcgatcgcctcctggatactctgagggagactcaggagagtctgtctttggcccaacagaggctccaggacgttatttacgaccgcgatagcctgcagcggcaactgaactccgcccttccccaggatatcgaatcgttgacggggggtctggccggcagcaagggagctgacccacccgaattcgctgctttgaccaaggaactaaacgcctgtcgcgaacagctcctggagaaggaagaggaaatttccgagctcaaagcagaacgtaataatacgagacttctgcttgagcaccttgagtgtctggtttcaaggcacgagagatcattgagaatgacagtagtgaaaagacaagcccaaagtccctctggggtctctagcgaggttgaagtcttgaaagctctcaaaagtcttttcgagcaccataaggcccttgacgagaaggtgagggagcggcttagagtttctctggagcgagtcagcgcgttagaagaggagcttgcagcagctaaccaagaaatcgtggccctaagggaacagaatgttcacattcaacgtaagatggccagtagcgagggttccaccgagagcgagcacctcgagggaatggaaccgggccagaaagtacacgagaaacgcttgagtaatggctccattgacagtacagatgagacatcacagatcgtggaactacaagaactgctggagaagcaaaactatgagatggcgcagatgaaggagagactggccgccctcagctcacgcgtcggcgaagtggaacaggaagcagaaacagcgagaaaggacctaataaaaaccgaggagatgaataccaaatatcagcgcgacattcgcgaagctatggctcagaaggaagacatggaggagaggatcactaccttggaaaaacgctacttatcagcacaacgtgagagcacctctattcatgatatgaatgacaaactggagaatgagcttgccaataaggaggcgatcctgcgtcagatggaagaaaaaaaccgccagttacaagagagactggaactggccgaacaaaaattacagcagactatgagaaaagctgagactctgcctgaggttgaagccgagttggcacagcgcattgccgccctgaccaaggccgaggagcggcacgggaatatagaagaaaggatgaggcacttagagggtcagttagaagaaaagaaccaggagctgcaacgggcacgacaacgtgagaaaatgaacgaggagcacaacaaaagactgagtgacaccgtggaccgcctcttgactgaatccaatgaacggcttcagctgcacctgaaggagaggatggccgcattggaggaaaagaacgtgctcattcaagaaagcgaaacctttcgcaagaatctggaggagtccctacatgacaaggagcgccttgcagaggaaatcgaaaaattgagaagcgaactggaccaattaaagatgcggaccggatcgctgattgagcccacaataccacgaactcacctggacacgtccgcagagctacgctacagcgtcggttctctggtcgattctcagagcgattatcgcacaactaaagtgattcgccgaccccgaaggggacgcatgggggtccggcgcgatgagcccaaggtaaagagcttaggagaccatgagtggaacaggacccaacagatcggggtgctcagttcgcaccctttcgagtcggatacggagatgtccgacattgacgatgacgaccgcgagaccattttcagttccatggacctgctcagccctagcggccacagtgacgctcagacccttgccatgatgctgcaggagcagctcgacgcaatcaataaagagatacgactgatacaggaagaaaaggaatccacagagttgcgggccgaggagattgaaaaccgtgttgcgagtgtctccctggaggggttgaacttggcgcgcgttcaccctggtacttcaattaccgccagcgtcacggcgtccagtttagctagttcctcaccaccctctggccacagcacgcctaagctgacacccaggagtccggccagagaaatggaccgcatgggcgtaatgaccttaccttccgatctccggaaacatagaagaaagattgctgtggtggaagaggacggtcgagaagataaggcaactataaagtgtgaaacctcccccccgcccacacccagagcgctgagaatgacccacacgcttccttccagctaccacaacgacgcgcggtcctccctaagcgtcagcctggagccggagtctctaggattggggtctgccaattcatcccaggactcgctgcacaaggctcctaagaagaaggggattaagtccagcataggccgcttattcggaaagaaggagaaagcccgactgggacagctgagaggctttatggaaactgaagcggcagcacaggagtcccttggactgggaaaactcggaacccaggcagaaaaagatcggcggttgaagaagaagcatgaactgctggaggaagcgcgccggaaggggctgcccttcgcccagtgggacggtccaacggttgtagcttggttagaactctggcttggtatgcccgcttggtacgttgccgcctgccgcgcaaacgtaaagagcggagccatcatgtcagcactctctgatacagagatccagagggaaattggaataagcaaccccttacatcggctcaaactgaggctggccatccaggaaatggtcagtctcacaagcccctcggccccccccactagtagaaccccttcggggaacgtgtgggtgactcacgaagagatggagaatttggcagcgcccgccaagacaaaagaatcagaggagggatcctgggctcagaccctcgcgtacggtgacatgaatcacgagtggattggcaatgaatggctgccttctcttggtcttccgcagtaccggtcatactttatggagtgtctcgtcgatgccaggatgctagaccaccttactaagaaggacctacgcgtccatctgaagatggtagacagcttccaccggacatcactgcagtacggaattatgtgcctgaaacgactgaactatgataggaaagagctcgagcgccggcgagaagcaagtcagcatgaaataaaagacgtcctcgtctggagtaatgacagagtcattaggtggatacaggccatcggtctgagggaatacgcaaacaatatacttgagagcggtgtgcatgggtcccttattgccctggacgaaaacttcgactactcatcgctggctcttctgttacaaatccctactcagaacacccaggcccgtcaaattttggaaagggaatataacaacctgcttgccttggggacagagcgacgccttgatgagtctgacgataaaaacttccgtagaggttcgacctggcgcaggcagttcccccctagggaagtacatggaatcagtatgatgcccggcagctccgaaaccctgcctgctggattccgcctgactactacgtctggccaatctcgcaaaatgactactgatgttgcgtcctcgcgtttacagcgcctcgacaatagcactgtccgtacatactcatgctag

SEQ ID NO: 83620 - DNA, 4033 bp, Artificial Sequence
  derived and/or modified sequence
tttttccgatggacgcttctccttttggctgctgacggagccacgggaagatgccgagctcctgccacgccaccgggccggggcacgttccgggagggcgccggggcacgcgtgtgtctgagctgcctttctcctcccgttgctagggaaatggtccaggagtgctgggtgtgagcctcccttctcctcaagccggagactgcggttgtcattgatcaattgaagaagcaaggacccgaaatcacagacattagcaatgatgtgtgaagtgatgcccacgattaatgaggacaccccaatgagccaaagggggtcccaaagcagtggctcggactcagactcccattttgagcagctgatggtgaatatgctagatgaaagggatcgtcttctagacacccttcgggagacccaggaaagcctctcacttgcccagcaaagacttcaggatgtcatctatgaccgagactcactccagagacagctcaattcagccctgccacaggatatcgaatccctaacaggagggctggctggttctaagggggctgatccaccggaatttgctgcactgacaaaagaattaaatgcctgcagggaacaacttctagaaaaggaagaagaaatctctgaacttaaagctgaaagaaacaacacaagactattactggagcatttggagtgccttgtgtcacgacatgaaagatcactaagaatgacggtggtaaaacggcaagcccagtctccctcaggagtatccagtgaagttgaagttctcaaggcactgaaatctttgtttgagcaccacaaggccttggatgaaaaggtaagggagcgactgagggtttctttagaaagagtctctgcactggaagaagaactagctgctgctaatcaggagattgttgccttgcgtgaacaaaatgttcatatacaaagaaaaatggcatcaagcgagggatccacagagtcagaacatcttgaagggatggaacctggacagaaagtccatgagaagcgtttgtccaatggttctatagactcaaccgatgaaactagtcaaatagttgaactacaagaattgcttgaaaagcaaaactatgaaatggcccagatgaaagaacgtttagcagccctttcttcccgagtgggagaggtggaacaggaagcagagacagcaagaaaggatctcattaaaacagaagaaatgaacaccaagtatcaaagggacattagggaggccatggcacaaaaggaagatatggaagaaagaattacaacccttgaaaagcgttacctcagtgctcagagagaatctacctccatacatgacatgaatgataaactagaaaatgagttagcaaataaagaagctatcctgcggcagatggaagagaaaaacagacagttacaagaacgtcttgagctagctgaacaaaagttgcagcagaccatgagaaaggctgaaaccttgcctgaagtagaggctgaactggctcagagaattgcagccctaaccaaggctgaagagagacatggaaatattgaagaacgtatgagacatttagagggtcaacttgaagagaagaatcaagaacttcaaagagctaggcaaagagagaaaatgaatgaggagcataacaagagattatcggatacggttgatagacttctgactgaatccaatgaacgcctacaactacacttaaaggaaagaatggctgctctagaagaaaagaatgttttaattcaagaatcagaaactttcagaaagaatcttgaagaatctttacatgataaggaaagattagcagaagaaattgaaaagctgagatctgaacttgaccaattgaaaatgagaactggctctttaattgaacccacaataccaagaactcatctagacacctcagctgagttgcggtactcagtgggatccctagtggacagccagtctgattacagaacaactaaagtaataagaagaccaaggagaggccgcatgggtgtgcgaagagatgagccaaaggtgaaatctcttggggatcacgagtggaatagaactcaacagattggagtactaagcagccacccttttgaaagtgacactgaaatgtctgatattgatgatgatgacagagaaacaatttttagctcaatggatcttctctctccaagtggtcattccgatgcccagacgctagccatgatgcttcaggaacaattggatgccatcaacaaagaaatcaggctaattcaggaagaaaaagaatctacagagttgcgtgctgaagaaattgaaaatagagtggctagtgtgagcctcgaaggcctgaatttggcaagggtccacccaggtacctccattactgcctctgttacagcttcatcgctggccagttcatctccccccagtggacactcaactccaaagctcacccctcgaagccctgccagggaaatggatcggatgggagtcatgacactgccaagtgatctgaggaaacatcggagaaagattgcagttgtggaagaagatggtcgagaggacaaagcaacaattaaatgtgaaacttctcctcctcctacccctagagccctcagaatgactcacactctcccttcttcctaccacaatgatgctcgaagtagtttatctgtctctcttgagccagaaagcctcgggcttggtagtgccaacagcagccaagactctcttcacaaagcccccaagaagaaaggaatcaagtcttcaataggacgtttgtttggtaaaaaagaaaaagctcgacttgggcagctccgaggctttatggagactgaagctgcagctcaggagtccctggggttaggcaaactcggaactcaagctgagaaggatcgaagactaaagaaaaagcatgaacttcttgaagaagctcggagaaagggattaccttttgcccagtgggatgggccaactgtggtcgcatggctagagctttggttgggaatgcctgcgtggtacgtggcagcctgccgagccaacgtgaagagtggtgccatcatgtctgctttatctgacactgagatccagagagaaattggaatcagcaatccactgcatcgcttaaaacttcgattagcaatccaggagatggtttccctaacaagtccttcagctcctccaacatctcgaactccttcaggcaacgtttgggtgactcatgaagaaatggaaaatcttgcagctccagcaaaaacgaaagaatctgaggaaggaagctgggcccagaccctggcttatggagatatgaatcatgagtggattggaaatgaatggcttcccagcttggggttacctcagtacagaagttactttatggaatgcttggtagatgcaagaatgttagatcacctaacaaaaaaagatctccgtgtccatttaaaaatggtggatagtttccatcgaacaagtttacaatatggaattatgtgcttaaagaggttgaattatgacagaaaagaactagaaagaagacgggaagcaagccaacatgaaataaaagacgtgttggtgtggagcaatgaccgagttattcgctggatacaagcaattggacttcgagaatatgcaaataatatacttgagagcggtgtgcatggctcacttatagccctggatgaaaactttgactacagcagcttagctttattattacagattccaacacagaacacccaggcaaggcagattcttgaaagagaatacaataacctcttggccctgggaactgaaaggcgactggatgaaagtgatgacaagaacttcagacgtggatcaacctggagaaggcagtttcctcctcgtgaagtacatggaatcagcatgatgcctgggtcctcagaaacattaccagctggatttaggttaaccacaacctctgggcagtcaagaaaaatgacaacagatgttgcttcatcaagactgcagaggttagacaactccactgttcgcacatactcatgttgaccagccactcaaaggaggcag

SEQ ID NO: 83621 - DNA, 3756 bp, Artificial Sequence
  derived and/or modified sequence
atgatgtgcgaagttatgccaaccattaacgaagatactcccatgagccaacgtggcagtcagagctctgggagcgattctgacagccattttgagcagctgatggttaacatgttggacgaacgcgacagattactggacaccttacgggaaacccaggaatcgctgtctctcgcccagcaaagactgcaagatgttatctacgacagagacagcttgcagcgccaactaaacagcgccctgccccaggacattgagtccctgaccggaggcctagcgggtagcaaaggtgccgaccccccagagtttgcagcgctgacgaaagagctgaatgcctgccgggaacagctccttgagaaagaagaggagattagcgagctaaaggcagaaaggaacaatactaggctccttctggaacacctcgagtgcctggttagtaggcatgaacgctccttgagaatgactgtggttaagagacaagctcagagcccctccggcgtcagcagcgaggttgaagtcctgaaagccctcaaatccctgttcgagcaccacaaagcactcgacgagaaggttcgcgagagactgcgcgtttctctggagcgcgtttccgcgcttgaagaagagttggctgctgccaaccaggagatcgtggctctgcgagagcagaacgtgcacatccagcggaagatggcctcgtccgaggggagtactgaaagcgaacacttagaaggtatggagcccggtcaaaaagtccacgagaaaagattatcaaatggatccatcgattctacagacgaaacatctcaaatcgtggagctgcaggaattgctggagaagcaaaattatgaaatggcgcagatgaaggaaagactcgcagccctgagcagcagagtaggcgaggtggagcaggaggctgagaccgctcgaaaggatttgataaagacggaagaaatgaacactaagtaccaacgtgacatccgagaagccatggctcagaaagaggatatggaggagaggataactactctggaaaagagatatctcagtgcacagcgcgagtccaccagtatacacgatatgaacgacaagttagaaaatgaacttgccaacaaggaggctattcttagacagatggaggaaaaaaacaggcagttgcaggaacggctggaacttgccgagcagaagctgcagcagacaatgagaaaggcagagacgctgcctgaggtagaggcagaactagcccaacgcatcgcggctctgactaaggccgaagagcgacatggaaacatcgaagaaagaatgcgacatctagaggggcagctcgaggagaagaatcaggagctccagagagctcgccagcgcgaaaaaatgaacgaagaacacaacaaacgactgagtgacaccgtggatcgactgctcacagagtcaaatgaaagactgcagctgcacttgaaggagcgcatggccgctctggaggagaaaaatgtgctgatacaagaatctgaaacatttaggaagaacctcgaggagtcactccatgataaggagagactggccgaagagatcgagaagctgcgcagtgagttagatcaactgaaaatgcgaaccgggtctctcatcgaacccaccataccacgtacacacctcgacacatcagcggaactgcggtactcagtaggtagcctggtcgattctcagtccgattatagaacgactaaggtcattcgcagacctcggcgtggtcggatgggggtgaggcgtgatgaacccaaagtaaagtcattaggcgaccacgagtggaacaggacacagcagatcggggttctgtcatcccacccgtttgagtcagatacagaaatgtcagatatcgacgacgatgaccgagagacaatctttagttcaatggacttattgtctcctagtggacatagtgatgcacaaaccttggcgatgatgcttcaagaacaattggacgcgattaataaggagatccgacttatccaggaagagaaggaaagcacagagttacgagcggaggagatcgagaatagagtcgcaagtgtcagcctcgaaggtctcaacctcgcgagggtgcatcctggaacaagtattacagcatctgtcaccgccagctctcttgcctctagttctcctccttccggacacagcacccccaagctgacaccgagaagccctgcgcgagaaatggatagaatgggagtaatgacactgcccagcgacctgcgtaaacacaggcggaagatcgccgtggtggaggaagacggtcgcgaggataaggcaaccataaaatgcgagacaagtcccccacccacgccgagggccttacgtatgacccacaccttacctagttcatatcacaacgacgcccgaagttctctcagcgtaagcctagagccagagtcgttgggcctaggttccgcaaattcgtctcaggactccctgcacaaagcgcctaaaaagaaggggatcaagagcagcattggtcgattgtttggcaaaaaggaaaaggcccgtttaggccagttacgtggattcatggagaccgaggcagcagcacaggagtccctcgggttaggaaaactcggaacacaggccgagaaggataggaggttgaagaagaagcatgaactgctggaggaagcccgtaggaaaggattgccttttgcacagtgggacggccctacggtggtcgcctggctcgaactctggctcgggatgccagcctggtatgttgccgcttgccgagcgaatgtaaagagcggggctattatgagtgctctgtcggacactgaaattcagagggaaattggcatttctaatcccctgcaccgcctgaagctgcggttggccattcaagagatggtgagtctgacctccccttcagcacccccaacatcccggactcctagcgggaacgtgtgggttacacacgaagagatggagaacctggcggctccggctaaaacaaaggaatcagaggagggttcctgggcccagacgctggcctacggagacatgaatcacgaatggatcgggaacgagtggctcccaagcctcgggctccctcagtataggtcgtacttcatggaatgccttgtggacgccaggatgctagatcacctgaccaagaaggatctgagggttcacctgaagatggtcgactctttccaccgcactagccttcagtacggcatcatgtgtttgaaacgacttaactacgatcggaaagagctcgagcggagaagggaggcaagccagcatgaaattaaggacgtgctagtttggagtaatgatcgagttatcaggtggatccaggccatcggactgcgcgagtatgcaaataatattctggagtcaggagtacatggtagtctgatcgccctggacgagaatttcgactattcgtctctggcattgcttttacagatcccgacccagaacacacaggctcgtcagatacttgagcgagagtacaacaacctactcgcactaggtacagagaggcgcttggacgagagcgatgataagaacttccggagggggtcaacctggcgtcggcaattccctcccagggaagtgcacggaatctcgatgatgcccggtagttctgagaccctccctgctggctttcgcctgacaacaacctcggggcagtcgcgaaagatgaccacggatgtggcttcgtctcgactgcaacggctggacaactctactgtgaggacttattcctgctag

SEQ ID NO: 83622 - protein, 1156 aa, Artificial Sequence
  derived and/or modified sequence
MIFSDMNTVSGSPKVHPPNGTRFYTFQEFAALTKELNACREQLLEKEEEISELKAERNNTRLLLEHLECLVSRHERSLRMTVVKRQAQSPSGVSSEVEVLKALKSLFEHHKALDEKVRERLRVSLERVSALEEELAAANQEIVALREQNVHIQRKMASSEGSTESEHLEGMEPGQKVHEKRLSNGSIDSTDETSQIVELQELLEKQNYEMAQMKERLAALSSRVGEVEQEAETARKDLIKTEEMNTKYQRDIREAMAQKEDMEERITTLEKRYLSAQRESTSIHDMNDKLENELANKEAILRQMEEKNRQLQERLELAEQKLQQTMRKAETLPEVEAELAQRIAALTKAEERHGNIEERMRHLEGQLEEKNQELQRARQREKMNEEHNKRLSDTVDRLLTESNERLQLHLKERMAALEEKNVLIQESETFRKNLEESLHDKERLAEEIEKLRSELDQLKMRTGSLIEPTIPRTHLDTSAELRYSVGSLVDSQSDYRTTKVIRRPRRGRMGVRRDEPKVKSLGDHEWNRTQQIGVLSSHPFESDTEMSDIDDDDRETIFSSMDLLSPSGHSDAQTLAMMLQEQLDAINKEIRLIQEEKESTELRAEEIENRVASVSLEGLNLARVHPGTSITASVTASSLASSSPPSGHSTPKLTPRSPAREMDRMGVMTLPSDLRKHRRKIAVVEEDGREDKATIKCETSPPPTPRALRMTHTLPSSYHNDARSSLSVSLEPESLGLGSANSSQDSLHKAPKKKGIKSSIGRLFGKKEKARLGQLRGFMETEAAAQESLGLGKLGTQAEKDRRLKKKHELLEEARRKGLPFAQWDGPTVVAWLELWLGMPAWYVAACRANVKSGAIMSALSDTEIQREIGISNPLHRLKLRLAIQEMVSLTSPSAPPTSRTKESEEGSWAQTLAYGDMNHEWIGNEWLPSLGLPQYRSYFMECLVDARMLDHLTKKDLRVHLKMVDSFHRTSLQYGIMCLKRLNYDRKELERRREASQHEIKDVLVWSNDRVIRWIQAIGLREYANNILESGVHGSLIALDENFDYSSLALLLQIPTQNTQARQILEREYNNLLALGTERRLDESDDKNFRRGSTWRRQFPPREVHGISMMPGSSETLPAGFRLTTTSGQSRKMTTDVASSRLQRLDNSTVRTYSC

SEQ ID NO: 83623 - DNA, 3471 bp, Artificial Sequence
  derived and/or modified sequence
atgatcttcagcgacatgaacaccgtgagcggcagccccaaggtgcacccccccaacggcaccagattctacaccttccaggagttcgccgccctgaccaaggagctgaacgcctgcagagagcagctgctggagaaggaggaggagatcagcgagctgaaggccgagagaaacaacaccagactgctgctggagcacctggagtgcctggtgagcagacacgagagaagcctgagaatgaccgtggtgaagagacaggcccagagccccagcggcgtgagcagcgaggtggaggtgctgaaggccctgaagagcctgttcgagcaccacaaggccctggacgagaaggtgagagagagactgagagtgagcctggagagagtgagcgccctggaggaggagctggccgccgccaaccaggagatcgtggccctgagagagcagaacgtgcacatccagagaaagatggccagcagcgagggcagcaccgagagcgagcacctggagggcatggagcccggccagaaggtgcacgagaagagactgagcaacggcagcatcgacagcaccgacgagaccagccagatcgtggagctgcaggagctgctggagaagcagaactacgagatggcccagatgaaggagagactggccgccctgagcagcagagtgggcgaggtggagcaggaggccgagaccgccagaaaggacctgatcaagaccgaggagatgaacaccaagtaccagagagacatcagagaggccatggcccagaaggaggacatggaggagagaatcaccaccctggagaagagatacctgagcgcccagagagagagcaccagcatccacgacatgaacgacaagctggagaacgagctggccaacaaggaggccatcctgagacagatggaggagaagaacagacagctgcaggagagactggagctggccgagcagaagctgcagcagaccatgagaaaggccgagaccctgcccgaggtggaggccgagctggcccagagaatcgccgccctgaccaaggccgaggagagacacggcaacatcgaggagagaatgagacacctggagggccagctggaggagaagaaccaggagctgcagagagccagacagagagagaagatgaacgaggagcacaacaagagactgagcgacaccgtggacagactgctgaccgagagcaacgagagactgcagctgcacctgaaggagagaatggccgccctggaggagaagaacgtgctgatccaggagagcgagaccttcagaaagaacctggaggagagcctgcacgacaaggagagactggccgaggagatcgagaagctgagaagcgagctggaccagctgaagatgagaaccggcagcctgatcgagcccaccatccccagaacccacctggacaccagcgccgagctgagatacagcgtgggcagcctggtggacagccagagcgactacagaaccaccaaggtgatcagaagacccagaagaggcagaatgggcgtgagaagagacgagcccaaggtgaagagcctgggcgaccacgagtggaacagaacccagcagatcggcgtgctgagcagccaccccttcgagagcgacaccgagatgagcgacatcgacgacgacgacagagagaccatcttcagcagcatggacctgctgagccccagcggccacagcgacgcccagaccctggccatgatgctgcaggagcagctggacgccatcaacaaggagatcagactgatccaggaggagaaggagagcaccgagctgagagccgaggagatcgagaacagagtggccagcgtgagcctggagggcctgaacctggccagagtgcaccccggcaccagcatcaccgccagcgtgaccgccagcagcctggccagcagcagcccccccagcggccacagcacccccaagctgacccccagaagccccgccagagagatggacagaatgggcgtgatgaccctgcccagcgacctgagaaagcacagaagaaagatcgccgtggtggaggaggacggcagagaggacaaggccaccatcaagtgcgagaccagccccccccccacccccagagccctgagaatgacccacaccctgcccagcagctaccacaacgacgccagaagcagcctgagcgtgagcctggagcccgagagcctgggcctgggcagcgccaacagcagccaggacagcctgcacaaggcccccaagaagaagggcatcaagagcagcatcggcagactgttcggcaagaaggagaaggccagactgggccagctgagaggcttcatggagaccgaggccgccgcccaggagagcctgggcctgggcaagctgggcacccaggccgagaaggacagaagactgaagaagaagcacgagctgctggaggaggccagaagaaagggcctgcccttcgcccagtgggacggccccaccgtggtggcctggctggagctgtggctgggcatgcccgcctggtacgtggccgcctgcagagccaacgtgaagagcggcgccatcatgagcgccctgagcgacaccgagatccagagagagatcggcatcagcaaccccctgcacagactgaagctgagactggccatccaggagatggtgagcctgaccagccccagcgccccccccaccagcagaaccaaggagagcgaggagggcagctgggcccagaccctggcctacggcgacatgaaccacgagtggatcggcaacgagtggctgcccagcctgggcctgccccagtacagaagctacttcatggagtgcctggtggacgccagaatgctggaccacctgaccaagaaggacctgagagtgcacctgaagatggtggacagcttccacagaaccagcctgcagtacggcatcatgtgcctgaagagactgaactacgacagaaaggagctggagagaagaagagaggccagccagcacgagatcaaggacgtgctggtgtggagcaacgacagagtgatcagatggatccaggccatcggcctgagagagtacgccaacaacatcctggagagcggcgtgcacggcagcctgatcgccctggacgagaacttcgactacagcagcctggccctgctgctgcagatccccacccagaacacccaggccagacagatcctggagagagagtacaacaacctgctggccctgggcaccgagagaagactggacgagagcgacgacaagaacttcagaagaggcagcacctggagaagacagttcccccccagagaggtgcacggcatcagcatgatgcccggcagcagcgagaccctgcccgccggcttcagactgaccaccaccagcggccagagcagaaagatgaccaccgacgtggccagcagcagactgcagagactggacaacagcaccgtgagaacctacagctgctag

SEQ ID NO: 83624 - DNA, 3471 bp, Artificial Sequence
  derived and/or modified sequence
atgatcttctccgatatgaatacagtgtccggctcacctaaggtgcatcccccaaatggaaccagattctacacctttcaggagttcgccgctcttacgaaagaactcaacgcttgcagggaacagctcctcgagaaggaggaagaaataagcgagctgaaggccgagcggaacaacacacgactgctgctggagcacctcgagtgcctcgtgtctcgacacgagagatccctacgaatgactgtggtaaagcggcaagcccaatctccatctggtgtgagctcagaggtagaagtactgaaagccctcaagagcctctttgaacaccacaaagcgctcgatgagaaggtgcgagagagacttagggtgtccctcgagcgggtgtccgctctggaggaggaactggccgccgccaatcaagagatagtagcgctccgggaacagaacgtgcatatccagcgcaaaatggcgtcctcagaaggatctaccgagtcagagcacctggaagggatggagccaggacagaaggtgcacgaaaaaaggctctccaatgggtccattgattccaccgatgagaccagtcagatcgtcgaactgcaggagctgctggaaaaacagaactatgagatggctcagatgaaggaaaggctggccgcgctttccagcagggtcggggaggtggaacaagaggctgaaaccgcgcggaaggatctgattaagacagaagagatgaacacaaagtaccagcgagacattagagaagctatggcccaaaaggaggacatggaggagcggatcactactctggaaaagaggtacctgtcggcccagagggaatctacctcgatacacgatatgaacgataaactcgaaaacgaactcgccaataaagaggccattctgcggcaaatggaagagaagaataggcagctgcaggaacgcctggagctagccgagcagaagctgcaacaaactatgcggaaggcagagacccttccagaggtcgaggcagaacttgctcagcgtatcgcggccttaactaaggctgaagaacggcacgggaatatcgaagagcgcatgagacatcttgaggggcaactggaggagaagaaccaggaactgcaacgagctcggcagcgcgagaaaatgaacgaagagcacaacaagcgcctctcggacaccgtggacaggctgctaacagagtcaaacgagcgactccagctccacttgaaggaacgcatggctgcacttgaagaaaagaacgttctaattcaggagtccgagactttccggaaaaacctcgaagagagcctccacgacaaagaacggctggccgaagagatcgaaaaactgaggagtgaactcgaccagctcaagatgcgcaccggctcattaatcgaacccactatccctcgtactcacttggacacttctgccgaactgcgctactcggtaggcagcctagtggattcacagagtgattaccggacaaccaaggtgattagaaggcctaggagaggcaggatgggcgtaagacgggacgaaccaaaggtcaagagcctgggcgaccatgagtggaaccggacccagcaaatcggcgtcctgtctagtcacccctttgagagtgatactgaaatgagtgacatagacgacgatgacagggaaacaatctttagctctatggacctgctatccccgagcggacatagtgatgcccagacccttgctatgatgctgcaggaacagttggacgccataaacaaggagatacgattgattcaggaagaaaaagagtcaactgagctgagggcagaggaaatcgagaatagggtagcatctgtgagtctagaggggttgaatcttgcaagagtgcaccctggaacctctatcactgcgagtgtgactgctagctctttggcctcctcttctcctcccagtggtcactccaccccaaagctgaccccacgtagtcctgcgcgtgaaatggaccggatgggcgtgatgacgcttccaagtgatttgcggaaacacaggcggaagatcgctgtggtggaggaggatggccgggaggacaaggcaactattaaatgcgaaacgtcccctccacccacacctagggccttacggatgacccacacgctgccgtctagttatcataacgacgctagaagttcgttaagcgtaagcctcgagccggagtcattaggattgggatccgccaactcaagtcaagattctttgcataaggctccaaagaagaaagggattaaaagctcaatcggtaggctgtttggaaagaaggagaaagccaggttggggcagcttaggggctttatggagaccgaagccgccgcccaggaaagcctgggactcgggaagttgggcacacaggccgaaaaggatcggaggctgaaaaaaaaacacgagctgctggaggaagctcgcagaaagggacttccattcgctcagtgggacggtcccactgtggttgcctggctggagctgtggcttggaatgcctgcctggtacgttgccgcttgtagggccaacgtcaagtctggtgcaatcatgtcagcactcagcgataccgaaattcaacgcgaaattgggatttctaaccccttgcacaggctgaaactgcggctggcgatacaggagatggtcagccttacctctccatctgcgccccccactagtcgcaccaaggaatctgaagaaggttcgtgggctcagacgttagcctatggcgacatgaatcacgaatggatcggaaatgagtggctgcctagcctagggctccctcaatataggagctacttcatggaatgtctggtggatgcacggatgcttgatcatctgacaaaaaaggatctgcgggtgcaccttaagatggtggacagtttccacaggacgagcctacagtacggaattatgtgcttaaaacgactcaactatgaccggaaagaactcgaacgcagacgcgaagcaagccagcacgaaatcaaagatgttctggtgtggtccaacgatcgcgtaatccggtggatacaggccattgggctgagagagtacgctaacaatatacttgaatcaggggtccacgggtccctgatcgctctcgacgagaactttgattactcctccttggctcttctcttacaaatcccgacacagaacacacaggctaggcagatacttgagcgagagtataataacctcctggctttggggacagagcgccggctggatgagtcagacgataagaactttcggagaggttccacctggagaagacagtttcctccgcgtgaggtccatgggatatccatgatgccaggtagtagcgaaaccttaccagctggttttcgcctgacgacgacatcaggtcaatctagaaaaatgactaccgatgtggcatcttcccggctgcagcgcctggacaacagtacagtacgaacgtacagctgctag

SEQ ID NO: 83625 - DNA, 3471 bp, Artificial Sequence
  derived and/or modified sequence
atgatcttcagtgacatgaacacagtgtctggcagccccaaggtgcaccccccaaatggcacccgcttctacaccttccaggagtttgctgccctgaccaaggagctgaatgcctgccgggagcagctgctggagaaggaggaggagatcagcgagctgaaggccgagaggaacaacacccggctgctgctggagcacctggagtgcctggtgtccagacatgagaggagcctgaggatgacagtggtgaagaggcaggcccagagccccagcggcgtgtcctctgaggtggaggtgctgaaggccctgaagagcctgtttgagcaccacaaggccctggatgagaaggtgcgggagcggctgcgggtgtccctggagcgggtgtctgccctggaggaggagctggccgccgccaaccaggagatcgtggccctgcgggagcagaatgtgcacatccagaggaagatggccagcagcgagggcagcacagaaagtgagcacctggagggcatggagcccggccagaaggtgcatgagaagaggctgagcaatggcagcattgacagcacagatgagaccagccagatcgtggagctgcaggagctgctggagaagcagaactatgagatggcccagatgaaggagcggctggccgccctgagcagccgggtgggggaggtggagcaggaggccgagacagccaggaaggacctgatcaagacagaggagatgaacaccaagtaccagagggacatccgggaggccatggcccagaaggaggacatggaggagcgcatcaccaccctggagaagcgctacctgagcgcccagcgggagagcaccagcatccatgacatgaatgacaagctggagaatgagctggccaacaaggaggccatcctgcggcagatggaggagaagaaccggcagctgcaggagcggctggagctggccgagcagaagctgcagcagaccatgaggaaggccgagaccctgcctgaggtggaggccgagctggcccagagaattgctgccctgaccaaggccgaggagagacatggcaacatcgaggagaggatgaggcacctggagggccagctggaggagaagaaccaggagctgcagagggcccggcagcgggagaagatgaatgaggagcacaacaagaggctgagtgacacagtggaccggctgctgacagagagcaatgaaaggctgcagctgcacctgaaggagaggatggccgccctggaggagaagaatgtgctgatccaggagagcgagaccttcaggaagaacctggaggagagcctgcatgacaaggagcggctggccgaggagattgagaagctgcggtctgagctggaccagctgaagatgaggacaggcagcctcatcgagcccaccatccccaggacccacctggacaccagcgctgagctgcgctacagcgtgggcagcctggtggacagccagagcgactaccgcaccaccaaggtgatccggcggccccggcggggccgcatgggcgtgagaagagatgagcccaaggtgaagagcctgggggaccacgagtggaacagaacccagcagatcggcgtgctgagcagccacccctttgaaagtgacacagagatgtctgacattgatgatgatgaccgggagaccatcttcagctccatggacctgctgagccccagcggccacagtgatgcccagaccctggccatgatgctgcaggagcagctggatgccatcaacaaggagatccgcctcatccaggaggagaaggagagcacagagctgcgggcagaggagattgagaacagagtggcctctgtgtccctggagggcctgaacctggcccgggtgcaccctggcaccagcatcacagcctctgtgacagccagcagcctggccagcagcagcccccccagcggccacagcacccccaagctgacccccaggagccctgcccgggagatggacaggatgggcgtgatgaccctgcccagcgacctgaggaagcacaggaggaagattgctgtggtggaggaggatggccgggaggacaaggccaccatcaagtgtgagaccagccccccacccaccccccgggccctgaggatgacccacaccctgcccagcagctaccacaatgatgcccggagcagcctgtctgtgtccctggagcctgagagcctgggcctgggcagcgccaacagcagccaggacagcctgcacaaggcccccaagaagaagggcatcaagagcagcatcggccgcctgtttgggaagaaggagaaggcccggctgggccagctgcggggcttcatggagacagaagctgctgcccaggagagcctgggcctgggcaagctgggcacccaggccgagaaggaccggcggctgaagaagaagcatgagctgctggaggaggcccggaggaagggcctgccctttgcccagtgggatggccccaccgtggtggcctggctggagctgtggctgggcatgcctgcctggtacgtggccgcctgccgggccaacgtgaagagcggggccatcatgtctgccctgagtgacacagagatccagcgggagatcggcatcagcaaccccctgcaccggctgaagctgcggctggccatccaggagatggtgtccctgaccagccccagcgccccacccaccagcaggaccaaggagagcgaggagggctcctgggcccagaccctggcctatggagacatgaaccacgagtggattggaaatgagtggctgcccagcctgggcctgccccagtaccgcagctacttcatggagtgcctggtggatgccaggatgctggaccacctgaccaagaaggacctgcgggtgcacctgaagatggtggacagcttccacaggaccagcctgcagtatggcatcatgtgcctgaagaggctgaactatgacaggaaggagctggagaggagaagagaggccagccagcacgagatcaaggatgtgctggtgtggagcaatgacagagtcatccgctggatccaggccatcggcctgcgggagtatgccaacaacatcctggagagcggcgtgcacggcagcctcatcgccctggatgagaactttgactacagcagcctggccctgctgctgcagatccccacccagaacacccaggcccggcagatcctggagcgggagtacaacaacctgctggccctgggcacagagcggcggctggatgaaagtgatgacaagaacttcagaagaggcagcacctggaggcggcagtttcctccccgggaggtgcacggcatctccatgatgcctggcagcagcgagaccctgcctgctggcttccggctgaccaccaccagcggccagagcaggaagatgaccacagatgtggccagcagccggctgcagaggctggacaacagcacagtgaggacctacagctgctag

SEQ ID NO: 83626 - DNA, 3471 bp, Artificial Sequence
  derived and/or modified sequence
atgatcttcagcgacatgaacaccgtgagcggcagccccaaggtgcaccccccaaatggtacaaggttttacacgtttcaagagtttgctgcactaaccaaggaacttaacgcatgtcgggagcaactcctggagaaggaagaagagatcagtgaactgaaagctgaaaggaacaacacccggctgttgcttgagcaccttgagtgcctggtctcccggcatgaacggtcacttagaatgactgtcgttaaacgccaggcccagagccccagtggggtatcttccgaggtggaggtgctgaaagctctcaaatctttgtttgagcaccataaagccctggacgagaaagtgcgggagcgtctccgcgtgtctctggagagggtgtcagccctggaagaagagctcgccgctgccaatcaggagatagtggctttgagggagcagaacgttcacatacaaaggaagatggcatcgagtgagggtagcacagaaagcgaacacctggaggggatggaacctggccagaaagtacacgaaaaacgcttatccaacggctctatcgacagcaccgatgaaacatctcagatagtggagctccaagagcttttggagaaacaaaattatgaaatggctcaaatgaaagaacggctggccgccctctcctctcgggtgggggaagtggagcaggaggctgaaaccgccaggaaggacctgatcaagacggaagagatgaacactaaatatcagcgggatatccgggaggcaatggcgcaaaaagaggacatggaagaacgaattacaacccttgagaagaggtacctgagtgcacaaagggaaagcacatcaattcacgatatgaatgacaagctggaaaatgaactggcaaacaaagaggccatcctcaggcagatggaagagaagaataggcagctgcaggagcggctcgagctggccgaacagaagctgcagcagaccatgcgtaaagcggaaaccctgcccgaggtcgaggcggaactggcacagcgcattgctgcattgactaaagcggaagagcggcacggcaatatcgaagaacgaatgaggcatctggagggccaactcgaggaaaagaaccaggaactgcagagagctaggcagagagagaagatgaacgaggagcataataaacggctgtcagacacagtggatagattgctgaccgagagcaatgagagattgcaattgcacttgaaggagcgtatggcagccttagaagaaaaaaacgtactaatccaggagagcgagaccttcaggaaaaatcttgaggaatctctgcacgataaggagcgactggccgaagaaattgaaaaattacggtctgaactggatcagctcaagatgagaaccggaagcttgatagagcccaccatcccacggacccacctggatacgagcgcagaactccgttatagtgtgggaagtttggtggactctcaatccgattacagaactacaaaggtgatacgacgcccccgacggggcagaatgggggtgcgcagggacgagcccaaggttaagagcctgggcgaccacgagtggaataggactcagcaaattggagtcctgagttcacaccctttcgagtccgacaccgagatgtctgatatcgatgacgacgatagggaaacaatcttcagctcgatggacctcctgtccccaagcggacactcagacgcccagacactggcaatgatgctgcaggaacagcttgatgcaatcaataaggagatcaggctcatccaagaggagaaggagagcaccgaactgagagctgaagaaatcgagaatcgagtagcctccgtatctctggaaggcttgaatctcgcccgcgtgcaccccggtacctcaataacagcatctgtcacagcctcgtctcttgcctcttcctctcccccatctgggcacagcacacctaaattgactcccagaagccctgccagggagatggaccgcatgggcgtgatgactctgcccagcgacctgcgcaaacataggcggaagattgccgttgtagaagaggatggtcgggaggataaggcaaccatcaaatgtgagacgtcaccccctccaacccctagagccctgcgcatgacgcacacgctgccaagcagctatcacaacgacgcaagatcttctctgagcgtatccctggagcccgaaagcctcgggctcgggagcgctaattcctcacaggattctctccataaagcacctaaaaaaaagggcataaagtcttccatcggccggctgttcggaaagaaagagaaggctagactcggacagctgcgggggttcatggagactgaagcagcggcacaggagagtctcggattaggcaaactgggcacccaggcggagaaggatcgcagactgaaaaaaaaacacgagctgttggaggaggcccgaagaaaaggcctgccgtttgctcaatgggatggtccaactgtcgtggcctggctagaactttggctgggcatgcccgcatggtacgtggcagcctgccgggccaatgtcaagagcggagcaattatgagcgctctgtcggataccgaaatacagcgggaaataggtatctctaacccgctgcatcggttgaaacttcggttagctatccaggaaatggtgtcactcacctcaccatctgccccccccacttcccggactaaagaatcagaagaggggagttgggcccagacacttgcgtacggagatatgaatcacgagtggattggtaacgagtggcttccttctctgggtcttccccagtatcgctcctacttcatggagtgtctggtggacgccaggatgttggaccaccttaccaaaaaggacctgagggtgcatttgaagatggtagacagcttccaccgaacctccctgcagtacggcattatgtgccttaaacggcttaattatgatagaaaagaactggagcggcggagggaagccagtcagcacgagattaaggatgtgctggtttggtcaaacgatagggtcatccgatggatccaggcgattgggctcagagagtatgccaacaacatactcgagagcggggttcatggttcgctcattgccctggacgaaaacttcgattactcatccctcgcgctgctcctgcagatccccacccaaaacactcaggcgcggcaaatattagaaagggagtacaacaatctactggctttgggcaccgaaagaaggctcgatgagtctgatgacaagaacttccggcgggggtcgacttggcggcggcagtttccccctcgagaggtacacggcatttccatgatgcccggtagctctgagaccctccctgccggcttccggctcactaccacctccggacagagcagaaagatgactactgatgtggcatcttcccgtctgcagcgtctcgacaatagcactgtgagaacatacagctgctag

SEQ ID NO: 83627 - DNA, 3903 bp, Artificial Sequence
  derived and/or modified sequence
gagaacagatgggcaggtccacagcactgccagattctgcacaagctccatttatcgttggttcttgcttttttccttctgtgtttttaattttttaaaaaacattgtatgttctagagaactagcttcacaaaaggtcggtggctgatgatctttcagctaagatttcaaatgtagaagaacaattcaaaatgctatcactgtgtatgtaagaaggatggggcagatttcattttaccctctagtctccctcaatgcatgcacggatttatctgtacgctaagctctctgctctgcatctgtagctccttgtggattatattgtctcagtgatcagaaatgattttctcggatatgaacaccgtttctggctcccctaaagtgcatcctcctaatgggacccggttttacacttttcaagaatttgctgcactgacaaaagaattaaatgcctgcagggaacaacttctagaaaaggaagaagaaatctctgaacttaaagctgaaagaaacaacacaagactattactggagcatttggagtgccttgtgtcacgacatgaaagatcactaagaatgacggtggtaaaacggcaagcccagtctccctcaggagtatccagtgaagttgaagttctcaaggcactgaaatctttgtttgagcaccacaaggccttggatgaaaaggtaagggagcgactgagggtttctttagaaagagtctctgcactggaagaagaactagctgctgctaatcaggagattgttgccttgcgtgaacaaaatgttcatatacaaagaaaaatggcatcaagcgagggatccacagagtcagaacatcttgaagggatggaacctggacagaaagtccatgagaagcgtttgtccaatggttctatagactcaaccgatgaaactagtcaaatagttgaactacaagaattgcttgaaaagcaaaactatgaaatggcccagatgaaagaacgtttagcagccctttcttcccgagtgggagaggtggaacaggaagcagagacagcaagaaaggatctcattaaaacagaagaaatgaacaccaagtatcaaagggacattagggaggccatggcacaaaaggaagatatggaagaaagaattacaacccttgaaaagcgttacctcagtgctcagagagaatctacctccatacatgacatgaatgataaactagaaaatgagttagcaaataaagaagctatcctgcggcagatggaagagaaaaacagacagttacaagaacgtcttgagctagctgaacaaaagttgcagcagaccatgagaaaggctgaaaccttgcctgaagtagaggctgaactggctcagagaattgcagccctaaccaaggctgaagagagacatggaaatattgaagaacgtatgagacatttagagggtcaacttgaagagaagaatcaagaacttcaaagagctaggcaaagagagaaaatgaatgaggagcataacaagagattatcggatacggttgatagacttctgactgaatccaatgaacgcctacaactacacttaaaggaaagaatggctgctctagaagaaaagaatgttttaattcaagaatcagaaactttcagaaagaatcttgaagaatctttacatgataaggaaagattagcagaagaaattgaaaagctgagatctgaacttgaccaattgaaaatgagaactggctctttaattgaacccacaataccaagaactcatctagacacctcagctgagttgcggtactcagtgggatccctagtggacagccagtctgattacagaacaactaaagtaataagaagaccaaggagaggccgcatgggtgtgcgaagagatgagccaaaggtgaaatctcttggggatcacgagtggaatagaactcaacagattggagtactaagcagccacccttttgaaagtgacactgaaatgtctgatattgatgatgatgacagagaaacaatttttagctcaatggatcttctctctccaagtggtcattccgatgcccagacgctagccatgatgcttcaggaacaattggatgccatcaacaaagaaatcaggctaattcaggaagaaaaagaatctacagagttgcgtgctgaagaaattgaaaatagagtggctagtgtgagcctcgaaggcctgaatttggcaagggtccacccaggtacctccattactgcctctgttacagcttcatcgctggccagttcatctccccccagtggacactcaactccaaagctcacccctcgaagccctgccagggaaatggatcggatgggagtcatgacactgccaagtgatctgaggaaacatcggagaaagattgcagttgtggaagaagatggtcgagaggacaaagcaacaattaaatgtgaaacttctcctcctcctacccctagagccctcagaatgactcacactctcccttcttcctaccacaatgatgctcgaagtagtttatctgtctctcttgagccagaaagcctcgggcttggtagtgccaacagcagccaagactctcttcacaaagcccccaagaagaaaggaatcaagtcttcaataggacgtttgtttggtaaaaaagaaaaagctcgacttgggcagctccgaggctttatggagactgaagctgcagctcaggagtccctggggttaggcaaactcggaactcaagctgagaaggatcgaagactaaagaaaaagcatgaacttcttgaagaagctcggagaaagggattaccttttgcccagtgggatgggccaactgtggtcgcatggctagagctttggttgggaatgcctgcgtggtacgtggcagcctgccgagccaacgtgaagagtggtgccatcatgtctgctttatctgacactgagatccagagagaaattggaatcagcaatccactgcatcgcttaaaacttcgattagcaatccaggagatggtttccctaacaagtccttcagctcctccaacatctcgaactaaagaatctgaggaaggaagctgggcccagaccctggcttatggagatatgaatcatgagtggattggaaatgaatggcttcccagcttggggttacctcagtacagaagttactttatggaatgcttggtagatgcaagaatgttagatcacctaacaaaaaaagatctccgtgtccatttaaaaatggtggatagtttccatcgaacaagtttacaatatggaattatgtgcttaaagaggttgaattatgacagaaaagaactagaaagaagacgggaagcaagccaacatgaaataaaagacgtgttggtgtggagcaatgaccgagttattcgctggatacaagcaattggacttcgagaatatgcaaataatatacttgagagcggtgtgcatggctcacttatagccctggatgaaaactttgactacagcagcttagctttattattacagattccaacacagaacacccaggcaaggcagattcttgaaagagaatacaataacctcttggccctgggaactgaaaggcgactggatgaaagtgatgacaagaacttcagacgtggatcaacctggagaaggcagtttcctcctcgtgaagtacatggaatcagcatgatgcctgggtcctcagaaacattaccagctggatttaggttaaccacaacctctgggcagtcaagaaaaatgacaacagatgttgcttcatcaagactgcagaggttagacaactccactgttcgcacatactcatgttgaccagccactcaaaggaggcagcactgacctgctatggcgtcttttcagtctactctacctaaagtgcactaccatctaagaagacgagcagtg

SEQ ID NO: 83628 - DNA, 3471 bp, Artificial Sequence
  derived and/or modified sequence
atgatcttctcggacatgaacactgtcagtggaagtcctaaagtacatcctcccaacggcaccaggttttatacgtttcaggaatttgctgctctgaccaaggagctcaacgcctgccgtgagcaactgttggaaaaagaggaggaaatatcagagcttaaggcagagagaaacaatactcggctgttactggaacatctggagtgcttggtatcccggcacgaacgcagcctgagaatgactgtcgtgaagcggcaggcacagtcccctagtggggtgagtagcgaggtggaggtcctgaaggccctcaaatccctcttcgaacaccacaaggcactggacgagaaggtgagggagagattgagagtgagtctcgaacgggtctccgctcttgaggaggagctggccgctgctaaccaagagatcgtggcccttcgggagcaaaacgtgcatattcaaaggaagatggcctcatccgaagggtccacagaatcagaacatctggaaggtatggaacctggccagaaggtccacgaaaaaagactgagcaatggatccattgatagtaccgatgaaactagtcagattgtcgagcttcaggaattgctggagaagcaaaactatgaaatggcccagatgaaggagcggctcgctgctctcagtagccgtgtaggtgaggtcgaacaggaggcagagactgcccgaaaagacttgatcaagaccgaagagatgaacactaaatatcagcgcgatattcgcgaagcaatggcccagaaggaagacatggaggaacggatcacaacactggagaaacgttatttgtccgcccaacgcgagtcgacaagcatccatgatatgaatgacaaactggaaaatgagcttgccaacaaagaggcgattttgcgtcagatggaggagaagaacaggcaactccaggagagactggagctggccgagcagaaattgcagcagaccatgaggaaggcagaaactctgcctgaagtggaagccgagttggcccaaaggattgctgcgcttactaaggctgaggaaaggcacggcaatattgaggaacgaatgcggcatttagagggccagctggaggaaaaaaaccaggaactgcaacgagctcgccagcgcgaaaaaatgaatgaggaacacaataaaaggctgtcagacaccgtggaccgcctgcttaccgaaagcaatgagcgcttgcagctccatttgaaagaaaggatggcggctttggaggaaaagaatgttctgatccaggagtctgaaactttccgcaagaacttagaggagtcacttcatgacaaagagcggcttgccgaagagatcgaaaaactgcggtccgaacttgatcaactgaagatgagaactggtagcctgatcgagcctaccatccccaggactcacctggacacctcggctgagctcagatactctgtgggctctttagtagatagtcagagcgactatagaactactaaagtaataagacggcctagaaggggtagaatgggtgttcgtcgcgatgaacccaaggtgaagagcctgggcgatcacgagtggaacaggacgcaacagattggagtcttatcttcccaccctttcgaatccgacaccgaaatgtctgatatagacgatgatgatcgcgagactatcttctctagcatggacttgctgtctccgtctggccactccgacgcacaaacgctggccatgatgctccaagaacagttggatgccattaacaaggaaatccgcctgatccaggaagagaaagaaagtaccgaactgagggccgaagagattgaaaacagagtggcctcagttagcctggaagggttgaacctcgccagagtacatcccggaacatctatcacggcctcagtcaccgctagcagcttagccagttcaagcccacccagtggtcacagcacccctaagctgacgcctcgctctccagccagggagatggaccggatgggagtgatgacactgccgtccgatttgcgcaaacacagacggaagattgctgtcgttgaggaagatgggagagaggataaggctaccatcaagtgcgaaacaagtcccccaccaacccctagggcacttcggatgacccatactcttcccagttcctaccacaacgatgctagaagttctctatccgtgtcactcgaacctgagtctcttggcctgggttccgccaactcttctcaggacagtctccataaggctccgaagaaaaaaggaataaaaagctctatcgggagactatttggtaagaaggaaaaagctcgcctggggcagttgcggggatttatggagactgaagctgcagcccaggagtctctcggtctcgggaaactgggcacgcaagcagaaaaggacagacgactgaagaagaagcacgaattgctggaagaggcacggagaaagggactgcccttcgcacaatgggacgggccaacggttgtcgcctggctggaactctggctgggtatgcccgcatggtacgttgccgcatgtagggccaatgtcaagagtggagcaattatgtcagccctttcagatacagaaatacagcgcgagatcggcatcagcaatcctttgcaccgcctgaaactgcggctggccatacaggagatggtctccctgacttcccctagcgctccccctaccagccggaccaaagagtctgaggaggggtcctgggcccagaccttagcatacggggatatgaaccacgaatggataggaaatgagtggctgccgtccctcgggctgccccagtatcgttcatactttatggagtgtctagtggacgcacggatgctggatcacttaaccaagaaggatctgagagtgcatctaaaaatggtggacagcttccacagaacctcccttcagtacggcataatgtgtttaaagaggcttaactatgataggaaggaactcgagaggcggcgagaggcttcacaacatgaaatcaaggacgtcctagtgtggtctaacgacagggtcatccgttggattcaggctatcgggctgcgtgaatatgctaacaatatactggagagtggtgtgcacggaagtctgatcgcactggacgagaactttgattattccagcctcgctttgcttctgcagatccccacccaaaacactcaggcaagacaaatactggagcgggaatataataatctgctagctctcggaacagagcgccgactcgacgaaagcgatgacaagaacttccgaaggggatctacttggagacggcaattcccacctagggaagtgcacgggattagtatgatgccaggatccagcgagacattgcctgcaggtttcagactgacgacaacctccggccagtcccgtaaaatgacaactgatgttgccagttcaagactccaaaggctagataactctacggtgcggacctacagctgttag

SEQ ID NO: 83629 - protein, 1152 aa, Artificial Sequence
  derived and/or modified sequence
MIFSDMNTVSGSPKVHPPNGTRFYTFQEFAALTKELNACREQLLEKEEEISELKAERNNTRLLLEHLECLVSRHERSLRMTVVKRQAQSPSGVSSEVEVLKALKSLFEHHKALDEKIVALREQNVHIQRKMASSEGSTESEHLEGMEPGQKVHEKRLSNGSIDSTDETSQIVELQELLEKQNYEMAQMKERLAALSSRVGEVEQEAETARKDLIKTEEMNTKYQRDIREAMAQKEDMEERITTLEKRYLSAQRESTSIHDMNDKLENELANKEAILRQMEEKNRQLQERLELAEQKLQQTMRKAETLPEVEAELAQRIAALTKAEERHGNIEERMRHLEGQLEEKNQELQRARQREKMNEEHNKRLSDTVDRLLTESNERLQLHLKERMAALEEKNVLIQESETFRKNLEESLHDKERLAEEIEKLRSELDQLKMRTGSLIEPTIPRTHLDTSAELRYSVGSLVDSQSDYRTTKVIRRPRRGRMGVRRDEPKVKSLGDHEWNRTQQIGVLSSHPFESDTEMSDIDDDDRETIFSSMDLLSPSGHSDAQTLAMMLQEQLDAINKEIRLIQEEKESTELRAEEIENRVASVSLEGLNLARVHPGTSITASVTASSLASSSPPSGHSTPKLTPRSPAREMDRMGVMTLPSDLRKHRRKIAVVEEDGREDKATIKCETSPPPTPRALRMTHTLPSSYHNDARSSLSVSLEPESLGLGSANSSQDSLHKAPKKKGIKSSIGRLFGKKEKARLGQLRGFMETEAAAQESLGLGKLGTQAEKDRRLKKKHELLEEARRKGLPFAQWDGPTVVAWLELWLGMPAWYVAACRANVKSGAIMSALSDTEIQREIGISNPLHRLKLRLAIQEMVSLTSPSAPPTSRTPSGNVWVTHEEMENLAAPAKTKESEEGSWAQTLAYGDMNHEWIGNEWLPSLGLPQYRSYFMECLVDARMLDHLTKKDLRVHLKMVDSFHRTSLQYGIMCLKRLNYDRKELERRREASQHEIKDVLVWSNDRVIRWIQAIGLREYANNILESGVHGSLIALDENFDYSSLALLLQIPTQNTQARQILEREYNNLLALGTERRLDESDDKNFRRGSTWRRQFPPREVHGISMMPGSSETLPAGFRLTTTSGQSRKMTTDVASSRLQRLDNSTVRTYSC

SEQ ID NO: 83630 - DNA, 3459 bp, Artificial Sequence
  derived and/or modified sequence
atgatcttcagcgacatgaacaccgtgagcggcagccccaaggtgcacccccccaacggcaccagattctacaccttccaggagttcgccgccctgaccaaggagctgaacgcctgcagagagcagctgctggagaaggaggaggagatcagcgagctgaaggccgagagaaacaacaccagactgctgctggagcacctggagtgcctggtgagcagacacgagagaagcctgagaatgaccgtggtgaagagacaggcccagagccccagcggcgtgagcagcgaggtggaggtgctgaaggccctgaagagcctgttcgagcaccacaaggccctggacgagaagatcgtggccctgagagagcagaacgtgcacatccagagaaagatggccagcagcgagggcagcaccgagagcgagcacctggagggcatggagcccggccagaaggtgcacgagaagagactgagcaacggcagcatcgacagcaccgacgagaccagccagatcgtggagctgcaggagctgctggagaagcagaactacgagatggcccagatgaaggagagactggccgccctgagcagcagagtgggcgaggtggagcaggaggccgagaccgccagaaaggacctgatcaagaccgaggagatgaacaccaagtaccagagagacatcagagaggccatggcccagaaggaggacatggaggagagaatcaccaccctggagaagagatacctgagcgcccagagagagagcaccagcatccacgacatgaacgacaagctggagaacgagctggccaacaaggaggccatcctgagacagatggaggagaagaacagacagctgcaggagagactggagctggccgagcagaagctgcagcagaccatgagaaaggccgagaccctgcccgaggtggaggccgagctggcccagagaatcgccgccctgaccaaggccgaggagagacacggcaacatcgaggagagaatgagacacctggagggccagctggaggagaagaaccaggagctgcagagagccagacagagagagaagatgaacgaggagcacaacaagagactgagcgacaccgtggacagactgctgaccgagagcaacgagagactgcagctgcacctgaaggagagaatggccgccctggaggagaagaacgtgctgatccaggagagcgagaccttcagaaagaacctggaggagagcctgcacgacaaggagagactggccgaggagatcgagaagctgagaagcgagctggaccagctgaagatgagaaccggcagcctgatcgagcccaccatccccagaacccacctggacaccagcgccgagctgagatacagcgtgggcagcctggtggacagccagagcgactacagaaccaccaaggtgatcagaagacccagaagaggcagaatgggcgtgagaagagacgagcccaaggtgaagagcctgggcgaccacgagtggaacagaacccagcagatcggcgtgctgagcagccaccccttcgagagcgacaccgagatgagcgacatcgacgacgacgacagagagaccatcttcagcagcatggacctgctgagccccagcggccacagcgacgcccagaccctggccatgatgctgcaggagcagctggacgccatcaacaaggagatcagactgatccaggaggagaaggagagcaccgagctgagagccgaggagatcgagaacagagtggccagcgtgagcctggagggcctgaacctggccagagtgcaccccggcaccagcatcaccgccagcgtgaccgccagcagcctggccagcagcagcccccccagcggccacagcacccccaagctgacccccagaagccccgccagagagatggacagaatgggcgtgatgaccctgcccagcgacctgagaaagcacagaagaaagatcgccgtggtggaggaggacggcagagaggacaaggccaccatcaagtgcgagaccagccccccccccacccccagagccctgagaatgacccacaccctgcccagcagctaccacaacgacgccagaagcagcctgagcgtgagcctggagcccgagagcctgggcctgggcagcgccaacagcagccaggacagcctgcacaaggcccccaagaagaagggcatcaagagcagcatcggcagactgttcggcaagaaggagaaggccagactgggccagctgagaggcttcatggagaccgaggccgccgcccaggagagcctgggcctgggcaagctgggcacccaggccgagaaggacagaagactgaagaagaagcacgagctgctggaggaggccagaagaaagggcctgcccttcgcccagtgggacggccccaccgtggtggcctggctggagctgtggctgggcatgcccgcctggtacgtggccgcctgcagagccaacgtgaagagcggcgccatcatgagcgccctgagcgacaccgagatccagagagagatcggcatcagcaaccccctgcacagactgaagctgagactggccatccaggagatggtgagcctgaccagccccagcgccccccccaccagcagaacccccagcggcaacgtgtgggtgacccacgaggagatggagaacctggccgcccccgccaagaccaaggagagcgaggagggcagctgggcccagaccctggcctacggcgacatgaaccacgagtggatcggcaacgagtggctgcccagcctgggcctgccccagtacagaagctacttcatggagtgcctggtggacgccagaatgctggaccacctgaccaagaaggacctgagagtgcacctgaagatggtggacagcttccacagaaccagcctgcagtacggcatcatgtgcctgaagagactgaactacgacagaaaggagctggagagaagaagagaggccagccagcacgagatcaaggacgtgctggtgtggagcaacgacagagtgatcagatggatccaggccatcggcctgagagagtacgccaacaacatcctggagagcggcgtgcacggcagcctgatcgccctggacgagaacttcgactacagcagcctggccctgctgctgcagatccccacccagaacacccaggccagacagatcctggagagagagtacaacaacctgctggccctgggcaccgagagaagactggacgagagcgacgacaagaacttcagaagaggcagcacctggagaagacagttcccccccagagaggtgcacggcatcagcatgatgcccggcagcagcgagaccctgcccgccggcttcagactgaccaccaccagcggccagagcagaaagatgaccaccgacgtggccagcagcagactgcagagactggacaacagcaccgtgagaacctacagctgctag

SEQ ID NO: 83631 - DNA, 3459 bp, Artificial Sequence
  derived and/or modified sequence
atgatattctctgatatgaacactgtgtctgggtcaccaaaggtccatcctcccaacggcacccgattctacaccttccaagagtttgcagccctcaccaaagagttaaatgcttgcagggagcagttactcgagaaagaggaggagatatccgaactgaaggccgaacggaataacacacggctgctgttggaacatctagagtgcctggtgtcccggcatgagcgctcgctcaggatgaccgtggtaaagcgtcaggcccagagccctagcggtgtgagcagcgaggttgaagtgttaaaggctctcaagtctcttttcgaacatcacaaggctttggatgaaaaaattgtggcgctgagggagcaaaacgtacacatccagcgcaaaatggcaagtagtgaaggctctacagagtctgagcatctggagggaatggagcctggtcaaaaagtgcacgagaagcgcttgagtaatggaagtatcgacagtaccgatgagaccagtcagattgtggagctgcaggagctgctggaaaaacagaattatgaaatggcacagatgaaggaacggttggctgcactgagctcccgtgtcggcgaggtcgaacaagaagcagagaccgcaagaaaggacctcattaagactgaggaaatgaatacgaagtatcagagggacattcgggaggctatggctcaaaaggaggacatggaggagcggatcacaactctggaaaaaaggtacctaagtgcacagcgtgaaagcacctccatacacgacatgaatgacaaactggagaatgagttagccaacaaggaggcgatcctgcgccagatggaggaaaagaaccgtcagctgcaggaaaggctggagctcgccgagcaaaagttacagcaaaccatgagaaaggcggaaacactccctgaggttgaagcggaactcgcacagaggatcgcggctctcaccaaagcagaggaacgtcatggcaatatcgaggagcgaatgcggcacctcgagggacaactagaggaaaaaaaccaggaattgcagagggcccgccagcgtgaaaagatgaacgaagagcacaataagcggctgtcagataccgtcgaccggctcctgacagagtctaacgagagattacagctgcacctgaaggaacggatggccgccctggaagaaaagaatgtgcttattcaagagtccgagaccttccgcaagaatctggaggaatcactgcacgacaaggaacgcttggccgaggaaatcgaaaaactgcgatctgagctggaccagctgaaaatgcgcaccgggtctttgatcgaacctactatccccaggacacacctggatacttccgccgagttaaggtactctgtcgggtcactggtggactctcagtccgactaccgcactacgaaggtgattaggcgacctagacggggaaggatgggtgtgcgccgcgatgagcctaaagtcaagtcgctgggggatcacgaatggaaccggacccagcagatcggggtactatccagccacccctttgaaagtgacacggagatgtcagacattgacgacgatgatagggagaccatcttctcaagtatggacctgctgagcccctccggccacagtgatgcacaaacgctcgctatgatgctccaggagcaactggatgctatcaataaagagatcagactcatccaggaggaaaaggagtcaacggagttacgtgcagaggagatcgagaaccgtgtggctagtgtgtccctagagggtctaaatctcgcgagggttcacccgggaacgagcatcacggcatctgtcacagcttcttccttggcctcgagctctcccccttccggacacagtactccaaagctgacaccccgatcacctgcccgcgaaatggacagaatgggcgtgatgacgctgccctctgacctgcgtaagcatcgtaggaagatcgccgtcgtggaagaggacggccgtgaagacaaggcaaccatcaaatgcgagacttctcctcctcctaccccccgggcccttaggatgacccataccttaccatcaagctaccataacgatgccaggagcagcctctccgtcagcctcgaacccgagtctttagggttgggatctgcaaacagttcccaagattccctgcataaggccccaaagaagaaggggatcaagtcttccatcggacggttgttcgggaagaaggagaaggcaagacttggtcaactgcgcggctttatggagaccgaggctgccgcacaggagtcactgggactgggaaaactgggaacccaggcggagaaggacaggcggcttaaaaaaaaacacgagcttctcgaagaggcacgtcggaaaggcttacctttcgcccagtgggatgggcctaccgtcgtagcctggttagagctgtggctgggcatgcctgcttggtatgtggcagcttgcagggccaatgttaaatcaggggcgatcatgagcgctctgtcggatacagagattcaaagggagattggcatctcgaaccccctgcatagattgaagttaagactagccatccaagagatggtgagccttacttccccgtcagccccgcctaccagcagaacaccttcaggaaatgtgtgggtcacccacgaagagatggaaaacctcgcggcccccgcaaagactaaggagagcgaagagggtagctgggcacagacgctggcgtatggagacatgaaccacgaatggattggcaacgaatggcttcctagtttgggcctccctcaataccgatcgtattttatggaatgtctggtggacgcgcgcatgctggaccaccttaccaagaaggatctgcgcgtccatcttaagatggtggactcatttcatcggacatccttacagtatggcattatgtgcctcaagagactgaactatgaccgcaaggagctggaacgccgtagggaagcatcacagcatgagatcaaggatgtgctggtatggagcaacgatcgcgtaataagatggattcaagctattggcctgcgcgagtatgctaataatattcttgagagtggcgtccacggttccctgatcgcattagacgagaacttcgactactcgagtctggctttactgttgcagatccctactcagaacacccaggcccgccagatccttgagagagaatataacaatctgctagcgctagggacggagcgccgcttggatgaaagcgacgataaaaattttcggcggggctcaacctggagacgtcagtttccaccacgggaagtacacggcatctctatgatgcccggctccagtgagacactcccggcgggtttccggctcactaccacctccgggcagagcagaaagatgactacggacgtggccagtagcagattgcagcgcctcgacaattctactgtacgtacatactcttgctag

SEQ ID NO: 83632 - DNA, 3459 bp, Artificial Sequence
  derived and/or modified sequence
atgatcttcagtgacatgaacacagtgtctggcagccccaaggtgcaccccccaaatggcacccgcttctacaccttccaggagtttgctgccctgaccaaggagctgaatgcctgccgggagcagctgctggagaaggaggaggagatcagcgagctgaaggccgagaggaacaacacccggctgctgctggagcacctggagtgcctggtgtccagacatgagaggagcctgaggatgacagtggtgaagaggcaggcccagagccccagcggcgtgtcctctgaggtggaggtgctgaaggccctgaagagcctgtttgagcaccacaaggccctggatgagaagatcgtggccctgcgggagcagaatgtgcacatccagaggaagatggccagcagcgagggcagcacagagagcgagcacctggagggcatggagcccggccagaaggtgcatgagaagaggctgagcaatggcagcattgacagcacagatgagaccagccagatcgtggagctgcaggagctgctggagaagcagaactatgagatggcccagatgaaggagcggctggccgccctgagcagccgggtgggggaggtggagcaggaggccgagacagccaggaaggacctgatcaagacagaggagatgaacaccaagtaccagagggacatccgggaggccatggcccagaaggaggacatggaggagcgcatcaccaccctggagaagcgctacctgagcgcccagcgggagagcaccagcatccatgacatgaatgacaagctggagaatgagctggccaacaaggaggccatcctgcggcagatggaggagaagaaccggcagctgcaggagcggctggagctggccgagcagaagctgcagcagaccatgaggaaggccgagaccctgcctgaggtggaggccgagctggcccagagaattgctgccctgaccaaggccgaggagcggcacggcaacatcgaggagaggatgaggcacctggagggccagctggaggagaagaaccaggagctgcagagggcccggcagcgggagaagatgaatgaggagcacaacaagaggctgagtgacacagtggaccggctgctgacagagagcaatgaaaggctgcagctgcacctgaaggagaggatggccgccctggaggagaagaatgtgctgatccaggagagcgagaccttcaggaagaacctggaggagagcctgcatgacaaggagcggctggccgaggagattgagaagctgcggtctgagctggaccagctgaagatgaggacaggcagcctgattgagcccaccatccccaggacccacctggacaccagcgctgagctgcgctacagcgtgggcagcctggtggacagccagagcgactaccgcaccaccaaggtgatcagaagaccccggcggggccgcatgggcgtgagaagagatgagcccaaggtgaagagcctgggggaccacgagtggaacagaacccagcagattggagtgctgagcagccacccctttgaaagtgacacagagatgtctgacattgatgatgatgaccgggagaccatcttcagctccatggacctgctgagccccagcggccacagtgatgcccagaccctggccatgatgctgcaggagcagctggatgccatcaacaaggagatccgcctcatccaggaggagaaggagagcacagagctgcgggcagaggagattgaaaatagagtggcctctgtgtccctggagggcctgaacctggcccgggtgcaccctggcaccagcatcacagcctctgtgacagccagcagcctggccagcagcagccccccatctggccacagcacccccaagctgacccccaggagccctgcccgggagatggacaggatgggcgtgatgaccctgcccagcgacctgaggaagcacaggaggaagattgctgtggtggaggaggatggaagagaggacaaggccaccatcaagtgtgagaccagccccccacccaccccccgggccctgaggatgacccacaccctgcccagcagctaccacaatgatgcccggagcagcctgtctgtgtccctggagcctgagagcctgggcctgggcagcgccaacagcagccaggacagcctgcacaaggcccccaagaagaagggcatcaagagcagcatcggccgcctgtttgggaagaaggagaaggcccggctgggccagctgcggggcttcatggagacagaggccgccgcccaggagagcctgggcctgggcaagctgggcacccaggccgagaaggaccggcggctgaagaagaagcatgagctgctggaggaggcccggaggaagggcctgccctttgcccagtgggatggccccaccgtggtggcctggctggagctgtggctgggcatgcctgcctggtacgtggccgcctgccgggccaacgtgaagagcggggccatcatgtctgccctgagtgacacagagatccagcgggagatcggcatcagcaaccccctgcaccggctgaagctgcggctggccatccaggagatggtgtccctgaccagccccagcgccccacccaccagcaggacccccagcggaaatgtgtgggtgacccatgaggagatggagaacctggccgccccagccaagaccaaggagagcgaggagggctcctgggcccagaccctggcctatggagacatgaaccacgagtggattggaaatgagtggctgcccagcctgggcctgccccagtaccgcagctacttcatggagtgcctggtggatgccaggatgctggaccacctgaccaagaaggacctgcgggtgcacctgaagatggtggacagcttccacaggaccagcctgcagtatggcatcatgtgcctgaagaggctgaactatgacaggaaggagctggagaggagaagagaggccagccagcacgagatcaaggatgtgctggtgtggagcaatgacagagtcatccgctggatccaggccatcggcctgcgggagtatgccaacaacatcctggagagcggcgtgcacggcagcctcatcgccctggatgagaactttgactacagcagcctggccctgctgctgcagatccccacccagaacacccaggcccggcagatcctggagcgggagtacaacaacctgctggccctgggcacagagcggcggctggatgaaagtgatgacaagaacttcagaagaggcagcacctggaggcggcagtttcctccccgggaggtgcacggcatctccatgatgcctggcagcagcgagaccctgcctgctggcttccggctgaccaccaccagcggccagagcaggaagatgaccacagatgtggccagcagccggctgcagaggctggacaacagcacagtgaggacctacagctgctag

SEQ ID NO: 83633 - DNA, 3459 bp, Artificial Sequence
  derived and/or modified sequence
atgatcttcagcgacatgaacaccgtgagcggcagccccaaggtgcacccgcctaacggcaccaggttctatactttccaagagtttgcagcccttactaaagaattaaacgcctgtagagagcagttgctggagaaagaggaggagatttccgaactgaaagccgagcgcaacaacaccagactcctactcgaacatctcgagtgcttagtctctagacatgagagatctttgcgtatgactgttgttaaaagacaggcgcagagtccgagtggggtcagctccgaggtggaggttctgaaggcactgaaatcgctcttcgagcatcataaggcactggatgaaaagatcgttgcactgcgggagcaaaacgtgcacatacaacgcaaaatggcctccagcgaaggaagtaccgagtccgaacatctcgagggcatggagcccgggcagaaagttcacgagaaacgactgtcaaatggctccatcgacagcacggacgagacatcccagatagtcgaactgcaggaattgctagaaaagcaaaattacgaaatggcacagatgaaggagagactcgctgccctgtcctctcgtgtgggtgaggtcgagcaggaagctgagacagcaaggaaggacctcatcaaaactgaggaaatgaatactaagtaccaaagggacatcagagaagcaatggctcagaaagaggacatggaagagcgcattactacgctggagaaacgatatttatctgctcagcgggaatctacgagcatccacgatatgaatgacaaacttgagaacgagttagctaacaaggaagcaatcctgcggcagatggaagaaaagaaccggcagcttcaggagcgacttgaactcgccgagcagaaattgcagcaaacgatgcgcaaggcagaaaccttaccagaggttgaggccgagctcgcccagcgcatagccgcgttgacaaaggccgaggaacggcatgggaatatcgaagagcggatgagacatttggagggacagttggaggagaagaaccaggaactacagcgtgcccgtcagagggagaaaatgaatgaagagcataacaaacggttgtccgacactgtcgatcgcctgttaacagaaagtaacgagcgactgcagttacacttaaaggagcgcatggcagctttagaggaaaaaaatgtgttaatccaagaaagcgaaacatttcggaagaacctcgaggagagcttgcacgataaggagagactggctgaggagattgaaaaacttagatctgaattggaccagctgaaaatgcgaactggcagcctgatcgaaccaaccattcccaggacacacctggacaccagcgccgaactgagatattccgtgggatcacttgtcgatagtcagagtgattatcgcacaaccaaggtgatccggaggccgaggagaggtcgtatgggcgtgaggagggatgagccaaaagtaaagtcccttggcgatcatgagtggaatcgcacacaacagataggcgtcttgtctagccaccctttcgagtccgacaccgagatgtctgatatcgacgatgatgatcgagagacaattttctccagtatggacttgctttccccgagtggccatagcgacgcccagacgctggcaatgatgctgcaggaacagctggacgctattaacaaagaaatccgccttatccaggaagagaaggagagtactgagctgcgtgcagaagaaatcgagaatcgagttgcaagcgtgtcactggagggcctcaatttggcgcgtgtacacccagggaccagcattaccgcttccgtgacggcctcctctctggcgtcgtcctcccctccctcaggccacagtacacctaagcttacccccaggagtcctgctcgagaaatggaccgtatgggggtcatgactctgccaagcgacttgcgaaaacatagacgcaagatcgcggtggttgaagaagacggaagggaggataaggcgaccatcaagtgtgagacgagtccgccccctactcctcgcgcgctccgcatgacccatactctgcccagcagctaccataacgacgcacggagctcactgtccgttagtctggagcccgaaagcctcggcctcggcagcgcaaactcctcgcaggatagcctacacaaggccccaaagaagaagggaatcaagagctctatcggaaggctgttcgggaagaaggaaaaggctcggctgggccagctgcgcggattcatggaaactgaggctgccgcgcaggagagtcttggcctggggaagctggggacgcaggcagagaaagatcggaggttgaagaagaagcacgagttactggaggaagcaaggagaaagggcctcccttttgcccagtgggacggccctactgttgtggcatggttggagctttggctgggaatgccagcctggtacgtcgccgcatgtagagccaacgttaaatccggagccatcatgtcggcactctctgatacagagatccagagagagatcggaatctctaaccctcttcatcgtttaaagctcaggctcgcgatacaggaaatggttagccttacctcaccttcggccccccccacctcccggacaccctctggaaatgtttgggtaacccatgaggagatggagaatctggcagcacctgccaaaacaaaggaatctgaagaggggagctgggcgcagactctggcctatggtgatatgaaccacgaatggataggtaacgaatggctcccctccctcggccttccccagtatcgctcctactttatggagtgtctcgtggacgcaaggatgctggaccacttaactaagaaagacctaagggtgcatttgaagatggttgattcctttcatcgaacctccctccagtatggcataatgtgcttgaaacgattaaattacgataggaaggaactcgagaggaggcgcgaggctagccagcatgagataaaagatgtattggtttggtccaacgatcgggtgattaggtggatacaagctattggactgagggagtatgcgaataacattctcgagagcggggtacacggcagcttgattgcactggacgaaaacttcgactatagctccctggcactcctactgcagatccccacccagaacacccaggccagacagattctcgagcgcgaatacaataatctgctcgctctcggcacagaaaggcgccttgacgaaagtgatgataagaattttaggcgaggttccacatggagacggcaatttccaccacgggaagtgcatgggatttccatgatgcccgggagttctgaaaccttacctgcaggattccgcctgactactacctctgggcagtctcggaagatgaccaccgacgtcgcctcctcacgtctgcaacgcctcgacaattcaaccgtccgaacgtacagttgttag

SEQ ID NO: 83634 - DNA, 3782 bp, Artificial Sequence
  derived and/or modified sequence
agattctgcacaagctccatttatcgttggttcttgcttttttccttctgtgtttttaattttttaaaaaacattgtatgttctagagaactagcttcacaaaaggtcggtggctgatgatctttcagctaagatttcaaatgtagaagaacaattcaaaatgctatcactgtgtatgtaagaaggatggggcagatttcattttaccctctagtctccctcaatgcatgcacggatttatctgtacgctaagctctctgctctgcatctgtagctccttgtggattatattgtctcagtgatcagaaatgattttctcggatatgaacaccgtttctggctcccctaaagtgcatcctcctaatgggacccggttttacacttttcaagaatttgctgcactgacaaaagaattaaatgcctgcagggaacaacttctagaaaaggaagaagaaatctctgaacttaaagctgaaagaaacaacacaagactattactggagcatttggagtgccttgtgtcacgacatgaaagatcactaagaatgacggtggtaaaacggcaagcccagtctccctcaggagtatccagtgaagttgaagttctcaaggcactgaaatctttgtttgagcaccacaaggccttggatgaaaagattgttgccttgcgtgaacaaaatgttcatatacaaagaaaaatggcatcaagcgagggatccacagagtcagaacatcttgaagggatggaacctggacagaaagtccatgagaagcgtttgtccaatggttctatagactcaaccgatgaaactagtcaaatagttgaactacaagaattgcttgaaaagcaaaactatgaaatggcccagatgaaagaacgtttagcagccctttcttcccgagtgggagaggtggaacaggaagcagagacagcaagaaaggatctcattaaaacagaagaaatgaacaccaagtatcaaagggacattagggaggccatggcacaaaaggaagatatggaagaaagaattacaacccttgaaaagcgttacctcagtgctcagagagaatctacctccatacatgacatgaatgataaactagaaaatgagttagcaaataaagaagctatcctgcggcagatggaagagaaaaacagacagttacaagaacgtcttgagctagctgaacaaaagttgcagcagaccatgagaaaggctgaaaccttgcctgaagtagaggctgaactggctcagagaattgcagccctaaccaaggctgaagagagacatggaaatattgaagaacgtatgagacatttagagggtcaacttgaagagaagaatcaagaacttcaaagagctaggcaaagagagaaaatgaatgaggagcataacaagagattatcggatacggttgatagacttctgactgaatccaatgaacgcctacaactacacttaaaggaaagaatggctgctctagaagaaaagaatgttttaattcaagaatcagaaactttcagaaagaatcttgaagaatctttacatgataaggaaagattagcagaagaaattgaaaagctgagatctgaacttgaccaattgaaaatgagaactggctctttaattgaacccacaataccaagaactcatctagacacctcagctgagttgcggtactcagtgggatccctagtggacagccagtctgattacagaacaactaaagtaataagaagaccaaggagaggccgcatgggtgtgcgaagagatgagccaaaggtgaaatctcttggggatcacgagtggaatagaactcaacagattggagtactaagcagccacccttttgaaagtgacactgaaatgtctgatattgatgatgatgacagagaaacaatttttagctcaatggatcttctctctccaagtggtcattccgatgcccagacgctagccatgatgcttcaggaacaattggatgccatcaacaaagaaatcaggctaattcaggaagaaaaagaatctacagagttgcgtgctgaagaaattgaaaatagagtggctagtgtgagcctcgaaggcctgaatttggcaagggtccacccaggtacctccattactgcctctgttacagcttcatcgctggccagttcatctccccccagtggacactcaactccaaagctcacccctcgaagccctgccagggaaatggatcggatgggagtcatgacactgccaagtgatctgaggaaacatcggagaaagattgcagttgtggaagaagatggtcgagaggacaaagcaacaattaaatgtgaaacttctcctcctcctacccctagagccctcagaatgactcacactctcccttcttcctaccacaatgatgctcgaagtagtttatctgtctctcttgagccagaaagcctcgggcttggtagtgccaacagcagccaagactctcttcacaaagcccccaagaagaaaggaatcaagtcttcaataggacgtttgtttggtaaaaaagaaaaagctcgacttgggcagctccgaggctttatggagactgaagctgcagctcaggagtccctggggttaggcaaactcggaactcaagctgagaaggatcgaagactaaagaaaaagcatgaacttcttgaagaagctcggagaaagggattaccttttgcccagtgggatgggccaactgtggtcgcatggctagagctttggttgggaatgcctgcgtggtacgtggcagcctgccgagccaacgtgaagagtggtgccatcatgtctgctttatctgacactgagatccagagagaaattggaatcagcaatccactgcatcgcttaaaacttcgattagcaatccaggagatggtttccctaacaagtccttcagctcctccaacatctcgaactccttcaggcaacgtttgggtgactcatgaagaaatggaaaatcttgcagctccagcaaaaacgaaagaatctgaggaaggaagctgggcccagaccctggcttatggagatatgaatcatgagtggattggaaatgaatggcttcccagcttggggttacctcagtacagaagttactttatggaatgcttggtagatgcaagaatgttagatcacctaacaaaaaaagatctccgtgtccatttaaaaatggtggatagtttccatcgaacaagtttacaatatggaattatgtgcttaaagaggttgaattatgacagaaaagaactagaaagaagacgggaagcaagccaacatgaaataaaagacgtgttggtgtggagcaatgaccgagttattcgctggatacaagcaattggacttcgagaatatgcaaataatatacttgagagcggtgtgcatggctcacttatagccctggatgaaaactttgactacagcagcttagctttattattacagattccaacacagaacacccaggcaaggcagattcttgaaagagaatacaataacctcttggccctgggaactgaaaggcgactggatgaaagtgatgacaagaacttcagacgtggatcaacctggagaaggcagtttcctcctcgtgaagtacatggaatcagcatgatgcctgggtcctcagaaacattaccagctggatttaggttaaccacaacctctgggcagtcaagaaaaatgacaacagatgttgcttcatcaagactgcagaggttagacaactccactgttcgcacatactcatgttgaccagccactcaaagg

SEQ ID NO: 83635 - DNA, 3459 bp, Artificial Sequence
  derived and/or modified sequence
atgatcttcagcgatatgaacacagtctccggcagccccaaggtccacccaccaaacgggactagattctacaccttccaagagtttgccgctctgaccaaggaactcaatgcatgccgggaacaactcttggaaaaggaggaggagatctctgagctaaaagcagagcgcaacaacacccgtttgttactcgagcatctggagtgcctggtttctagacatgagcgaagtttgcgcatgaccgtggtgaaaagacaggcacagagccccagtggagttagtagcgaggttgaggtgttaaaagctctcaaaagcctctttgagcaccataaagccttagacgaaaagatagtcgccctaagagaacagaatgtccatattcagcgcaaaatggcttcatcggaaggttctacggaatctgagcacctggagggaatggagcccggacaaaaagtgcacgagaagaggctgtctaatggatcaatcgatagcactgatgagacttcccagatagtcgagctgcaggagctgcttgaaaagcaaaattacgaaatggcacagatgaaagagcgactggccgcactcagctcgagggtaggcgaggtggaacaggaagcggaaacagcccgaaaagacttgattaaaactgaggagatgaatacaaagtatcagcgcgacataagagaggccatggcccagaaggaggatatggaagagaggataactactctcgagaaaaggtacttatcagctcagcgtgagtccacctcgattcacgatatgaatgataaactggagaatgagctggccaacaaggaggccattctccggcagatggaggaaaagaaccggcaactccaagaaagattagaactggctgagcagaagctccagcaaaccatgaggaaggccgagaccttgccggaagtggaagccgaactagcccagaggatcgccgctctgacaaaagctgaagaaagacacgggaacattgaagagagaatgagacatctagagggacaattggaggaaaagaatcaggaactccaaagggctcgccagcgggagaaaatgaacgaggaacataataaacgccttagcgataccgtagacaggctactgactgaaagtaatgagagactgcagcttcatctgaaagaacggatggccgcacttgaggaaaaaaatgttttaatccaggagtctgaaacatttagaaagaatctagaggaatccctccacgacaaagagcgcctggcagaggagatagaaaagctgcggagtgagctggaccagcttaaaatgaggaccggttctttaatcgagccgactattccaagaacacacttggatacttccgcggagctccggtattctgtgggaagtctggtggatagtcaatccgactatcgaactaccaaagtgatcagacggcctagacgagggagaatgggcgtcagacgggatgaacccaaggtaaagtcgttgggcgatcacgagtggaacaggacacagcaaataggcgtactgagctctcacccgttcgagagcgatactgaaatgtccgacattgacgacgatgatcgggagactattttcagtagtatggatttactgtcaccgtccggtcacagcgacgcccagactttggcaatgatgctgcaggagcagctcgacgctatcaacaaagagatccgtctgatccaagaggagaaagaatccaccgagctcagagccgaagagatcgagaatcgggtcgctagcgtgtctctggaagggcttaatctcgctcgagtccacccgggtacctctattaccgcatccgtgactgcatcttctctggccagcagttccccaccatcagggcactctactccaaaactcactcctagatcccctgctcgagaaatggaccgaatgggtgtgatgactttgccatcggaccttcggaagcacaggaggaaaatcgcagtcgtggaggaggacggcagagaggataaggccaccataaagtgcgaaacgagtcccccaccaacaccaagagcattaagaatgacccacacccttccgagtagttaccataacgacgcaaggtcttccctgtcagtctcccttgagccggagagtctggggctggggagcgctaattctagtcaggactcactgcataaggctcctaaaaagaaaggaatcaagagctccatcggcagactttttggcaaaaaggagaaggcacggctaggtcaacttagagggtttatggaaacagaagcagcagcccaggagtccctgggcctggggaaacttggcacacaggccgagaaggaccgcaggttgaagaagaagcacgagctcctcgaggaagcgaggagaaagggacttccatttgcgcagtgggacgggccaacagttgtggcctggctggagctatggttggggatgcctgcctggtacgtggccgcttgtagagccaatgtcaaatccggcgcaatcatgtccgcactgtcagacactgagatacagagggagattggcattagtaatcctcttcacagactgaagctacggctagctattcaggagatggtgtcgctcacatctccttcagcgccacctacgtcgagaacgcctagcggaaatgtgtgggtgacacatgaggaaatggaaaaccttgcagcacccgctaagaccaaggaaagcgaagagggctcctgggcccagaccctggcctacggagatatgaaccatgagtggattggtaatgaatggttgccttctcttgggctgccacagtatcgctcttacttcatggaatgtttagttgacgctcgcatgctggaccatctaaccaagaaagatttaagagtacacctgaagatggtggattccttccacaggacttcgctccaatacggcatcatgtgcctgaaacgactgaactatgaccgtaaggagctggagcggaggcgcgaggcctcacagcatgagatcaaagacgtcctcgtttggagcaacgatcgggtcattcgttggatccaggcaattgggcttcgtgagtatgccaacaacatccttgaatccggcgtccacggcagcctgattgccctcgatgaaaattttgactactcctccctggcactgcttctgcagatcccaacgcaaaatacccaggccaggcagatcctagaacgtgaatataacaacttattggcccttggcaccgagcgcagattagacgaaagcgacgacaagaacttccggagagggtctacgtggaggcgacaattccccccaagagaagtgcacgggattagcatgatgccaggatcgtccgaaacacttcctgctggttttcggttgaccactacatcaggccagtcgcggaagatgactactgatgtggcctccagccggctgcagagactggataatagcacagtccgaacctactcctgttag

SEQ ID NO: 83636 - protein, 783 aa, Artificial Sequence
  derived and/or modified sequence
MRHLEGQLEEKNQELQRARQREKMNEEHNKRLSDTVDRLLTESNERLQLHLKERMAALEEKNVLIQESETFRKNLEESLHDKERLAEEIEKLRSELDQLKMRTGSLIEPTIPRTHLDTSAELRYSVGSLVDSQSDYRTTKVIRRPRRGRMGVRRDEPKVKSLGDHEWNRTQQIGVLSSHPFESDTEMSDIDDDDRETIFSSMDLLSPSGHSDAQTLAMMLQEQLDAINKEIRLIQEEKESTELRAEEIENRVASVSLEGLNLARVHPGTSITASVTASSLASSSPPSGHSTPKLTPRSPAREMDRMGVMTLPSDLRKHRRKIAVVEEDGREDKATIKCETSPPPTPRALRMTHTLPSSYHNDARSSLSVSLEPESLGLGSANSSQDSLHKAPKKKGIKSSIGRLFGKKEKARLGQLRGFMETEAAAQESLGLGKLGTQAEKDRRLKKKHELLEEARRKGLPFAQWDGPTVVAWLELWLGMPAWYVAACRANVKSGAIMSALSDTEIQREIGISNPLHRLKLRLAIQEMVSLTSPSAPPTSRTCPVFLQTLAYGDMNHEWIGNEWLPSLGLPQYRSYFMECLVDARMLDHLTKKDLRVHLKMVDSFHRTSLQYGIMCLKRLNYDRKELERRREASQHEIKDVLVWSNDRVIRWIQAIGLREYANNILESGVHGSLIALDENFDYSSLALLLQIPTQNTQARQILEREYNNLLALGTERRLDESDDKNFRRGSTWRRQFPPREVHGISMMPGSSETLPAGFRLTTTSGQSRKMTTDDGVFSVYST

SEQ ID NO: 83637 - DNA, 2352 bp, Artificial Sequence
  derived and/or modified sequence
atgagacacctggagggccagctggaggagaagaaccaggagctgcagagagccagacagagagagaagatgaacgaggagcacaacaagagactgagcgacaccgtggacagactgctgaccgagagcaacgagagactgcagctgcacctgaaggagagaatggccgccctggaggagaagaacgtgctgatccaggagagcgagaccttcagaaagaacctggaggagagcctgcacgacaaggagagactggccgaggagatcgagaagctgagaagcgagctggaccagctgaagatgagaaccggcagcctgatcgagcccaccatccccagaacccacctggacaccagcgccgagctgagatacagcgtgggcagcctggtggacagccagagcgactacagaaccaccaaggtgatcagaagacccagaagaggcagaatgggcgtgagaagagacgagcccaaggtgaagagcctgggcgaccacgagtggaacagaacccagcagatcggcgtgctgagcagccaccccttcgagagcgacaccgagatgagcgacatcgacgacgacgacagagagaccatcttcagcagcatggacctgctgagccccagcggccacagcgacgcccagaccctggccatgatgctgcaggagcagctggacgccatcaacaaggagatcagactgatccaggaggagaaggagagcaccgagctgagagccgaggagatcgagaacagagtggccagcgtgagcctggagggcctgaacctggccagagtgcaccccggcaccagcatcaccgccagcgtgaccgccagcagcctggccagcagcagcccccccagcggccacagcacccccaagctgacccccagaagccccgccagagagatggacagaatgggcgtgatgaccctgcccagcgacctgagaaagcacagaagaaagatcgccgtggtggaggaggacggcagagaggacaaggccaccatcaagtgcgagaccagccccccccccacccccagagccctgagaatgacccacaccctgcccagcagctaccacaacgacgccagaagcagcctgagcgtgagcctggagcccgagagcctgggcctgggcagcgccaacagcagccaggacagcctgcacaaggcccccaagaagaagggcatcaagagcagcatcggcagactgttcggcaagaaggagaaggccagactgggccagctgagaggcttcatggagaccgaggccgccgcccaggagagcctgggcctgggcaagctgggcacccaggccgagaaggacagaagactgaagaagaagcacgagctgctggaggaggccagaagaaagggcctgcccttcgcccagtgggacggccccaccgtggtggcctggctggagctgtggctgggcatgcccgcctggtacgtggccgcctgcagagccaacgtgaagagcggcgccatcatgagcgccctgagcgacaccgagatccagagagagatcggcatcagcaaccccctgcacagactgaagctgagactggccatccaggagatggtgagcctgaccagccccagcgccccccccaccagcagaacctgccccgtgttcctgcagaccctggcctacggcgacatgaaccacgagtggatcggcaacgagtggctgcccagcctgggcctgccccagtacagaagctacttcatggagtgcctggtggacgccagaatgctggaccacctgaccaagaaggacctgagagtgcacctgaagatggtggacagcttccacagaaccagcctgcagtacggcatcatgtgcctgaagagactgaactacgacagaaaggagctggagagaagaagagaggccagccagcacgagatcaaggacgtgctggtgtggagcaacgacagagtgatcagatggatccaggccatcggcctgagagagtacgccaacaacatcctggagagcggcgtgcacggcagcctgatcgccctggacgagaacttcgactacagcagcctggccctgctgctgcagatccccacccagaacacccaggccagacagatcctggagagagagtacaacaacctgctggccctgggcaccgagagaagactggacgagagcgacgacaagaacttcagaagaggcagcacctggagaagacagttcccccccagagaggtgcacggcatcagcatgatgcccggcagcagcgagaccctgcccgccggcttcagactgaccaccaccagcggccagagcagaaagatgaccaccgacgacggcgtgttcagcgtgtacagcacctag

SEQ ID NO: 83638 - DNA, 2352 bp, Artificial Sequence
  derived and/or modified sequence
atgcgccacttagaggggcagctggaggagaagaatcaagagctgcagagggctaggcagagagaaaagatgaatgaagaacacaacaaacggcttagtgacaccgtagatcgacttctcacagaaagcaatgagagattgcagctccatttgaaagaacggatggcagcgctggaggagaaaaacgtcctgatccaggaatcagagacgttcaggaagaatctggaggaatcactccacgataaggaaaggttggcagaggaaatcgagaagctgagaagcgaactcgatcagttaaagatgcggacagggtcccttatcgagcccactatccccagaacacacctggatacctctgccgagttgagatacagcgtcggcagtctcgtcgattcccagtcggattatcgtaccacaaaggtcattaggcggccccgccgcgggaggatgggggtgcgcagagacgaacccaaggtaaaatcgctgggcgaccacgaatggaaccgaacccagcagatcggcgtccttagctcccacccctttgaaagtgatacggaaatgtcggacatcgatgatgacgacagagaaaccatcttttcttccatggacttgctgtcccctagtggccacagtgatgcccagacccttgccatgatgctccaggagcagttagatgctatcaataaagagatacgcctgattcaagaagagaaagagtcaaccgagttacgcgccgaggagattgagaatcgcgtcgcctcggtttccctggagggactgaatcttgcgcgtgtccaccccgggacgtccatcactgcaagcgtgacggcaagctcgttagccagctcttctccccccagtggtcactcgacaccaaaactgacgccccggtctcctgctcgagaaatggatagaatgggcgtcatgacactgccctcagacctgagaaaacacaggaggaagatagctgtcgtcgaggaggacggtcgggaagacaaagcgacgataaagtgtgaaacttcaccacctcccaccccacgggcactgcggatgacacacactttaccctcgtcataccacaatgatgcgcgttccagcttgagcgtaagccttgaacctgagtcgttaggcttagggagcgccaactcttcgcaagacagcctgcacaaagccccaaaaaaaaaaggcataaaatcatctatcgggagactctttggcaagaaagaaaaggctcgactagggcaacttagaggcttcatggagacagaggccgccgctcaagagtcactcgggcttggtaaactggggactcaggccgagaaggataggaggcttaagaagaaacatgagttgttagaagaggcccgtcgcaaggggctgccatttgctcagtgggatggccctaccgtcgtggcgtggctcgaactgtggctgggaatgccagcctggtacgtggccgcctgtagagcgaacgtgaagagtggcgccattatgagcgcccttagcgacactgagatccagcgtgaaatcggcatctctaatccactgcaccggctgaagctccgtttagctatccaagagatggtgtctctcacttcaccctccgcacccccaacctcgcggacatgcccggtgtttcttcagactctggcgtacggcgacatgaaccacgagtggattggcaatgagtggctcccttctctgggccttccacagtaccgatcatactttatggaatgcctcgtagacgccaggatgctcgaccacctcaccaaaaaggacctgcgagttcacctgaagatggtggactccttccacaggacaagcctgcagtacggaatcatgtgtctcaagcgattgaattacgacagaaaagagctggagcggcgccgcgaagctagccagcacgaaattaaggacgtgttggtgtggtccaatgatagggttattcggtggatccaggcaattggactgcgcgaatatgccaataacattttggagtccggcgtccacgggtctcttattgcccttgacgaaaacttcgactactctagcctggctttgctgctgcagataccaacgcagaacacacaagctagacagatcctcgagcgggaatataataacctgctggcgctaggcacagagagacgtctggatgaatccgacgacaagaacttccgtcgcggatcgacatggcggagacaattcccccctagggaagtccacggaatctcaatgatgccagggtcatctgaaaccctcccagccggtttccgcttaaccaccacctctggtcaaagcagaaaaatgactaccgacgacggggtattctccgtttactctacctag

SEQ ID NO: 83639 - DNA, 2352 bp, Artificial Sequence
  derived and/or modified sequence
atgaggcacctggagggccagctggaggagaagaaccaggagctgcagagggcccggcagcgggagaagatgaatgaggagcacaacaagaggctgagtgacacagtggaccggctgctgacagagagcaatgaaaggctgcagctgcacctgaaggagaggatggccgccctggaggagaagaatgtgctgatccaggagagcgagaccttcaggaagaacctggaggagagcctgcatgacaaggagcggctggccgaggagattgagaagctgcggtctgagctggaccagctgaagatgaggacaggcagcctgattgagcccaccatccccaggacccacctggacaccagcgctgagctgcgctacagcgtgggcagcctggtggacagccagagcgactaccgcaccaccaaggtgatcagaagaccccggcggggccgcatgggcgtgagaagagatgagcccaaggtgaagagcctgggggaccacgagtggaacagaacccagcagattggagtgctgagcagccacccctttgaaagtgacacagagatgtctgacattgatgatgatgaccgggagaccatcttcagctccatggacctgctgagccccagcggccacagtgatgcccagaccctggccatgatgctgcaggagcagctggatgccatcaacaaggagatccgcctcatccaggaggagaaggagagcacagagctgcgggcagaggagattgaaaatagagtggcctctgtgtccctggagggcctgaacctggcccgggtgcaccctggcaccagcatcacagcctctgtgacagccagcagcctggccagcagcagccccccatctggccacagcacccccaagctgacccccaggagccctgcccgggagatggacaggatgggcgtgatgaccctgcccagcgacctgaggaagcacaggaggaagattgctgtggtggaggaggatggaagagaggacaaggccaccatcaagtgtgagaccagccccccacccaccccccgggccctgaggatgacccacaccctgcccagcagctaccacaatgatgcccggagcagcctgtctgtgtccctggagcctgagagcctgggcctgggcagcgccaacagcagccaggacagcctgcacaaggcccccaagaagaagggcatcaagagcagcatcggccgcctgtttgggaagaaggagaaggcccggctgggccagctgcggggcttcatggagacagaggccgccgcccaggagagcctgggcctgggcaagctgggcacccaggccgagaaggaccggcggctgaagaagaagcatgagctgctggaggaggcccggaggaagggcctgccctttgcccagtgggatggccccaccgtggtggcctggctggagctgtggctgggcatgcctgcctggtacgtggccgcctgccgggccaacgtgaagagcggggccatcatgtctgccctgagtgacacagagatccagcgggagatcggcatcagcaaccccctgcaccggctgaagctgcggctggccatccaggagatggtgtccctgaccagccccagcgccccacccaccagcaggacctgccctgtgttcctgcagaccctggcctacggggacatgaaccacgagtggattggaaatgagtggctgcccagcctgggcctgccccagtaccgcagctacttcatggagtgcctggtggatgccaggatgctggaccacctgaccaagaaggacctgcgggtgcacctgaagatggtggacagcttccacaggaccagcctgcagtatggcatcatgtgcctgaagaggctgaactatgacaggaaggagctggagcggcggcgggaggccagccagcacgagatcaaggatgtgctggtgtggagcaatgacagagtcatccgctggatccaggccatcggcctgcgggagtatgccaacaacatcctggagagcggcgtgcacggcagcctgattgccctggatgaaaattttgactacagcagcctggccctgctgctgcagatccccacccagaacacccaggcccggcagatcctggagcgggagtacaacaacctgctggccctgggcacagaaagaaggctggatgaaagtgatgacaagaacttccggcggggcagcacctggaggcggcagttccccccccgggaggtgcacggcatctccatgatgcctggcagcagcgagaccctgcctgctggcttccggctgaccaccaccagcggccagagcaggaagatgaccacagatgatggagtcttctctgtgtacagcacctag

SEQ ID NO: 83640 - DNA, 2352 bp, Artificial Sequence
  derived and/or modified sequence
atgcggcacctggagggccagctggaggagaagaaccaggagctgcagcgggcgcggcagagagagaaaatgaacgaggagcacaacaaacgcttaagcgacacagtcgaccgcctccttaccgagtcaaatgagcgcttgcagctccacctaaaggaaagaatggcggccctggaagagaaaaatgttctaatccaggaatcagagacttttagaaagaatctggaggagagtctgcatgataaggaaaggctggcagaagagatagaaaaacttcggagtgagttggatcaattgaaaatgagaacaggctcactaatcgaacccacaatcccccgaacccacctggacacatcagcagagctgaggtactcagtcgggtccctggtggattcccagtccgattaccggaccacgaaagtgattcggcgcccccggagggggcgaatgggcgttaggcgggacgagcctaaggtgaagtccctgggtgaccacgagtggaaccgaacacagcagatcggagtgcttagctctcacccattcgaaagtgatactgagatgtccgatattgacgacgatgatagggaaaccatcttctcttccatggatcttctcagtccctcagggcacagtgatgcccagactctcgcaatgatgttgcaggagcagttagatgctattaataaagaaatccggttaattcaggaagaaaaagaatcaaccgagcttcgggccgaggaaattgaaaaccgcgtggccagtgtaagtttggaagggttgaatctggcacgcgtgcacccagggacttccattactgcatcggttacagcaagctccctggcaagttcatcccccccctccggtcactctactcctaagctgaccccaaggtctcccgctagggagatggatagaatgggagtgatgactttaccttcggacctgcgaaagcatcggcgaaaaattgcagttgtggaagaggatggacgggaagataaagcaaccatcaaatgtgagaccagtccccctccaactccaagagcattgcggatgacccacaccctgcctagctcctaccataatgatgcacgctcaagcctgagcgtctcactcgaacctgaatcactcggcctgggatccgcaaatagttcacaagatagtttgcacaaggcaccgaagaaaaaagggatcaagtcctccattgggaggttattcggaaagaaagaaaaagctaggcttgggcaactaagagggttcatggaaacggaggctgctgcgcaggagtcactcggactggggaagctgggcacccaggctgagaaagatcggcgcctcaaaaagaagcacgaactgctggaagaagctaggcgaaagggattgccatttgctcagtgggatgggccaaccgtcgtggcgtggctcgagttatggcttggaatgccagcctggtatgtcgctgcctgccgcgcgaacgtgaagtcaggtgccatcatgagcgcactcagcgacaccgagatccagcgtgaaattgggatctcaaaccctctccaccgcctgaagctacgactggcaattcaggagatggtgagcctcacaagtccgagcgccccccctacgtcccgcacctgccccgttttcctccagaccttggcgtacggagatatgaaccatgaatggatcggaaacgaatggctgcctagcctaggactacctcagtatcgctcatatttcatggagtgcctggtcgatgctagaatgctcgaccacctgactaaaaaagatcttcgtgtacacctgaaaatggtagatagcttccatagaacatccctccaatacggaatcatgtgtctgaagagactcaactacgacaggaaagagcttgagcggcgtcgcgaggcatcccagcacgagataaaggacgttctcgtgtggtctaatgatagagtcattaggtggatacaggcgatcggactgcgggagtacgccaacaatatactagagtcaggcgttcacgggagtctgatcgcacttgatgagaacttcgactacagttccttggcactcctgcttcagatccctacgcaaaatacgcaagccaggcagatccttgagcgcgagtacaataaccttctggccctgggaacggaacgcaggttggatgagagtgatgataagaatttcagacgcggatctacttggcgaaggcagtttccccctcgggaggtgcatgggatctccatgatgcctggttcctcagagacactgcctgctggcttccgtctgaccaccacctccggtcaatcacggaaaatgacaaccgatgatggagtattttcagtctattctacctag

SEQ ID NO: 83641 - DNA, 2352 bp, Artificial Sequence
  derived and/or modified sequence
atgaggcatctagagggacagttggaagagaaaaatcaggagctgcagagggccaggcagcgggagaaaatgaacgaagaacacaacaagcgcctatccgatactgtggacaggctactgaccgaaagcaacgaacgactgcagcttcacttgaaggagcgaatggctgcactggaggagaaaaacgtgttgatacaagagtcggagacatttcggaaaaatctggaagaaagtctacatgacaaggaaaggttggccgaggaaatagagaagctgaggtcagaactggaccaactcaagatgcgcactggatccttaatcgagccaactattccgaggacccacctggacacttccgcagagctgcgctattctgtgggcagccttgtggattctcaaagtgactaccggacaactaaagtgatcagacgacctcgtagaggtaggatgggtgtgcgcagagatgagccgaaggttaagtccctcggcgatcatgagtggaacaggactcagcagattggggtgctcagctcccaccccttcgagtcagacaccgaaatgtctgacatcgatgatgacgacagagagactatctttagctccatggacttactctccccgtctggccactcagacgcacaaacgctggccatgatgctgcaagaacagctggacgctattaataaggagatccggctgatccaagaagaaaaagaatccaccgaactaagggctgaggaaatcgagaaccgagttgcctcggtctctctggagggactgaatctggccagggtgcatcctggcaccagcattactgcatccgtcactgcgtcaagcctcgcctctagctcgccaccctcagggcactccacacccaagttaacacccagatctcctgcacgcgaaatggaccgaatgggtgtaatgacactgccctctgatctgagaaagcacaggagaaaaatcgcagtggtcgaggaggacgggagggaagataaggccaccattaaatgtgagacatcaccgccaccaaccccacgagcccttaggatgacacacacgctaccttcttcctaccacaatgacgcacgaagtagccttagcgtgtcgctggaaccagaatcccttggacttggctctgcaaatagttctcaagatagtctgcataaagcaccgaagaagaagggcatcaagtcctctatcggcaggctcttcggcaaaaaagagaaggccagattgggccagcttagaggctttatggagactgaagccgcagcccaagaaagcctgggtctgggcaaacttggaacccaagccgaaaaggatagaaggctgaaaaaaaaacacgaactgttagaagaggcaagacggaaaggcttgccatttgctcagtgggatggcccaactgttgttgcttggttagaactctggctcgggatgcccgcttggtacgttgctgcttgcagagccaacgttaagtcaggcgctataatgagtgctctttctgacaccgagatccagagggagatagggataagtaaccccctgcacagactgaagctccggctagcaattcaagagatggtgtctctaacttccccctcagccccacctacctctaggacctgccctgtattccttcagacgctggcctatggggatatgaaccacgagtggattggcaatgagtggctcccaagtctcgggctgccccagtataggtcttatttcatggagtgtttggtggacgcgagaatgcttgaccatttgaccaagaaagatctgcgtgtgcacctcaaaatggtggattcttttcatagaacctctttacagtacgggattatgtgtctgaagcgtctcaactatgaccgaaaggaactcgagagaagaagagaagcctcccagcacgagattaaagatgtcctggtttggtcgaacgatcgagtgatccgatggattcaggcaatcggcctgagagagtacgctaacaatatcctcgagtctggcgtgcacggtagcctgatcgcactcgatgagaatttcgattattccagtctcgcactgctgctccagatccccacccaaaacacgcaggcccgacagattctggaaagagaatacaataaccttctggcattgggtacggagaggagattggatgagtccgatgacaagaacttccgtagggggtccacttggagaaggcagttccccccacgggaggtccacgggatctccatgatgccaggctcgtctgaaaccctgcccgctggctttcggctgactaccacctccgggcaaagtaggaagatgactaccgacgatggggtgttttccgtttattccacatag

SEQ ID NO: 83642 - DNA, 1332 bp, Artificial Sequence
  derived and/or modified sequence
atgacccacaccctgcccagcagctaccacaacgacgccagaagcagcctgagcgtgagcctggagcccgagagcctgggcctgggcagcgccaacagcagccaggacagcctgcacaaggcccccaagaagaagggcatcaagagcagcatcggcagactgttcggcaagaaggagaaggccagactgggccagctgagaggcttcatggagaccgaggccgccgcccaggagagcctgggcctgggcaagctgggcacccaggccgagaaggacagaagactgaagaagaagcacgagctgctggaggaggccagaagaaagggcctgcccttcgcccagtgggacggccccaccgtggtggcctggctggagctgtggctgggcatgcccgcctggtacgtggccgcctgcagagccaacgtgaagagcggcgccatcatgagcgccctgagcgacaccgagatccagagagagatcggcatcagcaaccccctgcacagactgaagctgagactggccatccaggagatggtgagcctgaccagccccagcgccccccccaccagcagaacctgccccgtgttcctgcagaccctggcctacggcgacatgaaccacgagtggatcggcaacgagtggctgcccagcctgggcctgccccagtacagaagctacttcatggagtgcctggtggacgccagaatgctggaccacctgaccaagaaggacctgagagtgcacctgaagatggtggacagcttccacagaaccagcctgcagtacggcatcatgtgcctgaagagactgaactacgacagaaaggagctggagagaagaagagaggccagccagcacgagatcaaggacgtgctggtgtggagcaacgacagagtgatcagatggatccaggccatcggcctgagagagtacgccaacaacatcctggagagcggcgtgcacggcagcctgatcgccctggacgagaacttcgactacagcagcctggccctgctgctgcagatccccacccagaacacccaggccagacagatcctggagagagagtacaacaacctgctggccctgggcaccgagagaagactggacgagagcgacgacaagaacttcagaagaggcagcacctggagaagacagttcccccccagagaggtgcacggcatcagcatgatgcccggcagcagcgagaccctgcccgccggcttcagactgaccaccaccagcggccagagcagaaagatgaccaccgacgtggccagcagcagactgcagagactggacaacagcaccgtgagaacctacagctgctag

SEQ ID NO: 83643 - DNA, 1332 bp, Artificial Sequence
  derived and/or modified sequence
atgacccacactctgccatctagctatcataatgacgctagatctagcctcagtgtgtccctggagcccgaaagtctcgggctgggatcggccaacagttcccaagacagtcttcataaggcgcccaagaaaaaggggatcaagtcctccattggcagactctttggaaagaaagagaaggcccgcttaggccagctgcgagggttcatggagaccgaggcagctgcacaggagagcttgggcctcggcaagttggggacacaagccgaaaaagatagacgcctcaagaagaagcacgagttgctggaggaggccagaagaaaagggcttccattcgcccagtgggatgggcccactgtggttgcctggctggagctctggctaggcatgccagcgtggtacgtggctgcttgtagagcgaacgtgaaatctggcgcgataatgtccgccttaagcgataccgaaatacaacgcgaaatcggcattagcaatccccttcataggctcaagcttcgactggccattcaggaaatggtctcccttacatctcccagcgctccacctacatctcggacctgcccagtcttcctgcagactctcgcctatggtgacatgaaccacgaatggattggcaacgaatggttaccttctctcgggcttccgcagtatcgcagttattttatggaatgcctggtggacgcacgaatgctggatcacttgacgaagaaagatctccgggtgcatctgaagatggtggactctttccaccggacaagtctgcagtacggaattatgtgcctgaaaaggttgaactatgaccgtaaggagctggaaagaaggcgtgaggcgtcgcagcacgaaattaaagacgtgctagtctggagtaacgacagagtaatccgctggattcaggccatcggcctgcgcgaatacgccaacaatatcctggaaagcggggtgcatgggtctttgattgccctcgacgagaatttcgactattcctcacttgccctattacttcagatcccaacccagaatacacaggcaagacagatcctggaacgggagtacaacaatctgctggcactgggaactgaacggagactggatgagtccgatgataaaaacttcagaagaggctcgacatggcgacgccagtttcctccccgagaggttcacggcatttctatgatgcctggctcttccgaaacgctgcctgccggatttcggctgacaaccactagcggccagtcacggaaaatgactacagacgtcgccagctcacgcctacagaggctggataatagtactgtgagaacatatagctgctag

SEQ ID NO: 83644 - DNA, 1332 bp, Artificial Sequence
  derived and/or modified sequence
atgacccacaccctgcccagcagctaccacaatgatgcccggagcagcctgtctgtgtccctggagcctgagagcctgggcctgggcagcgccaacagcagccaggacagcctgcacaaggcccccaagaagaagggcatcaagagcagcatcggccgcctgtttgggaagaaggagaaggcccggctgggccagctgcggggcttcatggagacagaggccgccgcccaggagagcctgggcctgggcaagctgggcacccaggccgagaaggaccggcggctgaagaagaagcatgagctgctggaggaggcccggaggaagggcctgccctttgcccagtgggatggccccaccgtggtggcctggctggagctgtggctgggcatgcctgcctggtacgtggccgcctgccgggccaacgtgaagagcggggccatcatgtctgccctgagtgacacagagatccagcgggagatcggcatcagcaaccccctgcaccggctgaagctgcggctggccatccaggagatggtgtccctgaccagccccagcgccccacccaccagcaggacctgccctgtgttcctgcagaccctggcctacggggacatgaaccacgagtggattggaaatgagtggctgcccagcctgggcctgccccagtaccgcagctacttcatggagtgcctggtggatgccaggatgctggaccacctgaccaagaaggacctgcgggtgcacctgaagatggtggacagcttccacaggaccagcctgcagtatggcatcatgtgcctgaagaggctgaactatgacaggaaggagctggagcggcggcgggaggccagccagcacgagatcaaggatgtgctggtgtggagcaatgacagagtcatccgctggatccaggccatcggcctgcgggagtatgccaacaacatcctggagagcggcgtgcacggcagcctgattgccctggatgaaaattttgactacagcagcctggccctgctgctgcagatccccacccagaacacccaggcccggcagatcctggagcgggagtacaacaacctgctggccctgggcacagaaagaaggctggatgaaagtgatgacaagaacttccggcggggcagcacctggaggcggcagttccccccccgggaggtgcacggcatctccatgatgcctggcagcagcgagaccctgcctgctggcttccggctgaccaccaccagcggccagagcaggaagatgaccacagatgtggccagcagccggctgcagaggctggacaacagcacagtgaggacctacagctgctag

SEQ ID NO: 83645 - DNA, 1332 bp, Artificial Sequence
  derived and/or modified sequence
atgacccacaccctgcccagcagctaccacaacgacgcccggagctcgttgagcgtgtctttggagcctgagtcccttgggctgggctccgccaattcttctcaagattcactgcataaggcacctaagaagaagggtatcaagtccagcataggaaggctgttcggtaaaaaagaaaaggcacggctgggccagcttagagggtttatggagactgaggctgctgcccaggagagcctaggcctgggaaaactgggaacccaagctgagaaagataggcgcctgaaaaagaagcacgagctgttggaagaggctcgccgcaagggcctgccctttgcacagtgggatgggcctactgtcgttgcctggctagagttatggttggggatgcccgcatggtatgtggcggcatgtcgggcaaatgtaaagagcggggccattatgtcggctctgagcgacaccgagatccagagggagatcggcatttcaaatcctcttcatcgtctgaagttgcgcctggccatccaggagatggtgagtctcacctcgcccagtgcacccccaaccagtcgtacctgcccagtattccttcagacgcttgcctacggggacatgaaccacgagtggatcggcaatgagtggctgcctagtctggggctcccgcaatacagaagctacttcatggaatgtttggtcgatgctaggatgctggaccatttaacaaaaaaggatcttagagttcatcttaagatggtcgactcctttcacaggaccagcttgcagtatgggattatgtgcttgaagcgcttaaactacgatcggaaagagttagaacgccggcgcgaggcctcgcagcatgaaattaaggatgttcttgtttggtctaacgaccgggtgataaggtggattcaggccataggccttagggaatacgccaacaacattctagagagcggggttcacgggtccctcatcgcgttggacgaaaacttcgactactcttccttggcactcctgctacagatacctacccaaaacactcaggctcgccagatcctggagcgcgagtacaacaacctgctggctctcgggacagaacgccggctggatgagagtgacgacaaaaactttagaagagggagcacttggcgcaggcagttcccaccacgtgaggttcacggtatcagtatgatgcccgggtcttccgaaactctgcccgccggatttcggctgaccacaacgagcggccaatctcggaagatgacaaccgatgtcgcctccagccgcctgcagaggttggataactccactgttcgaacctactcgtgctag

SEQ ID NO: 83646 - DNA, 1332 bp, Artificial Sequence
  derived and/or modified sequence
atgactcataccctgccaagttcatatcataatgacgccagatcctccctgagcgtttctctggaacctgagtccttaggcctaggtagcgccaactcttcacaggattccctgcacaaggctccaaaaaagaaaggcattaaatcctcaattggaaggctgtttggaaagaaggagaaggcaagactgggacagctcagggggttcatggaaactgaggccgcagcacaggagtctctgggtcttggaaagttgggaacccaagcagagaaggaccggaggttgaagaaaaagcacgaactgttggaggaggctaggagaaaggggttgccatttgctcagtgggacgggcctacagtggtagcttggctggaactgtggctagggatgcccgcatggtatgtggcagcgtgtagggcaaatgttaagtctggcgcaataatgtctgccctgagcgataccgaaatccagagagagatcgggatctcgaaccctctccaccggctaaagctgcgacttgccatccaagaaatggtatctctgacatccccatccgccccacctaccagtcgcacttgcccagtcttcctccaaactctcgcatatggggacatgaatcacgaatggattggcaacgagtggctcccgagcctaggactgccacagtacaggtcttactttatggaatgtctggtcgatgctcgcatgcttgaccacctgacgaagaaggatttgcgcgtccatttaaaaatggtggacagcttccacagaaccagcctccaatatggcatcatgtgcctgaagcggttgaattatgacaggaaggaattagagagaaggagggaagcaagccagcatgaaatcaaagatgttctcgtatggagcaacgatagggtgatcaggtggattcaggctattggattgcgtgagtacgctaataacattctggaatctggagttcacggttccctaatagccctggacgaaaatttcgactactcttctcttgcattgttgctgcaaataccgacccagaacactcaggcacgacagatcctcgaaagggaatacaacaatttgttggccctcggcactgaaagaagactagacgaaagcgatgacaagaatttccgaaggggcagcacttggcgccgtcagttcccaccccgagaagtgcacggcatttcgatgatgccagggtccagcgagaccctccctgcaggcttccgcctcaccaccacgagtggccaatctcgcaagatgacgactgatgtcgccagtagcaggctacagaggctggacaactcaacggtccgaacatattcatgttag

SEQ ID NO: 83647 - protein, 760 aa, Artificial Sequence
  derived and/or modified sequence
MKTPPGASSRTKCSRELRSFCAFSCPRAKQPTCTAWFPQQEHPSENGPQMPGRDPPAASTMQVLLLTSAEDLDCTPGFQQKVFHINQPAEFIEDQSILNLTFSDCKGNDKLRYEVSSPYFKVNSDGGLVALRNITAVGKTLFVHARTPHAEDMAELVIVGGKDIQGSLQDIFKFARTSPVPRQKRSIVVSPILIPENQRQPFPRDVGKVVDSDRPERSKFRLTGKGVDQEPKGIFRINENTGSVSVTRTLDREVIAVYQLFVETTDVNGKTLEGPVPLEVIVIDQNDNRPIFREGPYIGHVMEGSPTGTTVMRMTAFDADDPATDNALLRYNIRQQTPDKPSPNMFYIDPEKGDIVTVVSPALLDRETLENPKYELIIEAQDMAGLDVGLTGTATATIMIDDKNDHSPKFTKKEFQATVEEGAVGVIVNLTVEDKDDPTTGAWRAAYTIINGNPGQSFEIHTNPQTNEGMLSVVKPLDYEISAFHTLLIKVENEDPLVPDVSYGPSSTATVHITVLDVNEGPVFYPDPMMVTRQEDLSVGSVLLTVNATDPDSLQHQTIRYSVYKDPAGWLNINPINGTVDTTAVLDRESPFVDNSVYTALFLAIDSGNPPATGTGTLLITLEDVNDNAPFIYPTVAEVCDDAKNLSVVILGASDKDLHPNTDPFKFEIHKQAVPDKVWKISKINNTHALVSLLQNLNKANYNLPIMVTDSGKPPMTNITDLRVQVCSCRNSKVDCNAAGALRFSLPSVLLLSLFSLACK

SEQ ID NO: 83648 - DNA, 2283 bp, Artificial Sequence
  derived and/or modified sequence
atgaaaacccctcccggggcaagcagcaggactaaatgttctcgcgagctaagatccttttgtgcattttcctgtcccagagcgaaacaacccacatgcacggcgtggtttcctcagcaggagcatccctccgagaacggtccgcagatgcctggtcgagacccccccgctgccagcaccatgcaggtgctgctcctcacatctgctgaggacctggactgcacacctgggtttcagcagaaggtgttccatattaatcagccagctgagttcattgaggaccagtcaattcttaatctcaccttctccgactgcaagggtaatgataaattgaggtacgaagtcagcagcccctacttcaaagttaacagtgatggcggcttggtagccctccgcaacatcactgctgtcggaaagactttgtttgtgcatgcacgaactcctcacgcggaggacatggcagagctagtcatcgtcggaggtaaagatattcagggttcactacaggatatatttaaatttgcccgaacttccccagtgccccgacagaaaaggagcattgtggtatctccaattctgattcctgaaaaccagcgtcagcccttcccaagagatgtgggcaaggtcgtcgatagcgacaggccggaacgcagtaaatttaggctgactgggaaaggcgtggatcaagaacccaagggaatatttcgcataaatgagaacaccggttctgttagtgtcacacgcactttagatagggaggtcatagccgtttaccagttatttgtcgaaacaaccgacgtgaacgggaaaaccctggaaggtccagttcctttggaagtgatcgtgatcgatcagaacgacaaccggccgatattccgtgaaggaccgtatatcggacatgttatggagggttccccaacaggcaccactgtgatgcggatgacagcatttgatgccgatgaccccgccacagataacgcacttctcagatacaatatcagacaacagacacctgacaaacctagtcctaatatgttttatatagacccggagaaaggcgatatagtgaccgtcgtcagtccggctttgcttgacagagaaactttagagaaccccaagtacgaactcatcatagaggctcaagacatggccggactagacgtgggccttacagggactgctactgcaacaattatgatcgatgataagaacgatcattcgccgaaattcaccaagaaagaattccaggcgaccgtggaggagggcgctgttggggtcatcgttaacctgaccgtggaggataaggacgatccgaccacgggcgcatggcgcgcagcctacaccatcataaacggtaacccaggccagtcgtttgagattcacaccaacccccagacaaacgaggggatgttaagtgtggtcaagcccctcgattacgagatcagtgcatttcacacacttctgattaaggtggaaaatgaggatcctttggtgcctgatgtgtcatatggtccctcctctacggctacagtccatatcacagtcctcgacgtgaatgagggaccggtgttctacccagaccccatgatggtgaccagacaagaagacctgtcggtgggttctgtgttgttgactgtaaatgcgacagatccagactccttacagcaccagaccatcagatattctgtgtacaaggaccctgccgggtggctgaatatcaatccaattaatggtacagtggatacaacagcagtgctggatagagagtcgccgttcgtggacaactcggtctacaccgccctgttcctcgcaatcgactctggcaatcctccggctactggtactggtactctgctcattaccctcgaagatgtgaacgacaatgcccctttcatttatcccactgtcgccgaggtttgtgacgatgccaagaacctaagtgtggtgatcctgggggcctctgacaaagaccttcaccctaataccgatccgttcaagttcgaaatccataagcaggctgtacctgataaggtgtggaagatatctaaaatcaacaatacacatgccctcgtgtctcttcttcagaacctcaataaggcgaattataacctacctatcatggtgactgactctgggaaacctccgatgaccaatattactgatctccgcgtgcaagtgtgctcctgccgcaacagcaaagtcgattgtaacgctgccggggctcttaggttcagcctacccagtgtcctgctgctgtctctcttttccctagcatgcaagtag

SEQ ID NO: 83649 - DNA, 2283 bp, Artificial Sequence
  derived and/or modified sequence
atgaagaccccacctggggccagcagcaggaccaagtgcagccgggagctgcgctccttctgtgccttcagctgcccccgggccaagcagcccacctgcacagcctggttcccccagcaggagcaccccagtgaaaatggcccccagatgcctggccgggaccccccagctgccagcaccatgcaggtgctgctgctgaccagcgctgaggacctggactgcaccccaggcttccagcagaaggtgttccacatcaaccagcctgctgagttcatcgaggaccagagcatcctgaacctgaccttcagtgactgcaagggaaatgacaagctgcgctatgaggtgagcagcccctacttcaaggtgaacagtgatggcggcctggtggccctgaggaacatcacagctgtgggcaagaccctgtttgtgcacgcccggacccctcatgctgaggacatggccgagctggtgattgtgggcggcaaggacatccagggcagcctgcaggacatcttcaagtttgcccggaccagccctgtgccccggcagaagaggagcatcgtggtgagccccatcctgatccctgagaaccagaggcagcccttccccagagatgtgggcaaggtggtggacagcgacaggcctgagaggagcaagttccggctgactggaaaaggagtggaccaggagcccaagggcatcttccgcatcaatgaaaatactggatctgtgtctgtgaccaggaccctggaccgggaggtgattgctgtgtaccagctgtttgtggagaccacagatgtgaatggcaagaccctggagggccctgtgcccctggaggtgattgtgattgaccagaatgacaaccggcccatcttccgggagggcccctacatcggccacgtgatggagggcagccccaccggcaccaccgtgatgaggatgacagcctttgatgctgatgatcctgccacagacaatgccctgctgcgctacaacatccggcagcagaccccagacaagcccagccccaacatgttctacatcgaccctgagaagggggacatcgtgacagtggtgtccccagccctgctggaccgggagaccctggagaaccccaagtatgagctgatcatcgaggcccaggacatggccggcctggatgtgggcctgactggaacagccacagccaccatcatgattgatgacaagaatgaccacagccccaagttcaccaagaaggagttccaggccaccgtggaggagggcgctgtgggcgtgattgtgaacctgactgtggaggacaaggatgaccccaccaccggggcctggagggctgcctacaccatcatcaatggaaatcctggccagagctttgagatccacaccaacccccagaccaatgaaggcatgctgtctgtggtgaagcccctggactatgagatcagcgccttccacaccctgctgatcaaggtggagaatgaagaccccctggtgcctgatgtgtcctatggccccagcagcacagccaccgtgcacatcaccgtgctggatgtgaatgaaggacctgtgttctacccagaccccatgatggtgacccggcaggaggacctgtctgtgggctctgtgctgctgactgtgaatgccacagatcctgacagcctgcagcaccagaccatccgctacagcgtgtacaaggaccctgctggctggctgaacatcaaccccatcaatggaacagtggacaccacagctgtgctggaccgggagagcccctttgtggacaacagcgtgtacacagccctcttcctggccattgattctggcaaccccccagccactggaacaggcaccctgctgatcaccctggaggatgtgaatgacaatgcccccttcatctaccccaccgtggccgaggtgtgtgatgatgccaagaacctgtctgtggtgatcctgggcgccagtgacaaggacctgcaccccaacacagaccccttcaagtttgagatccacaagcaggccgtgcctgacaaggtgtggaagatcagcaagatcaacaacacccacgccctggtgtccctgctgcagaacctgaacaaggccaactacaacctgcccatcatggtgacagattctgggaagccacccatgaccaacatcacagacctgcgggtgcaggtgtgcagctgcaggaacagcaaggtggactgcaatgctgctggggccctgcgcttcagcctgcccagcgtgctgctgctgagcctcttcagcctggcctgcaagtag

SEQ ID NO: 83650 - DNA, 2283 bp, Artificial Sequence
  derived and/or modified sequence
atgaagaccccccccggcgccagcagccggaccaagtgcagccgggagctgagaagtttctgcgcatttagttgcccaagggcgaaacagcccacctgcactgcttggtttcctcagcaagaacacccatcggagaacgggccacagatgccagggcgcgatcccccagcggcctctactatgcaagtactgttgctgacctccgcagaggacctggattgtacacctgggttccaacagaaggtgtttcacattaaccagcctgcggaattcattgaggatcagtcgatcctgaacctgacattcagtgactgcaagggaaatgataaactccgttacgaagtgagcagcccatattttaaagtcaattctgatggagggctcgttgcattaaggaacatcacagctgttggcaagaccctgtttgtccacgccaggacaccccatgcagaggatatggcagagttagtgatagttgggggcaaagacatacagggaagtctccaggacatattcaagttcgcaaggaccagccctgtgccccggcagaaacgaagtatcgtcgtgtcaccaattctcatcccagagaaccagcgacagcctttcccccgcgacgtcgggaaggtggtggattccgaccgcccagagcggagcaagtttcggcttaccggcaaaggtgtcgatcaggaaccaaaggggatttttcggattaatgagaacactggatccgtatctgtcacccggacccttgatcgagaagtaattgccgtgtaccagctctttgtggaaacaaccgacgtcaatggaaaaacgttggagggtcccgtgcccttagaagttatcgtcatagaccaaaacgacaaccgtcccattttcagagaaggaccttatatcggacacgtgatggagggtagtcctactggcaccaccgttatgcgaatgactgcatttgatgctgacgatcctgccacagacaatgctcttcttcgatacaatatcaggcagcagactcctgataaaccatcccccaatatgttctacatcgaccccgaaaagggcgatattgtgactgtcgtcagccctgctttactagaccgggagaccctggaaaaccctaagtacgaactgataatagaggcccaagatatggcaggcctggatgtaggcttgacaggaaccgccacagcaacaatcatgatagatgataagaatgatcactccccaaagttcaccaaaaaggaatttcaggctacagtggaggaaggcgccgtgggagtgattgtgaatctgaccgtggaggataaagacgatcccacgacgggcgcctggcgagcagcctatacaataatcaatggtaatcctggccagtcttttgaaatccacacaaatccacaaaccaacgaaggcatgctgtctgtggtgaagcctctggactacgagatctcagccttccatacccttctgataaaggtggagaatgaagatccattagttcccgatgtttcttacggaccatcctccaccgccacggtgcatataaccgttctcgatgtcaatgagggcccggtgttttaccccgacccaatgatggtaaccagacaggaggatctgtcagttggttcagtcttgctgacagttaacgctactgatccagatagcttgcaacaccagaccattcgatattcggtgtacaaggacccagccggctggctgaatattaaccctattaacggtactgttgacactaccgccgtgttagatcgtgagtctccttttgttgacaactctgtgtacactgctctctttctggcaatcgactccgggaaccctcctgccaccggcaccgggacacttctaattacgctagaagacgttaacgacaatgctccctttatctatccaaccgtcgctgaagtctgcgacgatgctaagaacctgtccgttgtcatccttggcgccagcgacaaggatctccacccaaacaccgatcctttcaagttcgagatccataagcaggcagttcccgacaaagtgtggaagattagcaaaatcaacaatacgcacgctctggtgtctttactccaaaacctgaacaaagccaactacaaccttcctatcatggttacagacagcgggaaaccccctatgaccaacatcaccgatttgagggtccaggtgtgctcctgccggaattccaaagtggactgtaatgctgctggcgctctaagattttctctgccttccgtcctgctcttatcccttttttcccttgcatgtaagtag

SEQ ID NO: 83651 - DNA, 2283 bp, Artificial Sequence
  derived and/or modified sequence
atgaagacaccccctggtgcctcaagccggaccaaatgttcgagggaactcaggtctttttgcgccttctcctgccccagggctaaacaacccacatgcactgcctggttcccccagcaagaacatccctcggagaatggccctcagatgccaggaagggacccgcctgcagctagcaccatgcaagtattgctcctcacttcagccgaggacctggactgtacaccaggtttccaacagaaggtgtttcatattaaccagcctgcagagttcattgaagatcagtccattttgaatttgaccttctccgactgtaagggcaatgataagttacgctatgaggtgagctcaccctacttcaaggttaacagtgacgggggactggtggccctaagaaatattacggctgtggggaagactttgtttgtccacgcgcgtacaccccacgctgaagatatggcagagcttgtaattgtgggcggaaaagatatccagggatctctccaggatattttcaaatttgcacggacaagcccagtccccaggcagaagcgaagtatagtggtgagccccattctgattcctgagaaccagcggcaaccctttccccgagacgttggtaaggtcgttgactctgaccggccagagaggtccaagttcagattgactggaaagggggtggaccaggagccaaaggggatctttagaatcaatgaaaacaccggttcggtatcagtgactaggacgctcgatcgagaagtgattgcggtgtatcaattattcgtagaaactacagacgtgaatggtaagactttggaagggcctgtgccactggaagttattgtaatagaccagaatgacaatcggcctatcttccgcgaggggccttacataggacatgtgatggaaggctcaccaaccgggaccactgtgatgcggatgaccgctttcgacgctgacgatcccgctacggataatgcattgctgagatacaacattagacagcaaacacccgacaaaccctctccaaatatgttttacattgatcccgagaaaggcgatattgtcacagtggtgtcgccagcgttgctggacagggaaacactggagaatcccaaatacgagctgattatagaggcccaggacatggccggactggatgttggattgaccggaaccgcaacggccacgatcatgattgacgataagaatgaccactctcccaaattcactaagaaggagtttcaggccaccgtggaggagggcgcagtcggcgtgatagttaacctgacggtggaggataaggacgaccctactacgggtgcctggcgggctgcctacacaattatcaacgggaatcccggtcagtcgtttgaaattcacacaaatccccaaacgaatgaggggatgctgtctgtggtgaaacccctagattacgagatctccgccttccatactttgctgatcaaggttgaaaacgaggacccactagtccctgatgtctcctacgggccttccagcactgcaaccgttcatatcaccgtcttggatgtcaatgagggaccggtcttctatcccgaccctatgatggtcaccagacaggaggatctgtccgttgggtcagtcttgttgacagtgaatgcaacagatcctgacagtctgcagcatcaaacaatccggtacagtgtctacaaagaccctgctgggtggctcaatattaaccccatcaatggtaccgttgataccacggccgttctagaccgggagagccccttcgtcgacaatagcgtgtacacagcactttttcttgcaatagattcgggcaatcccccagcaaccgggaccggtacgttgcttataactttggaagacgttaacgacaacgcaccattcatctacccaactgtggcagaagtgtgtgatgatgctaaaaatttgagtgtcgtgatcctgggcgcttcagataaggacctgcatccgaatacagatccctttaaatttgagattcataagcaagccgtaccagacaaggtgtggaagatctctaaaatcaacaacacccacgccctggtatcactactgcaaaatttaaataaagcaaattataacctgcccatcatggtgacagactccgggaaacctcctatgaccaacattactgaccttcgcgttcaagtctgcagctgcagaaatagcaaagtcgattgtaacgccgctggggctctgcgcttctctttgccgagcgtactgttactttcgttattctccttggcgtgcaaatag

SEQ ID NO: 83652 - DNA, 2280 bp, Artificial Sequence
  derived and/or modified sequence
atgaaaacgccgccgggcgcttctagtcggacaaaatgcagccgagaactccgctcgttctgtgcgttctcctgtcccagggccaaacaacccacctgcactgcatggttcccccagcaagaacatcccagtgagaatggcccacagatgcctgggcgtgacccacctgcagcttcaaccatgcaggtgctgctgctaacatctgcagaagatttggactgcactcctggatttcagcagaaagtgttccatatcaatcagccagctgaattcattgaggaccagtcaattctaaacttgaccttcagtgactgtaagggaaacgacaagctacgctatgaggtctcgagcccatacttcaaggtgaacagcgatggcggcttagttgctctgagaaacataactgcagtgggcaaaactctgttcgtccatgcacggaccccccatgcggaagatatggcagaactcgtgattgtcggggggaaagacatccagggctccttgcaggatatatttaaatttgcaagaacttctcctgtcccaagacaaaagaggtccattgtggtatctcccattttaattccagagaatcagagacagcctttcccaagagatgttggcaaggtagtcgatagtgacaggccagaaaggtccaagttccggctcactggaaagggagtggatcaagagcctaaaggaattttcagaatcaatgagaacacagggagcgtctccgtgacacggaccttggacagagaagtaatcgctgtttatcaactatttgtggagaccactgatgtcaatggcaaaactctcgaggggccggtgcctctggaagtcattgtgattgatcagaatgacaaccgaccgatctttcgggaaggcccctacatcggccacgtcatggaagggtcacccacaggcaccacagtgatgcggatgacagcctttgatgcagatgacccagccaccgataatgccctcctgcggtataatatccgtcagcagacgcctgacaagccatctcccaacatgttctacatcgatcctgagaaaggagacattgtcactgttgtgtcacctgcgctgctggaccgagagactctggaaaatcccaagtatgaactgatcatcgaggctcaagatatggctggactggatgttggattaacaggcacggccacagccacgatcatgatcgatgacaaaaatgatcactcaccaaaattcaccaagaaagagtttcaagccacagtcgaggaaggagctgtgggagttattgtcaatttgacagttgaagataaggatgaccccaccacaggtgcatggagggctgcctacaccatcatcaacggaaaccccgggcagagctttgaaatccacaccaaccctcaaaccaacgaagggatgctttctgttgtcaaaccattggactatgaaatttctgccttccacaccctgctgatcaaagtggaaaatgaagacccactcgtacccgacgtctcctacggccccagctccacagccaccgtccacatcactgtcctggatgtcaacgagggcccagtcttctacccagaccccatgatggtgaccaggcaggaggacctctctgtgggcagcgtgctgctgacagtgaatgccacggaccccgactccctgcagcatcaaaccatcaggtattctgtttacaaggacccagcaggttggctgaatattaaccccatcaatgggactgttgacaccacagctgtgctggaccgtgagtccccatttgtcgacaacagcgtgtacactgctctcttcctggcaattgacagtggcaaccctcccgctacgggcactgggactttgctgataaccctggaggacgtgaatgacaatgccccgttcatttaccccacagtagctgaagtctgtgatgatgccaaaaacctcagtgtagtcattttgggagcatcagataaggatcttcacccgaatacagatcctttcaaatttgaaatccacaaacaagctgttcctgataaagtctggaagatctccaagatcaacaatacacacgccctggtaagccttcttcaaaatctgaacaaagcaaactacaacctgcccatcatggtgacagattcagggaaaccacccatgacgaatatcacagatctcagggtacaagtgtgctcctgcaggaattccaaagtggactgcaacgcggcaggggccctgcgcttcagcctgccctcagtcctgctcctcagcctcttcagcttagcttgtaag

SEQ ID NO: 83653 - DNA, 2283 bp, Artificial Sequence
  derived and/or modified sequence
atgaagaccccccccggcgccagcagcagaaccaagtgcagcagagagctgagaagcttctgcgccttcagctgccccagagccaagcagcccacctgcaccgcctggttcccccagcaggagcaccccagcgagaacggcccccagatgcccggcagagacccccccgccgccagcaccatgcaggtgctgctgctgaccagcgccgaggacctggactgcacccccggcttccagcagaaggtgttccacatcaaccagcccgccgagttcatcgaggaccagagcatcctgaacctgaccttcagcgactgcaagggcaacgacaagctgagatacgaggtgagcagcccctacttcaaggtgaacagcgacggcggcctggtggccctgagaaacatcaccgccgtgggcaagaccctgttcgtgcacgccagaaccccccacgccgaggacatggccgagctggtgatcgtgggcggcaaggacatccagggcagcctgcaggacatcttcaagttcgccagaaccagccccgtgcccagacagaagagaagcatcgtggtgagccccatcctgatccccgagaaccagagacagcccttccccagagacgtgggcaaggtggtggacagcgacagacccgagagaagcaagttcagactgaccggcaagggcgtggaccaggagcccaagggcatcttcagaatcaacgagaacaccggcagcgtgagcgtgaccagaaccctggacagagaggtgatcgccgtgtaccagctgttcgtggagaccaccgacgtgaacggcaagaccctggagggccccgtgcccctggaggtgatcgtgatcgaccagaacgacaacagacccatcttcagagagggcccctacatcggccacgtgatggagggcagccccaccggcaccaccgtgatgagaatgaccgccttcgacgccgacgaccccgccaccgacaacgccctgctgagatacaacatcagacagcagacccccgacaagcccagccccaacatgttctacatcgaccccgagaagggcgacatcgtgaccgtggtgagccccgccctgctggacagagagaccctggagaaccccaagtacgagctgatcatcgaggcccaggacatggccggcctggacgtgggcctgaccggcaccgccaccgccaccatcatgatcgacgacaagaacgaccacagccccaagttcaccaagaaggagttccaggccaccgtggaggagggcgccgtgggcgtgatcgtgaacctgaccgtggaggacaaggacgaccccaccaccggcgcctggagagccgcctacaccatcatcaacggcaaccccggccagagcttcgagatccacaccaacccccagaccaacgagggcatgctgagcgtggtgaagcccctggactacgagatcagcgccttccacaccctgctgatcaaggtggagaacgaggaccccctggtgcccgacgtgagctacggccccagcagcaccgccaccgtgcacatcaccgtgctggacgtgaacgagggccccgtgttctaccccgaccccatgatggtgaccagacaggaggacctgagcgtgggcagcgtgctgctgaccgtgaacgccaccgaccccgacagcctgcagcaccagaccatcagatacagcgtgtacaaggaccccgccggctggctgaacatcaaccccatcaacggcaccgtggacaccaccgccgtgctggacagagagagccccttcgtggacaacagcgtgtacaccgccctgttcctggccatcgacagcggcaacccccccgccaccggcaccggcaccctgctgatcaccctggaggacgtgaacgacaacgcccccttcatctaccccaccgtggccgaggtgtgcgacgacgccaagaacctgagcgtggtgatcctgggcgccagcgacaaggacctgcaccccaacaccgaccccttcaagttcgagatccacaagcaggccgtgcccgacaaggtgtggaagatcagcaagatcaacaacacccacgccctggtgagcctgctgcagaacctgaacaaggccaactacaacctgcccatcatggtgaccgacagcggcaagccccccatgaccaacatcaccgacctgagagtgcaggtgtgcagctgcagaaacagcaaggtggactgcaacgccgccggcgccctgagattcagcctgcccagcgtgctgctgctgagcctgttcagcctggcctgcaagtag

SEQ ID NO: 83654 - protein, 674 aa, Artificial Sequence
  derived and/or modified sequence
MQPRTPLVLCVLLSQVLLLTSAEDLDCTPGFQQKVFHINQPAEFIEDQSILNLTFSDCKGNDKLRYEVSSPYFKVNSDGGLVALRNITAVGKTLFVHARTPHAEDMAELVIVGGKDIQGSLQVVDSDRPERSKFRLTGKGVDQEPKGIFRINENTGSVSVTRTLDREVIAVYQLFVETTDVNGKTLEGPVPLEVIVIDQNDNRPIFREGPYIGHVMEGSPTGTTVMRMTAFDADDPATDNALLRYNIRQQTPDKPSPNMFYIDPEKGDIVTVVSPALLDRETLENPKYELIIEAQDMAGLDVGLTGTATATIMIDDKNDHSPKFTKKEFQATVEEGAVGVIVNLTVEDKDDPTTGAWRAAYTIINGNPGQSFEIHTNPQTNEGMLSVVKPLDYEISAFHTLLIKVENEDPLVPDVSYGPSSTATVHITVLDVNEGPVFYPDPMMVTRQEDLSVGSVLLTVNATDPDSLQHQTIRYSVYKDPAGWLNINPINGTVDTTAVLDRESPFVDNSVYTALFLAIDSGNPPATGTGTLLITLEDVNDNAPFIYPTVAEVCDDAKNLSVVILGASDKDLHPNTDPFKFEIHKQAVPDKVWKISKINNTHALVSLLQNLNKANYNLPIMVTDSGKPPMTNITDLRVQVCSCRNSKVDCNAAGALRFSLPSVLLLSLFSLACK

SEQ ID NO: 83655 - protein, 272 aa, Artificial Sequence
  derived and/or modified sequence
MQPRTPLVLCVLLSQVLLLTSAEDLDCTPGFQQKVFHINQPAEFIEEDLSVGSVLLTVNATDPDSLQHQTIRYSVYKDPAGWLNINPINGTVDTTAVLDRESPFVDNSVYTALFLAIDSGNPPATGTGTLLITLEDVNDNAPFIYPTVAEVCDDAKNLSVVILGASDKDLHPNTDPFKFEIHKQAVPDKVWKISKINNTHALVSLLQNLNKANYNLPIMVTDSGKPPMTNITDLRVQVCSCRNSKVDCNAAGALRFSLPSVLLLSLFSLACK

SEQ ID NO: 83656 - DNA, 2025 bp, Artificial Sequence
  derived and/or modified sequence
atgcagcccaggacccctctcgtcctgtgtgtgctcctgtcccaggtcttgctgcttacatcagctgaagacctggattgcaccccaggcttccagcagaaggtgttccacattaaccaaccagccgagtttatcgaagaccaaagtatcctgaacctgaccttcagtgattgtaaggggaatgacaagctgcgctacgaagtctcaagcccctattttaaggttaactctgatggagggctggttgcactgagaaatataacagccgtcggcaaaaccctgttcgtccacgcgagaactccgcatgctgaggacatggcagagctggtcattgtcggggggaaagacatccagggttctctgcaggtcgtagattctgatagaccagagcgtagcaagtttaggctgaccgggaaaggagtggatcaggagcctaagggcattttccgaatcaatgaaaataccgggagcgtctcagttacgaggacactggatagggaggtgatcgccgtgtatcagctgtttgtcgaaacaaccgatgtcaacggtaaaacgctggaaggtccagtgccactcgaggtgatagtcatcgatcagaacgacaatcggcctatttttagggaaggcccttacatagggcacgttatggaaggttctcccaccggcactacagtgatgcgcatgacagcattcgacgcagatgacccggccacagataatgccctgctgagatataatattcgacagcagactccagacaagccgagtcccaacatgttctacatcgatccagagaagggcgacattgtgaccgtcgtctcccccgcacttctggatcgggaaactttggagaacccaaaatacgaactgataattgaagcacaggacatggccggacttgacgtaggcttgactggaacagcaacagccactattatgatcgatgacaaaaacgatcacagtcccaaattcacaaagaaagagtttcaggctacggtggaggagggcgctgtgggtgtcatcgtcaatctgaccgtggaagataaagacgaccctaccacaggtgcctggagagccgcctacacaatcatcaatggaaatcctggccagagcttcgaaatccacacgaacccacagactaacgaaggaatgttatcagtagtcaaacccctggactatgagatcagtgcgtttcacacactgctcattaaggtggaaaacgaggatcctttggttcccgacgtttcatacggcccttccagtactgctactgtgcatatcactgtccttgatgttaacgaaggaccagttttctacccagaccctatgatggtgactcgtcaagaggatctttccgtgggctcggtcctgctgacggtaaatgcaacagatcccgactcattgcagcatcagacgatccgttactccgtgtacaaagacccagcaggctggctaaacattaacccaattaacggaactgtcgataccacggcagtccttgatcgagaatctcccttcgtggacaattccgtttacacagcactgttcctggcaatcgactcaggaaacccgcctgccaccgggaccggcacgttgctgattaccctggaagatgtgaatgacaacgcgccgtttatatacccaaccgtggctgaggtctgcgacgatgccaaaaacttgtccgtggtgatccttggcgcgtccgataaagacttgcatccaaacacagaccctttcaaattcgaaatacacaagcaggcagtgcctgacaaggtctggaaaatcagcaagattaataatacgcatgccctggtgtccctcctgcaaaacctcaataaggcgaattataacctgcctattatggtcaccgactccggcaagcctcctatgaccaacatcaccgatcttcgcgttcaggtatgcagctgcagaaatagcaaggtcgactgcaacgccgccggagcacttcgcttctccttaccctctgtgctcttgctgagcttattcagtttggcctgtaagtag

SEQ ID NO: 83657 - DNA, 2025 bp, Artificial Sequence
  derived and/or modified sequence
atgcagcccaggacccccctggtgctgtgtgtgctgctgagccaggtgctgctgctgaccagcgctgaggacctggactgcaccccaggcttccagcagaaggtgttccacatcaaccagcctgctgagttcatcgaggaccagagcatcctgaacctgaccttcagtgactgcaagggaaatgacaagctgcgctatgaggtgagcagcccctacttcaaggtgaacagtgatggcggcctggtggccctgaggaacatcacagctgtgggcaagaccctgtttgtgcacgcccggacccctcatgctgaggacatggccgagctggtgattgtgggcggcaaggacatccagggcagcctgcaggtggtggacagcgacaggcctgagaggagcaagttccggctgactggaaaaggagtggaccaggagcccaagggcatcttccgcatcaatgaaaatactggatctgtgtctgtgaccaggaccctggaccgggaggtgattgctgtgtaccagctgtttgtggagaccacagatgtgaatggcaagaccctggagggccctgtgcccctggaggtgattgtgattgaccagaatgacaaccggcccatcttccgggagggcccctacatcggccacgtgatggagggcagccccaccggcaccaccgtgatgaggatgacagcctttgatgctgatgatcctgccacagacaatgccctgctgcgctacaacatccggcagcagaccccagacaagcccagccccaacatgttctacatcgaccctgagaagggggacatcgtgacagtggtgtccccagccctgctggaccgggagaccctggagaaccccaagtatgagctgatcatcgaggcccaggacatggccggcctggatgtgggcctgactggaacagccacagccaccatcatgattgatgacaagaatgaccacagccccaagttcaccaagaaggagttccaggccaccgtggaggagggcgctgtgggcgtgattgtgaacctgactgtggaggacaaggatgaccccaccaccggggcctggagggctgcctacaccatcatcaatggaaatcctggccagagctttgagatccacaccaacccccagaccaatgaaggcatgctgtctgtggtgaagcccctggactatgagatcagcgccttccacaccctgctgatcaaggtggagaatgaagaccccctggtgcctgatgtgtcctatggccccagcagcacagccaccgtgcacatcaccgtgctggatgtgaatgaaggacctgtgttctacccagaccccatgatggtgacccggcaggaggacctgtctgtgggctctgtgctgctgactgtgaatgccacagatcctgacagcctgcagcaccagaccatccgctacagcgtgtacaaggaccctgctggctggctgaacatcaaccccatcaatggaacagtggacaccacagctgtgctggaccgggagagcccctttgtggacaacagcgtgtacacagccctcttcctggccattgattctggcaaccccccagccactggaacaggcaccctgctgatcaccctggaggatgtgaatgacaatgcccccttcatctaccccaccgtggccgaggtgtgtgatgatgccaagaacctgtctgtggtgatcctgggcgccagtgacaaggacctgcaccccaacacagaccccttcaagtttgagatccacaagcaggccgtgcctgacaaggtgtggaagatcagcaagatcaacaacacccacgccctggtgtccctgctgcagaacctgaacaaggccaactacaacctgcccatcatggtgacagattctgggaagccacccatgaccaacatcacagacctgcgggtgcaggtgtgcagctgcaggaacagcaaggtggactgcaatgctgctggggccctgcgcttcagcctgcccagcgtgctgctgctgagcctcttcagcctggcctgcaagtag

SEQ ID NO: 83658 - DNA, 2025 bp, Artificial Sequence
  derived and/or modified sequence
atgcagccccggacccccctggtgctgtgcgtgctgctgagccaggttctactgctaactagcgcagaggacctggactgcacaccagggtttcagcagaaggtgtttcatattaatcaacccgctgaatttattgaggaccagtccattctcaacctgacatttagcgattgtaagggcaacgataagcttaggtacgaggtttcttcaccatacttcaaagtcaattccgatggaggactggtcgcactgagaaatataactgcagtgggcaaaaccttattcgtgcacgcgagaactcctcatgctgaagatatggctgaactagtcatcgttggcggaaaagacattcaggggtcgctccaggtagttgattctgaccgtccggagcgcagcaagtttagactcaccggaaaaggggtcgaccaagaaccgaaggggatctttagaatcaacgagaatactggatccgtgtccgtgacccgcactctagatcgggaggtgatcgctgtgtaccagctattcgtagagacaaccgatgtgaacggcaagacattggagggaccagttcccctggaggtgatcgtgatcgaccagaacgataacagacccatttttagagaaggcccctacatcgggcatgtgatggagggtagtcctactgggacgactgttatgcgaatgaccgcattcgacgcagacgaccctgctacagataacgctctattaaggtacaatattcgacagcagactcccgataagccgagtccgaacatgttttatattgatcccgagaagggcgacatcgtgacagtggtgtccccggccctcttagatcgcgaaacactcgagaatcccaaatacgagctgataatcgaagctcaggacatggcagggctagacgtgggccttacaggaaccgcgactgcgacaatcatgatagatgacaaaaacgatcactccccaaaattcactaagaaagagttccaagccacggtcgaggagggcgctgttggtgtgatagtcaacctgacggtagaggataaggatgacccaactaccggcgcctggcgcgccgcgtacaccattataaacggaaatcctggccaatcattcgagatccatactaatccacagacaaatgaaggcatgctgtcagtggtgaagcctcttgactacgagatttccgccttccataccctcctcataaaagtggagaacgaggaccccttggtgcctgatgtgagttatggtccctccagcacagcaacagtgcatatcaccgttctagacgtcaacgagggccctgtgttctaccctgatcctatgatggttacgcggcaggaagacttgtctgtcggctcagtcctactcactgtgaatgcaacggatcctgattctctgcagcaccagaccatccggtactctgtttacaaagatccagctggatggctgaatatcaatcctatcaacggcacagtggatacaaccgccgtcctggacagagaaagcccttttgtggataacagcgtatacactgccttgtttcttgcgattgatagcggcaatccccctgccacgggaacgggtacgctattgattacattggaagatgtgaacgacaatgcacccttcatatatcccaccgttgcagaagtgtgcgatgacgctaagaatctgagtgtggttatcttaggcgctagcgacaaggatcttcaccccaacacagacccctttaaattcgagatccataagcaggctgtcccagataaggtttggaaaatcagtaaaattaataacacccatgctctcgtcagtctcctccaaaacctgaacaaagcaaactataatcttcctatcatggtgacagactctggtaaaccgcctatgaccaacatcaccgacctgcgtgtgcaggtctgttcttgtagaaatagcaaggtggactgcaatgccgcgggggctttacgcttttctctgccctcagtgcttctgctgtccctgttttctctggcttgcaagtag

SEQ ID NO: 83659 - DNA, 2025 bp, Artificial Sequence
  derived and/or modified sequence
atgcaaccaagaactcccttagtgctgtgcgtgctcttgagccaggtgctgctgctcacgtctgcagaggacctggattgtacacccggatttcagcaaaaagtgtttcacattaaccagcccgctgagttcattgaagaccagtctatcttgaatctgactttcagcgactgcaaggggaacgacaagctccgatacgaggtttcttccccatacttcaaggttaatagcgacggaggcctggtggctctacggaacatcactgcagtaggaaaaactctttttgtgcacgcgaggaccccacatgccgaggatatggctgagttggtgatcgtgggaggtaaggacatacagggtagtctccaggtggtcgattccgaccgacccgagcgatccaaattccgcctgacaggtaagggcgtcgatcaggagcccaaaggtattttcagaatcaatgagaacacaggctccgtttccgtgacacgcacgctggatagggaggtgattgccgtgtatcagttgttcgttgagaccacggacgtgaacggcaagacactggaagggcctgtgccactggaggtgatcgtcatcgatcagaacgataatcggccaattttccgggaggggccatatatagggcatgtgatggagggttcccccaccggtaccacagttatgcggatgacagcattcgacgcggacgaccctgcaacggataacgctctgttgaggtacaacattcgacagcagacgccggacaaacctagcccgaacatgttttacatcgaccctgaaaagggggatattgtgacagtcgtgagtccagctctgctagaccgcgaaacactggagaacccaaagtacgaattgatcatagaggcacaggacatggcaggcttggacgttggtttaacaggaactgccactgcgactatcatgatcgacgataagaatgaccatagccctaagttcaccaagaaggaattccaggctaccgttgaggagggcgcagtgggagtgatagtgaacctcacggtcgaagacaaggatgacccaaccactggagcttggagagctgcctatacaatcatcaacggaaatcctggccagtccttcgagattcacaccaacccccagacaaacgaaggtatgctgtctgtagtgaaaccattggattatgagatctccgctttccacaccctgctgatcaaggtcgagaacgaagaccccctggtgcctgatgtatcttacggaccaagttctaccgcaaccgtccatattacagtcctggacgtcaacgagggccctgtgttttatccagatcctatgatggtgactcgccaagaagacttgagcgtgggcagcgtactgctgacagtcaatgctaccgaccccgactccctgcagcaccagacaattcggtattctgtgtataaggatccagcaggatggctcaatatcaacccgatcaatggcaccgtcgacactacagccgtgctcgacagggaaagccccttcgtggataactccgtgtacactgcgctctttctggcgattgatagtggcaacccaccagcgaccggcaccggcacactgctgatcacgctggaagacgtgaacgacaatgcacctttcatttatcccacagtggctgaggtatgcgatgacgccaaaaacctttcagtcgtgatcctaggggcttcagacaaagacctgcaccccaatacggatccgtttaagtttgagattcataaacaggccgttcctgacaaagtgtggaaaatttccaagatcaacaatactcacgcactggtaagcttgcttcaaaacctgaacaaagctaactacaacctacctataatggtgacagactctggtaagccgcctatgactaacatcactgatctgcgcgtccaggtgtgttcctgtcgcaacagcaaggtcgattgtaacgctgccggtgcactacgcttcagcctcccctctgtcctgctcctgagtctgttctctcttgcctgcaagtag

SEQ ID NO: 83660 - DNA, 2022 bp, Artificial Sequence
  derived and/or modified sequence
atgcagccgagaactccgctcgttctgtgcgttctcctgtcccaggtgctgctgctaacatctgcagaagatttggactgcactcctggatttcagcagaaagtgttccatatcaatcagccagctgaattcattgaggaccagtcaattctaaacttgaccttcagtgactgtaagggaaacgacaagctacgctatgaggtctcgagcccatacttcaaggtgaacagcgatggcggcttagttgctctgagaaacataactgcagtgggcaaaactctgttcgtccatgcacggaccccccatgcggaagatatggcagaactcgtgattgtcggggggaaagacatccagggctccttgcaggtagtcgatagtgacaggccagaaaggtccaagttccggctcactggaaagggagtggatcaagagcctaaaggaattttcagaatcaatgagaacacagggagcgtctccgtgacacggaccttggacagagaagtaatcgctgtttatcaactatttgtggagaccactgatgtcaatggcaaaactctcgaggggccggtgcctctggaagtcattgtgattgatcagaatgacaaccgaccgatctttcgggaaggcccctacatcggccacgtcatggaagggtcacccacaggcaccacagtgatgcggatgacagcctttgatgcagatgacccagccaccgataatgccctcctgcggtataatatccgtcagcagacgcctgacaagccatctcccaacatgttctacatcgatcctgagaaaggagacattgtcactgttgtgtcacctgcgctgctggaccgagagactctggaaaatcccaagtatgaactgatcatcgaggctcaagatatggctggactggatgttggattaacaggcacggccacagccacgatcatgatcgatgacaaaaatgatcactcaccaaaattcaccaagaaagagtttcaagccacagtcgaggaaggagctgtgggagttattgtcaatttgacagttgaagataaggatgaccccaccacaggtgcatggagggctgcctacaccatcatcaacggaaaccccgggcagagctttgaaatccacaccaaccctcaaaccaacgaagggatgctttctgttgtcaaaccattggactatgaaatttctgccttccacaccctgctgatcaaagtggaaaatgaagacccactcgtacccgacgtctcctacggccccagctccacagccaccgtccacatcactgtcctggatgtcaacgagggcccagtcttctacccagaccccatgatggtgaccaggcaggaggacctctctgtgggcagcgtgctgctgacagtgaatgccacggaccccgactccctgcagcatcaaaccatcaggtattctgtttacaaggacccagcaggttggctgaatattaaccccatcaatgggactgttgacaccacagctgtgctggaccgtgagtccccatttgtcgacaacagcgtgtacactgctctcttcctggcaattgacagtggcaaccctcccgctacgggcactgggactttgctgataaccctggaggacgtgaatgacaatgccccgttcatttaccccacagtagctgaagtctgtgatgatgccaaaaacctcagtgtagtcattttgggagcatcagataaggatcttcacccgaatacagatcctttcaaatttgaaatccacaaacaagctgttcctgataaagtctggaagatctccaagatcaacaatacacacgccctggtaagccttcttcaaaatctgaacaaagcaaactacaacctgcccatcatggtgacagattcagggaaaccacccatgacgaatatcacagatctcagggtacaagtgtgctcctgcaggaattccaaagtggactgcaacgcggcaggggccctgcgcttcagcctgccctcagtcctgctcctcagcctcttcagcttagcttgtaag

SEQ ID NO: 83661 - DNA, 2025 bp, Artificial Sequence
  derived and/or modified sequence
atgcagcccagaacccccctggtgctgtgcgtgctgctgagccaggtgctgctgctgaccagcgccgaggacctggactgcacccccggcttccagcagaaggtgttccacatcaaccagcccgccgagttcatcgaggaccagagcatcctgaacctgaccttcagcgactgcaagggcaacgacaagctgagatacgaggtgagcagcccctacttcaaggtgaacagcgacggcggcctggtggccctgagaaacatcaccgccgtgggcaagaccctgttcgtgcacgccagaaccccccacgccgaggacatggccgagctggtgatcgtgggcggcaaggacatccagggcagcctgcaggtggtggacagcgacagacccgagagaagcaagttcagactgaccggcaagggcgtggaccaggagcccaagggcatcttcagaatcaacgagaacaccggcagcgtgagcgtgaccagaaccctggacagagaggtgatcgccgtgtaccagctgttcgtggagaccaccgacgtgaacggcaagaccctggagggccccgtgcccctggaggtgatcgtgatcgaccagaacgacaacagacccatcttcagagagggcccctacatcggccacgtgatggagggcagccccaccggcaccaccgtgatgagaatgaccgccttcgacgccgacgaccccgccaccgacaacgccctgctgagatacaacatcagacagcagacccccgacaagcccagccccaacatgttctacatcgaccccgagaagggcgacatcgtgaccgtggtgagccccgccctgctggacagagagaccctggagaaccccaagtacgagctgatcatcgaggcccaggacatggccggcctggacgtgggcctgaccggcaccgccaccgccaccatcatgatcgacgacaagaacgaccacagccccaagttcaccaagaaggagttccaggccaccgtggaggagggcgccgtgggcgtgatcgtgaacctgaccgtggaggacaaggacgaccccaccaccggcgcctggagagccgcctacaccatcatcaacggcaaccccggccagagcttcgagatccacaccaacccccagaccaacgagggcatgctgagcgtggtgaagcccctggactacgagatcagcgccttccacaccctgctgatcaaggtggagaacgaggaccccctggtgcccgacgtgagctacggccccagcagcaccgccaccgtgcacatcaccgtgctggacgtgaacgagggccccgtgttctaccccgaccccatgatggtgaccagacaggaggacctgagcgtgggcagcgtgctgctgaccgtgaacgccaccgaccccgacagcctgcagcaccagaccatcagatacagcgtgtacaaggaccccgccggctggctgaacatcaaccccatcaacggcaccgtggacaccaccgccgtgctggacagagagagccccttcgtggacaacagcgtgtacaccgccctgttcctggccatcgacagcggcaacccccccgccaccggcaccggcaccctgctgatcaccctggaggacgtgaacgacaacgcccccttcatctaccccaccgtggccgaggtgtgcgacgacgccaagaacctgagcgtggtgatcctgggcgccagcgacaaggacctgcaccccaacaccgaccccttcaagttcgagatccacaagcaggccgtgcccgacaaggtgtggaagatcagcaagatcaacaacacccacgccctggtgagcctgctgcagaacctgaacaaggccaactacaacctgcccatcatggtgaccgacagcggcaagccccccatgaccaacatcaccgacctgagagtgcaggtgtgcagctgcagaaacagcaaggtggactgcaacgccgccggcgccctgagattcagcctgcccagcgtgctgctgctgagcctgttcagcctggcctgcaagtag

SEQ ID NO: 83662 - protein, 415 aa, Artificial Sequence
  derived and/or modified sequence
MQPRTPLVLCVLLSQVALLDRETLENPKYELIIEAQDMAGLDVGLTGTATATIMIDDKNDHSPKFTKKEFQATVEEGAVGVIVNLTVEDKDDPTTGAWRAAYTIINGNPGQSFEIHTNPQTNEGMLSVVKPLDYEISAFHTLLIKVENEDPLVPDVSYGPSSTATVHITVLDVNEGPVFYPDPMMVTRQEDLSVGSVLLTVNATDPDSLQHQTIRYSVYKDPAGWLNINPINGTVDTTAVLDRESPFVDNSVYTALFLAIDSGNPPATGTGTLLITLEDVNDNAPFIYPTVAEVCDDAKNLSVVILGASDKDLHPNTDPFKFEIHKQAVPDKVWKISKINNTHALVSLLQNLNKANYNLPIMVTDSGKPPMTNITDLRVQVCSCRNSKVDCNAAGALRFSLPSVLLLSLFSLACK

SEQ ID NO: 83663 - protein, 403 aa, Artificial Sequence
  derived and/or modified sequence
VVSPALLDRETLENPKYELIIEAQDMAGLDVGLTGTATATIMIDDKNDHSPKFTKKEFQATVEEGAVGVIVNLTVEDKDDPTTGAWRAAYTIINGNPGQSFEIHTNPQTNEGMLSVVKPLDYEISAFHTLLIKVENEDPLVPDVSYGPSSTATVHITVLDVNEGPVFYPDPMMVTRQEDLSVGSVLLTVNATDPDSLQHQTIRYSVYKDPAGWLNINPINGTVDTTAVLDRESPFVDNSVYTALFLAIDSGNPPATGTGTLLITLEDVNDNAPFIYPTVAEVCDDAKNLSVVILGASDKDLHPNTDPFKFEIHKQAVPDKVWKISKINNTHALVSLLQNLNKANYNLPIMVTDSGKPPMTNITDLRVQVCSCRNSKVDCNAAGALRFSLPSVLLLSLFSLACL

SEQ ID NO: 83664 - DNA, 1248 bp, Artificial Sequence
  derived and/or modified sequence
atgcagcctcgaactccattggtgctttgcgtgctcctctctcaggtcgccctgcttgatcgggaaactctggaaaatcctaagtatgagctgatcatcgaagctcaggacatggctgggctggatgtgggactcactggcactgcaactgccacgatcatgatcgacgataagaatgaccatagccctaaatttacaaaaaaggaattccaagcgacagttgaggaaggtgccgtgggtgtgattgtgaatttgacagttgaagataaggatgaccctaccactggagcctggcgagcagcgtatacaattatcaacggaaatcccgggcagtcattcgaaattcacaccaaccctcaaacaaacgagggcatgttatccgtggttaagcccctggactatgagatctctgcctttcacacactattgattaaagtggagaatgaagatccattagtccctgacgttagctatggtccttcatccactgccactgtccacatcacagtgcttgacgtaaatgaggggcccgttttctaccctgacccgatgatggtcactcgccaggaagacctgagcgtgggctccgtgctgctgacagtaaacgcgactgatccggacagtctgcagcaccaaacaattcgatattccgtgtacaaagatcctgcagggtggttgaacattaacccaattaacggaaccgtggatacgacagccgtcctggatagggagtccccttttgtcgataactccgtgtataccgcccttttcttggccatcgactccggcaatcccccggccactggtactggcaccctgctcattactctggaggacgtaaatgacaacgcgcccttcatctaccctacggtcgccgaagtgtgcgatgacgccaagaatctctcagtagttatcctcggggcaagtgataaggatcttcatcctaacacagacccctttaaatttgaaatccacaagcaggccgttcctgacaaggtctggaagattagtaagatcaataatacacacgccctggtgtcgctgctccagaatctgaacaaagcaaactacaacctaccaatcatggtgactgattcagggaaaccacccatgaccaacatcacggacctccgggtccaggtttgttcctgcaggaacagtaaagtagattgtaatgctgctggagctctcagattctctctgccgtctgtgctgttgttgtccttgttttccttagcgtgcaaatag

SEQ ID NO: 83665 - DNA, 819 bp, Artificial Sequence
  derived and/or modified sequence
atgcaaccccgtacacccctagtgctgtgcgtcttgctatcccaggtactcctcctcacatctgctgaggacctagactgtactcccggttttcagcaaaaagtgtttcacattaaccaaccagccgagttcatcgaagaggatctgtcagtagggtccgtcttgctgaccgtgaatgccaccgatccggatagcctgcagcaccagaccatacgatattccgtttacaaggaccccgccggctggttgaatatcaaccctatcaatggtacggttgacactacagctgtgctggatagggagagcccctttgtggataacagtgtttatactgccctctttctggccattgatagtgggaacccacctgccacaggaacaggcacccttctaattacattagaggatgtaaatgataacgccccctttatctatcctacggtggccgaggtgtgcgacgacgcaaaaaatttgtcagttgtgattttgggtgcgtctgataaagacctccatcccaatacagatccattcaagttcgagattcataaacaggccgtgccggataaggtttggaaaatctctaaaatcaacaacacccacgcgctggtgagtctgctgcaaaatctgaacaaggctaattacaatcttccgatcatggttactgactccggtaagccacccatgaccaacattaccgaccttagagttcaggtatgcagttgccggaactctaaagtcgattgtaacgcggctggggcactgagattctcactgcccagtgtgttactgctgagcttgttcagcttggcttgcaagtag

SEQ ID NO: 83666 - DNA, 1212 bp, Artificial Sequence
  derived and/or modified sequence
gtagtgagtcctgctttgttggatcgggagacactcgagaatcccaagtatgaactgattatagaagcacaagacatggccgggctggacgtgggtctgacaggcacggccacagccaccattatgatcgatgataagaacgaccacagccctaagtttacaaagaaggagtttcaagcaactgtggaggagggggccgtaggcgtgatagtcaacctgacagtcgaagacaaagatgaccccactaccggggcctggagagccgcctacacaatcattaacggcaaccccggccagtcgtttgagattcatacgaatcctcagacgaacgaaggtatgctctctgtagttaagcccttagattacgaaatcagcgcgttccacacattgctgataaaggtcgaaaatgaggaccctttggtgccggatgtttcgtatggccctagcagtaccgccaccgtgcatatcaccgttcttgacgttaacgagggtcccgtattttatcccgaccctatgatggtgacaaggcaggaggatctgtctgtgggctccgtgctccttactgtcaatgccaccgatcctgactccttacaacaccaaacaattcgctattccgtgtacaaggacccggccggatggctcaatataaacccaatcaatgggacagttgatacaactgccgtgctcgatagggagagcccttttgtggataactccgtgtataccgcgcttttcctggccatcgactctggaaacccacccgccactggaaccggaactctcctcatcaccctggaagacgtaaatgataatgcacccttcatctaccccactgtcgcagaggtttgcgacgatgccaaaaacctgagcgtagtcattttgggggctagtgacaaggacctacaccctaatacagaccctttcaagttcgagatacataagcaggcagttccagacaaggtctggaaaataagtaaaatcaacaacactcacgccctggtttccctgcttcagaacctcaataaagcgaactataatcttcctattatggtgacagatagcggtaaacctcccatgacgaatatcactgacctccgcgtccaggtgtgttcatgccggaattctaaggtggactgtaacgccgccggagcgctcagattctcgctgcccagcgtgctgttactatccctgtttagcttagcatgtctgtag

SEQ ID NO: 83667 - DNA, 1248 bp, Artificial Sequence
  derived and/or modified sequence
atgcagcccaggacccccctggtgctgtgtgtgctgctgagccaggtggccctgctggaccgggagaccctggagaaccccaagtatgagctgatcatcgaggcccaggacatggccggcctggatgtgggcctgaccggcacagccacagccaccatcatgattgatgacaagaatgaccacagccccaagttcaccaagaaggagttccaggccaccgtggaggagggcgctgtgggcgtcatcgtgaacctgactgtggaggacaaggatgaccccaccactggagcctggagggctgcctacaccatcatcaatggaaatcctggccagagctttgagatccacaccaacccccagaccaatgaaggcatgctgtctgtggtgaagcccctggactatgagatcagcgccttccacaccctgctgatcaaggtggagaatgaagaccccctggtgcctgatgtgtcctatggccccagcagcacagccaccgtgcacatcaccgtgctggatgtgaatgaaggacctgtgttctacccagaccccatgatggtgacccggcaggaggacctgtctgtgggctctgtgctgctgactgtgaatgccacagatcctgacagcctgcagcaccagaccatccgctacagcgtgtacaaggaccctgctggctggctgaacatcaaccccatcaatggcaccgtggacaccacagctgtgctggaccgggagagcccctttgtggacaacagcgtgtacacagccctcttcctggccatcgacagcggcaaccccccagccaccggcaccggcaccctgctgatcaccctggaggatgtgaatgacaatgcccccttcatctaccccaccgtggccgaggtgtgtgatgatgccaagaacctgtctgtggtgatcctgggcgccagtgacaaggacctgcaccccaacacagaccccttcaagtttgagatccacaagcaggccgtgcctgacaaggtgtggaagatcagcaagatcaacaacacccacgccctggtgtccctgctgcagaacctgaacaaggccaactacaacctgcccatcatggtgacagacagcggcaagccacccatgaccaacatcacagacctgcgggtgcaggtgtgcagctgcaggaacagcaaggtggactgcaatgctgctggggccctgcgcttcagcctgcccagcgtgctgctgctgagcctcttcagcctggcctgcaagtag

SEQ ID NO: 83668 - DNA, 819 bp, Artificial Sequence
  derived and/or modified sequence
atgcagcccaggacccccctggtgctgtgtgtgctgctgagccaggtgctgctgctgaccagcgctgaggacctggactgcaccccaggcttccagcagaaggtgttccacatcaaccagcctgctgagttcatcgaggaggacctgtctgtgggctctgtgctgctgactgtgaatgccacagatcctgacagcctgcagcaccagaccatccgctacagcgtgtacaaggaccctgctggctggctgaacatcaaccccatcaatggaacagtggacaccacagctgtgctggaccgggagagcccctttgtggacaacagcgtgtacacagccctcttcctggccattgattctggcaaccccccagccactggaacaggcaccctgctgatcaccctggaggatgtgaatgacaatgcccccttcatctaccccaccgtggccgaggtgtgtgatgatgccaagaacctgtctgtggtgatcctgggcgccagtgacaaggacctgcaccccaacacagaccccttcaagtttgagatccacaagcaggccgtgcctgacaaggtgtggaagatcagcaagatcaacaacacccacgccctggtgtccctgctgcagaacctgaacaaggccaactacaacctgcccatcatggtgacagattctgggaagccacccatgaccaacatcacagacctgcgggtgcaggtgtgcagctgcaggaacagcaaggtggactgcaatgctgctggggccctgcgcttcagcctgcccagcgtgctgctgctgagcctcttcagcctggcctgcaagtag

SEQ ID NO: 83669 - DNA, 1212 bp, Artificial Sequence
  derived and/or modified sequence
gtggtgtccccagccctgctggaccgggagaccctggagaaccccaagtatgagctgatcatcgaggcccaggacatggccggcctggatgtgggcctgaccggcacagccacagccaccatcatgattgatgacaagaatgaccacagccccaagttcaccaagaaggagttccaggccaccgtggaggagggcgctgtgggcgtcatcgtgaacctgactgtggaggacaaggatgaccccaccactggagcctggagggctgcctacaccatcatcaatggaaatcctggccagagctttgagatccacaccaacccccagaccaatgaaggcatgctgtctgtggtgaagcccctggactatgagatcagcgccttccacaccctgctgatcaaggtggagaatgaagaccccctggtgcctgatgtgtcctatggccccagcagcacagccaccgtgcacatcaccgtgctggatgtgaatgaaggacctgtgttctacccagaccccatgatggtgacccggcaggaggacctgtctgtgggctctgtgctgctgactgtgaatgccacagatcctgacagcctgcagcaccagaccatccgctacagcgtgtacaaggaccctgctggctggctgaacatcaaccccatcaatggcaccgtggacaccacagctgtgctggaccgggagagcccctttgtggacaacagcgtgtacacagccctcttcctggccatcgacagcggcaaccccccagccaccggcaccggcaccctgctgatcaccctggaggatgtgaatgacaatgcccccttcatctaccccaccgtggccgaggtgtgtgatgatgccaagaacctgtctgtggtgatcctgggcgccagtgacaaggacctgcaccccaacacagaccccttcaagtttgagatccacaagcaggccgtgcctgacaaggtgtggaagatcagcaagatcaacaacacccacgccctggtgtccctgctgcagaacctgaacaaggccaactacaacctgcccatcatggtgacagacagcggcaagccacccatgaccaacatcacagacctgcgggtgcaggtgtgcagctgcaggaacagcaaggtggactgcaatgctgctggggccctgcgcttcagcctgcccagcgtgctgctgctgagcctcttcagcctggcctgcctgtag

SEQ ID NO: 83670 - DNA, 1248 bp, Artificial Sequence
  derived and/or modified sequence
atgcagccccggacccccctggtgctgtgcgtgctgctgagccaggtcgctctcctggatcgcgagacgctcgaaaaccctaaatatgagctaattatcgaggcacaggacatggctggccttgatgttggtctaacaggaactgccactgctactatcatgattgacgacaagaatgatcatagtccaaaatttaccaagaaagagtttcaagccacagttgaggagggggcagttggtgttatcgtcaatttaactgtggaagacaaggatgatccaaccaccggtgcatggagagccgcatacacgatcataaatggtaaccctgggcagtcgtttgaaatccataccaatccccagaccaatgagggaatgttgtccgtcgtgaagcctctggactacgaaatttccgcattccacaccctcttgataaaagttgagaacgaggaccctcttgttcccgacgtgtcctatggcccctcatctactgccactgtgcacatcacagtgctcgatgttaacgaggggccggtattttacccagatcccatgatggtgacacgtcaggaggacttgtctgtagggagtgtgctgctcaccgtaaacgcgacagaccccgactcgctgcagcaccaaacgatacgctactcagtctacaaagaccctgcaggctggctgaacatcaatcctatcaacgggaccgttgacactacagcggtgctcgatcgggagagcccgttcgtggataactcagtatatacagcactctttttggccatagatagcgggaatcctcctgccaccggcacaggaaccctgctgataaccctggaagatgtgaatgacaacgcccccttcatctacccaactgtcgccgaagtttgcgacgatgctaaaaatctctcagtagttatcctcggggcctctgacaaagatctgcatcccaatacggatcccttcaagttcgagatccataagcaggctgttccagataaggtgtggaaaatttccaaaattaataatacccacgccctagtgtcccttctccaaaatctcaataaggcaaactacaacctaccaattatggtgactgacagcggcaaacctcctatgactaacatcactgacctccgggtgcaggtctgctcttgccgaaattcaaaagtggactgtaatgcagccggagcgctgcggtttagcctgcccagtgtcctgctgctgtccctgtttagcctggcttgcaaatag

SEQ ID NO: 83671 - DNA, 819 bp, Artificial Sequence
  derived and/or modified sequence
atgcagccccggacccccctggtgctgtgcgtgctgctgagccaggttcttctcctcacatccgccgaggaccttgattgcacacctggctttcagcagaaggttttccacattaatcagccagccgagttcatagaagaggatttgtcggtaggtagcgtgctgctgactgtcaacgctacagaccccgactccctgcagcaccagacaatacgctacagtgtttacaaggatcccgccgggtggttaaatatcaacccgataaacggcaccgtggatactactgcagtgctcgacagagaaagcccgtttgttgataactccgtgtatactgctctcttcctagccattgacagcggaaaccccccggcaacaggtaccggtactctcctcatcactttggaagatgtcaatgacaacgccccgttcatttacccgacagtggccgaggtttgtgacgacgccaagaacctttctgttgtgattctcggggcaagcgacaaggacctgcaccccaatactgaccccttcaaattcgaaatacacaaacaggcagtaccagacaaggtgtggaaaatttctaaaatcaataatactcacgctctggtgtcgctccttcagaacttgaacaaagcgaactataacttgcccattatggtaacagactcgggcaaaccccccatgacaaatattaccgacttgcgcgttcaggtctgtagctgccgcaactcgaaggtggattgcaatgctgctggggctctcaggttttccctcccctctgtcctgttgctcagcctcttttccctggcctgtaagtag

SEQ ID NO: 83672 - DNA, 1212 bp, Artificial Sequence
  derived and/or modified sequence
gtggtgagccccgccctgctggaccgggagaccctggagaaccccaaatatgagctgattatcgaagcacaggatatggctggcctagatgtcgggctcacgggcaccgcaacagccactatcatgatcgacgataaaaatgatcactctcccaaattcactaagaaagagtttcaggccaccgtagaagagggtgccgtcggtgtgattgtgaatctgaccgtggaggataaggacgaccccaccactggagcctggcgtgcggcctacacaatcataaacggaaacccggggcagtcgtttgaaattcatacaaacccccagaccaatgaaggaatgctgtctgtcgtgaaaccactcgattatgaaatatccgccttccatacgctactgatcaaggtcgagaatgaagatcccctggtgcctgatgtctcctacggcccttccagtaccgctactgtgcatattactgtccttgatgttaatgagggccctgtattctacccggaccccatgatggtcacccggcaggaagatctctctgttggcagcgtgctcctgacagtgaacgctacggatcccgatagcctgcagcatcaaaccatccgctattccgtctataaggaccctgccgggtggctgaacattaacccaatcaacggcaccgttgatactacagctgtgcttgacagggagtcaccctttgttgataacagcgtttacactgcgctattcctggctattgacagtgggaacccgcccgccacggggactggaacgctgctcatcactttagaagatgtgaacgataacgcgcctttcatctatcccacagtggccgaggtctgcgacgatgcaaagaacctgagcgtggtgatcctgggagccagcgacaaagaccttcaccccaacaccgatccttttaagttcgaaattcacaagcaggcagtccctgataaggtctggaagatttcaaaaattaacaatacgcacgctttggtgagcttgcttcaaaatttgaataaagccaactacaatctgcccattatggttaccgactcaggcaaaccacctatgactaatatcaccgacctgcgtgtccaggtgtgttcatgtagaaattctaaagtcgattgtaatgccgcaggagccctccgattttcactcccatcagttcttcttctgtcactgttttccctagcatgcctgtag

SEQ ID NO: 83673 - DNA, 1248 bp, Artificial Sequence
  derived and/or modified sequence
atgcagcctcgcacgcccctagtcctgtgtgtgctcctttcccaagtggccttactcgatcgagaaacactcgaaaatcccaagtatgaactcataatcgaagcccaggacatggcgggtttggacgtgggattgacaggaaccgcaacagcaacaatcatgattgacgacaaaaatgatcactcacccaaattcacaaagaaggagttccaggctaccgtggaggaaggggctgtcggtgtgatagttaacctgacagtggaagacaaagatgatcccacaaccggggcatggcgggcagcatacaccattattaacgggaatccgggacagtccttcgagatccacacaaacccacaaactaacgaagggatgcttagcgtggttaaacccctggactacgaaatatctgctttccatacattgttgatcaaagtcgaaaatgaggatccgctcgtgccggatgtgtcgtacgggccaagcagtactgcaacagtgcacatcaccgtcctggacgttaacgagggccctgtgttttacccagaccctatgatggtgactagacaggaggacctgagtgtgggctccgtactcctcactgtgaacgccaccgatccagactctctgcagcaccagactataaggtattcggtgtataaggacccagctgggtggttaaacattaaccccataaatggaaccgtggatacaaccgccgtgctggatcgcgaaagcccattcgttgacaacagtgtctataccgcattatttctggctatagatagtggaaaccccccagcaactggtacagggactttactgatcacactggaagacgtgaatgataacgcccctttcatttaccctacggtggccgaggtctgcgatgacgccaaaaacctctccgtggtgattctgggagccagcgacaaggacttacaccccaacactgatcctttcaaatttgaaattcataaacaggccgtccctgataaagtctggaagatcagcaagataaacaacacacatgctctggtgagcctgctgcagaatctgaacaaggccaattacaacctccctatcatggtgacagactctggaaaacctcctatgaccaacattaccgacctcagggttcaggtatgcagttgcaggaattcgaaggttgactgcaacgccgctggggcattgcggttttccctcccatctgtgctgctactttctctttttagcctggcctgtaaatag

SEQ ID NO: 83674 - DNA, 819 bp, Artificial Sequence
  derived and/or modified sequence
atgcagcccagaacaccgctcgtcctgtgtgtccttctctcccaggtactgctgctgaccagtgccgaggatcttgactgtacacccggttttcaacaaaaagtgttccatataaatcaaccggctgagttcatcgaggaagacttatccgtcgggtccgtcctgctaaccgtaaacgccacagatccagacagtctccaacatcagaccattcgctattctgtctacaaggacccagctgggtggctgaatatcaacccaataaacgggacagtggacacaactgcagttctggaccgagagtctccattcgtggacaattctgtttacactgcactgttcctcgctatagactccgggaacccccctgccacagggaccggaacactcctgatcaccctggaggatgtgaatgataatgccccatttatctacccgacagtagccgaggtatgtgatgacgctaagaatttgtccgtggttatcctgggggcatctgataaggatctccatccgaacacagaccccttcaaatttgagatccacaagcaggccgttcccgacaaggtgtggaagataagcaagataaacaatacccatgcccttgttagcctcttgcagaatctcaacaaggcgaactacaacctaccgataatggtgacggacagcggtaagccacctatgaccaatatcaccgatctgagggtgcaagtttgtagttgccgcaattccaaagtggactgcaacgccgctggtgctcttcgcttcagcctcccctcagttctcctcctctcccttttttcactagcttgcaaatag

SEQ ID NO: 83675 - DNA, 1212 bp, Artificial Sequence
  derived and/or modified sequence
gtggtgtctccagctctgctcgatcgggaaaccctggaaaatccaaaatatgaattaattatcgaagcccaggatatggcgggattagacgtcggattgaccggaacagctaccgcgacaatcatgatcgacgacaaaaacgatcactcccccaaatttacaaagaaggaatttcaagctaccgtggaggaaggggcagtgggggtcatcgtaaatctgacagtggaggacaaggacgatcctaccaccggtgcttggcgggcagcctacacaataattaacggcaacccaggccagagtttcgaaatccacaccaatccccagactaacgagggcatgctgtccgtggtgaagccattggactatgagatttccgcttttcacactctgttgattaaagtggagaacgaggacccactagtgcccgatgtttcttatggtccctcttccacagcaacagtgcacatcaccgtactggacgtgaatgaagggccagtcttttaccccgatccgatgatggtgaccaggcaggaagacttgagcgtgggaagcgtgcttctgactgtcaatgctacagatccggattcactacaacatcaaacaatccggtactcagtgtacaaagacccagccggatggctgaatatcaaccctatcaatggcacagtggataccacagcagtgctggatagagagtccccatttgtggataattccgtgtacaccgcgctttttctggcaatcgactcaggcaaccccccagcaactggcaccgggacattgctcatcaccctcgaggatgtcaacgacaacgcaccatttatttatccaacagtggctgaagtgtgtgacgatgccaaaaacttatcagttgtgattctgggcgcatcagacaaagatctccatcccaacacagaccctttcaaattcgagatccataagcaggcagtgcctgacaaagtgtggaaaataagcaaaataaataatactcatgctttggtcagcctactccagaacctgaacaaggctaattataacctgccaataatggtcacagacagtggaaaacccccaatgacaaatattactgacctaagggtgcaggtgtgttcttgccggaacagcaaagtggactgtaatgcagccggagctctgaggtttagtttgccttcggtccttttgctgtctctcttcagcctcgcctgtctttag

SEQ ID NO: 83676 - DNA, 1245 bp, Artificial Sequence
  derived and/or modified sequence
atgcagccgagaactccgctcgttctgtgcgttctcctgtcccaggtagcgctgctggaccgagagactctggaaaatcccaagtatgaactgatcatcgaggctcaagatatggctggactggatgttggattaacaggcacggccacagccacgatcatgatcgatgacaaaaatgatcactcaccaaaattcaccaagaaagagtttcaagccacagtcgaggaaggagctgtgggagttattgtcaatttgacagttgaagataaggatgaccccaccacaggtgcatggagggctgcctacaccatcatcaacggaaaccccgggcagagctttgaaatccacaccaaccctcaaaccaacgaagggatgctttctgttgtcaaaccattggactatgaaatttctgccttccacaccctgctgatcaaagtggaaaatgaagacccactcgtacccgacgtctcctacggccccagctccacagccaccgtccacatcactgtcctggatgtcaacgagggcccagtcttctacccagaccccatgatggtgaccaggcaggaggacctctctgtgggcagcgtgctgctgacagtgaatgccacggaccccgactccctgcagcatcaaaccatcaggtattctgtttacaaggacccagcaggttggctgaatattaaccccatcaatgggactgttgacaccacagctgtgctggaccgtgagtccccatttgtcgacaacagcgtgtacactgctctcttcctggcaattgacagtggcaaccctcccgctacgggcactgggactttgctgataaccctggaggacgtgaatgacaatgccccgttcatttaccccacagtagctgaagtctgtgatgatgccaaaaacctcagtgtagtcattttgggagcatcagataaggatcttcacccgaatacagatcctttcaaatttgaaatccacaaacaagctgttcctgataaagtctggaagatctccaagatcaacaatacacacgccctggtaagccttcttcaaaatctgaacaaagcaaactacaacctgcccatcatggtgacagattcagggaaaccacccatgacgaatatcacagatctcagggtacaagtgtgctcctgcaggaattccaaagtggactgcaacgcggcaggggccctgcgcttcagcctgccctcagtcctgctcctcagcctcttcagcttagcttgtaag

SEQ ID NO: 83677 - DNA, 816 bp, Artificial Sequence
  derived and/or modified sequence
atgcagccgagaactccgctcgttctgtgcgttctcctgtcccaggtgctgctgctaacatctgcagaagatttggactgcactcctggatttcagcagaaagtgttccatatcaatcagccagctgaattcattgaggaggacctctctgtgggcagcgtgctgctgacagtgaatgccacggaccccgactccctgcagcatcaaaccatcaggtattctgtttacaaggacccagcaggttggctgaatattaaccccatcaatgggactgttgacaccacagctgtgctggaccgtgagtccccatttgtcgacaacagcgtgtacactgctctcttcctggcaattgacagtggcaaccctcccgctacgggcactgggactttgctgataaccctggaggacgtgaatgacaatgccccgttcatttaccccacagtagctgaagtctgtgatgatgccaaaaacctcagtgtagtcattttgggagcatcagataaggatcttcacccgaatacagatcctttcaaatttgaaatccacaaacaagctgttcctgataaagtctggaagatctccaagatcaacaatacacacgccctggtaagccttcttcaaaatctgaacaaagcaaactacaacctgcccatcatggtgacagattcagggaaaccacccatgacgaatatcacagatctcagggtacaagtgtgctcctgcaggaattccaaagtggactgcaacgcggcaggggccctgcgcttcagcctgccctcagtcctgctcctcagcctcttcagcttagcttgtaag

SEQ ID NO: 83678 - DNA, 1751 bp, Artificial Sequence
  derived and/or modified sequence
gttgtgtcacctgcgctgctggaccgagagactctggaaaatcccaagtatgaactgatcatcgaggctcaagatatggctggactggatgttggattaacaggcacggccacagccacgatcatgatcgatgacaaaaatgatcactcaccaaaattcaccaagaaagagtttcaagccacagtcgaggaaggagctgtgggagttattgtcaatttgacagttgaagataaggatgaccccaccacaggtgcatggagggctgcctacaccatcatcaacggaaaccccgggcagagctttgaaatccacaccaaccctcaaaccaacgaagggatgctttctgttgtcaaaccattggactatgaaatttctgccttccacaccctgctgatcaaagtggaaaatgaagacccactcgtacccgacgtctcctacggccccagctccacagccaccgtccacatcactgtcctggatgtcaacgagggcccagtcttctacccagaccccatgatggtgaccaggcaggaggacctctctgtgggcagcgtgctgctgacagtgaatgccacggaccccgactccctgcagcatcaaaccatcaggtattctgtttacaaggacccagcaggttggctgaatattaaccccatcaatgggactgttgacaccacagctgtgctggaccgtgagtccccatttgtcgacaacagcgtgtacactgctctcttcctggcaattgacagtggcaaccctcccgctacgggcactgggactttgctgataaccctggaggacgtgaatgacaatgccccgttcatttaccccacagtagctgaagtctgtgatgatgccaaaaacctcagtgtagtcattttgggagcatcagataaggatcttcacccgaatacagatcctttcaaatttgaaatccacaaacaagctgttcctgataaagtctggaagatctccaagatcaacaatacacacgccctggtaagccttcttcaaaatctgaacaaagcaaactacaacctgcccatcatggtgacagattcagggaaaccacccatgacgaatatcacagatctcagggtacaagtgtgctcctgcaggaattccaaagtggactgcaacgcggcaggggccctgcgcttcagcctgccctcagtcctgctcctcagcctcttcagcttagcttgtctgtgagaactcctgacgtctgaagcttgactcccaagtttccatagcaacaggaaaaaaaaaaatctatccaaatctgaagattgcggtttacagctatcgaacttcacaactaggcctcaattgttccggttttttattttctttacaatttcacttagtctgtacttcatcattttgacagcatcttcctccctcctttaattaatggaatcttctgaattttccctgaatgtttaaagatcatgacatatgacttgatcttctgggagcaggaacaatgactactttttctggtgtgttaacatgtcgctagccagtgctccaggcacccagctttgtctgtgggttagtattggtgtatgtatgagtatctgtatgtatatatacacggtatttatagagagagactatcctggagaagcctcgttttgatgccattcttccttgcaaggttaagcaaggtgggtggaaactaagacacctgaaccctccagggcctcccgcatcaaggtcagcatgaggacagaccacagagctgtcac

SEQ ID NO: 83679 - DNA, 1248 bp, Artificial Sequence
  derived and/or modified sequence
atgcagcccagaacccccctggtgctgtgcgtgctgctgagccaggtggccctgctggacagagagaccctggagaaccccaagtacgagctgatcatcgaggcccaggacatggccggcctggacgtgggcctgaccggcaccgccaccgccaccatcatgatcgacgacaagaacgaccacagccccaagttcaccaagaaggagttccaggccaccgtggaggagggcgccgtgggcgtgatcgtgaacctgaccgtggaggacaaggacgaccccaccaccggcgcctggagagccgcctacaccatcatcaacggcaaccccggccagagcttcgagatccacaccaacccccagaccaacgagggcatgctgagcgtggtgaagcccctggactacgagatcagcgccttccacaccctgctgatcaaggtggagaacgaggaccccctggtgcccgacgtgagctacggccccagcagcaccgccaccgtgcacatcaccgtgctggacgtgaacgagggccccgtgttctaccccgaccccatgatggtgaccagacaggaggacctgagcgtgggcagcgtgctgctgaccgtgaacgccaccgaccccgacagcctgcagcaccagaccatcagatacagcgtgtacaaggaccccgccggctggctgaacatcaaccccatcaacggcaccgtggacaccaccgccgtgctggacagagagagccccttcgtggacaacagcgtgtacaccgccctgttcctggccatcgacagcggcaacccccccgccaccggcaccggcaccctgctgatcaccctggaggacgtgaacgacaacgcccccttcatctaccccaccgtggccgaggtgtgcgacgacgccaagaacctgagcgtggtgatcctgggcgccagcgacaaggacctgcaccccaacaccgaccccttcaagttcgagatccacaagcaggccgtgcccgacaaggtgtggaagatcagcaagatcaacaacacccacgccctggtgagcctgctgcagaacctgaacaaggccaactacaacctgcccatcatggtgaccgacagcggcaagccccccatgaccaacatcaccgacctgagagtgcaggtgtgcagctgcagaaacagcaaggtggactgcaacgccgccggcgccctgagattcagcctgcccagcgtgctgctgctgagcctgttcagcctggcctgcaagtag

SEQ ID NO: 83680 - DNA, 819 bp, Artificial Sequence
  derived and/or modified sequence
atgcagcccagaacccccctggtgctgtgcgtgctgctgagccaggtgctgctgctgaccagcgccgaggacctggactgcacccccggcttccagcagaaggtgttccacatcaaccagcccgccgagttcatcgaggaggacctgagcgtgggcagcgtgctgctgaccgtgaacgccaccgaccccgacagcctgcagcaccagaccatcagatacagcgtgtacaaggaccccgccggctggctgaacatcaaccccatcaacggcaccgtggacaccaccgccgtgctggacagagagagccccttcgtggacaacagcgtgtacaccgccctgttcctggccatcgacagcggcaacccccccgccaccggcaccggcaccctgctgatcaccctggaggacgtgaacgacaacgcccccttcatctaccccaccgtggccgaggtgtgcgacgacgccaagaacctgagcgtggtgatcctgggcgccagcgacaaggacctgcaccccaacaccgaccccttcaagttcgagatccacaagcaggccgtgcccgacaaggtgtggaagatcagcaagatcaacaacacccacgccctggtgagcctgctgcagaacctgaacaaggccaactacaacctgcccatcatggtgaccgacagcggcaagccccccatgaccaacatcaccgacctgagagtgcaggtgtgcagctgcagaaacagcaaggtggactgcaacgccgccggcgccctgagattcagcctgcccagcgtgctgctgctgagcctgttcagcctggcctgcaagtag

SEQ ID NO: 83681 - DNA, 1212 bp, Artificial Sequence
  derived and/or modified sequence
gtggtgagccccgccctgctggacagagagaccctggagaaccccaagtacgagctgatcatcgaggcccaggacatggccggcctggacgtgggcctgaccggcaccgccaccgccaccatcatgatcgacgacaagaacgaccacagccccaagttcaccaagaaggagttccaggccaccgtggaggagggcgccgtgggcgtgatcgtgaacctgaccgtggaggacaaggacgaccccaccaccggcgcctggagagccgcctacaccatcatcaacggcaaccccggccagagcttcgagatccacaccaacccccagaccaacgagggcatgctgagcgtggtgaagcccctggactacgagatcagcgccttccacaccctgctgatcaaggtggagaacgaggaccccctggtgcccgacgtgagctacggccccagcagcaccgccaccgtgcacatcaccgtgctggacgtgaacgagggccccgtgttctaccccgaccccatgatggtgaccagacaggaggacctgagcgtgggcagcgtgctgctgaccgtgaacgccaccgaccccgacagcctgcagcaccagaccatcagatacagcgtgtacaaggaccccgccggctggctgaacatcaaccccatcaacggcaccgtggacaccaccgccgtgctggacagagagagccccttcgtggacaacagcgtgtacaccgccctgttcctggccatcgacagcggcaacccccccgccaccggcaccggcaccctgctgatcaccctggaggacgtgaacgacaacgcccccttcatctaccccaccgtggccgaggtgtgcgacgacgccaagaacctgagcgtggtgatcctgggcgccagcgacaaggacctgcaccccaacaccgaccccttcaagttcgagatccacaagcaggccgtgcccgacaaggtgtggaagatcagcaagatcaacaacacccacgccctggtgagcctgctgcagaacctgaacaaggccaactacaacctgcccatcatggtgaccgacagcggcaagccccccatgaccaacatcaccgacctgagagtgcaggtgtgcagctgcagaaacagcaaggtggactgcaacgccgccggcgccctgagattcagcctgcccagcgtgctgctgctgagcctgttcagcctggcctgcctgtag

SEQ ID NO: 83682 - protein, 190 aa, Artificial Sequence
  derived and/or modified sequence
MQPRTPLVLCVLLSQVLLLTSAEDLDCTPGFQQKVFHINQPAEFIEDQSILNLTFSDCKGNDKLRYEVSSPYFKVNSDGGLVALRNITAVGKTLFVHARTPHAEDMAELVIVGGKDIQGSLQDIFKFARTSPVPRQKRSIVVSPILIPENQRQPFPRDVGKRTHNPINSELLLNEGITADLNPCITILAI

SEQ ID NO: 83683 - DNA, 573 bp, Artificial Sequence
  derived and/or modified sequence
atgcaaccccgcacaccactggttttgtgtgtgcttctctcccaggtgttattactcacctcggcggaagatttagactgtactccggggttccaacaaaaggtgtttcatataaatcagcctgctgaatttatcgaggaccagtccattttgaacctgacatttagtgactgtaaggggaacgataagctaagatatgaagtctcgtccccttatttcaaggtgaatagtgatgggggccttgtggcactgaggaatattacggcagttgggaaaacattgtttgtgcatgctcggactccccacgccgaagacatggccgagctcgtaattgtaggaggtaaggacattcagggaagtctgcaggacatatttaagtttgccaggacctcccctgttcctcgccagaaacgttctattgtcgtgtcacccatcctcatcccagagaatcaacggcaacctttccctcgggacgtaggtaaacgcactcataacccaattaactcagagcttctgttaaatgaaggcatcacagccgacctaaatccttgtataactatactcgcaatttag

SEQ ID NO: 83684 - DNA, 573 bp, Artificial Sequence
  derived and/or modified sequence
atgcagcccaggacccccctggtgctgtgtgtgctgctgagccaggtgctgctgctgaccagcgctgaggacctggactgcaccccaggcttccagcagaaggtgttccacatcaaccagcctgctgagttcatcgaggaccagagcatcctgaacctgaccttcagtgactgcaagggaaatgacaagctgcgctatgaggtgagcagcccctacttcaaggtgaacagtgatggcggcctggtggccctgaggaacatcacagctgtgggcaagaccctgtttgtgcacgcccggacccctcatgctgaggacatggccgagctggtgattgtgggcggcaaggacatccagggcagcctgcaggacatcttcaagtttgcccggaccagccctgtgccccggcagaagaggagcatcgtggtgagccccatcctgatccctgagaaccagaggcagcccttccccagagatgtgggcaagaggacccacaaccccatcaacagcgagctgctgctgaatgaaggcatcacagctgacctgaacccctgcatcaccatcctggccatctag

SEQ ID NO: 83685 - DNA, 573 bp, Artificial Sequence
  derived and/or modified sequence
atgcagccccggacccccctggtgctgtgcgtgctgctgagccaggtactgttgctgacgtccgccgaagatctggattgcacccctggctttcagcagaaggtctttcacatcaatcagcctgccgagttcatcgaagatcagagcattctcaacctaacgttttctgactgcaaagggaatgataagctgcgctacgaggtgtcttctccctactttaaagtcaacagcgatggcggattggtagctttacggaacattactgcagtgggtaagaccctattcgttcacgctcgaacgcctcacgccgaagacatggccgaattggtcattgtggggggaaaagatatccagggctccctgcaggacatcttcaagttcgcgcggacatctccagtgcccagacagaagcggagcattgttgtctccccaatccttattccagagaatcagcggcagccttttccaagagacgttgggaaacggacccacaaccccatcaatagcgagcttctgcttaatgagggaattacggcagatcttaacccttgcatcaccatcctggccatatag

SEQ ID NO: 83686 - DNA, 573 bp, Artificial Sequence
  derived and/or modified sequence
atgcagccaaggacacccctggtgctctgcgtcctgctttcacaagtgctgctgcttacctcagcggaggatttggactgcacgcccggattccaacagaaagtttttcacatcaatcagcctgccgagttcatcgaggaccaatcaatcctcaacttaaccttttcagattgcaaaggcaacgataaactgaggtatgaagtttcctctccttatttcaaagtgaattccgacggagggctggtggctctgagaaatatcaccgctgttgggaagaccctgttcgtgcacgctcggaccccccacgccgaggacatggctgagctcgtgatcgttgggggtaaagatatccagggcagtctgcaggatattttcaagtttgctcggactagccccgtgcctcggcagaagcgttctatcgtggtgtcaccaatcctcatcccggaaaatcagcgacagcctttcccaagagatgtaggcaaacgaacacacaacccaatcaatagcgagctgctcctaaacgaggggatcaccgctgatctgaatccctgtattactatcctcgccatatag

SEQ ID NO: 83687 - DNA, 810 bp, Artificial Sequence
  derived and/or modified sequence
tttgggaagttggctggctggcgaggcagagcctctcctcaaagcctggctcccacggaaaatatgctcagtgcagccgcgtgcatgaatgaaaacgccgccgggcgcttctagtcggacaaaatgcagccgagaactccgctcgttctgtgcgttctcctgtcccaggtgctgctgctaacatctgcagaagatttggactgcactcctggatttcagcagaaagtgttccatatcaatcagccagctgaattcattgaggaccagtcaattctaaacttgaccttcagtgactgtaagggaaacgacaagctacgctatgaggtctcgagcccatacttcaaggtgaacagcgatggcggcttagttgctctgagaaacataactgcagtgggcaaaactctgttcgtccatgcacggaccccccatgcggaagatatggcagaactcgtgattgtcggggggaaagacatccagggctccttgcaggatatatttaaatttgcaagaacttctcctgtcccaagacaaaagaggtccattgtggtatctcccattttaattccagagaatcagagacagcctttcccaagagatgttggcaagatgaagatttggcaagttctgtgcctagcacgatggctgacatgagataaaacccacaatcctattaacagcgaacttctcttgaatgaaggcattacagcagatttaaatccatgcattacaattttagcaatttaatgaacatcctatttggcgacattattgctttaaaggaataaatcacaaacattttacttcccacta

SEQ ID NO: 83688 - DNA, 573 bp, Artificial Sequence
  derived and/or modified sequence
atgcagccgagaactccgctcgttctgtgcgttctcctgtcccaggtgctgctgctaacatctgcagaagatttggactgcactcctggatttcagcagaaagtgttccatatcaatcagccagctgaattcattgaggaccagtcaattctaaacttgaccttcagtgactgtaagggaaacgacaagctacgctatgaggtctcgagcccatacttcaaggtgaacagcgatggcggcttagttgctctgagaaacataactgcagtgggcaaaactctgttcgtccatgcacggaccccccatgcggaagatatggcagaactcgtgattgtcggggggaaagacatccagggctccttgcaggatatatttaaatttgcaagaacttctcctgtcccaagacaaaagaggtccattgtggtatctcccattttaattccagagaatcagagacagcctttcccaagagatgttggcaagagaacccacaatcctattaacagcgaacttctcttgaatgaaggcattacagcagatttaaatccatgcattacaattttagcaatttaa

SEQ ID NO: 83689 - DNA, 573 bp, Artificial Sequence
  derived and/or modified sequence
atgcagcccagaacccccctggtgctgtgcgtgctgctgagccaggtgctgctgctgaccagcgccgaggacctggactgcacccccggcttccagcagaaggtgttccacatcaaccagcccgccgagttcatcgaggaccagagcatcctgaacctgaccttcagcgactgcaagggcaacgacaagctgagatacgaggtgagcagcccctacttcaaggtgaacagcgacggcggcctggtggccctgagaaacatcaccgccgtgggcaagaccctgttcgtgcacgccagaaccccccacgccgaggacatggccgagctggtgatcgtgggcggcaaggacatccagggcagcctgcaggacatcttcaagttcgccagaaccagccccgtgcccagacagaagagaagcatcgtggtgagccccatcctgatccccgagaaccagagacagcccttccccagagacgtgggcaagagaacccacaaccccatcaacagcgagctgctgctgaacgagggcatcaccgccgacctgaacccctgcatcaccatcctggccatctag

SEQ ID NO: 83690 - protein, 175 aa, Artificial Sequence
  derived and/or modified sequence
MQPRTPLVLCVLLSQVLLLTSAEDLDCTPGFQQKVFHINQPAEFIEDQSILNLTFSDCKGNDKLRYEVSSPYFKVNSDGGLVALRNITAVGKTLFVHARTPHAEDMAELVIVGGKDIQGSLQDIFKFARTSPVPRQKRSIVVSPILIPENQRQPFPRDVGKMKIWQVLCLARWLT

SEQ ID NO: 83691 - DNA, 528 bp, Artificial Sequence
  derived and/or modified sequence
atgcagccccgcacacctcttgtgctgtgtgttctgctcagtcaagttttactgctgacttcggcagaagacctggactgcacccctggcttccaacaaaaggtgttccacataaaccaaccagctgaatttatagaggaccagtctattctcaacctgacgtttagtgactgtaaaggtaacgataaactgaggtatgaggtttcttcaccctatttcaaagtaaacagtgatggaggcctggtggcgttaagaaacatcacagctgttggcaagacactgttcgttcacgcacgcacacctcacgcagaagatatggcggaactggttattgtcggcgggaaggacatacagggaagcttacaagacatcttcaagttcgcccgcacaagtcccgttcctcggcagaaaaggtcaatcgtcgtgtctcccattctgatccctgagaaccaacgccagccttttccgagggacgtaggcaagatgaaaatttggcaggtcctttgtctcgccaggtggcttacgtag

SEQ ID NO: 83692 - DNA, 528 bp, Artificial Sequence
  derived and/or modified sequence
atgcaacccagaaccccactggtgttgtgtgtcttattgtcgcaagtgctgttactgacctctgcagaggatctggattgcacccctggatttcagcagaaagtgtttcatatcaatcaaccagctgaatttattgaggaccagagtatcctgaaccttacattttccgactgcaaaggcaacgacaaacttcggtatgaggttagctctccttacttcaaggtgaattcagacgggggcctcgtcgccctgcgcaatataactgccgtaggcaagactctgttcgtgcacgcgaggacaccgcacgctgaagacatggccgaactggtaattgtaggagggaaggatattcagggttcgctccaggatattttcaagttcgcccgcaccagccctgtgcctaggcagaagcgttctatcgtcgtctcccctatactgattcccgagaaccagaggcaaccctttcccagggacgtgggcaagatgaagatctggcaggtgctttgcctggcccggtggttgacatag

SEQ ID NO: 83693 - DNA, 528 bp, Artificial Sequence
  derived and/or modified sequence
atgcagcccaggacccccctggtgctgtgtgtgctgctgagccaggtgctgctgctgaccagcgctgaggacctggactgcaccccaggcttccagcagaaggtgttccacatcaaccagcctgctgagttcatcgaggaccagagcatcctgaacctgaccttcagtgactgcaagggaaatgacaagctgcgctatgaggtgagcagcccctacttcaaggtgaacagtgatggcggcctggtggccctgaggaacatcacagctgtgggcaagaccctgtttgtgcacgcccggacccctcatgctgaggacatggccgagctggtgattgtgggcggcaaggacatccagggcagcctgcaggacatcttcaagtttgcccggaccagccctgtgccccggcagaagaggagcatcgtggtgagccccatcctgatccctgagaaccagaggcagcccttccccagagatgtgggcaagatgaagatctggcaggtgctgtgcctggcccgctggctgacctag

SEQ ID NO: 83694 - DNA, 528 bp, Artificial Sequence
  derived and/or modified sequence
atgcagccccggacccccctggtgctgtgcgtgctgctgagccaggtgctgctgctgacatctgccgaggatctcgactgcactcccggcttccagcagaaggttttccacataaaccagcccgctgagttcattgaagaccagtcaattctgaacctgacgttctctgattgcaagggcaatgacaagctccgctacgaagtgagtagcccatactttaaggtgaattcagacggtggtttggtcgccctgcgcaacatcacagccgtagggaagaccttgttcgtgcacgcccgtacaccccatgctgaagatatggcagagctggtgattgtggggggaaaggatatccagggatctctgcaggatatttttaaattcgctaggacgtcaccagtcccaagacaaaaaaggtccatcgtcgtctctccaatcctgattcctgaaaaccagcgccagcctttcccacgcgacgtcggcaagatgaagatctggcaggtgctgtgtctggctaggtggctgacatag

SEQ ID NO: 83695 - DNA, 528 bp, Artificial Sequence
  derived and/or modified sequence
atgcagccccggacccccctggtgctgtgcgtgctgctgagccaggtgttattgctcacgtcagccgaagacctcgattgcactccaggattccagcagaaggtgttccacattaaccaaccagccgagttcatcgaggaccagtcaatcctaaacctcactttcagcgactgtaaagggaatgataagttaaggtacgaggtcagttcaccatacttcaaggtcaactcagatggcgggctggtagctctccggaatattaccgcagtgggtaagactctgttcgtgcatgccagaacacctcatgccgaggacatggccgagctggttattgtcgggggcaaggatatccagggctctctgcaggatatcttcaaattcgccaggacttcccctgtgccaagacagaaacgcagcatcgtggtcagccccatcctgataccagagaatcagcggcagccctttcctcgggatgtagggaagatgaaaatctggcaggtgctttgcctggccaggtggttgacctag

SEQ ID NO: 83696 - DNA, 528 bp, Artificial Sequence
  derived and/or modified sequence
atgcagccccgaaccccccttgtgctgtgcgtccttttaagccaggttctgctgctcacttcagccgaagacctggattgcacacctgggttccaacagaaagttttccatatcaaccagcccgctgagttcatcgaagatcagtctatccttaatctaacattctctgattgtaaaggcaacgataagctgcgttacgaagtctcctcaccctacttcaaagtaaattcggacggcggtctggtggccttgcgaaatataacggcggtaggcaagaccttattcgtgcacgcacggacaccccatgcagaagacatggcagagctggtgattgtcggcggaaaggacattcaaggcagtcttcaggacatttttaagttcgcccgaacttctccagtcccgaggcagaagcggagtatcgtggtgagtccgatacttatacctgaaaaccagcgacagccattcccccgagacgtgggcaaaatgaagatttggcaggtgctgtgcctcgccagatggctcacttag

SEQ ID NO: 83697 - DNA, 528 bp, Artificial Sequence
  derived and/or modified sequence
atgcagccacggacccccctggtactgtgtgtgctgttgagccaggtccttttgctgacctcagctgaagatctggattgtactccaggttttcagcagaaggtgtttcatattaaccagccggctgagtttatcgaagatcagtcaattctgaacctgacatttagcgattgtaagggaaacgataagctgagatacgaagtcagctcgccgtatttcaaagtcaacagcgatggcggactggtggcactccgtaatattacagctgtcggcaaaacactctttgtccacgctcgcactccacatgccgaggatatggcagaactggtgatcgtcggtggaaaggacatccaaggaagccttcaggatattttcaagttcgctcgaacatctcctgtacctcgccagaaacggtccatcgttgtgagccccattctgataccagaaaatcagcgacagccgttccccagagacgttggtaagatgaagatctggcaggtactgtgtctggcacggtggctgacatag

SEQ ID NO: 83698 - DNA, 528 bp, Artificial Sequence
  derived and/or modified sequence
atgcagccgagaactccgctcgttctgtgcgttctcctgtcccaggtgctgctgctaacatctgcagaagatttggactgcactcctggatttcagcagaaagtgttccatatcaatcagccagctgaattcattgaggaccagtcaattctaaacttgaccttcagtgactgtaagggaaacgacaagctacgctatgaggtctcgagcccatacttcaaggtgaacagcgatggcggcttagttgctctgagaaacataactgcagtgggcaaaactctgttcgtccatgcacggaccccccatgcggaagatatggcagaactcgtgattgtcggggggaaagacatccagggctccttgcaggatatatttaaatttgcaagaacttctcctgtcccaagacaaaagaggtccattgtggtatctcccattttaattccagagaatcagagacagcctttcccaagagatgttggcaagatgaagatttggcaagttctgtgcctagcacgatggctgacatga

SEQ ID NO: 83699 - DNA, 528 bp, Artificial Sequence
  derived and/or modified sequence
atgcagcccagaacccccctggtgctgtgcgtgctgctgagccaggtgctgctgctgaccagcgccgaggacctggactgcacccccggcttccagcagaaggtgttccacatcaaccagcccgccgagttcatcgaggaccagagcatcctgaacctgaccttcagcgactgcaagggcaacgacaagctgagatacgaggtgagcagcccctacttcaaggtgaacagcgacggcggcctggtggccctgagaaacatcaccgccgtgggcaagaccctgttcgtgcacgccagaaccccccacgccgaggacatggccgagctggtgatcgtgggcggcaaggacatccagggcagcctgcaggacatcttcaagttcgccagaaccagccccgtgcccagacagaagagaagcatcgtggtgagccccatcctgatccccgagaaccagagacagcccttccccagagacgtgggcaagatgaagatctggcaggtgctgtgcctggccagatggctgacctag

SEQ ID NO: 83700 - protein, 312 aa, Artificial Sequence
  derived and/or modified sequence
MGVMAMLMLPLLLLGISGLLFIYQEVSRLWSKSAVQNKVVVITDAISGLGKECARVFHTGGARLVLCGKNWERLENLYDALISVADPSKQTFTPKLVLLDLSDISCVPDVAKEVLDCYGCVDILINNASVKVKGPAHKISLELDKKIMDANYFGPITLTKALLPNMISRRTGQIVLVNNIQGKFGIPFRTTYAASKHAALGFFDCLRAEVEEYDVVISTVSPTFIRSYHVYPEQGNWEASIWKFFFRKLTYGVHPVEVAEEVMRTVRRKKQEVFMANPIPKAAVYVRTFFPEFFFAVVACGVKEKLNVPEEG

SEQ ID NO: 83701 - DNA, 939 bp, Artificial Sequence
  derived and/or modified sequence
atgggtgtcatggcgatgctgatgctgccacttttattactgggaatctccggcctactttttatttatcaggaggtgtctcggctgtggtccaaatccgctgttcagaataaagtggtggttatcacagacgccatttcaggtttgggcaaagagtgtgccagggtgttccatacaggaggagccaggctggttttgtgtggaaagaattgggaacggctcgaaaatctgtacgacgcgcttatctccgttgctgacccatcaaaacagaccttcacacctaagttagttctgttggatttaagcgacatcagctgcgtgcctgatgtagccaaggaagtgctcgactgttatgggtgtgttgacatactgatcaataacgcttccgtgaaggtcaaagggccagctcacaagattagcctggagctggacaagaaaattatggatgccaactatttcggacctatcactctgacaaaggccttgttacctaacatgatctctaggagaaccggccagatcgtgttggtcaataatatccaaggcaagttcggcatcccatttaggaccacctacgcagccagtaaacatgcagctctgggctttttcgattgcctccgcgcagaggtggaggagtatgatgtagtgatctctacagtgtctccaaccttcattcgatcttaccacgtctatccagagcaggggaattgggaggcttcaatctggaagtttttctttagaaagctaacttacggagtgcaccccgtagaggttgccgaggaggtgatgagaacggtgcggcgtaagaaacaggaagtgttcatggcgaatccgatcccgaaagccgctgtttacgtgaggacatttttccctgagttcttttttgccgtggtggcttgtggagtcaaagaaaagctcaatgtgcctgaagagggctag

SEQ ID NO: 83702 - DNA, 939 bp, Artificial Sequence
  derived and/or modified sequence
atgggtgtaatggccatgctgatgcttccgctgctgctgctggggatttctggtctgctttttatctaccaggaagtgtccaggctgtggagtaagtctgccgtgcagaataaggttgtggtaattaccgacgccatcagcgggcttggcaaggagtgcgctcgtgtgttccataccgggggcgcacgcctggtgttgtgtgggaagaactgggagcggcttgagaacctctatgatgcacttatttctgtagcagacccttctaagcagactttcacgccaaagttagtacttctggacctgtccgacatcagctgtgtccccgacgtggctaaggaagtactcgactgctatggctgcgtggatattctgatcaacaatgcatctgtgaaagtgaaagggccagcccataagatttcgctagaactagacaagaagattatggatgccaattatttcggacccatcacactcaccaaagccttattgccgaatatgatttctagaagaaccggtcagatcgttctcgttaacaacatacagggtaagttcggaattccattcagaaccacttatgccgcaagcaagcacgctgcacttggctttttcgactgccttagggccgaggtcgaagagtacgatgtcgttatcagtactgtcagtcctactttcatacgctcctaccacgtttatcccgaacaaggaaattgggaagcctcaatctggaaatttttcttccgcaagctcacgtatggcgtccaccctgttgaagtggccgaggaagtgatgagaacagtgagacggaagaaacaagaggtcttcatggccaatccaattcccaaagctgccgtttatgtccggacttttttccccgaatttttctttgctgttgtagcttgtggcgttaaagaaaagttgaatgtgccagaggaggggtag

SEQ ID NO: 83703 - DNA, 939 bp, Artificial Sequence
  derived and/or modified sequence
atgggcgttatggcaatgctcatgctccccttactcctacttggcataagcggcctcctgttcatctatcaggaagtgtcccggctgtggtccaagagcgccgtccaaaataaggttgtcgtcataaccgacgctatctccggtctaggtaaggagtgtgccagagtgttccataccggcggagcgagactggtgttgtgtggaaaaaactgggaacggctggaaaacctctacgacgcccttattagtgttgccgacccttctaagcaaacattcacccctaaacttgtgcttctagacctttctgatatctcgtgtgttcccgacgtcgcaaaggaggtgcttgattgctatggttgtgtcgacattctgatcaataacgcctccgtgaaagttaaggggcctgcacataagatctctctcgaactggataagaagataatggacgctaactattttggaccaataacattgacaaaggccttgcttcctaacatgatttcccgacgcactggccaaatcgtgcttgtgaataacattcagggaaaatttggcattccctttcgaaccacatacgccgccagcaagcacgccgcactgggctttttcgactgccttagggccgaggtcgaagagtacgatgtcgttatcagtactgtcagtcctactttcatacgctcctaccacgtttatcccgaacaaggaaattgggaagcctcaatctggaaatttttcttccgcaagctcacgtatggcgtccaccctgttgaagtggccgaggaagtgatgagaacagtgagacggaagaaacaagaggtcttcatggccaatccaattcccaaagctgccgtttatgtccggacttttttccccgaatttttctttgctgttgtagcttgtggggtgaaagagaagttgaatgttccagaggagggctag

SEQ ID NO: 83704 - DNA, 939 bp, Artificial Sequence
  derived and/or modified sequence
atgggcgtgatggccatgctgatgctgcccctgctgctgctgggcatcagcggcctgctgttcatctaccaggaggtgagcagactgtggagcaagagcgccgtgcagaacaaggtggtggtgatcaccgacgccatcagcggcctgggcaaggagtgcgccagagtgttccacaccggcggcgccagactggtgctgtgcggcaagaactgggagagactggagaacctgtacgacgccctgatcagcgtggccgaccccagcaagcagaccttcacccccaagctggtgctgctggacctgagcgacatcagctgcgtgcccgacgtggccaaggaggtgctggactgctacggctgcgtggacatcctgatcaacaacgccagcgtgaaggtgaagggccccgcccacaagatcagcctggagctggacaagaagatcatggacgccaactacttcggccccatcaccctgaccaaggccctgctgcccaacatgatcagcagaagaaccggccagatcgtgctggtgaacaacatccagggcaagttcggcatccccttcagaaccacctacgccgccagcaagcacgccgccctgggcttcttcgactgcctgagagccgaggtggaggagtacgacgtggtgatcagcaccgtgagccccaccttcatcagaagctaccacgtgtaccccgagcagggcaactgggaggccagcatctggaagttcttcttcagaaagctgacctacggcgtgcaccccgtggaggtggccgaggaggtgatgagaaccgtgagaagaaagaagcaggaggtgttcatggccaaccccatccccaaggccgccgtgtacgtgagaaccttcttccccgagttcttcttcgccgtggtggcctgcggcgtgaaggagaagctgaacgtgcccgaggagggctag

SEQ ID NO: 83705 - DNA, 987 bp, Artificial Sequence
  derived and/or modified sequence
cccccagaacaagatgggagtcatggccatgctgatgctccccctgctgctgctgggaatcagcggcctcctcttcatttaccaagaggtgtccaggctgtggtcaaagtcagctgtgcagaacaaagtggtggtgatcaccgatgccatctcaggactgggcaaggagtgtgctcgggtgttccacacaggtggggcaaggctggtgctgtgtggaaagaactgggagaggctagagaacctatatgatgccttgatcagcgtggctgaccccagcaagcagacattcaccccaaagctggtcctgttggacctctcagacatcagctgtgtcccagatgtggcaaaagaagtcctggattgctatggctgtgtggacatcctcatcaacaatgccagtgtgaaggtgaaggggcctgcccataagatttctctggagctcgacaaaaagatcatggatgccaattactttggccccatcacattgacgaaagccctgcttcccaacatgatctcccggagaacaggccaaatcgtgttagtgaataatatccaagggaagtttggaatcccgttccgtacgacttacgctgcctccaagcacgcagccctgggcttctttgactgcctccgagccgaagtggaggaatacgatgttgtcatcagcaccgtgagcccgactttcatccggtcgtaccacgtgtatccagagcaaggaaactgggaagcttccatttggaaattctttttcaggaagctgacctacggcgtgcacccagtagaggtggcggaggaggtgatgcgcaccgtgcggaggaagaagcaagaggtgtttatggccaaccccatccccaaggccgccgtgtacgtccgcaccttcttcccggagttctttttcgccgtggtggcctgtggggtgaaggagaagctcaatgtcccggaggaggggtaactgcaggaggccaaatgggccaccccttggaaata

SEQ ID NO: 83706 - DNA, 939 bp, Artificial Sequence
  derived and/or modified sequence
atgggcgtgatggctatgttaatgctgcctttgctcttactgggaatcagtggactcctcttcatttaccaggaagtaagtaggctatggtctaaatcagcagttcaaaacaaagtagtggtgataaccgatgctatcagtggcctcggcaaggaatgcgccagagtctttcacaccgggggcgcccgcctagtgctgtgtggaaagaattgggagaggctggaaaacttgtatgacgccctgatttccgtggctgatccgtcgaagcagacattcacaccaaaactcgtgttgttagacttaagcgacatcagctgtgtgcccgacgtcgctaaggaggtgctggattgttatgggtgtgtagacattctcataaacaatgcttcagtgaaagtgaaagggcctgcccataagatctccctagaactggataagaagattatggatgccaactacttcgggccaataacactgaccaaggcactactgcctaatatgatctctaggaggaccggccagatcgttctggttaataacattcagggaaagttcggaatcccttttcggaccacatatgccgcttccaaacacgctgcattgggatttttcgactgtctgcgcgctgaggtggaggaatacgatgttgtcatctccacagtgagtccgacttttattagaagctatcatgtataccctgaacaggggaactgggaagctagcatctggaaattttttttcagaaaactaacatacggcgtccaccccgttgaggtggcagaggaagtgatgcgcactgtaagacgaaagaaacaggaggtctttatggccaacccaattcctaaagccgcggtctatgttcggactttttttcccgaatttttcttcgctgttgtggcctgtggggtgaaggagaaactgaacgtgcccgaggaagggtag

SEQ ID NO: 83707 - DNA, 939 bp, Artificial Sequence
  derived and/or modified sequence
atgggcgtgatggccatgctgatgctgcccctgctgctgctgggcatcagcggcctgctcttcatctaccaggaggtgtcccggctgtggagcaagtctgctgtgcagaacaaggtggtggtgatcacagatgccatcagcggcctgggcaaggaatgtgcccgggtcttccacactggaggagcccggctggtgctgtgtgggaagaactgggagcggctggagaacctgtatgatgccctgatctctgtggccgaccccagcaagcagaccttcacccccaagctggtgctgctggacctgagtgacatcagctgtgtgcctgatgtggccaaggaggtgctggactgctacggctgtgtggacatcctgatcaacaatgcctctgtgaaggtgaagggccctgcccacaagatcagcctggagctggacaagaagatcatggatgccaactacttcggccccatcaccctgaccaaggccctgctgcccaacatgatcagcagaagaacaggccagatcgtgctggtgaacaacatccagggcaagtttggcatccccttccgcaccacctatgctgccagcaagcacgccgccctgggcttctttgactgcctgcgggcagaggtggaggagtatgatgtggtgatcagcacagtgagccccaccttcatccgcagctaccacgtgtacccagagcagggcaactgggaggccagcatctggaagttcttcttcaggaagctgacctatggagtgcaccctgtggaggtggccgaggaggtgatgaggacagtgcggaggaagaagcaggaggtgttcatggccaaccccatccccaaggctgctgtgtatgtgaggaccttcttccctgagttcttctttgctgtggtggcctgtggggtgaaggagaagctgaatgtgcctgaggagggctag

SEQ ID NO: 83708 - DNA, 939 bp, Artificial Sequence
  derived and/or modified sequence
atgggcgtgatggccatgctgatgctgcccctgctgctgctgggcatatccggtctcctgttcatatatcaggaggtgtctcgtctttggagtaagagcgccgtgcagaacaaggtggtggtcattacagacgcgattagcgggttaggcaaagagtgtgccagagtgttccacaccgggggcgccagactggtgctttgcggcaaaaactgggagaggctggagaacctttatgacgcgctgatttctgtagctgatcccagcaagcaaactttcacacctaaactcgtgctgttggacctgtcagatatcagttgcgtgcccgacgtggcgaaggaagtccttgattgttatggctgcgtggacatcctgattaacaatgcctctgttaaagtaaaaggaccagcgcataagatttctcttgaactggataaaaaaataatggacgctaattacttcggacccattactctgacaaaagcgctgcttcctaacatgatttccagaagaacagggcaaattgtcctagttaacaatatacagggtaaattcggaataccgttccgcacgacctacgccgcgagcaaacacgcggctctcggtttcttcgattgtcttcgagcggaggtggaggaatatgatgtggtgatctccacagtgtcgcctaccttcatccgctcttatcacgtttatccagaacaggggaattgggaggcctctatatggaaattcttctttcggaaactgacttacggtgtacatcccgtagaggttgcagaagaggtcatgcgaaccgtaagaagaaagaagcaagaagtgtttatggctaatccaataccgaaggccgccgtgtatgtgcgcacatttttccctgaattctttttcgccgtggttgcctgcggtgtgaaggaaaagcttaatgtgcccgaagaaggttag

SEQ ID NO: 83709 - RNA, 939 nt, Artificial Sequence
  derived and/or modified sequence
auggguguaauggccaugcugaugcuuccgcugcugcugcuggggauuucuggucugcuuuuuaucuaccaggaaguguccaggcuguggaguaagucugccgugcagaauaagguugugguaauuaccgacgccaucagcgggcuuggcaaggagugcgcucguguguuccauaccgggggcgcacgccugguguugugugggaagaacugggagcggcuugagaaccucuaugaugcacuuauuucuguagcagacccuucuaagcagacuuucacgccaaaguuaguacuucuggaccuguccgacaucagcuguguccccgacguggcuaaggaaguacucgacugcuauggcugcguggauauucugaucaacaaugcaucugugaaagugaaagggccagcccauaagauuucgcuagaacuagacaagaagauuauggaugccaauuauuucggacccaucacacucaccaaagccuuauugccgaauaugauuucuagaagaaccggucagaucguucucguuaacaacauacaggguaaguucggaauuccauucagaaccacuuaugccgcaagcaagcacgcugcacuuggcuuuuucgacugccuuagggccgaggucgaagaguacgaugucguuaucaguacugucaguccuacuuucauacgcuccuaccacguuuaucccgaacaaggaaauugggaagccucaaucuggaaauuuuucuuccgcaagcucacguauggcguccacccuguugaaguggccgaggaagugaugagaacagugagacggaagaaacaagaggucuucauggccaauccaauucccaaagcugccguuuauguccggacuuuuuuccccgaauuuuucuuugcuguuguagcuuguggcguuaaagaaaaguugaaugugccagaggagggguag

SEQ ID NO: 83710 - RNA, 939 nt, Artificial Sequence
  derived and/or modified sequence
augggcguuauggcaaugcucaugcuccccuuacuccuacuuggcauaagcggccuccuguucaucuaucaggaagugucccggcugugguccaagagcgccguccaaaauaagguugucgucauaaccgacgcuaucuccggucuagguaaggagugugccagaguguuccauaccggcggagcgagacugguguuguguggaaaaaacugggaacggcuggaaaaccucuacgacgcccuuauuaguguugccgacccuucuaagcaaacauucaccccuaaacuugugcuucuagaccuuucugauaucucguguguucccgacgucgcaaaggaggugcuugauugcuaugguugugucgacauucugaucaauaacgccuccgugaaaguuaaggggccugcacauaagaucucucucgaacuggauaagaagauaauggacgcuaacuauuuuggaccaauaacauugacaaaggccuugcuuccuaacaugauuucccgacgcacuggccaaaucgugcuugugaauaacauucagggaaaauuuggcauucccuuucgaaccacauacgccgccagcaagcacgccgcacugggcuuuuucgacugccuuagggccgaggucgaagaguacgaugucguuaucaguacugucaguccuacuuucauacgcuccuaccacguuuaucccgaacaaggaaauugggaagccucaaucuggaaauuuuucuuccgcaagcucacguauggcguccacccuguugaaguggccgaggaagugaugagaacagugagacggaagaaacaagaggucuucauggccaauccaauucccaaagcugccguuuauguccggacuuuuuuccccgaauuuuucuuugcuguuguagcuuguggggugaaagagaaguugaauguuccagaggagggcuag

SEQ ID NO: 83711 - protein, 321 aa, Artificial Sequence
  derived and/or modified sequence
MEEGQYSEIEELPRRRCCRRGTQIVLLGLVTAALWAGLLTLLLLWHWDTTQSLKQLEERAARNVSQVSKNLESHHGDQMAQKSQSTQISQELEELRAEQQRLKSQDLELSWNLNGLQADLSSFKSQELNERNEASDLLERLREEVTKLRMELQVSSGFVCNTCPEKWINFQRKCYYFGKGTKQWVHARYACDDMEGQLVSIHSPEEQDFLTKHASHTGSWIGLRNLDLKGEFIWVDGSHVDYSNWAPGEPTSRSQGEDCVMMRGSGRWNDAFCDRKLGAWVCDRLATCTPPASEGSAESMGPDSRPDPDGRLPTPSAPLHS

SEQ ID NO: 83712 - DNA, 966 bp, Artificial Sequence
  derived and/or modified sequence
atggaggagggccagtacagcgagatcgaggagctgcccagaagaagatgctgcagaagaggcacccagatcgtgctgctgggcctggtgaccgccgccctgtgggccggcctgctgaccctgctgctgctgtggcactgggacaccacccagagcctgaagcagctggaggagagagccgccagaaacgtgagccaggtgagcaagaacctggagagccaccacggcgaccagatggcccagaagagccagagcacccagatcagccaggagctggaggagctgagagccgagcagcagagactgaagagccaggacctggagctgagctggaacctgaacggcctgcaggccgacctgagcagcttcaagagccaggagctgaacgagagaaacgaggccagcgacctgctggagagactgagagaggaggtgaccaagctgagaatggagctgcaggtgagcagcggcttcgtgtgcaacacctgccccgagaagtggatcaacttccagagaaagtgctactacttcggcaagggcaccaagcagtgggtgcacgccagatacgcctgcgacgacatggagggccagctggtgagcatccacagccccgaggagcaggacttcctgaccaagcacgccagccacaccggcagctggatcggcctgagaaacctggacctgaagggcgagttcatctgggtggacggcagccacgtggactacagcaactgggcccccggcgagcccaccagcagaagccagggcgaggactgcgtgatgatgagaggcagcggcagatggaacgacgccttctgcgacagaaagctgggcgcctgggtgtgcgacagactggccacctgcaccccccccgccagcgagggcagcgccgagagcatgggccccgacagcagacccgaccccgacggcagactgcccacccccagcgcccccctgcacagctag

SEQ ID NO: 83713 - DNA, 966 bp, Artificial Sequence
  derived and/or modified sequence
atggaggaaggacagtatagcgaaatcgaggagcttccaaggaggagatgttgccggagaggtactcagattgttctgctcgggctcgtaactgctgccttatgggcggggctcctgactctcctgttgctgtggcactgggacactacgcagagtctcaaacagctggaggagcgggcagcccgcaacgtatcccaggtaagcaagaacctcgaatctcaccacggagatcaaatggcgcagaagtcacagagcacgcagatatcgcaggagttggaggagctgagagctgaacagcaaagactcaagtcccaggatctagaactgtcctggaacttaaacggcctgcaggcagatctctcctcatttaaaagtcaggaactcaatgagcgcaatgaggccagcgatcttctggaacgactccgtgaggaggtcaccaaattgaggatggagctgcaggtgagcagcggattcgtgtgcaacacatgtcccgagaagtggatcaactttcagcgaaagtgctattactttggcaagggcacaaaacagtgggtgcatgcccggtacgcctgcgatgacatggagggccagttagtctctattcacagcccagaggaacaagatttcctcacgaagcatgcctctcataccggctcttggatcgggctgcgcaacctggatctgaagggcgaattcatttgggtggatgggagtcacgtggactactcaaattgggccccaggggagcccacgagccgctctcagggagaggactgcgttatgatgaggggctcaggccggtggaacgatgctttctgtgacagaaagttgggcgcctgggtgtgcgacagattagcaacatgcacgccaccggcttctgaaggatcagccgagtcgatgggccctgacagtcggcccgatccagacggaaggttgccaactccctccgcgcccctccatagctag

SEQ ID NO: 83714 - DNA, 1614 bp, Artificial Sequence
  derived and/or modified sequence
agtggctctactttcagaagaaagtgtctctcttcctgcttaaacctctgtctctgacggtccctgccaatcgctctggtcgaccccaacacactaggaggacagacacaggctccaaactccactaaccagagctgtgattgtgcccgctgagtggactgcgttgtcagggagtgagtgctccatcatcgggagaatccaagcaggaccgccatggaggaaggtcaatattcagagatcgaggagcttcccaggaggcggtgttgcaggcgtgggactcagatcgtgctgctggggctggtgaccgccgctctgtgggctgggctgctgactctgcttctcctgtggcactgggacaccacacagagtctaaaacagctggaagagagggctgcccggaacgtctctcaagtttccaagaacttggaaagccaccacggtgaccagatggcgcagaaatcccagtccacgcagatttcacaggaactggaggaacttcgagctgaacagcagagattgaaatctcaggacttggagctgtcctggaacctgaacgggcttcaagcagatctgagcagcttcaagtcccaggaattgaacgagaggaacgaagcttcagatttgctggaaagactccgggaggaggtgacaaagctaaggatggagttgcaggtgtccagcggctttgtgtgcaacacgtgccctgaaaagtggatcaatttccaacggaagtgctactacttcggcaagggcaccaagcagtgggtccacgcccggtatgcctgtgacgacatggaagggcagctggtcagcatccacagcccggaggagcaggacttcctgaccaagcatgccagccacaccggctcctggattggccttcggaacttggacctgaagggggagtttatctgggtggatgggagccacgtggactacagcaactgggctccaggggagcccaccagccggagccagggcgaggactgcgtgatgatgcggggctccggtcgctggaacgacgccttctgcgaccgtaagctgggcgcctgggtgtgcgaccggctggccacatgcacgccgccagccagcgaaggttccgcggagtccatgggacctgattcaagaccagaccctgacggccgcctgcccaccccctctgcccctctccactcttgagcatggatacagccaggcccagagcaagaccctgaagacccccaaccacggcctaaaagcctctttgtggctgaaaggtccctgtgacattttctgccacccaaacggaggcagctgacacatctcccgctcctctatggcccctgccttcccaggagtacaccccaacagcaccctctccagatgggagtgcccccaacagcaccctctccagatgagagtacaccccaacagcaccctctccagatgagagtacaccccaacagcaccctctccagatgagagtacaccccaacagcaccctctccagatgcagccccatctcctcagcaccccaggacctgagtatccccagctcaggtggtgagtcctcctgtccagcctgcatcaataaaatggggcagtgatggcctcccacatttgtccccttcttgg

SEQ ID NO: 83715 - DNA, 966 bp, Artificial Sequence
  derived and/or modified sequence
atggaggagggccagtacagcgagattgaggagctgccccggcggcgctgctgcagaagaggcacccagatcgtgctgctgggcctggtgacagctgccctgtgggccggcctgctgaccctgctgctgctgtggcactgggacaccacccagagcctgaagcagctggaggagcgggccgccagaaatgtgtcccaggtgtccaagaacctggagagccaccacggggaccagatggcccagaagagccagagcacccagatcagccaggagctggaggagctgcgggcagagcagcagaggctgaagagccaggacctggagctgtcctggaacctgaatggcctgcaggccgacctgagcagcttcaagagccaggagctgaatgaaagaaatgaggccagtgacctgctggagcggctgcgggaggaggtgaccaagctgaggatggagctgcaggtgagcagcggctttgtgtgcaacacctgcccagagaagtggatcaacttccagaggaagtgctactactttgggaagggcaccaagcagtgggtgcacgcccgctatgcctgtgatgacatggagggccagctggtgtccatccacagccctgaggagcaggacttcctgaccaagcacgccagccacacaggctcctggattggcctgaggaacctggacctgaagggggagttcatctgggtggatggcagccacgtggactacagcaactgggcccctggagagcccaccagccgcagccagggcgaggactgtgtgatgatgaggggcagcggccgctggaatgatgccttctgtgacaggaagctgggcgcctgggtgtgtgaccggctggccacctgcaccccaccagccagcgagggcagcgctgagagcatgggccctgacagcaggccagaccctgatggccgcctgcccacccccagcgcccccctgcacagctag

SEQ ID NO: 83716 - DNA, 966 bp, Artificial Sequence
  derived and/or modified sequence
atggaggagggccagtacagcgagatcgaggagctgccccggcggcggtgttgtcggaggggaactcagattgttctgctgggcctcgttacagcagccctgtgggcaggtctgctaactcttttgctactgtggcactgggacacgacccaatcactgaaacagctagaagagagagcagcgcgaaacgtttctcaagtgtcaaaaaacctggagtcccaccacggagaccaaatggcccagaaaagccagtcaacccagatcagtcaagaactcgaggagctgcgggccgaacagcagagactgaagtcccaggacctggagctatcttggaacctgaatggactacaggccgacctgagctcctttaagtcccaggagctaaacgagcggaatgaggcttcggatctacttgagcgattacgtgaggaggtgaccaagctccggatggaactgcaggtgtccagcgggttcgtgtgtaatacatgtccggaaaagtggattaacttccagagaaagtgctattactttggaaaaggaacaaagcagtgggtacacgcccgttacgcctgtgacgatatggagggccagctggttagcatacactctccagaggaacaggacttccttacaaaacatgctagtcataccggctcatggatcggcttgaggaacttggatctgaaaggggaattcatctgggtcgatggttcccatgtcgactattctaactgggccccgggcgaacctacctccagaagccagggtgaagattgtgttatgatgaggggaagtggcaggtggaatgacgcattctgcgaccgcaagctgggcgcatgggtgtgtgaccggttggccacctgcacacctccagcctcggaggggagtgcagagtccatgggccccgactcccgcccagatcctgacggacggttgccaacaccttctgccccactgcattcttag

SEQ ID NO: 83717 - DNA, 966 bp, Artificial Sequence
  derived and/or modified sequence
atggaggagggccaatatagtgagatcgaggagctcccccgtcgaagatgttgtaggcggggaacccaaatcgtccttctaggcctggtgaccgccgctctgtgggccggattgctgaccctgttactgctgtggcactgggataccactcagagtttaaaacaactcgaggagagagccgcacgcaacgtttcccaagtgtccaagaatctggagtcgcaccacggagaccagatggcccaaaagtcccaaagcacgcagatcagccaagaactggaggagctgagagctgaacaacagcggctgaagagccaggatttagaactgtcgtggaatttaaacggcctacaggccgacttatcgtcgttcaagtcacaggaattgaacgaacggaacgaggcaagcgacctgcttgaaagactgagggaggaggttacgaagctgcggatggaacttcaggtgtcttcaggttttgtttgcaacacttgcccggaaaagtggattaacttccagcgcaagtgctactattttgggaaaggaaccaagcagtgggtccatgcccgttacgcgtgcgacgacatggaaggccagctagtctctatccactcccctgaagaacaggatttcctcactaaacatgccagtcacactgggtcatggatcggattgagaaacctcgatctgaagggggagtttatttgggtagatggaagtcacgtcgactacagcaattgggcccctggtgagcccacttcccggtcacaaggcgaagactgcgtgatgatgcggggttcaggcagatggaacgatgccttctgtgacagaaagttaggggcatgggtttgcgatcggctggcgacatgcaccccgcctgcttctgagggtagtgccgagagcatgggaccggactcccggcctgatcccgatggaagattgccaactcccagcgccccactgcactcctag

SEQ ID NO: 83718 - protein, 432 aa, Artificial Sequence
  derived and/or modified sequence
MDADEGQDMSQVSGKESPPVSDTPDEGDEPMPIPEDLSTTSGGQQSSKSDRVVASNVKVETQSDEENGRACEMNGEECAEDLRMLDASGEKMNGSHRDQGSSALSGVGGIRLPNGKLKCDICGIICIGPNVLMVHKRSHTGERPFQCNQCGASFTQKGNLLRHIKLHSGEKPFKCHLCNYACRRRDALTGHLRTHSGDKGLSDTPYDSSASYEKENEMMKSHVMDQAINNAINYLGAESLRPLVQTPPGGSEVVPVISPMYQLHKPLAEGTPRSNHSAQDSAVENLLLLSKAKLVPSEREASPSNSCQDSTDTESNNEEQRSGLIYLTNHIAPHARNGLSLKEEHRAYDLLRAASENSQDALRVVSTSGEQMKVYKCEHCRVLFLDHVMYTIHMGCHGFRDPFECNMCGYHSQDRYEFSSHITRGEHRFHMS

SEQ ID NO: 83719 - DNA, 1299 bp, Artificial Sequence
  derived and/or modified sequence
atggacgccgacgaagggcaggatatgagccaagtctcaggtaaggaatcgccgcctgtgtcagacacacccgacgaaggggatgagcctatgccgataccagaagacctaagcaccacttcaggagggcagcagtcttccaagagcgatagagtggtggctagcaatgtcaaggtagagactcagtccgatgaagagaatggcagagcatgtgagatgaatggcgaggaatgcgctgaggacctacgcatgcttgatgcctctggcgagaagatgaacggatcgcatcgggatcaaggctcatctgctctttctggcgtgggcggaatcaggttgcctaacggcaagttaaagtgcgacatctgcggcattatatgcatcggtcctaatgtgctgatggtgcacaagcgctcacatacaggggaaaggccctttcagtgtaatcaatgtggggcatccttcacccagaaaggcaacctcctgcgccacatcaaactgcactccggtgagaagccctttaagtgtcacttatgcaattacgcctgccgccggcgcgacgcactgactggccaccttaggacacacagcggcgataagggactttccgatacaccttatgactcatcagcaagttatgagaaagagaacgagatgatgaagagccatgtgatggatcaggcaatcaacaacgccatcaattacttgggagccgagtccttacgccccttagtacagacaccacctggcggcagcgaggttgtgccggtgataagcccgatgtaccaactgcataagcccctggccgaaggaacaccccggagcaaccattcagcacaggatagcgccgtggaaaacctgctcctgctgtctaaggcaaagctagttccgagcgaaagggaagcatctcctagcaattcatgccaagattccacagacacggaaagcaataatgaagagcaacgcagcggactgatctacttaaccaaccatatcgccccacatgcccgaaacggcctgagtctgaaagaagaacacagggcatacgacctgttgcgcgccgccagcgagaatagccaagatgcactgcgtgtagtctcgacgtctggggaacagatgaaggtctataagtgcgaacattgtcgggtgcttttcttggatcatgtgatgtacacgattcacatgggatgtcacggctttcgggatccatttgagtgtaatatgtgcggataccactcgcaggacaggtatgaattttcctcccacatcacaagaggcgaacataggttccacatgtcttag

SEQ ID NO: 83720 - DNA, 5928 bp, Artificial Sequence
  derived and/or modified sequence
cgcggcgcatcccagcctgggcgggacgctcggccgcggcgaggcgggcaagcctggcagggcagagggagccccggctccgaggttgctcttcgcacccgaggatcagtcttggccccaaagcgcgacgcacaaatccacataacctgaggaccatggatgctgatgagggtcaagacatgtcccaagtttcagggaaggaaagcccccctgtaagcgatactccagatgagggcgatgagcccatgccgatccccgaggacctctccaccacctcgggaggacagcaaagctccaagagtgacagagtcgtggccagtaatgttaaagtagagactcagagtgatgaagagaatgggcgtgcctgtgaaatgaatggggaagaatgtgcggaggatttacgaatgcttgatgcctcgggagagaaaatgaatggctcccacagggaccaaggcagctcggctttgtcgggagttggaggcattcgacttcctaacggaaaactaaagtgtgatatctgtgggatcatttgcatcgggcccaatgtgctcatggttcacaaaagaagccacactggagaacggcccttccagtgcaatcagtgcggggcctcattcacccagaagggcaacctgctccggcacatcaagctgcattccggggagaagcccttcaaatgccacctctgcaactacgcctgccgccggagggacgccctcactggccacctgaggacgcactccggggacaagggcctgtccgacacgccctacgacagcagcgccagctacgagaaggagaacgaaatgatgaagtcccacgtgatggaccaagccatcaacaacgccatcaactacctgggggccgagtccctgcgcccgctggtgcagacgcccccgggcggttccgaggtggtcccggtcatcagcccgatgtaccagctgcacaagccgctcgcggagggcaccccgcgctccaaccactcggcccaggacagcgccgtggagaacctgctgctgctctccaaggccaagttggtgccctcggagcgcgaggcgtccccgagcaacagctgccaagactccacggacaccgagagcaacaacgaggagcagcgcagcggtctcatctacctgaccaaccacatcgccccgcacgcgcgcaacgggctgtcgctcaaggaggagcaccgcgcctacgacctgctgcgcgccgcctccgagaactcgcaggacgcgctccgcgtggtcagcaccagcggggagcagatgaaggtgtacaagtgcgaacactgccgggtgctcttcctggatcacgtcatgtacaccatccacatgggctgccacggcttccgtgatccttttgagtgcaacatgtgcggctaccacagccaggaccggtacgagttctcgtcgcacataacgcgaggggagcaccgcttccacatgagctaaagccctcccgcgcccccaccccagaccccgagccaccccaggaaaagcacaaggactgccgccttctcgctcccgccagcagcatagactggactggaccagacaatgttgtgtttggatttgtaactgttttttgttttttgtttgagttggttgattggggtttgatttgcttttgaaaagatttttatttttagaggcagggctgcattgggagcatccagaactgctaccttcctagatgtttccccagaccgctggctgagattccctcacctgtcgcttcctagaatccccttctccaaacgattagtctaaattttcagagagaaatagataaaacacgccacagcctgggaaggagcgtgctctaccctgtgctaagcacggggttcgcgcaccaggtgtctttttccagtccccagaagcagagagcacagcccctgctgtgtgggtctgcaggtgagcagacaggacaggtgtgccgccacccaagtgccaagacacagcagggccaacaacctgtgcccaggccagcttcgagctacatgcatctagggcggagaggctgcacttgtgagagaaaatactatttcaagtcatattctgcgtaggaaaatgaattggttggggaaagtcgtgtctgtcagactgccctgggtggagggagacgccgggctagagcctttgggatcgtcctggattcactggctttgcggaggctgctcagatggcctgagcctcccgaggcttgctgccccgtaggaggagactgtcttcccgtgggcatatctggggagccctgttccccgctttttcactcccatacctttaatggcccccaaaatctgtcactacaatttaaacaccagtcccgaaatttggatcttctttctttttgaatctctcaaacggcaacattcctcagaaaccaaagctttatttcaaatctcttccttccctggctggttccatctagtaccagaggcctcttttcctgaagaaatccaatcctagccctcattttaattatgtacatctgtttgtagccacaagcctgaatttctcagtgttggtaagtttctttacctaccctcactatatattattctcgttttaaaacccataaaggagtgatttagaacagtcattaattttcaactcaatgaaatatgtgaagcccagcatctctgttgctaacacacagagctcacctgtttgaaaccaagctttcaaacatgttgaagctctttactgtaaaggcaagccagcatgtgtgtccacacatacataggatggctggctctgcacctgtaggatattggaatgcacagggcaattgagggactgagccagaccttcggagagtaatgccaccagatcccctaggaaagaggaggcaaatggcactgcaggtgagaaccccgcccatccgtgctatgacatggaggcactgaagcccgaggaaggtgtgtggagattctaatcccaacaagcaagggtctccttcaagattaatgctatcaatcattaaggtcattactctcaaccacctaggcaatgaagaatataccatttcaaatatttacagtacttgtcttcaccaacactgtcccaaggtgaaatgaagcaacagagaggaaattgtacataagtacctcagcatttaatccaaacaggggttcttagtctcagcactatgacattttgggctgactacttatttgttaggcgggagctctcctgtgcattgtaggataattagcagtatccctggtggctacccaatagacgccagtagcaccccgaattgacaacccaaactctccagacatcaccaactgtcccctgcgaggagaaatcactcctgggggagaaccactgacccaaatgaattctaaaccaatcaaatgtctgggaagccctccaagaaaaaaaatagaaaagcacttgaagaatattcccaatattcccggtcagcagtatcaaggctgacttgtgttcatgtggagtcattataaattctataaatcaattattccccttcggtcttaaaaatatatttcctcataaacatttgagttttgttgaaaagatggagtttacaaagataccattcttgagtcatggatttctctgctcacagaagggtgtggcatttggaaacgggaataaacaaaattgctgcaccaatgcactgagtgaaggaagagagacagaggatcaagggctttagacagcactccttcaatatgcaatcacagagaaagatgcgccttatccaagttaatatctctaaggtgagagccttcttagagtcagtttgttgcaaatttcacctactctgttcttttccatccatccccctgagtcagttggttgaagggagttattttttcaagtggaattcaaacaaagctcaaaccagaactgtaaatagtgattgcaggaattcttttctaaactgctttgccctttcctctcactgccttttatagccaatataaatgtctctttgcacaccttttgttgtggttttatattgtaacaccatttttctttgaaactattgtatttaaagtaaggtttcatattatgtcagcaagtaattaacttatgtttaaaaggtggccatatcatgtaccaaaagttgctgaagtttctcttctagctggtaaagtaggagtttgcatgacttcacactttttttgcgtagtttcttctgttgtatgatggcgtgagtgtgtgtcttgggtaccgctgtgtactactgtgtgcctagattccatgcactctcgttgtgtttgaagtaaatattggagaccggagggtaacaggttggcctgttgattacagctagtaatcgctgtgtcttgttccgccccctccctgacaccccagcttcccaggatgtggaaagcctggatctcagctccttgccccatatcccttctgtaatttgtacctaaagagtgtgattatcctaattcaagagtcactaaaactcatcacattatcattgcatatcagcaaagggtaaagtcctagcaccaattgcttcacataccagcatgttccatttccaatttagaattagccacataataaaatcttagaatcttccttgagaaagagctgcctgagatgtagttttgttatatggttccccaccgaccatttttgtgcttttttcttgttttgttttgttttgactgcactgtgagttttgtagtgtcctcttcttgccaaaacaaacgcgagatgaactggacttatgtagacaaatcgtgatgccagtgtatccttcctttcttcagttccagcaataatgaatggtcaacttttttaaaatctagatctctctcattcatttcaatgtatttttactttaagatgaaccaaaattattagacttatttaagatgtacaggcatcagaaaaaagaagcacataatgcttttggtgcgatggcactcactgtgaacatgtgtaaccacatattaatatgcaatattgtttccaatactttctaatacagttttttataatgttgtgtgtggtgattgttcaggtcgaatctgttgtatccagtacagctttaggtcttcagctgcccttctggcgagtacatgcacaggattgtaaatgagaaatgcagtcatatttccagtctgcctctatgatgatgttaaattattgctgtttagctgtgaacaagggatgtaccactggaggaatagagtatccttttgtacacattttgaaatgcttcttctgtagtgatagaacaaataaatgcaacgaatactctgtctgccctatcccgtgaagtccacactggcgtaagagaaggcccagcagagcaggaatctgcctagactttctcccaatgagatcccaatatgagagggagaagagatgggcctcaggacagctgcaataccacttgggaacacatgtggtgtcttgatgtggccagcgcagcagttcagcacaacgtacctcccatctacaacagtgctggacgtgggaattctaagtcccagtcttgagggtgggtggagatggagggcaacaagagatacatttccagttctccactgcagcatgcttcagtcattctgtgagtggccgggcccagggccctcacaatttcactaccttgtcttttacatagtcataagaattatcctcaacatagccttttgacgctgtaaatcttgagtattcatttacccttttctgatctcctggaaacagctgcctgcctgcattgcacttctcttcccgaggagtggggtaaatttaaaagtcaagttatagtttggatgttagtatagaattttgaaattgggaattaaaaatcaggactggggactgggagaccaaaaatttctgatcccatttctgatggatgtgtcacaccttttctgtcaaaataaaatgtcttggaggttatgactccttggtgaaa

SEQ ID NO: 83721 - DNA, 1299 bp, Artificial Sequence
  derived and/or modified sequence
atggatgctgatgagggccaggacatgagccaggtgtctgggaaggagagcccccctgtgtctgacaccccagatgaaggagatgagcccatgcccatccctgaggacctgagcaccaccagcggcggccagcagagcagcaagagtgacagagtggtggccagcaatgtgaaggtggagacccagagtgatgaggagaatggccgggcctgtgagatgaatggagaagaatgtgccgaggacctgaggatgctggatgccagcggggagaagatgaatggcagccaccgggaccagggcagcagcgccctgtctggagtgggcggcatccggctgcccaacgggaagctgaagtgtgacatctgtggcatcatctgcatcggccccaacgtgctgatggtgcacaagaggagccacactggagagcggcccttccagtgcaaccagtgtggggccagcttcacccagaagggcaacctgctgcggcacatcaagctgcacagcggggagaagcccttcaagtgccacctgtgcaactatgcctgcagaagaagagatgccctgaccggccacctgcggacccacagcggggacaagggcctgagtgacaccccctatgacagcagcgccagctatgagaaggaaaatgagatgatgaagagccacgtgatggaccaggccatcaacaatgccatcaactacctgggcgctgagagcctgcggcccctggtgcagaccccacctgggggcagcgaggtggtgcctgtgatcagccccatgtaccagctgcacaagcccctggccgagggcacccccaggagcaaccacagcgcccaggacagcgctgtggagaacctgctgctgctgagcaaggccaagctggtgcccagcgagcgggaggccagccccagcaacagctgccaggacagcacagacacagagagcaacaatgaggagcagaggagcggcctcatctacctgaccaaccacatcgccccccacgccagaaatggcctgagcctgaaggaggagcaccgggcctatgacctgctgcgggccgccagcgagaacagccaggatgccctgcgggtggtgtccaccagcggggagcagatgaaggtgtacaagtgtgagcactgccgggtgctcttcctggaccacgtgatgtacaccatccacatgggctgccacggcttccgggacccctttgagtgcaacatgtgtggctaccacagccaggacagatatgagttcagcagccacatcaccagaggagagcaccgcttccacatgtcctag

SEQ ID NO: 83722 - DNA, 1299 bp, Artificial Sequence
  derived and/or modified sequence
atggacgccgacgagggccaggacatgagccaggtgagcggcaaggaaagtccaccggtcagcgatactccagacgagggcgacgagcctatgcccatcccagaggacttgagcactacctcagggggccagcaaagtagcaagagtgatagagtggtcgcgtctaacgttaaagtcgaaactcagtcggatgaggaaaatggccgagcttgcgagatgaacggagaagagtgtgcggaggacctccgcatgctggacgcctccggcgaaaagatgaatggcagccaccgagatcagggatcttctgcgctgtccggagtaggcggcattcgtctccctaacggcaaattaaagtgcgatatctgtggcattatctgtattgggcccaacgtcttaatggtccataagagatctcatactggcgagcgacctttccagtgtaatcagtgtggtgcaagcttcactcaaaagggaaacctgctgagacacattaagctgcactcaggcgaaaaacctttcaagtgtcacctctgtaactacgcctgtcggcgacgcgacgcattgacaggacacctgaggacgcattccggagataaggggctgtccgatactccctacgattctagcgcgtcctacgagaaagaaaatgagatgatgaaatcacatgtgatggaccaggcaattaataacgcgataaattacctgggggcggaatcgctgcgccctctggtgcagacgccacctgggggctctgaggtagtgcccgtgatatcccccatgtaccagttacacaagccgctggcagaaggaacccccaggagcaaccacagtgctcaggatagtgcggtcgagaatttacttttgttatcaaaggcgaaactcgtgccatccgagcgagaggcatctccttctaacagctgccaagactcaactgacactgagagcaataacgaggagcagcggtccggactgatctatctgacgaaccacatcgccccccatgcccggaatggactttccttaaaggaagagcacagggcctacgatctgctgagggctgcatccgagaactcgcaggacgctttgagagtcgtttcaacgtcaggggagcagatgaaggtgtacaagtgcgagcattgtagagtgctctttcttgaccatgttatgtacactatccacatggggtgtcatggattccgggacccctttgagtgtaacatgtgtggatatcacagccaagatcgctatgagtttagcagccacatcacacgaggagaacatcgctttcacatgagttag

SEQ ID NO: 83723 - DNA, 1299 bp, Artificial Sequence
  derived and/or modified sequence
atggatgctgacgaagggcaggacatgagccaggtctctgggaaggaatctcctcccgtgtccgataccccagacgaaggagacgaacccatgcccataccagaagacctgtctactacatccgggggtcagcagagcagcaagtccgaccgcgttgtggcaagtaatgttaaagtcgaaacccagtctgacgaagagaacggaagagcctgtgaaatgaacggcgaggaatgcgcggaagatctgaggatgctggatgcttccggcgaaaagatgaacgggagccaccgcgatcaggggtccagtgctctgtcaggggtgggcggtatccgattacccaatggcaagctgaaatgcgacatctgtggaataatctgtatcgggccaaacgtcctcatggtgcacaagcgttcgcacaccggggagcgtccgttccagtgtaaccagtgtggagccagctttacgcagaaaggcaatctgctgagacatatcaagttacactcaggcgagaaacctttcaagtgccatctctgtaactatgcatgccgccgtcgcgacgcattaaccggacacctgcgcacccattctggggacaagggcctgtctgataccccttacgactcgtcagctagctacgagaaggaaaatgagatgatgaaaagccacgtgatggaccaggctattaacaacgcgatcaattatttaggtgcggagagcctgagaccgctcgtgcagacccccccagggggaagcgaggtggtccctgtcatctctcccatgtatcagctgcataagccccttgccgagggaactcctcgtagtaaccacagcgcacaggattcagcagtggagaacctgctgctgctaagcaaggctaagctggtcccttccgagcgcgaggcaagccctagcaactcttgccaagactctaccgatacagaatcaaacaacgaggagcaacgaagtggtttgatatacctgaccaaccacattgctccccatgccaggaacggactgtcacttaaagaggaacaccgggcatacgatctgctacgagctgcctcagagaattctcaggatgccctcagagtggtgtctacttccggagaacagatgaaggtgtataagtgtgagcactgccgcgtgttgttcttggatcatgtgatgtacacgattcatatgggctgtcacggatttcgggatccctttgagtgtaatatgtgcggctatcattctcaagatcgatatgagttctcatcccacatcacaaggggcgaacatagattccatatgagctag

SEQ ID NO: 83724 - DNA, 1299 bp, Artificial Sequence
  derived and/or modified sequence
atggacgccgacgagggccaggacatgagccaggtgagcggcaaggagagcccccccgtgagcgacacccccgacgagggcgacgagcccatgcccatccccgaggacctgagcaccaccagcggcggccagcagagcagcaagagcgacagagtggtggccagcaacgtgaaggtggagacccagagcgacgaggagaacggcagagcctgcgagatgaacggcgaggagtgcgccgaggacctgagaatgctggacgccagcggcgagaagatgaacggcagccacagagaccagggcagcagcgccctgagcggcgtgggcggcatcagactgcccaacggcaagctgaagtgcgacatctgcggcatcatctgcatcggccccaacgtgctgatggtgcacaagagaagccacaccggcgagagacccttccagtgcaaccagtgcggcgccagcttcacccagaagggcaacctgctgagacacatcaagctgcacagcggcgagaagcccttcaagtgccacctgtgcaactacgcctgcagaagaagagacgccctgaccggccacctgagaacccacagcggcgacaagggcctgagcgacaccccctacgacagcagcgccagctacgagaaggagaacgagatgatgaagagccacgtgatggaccaggccatcaacaacgccatcaactacctgggcgccgagagcctgagacccctggtgcagaccccccccggcggcagcgaggtggtgcccgtgatcagccccatgtaccagctgcacaagcccctggccgagggcacccccagaagcaaccacagcgcccaggacagcgccgtggagaacctgctgctgctgagcaaggccaagctggtgcccagcgagagagaggccagccccagcaacagctgccaggacagcaccgacaccgagagcaacaacgaggagcagagaagcggcctgatctacctgaccaaccacatcgccccccacgccagaaacggcctgagcctgaaggaggagcacagagcctacgacctgctgagagccgccagcgagaacagccaggacgccctgagagtggtgagcaccagcggcgagcagatgaaggtgtacaagtgcgagcactgcagagtgctgttcctggaccacgtgatgtacaccatccacatgggctgccacggcttcagagaccccttcgagtgcaacatgtgcggctaccacagccaggacagatacgagttcagcagccacatcaccagaggcgagcacagattccacatgagctag

SEQ ID NO: 83725 - protein, 376 aa, Artificial Sequence
  derived and/or modified sequence
MDADEGQDMSQVSGKESPPVSDTPDEGDEPMPIPEDLSTTSGGQQSSKSDRVVASNVKVETQSDEENGRACEMNGEECAEDLRMLDASGEKMNGSHRDQGSSALSGVGGIRLPNGKLKCDICGIICIGPNVLMVHKRSHTGDKGLSDTPYDSSASYEKENEMMKSHVMDQAINNAINYLGAESLRPLVQTPPGGSEVVPVISPMYQLHKPLAEGTPRSNHSAQDSAVENLLLLSKAKLVPSEREASPSNSCQDSTDTESNNEEQRSGLIYLTNHIAPHARNGLSLKEEHRAYDLLRAASENSQDALRVVSTSGEQMKVYKCEHCRVLFLDHVMYTIHMGCHGFRDPFECNMCGYHSQDRYEFSSHITRGEHRFHMS

SEQ ID NO: 83726 - DNA, 1131 bp, Artificial Sequence
  derived and/or modified sequence
atggatgccgatgaaggccaggacatgtcccaggtctccggcaaagagagtcctcccgtgagtgatactcccgacgaaggagatgagcctatgcccatcccagaggatctgagcacgaccagtggcgggcagcaaagcagcaaatccgaccgcgtggtggcctccaatgtgaaggtggagacccaaagcgacgaggagaacggaagagcctgtgagatgaacggagaggaatgtgccgaagaccttcgcatgcttgacgcctcaggtgaaaaaatgaatggatctcaccgtgaccagggcagcagtgccctcagcggtgtgggcgggatccgactgcccaatggcaaactgaagtgcgacatatgtgggattatctgtatcggccccaatgtactcatggttcacaaacggtctcacactggggataaggggctgtcagacactccctacgacagtagtgcttcatacgagaaggaaaatgagatgatgaagagccacgtgatggatcaggctattaacaatgccatcaactacttaggggctgaatcattgaggcctcttgttcagactccccctggtggaagcgaagtagtgccagtcatcagtccaatgtatcagctgcataagcctcttgctgaaggaacccctcgctccaaccattcagcacaggacagcgcagtagagaatctcctactcctttccaaagctaagttggtccctagcgagcgcgaggcttcaccttcaaactcatgccaagatagcacggatactgagagcaacaatgaagagcagagatcgggacttatatatttgacaaaccatattgcccctcatgcccggaacggactctcactaaaggaagaacaccgcgcttatgatctgctcagagccgcctcagagaactcacaagacgcgctgagagtggtttccacctctggcgaacagatgaaagtatacaagtgcgagcactgcagggtgctttttctcgaccacgtcatgtacaccattcacatgggatgtcacggatttcgggaccctttcgagtgtaacatgtgtgggtatcacagccaagatagatatgagtttagctcacatatcacccgaggcgagcacaggtttcacatgtcgtag

SEQ ID NO: 83727 - DNA, 5760 bp, Artificial Sequence
  derived and/or modified sequence
cgcggcgcatcccagcctgggcgggacgctcggccgcggcgaggcgggcaagcctggcagggcagagggagccccggctccgaggttgctcttcgcacccgaggatcagtcttggccccaaagcgcgacgcacaaatccacataacctgaggaccatggatgctgatgagggtcaagacatgtcccaagtttcagggaaggaaagcccccctgtaagcgatactccagatgagggcgatgagcccatgccgatccccgaggacctctccaccacctcgggaggacagcaaagctccaagagtgacagagtcgtggccagtaatgttaaagtagagactcagagtgatgaagagaatgggcgtgcctgtgaaatgaatggggaagaatgtgcggaggatttacgaatgcttgatgcctcgggagagaaaatgaatggctcccacagggaccaaggcagctcggctttgtcgggagttggaggcattcgacttcctaacggaaaactaaagtgtgatatctgtgggatcatttgcatcgggcccaatgtgctcatggttcacaaaagaagccacactggggacaagggcctgtccgacacgccctacgacagcagcgccagctacgagaaggagaacgaaatgatgaagtcccacgtgatggaccaagccatcaacaacgccatcaactacctgggggccgagtccctgcgcccgctggtgcagacgcccccgggcggttccgaggtggtcccggtcatcagcccgatgtaccagctgcacaagccgctcgcggagggcaccccgcgctccaaccactcggcccaggacagcgccgtggagaacctgctgctgctctccaaggccaagttggtgccctcggagcgcgaggcgtccccgagcaacagctgccaagactccacggacaccgagagcaacaacgaggagcagcgcagcggtctcatctacctgaccaaccacatcgccccgcacgcgcgcaacgggctgtcgctcaaggaggagcaccgcgcctacgacctgctgcgcgccgcctccgagaactcgcaggacgcgctccgcgtggtcagcaccagcggggagcagatgaaggtgtacaagtgcgaacactgccgggtgctcttcctggatcacgtcatgtacaccatccacatgggctgccacggcttccgtgatccttttgagtgcaacatgtgcggctaccacagccaggaccggtacgagttctcgtcgcacataacgcgaggggagcaccgcttccacatgagctaaagccctcccgcgcccccaccccagaccccgagccaccccaggaaaagcacaaggactgccgccttctcgctcccgccagcagcatagactggactggaccagacaatgttgtgtttggatttgtaactgttttttgttttttgtttgagttggttgattggggtttgatttgcttttgaaaagatttttatttttagaggcagggctgcattgggagcatccagaactgctaccttcctagatgtttccccagaccgctggctgagattccctcacctgtcgcttcctagaatccccttctccaaacgattagtctaaattttcagagagaaatagataaaacacgccacagcctgggaaggagcgtgctctaccctgtgctaagcacggggttcgcgcaccaggtgtctttttccagtccccagaagcagagagcacagcccctgctgtgtgggtctgcaggtgagcagacaggacaggtgtgccgccacccaagtgccaagacacagcagggccaacaacctgtgcccaggccagcttcgagctacatgcatctagggcggagaggctgcacttgtgagagaaaatactatttcaagtcatattctgcgtaggaaaatgaattggttggggaaagtcgtgtctgtcagactgccctgggtggagggagacgccgggctagagcctttgggatcgtcctggattcactggctttgcggaggctgctcagatggcctgagcctcccgaggcttgctgccccgtaggaggagactgtcttcccgtgggcatatctggggagccctgttccccgctttttcactcccatacctttaatggcccccaaaatctgtcactacaatttaaacaccagtcccgaaatttggatcttctttctttttgaatctctcaaacggcaacattcctcagaaaccaaagctttatttcaaatctcttccttccctggctggttccatctagtaccagaggcctcttttcctgaagaaatccaatcctagccctcattttaattatgtacatctgtttgtagccacaagcctgaatttctcagtgttggtaagtttctttacctaccctcactatatattattctcgttttaaaacccataaaggagtgatttagaacagtcattaattttcaactcaatgaaatatgtgaagcccagcatctctgttgctaacacacagagctcacctgtttgaaaccaagctttcaaacatgttgaagctctttactgtaaaggcaagccagcatgtgtgtccacacatacataggatggctggctctgcacctgtaggatattggaatgcacagggcaattgagggactgagccagaccttcggagagtaatgccaccagatcccctaggaaagaggaggcaaatggcactgcaggtgagaaccccgcccatccgtgctatgacatggaggcactgaagcccgaggaaggtgtgtggagattctaatcccaacaagcaagggtctccttcaagattaatgctatcaatcattaaggtcattactctcaaccacctaggcaatgaagaatataccatttcaaatatttacagtacttgtcttcaccaacactgtcccaaggtgaaatgaagcaacagagaggaaattgtacataagtacctcagcatttaatccaaacaggggttcttagtctcagcactatgacattttgggctgactacttatttgttaggcgggagctctcctgtgcattgtaggataattagcagtatccctggtggctacccaatagacgccagtagcaccccgaattgacaacccaaactctccagacatcaccaactgtcccctgcgaggagaaatcactcctgggggagaaccactgacccaaatgaattctaaaccaatcaaatgtctgggaagccctccaagaaaaaaaatagaaaagcacttgaagaatattcccaatattcccggtcagcagtatcaaggctgacttgtgttcatgtggagtcattataaattctataaatcaattattccccttcggtcttaaaaatatatttcctcataaacatttgagttttgttgaaaagatggagtttacaaagataccattcttgagtcatggatttctctgctcacagaagggtgtggcatttggaaacgggaataaacaaaattgctgcaccaatgcactgagtgaaggaagagagacagaggatcaagggctttagacagcactccttcaatatgcaatcacagagaaagatgcgccttatccaagttaatatctctaaggtgagagccttcttagagtcagtttgttgcaaatttcacctactctgttcttttccatccatccccctgagtcagttggttgaagggagttattttttcaagtggaattcaaacaaagctcaaaccagaactgtaaatagtgattgcaggaattcttttctaaactgctttgccctttcctctcactgccttttatagccaatataaatgtctctttgcacaccttttgttgtggttttatattgtaacaccatttttctttgaaactattgtatttaaagtaaggtttcatattatgtcagcaagtaattaacttatgtttaaaaggtggccatatcatgtaccaaaagttgctgaagtttctcttctagctggtaaagtaggagtttgcatgacttcacactttttttgcgtagtttcttctgttgtatgatggcgtgagtgtgtgtcttgggtaccgctgtgtactactgtgtgcctagattccatgcactctcgttgtgtttgaagtaaatattggagaccggagggtaacaggttggcctgttgattacagctagtaatcgctgtgtcttgttccgccccctccctgacaccccagcttcccaggatgtggaaagcctggatctcagctccttgccccatatcccttctgtaatttgtacctaaagagtgtgattatcctaattcaagagtcactaaaactcatcacattatcattgcatatcagcaaagggtaaagtcctagcaccaattgcttcacataccagcatgttccatttccaatttagaattagccacataataaaatcttagaatcttccttgagaaagagctgcctgagatgtagttttgttatatggttccccaccgaccatttttgtgcttttttcttgttttgttttgttttgactgcactgtgagttttgtagtgtcctcttcttgccaaaacaaacgcgagatgaactggacttatgtagacaaatcgtgatgccagtgtatccttcctttcttcagttccagcaataatgaatggtcaacttttttaaaatctagatctctctcattcatttcaatgtatttttactttaagatgaaccaaaattattagacttatttaagatgtacaggcatcagaaaaaagaagcacataatgcttttggtgcgatggcactcactgtgaacatgtgtaaccacatattaatatgcaatattgtttccaatactttctaatacagttttttataatgttgtgtgtggtgattgttcaggtcgaatctgttgtatccagtacagctttaggtcttcagctgcccttctggcgagtacatgcacaggattgtaaatgagaaatgcagtcatatttccagtctgcctctatgatgatgttaaattattgctgtttagctgtgaacaagggatgtaccactggaggaatagagtatccttttgtacacattttgaaatgcttcttctgtagtgatagaacaaataaatgcaacgaatactctgtctgccctatcccgtgaagtccacactggcgtaagagaaggcccagcagagcaggaatctgcctagactttctcccaatgagatcccaatatgagagggagaagagatgggcctcaggacagctgcaataccacttgggaacacatgtggtgtcttgatgtggccagcgcagcagttcagcacaacgtacctcccatctacaacagtgctggacgtgggaattctaagtcccagtcttgagggtgggtggagatggagggcaacaagagatacatttccagttctccactgcagcatgcttcagtcattctgtgagtggccgggcccagggccctcacaatttcactaccttgtcttttacatagtcataagaattatcctcaacatagccttttgacgctgtaaatcttgagtattcatttacccttttctgatctcctggaaacagctgcctgcctgcattgcacttctcttcccgaggagtggggtaaatttaaaagtcaagttatagtttggatgttagtatagaattttgaaattgggaattaaaaatcaggactggggactgggagaccaaaaatttctgatcccatttctgatggatgtgtcacaccttttctgtcaaaataaaatgtcttggaggttatgactccttggtgaaa

SEQ ID NO: 83728 - DNA, 1131 bp, Artificial Sequence
  derived and/or modified sequence
atggatgctgatgagggccaggacatgagccaggtgtctgggaaggagagcccccctgtgtctgacaccccagatgaaggagatgagcccatgcccatccctgaggacctgagcaccaccagcggcggccagcagagcagcaagagtgacagagtggtggccagcaatgtgaaggtggagacccagagtgatgaggagaatggccgggcctgtgagatgaatggagaagaatgtgccgaggacctgaggatgctggatgccagcggggagaagatgaatggcagccaccgggaccagggcagcagcgccctgtctggagtgggcggcatccggctgcccaacgggaagctgaagtgtgacatctgtggcatcatctgcatcggccccaacgtgctgatggtgcacaagaggagccacactggagacaagggcctgagtgacaccccctatgacagcagcgccagctatgagaaggaaaatgagatgatgaagagccacgtgatggaccaggccatcaacaatgccatcaactacctgggcgctgagagcctgcggcccctggtgcagaccccacctgggggcagcgaggtggtgcctgtgatcagccccatgtaccagctgcacaagcccctggccgagggcacccccaggagcaaccacagcgcccaggacagcgctgtggagaacctgctgctgctgagcaaggccaagctggtgcccagcgagcgggaggccagccccagcaacagctgccaggacagcacagacacagagagcaacaatgaggagcagaggagcggcctcatctacctgaccaaccacatcgccccccacgccagaaatggcctgagcctgaaggaggagcaccgggcctatgacctgctgcgggccgccagcgagaacagccaggatgccctgcgggtggtgtccaccagcggggagcagatgaaggtgtacaagtgtgagcactgccgggtgctcttcctggaccacgtgatgtacaccatccacatgggctgccacggcttccgggacccctttgagtgcaacatgtgtggctaccacagccaggacagatatgagttcagcagccacatcaccagaggagagcaccgcttccacatgtcctag

SEQ ID NO: 83729 - DNA, 1131 bp, Artificial Sequence
  derived and/or modified sequence
atggacgccgacgagggccaggacatgagccaggtgagcggcaaggagtccccccccgtctcggatacgcctgacgaaggggacgagcccatgcccatccccgaggacctttctaccacctcaggcggtcagcagtcctccaagtccgacagagtggtcgcctccaacgtcaaggtggagacccagtctgacgaggagaacggaagagcctgcgaaatgaacggcgaggaatgtgccgaggacctacgaatgctggacgcctcaggtgagaaaatgaatgggagccacagagaccaggggtcttctgcactctcaggcgtaggcggaattaggctgcctaatggcaagttgaagtgtgacatatgtgggatcatttgcattggacctaacgtcctgatggtgcacaagagatcgcatacaggagataaaggattatccgataccccttatgactcctccgcctcttacgaaaaggaaaacgagatgatgaagtcacacgtaatggaccaggctattaacaatgccattaattacctgggggccgagtcattgagacctctggtgcagacacctccgggcggcagcgaagtcgtgcccgtgatctccccaatgtaccagcttcataaacctctagccgaagggactccccgttcaaaccactccgcccaggactcagctgtcgaaaatctgttactgctctctaaagcgaaactagtgccttctgaacgtgaggcaagtccctccaactcctgtcaagattccactgatactgaatcaaataatgaggagcagcgctcgggactgatctaccttaccaaccacatagcccctcatgcaagaaatggcctatctctgaaagaagagcaccgggcatacgatctgctgcgggcagccagtgagaatagccaagatgcactgcgggtcgtatctacctccggagagcaaatgaaagtctataaatgtgagcactgtagagtgctgtttcttgaccatgtgatgtacaccatccacatgggttgccatggcttccgagaccctttcgagtgcaatatgtgcggataccattcgcaggaccggtacgagttctctagccacatcacgcgcggggagcaccgcttccatatgagctag

SEQ ID NO: 83730 - DNA, 1131 bp, Artificial Sequence
  derived and/or modified sequence
atggatgctgacgaaggtcaagacatgagtcaggtgagtggcaaggaatctcccccagtaagcgacacacctgacgagggcgatgagccaatgcccatccctgaagatctatccaccacatctggtggccagcagtcaagtaagtccgatagggtggttgccagcaatgttaaggtcgaaacccagtctgacgaggaaaatggaagggcatgcgaaatgaatggcgaagaatgtgctgaagacctgcggatgctggatgcttctggtgagaagatgaatggctcccatcgagaccaggggtcctctgctctgtccggcgttggaggcattcggctgcccaacggtaagctgaaatgcgatatctgcgggatcatctgcataggaccaaatgtgctgatggtgcacaaaagatcccacaccggtgacaaggggctatctgacacgccatacgactcctccgcgtcctacgaaaaagaaaacgaaatgatgaaatcccacgtgatggaccaagccatcaacaacgcgataaactatttaggagccgagtcgctgcggccacttgtgcaaacccctcctggcggatcagaagtggtcccggtgatcagtcctatgtatcagcttcataaacctctggcggaagggacaccacggagcaaccactccgcccaggactctgccgtcgaaaatcttctcctgttgagcaaagccaagcttgtgccttcagagcgggaagctagcccctccaatagttgtcaggactctaccgacaccgagtctaacaatgaggaacagcgctcaggcctcatctatttgactaatcacattgcacctcacgcccgtaatggactgtcgctgaaggaggagcatagagcctatgatctcctgcgagcagcctctgaaaatagtcaagatgcgctgcgcgttgtgtctacctctggcgagcagatgaaggtgtataaatgcgagcattgccgggtgctgttcctcgaccacgttatgtataccatccacatggggtgtcacgggttccgcgatccgttcgaatgcaacatgtgcggctaccatagccaggaccgttacgagttctcaagccacattacacggggtgagcaccgtttccatatgagctag

SEQ ID NO: 83731 - DNA, 1131 bp, Artificial Sequence
  derived and/or modified sequence
atggacgccgacgagggccaggacatgagccaggtgagcggcaaggagagcccccccgtgagcgacacccccgacgagggcgacgagcccatgcccatccccgaggacctgagcaccaccagcggcggccagcagagcagcaagagcgacagagtggtggccagcaacgtgaaggtggagacccagagcgacgaggagaacggcagagcctgcgagatgaacggcgaggagtgcgccgaggacctgagaatgctggacgccagcggcgagaagatgaacggcagccacagagaccagggcagcagcgccctgagcggcgtgggcggcatcagactgcccaacggcaagctgaagtgcgacatctgcggcatcatctgcatcggccccaacgtgctgatggtgcacaagagaagccacaccggcgacaagggcctgagcgacaccccctacgacagcagcgccagctacgagaaggagaacgagatgatgaagagccacgtgatggaccaggccatcaacaacgccatcaactacctgggcgccgagagcctgagacccctggtgcagaccccccccggcggcagcgaggtggtgcccgtgatcagccccatgtaccagctgcacaagcccctggccgagggcacccccagaagcaaccacagcgcccaggacagcgccgtggagaacctgctgctgctgagcaaggccaagctggtgcccagcgagagagaggccagccccagcaacagctgccaggacagcaccgacaccgagagcaacaacgaggagcagagaagcggcctgatctacctgaccaaccacatcgccccccacgccagaaacggcctgagcctgaaggaggagcacagagcctacgacctgctgagagccgccagcgagaacagccaggacgccctgagagtggtgagcaccagcggcgagcagatgaaggtgtacaagtgcgagcactgcagagtgctgttcctggaccacgtgatgtacaccatccacatgggctgccacggcttcagagaccccttcgagtgcaacatgtgcggctaccacagccaggacagatacgagttcagcagccacatcaccagaggcgagcacagattccacatgagctag

SEQ ID NO: 83732 - protein, 328 aa, Artificial Sequence
  derived and/or modified sequence
MGAAARLSAPRALVLWAALGAAAHIGPAPDPEDWWSYKDNLQGNFVPGPPFWGLVNAAWSLCAVGKRQSPVDVELKRVLYDPFLPPLRLSTGGEKLRGTLYNTGRHVSFLPAPRPVVNVSGGPLLYSHRLSELRLLFGARDGAGSEHQINHQGFSAEVQLIHFNQELYGNFSAASRGPNGLAILSLFVNVASTSNPFLSRLLNRDTITRISYKNDAYFLQDLSLELLFPESFGFITYQGSLSTPPCSETVTWILIDRALNITSLQMHSLRLLSQNPPSQIFQSLSGNSRPLQPLAHRALRGNRDPRHPERRCRGPNYRLHVDGVPHGR

SEQ ID NO: 83733 - DNA, 399 bp, Artificial Sequence
  derived and/or modified sequence
atgctgagccccctgtggctgcagatcagcaagaggcccaggcctgaggtgtctgtgtccaatgcctgcttcagcagcgccctgcccaccagcaaccccaccagcctgaccctgaagcaccacaacatctttgtgctgcgggtggccctggagatcatccagtacagcgtgcacggcggcaggaacaggaagcccctggaggtgaccagcctggcctacagctgcccagagaactggtggcagaagcagatcggcgtgcagcccccagatgtgcacgccagcgccctgagccccaagccctgtgtgtcctggagccggcccctgagcctgctgagcagcaccatcctcttctggaagacccatgatgaaagagctgacttcagcaagctgcacagctag

SEQ ID NO: 83734 - DNA, 987 bp, Artificial Sequence
  derived and/or modified sequence
atgggggctgctgcccgattaagcgccccccgagctctagtgctctgggccgccctgggggcggcagcgcacatcggccctgcgcccgaccccgaagattggtggtcatacaaggacaacctgcagggcaatttcgtgccaggacctccgttttggggcctggtgaacgcggcgtggagtctctgtgccgtcggaaagaggcagagccctgtggacgtggaactcaagagggtgttgtatgacccattcctgccgccccttagactgagcactggcggtgagaaactgagaggcactctgtacaacaccgggcggcatgtgagcttcctacccgctccaagaccagtcgtgaacgtgtctggcgggccattactttactctcacaggctgtccgagctccgcctgttattcggtgccagggacggagctggctccgagcaccaaattaaccatcagggattctctgccgaggttcagttgatacatttcaaccaagaactgtatggcaacttctccgccgcaagccgtggcccaaatgggctggccatactgagtcttttcgtgaacgtcgcctcaaccagcaatcctttcctcagtcgtcttcttaatagggacactatcacccgcatctcatataaaaacgacgcatatttcctgcaggatctcagcctagaactcctgtttccagagtccttcggcttcattacctatcagggcagtctgtctacccctccatgctccgagacagtgacctggatcctcatcgatagggccctcaatattaccagtttgcagatgcacagcttgagactgctgtcacagaaccccccaagccaaatctttcagtctctctccggcaactctcgccccctccagcctctagcccacagagccctgcgcggtaacagagatccccggcaccccgaacggaggtgtagagggcctaattacagactgcacgtcgacggggtcccccatggtcgctag

SEQ ID NO: 83735 - DNA, 987 bp, Artificial Sequence
  derived and/or modified sequence
atgggcgccgccgcccggctgagcgccccccgggccctggtgctgtgggccgccctgggcgccgccgcccacatcggccctgccccagaccctgaggactggtggagctacaaggacaacctgcagggcaactttgtgcccggcccccccttctggggcctggtgaatgctgcctggagcctgtgtgctgtgggcaagaggcagagccctgtggatgtggagctgaagagggtgctgtatgaccccttcctgccccccctgcggctgagcactggaggagagaagctgcggggcaccctgtacaacacaggccgccacgtgtccttcctgcctgcccccaggcctgtggtgaatgtgtctgggggccccctgctgtacagccaccggctgtctgagctgcggctgctgtttggagccagagatggagctggcagcgagcaccagatcaaccaccagggcttctctgctgaggtgcagctgatccacttcaaccaggagctgtatggcaacttctctgctgccagccggggccccaacggcctggccatcctgagcctgtttgtgaatgtggccagcaccagcaaccccttcctgagccggctgctgaacagagacaccatcacccgcatctcctacaagaatgatgcctacttcctgcaggacctgagcctggagctgctcttccctgagagctttggcttcatcacctaccagggcagcctgagcaccccaccctgcagcgagaccgtgacctggatcctgattgaccgggccctgaacatcaccagcctgcagatgcacagcctgcggctgctgagccagaacccccccagccagatcttccagagcctgagcggcaacagccggcccctgcagcccctggcccaccgggccctgcggggcaacagagaccccaggcaccctgagcggcgctgccggggccccaactaccgcctgcacgtggatggagtgccccacggccgctag

SEQ ID NO: 83736 - DNA, 987 bp, Artificial Sequence
  derived and/or modified sequence
atgggcgccgccgcccggctgagcgccccccgggccctggtgctgtgggctgctttaggagccgccgcgcatattggccctgcccccgatcccgaggattggtggtcgtacaaagacaatttgcagggcaacttcgtccccgggccacccttttggggtctggtgaacgctgcttggagcttgtgcgcagtgggtaaacgacaatctccagtagatgtggaactcaagagggtcctctatgatccctttcttccaccactacgactctccacagggggcgagaagctgcgcgggacactgtataataccggcaggcatgtttcatttcttccagctccgaggcctgtggtgaatgtgtctggggggcccctcctctattcccatagactcagtgagttgaggctgctatttggcgctagagacggcgcaggatccgagcatcagataaatcaccagggattctcagcagaggtacagctgatccactttaaccaggagctgtacgggaatttcagcgcagcttccaggggccccaatggactcgcgatcctgagtttgtttgttaacgtcgctagtaccagcaatccattcctgtcccggctgctgaatagagatactatcactaggattagttataagaacgacgcatacttcttgcaggatctgtctctggaactcctcttccctgagtccttcgggttcataacttaccaggggtccctgtctacccccccctgctcagagactgtcacatggatccttatcgatcgagccttgaacatcactagtctccaaatgcactcactgagactcttgagtcaaaaccccccatcccagatattccagtccttgagcggaaactctaggccactccagcccctcgctcaccgggcactcagaggcaatcgggaccctcggcacccggaacggaggtgtagaggcccaaactaccgacttcatgtggatggcgtcccccatggtcggtag

SEQ ID NO: 83737 - DNA, 987 bp, Artificial Sequence
  derived and/or modified sequence
atgggcgcagctgctcggctgtcagcccctcgagctctggtgctctgggccgctttaggcgcagcagcacacatcgggccagcgccagacccagaggattggtggtcatataaggacaatcttcagggtaactttgttcccggtccaccgttctggggtctggtcaatgccgcatggtcactgtgcgccgtgggcaagcgccagagccctgttgatgtggaattgaaaagagtcctgtacgacccttttctaccccctttgcggctgtctactgggggtgaaaagctgcgtgggacactgtataataccggccgtcatgtgagcttcctgcctgctcctaggccggtggtgaatgtgtccgggggaccactgctgtactcacacaggttaagtgagctgcgactgcttttcggggctcgagatggcgctggcagcgagcatcagattaaccaccagggattttcagccgaggtgcagcttatccacttcaatcaggaactgtatggcaactttagcgccgctagtcgtgggccaaacgggctggccatcctgtcactgtttgtcaatgtagctagcactagtaaccctttcctgtccaggctgctaaatagagacaccattactcggatttcctataaaaacgacgcctattttctgcaggatctgtccctcgagttgttgttccccgagagttttggattcattacatatcaagggagcctgagcactcctccatgctctgagactgtaacatggatcctaatagaccgtgccctgaacattacaagccttcaaatgcattcactgcggctcctaagtcaaaaccccccttcccaaatttttcagtcccttagtggaaactctagaccccttcaacccctggctcaccgagcgttgcgagggaacagagaccccaggcatcccgagaggcgctgtcggggtcctaactacaggctgcacgtcgacggcgttccccatggcaggtag

SEQ ID NO: 83738 - DNA, 987 bp, Artificial Sequence
  derived and/or modified sequence
atgggcgcagctgcacggctttctgcaccaagagccctcgtgctgtgggctgccttaggcgccgccgcccacattggcccagcccccgacccagaggactggtggagttacaaggacaatctgcaggggaatttcgtgcccggccctccattctggggcttagtcaatgctgcttggtctctttgcgcggtcggaaaacgccagagtcccgttgatgtcgagttgaagagagtgctgtatgatccttttctgccaccgctccggctctccacgggcggcgagaaacttagaggaactttgtacaacactggccgacacgtgagcttcctgcctgctccccgccccgtggtgaacgttagtggcggacctctgctgtacagccaccgcttgtcagaactccgactgctattcggtgctcgcgacggcgccggctcggagcatcagatcaatcaccaaggtttttctgctgaagtgcagctaatacacttcaaccaggagctgtatggtaacttttccgctgcctcaagagggcccaatggactcgctatattgtcactctttgttaacgtggccagtactagtaatcccttcctgtcccgactgcttaaccgcgacacaatcacacgaatttcctacaaaaatgacgcctactttttgcaggatctgtccttggaactgttgtttcctgagtctttcggcttcatcacttatcaagggtcactttctactcccccttgctcagagacagttacgtggattctaattgaccgcgcactgaacattacatctttacagatgcacagtctccgcttacttagtcagaaccctccctctcagatttttcaatcactaagcggtaacagccgcccactccagccacttgcccatcgggcattacgcgggaaccgggaccctagacatcccgaaagacgctgtcggggaccaaactatcgtctccacgtggacggcgtgcctcatggccgctag

SEQ ID NO: 83739 - DNA, 987 bp, Artificial Sequence
  derived and/or modified sequence
atgggcgcagctgcacggctttctgcaccaagagccctcgtgctgtgggctgccttaggcgccgccgcccacattggcccagcccccgacccagaggactggtggagttacaaggacaatctgcaggggaatttcgtgcccggccctccattctggggcttagtcaatgctgcttggtctctttgcgcggtcggaaaacgccagagtcccgttgatgtcgagttgaagagagtgctgtatgatccttttctgccaccgctccggctctccacgggcggcgagaaacttagaggaactttgtacaacactgggcgacatgtcagctttctgcctgccccccggcccgtagtcaacgttagtggcggccccttactgtatagtcatcgactgagcgaactgaggttactgtttggcgcaagggacggtgcagggtctgagcatcaaatcaaccaccagggtttttcggcagaagtacagctaattcactttaatcaggagctctacggaaatttctccgctgctagccgcgggcctaacggactcgcaatccttagtcttttcgtcaacgtggccagtactagtaatccatttctgagcaggctcctgaatagagatacaatcacaagaatcagttataaaaacgacgcttatttcctccaggatctcagtctcgaacttctgttccccgaatcctttggatttatcacttaccagggatcactgtcaactccaccgtgttccgaaaccgtgacatggattttgatcgatcgtgccttgaacattacgtccctgcagatgcactctcttagacttctctcacagaacccaccctcccagatctttcagtcccttagtgggaacagtcgaccattgcaacccttggcacatcgggccctccgcggcaatcgcgatcccagacatcctgaaagaaggtgcagaggacccaactataggctccacgtcgatggagtgccccatggtagatag

SEQ ID NO: 83740 - DNA, 1653 bp, Artificial Sequence
  derived and/or modified sequence
aagggacaagagagaagagagactgaaacagggagaagaggcaggagaggaggaggtggggagagcacgaagctggaggccgacactgagggagggcgggaggaggtgaagaaggagagaggggagaagaggcaggagctggaaaggagagagggaggaggaggaggagatgcgggatggagacctggagttaggtggcttgggagagcttaatgaaaagagaacggagaggaggtgtgggttaggaaccaagaggtagccctgggggcagcagaaggctgagaggagtaggaagatcaggagctagagggagactggagggttccgggaaaagagcagaggaaagaggaaagacacagagagacgggagagagaagaagagtgggtttgaagggcggatctcagtccctggctgctttggcatttggggaactgggactccctgtggggaggagaggaaagctggaagtcctggagggacagggtcccagaaggaggggacagaggagctgagagaggggggcagggcgttgggcaggggtccctcggaggcctcctggggatgggggctgcagctcgtctgagcgcccctcgagcgctggtactctgggctgcactgggggcagcagctcacatcggaccagcacctgaccccgaggactggtggagctacaaggataatctccagggaaacttcgtgccagggcctcctttctggggcctggtgaatgcagcgtggagtctgtgtgctgtggggaagcggcagagccccgtggatgtggagctgaagagggttctttatgacccctttctgcccccattaaggctcagcactggaggagagaagctccggggaaccttgtacaacaccggccgacatgtctccttcctgcctgcaccccgacctgtggtcaatgtgtctggaggtcccctcctttacagccaccgactcagtgaactgcggctgctgtttggagctcgcgacggagccggctcggaacatcagatcaaccaccagggcttctctgctgaggtgcagctcattcacttcaaccaggaactctacgggaatttcagcgctgcctcccgcggccccaatggcctggccattctcagcctctttgtcaacgttgccagtacctctaacccattcctcagtcgcctccttaaccgcgacaccatcactcgcatctcctacaagaatgatgcctactttcttcaagacctgagcctggagctcctgttccctgaatccttcggcttcatcacctatcagggctctctcagcaccccgccctgctccgagactgtcacctggatcctcattgaccgggccctcaatatcacctcccttcagatgcactccctgagactcctgagccagaatcctccatctcagatcttccagagcctcagcggtaacagccggcccctgcagcccttggcccacagggcactgaggggcaacagggacccccggcaccccgagaggcgctgccgaggccccaactaccgcctgcatgtggatggtgtcccccatggtcgctgagactccccttcgaggattgcacccgcccgtcctaagcctccccacaaggcgaggggagttacccctaaaacaaagctattaaagggacagaatacttcctgttt

SEQ ID NO: 83741 - DNA, 987 bp, Artificial Sequence
  derived and/or modified sequence
atgggcgccgccgccagactgagcgcccccagagccctggtgctgtgggccgccctgggcgccgccgcccacatcggccccgcccccgaccccgaggactggtggagctacaaggacaacctgcagggcaacttcgtgcccggcccccccttctggggcctggtgaacgccgcctggagcctgtgcgccgtgggcaagagacagagccccgtggacgtggagctgaagagagtgctgtacgaccccttcctgccccccctgagactgagcaccggcggcgagaagctgagaggcaccctgtacaacaccggcagacacgtgagcttcctgcccgcccccagacccgtggtgaacgtgagcggcggccccctgctgtacagccacagactgagcgagctgagactgctgttcggcgccagagacggcgccggcagcgagcaccagatcaaccaccagggcttcagcgccgaggtgcagctgatccacttcaaccaggagctgtacggcaacttcagcgccgccagcagaggccccaacggcctggccatcctgagcctgttcgtgaacgtggccagcaccagcaaccccttcctgagcagactgctgaacagagacaccatcaccagaatcagctacaagaacgacgcctacttcctgcaggacctgagcctggagctgctgttccccgagagcttcggcttcatcacctaccagggcagcctgagcacccccccctgcagcgagaccgtgacctggatcctgatcgacagagccctgaacatcaccagcctgcagatgcacagcctgagactgctgagccagaacccccccagccagatcttccagagcctgagcggcaacagcagacccctgcagcccctggcccacagagccctgagaggcaacagagaccccagacaccccgagagaagatgcagaggccccaactacagactgcacgtggacggcgtgccccacggcagatag

SEQ ID NO: 83742 - protein, 354 aa, Artificial Sequence
  derived and/or modified sequence
MPRRSLHAAAVLLLVILKEQPSSPAPVNGSKWTYFGPDGENSWSKKYPSCGGLLQSPIDLHSDILQYDASLTPLEFQGYNLSANKQFLLTNNGHSVKLNLPSDMHIQGLQSRYSATQLHLHWGNPNDPHGSEHTVSGQHFAAELHIVHYNSDLYPDASTASNKSEGLAVLAVLIEMGSFNPSYDKIFSHLQHVKYKGQEAFVPGFNIEELLPERTAEYYRYRGSLTTPPCNPTVLWTVFRNPVQISQEQLLALETALYCTHMDDPSPREMINNFRQVQKFDERLVYTSFSQVQVCTAAGLSLGIILSLALAGILGICIVVVVSIWLFRRKSIKKGDNKGVIYKPATKMETEAHA

SEQ ID NO: 83743 - DNA, 1065 bp, Artificial Sequence
  derived and/or modified sequence
atgccacggcgcagtctccacgccgccgcggtcttgctgctggtgattctaaaagagcagccctcctccccagcccccgtcaacggatccaaatggacctatttcgggcccgacggtgagaatagctggtcaaagaaatacccatcatgcggaggcttactgcagagtcccatcgatcttcattctgacatcttgcagtatgatgcttcgctgactcccctggagttccaggggtacaatctcagtgccaacaaacagtttctgctgaccaacaacggccactctgttaaacttaatctgcctagcgatatgcatattcagggcctgcagagcagatacagtgctacccagttgcacttgcactgggggaacccaaacgatccccatggctcggaacacacagttagcggccagcacttcgctgccgaactccacattgtgcactacaactctgatctctaccccgacgctagcacagcgtccaacaaatcagagggcctggcagtgctggccgtgctcattgaaatgggcagctttaatccctcatatgataagatcttcagccacctgcagcatgtgaagtataagggtcaagaggcctttgttcctggctttaacatcgaagagttgttgcctgaacggactgctgagtactaccggtacagaggcagcttgaccacccctccgtgcaaccctacagtgttgtggacagtctttagaaacccagttcaaatttctcaggaacagctgctggccctcgagaccgcgctgtactgcacccacatggacgatcctagtccaagggaaatgatcaataatttcagacaggttcagaagttcgatgaacggctggtgtataccagtttttctcaagttcaagtttgcactgctgccggcctttccctcggtattattttgtctcttgccttggccggtatcctgggtatatgtattgttgttgtggtgagcatctggttgtttaggaggaagtcaattaagaagggtgataacaaaggggtgatctacaagcctgccacgaagatggagaccgaggcccacgcctag

SEQ ID NO: 83744 - DNA, 1065 bp, Artificial Sequence
  derived and/or modified sequence
atgcccaggaggagcctgcacgccgctgctgtgctgctgctggtgatcctgaaggagcagcccagcagccctgcccctgtgaatggcagcaagtggacctactttggaccagatggagagaacagctggagcaagaagtaccccagctgtggcggcctgctgcagagccccatcgacctgcacagcgacatcctgcagtatgatgccagcctgacccccctggagttccagggctacaacctgagcgccaacaagcagttcctgctgaccaacaacggccacagcgtgaagctgaacctgcccagcgacatgcacatccagggcctgcagagccgctacagcgccacccagctgcacctgcactggggcaaccccaatgacccccacggcagcgagcacacagtgtctggccagcactttgctgctgagctgcacatcgtgcactacaacagcgacctgtacccagatgccagcacagccagcaacaagtctgagggcctggccgtgctggccgtgctgattgagatgggcagcttcaaccccagctatgacaagatcttcagccacctgcagcacgtgaagtacaagggccaggaggcctttgtgcccggcttcaacatcgaggagctgctgcctgagaggacagctgagtactaccgctaccggggcagcctgaccaccccaccctgcaaccccaccgtgctgtggacagtgttcaggaaccctgtgcagatcagccaggagcagctgctggccctggagacagccctgtactgcacccacatggatgaccccagcccccgggagatgatcaacaacttccggcaggtgcagaagtttgatgagcggctggtgtacaccagcttcagccaggtgcaggtgtgcacagctgctggcctgagcctgggcatcatcctgagcctggccctggccggcatcctgggcatctgcatcgtggtggtggtgtccatctggctgttccggaggaagagcatcaagaagggggacaacaagggcgtcatctacaagccagccaccaagatggagacagaggcccacgcctag

SEQ ID NO: 83745 - DNA, 1065 bp, Artificial Sequence
  derived and/or modified sequence
atgccccggcggagcctgcacgccgccgccgtgctgctgctggtgatcctcaaagagcagccaagctctcccgcgccagttaatggatcaaagtggacatactttggtcctgacggcgaaaactcatggtcgaagaagtatccaagttgcggcggtctcctacagagccctatcgacctccacagcgatatcctgcagtacgatgcgagcctcactccactggagttccagggctacaacttgagcgctaacaaacagttcctcctcactaacaatgggcacagcgttaagctaaacctaccatccgacatgcacatccaaggcctccagagccgctatagcgctacccagttgcatctgcattggggaaacccaaacgacccccacggaagcgaacataccgttagcggccagcacttcgccgccgagctgcatatagtgcactataattcagatctgtatccggacgcctcaaccgcttccaataagagtgaaggcctcgcagttttggcagtgctgatcgagatgggtagcttcaacccttcatacgataagatcttttcccacttgcagcacgtgaaatataaagggcaggaggctttcgtgcccggcttcaacattgaggaactattaccagagagaacagccgaatactaccgctatagaggaagtttgaccacgcccccttgcaaccctactgtgctttggaccgtgttcagaaacccagtccagatctcacaggagcagcttctggctctcgagaccgcactgtactgtacacatatggatgatcccagtccccgggagatgataaacaatttccgtcaggtacaaaaatttgacgaacgcttggtatatacctctttttcccaggttcaggtctgtaccgccgcaggcctgtccctggggatcatcctgtctctggcgctggcggggatcctgggtatatgtatcgtcgtggtcgtctctatctggcttttccggagaaagagcataaaaaagggggacaataagggggtgatttataagcccgccacgaagatggaaactgaagctcatgcctag

SEQ ID NO: 83746 - DNA, 1065 bp, Artificial Sequence
  derived and/or modified sequence
atgccgagacggtccttgcacgccgctgccgtcctgctactagtgatcctgaaggagcagccttcttcccctgcaccggttaacgggagtaaatggacttactttggccctgacggagagaactcatggtctaagaaatacccaagttgcggagggctgctgcagtcaccaatcgacctgcactccgacatactgcagtacgacgcaagtctaactcccttagaattccagggctataacctctccgccaataagcagtttttgctcacgaataatggccacagcgtcaaactcaacctccccagcgatatgcacattcaaggactgcagtcccgctattctgctacacaactgcatttgcactgggggaatcctaatgatccacatggaagtgaacacactgtgagcggccagcactttgccgctgaattgcatattgtgcattacaacagcgatttgtatccagatgcctcaaccgcatctaataagagtgagggcctggccgtcctggccgtcctgattgaaatgggctcttttaatccatcttacgataagatcttctcccacctgcaacacgtgaaatataaaggtcaggaggctttcgttccaggctttaatatcgaggaactcctgccagagaggacagcagagtactaccgataccgtggtagcttaaccacccctccttgtaaccccacagttctttggaccgtgttccgaaatcctgtccaaatctcccaggaacaattgttagcattggagacggcactatactgtacccatatggatgacccgagccctagggaaatgataaataatttcaggcaagtccagaaattcgatgaaaggttggtgtatacgtcgtttagtcaagtgcaggtgtgcactgctgctggtcttagcctcggcatcattctgagtctggctttagccggaattctcggaatctgtatcgtggttgtcgtgtcgatttggctattccggcgaaagtctataaagaagggagacaacaagggtgtgatctataaacccgcaactaagatggagacagaggctcacgcgtag

SEQ ID NO: 83747 - DNA, 6413 bp, Artificial Sequence
  derived and/or modified sequence
ggaccagtgacagaccaagggcatgccactgaaggaatccctagacgcacccttctggatgtgagacaggcggatctcacccacgcctgccagcagctcctcggagaactgtgttcctgggtcagccctggcccagaggagcgccggggacccgcagagtgctgctgaagtcaaggctacaactcacctaggatctggggcgccagccctccggtgggcagggcgttctcctcccccaccccctccccgcacgatgacatcaagtgtttggcgttgagttgctccataaaagctgcccggggaagccaggagagcgaagggcggacgtactcgccacggcacccaggctgcgcgcacgcggtcccggtgtgcagctggagagcgagcggccaccgggagcccccggcacagcccgcgcccgccccgcaggagcccgcgaagatgccccggcgcagcctgcacgcggcggccgtgctcctgctggtgatcttaaaggaacagccttccagcccggccccagtgaacggttccaagtggacttattttggtcctgatggggagaatagctggtccaagaagtacccgtcgtgtgggggcctgctgcagtcccccatagacctgcacagtgacatcctccagtatgacgccagcctcacgcccctcgagttccaaggctacaatctgtctgccaacaagcagtttctcctgaccaacaatggccattcagtgaagctgaacctgccctcggacatgcacatccagggcctccagtctcgctacagtgccacgcagctgcacctgcactgggggaacccgaatgacccgcacggctctgagcacaccgtcagcggacagcacttcgccgccgagctgcacattgtccattataactcagacctttatcctgacgccagcactgccagcaacaagtcagaaggcctcgctgtcctggctgttctcattgagatgggctccttcaatccgtcctatgacaagatcttcagtcaccttcaacatgtaaagtacaaaggccaggaagcattcgtcccgggattcaacattgaagagctgcttccggagaggaccgctgaatattaccgctaccgggggtccctgaccacacccccttgcaaccccactgtgctctggacagttttccgaaaccccgtgcaaatttcccaggagcagctgctggctttggagacagccctgtactgcacacacatggacgacccttcccccagagaaatgatcaacaacttccggcaggtccagaagttcgatgagaggctggtatacacctccttctcccaagtgcaagtctgtactgcggcaggactgagtctgggcatcatcctctcactggccctggctggcattcttggcatctgtattgtggtggtggtgtccatttggcttttcagaaggaagagtatcaaaaaaggtgataacaagggagtcatttacaagccagccaccaagatggagactgaggcccacgcttgaggtccccggagctcccgggcacatccaggaaggaccttgctttggaccctacacacttcggctctctggacacttgcgacacctcaaggtgttctctgtagctcaatctgcaaacatgccaggcctcagggatcctctgctgggtgcctccttgccttgggaccatggccaccccagagccatccgatcgatggatgggatgcactctcagaccaagcagcaggaattcaaagctgcttgctgtaactgtgtgagattgtgaagtggtctgaattctggaatcacaaaccaagccatgctggtgggccattaatggttggaaaacactttcatccggggctttgccagagcgtgctttcaagtgtcctggaaattctgctgcttctccaagctttcagacaagaatgtgcactctctgcttaggttttgcttgggaaactcaacttctttcctctggagacggggcatctccctctgatttccttctgctatgacaaaacctttaatctgcaccttacaactcggggacaaatggggacaggaaggatcaagttgtagagagaaaaagaaaacaagagatatacattgtgatatattagggacactttcacagtcctgtcctctggatcacagacactgcacagaccttagggaatggcaggttcaagttccacttcttggtggggatgagaagggagagagagctagagggacaaagagaatgagaagacatggatgatctgggagagtctcactttggaatcagaattggaatcacattctgtttatcaagccataatgtaaggacagaataatacaatattaagtccaaatccaacctcctgtcagtggagcagttatgttttatactctacagattttacaaataatgaggctgttccttgaaaatgtgttgttgctgtgtcctggaggagacatgagttccgagatgacccaatctgcctttgaatctggaggaaataggcagaaacaaaatgactgtagaacttattctctgtaggccaaatttcatttcagccacttctgcaggatccctactgccaacctggaatggagacttttatctacttctctctctctgaagatgtcaaatcgtggtttagatcaaatatatttcaagctataaaagcaggaggttatctgtgcagggggctggcatcatgtatttaggggcaagtaataatggaatgctactaagatactccatattcttccccgaatcacacagacagtttctgacaggcgcaactcctccattttcctcccgcaggtgagaaccctgtggagatgagtcagtgccatgactgagaaggaaccgacccctagttgagagcaccttgcagttccccgagaactttctgattcacagtctcattttgacagcatgaaatgtcctcttgaagcatagctttttaaatatctttttccttctactcctccctctgactctaagaattctctcttctggaatcgcttgaacccaggaggcggaggttgcagtaagccaaggtcatgccactgcactctagcctgggtgacagagcgagactccatctcaaaaaaaaaaaaaaaaaaattattctgtaccatcacaacttttcacaacgatggcaagccttatgtcttgggagcctgttttgctaggcaaagttacaagtgacctaatgggagctcaaatgtgtgtgtgtctctctgtgtgtttgtgtgtgtgtgtgcactcaagacctctaacagcctcgaagcctggggtggcatcccggccttgccattagcatgcctcatgcatcatcagatgacaaggacaaccctcatgacgaagcaacatgaattagggggcctcttggccttggtccaaaattgtcaatcagaaatgaacataaaggactccagagcagtgggactgtctgtcaaaagactctgtatatcttttgtggatgagttttgtgagagaacagagagaccattgtacctggcacaagggctgttcatgaaaagggagacttactgggaggtgcaagacagtggcatttctcctctcctcttgctgctcagcacagccctggattgcagccccgaggctgagaccagacaaagcccgggaggcagaaagatgctccaagaaccaacactatcaatgtctttgcaaatcctcacaggattcctgtgggtccagctttggaactgggaaacctttcttcggatccgcactcattccactgatgccagctgcccctgaaggatgccagtactgtggtgtgtgagtctcagcagccgcccacacgctcctaactctgctgcatggcagatgcctaggtggaaatagcaaaaacaaggcccaggctggggccagggccagaggggaaggccctggattctcactcatgtgagatcttgaatctctttctttgttctgtttgtttagttagtatcatctggtaaaatagttaaaaaacaacaaaaaactctgtatctgtttctagcatgtgctgcattgactctattaatcacatttcaaattcaccctacattcctctcctcttcactagcctctctgaaggtgtcctggccagccctggagaagcactggtgtctgcagcacccctcagttcctgtgcctcagcccacaggccactgtgataatggtctgtttagcacttctgtatttattgtaagaatgattataatgaagatacacactgtaactacaagaaattataaatgtttttcacatcaggctgttctttttttttttttggaggcgaggttaaagcattactatttgcaaagcactctgtagctccctgttatggggataggtaactaatcagaataataatgtcactcgcatccacttcttagaacctggctccaaaggaaaataagctgatagactcaatcactttcctgaggatggaggcctatggcatgtgtggctgcaggtcgcgaagctgcttaatggtgctgggaagcctagaggaattaaataaagaccctggaggaggtgggatcggagctgcaccttgaacaaatagctcagatttgaacagatggatggaaaagagggaggtgttcccaaccaaggggacatgatacagggaacaggtcctatgtctctttactcctgagagtattaaacctagtaggtgggcagcccctcttggttgcctgttaccttattttgaattctttttgcaaaacatactatcacccgtccaaataatcttttgtctaaatccagacttcacattctgactggggcaaaaagaggcagtccagtaaaggttataaaataggtaccatcattgtttgccttatttagaaaagcatccaattttcactataatcaccctaagcctgagagaggtgaactgttcaagggtactttggctccagtgggtgacagtacctggcccagctttggaattgaaacatttctgatggtctgtactctgctagaacacaggatgcttctgctctccctgctctggcatcctgccaggtgtcatggccacgcacaggcatgaagacagccgggaagccagagttcccacgaagcactcactccttggacttgctcccaccccactggggagagcactcctggagcaggaaatgagcatctctcatctccctgaattccacatccactggctgaatgatcagggaggcatagcagtgagagccataggtcggcagagggaactcaggccctcctttaggatggccatcacctcatctcaatccagccaaatcaaccatctagagcacacaggccgagagaaatgtaataaaatataacatgagacacgtatgaaatttaaactttccggtagccacactagaaaaaggtaaaaaaaaaaaaaccagtgacattaatttaaatttaattttagataatccaacagatctaaaatactatcatttccacatgtaaccagtattttcatgtgtttttttctgcagtaaatctttgaaatctggtgtgtgttttacactgacagcacactcgattcagatgctagattttccttgtagatatttggtcgttatttagatttcataaaatttacagtttaaaagattccaatatccgagttgctccaaacacacttagaagttgttttccaaataatggaatcaatgatcggcttttagatgtaaacttattaaaataaagtagcgtttctcagttaagtcacattccaagcgctcaagatccatgccctgcgcagacccggacgacgaacccgactttcagagactgagggttctgcctagagagctcccacagaaatcagcccgagaagaaagccttgtgggtgaagccagggagggagacaggagggcaggaggaaaatcaagcctaaatgagcacatcgtggacgccgctcttcctctccccacatctcctcgcctcgccgcagtgggcccggctgtgccccaggtccccgcggtcgggagtgaatggcgctcgggtggcaggcacgtgggcacctggtgaactgcaggaccctggcaccgccaccccctcgcccctacacacacaggagtgcccctcccgttgtcacgtggccttcctgctgggtatctggagcagttgcagcctcgcttccggaaggaaacggggcctctggggcacagggaccacctgccagtgcgttccagccgggctgccatccacactggagaccgccccgcacgtggtcctcgggctcggattcagctgtcgcaggatgtgaggggaaaggtatgtggcccgacaatgccaccgagggtgtccccgggctccaccccgtgcctcttcattatagaatgactgggcagagataagggccagattactttgctgtattgaataattcaccataaaaatgattgcaaccagg

SEQ ID NO: 83748 - DNA, 1065 bp, Artificial Sequence
  derived and/or modified sequence
atgcccagaagaagcctgcacgccgccgccgtgctgctgctggtgatcctgaaggagcagcccagcagccccgcccccgtgaacggcagcaagtggacctacttcggccccgacggcgagaacagctggagcaagaagtaccccagctgcggcggcctgctgcagagccccatcgacctgcacagcgacatcctgcagtacgacgccagcctgacccccctggagttccagggctacaacctgagcgccaacaagcagttcctgctgaccaacaacggccacagcgtgaagctgaacctgcccagcgacatgcacatccagggcctgcagagcagatacagcgccacccagctgcacctgcactggggcaaccccaacgacccccacggcagcgagcacaccgtgagcggccagcacttcgccgccgagctgcacatcgtgcactacaacagcgacctgtaccccgacgccagcaccgccagcaacaagagcgagggcctggccgtgctggccgtgctgatcgagatgggcagcttcaaccccagctacgacaagatcttcagccacctgcagcacgtgaagtacaagggccaggaggccttcgtgcccggcttcaacatcgaggagctgctgcccgagagaaccgccgagtactacagatacagaggcagcctgaccacccccccctgcaaccccaccgtgctgtggaccgtgttcagaaaccccgtgcagatcagccaggagcagctgctggccctggagaccgccctgtactgcacccacatggacgaccccagccccagagagatgatcaacaacttcagacaggtgcagaagttcgacgagagactggtgtacaccagcttcagccaggtgcaggtgtgcaccgccgccggcctgagcctgggcatcatcctgagcctggccctggccggcatcctgggcatctgcatcgtggtggtggtgagcatctggctgttcagaagaaagagcatcaagaagggcgacaacaagggcgtgatctacaagcccgccaccaagatggagaccgaggcccacgcctag

SEQ ID NO: 83749 - DNA, 948 bp, Artificial Sequence
  derived and/or modified sequence
atggacctgcgccaatttctgatgtgtttgagcttgtgtaccgcatttgccttgtctaagcccacagaaaagaaggatcgggtgcaccatgaacctcagttgagtgacaaagttcacaatgatgctcagagtttcgattacgaccacgacgcgttcctcggggccgaagaggccaagacttttgatcagcttacaccagaagaatccaaggagaggttgggaaagatagtgtccaagatagatggggataaggacggattcgtaaccgtggacgaactcaaagactggatcaaattcgcccagaaacgatggatttacgaagatgtcgaaagacagtggaaaggacatgatctgaacgaagatggactagtctcttgggaggaatacaaaaatgctacatacggatatgttctagacgaccccgaccctgatgatggattcaattacaaacagatgatggtgcgtgacgagcggcgttttaagatggcagacaaggatggcgatcttatcgctaccaaagaagagttcacagccttcttgcatcctgaggaatacgactacatgaaagacatagtggtccaggagactatggaggatattgataagaatgccgatggatttatcgatctggaagaatacatcggcgatatgtatagccatgatggtaataccgatgagcccgaatgggttaagaccgagagagagcagtttgttgaattccgggacaagaatagagacggcaaaatggacaaggaggagacaaaggattggatcctccctagcgattacgatcacgctgaggccgaggctcgccacctggtctatgaaagcgaccagaataaggacggaaagctgaccaaagaggaaattgtcgacaaatatgatctcttcgtgggatctcaagcaacagactttggggaggccctcgtaagacacgacgaattctag

SEQ ID NO: 83750 - DNA, 798 bp, Artificial Sequence
  derived and/or modified sequence
atggacttgagacagttccttatgtgtctcagtttgtgcacggccttcgcactcagcaaacccactgagaaaaaggacagggtgcaccatgagcctcaattgagcgacaaagttcacaacgatgcccaaagcttcgactacgatcacgatgctttcttgggggccgaagaagcaaagacctttgaccagttgacacctgaggaatccaaggaacgtctgggcaaaattgtgtctaagatcgacggcgataaggacgggtttgtaaccgtggatgagctcaaagactggatcaagttcgcacagaaacgctggatctacgaagacgtggagcggcagtggaagggccacgatcttaatgaggacggcctggtctcttgggaagagtacaagaatgcaacgtacggttatgtgctcgatgacccagaccctgatgacggcttcaactataagcagatgatggtgcgtgacgagagaagattcaagatggccgacaaagatggagatcttattgcgacaaaagaggagtttaccgcttttctccatccagaggaatatgattatatgaaagacattgtggtacaagagactatggaagatattgacaagaatgccgacggctttatcgacctggaagagtacatcggtgatatgtattctcacgatggcaataccgacgagtctgaccagaacaaagacggaaaactgaccaaggaggagattgtcgataaatacgacctgttcgttggttcgcaggccaccgactttggggaggcgttggtccgccacgacgagttttag

SEQ ID NO: 83751 - DNA, 948 bp, Artificial Sequence
  derived and/or modified sequence
atggacctgcggcagttcctgatgtgcctgagcctgtgcacagcctttgccctgagcaagcccacagagaagaaggacagagtgcaccacgagccccagctgagtgacaaggtgcacaatgatgcccagagctttgattatgaccatgatgccttcctgggcgctgaggaggccaagacctttgaccagctgaccccagaggagagcaaggagcggctgggcaagatcgtgtccaagattgatggagacaaggatggctttgtgacagtggatgagctgaaggactggatcaagtttgcccagaagcgctggatctatgaagatgtggagcggcagtggaagggccatgacctgaatgaagatggcctggtgtcctgggaggagtacaagaatgccacctacggctacgtgctggatgatcctgaccctgatgatggcttcaactacaagcagatgatggtgagagatgagcggcgcttcaagatggctgacaaggatggagacctgattgccaccaaggaggagttcaccgccttcctgcaccctgaggagtatgactacatgaaggacatcgtggtgcaggagaccatggaggacatcgacaagaatgctgatggcttcatcgacctggaggagtacatcggggacatgtacagccatgatggcaacacagatgagcctgagtgggtgaagacagagcgggagcagtttgtggagttccgggacaagaacagagatggcaagatggacaaggaggagaccaaggactggatcctgcccagcgactatgaccacgccgaggccgaggcccggcacctggtgtatgaaagtgaccagaacaaggatggcaagctgaccaaggaggagatcgtggacaagtatgacctgtttgtgggcagccaggccacagactttggagaggccctggtgagacatgatgagttctag

SEQ ID NO: 83752 - DNA, 798 bp, Artificial Sequence
  derived and/or modified sequence
atggacctgcggcagttcctgatgtgcctgagcctgtgcacagcctttgccctgagcaagcccacagagaagaaggacagagtgcaccacgagccccagctgagtgacaaggtgcacaatgatgcccagagctttgattatgaccatgatgccttcctgggcgctgaggaggccaagacctttgaccagctgaccccagaggagagcaaggagcggctgggcaagatcgtgtccaagattgatggagacaaggatggctttgtgacagtggatgagctgaaggactggatcaagtttgcccagaagcgctggatctatgaagatgtggagcggcagtggaagggccatgacctgaatgaagatggcctggtgtcctgggaggagtacaagaatgccacctacggctacgtgctggatgatcctgaccctgatgatggcttcaactacaagcagatgatggtgagagatgagcggcgcttcaagatggctgacaaggatggagacctgattgccaccaaggaggagttcaccgccttcctgcaccctgaggagtatgactacatgaaggacatcgtggtgcaggagaccatggaggacatcgacaagaatgctgatggcttcatcgacctggaggagtacatcggggacatgtacagccatgatggcaacacagatgaaagtgaccagaacaaggatggcaagctgaccaaggaggagatcgtggacaagtatgacctgtttgtgggcagccaggccacagactttggagaggccctggtgagacatgatgagttctag

SEQ ID NO: 83753 - DNA, 948 bp, Artificial Sequence
  derived and/or modified sequence
atggacctgcggcagttcctgatgtgcctgagcctgtgcaccgcctttgccctctccaagccaaccgagaagaaagatcgcgttcaccacgagcctcaactgagtgataaggtgcataatgacgcacagagtttcgattacgaccacgatgcgttcctcggcgccgaagaggctaaaaccttcgaccagctgacaccggaggagagcaaagaaagattagggaagattgttagcaaaatcgacggggacaaggatggttttgtaacggtagacgagctcaaagactggattaagtttgctcagaagaggtggatttatgaggacgtcgagcggcagtggaagggtcacgacctgaatgaagatggactggttagctgggaggagtacaaaaacgcgacatacggatatgtgctggatgatcctgaccccgacgatggtttcaattacaagcagatgatggtaagggacgagagacgctttaagatggctgacaaagatggagacctcattgccaccaaagaagagttcacagcattcttgcaccccgaagaatatgactacatgaaggacattgtggttcaagagactatggaggacattgataaaaacgcagacgggtttatcgaccttgaggagtatataggcgatatgtactctcacgacggaaatacagacgaacccgagtgggtcaaaactgagcgagagcaattcgtggagtttcgagataaaaacagggatggcaagatggacaaggaagagaccaaggattggatcctgcccagcgactacgatcacgcagaggctgaggcgcggcacctggtgtacgaatccgatcagaataaagacggcaaattgaccaaggaggagatcgttgacaagtatgacctctttgtggggagtcaggccacagattttggggaggcactagtcaggcatgacgaattctag

SEQ ID NO: 83754 - DNA, 798 bp, Artificial Sequence
  derived and/or modified sequence
atggacctgcggcagttcctgatgtgcctgagcctgtgcaccgcctttgccctgtccaagccaactgagaagaaggaccgcgtccaccacgagcctcagctgagcgacaaagtgcacaacgatgcccagtctttcgactatgatcacgacgcgtttttaggcgctgaggaagcaaagaccttcgaccagctgactcctgaagagagtaaggagcgcctcggcaaaattgtgtcaaagattgacggcgacaaagacgggtttgtgaccgtcgatgagctgaaagactggataaagtttgctcagaaaagatggatttacgaagacgtggaaagacagtggaaaggacacgacttgaacgaggatggcctcgtctcctgggaggagtacaagaacgctacttatgggtacgttttggatgacccagaccccgacgatggctttaactacaaacagatgatggtgcgggacgaacgcagatttaaaatggcggacaaagatggagacctgatcgctactaaggaggagtttaccgcgttcctccatcctgaagaatatgattacatgaaggacattgtagtgcaagagacaatggaggatatcgacaagaacgccgacgggtttatagatcttgaggagtacattggtgatatgtactcccacgacgggaacacagacgagtctgaccagaataaagacggcaaactcacaaaggaggagatcgtcgacaaatacgatctttttgtgggcagccaggccactgatttcggcgaagcactcgtccgccacgacgaattctag

SEQ ID NO: 83755 - DNA, 948 bp, Artificial Sequence
  derived and/or modified sequence
atggacctgaggcaattcctaatgtgtttgtcactctgcacagcttttgccctgtccaagcctacagagaagaaggaccgggtgcatcatgagcctcagttaagcgataaagtgcataatgacgcgcagagcttcgattacgatcacgatgcattcttgggggcagaagaggctaaaacattcgatcagttgaccccggaagagagcaaagagagacttggtaagattgtgtctaaaatcgacggagacaaggatggattcgtgaccgtggacgaactcaaggactggatcaagtttgctcagaagagatggatctacgaagatgtcgaacgccagtggaagggacacgacttaaatgaggatggcttggtgagctgggaagagtacaaaaacgccacttacggatacgttctggatgatccggatccagatgacgggtttaactataagcagatgatggtccgcgatgagagacggttcaagatggctgataaggacggcgacttgattgcaactaaagaagaattcactgcatttctgcatcccgaagaatacgattacatgaaggatatcgtggtacaggaaacaatggaggatatcgataaaaacgctgatggattcatagacctggaggagtacatcggggacatgtacagccacgacgggaacactgatgaacctgaatgggtgaagaccgagcgggagcagttcgtagagtttagagataagaatcgagacggtaagatggacaaagaggaaaccaaggattggattctacccagcgactatgatcacgccgaggctgaggctcgccacctggtgtatgagagcgatcaaaacaaagatggcaaactgacaaaagaagagatagtcgacaagtacgatttgttcgttggcagccaagccactgacttcggtgaggctctagtacggcatgatgagttttag

SEQ ID NO: 83756 - DNA, 798 bp, Artificial Sequence
  derived and/or modified sequence
atggacctgagacagtttcttatgtgtctgtccctttgcaccgcatttgccctgtccaagccaacagagaagaaggatcgtgtgcaccatgagccacagctctcagataaagttcacaacgacgcccaatccttcgactatgaccacgacgcatttttgggggcagaggaggcgaagacttttgatcagttgacgccggaagaatctaaggagcgccttggaaagattgtttcaaaaatcgacggtgacaaggacggattcgtgacagtcgacgagctcaaggattggattaagtttgcacagaagcgctggatctatgaagatgttgaaaggcagtggaagggccatgacttaaacgaagacggcttggtgtcctgggaagagtacaaaaacgcgacctatgggtatgttttggatgatccggatcccgatgacgggttcaactataaacagatgatggttagggatgagcgtagatttaagatggctgacaaagacggcgatttgatagccactaaggaggagtttaccgctttcctgcaccctgaggaatatgattacatgaaagacattgtagtgcaggaaaccatggaagacattgacaaaaacgctgacgggtttattgatctcgaggagtacataggtgatatgtactcccacgacgggaacaccgatgagtccgatcagaacaaggacgggaaacttaccaaggaagagattgtagataagtatgatctgtttgtcgggagtcaggcaacagactttggagaagctctggttcggcacgacgagttttag

SEQ ID NO: 83757 - DNA, 948 bp, Artificial Sequence
  derived and/or modified sequence
atggatctacgccagtttctgatgtgtctctctctgtgcacagccttcgcactgagtaagcctacggagaaaaaagacagggtccaccacgagccacaactgtctgacaaagtgcataacgacgcccagtcctttgactatgaccatgatgcattcctgggcgccgaagaagctaagacttttgaccaattgacacccgaagaaagcaaagaacgcctgggtaagatcgtatcaaaaatcgacggtgacaaggatgggttcgttactgttgacgagcttaaagattggattaaattcgcccagaagcgctggatatacgaagacgtggaacgccagtggaaaggccacgacctaaatgaagacgggctagtgtcctgggaagaatacaaaaacgcgacatacggctacgtcctcgacgacccagatccagatgacggttttaactacaagcagatgatggttagagacgagagaagattcaagatggcagataaagacggagacctgatcgcgaccaaggaggaatttacagctttcctgcatcctgaggagtatgattacatgaaggacattgtagtacaggagacaatggaggacattgataagaatgcggatggattcatcgaccttgaggagtatatcggtgacatgtattcgcatgacggcaataccgacgaacctgaatgggtcaagacggaacgagaacaattcgtggaattcagagacaaaaatagggacggaaaaatggacaaggaagaaacaaaggattggatcttgccctctgactatgaccacgccgaggcagaggccaggcacctggtatatgaaagcgatcagaataaggatggcaaactcacaaaagaagaaattgttgacaagtacgatctgtttgtgggctcgcaggcgactgattttggggaggccctagttagacatgatgagttctag

SEQ ID NO: 83758 - DNA, 798 bp, Artificial Sequence
  derived and/or modified sequence
atggacctgaggcagttcctcatgtgcctttcactgtgcacagcctttgctttatccaaacctaccgaaaaaaaggaccgggttcaccatgagccccagctgtcggacaaggtgcataacgatgcacagtccttcgattatgaccatgatgcctttctgggtgctgaagaagctaaaacctttgaccagttgacacctgaggagtccaaggaaaggctgggaaagatagtctcaaagatcgacggcgacaaggatggctttgttaccgtggacgaactgaaagattggattaaatttgcccagaaaagatggatttatgaagacgtggagagacagtggaaggggcatgaccttaatgaggacggcttggtgtcatgggaagaatataagaatgccacctacggttacgtgctggacgatccagacccagacgatggatttaactacaaacaaatgatggtgcgagacgaacggagatttaagatggctgacaaggatggagatctcattgccacaaaagaagagttcacagcttttttgcatccggaagaatacgattacatgaaagacatagttgtgcaagagaccatggaagacattgataagaacgcagatggattcattgacttagaggagtatatcggcgacatgtattctcatgacggcaatacggatgagtctgaccagaacaaagatgggaagctgaccaaggaggagattgtagataaatacgatctgtttgtcgggtcgcaggctactgattttggagaagccctagtgaggcacgacgaattttag

SEQ ID NO: 83759 - DNA, 948 bp, Artificial Sequence
  derived and/or modified sequence
atggatctgaggcagtttctgatgtgtctctccctgtgcactgcgtttgcacttagtaaaccgaccgaaaagaaagatcgggtccaccacgagccacaactctccgataaagtgcataacgatgcccaaagttttgactacgaccacgatgcattccttggagccgaagaggcaaagacattcgatcagctgacccccgaggaatctaaagagcgcttaggcaagattgtgagtaaaatagacggagataaagacggtttcgtaactgtggacgagctgaaagactggataaaatttgcccagaagcgctggatatacgaagacgtggaacgccagtggaaaggccacgacctaaatgaagacgggctagtgtcctgggaagaatacaaaaacgcgacatacggctacgtcctcgacgacccagatccagatgacggttttaactacaagcagatgatggttagagacgagagaagattcaagatggcagataaagacggagacctgatcgcgaccaaggaggaatttacagctttcctgcatcctgaggagtatgattacatgaaggacattgtagtacaggagacaatggaggacattgataagaacgcagacggtttcatcgaccttgaagaatatatcggcgacatgtactctcacgacggaaatacggatgaacctgaatgggtgaaaacagaaagagaacaatttgttgagtttagagataagaacagggatggcaaaatggataaggaggaaaccaaggactggatattgccaagtgactacgaccacgccgaggctgaagcaagacatcttgtttacgagtcggaccagaacaaagacggcaagctcactaaggaggaaatcgttgataagtatgacctgtttgtcgggtctcaggcaacagatttcggggaagcactggtccggcacgatgaattctag

SEQ ID NO: 83760 - DNA, 798 bp, Artificial Sequence
  derived and/or modified sequence
atggatctacgtcagtttctcatgtgcttgagcctgtgcacagccttcgctctgtctaagcccaccgagaaaaaggacagggtgcaccatgaaccccaattatcagacaaagtacacaacgatgctcaaagttttgactatgatcacgatgcattcctgggcgccgaagaggccaagacatttgaccagctgactcccgaggagagcaaggagcgtctgggaaaaatagttagtaagatcgatggagataaggatggcttcgtaactgtggatgagctgaaggactggattaaattcgcccagaaaagatggatttatgaagacgtggagagacagtggaaggggcatgaccttaatgaggacggcttggtgtcatgggaagaatataagaatgccacctacggttacgtgctggacgatccagacccagacgatggatttaactacaaacaaatgatggtgcgagacgaacggagatttaagatggctgacaaggatggagatctcattgccacaaaagaagagttcacagcttttttgcatccggaagaatacgattacatgaaagacatagttgtgcaagagaccatggaagacattgataaaaatgcagacggctttattgatttagaggagtacatcggagatatgtattcacatgatggaaatactgacgagagcgatcagaataaagacgggaaattgactaaggaggagattgttgacaaatatgacctattcgtgggcagccaagcgaccgacttcggagaggccttagtgcgccacgacgagttctag

SEQ ID NO: 83761 - DNA, 948 bp, Artificial Sequence
  derived and/or modified sequence
atggacctgagacagttcctgatgtgcctgagcctgtgcaccgccttcgccctgagcaagcccaccgagaagaaggacagagtgcaccacgagccccagctgagcgacaaggtgcacaacgacgcccagagcttcgactacgaccacgacgccttcctgggcgccgaggaggccaagaccttcgaccagctgacccccgaggagagcaaggagagactgggcaagatcgtgagcaagatcgacggcgacaaggacggcttcgtgaccgtggacgagctgaaggactggatcaagttcgcccagaagagatggatctacgaggacgtggagagacagtggaagggccacgacctgaacgaggacggcctggtgagctgggaggagtacaagaacgccacctacggctacgtgctggacgaccccgaccccgacgacggcttcaactacaagcagatgatggtgagagacgagagaagattcaagatggccgacaaggacggcgacctgatcgccaccaaggaggagttcaccgccttcctgcaccccgaggagtacgactacatgaaggacatcgtggtgcaggagaccatggaggacatcgacaagaacgccgacggcttcatcgacctggaggagtacatcggcgacatgtacagccacgacggcaacaccgacgagcccgagtgggtgaagaccgagagagagcagttcgtggagttcagagacaagaacagagacggcaagatggacaaggaggagaccaaggactggatcctgcccagcgactacgaccacgccgaggccgaggccagacacctggtgtacgagagcgaccagaacaaggacggcaagctgaccaaggaggagatcgtggacaagtacgacctgttcgtgggcagccaggccaccgacttcggcgaggccctggtgagacacgacgagttctag

SEQ ID NO: 83762 - DNA, 798 bp, Artificial Sequence
  derived and/or modified sequence
atggacctgagacagttcctgatgtgcctgagcctgtgcaccgccttcgccctgagcaagcccaccgagaagaaggacagagtgcaccacgagccccagctgagcgacaaggtgcacaacgacgcccagagcttcgactacgaccacgacgccttcctgggcgccgaggaggccaagaccttcgaccagctgacccccgaggagagcaaggagagactgggcaagatcgtgagcaagatcgacggcgacaaggacggcttcgtgaccgtggacgagctgaaggactggatcaagttcgcccagaagagatggatctacgaggacgtggagagacagtggaagggccacgacctgaacgaggacggcctggtgagctgggaggagtacaagaacgccacctacggctacgtgctggacgaccccgaccccgacgacggcttcaactacaagcagatgatggtgagagacgagagaagattcaagatggccgacaaggacggcgacctgatcgccaccaaggaggagttcaccgccttcctgcaccccgaggagtacgactacatgaaggacatcgtggtgcaggagaccatggaggacatcgacaagaacgccgacggcttcatcgacctggaggagtacatcggcgacatgtacagccacgacggcaacaccgacgagagcgaccagaacaaggacggcaagctgaccaaggaggagatcgtggacaagtacgacctgttcgtgggcagccaggccaccgacttcggcgaggccctggtgagacacgacgagttctag

SEQ ID NO: 83763 - protein, 666 aa, Artificial Sequence
  derived and/or modified sequence
MATTVTCTRFTDEYQLYEDIGKGAFSVVRRCVKLCTGHEYAAKIINTKKLSARDHQKLEREARICRLLKHSNIVRLHDSISEEGFHYLVFDLVTGGELFEDIVAREYYSEADASHCIQQILEAVLHCHQMGVVHRDLKPENLLLASKCKGAAVKLADFGLAIEVQGDQQAWFGFAGTPGYLSPEVLRKEAYGKPVDIWACGVILYILLVGYPPFWDEDQHKLYQQIKAGAYDFPSPEWDTVTPEAKNLINQMLTINPAKRITAHEALKHPWVCQRSTVASMMHRQETVECLKKFNARRKLKGAILTTMLATRNFSVGRQTTAPATMSTAASGTTMGLVEQAKSLLNKKADGVKPQTNSTKNSAAATSPKGTLPPAALEPQTTVIHNPVDGIKESSDSANTTIEDEDAKAPRVPDILSSVRRGSGAPEAEGPLPCPSPAPFSPLPAPSPRISDILNSVRRGSGTPEAEGPLSAGPPPCLSPALLGPLSSPSPRISDILNSVRRGSGTPEAEGPSPVGPPPCPSPTIPGPLPTPSRKQEIIKTTEQLIEAVNNGDFEAYAKICDPGLTSFEPEALGNLVEGMDFHRFYFENLLAKNSKPIHTTILNPHVHVIGEDAACIAYIRLTQYIDGQGRPRTSQSEETRVWHRRDGKWQNVHFHCSGAPVAPLQ

SEQ ID NO: 83764 - DNA, 2001 bp, Artificial Sequence
  derived and/or modified sequence
atggcaacaaccgtcacttgcacaaggttcacggacgaataccagctgtacgaagacattggtaagggggcattcagtgtagtgaggcggtgcgtcaagctttgcaccggacatgagtatgctgctaaaatcatcaacactaagaagttgtccgccagagaccatcagaaattagaacgggaagcacgcatctgcaggctcttgaagcacagtaatattgttcgtctccacgacagcatttccgaggagggctttcattatctggtgtttgatctcgtcaccggaggcgagcttttcgaagacattgtcgcccgggagtactatagtgaggctgatgcctcccactgtatccaacagatcctggaggctgtgctccattgccaccagatgggggtcgtccacagagacctgaaacctgaaaatcttctcctggcaagcaagtgtaaaggcgcagccgtcaagttagctgactttggacttgctatcgaagtgcaaggggaccagcaggcctggttcgggttcgccggcactcccggctacttgtccccagaagtgttgcggaaggaggcgtatgggaagccggttgatatctgggcctgcggggtgatcctgtatatcttgttggtcggttatcctcccttctgggatgaagatcagcataaactctaccagcaaatcaaggcgggcgcctacgactttcccagccctgagtgggatacggttaccccggaggcaaagaacctgatcaatcagatgctcaccatcaaccccgcaaagcgcatcactgcacacgaagccttaaagcatccgtgggtctgccagcgcagtacggtcgcatctatgatgcaccgtcaggaaaccgtggagtgtctgaaaaagtttaatgcacgtcgcaaactcaaaggagcaatcctcactacaatgttagcaaccagaaatttctccgtgggacgtcagacgactgcacctgccactatgtcgactgccgcctccggcaccactatgggactcgttgaacaggccaagtctctattgaataaaaaggctgatggtgtgaagcctcagaccaattcgaccaaaaactctgcagccgcaacctctcctaaggggactctgcctcccgccgctctggaacctcagacgacggtcattcacaatcccgtggatggcatcaaagagtctagcgactccgctaatacgaccattgaagatgaagacgcaaaggcgccacgcgtgcccgacatcttgtcatctgtcagacgaggaagcggggcgcccgaagcagaggggcccttgccttgcccttcccccgcccccttttccccgctgcccgcacccagtccgcgcatatcagacatccttaattcagttaggcgcggcagcgggacccccgaggctgagggcccgctgagtgcggggccacccccctgcttgtcccccgccctgctggggcccctgagttcgccatccccccgaattagcgacatcctcaacagtgtcagacgtggaagtgggactccagaggcggaaggacccagccctgtaggaccacctccctgcccaagccccaccatacctggtcctctgcctactccgtctagaaagcaggaaatcatcaagaccaccgagcagcttatcgaagcggtgaataacggggattttgaggcctatgcaaaaatttgcgatcccggtctaacctctttcgagccagaagctctgggcaaccttgtggaggggatggatttccatcgtttctactttgaaaatctgctggcgaagaactctaaacctattcatactacgatacttaacccgcatgtccatgtgatcggcgaagatgctgcttgtattgcctacatccgccttacccagtacatagatgggcagggcagaccaagaacatcccagagcgaagaaacccgcgtttggcacagacgcgatgggaagtggcagaacgtacacttccattgcagtggcgctccagtagctccccttcagtag

SEQ ID NO: 83765 - DNA, 2001 bp, Artificial Sequence
  derived and/or modified sequence
atggccaccaccgtgacctgcacccgcttcacagatgagtaccagctgtatgaggacatcggcaagggggccttctctgtggtgagaagatgtgtgaagctgtgcaccggccacgagtatgctgccaagatcatcaacaccaagaagctgagcgcccgggaccaccagaagctggagcgggaggcccgcatctgccgcctgctgaagcacagcaacatcgtgcggctgcatgacagcatcagcgaggagggcttccactacctggtgtttgacctggtgactggaggagagctgtttgaggacatcgtggcccgggagtactacagcgaggctgatgccagccactgcatccagcagatcctggaggccgtgctgcactgccaccagatgggcgtggtgcaccgggacctgaagccagagaacctgctgctggccagcaaatgtaaaggagctgctgtgaagctggccgactttggcctggccatcgaggtgcagggcgaccagcaggcctggtttggatttgctggcaccccaggctacctgagccctgaggtgctgaggaaggaggcctacggcaagcctgtggacatctgggcctgtggggtcatcctgtacatcctgctggtgggctacccacccttctgggatgaggaccagcacaagctgtaccagcagatcaaggccggggcctatgacttccccagccctgagtgggacacagtgaccccagaggccaagaacctgatcaaccagatgctgaccatcaacccagccaagaggatcacagcccacgaggccctgaagcacccctgggtgtgccagaggagcacagtggcctccatgatgcaccggcaggagaccgtggagtgcctgaagaagttcaatgcccggaggaagctgaagggggccatcctgaccaccatgctggccaccaggaacttctctgtgggccggcagaccacagccccagccaccatgagcacagctgccagcggcaccaccatgggcctggtggagcaggccaagagcctgctgaacaagaaggcagatggagtgaagccccagaccaacagcaccaagaacagcgctgctgccaccagccccaagggcaccctgcccccagctgccctggagccccagaccaccgtcatccacaaccctgtggatggcatcaaggagagcagtgacagcgccaacaccaccattgaagatgaagatgccaaggccccccgggtgcctgacatcctgagctctgtgcggcggggcagcggggcccctgaggccgagggccccctgccctgccccagccctgcccccttcagccccctgcctgcccccagcccccgcatcagtgacatcctgaacagcgtgcggcggggcagcggcaccccagaggccgagggccccctgtctgctggccccccaccctgcctgagccctgccctgctgggccccctgagcagccccagcccccgcatcagtgacatcctgaacagcgtgagaagaggcagcggcaccccagaggccgagggccccagccctgtgggccccccaccctgccccagccccaccatccctggccccctgcccacccccagcaggaagcaggagatcatcaagaccacagagcagctgattgaggccgtgaacaatggagactttgaggcctatgccaagatctgtgaccccggcctgaccagctttgagcctgaggccctgggcaacctggtggagggcatggacttccaccgcttctactttgagaacctgctggccaagaacagcaagcccatccacaccaccatcctgaacccccacgtgcacgtgattggagaagatgctgcctgcatcgcctacatccggctgacccagtacattgatggccagggccggcccaggaccagccagagcgaggagaccagggtgtggcacagaagagatggcaagtggcagaatgtgcacttccactgcagcggggcccctgtggcccccctgcagtag

SEQ ID NO: 83766 - DNA, 2001 bp, Artificial Sequence
  derived and/or modified sequence
atggccaccaccgtgacctgcacccggttcaccgacgagtaccagctatacgaagatatcggtaagggggccttcagcgtggttcgccggtgcgttaagctctgcactggacacgaatatgccgctaagataattaatactaaaaagctatcagcacgtgatcaccagaagctcgagcgagaagcacgaatctgtcgtctgcttaagcactcaaacatcgtccgtctgcatgatagtatatctgaggagggttttcattacctcgtgtttgatctggtcacaggaggtgagctgtttgaggacatagtcgcccgagaatattactcagaggcagacgcttctcactgcatccagcaaatactggaggccgtgctacactgtcatcagatgggagtggtgcatcgtgatctgaagcccgagaacttgttgttggcctcgaaatgtaaaggcgcagcagtcaagctggcagactttggtctcgcaatcgaggtgcagggcgatcagcaggcatggtttgggtttgccgggactccaggatatctgtcccctgaagttctgagaaaggaggcctacgggaaaccggttgacatttgggcatgcggtgtgatactgtacatcctgctcgttggctatccgccgttttgggatgaggaccagcataagctctatcagcagataaaagctggagcctacgactttccctctcccgagtgggacacagtgactccagaggcgaaaaatctcataaatcaaatgttaactatcaatcccgcgaaacgtatcactgcccatgaggctctgaagcatccctgggtttgtcagcggtccacagtggcatcaatgatgcaccgccaggaaactgtagaatgcctgaagaagtttaacgctcgaagaaagctgaagggcgccatcctgacgaccatgcttgcaacccgcaatttcagcgtcggccgacaaaccactgcccccgccacaatgtccaccgccgcatccggcaccaccatgggcttggtggaacaggcaaaaagcctcctcaataagaaagctgacggcgtgaagccacaaactaactctaccaaaaacagcgctgcagcaacctcacctaaaggtactctgccacctgccgctctggaaccacaaacaactgttatacacaaccccgtggatgggataaaagagagcagtgactcagcgaacacgacaattgaggacgaagatgccaaggcgcctagagtgcccgacatcctgtcatccgtccgccgggggagtggtgctccagaggctgagggcccactcccatgtccctcccctgcgcccttctccccactgcccgccccttcaccgcgaattagtgacatactgaactccgtgagacgtggatctggcacacctgaagccgagggacctcttagcgctggtcctccaccctgcttgagccctgcactcctggggcctctgagcagccctagtccacggatctccgacattctgaattcagttcggagaggaagtgggactcccgaggctgaaggcccatcccccgttggaccaccaccctgtccttccccaaccattcccggccctctgcccacaccttccaggaaacaggaaatcatcaagacgactgagcaactgatcgaagcagtgaataatggtgacttcgaagcctacgccaaaatttgcgatccaggactgactagttttgaacctgaagcccttgggaacctggtcgaggggatggacttccataggttttactttgagaacctgctggccaaaaatagcaagccaatccatactaccattcttaatccgcatgtgcacgtgattggcgaagatgcagcatgcattgcctacattaggttgacacaatacatcgacggtcagggtcgacccagaacttcgcagtccgaggaaacgcgagtgtggcaccgtcgggacggcaagtggcagaatgtccatttccactgttctggcgcccccgttgcccccctgcagtag

SEQ ID NO: 83767 - DNA, 2001 bp, Artificial Sequence
  derived and/or modified sequence
atggccacgaccgtgacgtgcactagattcactgatgagtaccagctgtatgaagatatcggaaaaggagcattttccgtggtccgacggtgcgtcaaactatgtacgggccacgaatatgcagccaagataattaataccaaaaaactctcggcgagggatcaccagaagttggaacgggaagcccgtatatgccgactgttgaagcacagcaacatagtccgcctccacgattctatttcagaggaagggttccattatctcgtgtttgacctcgtgaccggcggagagttatttgaggacattgtggctcgtgagtactactcagaggctgacgcgtcgcactgtatccaacagattcttgaggcagtgctgcattgtcaccagatgggggtggtacatagggacttgaagcccgaaaacctgttattagcgtcaaagtgcaagggcgctgctgtcaaactcgctgattttgggcttgctatcgaagtgcagggcgatcagcaggcctggttcggctttgctggaacgcctggatacttatcccctgaggttttgagaaaggaggcttatggaaaacctgttgatatctgggcttgtggcgttatattgtacatcctgctcgttggatatcccccattctgggacgaggatcagcataaattatatcagcagattaaagctggggcttatgacttccctagccccgagtgggataccgtaactcccgaggctaagaacctgatcaaccaaatgctcactatcaatccagccaagaggatcactgcgcacgaggcattgaaacacccttgggtttgtcagagaagtaccgttgcctctatgatgcacagacaagaaaccgtggagtgtctaaaaaaatttaatgccagaaggaagctcaaaggtgcaatcctgactaccatgctggccacccgtaacttctctgtgggccgtcagacaacggccccagcaaccatgtcaacggctgctagtggcacaaccatgggtctggtagagcaggcgaagagcctgttgaataagaaagccgatggggtgaaaccacagactaacagtacgaaaaactcagcagcggctacatccccaaagggtaccctccccccagcggctcttgagcctcaaaccaccgtaattcacaatccggtagatgggatcaaggaatcaagcgacagcgcaaacacgactattgaggatgaggacgctaaagctccccgagtccccgacatcctttctagtgtacgtagaggatcaggagcaccggaggcggagggcccacttccctgcccaagtcctgccccattctctcctcttcccgcaccatcgcctagaatctctgatattctgaactctgtgcgcaggggatccgggaccccggaggcagaaggccctctgtcagccggaccgccaccttgtttgtctccggctctcctgggtcccctttcgtccccatcgcccaggattagcgacatattaaatagtgtgcggcgtgggagcgggacccccgaggccgagggtccatcacccgtggggcctccgccttgtccaagccctacgatccctgggcctcttcctaccccctcaagaaaacaggagattattaagactactgagcaacttatagaggccgtcaacaatggcgactttgaagcatacgctaaaatctgtgatccagggctgacatcgtttgaaccagaggccctcggcaacctcgtcgaaggcatggatttccaccgcttttacttcgagaacttgctggccaaaaactccaagcccatccacacaacaatcctaaacccgcacgtgcacgtcataggggaagacgccgcttgtattgcatatataaggctaactcagtacatcgatgggcagggcaggcctaggacttcacagtctgaagaaacaagagtatggcatagaagggacggaaaatggcagaacgtgcattttcactgcagcggagcccctgtcgcgcctctccagtag

SEQ ID NO: 83768 - DNA, 4447 bp, Artificial Sequence
  derived and/or modified sequence
ccgtgcccgcgagcgggagccggagtcgccgccgcccgagcgcagccgagcgcacgccgagcccgtccgccgccgccatggccaccacggtgacctgcacccgcttcaccgacgagtaccagctctacgaggatattggcaagggggctttctctgtggtccgacgctgtgtcaagctctgcaccggccatgagtatgcagccaagatcatcaacaccaagaagctgtcagccagagatcaccagaagctggagagagaggctcggatctgccgccttctgaagcattccaacatcgtgcgtctccacgacagcatctccgaggagggcttccactacctggtcttcgatctggtcactggtggggagctctttgaagacattgtggcgagagagtactacagcgaggctgatgccagtcactgtatccagcagatcctggaggccgttctccattgtcaccaaatgggggtcgtccacagagacctcaagccggagaacctgcttctggccagcaagtgcaaaggggctgcagtgaagctggcagacttcggcctagctatcgaggtgcagggggaccagcaggcatggtttggtttcgctggcacaccaggctacctgtcccctgaggtccttcgcaaagaggcgtatggcaagcctgtggacatctgggcatgtggggtgatcctgtacatcctgctcgtgggctacccacccttctgggacgaggaccagcacaagctgtaccagcagatcaaggctggtgcctatgacttcccgtcccctgagtgggacaccgtcactcctgaagccaaaaacctcatcaaccagatgctgaccatcaaccctgccaagcgcatcacagcccatgaggccctgaagcacccgtgggtctgccaacgctccacggtagcatccatgatgcacagacaggagactgtggagtgtctgaaaaagttcaatgccaggagaaagctcaagggagccatcctcaccaccatgctggccacacggaatttctcagtgggcagacagaccaccgctccggccacaatgtccaccgcggcctccggcaccaccatggggctggtggaacaagccaagagtttactcaacaagaaagcagatggagtcaagccccagacgaatagcaccaaaaacagtgcagccgccaccagccccaaagggacgcttcctcctgccgccctggagcctcaaaccaccgtcatccataacccagtggacgggattaaggagtcttctgacagtgccaataccaccatagaggatgaagacgctaaagcccccagggtccccgacatcctgagctcagtgaggaggggctcgggagccccagaagccgaggggcccctgccctgcccatctccggctccctttagccccctgccagccccatcccccaggatctctgacatcctgaactctgtgagaaggggttcaggaaccccagaagccgagggccccctctcagcggggcccccgccctgcctgtctccggctctcctaggccccctgtcctccccgtcccccaggatctctgacatcctgaactctgtgaggaggggctcagggaccccagaagccgagggcccctcgccagtggggcccccgccctgcccatctccgactatccctggccccctgcccaccccatcccggaagcaggagatcattaagaccacggagcagctcatcgaggccgtcaacaacggtgactttgaggcctacgcgaaaatctgtgacccagggctgacctcgtttgagcctgaagcactgggcaacctggttgaagggatggacttccacagattctacttcgagaacctgctggccaagaacagcaagccgatccacacgaccatcctgaacccacacgtgcacgtcattggagaggatgccgcctgcatcgcttacatccggctcacgcagtacattgacgggcagggccggccccgcaccagccagtctgaggagacccgcgtgtggcaccgccgcgacggcaagtggcagaacgtgcacttccactgctcgggcgcgcctgtggccccgctgcagtgaagagctgcgccctggtttcgccggacagagttggtgtttggagcccgactgccctcgggcacacggcctgcctgtcgcatgtttgtgtctgcctcgttccctcccctggtgcctgtgtctgcagaaaaacaagaccagatgtgatttgttaaaaaaaaacaaaaaaaaaaaaaaaaaaaacaagatgacgacgacaaccacaaaaaaaattgacatcagatgaaatgaaaaaaaaaaaaaacaaaaaaaactaaaggaaggaaaaagctgtaaaaatcactggcattcgtggggccactccccacccaagctccacgtgtgtccgtctgtgctcctggcctctgggggaccagctgggacatgaacttgtctgccaggcccccgtcgcgtgctgaacggtgttagtttgtaggtaacgcacacaccccacacctaaggtgtctgcatcctcctgccaacgcatgggctccacgtggtgtgctcgctggctgtcgtgactgtcagctgtctcttgggaggggctgtgggggcccgctgggctgcctcctttcccgctagttgtgcctgagagttgctgttgttcctgctttcccttcccttcctttcatcccctgaagggctaggtgtgggttttccgtgcccggtatccccacacacccagcacggacaacccttcggcagagcccaggccggcccctcaccccctggagtattgaaactggagtcccgtccccaaggccttcagagatgcccctacacacccagggctccagctctggtccttctgggggagtaaagtgcaaagaggggcacagcttagttttgggcctctcgccgagcaagagacagcactgctggctacagctccaacacagccagctgtggcaagaggactctgcctgggctggcccccctcctgtgtgaggtgtctgtcccttctctgctggccagcagcagatgcactggcagctcccaaccctgtttccgcccctcggccctcccccagcctgttcggcttctctgcagcccgcaagggggagcagacttttgacaaaggactgcgggcctcgctcaagtccctgagcccccagctgaagctgggaggggaggccaggctttgtgtctgggcatattcgtctgctgatggggtttggggaagcctggggcttggggtttggtcgggtggtgcagctagtggcagagcgggatcagaggtggtggctgcccagcttctgggctgagacaagggtctgtgcaggggtttactgaagtgggagtgcctttggaatctgggccgggagcagaagggagcaaaagctacagtgggagccagcctagggcacatgggaggcgtgagggcagtgctgcccgtgcagtgtcaggtgtgccagtgccttggcgggctgcagtgcgtgtgagggcaccttctaggtgggccagggatgcagctatggagataaggcgggctggggacagaaacaggtgggcacagggcccaggacaccagcggatggagggcagggtctagccctgtgctcctgagcgtcggctgcctgggttcgaggcggtgggtccccggccccttgtgatggtgtgtaccatgggggagctcggggacagggcaagcccgagcatggtggggctgcagggtgggtctgaagccaggttgggtgggggtggtcacaagccctgactgcagagggtcaggggctcctgccccagtgcctgcccactttcaattcacattgttttcaacaaggattttctttatcttcccctacaaatcaagccaagggaggggcacagaatggggaacaggacacaggatcctaaactccaaggggactgtccaccgatgaacactcagagtggacaccatcttccgtccacgctgtgcccaggacagctgtccccatccatgaacacagggtaaacatctgccgggctccgcaccagtggctccctgggccatgggacagcggcagggctcaccacggacagcacgtggcccagcagccggccaccctggcgtcctggggcctcctcccctcctctccctctcaccttgtcacctccacggagctgcctgtctgggataatttggggattttttttctgggggataattcttttgcatgacccctaaagagcaagccacaccggtctgctagctaggtgtccgcggtgtggtggtggcggccgctggccagcgctgcaaggggtcggctgcccacggtgctggctggcctcccctcctctctctttttgctgagtttcattgtcttttctttctgagccttgtaagtgtacaaaaattattcttattttgttctgtctcgggaaactgcaaataaaagaaaaacaggaca

SEQ ID NO: 83769 - DNA, 2001 bp, Artificial Sequence
  derived and/or modified sequence
atggccaccaccgtgacctgcaccagattcaccgacgagtaccagctgtacgaggacatcggcaagggcgccttcagcgtggtgagaagatgcgtgaagctgtgcaccggccacgagtacgccgccaagatcatcaacaccaagaagctgagcgccagagaccaccagaagctggagagagaggccagaatctgcagactgctgaagcacagcaacatcgtgagactgcacgacagcatcagcgaggagggcttccactacctggtgttcgacctggtgaccggcggcgagctgttcgaggacatcgtggccagagagtactacagcgaggccgacgccagccactgcatccagcagatcctggaggccgtgctgcactgccaccagatgggcgtggtgcacagagacctgaagcccgagaacctgctgctggccagcaagtgcaagggcgccgccgtgaagctggccgacttcggcctggccatcgaggtgcagggcgaccagcaggcctggttcggcttcgccggcacccccggctacctgagccccgaggtgctgagaaaggaggcctacggcaagcccgtggacatctgggcctgcggcgtgatcctgtacatcctgctggtgggctacccccccttctgggacgaggaccagcacaagctgtaccagcagatcaaggccggcgcctacgacttccccagccccgagtgggacaccgtgacccccgaggccaagaacctgatcaaccagatgctgaccatcaaccccgccaagagaatcaccgcccacgaggccctgaagcacccctgggtgtgccagagaagcaccgtggccagcatgatgcacagacaggagaccgtggagtgcctgaagaagttcaacgccagaagaaagctgaagggcgccatcctgaccaccatgctggccaccagaaacttcagcgtgggcagacagaccaccgcccccgccaccatgagcaccgccgccagcggcaccaccatgggcctggtggagcaggccaagagcctgctgaacaagaaggccgacggcgtgaagccccagaccaacagcaccaagaacagcgccgccgccaccagccccaagggcaccctgccccccgccgccctggagccccagaccaccgtgatccacaaccccgtggacggcatcaaggagagcagcgacagcgccaacaccaccatcgaggacgaggacgccaaggcccccagagtgcccgacatcctgagcagcgtgagaagaggcagcggcgcccccgaggccgagggccccctgccctgccccagccccgcccccttcagccccctgcccgcccccagccccagaatcagcgacatcctgaacagcgtgagaagaggcagcggcacccccgaggccgagggccccctgagcgccggcccccccccctgcctgagccccgccctgctgggccccctgagcagccccagccccagaatcagcgacatcctgaacagcgtgagaagaggcagcggcacccccgaggccgagggccccagccccgtgggcccccccccctgccccagccccaccatccccggccccctgcccacccccagcagaaagcaggagatcatcaagaccaccgagcagctgatcgaggccgtgaacaacggcgacttcgaggcctacgccaagatctgcgaccccggcctgaccagcttcgagcccgaggccctgggcaacctggtggagggcatggacttccacagattctacttcgagaacctgctggccaagaacagcaagcccatccacaccaccatcctgaacccccacgtgcacgtgatcggcgaggacgccgcctgcatcgcctacatcagactgacccagtacatcgacggccagggcagacccagaaccagccagagcgaggagaccagagtgtggcacagaagagacggcaagtggcagaacgtgcacttccactgcagcggcgcccccgtggcccccctgcagtag

SEQ ID NO: 83770 - protein, 499 aa, Artificial Sequence
  derived and/or modified sequence
MASTTTCTRFTDEYQLFEELGKGAFSVVRRCMKIPTGQEYAAKIINTKKLSARDHQKLEREARICRLLKHPNIVRLHDSISEEGFHYLVFDLVTGGELFEDIVAREYYSEADASHCIQQILESVNHCHLNGIVHRDLKPENLLLASKSKGAAVKLADFGLAIEVQGDQQAWFGFAGTPGYLSPEVLRKDPYGKPVDMWACGVILYILLVGYPPFWDEDQHRLYQQIKAGAYDFPSPEWDTVTPEAKDLINKMLTINPAKRITASEALKHPWICQRSTVASMMHRQETVDCLKKFNARRKLKGAILTTMLATRNFSAAKSLLKKPDGVKESTESSNTTIEDEDVKARKQEIIKVTEQLIEAINNGDFEAYTKICDPGLTAFEPEALGNLVEGMDFHRFYFENALSKSNKPIHTIILNPHVHLVGDDAACIAYIRLTQYMDGSGMPKTMQSEETRVWHRRDGKWQNVHFHRSGSPTVPIKPPCIPNGKENFSGGTSLWQNI

SEQ ID NO: 83771 - DNA, 1500 bp, Artificial Sequence
  derived and/or modified sequence
atggctagcaccactacatgtaccaggttcaccgatgagtatcagttatttgaggagcttggtaagggtgccttctccgtggttcggagatgcatgaaaattcctaccggacaggagtatgccgctaaaatcatcaataccaaaaaactgtccgccagggaccaccaaaaactggagcgtgaagcccggatctgccgcctgctgaaacaccccaatatcgtgagactgcacgattctatttccgaggagggctttcactatttagttttcgatctggtcacagggggcgaactgttcgaggacatcgtcgcgagagagtattactctgaagccgacgcatcccattgtatccagcagatcctcgagtcggtgaaccactgccatttaaatggaatcgtccaccgtgacctcaagcctgagaacctgctattagcctccaaatccaaaggggccgccgtcaaactcgccgacttcggactggcaattgaagttcagggagaccagcaggcgtggttcggcttcgcaggtaccccaggctacctgagccctgaggtcctcaggaaggacccctacggaaaaccggtggacatgtgggcctgtggcgtcatactctacatactgctcgttgggtatccgcccttctgggatgaggaccaacatcgcctgtatcaacaaattaaggctggagcttacgattttcccagccctgaatgggacaccgtcacaccagaggctaaggacctcatcaacaaaatgctcactatcaaccctgctaaacgtataactgccagcgaggcactaaaacatccgtggatttgccaacggagcacagtggcttctatgatgcatagacaagaaactgtggattgtctcaagaagttcaacgcccggaggaagctcaaaggggcaatccttacaaccatgctggctaccagaaactttagcgccgctaagagccttctcaagaaaccagacggtgtaaaggaatcaaccgaatcaagcaacacaacaattgaagacgaagatgtaaaggcccgcaaacaggagattatcaaggtgacggagcaactgattgaggcaattaacaacggcgacttcgaagcttataccaagatttgcgaccccggacttactgctttcgagccagaggctttgggcaatctggtggaaggcatggattttcatcgcttctactttgagaatgcgctgtcaaaatctaataagccaattcacactattatattaaatccccacgttcacctcgtgggcgacgatgctgcatgtatcgcctatattagactgacacagtatatggacggctctggaatgccaaaaactatgcagtctgaggagaccagagtgtggcaccggagagacgggaaatggcagaacgtgcatttccatcggagtgggagcccgacggtgccgattaagccaccatgcattcccaacgggaaggagaatttcagcggcggcacctcgctgtggcagaatatatag

SEQ ID NO: 83772 - DNA, 1500 bp, Artificial Sequence
  derived and/or modified sequence
atggccagcaccaccacctgcacccgcttcacagatgagtaccagctgtttgaggagctgggcaagggggccttctctgtggtgcggcgctgcatgaagatccccaccggccaggagtatgctgccaagatcatcaacaccaagaagctgagcgcccgggaccaccagaagctggagcgggaggcccgcatctgccgcctgctgaagcaccccaacatcgtgcggctgcatgacagcatcagcgaggagggcttccactacctggtgtttgacctggtgactggaggagagctgtttgaggacatcgtggcccgggagtactacagcgaggctgatgccagccactgcatccagcagatcctggagagcgtgaaccactgccacctgaatggcatcgtgcaccgggacctgaagccagagaacctgctgctggccagcaagagcaaaggagctgctgtgaagctggccgactttggcctggccatcgaggtgcagggcgaccagcaggcctggtttggatttgctggcaccccaggctacctgagccctgaggtgctgaggaaggacccctacggcaagcctgtggacatgtgggcctgtggggtcatcctgtacatcctgctggtgggctacccacccttctgggatgaggaccagcaccggctgtaccagcagatcaaggccggggcctatgacttccccagccctgagtgggacacagtgaccccagaggccaaggacctgatcaacaagatgctgaccatcaacccagccaagaggatcacagccagcgaggccctgaagcacccctggatctgccagaggagcacagtggcctccatgatgcaccggcaggagaccgtggactgcctgaagaagttcaatgcccggaggaagctgaagggggccatcctgaccaccatgctggccaccaggaacttctctgctgccaagagcctgctgaagaagccagatggagtgaaggagagcacagagagcagcaacaccaccattgaagatgaagatgtgaaggccaggaagcaggagatcatcaaggtgacagagcagctgattgaggccatcaacaatggagactttgaggcctacaccaagatctgtgaccccggcctgacagcctttgagcctgaggccctgggcaacctggtggagggcatggacttccaccgcttctactttgaaaatgccctgagcaagagcaacaagcccatccacaccatcatcctgaacccccacgtgcacctggtgggagatgatgctgcctgcatcgcctacatccggctgacccagtacatggatggcagcggcatgcccaagaccatgcagagcgaggagaccagggtgtggcacagaagagatggcaagtggcagaatgtgcacttccacaggagcggcagccccaccgtgcccatcaagccaccctgcatccccaacgggaaggagaacttcagcggcggcaccagcctgtggcagaacatctag

SEQ ID NO: 83773 - DNA, 1500 bp, Artificial Sequence
  derived and/or modified sequence
atggccagcaccaccacctgcacccggttcaccgacgagtaccagttgttcgaagaactcggcaagggggctttctcggtagtcagacggtgtatgaaaatacctactggacaggagtacgctgcaaaaatcataaataccaagaagttgtctgctagggaccatcagaagttggaacgggaagccagaatatgccgcctgctcaaacatccaaacattgtgcgcttgcacgacagcatctcagaggaaggatttcactatctggtgttcgatttagtcaccggcggtgagttgttcgaggacattgtcgctagggagtactactctgaggccgacgcgtcacactgtatccagcagattttagagtctgtgaaccattgccatctgaacggcatagtccaccgcgatctcaagcctgagaatctcctgcttgcatcaaagtcaaaaggagcggctgtcaaacttgccgatttcggcctggctattgaggttcagggggaccaacaggcctggttcggctttgccggcacacccggttatttgtctccggaagtactgaggaaggacccatatgggaagccagttgatatgtgggcctgtggcgtcattctgtacattctattggttggatacccaccattctgggacgaagatcagcacagactttaccaacaaatcaaagccggtgcttacgactttcccagccccgagtgggacaccgtgactccagaggcgaaagatttaatcaataaaatgctcaccattaacccagccaaaaggattaccgcctccgaggcccttaagcacccgtggatctgccagagatcgactgtcgcatctatgatgcataggcaggaaacggtggactgccttaaaaagtttaatgcccgccgaaagctcaaaggcgccatactgaccaccatgttggcaactagaaattttagtgccgcaaaatctctgctcaaaaaacctgacggcgtgaaggagtctaccgagtcaagcaacaccaccatcgaagacgaggacgtcaaggctaggaaacaggaaatcatcaaggtgaccgaacagctgatcgaagccattaacaacggagatttcgaggcctatacgaagatctgcgaccctgggctcacagcctttgagccggaagcacttggcaacctcgtcgagggcatggattttcatagattctattttgaaaacgcactctctaagtctaacaagcccatccacacaatcatattgaatccacacgtgcatcttgtcggtgacgatgccgcatgcattgcctatataagattaacacagtatatggacggatccggaatgcctaagacaatgcagagtgaggaaaccagggtctggcacaggagggacggtaaatggcagaacgtccattttcaccggtctggctcgcctaccgttccgattaagcctccttgcatacccaatgggaaggaaaacttctccggaggaacctccctctggcaaaacatatag

SEQ ID NO: 83774 - DNA, 1500 bp, Artificial Sequence
  derived and/or modified sequence
atggccagcactactacttgcacacgctttacagatgaatatcagcttttcgaagagctggggaaaggggctttcagcgtcgtaaggcgctgtatgaagatacctaccggacaagagtacgcagccaaaattatcaacacaaagaagctcagcgcgagagaccatcagaagttggagagggaggctagaatatgccggctgctgaagcacccgaatatcgtgaggctgcacgacagcatctctgaggaaggattccactacctagtctttgacctggtaacaggcggtgagctattcgaggatattgtggcaagagaatattactctgaggccgacgcttctcactgtattcagcaaatactcgaaagcgtaaaccattgccacttgaatgggatagtgcacagagacttaaagcccgagaacctactactggccagtaagagtaagggcgcagcagtgaagttagcagacttcggcctggctattgaggtccagggggatcagcaggcgtggtttgggttcgccggaacaccaggctacctcagccccgaggttctgaggaaggacccgtatggaaagccagtcgatatgtgggcttgtggtgtgattctgtatatcctgcttgtggggtatccccctttttgggatgaggaccagcatagactctaccagcagatcaaagccggagcttacgacttcccctcgccagaatgggacacagtgacgcctgaagccaaggacctgatcaataagatgctgactattaacccagctaagcgaatcactgcaagtgaggccctgaagcatccttggatttgccagcgctccactgtcgctagtatgatgcaccggcaggagacagtggattgcctcaaaaagttcaacgcgcgaagaaagttaaagggcgctattttgactacaatgctggctactaggaatttcagtgccgcaaagtcactcctgaaaaaacccgacggggtgaaagagtccacagaaagcagcaatacaacaatcgaggacgaagacgtgaaggctagaaagcaggaaataattaaggtcactgagcagctgattgaggcgattaacaacggcgatttcgaggcatacacgaagatctgcgatccaggcctgaccgctttcgaacccgaagcgctcgggaatttggttgaaggcatggactttcacagattttattttgaaaacgctttgagcaagtcgaacaagcctattcatacaataattctcaatccccatgtgcacctggttggagacgacgcggcatgcattgcttatatccggctgacccagtacatggatggatccggaatgccaaaaacgatgcaatcagaagaaacaagggtttggcaccggagggacggcaagtggcagaacgttcactttcatcgttctggctcccccacagtgcccatcaaacccccttgtatccctaacggcaaggagaacttctccggcggaacctctctgtggcaaaacatctag

SEQ ID NO: 83775 - DNA, 1940 bp, Artificial Sequence
  derived and/or modified sequence
atggcttcgaccacaacctgcaccaggttcacggacgagtatcagcttttcgaggagcttggaaagggggcattctcagtggtgagaagatgtatgaaaattcctactggacaagaatatgctgccaaaattatcaacaccaaaaagctttctgctagggatcatcagaaactagaaagagaagctagaatctgccgtcttttgaagcaccctaatattgtgcgacttcatgatagcatatcagaagagggctttcactacttggtgtttgatttagttactggaggtgaactgtttgaagacatagtggcaagagaatactacagtgaagctgatgccagtcattgtatacagcagattctagaaagtgttaatcattgtcacctaaatggcatagttcacagggacctgaagcctgagaatttgcttttagctagcaaatccaagggagcagctgtgaaattggcagactttggcttagccatagaagttcaaggggaccagcaggcgtggtttggttttgctggcacacctggatatctttctccagaagttttacgtaaagatccttatggaaagccagtggatatgtgggcatgtggtgtcattctctatattctacttgtggggtatccacccttctgggatgaagaccaacacagactctatcagcagatcaaggctggagcttatgattttccatcaccagaatgggacacggtgactcctgaagccaaagacctcatcaataaaatgcttactatcaaccctgccaaacgcatcacagcctcagaggcactgaagcacccatggatctgtcaacgttctactgttgcttccatgatgcacagacaggagactgtagactgcttgaagaaatttaatgctagaagaaaactaaagggtgccatcttgacaactatgctggctacaaggaatttctcagcagccaagagtttgttgaagaaaccagatggagtaaaggagtcaactgagagttcaaatacaacaattgaggatgaagatgtgaaagcacgaaagcaagagattatcaaagtcactgaacaactgatcgaagctatcaacaatggggactttgaagcctacacaaaaatctgtgacccaggccttactgcttttgaacctgaagctttgggtaatttagtggaagggatggattttcaccgattctactttgaaaatgctttgtccaaaagcaataaaccaatccacactattattctaaaccctcatgtacatctggtaggggatgatgccgcctgcatagcatatattaggctcacacagtacatggatggcagtggaatgccaaagacaatgcagtcagaagagactcgtgtgtggcaccgccgggatggaaagtggcagaatgttcattttcatcgctcggggtcaccaacagtacccatcaagccaccctgtattccaaatgggaaagaaaacttctcaggaggcacctctttgtggcaaaacatctaaggcctgaaaaccattcacatatgggtcttctaaatttcaacagtgccacttctgcattctctgttctcaaggcacctggatggtgaccctgggccgtcctctcctcctcttcatgcatgtttctgagtgcatgaagttgtgaaggtcctacatgtaatgcatatgtgatgcatcatcttatcatatattccttcctatacattgtttacacttcaactacggggatgttccacacaaacttaaattactgttggcaaaacaatagggggagattagacaaaaaaaaaaatccacaatattccaagtacaactcttcatcaagtttctctgttaatgccaagatttaacagacttaagaactattgttctctgaatgacagttgtaagagaaatgtaaattttttagaactctttgctgttaatctgttttggtttgtttg

SEQ ID NO: 83776 - DNA, 1500 bp, Artificial Sequence
  derived and/or modified sequence
atggccagcaccaccacctgcaccagattcaccgacgagtaccagctgttcgaggagctgggcaagggcgccttcagcgtggtgagaagatgcatgaagatccccaccggccaggagtacgccgccaagatcatcaacaccaagaagctgagcgccagagaccaccagaagctggagagagaggccagaatctgcagactgctgaagcaccccaacatcgtgagactgcacgacagcatcagcgaggagggcttccactacctggtgttcgacctggtgaccggcggcgagctgttcgaggacatcgtggccagagagtactacagcgaggccgacgccagccactgcatccagcagatcctggagagcgtgaaccactgccacctgaacggcatcgtgcacagagacctgaagcccgagaacctgctgctggccagcaagagcaagggcgccgccgtgaagctggccgacttcggcctggccatcgaggtgcagggcgaccagcaggcctggttcggcttcgccggcacccccggctacctgagccccgaggtgctgagaaaggacccctacggcaagcccgtggacatgtgggcctgcggcgtgatcctgtacatcctgctggtgggctacccccccttctgggacgaggaccagcacagactgtaccagcagatcaaggccggcgcctacgacttccccagccccgagtgggacaccgtgacccccgaggccaaggacctgatcaacaagatgctgaccatcaaccccgccaagagaatcaccgccagcgaggccctgaagcacccctggatctgccagagaagcaccgtggccagcatgatgcacagacaggagaccgtggactgcctgaagaagttcaacgccagaagaaagctgaagggcgccatcctgaccaccatgctggccaccagaaacttcagcgccgccaagagcctgctgaagaagcccgacggcgtgaaggagagcaccgagagcagcaacaccaccatcgaggacgaggacgtgaaggccagaaagcaggagatcatcaaggtgaccgagcagctgatcgaggccatcaacaacggcgacttcgaggcctacaccaagatctgcgaccccggcctgaccgccttcgagcccgaggccctgggcaacctggtggagggcatggacttccacagattctacttcgagaacgccctgagcaagagcaacaagcccatccacaccatcatcctgaacccccacgtgcacctggtgggcgacgacgccgcctgcatcgcctacatcagactgacccagtacatggacggcagcggcatgcccaagaccatgcagagcgaggagaccagagtgtggcacagaagagacggcaagtggcagaacgtgcacttccacagaagcggcagccccaccgtgcccatcaagcccccctgcatccccaacggcaaggagaacttcagcggcggcaccagcctgtggcagaacatctag

SEQ ID NO: 83777 - protein, 495 aa, Artificial Sequence
  derived and/or modified sequence
MATTATCTRFTDDYQLFEELGKGAFSVVRRCVKKTSTQEYAAKIINTKKLSARDHQKLEREARICRLLKHPNIVRLHDSISEEGFHYLVFDLVTGGELFEDIVAREYYSEADASHCIHQILESVNHIHQHDIVHRDLKPENLLLASKCKGAAVKLADFGLAIEVQGEQQAWFGFAGTPGYLSPEVLRKDPYGKPVDIWACGVILYILLVGYPPFWDEDQHKLYQQIKAGAYDFPSPEWDTVTPEAKNLINQMLTINPAKRITADQALKHPWVCQRSTVASMMHRQETVECLRKFNARRKLKGAILTTMLVSRNFSAAKSLLNKKSDGGVKEPQTTVVHNATDGIKGSTESCNTTTEDEDLKVRKQEIIKITEQLIEAINNGDFEAYTKICDPGLTSFEPEALGNLVEGMDFHKFYFENLLSKNSKPIHTTILNPHVHVIGEDAACIAYIRLTQYIDGQGRPRTSQSEETRVWHRRDGKWLNVHYHCSGAPAAPLQ

SEQ ID NO: 83778 - DNA, 1488 bp, Artificial Sequence
  derived and/or modified sequence
atggctacgaccgccacgtgcacgcgcttcaccgatgattatcaactctttgaagagcttggtaagggtgctttctctgtcgtgcggaggtgcgtgaagaagacaagtacccaagagtatgcagccaagataatcaatactaaaaaattgagtgcaagagaccaccagaaactggagcgcgaggctaggatttgccgcctgctcaagcacccgaatatcgttcggctgcatgatagcatcagtgaggaagggttccactatctggtgtttgaccttgttactggcggtgagctgttcgaagatattgtcgcacgggagtattactccgaagctgacgcatcgcactgcattcaccagattcttgaaagcgtgaatcatatccatcagcatgacatcgtgcatagggatctaaagcccgaaaacctccttttagcttctaaatgcaagggggccgctgtgaagctggcagacttcggactggctatagaggtgcaaggtgagcaacaagcttggttcggatttgcaggcactcctggctacctgagtccagaggtcctacgcaaagacccctacggtaagccggtggacatctgggcctgcggtgtgatactctacatcctgttggttggctatccccctttttgggatgaggaccagcataagctgtatcagcagatcaaagctggagcttatgatttcccctcccctgagtgggacacggtcactccagaagctaagaatctgatcaaccagatgctgacaattaatccagctaaacgtattactgccgatcaggcactcaaacatccctgggtatgccaacgatcaacagtagcctctatgatgcaccggcaggagactgtcgagtgcttaagaaagttcaatgctaggcggaagctcaaaggcgccatactgacaacaatgctggtatcgcgcaacttcagcgctgctaaatcgctcctgaacaaaaagtcagatggaggcgtgaaagagccccagacaacagtagtacacaacgctactgacggcatcaagggttccaccgaatcttgtaacactacgacagaagatgaagaccttaaagtgcgtaaacaagagattattaaaattacagaacagttaattgaggctatcaataatggagactttgaagcttacactaagatctgtgacccagggctgacatcttttgaaccagaagccctagggaacctcgtggaaggcatggacttccataagttctacttcgaaaacctactgtcaaaaaacagtaagccaatccacaccacgatactgaaccctcatgtacatgtgataggtgaagacgcagcctgcatcgcttacatcagactcacacaatatatagacggccagggccgacctcggacctcccaatctgaagaaactagagtgtggcatcggcgggacggtaaatggttgaatgtgcattatcactgcagtggagcaccagccgccccactgcagtag

SEQ ID NO: 83779 - DNA, 1488 bp, Artificial Sequence
  derived and/or modified sequence
atggccaccacagccacctgcacccgcttcacagatgactaccagctgtttgaggagctgggcaagggggccttctctgtggtgagaagatgtgtgaagaagaccagcacccaggagtatgctgccaagatcatcaacaccaagaagctgagcgcccgggaccaccagaagctggagcgggaggcccgcatctgccgcctgctgaagcaccccaacatcgtgcggctgcatgacagcatcagcgaggagggcttccactacctggtgtttgacctggtgactggaggagagctgtttgaggacatcgtggcccgggagtactacagcgaggctgatgccagccactgcatccaccagatcctggagagcgtgaaccacatccaccagcacgacatcgtgcaccgggacctgaagccagagaacctgctgctggccagcaaatgtaaaggagctgctgtgaagctggccgactttggcctggccatcgaggtgcagggcgagcagcaggcctggtttggatttgctggcaccccaggctacctgagccctgaggtgctgaggaaggacccctacggcaagcctgtggacatctgggcctgtggggtcatcctgtacatcctgctggtgggctacccacccttctgggatgaggaccagcacaagctgtaccagcagatcaaggccggggcctatgacttccccagccctgagtgggacacagtgaccccagaggccaagaacctgatcaaccagatgctgaccatcaacccagccaagaggatcacagctgaccaggccctgaagcacccctgggtgtgccagaggagcacagtggcctccatgatgcaccggcaggagaccgtggagtgcctgaggaagttcaatgcccggaggaagctgaagggggccatcctgaccaccatgctggtgtccaggaacttctctgctgccaagagcctgctgaacaagaagagtgatggcggcgtgaaggagccccagaccaccgtggtgcacaatgccacagatggcatcaagggcagcacagagagctgcaacaccaccacagaagatgaggacctgaaggtgaggaagcaggagatcatcaagatcacagagcagctgattgaggccatcaacaacggggactttgaggcctacaccaagatctgtgaccccggcctgaccagctttgagcctgaggccctgggcaacctggtggagggcatggacttccacaagttctactttgagaacctgctgagcaagaacagcaagcccatccacaccaccatcctgaacccccacgtgcacgtgattggagaagatgctgcctgcatcgcctacatccggctgacccagtacattgatggccagggccggcccaggaccagccagagcgaggagaccagggtgtggcacagaagagatggcaagtggctgaatgtgcactaccactgcagcggggccccagctgcccccctgcagtag

SEQ ID NO: 83780 - DNA, 1488 bp, Artificial Sequence
  derived and/or modified sequence
atggccaccaccgccacctgcacccggttcaccgacgactaccagctgtttgaagagctcggaaaaggagctttcagtgttgtccgacgctgcgtgaagaagacttccactcaagaatacgccgccaagataattaatactaagaaactgtccgcacgggaccaccagaagttagaaagggaagccagaatctgccggcttctcaaacatcctaacatcgtccgcctgcacgattctatctccgaggaaggctttcactacttggtcttcgacttggtgaccggaggagagttatttgaagacatcgttgccagagaatattactcagaggcggatgctagccactgtattcaccagatcctggagtccgtgaaccatatccatcagcacgatatcgttcatagggatctgaagcctgaaaatctgcttttggcgtctaagtgcaagggagccgctgtgaaattggccgattttggtttagcgattgaggtccaaggggaacaacaggcctggttcggctttgccgggacccccggatatttgtctcctgaggtgttacgtaaggatccctatggaaaaccggtggatatttgggcgtgcggcgtcattctttacatactgctggtgggatacccccccttttgggatgaagaccagcacaagctctaccagcagataaaggccggagcctacgacttcccttctcccgaatgggacactgtgactcctgaagcaaagaatctgatcaatcagatgctgacaataaatcctgcaaaaagaatcaccgcggatcaggctttgaagcacccatgggtgtgccaaaggtctaccgtcgcatccatgatgcacagacaggaaactgtggagtgtctgcggaagtttaacgctcggaggaagctgaagggagctatcctgaccaccatgctggtgagtagaaacttttccgctgctaaatctctactgaacaagaaaagtgacggtggcgtgaaggagccccagacaacagtggttcacaacgccactgacgggatcaagggttcgaccgaaagctgcaacaccacaacggaggatgaagatctgaaggtgcggaagcaagaaattattaaaattactgaacaactcatagaggctatcaataacggcgattttgaagcttataccaaaatctgtgatcccggtctgacatccttcgagcctgaggcgctgggcaatctggtagagggcatggatttccacaagttttactttgagaacctgctgagcaaaaattcaaaacccatacacaccacaattctgaaccctcatgttcacgtcataggcgaggacgccgcctgcatcgcctacattcggttgactcagtatatagatggccaagggagacccagaacaagtcagtctgaagaaacgagggtgtggcatcgtcgagacggaaaatggctaaatgttcactaccattgtagcggggcacccgccgcccccctccagtag

SEQ ID NO: 83781 - DNA, 1488 bp, Artificial Sequence
  derived and/or modified sequence
atggctacaactgcgacgtgcacgcgctttaccgatgactaccagctgtttgaggaattagggaagggcgcattttccgtcgtgaggaggtgcgtaaagaagacaagcacccaggaatacgcggctaaaataataaatacaaaaaagctgtccgcgagagatcaccagaagctagagagggaggccagaatctgcaggctgctgaagcacccaaacatcgttaggcttcacgattccattagtgaagagggattccactacctagtgttcgacctcgtcaccggaggcgagctgttcgaggacatcgtggccagagagtattactccgaagctgatgcctcccattgtatccaccagatcctggaatccgttaatcacatacatcagcatgatatcgtccacagagatctcaagcccgaaaacctgttacttgcatcaaaatgcaaaggtgctgctgtgaagctcgcagacttcggtctggcgatagaggtccaaggcgaacagcaagcatggtttggattcgcaggaacacccggatatctctcccctgaggttctccgaaaggacccttatggcaagcctgtggatatatgggcttgtggcgttatactttatatcctcctggtagggtaccctcctttttgggacgaagaccaacacaagctttaccagcagattaaggctggggcttacgacttccctagcccagaatgggacaccgtgacccccgaagcgaagaatcttatcaatcaaatgctaacaattaatcctgccaagaggatcacagccgatcaagcacttaagcatccctgggtttgtcagagatctacagtggcttccatgatgcacagacaggagactgtggaatgcctgagaaagttcaatgcacgaagaaagctgaagggtgcaatactgaccacaatgctagtaagtagaaacttttctgccgctaaatcacttctaaacaagaaatctgatgggggagttaaggagccgcagacaactgtggtgcataatgcaactgacggtataaagggatccaccgagtcatgcaacactaccaccgaggacgaggatttgaaggtgagaaaacaggaaattattaagattacggaacagcttattgaagccataaacaatggagactttgaagcttacacaaaaatttgtgatcctggcctgaccagcttcgagccagaagcgctggggaacctggtggaagggatggactttcacaaattctacttcgagaatttactgtctaagaacagcaaaccgatccacacgacaatcttaaatccccacgtgcacgtcattggcgaggatgctgcatgcattgcttatattaggttgacccagtacattgacgggcagggtcgtcctcgaacctcccagtccgaggagacgcgcgtctggcaccgcagagacgggaagtggctgaacgtgcactaccattgcagtggggctccggctgccccattacagtag

SEQ ID NO: 83782 - DNA, 3563 bp, Artificial Sequence
  derived and/or modified sequence
ggtgactgtgcaccgacgtcggcgcgggctgcaccgccgcgtccgcccgcccgccagcatggccaccaccgccacctgcacccgtttcaccgacgactaccagctcttcgaggagcttggcaagggtgctttctctgtggtccgcaggtgtgtgaagaaaacctccacgcaggagtacgcagcaaaaatcatcaataccaagaagttgtctgcccgggatcaccagaaactagaacgtgaggctcggatatgtcgacttctgaaacatccaaacatcgtgcgcctccatgacagtatttctgaagaagggtttcactacctcgtgtttgaccttgttaccggcggggagctgtttgaagacattgtggccagagagtactacagtgaagcagatgccagccactgtatacatcagattctggagagtgttaaccacatccaccagcatgacatcgtccacagggacctgaagcctgagaacctgctgctggcgagtaaatgcaagggtgccgccgtcaagctggctgattttggcctagccatcgaagtacagggagagcagcaggcttggtttggttttgctggcaccccaggttacttgtcccctgaggtcttgaggaaagatccctatggaaaacctgtggatatctgggcctgcggggtcatcctgtatatcctcctggtgggctatcctcccttctgggatgaggatcagcacaagctgtatcagcagatcaaggctggagcctatgatttcccatcaccagaatgggacacggtaactcctgaagccaagaacttgatcaaccagatgctgaccataaacccagcaaagcgcatcacggctgaccaggctctcaagcacccgtgggtctgtcaacgatccacggtggcatccatgatgcatcgtcaggagactgtggagtgtttgcgcaagttcaatgcccggagaaaactgaagggtgccatcctcacgaccatgcttgtctccaggaacttctcagctgccaaaagcctattgaacaagaagtcggatggcggtgtcaaggagccacaaaccactgtggtacacaacgctacagatgggatcaagggctccacagagagctgcaacaccaccacagaagatgaggacctcaaagtgcgaaaacaggagatcattaagattacagaacagctgattgaagccatcaacaatggggactttgaggcctacacgaagatttgtgatccaggcctcacttcctttgagcctgaggcccttggtaacctcgtggaggggatggatttccataagttttactttgagaatctcctgtccaagaacagcaagcctatccataccaccatcctaaacccacacgtccacgtgattggggaggacgcagcgtgcatcgcctacatccgcctcacccagtacatcgacgggcagggtcggcctcgcaccagccagtcagaagagacccgggtctggcaccgtcgggatggcaagtggctcaatgtccactatcactgctcaggggcccctgccgcaccgctgcagtgagctcagccacaggggctttaggagattccagccggaggtccaaccttcgcagccagtggctctggagggcctgagtgacagcggcagtcctgtttgtttgaggtttaaaacaattcaattacaaaagcggcagcagccaatgcacgcccctgcatgcagccctcccgcccgcccttcgtgtctgtctctgctgtaccgaggtgttttttacatttaagaaaaaaaaaaaagaaaaaaagattgtttaaaaaaaaaaggaatccataccatgatgcgttttaaaaccaccgacagcccttgggttggcaagaaggcaggagtatgtatgaggtccatcctggcatgagcagtggctcacccaccggccttgaagaggtgagcttggcctctctggtccccatggacttagggggaccaggcaagaactctgacagagctttgggggccgtgatgtgattgcagctcctgaggtggcctgcttaccccaggtctaggaatgaacttctttggaacttgcataggcgcctagaatggggctgatgagaacatcgtgaccatcagacctacttgggagagaacgcagagctcccagcctgctgtggaggcagctgagaagtggtggcctcaggactgagagcccggacgttgctgtactgtcttgtttagtgtagaagggaagagaattggtgctgcagaagtgtacccgccatgaagccgatgagaaacctcgtgttagtctgacatgcactcactcatccatttctataggatgcacaatgcatgtgggccctaatattgaggccttatccctgcagctaggagggggaggggttgttgctgctttgcttcgtgttttcttctaacctggcaaggagagagccaggccctggtcagggctcccgtgccgcctttggcggttctgtttctgtgctgatctggaccatctttgtcttgccttttcacggtagtggtccccatgctgaccctcatctgggcctgggccctctgccaagtgcccctgtgggatgggaggagtgaggcagtgggagaagaggtggtggtcgtttctatgcattcaggctgcctttggggctgcctcccttcttattcttccttgctgcacgtccatctcttttcctgtctttgagattgacctgactgctctggcaagaagaagaggtgtccttacagaggcctctttactgaccaactgaagtatagacttactgctggacaatctgcatgggcatcacccctccccgcatgtaacccaaaagaggtgtccagagccaaggcttctaccttcattgtccctctctgtgctcaaggagttccattccaggaggaagagatctataccctaagcagatagcaaagaagataatggaggagcaattggtcatggccttggtttccctcaaaacaacgctgcagatttatctgcacaaacatctccacttttgggggaaaggtgggtagattccagttccctggactaccttcaggaggcacgagagctgggagaagaggcaaagctacaggtttacttgggagccagctgagaagagagcagactcacaggtgctggtgcttggatttagccaggctcctccgagcacctcatgcatgtcccagcccctgggccctagccctttcctgccctgcagtctgcagtgccagcacgcaaatcccttcaccacagggtttcgttttgctggcttgaagacaaatggtcttagaattcattgagacccatagcttcatatggctgctccagccccacttcttagcattcttactcctcttctggggctaatgtcagcatctatagacaatagactattaaaaaatcaccttttaaacaagaaacggaaggcatttgatgcagaatttttgcatgacaacatagaaataatttaaaaatagtgtttgttctgaatgttggtagacccttcatagctttgttacaatgaaaccttgaactgaaaatatttaataaaataacctttaaacagtc

SEQ ID NO: 83783 - DNA, 1488 bp, Artificial Sequence
  derived and/or modified sequence
atggccaccaccgccacctgcaccagattcaccgacgactaccagctgttcgaggagctgggcaagggcgccttcagcgtggtgagaagatgcgtgaagaagaccagcacccaggagtacgccgccaagatcatcaacaccaagaagctgagcgccagagaccaccagaagctggagagagaggccagaatctgcagactgctgaagcaccccaacatcgtgagactgcacgacagcatcagcgaggagggcttccactacctggtgttcgacctggtgaccggcggcgagctgttcgaggacatcgtggccagagagtactacagcgaggccgacgccagccactgcatccaccagatcctggagagcgtgaaccacatccaccagcacgacatcgtgcacagagacctgaagcccgagaacctgctgctggccagcaagtgcaagggcgccgccgtgaagctggccgacttcggcctggccatcgaggtgcagggcgagcagcaggcctggttcggcttcgccggcacccccggctacctgagccccgaggtgctgagaaaggacccctacggcaagcccgtggacatctgggcctgcggcgtgatcctgtacatcctgctggtgggctacccccccttctgggacgaggaccagcacaagctgtaccagcagatcaaggccggcgcctacgacttccccagccccgagtgggacaccgtgacccccgaggccaagaacctgatcaaccagatgctgaccatcaaccccgccaagagaatcaccgccgaccaggccctgaagcacccctgggtgtgccagagaagcaccgtggccagcatgatgcacagacaggagaccgtggagtgcctgagaaagttcaacgccagaagaaagctgaagggcgccatcctgaccaccatgctggtgagcagaaacttcagcgccgccaagagcctgctgaacaagaagagcgacggcggcgtgaaggagccccagaccaccgtggtgcacaacgccaccgacggcatcaagggcagcaccgagagctgcaacaccaccaccgaggacgaggacctgaaggtgagaaagcaggagatcatcaagatcaccgagcagctgatcgaggccatcaacaacggcgacttcgaggcctacaccaagatctgcgaccccggcctgaccagcttcgagcccgaggccctgggcaacctggtggagggcatggacttccacaagttctacttcgagaacctgctgagcaagaacagcaagcccatccacaccaccatcctgaacccccacgtgcacgtgatcggcgaggacgccgcctgcatcgcctacatcagactgacccagtacatcgacggccagggcagacccagaaccagccagagcgaggagaccagagtgtggcacagaagagacggcaagtggctgaacgtgcactaccactgcagcggcgcccccgccgcccccctgcagtag

SEQ ID NO: 83784 - protein, 313 aa, Artificial Sequence
  derived and/or modified sequence
MHPHHQETLKKNRVVLAKQLLLSELLEHLLEKDIITLEMRELIQAKVGSFSQNVELLNLLPKRGPQAFDAFCEALRETKQGHLEDMLLTTLSGLQHVLPPLSCDYDLSLPFPVCESCPLYKKLRLSTDTVEHSLDNKDGPVCLQVKPCTPEFYQTHFQLAYRLQSRPRGLALVLSNVHFTGEKELEFRSGGDVDHSTLVTLFKLLGYDVHVLCDQTAQEMQEKLQNFAQLPAHRVTDSCIVALLSHGVEGAIYGVDGKLLQLQEVFQLFDNANCPSLQNKPKMFFIQACRGAGAIGSLGHLLLFTAATASLAL

SEQ ID NO: 83785 - DNA, 942 bp, Artificial Sequence
  derived and/or modified sequence
atgcacccacatcatcaggaaactctgaagaagaatcgagtcgtgctggccaaacagcttctcctgagcgagttactagagcacctcctcgagaaagacatcatcacgcttgagatgcgagagttaattcaggctaaagttggctcattctcccaaaatgtagaactccttaacctgctacccaaaagaggcccccaagcctttgacgcgttttgtgaagcccttagggagaccaaacaagggcatttagaagacatgctcctgaccaccctgtccggactccagcacgttctgcctccactctcatgtgactacgacttatccctcccattccctgtgtgtgagtcctgtccactttacaaaaaattgcgcctcagtacagatacagtggaacattctcttgataacaaggacggtcctgtctgcctgcaagttaagccttgtacaccagaattctatcagacccactttcagctagcctatagactgcaaagccgacccagggggctcgctctcgtactgtctaacgtgcactttacaggggagaaggagctcgaattccgcagcgggggtgatgttgaccactcaacgctggtgaccctgtttaaactcctggggtacgatgttcacgttctgtgcgatcagactgcccaggaaatgcaggaaaaacttcagaacttcgctcagctccccgctcacagagtaacagacagctgtatagtcgctctgttgtcccacggagttgagggtgccatctatggtgtagatgggaagctgctacaactccaggaagtcttccagctcttcgataacgcgaactgcccttcgttacagaacaaacccaagatgttcttcatacaagcctgccgtggcgctggggcaatcggttccctcggccatttgctgctcttcaccgctgctacagctagtctggccttatag

SEQ ID NO: 83786 - DNA, 942 bp, Artificial Sequence
  derived and/or modified sequence
atgcacccccaccaccaggagaccctgaagaagaacagagtggtgctggccaagcagctgctgctgtctgagctgctggagcacctgctggagaaggacatcatcaccctggagatgagggagctgatccaggccaaggtgggcagcttcagccagaatgtggagctgctgaacctgctgcccaagaggggcccccaggcctttgatgccttctgtgaggccctgcgggagaccaagcagggccacctggaggacatgctgctgaccaccctgagcggcctgcagcacgtgctgccccccctgagctgtgactatgacctgagcctgcccttccctgtgtgtgagagctgccccctgtacaagaagctgcggctgagcacagacacagtggagcacagcctggacaacaaggatggccctgtgtgcctgcaggtgaagccctgcaccccagagttctaccagacccacttccagctggcctaccgcctgcagagccggccccggggcctggccctggtgctgagcaatgtgcacttcaccggggagaaggagctggagttccgctctggaggagatgtggaccacagcaccctggtgaccctcttcaagctgctgggctatgatgtgcacgtgctgtgtgaccagacagcccaggagatgcaggagaagctgcagaactttgcccagctgcctgcccaccgggtgacagacagctgcatcgtggccctgctgagccacggcgtggagggcgccatctatggagtggatggcaagctgctgcagctgcaggaggtgttccagctgtttgacaatgccaactgccccagcctgcagaacaagcccaagatgttcttcatccaggcctgccgcggggccggggccatcggcagcctgggccacctgctgctcttcaccgctgccacagccagcctggccctgtag

SEQ ID NO: 83787 - DNA, 942 bp, Artificial Sequence
  derived and/or modified sequence
atgcacccccaccaccaggagaccctgaagaagaaccgggtggtgctggctaaacagctgctgctcagtgaacttcttgagcacttgctggagaaagacatcataacgctggagatgcgggaactcatccaagccaaagtcggtagcttctcacagaatgtggagctgctgaacttgttgccaaagcgaggaccgcaagcgtttgatgcgttctgtgaggccttgcgggagactaaacagggccacttagaggacatgctgctgactacattgagtgggctgcagcacgtgctcccccctctgtcatgtgattatgatcttagtttgccctttcctgtttgcgaatcatgtcccctctataaaaaattgcggctttccaccgatacggtggaacattccttagacaataaggacggtccagtgtgcttgcaggtgaaaccatgcacccccgagttctaccagactcacttccagctggcttacaggttacagagccggccccggggcctggccctcgtactcagcaatgttcatttcacaggtgagaaagaactagagttcagatcaggaggcgatgtcgaccactctacactggtgactttgttcaagctcctaggatatgacgtgcacgtcctgtgcgaccaaacggcccaagagatgcaggagaagctccaaaacttcgctcagctgccggcccacagggtgaccgatagttgcattgtcgcactcctgtcacatggggtggagggcgcaatctatggcgttgatggcaagctgcttcagctgcaagaggtctttcaactctttgataatgccaactgcccaagcttacaaaacaagccaaaaatgttcttcattcaggcctgcaggggagccggagccattggtagcctgggccacctgctgctgtttactgcggccacagcatctctggcactgtag

SEQ ID NO: 83788 - DNA, 942 bp, Artificial Sequence
  derived and/or modified sequence
atgcacccccaccatcaggagacacttaaaaagaaccgcgtggtcctggcaaagcagttgctgctgtcggaactgttggagcacttgctggagaaggacattatcacgctcgaaatgcgggagctgatacaagcgaaggtaggctccttctctcagaatgtggaactcctaaatctgcttccaaagcgtggccctcaggcgtttgatgccttttgcgaggctctcagggagaccaaacagggacacctggaagacatgttgcttaccaccctctcaggcctgcagcacgtgctaccaccgctctcatgtgactacgacctttccctgccatttccagtctgcgagtcttgtccgctgtataagaagttgaggctctcaacagatacggttgagcatagcttagataacaaggacggacccgtttgcctgcaggttaagccctgtactccagaattttaccagacccatttccagctcgcctatcgtctgcagagcagaccaagggggctggccctcgtgttatccaacgttcacttcacaggggagaaggagctggagttccgcagcggcggagacgtggatcacagcacactcgttactctttttaagctactgggttatgatgttcacgttctttgtgaccagactgcccaggagatgcaggagaagctgcaaaactttgcccagttgcccgctcacagagtgaccgatagctgcattgtcgctctgctatcacacggtgtggagggagcaatctacggcgtcgacggtaaactcctgcagttacaggaagtgttccagctgttcgataatgctaattgtcccagcctgcaaaataagcctaaaatgtttttcattcaggcctgtcgcggagccggtgcaataggatcgctgggccatctgctgttgttcactgctgccaccgccagcctcgctctctag

SEQ ID NO: 83789 - DNA, 942 bp, Artificial Sequence
  derived and/or modified sequence
atgcacccccaccaccaggagaccctgaagaagaacagagtggtgctggccaagcagctgctgctgagcgagctgctggagcacctgctggagaaggacatcatcaccctggagatgagagagctgatccaggccaaggtgggcagcttcagccagaacgtggagctgctgaacctgctgcccaagagaggcccccaggccttcgacgccttctgcgaggccctgagagagaccaagcagggccacctggaggacatgctgctgaccaccctgagcggcctgcagcacgtgctgccccccctgagctgcgactacgacctgagcctgcccttccccgtgtgcgagagctgccccctgtacaagaagctgagactgagcaccgacaccgtggagcacagcctggacaacaaggacggccccgtgtgcctgcaggtgaagccctgcacccccgagttctaccagacccacttccagctggcctacagactgcagagcagacccagaggcctggccctggtgctgagcaacgtgcacttcaccggcgagaaggagctggagttcagaagcggcggcgacgtggaccacagcaccctggtgaccctgttcaagctgctgggctacgacgtgcacgtgctgtgcgaccagaccgcccaggagatgcaggagaagctgcagaacttcgcccagctgcccgcccacagagtgaccgacagctgcatcgtggccctgctgagccacggcgtggagggcgccatctacggcgtggacggcaagctgctgcagctgcaggaggtgttccagctgttcgacaacgccaactgccccagcctgcagaacaagcccaagatgttcttcatccaggcctgcagaggcgccggcgccatcggcagcctgggccacctgctgctgttcaccgccgccaccgccagcctggccctgtag

SEQ ID NO: 83790 - protein, 330 aa, Artificial Sequence
  derived and/or modified sequence
MLKLKTKFGSWQTLCKRSNVWQDKCFFKPFNIDQISPNKKAHPNMEAGPPESGESTDALKLCPHEEFLRLCKERAEEIYPIKERNNRTRLALIICNTEFDHLPPRNGADFDITGMKELLEGLDYSVDVEENLTARDMESALRAFATRPEHKSSDSTFLVLMSHGILEGICGTVHDEKKPDVLLYDTIFQIFNNRNCLSLKDKPKVIIVQACRGANRGELWVRDSPASLEVASSQSSENLEEDAVYKTHVEKDFIAFCSSTPHNVSWRDSTMGSIFITQLITCFQKYSWCCHLEEVFRKVQQSFETPRAKAQMPTIERLSMTRYFYLFPGN

SEQ ID NO: 83791 - protein, 147 aa, Artificial Sequence
  derived and/or modified sequence
MAEGNHRKKPLKVLESLGKDFLTGVLDNLVEQNVLNWKEEEKKKYYDAKTEDKVRVMADSMQEKQRMAGQMLLQTFFNIDQISPNKKAHPNMEAGPPESGESTDALKLCPHEEFLRLCKERAEEIYPIKERNNRTRLALIICNTEFD

SEQ ID NO: 83792 - protein, 377 aa, Artificial Sequence
  derived and/or modified sequence
MAEGNHRKKPLKVLESLGKDFLTGVLDNLVEQNVLNWKEEEKKKYYDAKTEDKVRVMADSMQEKQRMAGQMLLQTFFNIDQISPNKKAHPNMEAGPPESGESTDALKLCPHEEFLRLCKERAEEIYPIKERNNRTRLALIICNTEFDHLPPRNGADFDITGMKELLEGLDYSVDVEENLTARDMESALRAFATRPEHKSSDSTFLVLMSHGILEGICGTVHDEKKPDVLLYDTIFQIFNNRNCLSLKDKPKVIIVQACRGANRGELWVRDSPASLEVASSQSSENLEEDAVYKTHVEKDFIAFCSSTPHNVSWRDSTMGSIFITQLITCFQKYSWCCHLEEVFRKVQQSFETPRAKAQMPTIERLSMTRYFYLFPGN

SEQ ID NO: 83793 - protein, 321 aa, Artificial Sequence
  derived and/or modified sequence
MADSMQEKQRMAGQMLLQTFFNIDQISPNKKAHPNMEAGPPESGESTDALKLCPHEEFLRLCKERAEEIYPIKERNNRTRLALIICNTEFDHLPPRNGADFDITGMKELLEGLDYSVDVEENLTARDMESALRAFATRPEHKSSDSTFLVLMSHGILEGICGTVHDEKKPDVLLYDTIFQIFNNRNCLSLKDKPKVIIVQACRGANRGELWVRDSPASLEVASSQSSENLEEDAVYKTHVEKDFIAFCSSTPHNVSWRDSTMGSIFITQLITCFQKYSWCCHLEEVFRKVQQSFETPRAKAQMPTIERLSMTRYFYLFPGN

SEQ ID NO: 83794 - DNA, 444 bp, Artificial Sequence
  derived and/or modified sequence
atggcagaaggtaatcacagaaagaagccccttaaagtactggaatctctgggcaaagatttcctaacgggagtgttggataatttggtagaacagaatgttttgaactggaaagaggaggagaagaaaaaatactatgatgcgaagactgaagacaaagttcgtgttatggctgatagcatgcaggagaaacagcggatggcggggcagatgctcctgcagacattttttaacatcgatcagattagtccaaataaaaaggctcaccccaatatggaggctggcccccctgaaagcggggaaagcaccgatgccctgaaactctgcccacatgaggaatttctgcgcttatgcaaggaacgcgctgaagagatatacccaattaaagagagaaacaatagaacacgcctggccttgattatctgcaacaccgagttcgactag

SEQ ID NO: 83795 - DNA, 1134 bp, Artificial Sequence
  derived and/or modified sequence
atggcagaggggaatcacaggaaaaaacccctcaaagtcctggagagcctcggaaaggattttttgactggcgttctggataatctcgtcgaacaaaacgtgttgaactggaaagaagaggaaaaaaagaaatactatgacgccaagaccgaagacaaagtcagggtcatggctgattcgatgcaggagaagcagaggatggcgggtcagatgttactccagacattcttcaatattgatcagatcagccctaataaaaaagcccacccaaatatggaagcaggcccaccagagtctggtgagagcactgacgctctgaagctgtgccctcacgaggagtttctacggttatgtaaagaacgcgccgaggagatctacccgattaaagagcgcaataacagaaccagacttgcccttatcatttgtaacaccgagtttgatcacctcccaccgcgaaacggagctgattttgacataacggggatgaaagagctgttggagggacttgattattcagtggatgtggaggaaaatctgaccgcgagagacatggaatctgccctcagagcctttgctactaggcccgagcataagagctccgatagcacttttctcgtccttatgagtcacggcatcctggagggcatatgtggaacagtgcacgacgagaaaaaacccgacgtgctgctgtatgacactatcttccagatctttaataaccgcaactgcctttcattgaaggacaaacccaaggtgattatcgttcaggcttgtagaggggctaatcggggcgagctctgggttagggacagccccgccagcctggaggtggccagcagccagtctagtgaaaacctggaggaggacgctgtgtacaagactcatgtagagaaggactttatcgctttttgctctagcacacctcacaatgtcagctggagagatagcaccatgggctcaatctttatcacccagctgatcacttgtttccagaagtactcctggtgttgccacctggaggaagtctttcgcaaagtccagcagtccttcgaaacgcctcgtgccaaagcccagatgccgacaatcgagagactaagcatgactagatacttttacctgttccccggtaactag

SEQ ID NO: 83796 - DNA, 444 bp, Artificial Sequence
  derived and/or modified sequence
atggccgagggcaaccacaggaagaagcccctgaaggtgctggagagcctgggcaaggacttcctgactggagtgctggacaacctggtggagcagaatgtgctgaactggaaggaggaggagaagaagaagtactatgatgccaagacagaggacaaggtgcgggtgatggctgacagcatgcaggagaagcagaggatggccggccagatgctgctgcagaccttcttcaacatcgaccagatcagccccaacaagaaggcccaccccaacatggaggccggccccccagagagcggggagagcacagatgccctgaagctgtgcccccatgaggagttcctgcggctgtgcaaggagcgggcagaggagatctaccccatcaaggagaggaacaacagaacccggctggccctgatcatctgcaacacagaatttgattag

SEQ ID NO: 83797 - DNA, 1134 bp, Artificial Sequence
  derived and/or modified sequence
atggccgagggcaaccacaggaagaagcccctgaaggtgctggagagcctgggcaaggacttcctgactggagtgctggacaacctggtggagcagaatgtgctgaactggaaggaggaggagaagaagaagtactatgatgccaagacagaggacaaggtgcgggtgatggctgacagcatgcaggagaagcagaggatggccggccagatgctgctgcagaccttcttcaacatcgaccagatcagccccaacaagaaggcccaccccaacatggaggccggccccccagagagcggggagagcacagatgccctgaagctgtgcccccatgaggagttcctgcggctgtgcaaggagcgggcagaggagatctaccccatcaaggagaggaacaacagaacccggctggccctgatcatctgcaacacagaatttgaccacctgcccccaagaaatggagctgactttgacatcaccggcatgaaggagctgctggagggcctggactacagcgtggatgtggaggagaacctgacagcccgggacatggagagcgccctgcgggcctttgccaccaggcctgagcacaagagcagtgacagcaccttcctggtgctgatgagccacggcatcctggagggcatctgtggcaccgtgcatgatgagaagaagccagatgtgctgctgtatgacaccatcttccagatcttcaacaacagaaactgcctgagcctgaaggacaagcccaaggtgatcatcgtgcaggcctgccgcggggccaacagaggagagctgtgggtgcgggacagccctgccagcctggaggtggccagcagccagagcagcgagaacctggaggaggatgctgtgtacaagacccacgtggagaaggacttcatcgccttctgcagcagcaccccccacaacgtgtcctggagggacagcaccatgggcagcatcttcatcacccagctgatcacctgcttccagaagtacagctggtgctgccacctggaggaggtgttcaggaaggtgcagcagagctttgagaccccccgggccaaggcccagatgcccaccatcgagcggctgtccatgacccgctacttctacctgtttcctggcaactag

SEQ ID NO: 83798 - DNA, 444 bp, Artificial Sequence
  derived and/or modified sequence
atggccgagggcaaccaccggaagaagcccctgaaggtgctggagtcactgggaaaggatttcctcactggagtcctcgacaacctagtcgagcagaacgttctcaattggaaggaagaagagaagaagaaatactacgatgctaaaacggaggataaagtaagagtgatggctgattctatgcaggaaaaacagcggatggcaggacagatgctgctgcaaactttctttaatatcgatcagatctctcctaataagaaggcccaccctaacatggaggcagggccccctgaaagcggcgagagcacagatgcactgaaactgtgccctcatgaggagtttctgcgactgtgcaaggagcgcgcagaagaaatctacccaatcaaggagaggaataaccgtacccggctcgccctgattatttgcaatactgagttcgactag

SEQ ID NO: 83799 - DNA, 1134 bp, Artificial Sequence
  derived and/or modified sequence
atggccgagggcaaccaccggaagaagcccctgaaggtgctggagtctcttgggaaggactttctgacgggagtgttagacaacttggtggagcagaatgtcctgaattggaaagaggaggagaaaaagaaatactatgacgccaaaaccgaggacaaggtaagagtgatggcagactctatgcaggagaaacagagaatggctggtcagatgctactgcagacattcttcaacattgaccagatatctccgaataagaaggctcatccaaacatggaggcaggaccccccgagagtggcgaatccacagacgctctaaagttgtgtccacacgaagagtttctgcggctttgcaaggagcgtgccgaggaaatctatccgataaaagagagaaataatagaacccgcctggccttaattatctgcaatactgagttcgaccatttgccaccccggaacggtgcagactttgacatcactggtatgaaggagctgctagaaggcctggattattcagtggatgtggaagaaaatctgactgctagggacatggaatctgcactgcgcgctttcgctaccaggccggaacataagagctccgattcaacctttcttgtcctcatgagtcacggaattctggaggggatctgcgggactgtccacgatgagaaaaaaccagatgtcctactatacgacaccatctttcagatcttcaataacagaaattgtctgtcattgaaggacaaaccaaaagtgatcattgtgcaggcatgccgtggagcgaatcgtggcgagctatgggtgcgcgattctccagcatcattagaggtggcttccagtcagagtagcgaaaacctagaagaggacgcagtctataagacgcatgttgagaaggacttcattgcattctgcagtagtacgccccataacgtgtcgtggcgcgattctacgatgggctctatcttcattacccagctaatcacatgctttcaaaaatattcctggtgctgtcacctggaggaagtctttagaaaggtacagcagagtttcgaaactccaagagccaaggcccagatgcccacaatagagcgattatccatgacacgctatttctacctctttcccggaaattag

SEQ ID NO: 83800 - DNA, 444 bp, Artificial Sequence
  derived and/or modified sequence
atggccgaaggaaaccatcgaaagaaacctttgaaagtgctcgaaagcctgggaaaggacttcctcaccggagttctggataacttagtggagcagaacgtgctgaactggaaggaagaagagaagaagaagtattatgatgcaaagactgaagacaaggttcgcgtcatggccgattcaatgcaggagaaacagcgtatggcaggacagatgcttctccagactttcttcaacatcgaccagatatcgcccaataaaaaggcccacccaaacatggaggccggaccacccgagtcaggcgagagtacggacgctcttaagctgtgcccacatgaggagtttcttaggctgtgcaaagagcgggctgaggagatataccccattaaggaaagaaataacaggacaaggctcgctctcatcatatgcaatacagaattcgactag

SEQ ID NO: 83801 - DNA, 1134 bp, Artificial Sequence
  derived and/or modified sequence
atggcggagggaaaccacagaaaaaagccgcttaaggtacttgagtcgctcggcaaagacttcctgacaggcgtgctggataacttagtagaacagaacgtgctgaactggaaagaggaggagaagaagaagtattatgacgcaaagactgaggataaagttagggtgatggccgacagtatgcaggaaaagcaacggatggcgggacaaatgctgctgcagacctttttcaatatagatcagatttctccgaataaaaaggcccaccccaacatggaagcgggacccccagagtcaggggagagtaccgacgcattgaaactttgtccccacgaagaattcctgaggttgtgtaaagaaagggcagaagagatttatcccattaaggaaagaaacaataggacaagactcgcgttaataatttgtaatacagagttcgaccacctgccacctagaaatggcgctgattttgacattactggcatgaaagaactgctcgaggggctagattatagcgtcgacgttgaggagaatcttactgcccgagatatggaaagcgccttgcgcgcttttgctacccggccagaacataaaagcagtgactccactttcctggtcctgatgagtcacggaatattggaggggatctgtggaacagttcacgacgagaagaaacccgacgtgctgctgtatgataccatttttcagatctttaacaaccggaactgtttgagcctgaaagataagccaaaggttatcatcgtccaggcatgccgcggtgccaaccgtggcgagctgtgggtgcgcgacagtcccgcaagcctggaagtggcatcctctcagtccagcgagaatctggaggaagatgccgtttataagacacacgtggagaaggactttatcgccttctgttctagtacacctcacaatgtgtcttggagagattctactatgggctccatattcatcacacagttaattacctgttttcagaaatactcatggtgttgtcacctcgaggaggtgttccgtaaggtgcagcagtccttcgagacgccaagagcaaaagcccaaatgccaaccattgagcgactttctatgactcggtatttttatttgtttcccggtaattag

SEQ ID NO: 83802 - DNA, 763 bp, Artificial Sequence
  derived and/or modified sequence
ggagggatggatcccggtcccacctaaagaagcagtctggccatgatctgccacagcggctgtgctgcactgtgaagactgctgcccagtccaatctgcccagcctccctagcactgtcagaaactaaattccagtaattggatgccaatttgctgatgacaaggcacttcctgataatgagtctggaattctgagcagcagtttcacaatctgtaattacacgtttccgccctttgcaataaggaaatacatagtttactttcatttttgactctgaggctctttccaacgctgtaaaaaaggacagaggctgttccctatggcagaaggcaaccacagaaaaaagccacttaaggtgttggaatccctgggcaaagatttcctcactggtgttttggataacttggtggaacaaaatgtactgaactggaaggaagaggaaaaaaagaaatattacgatgctaaaactgaagacaaagttcgggtcatggcagactctatgcaagagaagcaacgtatggcaggacaaatgcttcttcaaaccttttttaacatagaccaaatatcccccaataaaaaagctcatccgaatatggaggctggaccacctgagtcaggagaatctacagatgccctcaagctttgtcctcatgaagaattcctgagactatgtaaagaaagagctgaagagatctatccaataaaggagagaaacaaccgcacacgcctggctctcatcatatgcaatacagagtttgacca

SEQ ID NO: 83803 - DNA, 2158 bp, Artificial Sequence
  derived and/or modified sequence
aaatgagagctctgtctgtaaactctaggtggagttgctgaaattcctgcaagcatttcttgccgggagaggagggatggatcccggtcccacctaaagaagcagtctggccatgatctgccacagcggctgtgctgcactgtgaagactgctgcccagtccaatctgcccagcctccctagcactggtagggaaaaaccgctgactagagctgcagtaatggcagtcgcccctcccctggggaactcggtcatctctggcgtactccaggctgctatgctggctagtggggattctaatccagcggatctaagcttgcaggcttctgtgagaatggacctgctgcaaggccattttgctccctggcttcagccccctttccatgggagtggacgggactcctgcctcactagagttccgggagctgctggactatgtaaaaactcctgcagctcagtgcctgcccaaaaagctggaaatatgaactattgggttaattcttatcaggaaatgaaaaagagttgttagattaaacttcttcagtcattgtcgttctttgtaatcagagaaagaaaaactgagagatcaggaagagaagagacagatggatagaagaagtttgggtggccacaggaaacaagaaaagaaacaagctgaggtgtcaacccacaggataatattttgtcattttcatttttttcccccaagtcagaaactaaattccagtaattggatgccaatttgctgatgacaaggcacttcctgataatgagtctggaattctgagcagcagtttcacaatctgtaattacacgtttccgccctttgcaataaggaaatacatagtttactttcatttttgactctgaggctctttccaacgctgtaaaaaaggacagaggctgttccctatggcagaaggcaaccacagaaaaaagccacttaaggtgttggaatccctgggcaaagatttcctcactggtgttttggataacttggtggaacaaaatgtactgaactggaaggaagaggaaaaaaagaaatattacgatgctaaaactgaagacaaagttcgggtcatggcagactctatgcaagagaagcaacgtatggcaggacaaatgcttcttcaaaccttttttaacatagaccaaatatcccccaataaaaaagctcatccgaatatggaggctggaccacctgagtcaggagaatctacagatgccctcaagctttgtcctcatgaagaattcctgagactatgtaaagaaagagctgaagagatctatccaataaaggagagaaacaaccgcacacgcctggctctcatcatatgcaatacagagtttgaccatctgcctccgaggaatggagctgactttgacatcacagggatgaaggagctacttgagggtctggactatagtgtagatgtagaagagaatctgacagccagggatatggagtcagcgctgagggcatttgctaccagaccagagcacaagtcctctgacagcacattcttggtactcatgtctcatggcatcctggagggaatctgcggaactgtgcatgatgagaaaaaaccagatgtgctgctttatgacaccatcttccagatattcaacaaccgcaactgcctcagtctgaaggacaaacccaaggtcatcattgtccaggcctgcagaggtgcaaaccgtggggaactgtgggtcagagactctccagcatccttggaagtggcctcttcacagtcatctgagaacctagaggaagatgctgtttacaagacccacgtggagaaggacttcattgctttctgctcttcaacgccacacaacgtgtcctggagagacagcacaatgggctctatcttcatcacacaactcatcacatgcttccagaaatattcttggtgctgccacctagaggaagtatttcggaaggtacagcaatcatttgaaactccaagggccaaagctcaaatgcccaccatagaacgactgtccatgacaagatatttctacctctttcctggcaattgaaaatggaagccacaagcagcccagccctccttaatcaacttcaaggagcaccttcattagtacagcttgcatatttaacattttgtatttcaataaaagtgaagacaaacgaa

SEQ ID NO: 83804 - DNA, 444 bp, Artificial Sequence
  derived and/or modified sequence
atggccgagggcaaccacagaaagaagcccctgaaggtgctggagagcctgggcaaggacttcctgaccggcgtgctggacaacctggtggagcagaacgtgctgaactggaaggaggaggagaagaagaagtactacgacgccaagaccgaggacaaggtgagagtgatggccgacagcatgcaggagaagcagagaatggccggccagatgctgctgcagaccttcttcaacatcgaccagatcagccccaacaagaaggcccaccccaacatggaggccggcccccccgagagcggcgagagcaccgacgccctgaagctgtgcccccacgaggagttcctgagactgtgcaaggagagagccgaggagatctaccccatcaaggagagaaacaacagaaccagactggccctgatcatctgcaacaccgagttcgactag

SEQ ID NO: 83805 - DNA, 1134 bp, Artificial Sequence
  derived and/or modified sequence
atggccgagggcaaccacagaaagaagcccctgaaggtgctggagagcctgggcaaggacttcctgaccggcgtgctggacaacctggtggagcagaacgtgctgaactggaaggaggaggagaagaagaagtactacgacgccaagaccgaggacaaggtgagagtgatggccgacagcatgcaggagaagcagagaatggccggccagatgctgctgcagaccttcttcaacatcgaccagatcagccccaacaagaaggcccaccccaacatggaggccggcccccccgagagcggcgagagcaccgacgccctgaagctgtgcccccacgaggagttcctgagactgtgcaaggagagagccgaggagatctaccccatcaaggagagaaacaacagaaccagactggccctgatcatctgcaacaccgagttcgaccacctgccccccagaaacggcgccgacttcgacatcaccggcatgaaggagctgctggagggcctggactacagcgtggacgtggaggagaacctgaccgccagagacatggagagcgccctgagagccttcgccaccagacccgagcacaagagcagcgacagcaccttcctggtgctgatgagccacggcatcctggagggcatctgcggcaccgtgcacgacgagaagaagcccgacgtgctgctgtacgacaccatcttccagatcttcaacaacagaaactgcctgagcctgaaggacaagcccaaggtgatcatcgtgcaggcctgcagaggcgccaacagaggcgagctgtgggtgagagacagccccgccagcctggaggtggccagcagccagagcagcgagaacctggaggaggacgccgtgtacaagacccacgtggagaaggacttcatcgccttctgcagcagcaccccccacaacgtgagctggagagacagcaccatgggcagcatcttcatcacccagctgatcacctgcttccagaagtacagctggtgctgccacctggaggaggtgttcagaaaggtgcagcagagcttcgagacccccagagccaaggcccagatgcccaccatcgagagactgagcatgaccagatacttctacctgttccccggcaactag

SEQ ID NO: 83806 - DNA, 1340 bp, Artificial Sequence
  derived and/or modified sequence
cagaagcctttgtgatctcacctgttggaatgcactaatgttttctgagccccttaaatatcttgtctacattcttttaagaagctcttcaccaactgtcagaaggcaaccacagaaaaaagccacttaaggtgttggaatccctgggcaaagatttcctcactggtgttttggataacttggtggaacaaaatgtactgaactggaaggaagaggaaaaaaagaaatattacgatgctaaaactgaagacaaagttcgggtcatggcagactctatgcaagagaagcaacgtatggcaggacaaatgcttcttcaaaccttttttaacatagaccaaatatcccccaataaaaaagctcatccgaatatggaggctggaccacctgagtcaggagaatctacagatgccctcaagctttgtcctcatgaagaattcctgagactatgtaaagaaagagctgaagagatctatccaataaaggagagaaacaaccgcacacgcctggctctcatcatatgcaatacagagtttgaccatctgcctccgaggaatggagctgactttgacatcacagggatgaaggagctacttgagggtctggactatagtgtagatgtagaagagaatctgacagccagggatatggagtcagcgctgagggcatttgctaccagaccagagcacaagtcctctgacagcacattcttggtactcatgtctcatggcatcctggagggaatctgcggaactgtgcatgatgagaaaaaaccagatgtgctgctttatgacaccatcttccagatattcaacaaccgcaactgcctcagtctgaaggacaaacccaaggtcatcattgtccaggcctgcagaggtgcaaaccgtggggaactgtgggtcagagactctccagcatccttggaagtggcctcttcacagtcatctgagaacctagaggaagatgctgtttacaagacccacgtggagaaggacttcattgctttctgctcttcaacgccacacaacgtgtcctggagagacagcacaatgggctctatcttcatcacacaactcatcacatgcttccagaaatattcttggtgctgccacctagaggaagtatttcggaaggtacagcaatcatttgaaactccaagggccaaagctcaaatgcccaccatagaacgactgtccatgacaagatatttctacctctttcctggcaattgaaaatggaagccacaagcagcccagccctccttaatcaacttcaaggagcaccttcattagtacagcttgcatatttaacattttgtatttcaataaaagtgaagacaaacg

SEQ ID NO: 83807 - protein, 293 aa, Artificial Sequence
  derived and/or modified sequence
MSSASGLRRGHPAGGEENMTETDAFYKREMFDPAEKYKMDHRRRGIALIFNHERFFWHLTLPERRGTCADRDNLTRRFSDLGFEVKCFNDLKAEELLLKIHEVSTVSHADADCFVCVFLSHGEGNHIYAYDAKIEIQTLTGLFKGDKCHSLVGKPKIFIIQACRGNQHDVPVIPLDVVDNQTEKLDTNITEVDAASVYTLPAGADFLMCYSVAEGYYSHRETVNGSWYIQDLCEMLGKYGSSLEFTELLTLVNRKVSQRRVDFCKDPSAIGKKQVPCFASMLTKKLHFFPKSN

SEQ ID NO: 83808 - protein, 300 aa, Artificial Sequence
  derived and/or modified sequence
MVEIDAASVYTLPAGADFLMCYSVAEGYYSHRETVNGSWYIQDLCEMLGKYGSSLEFTELLTLVNRKVSQRRVDFCKDPSAIGKKQVPCFASMLTKKLHFFPKSNLEHHHHHHVEIDGGSPMSSASGLRRGHPAGGEENMTETDAFYKREMFDPAEKYKMDHRRRGIALIFNHERFFWHLTLPERRGTCADRDNLTRRFSDLGFEVKCFNDLKAEELLLKIHEVSTVSHADADCFVCVFLSHGEGNHIYAYDAKIEIQTLTGLFKGDKCHSLVGKPKIFIIQACRGNQHDVPVIPLDVVD

SEQ ID NO: 83809 - DNA, 882 bp, Artificial Sequence
  derived and/or modified sequence
atgagctctgctagcgggctgcggcgaggccatcccgccggaggagaagaaaacatgaccgagacggacgccttctacaagagagagatgttcgaccccgccgaaaagtacaagatggaccatagaaggcggggcattgccctgatatttaaccatgaacggtttttctggcacttgactctccctgaaagacgagggacatgcgctgatcgggataacctaacaaggcgattttctgacctggggtttgaggtcaaatgtttcaacgacctcaaggcggaggaactgttattgaagatacacgaggtttcaaccgtctctcacgccgatgccgactgttttgtttgtgtttttctgagtcatggggaagggaatcatatctatgcctatgatgctaagattgagatccaaactcttaccggcctcttcaaaggagataaatgccactctctggtcgggaagccaaagatttttataattcaggcctgccggggcaatcagcatgatgttcccgtcattcctctggacgtcgtggacaatcagacggaaaaactcgacaccaatattacagaggtggacgctgcgtccgtgtacacacttccagccggagccgatttcttgatgtgctactcggtagccgagggttactactctcatcgagaaaccgtcaacgggtcttggtatatacaagacttgtgcgaaatgctgggcaaatatggtagctctttagagttcacggagttgcttacactggtcaatcggaaagtcagtcagcgacgggttgatttttgtaaggacccatcggccattggcaagaaacaggtgccctgcttcgcatccatgctcactaagaagcttcacttttttcccaagtccaactag

SEQ ID NO: 83810 - DNA, 882 bp, Artificial Sequence
  derived and/or modified sequence
atgagcagcgccagcggcctgcggcggggccaccctgctggaggagaggagaacatgacagaaacagatgccttctacaagcgggagatgtttgatcctgctgagaagtacaagatggaccacagaagaagaggcatcgccctgatcttcaaccacgagcgcttcttctggcacctgaccctgcctgagcggcggggcacctgtgccgaccgggacaacctgacccggcgcttcagtgacctgggctttgaggtgaagtgcttcaatgacctgaaggccgaggagctgctgctgaagatccacgaggtgtccacagtgtcccatgctgatgctgactgctttgtgtgtgtgttcctgagccatggagagggcaaccacatctatgcctatgatgccaagattgagatccagaccctgaccggcctcttcaagggggacaagtgccacagcctggtgggcaagcccaagatcttcatcatccaggcctgccggggcaaccagcatgatgtgcctgtgatccccctggatgtggtggacaaccagacagagaagctggacaccaacatcacagaggtggatgctgcctctgtgtacaccctgcctgctggagctgacttcctgatgtgctacagcgtggccgagggctactacagccaccgggagaccgtgaatggctcctggtacatccaggacctgtgtgagatgctgggcaagtatggcagcagcctggagttcacagagctgctgaccctggtgaacaggaaggtgtcccagaggagagtggacttctgcaaggaccccagcgccatcggcaagaagcaggtgccctgctttgcctccatgctgaccaagaagctgcacttcttccccaagagcaactag

SEQ ID NO: 83811 - DNA, 882 bp, Artificial Sequence
  derived and/or modified sequence
atgagcagcgccagcggcctgcggcggggccaccccgccggcggcgaagagaacatgacggagacagacgctttctacaaacgtgaaatgttcgaccccgccgaaaagtacaagatggatcatcgacggcgcgggatcgccctgattttcaaccacgagcgcttcttttggcatcttaccctgcctgagcgacgaggaacttgtgctgaccgggacaacctcacgaggcgctttagcgacctcggcttcgaggtgaaatgctttaacgatctgaaagccgaggaactccttttgaaaatccatgaggtcagtactgtgagccatgcagacgcggattgttttgtgtgtgtgttcctgtcccacggggagggaaatcatatttacgcctacgatgcaaaaatcgagatccagacccttaccggcctgtttaagggggacaagtgccacagtttggttggaaaacctaagatattcatcatccaggcttgtcgtgggaatcagcatgacgtgccggtcattcctctcgacgtggtcgataatcagacggaaaaactcgacacgaacataaccgaggtggacgcagcctccgtgtatactctgcccgccggcgctgatttcctgatgtgctacagtgtggctgaaggctattactcacaccgagaaactgtgaatggcagttggtacattcaggacctctgcgaaatgctcggcaaatatggttcatctttagagttcacggagcttctgactctggttaacagaaaggtgagtcagcgccgtgtggatttctgtaaggacccaagtgctatcgggaagaagcaggttccatgttttgcatctatgctgaccaagaagctgcattttttcccaaagagcaactag

SEQ ID NO: 83812 - DNA, 882 bp, Artificial Sequence
  derived and/or modified sequence
atgtcaagtgcatcggggcttcgaaggggacaccccgcagggggtgaggagaatatgacggagaccgacgccttttacaagcgagagatgttcgatccggctgaaaagtacaaaatggatcacaggcggaggggaatcgccctcatcttcaatcacgagcgatttttctggcatctcactctgcccgagaggcgagggacctgcgcagacagagataatttgaccaggagattctcagatctaggcttcgaagtgaagtgctttaacgacttaaaagccgaagaattgttgctaaaaatccatgaagtaagcactgtcagccacgccgacgccgattgctttgtgtgcgtctttctgtctcacggtgaggggaaccatatctacgcttatgatgcaaaaatcgagatccaaactctgactggcttgttcaaaggcgacaagtgccatagtctggtcggcaagcctaagattttcatcatacaggcgtgccgtggaaaccagcacgatgtgcccgtgataccactggacgtcgtagacaatcagactgaaaagctggatacaaacattaccgaggtcgacgcagcaagcgtctatactctgcccgctggtgctgacttcctcatgtgctattcggtcgccgaaggatattacagccaccgggaaacggttaacggtagctggtacattcaggacttatgtgaaatgctgggtaaatatggaagcagcttagagttcactgagctcctgacactggtgaaccggaaggtgtctcaacgtcgcgtcgacttctgtaaagaccccagcgcaattggtaagaaacaggtgccatgctttgcctctatgttgacgaagaagctccacttcttcccaaagagcaattag

SEQ ID NO: 83813 - DNA, 900 bp, Artificial Sequence
  derived and/or modified sequence
atggtggaaatcgatgccgcgtccgtgtacaccttgcctgccggcgccgattttctgatgtgctactctgtcgcagaaggatattactcccatcgggaaacagtcaatggctcttggtacattcaggatctctgtgagatgctgggcaagtacggatcatccttggaatttactgagctgctaacactggtaaataggaaagtctcccagcggcgggtcgacttttgcaaggatcccagcgccatcggcaagaaacaagttccctgcttcgcaagtatgttgactaaaaagctgcactttttcccgaaatcaaacttggagcatcaccatcatcatcatgtcgaaattgatggcggctccccgatgagtagtgcatccggacttcgtcggggacaccccgccggtggcgaagaaaatatgaccgagacagacgccttctataaacgcgagatgttcgatcccgctgagaaatataaaatggaccaccgccgtcgcggaatagctctgatttttaaccatgagagattcttctggcatttgaccctcccggaacggagggggacatgcgccgacagagacaacctaacacgcagattttcagacctcggctttgaagtcaagtgtttcaacgatctgaaagccgaggagttactcttaaagatccatgaggtgtctacagtctcccacgccgacgccgactgcttcgtttgcgtctttctttctcacggcgaaggaaatcacatctacgcttatgacgccaaaatcgaaattcagaccttaactggcttatttaagggtgacaaatgtcatagcctcgtgggaaaaccgaagatcttcatcatccaggcatgtcgggggaatcagcacgacgtcccggttattcctcttgatgtggtggac

SEQ ID NO: 83814 - DNA, 900 bp, Artificial Sequence
  derived and/or modified sequence
atggtggagattgatgctgcgagcgtctacacgcttcccgcgggtgccgattttcttatgtgttactccgtggcagaaggatactacagccaccgcgagacagtgaacgggtcctggtacattcaagacctctgcgaaatgctgggaaagtacggatcttctttggaattcaccgagctgctgacattggttaaccggaaagtttcacaacggcgtgtggacttctgcaaggacccttccgctataggcaagaagcaagtcccgtgtttcgcttccatgttgaccaagaagctccatttcttccccaaaagcaacctcgagcaccaccaccaccatcatgtagagatagacggggggtccccaatgagcagcgccagtgggctgcggcggggacaccccgctgggggcgaggagaatatgactgagactgatgcattttataagcgggagatgtttgatccggccgagaaatacaagatggatcaccgacgcagagggatcgctctcatctttaatcacgagcgctttttttggcacttaactctccctgaaagacgaggtacttgcgctgacagagataatctgacccggagattttctgatttggggttcgaggtgaaatgtttcaacgacctcaaggccgaggagctgcttcttaaaatccacgaagttagcacagtcagtcacgccgatgctgattgctttgtctgtgtgtttcttagccacggggagggtaatcatatctatgcctacgatgccaagatcgaaatccagactctgaccggattattcaagggtgacaagtgtcactccttggttggcaagccaaagatcttcatcatccaggcctgccgcggtaatcagcatgatgtccctgtaatccctctcgacgtcgtggat

SEQ ID NO: 83815 - DNA, 900 bp, Artificial Sequence
  derived and/or modified sequence
atggtggaaatagatgccgcatcagtgtacacactaccagctggagctgattttcttatgtgttattccgtggccgaaggatattactcacatagagaaacagtaaacggatcttggtacatacaggatctgtgtgaaatgttaggaaagtatgggtcatctctcgagttcactgagctccttactcttgtgaacaggaaagtatcccagagacgggttgacttttgtaaggatccaagtgccatcgggaaaaaacaggtcccttgttttgcatccatgctcacaaagaaactccatttctttccaaaaagtaatttagaacaccaccatcaccaccatgttgaaatcgatgggggatccccaatgtcctctgcgagtggattacgccgaggacatcccgctgggggggaagaaaatatgacagaaacagatgctttttataagcgggaaatgtttgatcccgctgaaaaatacaaaatggatcatagaagaagaggaatagctcttatcttcaaccatgagcggtttttctggcaccttactctacctgagcgaagaggaacttgcgccgatcgcgataacctcactcgcaggttctccgatttgggattcgaggtgaaatgtttcaacgatttgaaagccgaagaactgcttttgaaaattcatgaagtatccacagtaagtcacgcagacgctgattgctttgtgtgtgtcttcctgtcccatggagaagggaatcatatttatgcttacgacgcaaagatagagatccagactctcacaggactctttaagggggataaatgccacagtctggtgggaaaacccaagatattcattatccaagcctgtagaggaaatcagcacgatgtgcccgtgatccccctcgatgtggttgat

SEQ ID NO: 83816 - DNA, 900 bp, Artificial Sequence
  derived and/or modified sequence
atggtggaaattgatgcagcatcagtctacaccctgcctgccggagcagacttccttatgtgttactcggtcgctgaaggttactacagccaccgtgagactgtcaacgggtcatggtacatccaagacctttgcgagatgctgggaaagtacgggtcctcactcgaatttacggaactccttacgctggtgaacagaaaagtgtcacagagacgcgtggatttttgtaaagaccccagcgccatcggtaagaaacaagtgccctgctttgcatcaatgcttaccaaaaagttgcacttcttccccaagtcgaacttggaacatcatcaccaccatcacgtggaaatagatgggggttcccctatgagcagcgcatcggggttgagacggggtcacccagcgggcggtgaggaaaacatgactgaaactgatgcgttctacaagcgcgaaatgttcgatccggcggagaagtataagatggatcatagaaggaggggaattgcactgatcttcaatcacgaaaggtttttctggcatcttactctgcccgaaagaagaggaacttgtgccgatcgagataatctcactcgccgattttcagacctgggttttgaggtgaagtgcttcaacgatctgaaggccgaagaacttcttctgaagatccacgaagtcagcaccgtctcccatgccgacgctgattgttttgtgtgtgtgtttctcagccatggagaggggaatcatatctacgcatacgacgcaaagattgaaatacagaccctcactggtcttttcaaaggtgataagtgtcattcgcttgtggggaaacctaaaatctttatcatacaagcgtgtcgtggcaaccagcatgatgtgcccgtgatccccctggatgtggtggac

SEQ ID NO: 83817 - DNA, 900 bp, Artificial Sequence
  derived and/or modified sequence
atggtcgaaattgacgctgcctcagtttatactttgcctgccggggccgacttcctgatgtgttatagtgtggcagagggctactattcccaccgagagacggtcaatgggagttggtatatccaggacctgtgtgaaatgctgggcaagtacggctcctccttagaatttacagaactgttgacactcgtgaataggaaggtgtcccagcgaagggtcgatttttgcaaggacccgtctgccattgggaaaaagcaggtgccttgcttcgctagtatgcttaccaagaagctccatttcttcccaaaatccaacctggagcaccatcatcaccatcacgtcgaaattgatggcggcagcccaatgagcagtgccagtgggctgagaagaggccacccagccggaggggaggagaacatgactgagacggacgctttctacaagcgagaaatgtttgatccagcggagaagtataagatggaccataggcggagaggaatcgccctgatattcaatcatgaacggttcttctggcacctaacactgccagagcggagagggacatgcgcggacagggacaatttgacccgcaggttttctgatttaggcttcgaagttaagtgttttaatgacctgaaggccgaagagctgcttctgaagatacatgaggtgagcactgtgtctcatgctgacgcggactgtttcgtgtgtgtgttcctgtcacacggcgaggggaatcacatctatgcttacgatgcaaagatagaaattcaaacactgactggtcttttcaagggtgacaagtgtcactcactggtggggaaacccaaaatctttatcattcaggcgtgccgcgggaaccagcatgacgttcctgtgatcccgctggacgtcgtcgac

SEQ ID NO: 83818 - DNA, 900 bp, Artificial Sequence
  derived and/or modified sequence
atggtggaaattgatgcagcatccgtgtacactttgccagctggtgcagactttcttatgtgttactcggtggcggagggttactactcgcaccgagaaaccgtcaatggctcgtggtacatccaagacctgtgtgagatgctgggcaaatacggttcatcacttgaatttaccgaactgctgacgctggtgaacagaaaggtgtcacagagaagagttgacttttgtaaagatccttcagcaattgggaagaagcaggtgccatgctttgcctccatgttgaccaagaagctgcatttctttcctaaaagcaatctcgaacaccaccaccaccatcatgtggaaatcgacggtgggtcaccaatgtcgtcggccagcggacttagacgcggacatcctgccgggggagaggaaaacatgacggagacggatgcattttacaagcgggaaatgtttgatccggccgagaagtataagatggatcatcggcgtcgtggaatcgccttgatattcaatcacgaacgcttcttctggcatctcactctgccggagcggcgggggacctgcgcggaccgtgataacttgactcgacggttttccgacctggggtttgaggtgaagtgcttcaacgatctgaaagcggaggaacttctgctcaagatccatgaagtgtctaccgtgtcccatgcagatgctgattgcttcgtgtgtgtgttcctctcacatggcgagggcaaccacatatacgcatacgacgcgaagattgaaattcaaactctcactggacttttcaagggagacaaatgtcactcgctggtcgggaagcctaagattttcatcattcaagcatgtcgcggcaaccagcatgacgtccccgtgatccctcttgacgtcgtggat

SEQ ID NO: 83819 - DNA, 900 bp, Artificial Sequence
  derived and/or modified sequence
atggttgagattgatgccgctagtgtctacaccctcccagccggggcagatttcctcatgtgttactctgtcgccgaggggtattattctcaccgtgagactgtaaatgggagctggtacatccaagatttgtgcgagatgttggggaagtatggttcatctcttgagttcacagagctgctgactctcgtgaaccgaaaggtgtcccagcggcgtgtcgatttctgcaaagatccaagcgcaattggaaagaagcaagtaccatgcttcgcttctatgctgaccaaaaagttgcacttcttcccaaagagtaaccttgaacaccatcatcaccatcatgtggaaattgacgggggatccccaatgtctagtgcttctggcctgcgaagaggtcacccggcagggggagaagagaacatgaccgaaacagatgctttctacaagcgtgaaatgttcgaccctgccgaaaaatataagatggaccacaggcgtaggggcatagccttgatcttcaaccacgagcgttttttctggcaccttaccctccctgaacgtcgcggcacgtgcgcggaccgagacaatctcacccgccgcttttctgatctcggttttgaggtgaagtgctttaacgatctaaaggccgaggaattgcttttgaaaatacatgaagtatccacagtgtctcatgctgacgcggattgttttgtatgtgtctttttgtctcatggggaggggaaccatatttatgcatacgatgccaaaatcgaaatacagactctcacgggtctgtttaagggtgataagtgtcactcactcgtgggaaaacctaagatttttatcatacaagcttgtcgtgggaaccagcatgacgtgccagtgatcccgctagacgtcgtcgat

SEQ ID NO: 83820 - DNA, 900 bp, Artificial Sequence
  derived and/or modified sequence
atggttgagattgacgctgcctccgtctacacgcttccagcaggcgctgacttcctcatgtgttactctgtagctgaaggatactatagccacagggaaacagtcaacggaagctggtacatccaggacctgtgcgaaatgcttgggaagtacggatcatccctggagttcactgagctgcttaccctggtgaaccggaaagtgagtcagcgcagggtggacttctgtaaggacccttctgctatagggaagaaacaggtgccttgtttcgctagcatgctgaccaaaaagttgcatttttttcctaaatcaaacctcgaacaccaccatcaccaccacgtcgagattgatggaggaagccctatgagttcagcatcgggcctgagacgtggtcaccccgccgggggcgaagaaaacatgacagagactgacgcattctacaagcgcgaaatgtttgaccctgcagaaaaatacaaaatggatcacaggcggaggggaatcgctctgatctttaaccacgagcgattcttctggcatttgacacttccggaacgcagaggtacatgtgctgatagagataacctcactcgtcgattctcagacctcggatttgaggtaaagtgtttcaacgatctgaaggctgaagaactgcttttaaagatccacgaggtgtcaaccgtcagccatgctgacgccgactgtttcgtgtgcgtgtttctgagtcatggagagggcaatcacatctacgcgtacgatgctaagattgaaatacagactttaaccggccttttcaagggcgataagtgccacagcctggtgggcaagccaaaaatctttatcattcaggcctgccggggcaaccagcacgatgtccctgtgatcccccttgatgttgtggat

SEQ ID NO: 83821 - DNA, 900 bp, Artificial Sequence
  derived and/or modified sequence
atggtggagatcgacgccgcatcagtttatacactaccagctggagccgatttcctaatgtgttattccgtggcagaagggtactactcgcatagagagactgtaaatgggagttggtatatacaagatttatgtgaaatgctggggaagtacggatcctctctcgagttcactgaattactgacattagtcaacaggaaagtgtctcagcggagagttgacttctgtaaagatcctagtgcaattggaaaaaaacaggtcccttgctttgcttcgatgcttactaaaaaacttcatttcttccccaagtctaacctggaacatcaccatcaccaccatgtcgaaatcgatggggggtcccctatgtcttccgcttctggactgcgacgcgggcatcccgctggaggagaagaaaatatgacagaaacagatgctttctataaaagggaaatgttcgaccctgctgagaaatataaaatggatcacaggcggcgggggatcgccctaatctttaaccacgaacggttcttttggcacttaactctgccggagcgacggggaacttgtgccgatagagataatctcacgagaagattttcagatctcggattcgaagttaaatgcttcaacgatctgaaagctgaagaactactactgaagatccatgaggtgtcaacagtatctcacgccgatgctgattgctttgtatgtgtgtttctctcacacggagaagggaaccacatctacgcatatgatgccaaaatagaaatacagacattaacagggctctttaaaggagataaatgtcactccttagtagggaaacctaagatttttattatacaggcatgtcgggggaatcagcacgacgtgcctgtaatcccattagacgtggtagat

SEQ ID NO: 83822 - DNA, 900 bp, Artificial Sequence
  derived and/or modified sequence
atggtcgagatcgatgcagcttccgtctacactctcccggctggcgccgatttccttatgtgctactctgtcgccgaaggctactattctcaccgcgagaccgtgaatggctcatggtacattcaggatctttgtgaaatgctgggcaaatacgggtcgtcactggaatttacggaactgttaactttggtgaacaggaaggtaagccagcgtcgggtcgacttttgcaaggacccaagcgccataggaaagaagcaggtcccatgttttgcctctatgctgacaaagaagctccatttttttcctaagtctaatctggaacatcaccatcaccaccacgtggagatcgacggggggagcccaatgagttcagcttcgggcttgaggcggggccaccccgctggcggcgaagagaacatgaccgaaaccgacgcattctacaaacgtgagatgtttgatccagctgaaaaatacaagatggaccacagaaggagaggtatcgctctgatcttcaatcacgaaaggttcttctggcacctgacgctgccagagagacgaggaacctgcgctgatcgggataaccttaccagacgcttctctgacttaggctttgaggtgaagtgtttcaatgaccttaaggccgaggaactgctgctcaagattcacgaggtttctaccgtctctcatgctgacgcagactgttttgtgtgcgtttttctttctcatggtgaaggaaatcacatctatgcctatgacgctaaaatcgagattcaaaccctgaccggcctcttcaagggtgacaagtgtcactccctggtcgggaaaccgaagatttttatcatccaggcctgccgggggaatcagcatgatgttcccgtgattccgctcgatgtcgtcgat

SEQ ID NO: 83823 - DNA, 900 bp, Artificial Sequence
  derived and/or modified sequence
atggtagagatcgatgcagcatccgtgtacactctcccagcaggcgccgacttcctaatgtgctactccgtggccgagggctactattcacacagagagaccgtgaacgggtcgtggtatattcaggacttgtgcgagatgttaggtaaatacggttcctctctggagtttactgaactcctcactttggtgaaccgcaaggtcagtcagcgtagggtggacttttgtaaagatccctccgctataggcaagaaacaggtaccatgctttgcatcgatgctgaccaaaaaactccacttctttccaaagagcaatctggagcatcaccaccaccatcacgtggagattgacgggggcagtccaatgtcaagcgcgtcggggctccggaggggacacccagctggaggcgaggaaaatatgacagagaccgacgccttctacaaaagggaaatgtttgatcccgccgaaaagtacaagatggaccacaggcggaggggaatcgctcttatctttaatcacgaacgctttttctggcatctcactttgcctgagcgccggggaacttgtgccgatcgagataatctgaccaggcggtttagtgatctgggattcgaggtgaagtgcttcaatgatcttaaggctgaggagttgttgcttaaaatccatgaggtctcaacagtctcacacgctgatgctgattgtttcgtgtgcgtgttcttatcccatggggagggaaatcacatttacgcctatgacgccaaaattgagatccagacattaacgggccttttcaaaggtgataaatgtcattcccttgtaggaaaaccaaaaattttcattattcaggcttgtagaggcaatcagcacgatgtgcctgttatcccactcgatgtcgtcgat

SEQ ID NO: 83824 - DNA, 900 bp, Artificial Sequence
  derived and/or modified sequence
atggttgaaatcgatgcggcgtcagtttacaccctgcccgccggagctgacttcctgatgtgctactctgtggccgaaggctattattctcatcgtgagaccgtgaatggctcctggtacatccaagatctgtgcgaaatgctgggaaagtatggaagctccctggaattcacggagctgctgactctggttaaccggaaagtgtctcaacgaagagtcgatttttgtaaagacccaagcgccatcggcaagaaacaggtgccgtgttttgctagcatgctgaccaaaaagttgcacttttttccgaaaagcaaccttgagcatcaccaccatcaccacgtggaaatcgatggtggtagcccgatgagctcggcctctggattgcgacgaggccatcctgccggtggggaggagaacatgactgagactgacgccttctacaaacgcgagatgttcgatccagccgagaagtacaaaatggatcatcgccgtaggggaatcgctctgattttcaaccacgagcgcttcttttggcacctgactctgcccgaacgacgaggtacttgcgccgaccgggataacctgactcgccgtttctctgacctaggctttgaggtcaagtgttttaatgacctgaaagcggaggaactgcttctgaagattcacgaggtgtcgacagtgtcgcatgctgacgcagattgtttcgtgtgcgtgttccttagccacggcgagggcaaccatatttacgcgtacgacgccaagatcgagatccagaccctgactggcctgttcaaaggtgataagtgtcattctcttgtggggaagccaaaaatttttatcatccaagcttgccgtggtaaccagcacgacgttccagtgattccactggatgttgtagat

SEQ ID NO: 83825 - DNA, 900 bp, Artificial Sequence
  derived and/or modified sequence
atggtggaaattgacgcagcatcggtgtacaccctcccagcgggagccgacttcttgatgtgttacagcgtggccgaaggatactactcccatcgggagactgtgaatggaagctggtacatccaagacctttgcgagatgctgggaaaatacggtagcagcctcgagtttaccgaactgctcacccttgttaaccgcaaggtttcgcagcgaagggtggacttttgcaaggatccgtcggccattggaaagaagcaggtgccatgttttgctagcatgcttaccaagaagctgcactttttccctaagagcaatttggaacatcatcaccatcaccacgtcgaaatcgatggtggatcgcctatgtcctcggcatcgggtttgaggcggggacatcccgcaggaggtgaagagaacatgaccgaaactgacgcattttacaagagagaaatgttcgatccagccgaaaagtacaagatggaccaccgacgccggggtattgctttgattttcaaccatgaacggttcttctggcatcttactttgcccgaacgtagaggaacgtgcgccgacagagataatctgactcgtagattctcagacctgggattcgaggtgaagtgctttaacgatctgaaggctgaagaacttcttctcaagatacatgaagtctcaactgtgtcgcacgcggatgccgattgctttgtgtgtgtgtttcttagccatggagaagggaatcacatatatgcctacgatgcaaagattgaaattcaaactctgaccggactcttcaagggagataagtgtcattcccttgttgggaaacctaagattttcattattcaagcatgtcgtgggaaccagcatgacgtgcctgtgatcccactcgatgtggtcgac

SEQ ID NO: 83826 - DNA, 900 bp, Artificial Sequence
  derived and/or modified sequence
atggtggagattgatgcagcctccgtctacactcttccagctggggcagactttctcatgtgttactccgtcgcagaaggctactactcgcatcgggaaaccgtgaacggatcctggtacattcaggatttgtgcgagatgctgggaaaatacggatcgtcgctcgagtttaccgagttgctgactctggtgaaccgcaaggtgtcgcagaggcgggtggacttttgtaaggatccctccgcaatcggaaagaagcaagtgccttgctttgcatcgatgcttactaagaagctccacttttttcctaagagcaacctcgagcatcaccaccatcatcatgtggaaatcgacggagggagccctatgtcctcggcctcgggactgcgtcgcggacatccagcgggaggagaggagaatatgaccgaaaccgacgcattctacaaacgagaaatgttcgatccagcagagaagtataagatggatcataggcggcggggcattgcactcatcttcaaccatgaacgtttcttttggcatcttactcttccagaacgacgcggtacctgtgccgatcgggacaacctgacccggagattctcggatctcggctttgaagtgaaatgcttcaatgacctcaaggcagaagagcttctccttaagattcatgaagtaagcactgtctcccacgccgatgcagactgttttgtctgcgtttttctttcccacggtgagggtaaccacatatatgcgtatgatgcaaagattgaaattcagaccctgaccgggctgttcaagggagataagtgccattctctggtgggtaagcccaagattttcattatccaagcatgccgcggaaaccaacacgacgtgcctgtgattcctctggatgtggtcgac

SEQ ID NO: 83827 - DNA, 900 bp, Artificial Sequence
  derived and/or modified sequence
atggtggagatcgatgctgcatccgtgtataccctgccagcgggggccgactttctgatgtgctacagcgtcgccgagggttattacagtcaccgcgagaccgtgaacggcagttggtatatacaggatttatgcgagatgctcggcaagtacggttcaagtcttgagttcaccgagctactgacattggtgaaccggaaagtttctcagagaagggtggacttttgcaaagacccttccgctatcggtaaaaagcaggtgccatgttttgcctcgatgttaacaaagaagctgcacttctttcccaaaagtaatcttgagcaccaccatcaccaccacgtggagatcgacggaggatccccgatgtcctcggccagtggtttaaggcggggacacccggcagggggcgaggaaaatatgacagagacagacgcattttacaagcgagaaatgtttgatcctgcagagaaatacaaaatggatcatcgcaggcgcggtatcgccctgatttttaatcatgagcgatttttctggcatttaactctgccagagagacggggaacatgcgctgatcgcgacaatctaactcggcgattctcagaccttggcttcgaagtgaagtgcttcaacgatctcaaagccgaggagctgctgctaaagatccacgaggtgtcaaccgtcagccatgctgacgctgactgtttcgtttgcgtcttcctgagccatggcgaagggaaccacatttatgcatatgacgctaaaatcgaaatacaaacactaactggcttattcaaaggcgacaagtgtcacagcctcgttggtaagcctaaaattttcattatccaggcttgtcgggggaatcagcacgacgtgcctgtgattcccctcgatgttgtggat

SEQ ID NO: 83828 - DNA, 900 bp, Artificial Sequence
  derived and/or modified sequence
atggtcgagatagacgcggcttcagtgtacacgttgccggcaggagctgatttcctcatgtgttacagcgttgcagaaggttactactcgcatcgcgaaaccgtgaatggaagctggtatatccaagatctttgcgagatgctcggaaagtacggcagctctttggaattcactgaattgctgaccctggtgaaccgcaaggtgagccagcgcagagtcgacttttgcaaggatccgtcggcgattggtaagaaacaggtgccctgctttgcgtcgatgttgactaaaaagctgcacttcttcccgaagtcgaatctggagcatcatcaccaccaccacgtcgaaatcgatggcggatctcctatgtcctccgcttccggtctgcgaaggggacacccggcaggaggggaggagaacatgaccgaaaccgatgcattttacaagagggaaatgttcgaccccgccgagaagtacaaaatggatcatcggcgcaggggcatcgcccttatcttcaaccatgagcggttcttttggcatcttacgctcccagaacggaggggaacctgtgcggatcgcgacaatctcaccaggaggttctcggacctgggattcgaagtaaagtgctttaacgatctgaaggctgaagagctgttgctgaagattcacgaagtctcgactgtgagccacgccgatgctgactgcttcgtctgcgtgttcctgagtcacggtgaaggcaaccacatctacgcctacgatgcgaagatcgaaattcaaactctcaccggacttttcaaaggggacaaatgtcactccctggtgggaaagccgaaaatcttcatcatccaagcgtgccgtggcaatcagcatgacgttccagtgatccctctcgacgtcgttgac

SEQ ID NO: 83829 - DNA, 900 bp, Artificial Sequence
  derived and/or modified sequence
atggtcgagatagatgccgctagcgtgtacaccctgcccgccggggctgattttctgatgtgttactccgtggcagaaggatattactctcacagagagacggtcaatggaagctggtacattcaagatttatgtgagatgctaggaaagtatggctcgagtttagaattcacagagctgcttacattggtcaacaggaaggtgtctcaacggagagtagatttttgcaaggatccttcagcgattggtaagaaacaagtgccttgcttcgcatcaatgctgacaaagaaactgcacttcttccctaaaagcaacctcgagcaccaccatcaccatcatgtggaaatcgatggcggatccccgatgagttctgcaagcggtctcagaagaggccatccagccggtggagaggagaacatgactgaaaccgatgctttctacaagagggagatgtttgatcccgccgagaagtacaaaatggaccatcggagacgcggcatagctcttattttcaatcacgaaaggttcttttggcatcttaccttaccagagcgtcgtggcacctgcgcagatagagataacctgactcgccgcttctctgaccttggattcgaagtgaagtgcttcaacgatttgaaggcggaagagctgttgttgaagatccacgaagtctccaccgtgagccatgcagacgctgattgctttgtgtgcgtctttctgagtcacggtgaaggcaaccacatctatgcatacgatgccaaaatcgaaattcagaccctcaccggactctttaagggcgataagtgtcactccctcgtgggaaagccaaaaatctttatcattcaggcttgtagggggaaccagcatgacgtgcctgtaatcccactggatgtggtagat

SEQ ID NO: 83830 - DNA, 900 bp, Artificial Sequence
  derived and/or modified sequence
atggtggaaatagatgcggcaagcgtgtataccctcccagccggagcagacttcctcatgtgttacagcgtcgctgagggctactactcgcaccgcgaaactgtgaacgggtcatggtatattcaagatctctgtgagatgctggggaagtacggctcctcacttgaatttaccgagctgctcacccttgtcaaccggaaagtgtcacaacgcagagtcgatttctgtaaggacccatcagcaattggaaagaagcaagtgccatgctttgcatcaatgcttaccaaaaaactccacttctttcctaaatccaacctggaacatcatcatcaccatcacgtcgaaattgatggaggtagccctatgtcgagcgcatccggacttcgaagaggtcacccggctggtggcgaagagaatatgactgaaactgatgcattttacaagagagagatgtttgatccagcagagaaatacaaaatggatcacagacggagaggaatcgcactgattttcaaccatgagcgtttcttttggcatttgacgctgcctgaaagacgggggacctgtgcagacagggacaacctgactcggaggttctcagaccttggatttgaggttaaatgttttaacgacctgaaggccgaagaactcctgcttaagattcatgaagtatccactgtgtcacatgcagatgcagactgttttgtgtgcgtgtttctcagccatggggaagggaatcacatttacgcttacgatgcaaagattgaaatccaaaccctgactggactgtttaagggggacaagtgtcattcccttgtgggaaaacccaagattttcattatacaagcatgcagaggaaaccaacacgacgtgcccgtcattccccttgatgtcgtcgac

SEQ ID NO: 83831 - DNA, 900 bp, Artificial Sequence
  derived and/or modified sequence
atggttgaaattgatgcagcttccgtgtacactctgcctgcgggagcggattttctgatgtgctactcggtggctgaaggatattactcgcacagggaaaccgtgaatggttcgtggtacatccaggacttgtgcgagatgctcggcaagtacgggtcctcgctggagttcaccgaactgctgacgctcgtgaaccggaaggtgtcgcaaagaagagtcgatttctgtaaggacccgtccgccattgggaaaaagcaggtgccttgcttcgcttctatgcttaccaagaagctgcacttcttcccaaagagcaacctcgaacatcaccatcatcaccacgttgaaatcgacggaggcagcccaatgagtagcgcgtcagggcttcgccgcggacatccggctggaggcgaagagaatatgactgaaactgatgccttctacaaaagagagatgtttgacccagccgagaagtacaagatggatcacaggcgccggggaatcgcactgatctttaatcatgaacggttcttctggcatctgaccctcccggagcgccgcggtacttgtgcagaccgggacaaccttactcggcggttctccgatctgggattcgaggtgaaatgtttcaacgatctgaaggccgaagaactcctcctcaagattcacgaagtgtcaaccgtgtcccacgctgacgctgattgctttgtctgcgtgtttctgtcgcatggagaagggaaccatatctacgcctacgacgcgaagatcgagattcagaccctcaccggcctcttcaaaggagacaaatgccactccctggtgggcaagccgaagatcttcatcatccaggcgtgccgcggcaaccaacacgacgtgccagtgattccgttggacgtggtggac

SEQ ID NO: 83832 - DNA, 900 bp, Artificial Sequence
  derived and/or modified sequence
atggtggaaattgatgcagcaagcgtgtacaccctgccagcgggagcagattttctcatgtgttactcagtcgcagagggttactattcgcacagggaaacggtgaacgggagctggtacattcaagatctttgtgaaatgctcgggaagtacggttcgtctcttgagtttactgaactgctcacccttgttaaccgtaaagtctcccagcgccgtgtggacttttgtaaagatccttcagcaattggtaaaaagcaggttccatgctttgcgtccatgctgaccaaaaaacttcactttttccctaagtcgaatcttgagcatcatcatcaccaccacgtggaaatcgacggaggttcgcccatgagctctgcatcgggtctgaggcggggacatccggcgggaggcgaggagaatatgactgagacggatgccttctataagagggaaatgttcgatcccgcggaaaagtacaagatggaccatcgacgcagaggcatcgcactgatattcaaccatgagaggtttttctggcaccttacgcttccagaaagaagaggaacctgtgcagatcgtgacaatctcaccagacggtttagcgatctgggatttgaggtgaagtgcttcaacgatttgaaggccgaagaactgctgctgaagattcatgaggttagcaccgtcagccacgccgacgcagattgctttgtgtgcgtgtttctctcccacggggaaggaaatcatatctacgcatacgatgccaagatagaaatccagacgcttactggtctgttcaaaggcgataaatgtcattccctggtgggcaagcctaagattttcataattcaagcctgtcgcggaaaccaacatgatgtgccagtgatccccttggacgtggtggat

SEQ ID NO: 83833 - DNA, 900 bp, Artificial Sequence
  derived and/or modified sequence
atggtcgaaattgacgcggcctctgtctataccctgcccgccggggcggactttctcatgtgttactcggtggccgagggatactactctcatcgcgaaactgtgaacggaagctggtatatccaagatctctgcgagatgctgggcaagtatggatcctcgctcgagttcactgagctgctgacgctcgtgaacagaaaggtgtcccaaagacgggtggacttctgtaaggacccgtccgcgatcggtaagaaacaggtgccgtgcttcgcgtcgatgctgaccaagaagctgcactttttcccgaagtcgaatctggagcatcaccatcaccaccatgtcgaaatcgacggaggatccccgatgtccagcgcttcggggctgcgcaggggacacccggccggaggtgaggaaaacatgaccgagactgacgctttctataagagagaaatgttcgaccctgccgaaaagtacaagatggaccaccggcggagaggcattgcactcatcttcaaccatgaaagatttttctggcatctgaccctgccagagcggcgaggaacctgcgccgacagggacaacctcactcggcgcttctccgacctgggctttgaagttaaatgcttcaatgacctgaaggctgaggagttgctgctcaaaatccacgaagtgtccactgtttcccatgcggatgcggattgcttcgtctgcgtgttcctgtcccacggcgaaggaaatcacatctacgcgtacgatgccaaaattgagatccagactcttactggcttgttcaagggagataagtgccactcactcgtggggaagccaaagattttcatcattcaggcctgccggggaaaccagcacgacgtgccagttatcccgctggacgtggtggat

SEQ ID NO: 83834 - DNA, 900 bp, Artificial Sequence
  derived and/or modified sequence
atggtcgaaattgacgctgcctcggtctacacccttcctgctggggcggatttccttatgtgctattccgtcgctgaaggttattactcacacagggagacagtaaatgggtcttggtacattcaggacctctgcgagatgctgggtaagtacgggtcgtccctcgagttcactgagctgctgactctcgttaacagaaaggtcagtcagagacgcgtcgacttttgtaaggaccctagtgctatcggaaaaaagcaggtgccgtgctttgcgtccatgctaactaaaaagctgcactttttcccgaagagtaacctcgagcaccatcaccatcatcatgtcgagatcgatggaggatcacccatgtcaagcgcatccggcctccgcagaggacaccctgccggcggcgaagaaaacatgaccgagaccgatgctttctataaaagagagatgtttgacccagcagagaaatataagatggaccacaggcgccgcgggatagcgctcatctttaaccacgaacggttcttctggcacctcactttgcccgaaaggcgcggcacctgtgccgatcgagacaatcttacgcgccgtttctccgacttgggcttcgaggtcaaatgcttcaacgacctaaaggctgaggagctactcctcaaaatccacgaagtatctaccgtttcccacgccgacgccgattgtttcgtgtgcgtcttcctcagccacggtgagggcaaccatatttacgcatatgatgcgaaaatagagattcaaactctgacaggcctgtttaaaggggacaagtgtcacagcttggtgggcaagccgaagatcttcattatccaggcttgccgggggaatcagcacgacgtgccggtcattccactcgacgtggtggac

SEQ ID NO: 83835 - DNA, 900 bp, Artificial Sequence
  derived and/or modified sequence
atggtggaaatagatgctgcctcagtgtacacattgcccgctggtgcggactttcttatgtgctatagtgtagcggaaggttactacagtcatagagagactgtgaacggtagctggtacatccaggatctctgtgagatgctcggtaagtatggatcaagtctcgaattcaccgagctccttactctggttaaccgcaaagtcagccaacgcagggttgatttttgcaaggatccatccgctatcggtaaaaaacaggtgccttgcttcgcgtcaatgctgacaaagaagttgcacttcttccccaaatccaacttggagcaccaccaccatcaccatgtggagattgatggtggtagccccatgtcatccgcaagcggtttgaggcgcggtcacccagccggaggagaggagaacatgactgagaccgacgcattctataaaagggaaatgttcgatcccgctgagaaatacaagatggaccaccgccgccgcggaatagctctgatttttaatcacgagagattcttctggcacctgaccctgcctgaaagaaggggaacatgtgccgaccgcgacaacctgactcgcaggttctccgacttgggctttgaggtgaaatgcttcaatgatctcaaagccgaggaactgctcctgaagatccatgaagtatccacggtttcccacgccgacgctgattgcttcgtgtgcgtattcctgtctcacggtgagggaaatcatatttacgcgtacgacgcaaaaatcgagatccagacattgacaggactgttcaaaggcgacaagtgtcactccttggtgggcaagccaaagattttcattattcaggcatgtcgcggaaaccagcatgacgtgcccgtcattcccttggatgtggttgat

SEQ ID NO: 83836 - DNA, 900 bp, Artificial Sequence
  derived and/or modified sequence
atggtagagatcgatgcagcttccgtctacacgctgccggcgggagccgactttctgatgtgctactcagtagcagaaggctactactcacatcgggagactgtgaacgggtcatggtacatccaggatctgtgtgaaatgctgggcaagtatggatcttcactggagttcacggagctgttgaccctggttaataggaaggtgtcgcaacgaagagtggacttctgcaaggacccatcggcgatcgggaaaaaacaggtgccatgcttcgcaagcatgctcaccaagaagctccatttcttcccaaagtcaaacttggaacaccaccatcaccaccacgttgaaatcgacggaggcagtccgatgtcgtccgcgtcgggactgcgcagaggccaccccgccggaggagaagaaaacatgactgagactgacgcattctacaagagagagatgttcgatccggctgagaaatacaaaatggaccatcggaggagaggcatcgcactgatattcaaccacgagcggttcttctggcatttgaccctcccggaacgcagaggaacttgcgccgatcgtgataatctgactcggcggtttagtgatcttggatttgaagtgaagtgctttaatgatctcaaagctgaggagctgcttcttaagatccatgaagtcagcaccgtgtcccatgccgatgccgactgctttgtgtgtgtgttcctttcgcacggcgaagggaaccatatctacgcctatgacgccaagatcgaaattcagaccctcaccggcctgttcaagggcgacaaatgtcactccctggtcgggaagcccaagattttcattatccaggcgtgccgcggtaaccaacacgacgtgcctgttatcccgctcgacgtcgtggac

SEQ ID NO: 83837 - DNA, 900 bp, Artificial Sequence
  derived and/or modified sequence
atggtggaaatagatgccgcgtcagtgtacaccctgccagcgggcgcggattttctgatgtgctactccgtggctgaagggtactactcccacagagaaaccgtcaacggatcatggtacatccaggacctgtgcgagatgctgggaaagtacggatcatcactggaatttactgagcttcttaccctcgtgaatcggaaagtctcgcagcgcagagtggatttttgcaaggacccgtcagcgatcggaaagaagcaagttccctgcttcgcctcaatgctcactaaaaagctgcacttctttccaaagtcgaaccttgagcatcaccaccatcatcacgtggaaatcgacggtggatccccaatgtccagcgcaagcgggctccgccggggccaccccgccggcggcgaggaaaacatgacggaaactgacgccttttacaagcgcgaaatgttcgacccagcagaaaagtacaagatggaccataggcgccgcggtattgccctgattttcaaccacgaacggtttttctggcatctgaccctcccggagcgccgcggtacttgcgccgaccgcgataacctgacgcggcggttctccgatctgggatttgaggtgaagtgctttaacgacctcaaagccgaagaacttctgctcaaaatccacgaggtttccactgtgtcacacgcggacgccgattgcttcgtctgcgtgttcttgtcgcatggagaaggaaaccatatctacgcgtacgatgcgaaaattgaaattcagactctcactggactcttcaagggagataagtgtcattcgctcgtcggtaagccgaagatcttcatcatccaggcttgtcgcggcaaccaacatgacgtgccggtcatcccgttggacgtggtggat

SEQ ID NO: 83838 - DNA, 900 bp, Artificial Sequence
  derived and/or modified sequence
atggtggagatcgatgcggcatcggtctacactctgcccgcaggcgcagatttccttatgtgctactcggtggccgagggatactactcccatagagaaactgtgaatggatcctggtacatacaagacctgtgtgagatgcttggcaagtacgggtcctcgcttgaattcaccgaacttctgaccctcgtgaacagaaaagtgtcacaacggagagtggacttttgtaaggatccctccgcgattggaaaaaagcaagtgccatgtttcgcatcaatgcttactaagaagctgcatttcttccctaaatcaaacttggaacatcatcaccatcaccacgtcgaaattgatggaggatcaccgatgtcgtcagctagcggtcttagacgcggtcatcccgccggtggggaggagaacatgactgaaactgacgcgttttacaagcgtgaaatgtttgatccagctgaaaagtacaagatggatcatagacgcagaggaattgccctgatattcaaccacgaacgctttttctggcacctgactttgcctgaacgccggggaacgtgcgcggatagagacaacttgaccagaaggttttcagacctcggatttgaggtgaagtgttttaacgatcttaaagcggaagaactcctgctgaaaattcatgaagtgagcaccgtgtcacatgctgatgcggattgcttcgtgtgtgttttcctgtcccacggcgaggggaaccatatctacgcatacgatgcgaaaattgaaatacaaaccctgaccggacttttcaagggcgataagtgtcattcgctggttggtaagcctaagatattcattatccaagcatgccggggtaatcagcacgatgtgcctgtgatcccccttgatgtcgtggac

SEQ ID NO: 83839 - DNA, 900 bp, Artificial Sequence
  derived and/or modified sequence
atggtggaaatcgacgccgcctctgtatacacactgcccgctggagcagatttcctgatgtgctactccgttgccgaggggtattactctcatagagagaccgtcaatgggagttggtatattcaggacctatgtgaaatgttgggaaagtatgggtccagtcttgagttcactgagctgctcacgctcgtgaatcggaaggttagccaaaggagggtcgatttttgtaaagatccttccgccataggtaaaaaacaggttccatgcttcgcaagcatgctgacaaaaaagctgcattttttcccaaagtcaaatctggaacaccatcaccatcaccacgtcgaaatcgacgggggatctccaatgtcttctgcctccgggttgcgtaggggccacccagccggaggggaggagaacatgacagagactgatgcgttttacaagagagaaatgttcgatccagccgagaagtacaaaatggatcatcgtcgcagaggaatcgctttaatcttcaaccacgaacgctttttctggcacttaaccttgccagagaggcggggcacttgcgccgacagagacaacctgacgagaaggtttagcgacctggggtttgaggtgaagtgctttaacgacctcaaagccgaagagctcctgttaaaaattcacgaggtgtcaaccgtgagtcatgctgacgccgactgtttcgtttgtgtgtttctgtcccatggggagggaaatcacatatacgcatacgatgcaaaaatcgaaattcagaccttgactggactctttaaaggggacaagtgccacagtttggtgggaaagccaaaaatcttcatcattcaggcctgtaggggaaaccaacacgatgtgcctgtgatccccctggacgtggttgac

SEQ ID NO: 83840 - DNA, 900 bp, Artificial Sequence
  derived and/or modified sequence
atggtcgagatagatgcggcctccgtttacaccctgcctgctggagctgatttcctaatgtgttattccgttgcagaaggctactacagtcacagagagactgttaacggttcatggtacattcaggacttatgcgagatgctcggcaagtacggatcgagcctagagttcaccgagctgctaactctggttaatcgcaaggtaagtcaaagacgtgtcgacttctgcaaagacccctctgccatcggcaagaagcaggtcccatgttttgcgtcaatgctcacaaaaaaactgcacttctttccgaaatcaaatctagagcatcaccaccaccatcacgtagaaatcgacggaggctctcccatgtccagcgcgagcggccttcggagggggcaccccgcaggtggcgaggagaacatgacggaaaccgatgcattttacaaaagggaaatgtttgatccggctgaaaaatacaagatggatcaccgccggcggggtattgccctcatctttaatcatgagcggttcttctggcatctgacccttccagagcgacgaggaacatgtgctgatcgggacaatcttacacgacgattcagcgacctcgggttcgaagtgaaatgtttcaatgacctgaaagccgaagagttgctgctcaagatccacgaagtctctacagtatcgcacgctgacgctgactgtttcgtgtgcgtgtttctcagtcacggggagggtaatcatatctatgcttacgacgccaagatcgagatccagactttaacggggctctttaagggggataaatgccactcgctcgtgggtaagcccaagatttttatcatccaagcttgcagaggcaaccagcatgacgttccagtcattcctctggacgtcgtggac

SEQ ID NO: 83841 - DNA, 900 bp, Artificial Sequence
  derived and/or modified sequence
atggttgaaatagatgcggcgtcggtatatacgctaccggcgggtgcggattttttaatgtgttattcggttgcggaaggttattattcgcatcgagaaacggttaatggttcgtggtatatacaagatctatgtgaaatgctaggtaaatatggttcgtcgttagaatttacggaattattaacgttagttaatcgaaaagtatcgcaacgtcgtgttgatttttgtaaagatccgtcggcgataggtaaaaaacaagttccgtgttttgcgtcgatgctaacgaaaaaactacatttttttccgaaatcgaatttagaacatcatcatcatcatcatgttgaaatagatggtggttcgccgatgtcgtcggcgtcgggtttacgtcgtggtcatccggcgggtggtgaagaaaatatgacggaaacggatgcgttttataaacgtgaaatgtttgatccggcggaaaaatataaaatggatcatcgtcgtcgaggtatagcgttaatatttaatcatgaacgttttttttggcatttaacgctaccggaacgtcgtggtacgtgtgcggatcgagataatttaacgcgtcgtttttcggatttaggttttgaagtaaaatgttttaatgatttaaaagcggaagaactactactaaaaatacatgaagtatcgacggtatcgcatgcggatgcggattgttttgtatgtgtttttttatcgcatggtgaaggtaatcatatatatgcgtatgatgcgaaaatagaaatacaaacgctaacgggtttatttaaaggtgataaatgtcattcgttagttggtaaaccgaaaatatttataatacaagcgtgtcgaggtaatcaacatgatgtaccggtaataccgctagatgttgttgat

SEQ ID NO: 83842 - DNA, 900 bp, Artificial Sequence
  derived and/or modified sequence
atggtggagattgatgcggccagcgtctacaccctccccgcaggcgccgattttctcatgtgctattctgttgccgagggatactatagccatcgcgagactgtgaatggcagttggtacatacaggacctttgtgagatgctgggaaaatatgggagctcattggaatttactgagctcctcactttggtaaatcgtaaagtgagccagagacgagtcgatttctgcaaagacccctctgctatcggaaagaagcaggtcccatgcttcgcatccatgctgacaaagaaattgcactttttccccaaaagcaacttagaacatcaccatcaccatcacgtggagattgacgggggctctccaatgagcagtgccagcgggcttcggcgaggacatcccgccggtggtgaggagaacatgaccgaaacagacgccttctataagcgcgaaatgtttgacccagccgaaaaatacaagatggatcacaggaggcgcggaatagcattgatttttaatcatgagagatttttctggcatctaaccctcccggagcggcgtggcacttgtgcggatagagacaacctaactaggcggttctcggacttgggctttgaagtgaaatgctttaatgacctgaaggccgaggaactcctgttgaaaatccatgaggtgtccacggtttctcatgcagacgcggactgtttcgtgtgcgtgttcctcagccacggggaggggaatcatatctacgcttatgatgcgaagatcgaaattcagacattgactggcttgttcaaaggtgacaaatgccactcactggtggggaaacccaaaatcttcattattcaggcctgtagggggaatcaacacgatgtgcccgtcataccgcttgacgttgtggac

SEQ ID NO: 83843 - DNA, 900 bp, Artificial Sequence
  derived and/or modified sequence
atggtggagatcgatgccgcctccgtgtacacgttgccggcgggagcggacttcctgatgtgctattccgtggcggagggatattactcccatagagaaactgtgaacggatcgtggtacatccaggatctgtgcgagatgctcggaaagtacggcagctcactggagtttactgaacttctgacgttggttaaccgcaaggtgtcgcaacgcagagtggacttctgcaaagacccaagcgcgattggaaagaagcaagtgccttgttttgccagcatgctgaccaagaagctgcactttttcccaaaatcgaacctggaacatcatcaccaccatcatgtggagattgacggtggatccccgatgtcctccgcctcgggcctgcgccgcggacacccggccggaggcgaagagaatatgaccgaaactgacgccttctacaagcgagagatgttcgatccagcagaaaagtataagatggaccatcgccggcgcggcatcgccctcatcttcaaccacgagcgtttcttctggcatctcacgctgccggaaaggcgcggaacttgtgctgatcgcgacaacttgacgcggcgcttctcagacctgggctttgaggtcaaatgcttcaatgacctcaaggccgaagaactcctcctcaagatccacgaagtcagcaccgtctcccatgccgacgctgattgcttcgtctgcgtctttctgtcgcacggggaaggtaaccacatttacgcctacgatgctaagattgagatccagaccctgaccggactgtttaagggtgacaagtgccattccctcgttggaaagccgaaaatcttcattatccaggcatgcagagggaaccagcatgacgtgccggtcatcccgctggatgtggtggac

SEQ ID NO: 83844 - DNA, 900 bp, Artificial Sequence
  derived and/or modified sequence
atggtggagattgatgctgcatccgtttacacactgcccgccggggccgattttctgatgtgttattcagtggctgaaggctattactcccaccgggagactgtgaacggatcttggtacatacaggacctttgcgaaatgctcgggaaatacgggtcatcccttgagttcactgagcttctgactctggtaaaccggaaagttagccaacgtcgtgtggatttctgcaaggacccgagcgcaattggcaagaaacaggtcccctgcttcgcatccatgctcaccaagaagctgcatttcttccccaaatctaatttagagcatcaccatcatcatcatgtggagattgacggtggatcgcccatgagtagcgcgagcgggctgaggcgaggacatcctgctggcggtgaggagaatatgacggagactgatgccttttataagcgcgagatgttcgaccccgcagagaaatataagatggatcacagaaggcggggtatcgcactgatttttaaccatgaacgctttttttggcacttaacattgcctgaacggcgcggcacctgcgcagatagagataatctgactaggagattctcagacttaggatttgaagttaagtgcttcaatgacctcaaagctgaggagctcctgctaaagattcatgaagtgagtactgtatctcatgccgatgcagattgcttcgtctgtgtcttcctgagccacggagagggtaatcatatatatgcatatgatgcaaagattgaaatccaaaccttgaccggcctgtttaagggcgacaaatgccattcactagtcggtaagcctaagatttttatcatccaagcttgccggggaaaccagcacgatgtgcccgtcattcccctagacgtggttgac

SEQ ID NO: 83845 - DNA, 900 bp, Artificial Sequence
  derived and/or modified sequence
atggtggaaattgacgcagcttcggtgtacactctgcccgcaggtgcggattttctcatgtgttactccgtggccgaaggttactactcgcatagagaaactgtcaatggttcatggtacatacaggacctctgtgagatgctcggcaagtacggctcgtcgctggagtttacggaactcctgactctggtcaatagaaaagtcagccagcgccgggtggatttttgtaaggacccttcagctatcgggaaaaagcaagtgccatgctttgcatctatgctgacgaagaaacttcatttcttccccaagtctaacctggagcatcaccaccatcatcacgtggagattgatggtggttcccctatgtcgtctgcatcgggtcttaggcgtggtcatccagcaggtggggaagagaacatgaccgaaactgacgcattctacaagcgcgaaatgtttgacccggcggagaagtacaaaatggaccataggcggagaggtattgcactcatattcaatcacgaacgattcttttggcatcttactctgcctgaaagacgcggtacctgcgcagaccgcgataaccttacgcggcggttttcggatctgggatttgaagtgaagtgttttaacgacctcaaggcagaagagctgcttctcaagatccatgaggtcagcaccgtgtcacatgcagatgcagactgttttgtgtgcgtattcttgtcacacggagaagggaaccatatctacgcctatgatgccaagattgagattcagactcttaccggcttgttcaagggagacaaatgccacagcctggtcggtaagccaaagatcttcattatacaagcatgtcgcggcaaccaacacgatgttcctgtcatcccactggatgttgtggat

SEQ ID NO: 83846 - DNA, 900 bp, Artificial Sequence
  derived and/or modified sequence
atggttgagatagatgctgccagcgtgtacacactgcctgctggcgcagattttctgatgtgttattcagtggcagaaggatactattcacacagagagactgtaaacgggtcctggtacatccaggatctgtgcgagatgctcggcaagtacggttcttcactggaattcactgagctcttgactttagtgaaccggaaggtgagccagcggcgggtcgacttctgtaaggacccctcagccataggaaaaaaacaggtgccatgttttgcgtcaatgctcacgaaaaaactccacttttttccaaagtctaacctcgagcatcaccaccaccaccatgtggagatcgacgggggatcccccatgtcttctgccagtggcctgcggcgcgggcacccagcaggtggcgaggaaaacatgaccgaaacagacgctttctacaagagggaaatgttcgaccctgcagaaaaatacaaaatggatcaccgccggaggggcatcgcgctcatcttcaaccacgagcgcttcttctggcacctcacactgcccgaaaggagaggcacttgcgccgacagagataacctgaccagaaggttcagcgacttggggtttgaagttaagtgcttcaatgacttaaaggctgaagaattgctactaaagatccacgaggtgagcaccgtgagccacgcagatgccgactgttttgtctgtgtctttctctctcacggagagggaaaccacatatacgcctacgacgcaaagattgagatccagaccttgacagggctgttcaagggagataaatgtcactccctggtggggaagccaaaaatatttatcatccaggcgtgtaggggcaatcagcatgacgtgccagtgatcccactagacgtggtggac

SEQ ID NO: 83847 - DNA, 900 bp, Artificial Sequence
  derived and/or modified sequence
atggtggagattgatgcagcttcggtgtataccctcccggcgggggcagacttcctcatgtgctactcggtggctgaaggatactactctcatagggagactgtcaacggaagttggtacatccaggatctgtgcgagatgctgggaaaatacggcagctcactggagttcactgagctgctgaccctggtgaataggaaggtgagccagcggcgtgtggatttttgcaaggacccgtccgccataggaaaaaagcaggtgccttgcttcgcatctatgctgaccaagaaacttcacttttttccaaagtccaatctggaacatcatcatcatcaccacgtggagatcgatggcgggtcgccaatgtcctcggcctcgggactgcgcagagggcaccctgccggtggtgaagaaaacatgactgaaaccgacgctttctacaagagagaaatgttcgacccggccgaaaagtacaagatggaccacaggaggcgcgggatcgctttgatcttcaaccacgaacggttcttttggcatttgaccctgccggagcggagaggaacttgcgcggaccgcgataatcttactcgccgcttctcggatctcggatttgaagtgaaatgcttcaacgacttgaaggccgaagaactgttgctcaaaatccatgaggtgtctactgtctcgcacgccgacgcggattgcttcgtgtgtgtgttcctgtcccacggcgagggaaaccacatctacgcctacgatgcgaagatcgagattcaaacgctcacgggactctttaagggggacaagtgtcacagcctggtggggaagccaaagatcttcatcatccaggcttgtagaggtaatcagcacgacgtgcccgtgatccctctcgacgtggtggac

SEQ ID NO: 83848 - DNA, 900 bp, Artificial Sequence
  derived and/or modified sequence
atggtcgagatagatgcggcaagtgtgtatacgcttccggccggggcagactttcttatgtgttactccgtcgccgaaggatactacagccatcgagaaactgtcaacggatcatggtacatccaagacctgtgtgagatgctgggtaaatacggctcctcccttgagtttaccgagctgctgacgctcgttaatagaaaagtcagccaaagacgcgtcgacttttgtaaagatccgtcggcaattggtaagaagcaggtgccctgctttgcatccatgcttaccaaaaaactccacttcttccccaagtccaacctggaacaccatcatcaccatcacgtcgaaattgatggagggagcccaatgtcgtcagcgtccggcctgcgccgcggacatccagcaggaggtgaggagaatatgaccgaaactgatgcattttacaaaagggaaatgtttgatccagcagagaagtacaagatggatcacaggagacggggaattgcattgattttcaaccacgaacggttcttttggcatctcacccttcctgaaaggcgtggtacgtgcgcagacagggacaatcttactcgccggttttcggatttgggatttgaggtgaagtgtttcaatgatctgaaggctgaggagctgttgctgaagatacatgaagtttcaaccgtgtcacatgcagacgcggactgtttcgtgtgcgtctttctttcgcatggagagggcaaccatatctatgcatacgatgcaaagatagaaattcagactcttactggtcttttcaagggtgataagtgccactccttggtaggtaagccaaagattttcatcatccaggcatgccgcgggaaccaacatgacgtccctgtgattccactggacgttgtcgac

SEQ ID NO: 83849 - DNA, 900 bp, Artificial Sequence
  derived and/or modified sequence
atggtggagatcgatgccgctagcgtctacacgctgccagcaggtgcagattttctcatgtgttactcagtggccgaaggttactacagccatcgagagacagtaaatgggagttggtacattcaggacttgtgcgagatgcttggcaagtatgggtctagcctggaatttacggagctgctgacgctcgtcaatcgaaaagtctcccagaggagggttgatttttgtaaggaccccagtgcaatcggaaagaaacaggtcccctgcttcgcgagtatgctgacgaagaaattacactttttccccaagtctaaccttgaacaccatcaccaccatcatgttgagatcgacggcggatccccgatgtcgtccgccagcggcttgcgccgcggccacccagctggtggcgaggagaatatgactgaaactgacgcgttttacaagcgagaaatgtttgatcctgctgaaaagtacaagatggaccacaggagaaggggtatcgccctaatcttcaaccacgagcgattcttttggcacctgacgttgccagagcggcggggtacttgcgcggatcgggataatctgacaagaagattttcggatctgggattcgaggtgaagtgctttaacgacctcaaggctgaggagctgctgctgaaaatccatgaggtctcaaccgtgtcacacgccgatgctgattgtttcgtgtgtgtcttcctgtcccatggcgagggcaatcacatttatgcttacgacgccaaaattgaaattcagacacttaccggactgttcaaaggagacaaatgccatagcctcgtggggaagccaaaaattttcattatccaggcctgccgcggcaaccaacacgacgtccctgtcattcctctggacgtagtcgat

SEQ ID NO: 83850 - DNA, 900 bp, Artificial Sequence
  derived and/or modified sequence
atggtcgagattgacgcggcatccgtctacacccttccagctggagctgatttcttgatgtgctactcggttgcggaagggtactactcccaccgcgagacggttaacgggtcctggtacatccaggatctgtgcgagatgctcggcaaatatggctcctcgctcgagttcaccgaactcctcactctcgttaatcggaaagtctcccaacgcagggtggacttctgcaaagatccctcagctatcgggaagaagcaggtcccatgcttcgcgtcaatgttgactaagaagctgcacttcttcccaaagtcgaacctcgaacatcatcatcaccatcatgtggaaatcgacggcgggtcaccgatgtcgtcggccagcggactcagacggggacacccggcgggaggagaagaaaacatgaccgagactgacgcattctacaagcgcgaaatgttcgatccggccgaaaagtacaagatggaccaccggcggagaggtatcgctctgatctttaatcatgagaggttcttctggcacctcacgctccctgagcggcgcgggacctgtgccgaccgcgataacctgacccggaggttttccgacctgggctttgaagtgaaatgcttcaatgacctgaaggccgaggagctcttgttgaagatccatgaggtgtcgactgtgtcccatgccgatgcagattgcttcgtctgcgtgttcctgtcacacggagaaggcaatcatatctatgcgtacgacgccaagatcgagattcagactctgaccggactgtttaagggagacaagtgccactcactggtcggaaagcccaagatcttcatcattcaggcgtgtagaggtaaccagcatgatgtgccggtgatcccgctggatgtggtcgac

SEQ ID NO: 83851 - DNA, 900 bp, Artificial Sequence
  derived and/or modified sequence
atggtagaaatagatgccgcatcagtgtacactctgcccgcaggcgccgactttttgatgtgctactcagtagctgagggttactactcccatcgagaaacagttaatggcagttggtacattcaggacctctgtgagatgctgggaaagtacggttcctctctagaatttactgaattgctcacactggtgaatcgaaaggtgtcccagaggagggtggatttttgtaaggaccccagcgcaatcggcaagaaacaggttccatgtttcgctagcatgctgactaagaagttgcatttctttcccaagagtaacctagagcaccaccaccatcatcacgtagaaattgacggcggctctccaatgtcatccgccagtggactgcgacggggtcaccccgccggcggtgaagagaatatgacagagacagatgcgttttacaaaagagagatgtttgatcctgccgaaaaatataaaatggatcaccgccgtaggggtattgccctgatcttcaaccacgagagatttttttggcatctgacactcccagaacgacggggaacgtgtgccgatcgggacaacctaacccgaaggttcagcgacctgggctttgaagtgaaatgttttaacgacctgaaggccgaggagctactacttaagattcacgaagtgtctacagtatctcatgccgatgccgactgtttcgtgtgcgtatttcttagtcacggggagggaaatcacatctacgcatacgatgcaaaaattgagatccaaactctcactggactcttcaagggcgataagtgtcacagcctggtgggcaagcccaaaattttcatcattcaggcctgccgaggaaatcagcatgatgtgcctgtgattccactggacgtagtcgac

SEQ ID NO: 83852 - DNA, 900 bp, Artificial Sequence
  derived and/or modified sequence
atggttgaaatcgatgcagcctccgtgtacactctgccggcgggcgcagactttctgatgtgctacagcgtggcggaaggatattactcccacagagaaactgtgaacggatcctggtacatccaagacctgtgcgaaatgcttggaaagtacggatcgtcgttggaattcactgagctgctgactctggtcaaccggaaggtgtcccaacggcgcgtggatttttgcaaggatccctcagctatcggaaagaaacaagtgccgtgcttcgccagcatgctgactaagaagctgcactttttcccgaagtccaacctcgagcaccaccaccatcaccacgtcgagatagatgggggctccccaatgagctcagcatcgggtctgagaaggggacatccagctggcggtgaagaaaacatgacggaaactgatgctttttacaagcgggagatgttcgatccggcggagaagtacaaaatggatcaccggaggcgagggatcgccctgatcttcaaccacgaacggttcttctggcatctcactttgccagagcgccgcggcacctgcgctgatcgcgataaccttactcggagattctccgaccttggattcgaggtgaaatgctttaacgacctgaaggccgaggaactgctgctcaaaatccacgaagtctctactgtctcccatgccgatgcggattgcttcgtgtgcgtctttctgtcacatggggagggaaaccatatctatgcatacgacgccaagattgaaattcaaaccctcactggactgttcaaaggcgacaagtgccattcactcgtgggaaagcctaaaatcttcattatccaggcctgtcggggtaaccagcacgacgtgccagtcatcccgctggatgtcgtggac

SEQ ID NO: 83853 - DNA, 900 bp, Artificial Sequence
  derived and/or modified sequence
atggtcgaaatcgatgccgccagcgtgtacactcttccagctggcgcggactttctcatgtgctattccgtcgccgagggatactacagccacagggaaaccgtgaacggttcatggtacatccaggacttgtgcgaaatgttgggcaagtacggaagtagcctggaattcaccgagctcctcacgttggtgaaccgcaaagtgtcccagagaagagtcgacttctgcaaggacccgtcggcaatcgggaagaaacaagtgccctgtttcgcctcaatgctgaccaagaaactgcacttcttcccaaaatcaaacctggaacatcatcaccatcaccacgttgaaatcgacggtggctcaccaatgtcgtcggcttcgggacttcggcgcggtcacccggcaggaggcgaggaaaatatgactgaaactgatgcgttctacaagcgggagatgtttgatccggccgaaaaatacaagatggatcaccgacgccggggaatcgcactcatcttcaatcatgagaggttcttctggcacctcaccctgccggagcggcgtggaacctgtgccgacagagacaacctgacccgccgcttctccgacctggggtttgaggtgaagtgcttcaatgatctgaaggctgaggagctgctcctcaagatccacgaagtgtccactgtgtcgcacgcggacgcggactgtttcgtctgcgtctttctgagccacggagaaggaaaccatatctacgcctacgacgcaaagatcgaaattcagacgctgactggactgtttaaaggagataagtgccattccctggtcggcaagcctaagatcttcattatccaagcctgccgggggaaccagcatgatgtgccggtgattcctctcgatgtggtggac

SEQ ID NO: 83854 - DNA, 900 bp, Artificial Sequence
  derived and/or modified sequence
atggtggagattgacgccgcctctgtgtatacattacctgctggtgccgacttcttgatgtgctactccgtggctgaggggtactactcccaccgagaaaccgtgaatggcagttggtacatccaagatctgtgcgagatgctgggcaaatacgggagtagccttgagtttaccgaactgctcactctggttaaccgaaaagtgtctcaacggcgtgtggatttttgtaaagacccgtctgcgatcggcaaaaaacaggtcccatgttttgccagcatgctcacaaagaagctacactttttcccaaagtctaatctggaacatcaccatcaccaccacgtcgagattgacggcggcagccccatgtcatcggcctccggactcaggaggggccacccagcaggcggggaagaaaacatgaccgaaactgatgcgttctataaacgcgagatgtttgaccccgctgaaaaatacaagatggatcatagacgaaggggcatcgcactgatctttaatcacgaaaggtttttctggcacctcaccctgcctgagagaagaggaacttgtgctgacagagacaatttaacccgtcgcttctctgatctcggctttgaagtcaaatgcttcaatgaccttaaggctgaagaactgttgctcaagattcacgaagtctcgacagttagtcacgcagacgcggattgctttgtctgcgtgtttctcagccacggagagggaaaccacatttatgcctatgatgccaagattgaaatccagacattaaccggactctttaagggtgacaagtgtcactccctcgtgggcaaaccaaaaatatttataattcaggcctgcaggggaaatcagcatgacgtgcctgtcattcctctcgacgtcgtcgat

SEQ ID NO: 83855 - DNA, 900 bp, Artificial Sequence
  derived and/or modified sequence
atggtggagatcgacgcagcttccgtctataccctgcccgccggggcagatttcctgatgtgttacagtgtggcagagggctactattcccaccgggagaccgtcaatggcagctggtatattcaagatttgtgcgagatgctgggcaagtatgggtctagcctggaattcacagagctgttgaccctggtgaatcggaaggtgtcccagcgccgggtggatttctgcaaagaccctagcgctatcggaaagaaacaagtgccgtgcttcgcctctatgcttaccaagaagttgcacttcttccccaaatccaatctcgaacatcaccatcaccaccatgtggagatcgacgggggctcccctatgagttccgcaagcgggctcaggagaggacacccagcgggaggggaagagaatatgaccgagacagatgccttctacaagagagagatgtttgaccccgcagagaagtacaaaatggatcaccgcagaagggggatagccttgatattcaaccacgagcgcttcttttggcatctcactctgcccgagcgcaggggtacctgtgctgacagagacaacttgactcgcagattttcagacttgggctttgaggtgaagtgtttcaacgacttgaaggctgaggaacttcttctcaaaatccacgaggtgagtacagttagccacgcagatgctgactgtttcgtgtgtgtcttcctgtctcatggcgagggaaaccacatttatgcctatgatgcaaagatagagatacagacactcaccggcctgttcaagggtgataaatgccattcacttgtagggaagcctaagatttttattatccaggcttgccgggggaaccaacatgacgtgccggtgattccacttgacgtggttgac

SEQ ID NO: 83856 - DNA, 900 bp, Artificial Sequence
  derived and/or modified sequence
atggtcgagattgatgcagccagtgtctacactctccccgccggagccgatttcctcatgtgttatagcgtcgcggagggctactattctcaccgggagacagtaaatgggtcatggtacatacaggacctctgtgaaatgctcggaaagtatggatctagcttggaattcaccgagctcctaacgctcgtgaatcgcaaggtctcacaaagaagggtcgacttctgtaaagacccctccgcgatcggtaaaaaacaggtgccatgcttcgcatctatgttgactaagaagttgcacttcttccccaagtccaatttagagcaccaccatcatcaccacgtcgagatagatggcggatcacctatgagttcggcctctgggctgcgaagaggacatcccgctggcggcgaggaaaatatgacggaaaccgacgccttctacaagagagaaatgtttgacccagctgagaaatataaaatggaccaccgtcgccgggggattgcactaatatttaaccatgagcgttttttctggcatttgaccctgccagagcggcggggtacatgcgcggaccgggacaacctaacgaggcggttctctgacctgggcttcgaggttaaatgtttcaacgacctgaaggccgaagaattgctgctcaagattcacgaggtcagtaccgtcagtcatgctgacgccgactgttttgtttgcgtcttcctgagccacggcgagggaaaccacatctacgcctacgatgccaaaatcgaaattcaaactctcacaggcttattcaagggtgataagtgccactcactagtggggaagccgaaaatttttattattcaggcctgtcgggggaatcagcacgacgtaccagttatcccgctggacgtcgtcgat

SEQ ID NO: 83857 - DNA, 900 bp, Artificial Sequence
  derived and/or modified sequence
atggtcgaaatcgatgctgcaagtgtctacaccttgccagcaggtgcggatttcctgatgtgttactctgtcgcagagggatattacagtcaccgcgagaccgtgaacgggtcatggtatatccaggacctctgcgagatgctgggcaaatacggcagtagccttgagttcactgaactcctgacattggtgaacaggaaggttagccagaggcgagtggatttttgcaaggatccaagcgcaatcggcaagaagcaagttccgtgctttgcctcaatgctgaccaaaaaactgcattttttcccgaagtctaacctggaacatcatcaccaccatcacgtagagattgatggcggtagccctatgagctcagccagcggcctccgccgaggccatccagccggaggcgaggaaaatatgaccgagacagacgccttctacaaacgagaaatgttcgatcccgctgaaaagtataagatggatcacaggcgaagaggcatcgcccttatattcaatcatgaacggtttttctggcatctcaccctgccagagagaaggggtacatgcgcggatcgagacaacctgactcgcagattctcagaccttgggtttgaggttaagtgttttaacgacctgaaggctgaggagctcctgcttaagattcacgaggtctctaccgtttcccatgcagatgccgattgcttcgtttgtgtgttcttgtctcacggtgagggtaaccatatatacgcatacgatgctaagatcgaaatccaaactcttaccggtttgtttaagggagacaagtgtcactcactggttggcaagccaaaaatcttcataatccaggcatgccggggcaatcaacatgacgtgcctgtgatccctttggatgtggttgac

SEQ ID NO: 83858 - DNA, 900 bp, Artificial Sequence
  derived and/or modified sequence
atggttgagatcgatgcggcctctgtgtacaccctgccggccggagcggacttcttgatgtgttacagcgtggcagaggggtactattcacatcgcgagaccgtcaatggctcctggtacattcaagatttgtgcgagatgctgggcaaatatggtagctccttggagttcaccgaactgttgacactagtaaacaggaaggtgtcgcagaggcgggttgacttttgcaaagacccatcagctatcggcaagaaacaggtcccatgttttgctagtatgctaacaaaaaagttacatttcttccccaaatcaaatctggagcaccaccatcaccatcacgttgagatcgatggagggagccctatgtcttccgctagtgggctacgtaggggccacccagccggcggagaggagaacatgacagaaaccgacgcattctacaagcgagagatgtttgacccggccgagaaatacaagatggaccaccgtaggcgaggcatcgcactgatcttcaatcacgaacggttcttctggcatttaacactccccgagagaaggggaacttgtgcagatagggataacctcacgcgacgttttagcgatctcgggttcgaagttaagtgttttaacgaccttaaggcagaggaactgttactcaaaattcatgaagtgtcaacagtgtcccacgccgacgccgattgcttcgtatgtgtctttctgagccatggagaggggaatcatatctatgcatatgatgccaagattgagattcagactcttacaggcctgtttaaaggcgataagtgtcacagcctcgtaggaaagcctaaaatattcataattcaggcttgccgagggaatcagcacgatgtccctgtgatcccactggacgtggtcgat

SEQ ID NO: 83859 - DNA, 900 bp, Artificial Sequence
  derived and/or modified sequence
atggtcgagattgatgccgcatccgtgtacactctgccggccggagcagatttcttgatgtgctactccgtggcagaaggatactactcgcacagagaaaccgtcaatgggtcctggtacatccaagacctctgtgaaatgctcggaaagtacggctcctccctggagtttaccgagctccttaccctcgtgaatagaaaggtgtctcagcggcgcgtcgatttctgcaaagacccgtcggcaattggcaagaagcaggtgccgtgcttcgcctccatgctgaccaaaaaactccatttctttccaaaatcgaacttggagcatcatcaccaccatcacgtggagatcgacggaggatcgccgatgtcgtccgcttcgggccttagacgcggccacccagccggtggtgaggaaaacatgactgaaaccgacgccttttacaagagggaaatgttcgatccggccgaaaagtacaagatggatcaccgccggagaggaatcgcgctgatctttaaccacgaacggttcttctggcacctgaccctcccagaaaggcggggaacttgtgcggatcgcgacaacctgactcggagattctcagatctgggattcgaagtgaagtgcttcaacgacctgaaagccgaggagctcctgcttaagatccatgaggtgtcgaccgtgtcccatgccgacgccgactgcttcgtctgtgttttcctgtcgcatggtgagggaaatcacatttacgcctacgacgcaaagatcgagatccaaacgctgacgggacttttcaagggagataagtgtcactccctcgtgggaaaaccgaagattttcatcattcaggcctgccggggaaaccagcacgacgtgccggtgatcccgctcgacgtggtcgac

SEQ ID NO: 83860 - DNA, 900 bp, Artificial Sequence
  derived and/or modified sequence
atggtagagatagatgcagcgtccgtatacacactaccagctggggcagatttccttatgtgctacagcgtagcagaagggtattattctcatcgtgagacagtcaacggaagttggtatatccaggatttatgtgaaatgttggggaagtatggaagttcactggaattcaccgaacttctaaccttggttaatcgaaaagtttctcagcgacgagttgacttctgcaaagatccttcggctattggtaaaaaacaagttccatgctttgcgagtatgctcactaaaaaactccacttttttcccaagagtaatctcgaacaccatcatcatcatcacgtggaaattgatggcggaagcccaatgtcatccgcatcaggcttgcgaagaggacatcctgcgggaggggaggaaaacatgaccgagacggatgctttttacaaaagagaaatgttcgacccagcagagaaatacaagatggaccataggagacgtggaattgccttgatttttaaccatgaaagatttttctggcatctaacgttgccagaacgtcgaggaacttgtgctgatcgcgacaacctaacacgacggttctccgatttgggattcgaagtaaaatgctttaacgatttaaaggcggaagaactgctcttgaagattcatgaggtatctacagtgtcacatgctgacgctgactgctttgtttgcgttttcttatcacatggggaaggaaaccacatctatgcatatgatgccaaaatcgagatccagacccttactggcctgttcaaaggcgacaaatgtcattctctggttggaaagccaaaaatctttattattcaggcctgcaggggaaaccaacacgatgtacctgtaattccacttgacgtggtcgat

SEQ ID NO: 83861 - DNA, 900 bp, Artificial Sequence
  derived and/or modified sequence
atggtggagatagatgcagcatcagtctacactctgcccgccggcgcagacttcctgatgtgctactccgtcgcagagggctattactctcaccgtgaaactgtgaatgggtcgtggtacatccaggacctgtgtgaaatgttgggaaagtacgggagctcccttgaattcactgaactgctgacgcttgtgaatagaaaggtgtcccaacggcgagtggatttttgtaaggatccttcagctattggaaaaaagcaggtgccatgtttcgcatccatgctcaccaagaagttgcacttttttcccaagtcgaaccttgaacaccaccatcatcatcatgtggagattgatggtggaagcccaatgagtagtgcctcaggtctgcgccgtggtcaccccgcaggaggagaagagaacatgactgagacggacgccttctataagcgtgaaatgtttgacccagcagaaaagtacaaaatggatcacaggagaagaggaattgcactcatattcaaccatgaacgtttcttttggcacctcaccctgcccgaaagacggggcacttgtgctgatagggataacctgactcgtcggttttccgatcttggatttgaggtcaaatgctttaatgatcttaaagcggaagagctcctgctgaagattcatgaggtgtcgaccgtctcgcatgcagacgctgattgctttgtctgtgtttttctttctcacggtgaaggcaaccatatctacgcatacgacgccaaaatcgaaattcagacccttaccggattgttcaaaggagataaatgtcactcgctcgtcggaaagcctaagatcttcataatccaagcatgccgaggaaatcaacatgatgtgcctgtcattcctttggatgtcgtggat

SEQ ID NO: 83862 - DNA, 900 bp, Artificial Sequence
  derived and/or modified sequence
atggtggagattgatgcagcatcagtctacacactacccgccggggccgattttctgatgtgttatagcgttgcagagggctattacagccaccgcgaaacagtaaacggatcctggtacattcaggatctgtgcgagatgctaggcaagtatggatcaagcctggagtttaccgagctgcttacactggtgaacaggaaagtgtctcagcgcagggtagatttttgcaaggatcctagcgctataggcaagaagcaggtgccttgcttcgcctccatgctgacaaaaaagctgcatttcttcccaaaaagcaacttagagcatcaccaccatcatcatgtagagatcgatggtgggtcacccatgagtagcgcaagcggactccgtagaggccatcccgctggaggcgaggagaatatgacagagaccgacgccttctacaagagagaaatgttcgaccctgcggaaaaatataaaatggatcatcgacggcgaggaatcgcgctaattttcaaccatgagaggttcttttggcacctaaccctgcctgaaagaaggggaacctgtgccgatcgcgacaacttaacccgcaggttttcagacctgggcttcgaagtgaagtgtttcaacgaccttaaggcggaggagctcctcctgaagatccatgaggtctctacagtttcacacgccgatgcagattgtttcgtgtgtgtatttttgtctcacggagaggggaaccacatctacgcttatgatgccaagatcgagatccagacattaacagggctgttcaagggggacaagtgtcactcacttgtgggcaagcccaaaatcttcatcatacaggcctgtcgcggcaaccagcacgacgtgcctgttatccccctagatgtggtcgat

SEQ ID NO: 83863 - DNA, 900 bp, Artificial Sequence
  derived and/or modified sequence
atggttgaaattgacgccgcgtccgtatatacgctcccggcaggagctgactttttaatgtgctactctgttgcagaaggctattattcccatcgggagacagtcaatggatcgtggtacatacaggatttgtgtgaaatgcttggaaaatacggaagctccttggagtttacagagcttctgaccctcgtgaaccgcaaagtctcccaaagaagagtagacttctgcaaagaccctagcgctattggaaaaaaacaagtaccgtgctttgcatccatgctgacaaagaaactgcattttttcccgaagtctaacctggaacatcaccaccatcatcatgtagaaattgatggtggatcgcctatgagctcagcgagcgggctgcggcgcggccaccccgcaggtggggaggaaaatatgaccgaaaccgatgcattttacaaacgcgaaatgtttgacccagcagagaaatataaaatggatcacagacgtagaggaatagcactgatttttaaccacgaaagatttttctggcatttgacacttcctgagcggagaggcacctgcgctgatcgtgataacttgacacggaggtttagtgatcttggttttgaggtaaaatgttttaatgatcttaaagccgaggagcttcttcttaaaattcatgaagtttctacggtgagccatgcggacgctgactgctttgtctgtgtttttctgtcacatggtgaaggcaatcatatctatgcgtatgacgcaaagattgaaattcaaaccctaacaggactgttcaagggcgacaaatgtcactcccttgtgggtaaacctaagatctttatcattcaggcttgtcgcggaaaccaacatgatgtgcccgttattcctcttgatgtcgtcgat

SEQ ID NO: 83864 - DNA, 900 bp, Artificial Sequence
  derived and/or modified sequence
atggtggagattgatgcagcatctgtgtacactctgccggccggtgccgactttcttatgtgctattcagtggccgagggttactactcccatagggagacggtgaatggcagctggtacatccaagacctttgtgaaatgcttggcaagtatggcagctcactggagttcactgagctgttgactctggtgaacagaaaggtgtcacagagacgcgtagacttctgcaaagatccttctgcaataggaaaaaagcaagtgccgtgctttgcaagcatgctgacgaagaaacttcacttctttcctaagtccaatctcgaacatcaccaccaccatcatgtggagatcgacggaggatcaccaatgtcgtcggcatcgggcttgcggagagggcacccggcaggaggtgaagagaacatgaccgagactgacgcattttacaagagagaaatgtttgatcccgcggagaagtacaaaatggaccaccgccgcagaggaattgcgctgattttcaaccatgagcgttttttctggcatctcaccctcccagagcgacggggaacttgtgccgatcgagacaacctcaccagacggttcagtgatctcggatttgaggtcaaatgtttcaacgatctgaaagcagaagaacttcttcttaagattcacgaagtgtccaccgtgagccatgccgacgccgattgctttgtgtgtgtgttcctgtcacatggtgaaggtaatcatatctacgcatacgatgcaaagatagaaatccaaactctgactggactgtttaaaggagataagtgtcattcgctcgtgggaaagccaaagatcttcattatccaggcgtgtcgtggaaaccaacacgatgtgcctgtgattccactcgatgtggtggat

SEQ ID NO: 83865 - DNA, 900 bp, Artificial Sequence
  derived and/or modified sequence
atggtcgagattgatgccgctagcgtctataccctgcccgctggcgccgattttctgatgtgttactctgtagccgaagggtactatagccaccgggaaaccgtgaacggaagctggtacatccaagatctatgcgagatgttgggcaagtatggttcctcgctagaattcactgaactgctgacattggtaaatcgcaaggtatcccagcgacgcgtcgatttttgcaaagacccttcggcaattggaaaaaagcaagtgccttgcttcgcatcaatgctgacaaagaaactccacttttttcccaaatcaaacctcgaacaccaccaccatcatcacgtggaaatcgacgggggatcgccaatgagttcagcatcaggactgcggcgcggccaccctgcggggggcgaggagaacatgaccgaaaccgatgccttttacaaacgtgagatgtttgacccagctgaaaagtacaaaatggaccatcgtagacgaggaatcgctctgatcttcaatcacgaacgatttttttggcacctgacactgcccgagcgaagaggtacgtgcgccgaccgtgacaacctcacccggcgtttctctgatcttggcttcgaggttaaatgtttcaacgaccttaaggctgaggagctcctcttgaagatacacgaagtctccactgttagtcatgccgacgctgattgttttgtatgcgtgtttctttcacacggtgaaggcaaccacatatacgcctacgatgccaaaatagagatccagaccctgacaggcttattcaagggcgataagtgccacagtctggtcggaaagccaaaaattttcatcatccaagcctgccgaggcaatcagcacgacgtgcctgtcatcccccttgatgttgtcgac

SEQ ID NO: 83866 - DNA, 900 bp, Artificial Sequence
  derived and/or modified sequence
atggtggaaatcgatgccgcctcagtgtacaccctgccggcgggagccgactttctgatgtgctacagcgtcgcggagggatactactcacacagggaaactgtcaacgggtcctggtacatccaggacctgtgcgagatgctgggcaagtacggatcctctctggagttcacggagctgctgaccctcgtgaatagaaaggtttcgcaacggcgggttgacttttgcaaggacccatccgccatcggaaaaaagcaggtaccctgttttgcgagcatgctgactaaaaagctgcatttcttccccaagtcgaacctcgagcatcaccatcaccaccacgtggaaattgacggaggatcgccgatgtcgtcagcgtccgggcttcggaggggccacccagctggtggtgaggaaaacatgaccgagactgacgcgttctacaagcgggagatgttcgacccagccgagaaatacaagatggaccacagacggagaggaatagcgctcatcttcaatcatgagcgctttttctggcatctgactctgcctgagcgcagaggtacctgcgcggatcgcgataacctgactaggagattcagcgatcttggattcgaggtgaagtgtttcaatgatctgaaggccgaagagctgttgcttaagatccacgaagtctcgaccgtgagtcatgccgacgcagattgcttcgtctgcgtctttctgagccacggggaaggcaaccacatctatgcatacgacgcgaagattgagatccaaactttgaccgggctgtttaaaggagataaatgtcactccctggtgggaaagcctaagatcttcatcatacaagcctgccgcggaaaccagcatgacgtgccggtgatcccgctggatgtcgtggac

SEQ ID NO: 83867 - DNA, 900 bp, Artificial Sequence
  derived and/or modified sequence
atggtcgaaatcgatgcagcgtctgtttacacgctcccagcaggggcggattttctgatgtgctacagcgttgccgaagggtactacagccaccgggaaactgttaatgggtcttggtacatccaggatctctgtgaaatgttgggtaagtacggcagcagtctcgaattcacggagctcctcaccttagtgaacagaaaagtttctcagcggcgggtagacttctgcaaggacccctctgctatcggaaagaaacaggttccttgctttgccagcatgctcaccaagaagctccatttcttcccaaagtccaatttagagcaccatcatcaccatcacgtcgaaattgatggcggctcacccatgtcttccgctagcggactcagacggggacaccctgccggcggagaagaaaacatgaccgaaactgatgctttttacaagcgggaaatgtttgatccggctgagaaatataaaatggaccacagaagacgcggcattgctctgatttttaaccacgaacgcttcttctggcacctgaccttgcccgagcgacgcggcacttgcgctgacagggacaatctgacaaggcggttttccgatttgggcttcgaagtaaaatgcttcaatgatctgaaagcggaggaattactcctgaagatccacgaggtgtccacggttagtcacgccgacgcggattgtttcgtatgcgtcttcctgtcacatggcgaaggaaatcacatctatgcgtacgatgctaaaattgaaatccagacactcaccggactgttcaagggtgacaagtgtcactctctggtaggaaagcctaaaatctttattatccaggcatgcagaggcaaccagcacgacgttcctgtgattcccctcgacgtcgtcgac

SEQ ID NO: 83868 - DNA, 900 bp, Artificial Sequence
  derived and/or modified sequence
atggtggagatagatgccgcttcagtgtacacgctgcctgctggtgcagatttcctcatgtgctactccgtggcggaaggctattacagccatcgcgagactgtgaacgggtcctggtacatacaagacctgtgtgaaatgctcgggaaatacggatcctccctcgaatttactgaacttcttaccctcgtgaatagaaaggtgtcacaaagacgcgtggacttttgtaaagatccatcggcaatcggaaagaagcaggtgccctgttttgcatccatgcttactaagaagctgcacttttttcctaagtccaatttggagcatcatcatcaccaccacgttgaaattgatggtggatctcctatgtccagcgcctcggggctgcgacggggtcatccagcaggtggggaagaaaacatgactgaaactgacgccttttacaagagggagatgttcgatccggcggaaaagtacaagatggatcataggcgacggggaattgcattgatattcaaccacgagaggtttttctggcatctcacccttcccgaaaggcgggggacctgtgcagatcgtgacaacctcacgcggaggttctcggatctgggtttcgaagtgaagtgtttcaacgatctgaaggccgaggagctgctgcttaagattcatgaggtgtccactgtctctcacgcagatgccgattgtttcgtgtgtgttttcctttcgcatggggagggaaatcatatctacgcttatgatgcgaagatagaaatccaaacccttaccggccttttcaagggggacaaatgtcactcactggtcggaaaacccaaaatcttcataatccaagcatgtcgtggaaaccagcatgatgtgccagtgatcccgctcgatgtcgtggac

SEQ ID NO: 83869 - DNA, 900 bp, Artificial Sequence
  derived and/or modified sequence
atggtggagatcgacgccgcctccgtgtataccttgcctgcaggagcagacttcctcatgtgctactccgtagcagagggatattatagccatcgcgaaacagtcaacggcagctggtacatacaggatctctgcgaaatgcttgggaagtatggttcctcgctggagttcaccgagttgctcacactcgtgaacaggaaagtcagccagcgaagagtagacttctgcaaggacccatctgcaatcggaaaaaaacaggtgccatgctttgccagcatgcttaccaagaagctgcatttctttcccaagtccaacctagagcaccaccatcatcaccacgtagagattgacgggggctcgcccatgtcatctgcgagtggccttcgtcgtgggcacccagccggtggagaagagaatatgacagagacagatgctttctataagcgtgagatgttcgatcccgccgaaaagtacaaaatggaccacaggcggcgcgggatcgccctgattttcaatcatgaaaggttcttttggcacctaactctgcctgagcgcagaggaacctgtgcagaccgcgacaacctaacacgtcggttttccgacttaggtttcgaggtgaagtgttttaacgatctgaaagccgaagagcttcttctgaaaatccacgaagtgtcaaccgtctcccatgccgatgctgattgcttcgtctgtgtttttctcagccacggagaggggaatcacatctacgcctacgacgcaaaaatcgaaatccagacactaactggcctgtttaagggagataagtgtcattctttggtcggcaaacctaagatctttattatccaagcctgtcgcggtaaccagcacgacgtcccagttatcccgctggatgtggtggat

SEQ ID NO: 83870 - DNA, 900 bp, Artificial Sequence
  derived and/or modified sequence
atggttgaaattgatgccgcttcagtctacacattacctgccggtgctgatttccttatgtgctattcggtcgctgaagggtactattcgcatagggagactgtcaatggatcttggtatatacaggatctgtgtgaaatgttgggcaaatacggtagtagtctggaattcactgagctcctaacacttgttaaccgtaaagtttcccaacgtagggtagacttctgtaaggatccaagcgcaataggcaaaaagcaggttccatgctttgcctcaatgctgactaaaaagttgcactttttccctaagtcgaaccttgaacatcatcatcatcatcatgttgagattgatggcgggtcacccatgtcttcggcttccggcttgcgtaggggccacccggccgggggcgaggagaatatgacggaaaccgatgccttctataagcgggaaatgttcgatcccgcagagaagtataaaatggatcatagacgtcggggtatagctcttattttcaatcatgaacggttcttttggcatctgactttacctgagcgaagaggaacctgtgctgaccgagataacttgaccaggagattctctgatctgggtttcgaagttaaatgttttaatgacctcaaggcagaagaactgctgcttaaaatacacgaagtatcaacagtaagccatgctgatgccgactgtttcgtttgtgtgttcctttctcacggagaaggaaatcacatttacgcttatgatgctaagattgagatacagacacttaccggtttgtttaaaggcgataaatgccacagtttggtcggtaagcctaagatatttatcatacaagcttgcaggggtaaccaacacgatgttccagttatcccactcgatgtggttgac

SEQ ID NO: 83871 - DNA, 900 bp, Artificial Sequence
  derived and/or modified sequence
atggtggagattgacgcggcgtcagtgtacacgttgccagctggagccgatttccttatgtgctattcggtagcagagggctattattcgcatcgcgagaccgtgaacggcagctggtatattcaggatctgtgcgaaatgcttggcaagtacggcagctcacttgagtttacggaactgctgacacttgtgaaccggaaggtgtctcagcgacgggtagacttttgtaaagatccaagtgcaatcggcaagaagcaagttccctgcttcgcttcgatgctcacgaagaaactgcattttttccccaagtccaatctggagcatcaccatcaccatcatgtcgaaattgatggcggatccccaatgagctccgcctccggcctgagacgaggccaccccgcggggggcgaggaaaatatgacagagacggatgccttctacaagcgggagatgttcgatccggcagagaaatacaaaatggaccatcgtcggcgcggaatcgccctgatatttaatcacgagcgattcttttggcacttaaccttgcccgaaagaagaggaacttgcgccgatcgagacaacttgacccggcgcttcagcgatctgggtttcgaggttaaatgttttaacgatttaaaggctgaggagctgttgctaaagattcatgaggttagcactgtgtcgcacgcggatgccgactgcttcgtttgcgtgtttctctcacacggtgagggcaatcatatttacgcgtacgacgccaagatcgagatacagaccctgactggtctgtttaaaggggataaatgtcatagtctggtgggcaagccaaagatttttatcatccaggcgtgcagaggcaaccaacacgatgttccggtcattccactggacgtcgtggat

SEQ ID NO: 83872 - DNA, 900 bp, Artificial Sequence
  derived and/or modified sequence
atggttgagatcgatgcagcgagcgtctacacgctgccagcgggagccgactttctgatgtgctactctgtggctgaaggttactactcacaccgtgaaacggtcaacggcagctggtacatccaagacctgtgtgaaatgcttggaaagtacggtagctctctggagtttacggaacttcttactctggtcaaccggaaggtgtcccaacgtagggtcgatttctgtaaggatccttcagcgattggaaagaaacaagtcccatgtttcgcatcgatgttgaccaagaagttgcacttttttcctaaatccaacctcgaacaccaccatcatcaccatgtggagatcgacgggggttctcccatgtcgagtgcatccggacttagacgcggacatcccgctggaggtgaagaaaacatgactgagactgatgccttttacaaaagagagatgtttgaccctgcggaaaagtacaagatggaccatagacgccgtggcatcgccctcatctttaatcatgagcggttcttttggcacctcactcttcctgagagacggggaacttgtgcagatagagataatctgactaggcgattttcggacctggggttcgaggtgaagtgctttaacgatctgaaagcagaagagctgctccttaagatacatgaagtatcaaccgtcagccatgcagacgcagattgttttgtttgtgtctttctctcgcatggagaaggaaatcatatctacgcatacgatgccaaaatagaaattcagaccctgactggtcttttcaagggcgacaagtgccattcgttggtcggaaaacccaagatattcatcattcaggcatgcagagggaatcagcacgatgtgcctgtcatacctcttgatgtggtggac

SEQ ID NO: 83873 - DNA, 900 bp, Artificial Sequence
  derived and/or modified sequence
atggtggaaatcgacgctgctagcgtctacaccctgcccgctggcgccgattttcttatgtgttactctgtggctgagggctactacagccatcgggaaaccgtgaatgggtcatggtatatccaggacctctgcgagatgctgggcaaatacggctcttctctcgagtttactgaactcctgaccctggtgaaccggaaggtttcacagcgccgggtcgacttctgcaaggacccttccgccattggaaagaagcaggtgccgtgttttgcttctatgctgacaaagaagttgcatttcttcccaaaatccaacttggagcaccatcaccatcaccatgtggagatcgacggggggtctccaatgtcttccgccagtggactgcgtagggggcatccagcaggcggcgaggaaaacatgaccgagactgacgccttctataagcgagagatgttcgacccagccgagaagtacaagatggatcatcggcgaaggggcatcgctctgattttcaatcacgagcggttcttctggcatctcacactccctgaacgccgtgggacttgtgcagatagagataacctgactcgacgatttagcgatctggggtttgaagtgaaatgtttcaacgatctcaaggctgaagagctcctcctgaaaatccacgaggtctcgacagtgagccacgcagatgccgactgctttgtttgcgtttttctgtcccacggagagggcaatcacatttacgcttacgacgccaaaatcgaaatacagacactaactgggctctttaagggcgataagtgtcacagtctggtggggaagcctaagattttcattattcaggcctgcagaggtaaccaacatgacgtacctgtaattcccctggacgtggttgac

SEQ ID NO: 83874 - DNA, 900 bp, Artificial Sequence
  derived and/or modified sequence
atggtggagatcgatgccgcgtcagtttataccctaccagccggcgccgactttctgatgtgttacagcgttgccgaaggatactactcacacagagagacggttaacggaagttggtatatccaagacctctgcgagatgctcggaaagtatggcagctccttggagtttaccgaactcctaactctagtgaatagaaaagtcagccagcgccgcgtggatttttgcaaggatccgtccgcaatcggcaagaaacaggtgccctgtttcgcatctatgctcaccaaaaagcttcacttcttcccgaaatcaaatcttgagcatcaccaccatcaccacgttgagatagatgggggcagtcccatgtcgtccgcaagcggattaaggcggggacatcctgcgggaggtgaggaaaacatgacagaaaccgacgccttctataaaagggagatgttcgaccctgcagaaaaatacaaaatggatcatagacggagagggatcgcgctgattttcaaccacgaaaggtttttttggcacctgacactgccagaacgtcgtggcacatgtgccgatcgggataatctgacccgcaggtttagtgatctgggctttgaggttaagtgtttcaacgatctaaaggccgaggagctgctactgaagatccacgaagtctcgactgttagtcacgccgacgcagattgtttcgtgtgtgttttcttgagccatggcgaggggaaccacatttatgcctatgatgcgaagattgaaattcagacgttgactggtctatttaagggcgataagtgtcacagcctcgtgggaaagcccaaaatcttcattatacaggcatgccgtgggaaccagcacgacgtgcctgtcatacctctggatgttgtggac

SEQ ID NO: 83875 - DNA, 900 bp, Artificial Sequence
  derived and/or modified sequence
atggtggagatcgacgctgcgtccgtgtacactctgcccgcgggggcggattttctcatgtgctacagcgtcgcggaaggatactactcccaccgcgaaaccgttaatggctcatggtacatccaagatttgtgcgaaatgctcggcaagtacgggtcatccctggagtttaccgagttgttgactcttgtgaaccgcaaagtttcgcaaaggcgcgtcgacttttgcaaggatccttcggcgattggaaagaagcaggtcccgtgctttgcttcaatgctgaccaagaagctgcatttctttccgaagtccaatctcgagcatcaccaccaccaccatgtggaaatcgacgggggctccccgatgtcatcggctagcggactgcgccgtggtcacccagcggggggcgaggaaaacatgactgagactgatgccttttacaaaagagaaatgttcgacccagccgaaaagtacaagatggatcaccgccgccgcgggatcgccctgatcttcaaccacgaaagatttttctggcatcttaccctgcccgagcggcgcggcacctgcgcggacagagataatcttacgcgcagattctccgacctgggattcgaagtcaaatgtttcaacgatctcaaagccgaagaactccttctgaaaatccacgaggtgtcaaccgtctcgcatgccgacgcagattgtttcgtgtgcgtatttctgtcacatggagaaggaaatcacatctatgcctacgacgcgaagatcgaaatccagactttgacgggtctgttcaagggagataaatgtcattccctcgtcgggaagccgaagattttcattatccaggcttgccggggaaaccagcatgatgtccccgtgatccctctggatgtggtcgac

SEQ ID NO: 83876 - DNA, 900 bp, Artificial Sequence
  derived and/or modified sequence
atggtggaaatcgatgctgcctccgtctacaccctgcctgcaggtgcagacttccttatgtgctactcggtggctgaaggatactactcacacagagaaactgtcaacggttcgtggtacatccaggatctttgtgagatgctgggaaagtacggatcgtcgctggagttcacggaattgctgactctggtgaataggaaagtcagccagaggagagtggatttttgcaaagacccaagcgccattggcaagaagcaggtcccgtgcttcgcatcaatgctgactaagaaactgcatttctttccaaagtccaacttggagcaccaccatcaccaccatgtggaaattgacgggggatctccgatgtcgagcgcgagcggtctgagaagaggacatccggcaggaggagaagagaatatgactgaaactgatgccttctataagcgcgaaatgttcgaccctgcggagaagtacaagatggaccatcgacgccgcggaattgcgctgatcttcaaccatgaaaggttcttttggcacctcaccctgccggaacggagaggcacttgtgccgaccgggataaccttacgagaagattctcagacctgggttttgaggtgaagtgcttcaacgacctgaaggccgaggagctgcttctgaagatccatgaagtgtcaaccgtctctcatgcagacgcggattgctttgtctgcgtgttcctctcgcacggagagggaaatcatatctacgcctatgatgcgaagatcgagatccagaccctgaccggcctcttcaagggcgacaagtgccactcactggtgggcaaaccgaagatcttcatcatccaagcgtgccgaggcaaccaacacgacgtgcctgtgatcccgttggacgtcgtcgac

SEQ ID NO: 83877 - DNA, 900 bp, Artificial Sequence
  derived and/or modified sequence
atggtggaaattgacgcagcgtcagtgtatacgcttccagcaggggctgatttcctgatgtgttatagcgtcgcggaggggtactactcacatcgggaaaccgtgaacggttcttggtatattcaggatctgtgcgagatgctcggcaagtacgggagtagcctcgaattcaccgaactcctgactctcgtcaatagaaaggtgtctcagcggcgggtggacttctgtaaagatccttccgctatcggaaagaagcaggtcccgtgtttcgcaagcatgcttactaagaaattgcatttctttcccaagtctaaccttgaacatcaccatcatcatcatgtggaaatagatggaggatcccccatgagctcggcatcgggcctccgaagaggtcacccagctggcggtgaagaaaacatgacggaaaccgatgccttctataaacgggagatgtttgaccctgcagagaaatacaaaatggatcatagacgacgcggaatcgcactgattttcaatcacgagcgatttttctggcacctcaccctgccagagcggcgcggcacctgcgcggatagagataaccttacccgtaggttttcggacttgggatttgaagtgaagtgctttaatgacctgaaagcagaggaacttctgcttaagatccatgaagtctcgactgtgtcgcacgcagatgcggactgttttgtgtgtgtttttctgtcccatggggaaggtaaccacatctacgcctacgatgccaagattgagatccaaactctgactggtttgtttaaaggagacaagtgccattccctcgtgggtaagccgaagattttcatcatccaggcttgtcgtggaaaccagcacgatgtacctgtcatacctcttgacgtggtcgat

SEQ ID NO: 83878 - DNA, 900 bp, Artificial Sequence
  derived and/or modified sequence
atggttgagatagatgctgcgtccgtatataccctgcctgcgggggctgattttctgatgtgctatagtgtggctgaaggatactacagccatagagagaccgttaacgggtcatggtatatccaagacttatgcgagatgctggggaaatacgggtcatctctagaatttacagagttgttgacacttgtgaatcggaaggtgtcccagcgacgagtggatttctgcaaggatccaagcgcaattggaaagaaacaggtaccttgttttgcttccatgctcacgaagaagcttcatttttttcctaagtcaaaccttgaacatcatcaccaccaccatgtggaaattgacggcgggtcacccatgagctcggcctccggactgaggagaggccatcctgccggcggcgaggagaacatgaccgagactgatgcattttacaagagagagatgttcgatcccgccgagaaatacaagatggaccatagacggcgaggaattgctctgattttcaatcacgaacggtttttctggcacctgaccttgcccgagcgccgagggacttgcgccgaccgcgataatctcacaagacggttctcggaccttggttttgaagtcaaatgttttaacgatcttaaggccgaggaactcctgctgaaaatccacgaggttagtactgtttcacatgcagacgcggattgtttcgtgtgtgtgttccttagccatggtgagggaaaccacatctatgcttacgacgcaaaaatagaaatccagactctgaccggtctatttaaaggtgataaatgtcatagcttggtcggcaaaccaaaaattttcataatccaggcctgtcggggtaaccagcacgacgtgcctgttataccactggatgtggtggat

SEQ ID NO: 83879 - DNA, 900 bp, Artificial Sequence
  derived and/or modified sequence
atggttgagattgatgccgctagcgtgtatacactgcccgccggggccgattttctgatgtgttattcagttgctgaggggtactatagccatcgcgagaccgtcaatgggtcttggtacattcaggatctctgtgaaatgctgggtaagtacggctcatcactggagttcacagagctcctgaccttggtcaaccggaaagtcagtcaacgacgggtggacttctgtaaagaccctagcgcaatcggaaaaaagcaggttccttgcttcgcaagtatgctcactaagaagctccacttcttcccgaagagcaatctggagcaccaccaccatcaccatgtggagattgacggagggtcacccatgtcttcagccagtggtctcagaagaggacaccccgccggcggcgaggaaaacatgactgagaccgatgccttttacaagcgcgaaatgtttgacccggcagaaaaatacaaaatggaccaccggagaagaggaattgctcttatttttaatcatgaacggttcttctggcatctgaccttgccagagcgccggggtacgtgcgccgatcgggataatctgactcggcggttctctgacctaggattcgaggttaagtgcttcaacgacctgaaagcagaggagttgcttctgaagatccacgaagtgagcacggtgtcccacgctgatgccgattgctttgtgtgcgttttccttagtcacggagaagggaaccacatatatgcatacgacgcgaagatagagattcaaacactcactggcctgtttaagggggataagtgccactcactggttggcaaacctaaaatctttatcattcaggcttgtcgggggaatcagcacgacgttcccgtaatacccctggacgttgtggat

SEQ ID NO: 83880 - DNA, 900 bp, Artificial Sequence
  derived and/or modified sequence
atggttgaaatcgatgcggcatccgtctacactttgcctgcgggagccgacttcctgatgtgttacagcgtggcagagggctactattcgcatcgggaaaccgtgaacggaagctggtacattcaggacctgtgtgagatgttgggcaagtacggttcaagcctcgaattcacggagcttctgactctggtgaaccggaaagtctcccaacgtagagttgacttttgtaaggacccatcggcgattggtaagaagcaggtgccttgttttgcgtccatgcttaccaagaagctgcacttttttcctaagagcaacctggagcatcaccatcaccatcatgtggaaatcgatggtggttcgcctatgtcgtccgcatccgggctcagaagaggacatcctgcagggggtgaagagaatatgaccgaaaccgacgcattttacaagcgtgagatgtttgatcctgccgaaaagtacaagatggatcatagacgcagggggattgctttgatattcaatcacgaaaggtttttctggcatcttaccctgccagaacgaagaggaacttgcgccgatcgcgacaacctgactagaagattttcggacctgggatttgaggtcaagtgctttaatgatttgaaagcggaggaacttctcctcaaaattcacgaagtctccacggtgtcacatgcggatgcagattgtttcgtctgtgtgttcctgtcgcatggtgaagggaaccacatttacgcctacgacgcgaagattgaaatccaaaccttgactggtcttttcaagggagataaatgccactcactggtgggtaaacctaaaatcttcataatccaagcatgtcgtggtaatcaacatgatgtgcctgtgatccctcttgacgttgtggac

SEQ ID NO: 83881 - DNA, 900 bp, Artificial Sequence
  derived and/or modified sequence
atggtcgaaatcgacgccgcctccgtgtacactctgcccgctggtgctgattttctgatgtgttactcggtggcggagggatactacagccacagggaaaccgtgaacggctcttggtatatccaggatctgtgtgaaatgctgggaaagtacggctccagcctggagttcactgagctgcttaccctcgtgaaccggaaggtcagtcagcgccgcgttgacttctgcaaggacccttcagccatcggaaaaaagcaggtgccgtgcttcgcgtcaatgctcacgaaaaagctgcacttttttccgaagtccaatctggagcaccaccaccatcaccacgtggagattgacggaggcagccctatgtccagcgcgagcggattgcggagaggacatcctgcgggcggagaagagaacatgaccgaaaccgacgcgttctacaagagagaaatgttcgatccagctgagaaatacaagatggaccatcgtcgccggggaatcgcgctgatcttcaatcatgagcgcttcttctggcatctgactctgccagaaagacggggcacttgtgctgatagagacaacctcacccgccgcttttcggacctgggtttcgaggtcaaatgcttcaatgatctgaaagcggaagaacttctgcttaagatccacgaggtttccaccgtgtcccacgccgacgcggattgcttcgtgtgcgtgttcctgtcgcatggagagggcaaccacatttacgcctacgacgccaagatcgagatccaaacccttactgggctgtttaaaggcgacaagtgccacagcttggtcggaaagccgaagatcttcatcatccaggcgtgtcggggaaaccagcatgatgtgccagtgatcccgctcgatgtggtcgac

SEQ ID NO: 83882 - DNA, 900 bp, Artificial Sequence
  derived and/or modified sequence
atggtggaaatcgacgcggcaagcgtgtacaccctgcccgcaggcgccgactttttgatgtgctactcggttgccgaaggatactattcccatagggaaactgtgaacggctcgtggtatattcaggatctgtgtgaaatgctcggtaagtacgggtcgtccttggaattcaccgaacttctgaccctggtgaaccgaaaggtgagccaacgtcgggtggatttttgtaaagacccgtccgcaattggtaagaagcaagtgccatgtttcgcctccatgctgaccaaaaaactccactttttccctaagagcaacctggagcatcaccatcaccaccacgtggaaattgacgggggttcaccaatgtcgtcagcgtcaggcctgaggagaggccatccagccggaggcgaagaaaacatgactgagactgatgcattttacaagcgagagatgttcgacccagcagagaagtacaagatggatcacaggcggcgtggtattgcactcattttcaaccatgaacgctttttctggcaccttactctgccagaaaggagagggacttgtgctgacagagacaacctgacgagacggtttagcgatctgggttttgaagtcaaatgctttaatgaccttaaggccgaagaacttcttcttaagatccacgaagtctcaaccgtgtctcatgccgacgcagattgttttgtctgtgtgtttctgtcgcacggggagggaaaccacatatacgcctacgatgccaagattgagattcagactcttaccgggctctttaagggagacaagtgtcattccctggtgggaaaaccaaagatcttcattatccaggcatgtaggggtaaccaacacgacgtgcccgtgattcctcttgacgtggtggat

SEQ ID NO: 83883 - DNA, 900 bp, Artificial Sequence
  derived and/or modified sequence
atggtggagatcgatgcagcctcggtttacaccttgcctgccggcgctgacttcctgatgtgttactccgtggcagaaggctactactcacaccgagagaccgttaacggatcatggtacatccaggatttgtgtgagatgctgggcaaatacggatcaagtctcgaatttactgagcttctgacgctggtgaacagaaaggtctctcagaggcgtgtggatttctgcaaagatccatctgccatcgggaagaaacaggtgccatgtttcgcgtctatgcttactaagaaattgcatttcttccctaaatcaaatctggagcaccaccaccatcatcacgtagagattgatggcggcagccccatgtcaagcgccagtgggctccgtagaggccatcctgccggtggggaggaaaatatgaccgagaccgacgcgttttataagagggaaatgtttgacccagctgaaaaatacaagatggaccaccgtcgcagaggaattgccctgatcttcaatcacgagagattcttttggcacctcaccctgcctgagagacgcggaacctgtgccgatagagataatctgactcgtcggttctccgacctgggattcgaggtaaagtgttttaatgatctcaaggccgaggagctgttgctgaaaatacatgaggtgtccactgtttcacacgctgacgccgattgtttcgtgtgtgtgttcctctcccacggagaagggaaccacatctacgcctacgacgctaagattgagatccagaccctgactgggctgttcaagggggataaatgccacagtctcgtgggtaaacctaagatatttataatccaggcatgcaggggcaaccagcacgatgtccctgtcatccccctggacgtcgtggat

SEQ ID NO: 83884 - DNA, 900 bp, Artificial Sequence
  derived and/or modified sequence
atggttgaaattgatgctgcatcagtttatacattgcccgccggagccgacttcctcatgtgttatagcgtggcagaaggctactatagccatcgcgaaactgtgaatggaagctggtatattcaagatctatgtgaaatgctcggaaagtacgggtctagtctcgagttcaccgagctgctgaccttggtgaacaggaaggttagccaacggagggtagacttctgtaaggaccctagtgcgatcggtaagaaacaggtgccatgcttcgcctcaatgctgactaaaaagctacacttctttcctaagagcaacctcgagcaccaccaccatcatcatgtggaaatcgatggtggctctccaatgtcctcagcttctggcctccgaaggggccaccctgcaggaggtgaggaaaatatgacggaaaccgatgcattctacaagcgcgaaatgttcgatcctgcggaaaagtataagatggaccacaggaggcggggtatagccctcatattcaaccacgagcggttcttctggcacttgacgctgcctgaaagacgtgggacgtgtgccgatagggacaatctgactaggcggtttagcgatctgggattcgaggtaaagtgtttcaacgatctgaaggccgaggagttgttactaaagatacatgaggtttcaacagtgtcccacgcagatgcggactgctttgtgtgcgttttcctgtcccatggcgaaggaaaccacatttatgcatatgatgctaaaattgagattcaaacattaacgggactgtttaaaggcgacaagtgccactccctggtgggaaagccaaagattttcatcattcaagcgtgcagggggaatcagcatgatgtgccggtaatacccttggatgttgtcgac

SEQ ID NO: 83885 - DNA, 900 bp, Artificial Sequence
  derived and/or modified sequence
atggtggagatcgacgcggctagtgtgtacactctccctgcgggagccgactttctgatgtgctattccgtcgcagagggttactactcgcatcgagagaccgttaacggctcctggtacatccaagacttgtgtgagatgcttggtaagtacggcagcagtctcgagttcaccgagctcctgacccttgtaaaccgcaaagtgagtcaacggagagtggacttttgcaaggatccgagcgcaatcggcaaaaagcaggtcccatgcttcgccagtatgctgactaaaaagctgcatttcttcccaaagtccaacctggagcaccaccaccaccaccacgtcgaaatcgatggaggttcccccatgagctccgcttccggcctgcgccgaggtcacccggccggtggcgaggagaacatgactgagactgacgccttctacaaacgcgaaatgttcgatcccgccgagaaatataagatggatcaccgccgacgcggaatcgccctgatctttaaccacgaacgtttcttctggcacctgaccttgcctgagcgtcgggggacatgcgctgatcgggacaacttgacgcgccgcttcagcgacctcggcttcgaggtcaagtgcttcaacgacttgaaggccgaggagctcttgttaaagattcatgaagtgtctacggtatcccacgctgacgccgattgcttcgtctgcgtgtttctcagtcacggtgagggcaaccatatctacgcctacgatgcaaagattgagattcaaaccctcactggacttttcaaaggagataagtgccactcccttgttggcaagccaaagatcttcattattcaggcatgccgcggcaaccagcatgatgtgccggttatccctctcgacgtggtcgac

SEQ ID NO: 83886 - DNA, 900 bp, Artificial Sequence
  derived and/or modified sequence
atggtggaaatcgatgcagcatcagtgtacaccctccctgcaggtgcagattttctcatgtgttacagcgtcgctgagggctactattcccatagagaaaccgtgaacggttcctggtacatccaagatctctgcgaaatgctggggaagtacggatcgtcactggaatttaccgagcttctgaccctcgttaataggaaagtcagccaacgtcgggtggacttttgtaaagacccttctgctattggtaaaaagcaggtgccgtgctttgcctcgatgcttaccaagaagctccacttttttcctaaatcgaacctggagcatcatcaccaccatcatgtggaaatagacggcggatcaccgatgtcgtctgcctcaggtctgcgcagaggtcatccagcgggcggcgaagaaaacatgaccgaaaccgatgcgttctacaaaagggaaatgtttgaccctgcagaaaagtacaagatggaccatcggagacgcggtattgcacttatctttaatcatgagagatttttctggcacctgaccctccctgaacgcaggggtacctgtgcggatagagataacctgactagaagattcagcgatcttggatttgaggtgaagtgtttcaacgaccttaaggctgaagaactgttgctgaagatccatgaagtgagcacggttagccatgcagacgctgattgttttgtgtgcgtgttcctgtcccacggcgagggaaaccatatctacgcatacgatgcaaaaatcgaaatccagactcttaccgggctcttcaaaggagacaagtgtcattccctggtgggaaagcctaagatcttcataatacaggcatgcagaggtaatcagcacgatgtccccgtgattcctctggacgtggtcgac

SEQ ID NO: 83887 - DNA, 900 bp, Artificial Sequence
  derived and/or modified sequence
atggtagaaatcgacgcagcttcagtgtacacgttgcctgccggtgctgatttcctgatgtgctactcggtggcggagggatattactcacatagagaaaccgtcaatggatcttggtacatccaggacctctgcgaaatgctgggaaagtacggtagcagcctcgaatttaccgaactcctcacgttggttaaccgcaaagtgtcccaacggcgcgtggatttttgcaaagacccgtccgccatcggaaaaaagcaagtcccgtgcttcgcttccatgctgactaagaaactgcatttctttcccaagtctaatttggagcatcatcaccaccatcatgtcgaaatcgatgggggatcgccgatgtcgagcgcatcgggactccggcgcggtcacccggccgggggagaagagaatatgaccgaaaccgatgcattttacaagcgggaaatgttcgatcctgcggaaaagtacaagatggaccatcggcggaggggcatcgcactgatcttcaaccacgagagattcttctggcacctcactctgcctgaacgacggggaacttgcgccgaccgagacaacctcacccggaggttctccgatctgggtttcgaggtcaagtgtttcaatgacctcaaagcagaagagttgctgctgaaaatccacgaagtgtcaactgtgtcgcacgcggatgccgactgtttcgtgtgtgtgttcctctcacacggagaaggaaaccatatctacgcttacgacgcaaagatcgagatccagacgctgaccggactgtttaaaggagacaaatgccactcgttggtcggcaagccaaagattttcattatccaggcgtgccgaggcaatcagcatgacgtgccggtgatcccattggatgtggttgat

SEQ ID NO: 83888 - DNA, 900 bp, Artificial Sequence
  derived and/or modified sequence
atggtagaaatcgacgcagcgtcggtttacactttgccagccggagctgacttcctgatgtgctactccgttgctgaaggttactactcacaccgggaaaccgtgaacggatcatggtacatccaggacctgtgtgagatgttgggaaagtacggatcgagcctcgagtttacggaactgttgaccctggtcaatagaaaagtctcgcaaaggcgcgtggacttctgcaaggatccttcggctattggaaagaagcaggtcccgtgcttcgcatccatgctgaccaagaagttgcatttctttcccaaatcaaatctggagcaccatcaccaccaccatgtggaaatcgacggtggatcccctatgagctccgcctccggactgcgccgcggccacccagcgggaggagaggaaaacatgaccgagactgacgcgttctacaaacgggaaatgttcgatccggcagagaagtataagatggaccataggcgccgaggaatcgcgttgattttcaatcatgagcggttcttttggcaccttaccttgccggaaaggcgcggtacttgcgcggatcgggacaacctgactagaagattctcagatctggggtttgaggtgaagtgtttcaacgacctgaaggccgaagaattgctgttgaaaatccacgaggtgtccaccgtgtcgcatgcggacgccgactgctttgtgtgcgtgttcttgtcccacggtgaagggaaccatatctacgcatatgacgccaagatcgagatccagactctcacgggactcttcaaaggagacaagtgtcatagcctggtcggtaaaccgaagatcttcattatccaggcttgccggggaaatcaacatgatgtcccggtgatcccactcgatgtggtggac

SEQ ID NO: 83889 - DNA, 900 bp, Artificial Sequence
  derived and/or modified sequence
atggtggaaatagacgctgcctccgtttataccttgccagctggtgcagactttctgatgtgttattctgtggcagaaggctactactctcaccgggaaaccgtgaacgggtcttggtacattcaggacttatgcgaaatgttagggaaatacgggtcttcccttgaattcacagaactcttaacactggtcaacagaaaggtcagccagcgccgcgtggacttttgtaaggacccttccgctatagggaagaagcaggtgccttgttttgcatctatgctgacaaagaaactgcatttcttcccaaagagcaacctggagcaccatcatcatcaccatgttgaaattgacggcggcagccccatgagtagcgcatccggattaaggcggggccatccagccgggggagaagaaaatatgacagaaactgatgccttttataagcgggagatgtttgatcccgcagaaaaatataagatggatcaccgccgacggggcattgccctcatattcaatcatgaaaggtttttttggcatttaactctcccagaaagacgtggcacttgcgctgatcgggacaaccttacaaggcgattctccgacctgggcttcgaggtcaagtgctttaatgatctgaaagccgaggagctcctgctgaagattcacgaagtgtcaaccgtgagtcacgccgatgccgattgcttcgtgtgcgtttttctgtcacatggcgagggcaaccacatctatgcttacgatgccaaaatcgaaattcagactctgaccgggctgtttaagggggacaaatgtcactccctcgtgggcaagcccaagatcttcatcattcaggcctgtcgtgggaaccagcacgacgttcctgttatccctcttgacgtcgtggac

SEQ ID NO: 83890 - DNA, 900 bp, Artificial Sequence
  derived and/or modified sequence
atggttgaaatcgacgccgcttccgtgtacactctcccggccggagctgacttcctgatgtgttactccgttgccgaagggtattactcccatcgcgaaactgtgaatggctcctggtatatccaagacctttgcgagatgctcggaaagtacggatcatctctggagttcactgaactgctgacgctcgtgaatcggaaggtgtcgcagcggcgagtcgatttctgcaaggatccgtccgcaattggcaaaaaacaggtcccctgttttgcgtctatgctgaccaagaaactccacttctttcccaaatccaatctggaacaccaccaccaccatcatgtggaaatagacggtggttcgccgatgtcgagcgcctcgggtcttagaaggggacacccagcgggcggagaggaaaacatgacggagactgacgccttttacaagcgggaaatgttcgacccagccgagaagtacaaaatggaccatcggagaagaggaatcgccctgatcttcaatcatgagcgctttttctggcacctcaccctgccagagcgccgcggcacctgcgcggatcgggataacctcacccgccgcttttccgacctgggattcgaagtgaagtgcttcaacgatctgaaagcagaagaattgctgctcaaaatccatgaggtgtcgaccgtttcgcacgcggacgctgattgctttgtctgcgtgttcctgagccacggggaggggaaccatatctacgcttatgatgccaagatcgagatccagactctgactggactgttcaagggggacaagtgccactcactggtgggcaagcctaagatcttcatcatccaggcatgccgcggaaaccaacacgatgtcccagtgatcccacttgatgtcgtggac

SEQ ID NO: 83891 - DNA, 900 bp, Artificial Sequence
  derived and/or modified sequence
atggtcgagattgatgcagcatctgtgtacactttgccagccggggcagattttcttatgtgttactctgtggccgaaggctactactcccatagagaaaccgtaaacggctcctggtacatacaggacctctgtgaaatgctgggaaagtacggctcttcactggagtttaccgagctgctgacgctggttaatcggaaagtgtctcagaggcgggtcgacttctgcaaggaccctagcgcaatcggaaagaagcaggtcccttgcttcgcctccatgctgacgaagaaacttcatttcttcccgaagagtaacctcgagcatcatcaccatcatcacgtggagattgatggcgggagcccaatgtcctcagctagcggcctgaggcggggacaccccgctggtggagaggagaatatgacagaaaccgacgccttctataaaagagagatgtttgatcctgccgagaagtacaagatggaccaccggcgacgagggatcgccctcatttttaatcatgaacggttcttctggcatctgactttgccggaacggcgggggacctgtgctgatagagataatctgacccgccggttctctgacctgggttttgaggttaagtgctttaatgatctgaaagcagaggagctcctgctgaaaatccatgaggtcagtactgtgagccacgcggacgctgattgctttgtgtgcgtgttcttgagccacggagaaggcaaccacatctatgcgtacgacgcaaagatagaaatccagaccctgactggactgttcaagggcgacaagtgccatagcctggtgggaaaaccaaaaatttttatcatccaggcctgtagggggaaccagcacgatgtgccagtcattccccttgacgtggtagac

SEQ ID NO: 83892 - DNA, 900 bp, Artificial Sequence
  derived and/or modified sequence
atggttgagattgacgccgctagtgtctacaccttgcctgctggggccgattttttgatgtgttacagcgttgccgaagggtactacagtcatcgggagacagtgaatgggtcctggtacatccaggatctctgcgagatgctcggaaaatatggatctagcctcgagtttaccgagctactgactctggtcaaccgtaaggtttctcaacgtcgagtcgatttctgcaaagacccttccgctatcggaaaaaagcaggtcccatgctttgcctccatgctcactaaaaagctgcacttcttccctaagtccaatttggaacaccatcatcatcatcatgttgagattgacggtggctctcctatgtccagtgcctcaggtttgagaagagggcaccctgctggcggcgaagaaaatatgaccgagactgatgcattctacaagcgggagatgtttgatcccgctgagaagtataagatggaccacagaaggcgaggcatcgccctgatatttaaccacgagcgcttcttctggcatcttaccctccccgagaggagagggacttgcgcagaccgggataacctgaccagaaggttttctgatctcggcttcgaagtaaaatgctttaatgatcttaaggcggaagaattactcttgaaaatccatgaggtgtcaaccgttagtcacgccgacgctgactgctttgtgtgtgtgttcttatcccacggcgaaggcaatcatatctatgcatacgacgcgaagatcgagatccagacattgacgggcctgttcaaaggtgacaagtgtcattccctcgttggcaaaccaaaaatcttcattattcaagcctgtagagggaaccaacatgatgtccccgtcattcctctggacgttgtggat

SEQ ID NO: 83893 - DNA, 900 bp, Artificial Sequence
  derived and/or modified sequence
atggtggaaattgatgctgcatcagtttatacattaccagctggagcagatttcttaatgtgttattctgtggcagaaggttactattctcatagagaaaccgttaacggatcatggtatatacaagatttatgtgaaatgttaggaaaatatggatcttctcttgaatttactgaactccttacacttgtcaacagaaaagttagtcaaaggagagttgatttctgtaaagatccttcagctattggtaaaaagcaagttccatgtttcgcaagtatgttaactaaaaaattacattttttcccaaaaagtaatttagaacatcaccatcaccatcatgttgaaattgatggtggatcaccaatgtcatctgcaagtggacttagaagaggacatcctgcaggaggagaagaaaatatgacagaaacagacgcattttataaaagagaaatgtttgatccagctgaaaaatataagatggatcatagaagaagaggtattgcattaatttttaatcatgaaagatttttttggcatttaacattaccagaaaggagaggaacatgtgctgatagagataatttaactagaagattctcagatttaggatttgaagttaaatgttttaatgatttaaaagcagaggaattacttttaaaaattcatgaagtttcaacagtatcacatgcagatgcagattgtttcgtttgtgtttttttatcacatggagaaggaaatcatatatatgcatatgatgcaaagatagaaattcaaactttaactggtttatttaagggagacaaatgtcattctttggtaggtaaaccaaaaattttcattatacaggcttgtagaggaaatcaacatgatgttcctgtcattcctttagatgtagttgat

SEQ ID NO: 83894 - DNA, 900 bp, Artificial Sequence
  derived and/or modified sequence
atggtggagatcgacgcggcgtcagtctacactctcccagcaggtgcggacttccttatgtgctactcagtcgctgagggctactattcgcatcgggaaaccgtgaacggatcgtggtacatccaagacctctgcgaaatgctcggaaagtacggcagctccctggaattcacggaactcctgactctcgttaaccgtaaggtcagccagcgccgggtggacttttgtaaagatccttcagcgatcggaaaaaagcaggtgccatgcttcgcatcgatgctgacgaagaagctgcatttcttcccgaaatcgaatctggagcaccaccatcaccatcacgttgagattgatggcgggtcaccgatgagctccgcctcggggctccggcgcggacacccagctggcggagaagagaatatgaccgagactgatgccttctataagcgcgaaatgttcgaccctgccgagaaatacaaaatggaccacaggagacgggggatcgcccttatctttaatcatgagcgcttcttctggcacctcaccttgcctgaacggcggggtacttgtgccgatcgcgataacctgactagacggttctccgacctcggatttgaagtgaagtgtttcaacgatctcaaggccgaagaactcctgctgaaaatccacgaagtctccaccgtgtcccacgccgacgcggactgcttcgtctgtgtgttcctgagccacggggagggaaaccacatttacgcttacgacgccaaaattgaaatccaaaccttgaccggcctctttaagggcgataagtgccactcactggttggaaagccgaagatctttatcatacaggcatgccgggggaaccagcatgatgttccagtgatcccgttggacgtggtcgac

SEQ ID NO: 83895 - DNA, 900 bp, Artificial Sequence
  derived and/or modified sequence
atggtcgaaatcgacgctgcctccgtttacactttgcccgctggcgctgatttcctgatgtgttactcagtcgctgaaggatactattcacaccgtgaaactgttaacggtagttggtatattcaggacctttgcgagatgctgggcaagtatggttcaagcctggagttcactgaattgctgaccttggtgaaccgcaaggtatctcagcgtcgcgtagacttctgtaaggacccctccgcaatcggaaagaagcaagtgccctgttttgctagtatgctcacaaagaagctccatttctttcccaaatccaatctcgaacatcaccaccaccaccacgtagaaatcgatggaggatctcctatgtcctctgcctccggactcagacgcggtcacccagccggcggtgaagagaatatgactgaaaccgacgccttctacaagagagaaatgttcgacccagccgagaagtacaagatggatcatagaagacgcggcattgctttgatttttaaccacgagcgcttcttttggcaccttacactgcccgagcgcagaggaacttgcgctgacagggataacctcacaaggcgctttagtgacttgggttttgaggtcaagtgcttcaatgacctgaaggccgaggagctgctgttgaagatacacgaagtgtcaactgtctcacatgccgatgcagattgcttcgtgtgcgtctttttgtctcacggagaaggtaaccacatttacgcctacgacgctaaaatcgagattcaaactctcacaggtctctttaagggtgataagtgccattcactcgtgggaaagcctaagatcttcattatccaggcttgccgtggcaaccaacacgacgtccccgtgatccctcttgatgtcgtcgac

SEQ ID NO: 83896 - DNA, 900 bp, Artificial Sequence
  derived and/or modified sequence
atggtggagatagacgccgcttccgtgtatactctccccgcaggagccgattttttgatgtgctatagtgtggctgaggggtattactctcaccgcgaaacggtgaatggatcctggtacattcaagatctctgtgagatgctgggaaagtatggctccagtcttgaattcacggaactcttgactttggtgaaccgcaaggtgagccagagaagggtagacttttgcaaggatccttccgcgatcggcaagaagcaggtaccttgcttcgctagcatgctaacaaagaagctgcacttctttcccaaatccaacctggaacatcaccaccatcaccatgtggagatcgacggcggcagccctatgtcgagcgcttccggcctaaggcgtggacatcccgcaggaggtgaggaaaatatgacggagaccgatgcattctataagcgagagatgtttgatccagcagaaaaatacaaaatggaccatagaaggagaggaattgccctcatcttcaatcatgaacgctttttttggcacctgaccctgcctgaacgaagagggacctgtgccgatcgggacaaccttactaggcgattttctgacctgggatttgaggttaaatgctttaacgacctaaaagcagaagaactcttgttaaaaatccatgaagtatctaccgtaagccatgctgacgcagactgttttgtgtgtgtcttcctctctcacggtgagggaaatcatatttacgcctatgatgccaagatagagatccaaacactgactggactatttaagggcgataaatgtcatagtctggtgggtaagcctaagatctttattatccaggcctgccgggggaatcaacatgacgtccctgtcattccgttggatgtcgttgat

SEQ ID NO: 83897 - DNA, 900 bp, Artificial Sequence
  derived and/or modified sequence
atggttgagatagacgccgccagcgtatatactctgcccgctggcgccgatttcttgatgtgctactctgtggccgaaggatactatagccatcgagagactgtcaacggctcatggtacattcaggatttatgtgagatgctggggaaatacgggagcagcctggaatttaccgaactgctgactctggtgaaccgtaaggtgtcccagcgacgggtagatttctgcaaagatccctccgcgattggcaagaaacaagtgccatgctttgcatcgatgctcaccaagaagttgcatttctttcccaaatccaacttggaacatcaccaccaccatcatgtggaaattgatgggggttccccgatgtccagcgcttctggtctgcgacgaggccatcccgcagggggcgaagaaaatatgaccgagacagacgccttctacaaaagggaaatgtttgatcctgctgaaaagtataaaatggaccatcggcggcgaggaattgcgctaatttttaatcacgaacggtttttttggcacctgaccctccctgagagaagaggtacatgcgcagatcgcgataaccttacccgtcgctttagtgatttgggatttgaggtcaaatgctttaatgatttgaaagctgaggagctgcttctcaaaatccacgaggtgtccactgtgtcacacgctgatgcagattgttttgtctgcgtattcctcagtcacggcgaaggaaaccacatatatgcctatgacgcaaagatagaaattcagaccctgacgggtctgttcaaaggcgataagtgccactccctcgtaggcaagccaaagatatttattatccaggcatgcagaggcaaccagcacgacgtaccagtgatccctttagacgtggtggat

SEQ ID NO: 83898 - DNA, 900 bp, Artificial Sequence
  derived and/or modified sequence
atggtggagatagacgccgcctccgtgtatactttacccgccggcgctgattttcttatgtgctattcggtcgccgaaggctattattctcaccgggaaacagtgaacggctcatggtacatccaggacctttgcgaaatgctcggcaagtacggcagctctttagagttcactgagctgctgacccttgtgaatcggaaggtttcacagcgtagagtagacttctgcaaagatccttctgctatagggaagaaacaggtaccatgcttcgcgtctatgttgaccaagaagctgcactttttccctaagtctaatctcgagcaccaccaccatcatcatgtagaaattgatggcggttctcccatgtcttcagcctcaggccttcgccgagggcacccagctggtggagaggaaaatatgacagaaactgatgccttctacaagcgtgagatgttcgacccagcagaaaagtataaaatggaccaccgacggcgaggtatcgcgttaatttttaatcacgagaggttcttttggcacctcacactccctgagaggcgcgggacctgcgcggaccgcgacaatctaactcggcgattctccgaccttggatttgaggttaaatgcttcaacgatttaaaagccgaggagcttctactcaaaatccacgaggtttctactgtttctcacgccgatgctgactgttttgtgtgtgtcttcctgagtcatggcgagggaaatcatatctacgcctacgatgccaagatcgagatccagactctaacgggcttgttcaagggggacaaatgccatagtcttgtgggcaagccgaagatcttcattatccaggcttgcagggggaaccagcacgacgtgccagtgattccgctggatgtggtcgac

SEQ ID NO: 83899 - DNA, 1548 bp, Artificial Sequence
  derived and/or modified sequence
ccgagggcggggccgggcccgggagcctgtggcttcaggaagaggagggcaaggtgtctggctgcgcgtttggctgcaatgagctcggcctcggggctccgcagggggcacccggcaggtggggaagaaaacatgacagaaacagatgccttctataaaagagaaatgtttgatccggcagaaaagtacaaaatggaccacaggaggagaggaattgctttaatcttcaatcatgagaggttcttttggcacttaacactgccagaaaggcggggcacctgcgcagatagagacaatcttacccgcaggttttcagatctaggatttgaagtgaaatgctttaatgatcttaaagcagaagaactactgctcaaaattcatgaggtgtcaactgttagccacgcagatgccgattgctttgtgtgtgtcttcctgagccatggcgaaggcaatcacatttatgcatatgatgctaaaatcgaaattcagacattaactggcttgttcaaaggagacaagtgtcacagcctggttggaaaacccaagatatttatcattcaggcatgtcggggaaaccagcacgatgtgccagtcattcctttggatgtagtagataatcagacagagaagttggacaccaacataactgaggtggatgcagcctccgtttacacgctgcctgctggagctgacttcctcatgtgttactctgttgcagaaggatattattctcaccgggaaactgtgaacggctcatggtacattcaagatttgtgtgagatgttgggaaaatatggctcctccttagagttcacagaactcctcacactggtgaacaggaaagtttctcagcgccgagtggacttttgcaaagacccaagtgcaattggaaagaagcaggttccctgttttgcctcaatgctaactaaaaagctgcatttctttccaaaatctaattaattaatagaggctatctaattttacactctgtattgaaaatggctttctcagccaggcgtggttactcacacctgtaatcccagcactttgggagtccaaggtgggcggatcacctgaggtcgggagttcgagaccagcctgaccaacatggagaagccccgtctctactaaaaatgcaaaaaaaaatttagctaggcatggcggcgcatgcctgcaatcccagctacttggaaggctgaggcaggagaatcacttgaacccaggaggtggaggctgcggtgagccgagattgcgccattgcactccagcctgggcaacgagtgaaactccgtctcaaaaaaaagaaaatgtctttctcttccttttatataaatatcgttagggtgaagcattatggtctaatgattcaaatgttttaaagtttaatgcctagcagagaactgccttaaaaaaaaaaaaaaaaagttcatgttggccatggtgaaagggtttgatatggagaaacaaaatcctcaggaaattagataaataaaaatttataagcatttgtattattttttaataaactgcagggttacacaaaaatct

SEQ ID NO: 83900 - DNA, 882 bp, Artificial Sequence
  derived and/or modified sequence
atgagcagcgccagcggcctgagaagaggccaccccgccggcggcgaggagaacatgaccgagaccgacgccttctacaagagagagatgttcgaccccgccgagaagtacaagatggaccacagaagaagaggcatcgccctgatcttcaaccacgagagattcttctggcacctgaccctgcccgagagaagaggcacctgcgccgacagagacaacctgaccagaagattcagcgacctgggcttcgaggtgaagtgcttcaacgacctgaaggccgaggagctgctgctgaagatccacgaggtgagcaccgtgagccacgccgacgccgactgcttcgtgtgcgtgttcctgagccacggcgagggcaaccacatctacgcctacgacgccaagatcgagatccagaccctgaccggcctgttcaagggcgacaagtgccacagcctggtgggcaagcccaagatcttcatcatccaggcctgcagaggcaaccagcacgacgtgcccgtgatccccctggacgtggtggacaaccagaccgagaagctggacaccaacatcaccgaggtggacgccgccagcgtgtacaccctgcccgccggcgccgacttcctgatgtgctacagcgtggccgagggctactacagccacagagagaccgtgaacggcagctggtacatccaggacctgtgcgagatgctgggcaagtacggcagcagcctggagttcaccgagctgctgaccctggtgaacagaaaggtgagccagagaagagtggacttctgcaaggaccccagcgccatcggcaagaagcaggtgccctgcttcgccagcatgctgaccaagaagctgcacttcttccccaagagcaactag

SEQ ID NO: 83901 - DNA, 900 bp, Artificial Sequence
  derived and/or modified sequence
atggtggagatcgacgccgccagcgtgtacaccctgcccgccggcgccgacttcctgatgtgctacagcgtggccgagggctactacagccaccgcgagaccgtgaacggcagctggtacatccaggacctgtgcgagatgctgggcaagtacggcagcagcctggagttcaccgagctgctgaccctggtgaaccgcaaggtgagccagcgccgcgtggacttctgcaaggaccccagcgccatcggcaagaagcaggtgccctgcttcgccagcatgctgaccaagaagctgcacttcttccccaagagcaacctggagcaccaccaccaccaccacgtggagatcgacggcggcagccccatgagcagcgccagcggcctgcgccgcggccaccccgccggcggcgaggagaacatgaccgagaccgacgccttctacaagcgcgagatgttcgaccccgccgagaagtacaagatggaccaccgccgccgcggcatcgccctgatcttcaaccacgagcgcttcttctggcacctgaccctgcccgagcgccgcggcacctgcgccgaccgcgacaacctgacccgccgcttcagcgacctgggcttcgaggtgaagtgcttcaacgacctgaaggccgaggagctgctgctgaagatccacgaggtgagcaccgtgagccacgccgacgccgactgcttcgtgtgcgtgttcctgagccacggcgagggcaaccacatctacgcctacgacgccaagatcgagatccagaccctgaccggcctgttcaagggcgacaagtgccacagcctggtgggcaagcccaagatcttcatcatccaggcctgccgcggcaaccagcacgacgtgcccgtgatccccctggacgtggtggac

SEQ ID NO: 83902 - DNA, 1089 bp, Artificial Sequence
  derived and/or modified sequence
taatacgactcactatagggaaataagagagaaaagaagagtaagaagaaatataagagccaccatggtagaaatagatgcagcctccgtttacacgctgcctgctggagctgacttcctcatgtgttactctgttgcagaaggatattattctcaccgggaaactgtgaacggctcatggtacattcaagatttgtgtgagatgttgggaaaatatggctcctccttagagttcacagaactcctcacactggtgaacaggaaagtttctcagcgccgagtggacttttgcaaagacccaagtgcaattggaaagaagcaggttccctgttttgcctcaatgctaactaaaaagctgcatttctttccaaaatctaatctcgagcaccaccaccaccaccacgttgaaattgatgggggatcccccatgagctcggcctcggggctccgcagggggcacccggcaggtggggaagaaaacatgacagaaacagatgccttctataaaagagaaatgtttgatccggcagaaaagtacaaaatggaccacaggaggagaggaattgctttaatcttcaatcatgagaggttcttttggcacttaacactgccagaaaggcggggcacctgcgcagatagagacaatcttacccgcaggttttcagatctaggatttgaagtgaaatgctttaatgatcttaaagcagaagaactactgctcaaaattcatgaggtgtcaactgttagccacgcagatgccgattgctttgtgtgtgtcttcctgagccatggcgaaggcaatcacatttatgcatatgatgctaaaatcgaaattcagacattaactggcttgttcaaaggagacaagtgtcacagcctggttggaaaacccaagatatttatcatccaggcatgtcggggaaaccagcacgatgtgccagtcattcctttggatgtagtagattgataataggctggagcctcggtggccatgcttcttgccccttgggcctccccccagcccctcctccccttcctgcacccgtacccccgtggtctttgaataaagtctgagtgggcggctctaga

SEQ ID NO: 83903 - DNA, 1066 bp, Artificial Sequence
  derived and/or modified sequence
gggaaataagagagaaaagaagagtaagaagaaatataagagccaccatggtagaaatagatgcagcctccgtttacacgctgcctgctggagctgacttcctcatgtgttactctgttgcagaaggatattattctcaccgggaaactgtgaacggctcatggtacattcaagatttgtgtgagatgttgggaaaatatggctcctccttagagttcacagaactcctcacactggtgaacaggaaagtttctcagcgccgagtggacttttgcaaagacccaagtgcaattggaaagaagcaggttccctgttttgcctcaatgctaactaaaaagctgcatttctttccaaaatctaatctcgagcaccaccaccaccaccacgttgaaattgatgggggatcccccatgagctcggcctcggggctccgcagggggcacccggcaggtggggaagaaaacatgacagaaacagatgccttctataaaagagaaatgtttgatccggcagaaaagtacaaaatggaccacaggaggagaggaattgctttaatcttcaatcatgagaggttcttttggcacttaacactgccagaaaggcggggcacctgcgcagatagagacaatcttacccgcaggttttcagatctaggatttgaagtgaaatgctttaatgatcttaaagcagaagaactactgctcaaaattcatgaggtgtcaactgttagccacgcagatgccgattgctttgtgtgtgtcttcctgagccatggcgaaggcaatcacatttatgcatatgatgctaaaatcgaaattcagacattaactggcttgttcaaaggagacaagtgtcacagcctggttggaaaacccaagatatttatcatccaggcatgtcggggaaaccagcacgatgtgccagtcattcctttggatgtagtagattgataataggctggagcctcggtggccatgcttcttgccccttgggcctccccccagcccctcctccccttcctgcacccgtacccccgtggtctttgaataaagtctgagtgggcggc

SEQ ID NO: 83904 - protein, 303 aa, Artificial Sequence
  derived and/or modified sequence
MADDQGCIEEQGVEDSANEDSVDAKPDRSSFVPSLFSKKKKNVTMRSIKTTRDRVPTYQYNMNFEKLGKCIIINNKNFDKVTGMGVRNGTDKDAEALFKCFRSLGFDVIVYNDCSCAKMQDLLKKASEEDHTNAACFACILLSHGEENVIYGKDGVTPIKDLTAHFRGDRCKTLLEKPKLFFIQACRGTELDDGIQADSGPINDTDANPRYKIPVEADFLFAYSTVPGYYSWRSPGRGSWFVQALCSILEEHGKDLEIMQILTRVNDRVARHFESQSDDPHFHEKKQIPCVVSMLTKELYFSQ

SEQ ID NO: 83905 - protein, 222 aa, Artificial Sequence
  derived and/or modified sequence
MADDQGCIEEQGVEDSANEDSVDAKPDRSSFVPSLFSKKKKNVTMRSIKTTRDRVPTYQYNMNFEKLGKCIIINNKNFDKVTGMGVRNGTDKDAEALFKCFRSLGFDVIVYNDCSCAKMQDLLKKASEEDHTNAACFACILLSHGEENVIYGKDGVTPIKDLTAHFRGDRCKTLLEKPKLFFIQACRGTELDDGIQADSGPINDTDANPRYKIPVEADFLFA

SEQ ID NO: 83906 - protein, 264 aa, Artificial Sequence
  derived and/or modified sequence
MADDQGCIEEQGVEDSANEDSVDAKPDRSSFVPSLFSKKKKNVTMRSIKTTRDRVPTYQYNMNFEKLGKCIIINNKNFDKVTGMGVRNGTDKDAEALFKCFRSLGFDVIVYNDCSCAKMQDLLKKASEEDHTNAACFACILFFIQACRGTELDDGIQADSGPINDTDANPRYKIPVEADFLFAYSTVPGYYSWRSPGRGSWFVQALCSILEEHGKDLEIMQILTRVNDRVARHFESQSDDPHFHEKKQIPCVVSMLTKELYFSQ

SEQ ID NO: 83907 - DNA, 912 bp, Artificial Sequence
  derived and/or modified sequence
atggcagatgatcaaggatgcattgaagaacagggagtcgaggatagcgccaacgaagattcagtggacgccaaacctgataggtcatctttcgtgccctccttatttagcaagaagaaaaaaaacgtcaccatgaggagcatcaagacgaccagggaccgcgtgcccacctaccagtacaacatgaactttgaaaagctcgggaaatgcatcatcatcaataataaaaactttgataaggtcacaggaatgggggtcaggaacggcactgacaaggatgcggaggcactcttcaagtgtttcagatcccttggtttcgacgtcatagtatataacgactgcagctgtgcaaaaatgcaggacctgctgaagaaggccagtgaggaagaccacaccaatgcggcatgcttcgcctgcatcctcctgtcccacggggaggaaaacgtcatttacggaaaagatggggtgactccaatcaaagatctgaccgctcacttccggggagacaggtgcaaaaccttactagaaaagcccaagctgttcttcatccaggcatgcaggggcacagaactggatgacgggattcaagccgatagcggccccataaatgacaccgacgctaacccacgttacaaaatccctgttgaagccgatttcctgtttgcctatagtactgtgccaggttactatagctggcgtagtccgggacggggatcctggtttgtccaggccttgtgctccattttggaggagcatggcaaggacctggaaatcatgcagatcctaacacgggtgaatgatcgagtggcgagacactttgagagccagtcagacgatccccatttccacgaaaaaaaacagattccctgcgtggtgtccatgctgacaaaagagctttacttttcccagtag

SEQ ID NO: 83908 - DNA, 912 bp, Artificial Sequence
  derived and/or modified sequence
atggctgatgatcagggttgtatcgaggagcagggagtagaggactctgccaacgaagactctgtggacgcgaaacctgaccggtccagcttcgttccatcacttttttctaaaaaaaaaaaaaatgtgacaatgcgtagcataaaaacaacccgcgatagagtgcctacctaccagtacaatatgaatttcgagaaattgggtaagtgcatcatcattaacaacaaaaattttgataaagtgaccgggatgggagtgcggaatgggactgataaggacgcagaggccctttttaagtgcttccggtctcttggcttcgacgtgatagtgtacaacgactgctcttgcgccaaaatgcaggacttgctgaagaaagcaagtgaggaggatcataccaacgccgcctgtttcgcctgcatcctactgagtcatggagaagaaaatgttatctatggaaaggatggagtgaccccgatcaaagatctcactgcccatttccgaggtgatcgatgtaagaccctgctggagaagccgaagctgttcttcattcaggcatgtaggggcacagaactggatgatggcattcaagcggacagtgggcccatcaacgatactgatgccaatcctcggtataaaatccctgtggaagctgacttcttatttgcctactccacggtccctggctactacagctggcggagccctggtcgtgggagctggttcgtgcaggctctgtgttcaattttggaagaacacgggaaagacctcgagatcatgcagattctcacaagagtgaatgaccgggtcgcccggcactttgaatcccagtcggacgacccacacttccacgaaaagaaacagattccatgcgttgttagtatgctgaccaaggagctttacttttctcagtag

SEQ ID NO: 83909 - DNA, 912 bp, Artificial Sequence
  derived and/or modified sequence
atggccgatgatcagggatgtattgaggagcaaggagtcgaagactccgcaaacgaggacagcgtcgacgctaagcctgacagatccagcttcgtgccctccctgttctcaaaaaaaaagaagaatgttaccatgcgaagtatcaaaacaacacgggatcgtgttcctacttaccaatacaatatgaattttgagaaactgggaaaatgcatcattattaataacaaaaacttcgataaagttacaggcatgggagtcagaaatgggaccgacaaagacgctgaagcgctctttaagtgcttccggtcactaggcttcgacgtcatagtgtataacgactgcagctgtgccaaaatgcaggacctgcttaagaaggcaagcgaggaagaccacacgaatgccgcctgctttgcctgcatactccttagccatggggaggagaacgtgatctacggaaaggacggcgtgactcctatcaaagacctgacagcccactttcgtggggatagatgcaagactttactggagaagcccaaactgttttttatccaggcttgcagaggcactgagttggacgacgggatccaagcagatagcggaccaattaatgatactgacgccaatcctaggtataagatcccagttgaggcggacttcttgtttgcatacagcacagtgcccggctactactcatggaggtcacctggccgtggatcctggttcgtccaggctttgtgctctatccttgaggagcatggtaaggatctggagattatgcagattctgactcgtgtcaatgatcgtgtcgctcgccattttgaatctcagtccgacgatccccacttccatgaaaagaagcagattccctgtgtcgtatccatgttgacaaaagaactttacttctcccagtag

SEQ ID NO: 83910 - DNA, 669 bp, Artificial Sequence
  derived and/or modified sequence
atggctgatgatcagggttgcatcgaggaacagggcgtagaagactcagccaatgaggattcagttgacgctaagcctgatcgttccagttttgtgcctagccttttctcgaagaaaaaaaaaaacgtcactatgcggtctattaaaactacccgcgaccgcgtacccacataccagtataacatgaatttcgagaaactcggaaagtgcattatcatcaataacaagaattttgataaagtaaccggcatgggagtcaggaatgggactgataaagatgcggaagccctgtttaaatgttttcggtctctcggatttgacgtgatcgtttacaatgactgttcatgtgccaaaatgcaggatctcctgaaaaaggcatcagaagaggatcataccaatgccgcctgctttgcttgtattctgttgtctcacggagaagaaaatgtgatctacggaaaagacggcgtaaccccaatcaaggacctgactgcccatttccgtggggatagatgtaaaaccctgttagagaagccaaaattatttttcattcaggcttgtcggggcacggaactggatgacgggatacaagcagacagtggacctatcaatgatacggacgcaaatccgaggtataaaattcctgtggaagccgacttcctgttcgcctag

SEQ ID NO: 83911 - DNA, 795 bp, Artificial Sequence
  derived and/or modified sequence
atggctgatgatcaggggtgtatcgaagaacaaggtgtcgaagattccgcgaacgaggattccgtggacgctaagcctgatcgcagctcttttgtgccttcgttatttagcaagaaaaagaagaatgtgactatgaggtccataaaaactacccgagacagagtccctacctaccaatataacatgaatttcgaaaaactgggcaaatgcataatcattaacaacaagaattttgataaagtgacaggtatgggagtgagaaacggcactgataaagatgctgaagccctgtttaaatgttttagaagccttggatttgacgtgatcgtctacaacgactgctcctgcgccaaaatgcaggatctgctcaaaaaagcgtcagaagaagatcatacaaatgctgcatgcttcgcttgcatcttattcttcatacaggcatgccggggcacggaactggacgacggtattcaggcagactccggtccaatcaacgacaccgatgcaaaccctcgatataagatccccgtggaagccgattttctgttcgcttactccacagtcccaggctattactcatggaggtcccctggcaggggaagctggttcgtgcaggccctgtgcagcatactagaggagcacggtaaagatctagagatcatgcaaatcctgaccagagttaacgatagagttgcccgccactttgaatcacagagtgatgacccgcatttccacgagaaaaagcagattccttgcgttgtatctatgctgaccaaggagttatatttctcacagtag

SEQ ID NO: 83912 - DNA, 912 bp, Artificial Sequence
  derived and/or modified sequence
atggctgatgaccagggctgcatcgaggagcagggcgtggaggacagcgccaatgaagattctgtggatgccaagccagacaggagcagctttgtgcccagcctcttcagcaagaagaagaagaatgtgaccatgaggagcatcaagaccacccgggacagagtgcccacctaccagtacaacatgaactttgagaagctgggcaagtgcatcatcatcaacaacaagaactttgacaaggtgacaggcatgggcgtgagaaatggaacagacaaggatgctgaggccctcttcaagtgcttccgcagcctgggctttgatgtgattgtgtacaatgactgcagctgtgccaagatgcaggacctgctgaagaaggccagcgaggaggaccacaccaatgctgcctgctttgcctgcatcctgctgagccacggggaggagaatgtcatctacggcaaggatggagtgacccccatcaaggacctgacagcccacttccggggggaccgctgcaagaccctgctggagaagcccaagctgttcttcatccaggcctgccggggcacagagctggatgatggcatccaggccgacagcggccccatcaatgacacagatgccaacccccgctacaagatccctgtggaggccgacttcctgtttgcctacagcacagtgcccggctactacagctggaggagccctggccggggctcctggtttgtgcaggccctgtgcagcatcctggaggagcacggcaaggacctggagatcatgcagatcctgaccagggtgaatgacagagtggcccggcactttgagagccagagtgatgacccccacttccacgagaagaagcagatcccctgtgtggtgtccatgctgaccaaggagctgtacttcagccagtag

SEQ ID NO: 83913 - DNA, 669 bp, Artificial Sequence
  derived and/or modified sequence
atggctgatgaccagggctgcatcgaggagcagggcgtggaggacagcgccaatgaagattctgtggatgccaagccagacaggagcagctttgtgcccagcctcttcagcaagaagaagaagaatgtgaccatgaggagcatcaagaccacccgggacagagtgcccacctaccagtacaacatgaactttgagaagctgggcaagtgcatcatcatcaacaacaagaactttgacaaggtgacaggcatgggcgtgagaaatggaacagacaaggatgctgaggccctcttcaagtgcttccgcagcctgggctttgatgtgattgtgtacaatgactgcagctgtgccaagatgcaggacctgctgaagaaggccagcgaggaggaccacaccaatgctgcctgctttgcctgcatcctgctgagccacggggaggagaatgtcatctacggcaaggatggagtgacccccatcaaggacctgacagcccacttccggggggaccgctgcaagaccctgctggagaagcccaagctgttcttcatccaggcctgccggggcacagagctggatgatggcatccaggccgacagcggccccatcaatgacacagatgccaacccccgctacaagatccctgtggaggccgacttcctgtttgcctag

SEQ ID NO: 83914 - DNA, 795 bp, Artificial Sequence
  derived and/or modified sequence
atggctgatgaccagggctgcatcgaggagcagggcgtggaggacagcgccaatgaagattctgtggatgccaagccagacaggagcagctttgtgcccagcctcttcagcaagaagaagaagaatgtgaccatgaggagcatcaagaccacccgggacagagtgcccacctaccagtacaacatgaactttgagaagctgggcaagtgcatcatcatcaacaacaagaactttgacaaggtgacaggcatgggcgtgagaaatggaacagacaaggatgctgaggccctcttcaagtgcttccgcagcctgggctttgatgtgattgtgtacaatgactgcagctgtgccaagatgcaggacctgctgaagaaggccagcgaggaggaccacaccaatgctgcctgctttgcctgcatcctcttcttcatccaggcctgccggggcacagagctggatgatggcatccaggccgacagcggccccatcaatgacacagatgccaacccccgctacaagatccctgtggaggccgacttcctgtttgcctacagcacagtgcccggctactacagctggaggagccctggccggggctcctggtttgtgcaggccctgtgcagcatcctggaggagcacggcaaggacctggagatcatgcagatcctgaccagggtgaatgacagagtggcccggcactttgagagccagagtgatgacccccacttccacgagaagaagcagatcccctgtgtggtgtccatgctgaccaaggagctgtacttcagccagtag

SEQ ID NO: 83915 - DNA, 912 bp, Artificial Sequence
  derived and/or modified sequence
atggccgacgaccagggctgcatcgaggagcagggcgtggaggactctgctaatgaggactctgttgacgccaagcctgatagatccagtttcgtcccatctctgttctctaagaagaagaaaaacgttaccatgcgaagtatcaagaccacacgagatagagtgcccacgtatcagtacaatatgaatttcgagaaactcgggaagtgcattattattaacaataagaattttgacaaagtgactgggatgggcgttcgaaacggtacagacaaagatgccgaggccctgttcaagtgttttcgcagcttgggatttgacgtcattgtttacaatgactgcagctgcgccaaaatgcaagacctactgaagaaggctagtgaagaagatcacactaatgccgcctgctttgcctgtatcctccttagtcatggcgaggaaaatgtgatctatggtaaagacggtgtgacacccatcaaagaccttactgcccacttcagaggcgatagatgcaaaactctgctggagaaacccaagcttttctttattcaggcctgcagagggaccgaactggatgatggaattcaagctgatagtggccctattaatgacaccgacgctaatcctaggtacaagattccggttgaggctgactttctgtttgcgtacagcactgtgcccggatactattcatggcggtcgcctggtcggggaagctggtttgttcaggcactgtgtagcatactggaagaacacggcaaagaccttgagattatgcagatccttacgagagttaacgaccgagttgcgcgtcactttgagtcccaatccgacgacccgcactttcacgaaaaaaaacagattccctgtgttgtaagtatgctcacaaaggagctctacttctcccaatag

SEQ ID NO: 83916 - DNA, 912 bp, Artificial Sequence
  derived and/or modified sequence
atggccgacgaccagggctgcatcgaggagcagggcgtggaggactctgctaatgaggacagtgtggatgcaaaaccagacagaagctctttcgttccaagccttttctccaaaaagaagaaaaacgttactatgagaagcatcaagacgacccgtgacagagtgcctacttaccaatacaatatgaactttgagaaactcggcaaatgcatcatcattaacaacaaaaattttgataaggtgaccgggatgggcgtgcgcaacggcacagataaagatgcagaggccctgtttaagtgcttcagatctttaggatttgacgtgatagtgtacaacgattgctcttgtgcaaaaatgcaggatctcctcaaaaaagcctctgaggaagaccacaccaacgctgcctgcttcgcttgcatacttctgagccacggtgaggagaatgttatctatggcaaagacggggtgacccctataaaagacttgacagctcacttcaggggcgataggtgcaaaactcttttagagaagcccaaattgttctttatacaggcttgcaggggcacggaactagacgatgggatccaggcggatagcggccccattaatgacacagatgcaaacccccggtataaaattcctgtggaggcggacttcctctttgcttattctaccgttcccggatactatagttggcgaagcccaggcagaggctcctggttcgtccaagcactatgttcaatcctggaagaacacgggaaggatttggaaatcatgcagatcctaaccagagtgaacgatcgggtggcccgccacttcgaatcccaaagcgacgatccccactttcacgagaaaaagcagatcccctgcgtggtcagtatgctgacaaaagaactttatttctctcagtag

SEQ ID NO: 83917 - DNA, 912 bp, Artificial Sequence
  derived and/or modified sequence
atggccgacgaccagggctgcatcgaggagcagggcgtggaggactccgctaatgaggattcggtggatgcgaaacctgatcggtccagctttgttccgtccttgttttcaaagaagaagaaaaacgtgacgatgcggtctattaagacaaccagggacagagtaccaacataccagtataatatgaacttcgagaagcttggcaagtgcatcatcatcaacaataaaaatttcgacaaagtaacgggaatgggtgtgcggaacggcactgataaggatgccgaagccctgttcaagtgttttagatcattgggcttcgatgtgatcgtatacaacgactgcagctgcgctaaaatgcaggacttgctcaagaaggcgtctgaggaagatcatacaaatgctgcctgtttcgcgtgcattttactgagccatggcgaggagaatgtgatttatgggaaagacggtgtaaccccaatcaaggacctgaccgctcatttccgaggggatagatgcaagaccctgctcgaaaaacctaaactgttcttcattcaggcatgtcgcgggacagaattggacgacggaatacaagctgacagcgggcccatcaacgacaccgacgccaatccaagatataaaatccctgttgaggcagatttcctgttcgcatattcaacggtacctggatactacagctggcggagcccgggtcgcggctcgtggttcgtgcaggctctgtgctcaattctagaagagcatggtaaagatctggagattatgcagattttaactcgggtaaacgatcgagttgcccgccatttcgagtcacaatctgatgacccacatttccatgaaaagaagcagatcccatgtgtggtgagcatgctgactaaagagctgtacttctcccaatag

SEQ ID NO: 83918 - DNA, 669 bp, Artificial Sequence
  derived and/or modified sequence
atggccgacgaccagggctgcatcgaggagcagggcgtggaggacagcgccaatgaagattcggtcgacgccaaaccggacagaagctcattcgtgccatctctgttttccaaaaagaaaaaaaacgttacaatgcgctcgattaagaccacgagagacagagtccccacttaccagtacaacatgaattttgagaaactgggcaaatgcattatcataaataacaagaactttgataaagttacaggaatgggggtgcgcaatgggaccgataaggatgctgaagccctgtttaagtgtttccgatctttaggatttgatgttatcgtttataacgactgctcttgtgccaaaatgcaggatctcctcaagaaagcatccgaagaagaccacaccaatgccgcatgcttcgcatgcattctgctgtcacatggcgaggaaaatgtgatttacggtaaagacggcgttacaccaattaaagacctgaccgctcattttagaggggaccgttgcaaaacattgctagagaagccaaagctgttctttatccaggcctgccgtggaacggagctcgacgacgggatccaggcggactcaggccccataaatgacacggacgctaatcctagatataaaatacctgtcgaagctgatttcctctttgcatag

SEQ ID NO: 83919 - DNA, 795 bp, Artificial Sequence
  derived and/or modified sequence
atggccgacgaccagggctgcatcgaggagcagggcgtggaggacagtgcaaatgaggattcggtagacgcaaagcctgaccgctccagcttcgtgccgtccctgtttagcaagaagaagaagaacgtgacaatgcgctctattaagacaaccagagacagggttcctacttatcagtacaacatgaactttgagaagctggggaaatgtataatcattaacaacaaaaatttcgacaaggtgacgggaatgggggtgagaaacggcaccgataaggacgcagaggctctcttcaaatgctttaggtcactcgggttcgacgtcatcgtatacaacgactgcagttgcgctaagatgcaggacctgctgaaaaaggctagcgaggaggaccatacgaatgccgcttgcttcgcctgcatcctgttttttatccaggcgtgtaggggaacagagttggatgacggtatccaggctgacagtggacccatcaatgacacagacgcaaaccctcggtacaagattcccgtggaggcggacttcctgtttgcgtacagcaccgtccctggctattactcttggcgcagtccgggtaggggctcgtggttcgtgcaggcactctgttcaattctggaagagcacggtaaggatcttgagattatgcagatacttacgcgggttaacgatagagtcgcccggcatttcgagtcccaatctgacgatccacacttccatgagaaaaaacagattccttgcgtagtgtcaatgttgaccaaagaactctatttttcccagtag

SEQ ID NO: 83920 - DNA, 912 bp, Artificial Sequence
  derived and/or modified sequence
atggcagatgatcagggttgcatcgaagagcagggggtggaagatagtgctaacgaagattcagtggatgccaagccagatagaagctcattcgtgccctcactctttagcaaaaagaagaagaatgttacaatgcgctccatcaagacgacccgagaccgggtaccaacctatcagtacaatatgaacttcgagaagttgggaaagtgcattattattaacaacaaaaattttgacaaagttactgggatgggggtgcgtaatggcaccgacaaagatgcggaggccctcttcaaatgcttccgctccctcgggttcgatgtcattgtgtataatgattgcagttgtgctaagatgcaagatctcctgaagaaagcatccgaggaggaccacactaatgccgcttgttttgcctgcattttgctttcacacggggaggagaatgtaatctatgggaaggacggcgtgacacccatcaaggatctcacagcccactttagaggagatcgttgcaaaaccctcctcgaaaagcccaagctgttcttcatacaggcctgtcggggtaccgaacttgacgacggtattcaggccgactctggccctatcaatgatacagacgcaaatcccagatataagattcccgtcgaggccgatttcctgttcgcctattccacggtgcctggctattattcatggagaagccctgggcgaggatcctggttcgttcaggccctgtgctccatactggaggaacacggcaaagatctcgagatcatgcaaatactcactcgggttaacgatagagtagccaggcatttcgagtcccagagcgatgacccacattttcatgagaagaagcagattccatgtgtggttagtatgttgaccaaggaactctatttctcccaatag

SEQ ID NO: 83921 - DNA, 912 bp, Artificial Sequence
  derived and/or modified sequence
atggctgatgaccaggggtgcattgaagagcagggcgtggaagacagcgccaatgaggatagcgttgatgctaagccagataggagctctttcgttccatccttattcagtaaaaaaaaaaaaaacgtaacaatgagatccatcaagaccacccgggatagagtgcccacctatcaatataacatgaattttgaaaagttaggcaaatgtatcatcatcaacaataagaatttcgacaaggtcacaggaatgggagtccgcaacggcaccgataaagacgccgaggccctcttcaagtgctttagatcacttggctttgacgtcattgtgtataacgattgtagttgcgcaaagatgcaggatttgcttaaaaaggctagcgaagaggatcacactaatgccgcttgttttgcatgcatcctactctcacatggggaggagaacgtgatctacggcaaagatggcgtgaccccgatcaaagaccttaccgcacattttaggggtgatcggtgtaaaactctattagaaaaacctaaattgtttttcatccaggcatgtcggggaaccgaactagatgatggcattcaggcagacagcggacctatcaacgatactgacgctaatccaagatataagatcccagtggaagccgattttttgttcgcttactcaacagtccccggttactactcatggagaagcccagggcgaggtagctggtttgtccaggcactttgctcgatactggaggagcacggcaaggatcttgaaatcatgcaaattctcactagagtgaacgatagagtggctagacacttcgagtcccaatcggatgatccccatttccacgagaagaagcagatcccctgcgtagtgagtatgctgaccaaggaattgtatttttctcagtag

SEQ ID NO: 83922 - DNA, 912 bp, Artificial Sequence
  derived and/or modified sequence
atggcagacgaccaggggtgtatcgaggaacaaggggtggaggactcagcgaatgaggatagtgtggacgccaagccagatcggagctcttttgttccaagcctatttagcaagaagaaaaaaaatgtcactatgcggagcattaaaactacaagagatcgggtcccaacttatcagtacaatatgaacttcgaaaaacttggaaagtgtattatcatcaacaataaaaattttgataaggtcacgggtatgggcgtgcggaatggaactgataaggatgccgaggctctgtttaagtgcttcagatcccttggattcgacgtgatagtctacaacgattgcagttgtgcaaagatgcaggaccttcttaagaaagcctctgaggaggaccatacaaacgcagcatgcttcgcttgcatcctactgagccacggcgaggaaaatgtgatctatgggaaagacggcgttacgccaatcaaagacctgactgcgcattttcgcggtgaccgttgcaagaccctcctggaaaaaccaaaactgttctttattcaggcgtgtagagggaccgagcttgacgacggaatccaggcggacagcggtcctatcaacgacacagacgcaaacccacggtataaaataccagtggaagccgatttcctgttcgcctatagcaccgttccgggttattattcttggcgatctccaggcagaggtagctggtttgtccaggccctgtgcagcattcttgaagaacatggaaaggatctggaaataatgcaaatcctgacccgggtaaatgacagagtggcacggcatttcgagagccagtcagacgatcctcattttcatgagaaaaagcaaattccatgtgtcgtttccatgctaactaaagaactctacttcagtcaatag

SEQ ID NO: 83923 - DNA, 669 bp, Artificial Sequence
  derived and/or modified sequence
atggccgacgaccaaggctgtatcgaagaacagggagtggaggatagcgctaacgaggattccgttgatgccaagcccgaccggtcatctttcgtaccatctttgttctctaaaaagaagaagaacgtcaccatgagatccattaaaacaactcgcgaccgcgtgcccacctatcaatacaatatgaacttcgagaagctaggaaaatgtatcattattaataataagaattttgacaaggtgacaggaatgggcgtgaggaacggcactgacaaagatgcagaagcgctatttaaatgcttccggtccctcggctttgatgttatcgtgtataatgactgcagctgtgccaagatgcaggatttgctgaagaaagctagtgaggaagaccacaccaacgctgcctgcttcgcctgcatcctgctgtcacatggtgaggaaaacgttatctacggcaaagatggtgttacacctattaaggatcttaccgcacatttcagaggagatcgatgtaagacactccttgagaagccaaagctgttcttcattcaggcttgcaggggcacagaattagatgacggcatccaggctgattctggaccgattaacgacacagacgctaatcccagatataaaatcccagtggaggcggacttcctatttgcttag

SEQ ID NO: 83924 - DNA, 795 bp, Artificial Sequence
  derived and/or modified sequence
atggccgacgatcaaggttgtatcgaggaacagggggtggaggacagcgcaaatgaggattcagtcgacgccaagccagatcggagcagcttcgtgccaagtctctttagcaagaagaaaaaaaacgtcacaatgcgatccatcaagacaactcgggaccgagtgcctacttaccaatacaatatgaactttgagaagctggggaaatgtataattatcaacaataagaacttcgataaggtgacaggcatgggtgtgcggaacggaacagacaaggacgccgaagccttgttcaagtgcttccgatctttggggtttgatgttatcgtctacaacgattgtagctgtgccaaaatgcaagacttgctgaaaaaagcaagtgaagaagaccacaccaacgccgcttgctttgcctgcatcttgttcttcatccaggcttgtcggggaaccgagctggacgacggtattcaggccgacagcggcccaatcaatgataccgatgccaacccccgatataagatccctgtggaggcagattttctgttcgcatattccacagtgccgggttattattcttggagaagtcccggtcgcggatcctggttcgtccaggccctgtgttctatcctggaagaacacggaaaggatctcgagattatgcaaattctgacccgcgtgaacgaccgtgtggccagacatttcgagtcccagtctgatgatcctcatttccatgagaagaaacagatcccatgcgtggtgagtatgcttactaaggagctctatttctcccagtag

SEQ ID NO: 83925 - DNA, 912 bp, Artificial Sequence
  derived and/or modified sequence
atggccgacgaccagggctgcatcgaggagcagggcgtggaggacagcgccaacgaggacagcgtggacgccaagcccgacagaagcagcttcgtgcccagcctgttcagcaagaagaagaagaacgtgaccatgagaagcatcaagaccaccagagacagagtgcccacctaccagtacaacatgaacttcgagaagctgggcaagtgcatcatcatcaacaacaagaacttcgacaaggtgaccggcatgggcgtgagaaacggcaccgacaaggacgccgaggccctgttcaagtgcttcagaagcctgggcttcgacgtgatcgtgtacaacgactgcagctgcgccaagatgcaggacctgctgaagaaggccagcgaggaggaccacaccaacgccgcctgcttcgcctgcatcctgctgagccacggcgaggagaacgtgatctacggcaaggacggcgtgacccccatcaaggacctgaccgcccacttcagaggcgacagatgcaagaccctgctggagaagcccaagctgttcttcatccaggcctgcagaggcaccgagctggacgacggcatccaggccgacagcggccccatcaacgacaccgacgccaaccccagatacaagatccccgtggaggccgacttcctgttcgcctacagcaccgtgcccggctactacagctggagaagccccggcagaggcagctggttcgtgcaggccctgtgcagcatcctggaggagcacggcaaggacctggagatcatgcagatcctgaccagagtgaacgacagagtggccagacacttcgagagccagagcgacgacccccacttccacgagaagaagcagatcccctgcgtggtgagcatgctgaccaaggagctgtacttcagccagtag

SEQ ID NO: 83926 - DNA, 669 bp, Artificial Sequence
  derived and/or modified sequence
atggccgacgaccagggctgcatcgaggagcagggcgtggaggacagcgccaacgaggacagcgtggacgccaagcccgacagaagcagcttcgtgcccagcctgttcagcaagaagaagaagaacgtgaccatgagaagcatcaagaccaccagagacagagtgcccacctaccagtacaacatgaacttcgagaagctgggcaagtgcatcatcatcaacaacaagaacttcgacaaggtgaccggcatgggcgtgagaaacggcaccgacaaggacgccgaggccctgttcaagtgcttcagaagcctgggcttcgacgtgatcgtgtacaacgactgcagctgcgccaagatgcaggacctgctgaagaaggccagcgaggaggaccacaccaacgccgcctgcttcgcctgcatcctgctgagccacggcgaggagaacgtgatctacggcaaggacggcgtgacccccatcaaggacctgaccgcccacttcagaggcgacagatgcaagaccctgctggagaagcccaagctgttcttcatccaggcctgcagaggcaccgagctggacgacggcatccaggccgacagcggccccatcaacgacaccgacgccaaccccagatacaagatccccgtggaggccgacttcctgttcgcctag

SEQ ID NO: 83927 - DNA, 795 bp, Artificial Sequence
  derived and/or modified sequence
atggccgacgaccagggctgcatcgaggagcagggcgtggaggacagcgccaacgaggacagcgtggacgccaagcccgacagaagcagcttcgtgcccagcctgttcagcaagaagaagaagaacgtgaccatgagaagcatcaagaccaccagagacagagtgcccacctaccagtacaacatgaacttcgagaagctgggcaagtgcatcatcatcaacaacaagaacttcgacaaggtgaccggcatgggcgtgagaaacggcaccgacaaggacgccgaggccctgttcaagtgcttcagaagcctgggcttcgacgtgatcgtgtacaacgactgcagctgcgccaagatgcaggacctgctgaagaaggccagcgaggaggaccacaccaacgccgcctgcttcgcctgcatcctgttcttcatccaggcctgcagaggcaccgagctggacgacggcatccaggccgacagcggccccatcaacgacaccgacgccaaccccagatacaagatccccgtggaggccgacttcctgttcgcctacagcaccgtgcccggctactacagctggagaagccccggcagaggcagctggttcgtgcaggccctgtgcagcatcctggaggagcacggcaaggacctggagatcatgcagatcctgaccagagtgaacgacagagtggccagacacttcgagagccagagcgacgacccccacttccacgagaagaagcagatcccctgcgtggtgagcatgctgaccaaggagctgtacttcagccagtag

SEQ ID NO: 83928 - protein, 496 aa, Artificial Sequence
  derived and/or modified sequence
MDFSRNLYDIGEQLDSEDLASLKFLSLDYIPQRKQEPIKDALMLFQRLQEKRMLEESNLSFLKELLFRINRLDLLITYLNTRKEEMERELQTPGRAQISAYRFHFCRMSWAEANSQCQTQSVPFWRRVDHLLIRVMLYQISEEVSRSELRSFKFLLQEEISKCKLDDDMNLLDIFIEMEKRVILGEGKLDILKRVCAQINKSLLKIINDYEEFSKGEELCGVMTISDSPREQDSESQTLDKVYQMKSKPRGYCLIINNHNFAKAREKVPKLHSIRDRNGTHLDAGALTTTFEELHFEIKPHDDCTVEQIYEILKIYQLMDHSNMDCFICCILSHGDKGIIYGTDGQEAPIYELTSQFTGLKCPSLAGKPKVFFIQACQGDNYQKGIPVETDSEEQPYLEMDLSSPQTRYIPDEADFLLGMATVNNCVSYRNPAEGTWYIQSLCQSLRERCPRGDDILTILTEVNYEVSNKDDKKNMGKQMPQPTFTLRKKLVFPSD

SEQ ID NO: 83929 - DNA, 1491 bp, Artificial Sequence
  derived and/or modified sequence
atggatttcagcaggaatctgtatgacattggcgagcagctggactcagaagatttggcgtcactcaagttcctgagtctggattatatcccacagcggaagcaggagcctatcaaagatgccctgatgttgtttcagcggttacaagaaaagcggatgctggaggagtctaatttatctttcctcaaggagctgttgttccgaattaacaggctggatttactgattacttatctcaacacacggaaggaagagatggagcgtgaactgcaaacaccaggacgcgcccagatctctgcttatcgctttcacttctgccgtatgtcctgggccgaggcgaattctcagtgtcagacacagagcgtgcccttttggagaagggtggatcacttactgatccgggtcatgttgtatcagatatccgaggaggtgtcacgatctgaattgcgatcatttaagtttttgctgcaagaggaaattagcaagtgtaagttggacgacgatatgaacctgttagatatttttatcgaaatggaaaagagggtgattctgggtgagggaaaactggatatcctcaagcgcgtgtgtgcgcagattaacaagtccctgctaaagatcattaacgattacgaagaatttagcaagggtgaggaattatgcggagtaatgaccatctcagactcccctcgagagcaagattccgagagccagaccctggacaaggtctatcaaatgaagtcgaagcccaggggctattgtctcattatcaacaatcataacttcgctaaagccagagagaaggtccctaaactacactccattcgggatcggaacggcacacacctggatgccggcgccctaaccaccacatttgaggaactgcacttcgaaattaagcctcacgacgactgtacagtggagcagatctacgaaatccttaagatataccagctgatggatcactctaatatggactgctttatctgttgcattctgtcccacggtgacaaggggatcatttacggcacagatggccaggaagcccctatttatgagctgacttcccagtttacagggctgaaatgtccaagtctggcagggaagcctaaagttttcttcatacaggcttgccagggggataattaccaaaaaggcattcccgtggagaccgattcagaagagcaaccatacttggagatggatttaagctccccgcagacaagatacattccagacgaggcagactttctattaggcatggctaccgtgaacaactgtgtaagttacagaaatccagccgaaggaacttggtacatacagtccctgtgtcagtcacttagggaaagatgccctcgaggggatgacatcctgaccattcttaccgaagtcaattatgaggtaagcaataaggatgataagaaaaatatgggaaagcagatgccccagcccacatttacccttcggaaaaaactggtgttcccatccgactag

SEQ ID NO: 83930 - DNA, 1491 bp, Artificial Sequence
  derived and/or modified sequence
atggacttcagcaggaacctgtatgacatcggggagcagctggacagcgaggacctggccagcctgaagttcctgagcctggactacatcccccagaggaagcaggagcccatcaaggatgccctgatgctgttccagaggctgcaggagaagaggatgctggaggagagcaacctgtccttcctgaaggagctgctcttccgcatcaaccggctggacctgctgatcacctacctgaacaccaggaaggaggagatggagcgggagctgcagaccccaggccgggcccagatcagcgcctaccgcttccacttctgcaggatgtcctgggccgaggccaacagccagtgccagacccagagcgtgcccttctggaggagagtggaccacctgctgatccgggtgatgctgtaccagatcagcgaggaggtgagccgctctgagctgcgctccttcaagttcctgctgcaggaggagatcagcaagtgcaagctggatgatgacatgaacctgctggacatcttcatcgagatggagaagagggtcatcctgggggagggcaagctggacatcctgaagagggtgtgtgcccagatcaacaagagcctgctgaagatcatcaatgactatgaggagttcagcaaaggagaggagctgtgtggggtgatgaccatcagtgacagcccccgggagcaggacagcgagagccagaccctggacaaggtgtaccagatgaagagcaagccccggggctactgcctgatcatcaacaaccacaactttgccaaggcccgggagaaggtgcccaagctgcacagcatccgggacagaaatggcacccacctggatgctggggccctgaccaccacctttgaggagctgcactttgagatcaagccccatgatgactgcaccgtggagcagatctatgagatcctgaagatctaccagctgatggaccacagcaacatggactgcttcatctgctgcatcctgagccacggggacaagggcatcatctatggaacagatggccaggaggcccccatctatgagctgaccagccagttcaccggcctgaagtgccccagcctggccggcaagcccaaggtgttcttcatccaggcctgccagggcgacaactaccagaagggcatccctgtggagacagacagcgaggagcagccctacctggagatggacctgagcagcccccagacccgctacatcccagatgaggccgacttcctgctgggcatggccaccgtgaacaactgtgtgtcctacagaaatcctgctgagggcacctggtacatccagagcctgtgccagagcctgcgggagcgctgccccagaggagatgacatcctgaccatcctgacagaggtgaactatgaggtgagcaacaaggatgacaagaagaacatgggcaagcagatgccccagcccaccttcaccctgaggaagaagctggtgttccccagcgactag

SEQ ID NO: 83931 - DNA, 1491 bp, Artificial Sequence
  derived and/or modified sequence
atggacttcagccggaacctgtacgacatcggcgagcagctggactctgaagacctggccagcttgaagtttctttctttggactacattcctcagcggaagcaggagcccatcaaagatgctctaatgctgttccagcggctccaggagaaacgcatgctcgaggaatctaacctttctttcctgaaagagctcctatttagaatcaataggctggacctgttgattacctatctgaataccagaaaagaggaaatggagcgggaactacagacaccaggcagagcgcagatctccgcttatcggttccacttttgtaggatgagctgggccgaagctaactcccaatgtcaaacccagtccgtacccttttggaggcgggtcgaccacctactgattcgagtcatgctgtatcagatcagcgaggaggtcagtcgcagcgagttacgctcctttaaattcctgctgcaagaggaaatcagtaaatgcaaactggacgacgatatgaatttactggatatattcattgaaatggagaaacgagtaatactgggagaggggaagctcgatatcctcaaaagagtttgtgcacagatcaataagagcttgctcaagatcatcaatgactacgaagagttctctaagggtgaagaactgtgcggcgttatgaccatctccgactcacctcgggaacaggacagcgagtcccagacacttgacaaggtttaccagatgaaaagcaaaccgcgcgggtactgccttatcattaataatcacaattttgcgaaggctcgcgagaaggtgcctaagcttcatagcatccgggatagaaatggaacacacctcgacgccggcgccctgactacgaccttcgaggagttgcatttcgaaatcaaaccacatgatgattgcacagtcgaacagatctacgagatccttaagatatatcaacttatggaccattctaatatggattgctttatctgttgcatcctgtcccatggtgataaaggtatcatatatggtacagatggtcaggaagcccctatttacgagctgacttcacaattcaccggactgaagtgccccagtctggcaggcaaacccaaagtgttttttatacaggcatgccaaggcgacaactatcagaaagggatcccggtcgaaaccgactcagaagaacaaccttacttggagatggatctcagctctcctcaaaccagatatatcccagacgaggccgattttctgttgggcatggctaccgttaataactgcgtgtcttaccggaatcccgccgaggggacatggtacatccagagcctgtgccagtcgctgcgagagcgttgccccagaggtgatgatatactgacaatcttaaccgaggtgaattacgaagtctcgaataaagatgacaagaagaatatggggaagcagatgcctcagcccacttttacactgaggaaaaaactggtgtttccctcagattag

SEQ ID NO: 83932 - DNA, 1491 bp, Artificial Sequence
  derived and/or modified sequence
atggatttcagcaggaacctgtatgacatcggagaacagttggacagtgaggatctggcttctctaaaatttctatcccttgactacatcccccagcgaaaacaagagcccatcaaggatgccctcatgctatttcagcgcttacaggagaaacgcatgctggaggaaagcaatctcagctttctgaaagagctcctgttcaggatcaataggctggacttactgattacctatctcaatacacgaaaagaagagatggagagggaactccagacacctggccgtgcccagatctctgcctatcgctttcacttctgtaggatgagctgggcagaagcaaattcccaatgccagactcagtcggtacccttttggaggcgcgtagatcacttactgatccgcgtaatgctgtaccagatttccgaagaagtcagtaggtccgaactacgctctttcaaatttctgttgcaagaggaaattagtaagtgcaagttggacgatgatatgaacctgctggatatctttatcgagatggagaagagggtgatactgggggaaggcaaactggatatccttaaacgtgtgtgcgcacaaatcaacaaaagtctgctgaagattattaatgattatgaagaattttcaaagggcgaagagctgtgtggtgttatgaccatctctgactccccccgagaacaagatagcgaatcccagacgctcgacaaagtataccagatgaagagcaagccgcgtggatattgtctgatcatcaacaaccataactttgctaaggccagggagaaggtccctaagctgcatagcatcagggacagaaatggtacccaccttgatgccggagcattaaccactactttcgaggaactacattttgagatcaaacctcacgacgactgcaccgtggagcagatatacgaaatcctgaaaatctaccagctcatggatcacagcaatatggactgctttatctgttgcattttgtcccatggcgacaagggcatcatctatgggacggatggtcaggaagcccctatctacgagctgacaagtcagtttacaggtctgaaatgcccctctctggctgggaagcctaaggtgtttttcatccaggcatgtcaaggtgacaactaccagaaaggtatcccagtagaaacagatagcgaagaacaaccatacttagagatggatctgagctctccacagacgaggtacattccagacgaggctgactttctgctgggcatggctactgtgaacaattgcgtgagctatagaaacccggctgaaggaacttggtatattcaatcactgtgccagtccctgcgggagaggtgtcctcgtggcgatgatatcctcactatcctgacggaagtaaactacgaggtgagtaataaggacgacaaaaagaatatgggaaaacaaatgcctcaacctacttttactctccgcaagaaactggtcttcccctctgattag

SEQ ID NO: 83933 - DNA, 1906 bp, Artificial Sequence
  derived and/or modified sequence
tttcaccttgtgtctgagctggtctgaaggctggttgttcagactgagcttcctgcctgcctgtaccccgccaacagcttcagaagaaggtgactggtggctgcctgaggaataccagtgggcaagagaattagcatttctggagcatctgctgtctgagcagcccctgggtgcgtccactttctgggcacgtgaggttgggccttggccgcctgagcccttgagttggtcacttgaaccttgggaatattgagattatattctcctgccttttaaaaagatggacttcagcagaaatctttatgatattggggaacaactggacagtgaagatctggcctccctcaagttcctgagcctggactacattccgcaaaggaagcaagaacccatcaaggatgccttgatgttattccagagactccaggaaaagagaatgttggaggaaagcaatctgtccttcctgaaggagctgctcttccgaattaatagactggatttgctgattacctacctaaacactagaaaggaggagatggaaagggaacttcagacaccaggcagggctcaaatttctgcctacaggttccacttctgccgcatgagctgggctgaagcaaacagccagtgccagacacagtctgtacctttctggcggagggtcgatcatctattaataagggtcatgctctatcagatttcagaagaagtgagcagatcagaattgaggtcttttaagtttcttttgcaagaggaaatctccaaatgcaaactggatgatgacatgaacctgctggatattttcatagagatggagaagagggtcatcctgggagaaggaaagttggacatcctgaaaagagtctgtgcccaaatcaacaagagcctgctgaagataatcaacgactatgaagaattcagcaaaggggaggagttgtgtggggtaatgacaatctcggactctccaagagaacaggatagtgaatcacagactttggacaaagtttaccaaatgaaaagcaaacctcggggatactgtctgatcatcaacaatcacaattttgcaaaagcacgggagaaagtgcccaaacttcacagcattagggacaggaatggaacacacttggatgcaggggctttgaccacgacctttgaagagcttcattttgagatcaagccccacgatgactgcacagtagagcaaatctatgagattttgaaaatctaccaactcatggaccacagtaacatggactgcttcatctgctgtatcctctcccatggagacaagggcatcatctatggcactgatggacaggaggcccccatctatgagctgacatctcagttcactggtttgaagtgcccttcccttgctggaaaacccaaagtgttttttattcaggcttgtcagggggataactaccagaaaggtatacctgttgagactgattcagaggagcaaccctatttagaaatggatttatcatcacctcaaacgagatatatcccggatgaggctgactttctgctggggatggccactgtgaataactgtgtttcctaccgaaaccctgcagagggaacctggtacatccagtcactttgccagagcctgagagagcgatgtcctcgaggcgatgatattctcaccatcctgactgaagtgaactatgaagtaagcaacaaggatgacaagaaaaacatggggaaacagatgcctcagcctactttcacactaagaaaaaaacttgtcttcccttctgattgatggtgctattttgtttgttttgttttgttttgtttttttgagacagaatctcgctctgtcgcccaggctggagtgcagtggcgtgatctcggctcaccgcaagctccgcctcccgggttcaggccattctcctgc

SEQ ID NO: 83934 - DNA, 1491 bp, Artificial Sequence
  derived and/or modified sequence
atggacttcagcagaaacctgtacgacatcggcgagcagctggacagcgaggacctggccagcctgaagttcctgagcctggactacatcccccagagaaagcaggagcccatcaaggacgccctgatgctgttccagagactgcaggagaagagaatgctggaggagagcaacctgagcttcctgaaggagctgctgttcagaatcaacagactggacctgctgatcacctacctgaacaccagaaaggaggagatggagagagagctgcagacccccggcagagcccagatcagcgcctacagattccacttctgcagaatgagctgggccgaggccaacagccagtgccagacccagagcgtgcccttctggagaagagtggaccacctgctgatcagagtgatgctgtaccagatcagcgaggaggtgagcagaagcgagctgagaagcttcaagttcctgctgcaggaggagatcagcaagtgcaagctggacgacgacatgaacctgctggacatcttcatcgagatggagaagagagtgatcctgggcgagggcaagctggacatcctgaagagagtgtgcgcccagatcaacaagagcctgctgaagatcatcaacgactacgaggagttcagcaagggcgaggagctgtgcggcgtgatgaccatcagcgacagccccagagagcaggacagcgagagccagaccctggacaaggtgtaccagatgaagagcaagcccagaggctactgcctgatcatcaacaaccacaacttcgccaaggccagagagaaggtgcccaagctgcacagcatcagagacagaaacggcacccacctggacgccggcgccctgaccaccaccttcgaggagctgcacttcgagatcaagccccacgacgactgcaccgtggagcagatctacgagatcctgaagatctaccagctgatggaccacagcaacatggactgcttcatctgctgcatcctgagccacggcgacaagggcatcatctacggcaccgacggccaggaggcccccatctacgagctgaccagccagttcaccggcctgaagtgccccagcctggccggcaagcccaaggtgttcttcatccaggcctgccagggcgacaactaccagaagggcatccccgtggagaccgacagcgaggagcagccctacctggagatggacctgagcagcccccagaccagatacatccccgacgaggccgacttcctgctgggcatggccaccgtgaacaactgcgtgagctacagaaaccccgccgagggcacctggtacatccagagcctgtgccagagcctgagagagagatgccccagaggcgacgacatcctgaccatcctgaccgaggtgaactacgaggtgagcaacaaggacgacaagaagaacatgggcaagcagatgccccagcccaccttcaccctgagaaagaagctggtgttccccagcgactag

SEQ ID NO: 83935 - protein, 479 aa, Artificial Sequence
  derived and/or modified sequence
MKSQGQHWYSSSDKNCKVSFREKLLIIDSNLGVQDVENLKFLCIGLVPNKKLEKSSSASDVFEHLLAEDLLSEEDPFFLAELLYIIRQKKLLQHLNCTKEEVERLLPTRQRVSLFRNLLYELSEGIDSENLKDMIFLLKDSLPKTEMTSLSFLAFLEKQGKIDEDNLTCLEDLCKTVVPKLLRNIEKYKREKAIQIVTPPVDKEAESYQGEEELVSQTDVKTFLEALPRAAVYRMNRNHRGLCVIVNNHSFTSLKDRQGTHKDAEILSHVFQWLGFTVHIHNNVTKVEMEMVLQKQKCNPAHADGDCFVFCILTHGRFGAVYSSDEALIPIREIMSHFTALQCPRLAEKPKLFFIQACQGEEIQPSVSIEADALNPEQAPTSLQDSIPAEADFLLGLATVPGYVSFRHVEEGSWYIQSLCNHLKKLVPRHEDILSILTAVNDDVSRRVDKQGTKKQMPQPAFTLRKKLVFPVPLDALSL

SEQ ID NO: 83936 - DNA, 1440 bp, Artificial Sequence
  derived and/or modified sequence
atgaagtctcagggccagcattggtactcatcgtcggacaaaaactgcaaagtctcttttcgagagaaactgcttattattgactccaatttgggcgttcaggacgtcgagaatctcaaatttttatgcatcggcctcgtgcctaacaaaaaacttgagaaaagttcttccgcatccgatgtttttgagcatcttctggccgaggacttgttaagcgaggaagatcccttctttctcgctgaactactgtacataatacgtcagaaaaagcttttgcagcacctgaattgcactaaggaggaggtcgagagacttctcccaacccgccagagagtcagtctatttcggaacctgctctatgaactgagcgaaggtatagatagtgaaaacttgaaagatatgatctttctcctgaaggatagccttcccaaaacggaaatgacgagcctgtcgttccttgccttccttgagaaacaaggcaagatagatgaagacaacctcacgtgcctggaagatctgtgtaaaaccgtggtgccaaaactgctgaggaacatagagaaatacaagagagaaaaagctattcagattgtcactcccccagtggacaaggaggcagaatcttaccagggcgaagaggagttggtaagccagacggacgtaaaaacatttttggaagcgctccctagagcagccgtctatcggatgaatcggaaccaccgggggctgtgcgtaatagtcaataatcactcatttacatccctcaaggataggcagggtacacacaaggatgcagaaattctgtctcatgtttttcaatggctggggtttacggtccacattcacaataacgtgaccaaggtggagatggaaatggtactgcagaagcagaagtgtaatcctgcacacgccgatggcgactgtttcgttttttgcatcctgacccatggcagattcggcgccgtgtattcttccgatgaagcactaatccctattcgggagatcatgtctcacttcacagctctccaatgccctcgcctggccgaaaagcccaaacttttcttcatacaggcttgccagggcgaggagatccaaccttctgtatccatagaggccgatgccctcaaccctgagcaagctccaaccagcctgcaggactctatacctgctgaggcagacttcctgctgggactggctacagtacctggatatgtcagtttccgacacgtggaagaaggatcatggtacatccagagcctctgtaatcacttaaaaaagctggttcctagacacgaggacatccttagtatcctgaccgccgttaacgacgatgtctccagaagggtagataaacaaggaacaaagaaacaaatgcctcaacccgcattcacccttcgcaagaagctggtattccccgtccccttggacgccctgagcttgtag

SEQ ID NO: 83937 - DNA, 1440 bp, Artificial Sequence
  derived and/or modified sequence
atgaagagccagggccagcactggtacagcagcagtgacaagaactgcaaggtgtccttccgggagaagctgctgatcatcgacagcaacctgggcgtgcaggatgtggagaacctgaagttcctgtgcatcggcctggtgcccaacaagaagctggagaagagcagcagcgccagtgatgtgtttgagcacctgctggccgaggacctgctgtctgaggaggaccccttcttcctggccgagctgctgtacatcatccggcagaagaagctgctgcagcacctgaactgcaccaaggaggaggtggagcggctgctgcccacccggcagagggtgtccctcttcaggaacctgctgtatgagctgtctgagggcatcgacagcgagaacctgaaggacatgatcttcctgctgaaggacagcctgcccaagacagagatgaccagcctgtccttcctggccttcctggagaagcagggcaagattgatgaggacaacctgacctgcctggaggacctgtgcaagacagtggtgcccaagctgctgagaaatattgagaagtacaagcgggagaaggccatccagatcgtgaccccacctgtggacaaggaggccgagagctaccagggcgaggaggagctggtgtcccagacagatgtgaagaccttcctggaggccctgcccagggctgctgtgtacaggatgaacagaaaccaccggggcctgtgtgtgattgtgaacaaccacagcttcaccagcctgaaggaccggcagggcacccacaaggatgctgagatcctgagccacgtgttccagtggctgggcttcaccgtgcacatccacaacaacgtgaccaaggtggagatggagatggtgctgcagaagcagaagtgcaacccagcccatgctgatggagactgctttgtgttctgcatcctgacccacggccgctttggagctgtgtacagcagtgatgaggccctgatccccatccgggagatcatgagccacttcaccgccctgcagtgcccccggctggccgagaagcccaagctgttcttcatccaggcctgccagggcgaggagatccagcccagcgtgtccattgaagcagatgccctgaaccctgagcaggcccccaccagcctgcaggacagcatcccagctgaggccgacttcctgctgggcctggccaccgtgcccggctacgtgtccttccgccacgtggaggagggctcctggtacatccagagcctgtgcaaccacctgaagaagctggtgcccaggcatgaggacatcctgagcatcctgacagctgtgaatgatgatgtgtcccggcgggtggacaagcagggcaccaagaagcagatgccccagcctgccttcaccctgaggaagaagctggtgtttcctgtgcccctggatgccctgagcctgtag

SEQ ID NO: 83938 - DNA, 1440 bp, Artificial Sequence
  derived and/or modified sequence
atgaagagccagggccagcactggtacagcagcagcgacaagaactgcaaagttagcttccgcgagaaactgctgattatcgacagcaatcttggcgtccaggatgtcgagaacctaaaattcctgtgtatcggattagtacccaataaaaagctggaaaaatcttcatctgcttctgatgtattcgagcacctactggctgaagatttgctgtctgaggaagaccccttctttctggctgaacttctgtacatcatccggcagaaaaaattgctgcagcacctaaactgcacgaaggaggaggtagagagactcctgccaacccgccagagagtgagtctgttccggaacctgctgtacgagctatctgagggcatagatagcgagaacctgaaagatatgatatttctgcttaaagactcacttccgaaaaccgagatgacatctctgtctttcctagcatttttggaaaagcaaggcaagatcgacgaggacaatctgacatgcctggaagacctgtgtaagaccgttgttccgaagctgcttagaaacatcgagaagtacaaacgcgagaaagcaattcagattgtgactccccctgtagacaaggaggctgagtcttatcagggagaagaggaactcgtgtcgcagaccgatgttaagacattccttgaggctctgcctcgggctgccgtttatcgcatgaataggaatcaccggggcctgtgcgtcatcgttaataatcactcttttacttctctaaaagatagacagggaacccataaggatgcagagattcttagccatgtgttccagtggctgggcttcactgtgcatattcacaataatgtcacaaaggtggagatggagatggtgctgcagaagcagaagtgcaatcccgctcacgctgacggggactgcttcgtgttttgcattctgacccacggacggttcggcgctgtgtattccagcgatgaagctctcattcctattagagagattatgtctcacttcacagcgttgcagtgtcctagactcgccgaaaagccaaaactgttttttatacaggcttgccagggcgaggaaattcagccgagtgtcagtattgaggcagatgccctgaacccagagcaggcccccacctctctgcaggattcaatccccgcggaggctgatttcttgctcggcctggccacagtgccgggatacgtgagctttcgtcacgtggaggagggttcctggtacatccagagtttatgcaatcatctcaagaagctggttcctcgtcacgaagatattctgagtattctgaccgctgtgaatgatgatgtttctagacgagtggacaagcaggggacgaagaagcagatgcctcagcctgcatttactctccgaaagaaactggtttttcccgtaccgctggacgctctctctctctag

SEQ ID NO: 83939 - DNA, 1440 bp, Artificial Sequence
  derived and/or modified sequence
atgaagtctcaggggcagcactggtacagcagttcagacaagaactgtaaggtctcatttagagaaaagttgctgatcatagatagcaatctgggagtgcaggatgtggagaaccttaagttcctgtgtatcgggttagtgcccaacaagaaactggagaaatccagctccgctagcgatgtgttcgaacatcttctggctgaagacctcttatctgaggaggatcctttcttcttagcagaactcctttacatcattcgccaaaaaaaacttttacagcatctgaactgtacaaaggaggaggtcgagcggttactcccaaccagacaaagggtatctttgttcaggaatctactgtatgaactgtccgaagggattgatagtgaaaaccttaaagatatgattttcttgcttaaggacagtctgcccaagacagagatgactagcctgtccttccttgcattcctagagaagcaagggaagatagatgaggacaatctgacctgtctggaagacctgtgcaagacagtcgttcccaagttgttgaggaatatcgaaaaatataaaagagaaaaagctatccagatcgtcacaccacccgtcgacaaagaggcggagtcttatcagggtgaggaagaactggtgtcccaaactgatgtgaaaacatttttggaagccctgcctcgggcagccgtgtatcgaatgaatcgcaatcaccgaggcttgtgcgtgattgtcaacaatcattccttcacttctcttaaagacaggcagggaacacacaaggacgctgagatcctctcacacgtcttccagtggctgggatttacagtgcacatccataataacgtgaccaaggtcgagatggagatggttctccaaaaacaaaagtgtaatcctgcacatgccgacggcgactgctttgtgttttgtatcttaactcatggacgctttggcgctgtctacagtagcgacgaagccttaatacccatccgggagatcatgtctcactttaccgccctccaatgcccccgactggccgaaaagccaaagctatttttcattcaggcctgtcagggcgaggaaatacagccatctgtctccattgaggctgatgctttgaaccctgagcaagcaccaactagcctgcaggatagtattcctgcagaagccgacttcctgctcgggctcgctacagttccgggatacgtgagctttaggcacgtggaggagggctcatggtacatccagtccctgtgcaatcatttgaaaaaattggtaccacgccacgaagatatcctgtccatactgactgccgtcaacgacgacgtcagtagaagggtggataagcagggcaccaagaagcagatgcctcagcccgcattcacattaaggaagaagctcgtcttcccagttcccctggacgctttgagcttgtag

SEQ ID NO: 83940 - DNA, 3926 bp, Artificial Sequence
  derived and/or modified sequence
tgaagtctcttcccaagcaaatgggagcttctttggaccttggagcacacagaggattctactttctttaaaactttgttttcaggcaatttccctgagaaccgtttacttccagaagattggtggagcttgatctgaaggctggccatgaaatctcaaggtcaacattggtattccagttcagataaaaactgtaaagtgagctttcgtgagaagcttctgattattgattcaaacctgggggtccaagatgtggagaacctcaagtttctctgcataggattggtccccaacaagaagctggagaagtccagctcagcctcagatgtttttgaacatctcttggcagaggatctgctgagtgaggaagaccctttcttcctggcagaactcctctatatcatacggcagaagaagctgctgcagcacctcaactgtaccaaagaggaagtggagcgactgctgcccacccgacaaagggtttctctgtttagaaacctgctctacgaactgtcagaaggcattgactcagagaacttaaaggacatgatcttccttctgaaagactcgcttcccaaaactgaaatgacctccctaagtttcctggcatttctagagaaacaaggtaaaatagatgaagataatctgacatgcctggaggacctctgcaaaacagttgtacctaaacttttgagaaacatagagaaatacaaaagagagaaagctatccagatagtgacacctcctgtagacaaggaagccgagtcgtatcaaggagaggaagaactagtttcccaaacagatgttaagacattcttggaagccttaccgagggcagctgtgtacaggatgaatcggaaccacagaggcctctgtgtcattgtcaacaaccacagctttacctccctgaaggacagacaaggaacccataaagatgctgagatcctgagtcatgtgttccagtggcttgggttcacagtgcatatacacaataatgtgacgaaagtggaaatggagatggtcctgcagaagcagaagtgcaatccagcccatgccgacggggactgcttcgtgttctgtattctgacccatgggagatttggagctgtctactcttcggatgaggccctcattcccattcgggagatcatgtctcacttcacagccctgcagtgccctagactggctgaaaaacctaaactctttttcatccaggcctgccaaggtgaagagatacagccttccgtatccatcgaagcagatgctctgaaccctgagcaggcacccacttccctgcaggacagtattcctgccgaggctgacttcctacttggtctggccactgtcccaggctatgtatcctttcggcatgtggaggaaggcagctggtatattcagtctctgtgtaatcatctgaagaaattggtcccaagacatgaagacatcttatccatcctcactgctgtcaacgatgatgtgagtcgaagagtggacaaacagggaacaaagaaacagatgccccagcctgctttcacactaaggaaaaaactagtattccctgtgcccctggatgcactttcattatagcagagagtttttgttggttcttagacctcaaacgaatcattggctataacctccagcctcctgcccagcacaggaatcggtggtctccacctgtcattctagaaacaggaaacaccgtgttttctgacacagtcaattctgattttctttttcttttgcaagtctaaatgttagaaaactttcttttttttggagatagtctcattctgtcacccagactggagtgcaggggggcaatcacggctcactgtagtctcgacctcccaggctcaagctgtcctcccgcctcagcttcccaagtagctgggaccacaggtgtgtaccaccgtgcccggattttttttattctttattttttgtagagatggagggatctcactttgttgcacaggctggtttcaaactcctaggcccaagtgatcctcccacctctgtccccaaaatactgggattataggcacgagccaccacacctggccagaaaactttcattattgaagacttggattgtagccttggttttggatgtctattctgaagacagagtaattggctttggtttgtgcaggtactttttctttgagacagagtcactccgtcacctgggctggagtgcagtggtgggatcactgttcactgcagccttgacctcccaggttcaagcgatcctcccacctcagcctcccaagtagctgagactacaggtgtgtgtccatgcacagctaactttttattttttttgtggagatggggtttcactatgttgcctaagctggtctcaaactcctgggctcaagcgatcctcccacctcagcttctcaaagttctgggactacaggcatgaaatactgtgcctggcctggggaccaggtgcattttaaggttccttggtgttcaaaaaccacgttcttagcctagattgagcttagattgcctctctagacaactaccccttagttataattctgtgtcccctctgcatgcccttaaacattggacagtgaggtcacagtccacccaccctctctctgatctcccccttcctaagacttctcttttgcacatctagtgaggtgaaaatttggtctatgccaggcccatttcctgcttttgtgtaaggaaggtgctcacataggaagtttttatttggttagagacaggtttccctgtaggaagatgatggctcatttacactcagctgctctgcaagcagaaactttacaacctgatgtcatattccattttggactgggtgcggtgactcatgcctgtaatcccagtactctgggaagccaaggcaggcagatcacttgaggtcaggagttcgagaccagcctggccaatacggcaaaacctcatcattactaaaaacacaaaaattagccaggtgtggcggcgagcacctgtaatcccagctactcgggaggctgagacaggagaatctcttgaatccaggaggcagaggctgtggtgagccaagatgacacaactgcactccagcttgggcaacagggcgagaccttgtttaaaaaaaaaattcaatattggggttggaacatttcagttgccattgacagaacacccaattcaaattgactgaagcaaagaagggaatttattgcctctttcacattgaaacccaggagtggataacactggcttcaggcaaagcttgaatcaggactcaatctacaggccagcacctttctcttggccggatgtcctcagggctggcagatgcagtagactgcagtggacagtccccaccttgttactgctactacactttgctcctctggcccaaggcatgaggagagaggctgtgtcagaaactgaagctgttctcaggatcactgggctcttcttggcagaggggatgtctggcttgcctgaagggagtggctctgtaaggacgccttgatgctttcttcattaagattttgagcatttttacgtacttgagcttttttttttttttttttcaatttctagaggaactttttctctgttaattcctggaactgtattttgaatccttaaaggtgagccctcatagggagatccaaagtcctgtggttaacgccttcatttatagatgaggcagctgaggcctggggatgtgaacaacctgctcacagtcctcatttactggatttgacttcagccaggtgaactggaatgccttggggcgtggaagggcattaggagtgtttcatttgatatgtgaatgctcataaaaaaatgtcaaggaatgaagaacaacaactctcagtggtgcctgcatttataattatttatgtgaaagtcaaattcatgtacagtaaatttgttataagaat

SEQ ID NO: 83941 - DNA, 1440 bp, Artificial Sequence
  derived and/or modified sequence
atgaagagccagggccagcactggtacagcagcagcgacaagaactgcaaggtgagcttcagagagaagctgctgatcatcgacagcaacctgggcgtgcaggacgtggagaacctgaagttcctgtgcatcggcctggtgcccaacaagaagctggagaagagcagcagcgccagcgacgtgttcgagcacctgctggccgaggacctgctgagcgaggaggaccccttcttcctggccgagctgctgtacatcatcagacagaagaagctgctgcagcacctgaactgcaccaaggaggaggtggagagactgctgcccaccagacagagagtgagcctgttcagaaacctgctgtacgagctgagcgagggcatcgacagcgagaacctgaaggacatgatcttcctgctgaaggacagcctgcccaagaccgagatgaccagcctgagcttcctggccttcctggagaagcagggcaagatcgacgaggacaacctgacctgcctggaggacctgtgcaagaccgtggtgcccaagctgctgagaaacatcgagaagtacaagagagagaaggccatccagatcgtgaccccccccgtggacaaggaggccgagagctaccagggcgaggaggagctggtgagccagaccgacgtgaagaccttcctggaggccctgcccagagccgccgtgtacagaatgaacagaaaccacagaggcctgtgcgtgatcgtgaacaaccacagcttcaccagcctgaaggacagacagggcacccacaaggacgccgagatcctgagccacgtgttccagtggctgggcttcaccgtgcacatccacaacaacgtgaccaaggtggagatggagatggtgctgcagaagcagaagtgcaaccccgcccacgccgacggcgactgcttcgtgttctgcatcctgacccacggcagattcggcgccgtgtacagcagcgacgaggccctgatccccatcagagagatcatgagccacttcaccgccctgcagtgccccagactggccgagaagcccaagctgttcttcatccaggcctgccagggcgaggagatccagcccagcgtgagcatcgaggccgacgccctgaaccccgagcaggcccccaccagcctgcaggacagcatccccgccgaggccgacttcctgctgggcctggccaccgtgcccggctacgtgagcttcagacacgtggaggagggcagctggtacatccagagcctgtgcaaccacctgaagaagctggtgcccagacacgaggacatcctgagcatcctgaccgccgtgaacgacgacgtgagcagaagagtggacaagcagggcaccaagaagcagatgccccagcccgccttcaccctgagaaagaagctggtgttccccgtgcccctggacgccctgagcctgtag

SEQ ID NO: 83942 - protein, 396 aa, Artificial Sequence
  derived and/or modified sequence
MSATDRMGPRAVPGLRLALLLLLVLGTPKSGVQGQEGLDFPEYDGVDRVINVNAKNYKNVFKKYEVLALLYHEPPEDDKASQRQFEMEELILELAAQVLEDKGVGFGLVDSEKDAAVAKKLGLTEVDSMYVFKGDEVIEYDGEFSADTIVEFLLDVLEDPVELIEGERELQAFENIEDEIKLIGYFKSKDSEHYKAFEDAAEEFHPYIPFFATFDSKVAKKLTLKLNEIDFYEAFMEEPVTIPDKPNSEEEIVNFVEEHRRSTLRKLKPESMYETWEDDMDGIHIVAFAEEADPDGFEFLETLKAVAQDNTENPDLSIIWIDPDDFPLLVPYWEKTFDIDLSAPQIGVVNVTDADSVWMEMDDEEDLPSAEELEDWLEDVLEGEINTEDDDDDDDD

SEQ ID NO: 83943 - protein, 390 aa, Artificial Sequence
  derived and/or modified sequence
MGPRAVPGLRLALLLLLVLGTPKSGVQGQEGLDFPEYDGVDRVINVNAKNYKNVFKKYEVLALLYHEPPEDDKASQRQFEMEELILELAAQVLEDKGVGFGLVDSEKDAAVAKKLGLTEVDSMYVFKGDEVIEYDGEFSADTIVEFLLDVLEDPVELIEGERELQAFENIEDEIKLIGYFKSKDSEHYKAFEDAAEEFHPYIPFFATFDSKVAKKLTLKLNEIDFYEAFMEEPVTIPDKPNSEEEIVNFVEEHRRSTLRKLKPESMYETWEDDMDGIHIVAFAEEADPDGFEFLETLKAVAQDNTENPDLSIIWIDPDDFPLLVPYWEKTFDIDLSAPQIGVVNVTDADSVWMEMDDEEDLPSAEELEDWLEDVLEGEINTEDDDDDDDD

SEQ ID NO: 83944 - protein, 311 aa, Artificial Sequence
  derived and/or modified sequence
MSMQRTTRMCSRSMRCWHSSTMNPPRMTRPHKDNSLGLTEVDSMYVFKGDEVIEYDGEFSADTIVEFLLDVLEDPVELIEGERELQAFENIEDEIKLIGYFKSKDSEHYKAFEDAAEEFHPYIPFFATFDSKVAKKLTLKLNEIDFYEAFMEEPVTIPDKPNSEEEIVNFVEEHRRSTLRKLKPESMYETWEDDMDGIHIVAFAEEADPDGFEFLETLKAVAQDNTENPDLSIIWIDPDDFPLLVPYWEKTFDIDLSAPQIGVVNVTDADSVWMEMDDEEDLPSAEELEDWLEDVLEGEINTEDDDDDDDD

SEQ ID NO: 83945 - DNA, 1191 bp, Artificial Sequence
  derived and/or modified sequence
atgtccgctaccgataggatggggcccagggccgttcccgggcttcggttggcactcctgctgttactcgtgcttggaactcccaaaagcggcgtgcagggacaagagggcctcgacttccctgaatacgacggtgtcgatagggtaatcaacgtgaatgccaagaactataaaaacgtgttcaaaaagtacgaggtgttggcgttactatatcacgagccacctgaagatgacaaagccagccagcggcagttcgaaatggaggagttgatccttgagctcgcagcgcaagttctcgaagataagggcgtgggatttggacttgtggattcagaaaaggacgccgcagttgccaaaaaactcggactgacagaagtcgatagcatgtacgtctttaagggggacgaggtcatcgagtatgatggggagttctctgctgataccattgtggaatttcttctggacgtcctggaagatccggtagagctgatagaaggtgagcgtgagctccaagccttcgagaatatagaagacgaaattaaattgatcggttattttaaaagtaaagacagtgaacactacaaggctttcgaggacgccgctgaagaatttcacccatacataccatttttcgccaccttcgatagcaaagtggcaaaaaagctcaccttgaagctgaatgaaattgatttctatgaagcattcatggaagagcctgtgacgatccccgacaagcctaactcagaagaggaaatcgttaacttcgtggaggaacaccgacgcagcaccctgcgaaaactcaaacccgaatctatgtatgaaacctgggaagacgacatggacggaatacatattgtggcattcgctgaagaagctgatcccgatggattcgaattcctcgagacccttaaggccgtggcccaggacaacaccgagaaccccgatttatccatcatctggatagatcctgatgatttccctctattagtcccatactgggaaaagacgtttgacatagacctctcagctcctcaaattggggtcgttaatgtgacggacgctgattccgtctggatggagatggatgatgaagaggatctgcccagcgcagaagaactggaggactggctggaggatgtgctggagggggaaataaacacagaggacgatgatgatgacgacgacgattag

SEQ ID NO: 83946 - DNA, 1173 bp, Artificial Sequence
  derived and/or modified sequence
atgggtccccgggcggtccccgggctccgcttggcgctcctactgctgctagtcctgggtacgccgaaatcaggagttcagggacaagaaggcctggacttccctgagtacgacggtgtggatagggtgataaatgttaacgctaagaattacaagaacgtctttaagaaatacgaagttttagctcttctctatcacgagccaccggaagacgacaaagccagccaacgacagtttgaaatggaagagttaatactggagctcgccgcccaagtgttagaagataagggagttggttttggtctggttgacagcgagaaagacgcggcggtcgctaagaaacttggcctcactgaggtcgatagtatgtacgtattcaagggagatgaggtcatcgaatatgacggtgagttctcagcagataccatcgtcgaattcctgctggatgttttagaagatcccgttgagctgatagagggcgagcgagaactgcaggcattcgagaatattgaggacgaaatcaaactcatcgggtatttcaagtccaaagatagcgagcactacaaagcctttgaggacgcagccgaggagtttcacccctatatccctttctttgcgacattcgactccaaggttgcaaagaagctgactctgaaactgaacgagatcgatttctacgaagcctttatggaagagcctgtcaccatacccgataagcccaacagtgaagaagagatcgtcaactttgtcgaggagcatagacgctctaccctacggaagttgaagccagagtcaatgtatgaaacttgggaggacgatatggatggtatccatatcgtggcctttgctgaggaagctgaccccgacggattcgagttcctagaaactctgaaggccgtggctcaggacaacaccgaaaatcctgacctttccattatctggattgatccagatgatttccctctactggtaccatattgggagaagacctttgatatcgatctctcagcaccccagattggagtggttaacgtgactgatgcagactctgtctggatggagatggacgatgaagaggatcttcctagcgctgaggagcttgaggattggctggaggacgtcctcgaaggtgagattaacaccgaggacgacgacgacgacgatgacgattag

SEQ ID NO: 83947 - DNA, 936 bp, Artificial Sequence
  derived and/or modified sequence
atgtctatgcagcgtacgacacggatgtgttcacgatccatgaggtgttggcatagtagcaccatgaatccgccaaggatgactcgaccccataaagataactccctgggactgaccgaagtggacagcatgtatgtgtttaagggggacgaggtgatagaatacgacggcgaattttcagccgatacaattgtggagtttctgctggatgtgcttgaggaccctgtggagttgatcgaaggggaaagagagctgcaggctttcgagaacatcgaagacgagatcaagcttatcggttacttcaagtctaaagattcggaacactacaaagctttcgaggatgcggcagaagagtttcacccttatataccattctttgccacttttgatagcaaagtagcgaaaaagctgactctaaaactgaatgagatcgacttttatgaagccttcatggaggaaccggtgactattccagataagcccaactcagaagaggagatagtcaacttcgttgaggaacatagacgtagcactctcagaaagctaaagcccgagagcatgtatgagacctgggaagatgacatggacggcatccatatagtggcattcgctgaagaagccgaccccgatggattcgaatttttggagactctgaaggccgtagcacaggacaacaccgaaaaccctgatctgtcaatcatctggatcgaccctgacgactttcccttattggtgccttactgggagaaaacctttgatattgatttatctgcaccacagatcggtgtggtgaacgtgaccgatgccgattcagtttggatggaaatggatgatgaggaggatctgccttccgccgaagagctggaagactggcttgaagacgtgctggagggcgaaataaacactgaggacgatgatgatgatgacgatgattag

SEQ ID NO: 83948 - DNA, 1191 bp, Artificial Sequence
  derived and/or modified sequence
atgtctgccacagacaggatgggccccagggctgtgcccggcctgcggctggccctgctgctgctgctggtgctgggcacccccaagagcggcgtgcagggccaggagggcctggacttcccagaatatgatggagtggacagagtcatcaacgtgaatgccaagaactacaagaatgtgttcaagaagtatgaggtgctggccctgctgtaccacgagcccccagaagatgacaaggccagccagaggcagtttgagatggaggagctgatcctggagctggccgcccaggtgctggaggacaagggcgtgggcttcggcctggtggacagcgagaaggatgctgctgtggccaagaagctgggcctgacagaggtggacagcatgtatgtgttcaagggagatgaagtcatcgagtatgatggagagttctctgctgacaccatcgtggagttcctgctggatgtgctggaggaccctgtggagctgattgaaggagagcgggagctgcaggcctttgagaacattgaagatgagatcaagctgattggctacttcaagagcaaggacagcgagcactacaaggcctttgaagatgctgctgaggagttccacccctacatccccttctttgccacctttgacagcaaggtggccaagaagctgaccctgaagctgaatgaaattgacttctatgaggccttcatggaggagcctgtgaccatcccagacaagcccaacagcgaggaggagatcgtgaactttgtggaggagcaccggcgcagcaccctgaggaagctgaagccagagagcatgtatgagacctgggaggatgacatggatggcatccacatcgtggcctttgctgaggaggccgaccctgatggctttgagttcctggagaccctgaaggctgtggcccaggacaacacagagaacccagacctgagcatcatctggattgatcctgatgacttccccctgctggtgccctactgggagaagacctttgatattgacctgagcgccccccagatcggcgtggtgaatgtgacagatgctgacagcgtgtggatggagatggatgatgaggaggacctgcccagcgctgaggagctggaggactggctggaggatgtgctggagggggagatcaacacagaagatgatgatgatgatgatgatgactag

SEQ ID NO: 83949 - DNA, 1173 bp, Artificial Sequence
  derived and/or modified sequence
atgggccccagggctgtgcccggcctgcggctggccctgctgctgctgctggtgctgggcacccccaagagcggcgtgcagggccaggagggcctggacttcccagaatatgatggagtggacagagtcatcaacgtgaatgccaagaactacaagaatgtgttcaagaagtatgaggtgctggccctgctgtaccacgagcccccagaagatgacaaggccagccagaggcagtttgagatggaggagctgatcctggagctggccgcccaggtgctggaggacaagggcgtgggcttcggcctggtggacagcgagaaggatgctgctgtggccaagaagctgggcctgacagaggtggacagcatgtatgtgttcaagggagatgaagtcatcgagtatgatggagagttctctgctgacaccatcgtggagttcctgctggatgtgctggaggaccctgtggagctgattgaaggagagcgggagctgcaggcctttgagaacattgaagatgagatcaagctgattggctacttcaagagcaaggacagcgagcactacaaggcctttgaagatgctgctgaggagttccacccctacatccccttctttgccacctttgacagcaaggtggccaagaagctgaccctgaagctgaatgaaattgacttctatgaggccttcatggaggagcctgtgaccatcccagacaagcccaacagcgaggaggagatcgtgaactttgtggaggagcaccggcgcagcaccctgaggaagctgaagccagagagcatgtatgagacctgggaggatgacatggatggcatccacatcgtggcctttgctgaggaggccgaccctgatggctttgagttcctggagaccctgaaggctgtggcccaggacaacacagagaacccagacctgagcatcatctggattgatcctgatgacttccccctgctggtgccctactgggagaagacctttgatattgacctgagcgccccccagatcggcgtggtgaatgtgacagatgctgacagcgtgtggatggagatggatgatgaggaggacctgcccagcgctgaggagctggaggactggctggaggatgtgctggagggggagatcaacacagaagatgatgatgatgatgatgatgactag

SEQ ID NO: 83950 - DNA, 936 bp, Artificial Sequence
  derived and/or modified sequence
atgtccatgcagaggaccaccaggatgtgcagccgctccatgcgctgctggcacagcagcaccatgaacccccccaggatgacccggccccacaaggacaacagcctgggcctgacagaggtggacagcatgtatgtgttcaagggagatgaggtgattgaatatgatggagagttctctgctgacaccatcgtggagttcctgctggatgtgctggaggaccctgtggagctgattgaaggagagcgggagctgcaggcctttgaaaatattgaagatgagatcaagctgattggctacttcaagagcaaggacagcgagcactacaaggcctttgaagatgctgctgaggagttccacccctacatccccttctttgccacctttgacagcaaggtggccaagaagctgaccctgaagctgaatgaaattgacttctatgaggccttcatggaggagcctgtgaccatcccagacaagcccaacagcgaggaggagatcgtgaactttgtggaggagcacagaagaagcaccctgaggaagctgaagccagagagcatgtatgagacctgggaggatgacatggatggcatccacatcgtggcctttgctgaggaggccgaccctgatggctttgagttcctggagaccctgaaggctgtggcccaggacaacacagaaaatccagacctgagcatcatctggattgatcctgatgacttccccctgctggtgccctactgggagaagacctttgacatcgacctgagcgccccccagattggagtggtgaatgtgacagatgctgacagcgtgtggatggagatggatgatgaggaggacctgcccagcgctgaggagctggaggactggctggaggatgtgctggagggggagatcaacacagaagatgatgatgatgatgatgatgactag

SEQ ID NO: 83951 - DNA, 1191 bp, Artificial Sequence
  derived and/or modified sequence
atgagcgccaccgaccggatgggcccccgggccgtgcccggcctgcggctggccttactgctgctcctcgttcttgggactcctaagtccggagtccagggccaggaaggcctagattttcccgagtacgatggggtggatcgtgtgattaacgtcaacgccaaaaactataagaatgtgtttaaaaagtacgaggtcttagcgctcctttaccacgaacctcccgaagacgacaaggcttcgcaaagacaatttgaaatggaagaactcattctagaacttgctgcccaggtcctagaggacaagggagtgggcttcgggttggtcgactcagaaaaagatgcggcagtggctaagaagctcggcctaactgaagttgactccatgtatgttttcaagggagatgaggtaatagagtacgatggagagttctcagccgacacaattgtggaatttcttctggatgtgcttgaggacccggttgaacttatcgagggcgagcgcgaactgcaagccttcgaaaacattgaagacgaaatcaagctcatcggttatttcaaaagcaaggactccgaacattataaagccttcgaagatgcggccgaagaatttcatccctatattccattttttgcaacctttgattccaaggtggcgaagaaattgacactgaagctcaatgagatcgacttctacgaagcctttatggaagaaccagtaaccattccagacaagcctaattcggaagaagaaatcgtcaattttgtggaggagcaccggaggtctacactaagaaaattgaagcccgagtccatgtacgagacgtgggaagacgatatggatggtatccacatcgtcgcctttgctgaggaggctgatcccgatggtttcgagttcttagaaacgcttaaggcagtggcacaggataacaccgaaaaccctgatctgagcatcatctggattgacccagacgattttcctcttctcgtgccttactgggagaaaactttcgacattgatttatctgctccacagatcggagtcgttaatgtgactgacgctgacagcgtctggatggagatggatgacgaggaggacctcccaagcgctgaagagctggaagactggttagaggatgtgctcgagggagagatcaatacagaggacgacgatgatgatgatgatgactag

SEQ ID NO: 83952 - DNA, 1173 bp, Artificial Sequence
  derived and/or modified sequence
atgggcccccgggccgtgcccggcctgcggctggccctgctgctgctgctggtgttagggaccccaaagagtggagtgcagggccaggagggcctggatttcccagagtacgacggcgtggaccgagtaatcaatgtgaatgccaaaaactataagaacgtgtttaaaaaatacgaagttctcgctctactgtaccacgagccgcctgaggatgataaagcatctcagagacagttcgagatggaagagttaatcctggagctggctgcacaggtactcgaggacaaaggagtggggtttggcttagtggactctgaaaaggacgcagctgtggcgaaaaaactggggctgaccgaggttgactcaatgtacgtgttcaagggggacgaagtaatcgagtatgacggcgagttttcagctgatactatcgtagaatttctgctggacgttctggaggaccctgtggagcttatcgagggtgaacgggagcttcaggctttcgagaatattgaggacgagataaagctcattgggtatttcaagagtaaggacagcgaacactataaggcattcgaagacgctgcagaagaattccatccgtacattccattcttcgcaaccttcgatagcaaggtcgctaagaagctgacgctgaagctcaacgagatcgatttttacgaggcatttatggaagagcccgtgaccatccctgacaagcctaacagcgaagaagagatcgtgaacttcgtggaagagcatagacgatctacgctgagaaagctgaagcctgagtctatgtatgagacatgggaggacgacatggatgggatacatattgtggccttcgcagaagaagccgatccagacggttttgagttcctggaaaccctcaaggcagtcgctcaggacaatacggagaatcccgacttatccataatatggatcgatcccgacgattttcctctgttggtcccatattgggaaaaaacattcgatatcgatctatctgccccgcagattggcgtggtgaacgtgaccgatgcggactctgtctggatggaaatggatgatgaggaagacctgccttccgccgaagagctggaagactggctggaagacgtgctagagggagagattaatacagaagacgacgatgatgatgacgacgattag

SEQ ID NO: 83953 - DNA, 936 bp, Artificial Sequence
  derived and/or modified sequence
atgagcatgcagcggaccacccggatgtgcagccggagcatgcggtgctggcactcatctacgatgaacccacctcggatgaccagacctcacaaggacaacagcctgggattgacagaggtcgatagcatgtacgtgttcaagggcgatgaggttattgagtacgatggtgagtttagcgccgataccatagtggagtttctcctcgatgtactggaggatccagtcgagttgatagagggcgaaagagagctgcaggcatttgagaatatcgaagatgagataaagttgatcgggtactttaagtccaaagactcagaacactacaaagcctttgaggacgctgccgaggaattccatccatatattccgttctttgccacttttgattctaaagtggcgaagaagctgaccctgaagttgaatgagatagatttctacgaggctttcatggaggagcccgtgaccatccccgataaacccaattctgaggaggagattgtaaactttgtagaggagcacagacgatcaaccctcagaaaactcaagcccgagtcaatgtatgagacgtgggaggacgacatggacggtattcatatcgtcgccttcgctgaagaggccgaccctgacggctttgaattcctagaaactctaaaggcagttgcgcaagataacacggaaaacccagacctgtctataatctggatcgacccggacgactttcccctgcttgttccctactgggagaagacattcgacatcgatctgagcgcccctcagatcggggtggtaaacgttactgacgcggattctgtttggatggaaatggacgatgaggaggatctgccttctgcagaagagcttgaggactggctggaggatgtgctggagggcgaaattaacaccgaagatgacgatgatgacgatgacgattag

SEQ ID NO: 83954 - DNA, 1191 bp, Artificial Sequence
  derived and/or modified sequence
atgtcggctaccgaccggatgggaccacgcgcagttccgggtctgcggctggccctgcttctattattagtgcttggaactccaaagtctggtgtgcaggggcaggagggcctcgattttcctgagtacgatggtgttgaccgcgttattaatgttaacgctaagaattacaaaaatgtatttaaaaagtatgaagtccttgccctgttatatcatgagcctcccgaggatgacaaggcatcccagcgccagttcgaaatggaggaactcatactggagctggctgcccaggtcctggaggacaagggtgtcggcttcggcctggtggatagtgagaaggacgcagcagtggccaagaagctcgggctcactgaagtggattctatgtatgtatttaaaggagatgaagtgatagaatacgacggggagttctccgctgacacaatcgtcgagtttttgctcgatgttctggaggatcccgttgaactgattgaaggagaaagagagctgcaggccttcgagaatatagaggacgagatcaagctgattggttactttaagtccaaagacagtgagcattacaaagcattcgaggacgccgcagaggagttccatccctatataccattctttgcgacattcgacagtaaagtcgctaaaaagcttaccctgaaattgaacgaaattgatttctatgaggcttttatggaggagcccgtgactattcctgataaaccgaattccgaggaagagatcgtgaacttcgtggaggagcatcgcagatccaccctgaggaaactgaagccagagtcgatgtatgaaacctgggaagacgatatggacgggatacacatcgtggcgttcgccgaggaagccgacccagatggtttcgaatttctggagacgctcaaggccgtggcccaggataacaccgaaaatcctgacctctctataatatggatcgaccccgatgattttcctttacttgtgccctactgggaaaagacgtttgacatcgatctcagcgctccacagattggggtggtaaatgttaccgatgccgacagcgtctggatggagatggacgacgaggaggacctgccctctgcagaggagctagaggattggctagaggatgtgcttgaaggagagatcaatacagaagatgatgacgatgatgacgacgattag

SEQ ID NO: 83955 - DNA, 1173 bp, Artificial Sequence
  derived and/or modified sequence
atggggccaagggcagtacccggattgcggctggcactgctgctgttgttggtactgggcaccccaaagtctggcgtgcaaggacaagagggcctcgattttcctgaatatgatggggtcgaccgggtcattaatgtgaacgccaagaactataaaaacgtgtttaaaaaatacgaagtgctggccctactgtatcatgagccccctgaagacgacaaggcctcccagaggcagttcgagatggaggagctaatcctggagctcgccgctcaggtcctggaagataagggcgtcggttttggactggttgattctgagaaggacgcggcagtggctaaaaagctcgggctaacggaggttgatagcatgtacgtgtttaagggcgatgaggtcatagaatatgacggcgagttttccgccgacacaatcgtcgagtttcttctggacgtgttggaagatcctgtagagctgatcgagggggagagagagctccaggcatttgagaacatcgaggacgagattaagctgatcgggtactttaagtccaaggactctgagcactataaggccttcgaagatgccgctgaggaattccatccttacattcccttctttgccactttcgactccaaggtagccaaaaagttgacgttgaagttgaacgagatagacttttatgaggcatttatggaagaacctgtcaccatcccggacaaacccaatagtgaggaggagattgtaaattttgtggaggagcatagacggagtactctccgcaagctcaagcccgagtctatgtatgaaacctgggaagacgacatggacggtattcacatcgtcgcctttgccgaagaggccgatccagatgggtttgagtttctggagactctgaaggctgtggcgcaagataacaccgagaatcctgacctcagtataatctggatagatcctgacgacttcccattgctggtcccttactgggaaaaaacatttgacatcgatctgagcgcccctcaaatcggagtcgtcaacgtcactgatgcggacagcgtttggatggaaatggacgacgaggaggaccttccctctgcagaagaactggaggactggctagaagacgtgctggaaggagaaatcaataccgaggacgacgacgacgacgacgacgactag

SEQ ID NO: 83956 - DNA, 936 bp, Artificial Sequence
  derived and/or modified sequence
atgtccatgcaacgtactactagaatgtgtagtaggagcatgcgctgctggcattcctccaccatgaacccgcctaggatgactcgcccacacaaggataactcactcggcctgaccgaagtcgactccatgtatgtcttcaagggagatgaagtgattgagtatgatggcgagttttcggccgataccattgtagagtttcttctcgacgtgcttgaagatcccgtggagctcattgagggcgagagggagcttcaggcgtttgagaacatcgaggacgagataaagcttatagggtactttaagtccaaagacagcgagcattacaaggcttttgaggacgctgccgaagagtttcatccgtatattccattcttcgccactttcgactccaaagtcgccaaaaagctcaccctgaagttaaacgaaatcgatttctatgaagcctttatggaagagcctgtgacgataccggataagcccaacagtgaagaagaaatcgtgaatttcgtcgaagagcacaggaggtctaccctaaggaaattaaaaccagagtctatgtatgagacctgggaggatgatatggacggcatacatatagttgcttttgccgaggaagctgacccagacgggttcgagttcttagagactcttaaagccgtggcccaggataacactgaaaatcctgatctgtcaatcatttggatcgaccctgacgactttcctttactggtgccatattgggaaaagacctttgacatcgacctctctgcacctcagatcggagtcgtcaacgtaaccgatgctgactctgtctggatggaaatggatgacgaggaagatctgcccagtgccgaggagctcgaggactggctggaagatgtcctggaaggtgagatcaatacagaggacgatgatgacgacgacgatgattag

SEQ ID NO: 83957 - DNA, 1897 bp, Artificial Sequence
  derived and/or modified sequence
acctgaccctttttcccttggctctgtcggcagtttctccaggacccagcagtgccctctgtccactgctctgggccattccccaatcccccctcccacttgagcccctaactcagaatctgggacccaggggcccctccctaccccagctaacctcttctggaccaggagagccaacccagatcccactacctccatgagtgctacagacaggatggggcccagagctgtgccgggtctgcggctggcactgctgttgctgctggtgctagggacacccaagtcaggggtacaggggcaggaagggctggacttccctgagtacgatggtgtggaccgtgtgatcaatgtcaatgcaaagaactacaagaatgtgttcaagaagtatgaggtgctggcactcctctaccatgaaccccccgaggatgacaaggcctcacaaagacaatttgagatggaggagctgatcctggagttagcagcccaagtcctagaagacaagggtgttggcttcgggctggtagactctgagaaggatgcagctgtggccaagaaactaggcctaactgaagtggacagcatgtatgtattcaagggagatgaagtcattgagtacgatggcgagttttctgctgacaccatcgtggagtttctgcttgatgtcctagaggaccctgtggaattgattgaaggtgaacgagagctgcaggcgtttgagaatattgaggatgagatcaaactcattggctacttcaagagcaaagactcagagcattacaaagccttcgaggatgcagctgaggagtttcatccctacatccccttcttcgccaccttcgacagcaaggtggcaaagaagctgaccctgaagctgaatgagattgatttctacgaggccttcatggaagagcctgtgaccatcccagacaagcccaatagcgaagaggagattgtcaacttcgtggaggagcacaggagatcaaccctgaggaaactgaagccggagagtatgtatgagacctgggaggatgatatggatggaatccacattgtggccttcgcagaggaagctgatcctgatggtttcgagttcttagagactctcaaggctgtggcccaagataacactgaaaacccagatcttagcatcatctggattgaccctgatgacttccccctgctggtcccatactgggagaagacgtttgacatcgacttgtcagccccacaaataggagtcgtcaatgttactgatgcggatagcgtatggatggaaatggacgatgaggaggacctgccttctgctgaggagctggaggactggctggaggatgtcctggagggcgagatcaacacagaggacgatgacgatgatgatgatgactagttgctatggcaaccatctttcagccccactggtcttttcatgctctctcctgccttcccttgtccttccctgagttcctccagggagactaggttattctctgccatagagctaactggggtctatatgctgggtgctgagacactgatccccctcatttgatgagcaaatgagctacttttccctagacaccaggccagctctctcttatctgacttctgtttcttatcccataacttacttgtatctattatgtgtctcttccatcactctccatactctttcttgtgattctcctctagccatatatatgggccccatctctgttctgttccctccatctatgcacagctttcccccactctctctaatcctgtatctttctgactgtcctgtccttggccagaaggaagggagaatactgtgtttgggactgtatctcagcaatcacttgttaatgtatttgggtcaaatgagaggcctcaataaagacatctggggcagcatgaa

SEQ ID NO: 83958 - DNA, 1956 bp, Artificial Sequence
  derived and/or modified sequence
aggggtgccaatttcagggggcagctccggttccctccccgccccctgctcctattcctccacctgaccctttttcccttggctctgtcggcagtttctccaggacccagcagtgccctctgtccactgctctgggccattccccaatcccccctcccacttgagcccctaactcagaatctgggacccaggggcccctccctaccccagctaacctcttctggaccaggagagccaacccagatcccactacctccatgagtgctacagacaggatggggcccagagctgtgccgggtctgcggctggcactgctgttgctgctggtgctagggacacccaagtcaggggtacaggggcaggaagggctggacttccctgagtacgatggtgtggaccgtgtgatcaatgtcaatgcaaagaactacaagaatgtgttcaagaagtatgaggtgctggcactcctctaccatgaaccccccgaggatgacaaggcctcacaaagacaatttgagatggaggagctgatcctggagttagcagcccaagtcctagaagacaagggtgttggcttcgggctggtagactctgagaaggatgcagctgtggccaagaaactaggcctaactgaagtggacagcatgtatgtattcaagggagatgaagtcattgagtacgatggcgagttttctgctgacaccatcgtggagtttctgcttgatgtcctagaggaccctgtggaattgattgaaggtgaacgagagctgcaggcgtttgagaatattgaggatgagatcaaactcattggctacttcaagagcaaagactcagagcattacaaagccttcgaggatgcagctgaggagtttcatccctacatccccttcttcgccaccttcgacagcaaggtggcaaagaagctgaccctgaagctgaatgagattgatttctacgaggccttcatggaagagcctgtgaccatcccagacaagcccaatagcgaagaggagattgtcaacttcgtggaggagcacaggagatcaaccctgaggaaactgaagccggagagtatgtatgagacctgggaggatgatatggatggaatccacattgtggccttcgcagaggaagctgatcctgatggtttcgagttcttagagactctcaaggctgtggcccaagataacactgaaaacccagatcttagcatcatctggattgaccctgatgacttccccctgctggtcccatactgggagaagacgtttgacatcgacttgtcagccccacaaataggagtcgtcaatgttactgatgcggatagcgtatggatggaaatggacgatgaggaggacctgccttctgctgaggagctggaggactggctggaggatgtcctggagggcgagatcaacacagaggacgatgacgatgatgatgatgactagttgctatggcaaccatctttcagccccactggtcttttcatgctctctcctgccttcccttgtccttccctgagttcctccagggagactaggttattctctgccatagagctaactggggtctatatgctgggtgctgagacactgatccccctcatttgatgagcaaatgagctacttttccctagacaccaggccagctctctcttatctgacttctgtttcttatcccataacttacttgtatctattatgtgtctcttccatcactctccatactctttcttgtgattctcctctagccatatatatgggccccatctctgttctgttccctccatctatgcacagctttcccccactctctctaatcctgtatctttctgactgtcctgtccttggccagaaggaagggagaatactgtgtttgggactgtatctcagcaatcacttgttaatgtatttgggtcaaatgagaggcctcaataaagacatctggggcagcatg

SEQ ID NO: 83959 - DNA, 1444 bp, Artificial Sequence
  derived and/or modified sequence
atgtcaatgcaaagaactacaagaatgtgttcaagaagtatgaggtgctggcactcctctaccatgaaccccccgaggatgacaaggcctcacaaagacaattccctaggcctaactgaagtggacagcatgtatgtattcaagggagatgaagtcattgagtacgatggcgagttttctgctgacaccatcgtggagtttctgcttgatgtcctagaggaccctgtggaattgattgaaggtgaacgagagctgcaggcgtttgagaatattgaggatgagatcaaactcattggctacttcaagagcaaagactcagagcattacaaagccttcgaggatgcagctgaggagtttcatccctacatccccttcttcgccaccttcgacagcaaggtggcaaagaagctgaccctgaagctgaatgagattgatttctacgaggccttcatggaagagcctgtgaccatcccagacaagcccaatagcgaagaggagattgtcaacttcgtggaggagcacaggagatcaaccctgaggaaactgaagccggagagtatgtatgagacctgggaggatgatatggatggaatccacattgtggccttcgcagaggaagctgatcctgatggtttcgagttcttagagactctcaaggctgtggcccaagataacactgaaaacccagatcttagcatcatctggattgaccctgatgacttccccctgctggtcccatactgggagaagacgtttgacatcgacttgtcagccccacaaataggagtcgtcaatgttactgatgcggatagcgtatggatggaaatggacgatgaggaggacctgccttctgctgaggagctggaggactggctggaggatgtcctggagggcgagatcaacacagaggacgatgacgatgatgatgatgactagttgctatggcaaccatctttcagccccactggtcttttcatgctctctcctgccttcccttgtccttccctgagttcctccagggagactaggttattctctgccatagagctaactggggtctatatgctgggtgctgagacactgatccccctcatttgatgagcaaatgagctacttttccctagacaccaggccagctctctcttatctgacttctgtttcttatcccataacttacttgtatctattatgtgtctcttccatcactctccatactctttcttgtgattctcctctagccatatatatgggccccatctctgttctgttccctccatctatgcacagctttcccccactctctctaatcctgtatctttctgactgtcctgtccttggccagaaggaagggagaatactgtgtttgggactgtatctcagcaatcacttgttaatgtatttgggtcaaatgagaggcctcaataaagacatctggggcagcatg

SEQ ID NO: 83960 - DNA, 1191 bp, Artificial Sequence
  derived and/or modified sequence
atgagcgccaccgacagaatgggccccagagccgtgcccggcctgagactggccctgctgctgctgctggtgctgggcacccccaagagcggcgtgcagggccaggagggcctggacttccccgagtacgacggcgtggacagagtgatcaacgtgaacgccaagaactacaagaacgtgttcaagaagtacgaggtgctggccctgctgtaccacgagccccccgaggacgacaaggccagccagagacagttcgagatggaggagctgatcctggagctggccgcccaggtgctggaggacaagggcgtgggcttcggcctggtggacagcgagaaggacgccgccgtggccaagaagctgggcctgaccgaggtggacagcatgtacgtgttcaagggcgacgaggtgatcgagtacgacggcgagttcagcgccgacaccatcgtggagttcctgctggacgtgctggaggaccccgtggagctgatcgagggcgagagagagctgcaggccttcgagaacatcgaggacgagatcaagctgatcggctacttcaagagcaaggacagcgagcactacaaggccttcgaggacgccgccgaggagttccacccctacatccccttcttcgccaccttcgacagcaaggtggccaagaagctgaccctgaagctgaacgagatcgacttctacgaggccttcatggaggagcccgtgaccatccccgacaagcccaacagcgaggaggagatcgtgaacttcgtggaggagcacagaagaagcaccctgagaaagctgaagcccgagagcatgtacgagacctgggaggacgacatggacggcatccacatcgtggccttcgccgaggaggccgaccccgacggcttcgagttcctggagaccctgaaggccgtggcccaggacaacaccgagaaccccgacctgagcatcatctggatcgaccccgacgacttccccctgctggtgccctactgggagaagaccttcgacatcgacctgagcgccccccagatcggcgtggtgaacgtgaccgacgccgacagcgtgtggatggagatggacgacgaggaggacctgcccagcgccgaggagctggaggactggctggaggacgtgctggagggcgagatcaacaccgaggacgacgacgacgacgacgacgactag

SEQ ID NO: 83961 - DNA, 1173 bp, Artificial Sequence
  derived and/or modified sequence
atgggccccagagccgtgcccggcctgagactggccctgctgctgctgctggtgctgggcacccccaagagcggcgtgcagggccaggagggcctggacttccccgagtacgacggcgtggacagagtgatcaacgtgaacgccaagaactacaagaacgtgttcaagaagtacgaggtgctggccctgctgtaccacgagccccccgaggacgacaaggccagccagagacagttcgagatggaggagctgatcctggagctggccgcccaggtgctggaggacaagggcgtgggcttcggcctggtggacagcgagaaggacgccgccgtggccaagaagctgggcctgaccgaggtggacagcatgtacgtgttcaagggcgacgaggtgatcgagtacgacggcgagttcagcgccgacaccatcgtggagttcctgctggacgtgctggaggaccccgtggagctgatcgagggcgagagagagctgcaggccttcgagaacatcgaggacgagatcaagctgatcggctacttcaagagcaaggacagcgagcactacaaggccttcgaggacgccgccgaggagttccacccctacatccccttcttcgccaccttcgacagcaaggtggccaagaagctgaccctgaagctgaacgagatcgacttctacgaggccttcatggaggagcccgtgaccatccccgacaagcccaacagcgaggaggagatcgtgaacttcgtggaggagcacagaagaagcaccctgagaaagctgaagcccgagagcatgtacgagacctgggaggacgacatggacggcatccacatcgtggccttcgccgaggaggccgaccccgacggcttcgagttcctggagaccctgaaggccgtggcccaggacaacaccgagaaccccgacctgagcatcatctggatcgaccccgacgacttccccctgctggtgccctactgggagaagaccttcgacatcgacctgagcgccccccagatcggcgtggtgaacgtgaccgacgccgacagcgtgtggatggagatggacgacgaggaggacctgcccagcgccgaggagctggaggactggctggaggacgtgctggagggcgagatcaacaccgaggacgacgacgacgacgacgacgactag

SEQ ID NO: 83962 - DNA, 936 bp, Artificial Sequence
  derived and/or modified sequence
atgagcatgcagagaaccaccagaatgtgcagcagaagcatgagatgctggcacagcagcaccatgaacccccccagaatgaccagaccccacaaggacaacagcctgggcctgaccgaggtggacagcatgtacgtgttcaagggcgacgaggtgatcgagtacgacggcgagttcagcgccgacaccatcgtggagttcctgctggacgtgctggaggaccccgtggagctgatcgagggcgagagagagctgcaggccttcgagaacatcgaggacgagatcaagctgatcggctacttcaagagcaaggacagcgagcactacaaggccttcgaggacgccgccgaggagttccacccctacatccccttcttcgccaccttcgacagcaaggtggccaagaagctgaccctgaagctgaacgagatcgacttctacgaggccttcatggaggagcccgtgaccatccccgacaagcccaacagcgaggaggagatcgtgaacttcgtggaggagcacagaagaagcaccctgagaaagctgaagcccgagagcatgtacgagacctgggaggacgacatggacggcatccacatcgtggccttcgccgaggaggccgaccccgacggcttcgagttcctggagaccctgaaggccgtggcccaggacaacaccgagaaccccgacctgagcatcatctggatcgaccccgacgacttccccctgctggtgccctactgggagaagaccttcgacatcgacctgagcgccccccagatcggcgtggtgaacgtgaccgacgccgacagcgtgtggatggagatggacgacgaggaggacctgcccagcgccgaggagctggaggactggctggaggacgtgctggagggcgagatcaacaccgaggacgacgacgacgacgacgacgactag

SEQ ID NO: 83963 - protein, 162 aa, Artificial Sequence
  derived and/or modified sequence
MGLETEKADVQLFMDDDSYSHHSGLEYADPEKFADSDQDRDPHRLNSHLKLGFEDVIAEPVTTHSFDKVWICSHALFEISKYVMYKFLTVFLAIPLAFIAGILFATLSCLHIWILMPFVKTCLMVLPSVQTIWKSVTDVIIAPLCTSVGRCFSSVSLQLSQD

SEQ ID NO: 83964 - protein, 113 aa, Artificial Sequence
  derived and/or modified sequence
MGLETEKADVQLFMDDDSYSHHSGLEYADPEKFADSDQDRDPHRLNSHLKLGFEDVIAEPVTTHSFDKVWICSHALFEISKYVMYKFLTVFLAIPLAFIAGILFATLSCLHIW

SEQ ID NO: 83965 - DNA, 342 bp, Artificial Sequence
  derived and/or modified sequence
atgggtttagagacagaaaaagccgatgtgcaattgttcatggatgacgattcctattctcatcactcgggcctcgagtacgcagatccagagaaattcgcggactccgaccaagaccgagacccacaccgactgaatagccacttgaagctgggatttgaagatgtgatcgctgagccagtgacaactcatagctttgacaaagtgtggatctgctctcatgctctgtttgaaatctccaagtatgttatgtacaaattcttaactgtctttctggcaatccctctggccttcatcgcaggcattttgtttgccacactgtcttgtttacacatctggtag

SEQ ID NO: 83966 - DNA, 342 bp, Artificial Sequence
  derived and/or modified sequence
atgggcctggagacagagaaggcagatgtgcagctgttcatggatgatgacagctacagccaccacagcggcctggagtatgctgaccctgagaagtttgctgacagcgaccaggaccgggacccccaccggctgaacagccacctgaagctgggctttgaagatgtgattgctgagcctgtgaccacccacagctttgacaaggtgtggatctgcagccacgccctgtttgagatcagcaaatatgtgatgtacaagttcctgactgtgttcctggccatccccctggccttcatcgccggcatcctgtttgccaccctgagctgcctgcacatctggtag

SEQ ID NO: 83967 - DNA, 342 bp, Artificial Sequence
  derived and/or modified sequence
atgggcctggagaccgagaaggccgacgtgcagctgttcatggacgacgatagctactcccaccatagcgggttagaatacgcggaccctgaaaaatttgccgacagcgatcaggatagggatccacaccgtctgaactcccacttgaaattgggatttgaagatgtaattgcagagcccgttaccactcacagctttgataaggtgtggatatgcagtcatgccctttttgaaatttcaaaatatgtgatgtacaagtttctgacagtgtttctcgccatccccttagcattcatcgcgggaatcctgttcgccacactgtcctgcctacatatttggtag

SEQ ID NO: 83968 - DNA, 342 bp, Artificial Sequence
  derived and/or modified sequence
atggggctggaaacggagaaagctgacgttcaactgtttatggacgatgattcctattcccatcattccggactggagtacgctgaccctgagaaattcgcggactccgaccaggatagggatccccaccgcctgaatagtcacttgaaactggggttcgaagatgtcattgctgagcccgttacgacacattcgttcgacaaagtgtggatttgtagccacgcgctgttcgaaatttcaaagtacgttatgtacaaatttcttaccgtgttcttagccattccgctggccttcatagccggtattctcttcgcgactctttcctgtctgcacatctggtag

SEQ ID NO: 83969 - DNA, 3301 bp, Artificial Sequence
  derived and/or modified sequence
ctccctccaggaaggccgttgtcttccctgggacgacttgccagctctgaggcatgacagtacgggcccccagaagggtgaccaggaggccctcctcgtcccagctgccggcgtcgccgcccactgcagggcccgggctgtgactcgtggggacggttccctgcgccccggcgggggaggtgggcggggaggggcggcggggcgccggggcggggctcgggacggccgggctgggagctggagcccacagcgggaagcggccgccgcccgggcctcgcagggctaggcgaggcgagggggggcggggccgggcgctacgggaaggggaggccgcgcggaccgggagccgcaccgcgccagccgggctgcagcggccgcgcaccaaggctgcgatggggctggagacggagaaggcggacgtacagctcttcatggacgacgactcctacagccaccacagcggcctcgagtacgccgaccccgagaagttcgcggactcggaccaggaccgggatccccaccggctcaactcgcatctcaagctgggcttcgaggatgtgatcgcagagccggtgactacgcactcctttgacaaagtgtggatctgcagccatgccctctttgaaatcagcaaatacgtaatgtacaagttcctgacggtgttcctggccattcccctggccttcattgcgggaattctctttgccaccctcagctgtctgcacatctggattttaatgccttttgtaaagacctgcctaatggttctgccttcagtgcagacaatatggaagagtgtgacagatgttatcattgctccattgtgtacgagcgtaggacgatgcttctcttctgtcagcctgcaactgagccaggattgaatacttggaccccaggtctggagattgggatactgtaatacttctttgttattataacataaaagcaccactgttctgttcatttcctagctgttctaattaagaaaactattaagatgagcaaccacatttagaaatgtttattgacaggtcttttcaaataatgcttttctaattaatagccaaagatttcatatctaactttgtaaccagaattatacagtaagttgacaccacttagatttaaaggcagacagttttgctttagtacaatagtatacattttataatgatgaacttataatgattaagggacatttctataaaaatactacaatagttttatgcacaacttcccattaaaaatgagatttcttatttgtttgtctgtttttactctgggagtaatactttttaaattacctttacatatatagtcactggcatactgagaatatacaatgatcctggaaattgcagtaacaaaagcacacaacgattatagtaactataagatacaataaaacaaataaatatgaaagtagattcatgaaaatgtattcctttaaaatattgttttcctacaggcctatttaacaagatgtttcattttactgtatattttgtagttaatataaatgttgctctaatcagattgcttaaaagcatttttattatatttatgttgttgaactaatatatgaaataagtaaatgtagctcccacaaggtaaacttcattggtaagattgcactgttctgattatgtaagcatttgtacatcttctttggaaataaaagataaaagagcgatacacaaagctttcttttctaacttttccaagcaaaatctaaaatgttttatgacatttttctggctgtgatcttaaaataattcatatctaaatagtattttgtctaggagatgctttctctctagtagttagaaattaaatctgtgtcagcattcctattaatgtctcactttactttcaagtaatattggtgctatttaacattttacagtaaatgttacttctgatactttagtacaatttcaactacagtgattcatgtagagagacaggggagttgtcaacttgggctactgaactacatgcataaactaaaaactaacagctacaaacttttaagatttctctaatattggtatgtaacacaggataaagttattcttgtcattttgaactgtagagtcctatttcagtgtgatgaatcactgttgctttgaaaaatctcattatttctgggccgggcatggtggctcacccctgtaatcccagcactttgggaggccaaggcgggtggatcatgaggtcaggagatcaagaccatcctggccaacatggtgataccccgtctctactaaaaatacaaaaaaattagttgggcatggtggcatgcacctgtagtcccagctacctgggaggctgaggcaggagaattgcttgaacctgggaggcagaggttgcagtgagccaaaatcatgccactgcactcccgcctggcaacagagcaagagtctgtctcaaaaaaaaaaagaaaaaaagaaaaaaagaaaaaagaaaaatctcattatttcaaaatgatagacatataccaaaaacaagtctataatgtgagtagttactaaaatttacacatcttaaaagtgtgtaaatgcttaaatttcagaattaccatcagaacctcaattgacattcctttgaatacgctaataagtgacaaataagattaataagatttttcaaaatcgccaggactggtgaatataaatgatgattgaactggaataatattggggaccaaatcaaatgaatgattaaattatgaagctcatatccttttgaaggtagttgcaaagagacatttcaaaactgccctaggccattgcagcatccttagatgggacgcataatcattaccttaaagcatcaccactcattttgaccatatagattttattatgttagtttaaaaggtcaatcagcctcatgactttatagttatgtcttgtatttaaaaacattttttatacatttggttatgttgataaaccaaaaacatttgattaataaaatatctatttgaataaattatgagctatcctttcaaacagctattggcaagttttaaacccaaaatatatacacatagttctgtaataaaactgtttgacttctcaagtaacatgacttccttatttctgaacagtactggttactttcaaaatgaatttttattgagattttccattaactatttttttcaaagactcaaattttgtaccaagtaaatccaggctttatgtacaaacatgttgtttgttttatttggggctgggggaggtatatgatgagcagacttctcggaattcataataaattttctaaaagccta

SEQ ID NO: 83970 - DNA, 893 bp, Artificial Sequence
  derived and/or modified sequence
cgatggggctggagacggagaaggcggacgtacagctcttcatggacgacgactcctacagccaccacagcggcctcgagtacgccgaccccgagaagttcgcggactcggaccaggaccgggatccccaccggctcaactcgcatctcaagctgggcttcgaggatgtgatcgcagagccggtgactacgcactcctttgacaaagtgtggatctgcagccatgccctctttgaaatcagcaaatacgtaatgtacaagttcctgacggtgttcctggccattcccctggccttcattgcgggaattctctttgccaccctcagctgtctgcacatctggtgagacggggcacaccgggtggaccggctttctgaaacatgggcatattctccgccacctgccccctactctcctcttatcccaggccggcgtcaggaggaggaacgcgcatcagttcccaagcagtaggaagaactggaaggccttgaaaggcaatgcgcttcctttagaataacagtttgggcttggagtttcaacaggagaaagaatgtcggtctttcctggggtgtgattttccttgcatacataaggctgggctgagtgtggaggcgggtacctggaagccacacttcttaccacaggctgctctcggggccctgttgtgactcgtacctgcggttctgggcaggactcttctttctttcattgccttttattcagtcactgcctgtgcttggggtaaaacaaaagtgatctctgagcagaatgccgctgacagtagaattggatgaggatgtcagacctggttaagcagtagtgtggaggggctgcttcaactttgcccctggcagatggcaaggatgggacccagaggaaagggaggtgtgtgca

SEQ ID NO: 83971 - DNA, 342 bp, Artificial Sequence
  derived and/or modified sequence
atgggcctggagaccgagaaggccgacgtgcagctgttcatggacgacgacagctacagccaccacagcggcctggagtacgccgaccccgagaagttcgccgacagcgaccaggacagagacccccacagactgaacagccacctgaagctgggcttcgaggacgtgatcgccgagcccgtgaccacccacagcttcgacaaggtgtggatctgcagccacgccctgttcgagatcagcaagtacgtgatgtacaagttcctgaccgtgttcctggccatccccctggccttcatcgccggcatcctgttcgccaccctgagctgcctgcacatctggtag

SEQ ID NO: 83972 - DNA, 489 bp, Artificial Sequence
  derived and/or modified sequence
atgggactggagacggaaaaggctgatgttcagctatttatggacgacgattcttactctcatcactcgggattagaatatgcagatcccgagaaattcgccgattcagaccaggaccgggatccacataggctcaacagtcatctaaagctgggatttgaagacgtgatcgccgaacccgtgacaactcactctttcgacaaagtgtggatctgttcgcatgcactctttgagattagtaagtacgtgatgtataagtttctgactgtgtttttagccatacccttggcattcattgccggaattctattcgcaaccctctcatgcctgcatatatggatcctaatgccattcgtcaagacatgccttatggtgttgccatctgtgcagactatttggaaatccgtcactgatgtaataatagctcccttgtgcacatccgtggggcgatgcttctcttccgtgtcacttcagttgagccaggactag

SEQ ID NO: 83973 - DNA, 489 bp, Artificial Sequence
  derived and/or modified sequence
atgggcctggagacagagaaggcagatgtgcagctgttcatggatgatgacagctacagccaccacagcggcctggagtatgctgaccctgagaagtttgctgacagcgaccaggaccgggacccccaccggctgaacagccacctgaagctgggctttgaagatgtgattgctgagcctgtgaccacccacagctttgacaaggtgtggatctgcagccacgccctgtttgagatcagcaaatatgtgatgtacaagttcctgactgtgttcctggccatccccctggccttcatcgccggcatcctgtttgccaccctgagctgcctgcacatctggatcctgatgccctttgtgaagacctgcctgatggtgctgcccagcgtgcagaccatctggaagtctgtgacagatgtgatcatcgcccccctgtgcacctctgtgggccgctgcttcagctctgtgtccctgcagctgagccaggactag

SEQ ID NO: 83974 - DNA, 489 bp, Artificial Sequence
  derived and/or modified sequence
atgggcctggagaccgagaaggccgacgtgcagctgttcatggacgatgattcctactcccatcactctgggcttgaatacgccgacccggaaaagtttgccgactcagaccaggatagggatccgcacagattgaacagccatctgaagcttggcttcgaggatgtgattgctgagcctgtgaccacacacagcttcgacaaggtgtggatttgctcacacgccctgtttgaaattagtaaatatgttatgtataaattcctcaccgtgttcctcgcgatcccgttggctttcatcgcggggattttgttcgctacactctcctgtttgcatatctggatccttatgcccttcgtgaagacttgtttgatggtgcttcctagtgtacaaacgatatggaaaagtgtgactgacgttatcatcgcacccttgtgcacatcagtgggacgatgcttcagttcagtttctttgcagttatcccaagattag

SEQ ID NO: 83975 - DNA, 489 bp, Artificial Sequence
  derived and/or modified sequence
atggggctggagaccgagaaggctgacgtgcaattgtttatggatgacgacagttactctcatcattccggactggagtatgctgaccccgagaagttcgccgatagtgaccaggacagagatccgcataggctgaattctcacctgaaattggggttcgaggatgtgattgctgaacccgtaactacccattcgtttgacaaggtttggatatgtagccacgccttgttcgagataagcaagtatgtgatgtacaaatttctaaccgtctttttggctatcccgctggcctttatcgctggcattttatttgcaacactgagctgtttgcacatatggatcctgatgcctttcgtgaaaacgtgcctgatggtgctcccatctgttcagacaatctggaaaagtgtcacagatgtcatcatcgcccctttgtgtactagcgtggggaggtgtttcagcagcgtctcattgcagctctctcaggactag

SEQ ID NO: 83976 - DNA, 489 bp, Artificial Sequence
  derived and/or modified sequence
atgggcctggagaccgagaaggccgacgtgcagctgttcatggacgacgacagctacagccaccacagcggcctggagtacgccgaccccgagaagttcgccgacagcgaccaggacagagacccccacagactgaacagccacctgaagctgggcttcgaggacgtgatcgccgagcccgtgaccacccacagcttcgacaaggtgtggatctgcagccacgccctgttcgagatcagcaagtacgtgatgtacaagttcctgaccgtgttcctggccatccccctggccttcatcgccggcatcctgttcgccaccctgagctgcctgcacatctggatcctgatgcccttcgtgaagacctgcctgatggtgctgcccagcgtgcagaccatctggaagagcgtgaccgacgtgatcatcgcccccctgtgcaccagcgtgggcagatgcttcagcagcgtgagcctgcagctgagccaggactag

SEQ ID NO: 83977 - protein, 151 aa, Artificial Sequence
  derived and/or modified sequence
MMAEEHTDLEAQIVKDIHCKEIDLVNRDPKNINEDIVKVDFEDVIAEPVGTYSFDGVWKVSYTTFTVSKYWCYRLLSTLLGVPLALLWGFLFACISFCHIWAVVPCIKSYLIEIQCISHIYSLCIRTFCNPLFAALGQVCSSIKVVLRKEV

SEQ ID NO: 83978 - DNA, 456 bp, Artificial Sequence
  derived and/or modified sequence
atgatggctgaagaacatacagacctcgaggcacagattgtcaaagatattcactgcaaagaaattgatctggtgaacagggacccgaagaatataaatgaagacattgttaaagtggacttcgaggatgtcattgccgagcccgtcggcacctacagttttgatggcgtctggaaggtgagctacaccaccttcaccgtgtcgaaatactggtgttatcggcttctgagcacgctcctcggcgttccactagctcttctgtggggattcctgttcgcctgcatctctttctgccacatatgggcggttgtgccttgtatcaagtcctacctgatcgaaattcagtgtatcagccatatttattctctctgcatccgaactttttgtaacccactattcgcagcgctgggccaggtgtgctccagtatcaaggttgtgttacgcaaagaagtgtag

SEQ ID NO: 83979 - DNA, 456 bp, Artificial Sequence
  derived and/or modified sequence
atgatggccgaggaacataccgatctggaggcccagatcgttaaagacattcactgcaaggaaattgatttggtcaaccgggatcccaaaaatattaacgaggacattgtgaaagtggactttgaagatgtaatcgcagagccagtgggtacttacagcttcgacggtgtctggaaggtgtcgtataccacattcaccgtcagtaagtactggtgctatcgcttgttatccactctcctgggtgtgcccctggctctgctgtgggggtttctgttcgcctgcatcagtttttgtcacatctgggccgtggtgccctgtataaagtcttatctcattgagatacaatgtatttcacacatctattccctgtgtatacggacattctgtaacccactgttcgccgcactcggtcaagtgtgtagctccattaaggttgttctgcgtaaagaagtctag

SEQ ID NO: 83980 - DNA, 456 bp, Artificial Sequence
  derived and/or modified sequence
atgatggccgaggagcacacagacctggaggcccagatcgtgaaggacatccactgcaaggagattgacctggtgaacagagaccccaagaacatcaatgaagacatcgtgaaggtggactttgaagatgtgattgctgagcctgtgggcacctacagctttgatggagtgtggaaggtgtcctacaccaccttcaccgtgtccaagtactggtgctaccgcctgctgagcaccctgctgggcgtgcccctggccctgctgtggggcttcctgtttgcctgcatctccttctgccacatctgggccgtggtgccctgcatcaagagctacctgattgagatccagtgcatcagccacatctacagcctgtgcatccgcaccttctgcaaccccctgtttgctgccctgggccaggtgtgcagcagcatcaaggtggtgctgaggaaggaggtgtag

SEQ ID NO: 83981 - DNA, 456 bp, Artificial Sequence
  derived and/or modified sequence
atgatggccgaggagcacaccgacctggaggcccagatcgtgaaggatatccattgcaaggagattgacttggtaaatagagatcctaaaaacatcaacgaggatattgtgaaagtcgacttcgaggatgtcatcgctgaacctgtgggaacttattcgtttgacggggtgtggaaagtgtcctatacgacatttaccgtgtccaaatattggtgctaccgtctcctctcaacactactgggagttcccctcgccctcctgtgggggttcctttttgcatgcatcagcttttgccacatctgggccgtggtaccatgcatcaagtcctatcttattgagattcagtgtatttcccacatttattcactgtgtatccgcaccttttgcaatcccctgtttgctgccctcggtcaagtgtgttcaagtatcaaggtcgtccttcggaaagaggtgtag

SEQ ID NO: 83982 - DNA, 456 bp, Artificial Sequence
  derived and/or modified sequence
atgatggccgaggagcacaccgacctggaggcccagatcgtgaaggatatccactgtaaggagatcgacctcgtgaaccgtgacccaaaaaacataaacgaggatatcgttaaagtggactttgaggatgtcatcgccgagcctgtcggcacctatagcttcgacggtgtctggaaggtgtcttacactacattcactgtcagcaagtattggtgctatagactcctctcaaccctcctcggggtgcctttggctcttctctggggctttcttttcgcatgcatcagtttctgccatatctgggctgtggtgccatgcatcaaatcgtacctcatcgaaatccagtgtatcagtcatatatactccttgtgcatcaggactttctgtaatcctctatttgctgccttgggtcaggtatgtagtagcattaaggtcgtactgcggaaggaagtttag

SEQ ID NO: 83983 - DNA, 456 bp, Artificial Sequence
  derived and/or modified sequence
atgatggctgaagagcacacagacctggaggcccagatcgttaaggatattcactgtaaggaaatagatttagtgaatagggacccaaaaaacattaatgaagacatcgtgaaagtggacttcgaagacgtcatagcggaacctgtgggtacctacagttttgacggtgtttggaaagtgagctacacgacattcacagtctcaaagtactggtgttacaggcttctctccactctcttgggcgtgccgctggccctcctgtggggattcctattcgcctgtatctccttttgtcacatatgggccgttgtgccttgtatcaagtcatatttgattgaaatccaatgtatctcacatatctactctctgtgtatcagaacgttctgtaaccctctctttgctgctttaggacaagtctgctcatctatcaaagtggtcctaagaaaagaggtgtag

SEQ ID NO: 83984 - DNA, 456 bp, Artificial Sequence
  derived and/or modified sequence
atgatggcggaagaacatactgatctggaggctcagattgtcaaggatatccattgtaaggaaatcgaccttgtcaatagagatcccaaaaatattaacgaggatattgtgaaggtcgacttcgaagatgtgatcgctgaacctgtcgggacatattccttcgacggtgtttggaaggtttcctataccacattcacagtgtcgaaatattggtgctatcgcctcttgagcacactacttggagtgcctctcgcactcctgtggggattcctgtttgcttgcatttccttctgccacatttgggcagttgtcccttgcatcaaatcgtacctgatcgagattcagtgtatcagtcatatttatagcctctgcatcaggacattctgtaatccactgttcgccgcactggggcaggtatgctcttctatcaaagtcgtcctgcggaaggaggtgtag

SEQ ID NO: 83985 - DNA, 1431 bp, Artificial Sequence
  derived and/or modified sequence
ctctctgccccaagtattttcagccccagccggccacacagctcggatctcctcctgtggatccccccagctctgcgatgatggcagaagagcacacagatctcgaggcccagatcgtcaaggatatccactgcaaggagattgacctggtgaaccgagaccccaagaacattaacgaggacatagtcaaggtggattttgaagacgtgatcgcagagcctgtgggcacctacagctttgacggcgtgtggaaggtgagctacaccaccttcactgtctccaagtactggtgctaccgtctgttgtccacgctgctgggcgtcccactggccctgctctggggcttcctgttcgcctgcatctccttctgccacatctgggcggtggtgccatgcattaagagctacctgatcgagatccagtgcatcagccacatctactcactctgcatccgcaccttctgcaacccactcttcgcggccctgggccaggtctgcagcagcatcaaggtggtgctgcggaaggaggtctaaagccaggtggggcaacagcggtggcagggcagggggtggtgggccagactggtccccgggggacttcttcacaggggctgctggcgagctctttctctttagggactgctccataccccatgatggagcacacggtgtagggaagccagaaagaaaagacggcccagccacagaagcacaatggcccttcgctctcccccagccccaccatgatgcccccatgcctgggcgtgggggaagatcatttgccaagaggcagctactgcaagtctttgcgttcacttgtactgtaacaacataaaccagcacgcggttcccacccggggccaacctctccacgcgcactcaggaaagtgaccagtgaccactggcgttaggaaggtggctccagtaaagggttttggctgcatttggggaatgctgcattttgttcgtgcctgtaagattggtttgtgtcctgaccagctccaaaaatatacttcactgccctgaaaaacagacacagggagagttggttgtctcttcacttggccaaatgtaagtgaagaacagagtctttttcttcttcggattctattgtttgctggaaccgtacacgttccttggaagatcatgtttaagtgactcctgttgcctgagcacaaaaatgggcaccaatggaggaaaatgacccttgggctggcaggggcagtgacccttccagggtaccactgagggaagggcctgggttcaagcctcccggaacctcccctttggctaaccgagcccctgaaatgcccagtactgccatttgacatgagggtaccttcgccctcaggagatgtgacgaaggaacaaggtctaatttgtgcgtgtgtggactcactatggaaataaaatgcagtagaaagagcatgta

SEQ ID NO: 83986 - DNA, 1260 bp, Artificial Sequence
  derived and/or modified sequence
ccagctctgcgatgatggcagaagagcacacagatctcgaggcccagatcgtcaaggatatccactgcaaggagattgacctggtgaaccgagaccccaagaacattaacgaggacatagtcaaggtggattttgaagacgtgatcgcagagcctgtgggcacctacagctttgacggcgtgtggaaggtgagctacaccaccttcactgtctccaagtactggtgctaccgtctgttgtccacgctgctgggcgtcccactggccctgctctggggcttcctgttcgcctgcatctccttctgccacatctgggcggtggtgccatgcattaagagctacctgatcgagatccagtgcatcagccacatctactcactctgcatccgcaccttctgcaacccactcttcgcggccctgggccaggtctgcagcagcatcaaggtggtgctgcggaaggaggtctaaagccagggactgctccataccccatgatggagcacacggtgtagggaagccagaaagaaaagacggcccagccacagaagcacaatggcccttcgctctcccccagccccaccatgatgcccccatgcctgggcgtgggggaagatcatttgccaagaggcagctactgcaagtctttgcgttcacttgtactgtaacaacataaaccagcacgcggttcccacccggggccaacctctccacgcgcactcaggaaagtgaccagtgaccactggcgttaggaaggtggctccagtaaagggttttggctgcatttggggaatgctgcattttgttcgtgcctgtaagattggtttgtgtcctgaccagctccaaaaatatacttcactgccctgaaaaacagacacagggagagttggttgtctcttcacttggccaaatgtaagtgaagaacagagtctttttcttcttcggattctattgtttgctggaaccgtacacgttccttggaagatcatgtttaagtgactcctgttgcctgagcacaaaaatgggcaccaatggaggaaaatgacccttgggctggcaggggcagtgacccttccagggtaccactgagggaagggcctgggttcaagcctcccggaacctcccctttggctaaccgagcccctgaaatgcccagtactgccatttgacatgagggtaccttcgccctcaggagatgtgacgaaggaacaaggtctaatttgtgcgtgtgtggactcactatggaaataaaatgcagtagaaa

SEQ ID NO: 83987 - DNA, 456 bp, Artificial Sequence
  derived and/or modified sequence
atgatggccgaggagcacaccgacctggaggcccagatcgtgaaggacatccactgcaaggagatcgacctggtgaacagagaccccaagaacatcaacgaggacatcgtgaaggtggacttcgaggacgtgatcgccgagcccgtgggcacctacagcttcgacggcgtgtggaaggtgagctacaccaccttcaccgtgagcaagtactggtgctacagactgctgagcaccctgctgggcgtgcccctggccctgctgtggggcttcctgttcgcctgcatcagcttctgccacatctgggccgtggtgccctgcatcaagagctacctgatcgagatccagtgcatcagccacatctacagcctgtgcatcagaaccttctgcaaccccctgttcgccgccctgggccaggtgtgcagcagcatcaaggtggtgctgagaaaggaggtgtag

SEQ ID NO: 83988 - protein, 277 aa, Artificial Sequence
  derived and/or modified sequence
MSSCSRVALVTGANRGIGLAIARELCRQFSGDVVLTARDVARGQAAVQQLQAEGLSPRFHQLDIDDLQSIRALRDFLRKEYGGLNVLVNNAAVAFKSDDPMPFDIKAEMTLKTNFFATRNMCNELLPIMKPHGRVVNISSLQCLRAFENCSEDLQERFHSETLTEGDLVDLMKKFVEDTKNEVHEREGWPNSPYGVSKLGVTVLSRILARRLDEKRKADRILVNACCPGPVKTDMDGKDSIRTVEEGAETPVYLALLPPDATEPQGQLVHDKVVQNW

SEQ ID NO: 83989 - DNA, 834 bp, Artificial Sequence
  derived and/or modified sequence
atgagttcttgctcccgcgtcgccctcgtcacaggcgccaatagaggcattggcctggccatcgccagggagctgtgcagacagttttcaggagacgtggtgctgaccgctcgggatgtcgcccgcggccaggcggctgtccagcaactgcaggcagaaggcttgagcccacgatttcatcagcttgatattgacgatctgcagtctatccgggctctgcgcgactttctgagaaaagagtatggcggcctgaatgtgcttgtgaataacgcagcagtggcctttaaatccgatgatcccatgccgtttgatataaaggctgagatgaccctgaagaccaacttcttcgccacgagaaatatgtgtaacgaacttcttcccatcatgaaacctcatggacgtgttgttaatatctccagcctgcagtgcttgcgggcctttgaaaactgcagcgaggacctccaagagcggtttcacagtgagaccctgacggagggggatctggtcgatctgatgaagaagtttgttgaggacacgaaaaatgaagtgcatgagcgagaaggctggcccaattcaccatatggcgtgtctaagttaggagtgaccgttctctctcggatcctcgcccgacgcctggatgaaaagagaaaggctgataggatcttggtgaacgcctgctgtcccggacccgtcaaaaccgacatggatggcaaagacagcattaggactgtagaggagggggccgagactcctgtctacctggctctgctcccacctgatgcaactgagcctcaggggcaactggtccatgataaagtcgtgcagaattggtag

SEQ ID NO: 83990 - DNA, 834 bp, Artificial Sequence
  derived and/or modified sequence
atgagcagctgcagccgggtggccctggtgactggagccaacagaggaattggcctggccatcgcccgggagctgtgccggcagttctctggagatgtggtgctgacagccagagatgtggcccggggccaggccgctgtgcagcagctgcaggccgagggcctgagcccccgcttccaccagctggacattgatgacctgcagagcatccgggccctgcgggacttcctgaggaaggagtatggaggcctgaatgtgctggtgaacaatgctgctgtggccttcaagagtgatgaccccatgccctttgacatcaaggccgagatgaccctgaagaccaacttctttgccaccaggaacatgtgcaatgagctgctgcccatcatgaagccccacggccgggtggtgaacatcagcagcctgcagtgcctgcgggcctttgagaactgcagcgaggacctgcaggagcgcttccacagcgagaccctgacagaaggagacctggtggacctgatgaagaagtttgtggaggacaccaagaatgaggtgcatgagcgggagggctggcccaacagcccctacggcgtgtccaagctgggcgtgacagtgctgagccgcatcctggcccggcggctggatgagaagaggaaggctgaccgcatcctggtgaatgcctgctgccccggccctgtgaagacagacatggatggcaaggacagcatcagaacagtggaggagggcgctgagacccctgtgtacctggccctgctgcccccagatgccacagagccccagggccagctggtgcatgacaaggtggtgcagaactggtag

SEQ ID NO: 83991 - DNA, 834 bp, Artificial Sequence
  derived and/or modified sequence
atgagcagctgcagccgggtggccctggtgaccggcgccaaccggggaatcgggctggctattgctcgcgaattatgccggcagttcagtggagacgtcgtgctaacggccagggacgttgcacgtggtcaagccgctgttcagcaattgcaagcggaaggtcttagcccacgcttccaccagttagatattgatgatcttcagtcgattcgagctttaagggatttcctaagaaaggaatacggcgggctgaatgtactggtgaataacgcggcagtggcctttaaaagcgacgaccccatgccctttgacatcaaggcagagatgacactcaaaaccaactttttcgctacgaggaacatgtgcaatgagctgctgccaatcatgaaacctcacggtcgtgtcgtgaatattagttctcttcagtgtctgcgcgcctttgagaattgctctgaggacctccaggagaggttccactctgaaacactgactgagggagacctggtggaccttatgaaaaaattcgtggaggatacaaaaaatgaggttcacgaacgcgagggatggcccaacagcccctacggcgtgtctaagctcggagttactgtgctgtcccgaattctagcacggcgccttgacgagaaacggaaagccgacagaattctggtgaacgcctgctgccccggacctgtcaaaacggacatggacgggaaggatagcattcgtacagtagaggaaggggcggaaacccctgtttatctcgctctgcttccccccgacgctacagaaccccaaggtcagctcgtccatgacaaagtcgtgcagaattggtag

SEQ ID NO: 83992 - DNA, 834 bp, Artificial Sequence
  derived and/or modified sequence
atgtcatcttgttcgagagtcgctttagtgacaggggcaaatagaggtattgggctggccattgctagagaactttgcagacagttttcgggggatgtcgtattgacggctcgggacgtcgctcgcggacaagctgctgtgcaacaactacaagcagaaggtctgtcaccccgattccaccagctagatatagacgacctccagagtatcagagcccttcgagattttctgagaaaagaatatgggggtttgaacgtgcttgtcaacaacgcagctgtcgcattcaagtctgacgatcctatgccatttgacataaaagccgaaatgacgcttaagactaatttttttgcgacaaggaacatgtgcaacgaactattgccaatcatgaagccccatggccgtgtggtcaacatctccagcctacagtgcctgcgcgcttttgagaactgctccgaagatcttcaggagaggtttcatagtgagacccttactgaaggtgacctggtcgatctgatgaagaaatttgtggaggatacaaaaaacgaagtgcatgagcgtgagggctggcccaattcaccttatggggtgagcaagctgggcgtcaccgtgcttagtcgcattcttgcacgcagactcgacgaaaaaaggaaagctgatcggattttagttaatgcttgctgcccgggacctgtcaaaaccgatatggacgggaaggattcgattcgcaccgtcgaggagggggcagaaacccccgtctatctcgctttactacctcctgatgcgacagagccacaagggcaattggttcatgataaggtcgtgcaaaactggtag

SEQ ID NO: 83993 - DNA, 1169 bp, Artificial Sequence
  derived and/or modified sequence
cggacacctcgcagatcaccccgcggctcagagcccggatcctgaagggcgcagcgtgggcagggggcgggcccgggagttggaacagagggcacagacggcccctcctcggaggggagggaccggagccggggcctttttctttaagactcgcagcactggatcccagaacttagtctgcgcggcggcattgacactagctgggctcctcggggcgcgccccaggtggtccgaagcccggtccgccctccacgcaggtgccccgcgctccccgctcagccatgtcgtcctgcagccgcgtggcgctggtgaccggggccaacaggggcatcggcttggccatcgcgcgcgaactgtgccgacagttctctggggatgtggtgctcaccgcgcgggacgtggcgcggggccaggcggccgtgcagcagctgcaggcggagggcctgagcccgcgcttccaccaactggacatcgacgacttgcagagcatccgcgccctgcgcgacttcctgcgcaaggagtacggggggctcaacgtactggtcaacaacgcggccgtcgccttcaagagtgatgatccaatgccctttgacattaaagctgagatgacactgaagacaaatttttttgccactagaaacatgtgcaacgagttactgccgataatgaaacctcatgggagagtggtgaatatcagtagtttgcagtgtttaagggcttttgaaaactgcagtgaagatctgcaggaaaggttccacagtgagacactcacagaaggagacctggtggatctcatgaaaaagtttgtggaggacacaaaaaatgaggtgcatgagagggaaggctggcccaactcaccttatggggtgtccaagttgggggtcacggtcttatcgaggatcctggccaggcgtctggatgagaagaggaaagctgacaggattctggtgaatgcgtgctgcccaggaccagtgaagacagacatggatgggaaagacagcatcaggactgtggaggagggggctgagacccctgtctacttggccctcttgcctccagatgccactgagccacaaggccagttggtccatgacaaagttgtgcaaaactggtaaacgtctgcttcggagcttgctgcttaataaatgttggtggaatgaatgaatgaa

SEQ ID NO: 83994 - DNA, 834 bp, Artificial Sequence
  derived and/or modified sequence
atgagcagctgcagcagagtggccctggtgaccggcgccaacagaggcatcggcctggccatcgccagagagctgtgcagacagttcagcggcgacgtggtgctgaccgccagagacgtggccagaggccaggccgccgtgcagcagctgcaggccgagggcctgagccccagattccaccagctggacatcgacgacctgcagagcatcagagccctgagagacttcctgagaaaggagtacggcggcctgaacgtgctggtgaacaacgccgccgtggccttcaagagcgacgaccccatgcccttcgacatcaaggccgagatgaccctgaagaccaacttcttcgccaccagaaacatgtgcaacgagctgctgcccatcatgaagccccacggcagagtggtgaacatcagcagcctgcagtgcctgagagccttcgagaactgcagcgaggacctgcaggagagattccacagcgagaccctgaccgagggcgacctggtggacctgatgaagaagttcgtggaggacaccaagaacgaggtgcacgagagagagggctggcccaacagcccctacggcgtgagcaagctgggcgtgaccgtgctgagcagaatcctggccagaagactggacgagaagagaaaggccgacagaatcctggtgaacgcctgctgccccggccccgtgaagaccgacatggacggcaaggacagcatcagaaccgtggaggagggcgccgagacccccgtgtacctggccctgctgccccccgacgccaccgagccccagggccagctggtgcacgacaaggtggtgcagaactggtag

SEQ ID NO: 83995 - protein, 432 aa, Artificial Sequence
  derived and/or modified sequence
MLGNSAPGPATREAGSALLALQQTALQEDQENINPEKAAPVQQPRTRAALAVLKSGNPRGLAQQQRPKTRRVAPLKDLPVNDEHVTVPPWKANSKQPAFTIHVDEAEKEAQKKPAESQKIEREDALAFNSAISLPGPRKPLVPLDYPMDGSFESPHTMDMSIILEDEKPVSVNEVPDYHEDIHTYLREMEVKCKPKVGYMKKQPDITNSMRAILVDWLVEVGEEYKLQNETLHLAVNYIDRFLSSMSVLRGKLQLVGTAAMLLASKFEEIYPPEVAEFVYITDDTYTKKQVLRMEHLVLKVLTFDLAAPTVNQFLTQYFLHQQPANCKVESLAMFLGELSLIDADPYLKYLPSVIAGAAFHLALYTVTGQSWPESLIRKTGYTLESLKPCLMDLHQTYLKAPQHAQQSIREKYKNSKYHGVSLLNPPETLNL

SEQ ID NO: 83996 - DNA, 1299 bp, Artificial Sequence
  derived and/or modified sequence
atgctgggcaacagcgcccccggccccgccaccagagaggccggcagcgccctgctggccctgcagcagaccgccctgcaggaggaccaggagaacatcaaccccgagaaggccgcccccgtgcagcagcccagaaccagagccgccctggccgtgctgaagagcggcaaccccagaggcctggcccagcagcagagacccaagaccagaagagtggcccccctgaaggacctgcccgtgaacgacgagcacgtgaccgtgcccccctggaaggccaacagcaagcagcccgccttcaccatccacgtggacgaggccgagaaggaggcccagaagaagcccgccgagagccagaagatcgagagagaggacgccctggccttcaacagcgccatcagcctgcccggccccagaaagcccctggtgcccctggactaccccatggacggcagcttcgagagcccccacaccatggacatgagcatcatcctggaggacgagaagcccgtgagcgtgaacgaggtgcccgactaccacgaggacatccacacctacctgagagagatggaggtgaagtgcaagcccaaggtgggctacatgaagaagcagcccgacatcaccaacagcatgagagccatcctggtggactggctggtggaggtgggcgaggagtacaagctgcagaacgagaccctgcacctggccgtgaactacatcgacagattcctgagcagcatgagcgtgctgagaggcaagctgcagctggtgggcaccgccgccatgctgctggccagcaagttcgaggagatctacccccccgaggtggccgagttcgtgtacatcaccgacgacacctacaccaagaagcaggtgctgagaatggagcacctggtgctgaaggtgctgaccttcgacctggccgcccccaccgtgaaccagttcctgacccagtacttcctgcaccagcagcccgccaactgcaaggtggagagcctggccatgttcctgggcgagctgagcctgatcgacgccgacccctacctgaagtacctgcccagcgtgatcgccggcgccgccttccacctggccctgtacaccgtgaccggccagagctggcccgagagcctgatcagaaagaccggctacaccctggagagcctgaagccctgcctgatggacctgcaccagacctacctgaaggccccccagcacgcccagcagagcatcagagagaagtacaagaacagcaagtaccacggcgtgagcctgctgaacccccccgagaccctgaacctgtag

SEQ ID NO: 83997 - DNA, 2797 bp, Artificial Sequence
  derived and/or modified sequence
catttcaatagtcgcgggatacttgaactgcaagaacagccgccgctccggcgggctgctcgctgcatctctgggcgtctttggctcgccacgctgggcagtgcctgcctgcgcctttcgcaacctcctcggccctgcgtggtctcgagctgggtgagcgagcgggcgggctggtaggctggcctgggctgcgaccggcggctacgactattctttggccgggtcggtgcgagtggtcggctgggcagagtgcacgctgcttggcgccgcaggctgatcccgccgtccactcccgggagcagtgatgttgggcaactctgcgccggggcctgcgacccgcgaggcgggctcggcgctgctagcattgcagcagacggcgctccaagaggaccaggagaatatcaacccggaaaaggcagcgcccgtccaacaaccgcggacccgggccgcgctggcggtactgaagtccgggaacccgcggggtctagcgcagcagcagaggccgaagacgagacgggttgcaccccttaaggatcttcctgtaaatgatgagcatgtcaccgttcctccttggaaagcaaacagtaaacagcctgcgttcaccattcatgtggatgaagcagaaaaagaagctcagaagaagccagctgaatctcaaaaaatagagcgtgaagatgccctggcttttaattcagccattagtttacctggacccagaaaaccattggtccctcttgattatccaatggatggtagttttgagtcaccacatactatggacatgtcaattatattagaagatgaaaagccagtgagtgttaatgaagtaccagactaccatgaggatattcacacataccttagggaaatggaggttaaatgtaaacctaaagtgggttacatgaagaaacagccagacatcactaacagtatgagagctatcctcgtggactggttagttgaagtaggagaagaatataaactacagaatgagaccctgcatttggctgtgaactacattgataggttcctgtcttccatgtcagtgctgagaggaaaacttcagcttgtgggcactgctgctatgctgttagcctcaaagtttgaagaaatataccccccagaagtagcagagtttgtgtacattacagatgatacctacaccaagaaacaagttctgagaatggagcatctagttttgaaagtccttacttttgacttagctgctccaacagtaaatcagtttcttacccaatactttctgcatcagcagcctgcaaactgcaaagttgaaagtttagcaatgtttttgggagaattaagtttgatagatgctgacccatacctcaagtatttgccatcagttattgctggagctgcctttcatttagcactctacacagtcacgggacaaagctggcctgaatcattaatacgaaagactggatataccctggaaagtcttaagccttgtctcatggaccttcaccagacctacctcaaagcaccacagcatgcacaacagtcaataagagaaaagtacaaaaattcaaagtatcatggtgtttctctcctcaacccaccagagacactaaatctgtaacaatgaaagactgcctttgttttctaagatgtaaatcactcaaagtatatggtgtacagtttttaacttaggttttaattttacaatcatttctgaatacagaagttgtggccaagtacaaattatggtatctattactttttaaatggttttaatttgtatatcttttgtatatgtatctgtcttagatatttggctaattttaagtggttttgttaaagtattaatgatgccagctgtcaggataataaattgatttggaaaactttgcaagtcaaatttaacttcttcaggattttgcttagtaaagaagtttacttggtttactatataatgggaagtgaaaagccttcctctaaaattaaagtaggtttaggaaaacagaccctcaaattctgacattcattttcctaagcaactggatcaatttgctgacttgggcataatctaatctaagcatatctgaatacagtattcagagatagatacagtagagattccccagactttttcgctctttgtaaaacctgtttgtttaggttttgcgaggtaaactcaacagaggttgggagtggaagagggtgggaagcttatatgcaaattaacagacgagaaatgctccagaaggtttattattttaaagcacattaaaaacaaaaaactatttttaaaatcctgctagattttataatggatttgtgaataaaaaatacccagggttctcagaatggaataaatatcccttttaatagttatatatacagatatacaactgttagctttaattggcagctctcttcttttttcttcttttcactggctttttacttggtgctttttcttgttttgcactggtggtctgtgttctgtgaataaagcaaagtaagaatttactaagagtatgttaagttttggattattgaaataagaggcatttcttagttttccagtaggatctaaaatgtgtcagctatgagtaagactggcatccaagaagtttatattatagatttaggtcctaatttttataaatcacaaggtaaaaaaatcacagaacagatggatctctaatgaaaaagggatgtctttttgtttatagtcatgtggcaagatgagagtaaaaccagagagcaaacctctataagtgttgagtatatgtatacatttgaaataaaccagaaatttgttacctta

SEQ ID NO: 83998 - DNA, 1299 bp, Artificial Sequence
  derived and/or modified sequence
atgctcggtaattctgctcccggacctgcaacgcgggaggccgggtccgccctactggctctgcaacagacagcgttacaggaagatcaagagaacattaatccggaaaaagccgctcccgtgcaacagcctcgcacccgtgccgccctggctgtgctgaagagtggaaaccccagggggctggcccagcagcagcgtcccaaaacaagacgggtcgcccctctgaaagatctaccagtgaacgacgagcatgtcactgtgccgccctggaaagccaattccaagcagccggcatttacaattcatgtggacgaggccgagaaagaggctcagaagaaaccagccgagagccagaaaatcgagagagaggatgccctagccttcaattcggccatttctcttccgggaccccgcaagcccttagtgcctcttgactacccaatggatgggtcctttgagtcacctcatactatggacatgtcaatcattctcgaggacgagaaaccagtgagtgttaatgaggtccccgattaccatgaagacatccatacttaccttagagaaatggaagtgaaatgcaaaccaaaggtgggatatatgaagaagcaaccggatattactaactcaatgcgggcgattttagtggactggctggtagaggtaggagaggaatacaaactccaaaacgagaccttgcacctcgcggtaaactacatcgaccgcttcctgtcctccatgtcagtgctgagaggcaaactgcagctggtcggcactgcagccatgttgcttgccagtaaatttgaagaaatatacccacctgaggtggccgagtttgtgtacataacagatgatacgtatacaaagaagcaagtactcagaatggaacaccttgtcctaaaggttctgacatttgatctggccgcacccactgtcaaccagttcttgacacaatactttctgcaccagcagcctgccaactgtaaagtagaatccctcgctatgttcctaggggagctgagcctcattgatgccgacccttaccttaaatacctgcctagtgtcatagcaggcgcggcattccatctcgccctgtatactgtcaccggccaatcctggccagagtcgctgattagaaaaaccggttacactctggaatcgctcaagccctgtctgatggatctgcaccaaacctacttgaaagctcctcagcacgcacagcagagcatccgagagaaatacaagaattctaagtatcacggagtcagtctcctgaatcccccggaaacactcaatttatag

SEQ ID NO: 83999 - DNA, 1299 bp, Artificial Sequence
  derived and/or modified sequence
atgctgggcaacagcgcccctggccctgccacccgggaggccggcagcgccctgctggccctgcagcagacagccctgcaggaggaccaggagaacatcaaccctgagaaggccgcccctgtgcagcagcccaggacccgggccgccctggccgtgctgaagagcggcaacccccggggcctggcccagcagcagaggcccaagacccggcgggtggcccccctgaaggacctgcctgtgaatgatgagcacgtgacagtgcccccctggaaggccaacagcaagcagcctgccttcaccatccacgtggatgaggccgagaaggaggcccagaagaagccagctgagagccagaagattgaaagagaagatgccctggccttcaacagcgccatcagcctgcccggccccaggaagcccctggtgcccctggactaccccatggatggcagctttgagagcccccacaccatggacatgagcatcatcctggaggatgagaagcctgtgtctgtgaatgaggtgcctgactaccacgaggacatccacacctacctgcgggagatggaggtgaagtgcaagcccaaggtgggctacatgaagaagcagcctgacatcaccaacagcatgagggccatcctggtggactggctggtggaggtgggggaggagtacaagctgcagaatgagaccctgcacctggccgtgaactacatcgaccgcttcctgagctccatgtctgtgctgcggggcaagctgcagctggtgggcacagctgccatgctgctggccagcaagtttgaggagatctacccacctgaggtggccgagtttgtgtacatcacagatgacacctacaccaagaagcaggtgctgaggatggagcacctggtgctgaaggtgctgacctttgacctggccgcccccaccgtgaaccagttcctgacccagtacttcctgcaccagcagcctgccaactgcaaggtggagagcctggccatgttcctgggggagctgagcctgattgatgctgacccctacctgaagtacctgcccagcgtgattgctggggccgccttccacctggccctgtacacagtgacaggccagagctggccagagagcctcatcaggaagacaggctacaccctggagagcctgaagccctgcctgatggacctgcaccagacctacctgaaggccccccagcacgcccagcagagcatccgggagaagtacaagaacagcaagtaccatggagtgtccctgctgaaccccccagagaccctgaacctgtag

SEQ ID NO: 84000 - DNA, 1299 bp, Artificial Sequence
  derived and/or modified sequence
atgctgggcaacagcgcccccggccccgccacccgggaggccggctccgccctactggcccttcaacaaactgcactacaggaggaccaggaaaatattaatccagagaaagctgctcccgttcagcagccacgaacccgagccgccctcgcagtgctgaagagtggaaatccacgaggcctggcccagcagcagaggcctaagacccggcgcgttgctccacttaaggatctaccagtgaatgatgaacacgttacggtgcctccatggaaggccaatagcaagcagcccgcattcacaatccacgtggatgaggcagaaaaagaagctcagaaaaagccggctgagagccagaagatcgagcgagaagatgcgctcgccttcaactccgcaatttcactgcctggaccgcgaaagcctctcgtccctctcgattatcccatggacgggtccttcgagtcaccccatacaatggatatgtctattatacttgaagatgaaaagccggtaagcgtaaatgaagtgcctgactatcatgaggacatccacacttacctgagggagatggaagtcaaatgcaaacctaaggttggatacatgaaaaagcagccagacatcactaacagcatgcgagccatcctggtggactggttggttgaggttggcgaggagtacaagttacaaaacgaaaccctgcacttagcagtgaattatattgatagatttctgtccagtatgtcagtcctgagaggtaagctacagctggtgggcaccgcagccatgttgctggcttccaaatttgaagagatatatcctccagaagtagcagaattcgtttacatcactgacgacacgtatactaagaagcaagttcttcgaatggaacacttggttttgaaggttttgacatttgatttggccgccccaaccgtcaaccagtttttgacccagtattttctgcaccagcagccagctaactgtaaggttgagagcttagccatgttcctgggagagctgtccttgatcgatgcagacccctatctaaaatacctaccaagtgttatagctggggcagctttccacttagccctttatactgtgaccggacagagttggcctgagagcttaatccgcaaaacagggtacacgctcgaatcgttaaagccgtgtctgatggaccttcatcagacctatttaaaagcacctcaacacgcccagcagtctatccgggagaagtataaaaactcaaagtatcacggtgtttcgctccttaacccaccggaaactctcaatttatag

SEQ ID NO: 84001 - DNA, 1299 bp, Artificial Sequence
  derived and/or modified sequence
atgctgggaaatagcgctccgggacccgcaaccagagaagctggttctgccttgctggctctgcagcaaacagcgctccaggaagaccaggagaacataaatcccgaaaaagcggcacctgttcagcaacctcgcacaagagccgcactcgcagtgctgaaatccggaaaccccaggggattggcacagcagcagcgacctaaaaccaggagggtggcccctctgaaggatctccctgtgaacgacgaacacgtcaccgtgcccccatggaaagccaatagcaagcagccagccttcaccatccatgtggacgaagccgagaaggaggcccaaaagaaaccagcagagtcacagaagatcgaacgcgaagacgccctggcttttaacagcgctatttcgctgccaggccctcgcaagcctctggtcccgctggattatcctatggacgggagcttcgaaagcccccacaccatggacatgtccatcatcttggaggatgaaaagccggtgtctgtgaatgaggtgcccgactaccatgaagatatccacacctacctcagagaaatggaggtcaaatgtaagcctaaggtgggctatatgaaaaagcagcctgatattactaattcaatgcgggctatactggtggattggttggtggaagtgggagaagaatacaagctgcaaaatgaaaccttgcaccttgctgttaattatatagatagattcctgtcctccatgagcgtcctgcggggtaagctacaactggtcggtaccgccgctatgctgttagcatcgaagtttgaggagatctatccgcctgaagtggccgaattcgtgtacatcacggatgacacatatactaagaagcaagtcctgagaatggagcatctcgtgctgaaagtcctcacattcgacctagcagcaccaacggtaaatcagtttctcacacagtacttcctccaccagcaacctgcaaactgtaaggtggagtcactcgccatgttcctgggggaactgagcctgattgacgccgatccttacctgaagtatctaccatcagtgattgccggagccgcttttcacctggcgttatacaccgtcaccggacagtcgtggccagaatcgctcattcgaaagacaggctataccctcgaaagtctcaaaccgtgcctcatggacctgcaccagacttacctcaaggcaccccaacacgcacagcaatcaatcagggagaaatacaagaacagcaaataccatggggtgagtctactgaatcccccagagactctgaatctgtag

SEQ ID NO: 84002 - protein, 1038 aa, Artificial Sequence
  derived and/or modified sequence
MWRCGGRQGLCVLRRLSGGHAHHRAWRWNSNRACERALQYKLGDKIHGFTVNQVTSVPELFLTAVKLTHDDTGARYLHLAREDTNNLFSVQFRTTPMDSTGVPHILEHTVLCGSQKYPCRDPFFKMLNRSLSTFMNAFTASDYTLYPFSTQNPKDFQNLLSVYLDATFFPCLRELDFWQEGWRLEHENPSDPQTPLVFKGVVFNEMKGAFTDNERIFSQHLQNRLLPDHTYSVVSGGDPLCIPELTWEQLKQFHATHYHPSNARFFTYGNFPLEQHLKQIHEEALSKFQKIEPSTVVPAQTPWDKPREFQITCGPDSFATDPSKQTTISVSFLLPDITDTFEAFTLSLLSSLLTSGPNSPFYKALIESGLGTDFSPDVGYNGYTREAYFSVGLQGIAEKDIETVRSLIDRTIDEVVEKGFEDDRIEALLHKIEIQMKHQSTSFGLMLTSYIASCWNHDGDPVELLKLGNQLAKFRQCLQENPKFLQEKVKQYFKNNQHKLTLSMRPDDKYHEKQAQVEATKLKQKVEALSPGDRQQIYEKGLELRSQQSKPQDASCLPALKVSDIEPTIPVTELDVVLTAGDIPVQYCAQPTNGMVYFRAFSSLNTLPEELRPYVPLFCSVLTKLGCGLLDYREQAQQIELKTGGMSASPHVLPDDSHMDTYEQVGVLFSSLCLDRNLPDMMQLWSEIFNNPCFEEEEHFKVLVKMTAQELANGIPDSGHLYASIRAGRTLTPAGDLQETFSGMDQVRLMKRIAEMTDIKPILRKLPRIKKHLLNGDNMRCSVNATPQQMPQTEKAVEDFLRSIGRSKKERRPVRPHTVEKPVPSSSGGDAHVPHGSQVIRKLVMEPTFKPWQMKTHFLMPFPVNYVGECIRTVPYTDPDHASLKILARLMTAKFLHTEIREKGGAYGGGAKLSHNGIFTLYSYRDPNTIETLQSFGKAVDWAKSGKFTQQDIDEAKLSVFSTVDAPVAPSDKGMDHFLYGLSDEMKQAHREQLFAVSHDKLLAVSDRYLGTGKSTHGLAILGPENPKIAKDPSWIIQ

SEQ ID NO: 84003 - DNA, 3117 bp, Artificial Sequence
  derived and/or modified sequence
atgtggagatgcggcggcagacagggcctgtgcgtgctgagaagactgagcggcggccacgcccaccacagagcctggagatggaacagcaacagagcctgcgagagagccctgcagtacaagctgggcgacaagatccacggcttcaccgtgaaccaggtgaccagcgtgcccgagctgttcctgaccgccgtgaagctgacccacgacgacaccggcgccagatacctgcacctggccagagaggacaccaacaacctgttcagcgtgcagttcagaaccacccccatggacagcaccggcgtgccccacatcctggagcacaccgtgctgtgcggcagccagaagtacccctgcagagaccccttcttcaagatgctgaacagaagcctgagcaccttcatgaacgccttcaccgccagcgactacaccctgtaccccttcagcacccagaaccccaaggacttccagaacctgctgagcgtgtacctggacgccaccttcttcccctgcctgagagagctggacttctggcaggagggctggagactggagcacgagaaccccagcgacccccagacccccctggtgttcaagggcgtggtgttcaacgagatgaagggcgccttcaccgacaacgagagaatcttcagccagcacctgcagaacagactgctgcccgaccacacctacagcgtggtgagcggcggcgaccccctgtgcatccccgagctgacctgggagcagctgaagcagttccacgccacccactaccaccccagcaacgccagattcttcacctacggcaacttccccctggagcagcacctgaagcagatccacgaggaggccctgagcaagttccagaagatcgagcccagcaccgtggtgcccgcccagaccccctgggacaagcccagagagttccagatcacctgcggccccgacagcttcgccaccgaccccagcaagcagaccaccatcagcgtgagcttcctgctgcccgacatcaccgacaccttcgaggccttcaccctgagcctgctgagcagcctgctgaccagcggccccaacagccccttctacaaggccctgatcgagagcggcctgggcaccgacttcagccccgacgtgggctacaacggctacaccagagaggcctacttcagcgtgggcctgcagggcatcgccgagaaggacatcgagaccgtgagaagcctgatcgacagaaccatcgacgaggtggtggagaagggcttcgaggacgacagaatcgaggccctgctgcacaagatcgagatccagatgaagcaccagagcaccagcttcggcctgatgctgaccagctacatcgccagctgctggaaccacgacggcgaccccgtggagctgctgaagctgggcaaccagctggccaagttcagacagtgcctgcaggagaaccccaagttcctgcaggagaaggtgaagcagtacttcaagaacaaccagcacaagctgaccctgagcatgagacccgacgacaagtaccacgagaagcaggcccaggtggaggccaccaagctgaagcagaaggtggaggccctgagccccggcgacagacagcagatctacgagaagggcctggagctgagaagccagcagagcaagccccaggacgccagctgcctgcccgccctgaaggtgagcgacatcgagcccaccatccccgtgaccgagctggacgtggtgctgaccgccggcgacatccccgtgcagtactgcgcccagcccaccaacggcatggtgtacttcagagccttcagcagcctgaacaccctgcccgaggagctgagaccctacgtgcccctgttctgcagcgtgctgaccaagctgggctgcggcctgctggactacagagagcaggcccagcagatcgagctgaagaccggcggcatgagcgccagcccccacgtgctgcccgacgacagccacatggacacctacgagcaggtgggcgtgctgttcagcagcctgtgcctggacagaaacctgcccgacatgatgcagctgtggagcgagatcttcaacaacccctgcttcgaggaggaggagcacttcaaggtgctggtgaagatgaccgcccaggagctggccaacggcatccccgacagcggccacctgtacgccagcatcagagccggcagaaccctgacccccgccggcgacctgcaggagaccttcagcggcatggaccaggtgagactgatgaagagaatcgccgagatgaccgacatcaagcccatcctgagaaagctgcccagaatcaagaagcacctgctgaacggcgacaacatgagatgcagcgtgaacgccaccccccagcagatgccccagaccgagaaggccgtggaggacttcctgagaagcatcggcagaagcaagaaggagagaagacccgtgagaccccacaccgtggagaagcccgtgcccagcagcagcggcggcgacgcccacgtgccccacggcagccaggtgatcagaaagctggtgatggagcccaccttcaagccctggcagatgaagacccacttcctgatgcccttccccgtgaactacgtgggcgagtgcatcagaaccgtgccctacaccgaccccgaccacgccagcctgaagatcctggccagactgatgaccgccaagttcctgcacaccgagatcagagagaagggcggcgcctacggcggcggcgccaagctgagccacaacggcatcttcaccctgtacagctacagagaccccaacaccatcgagaccctgcagagcttcggcaaggccgtggactgggccaagagcggcaagttcacccagcaggacatcgacgaggccaagctgagcgtgttcagcaccgtggacgcccccgtggcccccagcgacaagggcatggaccacttcctgtacggcctgagcgacgagatgaagcaggcccacagagagcagctgttcgccgtgagccacgacaagctgctggccgtgagcgacagatacctgggcaccggcaagagcacccacggcctggccatcctgggccccgagaaccccaagatcgccaaggaccccagctggatcatccagtag

SEQ ID NO: 84004 - DNA, 3117 bp, Artificial Sequence
  derived and/or modified sequence
atgtggaggtgcggtggacggcaagggttatgcgtgctgagaagactgtcgggagggcacgcgcatcatcgagcgtggcggtggaattccaacagggcttgcgaacgcgccctacagtataaactaggagacaagatccacggcttcacggtgaaccaagttacttcagtcccggagttattccttacagcagtcaaactgacccacgacgacaccggcgcacggtacctgcacttagcaagggaggacaccaataacttattctcagttcagttcaggaccaccccaatggatagcaccggggtgcctcacattctcgaacacaccgtactctgcggcagtcagaaatacccgtgccgggaccccttttttaagatgctcaatcgttcactttcaacattcatgaacgcctttacggcctccgactacactttgtacccgttctctacccagaaccccaaggattttcaaaatctgctgtcggtgtatttggatgcaaccttcttcccttgtctccgtgaactcgatttctggcaagaggggtggagactggagcacgaaaatccctcagatccccaaactcctttagttttcaaaggcgtagtgttcaacgagatgaagggggcttttaccgacaatgagagaatcttcagccagcatctgcagaaccgccttctccccgaccacacatacagcgtcgtgagtggcggggacccactgtgcattccagagctgacctgggagcaactaaagcagttccacgcaacccactatcatccttctaatgcaagatttttcacatatggaaactttcctctggaacagcaccttaagcagatacatgaggaggctctgtctaagtttcagaagatcgagcccagcacggtagtacctgcgcagaccccttgggataaaccaagagagttccagataacctgtggtcccgatagcttcgctactgatccttccaaacaaacaacgattagcgtaagttttttgttgcccgatataacggacacttttgaagctttcacccttagtttactgagcagtcttctgactagcggacccaattccccgttttacaaagccctgatcgaaagcggtttgggcactgatttctcaccagacgtgggctataacgggtatacccgagaggcctacttctccgtcggccttcaggggattgcagagaaagacatcgaaaccgtgcggagcctgattgacagaacaattgacgaagtcgtagaaaagggttttgaggacgatcggatcgaagccttactacacaaaattgagatccaaatgaagcaccagtcaactagcttcggactcatgctgacaagttatatcgcttcttgttggaaccacgatggggatcccgtagagttgttgaagctgggaaaccaactcgccaagtttcgacagtgcctgcaagaaaaccccaaatttcttcaggagaaggtgaaacagtatttcaagaataaccaacacaaattaaccctcagtatgagacctgacgacaagtaccacgagaaacaggcacaggtagaagctaccaaacttaagcagaaagtggaggctctgtctccaggtgataggcaacaaatctatgagaaaggcctggagcttcgttctcagcagtctaagccccaggatgctagctgtctaccagctctgaaagtcagcgatattgagcctacaatcccagtgactgagctcgatgttgtactgactgccggcgatattccagtgcaatactgtgcacaacctacaaacggcatggtgtatttcagggccttctctagtcttaatacgctcccagaggagcttagaccctacgttccactcttttgtagtgtactgactaagttagggtgcggcctactggattatcgtgaacaggcccagcaaatcgagctaaaaacaggcggcatgtctgcctccccacatgtgctgccagacgacagccacatggatacatatgaacaagtgggcgtactgttttcgagcttatgtttggacagaaatctcccagacatgatgcagctgtggagtgagatcttcaacaacccctgctttgaagaggaggaacatttcaaagtgctggtcaaaatgactgcgcaggagctggcaaacggaattcctgactccggccatctttatgccagcatcagggccggtagaacattaactcccgccggcgatctccaggagacattcagtggaatggatcaggtgcgtctgatgaagcgcatagctgaaatgacagatatcaagcccatcctcaggaagctgccgcggatcaagaagcacctgcttaatggtgacaatatgagatgttcagtcaacgccaccccccaacagatgccgcagactgagaaggccgtggaagactttctcaggagtataggacgatctaaaaaagaacgtcggccagtccgaccgcataccgtggaaaaaccggtgccttcatctagcggtggcgacgcacatgtgccccatggctctcaggtgatccggaagcttgtgatggagcccaccttcaagccttggcagatgaagactcacttcctcatgccctttccagtgaattatgtcggtgagtgtatccggacggtaccctatactgatcccgatcacgcttctctaaaaatcttggcacggttgatgacagccaaattcctgcatactgaaatcagagaaaagggtggcgcttacgggggcggggcaaaactcagtcacaacggtattttcaccctgtatagctacagggaccctaatacgatcgagactctgcaatcattcggtaaagccgtcgactgggctaaaagcggaaagtttacacaacaggacatcgacgaggcaaaacttagcgtgttttccactgtggatgccccggtagcccccagtgacaaggggatggaccacttcctctatggtttgagcgacgaaatgaagcaggcacatagagagcagttgtttgcagttagccatgacaagctcctggcggtgtccgaccgctatctcggaacaggtaagagtactcacggactggccattctcggacctgagaatcctaaaatcgccaaagacccatcttggatcattcagtag

SEQ ID NO: 84005 - DNA, 3117 bp, Artificial Sequence
  derived and/or modified sequence
atgtggaggtgtggcggccggcagggcctgtgtgtgctgcggcggctgagcggcggccacgcccaccaccgggcctggcgctggaacagcaacagagcctgtgagcgggccctgcagtacaagctgggggacaagatccacggcttcaccgtgaaccaggtgacctctgtgcctgagctgttcctgacagctgtgaagctgacccatgatgacaccggggcccgctacctgcacctggcccgggaggacaccaacaacctcttctctgtgcagttccgcaccacccccatggacagcactggagtgccccacatcctggagcacacagtgctgtgtggcagccagaagtacccctgccgggaccccttcttcaagatgctgaacagaagcctgagcaccttcatgaatgccttcaccgccagtgactacaccctgtaccccttcagcacccagaaccccaaggacttccagaacctgctgtctgtgtacctggatgccaccttcttcccctgcctgcgggagctggacttctggcaggagggctggaggctggagcacgagaaccccagcgacccccagacccccctggtgttcaagggcgtggtgttcaatgagatgaagggggccttcacagacaatgaaagaatcttcagccagcacctgcagaaccggctgctgcctgaccacacctacagcgtggtgtctggaggagaccccctgtgcatccctgagctgacctgggagcagctgaagcagttccacgccacccactaccaccccagcaatgcccgcttcttcacctacggcaacttccccctggagcagcacctgaagcagatccacgaggaggccctgagcaagttccagaagattgagcccagcacagtggtgcctgcccagaccccctgggacaagccccgggagttccagatcacctgtggccctgacagctttgccacagaccccagcaagcagaccaccatctctgtgtccttcctgctgcctgacatcacagacacctttgaggccttcaccctgagcctgctgagcagcctgctgaccagcggccccaacagccccttctacaaggccctgattgagagcggcctgggcacagacttctccccagatgtgggctacaacggctacacccgggaggcctacttctctgtgggcctgcagggcattgctgagaaggacattgaaacagtgcgcagcctgattgacaggaccattgatgaggtggtggagaagggctttgaagatgacagaattgaggccctgctgcacaagattgagatccagatgaagcaccagagcaccagctttggcctgatgctgaccagctacatcgccagctgctggaaccatgatggagaccctgtggagctgctgaagctgggcaaccagctggccaagttccggcagtgcctgcaggagaaccccaagttcctgcaggagaaggtgaagcagtacttcaagaacaaccagcacaagctgaccctgtccatgaggccagatgacaagtaccacgagaagcaggcccaggtggaggccaccaagctgaagcagaaggtggaggccctgagccctggggaccggcagcagatctatgagaagggcctggagctgcggagccagcagagcaagccccaggatgccagctgcctgcctgccctgaaggtgtctgacatcgagcccaccatccctgtgacagagctggatgtggtgctgacagctggggacatccctgtgcagtactgtgcccagcccaccaacggcatggtgtacttccgggccttcagcagcctgaacaccctgcctgaggagctgcggccctacgtgcccctcttctgcagcgtgctgaccaagctgggctgcggcctgctggactaccgggagcaggcccagcagatcgagctgaagacaggaggcatgtctgccagcccccacgtgctgcctgatgacagccacatggacacctatgagcaggtgggcgtgctcttcagcagcctgtgcctggacaggaacctgcctgacatgatgcagctgtggagcgagatcttcaacaacccctgctttgaggaggaggagcacttcaaggtgctggtgaagatgacagcccaggagctggccaacggcatcccagacagcggccacctgtatgccagcatccgggccggccgcaccctgaccccagctggggacctgcaggagaccttcagcggcatggaccaggtgcggctgatgaagagaattgctgagatgacagacatcaagcccatcctgaggaagctgccccgcatcaagaagcacctgctgaatggagacaacatgcgctgcagcgtgaatgccaccccccagcagatgccccagacagagaaggctgtggaggacttcctgcggagcatcggccgcagcaagaaggagaggaggcctgtgcggccccacacagtggagaagcctgtgcccagcagcagtggaggagatgcccacgtgccccacggcagccaggtgatcaggaagctggtgatggagcccaccttcaagccctggcagatgaagacccacttcctgatgcccttccctgtgaactacgtgggggagtgcatcagaacagtgccctacacagatcctgaccacgccagcctgaagatcctggcccggctgatgacagccaagttcctgcacacagagatccgggagaagggcggggcctatggaggaggagccaagctgagccacaacggcatcttcaccctgtacagctacagagaccccaacaccatcgagaccctgcagagctttgggaaggctgtggactgggccaagagcggcaagttcacccagcaggacattgatgaggccaagctgtctgtgttcagcacagtggatgcccctgtggcccccagcgacaagggcatggaccacttcctgtatggcctgagtgatgagatgaagcaggcccaccgggagcagctgtttgctgtgtcccatgacaagctgctggccgtgtctgaccgctacctgggcaccgggaagagcacccacggcctggccatcctgggccctgagaaccccaagatcgccaaggaccccagctggatcatccagtag

SEQ ID NO: 84006 - DNA, 3117 bp, Artificial Sequence
  derived and/or modified sequence
atgtggcggtgcggcggccggcagggcctgtgcgtgctgcggcggttaagcggaggacacgcgcaccaccgagcctggaggtggaactccaatcgggcatgcgagcgtgcgctgcaatataaactgggtgataagatccatggctttacagttaatcaagttacatctgtccccgaactctttctcaccgccgtgaagctgacgcacgacgacacaggcgcccggtacctccatttggctcgcgaagacaccaataatttgttttctgtgcagttcagaacaacccctatggatagcacaggagtcccacatatactggaacacacagtgctgtgtgggtcacagaagtacccatgcagagatcctttcttcaagatgctgaatagaagtctgagcacgtttatgaatgctttcacagcgtccgactatacgctgtacccattttccactcagaacccaaaggatttccagaatctgctgtccgtctacctggacgctacattctttccatgcctgcgcgaactggatttttggcaggagggatggcgcctggagcatgagaatccctcggatcctcagacacctttggtattcaagggggtggtgtttaacgaaatgaagggagcctttacagacaatgaaagaatttttagccagcaccttcagaatcggttgcttccagaccatacatattctgtagtgtctggcggggatcccctctgtatccctgaactgacctgggaacaattgaaacagtttcatgctactcattaccacccaagtaacgctcgtttttttacctatggaaactttcctcttgagcagcacttgaaacaaatccacgaggaggcgcttagtaaattccaaaaaatcgagccctccactgttgtccccgctcagacaccctgggataagccaagggagtttcagatcacatgcggcccagattctttcgctactgatcctagcaaacagaccacgatctcagttagcttcctgcttccggacatcacggatacctttgaggcctttacattgtctctgttgtctagccttctcacttctggtcctaattctcctttttataaggctcttattgagtccggactgggaaccgacttttcacctgacgtgggctacaacggctacacaagggaggcttacttcagcgtgggtctgcaggggattgccgaaaaagatatagagaccgtaaggtccctgatcgaccggaccatcgatgaagtcgtagagaaaggatttgaagacgataggattgaagccctcctgcataagattgagatccagatgaaacaccagtcaacatcctttggactgatgcttacttcttatatcgccagttgctggaatcacgacggggatcccgtggaattattgaaattaggcaaccagctggcaaagtttagacaatgtcttcaggagaatcctaagttcctccaggagaaagtcaagcagtatttcaagaacaatcagcacaagttaactctttctatgcgacccgatgataaataccatgaaaagcaggctcaagtggaggccaccaaacttaagcagaaagtagaagccctcagcccaggcgataggcagcagatctatgagaaggggctggagctccgctcccaacagtccaagccacaggacgcctcttgtctgcctgcactaaaggtgagcgatattgaaccgacaatcccagtcactgagctggacgtcgtactgacggctggcgatatacccgtacagtactgtgctcagcccaccaacgggatggtctacttcagagctttctcctcactgaacaccctcccggaagaactgcgcccgtatgtgccacttttctgtagcgtattaactaaactgggatgcggactcctggactaccgggaacaggctcagcaaattgagctcaaaacaggcggcatgtccgccagcccacatgtgttacctgatgattctcacatggacacatatgagcaggtgggtgttctttttagttcgctgtgtctggacaggaacttacccgacatgatgcagctctggtcagagatattcaacaatccatgtttcgaggaggaggagcacttcaaggtcctggttaagatgactgctcaggagttagcgaatggaatccccgacagcggccatctatacgccagtatccgggccggacggactttgacccccgcaggagatcttcaggagaccttttccggcatggaccaggtgagactcatgaaacgcatcgccgagatgaccgacattaagccaatcctgcggaagctgcctagaatcaagaagcatctgttgaatggagacaacatgagatgtagcgtgaacgccacccctcagcaaatgcctcaaactgagaaagccgtcgaagattttctacgcagcatcggcagatccaaaaaggagcgccgccctgttaggccccacacagtcgagaagccagtcccaagcagctctggaggtgacgctcacgtgccccacgggagccaggttattcgtaagttggtaatggaacccaccttcaaaccctggcagatgaaaacccattttctgatgcccttcccagtcaattacgtgggggagtgcatcagaacagtgccttatacagatccagaccacgcatccctcaaaatcctcgcccgtctgatgacagcaaagttcctgcatacagaaattcgggagaaggggggtgcctacggcggcggcgcgaagctgagtcataacggaatcttcaccctctattcctacagggatccgaatactatcgagacactccagtcctttggcaaggctgtcgattgggcgaaaagcggaaaatttacacagcaggatattgacgaggccaaattaagtgtcttttccaccgtcgatgcccccgtggctccctcagacaaagggatggatcattttctctacggcctgtccgacgagatgaagcaggcacaccgggagcagttatttgccgtgtcccacgataagctgctcgcagtttccgatcgatatctgggcactggcaagtcgacccatggcttggctatactggggcccgaaaaccccaagatcgcaaaggaccctagttggataatccagtag

SEQ ID NO: 84007 - DNA, 3457 bp, Artificial Sequence
  derived and/or modified sequence
agagggggttcctcgccagccaggtgctcgtcatgcgcaatgtggcgctgcggcgggcggcagggcctgtgtgtgctgaggcggctgagcggcggacatgcacaccacagagcgtggcgatggaacagtaaccgggcttgtgagagggctctgcagtataaactaggagacaagatccatggattcaccgtaaaccaggtgacatctgttcccgagctgttcctgactgcagtgaagctcacccatgatgacacaggagccaggtatttacacctggccagagaagacacgaataatctgttcagcgtgcagttccgtactactcccatggacagtactggtgttcctcacattcttgagcataccgtcctttgtgggtctcagaaatatccgtgcagagaccctttcttcaaaatgttgaaccggtccctctccacgttcatgaacgccttcacagctagtgattatactctgtatccattttccacacaaaatcccaaggactttcagaatctcctctcggtgtatttggatgccacctttttcccatgtttacgcgagctggatttctggcaggaaggatggcggctggaacatgagaatccgagcgacccccagacgcccttggtctttaaaggagtcgtctttaatgagatgaagggagcgtttacagacaatgagaggatattctcccagcaccttcagaacagacttcttcctgaccacacgtactcagtggtctccgggggtgacccactgtgcatcccggagcttacatgggagcagcttaagcagtttcatgccactcactatcacccaagcaatgctaggttcttcacgtacggtaattttccattagaacagcatctgaaacaaattcacgaggaagcactgagcaaattccagaaaattgaaccaagcaccgtggtgccagctcagacaccctgggacaagcctagggaattccagataacatgtggcccggattcatttgctacagatccctctaaacaaacaaccatcagcgttagcttcctcttaccggacatcaccgacacatttgaagccttcacattaagtcttctgtcttcactcttgacttctgggcccaattctcccttttacaaagccttgattgaatctggccttggcacagacttttctcctgatgttggatataatggctacacgagggaggcctactttagtgtcggcctccaagggattgcggagaaagacattgagaccgtcagaagcctcatagacagaacgattgatgaagtagttgagaaaggatttgaagatgatcgaattgaggctttacttcataaaattgaaatacagatgaaacatcagtctaccagctttgggctgatgctgacatcatacatagcttcttgctggaaccatgatggggaccctgtggagctcttgaagttgggaaatcagttagctaaattcagacagtgcctgcaggaaaatccaaaatttttgcaagaaaaagtaaaacagtattttaagaataaccagcataagctgactttatcgatgaggccagatgacaagtatcacgagaagcaggcacaggtggaagccacgaagctcaagcagaaggtcgaggctctgtcccccggagacaggcagcagatctacgagaaaggtctagaattacggagtcaacaaagcaaacctcaagatgcctcttgtctgccagcgttgaaagtttccgatattgaacccaccatacctgtcacagagttggacgtggtcctgacagctggagatatccctgttcagtactgcgcccagcccaccaatggcatggtgtatttccgggccttctccagcctgaacacactccccgaggagctgaggccctatgtgcccctcttctgcagcgtcctcaccaagctgggctgcggccttcttgactaccgggagcaggctcagcagatagaattgaagaccggagggatgagtgcttctccccacgtgctccccgacgactcacacatggacacctacgagcaggtaggtgtgcttttctcctctctctgcctggatcgaaacctgccagacatgatgcagctatggagtgaaatatttaacaacccgtgctttgaagaagaggagcacttcaaggtgctggtgaagatgaccgcccaggagctcgccaatggaattcctgactctgggcacctgtacgcatccatcagggcaggccggaccctcacgcccgcaggggacctgcaggagaccttcagcgggatggatcaggtgcggctgatgaagaggattgcagaaatgacagatatcaaacccatcctgaggaagctcccgcgtatcaagaaacacttgttaaatggtgataatatgaggtgttcagtgaatgcgactcctcagcagatgcctcagacagaaaaagcggtcgaagacttccttagaagcatcggtcggagtaaaaaggaacggaggcctgtgcgcccacacacggtcgagaaacctgtgcccagcagctctggtggagatgcccacgttccccatggctcccaggtcattaggaagctggtcatggaacccaccttcaagccctggcagatgaagactcacttcctgatgcccttcccggtgaattacgtgggtgaatgcatccgaactgtcccctacacggacccagatcatgccagtcttaaaatccttgcacgtttgatgactgccaaattcttgcatacagaaattcgagaaaaaggcggtgcttatggtggaggcgcaaaactcagccacaatgggattttcaccctttactcttacagggacccaaatacaatagagacgctccagtcttttgggaaggctgtcgactgggctaagtctggaaaattcacacagcaagacatcgacgaagccaaactttctgtcttctcaaccgtagatgctcctgtcgctccttcagacaaaggaatggaccacttcttgtacggcctctcggatgagatgaagcaggcccacagagagcagctctttgctgtcagccacgacaagctcctggccgtgagcgatagatacctcggcactgggaagagcacacacggcctggccatcctcggacccgagaacccgaaaattgccaaggacccatcctggatcatccaatgagcagccgtggcgctcgactgcacaggagcccgagacaatacacctccgagctgaatatgaaaagtcagaaatgctactgctttttccaagaatattatgtcattgagtgtcgccaaagcccttgactggcgagtcaaaaactcagatctatcttaagagtgaccaggaagaggttcattgaaataatcatgcatgaagcgccaaagatgcaccatgtagaattttcactttgtactggcaggctcgttttacctcattctagaatatttaagaatctaaaaataaagggcaactctgactt

SEQ ID NO: 84008 - DNA, 3117 bp, Artificial Sequence
  derived and/or modified sequence
atgtggcgttgtgggggacggcaggggctgtgcgttctgaggaggctgtcgggaggacacgcccaccacagagcatggcgttggaacagtaatcgcgcttgtgagcgtgccctgcagtataagttgggggacaagatccacggcttcaccgtgaaccaggtaacctctgttcctgaactgtttctcacagctgtgaaactcacacacgatgacacgggagcccgttatctgcacctggcgagggaagatacgaacaatttgttctccgtgcagttccggaccactcctatggactctaccggcgttccacacatcctggaacacacagtgctttgtgggtctcaaaagtatccttgtcgcgatcctttttttaagatgcttaaccggtctttgagcactttcatgaatgcatttaccgctagcgattacaccctctatcctttctcaacacaaaaccccaaggacttccagaatctcctctctgtatatctggatgcaactttcttcccttgtctgagagagctcgacttctggcaggagggatggcgcctggagcacgaaaacccatccgatccgcagactcctcttgtgttcaagggagtggtgtttaacgagatgaaaggagcctttacagataacgaaagaatattctcccaacatctccagaataggttactgcccgatcatacctactctgtggtttccggaggcgatcctctgtgcatacccgagttaacctgggagcagctgaagcagtttcacgccacccattatcatccttccaacgctagatttttcacctacgggaactttcctctcgaacagcaccttaagcagatccatgaggaagccctaagcaaattccagaagattgagccttctaccgtggtacccgctcaaaccccctgggataagcctcgggagtttcagatcacgtgtggccctgattcgttcgctactgatccatcaaagcaaactaccattagcgtcagctttctgctccccgacatcactgataccttcgaggccttcaccctgagtctgctgtcaagcctgcttacctcaggtcctaactccccattttataaagccttgattgagtccggtctgggcaccgatttcagtcccgatgtggggtacaatggttacacaagggaagcatacttctccgttgggctacagggaatcgcggagaaagacattgaaaccgtgcggagtctcattgaccggaccatcgacgaggttgtggaaaagggatttgaagatgaccgcatcgaggcactacttcataagatcgagatccagatgaagcaccagagtacctcctttggccttatgctgacttcgtacatcgcgagctgctggaaccatgacggagatcctgtggaattgctaaaacttgggaaccagttggcgaaatttagacagtgcttgcaggagaatcccaagttcttacaagaaaaggttaagcagtactttaagaataaccagcataagctgaccctttccatgcgccctgatgataaataccatgagaaacaagcgcaggttgaagccacaaagctaaagcagaaggttgaggccctttcccctggcgaccgccaacagatttacgagaagggtctcgaactgaggtcacagcagagtaagccccaggacgcgagctgcctgccagctctgaaagtgtcagacattgagcctacgatcccggtcaccgagctcgatgtagtgctgactgctggggatattcctgtccaatactgtgcccaacctactaacggaatggtgtactttcgggctttctccagcctcaacacacttccagaagagctcaggccttatgtccccctgttctgctcagtcctgacgaagctggggtgtggacttttggactatagggaacaagcccaacagattgaactcaaaacaggcggaatgagcgcctcccctcatgtgctacccgatgactcccacatggacacatatgagcaggtgggggtcctgttttcctccctgtgtctcgaccgcaatttaccggacatgatgcagctctggtctgagatcttcaataacccttgcttcgaagaggaggagcactttaaggtgctggtgaagatgaccgcacaggaactagccaacggtatcccagactcaggccacctgtatgcttctatcagagcagggagaacactgacgcctgccggagacctccaagaaacattcagcggcatggaccaggtcagacttatgaaaagaatcgcggagatgacagacattaaaccaattctgagaaaactccctagaattaagaagcatctcctgaacggagacaatatgcggtgctccgtgaacgctacacctcaacagatgccacaaactgaaaaggctgtagaggattttttgagatcaataggccgaagcaagaaggagcggaggcccgtgcggcctcacacggtggaaaaacctgtgcccagttcgtccgggggagatgcacacgtgccacatggcagccaggtaatccggaaactggtgatggagcctacgtttaagccttggcaaatgaaaacccattttctgatgcctttccctgtaaattacgtgggagagtgcatacgcactgtgccgtacactgacccagatcacgcctccctgaaaatacttgccaggctgatgacagctaagttcctccataccgaaatacgggagaaaggcggtgcatacgggggtggcgctaagctttctcacaacggaatatttaccctgtacagctatcgagaccctaacacaattgagacacttcagtcatttggcaaagctgtcgattgggctaaaagcggaaaattcacccagcaggacattgatgaagcgaaattgtcagtcttcagcactgtcgacgctcctgtggcacccagcgataagggtatggatcactttctttacggcctctcagatgaaatgaaacaggcccacagagaacagctgtttgctgtatctcatgacaagctcctggccgtcagcgatagatacctgggaacaggaaaaagcacacacggactggccattttgggcccagaaaaccctaagatagctaaggaccccagttggatcattcaatag

SEQ ID NO: 84009 - protein, 233 aa, Artificial Sequence
  derived and/or modified sequence
  misc_feature (1)..(1): Xaa can be any naturally occurring amino acid
XLIESGLGTDFSPDVGYNGYTREAYFSVGLQGIAEKDIETVRSLIDRTIDEVVEKGFEDDRIEALLHKIEIQMKHQSTSFGLMLTSYIASCWNHDGDPVELLKLGNQLAKFRQCLQENPKFLQEKVKQYFKNNQHKLTLSMRPDDKYHEKQAQVEATKLKQKVEALSPGDRQQIYEKGLELRSQQSKPQDASCLPALKVSDIEPTIPVTELDVVLTGHCERYAFPGSRVPWGN

SEQ ID NO: 84010 - protein, 939 aa, Artificial Sequence
  derived and/or modified sequence
MRNVALRRAAGPVCAEAAERRVTSVPELFLTAVKLTHDDTGARYLHLAREDTNNLFSVQFRTTPMDSTGVPHILEHTVLCGSQKYPCRDPFFKMLNRSLSTFMNAFTASDYTLYPFSTQNPKDFQNLLSVYLDATFFPCLRELDFWQEGWRLEHENPSDPQTPLVFKGVVFNEMKGAFTDNERIFSQHLQNRLLPDHTYSVVSGGDPLCIPELTWEQLKQFHATHYHPSNARFFTYGNFPLEQHLKQIHEEALSKFQKIEPSTVVPAQTPWDKPREFQITCGPDSFATDPSKQTTISVSFLLPDITDTFEAFTLSLLSSLLTSGPNSPFYKALIESGLGTDFSPDVGYNGYTREAYFSVGLQGIAEKDIETVRSLIDRTIDEVVEKGFEDDRIEALLHKIEIQMKHQSTSFGLMLTSYIASCWNHDGDPVELLKLGNQLAKFRQCLQENPKFLQEKVKQYFKNNQHKLTLSMRPDDKYHEKQAQVEATKLKQKVEALSPGDRQQIYEKGLELRSQQSKPQDASCLPALKVSDIEPTIPVTELDVVLTAGDIPVQYCAQPTNGMVYFRAFSSLNTLPEELRPYVPLFCSVLTNPCFEEEEHFKVLVKMTAQELANGIPDSGHLYASIRAGRTLTPAGDLQETFSGMDQVRLMKRIAEMTDIKPILRKLPRIKKHLLNGDNMRCSVNATPQQMPQTEKAVEDFLRSIGRSKKERRPVRPHTVEKPVPSSSGGDAHVPHGSQVIRKLVMEPTFKPWQMKTHFLMPFPVNYVGECIRTVPYTDPDHASLKILARLMTAKFLHTEIREKGGAYGGGAKLSHNGIFTLYSYRDPNTIETLQSFGKAVDWAKSGKFTQQDIDEAKLSVFSTVDAPVAPSDKGMDHFLYGLSDEMKQAHREQLFAVSHDKLLAVSDRYLGTGKSTHGLAILGPENPKIAKDPSWIIQ

SEQ ID NO: 84011 - protein, 184 aa, Artificial Sequence
  derived and/or modified sequence
KPVPSSSGGDAHVPHGSQVIRKLVMEPTFKPWQMKTHFLMPFPVNYVGECIRTVPYTDPDHASLKILARLMTAKFLHTEIREKGGAYGGGAKLSHNGIFTLYSYRDPNTIETLQSFGKAVDWAKSGKFTQQDIDEAKLSVFSTVDAPVAPSDKGILSITVRISTHSLTDDVAVFQVPGMHGQEH

SEQ ID NO: 84012 - DNA, 2820 bp, Artificial Sequence
  derived and/or modified sequence
atgagaaacgtggccctgagaagagccgccggccccgtgtgcgccgaggccgccgagagaagagtgaccagcgtgcccgagctgttcctgaccgccgtgaagctgacccacgacgacaccggcgccagatacctgcacctggccagagaggacaccaacaacctgttcagcgtgcagttcagaaccacccccatggacagcaccggcgtgccccacatcctggagcacaccgtgctgtgcggcagccagaagtacccctgcagagaccccttcttcaagatgctgaacagaagcctgagcaccttcatgaacgccttcaccgccagcgactacaccctgtaccccttcagcacccagaaccccaaggacttccagaacctgctgagcgtgtacctggacgccaccttcttcccctgcctgagagagctggacttctggcaggagggctggagactggagcacgagaaccccagcgacccccagacccccctggtgttcaagggcgtggtgttcaacgagatgaagggcgccttcaccgacaacgagagaatcttcagccagcacctgcagaacagactgctgcccgaccacacctacagcgtggtgagcggcggcgaccccctgtgcatccccgagctgacctgggagcagctgaagcagttccacgccacccactaccaccccagcaacgccagattcttcacctacggcaacttccccctggagcagcacctgaagcagatccacgaggaggccctgagcaagttccagaagatcgagcccagcaccgtggtgcccgcccagaccccctgggacaagcccagagagttccagatcacctgcggccccgacagcttcgccaccgaccccagcaagcagaccaccatcagcgtgagcttcctgctgcccgacatcaccgacaccttcgaggccttcaccctgagcctgctgagcagcctgctgaccagcggccccaacagccccttctacaaggccctgatcgagagcggcctgggcaccgacttcagccccgacgtgggctacaacggctacaccagagaggcctacttcagcgtgggcctgcagggcatcgccgagaaggacatcgagaccgtgagaagcctgatcgacagaaccatcgacgaggtggtggagaagggcttcgaggacgacagaatcgaggccctgctgcacaagatcgagatccagatgaagcaccagagcaccagcttcggcctgatgctgaccagctacatcgccagctgctggaaccacgacggcgaccccgtggagctgctgaagctgggcaaccagctggccaagttcagacagtgcctgcaggagaaccccaagttcctgcaggagaaggtgaagcagtacttcaagaacaaccagcacaagctgaccctgagcatgagacccgacgacaagtaccacgagaagcaggcccaggtggaggccaccaagctgaagcagaaggtggaggccctgagccccggcgacagacagcagatctacgagaagggcctggagctgagaagccagcagagcaagccccaggacgccagctgcctgcccgccctgaaggtgagcgacatcgagcccaccatccccgtgaccgagctggacgtggtgctgaccgccggcgacatccccgtgcagtactgcgcccagcccaccaacggcatggtgtacttcagagccttcagcagcctgaacaccctgcccgaggagctgagaccctacgtgcccctgttctgcagcgtgctgaccaacccctgcttcgaggaggaggagcacttcaaggtgctggtgaagatgaccgcccaggagctggccaacggcatccccgacagcggccacctgtacgccagcatcagagccggcagaaccctgacccccgccggcgacctgcaggagaccttcagcggcatggaccaggtgagactgatgaagagaatcgccgagatgaccgacatcaagcccatcctgagaaagctgcccagaatcaagaagcacctgctgaacggcgacaacatgagatgcagcgtgaacgccaccccccagcagatgccccagaccgagaaggccgtggaggacttcctgagaagcatcggcagaagcaagaaggagagaagacccgtgagaccccacaccgtggagaagcccgtgcccagcagcagcggcggcgacgcccacgtgccccacggcagccaggtgatcagaaagctggtgatggagcccaccttcaagccctggcagatgaagacccacttcctgatgcccttccccgtgaactacgtgggcgagtgcatcagaaccgtgccctacaccgaccccgaccacgccagcctgaagatcctggccagactgatgaccgccaagttcctgcacaccgagatcagagagaagggcggcgcctacggcggcggcgccaagctgagccacaacggcatcttcaccctgtacagctacagagaccccaacaccatcgagaccctgcagagcttcggcaaggccgtggactgggccaagagcggcaagttcacccagcaggacatcgacgaggccaagctgagcgtgttcagcaccgtggacgcccccgtggcccccagcgacaagggcatggaccacttcctgtacggcctgagcgacgagatgaagcaggcccacagagagcagctgttcgccgtgagccacgacaagctgctggccgtgagcgacagatacctgggcaccggcaagagcacccacggcctggccatcctgggccccgagaaccccaagatcgccaaggaccccagctggatcatccagtag

SEQ ID NO: 84013 - DNA, 555 bp, Artificial Sequence
  derived and/or modified sequence
aagcccgtgcccagcagcagcggcggcgacgcccacgtgccccacggcagccaggtgatcagaaagctggtgatggagcccaccttcaagccctggcagatgaagacccacttcctgatgcccttccccgtgaactacgtgggcgagtgcatcagaaccgtgccctacaccgaccccgaccacgccagcctgaagatcctggccagactgatgaccgccaagttcctgcacaccgagatcagagagaagggcggcgcctacggcggcggcgccaagctgagccacaacggcatcttcaccctgtacagctacagagaccccaacaccatcgagaccctgcagagcttcggcaaggccgtggactgggccaagagcggcaagttcacccagcaggacatcgacgaggccaagctgagcgtgttcagcaccgtggacgcccccgtggcccccagcgacaagggcatcctgagcatcaccgtgagaatcagcacccacagcctgaccgacgacgtggccgtgttccaggtgcccggcatgcacggccaggagcactag

SEQ ID NO: 84014 - DNA, 2820 bp, Artificial Sequence
  derived and/or modified sequence
atgaggaatgtcgctctgcgtagggccgctgggcctgtctgtgccgaggccgcagaaaggagggtgactagtgtgcccgaactttttctcacggccgtcaaacttacgcacgacgatacaggggcccggtacttgcacctcgcccgggaggatactaacaatctgttcagtgtccagtttagaacgacacccatggattctactggagtgccacacatactggagcacaccgtgctttgtggatcacagaagtatccatgtagggatcctttcttcaaaatgctaaaccgctcgctgtcaaccttcatgaacgcgttcaccgcctcagactatactttataccccttttcaacacagaatccaaaggacttccagaatctgctcagcgtctacctcgatgctacattctttccttgccttagggaactggacttttggcaggaaggatggcggcttgagcacgagaaccctagtgacccacaaactcccctagtcttcaagggcgtggttttcaatgagatgaaaggtgccttcacggacaatgaacgtattttcagccagcatctccagaacaggctgctccccgaccacacttattctgtcgtgagtggaggtgaccccctgtgtatccccgagctgacctgggaacagttgaagcagtttcatgcaacccattatcatccctcgaacgcgagattcttcacctacgggaattttccgctagagcaacacctcaaacagatacatgaggaagccctgagtaaatttcagaaaatagagcctagcaccgtcgtcccggcccagactccttgggacaagccacgagagttccagattacatgcgggccagacagcttcgccaccgacccgagtaaacaaacgacaatcagcgtttctttcctccttccagacataaccgacacgtttgaagctttcacactgagcctgctttcctctttattgacatcaggcccgaatagccctttttataaagctcttatcgaaagtggtctggggaccgatttttcccccgatgtgggatataatggatacacccgcgaggcttacttctccgtggggctgcaaggaattgccgagaaagatattgagacagttaggtccctcatagataggaccattgacgaagtggtggagaaaggctttgaggacgacaggatcgaagccctgctgcataagattgagattcagatgaagcaccaaagcaccagctttggactgatgttgacatcctatatcgcctcatgctggaaccatgatggcgaccccgttgaacttctcaagctgggcaatcagctggcgaagtttaggcagtgcctccaggagaaccccaagtttttgcaagaaaaagtgaaacagtattttaaaaataatcagcataaactcacgctgtccatgagacccgatgacaaataccatgagaagcaggctcaagtggaggccaccaaattaaagcagaaagttgaagccctgtccccaggcgatcgccagcagatctatgagaagggcctcgagctccgatctcagcagtcgaagccacaggacgcttcctgtctgcccgcgttaaaagtgtccgatatcgagccgacgattcctgtgaccgaactagacgttgttctaactgctggggacattccggtgcagtattgcgcccagccgacaaatggtatggtgtactttcgagccttcagttcactgaatactttacccgaggagctacgtccgtatgtgcctctcttctgtagcgtcctgacgaacccctgcttcgaggaggaggagcactttaaggttctcgtcaagatgacggctcaggaactggctaatggtatcccggatagtggccatctgtatgcgtctatcagggcaggaaggacgctgactccggccggcgatctacaggagacattctctggtatggaccaagtgaggcttatgaaaagaatcgcagagatgacagacattaaacccattctccggaagctgcctcggatcaagaaacacctgctgaatggcgacaacatgaggtgctccgtgaacgcaacaccccaacagatgcctcagacagagaaggcagtggaagacttcctgcggagtataggtcgatctaagaaggagcgaagaccagtccgacctcacactgtggaaaagcccgttccaagcagttcaggtggtgatgctcatgtgcctcacggctcccaggtcattaggaaacttgtaatggaacctaccttcaagccttggcaaatgaagacccatttcctgatgcccttccctgtgaattatgtcggcgagtgtattcggacggtcccctatacagatccagatcatgcaagcttgaaaatccttgcccgcctgatgacagctaagttcttgcacactgagatcagagaaaaaggaggggcctacggtggcggggcaaagcttagtcacaatggaatatttaccctctattcatatagggacccaaacactatcgagacactgcaatcattcggtaaagcggtggattgggcgaaatctggcaagttcactcagcaggatattgatgaggctaagttgagcgtgttcagtactgttgacgcacctgtggccccttcggataaagggatggaccattttctctacggtttatctgatgaaatgaagcaagcgcaccgggaacagttgtttgccgtctcacacgataagctgctagccgtctccgaccgctacctgggaaccgggaaatcaacgcatggactggctatcctgggcccagaaaaccccaagatagccaaggacccgagctggattattcaatag

SEQ ID NO: 84015 - DNA, 555 bp, Artificial Sequence
  derived and/or modified sequence
aagcccgtgccgagttctagcggcggggatgcacacgtgcctcacggttctcaagttataagaaaacttgtcatggagccaacatttaagccttggcagatgaaaacccatttccttatgccctttcccgtgaactacgtgggagaatgtatcagaacagttccctacacggatcccgaccacgcttccctcaaaatccttgcacggcttatgacagcaaagttcctgcatacagagatccgggagaagggaggtgcgtacggtggcggggctaagctgtcacacaatgggatttttactctttattcttaccgcgatcccaacacaattgagactttgcagtcctttgggaaagcagtggactgggctaaaagcggtaagtttacccaacaagacatagatgaggcaaagctctccgtgttctcaaccgtggatgccccagttgcaccctctgacaagggaattctgagcattacagtgagaatctcaacccacagtctcacagatgatgtcgccgtctttcaggtgccaggaatgcacgggcaagaacattag

SEQ ID NO: 84016 - DNA, 2820 bp, Artificial Sequence
  derived and/or modified sequence
atgagaaatgtggccctgcggcgggccgccggccctgtgtgtgccgaggccgctgagcggcgggtgacctctgtgcctgagctgttcctgacagctgtgaagctgacccatgatgacaccggggcccgctacctgcacctggcccgggaggacaccaacaacctcttctctgtgcagttccgcaccacccccatggacagcactggagtgccccacatcctggagcacacagtgctgtgtggcagccagaagtacccctgccgggaccccttcttcaagatgctgaacagaagcctgagcaccttcatgaatgccttcaccgccagtgactacaccctgtaccccttcagcacccagaaccccaaggacttccagaacctgctgtctgtgtacctggatgccaccttcttcccctgcctgcgggagctggacttctggcaggagggctggaggctggagcacgagaaccccagcgacccccagacccccctggtgttcaagggcgtggtgttcaatgagatgaagggggccttcacagacaatgaaagaatcttcagccagcacctgcagaaccggctgctgcctgaccacacctacagcgtggtgtctggaggagaccccctgtgcatccctgagctgacctgggagcagctgaagcagttccacgccacccactaccaccccagcaatgcccgcttcttcacctacggcaacttccccctggagcagcacctgaagcagatccacgaggaggccctgagcaagttccagaagattgagcccagcacagtggtgcctgcccagaccccctgggacaagccccgggagttccagatcacctgtggccctgacagctttgccacagaccccagcaagcagaccaccatctctgtgtccttcctgctgcctgacatcacagacacctttgaggccttcaccctgagcctgctgagcagcctgctgaccagcggccccaacagccccttctacaaggccctgattgagagcggcctgggcacagacttctccccagatgtgggctacaacggctacacccgggaggcctacttctctgtgggcctgcagggcattgctgagaaggacattgaaacagtgcgcagcctgattgacaggaccattgatgaggtggtggagaagggctttgaagatgacagaattgaggccctgctgcacaagattgagatccagatgaagcaccagagcaccagctttggcctgatgctgaccagctacatcgccagctgctggaaccatgatggagaccctgtggagctgctgaagctgggcaaccagctggccaagttccggcagtgcctgcaggagaaccccaagttcctgcaggagaaggtgaagcagtacttcaagaacaaccagcacaagctgaccctgtccatgaggccagatgacaagtaccacgagaagcaggcccaggtggaggccaccaagctgaagcagaaggtggaggccctgagccctggggaccggcagcagatctatgagaagggcctggagctgcggagccagcagagcaagccccaggatgccagctgcctgcctgccctgaaggtgtctgacatcgagcccaccatccctgtgacagagctggatgtggtgctgacagctggggacatccctgtgcagtactgtgcccagcccaccaacggcatggtgtacttccgggccttcagcagcctgaacaccctgcctgaggagctgcggccctacgtgcccctcttctgcagcgtgctgaccaacccctgctttgaggaggaggagcacttcaaggtgctggtgaagatgacagcccaggagctggccaacggcatcccagattctggccacctgtatgccagcatccgggccggccgcaccctgaccccagctggggacctgcaggagaccttcagcggcatggaccaggtgcggctgatgaagagaattgctgagatgacagacatcaagcccatcctgaggaagctgccccgcatcaagaagcacctgctgaatggagacaacatgcgctgcagcgtgaatgccaccccccagcagatgccccagacagagaaggctgtggaggacttcctgcggagcatcggccgcagcaagaaggagcggcggcctgtgcggccccacacagtggagaagcctgtgcccagcagcagtggaggagatgcccacgtgccccacggcagccaggtgatcaggaagctggtgatggagcccaccttcaagccctggcagatgaagacccacttcctgatgcccttccctgtgaactacgtgggggagtgcatcagaacagtgccctacacagatcctgaccacgccagcctgaagatcctggcccggctgatgacagccaagttcctgcacacagagatccgggagaagggcggggcctacggcggcggggccaagctgagccacaacggcatcttcaccctgtacagctacagagaccccaacaccatcgagaccctgcagagctttgggaaggctgtggactgggccaagagcggcaagttcacccagcaggacattgatgaggccaagctgagcgtcttcagcacagtggatgcccctgtggcccccagcgacaagggcatggaccacttcctgtatggcctgagtgatgagatgaagcaggcccaccgggagcagctgtttgctgtgtcccatgacaagctgctggccgtgtctgaccgctacctgggcaccgggaagagcacccacggcctggccatcctgggccctgagaaccccaagatcgccaaggaccccagctggatcatccagtag

SEQ ID NO: 84017 - DNA, 555 bp, Artificial Sequence
  derived and/or modified sequence
aagcctgtgcccagcagcagtggaggagatgcccacgtgccccacggcagccaggtgatcaggaagctggtgatggagcccaccttcaagccctggcagatgaagacccacttcctgatgcccttccctgtgaactacgtgggggagtgcatcagaacagtgccctacacagatcctgaccacgccagcctgaagatcctggcccggctgatgacagccaagttcctgcacacagagatccgggagaagggcggggcctatggaggaggagccaagctgagccacaacggcatcttcaccctgtacagctacagagaccccaacaccatcgagaccctgcagagctttgggaaggctgtggactgggccaagagcggcaagttcacccagcaggacattgatgaggccaagctgtctgtgttcagcacagtggatgcccctgtggcccccagcgacaagggcatcctgagcatcaccgtgcgcatcagcacccacagcctgacagatgatgtggccgtgttccaggtgcccggcatgcacggccaggagcactag

SEQ ID NO: 84018 - DNA, 2820 bp, Artificial Sequence
  derived and/or modified sequence
atgcggaacgtggccctgcggcgggccgccggccccgtgtgcgccgaggccgctgaacgacgggtgaccagtgtccccgaattgtttttgacggcagtaaaactcactcacgacgacactggagcccggtacttacatttagcgagagaagacaccaataacttattctccgtccaatttcgcacaacacccatggacagtacgggagtgccccacatcctcgaacacacagtcctctgcgggtcccagaaatatccttgccgcgaccccttttttaaaatgctgaaccggtcactcagcacatttatgaacgccttcacagctagcgattacaccctgtatcctttcagtacacaaaatcctaaggatttccagaaccttctgtctgtgtatctggatgccaccttcttcccttgtttgagggagctcgatttctggcaggagggttggcgcttggaacacgaaaacccttctgatccccaaacacccctggtctttaaaggagtcgttttcaacgaaatgaaaggcgcatttacggacaacgaaagaattttttcccagcatctgcagaaccgcttgctgccagaccatacttacagtgttgtgtccggtggcgatcccctgtgcattcctgagttgacctgggagcaactgaaacaatttcatgcaacacattatcatccctcaaacgctaggttcttcacctacggaaacttccccttagaacagcatctgaagcagatacacgaagaggctttgtcaaagttccagaagattgagcctagtacagtcgtgccggctcaaaccccttgggacaagccaagggaattccaaattacctgcgggcccgattccttcgccacagacccctcaaagcaaacaactatttcagtaagttttttgctacccgatattaccgacacgtttgaggccttcacattatcactcttatcttcactcctgactagcggccctaactcccctttttacaaggctctaattgagtcagggctggggacggatttctcccctgatgtggggtataacggctacacaagagaggcttacttctcagtgggattacagggcattgcagagaaagacatcgagaccgtgcgatcactcattgacagaaccattgacgaggtggtggaaaagggatttgaggacgacagaatcgaagcgctcctgcataaaattgaaatacagatgaagcatcagtccaccagctttgggttgatgttgacatcgtatatagcatcttgctggaaccacgatggcgaccccgtagaactcctcaagctgggaaaccagctggctaagttcagacagtgcctacaggaaaaccctaagttcctgcaggagaaagtcaagcagtatttcaagaataatcagcacaaactgaccctgtctatgaggcctgacgataaataccatgagaaacaggctcaggtggaagctactaagctgaaacagaaagtggaggcgctgagtccaggcgatagacagcaaatctatgagaagggacttgaactgcgctcacagcagagtaaacctcaagacgcttcgtgtcttccagctttaaaagtgtcagatatagagccgacgatacccgtcacggaattggatgtcgtcctgacagctggcgatatcccagtccaatattgtgctcagccaaccaacggaatggtttacttcagagcatttagtagcctcaatacacttccagaggaacttagaccctacgtaccactgttttgcagcgtcctgacaaatccatgcttcgaagaagaggaacactttaaagtcctggtgaaaatgacagctcaagaattggcaaatgggatcccggactccgggcatctctacgcttccataagagcagggcggacgcttacgcccgccggtgatcttcaggagacgttttctgggatggaccaggtaagattaatgaaaagaatcgcagagatgacagatatcaaacccatcctccgaaaattgccgcgcatcaaaaaacaccttttgaatggtgataatatgaggtgtagcgtgaatgctaccccacagcagatgccccagactgagaaggcagtagaagacttcctgcgatctattgggcgatccaagaaagagaggcgacccgttaggccacatactgtcgagaaacctgttccaagtagtagtggaggggatgcacacgtaccccatggaagtcaggtaattcgaaagctggtgatggaacctacctttaaaccttggcagatgaagactcacttcctcatgcccttccccgtgaactatgtgggcgagtgcatccggactgtaccttacactgatccagatcacgcttcgttgaaaatactggcccggctgatgaccgctaagttcctgcatacagaaattcgggaaaagggtggtgcttacggcgggggagccaagctgtcccataatggcatttttaccttgtatagttacagagatccaaataccatcgaaacactgcagagcttcggaaaggcagtggattgggctaagagtggaaagttcacacaacaggacatagatgaggccaagctgtcagtgttcagcactgtagacgctcctgtggccccatcagacaaaggaatggaccatttcctgtacggcttaagtgatgaaatgaaacaggcccaccgcgaacagctctttgcagtgtcccatgataaactcttggcagtgtcagaccggtaccttggaacgggaaaaagcacacatggcttagcaatcctgggccctgaaaatcctaaaatcgccaaggaccccagctggattatccaatag

SEQ ID NO: 84019 - DNA, 555 bp, Artificial Sequence
  derived and/or modified sequence
aagcccgtgcccagcagcagcggcggcgacgcccacgtgccccacggctctcaggttatccgcaaactggtgatggaacctacatttaaaccgtggcagatgaagactcattttctgatgcccttccccgtgaactatgtgggcgaatgtattcgaaccgtaccctacaccgacccggaccacgcctcactgaagatactcgcccgcttgatgacagctaagttcttacacaccgagatcagagagaagggcggcgcctacgggggaggtgctaagctttcacataacggcatctttactctttatagttatcgggatcccaacactatagagactctccagtcattcggcaaggctgtcgactgggcaaagagtggaaaattcacccagcaggacatcgatgaagctaagttgtcagtcttcagcacggttgatgctccagttgcacctagcgacaaggggattctctccatcacagttagaatttcaacccattcgctcacggacgatgtagcagtgtttcaagtcccaggcatgcatggacaagaacactag

SEQ ID NO: 84020 - DNA, 3030 bp, Artificial Sequence
  derived and/or modified sequence
gtcatgcgcaatgtggcgctgcggcgggcggcagggcctgtgtgtgctgaggcggctgagcggcgggtgacatctgttcccgagctgttcctgactgcagtgaagctcacccatgatgacacaggagccaggtatttacacctggccagagaagacacgaataatctgttcagcgtgcagttccgtactactcccatggacagtactggtgttcctcacattcttgagcataccgtcctttgtgggtctcagaaatatccgtgcagagaccctttcttcaaaatgttgaaccggtccctctccacgttcatgaacgccttcacagctagtgattatactctgtatccattttccacacaaaatcccaaggactttcagaatctcctctcggtgtatttggatgccacctttttcccatgtttacgcgagctggatttctggcaggaaggatggcggctggaacatgagaatccgagcgacccccagacgcccttggtctttaaaggagtcgtctttaatgagatgaagggagcgtttacagacaatgagaggatattctcccagcaccttcagaacagacttcttcctgaccacacgtactcagtggtctccgggggtgacccactgtgcatcccggagcttacatgggagcagcttaagcagtttcatgccactcactatcacccaagcaatgctaggttcttcacgtacggtaattttccattagaacagcatctgaaacaaattcacgaggaagcactgagcaaattccagaaaattgaaccaagcaccgtggtgccagctcagacaccctgggacaagcctagggaattccagataacatgtggcccggattcatttgctacagatccctctaaacaaacaaccatcagcgttagcttcctcttaccggacatcaccgacacatttgaagccttcacattaagtcttctgtcttcactcttgacttctgggcccaattctcccttttacaaagccttgattgaatctggccttggcacagacttttctcctgatgttggatataatggctacacgagggaggcctactttagtgtcggcctccaagggattgcggagaaagacattgagaccgtcagaagcctcatagacagaacgattgatgaagtagttgagaaaggatttgaagatgatcgaattgaggctttacttcataaaattgaaatacagatgaaacatcagtctaccagctttgggctgatgctgacatcatacatagcttcttgctggaaccatgatggggaccctgtggagctcttgaagttgggaaatcagttagctaaattcagacagtgcctgcaggaaaatccaaaatttttgcaagaaaaagtaaaacagtattttaagaataaccagcataagctgactttatcgatgaggccagatgacaagtatcacgagaagcaggcacaggtggaagccacgaagctcaagcagaaggtcgaggctctgtcccccggagacaggcagcagatctacgagaaaggtctagaattacggagtcaacaaagcaaacctcaagatgcctcttgtctgccagcgttgaaagtttccgatattgaacccaccatacctgtcacagagttggacgtggtcctgacagctggagatatccctgttcagtactgcgcccagcccaccaatggcatggtgtatttccgggccttctccagcctgaacacactccccgaggagctgaggccctatgtgcccctcttctgcagcgtcctcaccaacccgtgctttgaagaagaggagcacttcaaggtgctggtgaagatgaccgcccaggagctcgccaatggaattcctgactctgggcacctgtacgcatccatcagggcaggccggaccctcacgcccgcaggggacctgcaggagaccttcagcgggatggatcaggtgcggctgatgaagaggattgcagaaatgacagatatcaaacccatcctgaggaagctcccgcgtatcaagaaacacttgttaaatggtgataatatgaggtgttcagtgaatgcgactcctcagcagatgcctcagacagaaaaagcggtcgaagacttccttagaagcatcggtcggagtaaaaaggaacggaggcctgtgcgcccacacacggtcgagaaacctgtgcccagcagctctggtggagatgcccacgttccccatggctcccaggtcattaggaagctggtcatggaacccaccttcaagccctggcagatgaagactcacttcctgatgcccttcccggtgaattacgtgggtgaatgcatccgaactgtcccctacacggacccagatcatgccagtcttaaaatccttgcacgtttgatgactgccaaattcttgcatacagaaattcgagaaaaaggcggtgcttatggtggaggcgcaaaactcagccacaatgggattttcaccctttactcttacagggacccaaatacaatagagacgctccagtcttttgggaaggctgtcgactgggctaagtctggaaaattcacacagcaagacatcgacgaagccaaactttctgtcttctcaaccgtagatgctcctgtcgctccttcagacaaaggaatggaccacttcttgtacggcctctcggatgagatgaagcaggcccacagagagcagctctttgctgtcagccacgacaagctcctggccgtgagcgatagatacctcggcactgggaagagcacacacggcctggccatcctcggacccgagaacccgaaaattgccaaggacccatcctggatcatccaatgagcagccgtggcgctcgactgcacaggagcccgagacaatacacctccgagctgaatatgaaaagtcagaaatgctactgctttttccaagaatattatgtcattgagtgtcgccaaagcccttgactggcgagtcaaaaactcagatctatcttaagagtgaccaggaagaggttcattgaaataatcatgcatgaagcgccaaaga

SEQ ID NO: 84021 - DNA, 673 bp, Artificial Sequence
  derived and/or modified sequence
aaacctgtgcccagcagctctggtggagatgcccacgttccccatggctcccaggtcattaggaagctggtcatggaacccaccttcaagccctggcagatgaagactcacttcctgatgcccttcccggtgaattacgtgggtgaatgcatccgaactgtcccctacacggacccagatcatgccagtcttaaaatccttgcacgtttgatgactgccaaattcttgcatacagaaattcgagaaaaaggcggtgcttatggtggaggcgcaaaactcagccacaatgggattttcaccctttactcttacagggacccaaatacaatagagacgctccagtcttttgggaaggctgtcgactgggctaagtctggaaaattcacacagcaagacatcgacgaagccaaactttctgtcttctcaaccgtagatgctcctgtcgctccttcagacaaaggtattttgagtataacagtgagaatctcaacccacagcctcacagatgacgttgctgttttccaagttcccggcatgcatgggcaggagcactagcttctggtgcctccatccttgcttgtgatacgatttccacgtctgacaccctaaacacgcttcctgacatccgggcgagaagagtgcatcctgtcatttgttttactgacctgagacc

SEQ ID NO: 84022 - DNA, 2820 bp, Artificial Sequence
  derived and/or modified sequence
atgcgaaacgtggcgttgcgaagggcggcagggccagtctgcgctgaggccgctgagcgtcgcgtcacttccgtgcctgaactctttctgaccgccgtgaaactgactcacgatgatacaggggcacgctacctgcatctagcacgcgaggacaccaataatttgttttccgtgcagttcagaactacccccatggatagcaccggagtgccccacatcctggaacatacagtcttgtgcggctcgcagaaatatccttgtagagatccttttttcaaaatgctgaatagatcgttgagcacatttatgaacgctttcacagcttccgattacaccttgtatccattctccacgcagaatcccaaagacttccagaatctgctaagcgtatacctcgatgccactttctttccatgcctgagagaactcgacttttggcaggagggctggaggttagaacacgagaacccgtcagacccacagacccccctggtgtttaaaggtgtggtgtttaacgaaatgaagggggcattcacggataatgaaagaattttcagccagcatttacaaaacagactcctgccagaccatacctatagcgttgtaagtgggggtgatccactgtgcatacccgagctcacttgggagcagttgaagcagttccacgcaacgcattaccaccctagcaacgcaagatttttcacctacgggaactttccccttgaacagcatctcaaacagatacacgaggaagctctctcaaaattccagaagattgagcccagtactgtcgtaccagcccagaccccctgggataagccccgagaatttcagatcacctgcgggcctgactcatttgcaacagacccttcaaagcagactaccatcagcgtgagcttcctcctccccgatataaccgatacatttgaggcttttaccctgtctctgcttagtagcctgttgactagcgggcctaactcgcccttctataaggcgctcattgagagcgggctgggtacagacttttctccagacgtgggatacaacggttatacgcgtgaagcctacttttcggtgggactgcagggcattgccgagaaggatatcgagacagtccggtcactgatcgatcgtaccattgatgaggtggttgagaaggggttcgaggatgatcgcatagaggcactcctgcacaaaattgagattcaaatgaaacaccagtctacatccttcggtttgatgcttacatcctatatagcctcctgttggaaccatgatggcgatcccgtggaacttcttaagctcggaaatcagcttgccaagttccgccagtgtctacaggagaaccctaaattcttgcaggagaaggtcaagcagtatttcaaaaacaatcagcacaaactgaccctgagtatgcgccctgacgacaagtaccacgaaaaacaggcgcaggtagaggccacgaagttaaagcagaaggttgaagctctgtctcccggtgatcgccaacagatctacgaaaaggggctcgagctgcggtctcagcagtcaaagcctcaggacgcttcctgcctccctgcacttaaggtaagtgatattgaacccaccatccctgttactgagctggatgtcgtactgaccgctggagacatcccagtacagtattgcgcccaacccacgaatggaatggtgtattttcgcgctttctcatctctgaacaccctccctgaagagttgcggccttacgtgccgctgttttgtagcgtcctaacgaatccttgtttcgaggaggaagaacactttaaagtgctggtcaaaatgactgcccaggagcttgctaacggaatccctgattctggccacctctatgcctccatccgcgcagggcgaacactgacacccgcaggtgatcttcaggaaacattctcaggcatggaccaagtccggctgatgaaacggatcgctgaaatgaccgacattaagccaattctccgcaagcttccgcgtatcaagaagcatctccttaatggggacaacatgagatgctcagttaatgccacaccacagcaaatgccgcagaccgagaaagccgttgaggatttcttacgatctattggacgttcaaagaaagaaagacgacccgtcaggcctcacacggtcgaaaaacctgtgccgtccagcagtgggggagacgcccacgtgcctcatggttcacaggtgatccgaaagttggtgatggagcccactttcaagccatggcagatgaagacccacttcctgatgccattcccagtgaattacgtgggcgaatgtatcagaaccgttccctacaccgaccccgatcatgcttccctcaagattttggccagactaatgaccgcaaaattcctgcacaccgaaatccgggagaagggaggggcttatggagggggagccaagttgtctcacaatgggatttttacgctgtatagctaccgggatcccaacactattgagaccctgcagagcttcgggaaggccgtggattgggcgaaaagcggaaagttcacccaacaggacatcgatgaggcgaagttaagtgtgttcagcacggtggatgctccagttgccccttctgataaaggcatggaccatttcctgtacggtctctctgacgaaatgaagcaggcccatcgagagcaactctttgcggtatcacacgacaaactgttggccgtgtccgatcggtatctcggcaccggcaaatcaacacacggtctggccatcctcggaccagagaaccccaaaattgccaaggatccatcttggattatccagtag

SEQ ID NO: 84023 - DNA, 555 bp, Artificial Sequence
  derived and/or modified sequence
aaaccagtgccatcttctagcggtggagatgcccacgtgcctcatggatcccaggttattcggaagctggttatggaaccaacttttaagccatggcaaatgaagactcacttcctgatgcccttccccgtgaactatgtaggcgaatgcattcgcaccgtcccttatacggatcctgatcacgccagcctgaaaatactggccaggctgatgaccgcaaagttcctgcacacagaaatcagggaaaaaggaggtgcatacggcggaggggcaaaactctcgcataacggcatttttacactctactcatacagggatcctaacacgatagagactctgcagtccttcgggaaagccgtcgattgggcaaagtctggcaaatttactcaacaggatatcgatgaggctaagcttagcgtgttctctaccgtcgatgctccggtggctccaagcgacaagggcatcctaagtatcacagtgcgtatcagtacccacagtctgaccgatgatgtggcagtatttcaagtgcctggcatgcacgggcaagagcactag

SEQ ID NO: 84024 - protein, 759 aa, Artificial Sequence
  derived and/or modified sequence
MYCGIQILALWERGVCTQAPCYCIIMEYCAHGQLYEVLRAGRKITPRLLVDWSTGIASGMNYLHLHKIIHRDLKSPNVLVTHTDAVKISDFGTSKELSDKSTKMSFAGTVAWMAPEVIRNEPVSEKVDIWSFGVVLWELLTGEIPYKDVDSSAIIWGVGSNSLHLPVPSTCPDGFKILMKQTWQSKPRNRPSFRQTLMHLDIASADVLATPQETYFKSQAEWREEVKKHFEKIKSEGTCIHRLDEELIRRRREELRHALDIREHYERKLERANNLYMELSAIMLQLEMREKELIKREQAVEKKYPGTYKRHPVRPIIHPNAMEKLMKRKGVPHKSGMQTKRPDLLRSEGIPTTEVAPTASPLSGSPKMSTSSSKSRYRSKPRHRRGNSRGSHSDFAAILKNQPAQENSPHPTYLHQAQSQYPSLHHHNSLQQQYQQPPPAMSQSHHPRLNMHGQDIATCANNLRYFGPAAALRSPLSNHAQRQLPGSSPDLISTAMAADCWRSSEPDKGQAGPWGCCQADAYDPCLQCRPEQYGSLDIPSAEPVGRSPDLSKSPAHNPLLENAQSSEKTEENEFSGCRSESSLGTSHLGTPPALPRKTRPLQKSGDDSSEEEEGEVDSEVEFPRRQRPHRCISSCQSYSTFSSENFSVSDGEEGNTSDHSNSPDELADKLEDRLAEKLDDLLSQTPEIPIDISSHSDGLSDKECAVRRVKTQMSLGKLCVEERGYENPMQFEESDCDSSDGECSDATVRTNKHYSSATW

SEQ ID NO: 84025 - DNA, 2280 bp, Artificial Sequence
  derived and/or modified sequence
atgtattgtggtattcagattctggcactctgggagcggggagtctgcacacaggctccatgctattgcataattatggaatactgtgcccacggccaattgtacgaagtcctcagggctggtcggaaaattacacctaggttactagtcgattggtccactggtatcgccagtgggatgaactacttacacctgcacaagattatccaccgtgatctgaagagcccaaacgtgctcgtaactcatacagacgcagtgaaaatcagtgacttcggcacttcaaaagagctgtccgacaaatctactaaaatgtccttcgcaggcacagtagcctggatggcacccgaggtcatcagaaatgagcccgtttctgaaaaggtcgacatttggtcattcggcgtggtgctgtgggagctcctcaccggagaaattccttacaaggatgtggatagctcagccatcatttggggagttggttctaatagtttgcatctgcccgtacctagcacctgtccagacggttttaagatcctaatgaaacagacctggcagagcaagccaaggaatcggccgagctttcgacagacccttatgcacctggacatcgcatccgccgatgtgctggccacaccccaggagacttatttcaagagccaagccgagtggcgcgaggaagtcaagaaacacttcgagaaaatcaaatcagagggtacctgcattcaccgattggacgaagagctgatcagaaggcgcagggaggagcttcggcacgccctggatattcgggaacactatgaacggaaactcgaacgtgccaataatttgtacatggagctaagtgcaattatgctccaactcgagatgagggaaaaggagcttatcaagcgcgaacaggcggtggagaaaaagtatccgggaacttacaaacgccaccccgttaggcctattatccacccaaacgccatggaaaagctaatgaagagaaaaggggtaccccataaaagcggaatgcagacaaagcggccggaccttctgcggagtgaggggatccctaccaccgaggtagcccctaccgcaagtccactgagcgggagccctaaaatgtccacgagttcatccaagagtaggtataggagcaaaccccgccaccgtcgtggcaactctagagggtcacattcagattttgcggctattctaaagaaccagccagcccaggaaaacagccctcaccccacctacctccatcaggcccagtctcaatatccctccctccaccaccacaactcactccaacagcaatatcaacagccaccgcccgctatgagccagtcccatcaccctcgcctgaatatgcatggccaggacatcgctacatgcgcaaacaatctgagatactttggccccgccgcagccctcaggagcccattgtctaatcatgcgcaacgccagctgcctgggtctagcccagatttgattagcacggcaatggctgccgactgttggcgaagttccgagccagataaagggcaagctggaccttggggttgttgccaggcagatgcttacgacccttgcctgcagtgtcgtcccgagcagtatgggtccctcgacataccttctgcggagcctgtaggacgctcccccgatctgtctaaatccccggctcacaatcccctgctagagaatgctcagtcgtccgagaaaacggaggaaaacgaatttagtggctgtcggagcgaatcctccttgggcacctcacatctgggcacacctcctgcactcccgaggaagactagacctctacagaaaagcggggatgacagttctgaagaagaagaaggagaagtggatagcgaagttgagttcccccgtaggcagcgtccccacaggtgtatttcctcttgccagtcatatagcaccttttcttctgagaacttttcggtctctgacggcgaggagggaaatacctctgaccatagcaatagcccagacgagttggcggacaaactcgaggaccggctcgcggagaaactcgacgatctgctgagccagacccccgagatccccatcgatatctcgtctcactctgatgggctcagcgacaaggagtgcgctgtgaggcgtgttaaaacacagatgagcctgggcaagctctgtgtggaagagaggggctatgagaaccccatgcagtttgaggaaagcgactgcgatagttccgatggggaatgttctgacgctaccgtccgcacaaataagcattatagcagtgccacttggtag

SEQ ID NO: 84026 - DNA, 2280 bp, Artificial Sequence
  derived and/or modified sequence
atgtactgcggcatccagatcctggccctgtgggagcggggcgtgtgcacccaggccccctgctactgcatcatcatggagtactgtgcccacggccagctgtatgaggtgctgcgggccggcaggaagatcaccccccggctgctggtggactggagcacaggcatcgccagcggcatgaactacctgcacctgcacaagatcatccaccgggacctgaagagccccaacgtgctggtgacccacacagatgctgtgaagatcagtgactttggcaccagcaaggagctgagtgacaagagcaccaagatgagctttgctggcaccgtggcctggatggcccctgaggtgatcagaaatgaacctgtgtctgagaaggtggacatctggagctttggagtggtgctgtgggagctgctgactggagagatcccctacaaggatgtggacagcagcgccatcatctggggcgtgggcagcaacagcctgcacctgcctgtgcccagcacctgcccagatggcttcaagatcctgatgaagcagacctggcagagcaagcccaggaaccggcccagcttccggcagaccctgatgcacctggacatcgccagcgcagatgtgctggccaccccccaggagacctacttcaagagccaggccgagtggagggaggaggtgaagaagcactttgagaagatcaagtctgagggcacctgcatccaccggctggatgaggagctgatcagaagaagaagagaggagctgcggcatgccctggacatccgggagcactatgaaaggaagctggagcgggccaacaacctgtacatggagctgagcgccatcatgctgcagctggagatgagggagaaggagctgatcaagcgggagcaggccgtggagaagaagtacccaggcacctacaagaggcaccctgtgcggcccatcatccaccccaatgccatggagaagctgatgaagaggaaaggagtgccccacaagagcggcatgcagaccaagaggccagacctgctgcggtctgagggcatccccaccacagaggtggcccccacagccagccccctgagcggcagccccaagatgagcaccagcagcagcaagagccgctaccgcagcaagcccaggcaccggcggggcaacagccggggcagccacagcgactttgctgccatcctgaagaaccagcctgcccaggagaacagcccccaccccacctacctgcaccaggcccagagccagtaccccagcctgcaccaccacaacagcctgcagcagcagtaccagcagcccccaccagccatgagccagagccaccacccccggctgaacatgcacggccaggacatcgccacctgtgccaacaacctgcgctacttcggccctgctgctgccctgcggagccccctgagcaaccacgcccagaggcagctgcccggcagcagcccagacctgatcagcacagccatggctgctgactgctggaggagcagcgagccagacaagggccaggccggcccctggggctgctgccaggctgatgcctatgacccctgcctgcagtgcaggcctgagcagtatggcagcctggacatccccagcgctgagcctgtgggccgcagcccagacctgagcaagagccctgcccacaaccccctgctggagaatgcccagagcagcgagaagacagaagaaaatgagttcagcggctgccgctctgagagcagcctgggcaccagccacctgggcaccccaccagccctgcccaggaagacccggcccctgcagaagtctggagatgacagcagcgaggaggaggagggggaggtggacagcgaggtggagttcccccggcggcagaggccccaccgctgcatcagcagctgccagagctacagcaccttcagcagcgagaacttctctgtgtctgatggagaggagggcaacaccagtgaccacagcaacagcccagatgagctggccgacaagctggaggaccggctggccgagaagctggatgacctgctgagccagaccccagagatccccatcgacatcagcagccacagtgatggcctgagtgacaaggaatgtgctgtgagaagagtgaagacccagatgagcctgggcaagctgtgtgtggaggagcggggctatgagaaccccatgcagtttgaggagagtgactgtgacagcagtgatggagagtgcagtgatgccaccgtgaggaccaacaagcactacagcagcgccacctggtag

SEQ ID NO: 84027 - DNA, 2737 bp, Artificial Sequence
  derived and/or modified sequence
acctggttgtggagggtgacgccatgggtggggcggagcgtctgggatgcgctgggagcctaggatccccgacagttttgcagaacactgaaatctatggactctaaaatggacttcatttaaagaaacccacggaccattaatggacaaaaacatgagtcaatatgtattgtggcattcaaatcctagcactctgggagaggggtgtttgtactcaggccccatgttattgtattatcatggaatactgtgcccatggacaactctacgaggtcttacgagctggcaggaagatcacacctcgattgctagtagactggtccacaggaattgcaagtggaatgaattatttgcacctccataaaattattcatcgtgatctcaaatcacctaatgttttagtgacccacacagatgcggtaaaaatttcagattttggtacatctaaggaactcagtgacaaaagtaccaagatgtcatttgctggcacggtcgcatggatggcgccagaggtgatacggaatgaacctgtctctgaaaaagttgatatatggtcttttggagtggtgctttgggagctgctgacaggagagatcccttacaaagatgtagattcttcagccattatctggggtgttggaagcaacagcctccaccttccagttccttccacttgccctgatggattcaaaatccttatgaaacagacgtggcagagtaaacctcgaaaccgaccttcttttcggcagacactcatgcatttagacattgcctctgcagatgtacttgccaccccacaagaaacttacttcaagtctcaggctgaatggagagaagaagtgaaaaaacattttgagaagatcaaaagtgaaggaacttgtatacaccggttagatgaagaactgattcgaaggcgcagagaagagctcaggcatgcgctggatattcgtgaacactatgagcggaagcttgagcgggcgaataatttatacatggaattgagtgccatcatgctgcagctagaaatgcgggagaaggagctcattaagcgtgagcaagcagtggaaaagaagtatcctgggacctacaaacgacaccctgttcgtcctatcatccatcccaatgccatggagaaactcatgaaaaggaaaggagtgcctcacaaatctgggatgcagaccaaacggccagacttgttgagatcagaagggatccccaccacagaagtggctcccactgcatcccctttgtccggaagtcccaaaatgtccacttctagcagcaagagccgatatcgaagcaaaccacgccaccgccgagggaatagcagaggcagccatagtgactttgccgcaatcttgaaaaaccagccagcccaggaaaattcaccccatcccacttacctgcaccaagctcaatcccaatacccttctcttcatcaccataattctctgcagcagcaataccagcagccccctcctgccatgtcccagagtcaccatcccagactcaatatgcacggacaggacatagcaacctgcgccaacaacctgaggtatttcggcccagcagcagccctgcggagcccactcagcaaccatgctcagagacagctgcccggctcgagccctgacctcatctccacagccatggctgcagactgctggagaagttctgagcctgacaagggccaagctggtccctggggctgttgccaggctgacgcttatgacccctgccttcagtgcaggccagaacagtatgggtccttagacataccctctgctgagccagtggggaggagccctgacctttccaagtcaccagcacataatcctctcttggaaaacgcccagagttctgagaaaacggaagaaaatgaattcagcggctgtaggtctgagtcatccctcggcacctctcatctcggcacccctccagcgctacctcgaaaaacaaggcctctgcagaagagtggagatgactcctcagaagaggaagaaggggaagtagatagtgaagttgaatttccacgaagacagaggccccatcgctgtatcagcagctgccagtcatattcaacctttagctctgagaatttctctgtgtctgatggagaagagggaaataccagtgaccactcaaacagtcctgatgagttagctgataaacttgaagaccgcttggcagagaagctagacgacctgctgtcccagacgccagagattcccattgacatatcctcacactcggatgggctctctgacaaggagtgtgccgtgcgccgtgtgaagactcagatgtctctgggcaagctgtgtgtggaggaacgtggctatgagaaccccatgcagtttgaagaatcggactgtgactcttcagatggggagtgttctgatgccacagttaggaccaataaacactacagctctgctacctggtaatgaaggaatacacatcctgaagatctcgtgactatactggcatttcagatccaccccacccccagactcatcccactctctcccagcattttgtctgggaagagagactaccccatctttaccaccccctagaaatgagctgcaataacaggaacatgagacttcgcaaatctctggaaaataatatccaaatgaaattaagtctcactgaacatttcaatcaagaatggcagggatctattttattgaatattctagctactgtaacattgatatttatttttgtttgacat

SEQ ID NO: 84028 - DNA, 2280 bp, Artificial Sequence
  derived and/or modified sequence
atgtactgcggcatccagatcctggccctgtgggagcggggcgtgtgcacacaggctccatgctactgcataatcatggagtactgtgcgcacggccagctgtatgaagtactacgggccggccgcaaaataacacctcggctcctcgttgattggagcaccgggatcgcctcaggaatgaactatctccatttacacaaaatcatacaccgagaccttaaaagccccaatgtactggtgacgcataccgacgcagtaaagatcagcgactttgggaccagcaaggagctttcggacaaaagcactaaaatgagttttgcaggcacagtggcctggatggctcctgaagtgatcaggaacgaaccagtctctgagaaagtggatatctggagctttggcgtggtattgtgggaactgctgactggagagatcccatataaagatgtagattcatccgccatcatctggggggtcggctccaactctcttcacctcccggtgcccagcacctgccctgatggattcaaaatcctcatgaagcagacctggcaatccaagccgagaaaccgcccctcctttcggcagaccctcatgcaccttgacatcgcctctgcagatgtgctcgccacaccacaagaaacatacttcaagtcccaggcagagtggcgcgaggaagtgaagaagcacttcgagaagatcaagtcagagggcacttgtatccaccggctcgatgaggaattaatacggagacggagggaagaacttaggcatgcattagacataagagaacattatgaacgcaagttagagcgcgctaataatctctatatggagctgtccgctattatgctccagctggagatgcgagaaaaggaattaatcaagcgagagcaggccgtcgagaagaagtaccccggaacttacaaacgtcacccagtcagacctataatccacccaaatgccatggaaaagctgatgaaacgaaaaggagttccgcataagagcggtatgcagacaaagaggcctgacctactccggagtgagggtattccaaccacggaagttgcccctactgcatcacccctttccggctcccctaagatgtccaccagcagctctaaatctcgctataggtcaaaaccgcggcatagaaggggcaattcacggggaagtcactcagacttcgctgccatcctgaaaaatcagccagctcaggagaactcaccacatcctacttacctacaccaggctcagtctcagtaccccagcctccaccaccacaacagcctgcaacagcagtatcagcaaccgccccccgccatgagccagtcacaccatccgagacttaacatgcacgggcaggacatagcaacatgtgcgaataatctccgctactttggtccggcggctgctttgcgctcccctctctccaatcacgcccagagacaacttccaggctcgtcccctgatctcatttccacagcaatggcggccgattgttggaggtcttcagaacctgacaaaggccaggctggaccatggggctgttgccaggcggatgcctacgatccatgtttgcagtgccgtccggagcagtatggttcactggatataccgagcgcagagccagtgggcaggtcccctgatttgtctaagtcccctgcacacaatccgctcctggaaaacgcccagtcctcagagaaaactgaggagaacgagttttctggttgccggtcagaaagctcactgggaacatcacacctggggaccccaccagctttaccaagaaaaaccagaccgttgcagaagtctggagacgattccagcgaagaggaggagggtgaggtagatagtgaagtcgaattcccaagaaggcaacgcccccataggtgtatatcctcgtgtcagagctatagtactttttcatctgagaacttttcagtcagcgatggggaagaaggtaacacctccgaccactccaattcccccgatgaactcgctgacaagttggaagatcggctcgcagagaagcttgacgacctgctctcccagacaccagaaataccgatcgacatcagctcccactcggacggtctgagtgataaggagtgtgcggtgcggcgcgtgaagacccaaatgtcacttgggaaactttgtgtcgaggagcgtggttatgaaaatccgatgcagttcgaggagtctgactgtgactcctcagacggtgaatgcagcgacgccaccgtgagaacaaataaacattatagctccgctacgtggtag

SEQ ID NO: 84029 - DNA, 2280 bp, Artificial Sequence
  derived and/or modified sequence
atgtattgtggaatccagatcctggccctctgggagcggggagtctgcacccaggccccatgttattgcattatcatggagtactgcgctcacggtcagttatacgaagtgctccgagccggaaggaaaatcacccctcgcctgctggtagactggtctaccgggatcgccagcggaatgaactacttacatctgcataagatcatccacagggacttaaaaagtccaaatgtcctcgtgacacataccgatgccgtaaagatctctgacttcgggacttcaaaagagttgagtgataagagcaccaaaatgtccttcgccggtacagttgcctggatggcacctgaggtcatcagaaatgagcccgtgtctgagaaggtcgatatctggagctttggcgtggtgctgtgggaactactgaccggcgaaattccatacaaggacgtggactcctccgcgataatctggggggtaggatccaactcacttcacctccctgtgccctctacttgtcctgacgggttcaagatattaatgaagcagacctggcagtccaaacccaggaatcgccctagcttccggcagacattaatgcacctggacatagcctctgccgacgtgttggctacaccgcaggagacttactttaagtcccaggctgagtggagggaagaagtaaaaaaacactttgagaagattaaatcagagggcacatgtattcaccggctggacgaagagctcattcgtaggagacgcgaggagttgcgccatgctcttgacatacgcgaacattacgagagaaaactggagagggcaaataacctatatatggagttgtccgccattatgcttcaacttgagatgagggagaaagagttaattaagcgggagcaggccgtggaaaagaagtatcctggcacctacaagcggcatcctgtgagacctatcatccacccaaatgcaatggaaaagctgatgaagcgcaaaggtgtgccccacaaaagtggcatgcaaacgaagaggcccgatttgcttcgttccgaagggatccctaccacagaggtcgcccctaccgcatcccccctgagtggatcccccaaaatgagtacttcctcttctaagtcgcgctaccgctcaaaaccacggcatcggagaggaaattcgcgagggtcccattctgacttcgcagcaatcttaaagaaccaacctgcccaagaaaacagcccacacccaacgtatctgcatcaagcccagtctcagtatccttctctccaccaccacaacagtctccagcagcagtaccagcagcctccccctgcaatgagccagtcgcaccaccctaggcttaatatgcacggccaggacatcgctacttgcgccaataacctccgctacttcggcccagccgctgctttgagatcgcctttgtctaatcacgcacagagacagttacctggtagcagccccgacttgatcagtacagccatggccgctgactgttggcgttcttcagaaccagataaaggtcaagctggaccctggggctgttgccaggccgacgcctacgacccctgcctccaatgcagaccagaacaatatggaagtctggacatacccagtgccgaacccgtcggacgttcacccgacctgagtaaaagcccggcacacaatccactgttggagaacgcccagagtagcgagaaaaccgaagagaatgagttctcggggtgtaggagcgagagtagcctgggtacaagtcacctcgggactcctcctgcactgccgagaaaaacaaggcctctgcaaaaaagtggagacgacagctccgaggaagaggagggtgaggtggactccgaagtggaattcccgagaagacagagaccccatcggtgtataagcagttgtcagagctactctacctttagctccgagaacttttctgtgagcgacggcgaagaaggaaacacctccgaccactccaatagtcctgatgaactggcagataagctagaagacagattagcagaaaagctggacgacctcctgagtcaaacacccgaaattccgatcgatatcagttctcacagtgatggactgagtgacaaggaatgtgccgtgcggcgtgtcaagactcaaatgtctctcggcaagctctgtgttgaggagcgcggatacgagaatcctatgcagtttgaagagtccgactgcgacagttcggatggtgaatgcagcgacgctacggttcggaccaacaaacactatagcagcgccacatggtag

SEQ ID NO: 84030 - DNA, 2280 bp, Artificial Sequence
  derived and/or modified sequence
atgtactgcggcatccagatcctggccctgtgggagagaggcgtgtgcacccaggccccctgctactgcatcatcatggagtactgcgcccacggccagctgtacgaggtgctgagagccggcagaaagatcacccccagactgctggtggactggagcaccggcatcgccagcggcatgaactacctgcacctgcacaagatcatccacagagacctgaagagccccaacgtgctggtgacccacaccgacgccgtgaagatcagcgacttcggcaccagcaaggagctgagcgacaagagcaccaagatgagcttcgccggcaccgtggcctggatggcccccgaggtgatcagaaacgagcccgtgagcgagaaggtggacatctggagcttcggcgtggtgctgtgggagctgctgaccggcgagatcccctacaaggacgtggacagcagcgccatcatctggggcgtgggcagcaacagcctgcacctgcccgtgcccagcacctgccccgacggcttcaagatcctgatgaagcagacctggcagagcaagcccagaaacagacccagcttcagacagaccctgatgcacctggacatcgccagcgccgacgtgctggccaccccccaggagacctacttcaagagccaggccgagtggagagaggaggtgaagaagcacttcgagaagatcaagagcgagggcacctgcatccacagactggacgaggagctgatcagaagaagaagagaggagctgagacacgccctggacatcagagagcactacgagagaaagctggagagagccaacaacctgtacatggagctgagcgccatcatgctgcagctggagatgagagagaaggagctgatcaagagagagcaggccgtggagaagaagtaccccggcacctacaagagacaccccgtgagacccatcatccaccccaacgccatggagaagctgatgaagagaaagggcgtgccccacaagagcggcatgcagaccaagagacccgacctgctgagaagcgagggcatccccaccaccgaggtggcccccaccgccagccccctgagcggcagccccaagatgagcaccagcagcagcaagagcagatacagaagcaagcccagacacagaagaggcaacagcagaggcagccacagcgacttcgccgccatcctgaagaaccagcccgcccaggagaacagcccccaccccacctacctgcaccaggcccagagccagtaccccagcctgcaccaccacaacagcctgcagcagcagtaccagcagcccccccccgccatgagccagagccaccaccccagactgaacatgcacggccaggacatcgccacctgcgccaacaacctgagatacttcggccccgccgccgccctgagaagccccctgagcaaccacgcccagagacagctgcccggcagcagccccgacctgatcagcaccgccatggccgccgactgctggagaagcagcgagcccgacaagggccaggccggcccctggggctgctgccaggccgacgcctacgacccctgcctgcagtgcagacccgagcagtacggcagcctggacatccccagcgccgagcccgtgggcagaagccccgacctgagcaagagccccgcccacaaccccctgctggagaacgcccagagcagcgagaagaccgaggagaacgagttcagcggctgcagaagcgagagcagcctgggcaccagccacctgggcaccccccccgccctgcccagaaagaccagacccctgcagaagagcggcgacgacagcagcgaggaggaggagggcgaggtggacagcgaggtggagttccccagaagacagagaccccacagatgcatcagcagctgccagagctacagcaccttcagcagcgagaacttcagcgtgagcgacggcgaggagggcaacaccagcgaccacagcaacagccccgacgagctggccgacaagctggaggacagactggccgagaagctggacgacctgctgagccagacccccgagatccccatcgacatcagcagccacagcgacggcctgagcgacaaggagtgcgccgtgagaagagtgaagacccagatgagcctgggcaagctgtgcgtggaggagagaggctacgagaaccccatgcagttcgaggagagcgactgcgacagcagcgacggcgagtgcagcgacgccaccgtgagaaccaacaagcactacagcagcgccacctggtag

SEQ ID NO: 84031 - protein, 424 aa, Artificial Sequence
  derived and/or modified sequence
MEVCYQLPVLPLDRPVPQHVLSRRGAISFSSSSALFGCPNPRQLSQRRGAISYDSSDQTALYIRMLGDVRVRSRAGFESERRGSHPYIDFRIFHSQSEIEVSVSARNIRRLLSFQRYLRSSRFFRGTAVSNSLNILDDDYNGQAKCMLEKVGNWNFDIFLFDRLTNGNSLVSLTFHLFSLHGLIEYFHLDMMKLRRFLVMIQEDYHSQNPYHNAVHAADVTQAMHCYLKEPKLANSVTPWDILLSLIAAATHDLDHPGVNQPFLIKTNHYLATLYKNTSVLENHHWRSAVGLLRESGLFSHLPLESRQQMETQIGALILATDISRQNEYLSLFRSHLDRGDLCLEDTRHRHLVLQMALKCADICNPCRTWELSKQWSEKVTEEFFHQGDIEKKYHLGVSPLCDRHTESIANIQIGNYTYLDIAG

SEQ ID NO: 84032 - protein, 482 aa, Artificial Sequence
  derived and/or modified sequence
MEVCYQLPVLPLDRPVPQHVLSRRGAISFSSSSALFGCPNPRQLSQRRGAISYDSSDQTALYIRMLGDVRVRSRAGFESERRGSHPYIDFRIFHSQSEIEVSVSARNIRRLLSFQRYLRSSRFFRGTAVSNSLNILDDDYNGQAKCMLEKVGNWNFDIFLFDRLTNGNSLVSLTFHLFSLHGLIEYFHLDMMKLRRFLVMIQEDYHSQNPYHNAVHAADVTQAMHCYLKEPKLANSVTPWDILLSLIAAATHDLDHPGVNQPFLIKTNHYLATLYKNTSVLENHHWRSAVGLLRESGLFSHLPLESRQQMETQIGALILATDISRQNEYLSLFRSHLDRGDLCLEDTRHRHLVLQMALKCADICNPCRTWELSKQWSEKVTEEFFHQGDIEKKYHLGVSPLCDRHTESIANIQIGFMTYLVEPLFTEWARFSNTRLSQTMLGHVGLNKASWKGLQREQSSSEDTDAAFELNSQLLPQENRLS

SEQ ID NO: 84033 - DNA, 1275 bp, Artificial Sequence
  derived and/or modified sequence
atggaagtctgctaccagctccctgttctgccgctggatagaccagttcctcagcatgttctgagtcgcagaggggcaatttcatttagcagttcaagtgctctgttcgggtgcccgaatcccaggcagctgagccagagacgcggcgcaatctcatatgactcatctgatcagacagccctgtacattcggatgttaggagacgtacgggtccgttcacgcgcagggttcgaatcagaacggcgggggagtcacccctatattgactttcgcatattccatagtcagagcgaaattgaagttagcgtttcagctcgcaacattaggcggctgctttcttttcagcgatatctgaggagcagtaggtttttccggggcacagctgtttccaattccctcaatatattggatgatgactataatggtcaggccaagtgcatgctcgagaaggtcggcaactggaattttgatatattcctgtttgatcgcttaaccaatggaaattctcttgtgtcattgaccttccacctcttttctttgcatgggctcatcgaatatttccatctcgatatgatgaagctgcggcgcttcctggtgatgatccaggaagactatcacagccagaatccatatcacaatgctgtccatgctgctgatgtcacccaagctatgcattgctatctgaaggaacccaagttagccaattcagtgacaccctgggacattctgctctccttgattgccgcggctacccatgacctggatcacccaggcgtaaaccaacccttccttatcaaaactaaccattaccttgctacgttgtataagaacacatctgtactcgagaatcatcattggcggtccgccgtgggcctgcttcgggaaagtggcttattttctcatttgccattggaatcaagacagcagatggagacccagatcggcgccctgattttagccactgacatcagtaggcagaacgagtacctttcactgttcagatcacaccttgatcgcggcgacctgtgcctggaggacacaagacatcgccacctcgtgttgcaaatggccctcaagtgcgcagatatctgtaacccctgcagaacatgggagcttagcaagcaatggagcgaaaaggtgactgaagaattcttccaccagggcgacattgagaaaaagtaccatctgggcgtgagccccctgtgtgacagacacactgagtccattgccaatattcagatcgggaactatacttatctggatatcgcaggttag

SEQ ID NO: 84034 - DNA, 1449 bp, Artificial Sequence
  derived and/or modified sequence
atggaggtttgttatcagctgcccgtactgccactggatcgcccagtgccccaacacgtgctctcccgacgcggcgcaatctcattctccagcagttcagccttgttcgggtgccctaacccccggcaactgtcacagagacgtggcgcaatctcatacgattccagcgaccagacagccctgtacatcagaatgttaggagacgtgcgcgtccgctctcgagccgggttcgagagcgagcgacggggctctcacccctatattgatttcaggattttccatagccagtccgagatcgaagtcagtgtgtccgcacggaatattaggcgactgctctccttccagagatatctcagatctagtcggtttttccggggcaccgctgtctccaactctttaaacatcctggacgacgactataatggccaggccaagtgcatgttagaaaaagtagggaattggaactttgatatcttcctgtttgacagactcacaaacggaaatagtctggtgtcactgacatttcacctgtttagcctgcatgggctgatcgagtatttccatcttgatatgatgaaactccgaagatttctagtcatgattcaggaggattaccatagccagaacccttaccataatgccgtccatgcggcagacgttacccaggcgatgcattgctacttgaaggagcctaaacttgctaattccgtgacaccctgggatatccttctcagcttgatcgccgccgcaacacacgacctggaccatcccggagtgaatcagcctttcctgattaaaaccaaccattacctggccaccctctacaagaacaccagtgtgctggagaatcaccactggcggtctgccgtcggattgctgagagaaagtggcctatttagccatctccctttggaaagccgtcagcagatggaaactcagatcggagccctgatattggccaccgatatttcccgacagaacgagtatctatctctgttccgatctcacctggacaggggggacctatgtttggaggacactaggcaccgccatctcgtgcttcaaatggccttgaaatgcgccgacatttgcaacccttgccgcacatgggagctgagcaagcagtggagtgagaaggtcaccgaagagtttttccaccaaggtgatatagagaagaaatatcaccttggggtgtctcctctgtgcgaccgacacacagaatctattgcaaatattcagattggcttcatgacctatctggtggagcctctattcacggaatgggcccgctttagtaatacaagactgtctcagactatgctgggacacgttggtctgaataaggcgtcctggaaagggttgcagcgggagcagtccagttccgaggacaccgacgcggcgtttgaactgaattcccagctgttgccccaagaaaaccgacttagctag

SEQ ID NO: 84035 - DNA, 1275 bp, Artificial Sequence
  derived and/or modified sequence
atggaggtgtgctaccagctgcctgtgctgcccctggacaggcctgtgccccagcacgtgctgagcagaagaggagccatctccttcagcagcagcagcgccctgtttggctgccccaacccccggcagctgagccagaggagaggagccatctcctatgacagcagtgaccagacagccctgtacatccgcatgctgggagatgtgcgggtgcgcagcagagctggctttgaaagtgaaagaagaggcagccacccctacatcgacttccgcatcttccacagccagagcgagattgaggtgtctgtgtctgccaggaacatccggcggctgctgtccttccagcgctacctgcggagcagccgcttcttccggggcacagctgtgagcaacagcctgaacatcctggatgatgactacaacggccaggccaagtgcatgctggagaaggtgggcaactggaactttgacatcttcctgtttgaccggctgaccaacggcaacagcctggtgtccctgaccttccacctgttcagcctgcacggcctcatcgagtacttccacctggacatgatgaagctgcggcgcttcctggtgatgatccaggaggactaccacagccagaacccctaccacaatgctgtgcatgctgctgatgtgacccaggccatgcactgctacctgaaggagcccaagctggccaacagcgtgaccccctgggacatcctgctgagcctgattgctgctgccacccatgacctggaccaccctggggtgaaccagcccttcctgatcaagaccaaccactacctggccaccctgtacaagaacacctctgtgctggagaaccaccactggaggtctgctgtgggcctgctgcgggagagcggcctcttcagccacctgcccctggagagccggcagcagatggagacccagatcggggccctgatcctggccacagacatcagccggcagaatgagtacctgagcctcttccgcagccacctggacagaggagacctgtgcctggaggacaccaggcaccgccacctggtgctgcagatggccctgaagtgtgccgacatctgcaacccctgcaggacctgggagctgagcaagcagtggagcgagaaggtgacagaggagttcttccaccagggcgacatcgagaagaagtaccacctgggcgtgagccccctgtgtgacagacacacagagagcatcgccaacatccagatcggcaactacacctacctggacattgctggatag

SEQ ID NO: 84036 - DNA, 1449 bp, Artificial Sequence
  derived and/or modified sequence
atggaggtgtgctaccagctgcctgtgctgcccctggacaggcctgtgccccagcacgtgctgagcagaagaggagccatctccttcagcagcagcagcgccctgtttggctgccccaacccccggcagctgagccagaggagaggagccatctcctatgacagcagtgaccagacagccctgtacatccgcatgctgggagatgtgcgggtgcgcagcagagctggctttgaaagtgaaagaagaggcagccacccctacatcgacttccgcatcttccacagccagagcgagattgaggtgtctgtgtctgccaggaacatccggcggctgctgtccttccagcgctacctgcggagcagccgcttcttccggggcacagctgtgagcaacagcctgaacatcctggatgatgactacaacggccaggccaagtgcatgctggagaaggtgggcaactggaactttgacatcttcctgtttgaccggctgaccaacggcaacagcctggtgtccctgaccttccacctgttcagcctgcacggcctcatcgagtacttccacctggacatgatgaagctgcggcgcttcctggtgatgatccaggaggactaccacagccagaacccctaccacaatgctgtgcatgctgctgatgtgacccaggccatgcactgctacctgaaggagcccaagctggccaacagcgtgaccccctgggacatcctgctgagcctgattgctgctgccacccatgacctggaccaccctggggtgaaccagcccttcctgatcaagaccaaccactacctggccaccctgtacaagaacacctctgtgctggagaaccaccactggaggtctgctgtgggcctgctgcgggagagcggcctcttcagccacctgcccctggagagccggcagcagatggagacccagatcggggccctgatcctggccacagacatcagccggcagaatgagtacctgagcctcttccgcagccacctggacagaggagacctgtgcctggaggacaccaggcaccgccacctggtgctgcagatggccctgaagtgtgccgacatctgcaacccctgcaggacctgggagctgagcaagcagtggagcgagaaggtgacagaggagttcttccaccagggcgacatcgagaagaagtaccacctgggcgtgagccccctgtgtgacagacacacagagagcatcgccaacatccagatcggcttcatgacctacctggtggagcccctcttcacagagtgggcccgcttcagcaacacccggctgagccagaccatgctgggccacgtgggcctgaacaaggcctcctggaagggcctgcagcgggagcagagcagcagcgaggacacagatgctgcctttgagctgaacagccagctgctgccccaggagaaccggctgtcctag

SEQ ID NO: 84037 - DNA, 1275 bp, Artificial Sequence
  derived and/or modified sequence
atggaggtgtgctaccagctgcccgtgctgcccctggaccggcccgtccctcagcatgttttgtcgcggaggggcgccatatcttttagttcctcctccgcattattcgggtgcccaaaccctcggcagttatctcaacgtcgcggcgccatctcctacgacagctctgaccaaacagccctctacattcgaatgctgggagatgtcagggtacgaagcagagctggatttgaatccgagagaagaggatctcacccatacatagactttaggatctttcactcccaatctgaaatcgaagttagcgtgagcgctagaaatatccgcaggctcctctcgtttcagagatatctcaggtcttctagattcttcagaggaacagccgtttcaaactcgctcaatatcctggatgatgactataacggtcaggcgaagtgcatgctggaaaaagtcgggaattggaatttcgatatctttcttttcgacaggctgactaacggcaattccttagtttctctaacattccacctgttcagcctacacggactcatagagtattttcatttggatatgatgaagctgaggcggtttcttgtgatgattcaggaggactatcatagccaaaacccataccataatgcagtccacgccgctgacgtcacacaagctatgcactgctatctgaaagagccaaagttggcgaatagcgtcacaccctgggatatcctcctgtccctcatcgcagctgccacacacgatctcgaccatcctggagtgaaccaacctttcctgatcaaaactaatcactatctggctacactatacaagaatacgtctgtcctggagaaccatcattggcgaagtgctgtcggcctcctgagggagtctggtctgttttcccacctccccctggagagtcgccagcaaatggagacacaaatcggcgcgctcatactggctaccgatatcagccgccagaatgagtacctgagcctgtttagaagccatctggatagaggagacctgtgcctagaggacacacgccatcgtcacctcgttcttcagatggcgttgaagtgcgccgacatttgtaatccctgtaggacatgggaactgagtaaacagtggtcagaaaaggtgaccgaggagttttttcatcagggggatattgagaaaaaataccatctcggagtgtctccactttgtgaccgccatactgaatccattgctaatatccagattggcaattatacgtacctggatatcgccggctag

SEQ ID NO: 84038 - DNA, 1449 bp, Artificial Sequence
  derived and/or modified sequence
atggaggtgtgctaccagctgcccgtgctgcccctggaccggcccgtgcctcaacacgtccttagtaggagaggtgctatttccttcagttcctcctccgccctatttggctgtccaaatcccagacagttatctcagcgtcgcggtgcaatcagctatgacagcagcgaccagacggcgctgtacatcagaatgctgggagacgtcagggtgcggtcccgggcaggattcgaatctgaaagacgcggctcccacccttacatcgatttccgaatttttcactcccagtctgagattgaagttagtgtgagcgcccggaacatccgccgcctgctcagcttccagcgatatttaaggtcatccagattcttccgtggtactgctgtctctaattccctgaacatattggatgacgattacaatggacaggctaaatgcatgctggagaaggtgggcaactggaactttgacatcttcttattcgatagacttaccaatggtaatagtttagtgtccctgaccttccacctgttctctctccatggcctcatagagtactttcatttggacatgatgaaacttcggcgtttcctcgtgatgatccaggaggactatcattcacagaacccctatcacaacgccgtgcatgctgctgatgtcacccaagctatgcactgctacctcaaagaacctaagctggcgaatagcgtgactccttgggatatattactgtccctgattgctgccgcaacccacgatttagaccatcccggggtgaaccagcctttcctgataaagaccaaccactatcttgccaccctttacaagaatacgagcgtgttggagaaccatcattggagatcagccgtgggcctcctgcgagagagtggcttgttctcgcatcttcctctggagtcaaggcagcagatggagactcaaattggcgcactaatactggctactgatatctcacggcagaatgaatacctctcactgttccgctcgcatcttgacagaggtgacctgtgcctggaggacaccaggcatcgtcatctggtactgcagatggcattaaagtgtgccgacatttgtaatccttgtagaacctgggagctctcaaaacagtggtccgaaaaggtgaccgaggaatttttccaccagggggacatagagaagaagtaccacctcggagtgagcccgctgtgtgacaggcataccgagtccattgccaacattcaaataggcttcatgacatacctcgtcgagccattgtttactgagtgggcaagattcagcaatactcggttgagccagaccatgctgggtcacgttggcctgaataaggcatcgtggaaggggctccaaagggaacaaagtagctccgaggacacggacgcagccttcgaattgaactcacagctcttaccacaagaaaaccgattatcatag

SEQ ID NO: 84039 - DNA, 2977 bp, Artificial Sequence
  derived and/or modified sequence
cgggcgtattcaatggaagtgtgttaccagctgccggtactgcccctggacaggccggtcccccagcacgtcctcagccgccgaggagccatcagcttcagctccagctccgctctcttcggctgccccaatccccggcagctctctcagaggcgtggagctatttcctatgacagttctgatcagactgcattatacattcgtatgctaggagatgtacgtgtaaggagccgagcaggatttgaatcagaaagaagaggttctcacccatatattgattttcgtattttccactctcaatctgaaattgaagtgtctgtctctgcaaggaatatcagaaggctactaagtttccagcgatatcttagatcttcacgcttttttcgtggtactgcggtttcaaattccctaaacattttagatgatgattataatggacaagccaagtgtatgctggaaaaagttggaaattggaattttgatatctttctatttgatagactaacaaatggaaatagtctagtaagcttaacctttcatttatttagtcttcatggattaattgagtacttccatttagatatgatgaaacttcgtagatttttagttatgattcaagaagattaccacagtcaaaatccttaccataacgcagtccacgctgcggatgttactcaggccatgcactgttacttaaaggaacctaagcttgccaattctgtaactccttgggatatcttgctgagcttaattgcagctgccactcatgatctggatcatccaggtgttaatcaacctttccttattaaaactaaccattacttggcaactttatacaagaatacctcagtactggaaaatcaccactggagatctgcagtgggcttattgagagaatcaggcttattctcacatctgccattagaaagcaggcaacaaatggagacacagataggtgctctgatactagccacagacatcagtcgccagaatgagtatctgtctttgtttaggtcccatttggatagaggtgatttatgcctagaagacaccagacacagacatttggttttacagatggctttgaaatgtgctgatatttgtaacccatgtcggacgtgggaattaagcaagcagtggagtgaaaaagtaacggaggaattcttccatcaaggagatatagaaaaaaaatatcatttgggtgtgagtccactttgcgatcgtcacactgaatctattgccaacatccagattggtaactatacatatttagatatagctggttagaaaaatgccactgtttttatcaagaagggaaatatatttgaaatataaaatattaaaattatgctcatttctatttttaaaaataatttaagaaattttacccttgttttcccttgttatggctcttctaattctcatttaattttaggatgtaaaaagtatatttttgcagaacaggcagcagcaataacttgtttctgttcttatgtaaataagaatccattattcgctcatgtggaagcttcttttgcatcatttgggactgccatttaaaaaaggataggtaaacaaagaaatgacaaaaataaaataaataaaataaaaatggataggtggtgacccactgagcctgatcataatacgaagaccagcttctgccactgcctttccagactcttaccactgcctgttgattaaatctaactcttcaacatcctagacaggcccttataatcttgcttcaaatgctgtgcagccatcttgcctcaacttccctctcatttgcctacagcatctcgggacgcttctgtgtttcccaagtatacgctgttctttcgctctttgtgcctcgccagtgctttccatgtgcctcgtagagttatttttcttgaagaggcagctcaaatgtcaccttctccagaagctgctctccacttgctttaggcagagtcagtcacttttcttctagattccaaagtgcctgatccacttggttgtggattcctggagcctagcaccacaccagaagcacgaggcccttgagaactgtgtgttgagtgaactaataactgtattatagaaagcataatgaaaatgtcctgtgactgaagtatgtgtagcttgttgcaggagttcacaggaaagttgactaggattgagtgtgttgggctttgggtataaaggagggggattctacgggggcagtagctcaacaaggaatagagggaggagtgtaattttggtagctggtgttgaatagggcctttgagaatcagactgaacacagtgaaatatgtgcccaaagttcagaaagatgaagtttccagaaactaagaaggtagcacaatatgtggcatcatactcagaaaggaagaccatgccatggggccagaaattcagaaacgtaattcttacattgtgattgcaatggatactcatggaagaaagtgggtagtggccgatttgacttcagagtgacaggtagagaagggaagagcgtgtagaactgtggccagactttaggagtgtgagggatgctgaatctcccagagagctcacactggccaggaatgctgagagtagcagatgcttttcttttgggaggatagtaaaacaatttagaaccagatatgctttgtcttgattctcaagtagaataatcttcaaatgcaaaagaatacattagaaatggacaaaagtggccaggagcggtagctcatacttgtaacccagcactttgggaagccgaggcgggctgatcgcttgaggtcaggagttcgagaccagcctggccaaaatagtgaaactcacgtttctactaaaaatacaaaaattagctgggtgtgatggccacttgggaggctgagataggagaatcgcttgaacctgggaggcagaggttgcagtgagccaatatcgtgccactgcattccagcctgggtgacagaatgaaactccatcactccatctc

SEQ ID NO: 84040 - DNA, 3673 bp, Artificial Sequence
  derived and/or modified sequence
gctgctcctgagtcccgcgcgccctgggtctggccgctggctccagctgtcttttcttgcactgctttgctccgttcgtgctgcgctcgaactctgcagtccgggtacctgctcctctcggccgaggagccccagggcggcggggttccctttccgactttgcctgtgctggccccgcttgcaccccgtcccccctcgcctggagcgaggcgcgcgccggtcctggtaattggcgccgcggccgccgcggagccttcccgccggcggcccgagcggagggctggggttggggaggcgtgagcgcggcttcccagcccggggtcggtccccgcccgccctgcccccgtctcggcccggagcccccgagccgcggccccctcccactgcaggggccggcggccgcggcagggcgggcgccgcgcggaggcagggcgggcgtattcaatggaagtgtgttaccagctgccggtactgcccctggacaggccggtcccccagcacgtcctcagccgccgaggagccatcagcttcagctccagctccgctctcttcggctgccccaatccccggcagctctctcagaggcgtggagctatttcctatgacagttctgatcagactgcattatacattcgtatgctaggagatgtacgtgtaaggagccgagcaggatttgaatcagaaagaagaggttctcacccatatattgattttcgtattttccactctcaatctgaaattgaagtgtctgtctctgcaaggaatatcagaaggctactaagtttccagcgatatcttagatcttcacgcttttttcgtggtactgcggtttcaaattccctaaacattttagatgatgattataatggacaagccaagtgtatgctggaaaaagttggaaattggaattttgatatctttctatttgatagactaacaaatggaaatagtctagtaagcttaacctttcatttatttagtcttcatggattaattgagtacttccatttagatatgatgaaacttcgtagatttttagttatgattcaagaagattaccacagtcaaaatccttaccataacgcagtccacgctgcggatgttactcaggccatgcactgttacttaaaggaacctaagcttgccaattctgtaactccttgggatatcttgctgagcttaattgcagctgccactcatgatctggatcatccaggtgttaatcaacctttccttattaaaactaaccattacttggcaactttatacaagaatacctcagtactggaaaatcaccactggagatctgcagtgggcttattgagagaatcaggcttattctcacatctgccattagaaagcaggcaacaaatggagacacagataggtgctctgatactagccacagacatcagtcgccagaatgagtatctgtctttgtttaggtcccatttggatagaggtgatttatgcctagaagacaccagacacagacatttggttttacagatggctttgaaatgtgctgatatttgtaacccatgtcggacgtgggaattaagcaagcagtggagtgaaaaagtaacggaggaattcttccatcaaggagatatagaaaaaaaatatcatttgggtgtgagtccactttgcgatcgtcacactgaatctattgccaacatccagattggttttatgacttacctagtggagcctttatttacagaatgggccaggttttccaatacaaggctatcccagacaatgcttggacacgtggggctgaataaagccagctggaagggactgcagagagaacagtcgagcagtgaggacactgatgctgcatttgagttgaactcacagttattacctcaggaaaatcggttatcataacccccagaaccagtgggacaaactgcctcctggaggtttttagaaatgtgaaatggggtcttgaggtgagagaacttaactcttgactgccaaggtttccaagtgagtgatgccagccagcattatttatttccaagatttcctctgttggatcatttgaacccacttgttaattgcaagacccgaacatacagcaatatgaatttggctttcatgtgaaaccttgaatatgcaaagcccagcaggagagaatccgaaaggagtaacaaaggaagttttgatatgtgccacgactttttcaaagcatctaatcttcaaaacgtgaaacttgaattgttcagcaacaatctcttggaatttaaccagtctgatgcaacaatgtgtatcttgtaccttccactaagttctctctgagaaaatggaaatgtgaagtgcccagcctctgctgcctctggcaagacaatgtttacaaatcaactctgaaaatattggttctaaattgccttggagcatgattgtgaaggaaccactcaaacaaatttaaagatcaaactttagactgcagctctttccccctggtttgcctttttcttctttggatgccaccaaagcctcccatttgctatagttttatttcatgcactggaaactgagcatttatcgtagagtaccgccaagctttcactccagtgccgtttggcaatgcaattttttttagcaattagtttttaatttggggtgggaggggaagaacaccaatgtcctagctgtattatgattctgcagtgaagacattgcatgttgttttcactactgtacacttgacctgcacatgcgagaaaaaggtggaatgtttaaaacaccataatcagctcagggtatttgccaatctgaaataaaagtgggatgggagagtgtgtccttcagatcaagggtactaaagtccctttcgctgcagtgagtgagaggtatgttgtgtgtgaatgtacggatgtgtgtttgcgtgcatgtttgtgcatgtgtgactgtgcatgttatgtttctccatgtgggcaaagatttgaaatgtaagcttttatttattattttagaatgtgacataatgagcagccacactcgggggaggggaaggttggtaggtaagctgtaacagattgctccagttgccttaaactatgcacatagctaagtgaccaaacttcttgttttgatttgaaaaaagtgcattgttttcttgtccctccctttgatgaaacgttaccctttgacgggccttttgatgtgaacagatgttttctaggacaaactataaggactaattttaaacttcaaacattccacttttgtaatttgttttaaattgttttatgtatagtaagcacaactgtaatctagttttaagagaaaccggtgctttcttttagttcatttgtatttcccttgttactgtaaaagactgtttattaattgtttacagtttgttgcaacagccattttcttgggagaaagcttgagtgtaaagccatttgtaaaaggctttgccatactcattttaatatgtgcctgttgctgttaacttttgatgaataaaaacctatcttttcatatttttatctttgacatttaccttataactcaatcttttggaaaacacaatgctaaattacaaggaaatcaaagttagcttcttggctcttgtaattcatccctcagatgtttactcagtccgagcttatctactaatgactcaccttgcaagtgagtaagcagaagcccagtt

SEQ ID NO: 84041 - DNA, 1275 bp, Artificial Sequence
  derived and/or modified sequence
atggaggtgtgctatcagttgcctgtgctgccccttgatcgccctgtaccacaacacgttctatcccgcagaggtgccatctccttctcgagcagtagtgctctgttcggttgcccaaatccacgtcagctcagccagcgccgaggggctatctcctatgacagctcggatcagaccgctctgtatataagaatgctcggcgatgtcagagtccggagcagagctggattcgagtccgaacgcaggggatcacatccttatatagatttcaggatttttcatagccagtctgagatcgaagtatccgtaagtgccaggaacatccgacgcctgttgtcgtttcagaggtatttgagatcctctagattctttcgcggaacggctgtgtcaaattcactcaatatcctcgacgacgactataatggtcaggccaaatgtatgctggaaaaggtggggaattggaatttcgatatctttctcttcgacagactgaccaacgggaatagccttgtctccttgacattccatctcttttctttacatggcctcatagaatatttccatctggatatgatgaagcttcggaggttcttggtcatgatccaggaggattaccactcacaaaatccctatcataacgccgtccacgcggcagacgtcacccaggctatgcactgctacctgaaggagcctaaactcgcaaacagcgtcaccccctgggacatattgctgagcctgattgcagccgcaactcacgacctggatcatcctggtgtgaaccaaccatttctgatcaaaaccaaccactacctcgccaccttatacaaaaacaccagcgtgcttgagaatcatcactggcgcagcgccgtcggcttgctaagggagagtgggcttttctcccacctacccttggagtcacggcagcagatggagacccagattggcgcactcatcctggccacggatattagccggcagaatgaatacctgtccctgttccggtcacatctggaccggggtgacttgtgcttggaagacacgcggcaccggcatctggtcctgcagatggccctgaaatgtgcagatatctgtaacccttgcaggacttgggagctttccaagcaatggtcagagaaagttaccgaagagttctttcatcaaggcgatattgaaaagaagtatcacctgggggtgtcaccactgtgcgaccgccacaccgaatcgattgccaacatccagatcggaaactatacctatttggatatcgctggctag

SEQ ID NO: 84042 - DNA, 1449 bp, Artificial Sequence
  derived and/or modified sequence
atggaggtctgctatcaacttccagtcctgccattggatagacccgttccccagcacgttttgtcccgccgaggggctataagcttcagcagtagttctgcactgttcggctgccccaacccccgacaattgtctcagagacggggtgctatctcttacgacagctcagaccaaaccgcgctgtacataaggatgttgggtgacgtacgtgtgcggtcaagggcgggattcgagtctgagcggaggggctcacacccttacatcgactttcgcattttccattcgcagtccgaaatcgaagtgtccgtgtccgcaagaaatattcggagattacttagctttcagcggtatctgcggtcaagccgctttttccgcggtacagcggtctctaacagcctaaatatattagatgacgattataacggtcaggccaagtgcatgttggaaaaggtgggtaactggaacttcgatattttcctgttcgaccgactcaccaacggcaattccctggtgtctttaacattccacttgttctccctccatggactcattgaatactttcacctggatatgatgaagctgcgacggtttttggtgatgatacaggaggattatcactcccaaaatccctatcataatgcagttcacgctgcagacgtaacgcaagccatgcattgctatcttaaagaacccaagctggccaatagcgtgaccccctgggacatcctgctgagtctgatcgcagcggcaacccatgacctagaccaccccggagtaaatcagccatttctgattaagactaatcactacctagccactctctataaaaatacatccgtgctggaaaatcaccactggcgtagtgccgtgggtctattgagagagtctggattgttctctcatctaccacttgagtcacggcagcagatggagacccagattggcgctttaatactggctaccgatatctccagacagaacgagtatctgtctttatttcgaagccatctcgaccgcggtgatctgtgtctggaggatacccgccaccgacacctggttctacagatggcccttaagtgcgcagatatatgtaacccttgccgtacctgggagctttccaagcagtggagtgagaaagtgactgaagagttcttccatcagggagacatagaaaaaaagtaccatttaggggttagcccactatgtgacaggcacaccgagagcatcgccaatattcagatcggcttcatgacttatctggtcgagccactgttcaccgaatgggcgagattctccaacacgcggctgagccaaactatgctagggcatgtgggccttaacaaggcatcatggaagggattgcagcgggaacagtctagttccgaagacaccgatgctgcctttgagttgaacagccaactcttaccccaggaaaatcgtctgtcgtag

SEQ ID NO: 84043 - DNA, 1275 bp, Artificial Sequence
  derived and/or modified sequence
atggaggtgtgctaccagctgcccgtgctgcccctggacagacccgtgccccagcacgtgctgagcagaagaggcgccatcagcttcagcagcagcagcgccctgttcggctgccccaaccccagacagctgagccagagaagaggcgccatcagctacgacagcagcgaccagaccgccctgtacatcagaatgctgggcgacgtgagagtgagaagcagagccggcttcgagagcgagagaagaggcagccacccctacatcgacttcagaatcttccacagccagagcgagatcgaggtgagcgtgagcgccagaaacatcagaagactgctgagcttccagagatacctgagaagcagcagattcttcagaggcaccgccgtgagcaacagcctgaacatcctggacgacgactacaacggccaggccaagtgcatgctggagaaggtgggcaactggaacttcgacatcttcctgttcgacagactgaccaacggcaacagcctggtgagcctgaccttccacctgttcagcctgcacggcctgatcgagtacttccacctggacatgatgaagctgagaagattcctggtgatgatccaggaggactaccacagccagaacccctaccacaacgccgtgcacgccgccgacgtgacccaggccatgcactgctacctgaaggagcccaagctggccaacagcgtgaccccctgggacatcctgctgagcctgatcgccgccgccacccacgacctggaccaccccggcgtgaaccagcccttcctgatcaagaccaaccactacctggccaccctgtacaagaacaccagcgtgctggagaaccaccactggagaagcgccgtgggcctgctgagagagagcggcctgttcagccacctgcccctggagagcagacagcagatggagacccagatcggcgccctgatcctggccaccgacatcagcagacagaacgagtacctgagcctgttcagaagccacctggacagaggcgacctgtgcctggaggacaccagacacagacacctggtgctgcagatggccctgaagtgcgccgacatctgcaacccctgcagaacctgggagctgagcaagcagtggagcgagaaggtgaccgaggagttcttccaccagggcgacatcgagaagaagtaccacctgggcgtgagccccctgtgcgacagacacaccgagagcatcgccaacatccagatcggcaactacacctacctggacatcgccggctag

SEQ ID NO: 84044 - DNA, 1449 bp, Artificial Sequence
  derived and/or modified sequence
atggaggtgtgctaccagctgcccgtgctgcccctggacagacccgtgccccagcacgtgctgagcagaagaggcgccatcagcttcagcagcagcagcgccctgttcggctgccccaaccccagacagctgagccagagaagaggcgccatcagctacgacagcagcgaccagaccgccctgtacatcagaatgctgggcgacgtgagagtgagaagcagagccggcttcgagagcgagagaagaggcagccacccctacatcgacttcagaatcttccacagccagagcgagatcgaggtgagcgtgagcgccagaaacatcagaagactgctgagcttccagagatacctgagaagcagcagattcttcagaggcaccgccgtgagcaacagcctgaacatcctggacgacgactacaacggccaggccaagtgcatgctggagaaggtgggcaactggaacttcgacatcttcctgttcgacagactgaccaacggcaacagcctggtgagcctgaccttccacctgttcagcctgcacggcctgatcgagtacttccacctggacatgatgaagctgagaagattcctggtgatgatccaggaggactaccacagccagaacccctaccacaacgccgtgcacgccgccgacgtgacccaggccatgcactgctacctgaaggagcccaagctggccaacagcgtgaccccctgggacatcctgctgagcctgatcgccgccgccacccacgacctggaccaccccggcgtgaaccagcccttcctgatcaagaccaaccactacctggccaccctgtacaagaacaccagcgtgctggagaaccaccactggagaagcgccgtgggcctgctgagagagagcggcctgttcagccacctgcccctggagagcagacagcagatggagacccagatcggcgccctgatcctggccaccgacatcagcagacagaacgagtacctgagcctgttcagaagccacctggacagaggcgacctgtgcctggaggacaccagacacagacacctggtgctgcagatggccctgaagtgcgccgacatctgcaacccctgcagaacctgggagctgagcaagcagtggagcgagaaggtgaccgaggagttcttccaccagggcgacatcgagaagaagtaccacctgggcgtgagccccctgtgcgacagacacaccgagagcatcgccaacatccagatcggcttcatgacctacctggtggagcccctgttcaccgagtgggccagattcagcaacaccagactgagccagaccatgctgggccacgtgggcctgaacaaggccagctggaagggcctgcagagagagcagagcagcagcgaggacaccgacgccgccttcgagctgaacagccagctgctgccccaggagaacagactgagctag

SEQ ID NO: 84045 - protein, 366 aa, Artificial Sequence
  derived and/or modified sequence
MRRGLCRRSAENPDAGPVMAQPGSGCKATTRCLEGTAPPAMAQSDAEALAGALDKDEGQASPCTPSTPSVCSPPSAASSVPSAGKNICSSCGLEILDRYLLKVNNLIWHVRCLECSVCRTSLRQQNSCYIKNKEIFCKMDYFSRFGTKCARCGRQIYASDWVRRARGNAYHLACFACFSCKRQLSTGEEFGLVEEKVLCRIHYDTMIENLKRAAENGNGLTLEGAVPSEQDSQPKPAKRARTSFTAEQLQVMQAQFAQDNNPDAQTLQKLADMTGLSRRVIQVWFQNCRARHKKHTPQHPVPPSGAPPSRLPSALSDDIHYTPFSSPERARMVTLHGYIESHPFSVLTLPALPHLPVGAPQLPLSR

SEQ ID NO: 84046 - DNA, 2942 bp, Artificial Sequence
  derived and/or modified sequence
agtaaagacacaggcgaatcaagaggaggcgaggccggtattgtccgtctgaataggcgctgatagcgccgatgcgccgggggttgtgccggcgcagcgctgagaatcccgacgcggggccggtgatggcccagccagggtccggctgcaaagcgaccacccgctgtcttgaagggaccgcgccgcccgccatggctcagtctgacgccgaggccctggcaggagctctggacaaggacgagggtcaggcctccccatgtacgcccagcacgccatctgtctgctcaccgccctctgccgcctcctccgtgccgtctgcaggcaagaacatctgctccagctgcggcctcgagatcctggaccgatatctgctcaaggtcaacaacctcatctggcacgtgcggtgcctcgagtgctccgtgtgtcgcacgtcgctgaggcagcagaacagctgctacatcaagaacaaggagatcttctgcaagatggactacttcagccgattcgggaccaagtgtgcccggtgcggccgacagatctacgccagcgactgggtgcggagagctcgcggcaacgcctaccacctggcctgcttcgcctgcttctcgtgcaagcgccagctgtccactggtgaggagttcggcctggtcgaggagaaggtgctctgccgcatccactacgacaccatgattgagaacctcaagagggccgccgagaacgggaacggcctcacgttggagggggcagtgccctcggaacaggacagtcaacccaagccggccaagcgcgcgcggacgtccttcaccgcggaacagctgcaggttatgcaggcgcagttcgcgcaggacaacaaccccgacgctcagacgctgcagaagctggcggacatgacgggcctcagccggagagtcatccaggtgtggtttcaaaactgccgggcgcgtcataaaaagcacacgccgcaacacccagtgccgccctcgggggcgcccccgtcccgccttccctccgccctgtccgacgacatccactacaccccgttcagcagccccgagcgggcgcgcatggtcaccctgcacggctacattgagagtcatcctttttcagtactaacgctgccggcacttccgcatctgcccgtgggcgccccacagctgcccctcagccgctgagatccagtgtccaagctgcggccaggagtccacccacctccgcatccacccccgtccgccatcctgcccaccaccaggtcggttcccgaggcctggcctttccctctcctgctgagaaccagaacccaccaggagcaccacagagtcctcctcttggaaggcagaactccctgaaatctggaatcagggtggaaacagcctgtttttcccatttaaacaggagtcctcttcaacttcagctgattacaataacaaaaggcggaattgaattgtgcgatgccaacggccttctcatttacaggtttttttcccccacattggcctttatttactacttccttggaaccatctctgaattctgaatagctgacaacccccaatgttatccactctgttgcttttgtctggaaaactctacagtgtttgtgggatgtccccaaaggaaagctatgttctaattttatcatttccatctgtctggttatgtcaagttaattcagaaagagaagagacagtgaccaaccctgagaggcctaatagggcagagatggaggcctgcccagactaggaggcagcggggatagacagggaatggggagaagaaagacccccattggtttggaaatcaaggagagggcggtgacatattggaccagaagaggcactagccattttaaggagaggaaagagaaaactctggggtcagggagagaccctacccccacctaattatccagcatatatgtaagaaacatagcagcgatggtattcgatctgtgccatgactcttctgaatgtttggacaggttagagttggggacccctgttggccacttgttgacctctcatagtggtgcttgggccaggtcttctcaatggaaggggaatcccttataggggagagggaacagagcccagtgaaatggcagtcagaatgttaaccctggatccatctctaagtagagagagggtgcccattgcctaggtgagtgtgccaagctcaggattccaactggtgcctctgagcttcccaatcaatacttcctggagccagccccacccacccctgagaacagaggtcagacacagctgcgtaacatccatcctgctacaactcttccaccccaaacaaaagggctcaggctacacacgaccatgatttatgttttcaggggatgcccatttgtcccaagcttatcctgtaattctagaattacctggtgtcctgatgcattttccactagaggttgctaatcagcatgttttagcccaagtccgccttcctgctgtggttaacctgttatgttgcttttggaaggagactctaagacagggaaagcaagttcatggtacatacgcagccattgtctctgtttttacccatggcagacattgctaatcaatggcagctctatttcactgagtctggataaggtttcagagttcaaatgcttgacgttggcacttaacatgaaagcctataggtcattcttgctctgggatctacaggcagggtaggcacaggtgcagcctaagaagggaacctgcttcctctcccttccaaagacagtgacagctgactgagggcaaagagcaggcaccactcagaacgtggtgagtacagctcagctcagcactcagtcagtggtaacttgtgcccagccctgtgctaggcgctgacattaacaggagcaaccagggcccaattcctggccttggagctcaaatctttcctttgatttttgctcctgatcatcaaggccccagtgg

SEQ ID NO: 84047 - DNA, 1101 bp, Artificial Sequence
  derived and/or modified sequence
atgcggagaggcctgtgtagaagaagcgctgagaatcccgacgctggccctgtgatggcccagcccggatctggctgcaaggccacaacccgttgtctcgagggcacggctccccccgcaatggcacaaagtgacgcagaagccctcgcgggtgcactcgacaaggacgaaggccaggcgagcccctgtacaccaagtactcccagtgtatgcagcccccctagcgccgctagctctgttccctccgcaggtaagaacatctgctcatcttgtggactggagatcctcgatcggtacttactcaaggtgaataacctcatatggcacgttagatgcctggaatgctcggtgtgtcgcactagtctgaggcaacaaaactcatgctacatcaagaacaaggagattttctgcaagatggattacttctccaggtttggaactaaatgtgctagatgtggccggcaaatttacgcgagcgattgggtccggagggcccgggggaacgcctaccacctggcatgctttgcatgtttctcttgcaaacggcaattgtctaccggcgaagagttcggattagttgaagagaaagtcctgtgccgaatccactatgacacaatgatcgagaatttaaaacgggcagccgagaatggcaatggtctgactctggaaggggctgttccatcggagcaagacagccagcctaagccagctaagagggctaggaccagctttaccgccgaacagcttcaagtaatgcaggcccaattcgcgcaggacaacaatcccgacgctcagactctgcagaaattggcagatatgactgggctgagcaggcgggtcattcaggtatggtttcagaattgccgggcacggcacaagaagcatactccacagcatcccgtgcccccctctggcgcccccccttcaaggttgccctctgctttgtcggacgacatccattataccccattttcttcacccgagcgggctcggatggtcacccttcacggctacatcgaaagccacccgttcagcgtcttgactttgccagccctcccgcacttacctgtgggggcaccccagttgcccttaagccgctag

SEQ ID NO: 84048 - DNA, 1101 bp, Artificial Sequence
  derived and/or modified sequence
atgaggcggggcctgtgcagaagatctgcagaaaatccagatgctggccctgtgatggcccagcccggcagcggctgcaaggccaccacccgctgcctggagggcacagcccccccagccatggcccagagtgatgctgaggccctggccggggccctggacaaggatgagggccaggccagcccctgcacccccagcaccccatctgtgtgcagccccccatctgctgccagctctgtgcccagcgctgggaagaacatctgcagcagctgtggcctggagatcctggaccgctacctgctgaaggtgaacaacctgatctggcacgtgcgctgcctggagtgcagcgtgtgcaggaccagcctgcggcagcagaacagctgctacatcaagaacaaggagatcttctgcaagatggactacttcagcagatttggcaccaagtgtgcccgctgtggccggcagatctatgccagtgactgggtgagaagagcccggggaaatgcctaccacctggcctgctttgcctgcttcagctgcaagaggcagctgagcactggagaggagtttggcctggtggaggagaaggtgctgtgccgcatccactatgacaccatgattgagaacctgaagagagctgctgaaaatggaaatggcctgaccctggagggcgctgtgcccagcgagcaggacagccagcccaagccagccaagagggcccggaccagcttcaccgctgagcagctgcaggtgatgcaggcccagtttgcccaggacaacaacccagatgcccagaccctgcagaagctggccgacatgacaggcctgagccggcgggtcatccaggtgtggttccagaactgccgggcccggcacaagaagcacaccccccagcaccctgtgccccccagcggggccccacccagccggctgcccagcgccctgagtgatgacatccactacacccccttcagcagccctgagcgggccaggatggtgaccctgcacggctacatcgagagccaccccttctctgtgctgaccctgcctgccctgccccacctgcctgtgggcgccccccagctgcccctgagcaggtag

SEQ ID NO: 84049 - DNA, 1101 bp, Artificial Sequence
  derived and/or modified sequence
atgcggcggggcctgtgccggcggagcgccgagaaccccgacgccggacccgtaatggcccagccagggagtgggtgtaaggccaccacaaggtgtcttgaaggcactgctccccctgcgatggcacaaagcgatgcagaagctctcgccggagcattggacaaagacgagggacaggccagtccttgtacgccctccacgccctcagtgtgtagtccacccagcgctgcgagcagcgttccttctgccggcaaaaacatctgctctagttgtggtctggagatactggaccgatacctgcttaaggtgaataacctgatatggcatgttcggtgcctggaatgctctgtctgtcgcaccagccttagacagcaaaactcttgctatattaagaacaaagaaatattctgcaagatggattacttcagtagatttggcacaaaatgtgcgagatgtggaaggcagatctacgcaagcgattgggtgcgccgtgctaggggcaacgcgtatcacttggcctgtttcgcttgtttttcttgtaagcgccagctgagtacaggcgaggagtttggactagtggaggagaaggtgctctgcagaatccattacgacaccatgatcgaaaacctgaaacgggcagccgagaatggcaacggactgaccctggaaggcgctgtgccaagcgagcaggactcgcagcctaagccagccaagagggcacgaacctctttcacagcggaacagttgcaggtgatgcaggcacagtttgctcaggacaataaccccgacgcacaaacattacaaaaacttgcggatatgaccggcctgtcgagacgcgtcatccaggtgtggtttcaaaactgtagagcaagacataagaaacacacaccccagcaccctgtgcccccaagtggcgctccgccatctcgccttccatctgcgctctcagacgacattcattacacccccttctcttctcctgagcgggccagaatggtgacattacatggctacatagaaagccacccgttttcagtgctaacccttcctgcgcttccccacttacctgtgggggcaccgcagctgcctttaagccggtag

SEQ ID NO: 84050 - DNA, 1101 bp, Artificial Sequence
  derived and/or modified sequence
atgagacggggattatgcaggcgctccgccgaaaacccagacgccggacccgtcatggctcagccaggcagcggttgcaaggccactacacgttgcttagagggaacagctccaccagcgatggcacaatcagacgccgaagccttggcgggagcactcgacaaagatgaaggacaggcttccccctgtaccccaagcacaccgagcgtctgctcgcctccatccgccgcttccagtgtgccctccgctggcaaaaatatatgctcctcctgcggtctggagattttagatcgatatttgctgaaggttaataacctcatttggcacgtgcgttgtttagaatgctctgtttgcaggacctctctccgtcagcaaaactcttgttacattaagaacaaggaaatattttgcaagatggactacttctctcgttttgggacgaagtgcgcacgctgtgggaggcaaatctatgcaagcgattgggtaagaagagccagagggaatgcttatcatctcgcctgctttgcctgcttttcttgtaagagacaactaagtaccggagaagagtttggattagttgaggaaaaggtcctgtgtaggattcattacgacaccatgatcgaaaacctcaagcgcgctgccgagaatgggaatgggcttacattagagggcgctgtgccctcggaacaggacagccagcccaaacctgcaaagagagctcgaacatcttttacagcagaacaactgcaggtgatgcaggctcagttcgcacaggacaataatcccgatgcccaaaccctccagaaattagccgatatgacagggctgagcaggagggtcatccaggtttggttccagaactgccgtgcccgtcataaaaagcatacccctcagcacccagtgcctccttctggcgcaccccctagtcgtctcccttccgcattaagtgacgacattcactatactccattttcttctcccgagagggctcggatggtcactttgcatggttacattgaaagccatccatttagcgtacttactttgcccgcactccctcaccttccagtgggtgctccgcagctccctctgagtcgctag

SEQ ID NO: 84051 - DNA, 1101 bp, Artificial Sequence
  derived and/or modified sequence
atgagaagaggcctgtgcagaagaagcgccgagaaccccgacgccggccccgtgatggcccagcccggcagcggctgcaaggccaccaccagatgcctggagggcaccgccccccccgccatggcccagagcgacgccgaggccctggccggcgccctggacaaggacgagggccaggccagcccctgcacccccagcacccccagcgtgtgcagcccccccagcgccgccagcagcgtgcccagcgccggcaagaacatctgcagcagctgcggcctggagatcctggacagatacctgctgaaggtgaacaacctgatctggcacgtgagatgcctggagtgcagcgtgtgcagaaccagcctgagacagcagaacagctgctacatcaagaacaaggagatcttctgcaagatggactacttcagcagattcggcaccaagtgcgccagatgcggcagacagatctacgccagcgactgggtgagaagagccagaggcaacgcctaccacctggcctgcttcgcctgcttcagctgcaagagacagctgagcaccggcgaggagttcggcctggtggaggagaaggtgctgtgcagaatccactacgacaccatgatcgagaacctgaagagagccgccgagaacggcaacggcctgaccctggagggcgccgtgcccagcgagcaggacagccagcccaagcccgccaagagagccagaaccagcttcaccgccgagcagctgcaggtgatgcaggcccagttcgcccaggacaacaaccccgacgcccagaccctgcagaagctggccgacatgaccggcctgagcagaagagtgatccaggtgtggttccagaactgcagagccagacacaagaagcacaccccccagcaccccgtgccccccagcggcgccccccccagcagactgcccagcgccctgagcgacgacatccactacacccccttcagcagccccgagagagccagaatggtgaccctgcacggctacatcgagagccaccccttcagcgtgctgaccctgcccgccctgccccacctgcccgtgggcgccccccagctgcccctgagcagatag

SEQ ID NO: 84052 - protein, 363 aa, Artificial Sequence
  derived and/or modified sequence
MAQPGSGCKATTRCLEGTAPPAMAQSDAEALAGALDKDEGQASPCTPSTPSVCSPPSAASSVPSAGKNICSSCGLEILDRYLLKVNNLIWHVRCLECSVCRTSLRQQNSCYIKNKEIFCKMDYFSRFGTKCARCGRQIYASDWVRRARGNAYHLACFACFSCKRQLSTGEEFGLVEEKVLCRIHYDTMIENLKRAAENGNGLTLEGAVPSEQDSQPKPAKRARTSFTAEQLQVMQAQFAQDNNPDAQTLQKLADMTGLSRRVIQVWFQNCRARHKKHTPQHPVPPSGAPPSRLPSALSDDIHYTPFSSPERARMVTLHGYIESQVQCGQVHCRLPYTAPPVHLKADMDGPLSNRGEKVILFQY

SEQ ID NO: 84053 - protein, 176 aa, Artificial Sequence
  derived and/or modified sequence
MIENLKRAAENGNGLTLEGAVPSEQDSQPKPAKRARTSFTAEQLQVMQAQFAQDNNPDAQTLQKLADMTGLSRRVIQVWFQNCRARHKKHTPQHPVPPSGAPPSRLPSALSDDIHYTPFSSPERARMVTLHGYIESQVQCGQVHCRLPYTAPPVHLKADMDGPLSNRGEKVILFQY

SEQ ID NO: 84054 - DNA, 3587 bp, Artificial Sequence
  derived and/or modified sequence
gatgtgtggctccctgggtgatcttgcaacacttaggcaggagtgacctcagaggcctgtgaatggagcacctttgtcaatatcaggtcactgcggtccctggccctcctgccttctgacaatgggagtggggagtaaagggttaactgcttcccctcgtgtttatgggggtgggggttcagtgagtgccctggaggctaaagttcctcttcccagctaggcccaaacgacttcatgcaagcccctagccttctctggccctccgccttgagcccaagctctgtcgcgggctccagcgggagaagcctaccccctcccgcaaagcgagggtcccaggggaagcgcagagcgggaagcggccccccaccgcggcagagagcggcccagcggcggccagctgttgggggacagatgttgggggagccgagaggggagctgggggaggagcctcggggccgggacctccgagaagcggtcgttttaacctcttaattgctggttctgggttttttttccccctctggcttcttcccctacgggtttacctagaagggaaggagcagagagaataggtagggccccacctccaacccaccttgttcgcctcacaggatctaaagccttcaagaaggtcttgaacctaaaataagtgaacctccgtttgagtttcggcctctcggctcaatagcttgccgattcgggaccaagtgtgcccggtgcggccgacagatctacgccagcgactgggtgcggagagctcgcggcaacgcctaccacctggcctgcttcgcctgcttctcgtgcaagcgccagctgtccactggtgaggagttcggcctggtcgaggagaaggtgctctgccgcatccactacgacaccatgattgagaacctcaagagggccgccgagaacgggaacggcctcacgttggagggggcagtgccctcggaacaggacagtcaacccaagccggccaagcgcgcgcggacgtccttcaccgcggaacagctgcaggttatgcaggcgcagttcgcgcaggacaacaaccccgacgctcagacgctgcagaagctggcggacatgacgggcctcagccggagagtcatccaggtgtggtttcaaaactgccgggcgcgtcataaaaagcacacgccgcaacacccagtgccgccctcgggggcgcccccgtcccgccttccctccgccctgtccgacgacatccactacaccccgttcagcagccccgagcgggcgcgcatggtcaccctgcacggctacattgagagtcaggtacagtgcgggcaggtgcactgccggctgccttacaccgcaccccccgtccacctcaaagccgatatggatgggccgctctccaaccggggtgagaaggtcatcctttttcagtactaacgctgccggcacttccgcatctgcccgtgggcgccccacagctgcccctcagccgctgagatccagtgtccaagctgcggccaggagtccacccacctccgcatccacccccgtccgccatcctgcccaccaccaggtcggttcccgaggcctggcctttccctctcctgctgagaaccagaacccaccaggagcaccacagagtcctcctcttggaaggcagaactccctgaaatctggaatcagggtggaaacagcctgtttttcccatttaaacaggagtcctcttcaacttcagctgattacaataacaaaaggcggaattgaattgtgcgatgccaacggccttctcatttacaggtttttttcccccacattggcctttatttactacttccttggaaccatctctgaattctgaatagctgacaacccccaatgttatccactctgttgcttttgtctggaaaactctacagtgtttgtgggatgtccccaaaggaaagctatgttctaattttatcatttccatctgtctggttatgtcaagttaattcagaaagagaagagacagtgaccaaccctgagaggcctaatagggcagagatggaggcctgcccagactaggaggcagcggggatagacagggaatggggagaagaaagacccccattggtttggaaatcaaggagagggcggtgacatattggaccagaagaggcactagccattttaaggagaggaaagagaaaactctggggtcagggagagaccctacccccacctaattatccagcatatatgtaagaaacatagcagcgatggtattcgatctgtgccatgactcttctgaatgtttggacaggttagagttggggacccctgttggccacttgttgacctctcatagtggtgcttgggccaggtcttctcaatggaaggggaatcccttataggggagagggaacagagcccagtgaaatggcagtcagaatgttaaccctggatccatctctaagtagagagagggtgcccattgcctaggtgagtgtgccaagctcaggattccaactggtgcctctgagcttcccaatcaatacttcctggagccagccccacccacccctgagaacagaggtcagacacagctgcgtaacatccatcctgctacaactcttccaccccaaacaaaagggctcaggctacacacgaccatgatttatgttttcaggggatgcccatttgtcccaagcttatcctgtaattctagaattacctggtgtcctgatgcattttccactagaggttgctaatcagcatgttttagcccaagtccgccttcctgctgtggttaacctgttatgttgcttttggaaggagactctaagacagggaaagcaagttcatggtacatacgcagccattgtctctgtttttacccatggcagacattgctaatcaatggcagctctatttcactgagtctggataaggtttcagagttcaaatgcttgacgttggcacttaacatgaaagcctataggtcattcttgctctgggatctacaggcagggtaggcacaggtgcagcctaagaagggaacctgcttcctctcccttccaaagacagtgacagctgactgagggcaaagagcaggcaccactcagaacgtggtgagtacagctcagctcagcactcagtcagtggtaacttgtgcccagccctgtgctaggcgctgacattaacaggagcaaccagggcccaattcctggccttggagctcaaatctttcctttgatttttgctcctgatcatcaaggccccagtggcaaccatgtggtaagtggccaaccaagccctacccagggtcacccaacacactctgccttgagcctctcctcagggtctattccttgcgtggattatgtggccgtagcatgttacagttcaaacatgtctccactaccctgttaagagcagcctgggaacgtacaggccatcaagactatttatttaaatacaaaaaaaggggaaaacacacacacggaaaaaaaattgtaagcactttttttgtaaaaccaatgtctgttttgttacatacctttcatgtcgtgctttgtaaatgtcttatttgtgtaataaagttaatgcaagtagaagtgctggcactgaaatcc

SEQ ID NO: 84055 - DNA, 1092 bp, Artificial Sequence
  derived and/or modified sequence
atggcacagccaggtagtgggtgtaaagccaccacaagatgcctggaaggcacagccccacctgccatggcacagtctgatgcagaagcgctggcgggcgccctcgataaggacgagggacaggcctcaccctgcacaccaagcaccccctccgtatgtagtcctccatcagccgcgtcctcggtgccttctgccgggaagaacatctgctcatcttgcgggctcgaaatcctggatcgctatctcttaaaggttaacaacctgatttggcatgtgaggtgcttagaatgttcagtgtgtcgcacctctttgcggcagcagaatagctgctacattaagaataaggaaatcttctgcaaaatggattacttttcacgcttcggtacaaagtgcgcaaggtgtgggcgccagatctacgccagcgactgggtgagacgagctcgcgggaatgcctaccacctggcctgtttcgcttgtttttcttgtaagcggcagctcagtaccggcgaagaattcggtctcgtggaggagaaggtcctctgccggatccactacgacactatgattgagaatctaaaaagagcggctgaaaatggcaacggactgacgttggagggcgcagtgcccagtgagcaagactctcagcctaagcccgctaagagggctaggaccagcttcacagctgaacaactccaagttatgcaggcacaatttgcccaggacaataacccagatgcacagacactacagaaactggcggacatgactgggctttcaaggagagttatccaagtttggttccagaattgtcgtgcacggcataaaaaacacaccccccagcaccctgttcctcccagtggagctccaccctccaggctgccatcagcactgtctgacgacatccactacacaccattttcttcacccgagcgggccaggatggtaaccctacacggctacatcgagtcccaggtccagtgtggccaggtacactgcagactaccatatacggcaccaccagtgcatctaaaagcagatatggacgggcccctctctaaccgaggggagaaagtcattctgtttcaatattag

SEQ ID NO: 84056 - DNA, 1092 bp, Artificial Sequence
  derived and/or modified sequence
atggcccagcccggcagcggctgcaaggccaccacccgctgcctggagggcacagcccccccagccatggcccagagtgatgctgaggccctggccggggccctggacaaggatgagggccaggccagcccctgcacccccagcaccccatctgtgtgcagccccccatctgctgccagctctgtgcccagcgctgggaagaacatctgcagcagctgtggcctggagatcctggaccgctacctgctgaaggtgaacaacctgatctggcacgtgcgctgcctggagtgcagcgtgtgcaggaccagcctgcggcagcagaacagctgctacatcaagaacaaggagatcttctgcaagatggactacttcagcagatttggcaccaagtgtgcccgctgtggccggcagatctatgccagtgactgggtgagaagagcccggggaaatgcctaccacctggcctgctttgcctgcttcagctgcaagaggcagctgagcactggagaggagtttggcctggtggaggagaaggtgctgtgccgcatccactatgacaccatgattgagaacctgaagagagctgctgaaaatggaaatggcctgaccctggagggcgctgtgcccagcgagcaggacagccagcccaagccagccaagagggcccggaccagcttcaccgctgagcagctgcaggtgatgcaggcccagtttgcccaggacaacaacccagatgcccagaccctgcagaagctggccgacatgacaggcctgagccggcgggtcatccaggtgtggttccagaactgccgggcccggcacaagaagcacaccccccagcaccctgtgccccccagcggggccccacccagccggctgcccagcgccctgagtgatgacatccactacacccccttcagcagccctgagcgggccaggatggtgaccctgcacggctacatcgagagccaggtgcagtgtggccaggtgcactgccgcctgccctacacagcccctcctgtgcacctgaaggctgacatggatggccccctgagcaacagaggagagaaggtgatcctcttccagtactag

SEQ ID NO: 84057 - DNA, 1092 bp, Artificial Sequence
  derived and/or modified sequence
atggcccagcccggcagcggctgcaaggccaccacccggtgcctggaggggaccgcaccgccggcaatggcccagtctgacgccgaggctctagccggcgccctggacaaggatgaagggcaggcttccccctgcacccctagcacccctagcgtatgttccccacctagtgccgcatctagtgtgccatctgcaggcaagaatatctgtagtagttgcgggctggagatcctcgaccgttatctgctgaaggtgaataacctaatctggcatgtgcgctgtctggagtgcagtgtgtgcagaacttcactgcggcagcaaaacagctgctatatcaaaaataaggagattttctgtaaaatggactacttttctagattcggcacaaagtgtgcccgctgcggacgccaaatctatgcgtccgactgggtgagacgagcacgaggaaacgcttaccatctggcttgtttcgcctgcttcagctgtaaacgccagctatcaaccggagaggaattcggtctcgtggaagagaaagtcctctgcagaattcattacgacaccatgatcgagaacctgaagcgcgcggccgagaatggtaacggtctgactcttgagggagcggtaccttcagaacaagactcccaaccgaagcctgctaagcgggccagaaccagctttacagctgagcaactgcaggtcatgcaggctcagttcgcgcaggacaataaccccgatgctcagactctgcaaaagttagcagacatgacaggcctcagcagaagagtcatacaagtttggtttcagaattgccgggcccggcacaagaaacacacaccacaacatcccgtgcctcctagcggcgccccaccaagtcggctgcccagcgccctgtcagatgacatccactatacgccatttagctctcccgaacgggcgagaatggtaactcttcatggctacatcgagtcccaggtgcaatgtggccaggtgcattgccgattaccctataccgccccacctgtacacctcaaagcggacatggacggccccctctccaacagaggggaaaaagtcatcctattccagtattag

SEQ ID NO: 84058 - DNA, 1092 bp, Artificial Sequence
  derived and/or modified sequence
atggctcagcccggttctgggtgcaaggccaccacccggtgtctcgaggggactgcacctcccgcaatggctcaatccgatgccgaagcactcgccggagctctagataaagacgaaggtcaagcctcaccttgcaccccttccacccccagtgtgtgctcaccccctagtgccgcaagttctgtgccatctgcgggaaagaatatctgcagttcttgcgggcttgagatcctagatcgttatttgctgaaggtcaacaacctgatctggcatgtgaggtgcttggaatgcagcgtctgcaggacgagtttaaggcagcaaaacagttgctacataaagaacaaggagatcttctgcaagatggattacttcagcagatttggcaccaaatgtgctaggtgcggtcggcagatctacgcttccgattgggttcggagagccaggggaaacgcctatcaccttgcttgctttgcctgtttcagctgcaagcggcagcttagcacaggtgaagaatttggcctggtggaggagaaagtcctgtgtagaatccattatgatacaatgatagaaaatcttaaacgcgctgctgaaaatgggaatgggctcacgctggagggtgctgtgccgtccgagcaggacagccagcccaagccagctaaaagagccaggacttcattcaccgccgaacagctacaggtcatgcaggcgcagttcgcccaggacaacaatcctgatgcacaaacactgcagaaactggccgatatgactgggttgagccgcagggtaatccaagtgtggtttcagaactgcagggcgcgacacaaaaagcatacccctcaacaccccgtgccaccctccggtgctcctccaagccgactgcccagtgcgctgtcggatgacattcactacacgccattcagctcaccagaacgggctcgcatggtcacactacacggatatatcgagtcccaagtccagtgcgggcaggtccactgtcggttgccttacaccgcacctcctgtccacctgaaagcagatatggatgggccactgtcgaatcggggagaaaaggttattttattccagtattag

SEQ ID NO: 84059 - DNA, 1092 bp, Artificial Sequence
  derived and/or modified sequence
atggcccagcccggcagcggctgcaaggccaccaccagatgcctggagggcaccgccccccccgccatggcccagagcgacgccgaggccctggccggcgccctggacaaggacgagggccaggccagcccctgcacccccagcacccccagcgtgtgcagcccccccagcgccgccagcagcgtgcccagcgccggcaagaacatctgcagcagctgcggcctggagatcctggacagatacctgctgaaggtgaacaacctgatctggcacgtgagatgcctggagtgcagcgtgtgcagaaccagcctgagacagcagaacagctgctacatcaagaacaaggagatcttctgcaagatggactacttcagcagattcggcaccaagtgcgccagatgcggcagacagatctacgccagcgactgggtgagaagagccagaggcaacgcctaccacctggcctgcttcgcctgcttcagctgcaagagacagctgagcaccggcgaggagttcggcctggtggaggagaaggtgctgtgcagaatccactacgacaccatgatcgagaacctgaagagagccgccgagaacggcaacggcctgaccctggagggcgccgtgcccagcgagcaggacagccagcccaagcccgccaagagagccagaaccagcttcaccgccgagcagctgcaggtgatgcaggcccagttcgcccaggacaacaaccccgacgcccagaccctgcagaagctggccgacatgaccggcctgagcagaagagtgatccaggtgtggttccagaactgcagagccagacacaagaagcacaccccccagcaccccgtgccccccagcggcgccccccccagcagactgcccagcgccctgagcgacgacatccactacacccccttcagcagccccgagagagccagaatggtgaccctgcacggctacatcgagagccaggtgcagtgcggccaggtgcactgcagactgccctacaccgccccccccgtgcacctgaaggccgacatggacggccccctgagcaacagaggcgagaaggtgatcctgttccagtactag

SEQ ID NO: 84060 - DNA, 531 bp, Artificial Sequence
  derived and/or modified sequence
atgattgagaatttgaagcgggctgctgagaatgggaacggcctgacacttgagggcgcagtgccatcagagcaagactcccagccaaagcccgctaagagagctaggacctcattcaccgcagagcagttgcaggtcatgcaggctcagttcgctcaggataacaaccccgatgctcagacattacagaaactggctgacatgacaggtctgtcaagacgggtcatccaggtgtggtttcagaactgccgtgctcgccacaaaaagcatactccccagcatcccgttccaccttcaggggcaccaccctccagactgcctagtgccctgtctgacgatattcactacactccgttcagctcacctgaacgagctaggatggtgaccctgcacgggtacatcgaaagtcaggtacagtgcggccaggttcattgtcgcttgccctacaccgcaccacctgtgcacttgaaggccgacatggacggcccactcagtaatcggggcgaaaaggtaatactatttcagtactag

SEQ ID NO: 84061 - DNA, 531 bp, Artificial Sequence
  derived and/or modified sequence
atgattgagaacctgaagagagctgctgaaaatggaaatggcctgaccctggagggcgctgtgcccagcgagcaggacagccagcccaagccagccaagagggcccggaccagcttcaccgctgagcagctgcaggtgatgcaggcccagtttgcccaggacaacaacccagatgcccagaccctgcagaagctggccgacatgacaggcctgagcagaagagtcatccaggtgtggttccagaactgccgggcccggcacaagaagcacaccccccagcaccctgtgcccccatctggggccccacccagccggctgcccagcgccctgagtgatgacatccactacacccccttcagcagccctgagcgggccaggatggtgaccctgcacggctacatcgagagccaggtgcagtgtggccaggtgcactgccgcctgccctacacagcccctcctgtgcacctgaaggctgacatggatggccccctgagcaacagaggagagaaggtgatcctcttccagtactag

SEQ ID NO: 84062 - DNA, 531 bp, Artificial Sequence
  derived and/or modified sequence
atgatcgagaacctgaagcgggccgccgagaacggcaacggcctgacactcgagggcgcagtgccatcagagcaggatagccaacctaagcccgcaaagcgcgccaggacctccttcacagctgagcagctccaggtaatgcaggcgcagttcgcacaggacaataatcccgatgcccagaccttgcagaagttggccgatatgactggtctgagtagaagagttatccaagtgtggtttcagaactgtcgggcccggcacaagaagcacaccccccagcacccggtgcccccttctggtgccccaccctctcggctgcccagcgccctgtccgatgacattcattacactcctttctcaagcccggaacgggccagaatggtgaccttacacggctatatcgaatcacaggtacagtgcgggcaggtccactgtcgcctgccgtatacagcccccccggtacacctgaaggctgacatggacggtcccctaagtaaccggggtgaaaaagtcattctcttccagtactag

SEQ ID NO: 84063 - DNA, 531 bp, Artificial Sequence
  derived and/or modified sequence
atgatcgagaatcttaaacgggcagctgagaatgggaacggtttaaccctggagggtgccgtcccctctgaacaggacagccagccaaagccggctaagagagctcgaactagtttcacagccgagcaattacaggtgatgcaggctcaattcgcacaggataacaatcccgatgctcagactttacagaagctagccgacatgaccgggctgagccgacgagtgatacaagtgtggttccagaattgtcgggcaagacacaagaaacatactccacagcatcccgtcccacctagtggggctccaccaagccgcctcccttcagctctgagtgatgatatacattataccccattttcctcccctgaacgtgccagaatggtaactctgcatggctacatcgaatcccaagtgcagtgtggtcaggttcattgtagattaccctatactgcccctcccgtacacctcaaggcagacatggatgggccactttccaatcggggagagaaggtaatcctttttcagtactag

SEQ ID NO: 84064 - DNA, 531 bp, Artificial Sequence
  derived and/or modified sequence
atgatcgagaacctgaagagagccgccgagaacggcaacggcctgaccctggagggcgccgtgcccagcgagcaggacagccagcccaagcccgccaagagagccagaaccagcttcaccgccgagcagctgcaggtgatgcaggcccagttcgcccaggacaacaaccccgacgcccagaccctgcagaagctggccgacatgaccggcctgagcagaagagtgatccaggtgtggttccagaactgcagagccagacacaagaagcacaccccccagcaccccgtgccccccagcggcgccccccccagcagactgcccagcgccctgagcgacgacatccactacacccccttcagcagccccgagagagccagaatggtgaccctgcacggctacatcgagagccaggtgcagtgcggccaggtgcactgcagactgccctacaccgccccccccgtgcacctgaaggccgacatggacggccccctgagcaacagaggcgagaaggtgatcctgttccagtactag

SEQ ID NO: 84065 - protein, 362 aa, Artificial Sequence
  derived and/or modified sequence
MKLHCCLFTLVASIIVPAAFVLEDVDFDQMVSLEANRSSYNASFPSSFELSASSHSDDDVIIAKEGTSVSIECLLTASHYEDVHWHNSKGQQLDGRSRGGKWLVSDNFLNITNVAFDDRGLYTCFVTSPIRASYSVTLRVIFTSGDMSVYYMIVCLIAFTITLILNVTRLCMMSSHLRKTEKAINEFFRTEGAEKLQKAFEIAKRIPIITSAKTLELAKVTQFKTMEFARYIEELARSVPLPPLILNCRAFVEEMFEAVRVDDPDDLGERIKERPALNAQGGIYVINPEMGRSNSPGGDSDDGSLNEQGQEIAVQVSVHLQSETKSIDTESQGSSHFSPPDDIGSAESNCNYKDGAYENCQL

SEQ ID NO: 84066 - protein, 216 aa, Artificial Sequence
  derived and/or modified sequence
MSVYYMIVCLIAFTITLILNVTRLCMMSSHLRKTEKAINEFFRTEGAEKLQKAFEIAKRIPIITSAKTLELAKVTQFKTMEFARYIEELARSVPLPPLILNCRAFVEEMFEAVRVDDPDDLGERIKERPALNAQGGIYVINPEMGRSNSPGGDSDDGSLNEQGQEIAVQVSVHLQSETKSIDTESQGSSHFSPPDDIGSAESNCNYKDGAYENCQL

SEQ ID NO: 84067 - protein, 17 aa, Artificial Sequence
  derived and/or modified sequence
MKLHCCLFTLVASIIVP

SEQ ID NO: 84068 - protein, 109 aa, Artificial Sequence
  derived and/or modified sequence
MKLHCCLFTLVASIIVPAAFVLEDVDFDQMVSLEANRSSYNASFPSSFELSASSHSDDDVIIAKEGTSVSIECLLTASHYEDVHWHNSKGQQLDGRSRGGKWLVSDNFL

SEQ ID NO: 84069 - protein, 123 aa, Artificial Sequence
  derived and/or modified sequence
MKLHCCLFTLVASIIVPAAFVLEDVDFDQMVSLEANRSSYNASFPSSFELSASSHSDDDVIIAKEGTSVSIECLLTASHYEDVHWHNSKGQQLDGRSRGGKWLVSDNFLNITNVAFDDRGLYT

SEQ ID NO: 84070 - DNA, 1089 bp, Artificial Sequence
  derived and/or modified sequence
atgaagctacactgctgccttttcacactggtggcctccatcatcgtaccagcagccttcgtcctggaggatgtcgactttgaccaaatggttagtctcgaagccaaccgaagttcgtataatgcaagctttccatcaagcttcgagttgtccgcttcctcacactccgacgacgacgtgattatcgccaaagaaggtacgtccgtctcgatcgaatgcctactcacggcaagccactacgaggacgtccattggcacaactccaagggccagcaattggacgggcggtctaggggaggaaaatggctggtgtctgacaattttttaaatattactaacgtggcctttgacgaccgtggactgtatacctgttttgtaacttcccctattagggcctcctactcagtcactttacgagtgattttcaccagcggtgacatgagtgtctattacatgattgtgtgtctgatagccttcacaatcaccctgatcctgaacgtgaccagactgtgtatgatgagctcacatcttagaaaaactgaaaaggcgattaacgagtttttccgtacggagggagctgaaaagttacagaaggcgttcgagatcgcgaagcggatacctatcatcaccagtgccaagactctggagttggctaaggtgacacagttcaagacgatggaattcgcccgatatattgaagagctcgcccgcagtgtgcctctcccccctctgatcctcaattgtcgagccttcgtcgaggagatgttcgaggcagtccgggtcgacgacccagacgacctgggggagcgtataaaagagagaccagccctgaacgcacagggggggatatatgtaatcaatccggagatggggaggtccaactcccccggcggagattccgacgacggcagcttgaatgaacagggccaggaaattgccgtacaggtcagcgtccatctccagtcagagacaaaatcgatagatacagaaagccaagggagttcccacttttccccccctgatgatattggctctgcagagtccaattgtaattacaaggacggcgcctacgaaaattgccagctatag

SEQ ID NO: 84071 - DNA, 1089 bp, Artificial Sequence
  derived and/or modified sequence
atgaagctccattgttgtctgttcaccctggtggccagcattatcgttcctgcagcgttcgtgttagaggatgtcgattttgaccaaatggtgtcgctcgaagccaataggtcctcatataatgcttccttcccctcatctttcgagcttagcgcatcatctcacagcgacgacgatgtgattatcgctaaagaggggacgagtgtttccatcgagtgcttgcttaccgcctctcattatgaggatgtacattggcacaatagcaagggacagcaactcgacggtcggtctcgaggcggaaagtggctcgttagcgacaatttcctcaatattaccaacgtggccttcgatgatcgggggctgtacacatgtttcgtgacctcccccatccgagcctcctattcggttaccctgagggtgatctttacaagcggtgacatgagcgtctactatatgattgtgtgtctgattgcctttaccattactcttatccttaacgtgacaaggctgtgcatgatgtcttcccacctgagaaagaccgagaaggcgattaacgagttcttcaggactgagggcgctgagaagctacagaaggcattcgaaatcgcaaaaaggattccaattatcacatcagccaagacacttgagctggctaaagtaacccaatttaagacaatggaattcgcacggtatattgaggaattggcccgcagcgttcctttacccccgctcatattaaactgtagggccttcgtcgaagaaatgtttgaggcggtcagggtcgacgacccagatgacctcggagaaaggataaaggagagacctgccctaaacgcacagggcggcatttacgtcattaatccagaaatgggccgcagcaactcccctggcggggattctgatgacggctctctgaacgagcaaggccaagaaatcgccgtccaggtgtccgtgcatcttcaaagtgagaccaagtcaatcgacactgagagccagggttcttcacacttcagtccacctgacgacataggtagcgcagagtcgaactgtaactataaagacggcgcctacgaaaactgccagctgtag

SEQ ID NO: 84072 - DNA, 54 bp, Artificial Sequence
  derived and/or modified sequence
atgaaactgcactgttgcctttttactctcgttgcaagcatcattgtgccctag

SEQ ID NO: 84073 - DNA, 330 bp, Artificial Sequence
  derived and/or modified sequence
atgaagctgcattgttgtcttttcacgctcgttgcctcgatcatagtaccagcagcctttgtcctcgaggacgttgactttgaccagatggtctctctggaggcgaacagatcatcgtacaacgcctccttccctagttcttttgagcttagcgcttcttcccactccgatgatgatgttatcatagccaaggaaggcacatccgtgtctatagaatgtttactgaccgcgtctcactatgaggatgttcactggcacaacagcaagggccagcagctggatggaaggtcccgcggtggcaagtggctggtcagcgataactttctgtag

SEQ ID NO: 84074 - DNA, 372 bp, Artificial Sequence
  derived and/or modified sequence
atgaagctgcactgctgtctatttaccctggtggctagcataatcgtgcccgctgctttcgtattagaagatgtggattttgatcaaatggtctcactggaggcgaataggagttcttacaatgcttcctttccatctagtttcgagctgtccgcaagttcacattctgatgatgacgttattattgccaaagaggggaccagcgtctctattgagtgcctgctcactgctagccattacgaggacgttcattggcacaacagcaagggtcagcagctagatggacggtctagaggtggcaagtggctggttagcgacaattttctaaacattacaaacgtcgccttcgatgacagaggcctctatacatag

SEQ ID NO: 84075 - DNA, 1089 bp, Artificial Sequence
  derived and/or modified sequence
atgaagctgcactgctgcctcttcaccctggtggccagcatcatcgtgcctgctgcctttgtgctggaggatgtggactttgaccagatggtgtccctggaggccaacagaagcagctacaatgccagcttccccagcagctttgagctgagcgccagcagccacagtgatgatgatgtgatcatcgccaaggagggcacctctgtgtccattgagtgcctgctgacagccagccactatgaagatgtgcactggcacaacagcaagggccagcagctggatggccgcagcagaggaggcaagtggctggtgtctgacaacttcctgaacatcaccaacgtggcctttgatgaccggggcctgtacacctgctttgtgaccagccccatccgggccagctacagcgtgaccctgcgggtcatcttcaccagcggggacatgtctgtgtactacatgattgtgtgcctgattgccttcaccatcaccctcatcctgaatgtgacccggctgtgcatgatgagcagccacctgaggaagacagagaaggccatcaatgagttcttcagaacagagggcgctgagaagctgcagaaggcctttgagatcgccaagaggatccccatcatcaccagcgccaagaccctggagctggccaaggtgacccagttcaagaccatggagtttgcccgctacatcgaggagctggcccggtctgtgcccctgcccccactcatcctgaactgccgggcctttgtggaggagatgtttgaggccgtgcgggtggatgatcctgatgacctgggggagcgcatcaaggagaggcctgccctgaatgcccagggcggcatctacgtgatcaaccctgagatgggccgcagcaacagccctggaggagacagtgatgatggcagcctgaatgagcagggccaggagattgctgtgcaggtgtctgtgcacctgcagagcgagaccaagagcattgacacagagagccagggcagcagccacttcagccccccagatgacatcggcagcgctgagagcaactgcaactacaaggatggagcctatgagaactgccagctgtag

SEQ ID NO: 84076 - DNA, 54 bp, Artificial Sequence
  derived and/or modified sequence
atgaagctgcactgctgcctcttcaccctggtggccagcatcatcgtgccctag

SEQ ID NO: 84077 - DNA, 330 bp, Artificial Sequence
  derived and/or modified sequence
atgaagctgcactgctgcctcttcaccctggtggccagcatcatcgtgcctgctgcctttgtgctggaggatgtggactttgaccagatggtgtccctggaggccaacagaagcagctacaatgccagcttccccagcagctttgagctgagcgccagcagccacagtgatgatgatgtgatcatcgccaaggagggcacctctgtgtccattgagtgcctgctgacagccagccactatgaagatgtgcactggcacaacagcaagggccagcagctggatggccgcagcagaggaggcaagtggctggtgtctgacaacttcctgtag

SEQ ID NO: 84078 - DNA, 372 bp, Artificial Sequence
  derived and/or modified sequence
atgaagctgcactgctgcctcttcaccctggtggccagcatcatcgtgcctgctgcctttgtgctggaggatgtggactttgaccagatggtgtccctggaggccaacagaagcagctacaatgccagcttccccagcagctttgagctgagcgccagcagccacagtgatgatgatgtgatcatcgccaaggagggcacctctgtgtccattgagtgcctgctgacagccagccactatgaagatgtgcactggcacaacagcaagggccagcagctggatggccgcagcagaggaggcaagtggctggtgtctgacaacttcctgaacatcaccaacgtggcctttgatgaccggggcctgtacacctag

SEQ ID NO: 84079 - DNA, 2891 bp, Artificial Sequence
  derived and/or modified sequence
ggagctagacggcggtcgggtaggtgacggcttggttggggtcgctgcgaggggactactaggagcgccgaggcgtgagtcgtagcctgtggcttggggtcgggagtgcaggaggcgaaaatgtttgccattcttttgaaagtctggcctgggtgtgggagttcggtcatcgaacacttactgagagccagatacctgccaggcactgccctgggctccagggacacatcagtcaacgaacggaagggccctgctctcaagcagtgcgaaaagcagattataaacaagtcaacaaacgggattatctaaggtggtagttctctactcacatcttttaatcttgaagactagaaaatataactggatctaccacttgtttggaaaatttctctaccaagcaataaattacccgctgtgcttttgttgtagtgtagaagtttttgagttctccaaatctaaacaagattttgtcccattttcccatgaagctacattgttgcttattcactttagtggcaagtattattgtgccagctgcttttgttttggaagatgtggacttcgaccaaatggtttcactggaagcaaatcgtagttcttacaatgcatcctttccctcaagctttgaactctcagcaagttcccactcggatgatgatgtcatcatagccaaagagggaactagcgtttcaattgagtgtcttctcacagccagtcactatgaagatgtccattggcacaattcaaaaggacagcaactggatggcagaagcagaggtggaaagtggttggtttctgataacttcctaaacatcaccaatgtagcttttgatgaccgtgggctctatacctgtttcgtcacctctccaattcgtgcctcctactctgtcaccctacgtgttatcttcacctcgggagacatgagtgtctattacatgattgtttgcctgattgcctttacaatcacactcatcttgaatgtcacacggctgtgcatgatgagcagccatcttcgcaagactgagaaggctatcaatgagttctttagaactgaaggggctgagaaacttcagaaggcctttgagattgcaaaacgtatccccatcattacctcagccaaaactctggagctcgccaaagtcacacaatttaagaccatggagtttgctcgttatattgaagaactggcaagaagtgtccctcttccacctcttattctaaactgtcgagcctttgttgaggagatgtttgaggctgtgcgagtggacgaccctgatgacctgggtgaaagaattaaagagagacctgccttgaatgctcaaggtggcatctatgtcattaacccagagatgggacggagtaattcaccaggaggagattcagatgatggctctctgaatgaacaaggccaggaaatagcagttcaggtttctgtccaccttcagtcagaaaccaaaagtattgatacagagtctcaaggcagcagtcatttcagtccacctgatgatataggatctgcagaatctaactgtaactacaaagatggggcatatgaaaactgtcagctgtaacctacaatgctgtaacccagtacctacaaaatcagctcgctctcagaaaaggaacctgtttcttagaagaagtaacatttttgccaaaagatgactggggttttccgtttgttaatattaagcacatcagaacgtgaattgccaaagtcttcattagaaggcagcatttttcctctctgatacttttcagtcattttccttagagctttattaaattatgcatgctaagatttaaaggagccccagataaacatgatggggaaaagcactgaactaagagtcccatggtttctcttctggtcacagttcttccattggttggatctgatacttatcttgggacttcagtttttccgtcaataagatgagggattaggtgagatctgaagttgtttctagctctatagcttcttaacccatcacctttaaattaccagaatcttcactcatctctaagtaaacctttcccgggacttttactcgcttcttttggaaaggattaagctgagatctaaatttccacaccaatgtcataatgcacagaggtttttgaaaaacatctgagtgtttttcagatgttttgccatgtggagcatataatgatatgtgcaagattgaatcttttcaatgtagcacatgtctgtagggttatacagatgtcagagagctaactgctctgtaaactactttccatgagtaaattggtccttggtgggggtgtatcatatttttaacttactgagatatcattttagttcattgaggttggcagggattgcctaactgatcttccaaagtgagcagtttatttctaaggtataacgtctttgatgcttttagaataagaacagtgtcaaatcatctgtcttctggaaaatcatggattttcatatttctgttaacagaatttctcaggctttccctttttaaaagtattggactctacaaataggttctatatttgggatctcatcctaggagaaaacccaaaactggattcctcttaagacctctgtcaaccctcctgccctttgtggtcttaggtatggtgctataggttgcatgcgtctttatcttgtttgtttggttaatattttgttgttgaggtttttatttttgtttacttcagatacataattctgagctatggctgcttttgtagcctttccaagaagcactaacctgaaataagattagataattgtgagggtgtgttactatattaaaatacacacacaactgatctagacatcaagaggaagaaaaatgatggatgatgccacctgcttcaactgtatataataaacacttatgatgaca

SEQ ID NO: 84080 - DNA, 5049 bp, Artificial Sequence
  derived and/or modified sequence
aaacttccgagttaagccgccgctgaggccggaaggagctagacggcggtcgggttctctactcacatcttttaatcttgaagactagaaaatataactggatctaccacttgtttggaaaatttctctaccaagcaataaattacccgctgtgcttttgttgtagtgtagaagtttttgagttctccaaatctaaacaagattttgtcccattttcccatgaagctacattgttgcttattcactttagtggcaagtattattgtgccagctgcttttgttttggaagatgtggacttcgaccaaatggtttcactggaagcaaatcgtagttcttacaatgcatcctttccctcaagctttgaactctcagcaagttcccactcggatgatgatgtcatcatagccaaagagggaactagcgtttcaattgagtgtcttctcacagccagtcactatgaagatgtccattggcacaattcaaaaggacagcaactggatggcagaagcagaggtggaaagtggttggtttctgataacttcctaaacatcaccaatgtagcttttgatgaccgtgggctctatacctgtttcgtcacctctccaattcgtgcctcctactctgtcaccctacgtgttatcttcacctcgggagacatgagtgtctattacatgattgtttgcctgattgcctttacaatcacactcatcttgaatgtcacacggctgtgcatgatgagcagccatcttcgcaagactgagaaggctatcaatgagttctttagaactgaaggggctgagaaacttcagaaggcctttgagattgcaaaacgtatccccatcattacctcagccaaaactctggagctcgccaaagtcacacaatttaagaccatggagtttgctcgttatattgaagaactggcaagaagtgtccctcttccacctcttattctaaactgtcgagcctttgttgaggagatgtttgaggctgtgcgagtggacgaccctgatgacctgggtgaaagaattaaagagagacctgccttgaatgctcaaggtggcatctatgtcattaacccagagatgggacggagtaattcaccaggaggagattcagatgatggctctctgaatgaacaaggccaggaaatagcagttcaggtttctgtccaccttcagtcagaaaccaaaagtattgatacagagtctcaaggcagcagtcatttcagtccacctgatgatataggatctgcagaatctaactgtaactacaaagatggggcatatgaaaactgtcagctgtaacctacaatgctgtaacccagtacctacaaaatcagctcgctctcagaaaaggaacctgtttcttagaagaagtaacatttttgccaaaagatgactggggttttccgtttgttaatattaagcacatcagaacgtgaattgccaaagtcttcattagaaggcagcatttttcctctctgatacttttcagtcattttccttagagctttattaaattatgcatgctaagatttaaaggagccccagataaacatgatggggaaaagcactgaactaagagtcccatggtttctcttctggtcacagttcttccattggttggatctgatacttatcttgggacttcagtttttccgtcaataagatgagggattaggtgagatctgaagttgtttctagctctatagcttcttaacccatcacctttaaattaccagaatcttcactcatctctaagtaaacctttcccgggacttttactcgcttcttttggaaaggattaagctgagatctaaatttccacaccaatgtcataatgcacagaggtttttgaaaaacatctgagtgtttttcagatgttttgccatgtggagcatataatgatatgtgcaagattgaatcttttcaatgtagcacatgtctgtagggttatacagatgtcagagagctaactgctctgtaaactactttccatgagtaaattggtccttggtgggggtgtatcatatttttaacttactgagatatcattttagttcattgaggttggcagggattgcctaactgatcttccaaagtgagcagtttatttctaaggtataacgtctttgatgcttttagaataagaacagtgtcaaatcatctgtcttctggaaaatcatggattttcatatttctgttaacagaatttctcaggctttccctttttaaaagtattggactctacaaataggttctatatttgggatctcatcctaggagaaaacccaaaactggattcctcttaagacctctgtcaaccctcctgccctttgtggtcttaggtatggtgctataggttgcatgcgtctttatcttgtttgtttggttaatattttgttgttgaggtttttatttttgtttacttcagatacataattctgagctatggctgcttttgtagcctttccaagaagcactaacctgaaataagattagataattgtgagggtgtgttactatattaaaatacacacacaactgatctagacatcaagaggaagaaaaatgatggatgatgccacctgcttcaactgtatataataaacacttatgatgacatttcttgcctggctgagatctgatataatggaattgtaaatactcttcagaacaatttcttcagctacaggaagcgtggtgccatataattttaagaacttggcagtggagctccatttggggcttcacgtttcttcatatgacttctgattattgaagcattacttcagctagaggctcctgagggaaatgttcagaggaggttttatcaggattttaatttaaggtttcaaacaggggaagacaggaaattcaaagcgtgacgggataaaactcatgcctccctttgtccaggcttatcagaagtaatacatctgctctgaatagcatgaatgaatcaatgtgcagttttatcagatggcatcatggataaagatgataatgctgccttttctgtctctcaggctgtttccatggaaacctctagagccaaataaaagctaaccaatcatttagccaaagcttgccttggctcatagactggtatttctttaaggaaaattgtttttatatatttgactataagagcaaaggctcttgaacatatcctagattatggaacactttttcccttcccttttctctggaaaaattaaattttttttctgtccactgagactggagtgcagtggcaagatcatagctcactgcagcctccaactcctggggtcaagcgatcgtcctgcttcagcctcccaagcagctaggactacaggtgtgcaccacctttcctggctaatttttttttattttttgtagagatgggggtctcactttgttgcccaggctgaccttgtacttgtggcttcaaatgatcctcctgccttacctcccaaagtgttgagattacaggcatgagccactgtgcctggccaaaaaacattttaaatcccttgtctgggggtcagtcctctaaacatccctcagatttcagatagtactttcaaccctgtcctaacatagcaggtttgcagtaatcttttagaatatagcttgtcaaattagagaatggttttaccccacatgttctcataggagacattattatttagaaccctaaggtagacatgtttaaaatcaaagtcctaagaaacagaactttggaaaaatggaggaaatgtttttaaagtctgtaagtttgcacgatactgtatagtaactaaatgcatgctactccgttgtatcctagttattttagaaacagaggtggcctaatttggtggccaaagtaactggtttactttgagtgtaccagcttatggtgccattgatgaggaattaaagtaggtcaaaatttaattggagttggtattacttcgtaaagctagttttcaagaggaagaaaaccacacttactaatgttttctgtatctaatcaaatactcttcatatataattaagcctcatgttatcttttttttaaatcaaccttttgaacttcaactacagtctaaaagtcttgatggtaactatagtgtaattatctttttgtctcactggattttatagttagtggaaaatgcctttacaaaatgtatttaaaatagctgtcatctcatttgtaaattttgtcgtgtattgtgatatagtgaaccttattgtccttatgaaatggtagctttgtgaaatacattcaccaaaaatcaaaatttgaacatctttatgattccttaccagctgaagccagatagacaggtattaattgagctgatgccccacttgagtttatagactgtttgataactgcctgtcctccaaattgtgtatgtatatgttacgatggtttaattcttgagtcagggccagcacgcatttatattttctaccaattaccttgatagaaatatcttagaaattgctgacctggaacggttgtgagaagactcctggcttctttcttgcctcacttaacaaatattttaaggtcaaagcaatatctgtgcacggctttccttttgctcctccagacaagtgaggctgttggtatagtcctcttcaccctctgcatgtagcttcaccctagatcagacttttgtctcttgggtcccagatggcacaggagcactgcatgcttgttttctagagcccagccagtcatgggtgctagcctagtctccacacaccagcaagtagaacccaagtgtattgtataaatatttcctgagtaccagtaagagaatgcattcttttctcatctaggccaggaatgttgaaaatgctcagccttacatagaaactcctagattttcactaacgcatttcacaaaagtaaataagtatttcatataattcagaggatgtttaaattgtcagcattttaataaatacttgcattataattttgtctcttttttaaagaaagtcatacttgaatataatttattaaacgttcaatggagtatatagtctatttgaaatttt

SEQ ID NO: 84081 - DNA, 1186 bp, Artificial Sequence
  derived and/or modified sequence
aaacttccgagttaagccgccgctgaggccggaaggagctagacggcggtcgggtggaaagtggttggtttctgataacttcctaaacatcaccaatgtagcttttgatgaccgtgggctctatacctgtttcgtcacctctccaattcgtgcctcctactctgtcaccctacgtgttatcttcacctcgggagacatgagtgtctattacatgattgtttgcctgattgcctttacaatcacactcatcttgaatgtcacacggctgtgcatgatgagcagccatcttcgcaagactgagaaggctatcaatgagttctttagaactgaaggggctgagaaacttcagaaggcctttgagattgcaaaacgtatccccatcattacctcagccaaaactctggagctcgccaaagtcacacaatttaagaccatggagtttgctcgttatattgaagaactggcaagaagtgtccctcttccacctcttattctaaactgtcgagcctttgttgaggagatgtttgaggctgtgcgagtggacgaccctgatgacctgggtgaaagaattaaagagagacctgccttgaatgctcaaggtggcatctatgtcattaacccagagatgggacggagtaattcaccaggaggagattcagatgatggctctctgaatgaacaaggccaggaaatagcagttcaggtttctgtccaccttcagtcagaaaccaaaagtattgatacagagtctcaaggcagcagtcatttcagtccacctgatgatataggatctgcagaatctaactgtaactacaaagatggggcatatgaaaactgtcagctgtaacctacaatgctgtaacccagtacctacaaaatcagctcgctctcagaaaaggaacctgtttcttagaagaagtaacatttttgccaaaagatgactggggttttccgtttgttaatattaagcacatcagaacgtgaattgccaaagtcttcattagaaggcagcatttttcctctctgatacttttcagtcattttccttagagctttattaaattatgcatgctaagatttaaaggagccccagataaacatgatggggaaaagcactgaactaagagtcccatggtttctcttctggtcacagttcttccattggttggatctgatacttatcttg

SEQ ID NO: 84082 - DNA, 520 bp, Artificial Sequence
  derived and/or modified sequence
agacggcggtcgggtaggtgacggcttggttggggtcgctgcgaggggactactaggagcgccgaggcgtgagtcgtagcctgtggcttggggtcgggagtgcaggaggcgaaaatgtttgccattcttttgaaagtctggcctgggtgtgggagttcggtcatcgaacacttactgagagccagatacctgccaggcactgccctgggctccagggacacatcagtcaacgaacggaagggccctgctctcaagcagtgcgaaaagcagattataaacaagtcaacaaacgggattatctaaggttctctactcacatcttttaatcttgaagactagaaaatataactggatctaccacttgtttggaaaatttctctaccaagcaataaattacccgctgtgcttttgttgtagtgtagaagtttttgagttctccaaatctaaacaagattttgtcccattttcccatgaagctacattgttgcttattcactttagtggcaagtattattgtgcc

SEQ ID NO: 84083 - DNA, 567 bp, Artificial Sequence
  derived and/or modified sequence
gagctagacggcggtcgggtaggtgacggcttggttggggtcgctgcgaggggactactaggagcgccgaggcgttctctactcacatcttttaatcttgaagactagaaaatataactggatctaccacttgtttggaaaatttctctaccaagcaataaattacccgctgtgcttttgttgtagtgtagaagtttttgagttctccaaatctaaacaagattttgtcccattttcccatgaagctacattgttgcttattcactttagtggcaagtattattgtgccagctgcttttgttttggaagatgtggacttcgaccaaatggtttcactggaagcaaatcgtagttcttacaatgcatcctttccctcaagctttgaactctcagcaagttcccactcggatgatgatgtcatcatagccaaagagggaactagcgtttcaattgagtgtcttctcacagccagtcactatgaagatgtccattggcacaattcaaaaggacagcaactggatggcagaagcagaggtggaaagtggttggtttctgataacttcctaa

SEQ ID NO: 84084 - DNA, 643 bp, Artificial Sequence
  derived and/or modified sequence
ctactgccccggaagtgctccttcagcgcagaggcgtgccggtgtgtccgagaaaacttccgagttaagccgccgctgaggccggaaggagctagacggcggtcgggttctctactcacatcttttaatcttgaagactagaaaatataactggatctaccacttgtttggaaaatttctctaccaagcaataaattacccgctgtgcttttgttgtagtgtagaagtttttgagttctccaaatctaaacaagattttgtcccattttcccatgaagctacattgttgcttattcactttagtggcaagtattattgtgccagctgcttttgttttggaagatgtggacttcgaccaaatggtttcactggaagcaaatcgtagttcttacaatgcatcctttccctcaagctttgaactctcagcaagttcccactcggatgatgatgtcatcatagccaaagagggaactagcgtttcaattgagtgtcttctcacagccagtcactatgaagatgtccattggcacaattcaaaaggacagcaactggatggcagaagcagaggtggaaagtggttggtttctgataacttcctaaacatcaccaatgtagcttttgatgaccgtgggctctatacctg

SEQ ID NO: 84085 - DNA, 1089 bp, Artificial Sequence
  derived and/or modified sequence
atgaagctgcactgctgcctgttcaccctggtggccagcatcatcgtgcccgcggctttcgtgctggaggatgtggattttgaccagatggtgtctctcgaagctaaccgcagttcctataacgcctcttttccttccagcttcgaactctccgcgtcatcacattcagatgacgatgtcattattgccaaggagggaactagtgtgagcatcgagtgcttgctaaccgcctcccactacgaggacgtacactggcataacagtaaaggtcaacagctcgatggccgctctcggggaggaaagtggctggtttctgataactttcttaatatcacaaacgtggcctttgacgatcggggcctttatacttgcttcgtgaccagcccaatcagagcttcttactccgtgacactgcgcgttatatttacatccggcgacatgagcgtgtactatatgatcgtctgtctgattgcctttacaattactttgattctgaacgttactcgtctgtgcatgatgtctagccatctgagaaaaacagagaaggctatcaatgaattctttcggacggaaggtgccgaaaaactgcagaaggcatttgagatagccaagaggatccccatcataacatcagcgaagactcttgaactggctaaggtcacacagtttaaaaccatggaatttgcccgttacatagaggagctggctcgttccgttcctctgccgccactcatcttgaactgtcgtgctttcgttgaagaaatgtttgaggcggtaagagttgatgaccctgacgacttaggagaacggattaaggagaggccagcccttaatgctcaaggcgggatttacgtgataaatcctgagatgggaagatccaattctcccggtggtgatagcgatgatggctccttgaatgagcaaggacaggaaatcgcagtccaggtctcagtccacctccagtctgagaccaagagcatcgacacagagtcccagggttcatctcatttttcccctcccgatgatattggcagcgcagagtctaactgtaactacaaagacggggcatacgagaattgccagttatag

SEQ ID NO: 84086 - DNA, 1089 bp, Artificial Sequence
  derived and/or modified sequence
atgaagctgcactgctgcctgttcaccctggtggccagcatcatcgttcccgcagctttcgttcttgaggacgttgatttcgaccagatggtctccttagaagcaaaccgaagctcttacaatgcatctttccccagtagttttgagctcagcgcatcctcgcactccgatgacgatgttatcatcgcaaaagagggtacttccgttagtattgaatgtcttttaacagccagccattatgaggatgtgcattggcacaacagcaaaggacagcaactggatggcaggtctagaggtggcaagtggctggtgagcgataactttctgaatatcactaatgtcgcttttgacgataggggattgtatacatgcttcgttacatccccaattcgcgccagctacagcgtcacattacgcgtcatttttaccagcggagacatgtcggtctattacatgatcgtctgtctgatcgccttcacaattacgctgattttaaacgtgaccaggctctgcatgatgagcagtcatctcaggaaaactgagaaggcgataaacgaatttttccgtacagagggggcagagaagctccagaaggcctttgaaatcgccaagcgcattcctataatcacctctgctaaaacgctcgagcttgctaaggtgactcaattcaaaacaatggagtttgcgagatacatcgaggagctggcacgttcagtgcctctcccccccctgatactgaattgtcgggctttcgtagaagagatgtttgaagctgtgcgggtggacgatcctgatgacctcggggagcggatcaaggaacggcccgccctcaatgcacagggaggcatatatgtgattaatccagaaatgggccgatccaactcccccggaggcgattccgacgatggtagcttgaatgaacaagggcaggaaattgcagtgcaagtctctgtacatttgcaatctgagacaaagagtatcgataccgaaagccagggctcttcacacttctcccctcctgatgatattgggagtgccgagtcaaactgcaactataaagacggagcctacgaaaactgccagctctag

SEQ ID NO: 84087 - DNA, 54 bp, Artificial Sequence
  derived and/or modified sequence
atgaagctgcactgctgcctgttcaccctggtggccagcatcatcgtcccctag

SEQ ID NO: 84088 - DNA, 330 bp, Artificial Sequence
  derived and/or modified sequence
atgaagctgcactgctgcctgttcaccctggtggccagcatcatcgtgccagcagctttcgttcttgaggacgtcgactttgaccaaatggtaagcttggaggccaatagatcatcctataacgcgtcctttcccagcagttttgagctctcagcttcatctcactcagacgacgatgttattatagctaaggagggaaccagtgtaagcatcgaatgtctgctcacagcctctcactacgaggatgtgcattggcataacagcaagggccagcagctggatggcaggagccgtggaggaaaatggcttgtatcggacaattttctctag

SEQ ID NO: 84089 - DNA, 372 bp, Artificial Sequence
  derived and/or modified sequence
atgaagctgcactgctgcctgttcaccctggtggccagcatcatcgtcccagccgccttcgtgctggaggacgtggacttcgatcagatggtgtctttagaagccaacagatcgtcatacaatgcctcttttccgagctctttcgaactctccgcctctagccatagcgacgacgatgtgataatcgccaaagaaggtacatctgtgtctattgagtgcctcctgactgctagccactacgaagacgtacattggcataattccaaaggccaacagctggatgggaggtctcgcggcggcaaatggctggtgtctgataacttcctcaatataactaacgtggcatttgatgaccggggtctctacacttag

SEQ ID NO: 84090 - DNA, 1089 bp, Artificial Sequence
  derived and/or modified sequence
atgaaactgcactgctgcctgtttacattagtggcctcaatcattgttcctgcagccttcgtgctggaggacgtggattttgaccagatggtttcactggaagcgaaccgctccagttataatgcaagcttcccatcatcatttgagctgtccgcttctagtcactccgacgatgacgtgataattgccaaggagggcacgagcgtgagtatcgaatgcctgctgacggcctcacactacgaagacgtacactggcataactctaaaggtcagcagctggacggccgatctcgtggtggaaagtggctggttagcgataactttctcaacattactaacgtggcattcgatgatagaggcctgtatacttgctttgtgacttctcctattcgtgccagctactcagtgaccttaagagtgattttcacctcaggtgatatgtccgtttattacatgatagtctgcctgattgcctttacaattaccttgatcctcaatgttacccgattgtgtatgatgtcctctcacctcagaaaaacagagaaggcgattaatgagttttttaggaccgagggcgcagaaaaacttcagaaagcgtttgaaatcgcaaaacgaatccccataattaccagcgcgaagaccctcgaattagccaaggtcacccagtttaaaacaatggaattcgcgaggtatatcgaggagttagctaggagcgtgccattgcccccactgatcctgaactgtcgtgcatttgtcgaggaaatgtttgaagcggtgagggtggatgaccccgatgacttaggagaacgcatcaaggagagaccggcacttaatgcccaaggaggcatttacgtaattaatcccgaaatgggcagaagcaattcacccggaggcgattccgacgatggtagtctgaatgaacagggccaggaaatcgctgttcaagtgtcggtccatctgcagtctgaaactaaatccatagatactgagagccaggggagttcacatttttctcccccagatgatataggaagtgccgagagcaactgtaactacaaggatggcgcttacgagaactgtcagctgtag

SEQ ID NO: 84091 - DNA, 1089 bp, Artificial Sequence
  derived and/or modified sequence
atgaagctccactgttgtctttttactctcgtggccagtatcatcgtgcccgctgcttttgtactggaagatgtagattttgatcagatggtttccctggaggccaatcgcagcagctacaatgcttcatttccttcctccttcgaactgagtgctagctcccacagcgatgatgatgttatcatcgccaaggagggcacctccgtgtcaatagagtgccttttgacagcatctcactacgaagacgtgcattggcataattccaagggccagcagctcgacggccgatctagagggggaaagtggcttgtgagtgacaactttttgaatattactaatgttgcatttgatgaccggggattgtacacatgctttgtgacaagtcccattagggctagttattctgttactctccgagtgattttcacaagtggggatatgtcagtctactacatgatagtctgtttaatagcgttcactattacactgatcctcaatgttacgaggctctgtatgatgagtagccacctgcgcaagactgagaaagcaattaatgaattctttaggacggagggtgccgagaaattgcagaaggccttcgagatagctaaacggattcccattatcacttctgctaagactctggagctggctaaggtcacgcagttcaagaccatggaatttgcgaggtatattgaagaactcgcccgtagcgttcccctgccgccactgattttgaactgtcgcgcattcgtggaagaaatgttcgaggcggttagagtggacgatcctgacgacttgggggagaggataaaggaacgaccagccctgaacgcacagggcggaatctacgtgattaacccggaaatgggacgctcgaattcacccggaggagacagcgatgatggatcactgaatgagcagggacaggaaattgcggttcaggtgtccgtccacttgcagtcggagacaaagagcatcgatacggagtcacagggaagctcccatttctcacccccagacgatattggaagcgctgaatccaattgcaattataaggacggggcatatgaaaactgccagctgtag

SEQ ID NO: 84092 - DNA, 54 bp, Artificial Sequence
  derived and/or modified sequence
atgaagttacattgctgcctcttcacccttgtggcatctatcatcgtgccatag

SEQ ID NO: 84093 - DNA, 330 bp, Artificial Sequence
  derived and/or modified sequence
atgaagttacactgctgtctgttcaccctggtcgcctccatcattgtgccggcagctttcgtactggaagacgtcgactttgaccagatggttagcctcgaagcaaaccgtagttcctacaacgcctccttcccgtcctcatttgagctgtctgcctcctcccactccgacgatgacgtgattatcgctaaggaggggacaagcgtgagcatcgaatgcctcctaacagccagccattacgaagatgtgcactggcacaacagtaagggccagcagctcgatggcaggagtcgcggtggtaaatggctcgtctccgataatttcctctag

SEQ ID NO: 84094 - DNA, 372 bp, Artificial Sequence
  derived and/or modified sequence
atgaagctccactgctgtctctttacacttgtggctagcattattgtgcctgcggcatttgtgctcgaggacgtggacttcgatcagatggttagtctagaggccaatcgtagctcgtacaatgcaagcttcccaagcagctttgagctttctgccagcagtcactcagacgacgacgttatcatcgctaaggagggaactagcgtcagtatcgagtgtctactcaccgcctcacattatgaggatgtgcattggcacaacagtaagggacagcaactggacgggagatcaagagggggtaagtggctcgtatccgataactttctcaacattactaatgtggctttcgatgaccgtgggctctacacctag

SEQ ID NO: 84095 - DNA, 1089 bp, Artificial Sequence
  derived and/or modified sequence
atgaagctgcactgctgcctgttcaccctggtggccagcatcatcgtgcccgccgccttcgtgctggaggacgtggacttcgaccagatggtgagcctggaggccaacagaagcagctacaacgccagcttccccagcagcttcgagctgagcgccagcagccacagcgacgacgacgtgatcatcgccaaggagggcaccagcgtgagcatcgagtgcctgctgaccgccagccactacgaggacgtgcactggcacaacagcaagggccagcagctggacggcagaagcagaggcggcaagtggctggtgagcgacaacttcctgaacatcaccaacgtggccttcgacgacagaggcctgtacacctgcttcgtgaccagccccatcagagccagctacagcgtgaccctgagagtgatcttcaccagcggcgacatgagcgtgtactacatgatcgtgtgcctgatcgccttcaccatcaccctgatcctgaacgtgaccagactgtgcatgatgagcagccacctgagaaagaccgagaaggccatcaacgagttcttcagaaccgagggcgccgagaagctgcagaaggccttcgagatcgccaagagaatccccatcatcaccagcgccaagaccctggagctggccaaggtgacccagttcaagaccatggagttcgccagatacatcgaggagctggccagaagcgtgcccctgccccccctgatcctgaactgcagagccttcgtggaggagatgttcgaggccgtgagagtggacgaccccgacgacctgggcgagagaatcaaggagagacccgccctgaacgcccagggcggcatctacgtgatcaaccccgagatgggcagaagcaacagccccggcggcgacagcgacgacggcagcctgaacgagcagggccaggagatcgccgtgcaggtgagcgtgcacctgcagagcgagaccaagagcatcgacaccgagagccagggcagcagccacttcagcccccccgacgacatcggcagcgccgagagcaactgcaactacaaggacggcgcctacgagaactgccagctgtag

SEQ ID NO: 84096 - DNA, 54 bp, Artificial Sequence
  derived and/or modified sequence
atgaagctgcactgctgcctgttcaccctggtggccagcatcatcgtgccctag

SEQ ID NO: 84097 - DNA, 330 bp, Artificial Sequence
  derived and/or modified sequence
atgaagctgcactgctgcctgttcaccctggtggccagcatcatcgtgcccgccgccttcgtgctggaggacgtggacttcgaccagatggtgagcctggaggccaacagaagcagctacaacgccagcttccccagcagcttcgagctgagcgccagcagccacagcgacgacgacgtgatcatcgccaaggagggcaccagcgtgagcatcgagtgcctgctgaccgccagccactacgaggacgtgcactggcacaacagcaagggccagcagctggacggcagaagcagaggcggcaagtggctggtgagcgacaacttcctgtag

SEQ ID NO: 84098 - DNA, 372 bp, Artificial Sequence
  derived and/or modified sequence
atgaagctgcactgctgcctgttcaccctggtggccagcatcatcgtgcccgccgccttcgtgctggaggacgtggacttcgaccagatggtgagcctggaggccaacagaagcagctacaacgccagcttccccagcagcttcgagctgagcgccagcagccacagcgacgacgacgtgatcatcgccaaggagggcaccagcgtgagcatcgagtgcctgctgaccgccagccactacgaggacgtgcactggcacaacagcaagggccagcagctggacggcagaagcagaggcggcaagtggctggtgagcgacaacttcctgaacatcaccaacgtggccttcgacgacagaggcctgtacacctag

SEQ ID NO: 84099 - protein, 776 aa, Artificial Sequence
  derived and/or modified sequence
MCGYERCRPCRGAHGYLRGGQGVLHLRGLPGHGGRRLKHRRGRLGECLQHPASGAVRGDWREKPGCWSHRFPCPGRHALVGGTIIGSARCQAFRTREGRLKAACNLLQRGITNLCVIGGDGSLTGANLFRKEWSGLLEELARNGQIDKEAVQKYAYLNVVGMVGSIDNDFCGTDMTIGTDSALHRIIEVVDAIMTTAQSHQRTFVLEVMGRHCGYLALVSALACGADWVFLPESPPEEGWEEQMCVKLSENRARKKRLNIIIVAEGAIDTQNKPITSEKIKELVVTQLGYDTRVTILGHVQRGGTPSAFDRILASRMGVEAVIALLEATPDTPACVVSLNGNHAVRLPLMECVQMTQDVQKAMDERRFQDAVRLRGRSFAGNLNTYKRLAIKLPDDQIPKTNCNVAVINVGAPAAGMNAAVRSAVRVGIADGHRMLAIYDGFDGFAKGQIKEIGWTDVGGWTGQGGSILGTKRVLPGKYLEEIATQMRTHSINALLIIGGFEAYLGLLELSAAREKHEEFCVPMVMVPATVSNNVPGSDFSIGADTALNTITDTCDRIKQSASGTKRRVFIIETMGGYCGYLANMGGLAAGADAAYIFEEPFDIRDLQSNVEHLTEKMKTTIQRGLVLRNESCSENYTTDFIYQLYSEEGKGVFDCRKNVLGHMQQGGAPSPFDRNFGTKISARAMEWITAKLKEARGRGKKFTTDDSICVLGISKRNVIFQPVAELKKQTDFEHRIPKEQWWLKLRPLMKILAKYKASYDVSDSGQLEHVQPWSV

SEQ ID NO: 84100 - protein, 773 aa, Artificial Sequence
  derived and/or modified sequence
YERCRPCRGAHGYLRGGQGVLHLRGLPGHGGRRLKHRRGRLGECLQHPASGAVRGDWREKPGCWSHRFPCPGRHALVGGTIIGSARCQAFRTREGRLKAACNLLQRGITNLCVIGGDGSLTGANLFRKEWSGLLEELARNGQIDKEAVQKYAYLNVVGMVGSIDNDFCGTDMTIGTDSALHRIIEVVDAIMTTAQSHQRTFVLEVMGRHCGYLALVSALACGADWVFLPESPPEEGWEEQMCVKLSENRARKKRLNIIIVAEGAIDTQNKPITSEKIKELVVTQLGYDTRVTILGHVQRGGTPSAFDRILASRMGVEAVIALLEATPDTPACVVSLNGNHAVRLPLMECVQMTQDVQKAMDERRFQDAVRLRGRSFAGNLNTYKRLAIKLPDDQIPKTNCNVAVINVGAPAAGMNAAVRSAVRVGIADGHRMLAIYDGFDGFAKGQIKEIGWTDVGGWTGQGGSILGTKRVLPGKYLEEIATQMRTHSINALLIIGGFEAYLGLLELSAAREKHEEFCVPMVMVPATVSNNVPGSDFSIGADTALNTITDTCDRIKQSASGTKRRVFIIETMGGYCGYLANMGGLAAGADAAYIFEEPFDIRDLQSNVEHLTEKMKTTIQRGLVLRNESCSENYTTDFIYQLYSEEGKGVFDCRKNVLGHMQQGGAPSPFDRNFGTKISARAMEWITAKLKEARGRGKKFTTDDSICVLGISKRNVIFQPVAELKKQTDFEHRIPKEQWWLKLRPLMKILAKYKASYDVSDSGQLEHVQPWSV

SEQ ID NO: 84101 - DNA, 2331 bp, Artificial Sequence
  derived and/or modified sequence
atgtgtggctatgaaagatgcaggccgtgtcggggcgctcacggctatctccggggagggcaaggggtgttacacctccgcggactgccaggccacggtgggaggagactcaaacatcggagaggtcggttgggagagtgtctgcagcaccctgcttccggcgcagtcagaggggactggcgtgagaagcccggatgttggtcacaccgattcccatgccccggcagacatgctctggtgggaggcacaattatcggtagcgcacgctgccaggctttcagaaccagggagggcagattgaaggctgcgtgcaatctgcttcagcggggcatcacgaatctctgcgtgatcggtggtgacggatccctgactggcgcaaacttgtttcgcaaagaatggagcgggctgctcgaagaattggcacgcaacggccaaattgacaaggaggctgttcaaaaatacgcatacctgaacgtggtggggatggtcggttccattgacaacgacttctgcgggaccgacatgaccatcggtacagacagtgctctgcatagaattattgaagtcgtcgatgccatcatgaccaccgcacagagccatcaacgcacttttgtcctggaggtaatggggaggcattgtggttacctcgccctggtatccgccctcgcctgcggagctgactgggtgtttcttccagagagtcccccggaagagggatgggaggagcagatgtgcgtgaaactgagcgagaaccgcgctcggaagaaacgattgaatattatcatcgttgcagaaggagctatcgacactcagaacaaacccataacatccgaaaagatcaaagagctggtcgtcactcaactcgggtatgatacacgcgtcacaatcctgggacatgttcaaagaggcggtaccccgagcgcctttgataggattctcgcctctaggatgggagttgaagccgtgattgccctcctggaggccactcctgatacccccgcgtgtgtggttagtctgaacggaaaccacgctgtcagattaccactcatggagtgtgtacagatgacccaggacgtgcagaaagcgatggatgagaggaggttccaggatgccgtccgccttcgtgggcgttctttcgcgggaaacctcaacacttataaaagactcgctataaagctgccagacgaccagattcctaagaccaactgtaacgtggccgtcatcaatgttggagctcctgccgccgggatgaatgccgcggtgcgatccgccgttcgggtaggtattgctgatggccaccggatgctcgcaatatacgacggcttcgatgggtttgccaaagggcagataaaggagatcggatggacagacgtggggggctggacagggcagggaggctccattctggggactaaacgtgttctgcctggcaagtacctcgaggagatcgccacccagatgcgcacacattcaatcaatgcgttactgattataggcggcttcgaggcttatctgggcttgctagaactgagcgccgctcgcgagaagcacgaggaattttgtgttcctatggtcatggtccctgcaactgtgagcaacaacgttcctggctccgatttttcgatcggagcagacaccgctcttaatactatcacagatacatgtgaccgcatcaagcagtctgcttctggtaccaagcggcgggtctttattatcgagacaatgggcgggtattgtgggtacttggcaaacatgggaggcttggctgccggtgcagatgcggcttacatcttcgaagaaccatttgacatccgtgaccttcagtctaatgtggagcatctaacagagaaaatgaagacaaccatacaaaggggcctggtcttgcgaaacgagagttgcagcgaaaactacaccacagatttcatttatcagctctacagcgaggaaggaaaaggcgtctttgattgccggaaaaatgtgctggggcatatgcagcagggcggcgctccttcaccttttgaccgaaactttgggaccaagatcagcgcccgtgccatggagtggatcactgccaaacttaaagaagccaggggacggggtaaaaagttcaccacggatgattctatttgtgtgttaggtattagtaagcggaacgtgattttccagcccgtcgctgagctgaagaagcagacagacttcgagcaccgtatccctaaagagcagtggtggctgaaactccgccctctgatgaaaatcctggctaagtataaagcttcttatgatgtgtcggattccggacaacttgagcatgtgcagccttggagcgtttag

SEQ ID NO: 84102 - DNA, 2322 bp, Artificial Sequence
  derived and/or modified sequence
tacgaaaggtgccggccctgtaggggcgcacatggctatctccggggggggcagggggtgctccacctgcgaggtctgcccggccacggtggccgccgcttgaagcaccggcgcggccgcctgggagaatgccttcaacaccccgcctcaggagctgtgcgaggcgattggagagaaaaaccaggctgctggtcacatcgcttcccatgtccagggagacacgcactggtaggagggaccatcatcggctcagcccgctgtcaggctttcagaacccgcgaaggtcggctgaaagctgcatgcaacctgttgcagcgtgggattacaaatctgtgcgtgatcgggggagacgggtctctgaccggcgccaacctcttccgaaaggaatggagtggtctgctagaggaactggcgagaaacggacagatagataaggaggccgtccagaagtatgcatatctgaatgtggttgggatggtggggagtattgacaacgatttttgtggaaccgacatgaccattggaaccgattcagctttgcacaggatcattgaggttgttgatgcaatcatgacgaccgcccagtcccaccagaggacattcgttttggaggttatgggccggcactgtgggtatttagcgctggtttccgctctcgcttgtggagcggactgggtgttcctgccagagtctccaccggaagaaggctgggaagagcagatgtgtgtgaaactctctgagaacagggcccgaaaaaaacgtttgaacattataattgtcgccgagggagccatcgacactcaaaacaagcccataacttcagaaaagataaaagagctcgtggtgactcagctggggtacgatacccgggtgaccattctcggacacgtacagcgcggaggaacaccatctgcgttcgaccgaatcctcgcatcccggatgggggtggaggccgtcattgcacttctggaggccacacctgatactcccgcatgcgtcgtcagtctgaacggaaatcacgccgttcgcctcccactcatggagtgcgttcagatgacacaagacgtgcagaaggctatggatgagaggcgcttccaggatgcagttagactgaggggccgcagcttcgcaggcaatctgaacacttacaaacgacttgctattaaactgcctgatgaccaaatcccaaagaccaactgcaacgtagccgtaattaatgttggagcccccgctgcagggatgaatgcagcagttcggtctgccgtaagggttggcattgctgatggccatcgcatgcttgctatatacgatgggttcgatggcttcgccaaggggcagatcaaagaaatcggatggaccgatgtgggcggatggacgggccaaggtggaagcatcctgggaactaagcgagtgctgcctggaaagtacctcgaggaaattgcaactcagatgcggacgcacagcatcaacgcgctcctgatcatcggcgggtttgaagcgtatctagggctccttgaactctctgcagccagagaaaagcacgaggagttctgtgtccccatggtgatggtgcccgccaccgtcagcaacaatgtaccaggttctgattttagcattggagctgacacagccttgaacactatcacggacacatgcgacagaataaagcaatccgcctccggcactaagcggcgagtgtttattattgagacgatggggggttactgtggttacctcgcaaatatgggcgggcttgccgctggagccgatgccgcctacatttttgaagagcccttcgacatccgagatttacaatccaatgtcgagcatctgaccgaaaagatgaagacaaccatccagcggggcttagtcctgcgcaatgagagttgctcagagaattatacaaccgattttatctatcagctgtattctgaggagggcaagggcgtgttcgattgtagaaagaatgtcctgggacacatgcagcagggcggcgcacctagtccattcgaccggaatttcgggaccaagattagcgctagagccatggagtggattacagcaaagcttaaggaggccaggggtagaggcaagaagtttactaccgacgactcgatctgcgtattgggcatttctaagagaaatgtgatctttcagcccgtggccgagctgaagaagcaaacggattttgaacaccgtatccctaaggagcagtggtggctcaagttacgtcctcttatgaagatcctcgcgaaatacaaggcaagttacgacgtttcagacagcggtcagctggaacacgtacagccatggagcgtttag

SEQ ID NO: 84103 - DNA, 2331 bp, Artificial Sequence
  derived and/or modified sequence
atgtgtggctatgagcgctgccggccctgccgcggggcccacggctacctgcggggcggccagggcgtgctgcacctgcggggcctgcccggccacggcggccgccgcctgaagcaccggcggggccgcctgggggagtgcctgcagcacccagccagcggggctgtgcggggggactggagggagaagccaggctgctggagccaccgcttcccctgccccggcagacatgccctggtgggcggcaccatcatcggcagcgcccgctgccaggccttccgcacccgggagggccgcctgaaggccgcctgcaacctgctgcagaggggcatcaccaacctgtgtgtgattggaggagatggcagcctgaccggggccaacctcttcaggaaggagtggagcggcctgctggaggagctggccagaaatggccagattgacaaggaggccgtgcagaagtatgcctacctgaatgtggtgggcatggtgggcagcattgacaatgacttctgtggcacagacatgaccatcggcacagattctgccctgcaccgcatcatcgaggtggtggatgccatcatgaccacagcccagagccaccagaggacctttgtgctggaggtgatgggccgccactgcggctacctggccctggtgtctgccctggcctgtggggctgactgggtgttcctgcctgagagccccccagaggagggctgggaggagcagatgtgtgtgaagctgtctgagaacagagccaggaagaagaggctgaacatcatcatcgtggccgagggcgccatcgacacccagaacaagcccatcaccagcgagaagatcaaggagctggtggtgacccagctgggctatgacaccagggtgaccatcctgggccacgtgcagagaggaggcaccccatctgcctttgaccgcatcctggccagcaggatgggcgtggaggccgtgattgccctgctggaggccaccccagacaccccagcctgtgtggtgtccctgaatggaaatcatgctgtgcggctgcccctgatggagtgtgtgcagatgacccaggatgtgcagaaggccatggatgagcggcgcttccaggatgctgtgcggctgcggggccgcagctttgctggcaacctgaacacctacaagaggctggccatcaagctgcctgatgaccagatccccaagaccaactgcaatgtggccgtcatcaacgtgggcgccccagctgctggcatgaatgctgctgtgcgctctgctgtgcgggtgggcattgctgatggccacaggatgctggccatctatgatggctttgatggctttgccaagggccagatcaaggagatcggctggacagatgtgggcggctggacaggccagggcggcagcatcctgggcaccaagagggtgctgcccgggaagtacctggaggagatcgccacccagatgaggacccacagcatcaatgccctgctgatcatcggcggctttgaggcctacctgggcctgctggagctgtctgctgcccgggagaagcatgaggagttctgtgtgcccatggtgatggtgcctgccaccgtgagcaacaacgtgcccggcagtgacttcagcatcggggctgacacagccctgaacaccatcacagacacctgtgaccgcatcaagcagagcgccagcggcaccaagagaagagtcttcatcatcgagaccatgggcggctactgcggctacctggccaacatgggcggcctggccgccggggctgatgctgcctacatctttgaggagccctttgacatccgggacctgcagagcaatgtggagcacctgacagagaagatgaagaccaccatccagaggggcctggtgctgagaaatgaaagctgcagcgagaactacaccacagacttcatctaccagctgtacagcgaggagggcaaaggagtgtttgactgcaggaagaatgtgctgggccacatgcagcagggcggggcccccagcccctttgacaggaactttggcaccaagatcagcgcccgggccatggagtggatcacagccaagctgaaggaggcccggggccggggcaagaagttcaccacagatgacagcatctgtgtgctgggcatcagcaagagaaatgtcatcttccagcctgtggccgagctgaagaagcagacagactttgagcaccgcatccccaaggagcagtggtggctgaagctgcggcccctgatgaagatcctggccaagtacaaggccagctatgatgtgtctgattctggccagctggagcacgtgcagccctggagcgtgtag

SEQ ID NO: 84104 - DNA, 2322 bp, Artificial Sequence
  derived and/or modified sequence
tatgagcgctgccggccctgccgcggggcccacggctacctgcggggcggccagggcgtgctgcacctgcggggcctgcccggccatggaggccggcggctgaagcacagaagaggccgcctgggagaatgtctgcagcacccagccagcggggctgtgcggggggactggagggagaagccaggctgctggagccaccgcttcccctgccccggcagacatgccctggtgggcggcaccatcatcggcagcgcccgctgccaggccttccgcacccgggagggccgcctgaaggccgcctgcaacctgctgcagaggggcatcaccaacctgtgtgtgattggaggagatggcagcctgactggagccaacctcttcaggaaggagtggagcggcctgctggaggagctggccagaaatggccagattgacaaggaggccgtgcagaagtatgcctacctgaatgtggtgggcatggtgggcagcattgacaatgacttctgtggcacagacatgaccatcggcacagacagcgccctgcaccgcatcatcgaggtggtggatgccatcatgaccacagcccagagccaccagaggacctttgtgctggaggtgatgggccgccactgcggctacctggccctggtgtctgccctggcctgtggggctgactgggtgttcctgcctgagagccccccagaggagggctgggaggagcagatgtgtgtgaagctgtctgaaaatagagccaggaagaagaggctgaacatcatcatcgtggccgagggcgccatcgacacccagaacaagcccatcaccagcgagaagatcaaggagctggtggtgacccagctgggctatgacaccagggtgaccatcctgggccacgtgcagaggggcggcacccccagcgcctttgaccgcatcctggccagcaggatgggcgtggaggccgtcatcgccctgctggaggccaccccagacaccccagcctgtgtggtgtccctgaatggaaaccacgctgtgcggctgcccctgatggagtgtgtgcagatgacccaggatgtgcagaaggccatggatgaaagacgcttccaggatgctgtgcggctgcggggccgcagctttgctggcaacctgaacacctacaagaggctggccatcaagctgcctgatgaccagatccccaagaccaactgcaatgtggccgtcatcaacgtgggcgccccagctgctggcatgaatgctgctgtgcgctctgctgtgcgggtgggcattgctgatggccacaggatgctggccatctatgatggctttgatggctttgccaagggccagatcaaggagatcggctggacagatgtgggcggctggacaggccagggcggcagcatcctgggcaccaagagggtgctgcccgggaagtacctggaggagatcgccacccagatgaggacccacagcatcaatgccctgctgatcattggaggctttgaggcctacctgggcctgctggagctgtctgctgcccgggagaagcatgaggagttctgtgtgcccatggtgatggtgcctgccaccgtgagcaacaacgtgcccggcagtgacttcagcattggagctgacacagccctgaacaccatcacagacacctgtgaccgcatcaagcagagcgccagcggcaccaagagaagagtcttcatcatcgagaccatgggcggctactgcggctacctggccaacatgggcggcctggccgccggggctgatgctgcctacatctttgaggagccctttgacatccgggacctgcagagcaatgtggagcacctgacagagaagatgaagaccaccatccagaggggcctggtgctgagaaatgaaagctgcagcgagaactacaccacagacttcatctaccagctgtacagcgaggagggcaagggcgtgtttgactgcaggaagaatgtgctgggccacatgcagcagggcggggcccccagcccctttgacaggaactttggcaccaagatcagcgcccgggccatggagtggatcacagccaagctgaaggaggcccggggccggggcaagaagttcaccacagatgacagcatctgtgtgctgggcatcagcaagagaaatgtcatcttccagcctgtggccgagctgaagaagcagacagactttgagcaccgcatccccaaggagcagtggtggctgaagctgcggcccctgatgaagatcctggccaagtacaaggccagctatgatgtgtctgacagcggccagctggagcacgtgcagccctggagcgtgtag

SEQ ID NO: 84105 - DNA, 2331 bp, Artificial Sequence
  derived and/or modified sequence
atgtgcggctacgagcggtgccggccctgccggggcgcccacggctatcttcgaggaggccagggagtgctgcacctgcgtggtctccctgggcacgggggaagaagattgaaacaccgcaggggcagactgggggagtgcttgcagcacccagcttcgggcgcggtccggggcgattggagagagaagccaggctgttggtcccatcgctttccctgtccaggacgacacgctctcgtggggggcaccattatcgggtctgctaggtgtcaggcatttcggacccgggaaggccgtctgaaggctgcctgtaatctattacagcggggtatcacgaatttgtgtgtcataggcggcgacggctcactgacaggggccaacttgttccgtaaagagtggtctggtcttctggaagagcttgccaggaacggacagatagacaaagaggccgtacagaaatacgcatacttgaacgtagtaggcatggtggggtccatcgataatgatttctgtggcaccgatatgaccataggaactgacagcgcactacacaggatcattgaggtggtggatgcaatcatgacgacagcccagagccatcagcggacctttgtgctggaggtcatgggtcgccactgcggctatttagcattagtcagtgccctggcttgtggagctgattgggtgttccttccggaatcccctccagaggagggatgggaggagcagatgtgtgtcaagttgtctgaaaaccgagctcggaagaaaagactgaatatcattatcgtcgccgaaggggcaatcgacacccagaacaagcccattacctccgaaaagatcaaagaactcgtggtcacacagctgggctatgacactcgtgtcactattcttggacacgtccagcggggaggcactccttccgccttcgatagaatcctggcctctagaatgggagttgaagccgttatcgccctactagaggcgacacctgataccccagcttgcgtcgtgagtcttaacggcaaccatgccgtgagactaccactaatggagtgcgtgcagatgacccaggatgtccagaaggcaatggacgaacgaagatttcaggatgcggtgcgcctgcgaggtcgcagcttcgcaggaaatctgaatacctataaaagactcgcaatcaaacttcctgacgaccagatcccgaagacaaattgcaatgtagctgtcatcaatgtgggcgcccctgccgctggaatgaatgccgctgtccggtccgccgtgagggtagggattgcagatggccaccgcatgctggccatttacgatggatttgacggctttgcaaaaggtcagattaaagagattgggtggactgacgtcggaggatggaccggccagggcgggtccatcctcggcaccaagcgagttttaccaggaaaatatctggaggagatcgcgactcagatgcgcacccatagcattaatgccctgctaatcatcgggggcttcgaagcctatttgggactgttggagctctccgcagctagagagaagcacgaggagttttgtgtccccatggtaatggtgccggccaccgtatcaaataatgttccaggctcagacttttccattggcgctgataccgcccttaacactattacagacacttgtgaccgcattaaacagtcagcttctggtacaaagagaagggtgttcataatcgagactatgggcgggtactgcggctatcttgcaaatatgggcggcttagcagccggtgccgatgcagcttacatttttgaagaaccattcgacatccgcgatctccagagcaatgtagaacacctgaccgagaagatgaagaccacaattcagcggggactcgtacttcggaacgagtcatgcagtgaaaattacaccaccgactttatctatcagctctatagtgaggaaggcaaaggtgtatttgattgccgaaaaaatgtcctggggcacatgcaacagggtggagcgccatccccttttgatcggaactttggcaccaaaatttcagcgagagcaatggaatggattaccgctaagctaaaggaagcaaggggacgtggcaaaaaatttaccactgatgactctatttgcgtgctgggaatcagcaaacgaaatgtgatcttccagcccgtcgctgaactgaagaagcagacggacttcgaacatagaatcccaaaggagcagtggtggctcaagctgcgccctctcatgaaaatcctggcgaaatacaaagcatcctacgatgtatcagacagtggccagctggagcacgtgcagccatggtccgtgtag

SEQ ID NO: 84106 - DNA, 2322 bp, Artificial Sequence
  derived and/or modified sequence
tacgagcggtgccggccctgccggggcgcccacggctacctgcggggcggtcaaggtgtcttgcatctcagagggctgcccgggcacgggggacggcgcctgaaacaccgcaggggccgccttggtgaatgtcttcaacatccggccagcggggccgtgcgaggcgattggcgggagaaacccggatgctggtcacatagattcccctgtcctggacgccacgctctggtgggagggacaatcatcggctccgccaggtgtcaggcctttaggaccagagagggacggctgaaagctgcgtgcaatctcctacagaggggcatcacgaatttatgtgtgataggaggggatggttccttgaccggagctaatctatttcggaaggagtggtcaggccttctcgaggaactcgcgcggaacggacagattgataaagaggccgtgcaaaaatacgcctacctaaacgtggtgggaatggtgggcagtatcgataatgatttctgcggtactgatatgacaatagggaccgactccgcacttcacagaataattgaggtggtcgacgctatcatgaccaccgctcagagccatcagcgcacattcgtgctagaagtgatgggcaggcattgtggctacctcgcccttgtgtcagccttggcttgcggagcagactgggtcttcttacccgagagtccccctgaggaggggtgggaagagcagatgtgtgtcaagttatccgagaatcgggctcggaagaagaggctgaacataatcatcgtggcggagggggctatcgatacccagaataagccaatcacctcggaaaaaatcaaagagctggtcgtaacccaactcgggtacgacacacgcgtgaccatcctcgggcatgtgcagagggggggcactccttctgcctttgaccggattttggcctccaggatgggcgttgaggcagttatagccttgctggaggctaccccggacacaccggcctgtgtggtgtctcttaacggtaaccatgctgtgcgcctgcccctgatggagtgcgtccagatgactcaggatgtccaaaaggcgatggatgaaaggcggtttcaggatgctgtgcggctccggggtagatcatttgccggcaatctgaacacgtacaagagactcgcaattaagctgcctgacgaccagattcctaagaccaactgcaatgtggccgtgatcaacgtgggcgccccggccgctggaatgaacgccgcagtgaggagtgcagtcagggtgggcattgcggacggtcacaggatgttagccatctacgatgggttcgacgggttcgctaaaggtcagatcaaagagataggatggacggatgtggggggctggacaggccaagggggttccattttagggaccaagagagtgttaccggggaagtacttggaagaaattgccacccaaatgcgaacccattcaattaacgccttgttaatcataggggggttcgaagcatatctcggcttgctggaattgtcagcggcccgggagaagcatgaggaattctgcgttcccatggtgatggtgccagccactgtctctaacaacgtgcccgggtctgacttttccataggtgccgacacagcactcaatacaatcaccgacacatgcgaccggattaaacagagtgcgtccggtacgaagcgcagggtgttcatcattgagactatggggggctactgcgggtacctcgccaatatgggaggactcgcagcaggggctgacgccgcttatatatttgaggagcccttcgacatcagggatcttcagtccaatgtggagcacctcactgaaaaaatgaaaactactatacaacgagggctggttctaaggaatgagtcgtgttctgagaattacacaacagatttcatttaccaactgtactccgaagaagggaagggcgtcttcgactgcagaaaaaatgtgttgggccacatgcagcagggcggcgctccctccccctttgacagaaactttggaactaagatatctgcccgggctatggagtggatcaccgccaagcttaaagaggctagaggtagaggcaagaaatttactaccgatgattcaatctgcgtactggggatcagcaagcgcaacgttatatttcagcctgttgcagaacttaagaagcagaccgactttgagcaccgaattcccaaagagcagtggtggctcaagttgcggccacttatgaagatcctcgccaaatacaaagccagctatgatgtgtcggacagcgggcagttggaacacgtgcaaccctggtccgtgtag

SEQ ID NO: 84107 - DNA, 2769 bp, Artificial Sequence
  derived and/or modified sequence
atttaacattgaagagcggaaggtggcggagactcggcgcgccccaggccccgggtgcacgtgggggcgccggtgcccggatgatggagtgtcccgatccgtgcaatccctggcggggctgggttctcagagaaagaaaacgtgatgcagcagaggatgggattgaagaaacaggagagtgaagtggaaatagcctggcccgcgtgacttaaaccggcccggagatgtgcgggtatgaacgctgccgtccgtgccgtggtgcgcatgggtatctacgtgggggccaaggtgtacttcatctacgagggctaccagggcatggtggacggaggctcaaacatcgcagaggccgactgggagagtgtctccagcatcctgcaagtggtgctgtaaggggtgactggagggagaagcctggctgctggtcacaccgcttcccttgtcctggccggcatgctctggtgggcgggacgatcattggcagtgcgcggtgccaggccttccgcacgcgggaaggccgcctgaaggctgcttgcaacctgctgcagcgaggcatcaccaacctgtgtgtgatcggcggggacgggagcctcaccggggccaacctcttccggaaggagtggagtgggctgctggaggagctggccaggaacggccagatcgataaggaggccgtgcagaagtacgcctacctcaacgtggtgggcatggtgggctccatcgacaatgatttctgcggcaccgacatgaccatcggcacggactccgccctgcacaggatcatcgaggtcgtcgacgccatcatgaccacggcccagagccaccagaggaccttcgttctggaggtgatgggacgacactgtgggtacctggccctggtgagtgccttggcctgcggtgcggactgggtgttccttccagaatctccaccagaggaaggctgggaggagcagatgtgtgtcaaactctcggagaaccgtgcccggaaaaaaaggctgaatattattattgtggctgaaggagcaattgatacccaaaataaacccatcacctctgagaaaatcaaagagcttgtcgtcacgcagctgggctatgacacacgtgtgaccatcctcgggcacgtgcagagaggagggaccccttcggcattcgacaggatcttggccagccgcatgggagtggaggcagtcatcgccttgctagaggccaccccggacaccccagcttgcgtcgtgtcactgaacgggaaccacgccgtgcgcctgccgctgatggagtgcgtgcagatgactcaggatgtgcagaaggcgatggacgagaggagatttcaagatgcggttcgactccgagggaggagctttgcgggcaacctgaacacctacaagcgacttgccatcaagctgccggatgatcagatcccaaagaccaattgcaacgtagctgtcatcaacgtgggggcacccgcggctgggatgaacgcagccgtacgctcagctgtgcgcgtgggcattgccgacggccacaggatgctcgccatctatgatggctttgacggcttcgccaagggccagatcaaagaaatcggctggacagatgtcgggggctggaccggccaaggaggctccattcttgggacaaaacgcgttctcccggggaagtacttggaagagatcgccacacagatgcgcacgcacagcatcaacgcgctgctgatcatcggtggattcgaggcctacctgggactcctggagctgtcagccgcccgggagaagcacgaggagttctgtgtccccatggtcatggttcccgctactgtgtccaacaatgtgccgggttccgatttcagcatcggggcagacaccgccctgaacactatcaccgacacctgcgaccgcatcaagcagtccgccagcggaaccaagcggcgcgtgttcatcatcgagaccatgggcggctactgtggctacctggccaacatgggggggctcgcggccggagctgatgccgcatacattttcgaagagcccttcgacatcagggatctgcagtccaacgtggagcacctgacggagaaaatgaagaccaccatccagagaggccttgtgctcagaaatgagagctgcagtgaaaactacaccaccgacttcatttaccagctgtattcagaagagggcaaaggcgtgtttgactgcaggaagaacgtgctgggtcacatgcagcagggtggggcaccctctccatttgatagaaactttggaaccaaaatctctgccagagctatggagtggatcactgcaaaactcaaggaggcccggggcagaggaaaaaaatttaccaccgatgattccatttgtgtgctgggaataagcaaaagaaacgttatttttcaacctgtggcagagctgaagaagcaaacggattttgagcacaggattcccaaagaacagtggtggctcaagctacggcccctcatgaaaatcctggccaagtacaaggccagctatgacgtgtcggactcaggccagctggaacatgtgcagccctggagtgtctgacccagtcccgcctgcatgtgcctgcagccaccgtggactgtctgtttttgtaacacttaagttattttatcagcactttatgcacgtattattgacattaatacctaatcggcgagtgcccatctgccccacctgctccagtgcgtgctgtctgtggagtgtgtctcatgctttcagatgtgcatatgagcagaattaattaaacatttgccta

SEQ ID NO: 84108 - DNA, 2709 bp, Artificial Sequence
  derived and/or modified sequence
attgcctgctgcgcacccggacgtgcggctcccctcggcctcctcgccatggacgcggacgactcccgggcccccaagggctccttgcggaagttcctggagcacctctccggggccggcaaggccatcggcgtgctgaccagcggcggggatgctcaaggtatgaacgctgccgtccgtgccgtggtgcgcatgggtatctacgtgggggccaaggtgtacttcatctacgagggctaccagggcatggtggacggaggctcaaacatcgcagaggccgactgggagagtgtctccagcatcctgcaagtggtgctgtaaggggtgactggagggagaagcctggctgctggtcacaccgcttcccttgtcctggccggcatgctctggtgggcgggacgatcattggcagtgcgcggtgccaggccttccgcacgcgggaaggccgcctgaaggctgcttgcaacctgctgcagcgaggcatcaccaacctgtgtgtgatcggcggggacgggagcctcaccggggccaacctcttccggaaggagtggagtgggctgctggaggagctggccaggaacggccagatcgataaggaggccgtgcagaagtacgcctacctcaacgtggtgggcatggtgggctccatcgacaatgatttctgcggcaccgacatgaccatcggcacggactccgccctgcacaggatcatcgaggtcgtcgacgccatcatgaccacggcccagagccaccagaggaccttcgttctggaggtgatgggacgacactgtgggtacctggccctggtgagtgccttggcctgcggtgcggactgggtgttccttccagaatctccaccagaggaaggctgggaggagcagatgtgtgtcaaactctcggagaaccgtgcccggaaaaaaaggctgaatattattattgtggctgaaggagcaattgatacccaaaataaacccatcacctctgagaaaatcaaagagcttgtcgtcacgcagctgggctatgacacacgtgtgaccatcctcgggcacgtgcagagaggagggaccccttcggcattcgacaggatcttggccagccgcatgggagtggaggcagtcatcgccttgctagaggccaccccggacaccccagcttgcgtcgtgtcactgaacgggaaccacgccgtgcgcctgccgctgatggagtgcgtgcagatgactcaggatgtgcagaaggcgatggacgagaggagatttcaagatgcggttcgactccgagggaggagctttgcgggcaacctgaacacctacaagcgacttgccatcaagctgccggatgatcagatcccaaagaccaattgcaacgtagctgtcatcaacgtgggggcacccgcggctgggatgaacgcagccgtacgctcagctgtgcgcgtgggcattgccgacggccacaggatgctcgccatctatgatggctttgacggcttcgccaagggccagatcaaagaaatcggctggacagatgtcgggggctggaccggccaaggaggctccattcttgggacaaaacgcgttctcccggggaagtacttggaagagatcgccacacagatgcgcacgcacagcatcaacgcgctgctgatcatcggtggattcgaggcctacctgggactcctggagctgtcagccgcccgggagaagcacgaggagttctgtgtccccatggtcatggttcccgctactgtgtccaacaatgtgccgggttccgatttcagcatcggggcagacaccgccctgaacactatcaccgacacctgcgaccgcatcaagcagtccgccagcggaaccaagcggcgcgtgttcatcatcgagaccatgggcggctactgtggctacctggccaacatgggggggctcgcggccggagctgatgccgcatacattttcgaagagcccttcgacatcagggatctgcagtccaacgtggagcacctgacggagaaaatgaagaccaccatccagagaggccttgtgctcagaaatgagagctgcagtgaaaactacaccaccgacttcatttaccagctgtattcagaagagggcaaaggcgtgtttgactgcaggaagaacgtgctgggtcacatgcagcagggtggggcaccctctccatttgatagaaactttggaaccaaaatctctgccagagctatggagtggatcactgcaaaactcaaggaggcccggggcagaggaaaaaaatttaccaccgatgattccatttgtgtgctgggaataagcaaaagaaacgttatttttcaacctgtggcagagctgaagaagcaaacggattttgagcacaggattcccaaagaacagtggtggctcaagctacggcccctcatgaaaatcctggccaagtacaaggccagctatgacgtgtcggactcaggccagctggaacatgtgcagccctggagtgtctgacccagtcccgcctgcatgtgcctgcagccaccgtggactgtctgtttttgtaacacttaagttattttatcagcactttatgcacgtattattgacattaatacctaatcggcgagtgcccatctgccccacctgctccagtgcgtgctgtctgtggagtgtgtctcatgctttcagatgtgcatatgagcagaattaattaaacatttgcctatgactccaacag

SEQ ID NO: 84109 - DNA, 2331 bp, Artificial Sequence
  derived and/or modified sequence
atgtgcggatacgagcgatgcaggccatgtagaggagctcacggctacctgaggggaggtcaaggggtattgcaccttcgcggattgccaggtcacgggggacgaagactcaagcaccgcagaggcagacttggcgagtgtctgcagcatccagcgagtggcgcagtccgcggtgattggcgggaaaaaccagggtgctggagtcacagatttccctgccccggaaggcatgctttggtcgggggaaccattattgggtctgcaaggtgccaggctttcagaactagagagggccgtcttaaggcagcatgcaaccttctgcagcgtggcataacaaacttgtgtgtcattggtggagacggatctcttaccggggctaacctgtttaggaaagagtggagcggtctcctcgaagaactggctaggaacgggcagatagacaaagaggctgtgcaaaaatatgcgtacctaaacgtcgttgggatggtgggttccattgacaacgatttctgtggcactgatatgacaattggcaccgactccgcactgcacagaattatcgaggtggtcgacgccattatgactactgcccaaagtcatcagcgcacattcgttctggaagtcatggggagacattgcggctacttggctctggtgtcagcactggcctgtggcgctgattgggtttttctgcctgagtcccccccagaggaaggctgggaagaacagatgtgcgtcaaactctccgagaacagagctcgaaaaaagagactgaatattatcattgtcgccgagggggctatcgacacccagaataaacccatcacatctgagaaaatcaaggaactcgtcgtgacacagctgggttacgatacacgggtcactatcctgggccacgtgcagcgcggaggaactcctagtgcatttgatcgcatcctcgcttcaagaatgggcgtcgaagccgttattgctctgctcgaagctactccggatactccagcatgcgtggtgtcactgaatggtaatcatgccgtccggcttcccttgatggagtgcgtccaaatgacgcaagacgtgcagaaagctatggatgaacggcgattccaggatgcagtccggctgcgcggacgttctttcgctggcaacctcaacacatataaaaggctagcgataaagcttccagatgatcagatccctaaaactaattgtaatgtcgctgtgatcaatgttggtgcacctgcagccggtatgaacgctgctgttcggagtgcagtccgcgtaggaattgcggatggacaccggatgcttgcaatttatgacgggtttgacggattcgccaagggtcagatcaaagaaattggctggacggatgtggggggttggacaggacagggaggcagtatcttggggaccaaaagggtgctccctggtaaatatctggaggagatcgcaacgcaaatgagaacccactcaataaacgcattgctcatcataggcggatttgaggcatatctcggattactggagcttagcgcagccagagaaaagcatgaagagttttgcgtccctatggtaatggttccagctacggtgtccaacaacgtcccagggtcagatttttccatcggagccgacacagcactgaatacaatcaccgacacatgtgacaggattaaacagagcgcttctggcaccaaacggagagtgttcatcattgagactatgggcggatattgcgggtacctggctaatatggggggattggctgccggagcagacgctgcttacatcttcgaggagccattcgacatccgcgacctgcagtcaaatgtcgaacatttaacagagaagatgaagaccacaattcagagggggctcgtgctgcgcaacgagtcctgttctgagaactatacgaccgacttcatttatcagctctattccgaagaggggaaaggggtctttgattgccgcaaaaacgtcttaggccacatgcaacaaggaggagcaccttccccctttgaccgtaatttcggaactaaaatttcagccagagccatggaatggattacggctaaactgaaggaagccagagggaggggcaagaagttcacaaccgacgattctatttgtgttttgggcatctccaaacgcaatgtaatcttccagccagttgccgagctcaaaaaacaaactgactttgagcatcgaattcctaaagagcaatggtggctcaaactgaggcccttgatgaaaattctggcaaagtacaaggcctcttatgacgttagtgattccggacaactggaacacgtccaaccatggagcgtgtag

SEQ ID NO: 84110 - DNA, 2322 bp, Artificial Sequence
  derived and/or modified sequence
tacgagcgctgccggccatgcaggggagcccatggctatctgcgtggtggccagggtgttctacatttgcgtgggctgccgggacacgggggacgtaggctgaaacacaggcgcggaagactgggcgaatgcttgcagcatcccgcttccggtgcggtgcggggtgattggcgcgagaagcccggatgctggtcacacaggtttccctgccctggccgacacgcactggttgggggaaccattatcggctccgctagatgtcaagctttcaggacccgcgaggggagactgaaagctgcttgtaatctgctgcagcggggtattacaaatctgtgcgtaatcgggggagacgggtccctgaccggcgctaatttgttcaggaaagaatggtccgggctgcttgaagaactagcacggaatggccagatagacaaggaggctgtgcagaagtacgcatatcttaatgtagtgggaatggtcggcagcattgacaacgatttctgcggcacggatatgaccattggcacagactccgcgctccatagaatcatcgaggttgttgatgccattatgaccacggcccagtcacaccagaggacatttgtgttagaggtaatgggcaggcattgcggatatttggccctggtcagtgccctcgcctgtggtgctgactgggttttccttcccgaaagtccccctgaggaaggctgggaagagcaaatgtgcgttaaactgtccgagaatagagctcggaagaaacggctcaacattatcattgtagctgaaggggctattgacacacagaacaagcccatcacttctgaaaaaattaaagagctcgtggtcactcagctgggttatgacactagggttaccattctcgggcacgtgcagaggggagggacccctagcgccttcgaccgaattcttgcttcgcgcatgggcgttgaggccgtgatcgctcttctggaggcaacacctgatacaccggcatgtgtggttagcctgaacgggaatcacgcagtccggcttccattaatggagtgtgtccaaatgacccaagacgttcagaaggccatggatgagcgccgttttcaggacgccgtgcgcctgcgaggccgaagcttcgccggtaatctcaacacatataagcgccttgcgatcaaactacccgacgaccaaatacccaaaactaattgtaacgtggccgtcattaatgtgggtgccccagccgctgggatgaatgctgcggtgaggtccgctgttagagtgggtattgctgacggacacaggatgctggccatttacgacggttttgatggtttcgctaaaggacaaattaaggagatcggatggacagatgtcggtggctggacaggccagggaggcagcatactcggtacgaaaagggtgctgcctggaaagtacctcgaggaaatcgccacccagatgagaacccattctattaatgcccttcttataattgggggatttgaagcctatctggggctcctggagctgtccgcagcacgcgagaaacacgaggaattttgtgtaccaatggtgatggtccccgctacggtttccaacaatgttccagggtcagattttagtatcggcgctgatactgctctgaatactattacggacacctgtgataggattaagcagtctgcctcaggcaccaaaaggagggttttcattattgagactatgggcggatactgcggttacctcgctaatatggggggactggctgcgggtgcggacgctgcatacattttcgaggaacctttcgatattcgtgacttacagtcgaacgttgagcatctgaccgaaaagatgaaaaccacaatccagcggggactggtgctgagaaatgaaagctgtagtgagaattacacaacggacttcatctaccagctgtatagcgaggaaggaaagggcgttttcgactgccgcaagaacgttctaggccatatgcaacagggaggagccccatcgccgttcgacagaaactttggaaccaaaatctctgccagggccatggagtggattacagcgaaacttaaggaggccagagggcgaggcaagaaatttacaactgatgattctatttgtgtgctcgggatctctaaacgcaacgtcatcttccagcccgtcgccgagctcaagaagcagactgattttgagcacaggatccctaaagagcagtggtggcttaagctgcggcctctgatgaaaatcctggccaagtataaggccagttatgacgtgtccgactctggccagctggagcatgtgcagccgtggtccgtatag

SEQ ID NO: 84111 - DNA, 2331 bp, Artificial Sequence
  derived and/or modified sequence
atgtgcggctacgagagatgcagaccctgcagaggcgcccacggctacctgagaggcggccagggcgtgctgcacctgagaggcctgcccggccacggcggcagaagactgaagcacagaagaggcagactgggcgagtgcctgcagcaccccgccagcggcgccgtgagaggcgactggagagagaagcccggctgctggagccacagattcccctgccccggcagacacgccctggtgggcggcaccatcatcggcagcgccagatgccaggccttcagaaccagagagggcagactgaaggccgcctgcaacctgctgcagagaggcatcaccaacctgtgcgtgatcggcggcgacggcagcctgaccggcgccaacctgttcagaaaggagtggagcggcctgctggaggagctggccagaaacggccagatcgacaaggaggccgtgcagaagtacgcctacctgaacgtggtgggcatggtgggcagcatcgacaacgacttctgcggcaccgacatgaccatcggcaccgacagcgccctgcacagaatcatcgaggtggtggacgccatcatgaccaccgcccagagccaccagagaaccttcgtgctggaggtgatgggcagacactgcggctacctggccctggtgagcgccctggcctgcggcgccgactgggtgttcctgcccgagagcccccccgaggagggctgggaggagcagatgtgcgtgaagctgagcgagaacagagccagaaagaagagactgaacatcatcatcgtggccgagggcgccatcgacacccagaacaagcccatcaccagcgagaagatcaaggagctggtggtgacccagctgggctacgacaccagagtgaccatcctgggccacgtgcagagaggcggcacccccagcgccttcgacagaatcctggccagcagaatgggcgtggaggccgtgatcgccctgctggaggccacccccgacacccccgcctgcgtggtgagcctgaacggcaaccacgccgtgagactgcccctgatggagtgcgtgcagatgacccaggacgtgcagaaggccatggacgagagaagattccaggacgccgtgagactgagaggcagaagcttcgccggcaacctgaacacctacaagagactggccatcaagctgcccgacgaccagatccccaagaccaactgcaacgtggccgtgatcaacgtgggcgcccccgccgccggcatgaacgccgccgtgagaagcgccgtgagagtgggcatcgccgacggccacagaatgctggccatctacgacggcttcgacggcttcgccaagggccagatcaaggagatcggctggaccgacgtgggcggctggaccggccagggcggcagcatcctgggcaccaagagagtgctgcccggcaagtacctggaggagatcgccacccagatgagaacccacagcatcaacgccctgctgatcatcggcggcttcgaggcctacctgggcctgctggagctgagcgccgccagagagaagcacgaggagttctgcgtgcccatggtgatggtgcccgccaccgtgagcaacaacgtgcccggcagcgacttcagcatcggcgccgacaccgccctgaacaccatcaccgacacctgcgacagaatcaagcagagcgccagcggcaccaagagaagagtgttcatcatcgagaccatgggcggctactgcggctacctggccaacatgggcggcctggccgccggcgccgacgccgcctacatcttcgaggagcccttcgacatcagagacctgcagagcaacgtggagcacctgaccgagaagatgaagaccaccatccagagaggcctggtgctgagaaacgagagctgcagcgagaactacaccaccgacttcatctaccagctgtacagcgaggagggcaagggcgtgttcgactgcagaaagaacgtgctgggccacatgcagcagggcggcgcccccagccccttcgacagaaacttcggcaccaagatcagcgccagagccatggagtggatcaccgccaagctgaaggaggccagaggcagaggcaagaagttcaccaccgacgacagcatctgcgtgctgggcatcagcaagagaaacgtgatcttccagcccgtggccgagctgaagaagcagaccgacttcgagcacagaatccccaaggagcagtggtggctgaagctgagacccctgatgaagatcctggccaagtacaaggccagctacgacgtgagcgacagcggccagctggagcacgtgcagccctggagcgtgtag

SEQ ID NO: 84112 - DNA, 2322 bp, Artificial Sequence
  derived and/or modified sequence
tacgagagatgcagaccctgcagaggcgcccacggctacctgagaggcggccagggcgtgctgcacctgagaggcctgcccggccacggcggcagaagactgaagcacagaagaggcagactgggcgagtgcctgcagcaccccgccagcggcgccgtgagaggcgactggagagagaagcccggctgctggagccacagattcccctgccccggcagacacgccctggtgggcggcaccatcatcggcagcgccagatgccaggccttcagaaccagagagggcagactgaaggccgcctgcaacctgctgcagagaggcatcaccaacctgtgcgtgatcggcggcgacggcagcctgaccggcgccaacctgttcagaaaggagtggagcggcctgctggaggagctggccagaaacggccagatcgacaaggaggccgtgcagaagtacgcctacctgaacgtggtgggcatggtgggcagcatcgacaacgacttctgcggcaccgacatgaccatcggcaccgacagcgccctgcacagaatcatcgaggtggtggacgccatcatgaccaccgcccagagccaccagagaaccttcgtgctggaggtgatgggcagacactgcggctacctggccctggtgagcgccctggcctgcggcgccgactgggtgttcctgcccgagagcccccccgaggagggctgggaggagcagatgtgcgtgaagctgagcgagaacagagccagaaagaagagactgaacatcatcatcgtggccgagggcgccatcgacacccagaacaagcccatcaccagcgagaagatcaaggagctggtggtgacccagctgggctacgacaccagagtgaccatcctgggccacgtgcagagaggcggcacccccagcgccttcgacagaatcctggccagcagaatgggcgtggaggccgtgatcgccctgctggaggccacccccgacacccccgcctgcgtggtgagcctgaacggcaaccacgccgtgagactgcccctgatggagtgcgtgcagatgacccaggacgtgcagaaggccatggacgagagaagattccaggacgccgtgagactgagaggcagaagcttcgccggcaacctgaacacctacaagagactggccatcaagctgcccgacgaccagatccccaagaccaactgcaacgtggccgtgatcaacgtgggcgcccccgccgccggcatgaacgccgccgtgagaagcgccgtgagagtgggcatcgccgacggccacagaatgctggccatctacgacggcttcgacggcttcgccaagggccagatcaaggagatcggctggaccgacgtgggcggctggaccggccagggcggcagcatcctgggcaccaagagagtgctgcccggcaagtacctggaggagatcgccacccagatgagaacccacagcatcaacgccctgctgatcatcggcggcttcgaggcctacctgggcctgctggagctgagcgccgccagagagaagcacgaggagttctgcgtgcccatggtgatggtgcccgccaccgtgagcaacaacgtgcccggcagcgacttcagcatcggcgccgacaccgccctgaacaccatcaccgacacctgcgacagaatcaagcagagcgccagcggcaccaagagaagagtgttcatcatcgagaccatgggcggctactgcggctacctggccaacatgggcggcctggccgccggcgccgacgccgcctacatcttcgaggagcccttcgacatcagagacctgcagagcaacgtggagcacctgaccgagaagatgaagaccaccatccagagaggcctggtgctgagaaacgagagctgcagcgagaactacaccaccgacttcatctaccagctgtacagcgaggagggcaagggcgtgttcgactgcagaaagaacgtgctgggccacatgcagcagggcggcgcccccagccccttcgacagaaacttcggcaccaagatcagcgccagagccatggagtggatcaccgccaagctgaaggaggccagaggcagaggcaagaagttcaccaccgacgacagcatctgcgtgctgggcatcagcaagagaaacgtgatcttccagcccgtggccgagctgaagaagcagaccgacttcgagcacagaatccccaaggagcagtggtggctgaagctgagacccctgatgaagatcctggccaagtacaaggccagctacgacgtgagcgacagcggccagctggagcacgtgcagccctggagcgtgtag

SEQ ID NO: 84113 - protein, 166 aa, Artificial Sequence
  derived and/or modified sequence
MVTSSFPISVAVFALITLQVGTQDSFIAAVYEHAVILPNKTETPVSQEDALNLMNENIDILETAIKQAAEQGARIIVTPEDALYGWKFTRETVFPYLEDIPDPQVNWIPCQDPHRFGHTPVQARLSCLAKDNSIYVLANLGDKKPCNSRDSTCPPNGYFQYNTNVV

SEQ ID NO: 84114 - protein, 102 aa, Artificial Sequence
  derived and/or modified sequence
MNENIDILETAIKQAAEQGARIIVTPEDALYGWKFTRETVFPYLEDIPDPQVNWIPCQDPHRFGHTPVQARLSCLAKDNSIYVLANLGDKKPCNSRDSTCPP

SEQ ID NO: 84115 - protein, 101 aa, Artificial Sequence
  derived and/or modified sequence
MVTSSFPISVAVFALITLQVGTQDSFIAAVYEHAVILPNKTETPVSQEDALNLMNENIDILETAIKQAAEQGARIIVTPEDALYGWKFTRETVFPYLEDIP

SEQ ID NO: 84116 - protein, 147 aa, Artificial Sequence
  derived and/or modified sequence
MIISHFPKCVAVFALLALSVGALDTFIAAVYEHAVILPNRTETPVSKEEALLLMNKNIDVLEKAVKLAAKQGAHIIVTPEDGIYGWIFTRESIYPYLEDIPDPGVNWIPCRDPWRKSKKMNEPVSKELCYHCHSECNQYGQWKLYRT

SEQ ID NO: 84117 - protein, 207 aa, Artificial Sequence
  derived and/or modified sequence
MIISHFPKCVAVFALLALSVGALDTFIAAVYEHAVILPNRTETPVSKEEALLLMNKNIDVLEKAVKLAAKQGAHIIVTPEDGIYGWIFTRESIYPYLEDIPDPGVNWIPCRDPWRFGNTPVQQRLSCLAKDNSIYVVANIGDKKPCNASDSQCPPDGRYQYNTDVVFDSQGKLLARYHKGVESTPQKQSRCTTMTWKQRVVSCCYQN

SEQ ID NO: 84118 - DNA, 501 bp, Artificial Sequence
  derived and/or modified sequence
atggtgaccagcagcttccccatcagcgtggccgtgttcgccctgatcaccctgcaggtgggcacccaggacagcttcatcgccgccgtgtacgagcacgccgtgatcctgcccaacaagaccgagacccccgtgagccaggaggacgccctgaacctgatgaacgagaacatcgacatcctggagaccgccatcaagcaggccgccgagcagggcgccagaatcatcgtgacccccgaggacgccctgtacggctggaagttcaccagagagaccgtgttcccctacctggaggacatccccgacccccaggtgaactggatcccctgccaggacccccacagattcggccacacccccgtgcaggccagactgagctgcctggccaaggacaacagcatctacgtgctggccaacctgggcgacaagaagccctgcaacagcagagacagcacctgcccccccaacggctacttccagtacaacaccaacgtggtgtag

SEQ ID NO: 84119 - DNA, 309 bp, Artificial Sequence
  derived and/or modified sequence
atgaacgagaacatcgacatcctggagaccgccatcaagcaggccgccgagcagggcgccagaatcatcgtgacccccgaggacgccctgtacggctggaagttcaccagagagaccgtgttcccctacctggaggacatccccgacccccaggtgaactggatcccctgccaggacccccacagattcggccacacccccgtgcaggccagactgagctgcctggccaaggacaacagcatctacgtgctggccaacctgggcgacaagaagccctgcaacagcagagacagcacctgccccccctag

SEQ ID NO: 84120 - DNA, 306 bp, Artificial Sequence
  derived and/or modified sequence
atggtgaccagcagcttccccatcagcgtggccgtgttcgccctgatcaccctgcaggtgggcacccaggacagcttcatcgccgccgtgtacgagcacgccgtgatcctgcccaacaagaccgagacccccgtgagccaggaggacgccctgaacctgatgaacgagaacatcgacatcctggagaccgccatcaagcaggccgccgagcagggcgccagaatcatcgtgacccccgaggacgccctgtacggctggaagttcaccagagagaccgtgttcccctacctggaggacatcccctag

SEQ ID NO: 84121 - DNA, 444 bp, Artificial Sequence
  derived and/or modified sequence
atgatcatcagccacttccccaagtgcgtggccgtgttcgccctgctggccctgagcgtgggcgccctggacaccttcatcgccgccgtgtacgagcacgccgtgatcctgcccaacagaaccgagacccccgtgagcaaggaggaggccctgctgctgatgaacaagaacatcgacgtgctggagaaggccgtgaagctggccgccaagcagggcgcccacatcatcgtgacccccgaggacggcatctacggctggatcttcaccagagagagcatctacccctacctggaggacatccccgaccccggcgtgaactggatcccctgcagagacccctggagaaagagcaagaagatgaacgagcccgtgagcaaggagctgtgctaccactgccacagcgagtgcaaccagtacggccagtggaagctgtacagaacctag

SEQ ID NO: 84122 - DNA, 624 bp, Artificial Sequence
  derived and/or modified sequence
atgatcatcagccacttccccaagtgcgtggccgtgttcgccctgctggccctgagcgtgggcgccctggacaccttcatcgccgccgtgtacgagcacgccgtgatcctgcccaacagaaccgagacccccgtgagcaaggaggaggccctgctgctgatgaacaagaacatcgacgtgctggagaaggccgtgaagctggccgccaagcagggcgcccacatcatcgtgacccccgaggacggcatctacggctggatcttcaccagagagagcatctacccctacctggaggacatccccgaccccggcgtgaactggatcccctgcagagacccctggagattcggcaacacccccgtgcagcagagactgagctgcctggccaaggacaacagcatctacgtggtggccaacatcggcgacaagaagccctgcaacgccagcgacagccagtgcccccccgacggcagataccagtacaacaccgacgtggtgttcgacagccagggcaagctgctggccagataccacaagggcgtggagagcaccccccagaagcagagcagatgcaccaccatgacctggaagcagagagtggtgagctgctgctaccagaactag

SEQ ID NO: 84123 - DNA, 501 bp, Artificial Sequence
  derived and/or modified sequence
atggtgactagctcttttcctataagcgtcgccgtgttcgccctgattactctccaggtcggcactcaggattcctttatcgccgctgtatacgaacatgctgttattctgcccaataagacggaaacaccagtgtcccaggaagacgcattaaatctcatgaacgagaacatcgacatattagaaaccgccatcaaacaggctgccgaacagggggctcgtatcatcgtgactccagaggacgcattgtacggttggaagtttacacgcgaaacagtgtttccctatctggaggacatcccagatccccaggtaaactggattccatgtcaggatccccaccgtttcggtcacactcctgtccaggcccggctctcctgtctcgcaaaggacaatagcatatatgtcctagctaatctcggggacaagaaaccctgcaattccagggactcaacctgtccaccaaacgggtactttcagtataatacgaatgtagtatag

SEQ ID NO: 84124 - DNA, 309 bp, Artificial Sequence
  derived and/or modified sequence
atgaatgagaacatcgatatccttgaaacagccatcaaacaggccgccgagcagggggccaggattatcgtgaccccggaggatgccctttacgggtggaaattcactagagaaaccgtttttccttacctggaagacatacccgacccccaggtaaactggatcccttgccaggatcctcaccgttttggacatactccagtgcaagctcggctatcttgcttagccaaggataactctatctatgtgttagcgaatctcggcgacaaaaagccatgcaattcaagggattccacctgtccaccttag

SEQ ID NO: 84125 - DNA, 306 bp, Artificial Sequence
  derived and/or modified sequence
atggtcacatcctctttccctatctctgtcgcagtgttcgctctcataacccttcaggtgggtacccaagacagttttattgcagcagtgtatgagcacgctgtgattcttcccaataaaaccgaaacacctgtttcacaggaggacgccctgaatctgatgaatgaaaacattgacattctcgagaccgctattaaacaggcagctgagcaaggcgcgcgaatcatcgttactcctgaggatgccctgtacggatggaaattcacacgggaaacagtgttcccctacctggaagacatcccctag

SEQ ID NO: 84126 - DNA, 444 bp, Artificial Sequence
  derived and/or modified sequence
atgatcatcagccactttcccaagtgtgtcgctgtgttcgccctgctggccctaagcgtgggcgccttggacactttcatagccgctgtgtatgagcacgccgtcatccttcctaaccggaccgaaacaccagtctctaaggaggaagctctgttgctcatgaacaagaatattgacgtcctggagaaggccgtgaagctggctgccaagcagggggcccacattatcgtcacacccgaggacggtatctacgggtggatcttcactagggagagcatatacccttatctcgaggatatccccgatcccggtgttaactggattccctgtcgtgatccttggagaaagagtaaaaaaatgaacgaacccgtgagtaaagagctgtgttaccactgtcattccgaatgtaatcagtacggccagtggaagctttacaggacttag

SEQ ID NO: 84127 - DNA, 624 bp, Artificial Sequence
  derived and/or modified sequence
atgatcatcagccattttccaaaatgcgttgcagtgtttgccctcctggctctcagcgtcggcgcactggacaccttcatcgcagcagtgtacgagcacgcagtcatccttccaaaccgaacagaaactcccgtttctaaggaagaagcccttctgctgatgaataagaatattgatgtcctggagaaggccgtgaaacttgccgcgaagcagggggctcatatcatcgttacaccggaggacggaatatatgggtggatctttaccagagagagcatttatccgtatctggaggatatcccagacccaggagtcaactggataccgtgcagggacccttggcgatttggcaatactccagtgcagcagcgcctgagctgtcttgctaaagacaacagcatttacgtcgtagccaacattggtgacaagaaaccctgcaacgccagtgattcacagtgccccccagatggacggtaccaatacaacaccgatgtcgtctttgacagccagggtaagcttctggcccgttaccataagggtgttgaaagcaccccccagaaacagagtaggtgcacgactatgacttggaaacagagagtggtgtcatgctgctaccagaactag

SEQ ID NO: 84128 - DNA, 501 bp, Artificial Sequence
  derived and/or modified sequence
atggtgaccagcagcttccccatctctgtggccgtgtttgccctgatcaccctgcaggtgggcacccaggacagcttcatcgctgctgtgtatgaacatgctgtgatcctgcccaacaagacagagacccctgtgtcccaggaggatgccctgaacctgatgaatgaaaacatcgacatcctggagacagccatcaagcaggccgctgagcagggcgcccgcatcatcgtgaccccagaagatgccctgtatggctggaagttcacccgggagaccgtcttcccctacctggaggacatcccagacccccaggtgaactggatcccctgccaggacccccaccgcttcggccacacccctgtgcaggcccggctgagctgcctggccaaggacaacagcatctacgtgctggccaacctgggggacaagaagccctgcaacagccgggacagcacctgcccccccaacggctacttccagtacaacaccaacgtggtgtag

SEQ ID NO: 84129 - DNA, 309 bp, Artificial Sequence
  derived and/or modified sequence
atgaatgaaaatattgacatcctggagacagccatcaagcaggccgctgagcagggcgcccgcatcatcgtgaccccagaagatgccctgtatggctggaagttcacccgggagaccgtcttcccctacctggaggacatcccagacccccaggtgaactggatcccctgccaggacccccacagatttggccacacccctgtgcaggcccggctgagctgcctggccaaggacaacagcatctacgtgctggccaacctgggggacaagaagccctgcaacagccgggacagcacctgccccccatag

SEQ ID NO: 84130 - DNA, 306 bp, Artificial Sequence
  derived and/or modified sequence
atggtgaccagcagcttccccatctctgtggccgtgtttgccctgatcaccctgcaggtgggcacccaggacagcttcatcgctgctgtgtatgaacatgctgtgatcctgcccaacaagacagagacccctgtgtcccaggaggatgccctgaacctgatgaatgaaaacatcgacatcctggagacagccatcaagcaggccgctgagcagggcgcccgcatcatcgtgaccccagaagatgccctgtatggctggaagttcacccgggagaccgtcttcccctacctggaggacatcccctag

SEQ ID NO: 84131 - DNA, 444 bp, Artificial Sequence
  derived and/or modified sequence
atgatcatcagccacttccccaagtgtgtggccgtgtttgccctgctggccctgtctgtgggcgccctggacaccttcatcgctgctgtgtatgaacatgctgtgatcctgcccaacagaacagagacccctgtgtccaaggaggaggccctgctgctgatgaacaagaacattgatgtgctggagaaggctgtgaagctggccgccaagcagggcgcccacatcatcgtgaccccagaagatggcatctacggctggatcttcacccgggagagcatctacccctacctggaggacatcccagaccccggggtgaactggatcccctgccgggacccctggaggaagagcaagaagatgaatgaacctgtgtccaaggagctgtgctaccactgccacagcgagtgcaaccagtatggccagtggaagctgtaccgcacctag

SEQ ID NO: 84132 - DNA, 624 bp, Artificial Sequence
  derived and/or modified sequence
atgatcatcagccacttccccaagtgtgtggccgtgtttgccctgctggccctgtctgtgggcgccctggacaccttcatcgctgctgtgtatgaacatgctgtgatcctgcccaacagaacagagacccctgtgtccaaggaggaggccctgctgctgatgaacaagaacattgatgtgctggagaaggctgtgaagctggccgccaagcagggcgcccacatcatcgtgaccccagaagatggcatctacggctggatcttcacccgggagagcatctacccctacctggaggacatcccagaccccggggtgaactggatcccctgccgggacccctggaggtttggaaacacccctgtgcagcagaggctgagctgcctggccaaggacaacagcatctacgtggtggccaacatcggggacaagaagccctgcaatgccagtgacagccagtgccccccagatggccgctaccagtacaacacagatgtggtgtttgacagccagggcaagctgctggcccgctaccacaagggcgtggagagcaccccccagaagcagagccgctgcaccaccatgacctggaagcagagggtggtgtcctgctgctaccagaactag

SEQ ID NO: 84133 - DNA, 501 bp, Artificial Sequence
  derived and/or modified sequence
atggtgaccagcagcttccccatcagcgtggccgtgttcgccctgataaccctgcaagtcggtacccaggactctttcatagccgcagtgtacgaacacgccgtgatcctgcctaacaaaacagagacacccgttagtcaggaggatgcacttaatctcatgaatgagaacatagatatcctggagactgccatcaagcaagcggcagaacagggagctagaatcatcgtaacccccgaggacgcactctacggctggaagtttactcgcgaaactgtgttcccctatcttgaggatatccccgaccctcaagtgaattggatcccctgccaggatcctcatcggttcggccatacacccgtgcaggctaggttatcctgcctagccaaggataattcaatctacgtcctggctaacctgggcgataaaaaaccctgcaactcacgagacagtacttgtccccccaacggctatttccagtacaatactaatgtggtttag

SEQ ID NO: 84134 - DNA, 309 bp, Artificial Sequence
  derived and/or modified sequence
atgaacgagaacatcgacatcctggagaccgccatcaagcaggccgctgagcaaggggcacggatcattgtgacgccggaagacgcactgtatgggtggaagtttactcgggaaaccgtattcccctatctggaggacatcccggatccacaggtcaactggattccgtgtcaggaccctcataggttcgggcatactcctgtgcaagcaaggctttcgtgtttggccaaggataatagtatttatgttcttgccaacctgggtgataagaagccatgtaattcacgcgattccacctgcccgccctag

SEQ ID NO: 84135 - DNA, 306 bp, Artificial Sequence
  derived and/or modified sequence
atggtgaccagcagcttccccatcagcgtggccgtgttcgccctgataacgctgcaggtagggacccaggactcattcattgccgccgtttacgagcacgccgtaattctgcctaacaaaaccgaaacacccgtgtcacaggaggatgccctgaacctgatgaacgaaaacattgacatcttggaaacagccatcaagcaagcggcagagcaaggtgccagaatcattgtgacccccgaggacgctctgtatggctggaagttcacgagagagacggttttcccttatctggaggacatcccctag

SEQ ID NO: 84136 - DNA, 444 bp, Artificial Sequence
  derived and/or modified sequence
atgatcatcagccacttccccaagtgcgtggccgtgttcgccctgctggctttatccgtgggagctctggacacatttatagcagcagtatacgagcacgccgtcattcttcctaacaggaccgagacacccgttagtaaagaagaggccctgcttctgatgaataaaaacatcgatgtcctcgagaaagcagttaaactcgcagccaaacagggagcccatatcattgtaacccccgaggatggcatttatggctggattttcaccagagagtccatctacccttacctcgaggacatccctgaccctggggtaaattggataccctgtcgcgacccttggcgcaagtcaaaaaagatgaatgaaccagtttcaaaagagctttgttaccattgccattctgagtgcaatcaatacgggcagtggaaactgtatagaacttag

SEQ ID NO: 84137 - DNA, 624 bp, Artificial Sequence
  derived and/or modified sequence
atgatcatcagccacttccccaagtgcgtggccgtgttcgccctgctcgccctttccgtgggggcactggacactttcatcgctgctgtatacgagcatgctgtgatcttgccaaatagaacagaaacaccagtgtccaaggaagaagcactactcctaatgaacaaaaacatcgatgtcctggaaaaagctgtaaagctggcggctaagcaaggggcccacatcatagtcacccccgaggacggcatatacggctggatcttcacgcgtgaatcaatttacccctatctggaggacatcccggatccaggggttaactggatcccatgcagagatccatggaggttcggcaacactcccgtccagcagcggctgagctgcctggcaaaagataatagcatctatgttgtagccaatattggcgataagaaaccctgtaacgcaagcgacagtcagtgccctccagacggaaggtaccagtataataccgatgtggtgtttgatagccaggggaagctgctcgctagataccacaagggggtagaatctacaccccagaaacagtctaggtgcaccaccatgacgtggaaacaaagggtggtgtcttgttgctatcaaaattag

SEQ ID NO: 84138 - DNA, 501 bp, Artificial Sequence
  derived and/or modified sequence
atggtcacttcttcatttcccattagcgttgctgtctttgcgctgatcacccttcaggtaggtacccaggattcctttatcgccgcagtgtacgagcacgcggtaattttgccgaataagactgagaccccagtttcccaggaagacgcgttaaatctcatgaacgaaaacatagacattctggagacagcaatcaagcaggctgcggaacagggggctcgcattatagtgaccccagaggatgctctctatggttggaagttcactagagagaccgtgttcccctacctggaggacattccagacccacaggttaactggatcccatgccaggaccctcatcgttttggacatacgcccgttcaggccagacttagttgtctggcaaaagacaatagcatttatgtgttggctaacctcggagataagaaaccatgcaattcaagggactccacgtgtcccccaaatggctatttccagtataatacaaacgtggtttag

SEQ ID NO: 84139 - DNA, 309 bp, Artificial Sequence
  derived and/or modified sequence
atgaacgagaacatcgacatattggagacagccatcaaacaggccgctgagcaaggagccagaattatcgtaacccctgaagacgcactgtacgggtggaaatttaccagggagaccgtttttccttatctggaggacatacctgatcctcaagtaaactggatcccctgccaggacccacaccggtttggccacactcctgtccaagcgaggctttcctgcctggccaaggataactcgatttacgtgctggcaaatctgggagacaaaaaaccttgtaactccagagacagtacttgcccaccttag

SEQ ID NO: 84140 - DNA, 306 bp, Artificial Sequence
  derived and/or modified sequence
atggtgacaagtagctttccaatctctgtggccgtgttcgccttaattacactacaggtcggcacccaggattcgttcatcgcagccgtgtacgaacacgcagttatcctccccaataaaactgagacccctgtgagtcaggaggacgccctcaacctgatgaacgagaacattgacatattggaaactgcaatcaagcaggcggcagaacagggagcaagaattattgtaacaccagaagatgccttgtacgggtggaagttcacgagagagaccgttttcccttatctcgaagatatcccttag

SEQ ID NO: 84141 - DNA, 444 bp, Artificial Sequence
  derived and/or modified sequence
atgattatcagccatttccctaaatgcgttgctgtgtttgccctgttagccctgtcagttggcgcactggatacctttattgcagctgtgtacgagcacgccgtgatactcccaaaccggaccgagaccccagtcagtaaggaagaagcattgctgctgatgaataagaatatcgacgtgctggagaaggccgttaagctcgccgctaagcagggcgctcacattatcgtaactcctgaggacggcatatacggttggatcttcactcgtgaaagtatatacccttatctggaggatattcccgatcccggagtgaattggataccctgccgggacccttggcgcaaatccaagaaaatgaatgagccggtgtcaaaagaactctgttatcactgccacagcgagtgcaatcagtatgggcagtggaaactgtaccggacctag

SEQ ID NO: 84142 - DNA, 624 bp, Artificial Sequence
  derived and/or modified sequence
atgatcatttcacactttcctaaatgtgtggccgtcttcgcactgcttgccctgtcggtgggcgcactcgacacttttatagctgccgtatacgagcacgccgtgatcctgccaaacagaacagaaacacctgtcagtaaggaggaggctttgctcttgatgaataaaaatatcgatgtgctcgaaaaagccgtgaaacttgccgctaagcaaggggcacatataatagtgactccggaagacggaatatatggatggattttcacaagagagagcatctacccttatttggaagacatcccagaccccggtgtgaattggataccctgtcgcgatccgtggcgctttgggaatactcctgtccagcagcggctaagttgtcttgcaaaagacaactccatctatgtggtcgccaatatcggcgacaagaaaccgtgcaacgcgtcggattcccagtgtcctcctgacggacgctatcaatacaacacagatgtagttttcgactcacagggcaaactgctcgccaggtaccataagggagtcgaaagtaccccgcaaaagcaaagccgttgcactacaatgacctggaaacagcgggtggtctcctgttgctatcagaattag

SEQ ID NO: 84143 - DNA, 444 bp, Artificial Sequence
  derived and/or modified sequence
atgataatctcgcactttcccaaatgtgttgccgtctttgccctcctggccctgtctgtgggggcactcgatactttcattgcggccgtgtacgagcatgctgttatattacccaacagaaccgagacgcccgttagtaaagaagaagctttgcttctaatgaataaaaacatcgacgtactggagaaggccgtgaaattggccgccaagcagggagcccatattatagtcaccccagaagacggcatctatggttggattttcacaagagagtcaatctatccctacctcgaagacattccagaccctggagtaaattggattccttgccgggatccttggcgtaagagcaagaaaatgaacgagccagtctcaaaagaactttgctatcactgtcactctgaatgtaaccaatatggtcaatggaagttgtacagaacctag

SEQ ID NO: 84144 - DNA, 624 bp, Artificial Sequence
  derived and/or modified sequence
atgattatctcacatttccccaagtgcgtagcggtgtttgccctcctcgctttgtccgtcggagcactggataccttcatcgctgcagtgtacgaacatgccgtcatcctaccaaacaggacagagacccccgtgtcaaaggaagaggctctcttactcatgaacaagaatatcgatgttctcgaaaaagctgtcaaattggctgccaagcaaggtgcacacatcatcgtgacccccgaggacggcatctatggttggatttttacccgtgaaagtatttatccctatttggaggacatacctgatccaggtgtcaattggattccgtgtcgcgacccttggcgctttgggaacactccggttcagcaacggcttagttgccttgccaaggacaacagtatttacgtggtagctaacataggcgacaagaaaccatgcaacgccagcgactcccaatgcccaccagacggacggtaccagtataatactgacgttgtgttcgactcccagggaaagctccttgccaggtatcacaagggcgtggaatctacacctcagaagcaaagtaggtgtacaacaatgacatggaagcaacgtgtggtatcttgctgttatcagaattag

SEQ ID NO: 84145 - DNA, 444 bp, Artificial Sequence
  derived and/or modified sequence
atgatcatctcccatttccccaagtgcgtcgccgtctttgctctgctagcactatcagtaggcgccctggataccttcattgctgctgtctacgaacatgcggtgattttacctaaccggacagaaacccccgtgagtaaggaagaagctctcctccttatgaacaagaatattgatgtgctggaaaaagccgtgaagctcgccgccaagcagggtgctcacataatcgttactcctgaggatggtatctatggttggatctttacgagagaaagtatttacccctacctcgaggacatccccgaccccggagttaactggattccctgtcgcgacccatggaggaaaagtaagaagatgaacgaacccgtatcaaaggaactttgctatcactgccacagcgaatgcaatcaatatggccaatggaagctgtacaggacatag

SEQ ID NO: 84146 - DNA, 624 bp, Artificial Sequence
  derived and/or modified sequence
atgattatatctcactttcctaagtgtgtagctgtgttcgcactcttggccctgtccgtcggcgctctcgatacctttatagctgccgtctacgagcacgccgtcattctcccaaatcgaactgagactcctgtcagcaaagaggaggccctcctactaatgaacaaaaacatagatgtactcgaaaaggccgtcaagcttgccgccaagcagggcgcccatataattgtaaccccagaggacggcatatatggctggatcttcacccgagagtcgatttacccttatctcgaggatatcccggatcccggggtgaactggatcccctgcagagacccatggcgctttggaaatacccccgtacagcaaaggctgagctgtctggctaaagacaacagcatctatgtagttgccaacattggtgacaagaagccctgcaatgcatctgattcacagtgtccaccagacggtagataccagtataacacagacgtggtgttcgactcacaaggtaaattattggcaaggtaccacaagggcgtcgagagtacccctcagaagcaatctcgatgtactactatgacatggaagcagcgagtggtttcctgctgctaccaaaattag

SEQ ID NO: 84147 - DNA, 594 bp, Artificial Sequence
  derived and/or modified sequence
gactggaggagcacaggccttggaaaggaaagcagctgagatccagaggagtggaaggctcccccttgactaaagctaaatcactaaaccttggccatggtcacttcctcttttccaatctctgtggcagtttttgccctaataaccctgcaggttggtactcaggacagttttatagctgcagtgtatgaacatgctgtcattttgccaaataaaacagaaacaccagtttctcaggaggatgccttgaatctcatgaacgagaatatagacattctggagacagcgatcaagcaggcagctgagcagggtgctcgaatcattgtgactccagaagatgcactttatggatggaaatttaccagggaaactgttttcccttatctggaggatatcccagaccctcaggtgaactggattccgtgtcaagacccccacagatttggtcacacaccagtacaagcaagactcagctgcctggccaaggacaactctatctatgtcttggcaaatttgggggacaaaaagccatgtaattcccgtgactccacatgtcctcctaatggctactttcaatacaataccaatgtggtg

SEQ ID NO: 84148 - DNA, 587 bp, Artificial Sequence
  derived and/or modified sequence
ggaggagcacaggccttggaaaggaaagcagctgagatccagaggagtggaaggctcccccttgactaaagctccaaggacagagaaaaacatccagatttgggaacacaataacagatatgattgtccccacttctactgccaaaattataaaactgttaactcctcctcatcagcttacctgactacttaaaagcaaaagagttaattaagtattactaattggtgatactagatcaatgaagaaacaccagtttctcaggaggatgccttgaatctcatgaacgagaatatagacattctggagacagcgatcaagcaggcagctgagcagggtgctcgaatcattgtgactccagaagatgcactttatggatggaaatttaccagggaaactgttttcccttatctggaggatatcccagaccctcaggtgaactggattccgtgtcaagacccccacagatttggtcacacaccagtacaagcaagactcagctgcctggccaaggacaactctatctatgtcttggcaaatttgggggacaaaaagccatgtaattcccgtgactccacatgtcctccta

SEQ ID NO: 84149 - DNA, 543 bp, Artificial Sequence
  derived and/or modified sequence
aaagcagctgagatccagaggagtggaaggctcccccttgactaaagctccaaggacagagaaaaacatccagatttgggaacacaataacagatatgattgtccccacttctactgccaaaattataaaactgttaactcctcctcatcagcttacctgactacttaaaagcaaaagagttaattaagtattactaattggtgatactagatcaatgaagaaatcactaaaccttggccatggtcacttcctcttttccaatctctgtggcagtttttgccctaataaccctgcaggttggtactcaggacagttttatagctgcagtgtatgaacatgctgtcattttgccaaataaaacagaaacaccagtttctcaggaggatgccttgaatctcatgaacgagaatatagacattctggagacagcgatcaagcaggcagctgagcagggtgctcgaatcattgtgactccagaagatgcactttatggatggaaatttaccagggaaactgttttcccttatctggaggatatccca

SEQ ID NO: 84150 - DNA, 517 bp, Artificial Sequence
  derived and/or modified sequence
aatgtaaagtttttccagtgaaacaaaacgtaagaatctgagtttgtttttcaaagatcactaaattttagttatgattatatcacattttccaaaatgtgtggcagtttttgccctccttgctctgagtgttggtgcactggacacttttattgctgcagtatatgagcatgcggtgatattaccaaacagaacagaaacacctgtttcaaaagaagaagctttgctcctgatgaacaagaacatagatgttttggagaaagcagttaagctggcagcgaagcagggtgcacatatcattgtgaccccagaagatggaatctatggttggatcttcaccagggagagcatttacccctatctagaggatataccagaccctggagtgaactggattccatgtagagacccctggaggaagagtaaaaagatgaatgagcctgtttccaaagagctttgctatcactgtcattcagaatgcaatcaatatggccaatggaaattgtataggacttga

SEQ ID NO: 84151 - protein, 209 aa, Artificial Sequence
  derived and/or modified sequence
MSSTLPALLCVGLCLSQRISAQQQMYDTPTLSVHPGPEVISGEKVTFYCRLDTATSMFLLLKEGRSSHVQRGYGKVQAEFPLGPVTTAHRGTYRCFGSYNNHAWSFPSEPVKLLVTGDIENTSLAPEDPTFPADTWGTYLLTTETGLQKDHALWDHTAQNLLRMGLAFLVLVALVWFLVEDWLSRKRTRERASRASTWEGRRRLNTQTL

SEQ ID NO: 84152 - protein, 197 aa, Artificial Sequence
  derived and/or modified sequence
MSSTLPALLCVEMYDTPTLSVHPGPEVISGEKVTFYCRLDTATSMFLLLKEGRSSHVQRGYGKVQAEFPLGPVTTAHRGTYRCFGSYNNHAWSFPSEPVKLLVTGDIENTSLAPEDPTFPADTWGTYLLTTETGLQKDHALWDHTAQNLLRMGLAFLVLVALVWFLVEDWLSRKRTRERASRASTWEGRRRLNTQTL

SEQ ID NO: 84153 - DNA, 630 bp, Artificial Sequence
  derived and/or modified sequence
atgtcttcaacactgcctgctctcttatgtgtggggctctgtctttcccaacgaatatctgcgcagcagcaaatgtacgatacgccgactctttcagtacatccgggtcctgaggtcatatccggagagaaagtgacattttactgcaggctagatacagcaacttccatgtttctgctgctgaaagaaggacgctctagtcacgtgcagcgcgggtatggaaaagtacaggccgagttcccattgggccctgtaacaacagcccatcgcggcacctaccgctgctttggctcttataacaatcacgcatggagtttcccctccgaacctgtaaagctcttagtgacaggcgatatcgagaacacatcactcgccccagaggatcctacgttccccgcagacacatggggcacgtacctcctgacaacagaaacaggtctccagaaggaccacgccctgtgggatcacaccgcacaaaacctgctgcggatgggcctggctttcttggtgctcgtggctctcgtgtggttcctggtggaagactggctctcaaggaagagaacccgcgaacgggcatctagagctagtacctgggaagggcggcgcagactgaacactcagactctgtag

SEQ ID NO: 84154 - DNA, 594 bp, Artificial Sequence
  derived and/or modified sequence
atgtcctccacattgcctgccctcctctgtgttgaaatgtatgacacccccactctatccgtgcatcctggccccgaggttatatccggcgagaaggtgaccttttactgtaggctggataccgccacctcaatgtttttactgctaaaggagggaagaagctcccatgtccaaagaggatatgggaaggtccaggccgagtttcctctgggaccagttaccacagctcatagagggacatacaggtgttttggaagctacaataaccatgcttggagttttcctagcgagccagttaagctgcttgtcaccggagatatagaaaatacctccctggcacccgaagacccaacttttccagccgatacttggggaacttatctcctcactaccgagacgggacttcaaaaggaccacgctctatgggatcatacggcgcagaacctgctgagaatgggccttgctttccttgttctcgtcgcgctggtctggttcctggtggaagactggttgagtcgtaaaaggactagggaacgagctagcagagctagcacctgggaggggagaagacgactgaacacccagactttatag

SEQ ID NO: 84155 - DNA, 630 bp, Artificial Sequence
  derived and/or modified sequence
atgagcagcaccctgcctgccctgctgtgtgtgggcctgtgcctgagccagaggatcagcgcccagcagcagatgtatgacacccccaccctgtctgtgcaccctggccctgaggtgatctctggagagaaggtgaccttctactgccgcctggacacagccacctccatgttcctgctgctgaaggagggccgcagcagccacgtgcagaggggctacggcaaggtgcaggccgagttccccctgggccctgtgaccacagcccaccggggcacctaccgctgcttcggcagctacaacaaccacgcctggagcttccccagcgagcctgtgaagctgctggtgactggagacatcgagaacaccagcctggcccctgaggaccccaccttccctgctgacacctggggcacctacctgctgaccacagaaacaggcctgcagaaggaccacgccctgtgggaccacacagcccagaacctgctgaggatgggcctggccttcctggtgctggtggccctggtgtggttcctggtggaggactggctgagcaggaagaggacccgggagcgggccagccgggccagcacctgggagggcagaagaaggctgaacacccagaccctgtag

SEQ ID NO: 84156 - DNA, 594 bp, Artificial Sequence
  derived and/or modified sequence
atgagcagcaccctgcctgccctgctgtgtgtggagatgtatgacacccccaccctgtctgtgcaccctggccctgaggtgatctctggagagaaggtgaccttctactgccgcctggacacagccacctccatgttcctgctgctgaaggagggccgcagcagccacgtgcagaggggctacggcaaggtgcaggccgagttccccctgggccctgtgaccacagcccaccggggcacctaccgctgcttcggcagctacaacaaccacgcctggagcttccccagcgagcctgtgaagctgctggtgactggagacatcgagaacaccagcctggcccctgaggaccccaccttccctgctgacacctggggcacctacctgctgaccacagaaacaggcctgcagaaggaccacgccctgtgggaccacacagcccagaacctgctgaggatgggcctggccttcctggtgctggtggccctggtgtggttcctggtggaggactggctgagcaggaagaggacccgggagcgggccagccgggccagcacctgggagggcagaagaaggctgaacacccagaccctgtag

SEQ ID NO: 84157 - DNA, 868 bp, Artificial Sequence
  derived and/or modified sequence
tccccactgctcagcactaggccggcagaatctgagcgatgtcttccacactccctgccctgctctgcgtcgggctgtgtctgagtcagaggatcagcgcccagcagcaaatgtatgacacacccaccctctcggttcatcctggacccgaagtgatctcgggagagaaggtgaccttctactgccgtctagacactgcaacaagcatgttcttactgctcaaggagggaagatccagccacgtacagcgcggatacgggaaggtccaggcggagttccccctgggccctgtgaccacagcccaccgagggacataccgatgttttggctcctataacaaccatgcctggtctttccccagtgagccagtgaagctcctggtcacaggcgacattgagaacaccagccttgcacctgaagaccccacctttcctgcagacacttggggcacctaccttttaaccacagagacgggactccagaaagaccatgccctctgggatcacactgcccagaatctccttcggatgggcctggcctttctagtcctggtggctctagtgtggttcctggttgaagactggctcagcaggaagaggactagagagcgagccagcagagcttccacttgggaaggcaggagaaggctgaacacacagactctttgaagaatgaccatgagacacagtggccatgggtggatctgaaagctggtgttgagcctgggcggcgtgagctctgtgttggacccacggaggagggagtcactgcagggaaagagggacactggcattccatttgtcagagcatcccggacgatgcagagggtgggagaactacatgctaaatttctttttttttttttttg

SEQ ID NO: 84158 - DNA, 832 bp, Artificial Sequence
  derived and/or modified sequence
tccccactgctcagcactaggccggcagaatctgagcgatgtcttccacactccctgccctgctctgcgtcgaaatgtatgacacacccaccctctcggttcatcctggacccgaagtgatctcgggagagaaggtgaccttctactgccgtctagacactgcaacaagcatgttcttactgctcaaggagggaagatccagccacgtacagcgcggatacgggaaggtccaggcggagttccccctgggccctgtgaccacagcccaccgagggacataccgatgttttggctcctataacaaccatgcctggtctttccccagtgagccagtgaagctcctggtcacaggcgacattgagaacaccagccttgcacctgaagaccccacctttcctgcagacacttggggcacctaccttttaaccacagagacgggactccagaaagaccatgccctctgggatcacactgcccagaatctccttcggatgggcctggcctttctagtcctggtggctctagtgtggttcctggttgaagactggctcagcaggaagaggactagagagcgagccagcagagcttccacttgggaaggcaggagaaggctgaacacacagactctttgaagaatgaccatgagacacagtggccatgggtggatctgaaagctggtgttgagcctgggcggcgtgagctctgtgttggacccacggaggagggagtcactgcagggaaagagggacactggcattccatttgtcagagcatcccggacgatgcagagggtgggagaactacatgctaaatttctttttttttttttttg

SEQ ID NO: 84159 - DNA, 630 bp, Artificial Sequence
  derived and/or modified sequence
atgagcagcaccctgcccgccctgctgtgcgtgggcctgtgcctgtcccaacgcatatccgcccagcagcagatgtacgataccccaactctttcagtgcaccccggtccggaggttattagcggcgagaaggtcactttttactgccgactggatacggcaacgtccatgttcctcctgttgaaggaaggccgctcttcccacgtacagcggggctatggaaaagtccaggcggagttccctctgggccccgtgacgacagctcataggggtacctatcgctgttttggttcctataacaaccacgcctggtcttttccgtctgagcccgtcaagctgctggtcacaggggacatagagaacacgagcctggccccggaagatcctacctttccggccgacacttgggggacatatctccttacaactgagacgggccttcagaaagaccacgccctgtgggaccatacggcacaaaatctgctccgcatgggtctggctttcctggtccttgttgccctggtctggttcctagtcgaggattggctcagccgcaagcggacaagggaaagagctagtcgcgcctccacatgggagggtcgtagacggttgaacacccagaccctgtag

SEQ ID NO: 84160 - DNA, 594 bp, Artificial Sequence
  derived and/or modified sequence
atgagcagcaccctgcccgccctgctgtgcgtggagatgtacgacactccgacactcagcgttcaccccggtccagaagtgatctccggggaaaaagtgacattctattgccggctggacaccgcaacctcaatgttcttgctcctgaaggagggacgttccagccatgtgcagagaggctacggcaaggtgcaggcagaattccctctgggcccagtaacaacagcccacagaggcacttatcggtgttttggatcatataataaccacgcttggagctttccttcagaacctgtgaagctgctggttacgggcgacattgagaataccagtctcgcccccgaagatcctaccttccctgctgacacatggggaacatatttgcttacaaccgagacaggcttgcagaaggaccacgctctatgggaccatacagcgcagaacctgctcagaatgggactggcctttctagtgctggttgcacttgtgtggttcttggtggaggactggctctctagaaagcgtactcgcgagcgagcttctagggccagtacatgggaagggcggcggagattaaacacccagacattgtag

SEQ ID NO: 84161 - DNA, 630 bp, Artificial Sequence
  derived and/or modified sequence
atgagttccacacttccagcccttttatgtgttgggctatgcttaagccagcgaatctcagcccagcaacagatgtatgacacacctaccctgtctgtacacccagggcctgaagtcatctctggcgagaaggtcaccttttactgcaggttggacacggctactagcatgtttttgctactgaaggaaggtagaagctcccacgtccagcgtggatatggcaaagtgcaagcggaattcccactggggcctgtcacaacagcgcatcggggtacctacaggtgctttgggagttacaataatcacgcctggagctttcccagcgagccagtgaagctgttggtcaccggcgacattgaaaatacttcactggctccagaggatcctacgtttcctgcggatacctggggaacttacctgctgaccacagagaccggcctgcagaaggatcatgcactgtgggatcacaccgctcaaaaccttctcaggatgggtcttgcattcctggtgctcgttgctctagtctggtttctcgttgaagattggttaagccggaagcggacgcgagaacgagctagtagggcttctacttgggaaggacgtagaagactgaacacacagaccctttag

SEQ ID NO: 84162 - DNA, 594 bp, Artificial Sequence
  derived and/or modified sequence
atgtcctcgacgctccccgctctgctctgtgttgaaatgtatgacacaccaacactgtcagtccaccccggtcctgaagtcatctctggcgagaaggtgaccttctactgtcggctggacactgccacatctatgtttcttctgctaaaagaagggagaagctctcacgttcagcgaggttatggaaaggtgcaggctgaatttcctctgggtccggtgactacagcgcatcggggaacataccgatgcttcggatcttataataaccacgcttggagctttcctagtgagcccgtgaaactgctcgtaaccggtgatattgaaaacacctctttggctccagaggatcccacctttccagctgacacctggggtacttaccttctgacaaccgaaaccgggctgcagaaagatcacgccctgtgggatcacacagcacagaacttgctccggatgggtttggccttccttgttctagtggccttagtatggttcctcgtcgaagactggctgagtcgaaaacggactagggagcgagccagccgggctagcacatgggagggtcggagacgtctgaatacacagacattgtag

SEQ ID NO: 84163 - DNA, 630 bp, Artificial Sequence
  derived and/or modified sequence
atgagcagcaccctgcccgccctgctgtgcgtgggcctgtgcctgagccagagaatcagcgcccagcagcagatgtacgacacccccaccctgagcgtgcaccccggccccgaggtgatcagcggcgagaaggtgaccttctactgcagactggacaccgccaccagcatgttcctgctgctgaaggagggcagaagcagccacgtgcagagaggctacggcaaggtgcaggccgagttccccctgggccccgtgaccaccgcccacagaggcacctacagatgcttcggcagctacaacaaccacgcctggagcttccccagcgagcccgtgaagctgctggtgaccggcgacatcgagaacaccagcctggcccccgaggaccccaccttccccgccgacacctggggcacctacctgctgaccaccgagaccggcctgcagaaggaccacgccctgtgggaccacaccgcccagaacctgctgagaatgggcctggccttcctggtgctggtggccctggtgtggttcctggtggaggactggctgagcagaaagagaaccagagagagagccagcagagccagcacctgggagggcagaagaagactgaacacccagaccctgtag

SEQ ID NO: 84164 - DNA, 594 bp, Artificial Sequence
  derived and/or modified sequence
atgagcagcaccctgcccgccctgctgtgcgtggagatgtacgacacccccaccctgagcgtgcaccccggccccgaggtgatcagcggcgagaaggtgaccttctactgcagactggacaccgccaccagcatgttcctgctgctgaaggagggcagaagcagccacgtgcagagaggctacggcaaggtgcaggccgagttccccctgggccccgtgaccaccgcccacagaggcacctacagatgcttcggcagctacaacaaccacgcctggagcttccccagcgagcccgtgaagctgctggtgaccggcgacatcgagaacaccagcctggcccccgaggaccccaccttccccgccgacacctggggcacctacctgctgaccaccgagaccggcctgcagaaggaccacgccctgtgggaccacaccgcccagaacctgctgagaatgggcctggccttcctggtgctggtggccctggtgtggttcctggtggaggactggctgagcagaaagagaaccagagagagagccagcagagccagcacctgggagggcagaagaagactgaacacccagaccctgtag

SEQ ID NO: 84165 - protein, 430 aa, Artificial Sequence
  derived and/or modified sequence
MEGSASPPEKPRARPAAAVLCRGPVEPLVFLANFALVLQGPLTTQYLWHRFSADLGYNGTRQRGGCSNRSADPTMQEVETLTSHWTLYMNVGGFLVGLFSSTLLGAWSDSVGRRPLLVLASLGLLLQALVSVFVVQLQLHVGYFVLGRILCALLGDFGGLLAASFASVADVSSSRSRTFRMALLEASIGVAGMLASLLGGHWLRAQGYANPFWLALALLIAMTLYAAFCFGETLKEPKSTRLFTFRHHRSIVQLYVAPAPEKSRKHLALYSLAIFVVITVHFGAQDILTLYELSTPLCWDSKLIGYGSAAQHLPYLTSLLALKLLQYCLADAWVAEIGLAFNILGMVVFAFATITPLMFTGALFSAVACVNSLAMLTASGFNSLYPATLNFMKGFPFLLGAGLLLIPAVLIGMLEKADPHLEFQQFPQSP

SEQ ID NO: 84166 - DNA, 1293 bp, Artificial Sequence
  derived and/or modified sequence
atggagggcagcgccagcccccccgagaagcccagagccagacccgccgccgccgtgctgtgcagaggccccgtggagcccctggtgttcctggccaacttcgccctggtgctgcagggccccctgaccacccagtacctgtggcacagattcagcgccgacctgggctacaacggcaccagacagagaggcggctgcagcaacagaagcgccgaccccaccatgcaggaggtggagaccctgaccagccactggaccctgtacatgaacgtgggcggcttcctggtgggcctgttcagcagcaccctgctgggcgcctggagcgacagcgtgggcagaagacccctgctggtgctggccagcctgggcctgctgctgcaggccctggtgagcgtgttcgtggtgcagctgcagctgcacgtgggctacttcgtgctgggcagaatcctgtgcgccctgctgggcgacttcggcggcctgctggccgccagcttcgccagcgtggccgacgtgagcagcagcagaagcagaaccttcagaatggccctgctggaggccagcatcggcgtggccggcatgctggccagcctgctgggcggccactggctgagagcccagggctacgccaaccccttctggctggccctggccctgctgatcgccatgaccctgtacgccgccttctgcttcggcgagaccctgaaggagcccaagagcaccagactgttcaccttcagacaccacagaagcatcgtgcagctgtacgtggcccccgcccccgagaagagcagaaagcacctggccctgtacagcctggccatcttcgtggtgatcaccgtgcacttcggcgcccaggacatcctgaccctgtacgagctgagcacccccctgtgctgggacagcaagctgatcggctacggcagcgccgcccagcacctgccctacctgaccagcctgctggccctgaagctgctgcagtactgcctggccgacgcctgggtggccgagatcggcctggccttcaacatcctgggcatggtggtgttcgccttcgccaccatcacccccctgatgttcaccggcgccctgttcagcgccgtggcctgcgtgaacagcctggccatgctgaccgccagcggcttcaacagcctgtaccccgccaccctgaacttcatgaagggcttccccttcctgctgggcgccggcctgctgctgatccccgccgtgctgatcggcatgctggagaaggccgacccccacctggagttccagcagttcccccagagcccctag

SEQ ID NO: 84167 - DNA, 1293 bp, Artificial Sequence
  derived and/or modified sequence
atggaagggagcgccagccctccggagaagccacgagcccggccagcagccgctgtactgtgtcgcggccctgtggagcccttggtcttcctggcaaattttgctttggttctgcagggccccttgaccacgcagtacctgtggcaccgattctcggctgacctcgggtacaatggcactcgccagagggggggatgcagcaacagatctgcagaccctacaatgcaagaagtggaaacgttgacatcacactggaccctgtacatgaatgtgggcggatttttagttggcctgttttcctccacgctgcttggcgcatggtctgattcagtgggcagaaggccactgcttgtactggcctcactcgggctgcttctacaggcacttgttagcgtcttcgttgtgcagctgcagctccacgtcgggtacttcgtcctggggagaatcctctgcgcattgctgggcgattttggagggctgctggccgcgtcatttgctagtgttgcagatgtgagttcttccaggagcaggacgtttcgtatggcgctgctggaagcatctataggcgtcgctggaatgttggcctccctgctgggaggtcattggcttagagcccaggggtatgctaatcctttctggctcgcgctggccctcctaattgccatgacattgtacgccgccttttgttttggcgagacccttaaggaacccaaatcaactcggctgtttacatttcggcaccatcgctctattgttcaactatacgtggctcctgcgcctgaaaaatctaggaaacacctggccttatattcccttgcgatcttcgttgttattacggtgcactttggagctcaagacattctgacactgtacgagctgtctacacccttatgttgggactcaaagcttatcgggtatgggtccgcggcccagcacctgccttatctcacctcgctgttggccctgaaactgttacagtactgcctggccgatgcctgggtcgctgaaatagggctcgctttcaatattctcggaatggtcgtgtttgccttcgcaactataacgcctctgatgtttaccggcgccctgttctcagcagtggcgtgcgtgaatagcctggcgatgctgaccgctagcgggtttaattctctgtacccagcaacactgaatttcatgaaagggtttccattcctgttaggggcaggcttgctgctaataccggcagtcctgattggcatgctcgaaaaagcagatccacatctagaattccagcagttccctcagagcccatag

SEQ ID NO: 84168 - DNA, 1293 bp, Artificial Sequence
  derived and/or modified sequence
atggagggcagcgccagccccccagagaagccccgggcccggcctgctgctgctgtgctgtgccggggccctgtggagcccctggtgttcctggccaactttgccctggtgctgcagggccccctgaccacccagtacctgtggcaccgcttctctgctgacctgggctacaacggcacccggcagaggggcggctgcagcaacagatctgctgaccccaccatgcaggaggtggagaccctgaccagccactggaccctgtacatgaatgtgggcggcttcctggtgggcctcttcagcagcaccctgctgggcgcctggagcgacagcgtgggcagaagacccctgctggtgctggccagcctgggcctgctgctgcaggccctggtgtctgtgtttgtggtgcagctgcagctgcacgtgggctactttgtgctgggccgcatcctgtgtgccctgctgggggactttggaggcctgctggccgccagctttgcctctgtggctgatgtgagcagcagccgcagcaggaccttcaggatggccctgctggaggccagcattggagtggccggcatgctggccagcctgctgggcggccactggctgcgggcccagggctacgccaaccccttctggctggccctggccctgctgattgccatgaccctgtatgctgccttctgcttcggggagaccctgaaggagcccaagagcaccaggctcttcaccttccgccaccacaggagcatcgtgcagctgtatgtggccccagcccctgagaagagcaggaagcacctggccctgtacagcctggccatctttgtggtgatcaccgtgcactttggagcccaggacatcctgaccctgtatgagctgagcacccccctgtgctgggacagcaagctgattggctacggcagcgctgcccagcacctgccctacctgaccagcctgctggccctgaagctgctgcagtactgcctggctgatgcctgggtggccgagatcggcctggccttcaacatcctgggcatggtggtgtttgcctttgccaccatcacccccctgatgttcaccggggccctcttctctgctgtggcctgtgtgaacagcctggccatgctgacagccagcggcttcaacagcctgtacccagccaccctgaacttcatgaagggcttccccttcctgctgggcgccggcctgctgctgatcccagctgtgctgattggcatgctggagaaggctgacccccacctggagttccagcagttcccccagagcccctag

SEQ ID NO: 84169 - DNA, 1293 bp, Artificial Sequence
  derived and/or modified sequence
atggagggcagcgccagcccccccgagaagccccgggcccggcccgccgctgctgtgttgtgtagagggccagtggagccactggtgttcctggcaaactttgccctggtattgcaagggcctctgaccacgcagtatctgtggcaccgcttctccgccgacctggggtacaatggcactaggcagcgcggaggatgctcaaatcgcagcgcagacccaactatgcaggaggtggagactctgaccagtcattggaccttatacatgaatgtcggagggttcctggttgggctgttctccagtacgctgctgggcgcttggtcggattcggtgggccgacggcccttactggtgctggcctccctcgggctgcttctgcaagccctggtttccgtcttcgtggtccagctgcagctccacgtgggctattttgtgttgggacgaatcctgtgcgccctcctgggagatttcggaggcctgctcgctgcctccttcgcctctgttgccgatgtgagttcatctaggagtagaacattcagaatggctcttctggaggccagtatcggggttgccggaatgctggcgagcctgttaggcggccactggctgagggctcagggctatgctaacccattctggctggcactggcccttctgatcgccatgactctctacgcagccttctgtttcggggagactctgaaagaaccaaagtctactagactgttcacattccggcaccatcggagtatcgtccagctatacgttgcgcctgcaccagaaaaaagtcggaaacatctggccctatacagcctagctatttttgtggtgatcaccgtgcacttcggcgcccaggatatactcactctgtacgaactgtctacaccgctgtgttgggactctaagctcataggatacggatccgcagctcagcacctgccatacctcacctcactgctggctctcaaactcctgcagtactgcctcgccgatgcttgggttgcagagatcggattagccttcaatattttgggcatggtggttttcgccttcgctacgatcacaccacttatgttcacaggcgcgctgtttagtgctgttgcctgcgtcaacagcttagccatgttgacagcctccggcttcaacagcctatatcctgccacacttaattttatgaagggcttccctttccttctgggagctggtctgctgctaatcccagccgtgctcatcggtatgctggagaaagcagacccgcacctcgagttccagcaattcccccagtcaccttag

SEQ ID NO: 84170 - DNA, 1293 bp, Artificial Sequence
  derived and/or modified sequence
atggaaggatcagcatctccccctgaaaaaccacgcgctagaccagcagccgctgtattgtgccgaggcccagtggagcccttggtgtttctggctaacttcgccctggtgttacaaggcccactgacaacccaatacctttggcataggttcagcgcggaccttggctacaatggaactcgccagcgaggaggctgcagcaatagatctgcagaccctacaatgcaggaagtggagacgctgaccagccactggactctgtacatgaatgtgggaggcttcctcgttggccttttttctagtaccctgctcggcgcatggagcgattcagttggcagacggccactgctggtgctggccagcttaggcttgttgctccaggcccttgtgtccgtattcgtagtgcaattgcagctccacgttggctactttgttttgggccgaatcctatgcgccctcctgggtgattttggaggactcctggcagcctcattcgcgagtgttgctgacgtctcgtcttccaggtcccggacttttagaatggcgctcctggaggcctctattggggttgcaggcatgttggcctccctcctggggggacactggttgagagcacaggggtacgccaatccgttttggctcgctctcgctctgctgatcgctatgactttgtacgctgccttttgctttggcgagacgctgaaagaaccaaagtccacaagactgtttactttcaggcatcatcgctccatcgttcagctatatgtagcacccgctcccgagaagtcccggaaacatctcgcactatattcccttgctatcttcgttgtgatcaccgtgcactttggagcacaagacatacttactttatatgagctgagcacacctctgtgctgggattctaagctgatcggttatggtagcgctgctcagcatctgccctatctaacttctctcctcgctctgaaactcctccaatactgtcttgccgacgcttgggtggcggaaatcggtctggcctttaatatcctcggcatggtagtttttgctttcgccaccatcacgcccctgatgttcacaggggctctttttagtgccgtggcatgtgtgaattctcttgcaatgttgaccgcctcaggttttaatagcctgtacccagccacactcaactttatgaaggggttcccatttttacttggagccggactcctgctgatcccagcagtgctgatcggaatgctggaaaaggccgatcctcacctagagttccaacagttcccacagagcccttag

SEQ ID NO: 84171 - DNA, 6400 bp, Artificial Sequence
  derived and/or modified sequence
acagcgcaagccccacgccacgcgtcgctggtcccaggcagcgagtcgctcgcgcgccccgccgcccgcctggcgacagctccgccgcgcacgcacatggaggggagcgcgagccccccggaaaagccccgcgcccgccctgcggctgccgtgctgtgccggggcccggtagagccgctggtcttcctggccaactttgccttggtcctgcagggcccgctcaccacgcagtatctgtggcaccgcttcagcgccgacctcggctacaatggcacccgccaaagggggggctgcagcaaccgcagcgcggaccccaccatgcaggaagtggagacccttacctcccactggaccctctacatgaacgtgggcggcttcctggtggggctcttctcgtccaccctgctgggagcttggagcgacagtgtgggccgccgcccgctgctagtgctggcctcgctgggcctgctgctccaggccctagtgtccgtttttgtggtgcagctgcagctccacgtcggctacttcgtgctgggtcgcatcctttgtgccctcctcggcgacttcggtggccttctggctgctagctttgcgtccgtggcagatgtcagctccagtcgcagccgcaccttccggatggccctgctggaagccagcatcggggtggctgggatgctggcaagcctcctcgggggccactggctccgggcccagggttatgccaaccccttctggctggccttggccttgctgatagccatgactctctatgcagctttctgctttggtgagaccttaaaggagccaaagtccacccggctcttcacgttccgtcaccaccgatccattgtccagctctatgtggctcccgccccagagaagtccaggaaacatttagccctctactcactggccatcttcgtggtgatcactgtgcactttggggcccaggacatcttaaccctttatgaactaagcacacccctctgctgggactccaaactaatcggctatggttctgcagctcagcatctcccctacctcaccagcctgctggccctgaagctcctgcagtactgcctggccgatgcctgggtagctgagatcggcctggccttcaacatcctggggatggtggtctttgcctttgccactatcacgcctctcatgttcacaggtgctctcttttctgctgtggcctgtgtgaatagcctggccatgctgacggcctccggcttcaactcactctacccagccactctgaactttatgaaggggttccccttcctcctgggagctggcctcctgctcatcccggctgttctgattgggatgctggaaaaggctgatcctcacctcgagttccagcagtttccccagagcccctgatctgcctggaccagaagacagagggcaagaggagcaaagtgaacaccaagcaactggaggtctgcagctggaagcccagcccacagcaggacaagcaactcttgtctaagggcagtgctctctttggacgaggtagtcaagagagaccaaggcaccaccccatccacagctgacccagcctctgtctaggatctagaatcataacccacacaggcccactgcaggacaggtggcagaggagctatttgggacaggagtcagttctccctttctgctatccatcacttataaccccacaggccagaggagaggtcctgagagaggtgacacttcagggaccagaggcagcacgagggctggcatctctccttccagcccaaactgcacagccccaaccaggttcccaacacgtgtagcagtcatcagccattccttaacaatgaatgtggtacctggttagtgccagccttgggaaggagggagggaggtaagaggggcttggtgatctctggaggaagagtgttgcctttgctgtggttggggaatcgatccttggctatggcctacccactcccctggctgaagagtgccaatcattacaaatcagcttcagcaaactgaaacaaaccttctggtgccttgggctttggggccctctgttttcctgctcccagtctgcctgccatacgttagacaacagaagctgctgggctgggcaggagccctgagctgcctggtggattggtaccaagtggggccagccagggcttctactgactcgctgtgcaaccttgagcaagccccactaggaacggctagatcagcaatgccccaaattgttgaatcgtggtgatcacatttggatggacaagttaggaaacttagctgattctctgagatacttcccacttcctcatacattctacaatgagatgcctctcttcatgggcctggggaaaggatgaatgagtgtggctggacttttgacctttaatgtccctgagcagttcttggcccttggggagaagtagggggaggatctggctgactcagccccaaccgaggggtagcagctgcagcccagccaagcagaacaccctggccctacagacctgtgtctgagcaggctttggaggaaaggccacttctgagtcctctgtctcaggagaagccaggcctaggtgcttgacctggtgatctgagctgtgtttgtcctagtatgggtggcagtcacctctgaacacactggccttggcttagaggaggcttgtgacttcagctgttccagctggggctggatgctggactctgattccctcagagagacagaagatcgggcagaggtcaaccagaaggccacacagggcagtggacaacagtggagggtataccaaatagaaataaaacgcaggaaacctctctgaatactgcccttggggacctcaggagggagtgggactgattggagacaaagagccagaaatcatcccctggagatactcagacactgtattgttattggcgctgtcctgtgagggcagtgtccaggctgccctgcttgtcatatccatgccctggctctggccccggtgagcacttgtgctgcatgaggaaaggaggatcaggtggggtcaaaaccaaagcatcgaggctggcactggccaagacagactctggcagggaggggagtggaaggaaggagccccaaacctggagtgagacctttgactttctgatgatgtggccaagaactaggagtcacctggccagcacagccaagagtggggctgggggcgccagctttaaggtgtcaacacctggcccttgcggggaaagagccttcagcagcccccacggcctggagcctgggtttattggagggtgctttcttaccctctgaacccagtggaggagggggcaatgggatattcctgctctgtatggcctctgggtcagctttttgttgcaaaatcctatcccccgctgctagattctttgaagcaagggagaagcaatagcccagcctcagaatgattctcaggaaagcaattccactgccagtggactgggtgccaggaggcctaggtctggatctggggctgccactaatgacaggaaagtgggcttatcctcaacctttctgagcctcagtgtcattatctgtaaaatggggatgataataccaggtagagttgctctgatgactggagaccatggagcggagtgtttgggaaatggcaaagatttgtgagggcttcgtgctttagagatttgctacccttaaccaccagcatcagctcacctgggaatctgtaagaaatgcagagtcctaggccccaccccagatctcctgattttaacaacattcccaggtgacttggatgcatgttaaagttggagaagctgccctaagtgacaaccctttgccttttcaggactttgcctctttccacagagctgcaggttctgtctaggctgcttttactgccatgggggctgcctggtccctgagtaagcagtgggtagccctggatggctgaggggctggggaagccagctgggccagaccaggaaggagcctgaggcacagcaccaaggcatggggtagggtgggctttgaggcacggcctccccatgcccagacccaggcccaaacaggaggctcctgtgcaccagcaagtgcagcaaagctggctgcagtgacaaggaagtcagagggagggctggtttgcctcaaccctcgccctggatgtggcaaaagataccacaccgaaggaagctgtaggggatctgggacttagtcaggctagctaagggcactgagtgattacagggcaaggccacagagcggcaggaagttgtaagtgcaggggccaggcacagtctgagtggagagccatgatggcactcatccctggctggctcctgggcccaggcctttgctcagaatacagtgcccaggcccgcctgggcattgccttaattcctgtctgaggctgccttccttcatcctcctcaagctgactgctatcagcaggagaagggaatgcagaaccacccccaccccaactccagtgtctccagaactgagcagggaccctccccatgacggagacagacaacccaatggcagggcctgggggagttctaacctcccgtgcccaagcctgacttcccttccctctccagatactgaggaaagtgggttggaggtgggccatgagggtgggggacagggggagggagagccatttcctaagaagagcccaggttgtctcagcccagggagactggtttcaggagctgttccttcagaaaggacgatggaaatggaagtcacagcagggctggggaactggggactggttaggttggacccatgggtgcagcaccctccaaactggtgtcagagcctgcagatgagtcccgggaggagcggccctgcaggaagcggatgatcttctcaatggtggcctcctggtattcgtgggaccacctgtgggcacaggagccaatgtggttcagacagctgggcagagggagctgctagtcagctgtttgcccacactctgcctgtcatggtgatttgtaccctacccccctggtcccagggccctggggctcacttgataccgttgaaagtaagcacagcctgcatgtcctcaggcaggacctggggctcaggccactcgaagccatcaatgatgggcacaatgttcttgccgcagcttaaagcagtcacaatctcctggagaaagaaaggaaaggaggaagatacccctgtacccatctagggacccttgtagccaggcaggtgctgggaggcccactggcccgaggctgggcccagggcaggacaccagtcctgatgtccaccttgatgtctaccttaacccttgtagtgtaataaaaaataaatatttttcctttgcccagagttcctggcacagagctgctaaaacccttggaatctcttgagtgatgagtgtctttgtatgctaaagagatgattccccactgggggcccggggggtgctatgggggtagcctagatagtttcaggaagagggctggtcaccagggagaccagggcatgactagaggattggaactttcagccccacctcccagcctccagagaggtgctggagattgagttcaatcaccaatggccaatgatttaatcaatcatgcctacataatggaacctccataaaaacccccaaacaaggggttttgaagagcctccaggttgataaacaggtgtaggtgctgggaaggtggtagaaggcatggcatccacacctccaccctccatacgtagagatcctatgtatctcttccatttggctattcttgagctgtgtcctttataactgtgaaattaaataattcagctgggcatggtgggtcacgcctgtaatcccaacactttgggaggctgaggcaggaggatcacttgagcccaggattttgagattaataatattatttattactattattcaagctttgttaaatcaaacctaaagctcttggaactttaagttattctgagccttgacaggaattggtctctgcagcctgagtcatggggcatgcagctgcaacttccacctattttttttttttctgtaattacttaggaagaccaaatggcaccagagataagactcccttagatccccacttagatcaccaccctttctcagggggtaataaagtcatcttccttggaatgtagcaatctataaccaatcaaagcactgtaacatacgcactggtcttgtatggaaaatgttgtaatcctgctaaaattcctctctctttgcctgtggaagtgaaaccttaacttctccagtttggaatgctcaccccatgcctttggagtcaatgcttactgggtggctattctcaaactttgcactcaaagaaactctatacttagtcttattttctgaatctcattatttaaggttgacataataaacaactaatagtaagtaaagtg

SEQ ID NO: 84172 - protein, 74 aa, Artificial Sequence
  derived and/or modified sequence
MDSEVQRDGRILDLIDDAWREDKLPYEDVAIPLNELPEPEQDNGGTTESVKEQEMKWTDLALQYLHENVPPIGN

SEQ ID NO: 84173 - DNA, 225 bp, Artificial Sequence
  derived and/or modified sequence
atggattctgaggtgcaacgcgacggcaggatactcgatctcattgatgatgcctggcgcgaagacaaattgccatacgaggatgtggcgatcccccttaatgagctgcccgaaccagagcaggacaatggaggcaccactgagagcgtaaaagagcaagaaatgaaatggactgacctcgcactgcagtacctccacgaaaacgtccctcctatcggaaattag

SEQ ID NO: 84174 - DNA, 225 bp, Artificial Sequence
  derived and/or modified sequence
atggattctgaagtccagcgagatgggcgtattttggaccttatagacgatgcgtggagagaagacaaacttccctacgaggatgtcgccatcccattaaatgagctgcccgaaccggaacaggataacggaggcaccacggaaagtgtgaaagagcaggagatgaaatggactgatctggcactgcagtatttacacgagaatgttccgccaatcggaaattag

SEQ ID NO: 84175 - DNA, 225 bp, Artificial Sequence
  derived and/or modified sequence
atggattcagaggtacagagggatggtagaattctggacctgatcgacgatgcctggcgcgaggacaagctgccctatgaagacgtggccatcccactcaacgaacttccagaacctgagcaggataatggtgggaccacagagtccgttaaggagcaggagatgaaatggacagatctggctctacagtatctgcatgagaatgtccccccaattggtaattag

SEQ ID NO: 84176 - DNA, 225 bp, Artificial Sequence
  derived and/or modified sequence
atggatagcgaagtccagagggacggccgaatcctcgatctgatcgacgatgcctggcgagaagataaactgccatatgaggacgtggcgatacctcttaacgaacttcccgagcctgaacaagacaatggaggcacaacagaaagtgtcaaagaacaagagatgaagtggacagatttagcacttcagtacctgcatgagaacgtcccccctattggcaattag

SEQ ID NO: 84177 - DNA, 225 bp, Artificial Sequence
  derived and/or modified sequence
atggattctgaggtgcagagagatggccgcatcctggacctgattgatgatgcctggagggaggacaagctgccctatgaagatgtggccatccccctgaatgagctgcctgagcctgagcaggacaatggaggcaccacagaatctgtgaaggagcaggagatgaagtggacagacctggccctgcagtacctgcatgaaaatgtgccccccatcggcaactag

SEQ ID NO: 84178 - DNA, 1209 bp, Artificial Sequence
  derived and/or modified sequence
agtgcagacacgtgatgcgggggagggggggggggcgtggcaggagcaagcgtctgccgcggtggccgggtgccgatttgacaagatcaaagctgcaggaaaatggacagtgaggttcagagagatggaaggatcttggatttgattgatgatgcttggcgagaagacaagctgccttatgaggatgtcgcaataccactgaatgagcttcctgaacctgaacaagacaatggtggcaccacagaatctgtcaaagaacaagaaatgaagtggacagacttagccttacagtacctccatgagaatgttccccccattggaaactgacgcttggctcctttcttgtggatggattttctcaaagtacacagataaagcatggtttgtttcagtctccaaattcaaacctttgagtaataaatcagcactcaaaaatgtacacccatttagtttgtggtagcaaagtgcaatgcgaaattgaatgagaaactgagatttctcagtaatggtgaatatttcgctctttaaacctaaaactcttcattgagtagcttatatttgaacatgattggttaaacatttgcctctacctctgattttgctttgctgtcaaagtttaacaccttccaactacttatgtgtgtcctgtaacacaggtgattgaacgtatgagagggaaaggcaaagaaaaaggaagccagacactaggagaattattaacttctcatacttccccacattgagaagcattcggagtgtatttagcctgtagatgttgtgatatgcaaatatcccattccctggttactggcattcctaagattcttcatggtattttcaaactttggataaatttacagattagaaagatatctgacagttaatctctgttctccttacaaattccttttgtgctgctggaaaggatctttggctaggtggatgactagttttattcaaagccttttctcaaagccctttcagttacaaccaccccactatggaatcagtatttagttatacatttgtataagaacctgtattttgaaaaacacattcatgtatatttattcctggaattatttgcctgttaaacagtgtctttcatgttctctccccagattgtaaactctgtaagaagctgcttgtatctgtatcccttgttgaaactctgaaaacactgaataactaaaatctcttctcatcctt

SEQ ID NO: 84179 - DNA, 1840 bp, Artificial Sequence
  derived and/or modified sequence
gcagacacgtgatgcgggggagggggggggggcgtggcaggagcaagcgtctgccgcggtggccgggtgccggtaagggtttccagcgcccccggcctaggttttggaggcgcgggaatgcgttcgttgctcagtgtcggacttccccctattcccatcggccgaggctgtcactttacgctcataaccgtttttctttactgcactcgtgtcgggaggaaagggacttgcgtggcacccccagacctccccgtctccgcttccacgtttggtacatcctgcctgaggcaggaagccgcagctgagggacggcctgtcgtacggtgcggatggtggtggcctgcgaggctcatttctagcaaggaacaaggctttcccgctttgattttataaatattatgtttacaaagctgtaatatatagaaattgataagacgtgtccctgtccctggaaacgcaggcaccgcgtgtttggaaagacattcatctgggctgtttgacagactccccagttggtgccatgctctgtgcttagggaactgtgagacccctggaggggtgggtaccgggaccgcactcagcctggggtttggaggcggcctcctataggaagcgacctgggacctaagatttttagactgactgtgggttcactggaataaaaaggaagaaacaaagagcattgcaggcatcgggactgtcacatttgacaagatcaaagctgcaggaaaatggacagtgaggttcagagagatggaaggatcttggatttgattgatgatgcttggcgagaagacaagctgccttatgaggatgtcgcaataccactgaatgagcttcctgaacctgaacaagacaatggtggcaccacagaatctgtcaaagaacaagaaatgaagtggacagacttagccttacagtacctccatgagaatgttccccccattggaaactgacgcttggctcctttcttgtggatggattttctcaaagtacacagataaagcatggtttgtttcagtctccaaattcaaacctttgagtaataaatcagcactcaaaaatgtacacccatttagtttgtggtagcaaagtgcaatgcgaaattgaatgagaaactgagatttctcagtaatggtgaatatttcgctctttaaacctaaaactcttcattgagtagcttatatttgaacatgattggttaaacatttgcctctacctctgattttgctttgctgtcaaagtttaacaccttccaactacttatgtgtgtcctgtaacacaggtgattgaacgtatgagagggaaaggcaaagaaaaaggaagccagacactaggagaattattaacttctcatacttccccacattgagaagcattcggagtgtatttagcctgtagatgttgtgatatgcaaatatcccattccctggttactggcattcctaagattcttcatggtattttcaaactttggataaatttacagattagaaagatatctgacagttaatctctgttctccttacaaattccttttgtgctgctggaaaggatctttggctaggtggatgactagttttattcaaagccttttctcaaagccctttcagttacaaccaccccactatggaatcagtatttagttatacatttgtataagaacctgtattttgaaaaacacattcatgtatatttattcctggaattatttgcctgttaaacagtgtctttcatgttctctccccagattgtaaactctgtaagaagctgcttgtatctgtatcccttgttgaaactctgaaaacactgaataactaaaatctcttctcatcctttt

SEQ ID NO: 84180 - DNA, 225 bp, Artificial Sequence
  derived and/or modified sequence
atggacagcgaggtgcagcgggacggccggatcctggacctgatcgacgacgcctggagggaggataagttaccctatgaggatgttgccatcccgctgaatgaattaccagaaccagaacaggataatgggggtacgaccgagtccgtgaaggagcaggagatgaaatggactgacttggcactccagtacctccacgagaatgttcctcccataggcaattag

SEQ ID NO: 84181 - DNA, 225 bp, Artificial Sequence
  derived and/or modified sequence
atggacagcgaggtgcagcgggacggccggatcctggacctgatcgacgatgcttggagagaagataaattgccctacgaggatgtggccattccccttaacgaactgcctgaacccgagcaggacaatggcgggaccacggaatctgtaaaggagcaggagatgaagtggactgacctggccttacagtacctacacgagaacgttcctccaatcggcaactag

SEQ ID NO: 84182 - DNA, 225 bp, Artificial Sequence
  derived and/or modified sequence
atggacagcgaggtgcagcgggacggccggatcctggacctgatcgatgatgcttggcgggaggataaactgccctacgaagacgtggccatcccactcaacgaactcccagagcctgaacaagacaatggagggaccaccgagtccgtcaaggaacaagagatgaagtggactgacttggccctgcaatacttgcacgagaatgtaccgcccattggcaactag

SEQ ID NO: 84183 - DNA, 225 bp, Artificial Sequence
  derived and/or modified sequence
atggacagcgaggtgcagcgggacggccggatcctggacctgatcgacgatgcgtggagggaggacaagctgccatatgaggacgtcgcaatccccctgaatgagcttcccgagcctgaacaggataacgggggtactacggaatctgttaaagagcaggaaatgaagtggactgatctggccttgcagtatttacatgaaaatgtcccacccattggaaattag

SEQ ID NO: 84184 - DNA, 896 bp, Artificial Sequence
  derived and/or modified sequence
acactaaatgagcgggtccccttgtgccgtgaatgaagtagtcccaacagcgctagctagacagcagccctggcagggaggccgcactggggtctctccgctgaaaaggaaggtgggtccgccggggaagatttgacaagatcaaagctgcaggaaaatggacagtgaggttcagagagatggaaggatcttggatttgattgatgatgcttggcgagaagacaagctgccttatgaggatgtcgcaataccactgaatgagcttcctgaacctgaacaagacaatggtggcaccacagaatctgtcaaagaacaagaaatgaagtggacagacttagccttacagtacctccatgagaatgttccccccattggaaactgacgcttggctcctttcttgtggatggattttctcaaagtacacagataaagcatggtttgtttcagtctccaaattcaaacctttgagtaataaatcagcactcaaaaatgtacacccatttagtttgtggtagcaaagtgcaatgcgaaattgaatgagaaactgagatttctcagtaatggtgaatatttcgctctttaaacctaaaactcttcattgagtagcttatatttgaacatgattggttaaacatttgcctctacctctgattttgctttgctgtcaaagtttaacaccttccaactacttatgtgtgtcctgtaacacaggtgattgaacgtatgagagggaaaggcaaagaaaaaggaagccagacactaggagaattattaacttctcatacttccccacattgagaagcattcggagtgtatttagcctgtagatgttgtgatatgcaaatatcccattccctggttactggcattcctaagattcttcatggtattttcaa

SEQ ID NO: 84185 - DNA, 1420 bp, Artificial Sequence
  derived and/or modified sequence
tggcaggagcaagcgtctgccgcggtggccgggtgccggtaagggtttccagcgcccccggcctaggttttggaggcgcgggaatgcgttcgttgctcagtgtcggacttccccctattcccatcggccgaggctgtcactttacgctcataaccgtttttctttactgcactcgtgtcgggaggaaagggacttgcgtggcacccccagacctccccgtctccgcttccacgtttggtacatcctgcctgaggcaggaagccgcagctgagggacggcctgtcgtacgatttgacaagatcaaagctgcaggaaaatggacagtgaggttcagagagatggaaggatcttggatttgattgatgatgcttggcgagaagacaagctgccttatgaggatgtcgcaataccactgaatgagcttcctgaacctgaacaagacaatggtggcaccacagaatctgtcaaagaacaagaaatgaagtggacagacttagccttacagtacctccatgagaatgttccccccattggaaactgacgcttggctcctttcttgtggatggattttctcaaagtacacagataaagcatggtttgtttcagtctccaaattcaaacctttgagtaataaatcagcactcaaaaatgtacacccatttagtttgtggtagcaaagtgcaatgcgaaattgaatgagaaactgagatttctcagtaatggtgaatatttcgctctttaaacctaaaactcttcattgagtagcttatatttgaacatgattggttaaacatttgcctctacctctgattttgctttgctgtcaaagtttaacaccttccaactacttatgtgtgtcctgtaacacaggtgattgaacgtatgagagggaaaggcaaagaaaaaggaagccagacactaggagaattattaacttctcatacttccccacattgagaagcattcggagtgtatttagcctgtagatgttgtgatatgcaaatatcccattccctggttactggcattcctaagattcttcatggtattttcaaactttggataaatttacagattagaaagatatctgacagttaatctctgttctccttacaaattccttttgtgctgctggaaaggatctttggctaggtggatgactagttttattcaaagccttttctcaaagccctttcagttacaaccaccccactatggaatcagtatttagttatacatttgtataagaacctgtattttgaaaaacacattcatgtatatttattcctggaattatttgcctgttaaacagtgtctttcatgttctctccccagattgtaaactctgtaagaagctgcttgtatctgtatcccttgttgaaactctgaaaacactgaataactaaaatctcttctcatc

SEQ ID NO: 84186 - DNA, 225 bp, Artificial Sequence
  derived and/or modified sequence
atggatagtgaggtccagagagatggcaggatattagatctgatcgacgatgcttggagggaagataagttaccttacgaggatgtcgccatccctcttaacgaactgccggaaccagagcaggataatgggggaactacagaaagcgtgaaggagcaggaaatgaagtggaccgacctcgccctgcagtacctgcacgagaacgtgcctccaataggaaattag

SEQ ID NO: 84187 - DNA, 225 bp, Artificial Sequence
  derived and/or modified sequence
atggacagcgaagtgcagcgcgacggacgcattcttgatctgattgacgatgcttggcgtgaggacaagctgccatatgaggacgtagctatcccgctcaatgagctgcctgaaccggaacaagataacgggggaaccaccgaaagcgtcaaagagcaagagatgaagtggactgatctggcgctccaataccttcacgaaaatgtgccccctatcgggaattag

SEQ ID NO: 84188 - DNA, 225 bp, Artificial Sequence
  derived and/or modified sequence
atggacagtgaggtgcagcgggacggacgcattctggacctcattgacgatgcttggcgagaggacaagctcccctatgaggatgttgcaataccccttaatgagctgcccgagccagagcaggacaacggcggtacgactgagtctgtgaaggaacaagaaatgaagtggacagacctggccctccaatatttgcacgagaacgtgcctcctatcggcaattag

SEQ ID NO: 84189 - DNA, 225 bp, Artificial Sequence
  derived and/or modified sequence
atggatagtgaggtgcagagagacggaagaatactcgacctcattgacgatgcatggagggaagacaaattaccttacgaagatgtggccattcccctcaacgaactgccagagcccgagcaggacaatgggggtaccacagagtctgttaaagagcaagagatgaagtggaccgacttagccttacagtatttgcatgagaacgttccccctattggtaactag

SEQ ID NO: 84190 - DNA, 225 bp, Artificial Sequence
  derived and/or modified sequence
atggacagcgaggtgcagagagacggcagaatcctggacctgatcgacgacgcctggagagaggacaagctgccctacgaggacgtggccatccccctgaacgagctgcccgagcccgagcaggacaacggcggcaccaccgagagcgtgaaggagcaggagatgaagtggaccgacctggccctgcagtacctgcacgagaacgtgccccccatcggcaactag

SEQ ID NO: 84191 - protein, 438 aa, Artificial Sequence
  derived and/or modified sequence
MERRRITSAARRSYVSSGEMMVGGLAPGRRLGPGTRLSLARMPPPLPTRVDFSLAGALNAGFKETRASERAEMMELNDRFASYIEKVRFLEQQNKALAAELNQLRAKEPTKLADVYQAELRELRLRLDQLTANSARLEVERDNLAQDLATVRQKLQDETNLRLEAENNLAAYRQEADEATLARLDLERKIESLEEEIRFLRKIHEEEVRELQEQLARQQVHVELDVAKPDLTAALKEIRTQYEAMASSNMHEAEEWYRSKFADLTDAAARNAELLRQAKHEANDYRRQLQSLTCDLESLRGTNESLERQMREQEERHVREAASYQEALARLEEEGQSLKDEMARHLQEYQDLLNVKLALDIEIATYRKLLEGEENRITIPVQTFSNLQIRGQYSRASWEGHWSPAPSSRACRLLQTGTEDQGKGIQLSLGAFVTLQRS

SEQ ID NO: 84192 - DNA, 1317 bp, Artificial Sequence
  derived and/or modified sequence
atggaacggaggcgtattacgagcgctgcacgccgttcctatgtttcttctggagagatgatggtgggtggtctcgcgccaggaagacggctgggccctggcacccgattgagtctggcaaggatgccccctccactgcctactcgggtcgatttctccttggctggggccctaaatgccggctttaaagagacaagggccagcgaaagagcagagatgatggagctcaatgaccgttttgccagctatatcgaaaaggtgcggtttctggagcaacaaaacaaagctcttgccgcagagctcaaccagttgagagccaaagaacctacgaagttggccgatgtgtaccaggcggaactccgagagctgaggctgcgtcttgaccagctcactgccaattccgccaggctggaagtggagcgtgataacttggcccaggacctggctacagtgcgccaaaaattacaggacgaaactaacttgcgtcttgaggccgaaaacaatctggctgcataccggcaagaggccgatgaggctacactggcacggctcgatctcgaaaggaagattgagtccctcgaggaagaaattagatttctgagaaagatacacgaggaagaggttcgggagctccaggaacagttggcccggcaacaggtgcacgtggaactggatgtcgctaagccagatctgacagctgcattgaaagaaatccgaacgcagtacgaggccatggcttccagcaacatgcatgaggccgaggaatggtatcgctcaaagtttgctgatctcactgacgccgctgcccgcaacgccgaactgttgcgacaggccaagcacgaagcaaatgattacaggcgccagttacagagcctcacatgtgacttggaatcccttagggggactaatgagagcctcgagaggcaaatgcgcgaacaggaggagcggcatgtacgagaagcggctagctaccaagaggccttggctcggcttgaggaagaagggcagagcctaaaggacgagatggccagacacttgcaggagtaccaggatctcctgaacgtaaagctggcactggacattgagatcgctacttacaggaagctgctagaaggagaggagaaccgcatcaccatccctgtgcaaacctttagtaatcttcagattcgagggcagtactccagagcctcatgggaagggcactggagtcccgccccaagctctagagcctgtcgtctacttcagacggggactgaagatcaaggcaagggaattcagttgagcctgggggccttcgtgaccctgcagagaagctag

SEQ ID NO: 84193 - DNA, 1013 bp, Artificial Sequence
  derived and/or modified sequence
agagccagagcaggatggagaggagacgcatcacctccgctgctcgccgctcctacgtctcctcaggggagatgatggtggggggcctggctcctggccgccgtctgggtcctggcacccgcctctccctggctcgaatgccccctccactcccgacccgggtggatttctccctggctggggcactcaatgctggcttcaaggagacccgggccagtgagcgggcagagatgatggagctcaatgaccgctttgccagctacatcgagaaggttcgcttcctggaacagcaaaacaaggcgctggctgctgagctgaaccagctgcgggccaaggagcccaccaagctggcagacgtctaccaggctgagctgcgagagctgcggctgcggctcgatcaactcaccgccaacagcgcccggctggaggttgagagggacaatctggcacaggacctggccactgtgaggcagaagaagcagatgaagccaccctggcccgtctggatctggagaggaagattgagtcgctggaggaggagatccggttcttgaggaagatccacgaggaggaggttcgggaactccaggagcagctggcccgacagcaggtccatgtggagcttgacgtggccaagccagacctcaccgcagccctgaaagagatccgcacgcagtatgaggcaatggcgtccagcaacatgcatgaagccgaagagtggtaccgctccaagtttgcagacctgacagacgctgctgcccgcaacgcggagctgctccgccaggccaagcacgaagccaacgactaccggcgccagttgcagtccttgacctgcgacctggagtctctgcgcggcacgaacgagtccctggagaggcagatgcgcgagcaggaggagcggcacgtgcgggaggcggccagttatcaggaggcgctggcgcggctggaggaagaggggcagagcctcaaggacgagatggcccgccacttgcaggagtaccaggacctgctca

SEQ ID NO: 84194 - DNA, 1445 bp, Artificial Sequence
  derived and/or modified sequence
agagcaggatggagaggagacgcatcacctccgctgctcgccgctcctacgtctcctcaggggagatgatggtggggggcctggctcctggccgccgtctgggtcctggcacccgcctctccctggctcgaatgccccctccactcccgacccgggtggatttctccctggctggggcactcaatgctggcttcaaggagacccgggccagtgagcgggcagagatgatggagctcaatgaccgctttgccagctacatcgagaaggttcgcttcctggaacagcaaaacaaggcgctggctgctgagctgaaccagctgcgggccaaggagcccaccaagctggcagacgtctaccaggctgagctgcgagagctgcggctgcggctcgatcaactcaccgccaacagcgcccggctggaggttgagagggacaatctggcacaggacctggccactgtgaggcagaagctccaggatgaaaccaacctgaggctggaagccgagaacaacctggctgcctatagacaggaagcagatgaagccaccctggcccgtctggatctggagaggaagattgagtcgctggaggaggagatccggttcttgaggaagatccacgaggaggaggttcgggaactccaggagcagctggcccgacagcaggtccatgtggagcttgacgtggccaagccagacctcaccgcagccctgaaagagatccgcacgcagtatgaggcaatggcgtccagcaacatgcatgaagccgaagagtggtaccgctccaagtttgcagacctgacagacgctgctgcccgcaacgcggagctgctccgccaggccaagcacgaagccaacgactaccggcgccagttgcagtccttgacctgcgacctggagtctctgcgcggcacgaacgagtccctggagaggcagatgcgcgagcaggaggagcggcacgtgcgggaggcggccagttatcaggaggcgctggcgcggctggaggaagaggggcagagcctcaaggacgagatggcccgccacttgcaggagtaccaggacctgctcaatgtcaagctggccctggacatcgagatcgccacctacaggaagctgctagagggcgaggagaaccggatcaccattcccgtgcagaccttctccaacctgcagattcgaggtcagtacagcagggcctcgtgggaagggcactggagtcctgccccctcctccagggcctgtaggttgctccagactgggactgaggatcagggcaaagggatccagctctccctgggggccttcgtgacactgcagcgctcctagccagagcctatcataccagggtacttctaggtggggcttgcagctgcccctgtcctgctaggccctggtccctcttcccctccctgcaccccattcgacagcagaactgggtgagagctt

SEQ ID NO: 84195 - DNA, 1317 bp, Artificial Sequence
  derived and/or modified sequence
atggagcggcggcgcatcaccagcgctgcccggcgctcctatgtgtcctctggagagatgatggtgggcggcctggcccctggaagaaggctgggccctggcacccggctgagcctggccaggatgcccccacccctgcccaccagggtggacttcagcctggccggggccctgaatgccggcttcaaggagacccgggccagcgagagagctgagatgatggagctgaatgacagatttgccagctacatcgagaaggtgcgcttcctggagcagcagaacaaggccctggccgctgagctgaaccagctgcgggccaaggagcccaccaagctggctgatgtgtaccaggccgagctgcgggagctgcggctgcggctggaccagctgacagccaacagcgcccggctggaggtggagcgggacaacctggcccaggacctggccaccgtgcggcagaagctgcaggatgagaccaacctgcggctggaggccgagaacaacctggccgcctaccggcaggaggctgatgaggccaccctggcccggctggacctggagaggaagattgagagcctggaggaggagatccgcttcctgaggaagatccacgaggaggaggtgcgggagctgcaggagcagctggcccggcagcaggtgcacgtggagctggatgtggccaagccagacctgacagctgccctgaaggagatccgcacccagtatgaggccatggccagcagcaacatgcatgaagctgaggagtggtaccgcagcaagtttgctgacctgacagatgctgctgccagaaatgctgagctgctgcggcaggccaagcatgaggccaatgactaccgccggcagctgcagagcctgacctgtgacctggagagcctgcggggcaccaatgaaagcctggagcggcagatgagggagcaggaggagagacatgtgcgggaggccgccagctaccaggaggccctggcccggctggaggaggagggccagagcctgaaggatgagatggcccggcacctgcaggagtaccaggacctgctgaatgtgaagctggccctggacattgaaattgccacctacaggaagctgctggagggggaggagaaccgcatcaccatccctgtgcagaccttcagcaacctgcagatccggggccagtacagccgggcctcctgggagggccactggagccctgcccccagcagccgggcctgccgcctgctgcagacaggaacagaggaccagggcaagggcatccagctgagcctgggcgcctttgtgaccctgcagaggagctag

SEQ ID NO: 84196 - DNA, 1317 bp, Artificial Sequence
  derived and/or modified sequence
atggagcggcggcggatcaccagcgccgcccggcggagctacgtgtcctccggggaaatgatggtaggcgggctcgccccgggcagacgactaggccccggcacccggctaagtttggccagaatgcctccaccgctgccaacccgagtggactttagcttggccggggcactcaacgccggttttaaggagactagggcatccgagcgagcagagatgatggagctgaacgaccggtttgcttcctacatcgaaaaggttcgttttctggaacagcaaaataaggcactggccgccgaactgaaccagctccgtgcgaaagagcccaccaaacttgctgatgtgtaccaggcggaattgcgcgagctacggctccggctggatcagctcactgctaacagtgcccgactggaggtcgagagagacaaccttgcgcaggacctcgccaccgtcaggcagaagctgcaggatgagacaaatctaagactcgaggccgaaaataatctcgctgcctacaggcaggaagcggacgaggcaaccctcgcccggcttgatctcgaacgtaagattgagagtctggaagaggagataagatttttgcgcaagatccacgaggaagaggtgagggagctgcaagaacagctggcgcgccagcaggtccacgtagagcttgatgtagctaaacccgacctcacggcggccttgaaggaaatacgcacacagtacgaggcaatggcctcatctaatatgcacgaagctgaggagtggtatcggtcaaagtttgctgacctgaccgacgctgcagccaggaatgcggagctgctgcgccaggccaaacatgaagcaaacgattatagaaggcagctccagtccctaacttgcgatctggaaagtctaagaggtacgaatgagtccctagagagacagatgcgggaacaggaggagcgtcatgtgagagaggccgctagctaccaggaagccctcgccaggttggaggaggagggtcagtctctgaaggacgaaatggccagacacttacaggaataccaggatctgctcaacgtcaagttggctcttgacattgagattgcaacttatagaaagttgcttgagggcgaggaaaatcggattacaatcccggtgcagacattttctaacttgcaaataagggggcagtactctagagcctcatgggaggggcactggagtccggctccatcaagccgggcctgtagactgctccagacaggaaccgaagatcaaggtaagggcattcaattatcattgggggccttcgtcacattgcaacgatcctag

SEQ ID NO: 84197 - DNA, 1317 bp, Artificial Sequence
  derived and/or modified sequence
atggagcgcagacgcataacaagtgcggctaggagatcttacgtgtcatctggagaaatgatggttggtggcctggctccaggaaggagactagggcctggaactaggttatcactcgcaaggatgccgcctcccctccctactcgagtggacttttccctggcaggagcattgaatgccggattcaaggaaaccagagcatcagaacgggcagagatgatggaattgaacgataggtttgccagctacatcgaaaaagttagatttcttgagcagcagaataaggccctcgctgctgagctgaaccaactgagagcaaaggagcctactaaactggcggacgtgtatcaggcggagctgagagaactgcgcctacggttggaccagttaacagctaattctgcgcgtctcgaggtcgagagggataatctcgcacaggatttagctacagtgcgacagaagctccaggacgagactaatctccgcctggaggccgaaaacaatttagctgcatacagacaggaagctgacgaagccacattagcccgtcttgaccttgagcggaagatagagtctctcgaagaagagattaggtttctgaggaaaattcacgaagaagaggttcgggagcttcaggagcagctggccaggcagcaggtccacgttgaactggacgtggccaagccagatctcacagccgcactaaaggaaatccgcacacagtatgaggctatggcctcctccaacatgcacgaagcagaagaatggtacagatctaagtttgccgacctgactgatgctgccgctcgcaacgctgagctactgagacaggcaaagcatgaggccaatgattaccggcgacagctccaatcgttaacctgtgatctggaatcccttagaggcacaaatgaatccttggagcgccagatgcgcgaacaggaggagcgtcacgtaagagaggctgccagctaccaggaagcgttggcccgtctggaagaagaagggcaatccctgaaagacgagatggccagacacctgcaagaatatcaggacctgctgaacgttaaactggcactggatatcgagatcgctacttataggaagttactggagggcgaagaaaatagaattacaattcctgtgcagactttctcaaatcttcagatcagggggcaatactcaagagcatcctgggaaggccattggagtccagccccatccagccgagcttgcaggttgctccaaaccggtactgaagaccagggcaagggaattcagctcagcctaggtgcgtttgtgaccctgcagcggagctag

SEQ ID NO: 84198 - DNA, 1317 bp, Artificial Sequence
  derived and/or modified sequence
atggagagaagaagaatcaccagcgccgccagaagaagctacgtgagcagcggcgagatgatggtgggcggcctggcccccggcagaagactgggccccggcaccagactgagcctggccagaatgcccccccccctgcccaccagagtggacttcagcctggccggcgccctgaacgccggcttcaaggagaccagagccagcgagagagccgagatgatggagctgaacgacagattcgccagctacatcgagaaggtgagattcctggagcagcagaacaaggccctggccgccgagctgaaccagctgagagccaaggagcccaccaagctggccgacgtgtaccaggccgagctgagagagctgagactgagactggaccagctgaccgccaacagcgccagactggaggtggagagagacaacctggcccaggacctggccaccgtgagacagaagctgcaggacgagaccaacctgagactggaggccgagaacaacctggccgcctacagacaggaggccgacgaggccaccctggccagactggacctggagagaaagatcgagagcctggaggaggagatcagattcctgagaaagatccacgaggaggaggtgagagagctgcaggagcagctggccagacagcaggtgcacgtggagctggacgtggccaagcccgacctgaccgccgccctgaaggagatcagaacccagtacgaggccatggccagcagcaacatgcacgaggccgaggagtggtacagaagcaagttcgccgacctgaccgacgccgccgccagaaacgccgagctgctgagacaggccaagcacgaggccaacgactacagaagacagctgcagagcctgacctgcgacctggagagcctgagaggcaccaacgagagcctggagagacagatgagagagcaggaggagagacacgtgagagaggccgccagctaccaggaggccctggccagactggaggaggagggccagagcctgaaggacgagatggccagacacctgcaggagtaccaggacctgctgaacgtgaagctggccctggacatcgagatcgccacctacagaaagctgctggagggcgaggagaacagaatcaccatccccgtgcagaccttcagcaacctgcagatcagaggccagtacagcagagccagctgggagggccactggagccccgcccccagcagcagagcctgcagactgctgcagaccggcaccgaggaccagggcaagggcatccagctgagcctgggcgccttcgtgaccctgcagagaagctag

SEQ ID NO: 84199 - protein, 409 aa, Artificial Sequence
  derived and/or modified sequence
MQEAGDECEPEWCDAEDPLFILYTSGSTGKPKGVVHTVGGYMLYVATTFKYVFDFHAEDVFWCTADIGWITGHSYVTYGPLANGATSVLFEGIPTYPDVNRLWSIVDKYKVTKFYTAPTAIRLLMKFGDEPVTKHSRASLQVLGTVGEPINPEAWLWYHRVVGAQRCPIVDTFWQTETGGHMLTPLPGATPMKPGSATFPFFGVAPAILNESGEELEGEAEGYLVFKQPWPGIMRTVYGNHERFETTYFKKFPGYYVTGDGCQRDQDGYYWITGRIDDMLNVSGHLLSTAEVESALVEHEAVAEAAVVGHPHPVKGECLYCFVTLCDGHTFSPKLTEELKKQIREKIGPIATPDYIQNAPGLPKTRSGKIMRRVLRKIAQNDHDLGDMSTVADPSVISHLFSHRCLTIQ

SEQ ID NO: 84200 - DNA, 1230 bp, Artificial Sequence
  derived and/or modified sequence
atgcaagaagctggagacgagtgtgagcccgaatggtgtgatgccgaggatcccctgtttattctgtacacctccggctctacaggcaagcctaaaggcgtggtccacacagtaggcggctacatgctgtatgtcgccaccacgttcaaatacgtctttgatttccacgccgaagatgtgttttggtgcactgccgacatcggctggatcacaggccacagctacgttacatatggcccactggctaatggcgctacatctgtgctgtttgagggtataccgacgtatcctgacgtgaaccggctgtggtccattgtggacaagtacaaagtgacgaagttctacaccgcacccacagctatcagactgcttatgaagtttggtgacgagcccgtgaccaagcacagcagggcctctctgcaggtgctgggtaccgtgggggaacctattaaccctgaggcttggctctggtatcaccgggtcgtaggagctcaaaggtgcccgattgtggacacattctggcagactgagacaggaggtcacatgctgactcccttgcctggcgccacacccatgaagcctggatccgccaccttccccttctttggagtggcccctgctatcctcaacgagtcgggagaggagttggaaggagaggccgaaggttatttggtgttcaaacagccttggcccgggatcatgcggacagtgtacggcaatcatgagaggtttgagactacttacttcaagaagtttcctgggtactacgtgaccggcgatggctgccaacgtgatcaggacggatactactggatcacaggacgaatcgacgacatgctgaacgtcagtgggcatctactgtctactgccgaagtggagtccgccctggtggaacacgaggctgtggcagaagcagccgtggtcggtcacccgcatcccgtgaagggcgaatgcctgtactgtttcgtgactttgtgtgacggtcacacctttagcccaaaactgacagaggaacttaagaaacagatacgagagaaaatcggtcccatagccacgcccgactacatacagaatgcacctggcctcccaaaaacacggtccggcaagattatgcgacgggttctgcggaagattgcacaaaatgatcacgacctcggcgatatgtctaccgtggcagatccatctgttatctctcacctctttagccaccgctgtctgacaatccagtag

SEQ ID NO: 84201 - DNA, 1230 bp, Artificial Sequence
  derived and/or modified sequence
atgcaggaggccggagatgaatgtgagcctgagtggtgtgatgctgaggaccccctcttcatcctgtacaccagcggcagcacaggcaagcccaagggcgtggtgcacacagtgggcggctacatgctgtatgtggccaccaccttcaagtatgtgtttgacttccacgccgaggatgtgttctggtgcacagctgacatcggctggatcaccggccacagctatgtgacctacggccccctggccaatggagccacctctgtgctgtttgagggcatccccacctacccagatgtgaaccggctgtggagcatcgtggacaagtacaaggtgaccaagttctacacagcccccacagccatccggctgctgatgaagtttggagatgagcctgtgaccaagcacagccgggccagcctgcaggtgctgggcaccgtgggggagcccatcaaccctgaggcctggctgtggtaccaccgggtggtgggcgcccagcgctgccccatcgtggacaccttctggcagacagagaccggcggccacatgctgacccccctgcccggggccacccccatgaagccaggcagcgccaccttccccttcttcggcgtggccccagccatcctgaatgaaagtggagaggagctggagggggaggccgagggctacctggtgttcaagcagccctggccaggcatcatgaggacagtgtatggcaaccacgagagatttgagaccacctacttcaagaagtttcctggctactacgtgactggagatggctgccagagggaccaggacggctactactggatcaccggcagaattgatgacatgctgaatgtgtctggccacctgctgagcacagctgaggtggagagcgccctggtggagcatgaagctgtggccgaggccgctgtggtgggccacccccaccctgtgaagggagaatgtctgtactgctttgtgaccctgtgtgatggccacaccttcagccccaagctgacagaggagctgaagaagcagatccgggagaagattggccccatcgccaccccagactacatccagaatgcccctggcctgcccaagaccaggtctgggaagatcatgagaagagtgctgaggaagatcgcccagaatgaccatgacctgggggacatgagcacagtggccgaccccagcgtcatcagccacctgttcagccaccgctgcctgaccatccagtag

SEQ ID NO: 84202 - DNA, 1230 bp, Artificial Sequence
  derived and/or modified sequence
atgcaggaggccggcgacgagtgcgagcccgagtggtgcgacgccgaagatcccttgttcatattgtacacaagcgggtctaccggcaagcccaaaggcgttgtgcacacagtgggggggtacatgctctacgtggcaaccactttcaagtacgttttcgattttcacgcggaagatgttttctggtgcaccgctgatattggatggataaccggccactcttacgttacctacggacccctggcaaacggcgcaacaagtgtactcttcgagggcatcccaacctatccagacgtcaacaggctttggtcgatcgtggataagtataaggtgaccaagttttatactgccccaacggcgatccggttgctcatgaagttcggggacgaaccagtcaccaagcattcacgcgctagtctccaggttctcggtacagtgggtgaacctataaacccagaagcatggttgtggtaccatcgggtggttggagctcagagatgtcctatagttgatacattttggcagaccgaaacaggcgggcacatgctgactccactgcccggggcgacgccaatgaagcccggttcagcgactttcccattcttcggtgtggccccagcaatccttaacgagtccggcgaagagcttgagggtgaagctgagggctacctagtgtttaagcagccttggcctggcatcatgaggacagtgtatggaaatcacgagcggttcgagacaacctatttcaagaagtttcccgggtattacgtgacaggtgacggctgccagagagatcaggacggctactattggattaccggtcgcattgatgacatgttaaacgtgtcagggcatctcttgagcactgccgaggttgaaagcgccctggtggaacatgaggcagtcgccgaagccgctgtagtcggtcacccacatccagtgaaaggggaatgcctgtactgcttcgtgacgttgtgcgatggccacaccttttcccctaaattgacagaagaactgaagaaacaaatccgggagaagatagggcccattgctacaccagactacatccagaacgccccaggtttgccaaaaacaagaagtggaaaaatcatgagaagggtcctcagaaaaattgctcagaatgaccatgacctgggagacatgtctactgtggccgacccatccgtcatttctcacctcttttcccatcgttgcttaaccatacagtag

SEQ ID NO: 84203 - DNA, 1230 bp, Artificial Sequence
  derived and/or modified sequence
atgcaagaggctggcgatgaatgcgaacccgagtggtgtgatgccgaggatcctctgttcattctgtatacatcaggcagtacaggtaagccaaaaggggtcgttcatacagtgggaggctatatgttatacgtggccactacatttaagtacgttttcgatttccatgccgaagacgtgttctggtgcacagctgatatcggctggattaccggacactcatacgtgacctacggtcctctcgctaacggcgcaacctctgtattgtttgaagggatccccacgtaccctgatgtcaacaggttatggagcatcgttgacaagtataaggtgactaaattttacacagcccctaccgccattcgtcttctaatgaagttcggggacgaaccggtcactaagcactcccgcgctagcctgcaggtgctcggcaccgtcggtgagcctatcaatcctgaggcctggctctggtatcatcgggtcgtgggcgctcagcggtgccctatcgtcgacactttctggcaaaccgagaccggaggccatatgctgactccccttcccggagccacaccaatgaaacctggcagcgccacgtttccctttttcggagtagccccagccatcctcaacgagagcggcgaagagctcgaaggcgaggctgaaggatatcttgtatttaaacagccatggccaggtattatgcgcactgtgtacggaaaccacgagcggttcgagacaacctacttcaaaaagtttcctggctattacgtaactggagatgggtgtcagagggaccaagatggatattattggattaccggccgaatcgatgacatgttaaacgtcagcggacacctgctgtcaaccgctgaagtcgagtcagccttggtagagcatgaggctgtcgctgaggccgctgttgtcgggcacccacaccctgttaaaggcgagtgtctatactgcttcgtgactctgtgtgatggacacactttttcccctaaacttacagaagaacttaagaagcaaattagagagaagattggacccatagccacacccgactatatccaaaacgcacccggacttccgaagaccaggagcggtaagatcatgcgtagagtgttgaggaagatagcacagaatgaccatgatttgggagacatgagcacagtggccgacccttcagtgatcagccaccttttttctcaccgatgtctcactatccagtag

SEQ ID NO: 84204 - DNA, 1230 bp, Artificial Sequence
  derived and/or modified sequence
atgcaggaggccggcgacgagtgcgagcccgagtggtgcgacgccgaggaccccctgttcatcctgtacaccagcggcagcaccggcaagcccaagggcgtggtgcacaccgtgggcggctacatgctgtacgtggccaccaccttcaagtacgtgttcgacttccacgccgaggacgtgttctggtgcaccgccgacatcggctggatcaccggccacagctacgtgacctacggccccctggccaacggcgccaccagcgtgctgttcgagggcatccccacctaccccgacgtgaacagactgtggagcatcgtggacaagtacaaggtgaccaagttctacaccgcccccaccgccatcagactgctgatgaagttcggcgacgagcccgtgaccaagcacagcagagccagcctgcaggtgctgggcaccgtgggcgagcccatcaaccccgaggcctggctgtggtaccacagagtggtgggcgcccagagatgccccatcgtggacaccttctggcagaccgagaccggcggccacatgctgacccccctgcccggcgccacccccatgaagcccggcagcgccaccttccccttcttcggcgtggcccccgccatcctgaacgagagcggcgaggagctggagggcgaggccgagggctacctggtgttcaagcagccctggcccggcatcatgagaaccgtgtacggcaaccacgagagattcgagaccacctacttcaagaagttccccggctactacgtgaccggcgacggctgccagagagaccaggacggctactactggatcaccggcagaatcgacgacatgctgaacgtgagcggccacctgctgagcaccgccgaggtggagagcgccctggtggagcacgaggccgtggccgaggccgccgtggtgggccacccccaccccgtgaagggcgagtgcctgtactgcttcgtgaccctgtgcgacggccacaccttcagccccaagctgaccgaggagctgaagaagcagatcagagagaagatcggccccatcgccacccccgactacatccagaacgcccccggcctgcccaagaccagaagcggcaagatcatgagaagagtgctgagaaagatcgcccagaacgaccacgacctgggcgacatgagcaccgtggccgaccccagcgtgatcagccacctgttcagccacagatgcctgaccatccagtag

SEQ ID NO: 84205 - DNA, 2400 bp, Artificial Sequence
  derived and/or modified sequence
agtcccggcacccgccgcgaccgcaaaggcggccgcggttctaggaacttgacgtgatggggcttcctgaggagcgggtccggagcggcagcgggagccggggccaggaggaagctggagccggaggccgggcgcggagttggtctccgccgcccgaggtcagccgctccgcgcacgtcccctcgctgcagcgctaccgcgagctgcaccggcgctccgtggaggagccgcgggaattctggggagacattgccaaggaattttactggaagactccatgccctggcccattccttcggtacaactttgatgtgactaaagggaaaatcttcattgagtggatgaaaggagcaactaccaacatctgctacaatgtactggatcgaaatgtccatgagaaaaagcttggagataaagttgctttttactgatctcatggaaccaagggattgacttgtggtggcatgagctcatgcaagaggcaggggatgagtgtgagcccgagtggtgtgatgccgaggacccactcttcatcctgtacaccagtggctccacaggcaaacccaagggtgtggttcacacagttgggggctacatgctctatgtagccacaaccttcaagtatgtgtttgacttccatgcagaggatgtgttctggtgcacggcagacattggttggatcactggtcattcctacgtcacctatgggccactggccaatggtgccaccagtgttttgtttgaggggattcccacatatccggacgtgaaccgcctgtggagcattgtggacaaatacaaggtgaccaagttctacacagcacccacagccatccgtctgctcatgaagtttggagatgagcctgtcaccaagcatagccgggcatccttgcaggtgttaggcacagtgggtgaacccatcaaccctgaggcctggctatggtaccaccgggtggtaggtgcccagcgctgccccatcgtggacaccttctggcaaacagagacaggtggccacatgttgactccccttcctggtgccacacccatgaaacccggttctgctactttcccattctttggtgtagctcctgcaatcctgaatgagtccggggaagagttggaaggtgaagctgaaggttatctggtgttcaagcagccctggccagggatcatgcgcacagtctatgggaaccacgaacgctttgagacaacctactttaagaagtttcctggatactatgttacaggagatggctgccagcgggaccaggatggctattactggatcactggcaggattgatgacatgctcaatgtatctggacacctgctgagtacagcagaggtggagtcagcacttgtggaacatgaggctgttgcagaggcagctgtggtgggccaccctcatcctgtgaagggtgaatgcctctactgctttgtcaccttgtgtgatggccacaccttcagccccaagctcaccgaggagctcaagaagcagattagagaaaagattggccccattgccacaccagactacatccagaatgcacctggcttgcctaaaacccgctcagggaaaatcatgaggcgagtgcttcggaagattgctcagaatgaccatgacctcggggacatgtctactgtggctgacccatctgtcatcagtcacctcttcagccaccgctgcctgaccatccagtgaacatgatcctgacctttacctaggattcctcctgctccaaactttgcccatcctctttgccccctcaggagtgctgagggccagtgttgacccacactaccctcccttgaccagctgtctgggaccggaaaccagctttgtctccaggtagagacaacatcctgtgactgccaggcagaaaggacagggcccaggtcagcctcagtctgctgtgcctccagactgcagagctctcagaacccagaacagagacgaaaaggctacctctcctacccaagttaagtgttcaaaggggatgtgagggcctccactgaagcagggaggcagctgtgtaatcctatgtcagctctcttaggaagccccagtacttatattgggcatgcacttgcccttaaaaacaatgatttgtgagtccaggaacaatttactatttttaaaatattttgctgcttctgttctgggtctgaattcccttttgtgccagattcagtctccagagggtattcagatcatctgcttctttgaaggagtaaatgtgttttgttcctagggccagaggagcttgtcttccttgtcctctgttcccaccctcccctgaacagaacccagcccataagagacattctcagatgaaactctgttttcttgccccagtcaggctcaagccctgtggttgtaggaataaagcctgtgatctc

SEQ ID NO: 84206 - protein, 357 aa, Artificial Sequence
  derived and/or modified sequence
MSHQTGIQASEDVKEIFARARNGKYRLLKISIENEQLVIGSYSQPSDSWDKDYDSFVLPLLEDKQPCYILFRLDSQNAQGYEWIFIAWSPDHSHVRQKMLYAATRATLKKEFGGGHIKDEVFGTVKEDVSLHGYKKYLLSQSSPAPLTAAEEELRQIKINESPEDHIGVQTDVGVDTKHQTLQGVAFPISREAFQALEKLNNRQLNYVQLEIDIKNEIIILANTTNTELKDLPKRIPKDSARYHFFLYKHSHEGDYLESIVFIYSMPGYTCSIRERMLYSSCKSRLLEIVERQLQMDVIRKIEIDNGDELTADFLYEEVHPKQHAHKQSFAKPKGPAGKRGIRRLIRGPAETEATTD

SEQ ID NO: 84207 - DNA, 1074 bp, Artificial Sequence
  derived and/or modified sequence
atgagccaccagaccggcatccaggccagcgaggacgtgaaggagatcttcgccagagccagaaacggcaagtacagactgctgaagatcagcatcgagaacgagcagctggtgatcggcagctacagccagcccagcgacagctgggacaaggactacgacagcttcgtgctgcccctgctggaggacaagcagccctgctacatcctgttcagactggacagccagaacgcccagggctacgagtggatcttcatcgcctggagccccgaccacagccacgtgagacagaagatgctgtacgccgccaccagagccaccctgaagaaggagttcggcggcggccacatcaaggacgaggtgttcggcaccgtgaaggaggacgtgagcctgcacggctacaagaagtacctgctgagccagagcagccccgcccccctgaccgccgccgaggaggagctgagacagatcaagatcaacgagagccccgaggaccacatcggcgtgcagaccgacgtgggcgtggacaccaagcaccagaccctgcagggcgtggccttccccatcagcagagaggccttccaggccctggagaagctgaacaacagacagctgaactacgtgcagctggagatcgacatcaagaacgagatcatcatcctggccaacaccaccaacaccgagctgaaggacctgcccaagagaatccccaaggacagcgccagataccacttcttcctgtacaagcacagccacgagggcgactacctggagagcatcgtgttcatctacagcatgcccggctacacctgcagcatcagagagagaatgctgtacagcagctgcaagagcagactgctggagatcgtggagagacagctgcagatggacgtgatcagaaagatcgagatcgacaacggcgacgagctgaccgccgacttcctgtacgaggaggtgcaccccaagcagcacgcccacaagcagagcttcgccaagcccaagggccccgccggcaagagaggcatcagaagactgatcagaggccccgccgagaccgaggccaccaccgactag

SEQ ID NO: 84208 - DNA, 1074 bp, Artificial Sequence
  derived and/or modified sequence
atgtcccatcagacaggcatacaggcttccgaagacgtaaaagagatctttgctcgggccagaaatggcaagtaccgcctgctgaagatctcgattgagaacgaacagcttgtgatcggctcatattcacagcccagcgacagctgggataaagactacgacagttttgtgttgcctctactggaggataaacaaccctgctacattttatttcgcttggacagtcaaaatgcccaaggctacgaatggatttttatcgcgtggtcccccgaccattcccacgtcaggcagaaaatgctgtacgctgcaacacgggccaccctgaagaaggagttcggaggaggccacatcaaggatgaggtgtttgggacagttaaggaagacgtttccctgcatggctataagaagtacttattgtcgcagtcctctccagctccactaactgctgcggaagaggaactcaggcagataaagattaacgaatcaccagaggatcacatcggcgttcagacggacgtgggagtggataccaagcaccaaactctgcagggggtggcgttcccaatcagtcgagaagccttccaggccttggagaagctgaataacagacagctgaactatgtgcaacttgaaattgatataaaaaatgaaattattatcctcgcaaatactacaaatacagagcttaaggacctgccaaagagaatcccgaaggactcagcccgatatcacttctttctgtacaagcactctcacgagggggactatctggagtcaattgtgtttatttacagcatgccgggttacacatgttctatccgcgagagaatgctctactcttcctgcaagtcaagactcctcgaaatagtggagcgacagctacagatggacgtaatacgtaaaatcgaaatcgacaatggagacgagcttaccgctgacttcctgtacgaagaagtacatccaaagcagcacgcacataaacagagtttcgccaaacctaaaggcccagctggcaagcggggtatcagaagattaattcgaggccccgctgaaaccgaggcaactacagactag

SEQ ID NO: 84209 - DNA, 1074 bp, Artificial Sequence
  derived and/or modified sequence
atgagccaccagacaggcatccaggcctctgaagatgtgaaggagatctttgcccgggccagaaatggcaagtaccgcctgctgaagatcagcattgaaaatgagcagctggtgattggcagctacagccagcccagcgacagctgggacaaggactatgacagctttgtgctgcccctgctggaggacaagcagccctgctacatcctcttccggctggacagccagaatgcccagggctatgagtggatcttcatcgcctggagcccagaccacagccacgtgcggcagaagatgctgtatgctgccacccgggccaccctgaagaaggagtttggaggcggccacatcaaggatgaggtgtttggcaccgtgaaggaggatgtgtccctgcacggctacaagaagtacctgctgagccagagcagccctgcccccctgacagctgctgaggaggagctgcggcagatcaagatcaatgaaagccctgaggaccacatcggcgtgcagacagatgtgggcgtggacaccaagcaccagaccctgcagggcgtggccttccccatcagccgggaggccttccaggccctggagaagctgaacaaccggcagctgaactacgtgcagctggagattgacatcaagaatgagatcatcatcctggccaacaccaccaacacagagctgaaggacctgcccaagaggatccccaaggacagcgcccgctaccacttcttcctgtacaagcacagccatgaaggagactacctggagagcatcgtgttcatctacagcatgcctggctacacctgcagcatccgggagaggatgctgtacagcagctgcaagagccggctgctggagatcgtggagcggcagctgcagatggatgtgatcaggaagattgaaattgacaatggagatgagctgacagctgacttcctgtatgaggaggtgcaccccaagcagcacgcccacaagcagagctttgccaagcccaagggccctgctgggaagaggggcatcagaagactcatccggggccctgctgagacagaggccaccacagactag

SEQ ID NO: 84210 - DNA, 1074 bp, Artificial Sequence
  derived and/or modified sequence
atgagccaccagaccggcatccaggccagcgaggacgtgaaggagatattcgccagagcacgaaatggtaaataccggcttttgaagatcagcatcgagaatgagcaactggtgataggatcttattcgcagccaagcgactcctgggataaggattatgacagtttcgtgctcccactactggaggacaagcaaccatgttacatcctgtttaggttggactctcaaaacgcccaaggctatgagtggatcttcatcgcttggtctcctgatcacagccatgtcaggcagaaaatgctgtatgcagccacccgggccacgctcaagaaggaatttggcggcggacatatcaaagacgaggtattcggtaccgtgaaggaagatgtgtccctgcatggctacaagaagtaccttctttcacagtcctcacccgctcccctcacagccgccgaagaggagctacggcagattaagattaacgaaagccccgaagatcacattggcgtacagaccgatgtgggagtggatacaaagcaccagaccctccagggagtagcctttccaatcagtcgggaggccttccaggctctcgagaaacttaacaatcgtcagcttaactacgttcagctggagatcgatattaagaacgagattattatactggcaaacacaaccaacactgaactcaaagacttaccaaaaagaatccctaaggattccgccagataccacttcttcctctacaagcacagccatgaaggtgactatcttgagtctattgtgttcatatactccatgccaggatatacttgtagcatccgagagagaatgctgtactcctcttgtaagtcacgacttctagaaatcgttgagcgccagctgcagatggacgttattcggaagatcgagatcgacaacggggatgaattgaccgctgattttctgtacgaggaggtccatcccaaacaacacgcacacaaacagagtttcgcaaaacctaagggcccggctggaaaacgcggcatcagaagactaatcagaggcccggcagaaaccgaggctacaactgactag

SEQ ID NO: 84211 - DNA, 1074 bp, Artificial Sequence
  derived and/or modified sequence
atgtcacaccaaaccgggattcaggcatctgaggacgtcaaggaaatcttcgctagggcccgaaacgggaagtatagactgctgaaaattagcattgagaacgaacagcttgtgattgggagttactcacagccatccgacagctgggataaagactacgacagctttgtattacctttattagaagacaagcagccttgttatatcctgttccgcctggattcgcaaaacgcacagggttacgaatggattttcattgcctggtccccagatcattcacatgtccggcagaagatgctctacgctgctacaagagccacactaaagaaagagtttgggggaggccatattaaggatgaggtgtttggcacggtgaaagaagacgtctctcttcacggttacaaaaagtatctcctatcacagagtagtccagctcctttgacagctgccgaagaagaactcaggcagatcaagatcaacgagtctccagaggaccacataggtgtccagaccgatgtgggcgtggacacaaagcatcaaacgttgcagggggtggcattccctatttccagggaggcatttcaggctctcgaaaaactgaataaccgccaactgaactatgtgcagctggagatcgacattaagaatgaaatcatcatcctcgccaacacgactaatactgagctcaaggatcttcccaaacgcatacccaaagactccgcgaggtatcactttttcctctataagcacagccatgagggcgactacctggagagtatcgtgttcatttattcaatgccaggatacacctgctccattcgagaaagaatgctttacagttcttgtaagagccgattgttggagatcgtggaacgtcagctgcagatggacgtgatccggaaaatcgaaatagataatggggacgagttgaccgcagacttcttgtacgaggaagtgcatccaaagcaacacgctcacaagcaatcttttgctaaaccaaagggcccagccggaaagcgagggatcaggcggctgatccgcggtcctgccgagacagaggcaaccacagactag

SEQ ID NO: 84212 - DNA, 1170 bp, Artificial Sequence
  derived and/or modified sequence
cgccatgtcccaccagaccggcatccaagcaagtgaagatgttaaagagatctttgccagagccagaaatggaaagtacagacttctgaaaatatctattgaaaatgagcaacttgtgattggatcatatagtcagccttcagattcctgggataaggattatgattcctttgttttacccctgttggaggacaaacaaccatgctatatattattcaggttagattctcagaatgcccagggatatgaatggatattcattgcatggtctccagatcattctcatgttcgtcaaaaaatgttgtatgcagcaacaagagcaactctgaagaaggaatttggaggtggccacattaaagatgaagtatttggaacagtaaaggaagatgtatcattacatggatataaaaaatacttgctgtcacaatcttcccctgccccactgactgcagctgaggaagaactacgacagattaaaatcaatgagagcccagaggatcatattggggtacagactgacgtgggtgtggacactaagcatcaaacactacaaggagtagcatttcccatttctcgagaagcctttcaggctttggaaaaattgaataatagacagctcaactatgtgcagttggaaatagatataaaaaatgaaattataattttggccaacacaacaaatacagaactgaaagatttgccaaagaggattcccaaggattcagctcgttaccatttctttctgtataaacattcccatgaaggagactatttagagtccatagtttttatttattcaatgcctggatacacatgcagtataagagagcggatgctgtattctagctgcaagagccgtctgctagaaattgtagaaagacaactacaaatggatgtaattagaaagatcgagatagacaatggggatgagttgactgcagacttcctttatgaagaagtacatcccaagcagcatgcacacaagcaaagttttgcaaaaccaaaaggtcctgcaggaaaaagaggaattcgaagactaattaggggcccagcggaaactgaagctactactgattaaagtcatcacattaaacattgtaatactagttttttaaaagtccagcttttagtacaggagaactgaaatcattccatgttgatataaagtag

SEQ ID NO: 84213 - DNA, 4560 bp, Artificial Sequence
  derived and/or modified sequence
gcggcggcggcggcagcggcagcagcagctgctacagtggcggtggcggcggcggctgctgctgagcccgggcggcggcggggaccccgggctggggccacgcgggccggaggccccggcaccattggccccagcgcagacgcgaacccgcgctctctgatcagaggcgaagctcggaggtcctacaggtatggatctctggcagctgctgttgaccttggcactggcaggatcaagtgatgctttttctggaagtgaggccacagcagctatccttagcagagcaccctggagtctgcaaagtgttaatccaggcctaaagacaaattcttctaaggagcctaaattcaccaagtgccgttcacctgagcgagagactttttcatgccactggacagatgaggttcatcatggtacaaagaacctaggacccatacagctgttctataccagaaggaacactcaagaatggactcaagaatggaaagaatgccctgattatgtttctgctggggaaaacagctgttactttaattcatcgtttacctccatctggataccttattgtatcaagctaactagcaatggtggtacagtggatgaaaagtgtttctctgttgatgaaatagtgcaaccagatccacccattgccctcaactggactttactgaacgtcagtttaactgggattcatgcagatatccaagtgagatgggaagcaccacgcaatgcagatattcagaaaggatggatggttctggagtatgaacttcaatacaaagaagtaaatgaaactaaatggaaaatgatggaccctatattgacaacatcagttccagtgtactcattgaaagtggataaggaatatgaagtgcgtgtgagatccaaacaacgaaactctggaaattatggcgagttcagtgaggtgctctatgtaacacttcctcagatgagccaatttacatgtgaagaagatttctactttccatggctcttaattattatctttggaatatttgggctaacagtgatgctatttgtattcttattttctaaacagcaaaggattaaaatgctgattctgcccccagttccagttccaaagattaaaggaatcgatccagatctcctcaaggaaggaaaattagaggaggtgaacacaatcttagccattcatgatagctataaacccgaattccacagtgatgactcttgggttgaatttattgagctagatattgatgagccagatgaaaagactgaggaatcagacacagacagacttctaagcagtgaccatgagaaatcacatagtaacctaggggtgaaggatggcgactctggacgtaccagctgttgtgaacctgacattctggagactgatttcaatgccaatgacatacatgagggtacctcagaggttgctcagccacagaggttaaaaggggaagcagatctcttatgccttgaccagaagaatcaaaataactcaccttatcatgatgcttgccctgctactcagcagcccagtgttatccaagcagagaaaaacaaaccacaaccacttcctactgaaggagctgagtcaactcaccaagctgcccatattcagctaagcaatccaagttcactgtcaaacatcgacttttatgcccaggtgagcgacattacaccagcaggtagtgtggtcctttccccgggccaaaagaataaggcagggatgtcccaatgtgacatgcacccggaaatggtctcactctgccaagaaaacttccttatggacaatgcctacttctgtgaggcagatgccaaaaagtgcatccctgtggctcctcacatcaaggttgaatcacacatacagccaagcttaaaccaagaggacatttacatcaccacagaaagccttaccactgctgctgggaggcctgggacaggagaacatgttccaggttctgagatgcctgtcccagactatacctccattcatatagtacagtccccacagggcctcatactcaatgcgactgccttgcccttgcctgacaaagagtttctctcatcatgtggctatgtgagcacagaccaactgaacaaaatcatgccttagcctttctttggtttcccaagagctacgtatttaatagcaaagaattgactggggcaataacgtttaagccaaaacaatgtttaaaccttttttgggggagtgacaggatggggtatggattctaaaatgccttttcccaaaatgttgaaatatgatgttaaaaaaataagaagaatgcttaatcagatagatattcctattgtgcaatgtaaatattttaaagaattgtgtcagactgtttagtagcagtgattgtcttaatattgtgggtgttaatttttgatactaagcattgaatggctatgtttttaatgtatagtaaatcacgctttttgaaaaagcgaaaaaatcaggtggcttttgcggttcaggaaaattgaatgcaaaccatagcacaggctaattttttgttgtttcttaaataagaaacttttttatttaaaaaactaaaaactagaggtgagaaatttaaactataagcaagaaggcaaaaatagtttggatatgtaaaacatttattttgacataaagttgataaagattttttaataatttagacttcaagcatggctattttatattacactacacactgtgtactgcagttggtatgacccctctaaggagtgtagcaactacagtctaaagctggtttaatgttttggccaatgcacctaaagaaaaacaaactcgttttttacaaagcccttttatacctccccagactccttcaacaattctaaaatgattgtagtaatctgcattattggaatataattgttttatctgaatttttaaacaagtatttgttaatttagaaaactttaaagcgtttgcacagatcaacttaccaggcaccaaaagaagtaaaagcaaaaaagaaaacctttcttcaccaaatcttggttgatgccaaaaaaaaatacatgctaagagaagtagaaatcatagctggttcacactgaccaagatacttaagtgctgcaattgcacgcggagtgagttttttagtgcgtgcagatggtgagagataagatctatagcctctgcagcggaatctgttcacacccaacttggttttgctacataattatccaggaagggaataaggtacaagaagcattttgtaagttgaagcaaatcgaatgaaattaactgggtaatgaaacaaagagttcaagaaataagtttttgtttcacagcctataaccagacacatactcatttttcatgataatgaacagaacatagacagaagaaacaaggttttcagtccccacagataactgaaaattatttaaaccgctaaaagaaactttctttctcactaaatcttttataggatttatttaaaatagcaaaagaagaagtttcatcattttttacttcctctctgagtggactggcctcaaagcaagcattcagaagaaaaagaagcaacctcagtaatttagaaatcattttgcaatcccttaatatcctaaacatcattcatttttgttgttgttgttgttgttgagacagagtctcgctctgtcgccaggctagagtgcggtggcgcgatcttgactcactgcaatctccacctcccacaggttcaggcgattcccgtgcctcagcctcctgagtagctgggactacaggcacgcaccaccatgccaggctaatttttttgtattttagcagagacggggtttcaccatgttggccaggatggtctcgatctcctgacctcgtgatccacccgactcggcctcccaaagtgctgggattacaggtgtaagccaccgtgcccagccctaaacatcattcttgagagcattgggatatctcctgaaaaggtttatgaaaaagaagaatctcatctcagtgaagaatacttctcattttttaaaaaagcttaaaactttgaagttagctttaacttaaatagtatttcccatttatcgcagaccttttttaggaagcaagcttaatggctgataattttaaattctctctcttgcaggaaggactatgaaaagctagaattgagtgtttaaagttcaacatgttatttgtaatagatgtttgatagattttctgctactttgctgctatggttttctccaagagctacataatttagtttcatataaagtatcatcagtgtagaacctaattcaattcaaagctgtgtgtttggaagactatcttactatttcacaacagcctgacaacatttctatagccaaaaatagctaaatacctcaatcagtctcagaatgtcattttggtactttggtggccacataagccattattcactagtatgactagttgtgtctggcagtttatatttaactctctttatgtctgtggattttttccttcaaagtttaataaatttattttcttggattcctgatagtgtgcttctgttatcaaacaccaacataaaaatgatctaaacc

SEQ ID NO: 84214 - protein, 638 aa, Artificial Sequence
  derived and/or modified sequence
MDLWQLLLTLALAGSSDAFSGSEATAAILSRAPWSLQSVNPGLKTNSSKEPKFTKCRSPERETFSCHWTDEVHHGTKNLGPIQLFYTRRNTQEWTQEWKECPDYVSAGENSCYFNSSFTSIWIPYCIKLTSNGGTVDEKCFSVDEIVQPDPPIALNWTLLNVSLTGIHADIQVRWEAPRNADIQKGWMVLEYELQYKEVNETKWKMMDPILTTSVPVYSLKVDKEYEVRVRSKQRNSGNYGEFSEVLYVTLPQMSQFTCEEDFYFPWLLIIIFGIFGLTVMLFVFLFSKQQRIKMLILPPVPVPKIKGIDPDLLKEGKLEEVNTILAIHDSYKPEFHSDDSWVEFIELDIDEPDEKTEESDTDRLLSSDHEKSHSNLGVKDGDSGRTSCCEPDILETDFNANDIHEGTSEVAQPQRLKGEADLLCLDQKNQNNSPYHDACPATQQPSVIQAEKNKPQPLPTEGAESTHQAAHIQLSNPSSLSNIDFYAQVSDITPAGSVVLSPGQKNKAGMSQCDMHPEMVSLCQENFLMDNAYFCEADAKKCIPVAPHIKVESHIQPSLNQEDIYITTESLTTAAGRPGTGEHVPGSEMPVPDYTSIHIVQSPQGLILNATALPLPDKEFLSSCGYVSTDQLNKIMP

SEQ ID NO: 84215 - protein, 294 aa, Artificial Sequence
  derived and/or modified sequence
MDLWQLLLTLALAGSSDAFSGSEATAAILSRAPWSLQSVNPGLKTNSSKEPKFTKCRSPERETFSCHWTDEVHHGTKNLGPIQLFYTRRNTQEWTQEWKECPDYVSAGENSCYFNSSFTSIWIPYCIKLTSNGGTVDEKCFSVDEIVQPDPPIALNWTLLNVSLTGIHADIQVRWEAPRNADIQKGWMVLEYELQYKEVNETKWKMMDPILTTSVPVYSLKVDKEYEVRVRSKQRNSGNYGEFSEVLYVTLPQMSQFTCEEDFYFPWLLIIIFGIFGLTVMLFVFLFSKQQSQN

SEQ ID NO: 84216 - protein, 451 aa, Artificial Sequence
  derived and/or modified sequence
MVLEYELQYKEVNETKWKMMDPILTTSVPVYSLKVDKEYEVRVRSKQRNSGNYGEFSEVLYVTLPQMSQFTCEEDFYFPWLLIIIFGIFGLTVMLFVFLFSKQQRIKMLILPPVPVPKIKGIDPDLLKEGKLEEVNTILAIHDSYKPEFHSDDSWVEFIELDIDEPDEKTEESDTDRLLSSDHEKSHSNLGVKDGDSGRTSCCEPDILETDFNANDIHEGTSEVAQPQRLKGEADLLCLDQKNQNNSPYHDACPATQQPSVIQAEKNKPQPLPTEGAESTHQAAHIQLSNPSSLSNIDFYAQVSDITPAGSVVLSPGQKNKAGMSQCDMHPEMVSLCQENFLMDNAYFCEADAKKCIPVAPHIKVESHIQPSLNQEDIYITTESLTTAAGRPGTGEHVPGSEMPVPDYTSIHIVQSPQGLILNATALPLPDKEFLSSCGYVSTDQLNKIMP

SEQ ID NO: 84217 - DNA, 1917 bp, Artificial Sequence
  derived and/or modified sequence
atggacttgtggcagctgctcctgacactagctttggcaggtagtagcgacgctttttccggttccgaggccacggcagcaatactttctcgggccccctggagcctgcagtctgtgaatccagggctcaaaaccaatagctccaaagagcctaaattcaccaaatgtagatctcccgagcgcgaaacattctcctgccattggacggatgaggtgcaccatggcacaaagaacctaggacccatacagctgttttacacccggcgcaacacccaggagtggacacaggaatggaaagagtgccccgattacgtgagcgccggagagaactcttgctacttcaattctagctttacaagtatatggatcccttactgcatcaagctgacgtccaatggggggaccgtagatgaaaagtgcttctcggtggacgaaattgtacagcccgaccctcccatcgcactaaattggactctgctaaatgtgtctttaacaggcattcacgccgatatccaggtcagatgggaggctcctagaaatgcagatattcagaaaggctggatggtgctggaatatgaactgcagtacaaagaagtgaatgaaaccaagtggaaaatgatggatcctattctgaccacaagcgtcccagtctatagtctaaaagtcgataaggaatatgaggttagagtgcggtccaagcaacgcaactcaggaaactacggggagttttccgaggtgctgtatgtgacgctgccccagatgagtcagttcacatgtgaagaagacttttactttccctggctcctgattatcattttcgggatattcggcttgacagtaatgctgtttgtgtttctatttagcaaacagcagaggatcaagatgctgatactgcctcccgtcccagtgccgaaaatcaaggggatcgatcctgatctcctgaaagaaggaaagctggaggaggttaacactatactggcaatacacgactcatacaaacccgaattccatagcgacgactcatgggtagagttcatcgagcttgacattgacgaaccagacgaaaaaaccgaggagtctgacacagatcgcctcctcagttccgaccacgagaagtctcactccaatctgggagttaaagatggagattccggcaggaccagttgttgcgaacccgatatcctcgaaaccgacttcaacgccaatgacatccacgagggtacctccgaagtagcacagccccagaggctcaagggagaggccgatctcttgtgcctggatcagaagaatcagaataactccccttatcatgacgcctgtcctgctacccagcagccatccgtcattcaggctgagaaaaacaaaccccagccattgcccaccgaaggagctgagtctacacatcaggccgcccacatccagttatccaatcccagcagcctgtctaacatagatttttacgcacaggttagtgatattactccagctgggtcagtggttctctcccccgggcagaaaaataaggcagggatgagccagtgcgacatgcaccctgagatggtgagtctatgtcaggagaactttttgatggacaacgcttacttctgcgaagccgacgcaaagaagtgcatccctgtggcaccccatataaaagtggaatcacacattcagcccagccttaatcaggaggacatatacattacgaccgaatctctaaccactgcggccggccgcccaggcacaggcgagcacgttccagggagtgagatgcccgttcccgactatacctccatccacatagtgcaatctccccagggtttaattctgaatgctacagcactgcccctacccgataaagaattcctgtcctcctgcggctacgtctccacagaccaactgaacaagataatgccctag

SEQ ID NO: 84218 - DNA, 1851 bp, Artificial Sequence
  derived and/or modified sequence
atggatctttggcagctcctgctcaccttagccctcgccggaagctcagacgccttttccgggtcggaagattcttcaaaagaacctaaattcactaagtgccgctcccctgagagagaaacctttagctgtcactggacagacgaggtgcaccacggaacgaaaaatcttggacctatacagcttttttacactcgtcggaatacccaggagtggacccaggagtggaaggagtgtcccgattatgtgtctgcaggcgagaatagttgctacttcaattcgtccttcacgagcatttggataccctactgtattaagctcacaagcaacggcggtactgtggatgagaagtgcttctcggtggacgaaatcgtacagcctgatccgccaatcgctctgaattggactctcttaaacgtcagccttacggggatacatgcagacattcaggtccgctgggaagctccgagaaatgccgacatccaaaagggatggatggtactagaatacgagctgcagtacaaggaggttaacgagaccaagtggaagatgatggatccgatacttaccacaagcgtccctgtgtattcactgaaggtcgataaagaatacgaggtgcgcgtgcgaagcaaacaaagaaactccggaaactacggcgagtttagcgaggtactgtatgttaccctgcctcagatgtcacaatttacttgcgaagaggacttttactttccctggctgttgataattattttcggcatatttggtcttacggtaatgctgtttgtgtttctgttcagtaaacagcagcgtattaaaatgctcattctgcccccagttccagtgccgaaaattaaaggaatcgatccagacctcctgaaagagggaaagctggaggaagtgaatactatcctggctatccatgactcatacaaacctgaatttcatagcgacgacagttgggttgagtttattgagctggacatcgatgaacccgacgagaagaccgaagagagcgatacagaccgcttactctccagtgatcacgagaagagtcactctaacctcggggtaaaagatggcgactcgggcagaacgagctgctgcgaacccgacatactagagaccgatttcaacgccaatgacattcacgaggggacctctgaggtcgcccaaccacagaggctcaagggagaagctgacctgctgtgcctcgatcagaagaatcagaacaattcaccctaccatgatgcctgtcccgcgacccagcagccatccgtgattcaggcggagaagaacaaaccgcagcctctccccaccgagggagccgagtccacccaccaggccgcacatatccagttatccaaccctagttccctatctaatattgatttctatgcccaagtcagcgacattacacctgccggatctgtagttctttcccctggacagaaaaacaaagctggtatgtcccagtgtgatatgcatcccgagatggtgtctttgtgtcaagaaaactttctcatggacaatgcatatttttgcgaagcagatgctaagaagtgcatacctgtcgctccacacattaaggtggagtcacacattcaaccgagtctgaaccaggaggatatatatatcactacagagtcattaaccacagccgccggccggcccgggacaggagagcatgtaccgggatccgaaatgcccgttcccgactacacttccattcatattgtacagagtccccagggactcattttgaacgctacggctctgcccctgcccgataaggaattcctcagcagctgcggctacgtgtctacagaccaattgaataagattatgccatag

SEQ ID NO: 84219 - DNA, 1356 bp, Artificial Sequence
  derived and/or modified sequence
atggtgttggagtatgaactccagtataaagaagtgaacgaaactaaatggaaaatgatggatcctatcttgactactagcgtgcccgtttactctctgaaagttgacaaagaatatgaggtacgcgtgcgcagcaaacagcgcaatagtggcaactacggcgaatttagcgaggtattatacgtcacactgccccagatgtctcaattcacctgcgaggaggacttctattttccttggctactcatcattattttcggaatttttgggttgaccgtcatgctgttcgtgttcctgtttagcaagcagcagcgcataaagatgctgattctgccccctgtaccagtgcccaagatcaagggaatcgatccggacctgctgaaagaggggaagctggaggaagtgaatactatcctggcgatccatgactcttataagcccgaattccactccgacgattcttgggtcgagttcatagaactggacattgatgaacctgatgagaaaactgaagaaagcgacaccgaccgcctcttgtcatccgatcatgaaaagtcacattccaacttgggagtcaaggatggggactcgggaaggacgagttgttgcgaacctgatatcctcgagacggactttaacgctaatgacatccatgagggaaccagcgaggtggcacagccacaacggctaaagggtgaggctgacctgctgtgtctagaccagaagaatcagaataactctccttaccacgatgcatgcccagccacccagcaaccatctgttattcaagctgagaaaaacaaaccccagcccctcccgactgagggcgcagagtcaacccatcaggccgcgcacattcagttgtccaatcccagtagtctgagcaatatcgacttctacgctcaagtaagcgatattacaccagctggctctgttgtactttctccaggtcagaagaataaggcaggaatgtcacaatgcgatatgcatcctgagatggtttccctgtgccaggagaatttcctgatggacaacgcctacttctgtgaggcggatgccaagaagtgtatcccagttgcaccgcatatcaaggtggagagccacattcagcctagcctcaaccaagaagacatttatatcaccacagagtctctaaccaccgccgctgggcgacctggaacaggagagcacgtgcccggaagtgagatgcctgtccctgactacacttccatccacattgtacaaagtcctcagggcttaatcttgaacgctaccgccttgccattaccagataaggagttcttgagctcctgcggatacgtgtccactgatcagctgaataaaatcatgccgtag

SEQ ID NO: 84220 - DNA, 2173 bp, Artificial Sequence
  derived and/or modified sequence
gattgcaggtcctacaggtatggatctctggcagctgctgttgaccttggcactggcaggatcaagtgatgctttttctggaagtgaggccacagcagctatccttagcagagcaccctggagtctgcaaagtgttaatccaggcctaaagacaagaacactcaagaatggactcaagaatggaaagaatgccctgattatgtttctgctggggaaaacagctgttactttaattcatcgtttacctccatctggataccttattgtatcaagctaactagcaatggtggtacagtggatgaaaagtgtttctctgttgatgaaatagtgcaaccagatccacccattgccctcaactggactttactgaacgtcagtttaactgggattcatgcagatatccaagtgagatgggaagcaccacgcaatgcagatattcagaaaggatggatggttctggagtatgaacttcaatacaaagaagtaaatgaaactaaatggaaaatgatggaccctatattgacaacatcagttccagtgtactcattgaaagtggataaggaatatgaagtgcgtgtgagatccaaacaacgaaactctggaaattatggcgagttcagtgaggtgctctatgtaacacttcctcagatgagccaatttacatgtgaagaagatttctactttccatggctcttaattattatctttggaatatttgggctaacagtgatgctatttgtattcttattttctaaacagcaaaggattaaaatgctgattctgcccccagttccagttccaaagattaaaggaatcgatccagatctcctcaaggaaggaaaattagaggaggtgaacacaatcttagccattcatgatagctataaacccgaattccacagtgatgactcttgggttgaatttattgagctagatattgatgagccagatgaaaagactgaggaatcagacacagacagacttctaagcagtgaccatgagaaatcacatagtaacctaggggtgaaggatggcgactctggacgtaccagctgttgtgaacctgacattctggagactgatttcaatgccaatgacatacatgagggtacctcagaggttgctcagccacagaggttaaaaggggaagcagatctcttatgccttgaccagaagaatcaaaataactcaccttatcatgatgcttgccctgctactcagcagcccagtgttatccaagcagagaaaaacaaaccacaaccacttcctactgaaggagctgagtcaactcaccaagctgcccatattcagctaagcaatccaagttcactgtcaaacatcgacttttatgcccaggtgagcgacattacaccagcaggtagtgtggtcctttccccgggccaaaagaataaggcagggatgtcccaatgtgacatgcacccggaaatggtctcactctgccaagaaaacttccttatggacaatgcctacttctgtgaggcagatgccaaaaagtgcatccctgtggctcctcacatcaaggttgaatcacacatacagccaagcttaaaccaagaggacatttacatcaccacagaaagccttaccactgctgctgggaggcctgggacaggagaacatgttccaggttctgagatgcctgtcccagactatacctccattcatatagtacagtccccacagggcctcatactcaatgcgactgccttgcccttgcctgacaaagagtttctctcatcatgtggctatgtgagcacagaccaactgaacaaaatcatgccttagcctttctttggtttcccaagagctacgtatttaatagcaaagaattgactggggcaataacgtttaagccaaaacaatgtttaaaccttttttgggggagtgacaggatggggtatggattctaaaatgccttttcccaaaatgttgaaatatgatgttaaaaaaataagaagaatgcttaatcagatagatattcctattgtgcaatgtaaatattttaaagaattgtgtcagactgtttagtagcagtgattgtcttaatattgtgggtgttaatttttgatactaagcattgaatggctatgtttttaatgtatagtaaatcacgctttttgaaaaagcgaaaaaatcaggtggcttttgcggt

SEQ ID NO: 84221 - DNA, 1917 bp, Artificial Sequence
  derived and/or modified sequence
atggacctgtggcagctgctgctgaccctggccctggccggcagcagtgatgccttcagcggcagcgaggccacagctgccatcctgagccgggccccctggagcctgcagagcgtgaaccctggcctgaagaccaacagcagcaaggagcccaagttcaccaagtgccgcagccctgagcgggagaccttcagctgccactggacagatgaggtgcaccacggcaccaagaacctgggccccatccagctgttctacaccaggaggaacacccaggagtggacccaggagtggaaggagtgcccagactatgtgtctgctggggagaacagctgctacttcaacagcagcttcaccagcatctggatcccctactgcatcaagctgaccagcaatggaggcaccgtggatgagaagtgcttctctgtggatgagatcgtgcagcctgacccccccatcgccctgaactggaccctgctgaatgtgtccctgaccggcatccatgctgacatccaggtgcgctgggaggcccccagaaatgctgacatccagaagggctggatggtgctggagtatgagctgcagtacaaggaggtgaatgagaccaagtggaagatgatggaccccatcctgaccacctctgtgcctgtgtacagcctgaaggtggacaaggagtatgaggtgcgggtgcgcagcaagcagagaaattctggcaactacggggagttcagcgaggtgctgtatgtgaccctgccccagatgagccagttcacctgtgaggaggacttctacttcccctggctgctgatcatcatcttcggcatcttcggcctgactgtgatgctgtttgtgttcctgttcagcaagcagcagaggatcaagatgctgatcctgccccctgtgcctgtgcccaagatcaagggcattgatcctgacctgctgaaggagggcaagctggaggaggtgaacaccatcctggccatccatgacagctacaagccagagttccacagtgatgacagctgggtggagttcatcgagctggacattgatgagccagatgagaagacagaggagagtgacacagaccggctgctgagcagtgaccacgagaagagccacagcaacctgggcgtgaaggatggagacagcggccgcaccagctgctgtgagccagacatcctggagacagacttcaatgccaatgacatccacgagggcaccagcgaggtggcccagccccagaggctgaagggggaggccgacctgctgtgcctggaccagaagaaccagaacaacagcccctaccatgatgcctgcccagccacccagcagcccagcgtcatccaggccgagaagaacaagccccagcccctgcccacagaaggagctgagagcacccaccaggccgcccacatccagctgagcaaccccagcagcctgagcaacatcgacttctacgcccaggtgtctgacatcaccccagctggctctgtggtgctgagccctggccagaagaacaaggccggcatgagccagtgtgacatgcaccctgagatggtgtccctgtgccaggagaacttcctgatggacaatgcctacttctgtgaggctgatgccaagaagtgcatccctgtggccccccacatcaaggtggagagccacatccagcccagcctgaaccaggaggacatctacatcaccacagagagcctgaccacagctgctggccggcccggcactggagagcacgtgcccggcagcgagatgcctgtgcctgactacaccagcatccacatcgtgcagagcccccagggcctcatcctgaatgccacagccctgcccctgcctgacaaggagttcctgagcagctgtggctacgtgtccacagaccagctgaacaagatcatgccctag

SEQ ID NO: 84222 - DNA, 1851 bp, Artificial Sequence
  derived and/or modified sequence
atggacctgtggcagctgctgctgaccctggccctggccggcagcagtgatgccttcagcggcagcgaggacagcagcaaggagcccaagttcaccaagtgccgcagccctgagcgggagaccttcagctgccactggacagatgaggtgcaccacggcaccaagaacctgggccccatccagctgttctacaccaggaggaacacccaggagtggacccaggagtggaaggagtgcccagactatgtgtctgctggggagaacagctgctacttcaacagcagcttcaccagcatctggatcccctactgcatcaagctgaccagcaatggaggcaccgtggatgagaagtgcttctctgtggatgagatcgtgcagcctgacccccccatcgccctgaactggaccctgctgaatgtgtccctgaccggcatccatgctgacatccaggtgcgctgggaggcccccagaaatgctgacatccagaagggctggatggtgctggagtatgagctgcagtacaaggaggtgaatgagaccaagtggaagatgatggaccccatcctgaccacctctgtgcctgtgtacagcctgaaggtggacaaggagtatgaggtgcgggtgcgcagcaagcagagaaattctggcaactacggggagttcagcgaggtgctgtatgtgaccctgccccagatgagccagttcacctgtgaggaggacttctacttcccctggctgctgatcatcatcttcggcatcttcggcctgactgtgatgctgtttgtgttcctgttcagcaagcagcagaggatcaagatgctgatcctgccccctgtgcctgtgcccaagatcaagggcattgatcctgacctgctgaaggagggcaagctggaggaggtgaacaccatcctggccatccatgacagctacaagccagagttccacagtgatgacagctgggtggagttcatcgagctggacattgatgagccagatgagaagacagaggagagtgacacagaccggctgctgagcagtgaccacgagaagagccacagcaacctgggcgtgaaggatggagacagcggccgcaccagctgctgtgagccagacatcctggagacagacttcaatgccaatgacatccacgagggcaccagcgaggtggcccagccccagaggctgaagggggaggccgacctgctgtgcctggaccagaagaaccagaacaacagcccctaccatgatgcctgcccagccacccagcagcccagcgtcatccaggccgagaagaacaagccccagcccctgcccacagaaggagctgagagcacccaccaggccgcccacatccagctgagcaaccccagcagcctgagcaacatcgacttctacgcccaggtgtctgacatcaccccagctggctctgtggtgctgagccctggccagaagaacaaggccggcatgagccagtgtgacatgcaccctgagatggtgtccctgtgccaggagaacttcctgatggacaatgcctacttctgtgaggctgatgccaagaagtgcatccctgtggccccccacatcaaggtggagagccacatccagcccagcctgaaccaggaggacatctacatcaccacagagagcctgaccacagctgctggccggcccggcactggagagcacgtgcccggcagcgagatgcctgtgcctgactacaccagcatccacatcgtgcagagcccccagggcctcatcctgaatgccacagccctgcccctgcctgacaaggagttcctgagcagctgtggctacgtgtccacagaccagctgaacaagatcatgccctag

SEQ ID NO: 84223 - DNA, 1356 bp, Artificial Sequence
  derived and/or modified sequence
atggtgctggagtatgagctgcagtacaaggaggtgaatgagaccaagtggaagatgatggaccccatcctgaccacctctgtgcctgtgtacagcctgaaggtggacaaggagtatgaggtgcgggtgcgcagcaagcagaggaacagcggcaactatggagagttcagcgaggtgctgtatgtgaccctgccccagatgagccagttcacctgtgaggaggacttctacttcccctggctgctgatcatcatcttcggcatcttcggcctgactgtgatgctgtttgtgttcctgttcagcaagcagcagaggatcaagatgctgatcctgccccctgtgcctgtgcccaagatcaagggcatcgaccctgacctgctgaaggagggcaagctggaggaggtgaacaccatcctggccatccatgacagctacaagccagagttccacagtgatgacagctgggtggagttcatcgagctggacattgatgagccagatgagaagacagaggagagtgacacagaccggctgctgagcagtgaccacgagaagagccacagcaacctgggcgtgaaggatggagacagcggccgcaccagctgctgtgagccagacatcctggagacagacttcaatgccaatgacatccacgagggcaccagcgaggtggcccagccccagaggctgaagggggaggccgacctgctgtgcctggaccagaagaaccagaacaacagcccctaccatgatgcctgcccagccacccagcagcccagcgtcatccaggccgagaagaacaagccccagcccctgcccacagagggcgctgagagcacccaccaggccgcccacatccagctgagcaaccccagcagcctgagcaacatcgacttctacgcccaggtgtctgacatcaccccagctggctctgtggtgctgagccctggccagaagaacaaggccggcatgagccagtgtgacatgcaccctgagatggtgtccctgtgccaggagaacttcctgatggacaatgcctacttctgtgaggctgatgccaagaagtgcatccctgtggccccccacatcaaggtggagagccacatccagcccagcctgaaccaggaggacatctacatcaccacagagagcctgaccacagctgctggccggcccggcaccggggagcacgtgcccggcagcgagatgcctgtgcctgactacaccagcatccacatcgtgcagagcccccagggcctcatcctgaatgccacagccctgcccctgcctgacaaggagttcctgagcagctgtggctacgtgtccacagaccagctgaacaagatcatgccctag

SEQ ID NO: 84224 - DNA, 1917 bp, Artificial Sequence
  derived and/or modified sequence
atggacctgtggcagctgctgctgaccctggccctggccggcagcagcgatgccttcagcggctctgaagccaccgcggccatcttgagccgcgctccttggtcactgcaatcagtcaatcccggacttaaaaccaattcttctaaggaacctaaattcaccaagtgccgcagccccgaaagagagacattctcttgtcattggacagacgaagtgcaccacggcactaagaatcttggaccaatacaactgttttacactagacgcaatacccaggaatggacacaagagtggaaggagtgtcccgattacgtgtccgccggggaaaatagctgctacttcaactcatcgtttactagcatctggattccctattgtatcaagcttacttcaaatggcggcactgtcgatgagaagtgtttttccgtggacgagatagtgcagcctgatccccccattgccttgaactggaccctgttaaatgtatcactgactggcattcatgccgatattcaggttcgatgggaagcaccgagaaacgccgatattcaaaaaggttggatggtgctggagtatgagcttcagtacaaggaagtgaatgagaccaaatggaaaatgatggatcccattctcactacatccgtgcctgtatactctcttaaggtggacaaggaatacgaagttcgagtcagatcaaaacagcgcaactctggtaattatggagagttttccgaagtcctgtacgttacacttccccagatgagccagttcacctgcgaggaggatttctactttccctggctcctcatcataatttttgggatctttggcctaacggtgatgttgttcgtgttcttattttccaagcagcagcggattaaaatgttgattctgcccccagtgcccgtacctaaaataaagggtattgatcctgacctgctgaaagaaggcaaattggaggaggttaacaccattctggccatccacgatagttacaagcccgagtttcatagcgacgacagttgggtcgaattcatcgagctggacatcgatgagccagacgaaaagacagaggaatctgacactgatcggctgctctcatcagaccatgaaaagagccactctaacctcggagtcaaagatggtgattccggtcgtacatcatgctgtgaaccggatattctcgaaactgacttcaatgctaacgatatccacgagggaacttcagaggtcgcccagccgcaaaggctgaagggtgaggctgatcttctgtgcctcgaccagaagaatcagaacaacagtccgtaccatgatgcgtgtccggccactcaacaaccttccgtcattcaggccgagaaaaacaaacctcagccattgcccaccgagggagcagagtcaacccaccaagcagcacatatccaactgtccaatcccagctccctctctaacatcgatttctacgctcaggtgagcgacatcacacctgctggaagtgtcgttttaagccctggtcaaaagaacaaagcaggaatgtctcagtgtgacatgcacccagaaatggtctctctgtgtcaagaaaacttcctgatggataatgcttacttttgcgaagcggacgccaagaagtgtattcccgtggctcctcacatcaaagtggaaagccatatccagccctctcttaaccaggaggatatctacataacaaccgaaagcctcactaccgcagctggacgcccaggtacaggcgagcatgtgcccgggtctgagatgcctgtgccagactacacgagcatccacattgtgcaatcccctcagggtctgatactgaacgcaacggcgctcccactgccagataaagagttcctgtcatcctgtggttacgtgtccacagaccagttaaataaaattatgccttag

SEQ ID NO: 84225 - DNA, 1851 bp, Artificial Sequence
  derived and/or modified sequence
atggacctgtggcagctgctgctgaccctggccctggccggcagcagtgatgctttcagtgggagtgaagattcctctaaagaaccaaagttcacgaagtgcagaagtcctgaaagagaaaccttcagctgccactggacagatgaggtacatcacggcactaaaaatttgggcccaatccaactgttctatacacgccgtaacactcaggagtggacgcaggagtggaaggagtgccccgattacgtgagcgccggcgagaattcatgctacttcaattcttcctttacttcgatttggatcccttactgcatcaaacttacatctaatgggggaactgtcgatgaaaagtgtttcagcgtcgacgagatcgtccagcccgacccccccatcgcgttaaactggactctgctgaatgtgtcattgacaggcatacatgcagatatccaggtccgatgggaggctccccggaacgctgatatccagaaggggtggatggtcctggagtacgagctgcagtataaagaggtgaatgaaacaaaatggaagatgatggacccgattctgacaacctctgttcccgtctattcattaaaggttgataaagaatacgaagtgagggttcgctccaagcagagaaactctggaaattacggagaattcagcgaagtgctgtacgttacactaccgcagatgtcccagttcacatgcgaggaggacttttattttccgtggcttctcatcatcatttttggaatcttcggcctgacagtcatgctgtttgtgtttctcttcagcaaacagcagagaatcaagatgctaattctccccccagtgccagtcccaaaaatcaagggcatcgaccctgacctgcttaaagagggaaaacttgaggaagtgaataccatactagccatacatgattcgtacaaacccgaatttcactctgacgatagctgggttgagttcatagaactggatatcgacgagcctgacgagaaaaccgaggagagtgacacagaccgccttttgtcatctgatcacgagaaaagtcattccaatctcggagttaaggacggcgactccggaagaacatcatgttgtgagccggatatactggagacagattttaacgctaatgacattcacgagggcacatcagaggtagcacagccccaacgccttaaaggtgaagcagatctgctctgcttagatcagaaaaatcagaacaattcgccataccacgacgcctgtccagccacccagcagccgagcgtcatccaagccgaaaaaaataaacctcagcccttgccgaccgaaggtgcggagtctactcaccaagccgcgcacatccagctgtctaacccgtccagcttatccaatatcgacttttacgcacaggtgtccgacatcacccctgccgggagcgtggtgctgagcccaggacagaagaataaggctggcatgtcacaatgtgacatgcacccagaaatggtctccctgtgccaggaaaacttcctgatggacaatgcttacttttgtgaggccgacgccaagaaatgcatccccgtagccccccacattaaggtggaatctcatattcagccctcattgaaccaagaggacatctatataaccacggaatctctcactacggccgctggtcggccaggcacaggtgaacatgtgcctggatccgaaatgccagtgccggactacacctccatccacatagttcagtcacctcaagggttaatcttgaacgcgaccgccctgcccctgcctgataaagagtttctgtcttcttgcggctacgtgagcacagatcaactcaataaaatcatgccttag

SEQ ID NO: 84226 - DNA, 1356 bp, Artificial Sequence
  derived and/or modified sequence
atggtgctggagtacgagctgcagtacaaggaggtgaacgagaccaagtggaagatgatggatcctatcctgaccaccagtgttccggtttacagtttaaaagtcgacaaggagtatgaagtgcgggtgaggtccaagcagcggaactccgggaattacggagaattcagcgaggtgctctatgtcacgctaccccagatgtcacaatttacctgtgaggaggacttttacttcccctggttactcatcattatttttgggatcttcgggctgactgtgatgctattcgtgttcttgttctcaaaacagcagcgcatcaagatgctgatcctgcctcccgttcccgtgccaaaaatcaaaggaatcgatccagacctgctgaaggagggaaagctcgaggaagttaataccatcctagccatccatgattcctataagccagaattccactccgatgactcctgggtagagtttattgaattggatattgatgagcccgatgagaagactgaagagtccgataccgatcgcctgttgtcgtcagatcacgagaagagccattctaacttgggagtgaaggatggggattcagggcggacttcttgctgcgagccagatattctggagaccgacttcaatgccaacgatatacatgaaggaaccagcgaagttgcccaaccacaacggcttaaaggggaggcagacctcctctgtttagaccagaaaaaccagaataacagcccgtaccacgatgcatgtcccgccacacagcagccttctgttatccaggctgagaagaataagccccagcccctgcccaccgagggggctgagagcactcaccaggcagcacacattcaactgagcaatccatctagtttgtccaacatcgacttctacgctcaagtgagtgacatcacacctgctgggtccgttgttctgtctcccggccagaagaataaggctgggatgagccaatgtgacatgcatccagagatggtctccctgtgtcaggaaaatttcctcatggacaacgcttatttctgcgaagccgatgccaagaaatgtattcccgtcgcgcctcatattaaggtggaatcccacatccagccttcattgaaccaggaagacatctacatcaccactgaatctctcaccacggctgccggcagacccggtacaggtgaacacgtgcccggctccgagatgcctgtgcccgattacacatcaatccatattgtgcaaagcccgcagggcctaatcttgaacgcaactgccttgcccttgccagacaaggagttcctgtctagttgcggctacgtttctaccgaccagctgaacaagattatgccatag

SEQ ID NO: 84227 - DNA, 1917 bp, Artificial Sequence
  derived and/or modified sequence
atggacctttggcaattgcttctgactctggctctggccggaagttcggacgccttctctggaagtgaagcaacagccgcaatcctcagcagggcaccttggagtctgcagagcgtaaatcccggtctcaaaaccaatagctccaaagagccaaagttcacaaagtgtcgaagccctgagcgcgagaccttttcatgtcactggaccgacgaagttcatcacggaaccaagaaccttgggccaatacagctgttctacacaaggcggaacacacaggagtggacccaagagtggaaagagtgtccagattatgtctctgctggcgagaactcctgctattttaacagctcgttcacctccatctggatcccgtattgcatcaagttaacctcgaacggcggaacagtggacgaaaaatgcttctctgttgacgaaatagtgcagccagacccacctatcgcactaaactggaccctactcaacgtttctcttaccggaattcacgcagatatccaggtcaggtgggaagccccaagaaacgctgacatccagaagggctggatggtactggaatacgagctccagtacaaggaggtgaacgaaactaagtggaagatgatggacccaatactcactacaagcgttcccgtatactcccttaaggtcgataaggaatatgaagtgcgcgtccgttcaaagcagcgtaattcaggcaactacggcgaattctcagaggtactgtacgtgaccctgcctcaaatgagtcagttcacttgcgaagaggacttctacttcccttggctcctgatcataatctttggcattttcggattgaccgtaatgctgttcgtatttctgttctcgaagcagcaacgaattaagatgctgattctgccaccagtccccgtccctaagataaagggcattgatcctgatctgctcaaagagggaaagttagaagaggtgaacacaattctggctattcatgattcctacaaacctgagttccatagcgacgacagttgggtggagtttatcgaactggatatagatgagcccgacgaaaaaacagaagaatcagacaccgaccgtctgctctcttccgaccacgaaaagtcgcattcgaacctcggggtcaaagatggggactccggtcgaacatcatgctgcgaaccagacatactggagacagacttcaacgccaatgatatccacgaaggcacttcggaagtggctcaacctcaacgactgaaaggcgaagcagacttactgtgcttagaccaaaagaatcagaacaacagtccttaccatgatgcttgcccagctacccagcagccctctgtgatccaggccgagaaaaataaacctcagcctctgcccaccgaaggggctgaaagcacccatcaggccgctcacattcagttgtcaaacccaagttcactctcaaacattgacttttatgcacaagtttccgacattaccccggctggaagcgtggtcctctcccctgggcagaagaataaggccggaatgtcacagtgcgacatgcaccccgagatggtgtcactgtgtcaggagaactttctgatggataatgcatatttctgcgaagctgatgccaagaaatgtatcccagtcgcaccgcatatcaaagtcgagtctcatatacaaccgtcactcaatcaggaggatatatatattaccactgagtcacttaccacagctgccggacgtccgggaacaggggaacatgtgccgggatcggagatgcctgttcccgattatacaagcattcacatcgttcagtccccgcaggggctgatcctcaacgccaccgcccttcccctccccgataaagagttcctgtcctcctgcggatatgtgtctaccgatcaattgaacaaaattatgccatag

SEQ ID NO: 84228 - DNA, 1851 bp, Artificial Sequence
  derived and/or modified sequence
atggacctgtggcagctattgctgaccctggccttagccggtagcagtgatgccttctcaggcagtgaagattccagtaaggagccaaaattcacgaagtgtcgttcgccggagagagagacttttagctgtcactggaccgatgaagtgcaccatggcactaaaaacctcggccctatccagctgttctatacacgcaggaatactcaggagtggacccaggaatggaaagaatgccctgactacgtgtctgcaggagaaaactcatgttacttcaactccagcttcacttctatatggatcccttactgtataaaactcacctcaaatggcggtaccgtggatgagaagtgcttttctgtggatgaaatcgtgcagcctgacccccctatagctctcaactggactcttctgaacgtctccttgactgggatccatgctgacattcaggttagatgggaggctcctcgtaacgccgatatccagaagggatggatggttctcgagtacgagctgcagtacaaggaggttaatgagacgaaatggaagatgatggatcctattctgaccaccagtgttccagtgtactctttaaaggtcgacaaagagtacgaggtcagagtgcggagtaagcaacggaattcggggaactacggcgaattcagcgaggtgctatacgtgactctcccacagatgagccagtttacatgtgaagaggacttctattttccttggctgctcattattatctttgggattttcggactcactgtgatgctctttgttttcttattctctaagcagcagaggatcaagatgctgatattacctccagtacccgttccaaagatcaagggaatcgatcccgacctgctgaaggagggaaagctggaggaggttaacaccatcctcgctattcacgattcttataaaccagagttccactcagatgacagttgggtggaatttattgaacttgatatagacgaacccgatgaaaagactgaggagagtgatactgatcgccttctttcatcagaccacgagaaatcccattcaaatttaggggtgaaagacggcgactccgggaggactagctgctgtgagcccgacatcctcgagacagacttcaacgccaacgacattcacgaaggtacatcagaagtagcccagcctcagcgtctaaagggagaggcagatctgctttgcctggaccagaaaaaccagaataactccccctatcacgatgcttgtcccgcaacgcaacagccctccgtgatccaagcggaaaaaaacaagccacagcctctcccaaccgagggcgctgagtcaacacatcaggctgctcatatccagttgagtaatccatcatctttatctaatattgatttttacgcacaggtgtctgacattaccccagccggttcagtcgtgttgtcccccggtcagaagaacaaagccggaatgagtcagtgcgacatgcatcccgaaatggtcagtctttgccaggagaatttcctgatggacaacgcttacttctgcgaggctgacgctaagaagtgcattcctgtggcccctcatattaaagtggaaagtcacatccaaccctctctgaaccaggaggacatttatattaccacggaaagcctgacaactgccgcaggcaggcctggtactggcgaacacgtcccaggctccgaaatgcccgtgcctgattatacttcgatccacatcgttcagagcccacaggggctgatcttgaacgcaacagcgcttcccctgcccgacaaggagtttcttagctcctgtggatatgtgtccaccgatcagcttaacaagataatgccctag

SEQ ID NO: 84229 - DNA, 1356 bp, Artificial Sequence
  derived and/or modified sequence
atggtccttgagtacgagctgcagtacaaagaggtgaatgagacgaaatggaaaatgatggaccccattctgacgacaagcgtgcctgtctactcactgaaggttgacaaagaatatgaagttcgggtgcgctccaaacagagaaacagtggaaattacggggagtttagtgaggtcctctacgtgactctgcctcaaatgtcacagttcacttgtgaagaggacttttatttcccttggctgttgattattatattcggaatatttggcctcacagttatgctgtttgtgttcctgttttcgaaacagcaaaggatcaagatgcttattcttccaccggtgcctgtacctaagattaaagggatcgaccccgacctgctgaaggagggaaagctggaggaagtgaataccatcctagcaattcacgactcatataagccagagttccactctgacgactcatgggttgagtttatcgaactggacattgacgaaccagatgaaaagacagaagagtccgacaccgatcggctgcttagctctgatcatgagaaatcacattccaacctgggcgtaaaagacggagattctgggaggaccagttgttgtgaacccgacatcctggagaccgactttaatgccaatgacatccacgaagggacttcagaggtggcgcagccacagagattgaagggcgaggcagacttattgtgtctggatcagaaaaatcaaaacaactctccctaccacgacgcctgtccagccacgcagcagcccagtgtcatccaggctgaaaaaaacaaacctcagcctctgcccaccgaaggagctgagtcaacacaccaggccgcacacattcagttatctaatcctagtagcctgagtaatatcgatttttatgctcaggtttccgacattacaccggctggctcagtggtgctatccccagggcagaaaaacaaagcaggaatgagccagtgcgacatgcatccagagatggtcagtctgtgccaggagaactttctcatggataacgcctatttttgtgaggccgacgcaaagaagtgtatacctgttgccccacacataaaggtcgaaagccatatccagccttcattaaaccaagaggacatctacatcactacggaatctctcacgactgccgcaggacgacccggtactggggagcacgtccccggatctgaaatgcctgtgcctgattatactagtatacacatagtccagtctccccaggggctgattctgaatgcaactgccctaccactcccggacaaagagtttctatcttcctgtggatatgtctccactgaccagcttaataaaattatgccttag

SEQ ID NO: 84230 - DNA, 1917 bp, Artificial Sequence
  derived and/or modified sequence
atggacctgtggcagctgctgctgaccctggccctggccggcagcagcgacgccttcagcggcagcgaggccaccgccgccatcctgagcagagccccctggagcctgcagagcgtgaaccccggcctgaagaccaacagcagcaaggagcccaagttcaccaagtgcagaagccccgagagagagaccttcagctgccactggaccgacgaggtgcaccacggcaccaagaacctgggccccatccagctgttctacaccagaagaaacacccaggagtggacccaggagtggaaggagtgccccgactacgtgagcgccggcgagaacagctgctacttcaacagcagcttcaccagcatctggatcccctactgcatcaagctgaccagcaacggcggcaccgtggacgagaagtgcttcagcgtggacgagatcgtgcagcccgacccccccatcgccctgaactggaccctgctgaacgtgagcctgaccggcatccacgccgacatccaggtgagatgggaggcccccagaaacgccgacatccagaagggctggatggtgctggagtacgagctgcagtacaaggaggtgaacgagaccaagtggaagatgatggaccccatcctgaccaccagcgtgcccgtgtacagcctgaaggtggacaaggagtacgaggtgagagtgagaagcaagcagagaaacagcggcaactacggcgagttcagcgaggtgctgtacgtgaccctgccccagatgagccagttcacctgcgaggaggacttctacttcccctggctgctgatcatcatcttcggcatcttcggcctgaccgtgatgctgttcgtgttcctgttcagcaagcagcagagaatcaagatgctgatcctgccccccgtgcccgtgcccaagatcaagggcatcgaccccgacctgctgaaggagggcaagctggaggaggtgaacaccatcctggccatccacgacagctacaagcccgagttccacagcgacgacagctgggtggagttcatcgagctggacatcgacgagcccgacgagaagaccgaggagagcgacaccgacagactgctgagcagcgaccacgagaagagccacagcaacctgggcgtgaaggacggcgacagcggcagaaccagctgctgcgagcccgacatcctggagaccgacttcaacgccaacgacatccacgagggcaccagcgaggtggcccagccccagagactgaagggcgaggccgacctgctgtgcctggaccagaagaaccagaacaacagcccctaccacgacgcctgccccgccacccagcagcccagcgtgatccaggccgagaagaacaagccccagcccctgcccaccgagggcgccgagagcacccaccaggccgcccacatccagctgagcaaccccagcagcctgagcaacatcgacttctacgcccaggtgagcgacatcacccccgccggcagcgtggtgctgagccccggccagaagaacaaggccggcatgagccagtgcgacatgcaccccgagatggtgagcctgtgccaggagaacttcctgatggacaacgcctacttctgcgaggccgacgccaagaagtgcatccccgtggccccccacatcaaggtggagagccacatccagcccagcctgaaccaggaggacatctacatcaccaccgagagcctgaccaccgccgccggcagacccggcaccggcgagcacgtgcccggcagcgagatgcccgtgcccgactacaccagcatccacatcgtgcagagcccccagggcctgatcctgaacgccaccgccctgcccctgcccgacaaggagttcctgagcagctgcggctacgtgagcaccgaccagctgaacaagatcatgccctag

SEQ ID NO: 84231 - DNA, 1851 bp, Artificial Sequence
  derived and/or modified sequence
atggacctgtggcagctgctgctgaccctggccctggccggcagcagcgacgccttcagcggcagcgaggacagcagcaaggagcccaagttcaccaagtgcagaagccccgagagagagaccttcagctgccactggaccgacgaggtgcaccacggcaccaagaacctgggccccatccagctgttctacaccagaagaaacacccaggagtggacccaggagtggaaggagtgccccgactacgtgagcgccggcgagaacagctgctacttcaacagcagcttcaccagcatctggatcccctactgcatcaagctgaccagcaacggcggcaccgtggacgagaagtgcttcagcgtggacgagatcgtgcagcccgacccccccatcgccctgaactggaccctgctgaacgtgagcctgaccggcatccacgccgacatccaggtgagatgggaggcccccagaaacgccgacatccagaagggctggatggtgctggagtacgagctgcagtacaaggaggtgaacgagaccaagtggaagatgatggaccccatcctgaccaccagcgtgcccgtgtacagcctgaaggtggacaaggagtacgaggtgagagtgagaagcaagcagagaaacagcggcaactacggcgagttcagcgaggtgctgtacgtgaccctgccccagatgagccagttcacctgcgaggaggacttctacttcccctggctgctgatcatcatcttcggcatcttcggcctgaccgtgatgctgttcgtgttcctgttcagcaagcagcagagaatcaagatgctgatcctgccccccgtgcccgtgcccaagatcaagggcatcgaccccgacctgctgaaggagggcaagctggaggaggtgaacaccatcctggccatccacgacagctacaagcccgagttccacagcgacgacagctgggtggagttcatcgagctggacatcgacgagcccgacgagaagaccgaggagagcgacaccgacagactgctgagcagcgaccacgagaagagccacagcaacctgggcgtgaaggacggcgacagcggcagaaccagctgctgcgagcccgacatcctggagaccgacttcaacgccaacgacatccacgagggcaccagcgaggtggcccagccccagagactgaagggcgaggccgacctgctgtgcctggaccagaagaaccagaacaacagcccctaccacgacgcctgccccgccacccagcagcccagcgtgatccaggccgagaagaacaagccccagcccctgcccaccgagggcgccgagagcacccaccaggccgcccacatccagctgagcaaccccagcagcctgagcaacatcgacttctacgcccaggtgagcgacatcacccccgccggcagcgtggtgctgagccccggccagaagaacaaggccggcatgagccagtgcgacatgcaccccgagatggtgagcctgtgccaggagaacttcctgatggacaacgcctacttctgcgaggccgacgccaagaagtgcatccccgtggccccccacatcaaggtggagagccacatccagcccagcctgaaccaggaggacatctacatcaccaccgagagcctgaccaccgccgccggcagacccggcaccggcgagcacgtgcccggcagcgagatgcccgtgcccgactacaccagcatccacatcgtgcagagcccccagggcctgatcctgaacgccaccgccctgcccctgcccgacaaggagttcctgagcagctgcggctacgtgagcaccgaccagctgaacaagatcatgccctag

SEQ ID NO: 84232 - DNA, 1356 bp, Artificial Sequence
  derived and/or modified sequence
atggtgctggagtacgagctgcagtacaaggaggtgaacgagaccaagtggaagatgatggaccccatcctgaccaccagcgtgcccgtgtacagcctgaaggtggacaaggagtacgaggtgagagtgagaagcaagcagagaaacagcggcaactacggcgagttcagcgaggtgctgtacgtgaccctgccccagatgagccagttcacctgcgaggaggacttctacttcccctggctgctgatcatcatcttcggcatcttcggcctgaccgtgatgctgttcgtgttcctgttcagcaagcagcagagaatcaagatgctgatcctgccccccgtgcccgtgcccaagatcaagggcatcgaccccgacctgctgaaggagggcaagctggaggaggtgaacaccatcctggccatccacgacagctacaagcccgagttccacagcgacgacagctgggtggagttcatcgagctggacatcgacgagcccgacgagaagaccgaggagagcgacaccgacagactgctgagcagcgaccacgagaagagccacagcaacctgggcgtgaaggacggcgacagcggcagaaccagctgctgcgagcccgacatcctggagaccgacttcaacgccaacgacatccacgagggcaccagcgaggtggcccagccccagagactgaagggcgaggccgacctgctgtgcctggaccagaagaaccagaacaacagcccctaccacgacgcctgccccgccacccagcagcccagcgtgatccaggccgagaagaacaagccccagcccctgcccaccgagggcgccgagagcacccaccaggccgcccacatccagctgagcaaccccagcagcctgagcaacatcgacttctacgcccaggtgagcgacatcacccccgccggcagcgtggtgctgagccccggccagaagaacaaggccggcatgagccagtgcgacatgcaccccgagatggtgagcctgtgccaggagaacttcctgatggacaacgcctacttctgcgaggccgacgccaagaagtgcatccccgtggccccccacatcaaggtggagagccacatccagcccagcctgaaccaggaggacatctacatcaccaccgagagcctgaccaccgccgccggcagacccggcaccggcgagcacgtgcccggcagcgagatgcccgtgcccgactacaccagcatccacatcgtgcagagcccccagggcctgatcctgaacgccaccgccctgcccctgcccgacaaggagttcctgagcagctgcggctacgtgagcaccgaccagctgaacaagatcatgccctag

SEQ ID NO: 84233 - protein, 876 aa, Artificial Sequence
  derived and/or modified sequence
MDPAPSLGCSLKDVKWSSVAVPLDLLVSTYRLPQIARLDNGECVEGLRENDYLLIHSCRQWTTITAHSLEEGHYVIGPKIEIPVHYAGQFKLLEQDRDIKEPVQYFNSVEEVAKAFPERVYVMEDITFNVKVASGECNEDTEVYNITLCTGDELTLMGQAEILYAKTFKEKSRLNTIFKKIGKLNSISKLGKGKMPCLICMNHRTNESISLPFQCKGRFSTRSPLELQMQEGEHTIRNIVEKTRLPVNVTVPSPPPRNPYDLHFIREGHRYKFVNIQTKTVVVCCVLRNNKILPMHFPLHLTVPKFSLPEHLVKGESWPETLVHHWLGICQEQFDIDEYSRAVRDVKTDWNEECKSPKKGRCSGHNHVPNSLSYARDELTQSFHRLSVCVYGNNLHGNSEVNLHGCRDLGGDWAPFPHDILPYQDSGDSGSDYLFPEASEESAGIPGKSELPYEELWLEEGKPSHQPLTRSLSEKNRCDQFRGSVRSKCATSPLPIPGTLGAAVKSSDTALPPPPVPPKSEAVREECRLLNAPPVPPRSAKPLSTSPSIPPRTVKPARQQTRSPSPTLSYYSSGLHNISVTKTDTNPSESTPVSCYPCNRVKTDSVDLKSPFGSPSAEAVSSRLSWPNHYSGASESQTRSDFLLDPSRSYSYPRQKTPGTPKRNCPAPFDFDGCELLASPTSPVTAEFSSSVSGCPKSASYSLESTDVKSLAAGVTKQSTSCPALPPRAPKLVEEKVASETSPLPLKIDGAEEDPKSGSPDLSEDQYFVKKGMQDIFSASYPFSSPLHLQLAPRSCGDGSPWQPPADLSGLSIEEVSKSLRFIGLSEDVISFFVTEKIDGNLLVQLTEEILSEDFKLSKLQVKKIMQFINGWRPKI

SEQ ID NO: 84234 - DNA, 2631 bp, Artificial Sequence
  derived and/or modified sequence
atggaccccgcccccagcctgggctgcagcctgaaggacgtgaagtggagcagcgtggccgtgcccctggacctgctggtgagcacctacagactgccccagatcgccagactggacaacggcgagtgcgtggagggcctgagagagaacgactacctgctgatccacagctgcagacagtggaccaccatcaccgcccacagcctggaggagggccactacgtgatcggccccaagatcgagatccccgtgcactacgccggccagttcaagctgctggagcaggacagagacatcaaggagcccgtgcagtacttcaacagcgtggaggaggtggccaaggccttccccgagagagtgtacgtgatggaggacatcaccttcaacgtgaaggtggccagcggcgagtgcaacgaggacaccgaggtgtacaacatcaccctgtgcaccggcgacgagctgaccctgatgggccaggccgagatcctgtacgccaagaccttcaaggagaagagcagactgaacaccatcttcaagaagatcggcaagctgaacagcatcagcaagctgggcaagggcaagatgccctgcctgatctgcatgaaccacagaaccaacgagagcatcagcctgcccttccagtgcaagggcagattcagcaccagaagccccctggagctgcagatgcaggagggcgagcacaccatcagaaacatcgtggagaagaccagactgcccgtgaacgtgaccgtgcccagccccccccccagaaacccctacgacctgcacttcatcagagagggccacagatacaagttcgtgaacatccagaccaagaccgtggtggtgtgctgcgtgctgagaaacaacaagatcctgcccatgcacttccccctgcacctgaccgtgcccaagttcagcctgcccgagcacctggtgaagggcgagagctggcccgagaccctggtgcaccactggctgggcatctgccaggagcagttcgacatcgacgagtacagcagagccgtgagagacgtgaagaccgactggaacgaggagtgcaagagccccaagaagggcagatgcagcggccacaaccacgtgcccaacagcctgagctacgccagagacgagctgacccagagcttccacagactgagcgtgtgcgtgtacggcaacaacctgcacggcaacagcgaggtgaacctgcacggctgcagagacctgggcggcgactgggcccccttcccccacgacatcctgccctaccaggacagcggcgacagcggcagcgactacctgttccccgaggccagcgaggagagcgccggcatccccggcaagagcgagctgccctacgaggagctgtggctggaggagggcaagcccagccaccagcccctgaccagaagcctgagcgagaagaacagatgcgaccagttcagaggcagcgtgagaagcaagtgcgccaccagccccctgcccatccccggcaccctgggcgccgccgtgaagagcagcgacaccgccctgccccccccccccgtgccccccaagagcgaggccgtgagagaggagtgcagactgctgaacgccccccccgtgccccccagaagcgccaagcccctgagcaccagccccagcatcccccccagaaccgtgaagcccgccagacagcagaccagaagccccagccccaccctgagctactacagcagcggcctgcacaacatcagcgtgaccaagaccgacaccaaccccagcgagagcacccccgtgagctgctacccctgcaacagagtgaagaccgacagcgtggacctgaagagccccttcggcagccccagcgccgaggccgtgagcagcagactgagctggcccaaccactacagcggcgccagcgagagccagaccagaagcgacttcctgctggaccccagcagaagctacagctaccccagacagaagacccccggcacccccaagagaaactgccccgcccccttcgacttcgacggctgcgagctgctggccagccccaccagccccgtgaccgccgagttcagcagcagcgtgagcggctgccccaagagcgccagctacagcctggagagcaccgacgtgaagagcctggccgccggcgtgaccaagcagagcaccagctgccccgccctgccccccagagcccccaagctggtggaggagaaggtggccagcgagaccagccccctgcccctgaagatcgacggcgccgaggaggaccccaagagcggcagccccgacctgagcgaggaccagtacttcgtgaagaagggcatgcaggacatcttcagcgccagctaccccttcagcagccccctgcacctgcagctggcccccagaagctgcggcgacggcagcccctggcagccccccgccgacctgagcggcctgagcatcgaggaggtgagcaagagcctgagattcatcggcctgagcgaggacgtgatcagcttcttcgtgaccgagaagatcgacggcaacctgctggtgcagctgaccgaggagatcctgagcgaggacttcaagctgagcaagctgcaggtgaagaagatcatgcagttcatcaacggctggagacccaagatctag

SEQ ID NO: 84235 - DNA, 2631 bp, Artificial Sequence
  derived and/or modified sequence
atggatcctgctcctagtttggggtgcagtttaaaagacgtgaaatggtcctcagtcgccgtcccgctcgacttgctggtttcaacataccgactaccccagattgccagactggataacggcgagtgcgtagagggcctcagagaaaatgactacctcctcatccactcgtgtagacagtggacaacgatcacggctcactcactggaagaaggacactatgtaattggacctaagattgagattccagtgcattacgcaggccagttcaagcttcttgagcaggacagggatatcaaagagccggtgcagtacttcaacagtgtggaggaggtggccaaggcgtttccagaacgggtctatgtaatggaagacattacctttaatgttaaagtcgcatcaggagaatgcaatgaagataccgaggtttataatataaccctgtgtacgggggatgagctgaccttaatgggccaggcagaaattctttacgcaaagacttttaaagagaaatcccgcctgaatacaatctttaagaagatcgggaagctcaactccatttctaagctgggcaaaggcaaaatgccatgcttgatctgtatgaaccatcgcacaaatgaaagcatttcgttgcccttccaatgtaaagggcgtttctccactaggagcccactcgagctgcaaatgcaggagggggaacacactattcgcaacatcgtcgaaaagacgcgcctgccagtcaatgtgacggtgccatccccacctccacgaaatccctacgacttgcatttcattcgggagggccacagatacaaatttgtgaatattcaaaccaaaacagtggttgtttgctgtgttctgcggaataataagatcttgcctatgcatttccctctgcacttgactgtgcctaaattctctctgccggagcaccttgtgaagggggaatcctggccagaaacactcgtacatcattggctggggatttgccaggagcagttcgatatcgatgagtatagccgggccgttcgcgatgtcaaaacggattggaatgaggagtgtaaatctcctaagaagggtcgctgtagtgggcacaaccatgtccccaacagcctgtcctatgcgcgcgacgagctgacccaaagcttccatcgtctctctgtgtgcgtctatggcaacaacctgcatggtaatagtgaagtgaacttacacggctgcagggatctcggcggtgactgggcgccctttccacacgacattctgccgtatcaggactcgggagactcagggagcgactatctttttccagaggcttccgaagagtcagctggcattcctggaaaatcagaactgccatacgaggaactgtggctggaagagggtaagccttctcaccagccacttacaaggagtttatcagagaaaaacagatgcgaccagttcagaggaagtgttcgttccaagtgcgctacatctccactcccaattccaggtactcttggcgctgccgtaaaaagctcagacaccgcactgccaccgccccctgttccacccaagtccgaggccgtgcgggaggagtgccggcttcttaacgctcccccggtgcctcctcgcagtgcaaaacccctgtcgacctcccccagtatacccccccgaaccgtgaagccagcccgacagcaaacaagatcaccatctcccacactgtcgtactactcctcgggccttcataatatctccgtcacaaagactgacactaatccaagcgagtcaacaccagtgagttgttacccatgtaacagggttaaaactgactctgtagacctcaagagcccattcggatcaccgtctgcagaggctgtctcctcaaggctctcctggcccaaccactacagtggcgcatccgagtcacagacccgaagcgactttttgctcgacccttcgcgctcatactcctatccccgacagaaaacacccggtacacccaaaagaaattgccccgcaccgttcgacttcgacggctgtgagctgctcgcatcccccaccagtcccgtgaccgcagaattttcctcatcggtgtccggttgccctaaatcagctagctactccctggagtccacagacgtcaaaagccttgctgctggggtcactaagcagtcaacctcttgccccgctttgccaccacgagctcccaaattagttgaggagaaggtcgcttcagagacctcccctctacccctgaagattgacggggccgaggaggatcccaaatctggctcacccgatctgtccgaggaccagtattttgtgaagaagggaatgcaggatatcttctccgcatcctatcccttttccagccctctccatctgcagctggccccgcgatcctgcggagacggatcaccatggcagccccccgccgacctttctggactgtccatcgaggaagtttctaaatctttgaggtttattggcttaagtgaggatgtgatttcttttttcgtcaccgagaagatcgatggaaatctactggtgcagttgaccgaggagattttatctgaagacttcaagctgtctaaattgcaggtaaagaaaatcatgcagttcatcaatggttggaggccaaaaatttag

SEQ ID NO: 84236 - DNA, 3006 bp, Artificial Sequence
  derived and/or modified sequence
gaagatggacccggcgccctcgctgggctgcagcctcaaggatgtgaagtggagctcggtggccgtgccgctcgacctcctggtcagcacttaccggctgccccagatcgcgcgcctggacaacggagagtgcgtagaagggctgcgggaaaatgactatctgctgattcattcctgccgccagtggaccaccatcactgcccacagcttggaggagggtcactatgtcattgggccaaagatagagattccggtacattatgcagggcaattcaagctgctggaacaagaccgagatataaaggagccagtgcaatatttcaacagtgtggaggaggtggctaaggcatttcctgaacgcgtgtacgtcatggaggatatcacattcaacgtgaaggttgcttcaggtgaatgcaatgaagacactgaagtttacaacatcaccctgtgtactggggatgaactcactctaatggggcaggcagaaatcctttatgcaaagacattcaaggaaaagtcacgactcaacacaatcttcaaaaagattgggaagctcaattccatcagcaagctgggaaaaggcaaaatgccgtgcctcatttgtatgaatcaccggaccaacgaaagcattagccttccattccagtgcaagggcagatttagcacccgaagtcccctggaacttcagatgcaagagggcgaacacaccatccgcaacattgtggagaaaaccaggcttcctgtgaatgtgactgtgccaagccctccaccgagaaacccatacgacctccacttcatccgtgaggggcaccgctataagtttgtgaacatccagaccaagacggtggtggtttgctgtgtgctgcggaacaacaagatcctccccatgcactttcctttgcacttgactgtccccaagttcagcctcccagaacacctggtgaagggagagagctggcccgaaaccctggtccatcactggctaggtatctgccaagaacagttcgacatcgatgagtattcacgggctgtccgtgatgtgaaaaccgactggaatgaagaatgcaagagccccaagaagggtcggtgctctggccacaaccacgtgcccaattcgctcagctacgcccgcgatgagctcacccagtccttccaccgactctcggtctgtgtgtatggcaacaatctccatggcaacagtgaggtgaaccttcatggttgcagggacctggggggagattgggctccctttcctcatgacatcctgccctatcaggactctggagatagtgggagcgactaccttttcccagaagctagtgaagaatcagcaggcatcccgggaaagtcagaacttccctacgaagagctgtggctggaggaaggcaagcccagccatcagcctctcactcgctctctgagcgagaagaacagatgtgatcagtttagaggttctgtccgatccaaatgtgcgacttctcctcttcccatccctgggactctgggagcagcagtgaagtcttcagatactgccctacctccacctccagtgcctcccaaatctgaagccgtcagagaagaatgccggctcctgaacgccccacctgttccaccccgaagcgcaaagcctttgtccaccagtccctccatccctcctcgcacagtcaagccagcgcggcaacagactcgctctcccagccccaccttgtcctactattcttcagggctacacaacatcagcgtcactaaaactgacacaaatccttctgaaagcactcctgtttcctgctatccatgtaaccgagtgaaaactgattctgtggacctgaaatccccgtttggaagtccttctgctgaagctgtgtcctctcggctctcatggcctaaccattattcaggagcatcagaaagccagaccaggagtgacttcctgctggatccaagcaggagttatagttaccctagacaaaagacgccaggcacaccaaagagaaactgcccagcaccttttgattttgatggctgtgagctcctggccagccccactagcccagtcactgcagaattcagtagcagcgtctctggttgtcccaagtcagccagctactctctggagagcacagatgtgaaatctcttgcagctggtgtgacaaagcagagtacgtcatgccctgccttaccccccagggctccaaaactagtggaagagaaggtcgcctccgaaacatctcctttgcctctgaaaattgatggtgctgaggaagaccccaagtctgggtcaccagatctctcggaggaccagtattttgttaaaaagggcatgcaggacatcttctctgcctcctaccctttctcatctccgctccatctccagctggcccccagatcctgtggcgacggttccccatggcagccacctgctgacctatcaggactctctatagaggaagtgtccaagtcactacggttcattggtttgtccgaagatgtcatatcattctttgttactgaaaagattgatgggaacctgcttgttcagctaacggaagaaatcctctcagaggatttcaaattgagcaaattgcaggtgaagaagataatgcaattcattaatggctggaggcccaaaatatagccaaataacccccggccagcatggaacaaaactgatcaatgcgtgtgctagaaggggtgggctgggacacaatttcatgtttttgcactaaaaaccttctctgtaaatagggataagagaaactcttactatgcagattacgtttttgaatggtgaacaggctattttgtacatcaataaaaatgctgtacagaacacttggaggtgtgccttgtacgtcactcaacaaacactcagcagctgctaaaagaaaaaaaggcatgtgcagagaaatcattcttacccaagtaggtttatgtgagaaggtatgatatttattacaaaatagccaaagctggaagacataaaaatctttaaaaaaaaaaaaaaaa

SEQ ID NO: 84237 - DNA, 2631 bp, Artificial Sequence
  derived and/or modified sequence
atggaccctgcccccagcctgggctgcagcctgaaggatgtgaagtggagctctgtggccgtgcccctggacctgctggtgtccacctaccgcctgccccagatcgcccggctggacaacggggagtgtgtggagggcctgagagaaaatgactacctgctgatccacagctgccggcagtggaccaccatcacagcccacagcctggaggagggccactacgtgattggccccaagattgagatccctgtgcactacgccggccagttcaagctgctggagcaggaccgggacatcaaggagcctgtgcagtacttcaacagcgtggaggaggtggccaaggccttccctgagcgggtgtatgtgatggaggacatcaccttcaacgtgaaggtggccagcggggagtgcaatgaagacacagaggtgtacaacatcaccctgtgcacaggagatgagctgaccctgatgggccaggccgagatcctgtatgccaagaccttcaaggagaagagccggctgaacaccatcttcaagaagattggcaagctgaacagcatcagcaagctgggcaagggcaagatgccctgcctgatctgcatgaaccacaggaccaatgaaagcatcagcctgcccttccagtgcaagggccgcttcagcaccaggagccccctggagctgcagatgcaggagggggagcacaccatcagaaatattgtggagaagacccggctgcctgtgaatgtgacagtgcccagccccccaccaagaaacccctatgacctgcacttcatccgggagggccaccgctacaagtttgtgaacatccagaccaagacagtggtggtgtgctgcgtgctgaggaacaacaagatcctgcccatgcacttccccctgcacctgactgtgcccaagttcagcctgcctgagcacctggtgaagggggagagctggccagagaccctggtgcaccactggctgggcatctgccaggagcagtttgatattgatgagtacagcagagctgtgagagatgtgaagacagactggaatgaggagtgcaagagccccaagaagggccgctgcagcggccacaaccacgtgcccaacagcctgtcctatgccagagatgagctgacccagagcttccaccggctgtctgtgtgtgtgtatggcaacaacctgcacggcaacagcgaggtgaacctgcacggctgccgggacctgggcggggactgggcccccttcccccatgacatcctgccctaccaggacagcggggacagcggcagtgactacctgtttcctgaggccagcgaggagagcgctggcatccctgggaagtctgagctgccctatgaggagctgtggctggaggagggcaagcccagccaccagcccctgaccaggagcctgtctgagaagaacagatgtgaccagttccggggctctgtgcgcagcaaatgtgccaccagccccctgcccatccctggcaccctgggcgctgctgtgaagagcagtgacacagccctgcccccacctcctgtgccccccaagtctgaggccgtgcgggaggagtgccgcctgctgaatgcccctcctgtgccccccaggtctgccaagcccctgagcaccagccccagcatcccccccaggacagtgaagccagcccggcagcagaccaggagccccagccccaccctgagctactacagcagcggcctgcacaacatctctgtgaccaagacagacaccaaccccagcgagagcacccctgtgtcctgctacccctgcaacagagtgaagacagattctgtggacctgaagagccccttcggcagccccagcgctgaggccgtgagcagccggctgtcctggcccaaccactacagcggggccagcgagagccagaccaggagtgacttcctgctggaccccagccgcagctacagctacccccggcagaagaccccaggcacccccaagaggaactgcccagccccctttgattttgatggctgtgagctgctggccagccccaccagccctgtgacagctgagttcagcagctctgtgtctggctgccccaagagcgccagctacagcctggagagcacagatgtgaagagcctggccgccggcgtgaccaagcagagcaccagctgcccagccctgcccccccgggcccccaagctggtggaggagaaggtggccagcgagaccagccccctgcccctgaagattgatggagctgaggaggaccccaagagcggcagcccagacctgtctgaggaccagtactttgtgaagaagggcatgcaggacatcttcagcgccagctaccccttcagcagccccctgcacctgcagctggcccccaggagctgtggagatggcagcccctggcagcccccagctgacctgagcggcctgagcattgaggaggtgtccaagagcctgcgcttcatcggcctgtctgaagatgtgatctccttctttgtgacagagaagattgatggcaacctgctggtgcagctgacagaggagatcctgtctgaggacttcaagctgagcaagctgcaggtgaagaagatcatgcagttcatcaatggctggaggcccaagatctag

SEQ ID NO: 84238 - DNA, 2631 bp, Artificial Sequence
  derived and/or modified sequence
atggaccccgcccccagcctgggctgcagcctgaaggacgtgaagtggagctccgttgctgtcccccttgacctccttgtatctacttaccggctcccacaaattgcccggctcgacaatggcgaatgcgttgagggccttcgggaaaatgattatctgctcatccactcatgcagacagtggaccaccatcactgcccatagtcttgaggaaggtcattacgtgatcggccccaagatagagataccagttcactacgccggccagttcaaactcctagaacaggatcgggacattaaggaacccgtccagtactttaatagcgttgaagaggtcgccaaagccttccccgagcgcgtttatgttatggaagatatcactttcaacgttaaggtcgcgtccggtgagtgtaacgaggataccgaagtgtacaatattacactctgcacgggcgatgaactcacactcatggggcaagcagagatactatatgccaagacattcaaagaaaagagccgactgaatacaatatttaagaagattggaaagctgaattccatctcaaagctggggaaggggaagatgccctgcctgatatgtatgaatcaccggactaacgagtcgattagcctgcctttccagtgcaaagggagattcagtaccaggtctccactcgagctgcagatgcaggagggggaacacacaatccgaaacattgttgagaaaacacgcctacctgtcaatgtgacagtgcccagcccccctcctcgcaatccatatgatttgcacttcatcagggagggacatcggtataaatttgttaatattcagactaagacagttgtcgtatgctgcgttttgcgcaataataagatcctgccaatgcacttcccgcttcatctgactgttcctaagttcagcctgccggagcacctcgttaaaggtgagtcttggccagagaccctggtgcaccattggctgggcatttgccaggaacagttcgatattgatgaatattctcgggccgtgcgcgacgtgaaaaccgattggaacgaggaatgcaaatcaccaaagaagggaaggtgttccggacataatcatgtgcctaatagcttgtcatacgcccgcgacgagctcactcaaagcttccacaggttatcggtatgtgtgtatgggaataacctgcacgggaactcagaagtaaacctccacggatgtcgggacctcggaggggactgggcgcctttcccccatgacatcctaccgtatcaagactctggcgactcaggtagcgattatttattccccgaagcttctgaagagtccgcgggcattcccggaaaatctgagctgccatacgaggagctgtggctagaagagggcaaaccctctcaccaaccattaacacgatcgttgtcagagaagaaccgatgcgaccagttccgcggaagcgtccgctccaaatgtgcaacatcaccactccccatcccgggcaccctgggggcagcagtgaagtcttcagatacggcactcccccctcctccagtgccacccaagtccgaggccgttcgcgaggagtgtcgtctactgaatgcacctcccgtaccaccgaggagcgcaaagccgctgagcacgtctcccagtatcccgccgcgcaccgtgaaacctgctcgtcagcagacccgcagcccgagccccaccctgagctattatagttctggacttcacaatatcagtgtgaccaagacagataccaacccctctgaatctacccccgtctcttgttacccatgcaaccgggtcaaaaccgatagtgtagaccttaaatctccctttggatcaccttccgcggaggcagtgtctagtagattgtcctggccgaatcattatagcggcgcatctgagtctcagacccgttcagattttctgctcgacccgtcccgaagttacagctaccccaggcagaagacacctggaactcccaaacggaattgcccagcaccatttgactttgatggatgcgaattgttggctagccctacatcaccagtgactgccgagttcagcagtagcgtgtccggttgcccgaagagtgcatcctactcactcgagtctacagacgtgaagagcctcgctgctggcgtcaccaaacaatcaacttcctgtcctgccctgccacccagagccccaaagctggtggaggaaaaggtggcatccgaaaccagtcccctcccattgaagatcgatggggcagaggaagatcccaagtccggttctccagacctctcagaagaccagtactttgttaagaagggaatgcaagatattttcagtgcaagttaccctttttcatctccactgcacctccagctggcgcctcgaagctgcggagatgggtcaccatggcagcccccagctgacttgagtggcctttcgatcgaggaggtatccaagtctctgagatttattggtctgtcagaggacgtgatatccttttttgtcacggagaagattgatggaaacctgctcgtccagcttacagaggaaatcctgagtgaggacttcaagttgtccaagctgcaggtgaaaaaaattatgcagttcataaacggctggcggcccaagatttag

SEQ ID NO: 84239 - DNA, 2631 bp, Artificial Sequence
  derived and/or modified sequence
atggacccagcgccttctctggggtgttcgttgaaagatgtcaaatggtcctcggttgcagtgcctctggatcttctggtctctacgtaccgcctcccccaaatcgccagactcgataacggcgagtgtgtggagggactgcgcgaaaacgactatctgcttattcacagctgcaggcagtggaccacgatcacggcccactccctggaagaaggccactacgtaatcggccctaagatcgaaattcccgtacactacgcgggacaattcaagttactcgaacaggacagggacatcaaagaacctgtgcagtatttcaatagcgtggaagaagtcgccaaggcatttccagaaagagtgtacgtgatggaagacattacctttaatgtgaaggtggcatctggcgagtgtaacgaagatacagaggtttataacattactctctgtactggcgatgaactcaccctcatgggccaggctgagatattgtatgctaaaacctttaaagaaaagagccggcttaacaccatcttcaagaagatcgggaaactgaattcaattagcaagctgggaaagggaaagatgccttgcttgatttgcatgaaccatcgcacgaatgaaagcattagtctgcccttccagtgtaaggggcgattttcaacacggagtcccctggagctgcaaatgcaggaaggagagcataccattcgtaatattgtcgaaaaaacccgcctcccagtgaatgtaacagtgccctccccgccaccacgtaatccctacgacctccacttcatcagggagggacatcggtataaattcgttaatattcagacgaagaccgttgtcgtgtgctgcgtactgcggaataataagatcctccccatgcacttccccctgcacctcaccgtgccgaagttcagcctgccagagcatctggtgaagggagaatcatggcctgagaccctggttcaccattggctcggcatatgtcaggaacagttcgatatcgatgagtactcccgcgcagtgcgtgatgtgaaaacagattggaatgaggagtgcaaatctccaaagaaagggagatgctccggccacaaccacgtaccaaacagcctaagctatgctcgcgacgagctgacccagagtttccacaggctgtccgtgtgcgtatacgggaataatcttcacggcaactctgaggtcaaccttcacgggtgcagggatctgggaggagactgggcccctttcccgcacgacattctgccgtaccaggacagcggagacagtggctcagactatctttttcccgaagctagcgaagaaagcgctggaatacctggcaaatccgaattgccatacgaagagctgtggctggaggagggcaagccatctcatcaaccccttacccgctctctatctgagaagaaccgctgtgatcagttccgcggttcagtgaggagtaagtgtgctacttctccactgcctatccccggtacgttgggcgctgcagtgaaatccagcgacacagcacttcccccacccccagtccccccaaagagcgaggcagtccgcgaagagtgccgcctactcaacgctccccctgtcccccctcgtagcgcaaagcctctgtctacttcccccagcatcccccctcgcaccgttaaacctgccaggcagcagacacggtcaccctcacctactttgagttattatagcagtggacttcacaacatttctgtgactaagactgacactaacccgagcgaatctaccccagttagctgttacccatgcaatcgcgtgaaaaccgactccgtggacctcaagagccccttcggatccccctcagcagaggcagtatcctcacggctttcctggcccaatcactacagcggcgcatctgagtcacaaacacggtctgatttccttttggacccctcccggagttatagctaccccagacaaaagaccccagggaccccgaagcgcaattgtcccgctcccttcgacttcgacggatgcgaactgctggcttctccgactagcccggtcaccgccgagttcagctcatctgttagcggctgccccaagtccgcctcatactcactcgaatctaccgatgttaagtccctagctgctggggtcactaagcagtctacttcttgtccagcactcccacccagagcccctaagcttgtcgaggagaaagtagcctcggagacttcacccctgcccttaaaaattgatggggctgaggaggatcccaagtctgggtcacccgacctgagcgaagatcagtacttcgtcaaaaaaggcatgcaggatatcttctctgcgtcctaccccttcagctctcccctccacctccaactcgccccaaggagctgcggcgatgggagcccatggcaaccaccagctgatctgagcggtctgagcatagaggaagtgtctaagtccctgaggtttatcggactgtctgaagatgtgattagctttttcgtgaccgaaaaaatcgacggtaatcttctcgtccagttaacagaggagattttgagcgaagactttaaactgagcaagctgcaggtcaagaaaatcatgcaattcataaatggatggagacccaagatctag

SEQ ID NO: 84240 - protein, 701 aa, Artificial Sequence
  derived and/or modified sequence
MPRTMIPPGECTYAGRKRRRPLQKQRPAVGAEKSNPSKRHRDRLNAELDHLASLLPFPPDIISKLDKLSVLRLSVSYLRVKSFFQVVQEQSSRQPAAGAPSPGDSCPLAGSAVLEGRLLLESLNGFALVVSAEGTIFYASATIVDYLGFHQTDVMHQNIYDYIHVDDRQDFCRQLHWAMDPPQVVFGQPPPLETGDDAILGRLLRAQEWGTGTPTEYSAFLTRCFICRVRCLLDSTSGFLTMQFQGKLKFLFGQKKKAPSGAMLPPRLSLFCIAAPVLLPSAAEMKMRSALLRAKPRADTAATADAKVKATTSLCESELHGKPNYSAGRSSRESGVLVLREQTDAGRWAQVPARAPCLCLRGGPDLVLDPKGGSGDREEEQHRMLSRASGVTGRRETPGPTKPLPWTAGKHSEDGARPRLQPSKNDPPSLRPMPRGSCLPCPCVQGTFRNSPISHPPSPSPSAYSSRTSRPMRDVGEDQVHPPLCHFPQRSLQHQLPQPGAQRFATRGYPMEDMKLQGVPMPPGDLCGPTLLLDVSIKMEKDSGCEGAADGCVPSQVWLGASDRSHPATFPTRMHLKTEPDSRQQVYISHLGHGVRGAQPHGRATAGRSRELTPFHPAHCACLEPTDGLPQSEPPHQLCARGRGEQSCTCRAAEAAPVVKREPLDSPQWATHSQGMVPGMLPKSALATLVPPQASGCTFLP

SEQ ID NO: 84241 - DNA, 2106 bp, Artificial Sequence
  derived and/or modified sequence
atgcctaggacgatgatcccaccgggggaatgcacatatgccggcagaaagagaagacgtcctctgcagaaacagcggccagccgtcggggcagaaaaatcaaaccccagcaaacgacaccgcgatcgtctgaatgctgagttggaccacctagccagcctgcttcccttccctccagatattatcagcaaactggacaagctgtctgtgctgcggctttccgtgtcatatctgagggtgaagagttttttccaggttgtgcaggaacaaagctctcggcagcccgccgccggtgcccccagtccgggagattcgtgtccactcgcgggaagtgcggtattagagggcagactcctgctggagtcactgaatggtttcgctttagtggttagcgccgagggaacgatattttacgcatccgctactatcgtcgactacctaggtttccaccaaacggatgtgatgcatcagaatatttatgattacattcacgtcgatgaccgccaggacttttgcagacagttgcactgggccatggaccctccccaggtggtcttcggtcagccccccccgctggaaaccggggatgacgctattctcggtaggctgcttagggcccaggagtggggcactggcacacctacagaatattcagcctttttgacacgctgcttcatctgtagagtgcgctgcctgttggacagcacgtccggcttcctgaccatgcaattccagggcaaattgaagtttctttttggccagaaaaagaaggcaccttctggagctatgttgcctcctcggctatctctgttttgcattgcagcccccgtactcctcccaagcgctgcggaaatgaagatgaggtccgcgctgttaagggccaaaccaagggcagacaccgctgccacagccgatgcaaaggttaaagcaactacatctctttgtgagtccgagctccacggcaaacccaactatagcgccggccgcagttccagggagagtggcgtcctggtgctgcgtgagcagactgacgcgggccgatgggcacaagtgccggccagagctccttgtttatgccttaggggcggaccagatctggttcttgaccctaaaggaggctcgggtgaccgcgaggaggaacagcatcggatgctcagtcgggcgtctggtgtaacaggtagaagggagacaccaggaccaacgaagccgttgccttggaccgctggcaaacactcggaagacggggcacggcctcgcctccagccgtccaagaacgatccgccctctttgaggcccatgccccgcggcagctgtttgccctgtccttgtgtgcagggaaccttcaggaactcccccatttctcaccctccatccccctccccgagcgcatattccagcaggaccagtcgtcctatgcgcgatgtgggggaagatcaggtacaccctcccctgtgccattttcctcagaggtcgctgcaacatcaactgcctcaacctggcgcgcagaggttcgctactaggggatacccaatggaagacatgaagctgcagggagtgcctatgccgcccggcgatctctgtgggccgactctcctacttgatgtgagtatcaagatggagaaagactctggctgcgaaggcgcggctgacggatgcgtgcctagtcaggtgtggttgggagcttctgatcgctcccaccccgccacattccccacgcgcatgcacctaaaaacagaacctgactcacgtcaacaggtctacattagccacctggggcatggagtgagaggagctcagccccatggacgcgctaccgctggaaggtcccgggaactcaccccctttcaccccgcccattgcgcctgtcttgaaccaactgacggcctgcctcagagtgaacccccgcaccagctatgtgctcgtgggcgaggggagcaaagttgtacctgtagggctgctgaagccgcgccagtcgtcaaacgggaacccttggattccccccagtgggccactcatagccagggtatggtacccgggatgctgcccaaaagtgcccttgctacactggtccccccgcaggccagtggctgtaccttcctaccttag

SEQ ID NO: 84242 - DNA, 2106 bp, Artificial Sequence
  derived and/or modified sequence
atgcccaggaccatgatccccccaggagagtgcacctacgccggcaggaagagaagaagacccctgcagaagcagaggcctgctgtgggcgctgagaagagcaaccccagcaagaggcaccgggaccggctgaatgctgagctggaccacctggccagcctgctgcccttccccccagacatcatcagcaagctggacaagctgtctgtgctgcggctgtctgtgtcctacctgcgggtgaagagcttcttccaggtggtgcaggagcagagcagccggcagcctgctgctggggcccccagccctggggacagctgccccctggccggcagcgctgtgctggagggccgcctgctgctggagagcctgaatggatttgccctggtggtgtctgctgagggcaccatcttctacgccagcgccaccatcgtggactacctgggcttccaccagacagatgtgatgcaccagaacatctatgactacatccacgtggatgaccggcaggacttctgccggcagctgcactgggccatggaccccccccaggtggtgtttggccagcccccacccctggagactggagatgatgccatcctgggccgcctgctgcgggcccaggagtggggcaccggcacccccacagagtacagcgccttcctgacccgctgcttcatctgccgggtgcgctgcctgctggacagcaccagcggcttcctgaccatgcagttccagggcaagctgaagttcctgtttggccagaagaagaaggcccccagcggggccatgctgcccccccggctgagcctcttctgcatcgccgcccctgtgctgctgcccagcgctgctgagatgaagatgaggtctgccctgctgcgggccaagcccagggctgacacagctgccacagcagatgccaaggtgaaggccaccaccagcctgtgtgagagcgagctgcacggcaagcccaactacagcgctggccgcagcagccgggagagcggcgtgctggtgctgcgggagcagacagatgctggccgctgggcccaggtgcctgcccgggccccctgcctgtgcctgcggggcggccctgacctggtgctggaccccaagggcggcagcggggaccgggaggaggagcagcacaggatgctgagccgggccagcggcgtgacaggccggcgggagaccccaggccccaccaagcccctgccctggacagctgggaagcacagtgaagatggagcccggccccggctgcagcccagcaagaatgacccccccagcctgcggcccatgccccggggcagctgcctgccctgcccctgtgtgcagggcaccttcaggaacagccccatcagccacccccccagccccagccccagcgcctacagcagcaggaccagccggcccatgagagatgtgggggaggaccaggtgcacccccccctgtgccacttcccccagaggagcctgcagcaccagctgccccagcccggggcccagagatttgccacccggggctaccccatggaggacatgaagctgcagggcgtgcccatgcctcctggggacctgtgtggccccaccctgctgctggatgtgtccatcaagatggagaaggacagcggctgtgagggcgctgctgatggctgtgtgcccagccaggtgtggctgggcgccagtgacaggagccacccagccaccttccccaccaggatgcacctgaagacagagccagacagccggcagcaggtgtacatcagccacctgggccatggagtgcggggggcccagccccacggccgggccacagctggccgcagccgggagctgacccccttccacccagcccactgtgcctgcctggagcccacagatggcctgccccagagcgagcccccccaccagctgtgtgcccggggccgcggggagcagagctgcacctgcagagctgctgaggccgcccctgtggtgaagcgggagcccctggacagcccccagtgggccacccacagccagggcatggtgcccggcatgctgcccaagagcgccctggccaccctggtgcccccccaggccagcggctgcaccttcctgccctag

SEQ ID NO: 84243 - DNA, 2106 bp, Artificial Sequence
  derived and/or modified sequence
atgccccggaccatgatcccccccggcgagtgcacctacgccggcaggaaacggaggcgccccctgcaaaaacagcgacctgctgtgggagcagagaaaagcaaccccagtaaaagacacagggataggttaaacgcggaactcgatcatctcgctagcttactcccttttcctcccgatatcatttctaaactggataagctgtcggttctgagactgagcgtctcttacctcagagtgaagagcttctttcaggttgttcaggagcagtcctctcgacagcccgccgccggtgcccctagcccgggcgatagctgtccgctagcgggtagcgcggtgcttgaaggaaggctcctgctggaaagtctgaacggattcgcgttagtggtttccgccgagggcacgatcttctacgcctctgccaccatcgtggattacctgggttttcatcagacggatgttatgcaccagaatatttacgattacattcacgtggatgaccggcaggatttctgccgccagctgcactgggccatggacccccctcaggtggtctttgggcagcccccccccctggagaccggagacgatgccatccttggtcgactccttcgagcacaggaatggggcactgggacacctactgagtatagtgcatttctgacacggtgctttatctgtcgcgtgaggtgcctcttagactctaccagtgggttcctaaccatgcaatttcaagggaagctgaagttcttgtttggacagaaaaaaaaggcccccagcggggccatgcttccgccaagactcagcctgttttgtattgccgctccggtactgctccctagcgcagctgagatgaagatgagaagcgcgctgttgagagcaaagcctagggctgatacggcagcgactgcagatgccaaggtgaaggctacaaccagtctctgcgagtccgaactgcatggaaaaccgaattacagcgccggacgctccagtcgtgagagcggagtgctggtgctgagagaacagaccgacgcagggagatgggcacaagttccagcccgggcaccatgcctgtgcctgaggggcggccccgacctggtgctcgatcccaagggcggtagtggagatagggaggaagaacaacatagaatgctctctcgggccagcggcgtgactgggagacgggagacaccagggcctacaaaacctttgccctggacagcaggtaaacatagcgaagatggtgctagaccaaggttacagcccagtaagaacgaccccccttctctgcgtccgatgcctcgggggtcatgcctgccctgcccttgcgttcagggtacctttaggaacagccctatttcccatccaccctccccatcgccatcagcatactcttctcgcacatcaagacctatgagggacgtaggtgaggaccaggtgcacccacctttgtgccacttcccacaacggagtcttcagcatcaacttcctcagcccggggcccaacgcttcgctaccaggggttaccccatggaggatatgaagctgcagggagtccctatgccacccggcgacctgtgcggcccaacgttgctcctggacgtgagcattaaaatggaaaaggactcaggctgcgagggggccgccgatggttgcgtgccctctcaggtgtggttgggcgcttccgacaggagtcaccctgcaacctttccgacccgtatgcacctaaagactgagcctgactcgaggcagcaggtttacatttcgcacctgggacacggggtgaggggcgcccagccacacgggagggcaactgccggccggagtagagagctcactccattccaccctgctcactgtgcgtgtcttgaaccgacagacggtctgccccaatcggagccaccccaccagttgtgtgcacgcggacgaggagaacaatcatgcacatgccgcgccgctgaggcagcccccgttgtgaagagggaacctcttgactctcctcagtgggctacgcacagccagggaatggtgcctggtatgttgccaaaatcagctctcgcaaccctagtgccaccacaagcttccggttgtaccttcctaccatag

SEQ ID NO: 84244 - DNA, 2106 bp, Artificial Sequence
  derived and/or modified sequence
atgccacgaacaatgatcccccctggagagtgtacttacgctggcagaaaacgtagacgcccactccaaaagcaacgtcccgctgttggtgcagaaaaaagcaatccatcaaagagacacagagacaggctgaacgcagagctcgatcatctcgcatctttgctgccttttcccccagatattattagtaagctcgataaactatccgtgttgaggttgtccgtaagctacctgcgcgttaagagctttttccaggtcgtgcaggaacagtcgtcccgccagcctgctgctggggcaccatctcccggagatagttgtcctctggcaggaagcgcggtactggaaggtaggctgctgctggagagcttgaacggctttgcactggtggtttccgcggagggcacgatattttacgccagcgccactatcgtggactatctgggcttccaccaaacggatgtgatgcaccaaaatatttatgattacatccatgtggacgacagacaggacttttgccggcaactgcactgggccatggaccctccacaggtggtgtttggccagcctcccccactcgaaaccggcgacgatgccatcctgggacgacttcttagggcccaggagtggggtactgggactcctactgaatattcagccttcctgacacgatgtttcatctgtagagtgagatgcctgttggactccacaagcggcttcctgactatgcagttccagggcaaattgaaattcctcttcggccagaagaaaaaagctcctagcggagccatgttgccaccacggctgagtttgttttgcatcgccgcacccgttttgctgccctctgcagctgaaatgaaaatgcggtcagctttgctccgagcaaagccccgtgctgacacagccgcaactgctgatgccaaggttaaggcaaccacttctttgtgcgaatccgaactgcatggaaaacctaactacagcgctgggagatcttccagagagtcaggggtcctcgtgttgcgcgagcagaccgacgcgggaagatgggctcaggtccctgctcgtgcgccatgtttgtgcttgagggggggtccagatctcgtgctggacccgaagggagggtctggggacagagaagaggagcagcatcgtatgttgagcagagcatctggcgtaaccgggagacgcgagaccccgggtcccactaagcctctgccctggaccgccggaaaacactctgaggacggagcacgccctaggttgcaacctagcaagaacgatccaccatctctgcgccctatgccacgcggttcttgcctaccatgtccttgcgttcagggaacatttaggaacagtcctatttcccatcctccttcaccaagtccgtccgcctattcatctagaacctccagacccatgagggacgtgggagaagaccaagtgcatcccccactgtgtcatttcccgcaaaggtccctccagcaccagctgccccagccaggtgcgcagaggtttgctacaagaggctaccctatggaggatatgaagctgcagggtgtgcctatgccccctggcgatctgtgcggacctacactgttactggacgtctcaatcaagatggagaaggattctggatgtgagggcgcagcggacgggtgtgtcccctcccaagtatggttgggagcgagtgataggagccatccagctaccttccccacccggatgcatctgaagactgaacccgatagtagacaacaggtttacatctcccacttgggacacggtgtgcgcggagctcaaccccacggtcgagcgaccgccggacgtagtcgtgagctcacaccattccaccctgcgcactgtgcctgtttggagccaaccgacggactgcctcaatccgagccaccacatcagctgtgtgccagggggaggggtgaacagtcctgtacctgtagggcagccgaggcagcacccgtggtgaagcgagagcctctagactctcctcagtgggctactcactcccagggcatggtgcccggtatgctgccaaagagtgctctcgccacccttgttcccccacaggcgtcagggtgtaccttcttgccttag

SEQ ID NO: 84245 - DNA, 2173 bp, Artificial Sequence
  derived and/or modified sequence
ggcacgtggactccctttaatccagtgactgtcaggtcgatcatatgccgaggacgatgatcccgccgggggagtgcacgtacgcgggccggaagcggaggaggcccctgcagaaacagaggcccgccgtgggggcagagaagtccaacccctccaagcgacaccgggaccgcctcaacgccgagttggaccacctggccagcctgctgccgttcccgcctgacatcatctccaagctggacaagctttctgtcctgcgcctcagtgtcagttacctccgggtgaagagcttcttccaagtcgtgcaggagcagagctcacggcagcctgcggccggcgccccctcgcccggagacagctgtcctcttgcagggtctgccgtgctggagggaaggctgctgttggagtctcttaatggctttgctctggtcgtgagtgcagaagggacgatattttatgcatcagcaacgatcgtggactatctgggcttccatcagacggatgtaatgcaccagaacatttatgactacatccacgtggacgaccgccaggacttctgccggcagctccactgggccatggaccctccccaggtggtgtttgggcagcccccgcccttggagacaggagatgatgctatcctggggaggctgctcagggcccaggagtggggcacaggcacgcccaccgagtactcggccttcctgacccgctgcttcatctgccgtgtgcgctgcctgctggacagcacctcgggcttcctgacgatgcagtttcaaggaaaactaaaattcctgtttggacagaagaagaaggcgccgtcaggagccatgctcccgccgcggctgtcgctgttctgcattgcggcacccgttctcctcccctccgcagcggagatgaaaatgaggagcgcgctcctgagggcaaaacccagagcagacaccgcagccaccgcggatgcaaaagtaaaagccaccaccagtctgtgcgaatcggaactgcatggaaaacccaattactcagcaggaaggagcagcagagagagcggcgttttggtgctcagggaacagactgacgctggccgatgggcacaggttcccgccagggccccatgcctgtgcctccggggtggccctgaccttgtccttgaccccaaggggggctcaggggacagggaggaggagcagcacaggatgctgagcagggcctctggagtgacagggcggagggagactccaggacccacaaagcccctgccctggacagcgggaaagcacagtgaggatggtgccaggccgaggctgcagcccagcaagaatgacccgccctccctgcgccccatgccccgcggctcctgcctgccctgcccgtgtgtccagggcactttcaggaactcgcccatctctcacccgccgagcccgtcccccagtgcctactccagccggaccagcagacccatgcgggatgtcggtgaggaccaggtgcaccctcccctctgccactttccccagaggagcctgcagcaccagctccctcagcctggagctcagcgttttgccacgaggggctatcccatggaggacatgaagctgcaaggtgtaccgatgcctccgggggacctgtgtggtccgacgctgctgctagatgtgtccatcaagatggagaaggactctgggtgtgagggtgctgcagacggctgtgtgcccagccaggtgtggctgggggccagtgacaggagccacccagccaccttccctaccaggatgcacctgaaaacagagccagactctcggcaacaggtgtacatctcgcacctggggcacggcgtgcggggggctcagccccatgggagggccactgctgggcgcagcagggagctgacccctttccaccctgcacactgtgcctgcctggagcccacagacggccttccccagtcggagcctccccaccagctctgtgcacggggccgaggtgaacagtcctgcacctgcagagctgctgaggccgcccctgtggtcaagcgggagcccttggactcaccccagtgggctactcacagccagggaatggtgcccgggatgttgcccaaaagtgccttggccacgctggtcccgccccaagcttcggggtgcacattcctgccatagcgcagtgaccaccatccaagctc

SEQ ID NO: 84246 - DNA, 2106 bp, Artificial Sequence
  derived and/or modified sequence
atgcccagaaccatgatcccccccggcgagtgcacctacgccggcagaaagagaagaagacccctgcagaagcagagacccgccgtgggcgccgagaagagcaaccccagcaagagacacagagacagactgaacgccgagctggaccacctggccagcctgctgcccttcccccccgacatcatcagcaagctggacaagctgagcgtgctgagactgagcgtgagctacctgagagtgaagagcttcttccaggtggtgcaggagcagagcagcagacagcccgccgccggcgcccccagccccggcgacagctgccccctggccggcagcgccgtgctggagggcagactgctgctggagagcctgaacggcttcgccctggtggtgagcgccgagggcaccatcttctacgccagcgccaccatcgtggactacctgggcttccaccagaccgacgtgatgcaccagaacatctacgactacatccacgtggacgacagacaggacttctgcagacagctgcactgggccatggaccccccccaggtggtgttcggccagcccccccccctggagaccggcgacgacgccatcctgggcagactgctgagagcccaggagtggggcaccggcacccccaccgagtacagcgccttcctgaccagatgcttcatctgcagagtgagatgcctgctggacagcaccagcggcttcctgaccatgcagttccagggcaagctgaagttcctgttcggccagaagaagaaggcccccagcggcgccatgctgccccccagactgagcctgttctgcatcgccgcccccgtgctgctgcccagcgccgccgagatgaagatgagaagcgccctgctgagagccaagcccagagccgacaccgccgccaccgccgacgccaaggtgaaggccaccaccagcctgtgcgagagcgagctgcacggcaagcccaactacagcgccggcagaagcagcagagagagcggcgtgctggtgctgagagagcagaccgacgccggcagatgggcccaggtgcccgccagagccccctgcctgtgcctgagaggcggccccgacctggtgctggaccccaagggcggcagcggcgacagagaggaggagcagcacagaatgctgagcagagccagcggcgtgaccggcagaagagagacccccggccccaccaagcccctgccctggaccgccggcaagcacagcgaggacggcgccagacccagactgcagcccagcaagaacgacccccccagcctgagacccatgcccagaggcagctgcctgccctgcccctgcgtgcagggcaccttcagaaacagccccatcagccacccccccagccccagccccagcgcctacagcagcagaaccagcagacccatgagagacgtgggcgaggaccaggtgcacccccccctgtgccacttcccccagagaagcctgcagcaccagctgccccagcccggcgcccagagattcgccaccagaggctaccccatggaggacatgaagctgcagggcgtgcccatgccccccggcgacctgtgcggccccaccctgctgctggacgtgagcatcaagatggagaaggacagcggctgcgagggcgccgccgacggctgcgtgcccagccaggtgtggctgggcgccagcgacagaagccaccccgccaccttccccaccagaatgcacctgaagaccgagcccgacagcagacagcaggtgtacatcagccacctgggccacggcgtgagaggcgcccagccccacggcagagccaccgccggcagaagcagagagctgacccccttccaccccgcccactgcgcctgcctggagcccaccgacggcctgccccagagcgagcccccccaccagctgtgcgccagaggcagaggcgagcagagctgcacctgcagagccgccgaggccgcccccgtggtgaagagagagcccctggacagcccccagtgggccacccacagccagggcatggtgcccggcatgctgcccaagagcgccctggccaccctggtgcccccccaggccagcggctgcaccttcctgccctag

SEQ ID NO: 84247 - protein, 643 aa, Artificial Sequence
  derived and/or modified sequence
MSPFLRIGLSNFDCGSCQSCQGEAVNPYCAVLVKEYVESENGQMYIQKKPTMYPPWDSTFDAHINKGRVMQIIVKGKNVDLISETTVELYSLAERCRKNNGKTEIWLELKPQGRMLMNARYFLEMSDTKDMNEFETEGFFALHQRRGAIKQAKVHHVKCHEFTATFFPQPTFCSVCHEFVWGLNKQGYQCRQCNAAIHKKCIDKVIAKCTGSAINSRETMFHKERFKIDMPHRFKVYNYKSPTFCEHCGTLLWGLARQGLKCDACGMNVHHRCQTKVANLCGINQKLMAEALAMIESTQQARCLRDTEQIFREGPVEIGLPCSIKNEARPPCLPTPGKREPQGISWESPLDEVDKMCHLPEPELNKERPSLQIKLKIEDFILHKMLGKGSFGKVFLAEFKKTNQFFAIKALKKDVVLMDDDVECTMVEKRVLSLAWEHPFLTHMFCTFQTKENLFFVMEYLNGGDLMYHIQSCHKFDLSRATFYAAEIILGLQFLHSKGIVYRDLKLDNILLDKDGHIKIADFGMCKENMLGDAKTNTFCGTPDYIAPELFVREPEKRLGVRGDIRQHPLFREINWEELERKEIDPPFRPKVKSPFDCSNFDKEFLNEKPRLSFADRALINSMDQNMFRNFSFMNPGMERLIS

SEQ ID NO: 84248 - DNA, 1932 bp, Artificial Sequence
  derived and/or modified sequence
atgagccctttcttacgcattggcctaagcaacttcgactgcggtagttgccagtcctgccagggcgaagccgtgaacccgtactgcgcagtgctggttaaggagtatgttgaaagcgaaaatggacaaatgtacatccagaagaagcctacaatgtatccgccatgggactctacattcgacgcccacataaacaaaggccgggttatgcagattatagtgaagggcaagaacgtcgatctgatctctgagactacggtggagctatattcactagcggagcgctgccgcaagaacaatggcaaaaccgaaatatggcttgaactgaagccacagggccgcatgctgatgaatgccagatacttcctggagatgtctgatactaaagatatgaacgagttcgaaaccgaaggattctttgcgctgcatcagagaagaggagcaatcaagcaggccaaagtgcaccatgtaaaatgccacgaattcaccgccaccttttttccgcagcccacgttctgttccgtgtgtcatgagtttgtgtggggtcttaataaacaagggtaccagtgcaggcagtgcaatgccgcaattcacaagaagtgcattgataaagtcatcgccaaatgcacaggaagtgcgatcaactctagagaaaccatgttccataaggagagatttaaaatcgacatgccacatcgctttaaagtctacaattataagagcccgacattctgtgagcactgtgggacattactgtggggattggcaagacagggacttaaatgcgacgcctgcggtatgaatgtgcatcatagatgccagacaaaagtcgcaaatttgtgcgggataaatcaaaaattgatggccgaagcgctcgccatgatcgaatctacacagcaagctcgatgcctgcgagacactgagcaaatctttcgggaaggccctgtggagattggccttccttgcagtatcaagaatgaagcaagaccgccctgtctgccgacgccagggaagagggagccgcaaggcatatcctgggaaagtcccttggacgaagtggataagatgtgccacctccctgaaccagaacttaataaggaacgcccctctctgcaaatcaagctcaagatagaggatttcattttgcataagatgctcgggaaaggcagcttcggaaaggtctttctggccgaattcaaaaagacgaatcaattcttcgccatcaaggctttgaagaaggatgtggtgttgatggacgatgacgtcgagtgcactatggtggaaaagcgcgtcctgtcattggcttgggaacatccattcctgactcacatgttttgcacctttcagacgaaggagaacctgttctttgtgatggagtacctgaatggtggggatcttatgtaccacatacaaagctgccataagttcgacctatctcgggcaacattttatgctgccgaaattatcctcggactgcaattcctgcactcaaaagggattgtgtaccgagatttgaagctcgacaacattctgttggataaagacggccacattaagatcgcagatttcgggatgtgtaaagagaacatgctgggggatgccaaaaccaatactttctgcgggacccctgactacatagcacccgagctctttgtcagagagccggaaaaacgactgggcgtgcggggagacattcggcagcacccactttttcgtgaaatcaattgggaagagctcgagcgtaaagaaatcgaccctcctttcagacctaaggtgaagtctcccttcgactgctcaaatttcgataaggaatttctcaacgagaagcctaggctgagcttcgctgatagagctctgataaattccatggaccagaatatgtttcgcaacttctcgttcatgaatccaggcatggagaggctaattagttag

SEQ ID NO: 84249 - DNA, 1932 bp, Artificial Sequence
  derived and/or modified sequence
atgagccccttcctgagaattggcctgagcaactttgactgtggcagctgccagagctgccagggcgaggccgtgaacccctactgtgctgtgctggtgaaggagtatgtggagagtgaaaatggccagatgtacatccagaagaagcccaccatgtacccaccctgggacagcacctttgatgcccacatcaacaagggccgggtgatgcagatcatcgtgaagggcaagaatgtggacctgatcagcgagaccaccgtggagctgtacagcctggccgagcgctgcaggaagaacaacgggaagacagagatctggctggagctgaagccccagggccgcatgctgatgaatgcccgctacttcctggagatgtctgacaccaaggacatgaatgaatttgaaacagagggcttctttgccctgcaccagaggagaggagccatcaagcaggccaaggtgcaccacgtgaagtgccacgagttcaccgccaccttcttcccccagcccaccttctgcagcgtgtgccatgaatttgtgtggggcctgaacaagcagggctaccagtgccggcagtgcaatgctgccatccacaagaagtgcatcgacaaggtgattgccaagtgcaccggcagcgccatcaacagccgggagaccatgttccacaaggagcgcttcaagattgacatgccccaccgcttcaaggtgtacaactacaagagccccaccttctgtgagcactgcggcaccctgctgtggggcctggcccggcagggcctgaagtgtgatgcctgtggcatgaatgtgcaccaccgctgccagaccaaggtggccaacctgtgtggcatcaaccagaagctgatggccgaggccctggccatgattgagagcacccagcaggcccgctgcctgcgggacacagagcagatcttccgggagggccctgtggagatcggcctgccctgcagcatcaagaatgaggcccggcccccctgcctgcccacccctgggaagcgggagccccagggcatctcctgggagagccccctggatgaggtggacaagatgtgccacctgcctgagcctgagctgaacaaggagcggcccagcctgcagatcaagctgaagattgaggacttcatcctgcacaagatgctgggcaagggcagctttgggaaggtgttcctggccgagttcaagaagaccaaccagttctttgccatcaaggccctgaagaaggatgtggtgctgatggatgatgatgtggagtgcaccatggtggagaagagggtgctgagcctggcctgggagcaccccttcctgacccacatgttctgcaccttccagaccaaggagaacctcttctttgtgatggagtacctgaatggaggagacctgatgtaccacatccagagctgccacaagtttgacctgagccgggccaccttctatgctgctgagatcatcctgggcctgcagttcctgcacagcaagggcatcgtgtacagagacctgaagctggacaacatcctgctggacaaggatggccacatcaagattgctgactttggcatgtgcaaggagaacatgctgggagatgccaagaccaacaccttctgtggcaccccagactacatcgcccctgagctgtttgtgcgggagcctgagaagaggctgggcgtgcggggggacatccggcagcaccccctcttccgggagatcaactgggaggagctggagaggaaggagattgacccccccttccggcccaaggtgaagagcccctttgactgcagcaactttgacaaggagttcctgaatgagaagccccggctgagctttgctgaccgggccctgatcaacagcatggaccagaacatgttcaggaacttctccttcatgaaccctggcatggagcggctcatctcctag

SEQ ID NO: 84250 - DNA, 1932 bp, Artificial Sequence
  derived and/or modified sequence
atgagccccttcctgcggatcggcctgagcaacttcgactgcggctcatgtcagagttgccagggcgaagccgtcaatccttactgcgccgtcctcgttaaggagtatgtggaatctgaaaacggccagatgtacattcagaagaagcctacaatgtatcctccctgggatagcacattcgatgctcatataaacaagggacgagtgatgcagatcattgtcaaagggaaaaacgtagacctcatcagtgagactaccgttgagctatactcactggctgaacgttgccggaagaataatgggaaaaccgaaatctggctggaactgaagccacagggcagaatgctaatgaatgcaagatatttccttgaaatgtcagacaccaaggatatgaatgagttcgagacagaagggttttttgctttacatcaaagaaggggtgcaatcaagcaagctaaagtgcatcatgtgaaatgccatgaattcactgccacattctttcctcaacctaccttttgctctgtctgtcatgagttcgtgtgggggctgaataaacaaggatatcaatgccgacaatgcaatgcagccattcacaagaagtgtatagacaaggtgattgctaaatgcacaggtagtgctattaattcgagagagactatgtttcacaaggagagatttaagatcgacatgccccaccgttttaaggtatataattacaagagccccacattctgtgaacattgtgggacattgctgtggggccttgcacgccagggtctgaagtgcgacgcttgtggtatgaatgtccaccacaggtgccagacgaaggtggccaacctctgcgggattaaccagaaactgatggcagaggcgctcgcgatgattgagagtacccaacaggctcgctgcttaagggatacggagcaaatcttcagagaaggacctgtagaaatcggtctgccatgttctattaagaatgaggctcgtcccccttgcttgcccacaccaggcaagcgggaaccgcaggggatttcctgggaaagtccgctggacgaggtggataagatgtgtcacctgcctgaacccgaactgaacaaggagcgcccttcgctccagataaagttgaagattgaggactttatcctccacaagatgcttgggaagggaagtttcggcaaggtgtttctggccgagtttaagaaaactaaccagttcttcgccatcaaagctctcaaaaaggatgtggtgctgatggatgatgatgtggagtgcacaatggtggagaagagggtcctcagtttagcctgggaacacccttttctgacacatatgttctgtacttttcaaaccaaggagaatttgtttttcgtgatggaatatcttaacggcggagacctgatgtatcatattcaaagctgtcacaaattcgacctctctcgggccaccttttatgctgccgaaatcatacttggattgcagttcctgcattcgaaaggtatcgtttatagggaccttaagctggataacatcctcttggacaaggacggtcacattaagatagcggatttcggcatgtgcaaggaaaatatgctcggggacgccaagacaaacacattttgcggtaccccagactacattgcccctgaactgttcgtgagggagccggagaaacgcttaggcgtgcggggggatattcgccagcaccccctcttcagagagatcaattgggaggaattggagcgcaaggaaattgaccctcctttcaggcctaaggtgaagagtccctttgattgctcaaacttcgataaggaattcttaaatgagaaacctcgattaagtttcgccgatcgagccctcattaattccatggatcagaacatgttcagaaatttttccttcatgaatccggggatggagcgtctcatctcatag

SEQ ID NO: 84251 - DNA, 1932 bp, Artificial Sequence
  derived and/or modified sequence
atgtctccattcttgcgcattggtctttcgaattttgactgcggctcctgtcagtcttgtcagggcgaggcagttaatccatattgcgccgtccttgtcaaggagtatgtggagagcgaaaatgggcaaatgtatatccaaaagaagcccacaatgtatccaccttgggacagcacttttgatgcgcacatcaacaaaggcagagtgatgcaaataatcgtgaaaggaaagaacgtggacctgatctctgagaccacggtagagctgtattccctggctgagcggtgcaggaagaacaatggcaaaaccgaaatttggctggaactgaaaccacaggggaggatgctgatgaatgcaagatatttcctcgagatgtctgacactaaagacatgaatgagtttgaaaccgaaggattttttgccctccaccaaagacgtggcgctatcaaacaagctaaggtgcaccacgtgaaatgccatgagtttaccgccacgtttttccctcagccaacgttctgttccgtatgccacgaattcgtatggggtttgaacaagcaagggtatcagtgtaggcagtgcaacgccgcaatccataaaaaatgcatcgacaaggtgattgctaaatgtacaggttcagctatcaactctcgcgagaccatgttccacaaggagaggtttaaaatcgacatgccacatcgattcaaagtgtacaattacaagtcgcccacgttttgtgagcattgtgggacgctcctttgggggcttgcgagacaaggactaaaatgtgatgcatgcggcatgaacgttcaccaccgttgtcaaaccaaagtggcaaacctctgtggcattaatcagaaacttatggcagaagctcttgctatgattgaaagtacccagcaagccaggtgcctccgtgacacagaacagatatttcgcgagggtccagttgagataggcttaccctgtagtatcaaaaacgaggctcggcctccatgcctcccaacacccggtaaacgcgaaccgcagggcattagttgggagtcccccttggacgaagttgacaagatgtgccacctgcccgaacctgagctgaataaggaacgaccgagtctgcaaattaagctgaagatagaagatttcatcctgcataaaatgttaggaaaaggttctttcgggaaggtgttcttagccgaattcaagaagacaaaccagttcttcgcaattaaagcattaaaaaaggacgtggtcctgatggacgatgacgttgagtgcactatggtggagaaaagagtcctgagtctggcctgggagcacccctttctaacccatatgttttgcaccttccagacaaaggaaaatctgttctttgtcatggagtatttgaacggtggtgatttaatgtaccatatccagagctgccataagtttgatctttcacgggctaccttctacgccgcagaaattattctgggcctgcaattcctgcactctaaagggatagtctatcgggatctgaagctggacaacatcctgttagataaggacggtcatattaaaattgcggacttcggaatgtgcaaggagaacatgctcggagacgcgaagactaataccttttgtggtaccccagactatattgccccagaactgttcgttagagagccggagaagaggttgggcgtgcgcggagacattaggcaacatcctctttttcgagagatcaactgggaggagttagagaggaaggaaatcgaccctccctttcgcccaaaagttaagagccccttcgattgcagtaactttgacaaggaatttctcaacgaaaagccacggttgtcgttcgccgatcgggctcttataaacagcatggaccaaaacatgttcaggaacttctcctttatgaatcccggaatggagagactgatctcatag

SEQ ID NO: 84252 - DNA, 3042 bp, Artificial Sequence
  derived and/or modified sequence
agtccccgcgcagtccccgcgcagtcccagcgccaccgggcagcagcggcgccgtgctcgctccagggcgcaaccatgtcgccatttcttcggattggcttgtccaactttgactgcgggtcctgccagtcttgtcagggcgaggctgttaacccttactgtgctgtgctcgtcaaagagtatgtcgaatcagagaacgggcagatgtatatccagaaaaagcctaccatgtacccaccctgggacagcacttttgatgcccatatcaacaagggaagagtcatgcagatcattgtgaaaggcaaaaacgtggacctcatctctgaaaccaccgtggagctctactcgctggctgagaggtgcaggaagaacaacgggaagacagaaatatggttagagctgaaacctcaaggccgaatgctaatgaatgcaagatactttctggaaatgagtgacacaaaggacatgaatgaatttgagacggaaggcttctttgctttgcatcagcgccggggtgccatcaagcaggcaaaggtccaccacgtcaagtgccacgagttcactgccaccttcttcccacagcccacattttgctctgtctgccacgagtttgtctggggcctgaacaaacagggctaccagtgccgacaatgcaatgcagcaattcacaagaagtgtattgataaagttatagcaaagtgcacaggatcagctatcaatagccgagaaaccatgttccacaaggagagattcaaaattgacatgccacacagatttaaagtctacaattacaagagcccgaccttctgtgaacactgtgggaccctgctgtggggactggcacggcaaggactcaagtgtgatgcatgtggcatgaatgtgcatcatagatgccagacaaaggtggccaacctttgtggcataaaccagaagctaatggctgaagcgctggccatgattgagagcactcaacaggctcgctgcttaagagatactgaacagatcttcagagaaggtccggttgaaattggtctcccatgctccatcaaaaatgaagcaaggccgccatgtttaccgacaccgggaaaaagagagcctcagggcatttcctgggagtctccgttggatgaggtggataaaatgtgccatcttccagaacctgaactgaacaaagaaagaccatctctgcagattaaactaaaaattgaggattttatcttgcacaaaatgttggggaaaggaagttttggcaaggtcttcctggcagaattcaagaaaaccaatcaatttttcgcaataaaggccttaaagaaagatgtggtcttgatggacgatgatgttgagtgcacgatggtagagaagagagttctttccttggcctgggagcatccgtttctgacgcacatgttttgtacattccagaccaaggaaaacctcttttttgtgatggagtacctcaacggaggggacttaatgtaccacatccaaagctgccacaagttcgacctttccagagcgacgttttatgctgctgaaatcattcttggtctgcagttccttcattccaaaggaatagtctacagggacctgaagctagataacatcctgttagacaaagatggacatatcaagatcgcggattttggaatgtgcaaggagaacatgttaggagatgccaagacgaataccttctgtgggacacctgactacatcgccccagagctcttcgtgcgagaacctgagaagaggctgggcgtgaggggagacatccgccagcaccctttgtttcgggagatcaactgggaggaacttgaacggaaggagattgacccaccgttccggccgaaagtgaaatcaccatttgactgcagcaatttcgacaaagaattcttaaacgagaagccccggctgtcatttgccgacagagcactgatcaacagcatggaccagaatatgttcaggaacttttccttcatgaaccccgggatggagcggctgatatcctgaatcttgcccctccagagacaggaaagaatttgccttctccctgggaactggttcaagagacactgcttgggttcctttttcaacttggaaaaagaaagaaacactcaacaataaagactgagacccgttcgcccccatgtgacttttatctgtagcagaaaccaagtctacttcactaatgacgatgccgtgtgtctcgtctcctgacatgtctcacagacgctcctgaagttaggtcattactaaccatagttatttacttgaaagatgggtctccgcacttggaaaggtttcaagacttgatactgcaataaattatggctcttcacctgggcgccaactgctgatcaatgaaatgcttgttgaatcaggggcaaacggagtacagacgtctcaagactgaaacggccccattgcctggtctagtagcggatctcactcagccgcagacaagtaatcactaacccgttttattctattcctatctgtggatgtgtaaatggctggggggccagccctggataggtttttatgggaattctttacaataaacatagcttgtaacttgagatctacaaatccattcatcctgattgggcatgaaatccatggtcaagaggacaagtggaaagtgagagggaaggtttgctagacaccttcgcttgttatcttgtcaagatagaaaagatagtatcatttcacccttgccagtaaaaacctttccatccacccattctcagcagactccagtattggcacagtcactcactgccattctcacactataacaagaaaagaaatgaagtgcataagtctcctgggaaaagaaccttaaccccttctcgtgccatgactggtgatttcatgactcataagcccctccgtaggcatcattcaagatcaatggcccatgcatgctgtttgcagcagtcaattgagttgaattagaattccaaccatacattttaaaggtatttgtgctgtgtgtatattttgataaaatgttgtgacttcatggcaaacaggtggatgtgt

SEQ ID NO: 84253 - DNA, 1932 bp, Artificial Sequence
  derived and/or modified sequence
atgagccccttcctgagaatcggcctgagcaacttcgactgcggcagctgccagagctgccagggcgaggccgtgaacccctactgcgccgtgctggtgaaggagtacgtggagagcgagaacggccagatgtacatccagaagaagcccaccatgtaccccccctgggacagcaccttcgacgcccacatcaacaagggcagagtgatgcagatcatcgtgaagggcaagaacgtggacctgatcagcgagaccaccgtggagctgtacagcctggccgagagatgcagaaagaacaacggcaagaccgagatctggctggagctgaagccccagggcagaatgctgatgaacgccagatacttcctggagatgagcgacaccaaggacatgaacgagttcgagaccgagggcttcttcgccctgcaccagagaagaggcgccatcaagcaggccaaggtgcaccacgtgaagtgccacgagttcaccgccaccttcttcccccagcccaccttctgcagcgtgtgccacgagttcgtgtggggcctgaacaagcagggctaccagtgcagacagtgcaacgccgccatccacaagaagtgcatcgacaaggtgatcgccaagtgcaccggcagcgccatcaacagcagagagaccatgttccacaaggagagattcaagatcgacatgccccacagattcaaggtgtacaactacaagagccccaccttctgcgagcactgcggcaccctgctgtggggcctggccagacagggcctgaagtgcgacgcctgcggcatgaacgtgcaccacagatgccagaccaaggtggccaacctgtgcggcatcaaccagaagctgatggccgaggccctggccatgatcgagagcacccagcaggccagatgcctgagagacaccgagcagatcttcagagagggccccgtggagatcggcctgccctgcagcatcaagaacgaggccagacccccctgcctgcccacccccggcaagagagagccccagggcatcagctgggagagccccctggacgaggtggacaagatgtgccacctgcccgagcccgagctgaacaaggagagacccagcctgcagatcaagctgaagatcgaggacttcatcctgcacaagatgctgggcaagggcagcttcggcaaggtgttcctggccgagttcaagaagaccaaccagttcttcgccatcaaggccctgaagaaggacgtggtgctgatggacgacgacgtggagtgcaccatggtggagaagagagtgctgagcctggcctgggagcaccccttcctgacccacatgttctgcaccttccagaccaaggagaacctgttcttcgtgatggagtacctgaacggcggcgacctgatgtaccacatccagagctgccacaagttcgacctgagcagagccaccttctacgccgccgagatcatcctgggcctgcagttcctgcacagcaagggcatcgtgtacagagacctgaagctggacaacatcctgctggacaaggacggccacatcaagatcgccgacttcggcatgtgcaaggagaacatgctgggcgacgccaagaccaacaccttctgcggcacccccgactacatcgcccccgagctgttcgtgagagagcccgagaagagactgggcgtgagaggcgacatcagacagcaccccctgttcagagagatcaactgggaggagctggagagaaaggagatcgacccccccttcagacccaaggtgaagagccccttcgactgcagcaacttcgacaaggagttcctgaacgagaagcccagactgagcttcgccgacagagccctgatcaacagcatggaccagaacatgttcagaaacttcagcttcatgaaccccggcatggagagactgatcagctag

SEQ ID NO: 84254 - protein, 195 aa, Artificial Sequence
  derived and/or modified sequence
MATEGGGKEMNEIKTQFTTREGLYKLLPHSEYSRPNRVPFNSQGSNPVRVSFVNLNDQSGNGDRLCFNVGRELYFYIYKGVRKAADLSKPIDKRIYKGTQPTCHDFNHLTATAESVSLLVGFSAGQVQLIDPIKKETSKLFNEENSCQHLWKVDWNEERQNEGSKTSEEALVTVQPAEHFCRQEDRMQGVLQDQN

SEQ ID NO: 84255 - DNA, 588 bp, Artificial Sequence
  derived and/or modified sequence
atggccaccgagggcggcggcaaggagatgaacgagatcaagacccagttcaccaccagagagggcctgtacaagctgctgccccacagcgagtacagcagacccaacagagtgcccttcaacagccagggcagcaaccccgtgagagtgagcttcgtgaacctgaacgaccagagcggcaacggcgacagactgtgcttcaacgtgggcagagagctgtacttctacatctacaagggcgtgagaaaggccgccgacctgagcaagcccatcgacaagagaatctacaagggcacccagcccacctgccacgacttcaaccacctgaccgccaccgccgagagcgtgagcctgctggtgggcttcagcgccggccaggtgcagctgatcgaccccatcaagaaggagaccagcaagctgttcaacgaggagaacagctgccagcacctgtggaaggtggactggaacgaggagagacagaacgagggcagcaagaccagcgaggaggccctggtgaccgtgcagcccgccgagcacttctgcagacaggaggacagaatgcagggcgtgctgcaggaccagaactag

SEQ ID NO: 84256 - DNA, 588 bp, Artificial Sequence
  derived and/or modified sequence
atggctacagagggcggggggaaggagatgaatgagatcaaaacccaattcacaaccagggaagggttatataaactacttccacattcagagtacagtcgacccaaccgcgttcccttcaacagccaagggagcaacccagtgagagtttccttcgtgaacttgaacgaccaatctgggaatggcgatagactgtgtttcaacgtagggcgggaactttacttttatatttacaaaggcgtgagaaaagccgccgacctctccaagcccatagacaaaagaatctacaaaggcacccagcccacctgtcatgacttcaatcatttgaccgcaacagcggagtcagtatccctgctggtcggattctcagcgggacaggtacagctgattgaccccataaagaaagagactagtaagcttttcaacgaagagaactcttgtcaacatctctggaaagtggactggaatgaggagaggcaaaacgagggctcaaagacttcagaggaggcactggtgaccgttcaaccagccgagcacttttgtcggcaagaggaccgcatgcagggggtgctgcaggatcagaactag

SEQ ID NO: 84257 - DNA, 588 bp, Artificial Sequence
  derived and/or modified sequence
atggccacagaaggaggcggcaaggagatgaatgagatcaagacccagttcaccacccgggagggcctgtacaagctgctgccccacagcgagtacagccggcccaacagagtgcccttcaacagccagggcagcaaccctgtgcgggtgtcctttgtgaacctgaatgaccagagcggaaatggagaccggctgtgcttcaacgtgggccgggagctgtacttctacatctacaagggcgtgaggaaggctgctgacctgagcaagcccatcgacaagaggatctacaagggcacccagcccacctgccacgacttcaaccacctgacagccacagctgagagcgtgtccctgctggtgggcttctctgctggccaggtgcagctgattgaccccatcaagaaggagaccagcaagctgttcaatgaggagaacagctgccagcacctgtggaaggtggactggaatgaggagcggcagaatgaaggcagcaagaccagcgaggaggccctggtgacagtgcagcctgctgagcacttctgccggcaggaggacaggatgcagggcgtgctgcaggaccagaactag

SEQ ID NO: 84258 - DNA, 588 bp, Artificial Sequence
  derived and/or modified sequence
atggccaccgagggcggcggcaaggagatgaacgagatcaagacccagtttaccacgcgggaaggcctctacaaattgctgccccactcggagtatagtaggcccaatcgggttccgttcaactcccagggctccaatcccgtgagggtgtcgttcgtcaatcttaatgatcagtctggtaacggggaccgtttgtgttttaacgttggacgtgagctgtatttttacatctacaagggtgtgaggaaagccgcggatttgtccaagcctatcgacaagcggatatataaggggactcaacctacctgccacgacttcaaccatctgacagcaacagctgaatccgtttccctcctggtgggcttctcagcagggcaggtgcagctgatagaccccattaagaaggagacctccaaattgttcaatgaggagaacagctgtcagcacctctggaaagtcgattggaacgaagaaagacaaaacgaaggtagcaaaacttcggaagaagccctggtgacagtgcagccagccgagcacttttgtcgccaggaggacagaatgcaaggcgtgctgcaagatcagaattag

SEQ ID NO: 84259 - DNA, 588 bp, Artificial Sequence
  derived and/or modified sequence
atggccaccgaaggaggcggtaaagagatgaatgagattaagacccagtttaccacccgagaggggctgtataagctgttaccgcatagcgagtactccagacctaaccgcgttccttttaatagccagggcagtaatcctgtacgagtctcctttgtgaatctgaacgaccagagcgggaatggtgatcggctgtgcttcaatgttggcagagaattgtacttctacatctataaaggtgtgagaaaggctgccgacctctctaagcccatcgacaagagaatctataaaggaacacagccaacctgtcatgatttcaaccatttaacagctacggcagaatcagtaagcttgcttgtgggcttctccgccggacaagtacaactgatcgatcctatcaagaaagagacctccaaactgtttaacgaggaaaactcatgtcagcacctgtggaaagtagactggaacgaagagaggcaaaacgagggcagcaagaccagtgaggaagctcttgttacagttcagcctgcagagcacttctgccggcaggaagaccgaatgcaaggagtgcttcaggatcagaattag

SEQ ID NO: 84260 - DNA, 3060 bp, Artificial Sequence
  derived and/or modified sequence
ggtgggcgtgatccgggcacttagggcaggatgaacgctgctttccaagatggcgacggagggaggagggaaggagatgaacgagattaagacccaattcaccacccgggaaggtctgtacaagctgctgccgcactcggagtacagccggcccaaccgggtgcccttcaactcgcagggatccaaccctgtccgcgtctccttcgtaaacctcaacgaccagtctggcaacggcgaccgcctctgcttcaatgtgggccgggagctgtacttctatatctacaagggggtccgcaaggctgctgacttgagtaaaccaatagataaaaggatatacaaaggaacacagcctacttgtcatgacttcaaccacctaacagccacagcagaaagtgtctctctcctagtgggcttttccgcaggccaagtccagcttatagacccaatcaaaaaagaaactagcaaactttttaatgaggaaaactcttgtcagcacttgtggaaggtggattggaatgaagaaagacagaatgaaggtagcaagaccagtgaggaggctctagtaactgtccagccggcagagcacttctgcaggcaggaggacaggatgcaaggtgttctccaagaccagaactaaaagtgcccaacagcttgagaagagggcactggagagaggggcagggaagcgcccttctcctcggctgtgcttctgagtaatggctcccgcagacctggggagggcctggggaggggtggccgcggtggttcctgatatcaggtgtgtaaggtgcaatgcgtgctgctaaccctaggagaaatttggggaaaatatttgtagttttctcgccaaactttgagcttcctcattgaaatttttcagtctttcagcctaaacgttattatgagcaagaatatcttttctaacctaatctgtggaataaaacacagcatttggcaagaagaggctgttaaatactcagtcagcatcactgttccagcgtgtaccaaaccacagagatgaaaggctcagacgaaagtcaggtgcacgctgcgtggctggagaatcccgctcccacccggcaagggggcgagctggtccctgggcggtgtcagacaccttctgaaggtgccaggccagggccaggggagcttcaactcgccctccttgggttggcctttttcaccagaattcaagaagccagatttgtgctgtgactgcgatggggcaggcttctaaacactactggtggccctggagcctttctctgaggcttttttcttattcagaaggagaattaaaaattcccccagcggcctggagaagggaacctttggaaaagcttgccttcttttaaaagcaaatgcatgtgcaggagtagacactttacaaataaccagtagccttggggtcgaaatttgcttaaatcatggtaaaggatctcatttctcttttgtgctgattgaaccttctagcagtttggaagtgttttcctgtgaacccttagctggggactgagggtaaatgccttaaaaatggaggcatggaaaatcagaaaggagctatcacaatcattcttttctcaaaggcgttcaggaattctgaggaagaaatgcagtgacaggatgggattttaggggcaaggacaccgtccgggcggggcccagggctctccactggctgacttcacccccagggcccagctggcacgtggccaggcagccatttctccccagttcctccacttcctggggttcattttaaataataaattgtaaagtatgaaatgagtgctgaagttgcctgcatacaaggtcctcatcacctctcgcctgggagggagacgttttctttctttgttgagcgagctcaaagtgtgaggcggagaaaacctaggggttgggggcggctggagaagggatccacggaaacccaagcgccacatcatgcgtgtctgactgcccacggaagaactagaagcagttcaccagtggattttctggggaacgattcatggaacacagcgtctggcgtccagctttgtgggtgagggcatggcgggggatccggtggccctgccctgcctccggtgccggtggatgggggagggactggcctctgactgcggggttgcaccatggcggcggtcggtgtgcccttggctgaggtttcgttccttagcagtgagaacctccacatgcgtgggtaggggtcgggtgacctggagacgcctcctccggtctggtctgggtgacaaaggtgaaggtttatagtctaccaccctggcagcagcctgcagggcccccccttgtctggagcacacccttcgccacgggctgattgggactgtcgggtgttgctttaagttaacaaggtgcacatcacagcgaccccaagtgatgtcccaaagggaggagacattagtctggccgaagtgaagtctgtggctttatatgtaaaagcactcgtatgcaactgttacctttgaaactcagatcctagttacgaactataagaacgtgcccctccagtagagggagactgtctcactgatgttgatttctttattcatttccgcatctgttacacgaacttcgtgtcataaattgctatcctttcatttgaaagtgtaaaaaatttcctgcatttttatcatttctgtatacttgagtttattagagattgttatgttaggcgacactgtataaaattgtatggatattttgagtgaaaatcaaaagtaaaattcacatgtatttccttttttatattttcatccaatttcttgacaacttgaataaatttcataaagagccttcctaacatgaaatattggtaaattaaattctttactgttgcaataattaatgaaactttagtatcagtattgttttataattttaaggaaatcatgtttgtttcactgctttgtttttttttttagctgttgccttgtcactgtcacagctaacaagacttactacatacttgatattctgaagtactgtggggctgtcctctgtatactgacattaaataaacgtgtgtgagtgaactgtaaa

SEQ ID NO: 84261 - protein, 511 aa, Artificial Sequence
  derived and/or modified sequence
MNEIKTQFTTREGLYKLLPHSEYSRPNRVPFNSQGSNPVRVSFVNLNDQSGNGDRLCFNVGRELYFYIYKGVRKRLIDKSRVTCVKWVPGSESLFLVAHSSGNMYLYNVEHTCGTTAPHYQLLKQGESFAVHTCKSKSTRNPLLKWTVGEGALNEFAFSPDGKFLACVSQDGFLRVFNFDSVELHGTMKSYFGGLLCVCWSPDGKYIVTGGEDDLVTVWSFVDCRVIARGHGHKSWVSVVAFDPYTTSVEEGDPMEFSGSDEDFQDLLHFGRDRANSTQSRLSKRNSTDSRPVSVTYRFGSVGQDTQLCLWDLTEDILFPHQPLSRARTHTNVMNATSPPAGSNGNSVTTPGNSVPPPLPRSNSLPHSAVSNAGSKSSVMDGAIASGVSKFATLSLHDRKERHHEKDHKRNHSMGHISSKSSDKLNLVTKTKTDPAKTLGTPLCPRMEDVPLLEPLICKKIAHERLTVLIFLEDCIVTACQEGFICTWGRPGKVGSLSSPSQASSPGGTVV

SEQ ID NO: 84262 - protein, 520 aa, Artificial Sequence
  derived and/or modified sequence
MATEGGGKEMNEIKTQFTTREGLYKLLPHSEYSRPNRVPFNSQGSNPVRVSFVNLNDQSGNGDRLCFNVGRELYFYIYKGVRKRLIDKSRVTCVKWVPGSESLFLVAHSSGNMYLYNVEHTCGTTAPHYQLLKQGESFAVHTCKSKSTRNPLLKWTVGEGALNEFAFSPDGKFLACVSQDGFLRVFNFDSVELHGTMKSYFGGLLCVCWSPDGKYIVTGGEDDLVTVWSFVDCRVIARGHGHKSWVSVVAFDPYTTSVEEGDPMEFSGSDEDFQDLLHFGRDRANSTQSRLSKRNSTDSRPVSVTYRFGSVGQDTQLCLWDLTEDILFPHQPLSRARTHTNVMNATSPPAGSNGNSVTTPGNSVPPPLPRSNSLPHSAVSNAGSKSSVMDGAIASGVSKFATLSLHDRKERHHEKDHKRNHSMGHISSKSSDKLNLVTKTKTDPAKTLGTPLCPRMEDVPLLEPLICKKIAHERLTVLIFLEDCIVTACQEGFICTWGRPGKVGSLSSPSQASSPGGTVV

SEQ ID NO: 84263 - protein, 600 aa, Artificial Sequence
  derived and/or modified sequence
MATEGGGKEMNEIKTQFTTREGLYKLLPHSEYSRPNRVPFNSQGSNPVRVSFVNLNDQSGNGDRLCFNVGRELYFYIYKGVRKAADLSKPIDKRIYKGTQPTCHDFNHLTATAESVSLLVGFSAGQVQLIDPIKKETSKLFNEENSCQHLWKVDWNEERQNEGSKTSEEALVTVQRLIDKSRVTCVKWVPGSESLFLVAHSSGNMYLYNVEHTCGTTAPHYQLLKQGESFAVHTCKSKSTRNPLLKWTVGEGALNEFAFSPDGKFLACVSQDGFLRVFNFDSVELHGTMKSYFGGLLCVCWSPDGKYIVTGGEDDLVTVWSFVDCRVIARGHGHKSWVSVVAFDPYTTSVEEGDPMEFSGSDEDFQDLLHFGRDRANSTQSRLSKRNSTDSRPVSVTYRFGSVGQDTQLCLWDLTEDILFPHQPLSRARTHTNVMNATSPPAGSNGNSVTTPGNSVPPPLPRSNSLPHSAVSNAGSKSSVMDGAIASGVSKFATLSLHDRKERHHEKDHKRNHSMGHISSKSSDKLNLVTKTKTDPAKTLGTPLCPRMEDVPLLEPLICKKIAHERLTVLIFLEDCIVTACQEGFICTWGRPGKVVSFNP

SEQ ID NO: 84264 - protein, 312 aa, Artificial Sequence
  derived and/or modified sequence
MKSYFGGLLCVCWSPDGKYIVTGGEDDLVTVWSFVDCRVIARGHGHKSWVSVVAFDPYTTSVEEGDPMEFSGSDEDFQDLLHFGRDRANSTQSRLSKRNSTDSRPVSVTYRFGSVGQDTQLCLWDLTEDILFPHQPLSRARTHTNVMNATSPPAGSNGNSVTTPGNSVPPPLPRSNSLPHSAVSNAGSKSSVMDGAIASGVSKFATLSLHDRKERHHEKDHKRNHSMGHISSKSSDKLNLVTKTKTDPAKTLGTPLCPRMEDVPLLEPLICKKIAHERLTVLIFLEDCIVTACQEGFICTWGRPGKVVSFNP

SEQ ID NO: 84265 - DNA, 1803 bp, Artificial Sequence
  derived and/or modified sequence
atggccaccgagggcggcggcaaggagatgaacgagatcaagacccagttcaccaccagagagggcctgtacaagctgctgccccacagcgagtacagcagacccaacagagtgcccttcaacagccagggcagcaaccccgtgagagtgagcttcgtgaacctgaacgaccagagcggcaacggcgacagactgtgcttcaacgtgggcagagagctgtacttctacatctacaagggcgtgagaaaggccgccgacctgagcaagcccatcgacaagagaatctacaagggcacccagcccacctgccacgacttcaaccacctgaccgccaccgccgagagcgtgagcctgctggtgggcttcagcgccggccaggtgcagctgatcgaccccatcaagaaggagaccagcaagctgttcaacgaggagaacagctgccagcacctgtggaaggtggactggaacgaggagagacagaacgagggcagcaagaccagcgaggaggccctggtgaccgtgcagagactgatcgacaagagcagagtgacctgcgtgaagtgggtgcccggcagcgagagcctgttcctggtggcccacagcagcggcaacatgtacctgtacaacgtggagcacacctgcggcaccaccgccccccactaccagctgctgaagcagggcgagagcttcgccgtgcacacctgcaagagcaagagcaccagaaaccccctgctgaagtggaccgtgggcgagggcgccctgaacgagttcgccttcagccccgacggcaagttcctggcctgcgtgagccaggacggcttcctgagagtgttcaacttcgacagcgtggagctgcacggcaccatgaagagctacttcggcggcctgctgtgcgtgtgctggagccccgacggcaagtacatcgtgaccggcggcgaggacgacctggtgaccgtgtggagcttcgtggactgcagagtgatcgccagaggccacggccacaagagctgggtgagcgtggtggccttcgacccctacaccaccagcgtggaggagggcgaccccatggagttcagcggcagcgacgaggacttccaggacctgctgcacttcggcagagacagagccaacagcacccagagcagactgagcaagagaaacagcaccgacagcagacccgtgagcgtgacctacagattcggcagcgtgggccaggacacccagctgtgcctgtgggacctgaccgaggacatcctgttcccccaccagcccctgagcagagccagaacccacaccaacgtgatgaacgccaccagcccccccgccggcagcaacggcaacagcgtgaccacccccggcaacagcgtgcccccccccctgcccagaagcaacagcctgccccacagcgccgtgagcaacgccggcagcaagagcagcgtgatggacggcgccatcgccagcggcgtgagcaagttcgccaccctgagcctgcacgacagaaaggagagacaccacgagaaggaccacaagagaaaccacagcatgggccacatcagcagcaagagcagcgacaagctgaacctggtgaccaagaccaagaccgaccccgccaagaccctgggcacccccctgtgccccagaatggaggacgtgcccctgctggagcccctgatctgcaagaagatcgcccacgagagactgaccgtgctgatcttcctggaggactgcatcgtgaccgcctgccaggagggcttcatctgcacctggggcagacccggcaaggtggtgagcttcaacccctag

SEQ ID NO: 84266 - DNA, 1803 bp, Artificial Sequence
  derived and/or modified sequence
atggccaccgagggaggtggcaaggaaatgaacgagattaagactcagttcacaaccagagagggactttataaacttctcccgcactctgagtactcacgccccaatagggtcccttttaattctcagggatccaaccccgtcagggtgtctttcgtcaatttgaatgaccagagcggcaatggcgataggctttgttttaatgtgggacgcgagttatatttttacatttataagggggtgcgaaaggccgctgacctgtcaaagccaattgataaacgcatctataaaggcacacaacctacatgtcatgacttcaatcatctgaccgctaccgcggagtctgtgtctctgctagtcggattttccgctggacaggttcagctcattgaccccattaaaaaggagacatccaaactgttcaacgaagagaacagctgtcagcatctgtggaaagtagattggaacgaggaacgccaaaatgaagggagcaaaacatccgaggaggcacttgtgacagtgcagcgccttattgacaagtcacgcgtgacatgcgtcaagtgggtgcccggaagcgagagtctctttctggtagcccatagctcaggtaacatgtatctgtataatgtcgaacatacttgtggaacgacagcaccacactaccaacttctgaagcagggggaaagtttcgcggttcatacatgtaagtccaagagcacacgcaaccctctcttgaaatggactgtgggagagggggccctgaacgagttcgcatttagtcccgatggtaaatttctggcctgtgtttcgcaggacggctttttgagggtgttcaacttcgatagcgtggagctgcacggaaccatgaagtcctacttcgggggactcctgtgtgtctgctggagtcctgacggaaagtatatcgtgaccggcggagaggatgacttggtcacagtgtggtccttcgtagactgcagggtgatcgcaaggggtcatggtcataagtcctgggtcagcgtggtggcgttcgacccctacactacgtccgtggaggagggagaccccatggagttttccggctcagacgaggacttccaggacctcctgcacttcgggcgcgatagagccaacagcactcagagtagactgagcaaacggaatagcacagactctcgaccagtaagcgtcacttatagattcggttccgtgggacaggacactcaactgtgcttatgggacctcactgaagacatcctgttcccccatcagcccctgtcccgagcccgtacacacacaaatgtcatgaatgccacttctccacctgcaggaagcaatggcaacagtgtgaccacccccggaaattccgttcctccgccccttccaagatccaattctctcccacattccgcagtgtccaatgcgggatctaaatcttcggttatggatggggctatcgcttctggggtcagcaagttcgctactttgagcctgcacgaccgtaaagagagacaccatgaaaaggaccacaagagaaaccatagtatggggcatattagttcaaagtcctctgataagttaaacctggtaactaagacaaaaactgacccggccaagaccttgggaacccctctttgcccgaggatggaagatgttcctttgctcgagcctctcatctgtaaaaagatagctcatgagaggctgaccgtactgattttcttggaagactgcatcgtgactgcatgccaggagggatttatatgtacctggggacgccccggtaaggttgtaagtttcaatccctag

SEQ ID NO: 84267 - DNA, 1803 bp, Artificial Sequence
  derived and/or modified sequence
atggccacagaaggaggcggcaaggagatgaatgagatcaagacccagttcaccacccgggagggcctgtacaagctgctgccccacagcgagtacagccggcccaacagagtgcccttcaacagccagggcagcaaccctgtgcgggtgtcctttgtgaacctgaatgaccagagcggaaatggagaccggctgtgcttcaacgtgggccgggagctgtacttctacatctacaagggcgtgaggaaggctgctgacctgagcaagcccatcgacaagaggatctacaagggcacccagcccacctgccacgacttcaaccacctgacagccacagctgagagcgtgtccctgctggtgggcttctctgctggccaggtgcagctgattgaccccatcaagaaggagaccagcaagctgttcaatgaggagaacagctgccagcacctgtggaaggtggactggaatgaggagcggcagaatgaaggcagcaagaccagcgaggaggccctggtgacagtgcagaggctgattgacaagagccgggtgacctgtgtgaagtgggtgcccggcagcgagagcctcttcctggtggcccacagcagcggcaacatgtacctgtacaacgtggagcacacctgtggcaccacagccccccactaccagctgctgaagcagggcgagagctttgctgtgcacacctgcaagagcaagagcaccaggaaccccctgctgaagtggacagtgggggagggcgccctgaatgaatttgccttctccccagatggcaagttcctggcctgtgtgtcccaggacggcttcctgcgggtcttcaactttgacagcgtggagctgcacggcaccatgaagagctactttggaggcctgctgtgtgtgtgctggagcccagatggcaagtacatcgtgactggaggagaagatgacctggtgacagtgtggagctttgtggactgcagggtcatcgcccggggccacggccacaagtcctgggtgtctgtggtggcctttgacccctacaccacctctgtggaggagggggaccccatggagttcagcggcagtgatgaggacttccaggacctgctgcacttcggccgggaccgggccaacagcacccagagccggctgagcaagaggaacagcacagacagcaggcctgtgtctgtgacctaccgcttcggctctgtgggccaggacacccagctgtgcctgtgggacctgacagaggacatcctcttcccccaccagcccctgagccgggcccggacccacaccaacgtgatgaatgccaccagccccccagctggcagcaatggaaacagcgtgaccaccccaggcaacagcgtgcccccacccctgcccaggagcaacagcctgccccacagcgctgtgtccaatgccggcagcaagagctctgtgatggatggagccatcgccagcggcgtgtccaagtttgccaccctgagcctgcatgacaggaaggagcggcaccacgagaaggaccacaagaggaaccacagcatgggccacatcagcagcaagagcagtgacaagctgaacctggtgaccaagaccaagacagatcctgccaagaccctgggcacccccctgtgccccaggatggaggatgtgcccctgctggagcccctcatctgcaagaagatcgcccacgagcggctgactgtgctgatcttcctggaggactgcatcgtgacagcctgccaggagggcttcatctgcacctggggccggcctgggaaggtggtgtccttcaacccctag

SEQ ID NO: 84268 - DNA, 1803 bp, Artificial Sequence
  derived and/or modified sequence
atggccaccgagggcggcggcaaggagatgaacgagatcaagacccagtttacgacgagggaggggctctacaaattgttgcctcacagtgaatactctcggccaaacagagtgccgttcaattcccaagggtcaaatcctgtgcgcgtctcattcgtcaacctgaacgatcagagtgggaacggggacaggctttgtttcaacgtgggacgtgagctctacttttacatttacaaaggggtgcggaaggcagcggacctcagcaaaccaatcgacaaacgcatttataagggcacccagccgacctgccatgattttaatcacctgacggctactgctgaatccgttagtttgctggttgggttttctgccggacaagtccagttgatcgatccgatcaagaaggaaacttctaagctctttaatgaagagaactcttgtcagcacctatggaaggtggactggaacgaggaacgtcagaacgaggggtccaaaacttccgaagaggcattagtgaccgttcagagactgatcgacaagagtcgggtgacctgcgtcaagtgggtcccaggaagcgaatccctctttcttgtcgctcacagcagcggcaatatgtatctgtacaacgtggaacatacttgcgggaccacagcccctcattatcagctgctgaaacaaggcgaatcttttgccgtccacacgtgcaaaagcaagtctaccaggaacccactgctgaagtggacagtgggagagggagcattgaacgagtttgcgttttcccccgatgggaaattcctggcctgcgtctcccaggacggattcctacgcgtgttcaactttgactcagtagagctccacggcacaatgaaaagttactttggtggactcctgtgcgtctgctggtctcccgatggcaaatatattgtcaccggcggggaagacgacctggttacagtttggagcttcgtggattgtcgcgtgattgcccgtggccacgggcataagtcttgggtgtccgtggtcgcttttgacccctatacgacgagcgtggaggagggcgatccgatggagttcagtgggtcagacgaggactttcaagacctgttacatttcggtcgcgaccgcgctaactccacacagtcgagactgagtaaacgcaactccacggatagcaggcccgtgagcgtcacctatcgcttcggatcagtgggacaggatacacaactgtgtctatgggatctcactgaggacatcctgtttccccatcagcccctgagccgggccaggacacataccaacgtgatgaacgccacatccccaccggctggttctaatggaaacagcgtgaccactcctggaaatagcgtgcccccaccccttccgaggagtaattcattaccacactctgctgtcagtaacgccggttctaagagctccgttatggatggagccatagcctctggagtttctaaatttgccactctctccttacatgaccgaaaagagcgccaccatgaaaaggaccataagaggaatcactccatgggacatatctccagtaaaagttctgacaagctcaacttagtgaccaagactaaaacagaccctgccaagactctgggcaccccgctctgtccacgaatggaagacgtgccactgttggagccactgatatgtaaaaaaattgcccacgaaagactgaccgtgctcatcttccttgaagattgcattgtcactgcttgccaggagggctttatttgtacttggggcaggcctggtaaggtggtatcatttaatccttag

SEQ ID NO: 84269 - DNA, 1803 bp, Artificial Sequence
  derived and/or modified sequence
atggctacagaggggggaggaaaagagatgaacgagatcaaaacgcagtttacaacccgcgagggactgtataagctgctccctcatagcgagtattccaggccgaaccgagttcccttcaatagtcaaggaagtaacccagtcagggtgagtttcgtcaatctgaatgatcagagtggaaacggagatcggctctgtttcaacgtgggcagggagctatatttttatatctacaagggcgtgcgcaaggccgctgacctttccaagcctattgacaaacgcatctacaagggcacccaaccaacctgccacgactttaatcacctgaccgctaccgcagagtccgtttcacttttggtgggattctccgccggtcaagtccaattaatcgatcccatcaaaaaggagaccagcaagctgtttaacgaggagaattcctgccaacacctgtggaaggttgactggaatgaggaaaggcaaaacgagggatccaagaccagcgaggaggctctagtgactgtgcagagactaattgacaagtctagggttacatgcgtcaaatgggtacccggaagtgaaagcctgttcctggttgcacactcatcgggaaacatgtacttgtataatgttgagcacacatgtgggacaaccgcccctcattaccaactgctgaagcaaggagaatctttcgcagtccatacctgtaaatcaaaatccaccaggaacccactgttgaagtggaccgtgggtgaaggtgccctgaacgaatttgcatttagtcccgacggaaaattcctggcctgtgtatcccaggacgggttccttcgggtgtttaacttcgacagcgtcgagctgcacggcaccatgaagagctacttcggtggactgttgtgcgtgtgctggtcccctgatggtaaatatatcgtgacagggggtgaggacgacttagtcaccgtgtggtcattcgtagactgccgcgtgatcgcgagaggtcatggacacaagagctgggttagcgtagttgcattcgatccgtacactacctcagtggaagagggcgaccctatggagttttcggggtccgacgaagattttcaggatctcctgcacttcggtagggaccgcgcaaatagcacacagagcaggctgtccaagcgaaactccacagactcaagacctgtgtctgtcacatatcgctttggaagtgtgggtcaggacactcagttgtgtctgtgggacctgactgaagatattctgttcccacatcagcctctctccagggcccgtacccacactaacgtgatgaatgccaccagccctccagccggaagcaacggcaacagtgtgactactcccggaaatagcgtccccccaccactaccgcgatctaactcgctgccccacagcgcagtttctaatgcaggtagcaaatcctctgttatggacggagctatcgcgtcaggagtgtcgaaattcgccacactgtcattgcacgacagaaaagagcggcaccatgagaaggatcacaagagaaaccattcaatgggccacatttcgtccaagtcgagcgacaaattgaatcttgtgaccaagactaagaccgatcccgctaagacacttggtactcctctgtgtccaaggatggaggacgttccgcttttagagccattaatctgtaagaagatcgctcatgagagactaaccgtgctcattttcctggaggactgtattgtcaccgcttgtcaggagggcttcatttgcacctgggggcgaccaggtaaagttgtatcctttaacccctag

SEQ ID NO: 84270 - DNA, 2067 bp, Artificial Sequence
  derived and/or modified sequence
gctttccaagatggcgacggagggaggagggaaggagatgaacgagattaagacccaattcaccacccgggaaggtctgtacaagctgctgccgcactcggagtacagccggcccaaccgggtgcccttcaactcgcagggatccaaccctgtccgcgtctccttcgtaaacctcaacgaccagtctggcaacggcgaccgcctctgcttcaatgtgggccgggagctgtacttctatatctacaagggggtccgcaaggctgctgacttgagtaaaccaatagataaaaggatatacaaaggaacacagcctacttgtcatgacttcaaccacctaacagccacagcagaaagtgtctctctcctagtgggcttttccgcaggccaagtccagcttatagacccaatcaaaaaagaaactagcaaactttttaatgaggaaaactcttgtcagcacttgtggaaggtggattggaatgaagaaagacagaatgaaggtagcaagaccagtgaggaggctctagtaactgtccagagactaatagacaagtcacgagttacctgtgtcaaatgggttcccggttcggaaagccttttcctagtagcccactcgagtgggaacatgtacttatataatgtggagcacacttgtggcaccacagccccccactaccagcttctgaagcagggagagagctttgccgtgcacacttgcaagagcaaatccacgaggaaccctctccttaagtggacggtgggcgagggggccctcaacgagtttgctttctccccagatggcaagttcttagcgtgcgtgagccaggacgggtttctgcgggtgttcaactttgactcagtggagctgcacggtacgatgaaaagctactttgggggcttgctgtgtgtgtgctggagcccggatggcaagtacatcgtgacaggtggggaggacgacttggtgacagtctggtcctttgtagactgccgagtaatagccagaggccacgggcacaagtcctgggtcagtgttgtagcgtttgacccttataccactagtgtagaagaaggtgaccctatggagtttagtggcagcgatgaggacttccaagaccttcttcattttggcagagatcgagcaaatagtacacagtccaggctctccaaacggaactctacagacagccgccccgtaagtgtcacgtatcggtttggttccgtgggccaggacacacagctctgtttatgggaccttacagaagatatccttttccctcaccaacccctctcaagagcaaggacacacacaaatgtcatgaatgccacgagtcctcctgctggaagcaatgggaacagtgttacaacacccgggaactctgtgccgcctcctctgccacggtccaacagccttccacattcagcagtctcaaatgctggcagcaaaagcagtgtcatggacggggccattgcttctggggtcagcaaatttgcaacactttcactacatgaccggaaggagaggcaccacgagaaagatcacaagcgaaatcatagcatgggacacatttctagcaagagcagtgacaaactgaatctagttaccaaaaccaaaacggaccctgctaaaactctgggaacgcccctgtgtcctcgaatggaagatgttcccttgttagagccgctgatatgtaaaaagatagcacatgagagactgactgtactaatatttcttgaagactgtatagtcactgcttgtcaggagggatttatttgcacatggggaaggcctggtaaagtggtaagttttaatccttaatgctgcaccagatctagaacttgaataggtagtgacttttttctttttcgtgggaggggtggggtgtacaatgaatgtgaatgacacttcttattcttaatgtaaatctcaatgcatcagagccataattttggatactgcatgccatgtaattctgaatcatttgataatttaccttagagcatttaaaaaaatataatcaaactaattgccagccaagtcagtcatcctcctgggagtatatagagtcccaa

SEQ ID NO: 84271 - protein, 396 aa, Artificial Sequence
  derived and/or modified sequence
MYLYNVEHTCGTTAPHYQLLKQGESFAVHTCKSKSTRNPLLKWTVGEGALNEFAFSPDGKFLACVSQDGFLRVFNFDSVELHGTMKSYFGGLLCVCWSPDGKYIVTGGEDDLVTVWSFVDCRVIARGHGHKSWVSVVAFDPYTTSVEEGDPMEFSGSDEDFQDLLHFGRDRANSTQSRLSKRNSTDSRPVSVTYRFGSVGQDTQLCLWDLTEDILFPHQPLSRARTHTNVMNATSPPAGSNGNSVTTPGNSVPPPLPRSNSLPHSAVSNAGSKSSVMDGAIASGVSKFATLSLHDRKERHHEKDHKRNHSMGHISSKSSDKLNLVTKTKTDPAKTLGTPLCPRMEDVPLLEPLICKKIAHERLTVLIFLEDCIVTACQEGFICTWGRPGKVVSFNP

SEQ ID NO: 84272 - DNA, 2164 bp, Artificial Sequence
  derived and/or modified sequence
aaaacaacaaaaaacagttgtaaggagtccatggcacagaaagtttaagcaccctgatttaggctgctgacttgagtaaaccaatagataaaaggatatacaaaggaacacagcctacttgtcatgacttcaaccacctaacagccacagcagaaagtgtctctctcctagtgggcttttccgcaggccaagtccagcttatagacccaatcaaaaaagaaactagcaaactttttaatgaggaaagactaatagacaagtcacgagttacctgtgtcaaatgggttcccggttcggaaagccttttcctagtagcccactcgagtgggaacatgtacttatataatgtggagcacacttgtggcaccacagccccccactaccagcttctgaagcagggagagagctttgccgtgcacacttgcaagagcaaatccacgaggaaccctctccttaagtggacggtgggcgagggggccctcaacgagtttgctttctccccagatggcaagttcttagcgtgcgtgagccaggacgggtttctgcgggtgttcaactttgactcagtggagctgcacggtacgatgaaaagctactttgggggcttgctgtgtgtgtgctggagcccggatggcaagtacatcgtgacaggtggggaggacgacttggtgacagtctggtcctttgtagactgccgagtaatagccagaggccacgggcacaagtcctgggtcagtgttgtagcgtttgacccttataccactagtgtagaagaaggtgaccctatggagtttagtggcagcgatgaggacttccaagaccttcttcattttggcagagatcgagcaaatagtacacagtccaggctctccaaacggaactctacagacagccgccccgtaagtgtcacgtatcggtttggttccgtgggccaggacacacagctctgtttatgggaccttacagaagatatccttttccctcaccaacccctctcaagagcaaggacacacacaaatgtcatgaatgccacgagtcctcctgctggaagcaatgggaacagtgttacaacacccgggaactctgtgccgcctcctctgccacggtccaacagccttccacattcagcagtctcaaatgctggcagcaaaagcagtgtcatggacggggccattgcttctggggtcagcaaatttgcaacactttcactacatgaccggaaggagaggcaccacgagaaagatcacaagcgaaatcatagcatgggacacatttctagcaagagcagtgacaaactgaatctagttaccaaaaccaaaacggaccctgctaaaactctgggaacgcccctgtgtcctcgaatggaagatgttcccttgttagagccgctgatatgtaaaaagatagcacatgagagactgactgtactaatatttcttgaagactgtatagtcactgcttgtcaggagggatttatttgcacatggggaaggcctggtaaagtggtaagttttaatccttaatgctgcaccagatctagaacttgaataggtagtgacttttttctttttcgtgggaggggtggggtgtacaatgaatgtgaatgacacttcttattcttaatgtaaatctcaatgcatcagagccataattttggatactgcatgccatgtaattctgaatcatttgataatttaccttagagcatttaaaaaaatataatcaaactaattgccagccaagtcagtcatcctcctgggagtatatagagtcccaaggttagcgctcctgtattagactatttcaattttaggaaaatcatgaccatgtggggaaacaatgactttaaaatgctgaaattaaaatttatgctttaactggaatattttttgcttaactactcaattagaatattgtacacctgatcaatgtgtgttcagcacagatggccatgaattgtcatttatagtccaattttttatcttaatcataaaatgtttaggaatctatgaaatttaactttaggaacaaaacgtttagcagggttgattgatattatttttacattgttctggcaatccacagaaagagaagagccttaatttttaaaacccattttagtcattttatgacaattaaagttgtttaataaacatcttttttc

SEQ ID NO: 84273 - protein, 532 aa, Artificial Sequence
  derived and/or modified sequence
MELDLSPPHLSSSPEDLCPAPGTPPGTPRPPDTPLPEEVKRSQPLLIPTTGRKLREEERRATSLPSIPNPFPELCSPPSQSPILGGPSSARGLLPRDASRPHVVKVYSEDGACRSVEVAAGATARHVCEMLVQRAHALSDETWGLVECHPHLALERGLEDHESVVEVQAAWPVGGDSRFVFRKNFAKYELFKSSPHSLFPEKMVSSCLDAHTGISHEDLIQNFLNAGSFPEIQGFLQLRGSGRKLWKRFFCFLRRSGLYYSTKGTSKDPRHLQYVADVNESNVYVVTQGRKLYGMPTDFGFCVKPNKLRNGHKGLRIFCSEDEQSRTCWLAAFRLFKYGVQLYKNYQQAQSRHLHPSCLGSPPLRSASDNTLVAMDFSGHAGRVIENPREALSVALEEAQAWRKKTNHRLSLPMPASGTSLSAAIHRTQLWFHGRISREESQRLIGQQGLVDGLFLVRESQRNPQGFVLSLCHLQKVKHYLILPSEEEGRLYFSMDDGQTRFTDLLQLVEFHQLNRGILPCLLRHCCTRVAL

SEQ ID NO: 84274 - protein, 555 aa, Artificial Sequence
  derived and/or modified sequence
MGKWRPGQGHTTGSVKPLSCSDAMELDLSPPHLSSSPEDLCPAPGTPPGTPRPPDTPLPEEVKRSQPLLIPTTGRKLREEERRATSLPSIPNPFPELCSPPSQSPILGGPSSARGLLPRDASRPHVVKVYSEDGACRSVEVAAGATARHVCEMLVQRAHALSDETWGLVECHPHLALERGLEDHESVVEVQAAWPVGGDSRFVFRKNFAKYELFKSSPHSLFPEKMVSSCLDAHTGISHEDLIQNFLNAGSFPEIQGFLQLRGSGRKLWKRFFCFLRRSGLYYSTKGTSKDPRHLQYVADVNESNVYVVTQGRKLYGMPTDFGFCVKPNKLRNGHKGLRIFCSEDEQSRTCWLAAFRLFKYGVQLYKNYQQAQSRHLHPSCLGSPPLRSASDNTLVAMDFSGHAGRVIENPREALSVALEEAQAWRKKTNHRLSLPMPASGTSLSAAIHRTQLWFHGRISREESQRLIGQQGLVDGLFLVRESQRNPQGFVLSLCHLQKVKHYLILPSEEEGRLYFSMDDGQTRFTDLLQLVEFHQLNRGILPCLLRHCCTRVAL

SEQ ID NO: 84275 - DNA, 1668 bp, Artificial Sequence
  derived and/or modified sequence
atgggcaagtggcgtccagggcagggtcacacaacgggaagtgtgaaacctctctcgtgctccgacgcaatggaactagatttgagcccaccacacctgtctagtagtcctgaagacttatgtcctgcacccggtactccaccgggaacccctcggccacccgatacccctctccccgaggaagttaaaagatcccaaccattgctgatcccaaccaccggccgtaaactccgcgaagaggaaaggagagcaacttccctgccctcgataccaaatcccttccccgagctctgctcaccccctagtcagagccccatcttgggcggtcctagttcggcaagggggctccttcctcgggacgcctcaaggccacacgttgttaaggtatactctgaagatggcgcgtgtcggagcgttgaagttgccgccggtgccacagcccgccatgtctgtgaaatgcttgttcagagagcgcacgcgctctccgacgagacttggggcctggtcgagtgtcatccacacctggcgctcgagcgcggcttggaagaccatgagtctgtcgtggaggttcaggccgcctggcctgttggtggggatagccgttttgtgtttaggaaaaattttgcgaaatacgagttgttcaaaagttccccacatagcctgttccccgagaaaatggtgagctcatgtctcgacgcccatacaggtatcagtcatgaggatttgatccaaaattttctgaatgcggggagttttccagaaattcagggctttctgcagctcagggggtcagggcgaaaactgtggaagcgattcttctgctttctgcggcggtctggcctgtattactcgacaaaagggacaagcaaagaccccaggcatctgcagtacgttgcggatgtgaatgaaagcaatgtctatgttgtgacccaaggccgcaaactatacggcatgcctaccgacttcgggttttgtgtgaagccgaacaaactccggaacggccacaaaggtctcagaatcttttgttccgaggatgagcagtcacgcacctgctggcttgcagcgtttaggttgtttaagtacggggtgcagctgtataaaaattaccagcaggcccagtctcgacacttgcacccctcctgcttgggctccccgccactgcgttccgcatccgataatacactggttgcaatggacttttccgggcacgcaggcagagttatcgagaacccccgcgaagctctatcagttgcccttgaagaagcccaggcatggcgcaaaaagactaatcaccgattatctcttccgatgcctgcgagcggcacctctctctccgcggccattcacaggacccagctgtggtttcatggccgcataagcagagaagagtctcagcggctcattgggcagcagggtctagtagacggcctgttcctagttagggagtcccagcgcaatcctcagggtttcgtcctgtctttatgccacctccagaaagtaaagcactacttgattttaccctccgaagaagaaggcaggctctatttttctatggacgatggccagacaagatttacagatctccttcagcttgtggagttccaccagctgaaccgcgggatactaccctgcctcttaaggcactgctgtacgcgcgtggccctgtag

SEQ ID NO: 84276 - DNA, 2228 bp, Artificial Sequence
  derived and/or modified sequence
cctggaatctggacacacagggctcccccccgcctctgacttctctgtccgaagtcgggacaccctcctaccacctgtagagaagcgggagtggatctgaaataaaatccaggaatctgggggttcctagacggagccagacttcggaacgggtgtcctgctactcctgctggggctcctccaggacaagggcacacaactggttccgttaagcccctctcttgctcagacgccatggagctggatctgtctccacctcatcttagcagctctccggaagacctttgcccagcccctgggacccctcctgggactccccggccccctgatacccctctgcctgaggaggtaaagaggtcccagcctctcctcatcccaaccaccggcaggaaacttcgagaggaggagaggcgtgccacctccctcccctctatccccaaccccttccctgagctctgcagtcctccctcacagagcccaattctcgggggcccctccagtgcaagggggctgctcccccgcgatgccagccgcccccatgtagtaaaggtgtacagtgaggatggggcctgcaggtctgtggaggtggcagcaggtgccacagctcgccacgtgtgtgaaatgctggtgcagcgagctcacgccttgagcgacgagacctgggggctggtggagtgccacccccacctagcactggagcggggtttggaggaccacgagtccgtggtggaagtgcaggctgcctggcccgtgggcggagatagccgcttcgtcttccggaaaaacttcgccaagtacgaactgttcaagagctccccacactccctgttcccagaaaaaatggtctccagctgtctcgatgcacacactggtatatcccatgaagacctcatccagaacttcctgaatgctggcagctttcctgagatccagggctttctgcagctgcggggttcaggacggaagctttggaaacgctttttctgcttcttgcgccgatctggcctctattactccaccaagggcacctctaaggatccgaggcacctgcagtacgtggcagatgtgaacgagtccaacgtgtacgtggtgacgcagggccgcaagctctacgggatgcccactgacttcggtttctgtgtcaagcccaacaagcttcgaaatggccacaaggggcttcggatcttctgcagtgaagatgagcagagccgcacctgctggctggctgccttccgcctcttcaagtacggggtgcagctgtacaagaattaccagcaggcacagtctcgccatctgcatccatcttgtttgggctccccacccttgagaagtgcctcagataataccctggtggccatggacttctctggccatgctgggcgtgtcattgagaacccccgggaggctctgagtgtggccctggaggaggcccaggcctggaggaagaagacaaaccaccgcctcagcctgcccatgccagcctccggcacgagcctcagtgcagccatccaccgcacccaactctggttccacgggcgcatttcccgtgaggagagccagcggcttattggacagcagggcttggtagacggcctgttcctggtccgggagagtcagcggaacccccagggctttgtcctctctttgtgccacctgcagaaagtgaagcattatctcatcctgccgagcgaggaggagggccgcctgtacttcagcatggatgatggccagacccgcttcactgacctgctgcagctcgtggagttccaccagctgaaccgcggcatcctgccgtgcttgctgcgccattgctgcacgcgggtggccctctgaccaggccgtggactggctcatgcctcagcccgccttcaggctgcccgccgcccctccacccatccagtggactctggggcgcggccacaggggacgggatgaggagcgggagggttccgccactccagttttctcctctgcttctttgcctccctcagatagaaaacagcccccactccagtccactcctgacccctctcctcaagggaaggccttgggtggccccctctccttctcctagctctggaggtgctgctctagggcagggaattatgggagaagtgggggcagcccaggcggtttcacgccccacactttgtacagaccgagaggccagttgatctgctctgttttatactagtgacaataaagattattttttgatacacctatga

SEQ ID NO: 84277 - DNA, 2197 bp, Artificial Sequence
  derived and/or modified sequence
tgcgggctgcggggagatgtggggagggccccctccactttggagggcagtgaaggagagggatcctctaaattgtcgaggcttcatctctccagattgtatgcccttctcagcaacaccgcctccggccctccgatgggaaagtggaggccgggacaagggcacacaactggttccgttaagcccctctcttgctcagacgccatggagctggatctgtctccacctcatcttagcagctctccggaagacctttgcccagcccctgggacccctcctgggactccccggccccctgatacccctctgcctgaggaggtaaagaggtcccagcctctcctcatcccaaccaccggcaggaaacttcgagaggaggagaggcgtgccacctccctcccctctatccccaaccccttccctgagctctgcagtcctccctcacagagcccaattctcgggggcccctccagtgcaagggggctgctcccccgcgatgccagccgcccccatgtagtaaaggtgtacagtgaggatggggcctgcaggtctgtggaggtggcagcaggtgccacagctcgccacgtgtgtgaaatgctggtgcagcgagctcacgccttgagcgacgagacctgggggctggtggagtgccacccccacctagcactggagcggggtttggaggaccacgagtccgtggtggaagtgcaggctgcctggcccgtgggcggagatagccgcttcgtcttccggaaaaacttcgccaagtacgaactgttcaagagctccccacactccctgttcccagaaaaaatggtctccagctgtctcgatgcacacactggtatatcccatgaagacctcatccagaacttcctgaatgctggcagctttcctgagatccagggctttctgcagctgcggggttcaggacggaagctttggaaacgctttttctgcttcttgcgccgatctggcctctattactccaccaagggcacctctaaggatccgaggcacctgcagtacgtggcagatgtgaacgagtccaacgtgtacgtggtgacgcagggccgcaagctctacgggatgcccactgacttcggtttctgtgtcaagcccaacaagcttcgaaatggccacaaggggcttcggatcttctgcagtgaagatgagcagagccgcacctgctggctggctgccttccgcctcttcaagtacggggtgcagctgtacaagaattaccagcaggcacagtctcgccatctgcatccatcttgtttgggctccccacccttgagaagtgcctcagataataccctggtggccatggacttctctggccatgctgggcgtgtcattgagaacccccgggaggctctgagtgtggccctggaggaggcccaggcctggaggaagaagacaaaccaccgcctcagcctgcccatgccagcctccggcacgagcctcagtgcagccatccaccgcacccaactctggttccacgggcgcatttcccgtgaggagagccagcggcttattggacagcagggcttggtagacggcctgttcctggtccgggagagtcagcggaacccccagggctttgtcctctctttgtgccacctgcagaaagtgaagcattatctcatcctgccgagcgaggaggagggccgcctgtacttcagcatggatgatggccagacccgcttcactgacctgctgcagctcgtggagttccaccagctgaaccgcggcatcctgccgtgcttgctgcgccattgctgcacgcgggtggccctctgaccaggccgtggactggctcatgcctcagcccgccttcaggctgcccgccgcccctccacccatccagtggactctggggcgcggccacaggggacgggatgaggagcgggagggttccgccactccagttttctcctctgcttctttgcctccctcagatagaaaacagcccccactccagtccactcctgacccctctcctcaagggaaggccttgggtggccccctctccttctcctagctctggaggtgctgctctagggcagggaattatgggagaagtgggggcagcccaggcggtttcacgccccacactttgtacagaccgagaggccagttgatctgctctgttttatactagtgacaataaagattattttttgatacacctatg

SEQ ID NO: 84278 - DNA, 2107 bp, Artificial Sequence
  derived and/or modified sequence
agttaagggcctggcgtctccctccctgaagacgtggtcccagccgggtgtcctgacgctcggggttcaggacaagggcacacaactggttccgttaagcccctctcttgctcagacgccatggagctggatctgtctccacctcatcttagcagctctccggaagacctttgcccagcccctgggacccctcctgggactccccggccccctgatacccctctgcctgaggaggtaaagaggtcccagcctctcctcatcccaaccaccggcaggaaacttcgagaggaggagaggcgtgccacctccctcccctctatccccaaccccttccctgagctctgcagtcctccctcacagagcccaattctcgggggcccctccagtgcaagggggctgctcccccgcgatgccagccgcccccatgtagtaaaggtgtacagtgaggatggggcctgcaggtctgtggaggtggcagcaggtgccacagctcgccacgtgtgtgaaatgctggtgcagcgagctcacgccttgagcgacgagacctgggggctggtggagtgccacccccacctagcactggagcggggtttggaggaccacgagtccgtggtggaagtgcaggctgcctggcccgtgggcggagatagccgcttcgtcttccggaaaaacttcgccaagtacgaactgttcaagagctccccacactccctgttcccagaaaaaatggtctccagctgtctcgatgcacacactggtatatcccatgaagacctcatccagaacttcctgaatgctggcagctttcctgagatccagggctttctgcagctgcggggttcaggacggaagctttggaaacgctttttctgcttcttgcgccgatctggcctctattactccaccaagggcacctctaaggatccgaggcacctgcagtacgtggcagatgtgaacgagtccaacgtgtacgtggtgacgcagggccgcaagctctacgggatgcccactgacttcggtttctgtgtcaagcccaacaagcttcgaaatggccacaaggggcttcggatcttctgcagtgaagatgagcagagccgcacctgctggctggctgccttccgcctcttcaagtacggggtgcagctgtacaagaattaccagcaggcacagtctcgccatctgcatccatcttgtttgggctccccacccttgagaagtgcctcagataataccctggtggccatggacttctctggccatgctgggcgtgtcattgagaacccccgggaggctctgagtgtggccctggaggaggcccaggcctggaggaagaagacaaaccaccgcctcagcctgcccatgccagcctccggcacgagcctcagtgcagccatccaccgcacccaactctggttccacgggcgcatttcccgtgaggagagccagcggcttattggacagcagggcttggtagacggcctgttcctggtccgggagagtcagcggaacccccagggctttgtcctctctttgtgccacctgcagaaagtgaagcattatctcatcctgccgagcgaggaggagggccgcctgtacttcagcatggatgatggccagacccgcttcactgacctgctgcagctcgtggagttccaccagctgaaccgcggcatcctgccgtgcttgctgcgccattgctgcacgcgggtggccctctgaccaggccgtggactggctcatgcctcagcccgccttcaggctgcccgccgcccctccacccatccagtggactctggggcgcggccacaggggacgggatgaggagcgggagggttccgccactccagttttctcctctgcttctttgcctccctcagatagaaaacagcccccactccagtccactcctgacccctctcctcaagggaaggccttgggtggccccctctccttctcctagctctggaggtgctgctctagggcagggaattatgggagaagtgggggcagcccaggcggtttcacgccccacactttgtacagaccgagaggccagttgatctgctctgttttatactagtgacaataaagattattttttgataca

SEQ ID NO: 84279 - DNA, 1668 bp, Artificial Sequence
  derived and/or modified sequence
atgggcaagtggaggcctggccagggccacaccaccggctctgtgaagcccctgagctgcagtgatgccatggagctggacctgagccccccccacctgagcagcagccctgaggacctgtgcccagcccctggcaccccacctggcaccccccggcccccagacacccccctgcctgaggaggtgaagaggagccagcccctgctgatccccaccactggaaggaagctgcgggaggaggagcggcgggccaccagcctgcccagcatccccaaccccttccctgagctgtgcagcccccccagccagagccccatcctgggcggccccagcagcgcccggggcctgctgcccagagatgccagccggccccacgtggtgaaggtgtacagtgaagatggagcctgccgctctgtggaggtggccgccggggccacagcccggcacgtgtgtgagatgctggtgcagagggcccacgccctgagtgatgagacctggggcctggtggagtgccacccccacctggccctggagcggggcctggaggaccacgagagcgtggtggaggtgcaggccgcctggcctgtgggcggggacagcagatttgtgttcaggaagaactttgccaagtatgagctgttcaagagcagcccccacagcctcttccctgagaagatggtgagcagctgcctggatgcccacacaggcatcagccatgaggacctgatccagaacttcctgaatgccggcagcttccctgagatccagggcttcctgcagctgcggggcagcggcaggaagctgtggaagcgcttcttctgcttcctgcggcgcagcggcctgtactacagcaccaagggcaccagcaaggaccccaggcacctgcagtatgtggctgatgtgaatgaaagcaatgtgtatgtggtgacccagggcaggaagctgtatggcatgcccacagactttggcttctgtgtgaagcccaacaagctgagaaatggccacaagggcctgcgcatcttctgcagtgaagatgagcagagcaggacctgctggctggccgccttccgcctcttcaagtatggagtgcagctgtacaagaactaccagcaggcccagagccgccacctgcaccccagctgcctgggcagcccccccctgcggagcgccagtgacaacaccctggtggccatggacttcagcggccacgccggccgggtgattgagaacccccgggaggccctgtctgtggccctggaggaggcccaggcctggaggaagaagaccaaccaccggctgagcctgcccatgcctgccagcggcaccagcctgtctgctgccatccacaggacccagctgtggttccacggccgcatcagccgggaggagagccagaggctcatcggccagcagggcctggtggatggcctcttcctggtgcgggagagccagaggaacccccagggctttgtgctgagcctgtgccacctgcagaaggtgaagcactacctgatcctgcccagcgaggaggagggccgcctgtacttctccatggatgatggccagacccgcttcacagacctgctgcagctggtggagttccaccagctgaacagaggcatcctgccctgcctgctgcggcactgctgcaccagggtggccctgtag

SEQ ID NO: 84280 - DNA, 1668 bp, Artificial Sequence
  derived and/or modified sequence
atgggcaagtggcggcccggccagggccacaccaccggcagcgtgaagcctcttagctgctccgacgcaatggagctcgatctttcgccgcctcacctctcaagcagcccagaggatctttgtccagctccaggaacacccccgggaactccccgaccgcctgacaccccgctcccggaagaggttaaaagatcccaaccgctactgatacccactacgggaagaaaacttcgagaggaagagaggcgggccacttccctgccatctataccgaaccctttccctgaactttgctctccccctagccagtcccctattttggggggaccgtctagcgcacggggccttcttccacgagatgccagccgtccacacgtggtgaaggtctacagtgaagacggtgcctgtcgctccgtggaggtggcagctggggcaacggctcgacatgtgtgcgagatgcttgtgcagagagctcatgccctgagcgacgagacgtggggcctcgtcgagtgtcatccacaccttgcactggagcgaggcctggaggatcacgagagcgtcgtggaagtgcaggccgcttggcccgttggaggagattcgagattcgtgttccggaaaaactttgcaaagtatgagctgtttaaaagttcccctcatagcttgtttccagaaaagatggtgtcatcctgcctcgacgcgcacactggcattagccatgaagatcttattcaaaactttctgaacgccgggtcctttcctgaaattcagggctttttgcagcttagaggatccggccggaagctctggaagaggtttttctgctttttgcgacgatcaggactgtattactctacaaaggggacatccaaggacccaagacatctgcaatatgtcgccgacgtcaatgagagcaacgtctacgtggtgactcaggggcgcaagttgtatggaatgccaaccgacttcggattctgtgtgaagcccaacaagttgcggaatggacacaaagggctacgcattttttgcagcgaagatgaacagagccggacttgctggctggcggccttcaggctcttcaagtacggggtgcaattgtataaaaactatcagcaggcccagtctaggcacctgcacccatcatgcctcgggagcccgcccctgcgcagcgcttcagataatacccttgtggctatggatttcagtggccacgcgggaagagtcatcgagaacccgcgggaagctctgagcgtcgccctggaagaggcccaagcttggcgcaagaaaaccaatcatcgcttgagccttcctatgccagcctcgggtacaagcctcagtgctgctatccaccgcacacagttatggttccacggacgaattagtcgggaggagtctcagcgcctcatcggccaacagggcttggtggacgggttgtttctcgtgcgtgaaagccagcgcaacccacagggctttgtcctgagcctgtgccatttacaaaaagtaaaacactacctcatcttacccagcgaagaagaagggcgcctgtattttagcatggacgacggtcagacacgttttaccgacttacttcagttggtcgagtttcatcaacttaaccggggaatcctcccttgcctcctgaggcactgttgcactagggtagccttatag

SEQ ID NO: 84281 - DNA, 1668 bp, Artificial Sequence
  derived and/or modified sequence
atgggcaaatggaggccaggacagggtcatacaacagggtctgtgaagccactgtcctgttcagatgcaatggagctggatttgtccccaccacacttgtccagctccccggaggacctgtgtccagcacccggtacacctcctggcacccctcgccctcctgacacacccttgccagaagaggtgaagagatcccagcccctgctgattcctacaactgggaggaagctgagagaggaggaacggagggcaacttctttgccttcaattccaaatccctttcccgagctttgtagccctcctagccaaagccctatcctaggcggacctagttccgctagaggcttactgccaagagatgctagtcggccacacgttgtgaaggtgtactccgaggacggcgcttgccggtctgtagaagtcgccgctggcgcaacagctcggcatgtgtgtgaaatgctcgttcaacgagcccatgctctgtctgacgaaacgtggggcctcgtcgagtgccatccccatctggcactggagcgtgggctcgaggaccacgaaagcgtggttgaggtgcaggcagcctggcccgtgggcggtgattcgcgatttgtgttcagaaaaaatttcgctaagtacgaacttttcaagtccagtcctcactccctctttcccgaaaagatggtatcgagctgcctggatgcccacactggcatctcacacgaggatttaattcaaaactttctcaacgccggatcgttccctgagatccaaggcttcctacagttgcgcggttcggggagaaagctgtggaagcggtttttttgctttctaaggaggtctggactctattatagtacaaagggaacttctaaagatccaagacacctgcagtacgtggcggacgttaatgagtctaatgtgtacgtagtaacccaaggccgaaagctgtatggaatgcctactgacttcgggttctgcgtcaagccaaacaagctgcggaacgggcataagggattacgcatcttctgctctgaagacgaacaatcccgaacatgttggctagcagcctttaggctgttcaaatacggtgtgcagctttataaaaactaccagcaagcccagtctcgacacctgcatccctcctgcctagggtccccgccactcagaagcgccagtgataatactcttgtcgccatggatttttcagggcacgcgggacgcgtaatcgagaacccaagagaggcactctccgttgcgctggaagaggcacaggcctggaggaagaagacgaatcaccgattgagtttacctatgccagcctctgggacaagcctgtccgccgctattcatcgcacgcagctttggtttcacggtcgaatcagccgggaggagagccagaggcttatcggtcagcagggcctagtcgacggtctgttcttagtccgcgaatcccaacgaaacccccagggctttgtgctgagcttatgccacttacagaaagtgaagcattatttgatcctgccctcagaagaggaggggcgtctttatttctctatggacgacggacagacaaggttcacagacctgctacagctcgtggagttccatcaacttaacagggggattctgccgtgccttcttcggcactgctgcactcgcgtggctctctag

SEQ ID NO: 84282 - DNA, 1668 bp, Artificial Sequence
  derived and/or modified sequence
atgggcaagtggagacccggccagggccacaccaccggcagcgtgaagcccctgagctgcagcgacgccatggagctggacctgagccccccccacctgagcagcagccccgaggacctgtgccccgcccccggcaccccccccggcacccccagaccccccgacacccccctgcccgaggaggtgaagagaagccagcccctgctgatccccaccaccggcagaaagctgagagaggaggagagaagagccaccagcctgcccagcatccccaaccccttccccgagctgtgcagcccccccagccagagccccatcctgggcggccccagcagcgccagaggcctgctgcccagagacgccagcagaccccacgtggtgaaggtgtacagcgaggacggcgcctgcagaagcgtggaggtggccgccggcgccaccgccagacacgtgtgcgagatgctggtgcagagagcccacgccctgagcgacgagacctggggcctggtggagtgccacccccacctggccctggagagaggcctggaggaccacgagagcgtggtggaggtgcaggccgcctggcccgtgggcggcgacagcagattcgtgttcagaaagaacttcgccaagtacgagctgttcaagagcagcccccacagcctgttccccgagaagatggtgagcagctgcctggacgcccacaccggcatcagccacgaggacctgatccagaacttcctgaacgccggcagcttccccgagatccagggcttcctgcagctgagaggcagcggcagaaagctgtggaagagattcttctgcttcctgagaagaagcggcctgtactacagcaccaagggcaccagcaaggaccccagacacctgcagtacgtggccgacgtgaacgagagcaacgtgtacgtggtgacccagggcagaaagctgtacggcatgcccaccgacttcggcttctgcgtgaagcccaacaagctgagaaacggccacaagggcctgagaatcttctgcagcgaggacgagcagagcagaacctgctggctggccgccttcagactgttcaagtacggcgtgcagctgtacaagaactaccagcaggcccagagcagacacctgcaccccagctgcctgggcagcccccccctgagaagcgccagcgacaacaccctggtggccatggacttcagcggccacgccggcagagtgatcgagaaccccagagaggccctgagcgtggccctggaggaggcccaggcctggagaaagaagaccaaccacagactgagcctgcccatgcccgccagcggcaccagcctgagcgccgccatccacagaacccagctgtggttccacggcagaatcagcagagaggagagccagagactgatcggccagcagggcctggtggacggcctgttcctggtgagagagagccagagaaacccccagggcttcgtgctgagcctgtgccacctgcagaaggtgaagcactacctgatcctgcccagcgaggaggagggcagactgtacttcagcatggacgacggccagaccagattcaccgacctgctgcagctggtggagttccaccagctgaacagaggcatcctgccctgcctgctgagacactgctgcaccagagtggccctgtag

SEQ ID NO: 84283 - DNA, 1599 bp, Artificial Sequence
  derived and/or modified sequence
atggagttagacctgtcacctcctcatctgagctcttcccctgaagacttgtgtccagcacccggcaccccccccgggactcccagacctccagatacgccactccctgaagaggtcaagcgcagccagccattgctgatacccactacagggcgaaaactgcgagaggaagagaggagagctacgagtctcccctccatccccaaccctttccccgagctctgttctccgccctcacagagccctatattaggtgggccaagctccgctaggggcctgttacctcgagacgcaagccggccacacgtcgtgaaggtgtactccgaagacggggcttgcagaagtgttgaagtggcggctggcgctactgctagacatgtatgcgaaatgctggtccaaagggcccacgcgctgtcggatgaaacgtgggggttagtagaatgtcatccacatcttgctctggaaagaggccttgaggatcatgaaagtgttgtggaagtccaggcagcatggcctgtgggcggcgacagtagattcgtgttccgcaagaacttcgctaagtacgagctgtttaagtcaagtcctcacagcctcttccctgagaagatggtctctagctgcctggacgcgcacactgggatcagtcacgaagacctgatccaaaactttctaaatgctggcagtttccctgagattcaggggttcctgcagcttcggggatcagggagaaaattatggaaacgattcttctgtttcttacgcaggagcggtctttattactctacgaagggaactagcaaggacccccggcatctccagtatgtggccgacgtcaatgaaagtaatgtgtatgtagtcactcagggccggaagctgtatggaatgcccacagacttcgggttttgtgtaaagcccaataagctgcgcaacggacacaagggacttagaattttctgctccgaagacgaacagtctaggacatgctggcttgccgcgtttcggctcttcaaatacggagtgcaattatataaaaactatcagcaggcccagagccgccacctgcacccctcctgcttagggagcccaccattgcgaagcgcatccgacaacactcttgtagcaatggacttttctgggcacgccggacgcgtcattgagaatccgcgggaagccctctctgtggctctggaggaagctcaagcttggcggaaaaaaactaatcacagactctcactgcccatgccagccagtggcacgtcattgtctgcagcaatccacaggactcagctgtggtttcacgggcgcatttctcgtgaggagagtcagcgactgatcggacagcagggcctggtggatggcctgtttctagtgagagaaagtcagcggaacccacagggatttgtgctatcactgtgccatttacagaaggtgaaacattacctgatccttccgagtgaggaagaaggtagactgtacttcagcatggatgacggtcaaacccgattcacggatctgctccaactcgttgagtttcatcagttaaaccgggggattctgccatgccttcttcgccactgttgtactagagtagcattgtag

SEQ ID NO: 84284 - DNA, 1599 bp, Artificial Sequence
  derived and/or modified sequence
atggaactggatttgagtccgccccatctttcctcctcgcccgaagacctctgtccagcaccgggtaccccccccggcacccctaggccgccagacactcctttgcccgaggaggtgaaacgatcacagccactcctgattcccactactggcagaaaactgcgggaggaggaaaggagggcaacgtcccttccttcgattccaaatcctttccccgaactttgtagtcctccttctcaatccccaatcctcgggggtcctagctcagcgaggggccttctgcctcgggacgccagccggcctcacgtggttaaagtttatagtgaggatggcgcgtgcagaagtgtagaggtggctgccggcgctaccgcgaggcacgtgtgtgagatgctcgtccagcgggcccacgctctgtctgacgagacctggggactggttgaatgccacccacacttagctctggagagaggcctggaagaccacgaatcagtcgtcgaagtgcaggctgcctggcctgtgggcggcgattcccgttttgtgtttcgtaagaactttgctaaatatgagctgtttaaaagcagcccccactcactgtttccggagaagatggtgtcctcctgtctggacgcccacactggaatcagtcatgaggacctcatccaaaattttctgaatgcaggaagctttcctgagatccaagggtttctacaattgagaggttctgggcggaagctctggaagcgcttcttttgcttcttgcggaggtccggcctctactattctactaaggggacttctaaagatccgaggcacctacagtatgtggccgatgttaacgagagcaacgtatacgttgttacccaaggaaggaaactctacggtatgcctaccgactttggtttctgcgtcaagcccaacaaactgagaaacgggcacaaggggctcagaattttctgctcagaagatgaacagagccggacgtgttggctggcagcattcaggcttttcaaatatggcgtgcagttgtacaagaattaccagcaagcccagagccgccatttacatccctcctgcttggggagccctccccttaggtctgccagcgataacacccttgtcgccatggacttttccggccacgcaggcagggttattgaaaatccccgcgaagcactgtccgtcgcgttagaggaagcacaggcttggagaaaaaagacaaaccaccgccttagtctacctatgcctgcttcaggaaccagcttgagtgcggccatccacaggacccagctctggttccatggcaggattagtcgtgaggagagccaacgcttgatcggtcagcagggcctggtggacgggctctttctcgtccgcgagtcacagagaaatccgcaaggctttgttctaagtctgtgtcacttacaaaaggttaagcactacctcattctcccttcagaggaggagggacgcctctatttttccatggatgatggacagactaggtttacagatcttctgcagttggtagagttccaccagctcaataggggaattctcccttgcctcctgaggcattgttgtacaagggtggccctctag

SEQ ID NO: 84285 - DNA, 1599 bp, Artificial Sequence
  derived and/or modified sequence
atggaactggacctgagtccaccacatctctccagctctcctgaagacctgtgccctgcaccaggtacccccccagggacccctaggccacccgacacgccgctacccgaggaggtaaaacgttctcagccgctgttgattcccaccactgggcgcaaactgagggaggaagagagacgggccacctctttgccctcaatccccaatcccttcccagaactctgctctccacctagtcagtcccccattttagggggaccatctagcgcccgaggactccttcccagggacgctagtcgaccccacgttgtaaaggtctacagcgaggacggcgcttgccgaagcgtagaggttgccgcaggcgccacagcccgtcacgtttgcgagatgttagtacaaagggcgcatgccctttctgacgaaacctggggcttagtcgaatgtcaccctcacctggctctcgaacggggcttggaagatcacgaatctgtcgtagaggtgcaggccgcttggcctgtcggcggtgattcgaggttcgttttccgcaaaaatttcgctaaatacgaactcttcaagtcatcgccccattcactatttcccgaaaagatggtatcatcctgtcttgacgcccacaccggtatttctcatgaggatttaatacagaacttcttaaacgctggctctttcccagagattcaaggattcctgcagttacgcggcagcgggagaaaactttggaagaggtttttctgtttcctgcgccgctcagggctctattatagcactaaggggacttcaaaggaccctcgccacctgcaatatgtggccgatgtgaacgaatcaaatgtctacgtggtcacccagggcagaaaactgtatgggatgccaaccgactttggcttttgcgttaagccaaataagttacggaacggtcacaaaggtctgcgtattttttgctccgaagatgagcagtctaggacatgttggctcgccgcctttcgactttttaagtatggtgtgcagctttataaaaattaccagcaggcccagtcccgccatctgcatccctcatgtctgggatccccaccactgagatctgcaagtgacaacacactggttgcgatggacttcagcgggcatgcaggccgagtgattgagaaccccagagaagcattatctgtggctctggaggaggcacaggcttggaggaaaaagaccaatcatcgcctgtcgctaccgatgccggcctctggaacatctctgagcgccgccattcacagaacacagctctggtttcatggacgaataagtcgggaggagagtcagcgcttaattgggcagcaagggttggtggacggcttattcctcgtgagggagagccagagaaacccccaggggttcgtacttagcctctgccaccttcagaaagtcaagcactacctgatcctcccctccgaggaggaaggccgtttgtatttctcaatggacgacggccagaccagatttacggacctgctacagttggtagagttccatcaactcaaccgcggtatcctaccgtgtctgctgaggcattgctgcacacgcgtcgcactctag

SEQ ID NO: 84286 - DNA, 1599 bp, Artificial Sequence
  derived and/or modified sequence
atggagctggacctgagccccccccacctgagcagcagccctgaggacctgtgcccagcccctggcaccccacctggcaccccccggcccccagacacccccctgcctgaggaggtgaagaggagccagcccctgctgatccccaccaccggcaggaagctgcgggaggaggagcggcgggccaccagcctgcccagcatccccaaccccttccctgagctgtgcagcccccccagccagagccccatcctgggcggccccagcagcgcccggggcctgctgcccagagatgccagccggccccacgtggtgaaggtgtacagtgaagatggagcctgccgctctgtggaggtggccgccggggccacagcccggcacgtgtgtgagatgctggtgcagagggcccacgccctgagtgatgagacctggggcctggtggagtgccacccccacctggccctggagcggggcctggaggaccatgaatctgtggtggaggtgcaggccgcctggcctgtgggcggggacagcagatttgtgttcaggaagaactttgccaagtatgagctgttcaagagcagcccccacagcctcttccctgagaagatggtgagcagctgcctggatgcccacacaggcatcagccatgaagatctcatccagaacttcctgaatgccggcagcttccctgagatccagggcttcctgcagctgcggggcagcggcaggaagctgtggaagcgcttcttctgcttcctgcggcgcagcggcctgtactacagcaccaagggcaccagcaaggaccccaggcacctgcagtatgtggctgatgtgaatgaaagcaatgtgtatgtggtgacccagggcaggaagctgtatggcatgcccacagactttggcttctgtgtgaagcccaacaagctgagaaatggccacaagggcctgcgcatcttctgcagtgaagatgagcagagcaggacctgctggctggccgccttccgcctcttcaagtatggagtgcagctgtacaagaactaccagcaggcccagagccgccacctgcaccccagctgcctgggcagcccccccctgcggagcgccagtgacaacaccctggtggccatggacttcagcggccatgctggccgggtgattgagaacccccgggaggccctgtctgtggccctggaggaggcccaggcctggaggaagaagaccaaccaccggctgagcctgcccatgcctgccagcggcaccagcctgtctgctgccatccacaggacccagctgtggttccacggccgcatcagccgggaggagagccagaggctgattggccagcagggcctggtggatggcctcttcctggtgcgggagagccagaggaacccccagggctttgtgctgagcctgtgccacctgcagaaggtgaagcactacctgatcctgcccagcgaggaggagggccgcctgtacttctccatggatgatggccagacccgcttcacagacctgctgcagctggtggagttccaccagctgaacagaggcatcctgccctgcctgctgcggcactgctgcaccagggtggccctgtag

SEQ ID NO: 84287 - DNA, 1599 bp, Artificial Sequence
  derived and/or modified sequence
atggagctggacctgagccccccccacctgagcagcagccccgaggacttgtgtcccgcacctggcaccccacctggaactccgagaccgccagacacaccactgcccgaagaagtcaagcgaagccagccgcttttgattccaacaaccgggcggaagctgagagaggaggaaaggcgcgcgacttcgctgccatctatccctaacccctttcccgagctgtgctcccctccgagtcagtcgcccatcttgggcggacctagcagcgccaggggcctgcttcctcgcgacgcatctaggccacacgtagtgaaagtctacagcgaagacggagcatgtaggtctgtcgaagtggcagctggagcgacagccaggcatgtgtgcgaaatgctcgtgcagagagcacatgccttatccgatgaaacttgggggctcgtggaatgtcatccacatttggcccttgaacgagggctggaggatcacgagtccgttgttgaggtgcaggcagcctggcccgtgggtggtgacagccgcttcgtcttccgaaagaacttcgccaagtacgaactgtttaaaagttccccccactcattgtttccagaaaaaatggtgtcctcctgtttggatgcccatacggggatctcccacgaggatctgatccagaacttcctgaatgccggctctttccccgaaatccagggatttctacagcttcggggtagtggaaggaaactctggaaacggttcttttgcttccttcggcggagcggcctctattattcgacaaagggtactagtaaagacccccgccacctgcagtatgtggcagatgtgaatgagtccaatgtgtatgtggttacccagggcagaaaactgtatgggatgccaaccgacttcggtttttgcgtaaaacctaacaaactgcgcaatggtcacaaaggcctgagaattttctgctccgaagacgagcaatctcgcacatgttggctcgcagcctttcggttgtttaagtatggcgtgcaactgtacaagaattaccaacaggcacagtcaaggcatctgcatccgtcctgcctggggtcaccacctctgcgtagcgcttccgataatacactcgtggcaatggattttagcggccacgccgggagagtgatcgagaatcctcgcgaagccttatcagtggccttagaggaggctcaggcgtggcgcaaaaagaccaatcaccgactgtctttgcccatgcccgcctctgggacctccctgagtgccgccatccaccgaacccaactttggttccacggccgtatcagccgggaagagtcccaaaggctgatcggtcagcagggactggtggatggtctgtttctggtccgtgagtctcagcgaaatccgcaaggcttcgtgttgagcctctgtcacttgcagaaagtgaaacactacttgattttaccttcagaagaagagggccggttgtatttctctatggacgacggccaaaccaggtttaccgatctgttgcaattagtggagtttcatcagctcaacagagggattcttccttgtctgctgcggcactgctgtacaagggtcgctttgtag

SEQ ID NO: 84288 - DNA, 1599 bp, Artificial Sequence
  derived and/or modified sequence
atggagctggacctgagccccccccacctgagcagcagccccgaggacctgtgtccagccccaggtacccccccagggacaccccggccccctgatacaccactgcccgaggaggtgaaaagaagtcagccattactgattcccactaccgggcgaaagttgcgtgaggaagaacgcagggctacctccctgcctagtatccccaatcccttccccgaattgtgctcacctccttctcagtcacctattcttggcggccctagctctgcaagaggcttactgccccgcgatgcatctcgcccccacgtggtgaaggtatactccgaggacggggcatgtagatccgtggaagttgctgcaggagcaaccgcccggcatgtatgcgagatgttagtccagcgggcacatgccctgagcgatgaaacttggggtctggtcgagtgccacccccacctggccctcgagcgcggcctggaagaccacgaatcggtcgtggaggtgcaggccgcgtggccagtggggggtgattcaagatttgtgttccgcaagaatttcgccaaatacgagctgttcaagagctcaccccatagcttatttcccgagaaaatggtcagctcctgcctggatgcccacacaggcatcagccatgaagacttgattcagaatttcctgaatgctgggtcttttcccgagattcagggattcctgcagttgaggggatctggaaggaaactttggaaacgcttcttttgttttctcaggcggagtggactttactacagcacaaaaggcactagcaaggacccgcgccaccttcagtatgtggccgatgtcaatgaaagcaacgtctatgtggtcacacaagggcggaagctgtatgggatgccaaccgactttgggttttgtgtgaaacctaacaagttacggaatggacacaaggggcttagaattttttgcagcgaagacgagcagtccaggacatgctggctggctgccttcaggctatttaaatacggcgtacaactgtacaagaattaccagcaggcccaatcaagacacctgcatccgtcttgtctggggtctccacccctgaggtcggcctcagataacactttggtggccatggacttcagtggacacgcgggcagggtgatcgaaaatccgagggaggccctgagtgtggcccttgaggaggcacaagcatggagaaagaaaacaaatcatcgtctgagtctaccgatgcccgcctctggcacctcgctgtccgctgcaatccatcgcacccagctctggttccacgggcgcatcagcagggaagaatcccaacggctgatcggccagcagggtttagtcgacggcctctttctggtcagagagtcccagcgcaatccgcagggtttcgtgctctcactctgccatttgcagaaggtgaaacattatctcatattgccgtccgaagaggaaggacggctctatttttccatggacgacggccaaactcgattcaccgaccttctccaacttgttgaatttcatcaacttaatagaggaattctgccctgtttattgagacactgttgtaccagagtagctctgtag

SEQ ID NO: 84289 - DNA, 1599 bp, Artificial Sequence
  derived and/or modified sequence
atggagctggacctgagccccccccacctgagcagcagccccgaggacctctgtccagctccaggcacccctcccggtactccaaggcccccggacactcccctgcccgaggaagtgaagagatctcagcccctgcttattcccaccacgggacggaaactcagagaggaagagcgaagggccacaagcctcccatctatcccaaatccatttccagaactgtgctcacctccctcacaatcccccattctgggtggaccgtcctcagcccgcgggctccttccccgagatgcatcacgaccccacgtggtgaaggtgtactctgaagacggcgcctgccggtctgtggaggttgccgcgggcgctacagccagacatgtatgcgagatgctagtgcaacgggcccacgcgcttagcgacgaaacttggggcctcgtagaatgtcatccccacctggctttagagcggggattggaggaccacgaatctgtggtggaggtgcaggccgcttggccagtcggtggggactcacgtttcgtcttcagaaaaaacttcgcaaaatatgagctcttcaagtcctcaccacattccctctttccagaaaagatggtatcctcttgccttgacgcccacacgggcatctcccacgaagatctgattcagaatttcttaaatgctgggtctttcccggagatccaaggcttccttcagttgagaggtagcggccggaagctgtggaagcgcttcttctgttttcttcgccggtcaggtctctactacagtaccaagggtacgtctaaggaccccagacacttacagtacgtggctgacgtaaatgaaagcaacgtgtacgtcgtcactcaaggcaggaagctttacggcatgcccacagatttcggattctgcgtgaagcctaacaaactgagaaacggccataaaggattaagaatattttgctctgaagacgaacaaagtcggacctgctggctggcagccttccggctgtttaaatacggcgtccaactgtataagaattatcagcaagcacagagcagacatctgcacccgagctgcctcggatctcctccattgcgcagtgcctcagacaatactttggtagcgatggattttagcggacacgcgggccgggtgattgagaacccccgagaagccctgtctgtggccttagaagaggcccaggcatggcgaaaaaagaccaaccataggttgagcctgcccatgcccgcctcaggaacatcacttagcgccgccatccataggactcagctctggttccacggccgaatctcaagggaggagagccagaggttgatcgggcagcaaggcttggtggacgggctgtttcttgtccgcgagagtcagaggaacccacagggatttgtgttatccctgtgccatcttcagaaagttaagcactatcttattcttccaagtgaggaagaaggaagactgtacttcagcatggatgatgggcagaccaggttcaccgacctcttgcagctggtggagtttcatcaactgaatcgcggcatactcccctgcctcctgaggcattgttgcacaagagttgctctttag

SEQ ID NO: 84290 - DNA, 1599 bp, Artificial Sequence
  derived and/or modified sequence
atggagctggacctctctccgccacacctgtcttcttcacccgaggatctgtgccctgctcccggaacaccacccggtacacctcgcccacccgatacccctctaccagaggaagttaaaagatcacagccccttttgatccctactaccggcagaaaactcagagaagaagaacgcagggccacttcgctaccctcgatccctaacccttttccagaattgtgtagccccccatctcaatcccctattctcgggggaccatcttccgcacggggattgctgccaagagatgctagtcgacctcatgtagtgaaggtttattctgaagacggtgcatgccgctcggttgaggtggcagccggagccaccgcaaggcacgtgtgtgagatgttagtgcagagggcccatgccctatccgacgaaacctggggattagtggaatgccatccgcatcttgccctcgagaggggtttagaagaccatgagagcgtggtcgaagttcaagctgcttggcccgttggaggcgattcccgctttgtcttcaggaaaaactttgcgaagtatgaattgttcaagagttcaccccatagcctgttccccgagaagatggtctccagctgtctagatgcccatacagggattagtcatgaggacctgatccaaaactttctgaatgctggcagtttccctgagatccagggcttcctgcagcttagggggagcggacgaaaactgtggaaaaggttcttttgtttcctacgccgaagcggcctctactatagtactaagggcacatctaaggatccgagacacctgcagtatgtagctgatgtgaacgaatcaaatgtctacgtggtaactcagggacgcaaactttacggaatgccaactgacttcggcttttgtgtcaaaccaaataaactacggaatggacataaaggcctccggatcttttgcagcgaggacgagcagagtcgaacgtgttggctagctgccttcagactgttcaagtatggcgtgcaactttacaagaactaccagcaggctcagagcagacatttgcacccaagttgcttggggtcaccacctctgcgtagtgcttcggataatactctagtagctatggacttttcaggacacgcagggcgtgtgattgagaatccaagagaggcgctgagcgttgcactagaagaggcccaggcctggagaaaaaaaacgaatcatagactgagcttgcccatgccagcttccgggacatcgctgagtgcagcaatccatcgcacccaactttggttccacggcagaatttcacgagaggagagccaacgactaatagggcagcaaggcctggtggacggcctcttcctggtgcgtgaatcgcagcgaaatcctcaaggatttgtgctatccctatgccacttgcagaaagttaaacactatcttatcctgccctctgaggaagaaggcagattgtactttagtatggatgacggccaaacaaggttcacagacctgctgcagctggtcgagttccaccagctgaatcgagggatcctgccttgcttgctgaggcactgctgcacaagagtggcactgtag

SEQ ID NO: 84291 - DNA, 1599 bp, Artificial Sequence
  derived and/or modified sequence
atggaactggacttgagccccccacatttgagcagcagcccagaagacctttgccctgctcctgggacccccccaggaacaccacggcctcctgatacacctctgcctgaggaagttaaacgatctcagcctctgctgataccgactacaggtagaaaactacgcgaagaggagcgccgtgccaccagcttgcctagcatccccaacccgtttcctgaactgtgctcccctccgagccagtctccaatcctggggggaccctcaagcgcaaggggcctgttgccaagagacgcaagtcgtcctcacgtggtgaaggtctattcggaagacggcgcttgtcgcagtgtggaggttgctgctggcgcaacggcgcgtcatgtttgcgaaatgttggtgcagcgagctcacgccctctcggatgagacctggggcttagtggaatgtcatcctcacctggccctggagagggggctggaggatcacgagtctgtggttgaggtgcaggccgcttggccagttggcggagacagccgtttcgttttcagaaaaaacttcgctaagtacgaattgtttaaaagcagtcctcactctctgttccccgaaaagatggtaagttcgtgcctggatgcacataccggcatcagccacgaggatctgatccagaacttcctaaatgcaggcagcttccctgagattcagggctttctgcagttgagaggttcggggcgtaagttgtggaaacgctttttctgtttcctgaggaggtccggcctatactattctaccaagggtaccagcaaagatcctagacatctgcaatatgttgctgatgtgaacgaaagcaatgtctatgttgtgacacaaggaaggaagctatatgggatgcctactgacttcggcttctgcgttaaaccaaataagctccgcaatgggcataaaggattaagaatcttctgttctgaggatgagcagtcccgtacctgctggctggctgcgtttcggctgtttaaatacggtgtccagctctacaaaaactatcaacaggcccaatctcgccatctccaccccagttgtctgggttccccaccacttcgctcagcgtctgataacaccctggttgccatggacttctccggtcatgcagggcgtgtcatagagaacccgagagaagcactgtcggtggccttggaggaggcacaggcctggcggaagaagactaaccataggctgtcactgcccatgcctgccagcggcacatctctttcagccgcaatccacaggacacagctttggtttcacgggcgaatatctcgcgaggagtcccaacggctgattgggcaacagggcctggtggacggcttatttctcgtgagagagtcacagcgcaacccccaaggttttgtgctgtcactctgccacctacaaaaagtgaagcattatttgatcctgccatctgaggaagaggggagattatatttcagtatggatgatggccagactagattcaccgacctcctgcagctggtggaatttcaccagttgaaccggggaatcctcccttgcctgttgcgccactgctgcactagagtggccctgtag

SEQ ID NO: 84292 - DNA, 1599 bp, Artificial Sequence
  derived and/or modified sequence
atggagttggatctgagtccgccacacctgtcttcatcaccagaagatttgtgcccagccccagggactcctccaggcacgcctcgtcctcccgacacaccattgccggaagaggtcaaacgcagtcaacctctgcttattccaacaactggtcgaaagctcagagaggaagaaaggcgcgcaacaagcttacccagcatcccaaacccatttcctgaactatgctcccccccttctcagtcacctatcttggggggtccaagctctgctaggggactattgcccagagacgcaagcagaccccacgttgtgaaggtgtactccgaggacggggcttgccggtctgttgaggttgccgctggcgctacagcgaggcacgtatgcgagatgctcgtccagagagcacatgcccttagtgacgaaacctggggtctggtcgaatgccacccacatctggccctcgagagggggctggaagaccacgagtcggtggtggaagtgcaggcagcatggccagttggaggcgacagccgatttgtgtttagaaagaacttcgccaagtacgaacttttcaagagttccccccatagcctttttcctgaaaaaatggtctcctcttgcctcgatgcccatacaggcatctcccatgaagacctcatacagaacttcctgaatgccggaagctttccagagattcagggatttctgcaattgagaggaagcggacgcaaactgtggaaaagatttttttgctttctgaggcgtagtgggctctattacagtaccaaaggcaccagtaaggatccaagacacttacagtatgttgcagacgtgaacgaaagcaatgtctacgtggtcactcagggcaggaagctctacgggatgcctaccgacttcggattttgcgttaaaccaaacaaactgagaaacgggcacaaagggctgagaattttttgctccgaagatgagcaaagccgcacctgttggctggcggctttccgactttttaaatatggcgtgcagttgtataaaaactaccaacaagcacaatccagacacctgcatccatcatgccttggcagcccgccacttaggtctgccagtgacaacaccctagtggcgatggacttcagcggtcacgcaggacgcgtaattgaaaaccccagagaggccctgtccgtggccctggaggaggctcaagcctggcgcaagaagacaaatcataggcttagtctgccgatgcctgcctcagggaccagcctgtctgctgccatacatagaactcaactgtggttccacggccgaattagtcgtgaagagtcacaacgtctgatagggcaacaggggctagtggacggcttgtttctggtgcgggagagccagaggaacccgcagggcttcgtactctccttatgccacctccagaaggtgaagcattatctcatactgccctcagaagaagagggacgcttatatttttcaatggacgatggccagaccaggttcacagatctgctgcaactcgtcgagtttcaccagcttaacagagggatcttaccttgcctcctgcgtcactgctgcacaagggtagccctctag

SEQ ID NO: 84293 - DNA, 1599 bp, Artificial Sequence
  derived and/or modified sequence
atggagctggacctgagccccccccacctgagcagcagccccgaggacctgtgccccgcccccggcaccccccccggcacccccagaccccccgacacccccctgcccgaggaggtgaagagaagccagcccctgctgatccccaccaccggcagaaagctgagagaggaggagagaagagccaccagcctgcccagcatccccaaccccttccccgagctgtgcagcccccccagccagagccccatcctgggcggccccagcagcgccagaggcctgctgcccagagacgccagcagaccccacgtggtgaaggtgtacagcgaggacggcgcctgcagaagcgtggaggtggccgccggcgccaccgccagacacgtgtgcgagatgctggtgcagagagcccacgccctgagcgacgagacctggggcctggtggagtgccacccccacctggccctggagagaggcctggaggaccacgagagcgtggtggaggtgcaggccgcctggcccgtgggcggcgacagcagattcgtgttcagaaagaacttcgccaagtacgagctgttcaagagcagcccccacagcctgttccccgagaagatggtgagcagctgcctggacgcccacaccggcatcagccacgaggacctgatccagaacttcctgaacgccggcagcttccccgagatccagggcttcctgcagctgagaggcagcggcagaaagctgtggaagagattcttctgcttcctgagaagaagcggcctgtactacagcaccaagggcaccagcaaggaccccagacacctgcagtacgtggccgacgtgaacgagagcaacgtgtacgtggtgacccagggcagaaagctgtacggcatgcccaccgacttcggcttctgcgtgaagcccaacaagctgagaaacggccacaagggcctgagaatcttctgcagcgaggacgagcagagcagaacctgctggctggccgccttcagactgttcaagtacggcgtgcagctgtacaagaactaccagcaggcccagagcagacacctgcaccccagctgcctgggcagcccccccctgagaagcgccagcgacaacaccctggtggccatggacttcagcggccacgccggcagagtgatcgagaaccccagagaggccctgagcgtggccctggaggaggcccaggcctggagaaagaagaccaaccacagactgagcctgcccatgcccgccagcggcaccagcctgagcgccgccatccacagaacccagctgtggttccacggcagaatcagcagagaggagagccagagactgatcggccagcagggcctggtggacggcctgttcctggtgagagagagccagagaaacccccagggcttcgtgctgagcctgtgccacctgcagaaggtgaagcactacctgatcctgcccagcgaggaggagggcagactgtacttcagcatggacgacggccagaccagattcaccgacctgctgcagctggtggagttccaccagctgaacagaggcatcctgccctgcctgctgagacactgctgcaccagagtggccctgtag

SEQ ID NO: 84294 - protein, 227 aa, Artificial Sequence [sequence omitted]

SEQ ID NO: 84295 - protein, 59 aa, Artificial Sequence
  derived and/or modified sequence
MNQSIPVAPTPPRRVRLKPWLVAQVNSCQYPGLQWVNGEKKLFCIPWRHATRHGPSQDG

SEQ ID NO: 84296 - protein, 141 aa, Artificial Sequence
  derived and/or modified sequence
MNQSIPVAPTPPRRVRLKPWLVAQVNSCQYPGLQWVNGEKKLFCIPWRHATRHGPSQDGDNTIFKAWAKETGKYTEGVDEADPAKWKANLRCALNKSRDFRLIYDGPRDMPPQPYKIYEVCSNGPAPTDSQPPEDYSFGAG

SEQ ID NO: 84297 - protein, 412 aa, Artificial Sequence
  derived and/or modified sequence
MNQSIPVAPTPPRRVRLKPWLVAQVNSCQYPGLQWVNGEKKLFCIPWRHATRHGPSQDGDNTIFKAWAKETGKYTEGVDEADPAKWKANLRCALNKSRDFRLIYDGPRDMPPQPYKIYEVCSNGPAPTDSQPPEDYSFGAGEEEEEEEELQRMLPSLSLTVTDLEIKFQYRGRPPRALTISNPHGCRLFYSQLEATQEQVELFGPISLEQVRFPSPEDIPSDKQRFYTNQLLDVLDRGLILQLQGQDLYAIRLCQCKVFWSGPCASAHDSCPNPIQREVKTKLFSLEHFLNELILFQKGQTNTPPPFEIFFCFGEEWPDRKPREKKLITVQVVPVAARLLLEMFSGELSWSADSIRLQISNPDLKDRMVEQFKELHHIWQSQQRLQPVAQAPPGAGLGVGQGPWPMHPAGMQ

SEQ ID NO: 84298 - DNA, 684 bp, Artificial Sequence
  derived and/or modified sequence
atgaaccagagcatccccgtggcccccaccccccccagaagagtgagactgaagccctggctggtggcccaggtgaacagctgccagtaccccggcctgcagtgggtgaacggcgagaagaagctgttctgcatcccctggagacacgccaccagacacggccccagccaggacggcgacaacaccatcttcaaggcctgggccaaggagaccggcaagtacaccgagggcgtggacgaggccgaccccgccaagtggaaggccaacctgagatgcgccctgaacaagagcagagacttcagactgatctacgacggccccagagacatgcccccccagccctacaagatctacgaggtgtgcagcaacggccccgcccccaccgacagccagccccccgaggactacagcttcggcgccggcgaggaggaggaggaggaggaggagagaatgagcagcggcagacccctgtgcagcagacccctgtgcggcagactgctgtgcagcagacccctgtgcagcagaccctggtgctgggtgcccctgctgcagacccccgccccctggctgctgcccctggccaccctgctggccagcggcagcttcagcctgagaagctggagcctgggcccctgcctgcccgcctgccccctgcaggccaacagcagctgccagacctgctag

SEQ ID NO: 84299 - DNA, 474 bp, Artificial Sequence
  derived and/or modified sequence
atgaaccagagcatccccgtggcccccaccccccccagaagagtgagactgaagccctggctggtggcccaggtgaacagctgccagtaccccggcctgcagtgggtgaacggcgagaagaagctgttctgcatcccctggagacacgccaccagacacggccccagccaggacggcgacaacaccatcttcaaggcctgggccaaggagaccggcaagtacaccgagggcgtggacgaggccgaccccgccaagtggaaggccaacctgagatgcgccctgaacaagagcagagacttcagactgatctacgacggccccagagacatgcccccccagccctacaagatctacgaggtgtgcagcaacggccccgcccccaccgacagccagccccccgaggactacagcttcggcgccggcgaggaggaggaggaggaggaggagatgcagtgcagcctggcccccacctag

SEQ ID NO: 84300 - DNA, 321 bp, Artificial Sequence
  derived and/or modified sequence
atgaaccagagcatccccgtggcccccaccccccccagaagagtgagactgaagccctggctggtggcccaggtgaacagctgccagtaccccggcctgcagtgggtgaacggcgagaagaagctgttctgcatcccctggagacacgccaccagacacggccccagccaggacggcgacaacaccatcttcaaggcctgggccaaggagaccggcaagtacaccgagggcgtggacgaggccgaccccgccaagtggaaggccaacctgagatgcgccctgaacaagagcagagacttcagactgatctacgacggctag

SEQ ID NO: 84301 - DNA, 180 bp, Artificial Sequence
  derived and/or modified sequence
atgaaccagagcatccccgtggcccccaccccccccagaagagtgagactgaagccctggctggtggcccaggtgaacagctgccagtaccccggcctgcagtgggtgaacggcgagaagaagctgttctgcatcccctggagacacgccaccagacacggccccagccaggacggctag

SEQ ID NO: 84302 - DNA, 426 bp, Artificial Sequence
  derived and/or modified sequence
atgaaccagagcatccccgtggcccccaccccccccagaagagtgagactgaagccctggctggtggcccaggtgaacagctgccagtaccccggcctgcagtgggtgaacggcgagaagaagctgttctgcatcccctggagacacgccaccagacacggccccagccaggacggcgacaacaccatcttcaaggcctgggccaaggagaccggcaagtacaccgagggcgtggacgaggccgaccccgccaagtggaaggccaacctgagatgcgccctgaacaagagcagagacttcagactgatctacgacggccccagagacatgcccccccagccctacaagatctacgaggtgtgcagcaacggccccgcccccaccgacagccagccccccgaggactacagcttcggcgccggctag

SEQ ID NO: 84303 - DNA, 459 bp, Artificial Sequence
  derived and/or modified sequence
atgaaccagagcatccccgtggcccccaccccccccagaagagtgagactgaagccctggctggtggcccaggtgaacagctgccagtaccccggcctgcagtgggtgaacggcgagaagaagctgttctgcatcccctggagacacgccaccagacacggccccagccaggacggcgacaacaccatcttcaaggcctgggccaaggagaccggcaagtacaccgagggcgtggacgaggccgaccccgccaagtggaaggccaacctgagatgcgccctgaacaagagcagagacttcagactgatctacgacggccccagagacatgcccccccagccctacaagatctacgaggtgtgcagcaacggccccgcccccaccgacagccagccccccgaggactacagcttcggcgccggcgaggaggaggaggaggaggaggaggtgagcgtgtag

SEQ ID NO: 84304 - DNA, 1239 bp, Artificial Sequence
  derived and/or modified sequence
atgaaccagagcatccccgtggcccccaccccccccagaagagtgagactgaagccctggctggtggcccaggtgaacagctgccagtaccccggcctgcagtgggtgaacggcgagaagaagctgttctgcatcccctggagacacgccaccagacacggccccagccaggacggcgacaacaccatcttcaaggcctgggccaaggagaccggcaagtacaccgagggcgtggacgaggccgaccccgccaagtggaaggccaacctgagatgcgccctgaacaagagcagagacttcagactgatctacgacggccccagagacatgcccccccagccctacaagatctacgaggtgtgcagcaacggccccgcccccaccgacagccagccccccgaggactacagcttcggcgccggcgaggaggaggaggaggaggaggagctgcagagaatgctgcccagcctgagcctgaccgtgaccgacctggagatcaagttccagtacagaggcagaccccccagagccctgaccatcagcaacccccacggctgcagactgttctacagccagctggaggccacccaggagcaggtggagctgttcggccccatcagcctggagcaggtgagattccccagccccgaggacatccccagcgacaagcagagattctacaccaaccagctgctggacgtgctggacagaggcctgatcctgcagctgcagggccaggacctgtacgccatcagactgtgccagtgcaaggtgttctggagcggcccctgcgccagcgcccacgacagctgccccaaccccatccagagagaggtgaagaccaagctgttcagcctggagcacttcctgaacgagctgatcctgttccagaagggccagaccaacacccccccccccttcgagatcttcttctgcttcggcgaggagtggcccgacagaaagcccagagagaagaagctgatcaccgtgcaggtggtgcccgtggccgccagactgctgctggagatgttcagcggcgagctgagctggagcgccgacagcatcagactgcagatcagcaaccccgacctgaaggacagaatggtggagcagttcaaggagctgcaccacatctggcagagccagcagagactgcagcccgtggcccaggccccccccggcgccggcctgggcgtgggccagggcccctggcccatgcaccccgccggcatgcagtag

SEQ ID NO: 84305 - DNA, 684 bp, Artificial Sequence
  derived and/or modified sequence
atgaatcagagcatccctgttgctcctacaccgccccgccgggtgagactcaaaccatggctggtggcccaagtcaattcctgccagtaccccgggttgcagtgggtcaatggagaaaaaaagctgttttgcatcccctggagacatgccacccggcacggacctagccaggacggcgacaacaccatctttaaagcttgggctaaagagacaggaaaatataccgagggagtggatgaagctgaccctgccaagtggaaagccaatctccggtgtgcccttaacaagtctagagatttccgtctgatctacgatgggcctcgtgacatgccgcctcaaccctacaagatctacgaggtctgctcaaatggaccagcgccgaccgacagtcagccacccgaggattattctttcggggctggcgaagaggaagaagaggaggaagagagaatgtcttccggcagacctctgtgctctcggcccttgtgtggacggttgctatgtagccggcctctatgctctagaccctggtgctgggttcccctactccagacacctgctccatggctgctgcctttggctactctcttggcctccggatccttctcacttcgaagctggagtttgggcccctgcctgcccgcatgtcccctccaggcgaattcaagttgccaaacatgctag

SEQ ID NO: 84306 - DNA, 474 bp, Artificial Sequence
  derived and/or modified sequence
atgaatcagtctattcctgtagcacccactcccccccgtagagtgcggcttaagccctggcttgtggcccaggtgaattcttgtcaatatccaggactgcaatgggtgaatggggagaagaaactattctgtataccctggaggcacgccacacgccacggcccgtctcaggatggggacaacaccatattcaaggcttgggccaaagagaccggcaagtacacagagggagtggacgaagctgaccctgctaaatggaaggccaatctcagatgcgcactgaacaaatcccgagattttcgcctcatttatgacggcccacgggatatgccaccccagccatataagatttacgaggtgtgcagcaacggaccagctccaacggattcccagcctccagaagactacagcttcggcgctggggaagaggaggaagaggaggaggaaatgcagtgttctctcgcgcccacctag

SEQ ID NO: 84307 - DNA, 321 bp, Artificial Sequence
  derived and/or modified sequence
atgaatcagagcatccctgtcgctcccacccctcccagacgggtaagactcaagccctggttagtggcccaggtcaacagctgtcagtacccaggcctgcagtgggtcaacggggaaaaaaagctgttctgcattccctggcggcacgctacccgccacggcccctcacaggacggagataacacgattttcaaggcttgggctaaggagactggtaagtataccgagggagtagacgaggctgacccagccaaatggaaagccaacctgaggtgcgccctgaataagtcccgggacttccggttaatttatgatggttag

SEQ ID NO: 84308 - DNA, 180 bp, Artificial Sequence
  derived and/or modified sequence
atgaaccagtctatcccggttgcccccacaccccctcgcagagtccgtttaaagccctggctggtcgctcaggtgaactcctgccagtaccctggcttgcagtgggtcaatggtgaaaaaaaactgttctgtataccatggcgacatgctacccgccatggtccttctcaagacggatag

SEQ ID NO: 84309 - DNA, 426 bp, Artificial Sequence
  derived and/or modified sequence
atgaaccagtcaatcccggtggctccaacaccaccaagacgcgtccggttgaaaccatggcttgtggcccaggttaactcttgccaatatcctgggctccaatgggtgaatggggagaagaaactcttctgcatcccatggcgtcatgcaacccggcacggacccagtcaggacggagacaacactatctttaaggcctgggcaaaggagaccgggaaatacactgaaggggtggatgaggctgatcctgcaaagtggaaggctaacctgaggtgcgctctaaacaagagccgggattttagactgatctatgacggacctcgcgatatgccacctcaaccgtataagatttacgaagtgtgtagtaacggccctgcaccaacagattcccaacccccagaggattattcttttggagcgggctag

SEQ ID NO: 84310 - DNA, 459 bp, Artificial Sequence
  derived and/or modified sequence
atgaaccaaagcatcccagtggctcctaccccccctcgccgggtgcggcttaaaccctggttggtcgctcaggtgaatagttgccagtacccgggccttcaatgggtcaacggcgaaaaaaagcttttctgtataccatggaggcatgccacgaggcacggcccgtctcaagatggagataacacaatctttaaagcttgggccaaggagaccggcaagtacacagaaggggttgatgaagccgatcctgccaagtggaaggcaaacctccgatgcgccctgaataagtctcgggatttccgcctaatatatgacggaccacgggatatgcctccacagccatataagatctatgaagtatgtagtaacggccctgctcctacagacagccagccaccagaggactactccttcggagctggagaagaggaggaggaggaggaggaggtgagtgtgtag

SEQ ID NO: 84311 - DNA, 1239 bp, Artificial Sequence
  derived and/or modified sequence
atgaaccagtcgattccggtggcgcctactcccccccgcagggtcaggctaaagccttggttggtcgcccaggtgaactcttgtcaataccccggattgcaatgggtgaatggggagaagaaattgttctgtatcccgtggaggcatgccactagacacggcccctcacaggacggcgacaataccatttttaaagcatgggctaaagagacgggaaaatacactgagggcgtcgatgaggctgacccggccaaatggaaggctaacctgagatgcgccttaaataagtcaagagacttcagactaatatacgacgggccaagagatatgccgcctcaaccatataaaatctatgaagtctgttcaaacggaccagctcccaccgactcacaacctcccgaggactattcctttggagctggcgaagaagaagaagaagaagaagagttgcaaagaatgcttcctagtctgagcctcactgtcactgacttagaaatcaaatttcagtaccgggggcgaccccccagggcgctgaccatctctaaccctcatggctgcaggctcttttactcccaactcgaagctacacaagagcaggtggagctgtttggtcctatctccctggagcaggtccggtttcccagccctgaggacatcccgtcagataagcaacgattctatacaaatcagctgctggacgttctggatcgcggactgatacttcagcttcaggggcaggatctgtacgcgatccgactgtgccagtgcaaagtcttctggtccgggccatgcgcctccgcacacgacagttgtccaaatcctatccaaagggaagtgaagacaaaactctttagcctggagcacttcctcaatgaactcatcttatttcagaaaggccagacaaacacaccgccccccttcgaaatattcttctgcttcggggaagaatggccagataggaagccccgggagaagaagctgattactgtgcaggtggtccccgtcgcagccagactgctgctggagatgttctctggtgaactcagctggtctgctgattccattagactgcagatcagcaacccggacctgaaagatcggatggtcgagcagtttaaggagcttcaccacatttggcagagccagcagcggctgcagcctgtggcccaagccccccccggcgccggattaggggtgggacagggcccttggcccatgcacccagcaggcatgcagtag

SEQ ID NO: 84312 - DNA, 684 bp, Artificial Sequence
  derived and/or modified sequence
atgaaccagagcatccctgtggcccccaccccaccaagaagagtgcggctgaagccctggctggtggcccaggtgaacagctgccagtacccaggcctgcagtgggtgaatggagagaagaagctgttctgcatcccctggaggcatgccaccaggcatggccccagccaggatggagacaacaccatcttcaaggcctgggccaaggagaccgggaagtacacagaaggagtggatgaagctgaccctgccaagtggaaggccaacctgcgctgtgccctgaacaagagccgggacttccgcctcatctatgatggcccccgggacatgccaccccagccctacaagatctatgaggtgtgcagcaatggacctgcccccacagacagccagcccccagaggactacagctttggagctggggaggaggaggaggaggaggaggagaggatgagcagcggccggcccctgtgcagccggcccctgtgtggccgcctgctgtgcagccggcccctgtgcagccggccctggtgctgggtgcccctgctgcagaccccagccccctggctgctgcccctggccaccctgctggccagcggcagcttcagcctgcgctcctggagcctgggcccctgcctgcctgcctgccccctgcaggccaacagcagctgccagacctgctag

SEQ ID NO: 84313 - DNA, 474 bp, Artificial Sequence
  derived and/or modified sequence
atgaaccagagcatccctgtggcccccaccccaccaagaagagtgcggctgaagccctggctggtggcccaggtgaacagctgccagtacccaggcctgcagtgggtgaatggagagaagaagctgttctgcatcccctggaggcatgccaccaggcatggccccagccaggatggagacaacaccatcttcaaggcctgggccaaggagaccgggaagtacacagaaggagtggatgaagctgaccctgccaagtggaaggccaacctgcgctgtgccctgaacaagagccgggacttccgcctcatctatgatggcccccgggacatgccaccccagccctacaagatctatgaggtgtgcagcaatggacctgcccccacagacagccagcccccagaggactacagctttggagctggggaggaggaggaggaggaggaggagatgcagtgcagcctggcccccacctag

SEQ ID NO: 84314 - DNA, 321 bp, Artificial Sequence
  derived and/or modified sequence
atgaaccagagcatccctgtggcccccaccccaccaagaagagtgcggctgaagccctggctggtggcccaggtgaacagctgccagtacccaggcctgcagtgggtgaatggagagaagaagctgttctgcatcccctggaggcatgccaccaggcatggccccagccaggatggagacaacaccatcttcaaggcctgggccaaggagaccgggaagtacacagaaggagtggatgaagctgaccctgccaagtggaaggccaacctgcgctgtgccctgaacaagagccgggacttccgcctcatctatgatggatag

SEQ ID NO: 84315 - DNA, 180 bp, Artificial Sequence
  derived and/or modified sequence
atgaaccagagcatccctgtggcccccaccccaccaagaagagtgcggctgaagccctggctggtggcccaggtgaacagctgccagtacccaggcctgcagtgggtgaatggagagaagaagctgttctgcatcccctggaggcatgccaccaggcatggccccagccaggacggctag

SEQ ID NO: 84316 - DNA, 426 bp, Artificial Sequence
  derived and/or modified sequence
atgaaccagagcatccctgtggcccccaccccaccaagaagagtgcggctgaagccctggctggtggcccaggtgaacagctgccagtacccaggcctgcagtgggtgaatggagagaagaagctgttctgcatcccctggaggcatgccaccaggcatggccccagccaggatggagacaacaccatcttcaaggcctgggccaaggagaccgggaagtacacagaaggagtggatgaagctgaccctgccaagtggaaggccaacctgcgctgtgccctgaacaagagccgggacttccgcctcatctatgatggcccccgggacatgccaccccagccctacaagatctatgaggtgtgcagcaatggacctgcccccacagacagccagcccccagaggactacagctttggagctggatag

SEQ ID NO: 84317 - DNA, 459 bp, Artificial Sequence
  derived and/or modified sequence
atgaaccagagcatccctgtggcccccaccccaccaagaagagtgcggctgaagccctggctggtggcccaggtgaacagctgccagtacccaggcctgcagtgggtgaatggagagaagaagctgttctgcatcccctggaggcatgccaccaggcatggccccagccaggatggagacaacaccatcttcaaggcctgggccaaggagaccgggaagtacacagaaggagtggatgaagctgaccctgccaagtggaaggccaacctgcgctgtgccctgaacaagagccgggacttccgcctcatctatgatggcccccgggacatgccaccccagccctacaagatctatgaggtgtgcagcaatggacctgcccccacagacagccagcccccagaggactacagctttggagctggggaggaggaggaggaggaggaggaggtgtctgtgtag

SEQ ID NO: 84318 - DNA, 1239 bp, Artificial Sequence
  derived and/or modified sequence
atgaaccagagcatccctgtggcccccaccccaccaagaagagtgcggctgaagccctggctggtggcccaggtgaacagctgccagtacccaggcctgcagtgggtgaatggagagaagaagctgttctgcatcccctggaggcatgccaccaggcatggccccagccaggatggagacaacaccatcttcaaggcctgggccaaggagaccgggaagtacacagaaggagtggatgaagctgaccctgccaagtggaaggccaacctgcgctgtgccctgaacaagagccgggacttccgcctcatctatgatggcccccgggacatgccaccccagccctacaagatctatgaggtgtgcagcaatggacctgcccccacagacagccagcccccagaggactacagctttggagctggggaggaggaggaggaggaggaggagctgcagaggatgctgcccagcctgagcctgactgtgacagacctggagatcaagttccagtaccggggccggcccccccgggccctgaccatcagcaacccccacggctgccgcctcttctacagccagctggaggccacccaggagcaggtggagctgtttggccccatcagcctggagcaggtgcgcttccccagccctgaggacatccccagcgacaagcagcgcttctacaccaaccagctgctggatgtgctggaccggggcctcatcctgcagctgcagggccaggacctgtatgccatccggctgtgccagtgcaaggtgttctggagcggcccctgtgccagcgcccatgacagctgccccaaccccatccagcgggaggtgaagaccaagctgttcagcctggagcacttcctgaatgaactcatcctcttccagaagggccagaccaacaccccacctccatttgagatcttcttctgctttggagaggagtggccagacaggaagccccgggagaagaagctgatcaccgtgcaggtggtgcctgtggccgcccggctgctgctggagatgttttctggagagctgtcctggagcgctgacagcatccggctgcagatcagcaacccagacctgaaggacaggatggtggagcagttcaaggagctgcaccacatctggcagagccagcagaggctgcagcctgtggcccaggcccctcctggagctggcctgggcgtgggccagggcccctggcccatgcaccctgctggcatgcagtag

SEQ ID NO: 84319 - DNA, 514 bp, Artificial Sequence
  derived and/or modified sequence
gtccagctgcgcctggaaagcgagctcggacccctctgccatgaaccagtccatcccagtggctcccaccccaccccgccgcgtgcggctgaagccctggctggtggcccaggtgaacagctgccagtacccagggcttcaatgggtcaacggggaaaagaaattattctgcatcccctggaggcatgccacaaggcatggtcccagccaggacggagataacaccatcttcaaggcctgggccaaggagacagggaaatacaccgaaggcgtggatgaagccgatccggccaagtggaaggccaacctgcgctgtgcccttaacaagagccgggacttccgcctcatctacgacgggccccgggacatgccacctcagccctacaagatctacgaggtctgctccaatggccctgctcccacagactcccagccccctgaggattactcttttggtgcaggagaggaggaggaagaagaggaagagatgcagtgcagtctggcccccacatga

SEQ ID NO: 84320 - DNA, 553 bp, Artificial Sequence
  derived and/or modified sequence
agcctgggcagagctcagcttggtcccgccgcccggccggtgctccctggcgcagccacgcaggcgcaccgcagacagccttcctaacaggctccggcaggcgttagggccttcctaagtgctacccgaatgcgtgtccagtgggaggagaagggggaggaccaagaacctagatgaatggccctagagaggtaacatctgtttggtgcctgctgtcattggagacccctctgccatgaaccagtccatcccagtggctcccaccccaccccgccgcgtgcggctgaagccctggctggtggcccaggtgaacagctgccagtacccagggcttcaatgggtcaacggggaaaagaaattattctgcatcccctggaggcatgccacaaggcatggtcccagccaggacggagataacaccatcttcaaggcctgggccaaggagacagggaaatacaccgaaggcgtggatgaagccgatccggccaagtggaaggccaacctgcgctgtgcccttaacaagagccgggacttccgcctcatctacgacggg

SEQ ID NO: 84321 - DNA, 560 bp, Artificial Sequence
  derived and/or modified sequence
attaaacagccgtgttgggcagggccagactgctggactgacagtagggggcaggcagccggaccctctgagctccccaacggcaccagcgcctgcacggcctcagcccagggggtcattagggaagctctccccgattctgtgcagacagagcttcctctgtccacccttgctcggccagaattgtgtgccgctggtgactggcacccctctattctagggccaaggcctctcaggggtctacagatacaactatggccttcctaacaggctccggcaggcgttagggccttcctaagtgctacccgaatgcgtgtccagtgggaggagaagggggaggaccaagaacctagatgaatggccctagagagacccctctgccatgaaccagtccatcccagtggctcccaccccaccccgccgcgtgcggctgaagccctggctggtggcccaggtgaacagctgccagtacccagggcttcaatgggtcaacggggaaaagaaattattctgcatcccctggaggcatgccacaaggcatggtcccagccaggacggag

SEQ ID NO: 84322 - DNA, 637 bp, Artificial Sequence
  derived and/or modified sequence
cgggaggcgcagcctgggcagagctcagcttggtcccgccgcccggccggtgctccctggcgcagccacgcaggcgcaccgcagacagccttcctaacaggctccggcaggcgttagggccttcctaagtgctacccgaatgcgtgtccagtgggaggagaagggggaggaccaagaacctagatgaatggccctagagagacccctctgccatgaaccagtccatcccagtggctcccaccccaccccgccgcgtgcggctgaagccctggctggtggcccaggtgaacagctgccagtacccagggcttcaatgggtcaacggggaaaagaaattattctgcatcccctggaggcatgccacaaggcatggtcccagccaggacggagataacaccatcttcaaggcctgggccaaggagacagggaaatacaccgaaggcgtggatgaagccgatccggccaagtggaaggccaacctgcgctgtgcccttaacaagagccgggacttccgcctcatctacgacgggccccgggacatgccacctcagccctacaagatctacgaggtctgctccaatggccctgctcccacagactcccagccccctgaggattactcttttggtgcaggaga

SEQ ID NO: 84323 - DNA, 689 bp, Artificial Sequence
  derived and/or modified sequence
ctcatttgtgtgcagccccggaggaccagagtggggaagcaccccaccctctcccagggcccaactgagcactgcagcgggaggtacggggttgtcaaatgacagttttgccattccagattgccaaaagagccagtggccagtctagggcaccgcgccgtctggcatctccctggaggccctgggcctggcccgaggctcagcccggatctgcagttgccagacccctctgccatgaaccagtccatcccagtggctcccaccccaccccgccgcgtgcggctgaagccctggctggtggcccaggtgaacagctgccagtacccagggcttcaatgggtcaacggggaaaagaaattattctgcatcccctggaggcatgccacaaggcatggtcccagccaggacggagataacaccatcttcaaggcctgggccaaggagacagggaaatacaccgaaggcgtggatgaagccgatccggccaagtggaaggccaacctgcgctgtgcccttaacaagagccgggacttccgcctcatctacgacgggccccgggacatgccacctcagccctacaagatctacgaggtctgctccaatggccctgctcccacagactcccagccccctgaggattactcttttggtgcaggagaggaggaggaagaagaggaagaggtgagtgt

SEQ ID NO: 84324 - DNA, 1374 bp, Artificial Sequence
  derived and/or modified sequence
gcccggcaggttggcggaccggcgggaggcgcagcctgggcagagctcagcttggtcccgccgcccggccggtgctccctggcgcagccacgcaggcgcaccgcagacagacccctctgccatgaaccagtccatcccagtggctcccaccccaccccgccgcgtgcggctgaagccctggctggtggcccaggtgaacagctgccagtacccagggcttcaatgggtcaacggggaaaagaaattattctgcatcccctggaggcatgccacaaggcatggtcccagccaggacggagataacaccatcttcaaggcctgggccaaggagacagggaaatacaccgaaggcgtggatgaagccgatccggccaagtggaaggccaacctgcgctgtgcccttaacaagagccgggacttccgcctcatctacgacgggccccgggacatgccacctcagccctacaagatctacgaggtctgctccaatggccctgctcccacagactcccagccccctgaggattactcttttggtgcaggagaggaggaggaagaagaggaagagctgcagaggatgttgccaagcctgagcctcacagtgaccgacctggagatcaagtttcagtaccgggggcggccaccccgggccctcaccatcagcaacccccatggctgccggctcttctacagccagctggaggccacccaggagcaggtggaactcttcggccccataagcctggagcaagtgcgcttccccagccctgaggacatccccagtgacaagcagcgcttctacacgaaccagctgctggatgtcctggaccgcgggctcatcctccagctacagggccaggacctttatgccatccgcctgtgtcagtgcaaggtgttctggagcgggccttgtgcctcagcccatgactcatgccccaaccccatccagcgggaggtcaagaccaagcttttcagcctggagcattttctcaatgagctcatcctgttccaaaagggccagaccaacaccccaccacccttcgagatcttcttctgctttggggaagaatggcctgaccgcaaaccccgagagaagaagctcattactgtacaggtggtgcctgtagcagctcgactgctgctggagatgttctcaggggagctatcttggtcagctgatagtatccggctacagatctcaaacccagacctcaaagaccgcatggtggagcaattcaaggagctccatcacatctggcagtcccagcagcggttgcagcctgtggcccaggcccctcctggagcaggccttggtgttggccaggggccctggcctatgcacccagctggcatgcaataacaaggctgcagacg

SEQ ID NO: 84325 - DNA, 684 bp, Artificial Sequence
  derived and/or modified sequence
atgaaccagagcatccccgtggcccccacccccccccggcgggtgcggctcaaaccttggttggtggcccaggtaaacagctgtcagtaccccggattacaatgggtgaatggcgaaaagaaactgttttgcatcccctggagacacgccaccaggcacggcccctctcaggacggcgacaatacaattttcaaggcctgggcaaaagagaccggaaaatatacggaaggagtcgatgaagcggacccagctaaatggaaggccaacctccggtgcgccctcaataaatccagagattttcgtctgatatatgacgggccacgggacatgccaccccagccatacaagatatatgaagtctgtagcaacgggccagcccccactgattcacagcccccggaggactattcatttggtgcaggcgaggaggaagaagaagaagaggaacgcatgagttcagggcgccctctctgttcccgacctctgtgcggccgcctgctctgcagcagaccactgtgtagtcggccctggtgctgggtccctttgctgcaaacaccggccccatggctgctgccgctcgccaccctcctggcttccggcagtttcagcctgaggtcatggtctctgggcccttgcctccctgcatgcccactacaggccaattcatcatgccagacctgttag

SEQ ID NO: 84326 - DNA, 474 bp, Artificial Sequence
  derived and/or modified sequence
atgaaccagagcatccccgtggcccccacccccccccggcgggtgcggttgaagccgtggctcgtggctcaggtgaactcttgtcagtatcctggtctccagtgggtgaacggcgaaaaaaaactcttttgtattccttggaggcatgccactaggcacggcccctcacaggacggggacaatacgattttcaaggcttgggccaaggagacggggaaatatactgagggggtggatgaggctgaccccgccaaatggaaggcaaacctaagatgtgctctaaataagtcccgagactttcgtcttatttatgacgggcctcgtgacatgccaccacagccttataagatctatgaggtttgctctaatgggcctgcacccacagacagccaaccaccggaagattactcatttggcgcaggagaggaagaggaggaggaggaggagatgcagtgcagtttagcacccacttag

SEQ ID NO: 84327 - DNA, 321 bp, Artificial Sequence
  derived and/or modified sequence
atgaaccagagcatccccgtggcccccacccccccccggcgggtgaggctgaaaccatggttggtggcccaagtaaactcctgtcagtatcctggcctgcagtgggtcaacggagagaagaagttattctgcataccatggcgtcacgccacacggcacggaccctcacaggatggcgacaacacgatattcaaggcttgggcaaaggaaacgggcaaatatacagagggcgtggatgaagcggacccggccaagtggaaagccaacctgcggtgcgcactcaacaaatcccgtgattttcgactcatttacgacggttag

SEQ ID NO: 84328 - DNA, 180 bp, Artificial Sequence
  derived and/or modified sequence
atgaaccagagcatccccgtggcccccacccccccccggcgggtgcggctgaagccctggctcgttgcccaagttaacagctgtcagtacccagggttgcagtgggtgaacggggagaaaaagctgttttgcatcccatggagacatgcgacaaggcacggaccaagtcaggatggctag

SEQ ID NO: 84329 - DNA, 426 bp, Artificial Sequence
  derived and/or modified sequence
atgaaccagagcatccccgtggcccccacccccccccggcgggtgcggctcaagccttggctagtcgctcaggtcaactcgtgccaataccccggcctccagtgggtgaacggagaaaagaagctgttttgcataccctggagacacgctactaggcatgggcccagtcaggatggagacaacacgatctttaaagcttgggccaaagaaaccggcaagtacaccgagggagtggatgaggcggatcctgcgaagtggaaggctaatctcagatgcgccctgaacaaatcccgcgatttccgcctcatttatgacggtcccagagatatgccccctcagccgtacaagatctacgaggtgtgtagtaacggcccggctcctacagacagtcaaccaccggaggactactcatttggagccggctag

SEQ ID NO: 84330 - DNA, 459 bp, Artificial Sequence
  derived and/or modified sequence
atgaaccagagcatccccgtggcccccacccccccccggcgggtgcggctaaagccttggcttgtcgctcaggtgaactcctgtcaataccccgggttgcagtgggtgaacggtgagaaaaagctgttctgtattccttggcgccatgcaacccgccacggcccttcacaagatggggataacacgatttttaaagcgtgggctaaggagacagggaagtatacagagggggtggacgaagctgatccagctaaatggaaggctaacctgagatgtgcccttaacaaatcacgcgattttaggttgatttatgacggtccaagagacatgcccccgcagccatataaaatctacgaggtgtgttctaacggtcccgcaccaacagactctcagccacccgaagattattcctttggtgcgggtgaggaggaggaggaagaggaagaagtcagcgtgtag

SEQ ID NO: 84331 - DNA, 1239 bp, Artificial Sequence
  derived and/or modified sequence
atgaaccagagcatccccgtggcccccacccccccccggcgggtgcgactgaagccttggctggtggcgcaggttaattcctgtcaatacccgggcctgcaatgggtcaatggggaaaaaaaactgttctgcatcccctggaggcacgctacacgccacggaccctctcaggatggcgacaatacaattttcaaagcttgggctaaagagacaggaaagtacactgaaggggtcgacgaggcggatcccgcgaagtggaaggcaaacctgcgctgcgcgcttaataagagccgtgacttcagacttatttatgatgggccgagagacatgcctccccagccatataagatctacgaggtctgttctaacggacccgcccccaccgattcgcagcctcctgaggattacagctttggcgcaggcgaggaggaagaggaggaggaggaactccagcggatgctgcctagtctctcactgacagtgacagacctagagattaagttccagtacaggggacgcccacctcgggcgctcactatttctaacccacatgggtgcagattgttttactcgcagttagaggctacgcaagagcaagtggagctctttggacctatctcgttggagcaagtcagattcccatcccctgaggatattccgagcgacaaacaacgcttctatacaaaccagttactcgatgtgctggaccgcggtctaatcttgcaactgcaaggccaggatctgtacgccatacggctctgtcaatgcaaagtcttctggtcaggcccttgcgcttctgcacatgattcttgcccaaaccctatccagagggaagtgaagacgaaactgttctctttagaacatttcctaaacgagctgatcttattccagaagggccagaccaatactccaccacctttcgaaatctttttctgtttcggtgaggagtggccggatcgcaaaccacgcgaaaaaaagctgattaccgttcaagtggtgccggttgccgcccgccttctacttgaaatgtttagcggcgagctgagctggtctgccgattcgattcggctccaaatctcaaatccagatctgaaagatcggatggtcgagcagtttaaagagctgcaccacatatggcaatcacagcagcgactgcaacctgtagctcaagcaccccccggggcaggcctgggagttggtcagggcccttggcctatgcaccctgctgggatgcaatag

SEQ ID NO: 84332 - DNA, 684 bp, Artificial Sequence
  derived and/or modified sequence
atgaatcagtccatacccgtggctccaacccctcccagaagagtcagattaaaaccctggctagttgcacaagtgaacagctgccaatatcctggccttcagtgggtgaacggcgaaaagaagctgttttgtattccttggaggcacgccactcgccacggaccaagtcaggatggcgacaatacaatcttcaaagcttgggctaaagaaactggtaagtacacggaaggcgtggacgaagccgatcctgccaagtggaaggctaaccttagatgtgcactaaacaaatcaagagacttccgtctaatctacgacggtccacgggacatgccccctcaaccatacaaaatttacgaagtgtgtagcaatgggccagctcccacagacagccagcctcctgaggactattctttcggcgcaggcgaggaggaggaggaggaagaagaacggatgtcatctggccgacctctgtgcagtagacctttgtgcgggcgtctgttatgcagccggcctctctgctcccgtccgtggtgttgggtccctctgctgcaaactcccgctccctggttactgccgttagctactcttctggcctcaggctcttttagtctcaggagttggagcctgggcccatgtctgcctgcttgccctttgcaggccaacagctcctgccagacgtgctag

SEQ ID NO: 84333 - DNA, 474 bp, Artificial Sequence
  derived and/or modified sequence
atgaaccagtctatccccgtggcgccaacaccgccacgcagggtgcgattgaaaccatggctggttgcccaggtaaatagctgccaatatcctggcctgcagtgggtgaacggcgaaaaaaagctgttctgtataccatggagacatgcgacccgtcacggcccttcacaggacggagacaacaccatattcaaagcttgggctaaagagacggggaagtataccgagggcgtggatgaggcggatccggctaaatggaaagccaatctgcgctgtgccttgaataagtctagggacttccggcttatatacgatgggccacgggacatgccgccacagccctataagatctacgaagtatgctccaatgggccagcccctacagattctcagccacctgaagattacagtttcggtgctggggaggaggaagaggaagaagaagagatgcagtgtagtctagccccaacctag

SEQ ID NO: 84334 - DNA, 321 bp, Artificial Sequence
  derived and/or modified sequence
atgaatcagtccatcccggtggcccctactccccctcgaagagtgagattgaagccctggcttgtggcacaagtcaatagttgccagtaccctgggctgcagtgggtcaatggcgagaagaagttgttttgtatcccatggaggcacgccacaagacatggcccttcacaggacggggacaacactatattcaaggcctgggccaaggagaccggtaagtacaccgagggtgtggacgaggcagaccccgctaaatggaaggccaatctgcgctgcgcactgaataagtctagggatttccgtctcatttacgatggttag

SEQ ID NO: 84335 - DNA, 180 bp, Artificial Sequence
  derived and/or modified sequence
atgaaccagtccatacccgtagcacccactccacctagacgggtgagactgaagccttggctggtcgctcaagtcaatagctgccagtatcccggacttcagtgggttaacggagagaagaagctcttctgcatcccttggaggcacgccacgagacatggacctagccaggatgggtag

SEQ ID NO: 84336 - DNA, 426 bp, Artificial Sequence
  derived and/or modified sequence
atgaaccagtccatccccgtagctccgacaccaccgcgacgcgttcgcctgaagccctggctagtggcccaagttaatagctgtcagtatcccggacttcagtgggtgaatggggaaaagaaattattctgcataccctggagacacgcgactcgacatgggccttcgcaggacggggataataccatcttcaaagcctgggcaaaagaaacagggaaatacaccgaaggtgtagatgaggccgaccctgccaaatggaaggctaatctgagatgcgcgcttaataagagtagagatttcagattaatctacgatggaccgagagacatgccccctcaaccatacaaaatctacgaggtatgttccaacggaccggctccaaccgacagtcagcccccagaggattatagctttggcgcagggtag

SEQ ID NO: 84337 - DNA, 459 bp, Artificial Sequence
  derived and/or modified sequence
atgaatcaatccataccagtggcaccaacacccccacgacgtgtgcgcctcaagccctggttggtcgcgcaggtgaattcttgtcaataccccggactacagtgggttaatggcgagaagaaattgttttgcataccctggcgtcacgcgaccagacacggaccctcccaagatggagataacactattttcaaggcatgggctaaagagactgggaagtatactgagggggttgatgaggccgatcctgcgaaatggaaagccaacctcaggtgcgccttaaacaaaagcagagatttccgcctaatctacgacggcccaagggatatgcccccacaaccctataaaatatatgaagtttgctccaatggccctgcgcctaccgatagccagccacccgaggactacagtttcggcgcaggagaggaagaagaagaagaagaagaggtcagtgtgtag

SEQ ID NO: 84338 - DNA, 1239 bp, Artificial Sequence
  derived and/or modified sequence
atgaatcagagtattcccgttgccccaacccccccacgcagggttcgccttaaaccatggcttgtcgcccaagtcaacagttgccaatatcctggactacagtgggtcaacggagaaaagaagctcttctgcattccatggaggcacgccacacgccatggcccaagccaggatggggacaataccatcttcaaagcctgggctaaagaaactgggaaatacaccgagggcgtcgatgaggccgatcctgcaaagtggaaggccaatctacgctgcgcacttaataaaagccgggattttcgtttgatctatgatgggcctcgggacatgcctcctcagccttacaagatctatgaagtctgctctaatggacctgcacccaccgactcacaaccacccgaagattacagctttggtgctggcgaagaagaagaggaggaggaagagcttcagagaatgctcccatccctgtcactaactgtgactgatcttgaaatcaagtttcagtatagaggcaggccccctcgcgcattaacgatatccaacccccatggttgtagactgttctactcacagctggaagccactcaagaacaggtcgaactcttcggtccaattagcctggaacaggtccggtttccttctccagaagatatcccttccgataagcagaggttttatacgaaccagctgctggacgtgttggaccgtggcctaatcctgcagctccagggccaggacctgtatgccatccgcctatgtcagtgcaaagtgttttggagcggtccatgcgcttccgcccatgactcgtgtccgaatccgatccaaagagaggtgaaaactaaactgtttagcctggaacacttcttgaatgagctgatcctcttccagaagggccaaactaacacaccgccacccttcgaaatttttttttgctttggcgaggaatggcctgacagaaaacctagagaaaaaaaactgataacagtgcaggttgttcccgtggcggctcgcctgctgctggagatgttctccggcgaactatcttggtctgccgacagcataagactgcagatctcgaaccccgacctgaaggaccggatggttgaacaatttaaggaactacaccatatctggcagtcgcagcaaagactgcagccggtggcgcaggcaccacctggcgctggtctgggcgtaggccagggaccctggcccatgcaccccgctggcatgcaatag

SEQ ID NO: 84339 - protein, 616 aa, Artificial Sequence
  derived and/or modified sequence
MDLWQLLLTLALAGSSDAFSGSEDSSKEPKFTKCRSPERETFSCHWTDEVHHGTKNLGPIQLFYTRRNTQEWTQEWKECPDYVSAGENSCYFNSSFTSIWIPYCIKLTSNGGTVDEKCFSVDEIVQPDPPIALNWTLLNVSLTGIHADIQVRWEAPRNADIQKGWMVLEYELQYKEVNETKWKMMDPILTTSVPVYSLKVDKEYEVRVRSKQRNSGNYGEFSEVLYVTLPQMSQFTCEEDFYFPWLLIIIFGIFGLTVMLFVFLFSKQQRIKMLILPPVPVPKIKGIDPDLLKEGKLEEVNTILAIHDSYKPEFHSDDSWVEFIELDIDEPDEKTEESDTDRLLSSDHEKSHSNLGVKDGDSGRTSCCEPDILETDFNANDIHEGTSEVAQPQRLKGEADLLCLDQKNQNNSPYHDACPATQQPSVIQAEKNKPQPLPTEGAESTHQAAHIQLSNPSSLSNIDFYAQVSDITPAGSVVLSPGQKNKAGMSQCDMHPEMVSLCQENFLMDNAYFCEADAKKCIPVAPHIKVESHIQPSLNQEDIYITTESLTTAAGRPGTGEHVPGSEMPVPDYTSIHIVQSPQGLILNATALPLPDKEFLSSCGYVSTDQLNKIMP

SEQ ID NO: 84340 - DNA, 885 bp, Artificial Sequence
  derived and/or modified sequence
atggacctatggcagctactcctgactttagcactggccggcagttccgatgcattttccggatccgaggcgaccgcagctatcttatctagggctccatggtccctccaatccgtcaatcctggcctcaaaactaatagtagtaaagagcctaagtttacaaaatgtcggtcgccagagcgcgagactttctcttgtcactggaccgacgaggttcatcacggcacaaaaaatcttggcccaatccagctgttttacacccggcggaatacccaggagtggacccaggagtggaaagagtgtcccgactacgtgtcagcaggggagaatagctgttactttaattcatcgttcacttctatctggatcccttactgcatcaaactgactagtaatggtggtaccgttgacgaaaagtgtttttcggttgatgagatcgtgcagccagatcctcccatcgctttaaattggaccctgttaaatgtgtcccttacaggtattcacgccgatattcaggtgaggtgggaggcgcccaggaatgccgacatccagaaagggtggatggtccttgagtatgagctccagtacaaggaagtaaatgaaaccaaatggaagatgatggatcccattctgaccacttccgtgcccgtatactccctgaaggtggacaaggagtacgaggtgagagtgcgaagtaaacagcgaaacagcggcaactacggcgaattcagcgaggtcttatacgttacactccctcagatgtctcagttcacgtgcgaggaggacttttacttcccctggttgctcatcataatttttggtattttcggcctgacagtgatgctcttcgtgttcctgtttagtaaacagcagagccaaaactag

SEQ ID NO: 84341 - DNA, 925 bp, Artificial Sequence
  derived and/or modified sequence
ccgcgctctctgatcagaggcgaagctcggaggtcctacaggtatggatctctggcagctgctgttgaccttggcactggcaggatcaagtgatgctttttctggaagtgaggccacagcagctatccttagcagagcaccctggagtctgcaaagtgttaatccaggcctaaagacaaattcttctaaggagcctaaattcaccaagtgccgttcacctgagcgagagactttttcatgccactggacagatgaggttcatcatggtacaaagaacctaggacccatacagctgttctataccagaaggaacactcaagaatggactcaagaatggaaagaatgccctgattatgtttctgctggggaaaacagctgttactttaattcatcgtttacctccatctggataccttattgtatcaagctaactagcaatggtggtacagtggatgaaaagtgtttctctgttgatgaaatagtgcaaccagatccacccattgccctcaactggactttactgaacgtcagtttaactgggattcatgcagatatccaagtgagatgggaagcaccacgcaatgcagatattcagaaaggatggatggttctggagtatgaacttcaatacaaagaagtaaatgaaactaaatggaaaatgatggaccctatattgacaacatcagttccagtgtactcattgaaagtggataaggaatatgaagtgcgtgtgagatccaaacaacgaaactctggaaattatggcgagttcagtgaggtgctctatgtaacacttcctcagatgagccaatttacatgtgaagaagatttctactttccatggctcttaattattatctttggaatatttgggctaacagtgatgctatttgtattcttattttctaaacagcaaagtcaaaat

SEQ ID NO: 84342 - DNA, 885 bp, Artificial Sequence
  derived and/or modified sequence
atggacctgtggcagctgctgctgaccctggccctggccggcagcagtgatgccttcagcggcagcgaggccacagctgccatcctgagccgggccccctggagcctgcagagcgtgaaccctggcctgaagaccaacagcagcaaggagcccaagttcaccaagtgccgcagccctgagcgggagaccttcagctgccactggacagatgaggtgcaccacggcaccaagaacctgggccccatccagctgttctacaccaggaggaacacccaggagtggacccaggagtggaaggagtgcccagactatgtgtctgctggggagaacagctgctacttcaacagcagcttcaccagcatctggatcccctactgcatcaagctgaccagcaatggaggcaccgtggatgagaagtgcttctctgtggatgagatcgtgcagcctgacccccccatcgccctgaactggaccctgctgaatgtgtccctgaccggcatccatgctgacatccaggtgcgctgggaggcccccagaaatgctgacatccagaagggctggatggtgctggagtatgagctgcagtacaaggaggtgaatgagaccaagtggaagatgatggaccccatcctgaccacctctgtgcctgtgtacagcctgaaggtggacaaggagtatgaggtgcgggtgcgcagcaagcagagaaattctggcaactacggggagttcagcgaggtgctgtatgtgaccctgccccagatgagccagttcacctgtgaggaggacttctacttcccctggctgctgatcatcatcttcggcatcttcggcctgactgtgatgctgtttgtgttcctgttcagcaagcagcagagccagaactag

SEQ ID NO: 84343 - DNA, 885 bp, Artificial Sequence
  derived and/or modified sequence
atggacctgtggcagctgctgctgaccctggccctggccggcagctctgatgctttttccggttcggaagccacagccgcaatcctttcaagagccccatggtctctccagtctgtgaatcctgggctgaagactaatagtagcaaggagccaaagttcaccaaatgtaggagcccagaaagggagaccttctcctgccattggacggacgaggtgcaccacggcactaagaatctgggtccaattcagcttttctatacacggaggaatacccaggaatggactcaagagtggaaggagtgcccagactacgtgagtgccggagaaaacagctgctatttcaattcatctttcacctctatatggattccttattgcatcaaactgacctctaacgggggaacggttgatgagaagtgcttctctgtggacgaaatcgtgcagccagaccccccaatagccctgaattggaccctcttaaacgtctcactgacgggcatccatgccgacattcaggtccgatgggaggctcctcggaacgccgacatccagaagggctggatggttctggaatatgagctccaatataaagaggttaacgagaccaaatggaaaatgatggacccgattcttaccaccagcgtcccagtatatagccttaaagtagacaaggagtatgaggtgcgcgtccgatctaaacaaagaaactctgggaattatggcgagtttagcgaggtgctgtatgtgacactcccacagatgtctcaattcacttgcgaggaagatttttacttcccatggcttctgataataattttcggtatcttcgggttgacagtgatgttatttgtatttctcttcagtaaacagcagagccaaaactag

SEQ ID NO: 84344 - DNA, 885 bp, Artificial Sequence
  derived and/or modified sequence
atggatctgtggcaacttctcttgacacttgcactggcgggttcctctgacgctttctctggcagcgaagctacagcggcaatcctgtctcgcgctccgtggagtctgcagagcgttaacccaggtctaaaaaccaacagtagcaaggaaccgaagtttacaaagtgcagatcaccggagagggagacgttcagttgtcactggactgacgaagtccatcacggcaccaagaatctcggacccatccagctgttctacactcgcagaaacactcaggagtggactcaggagtggaaagagtgccccgactacgtatcagcgggagagaactcttgttacttcaatagttcttttaccagcatctggattccttactgtatcaagctcacttctaacggcggaaccgtggatgaaaagtgcttctcagtggacgaaatcgtacagcccgatccccctatcgcccttaattggactctgttaaatgtttcgttaaccggcatacatgcggatattcaggtcagatgggaagcccctcgtaacgccgacatccagaaggggtggatggtcctagagtatgaactccaatacaaagaagtaaacgaaacaaaatggaaaatgatggatcccatactgacaacgagtgttcccgtatactcgctgaaggttgataaggagtacgaagttcgtgtgaggtcaaagcaacgaaattccgggaattacggcgagttctctgaagtcctctatgtgacattacctcagatgtcccaatttacttgcgaagaagatttctactttccatggctccttataatcatttttggtatatttgggttgacagtgatgctctttgtgtttctgttcagcaagcagcagagccagaattag

SEQ ID NO: 84345 - DNA, 885 bp, Artificial Sequence
  derived and/or modified sequence
atggacctgtggcagctgctgctgaccctggccctggccggcagcagcgacgccttcagcggcagcgaggccaccgccgccatcctgagcagagccccctggagcctgcagagcgtgaaccccggcctgaagaccaacagcagcaaggagcccaagttcaccaagtgcagaagccccgagagagagaccttcagctgccactggaccgacgaggtgcaccacggcaccaagaacctgggccccatccagctgttctacaccagaagaaacacccaggagtggacccaggagtggaaggagtgccccgactacgtgagcgccggcgagaacagctgctacttcaacagcagcttcaccagcatctggatcccctactgcatcaagctgaccagcaacggcggcaccgtggacgagaagtgcttcagcgtggacgagatcgtgcagcccgacccccccatcgccctgaactggaccctgctgaacgtgagcctgaccggcatccacgccgacatccaggtgagatgggaggcccccagaaacgccgacatccagaagggctggatggtgctggagtacgagctgcagtacaaggaggtgaacgagaccaagtggaagatgatggaccccatcctgaccaccagcgtgcccgtgtacagcctgaaggtggacaaggagtacgaggtgagagtgagaagcaagcagagaaacagcggcaactacggcgagttcagcgaggtgctgtacgtgaccctgccccagatgagccagttcacctgcgaggaggacttctacttcccctggctgctgatcatcatcttcggcatcttcggcctgaccgtgatgctgttcgtgttcctgttcagcaagcagcagagccagaactag

SEQ ID NO: 84346 - protein, 262 aa, Artificial Sequence
  derived and/or modified sequence
MPFLGQDWRSPGQNWVKTADGWKRFLDEKSGSFVSDLSSYCNKEVYNKENLFNSLNYDVAAKKRKKDMLNSKTKTQYFHQEKWIYVHKGSTKERHGYCTLGEAFNRLDFSTAILDSRRFNYVVRPAFKGLTFTDLPLCLQLNIMQRLSDGRDLVSLGQAAPDLHVLSEDRLLWKKLCQYHFSERQIRKRLILSDKGQLDWKKMYFKLVRCYPRKEQYGDTLQLCKHCHILSWKGTDHPCTANNPESCSVSLSPQDFINLFKF

SEQ ID NO: 84347 - DNA, 1227 bp, Artificial Sequence
  derived and/or modified sequence
agcactcccggagcctgcaacgcttgagatcctctccgcgcccgccaccccgcagggtgccccgcgccgttcccgccgccccgccgcccccgtcgcgggcccctgcaccccgagcatccgccccgggtggcacgtccccgagcccaccaggccggccccgtctccccatccgtctagtccgctcgcggtgccatgccattcctcgggcaggactggcggtcccccgggcagaactgggtgaagacggccgacggctggaagcgcttcctggatgagaagagcggcagtttcgtgagcgacctcagcagttactgcaacaaggaggtatacaataaggagaatcttttcaacagcctgaactatgatgttgcagccaagaagagaaagaaggacatgctgaatagcaaaaccaaaactcagtatttccaccaagaaaaatggatctatgttcacaaaggaagtactaaagagcgccatggatattgcaccctgggggaagctttcaacagactggacttctcaactgccattctggattccagaagatttaactacgtggtccggcctgccttcaaaggcctcaccttcactgacctgcctttgtgcctacaactgaacatcatgcagaggctgagcgacgggcgggacctggtcagcctgggccaggctgcccccgacctgcacgtgctcagcgaagaccggctgctgtggaagaaactctgccagtaccacttctccgagcggcagatccgcaaacgattaattctgtcagacaaagggcagctggattggaagaagatgtatttcaaacttgtccgatgttacccaaggaaagagcagtatggagatacccttcagctctgcaaacactgtcacatcctttcctggaagggcactgaccatccgtgcactgccaataacccagagagctgctccgtttcactttcaccccaggactttatcaacttgttcaagttctgaatcccagcacatgacaacacttcagaagggtccccctgctgactggagagctgggaatatggcatttggacacttcatttgtaaatagtgtacattttaaacattggctcgaaacttcagagataagtcatggagaggacattggaggggagaaatgcagttgctgactgggaatttaagaatgtgaacttctcactagaattggtatggaaaagcaaaatactgtaaataaactttttttctaac

SEQ ID NO: 84348 - DNA, 789 bp, Artificial Sequence
  derived and/or modified sequence
atgccattcttgggccaggattggcgcagccctggccagaactgggttaagactgccgacggatggaagcgttttctggacgaaaaatctggaagtttcgtgtctgatctgtcaagctactgcaacaaagaggtgtacaataaagaaaacctctttaacagtttaaactacgacgtggcagctaagaagagaaagaaggacatgctcaactctaaaactaaaacgcagtatttccaccaggagaaatggatatacgtgcacaaggggtctaccaaggagcggcatggatattgtacactcggggaagcatttaaccggttagatttttctactgctattctggacagtcgccgctttaattacgtggtgcggcccgcctttaaaggcctcacattcactgatctccctctttgccttcaactgaacatcatgcagcgactgagcgacggacgagacctggtgtcactgggacaggccgcgccagatcttcacgtgctgtccgaggatagactactctggaaaaagctgtgtcagtatcattttagcgagagacagattaggaagcgtctgatactctcagataaggggcagctggactggaaaaagatgtacttcaagcttgtcagatgctaccctaggaaggagcagtacggggacacactgcagctctgtaagcactgccacatcttgtcctggaaaggcactgatcatccctgcactgctaacaatcccgaaagctgttccgtgtccctgagcccacaggattttattaatctgtttaagttttag

SEQ ID NO: 84349 - DNA, 789 bp, Artificial Sequence
  derived and/or modified sequence
atgcccttcctgggccaggactggaggagccctggccagaactgggtgaagacagcagatggctggaagcgcttcctggatgagaagagcggcagctttgtgtctgacctgagcagctactgcaacaaggaggtgtacaacaaggaaaatctcttcaacagcctgaactatgatgtggccgccaagaagaggaagaaggacatgctgaacagcaagaccaagacccagtacttccaccaggagaagtggatctacgtgcacaagggcagcaccaaggagagacatggctactgcaccctgggggaggccttcaaccggctggacttcagcacagccatcctggacagccgccgcttcaactacgtggtgcggcctgccttcaagggcctgaccttcacagacctgcccctgtgcctgcagctgaacatcatgcagaggctgagtgatggccgggacctggtgtccctgggccaggccgccccagacctgcacgtgctgtctgaggaccggctgctgtggaagaagctgtgccagtaccacttcagcgagcggcagatcaggaagaggctcatcctgagtgacaagggccagctggactggaagaagatgtacttcaagctggtgcgctgctaccccaggaaggagcagtatggagacaccctgcagctgtgcaagcactgccacatcctgtcctggaagggcacagaccacccctgcacagccaacaaccctgagagctgcagcgtgtccctgagcccccaggacttcatcaacctcttcaagttctag

SEQ ID NO: 84350 - DNA, 789 bp, Artificial Sequence
  derived and/or modified sequence
atgcccttcctgggccaggactggcggagccccggccagaactgggtgaaaaccgccgacgggtggaaacgatttctggatgagaagtctggctcatttgtgagcgacttgtccagctactgcaataaggaggtgtacaataaggagaatctcttcaattcacttaattatgacgtggccgctaagaaaaggaaaaaagatatgctaaactccaaaacaaaaacccagtatttccaccaggaaaaatggatctacgttcacaaagggagtaccaaagaacgccatggttactgtaccctcggcgaggcatttaataggctcgacttttctacagcaattctcgacagtaggaggtttaactatgtagtgagaccggcgtttaagggccttaccttcacagatcttccactgtgcctccagctgaacatcatgcagagactctctgacggacgggacctggtctccctgggacaagcagcgccagatctgcatgttttgtcagaggatagactgctgtggaaaaaactctgccaatatcatttttcagagaggcagattcgcaagcgcctcatcctctcagacaaaggacagctagattggaaaaagatgtacttcaaactcgtcagatgttatccgaggaaggagcagtatggggatacattacagctgtgtaagcactgtcacattctgtcttggaaagggactgaccatccttgcacagccaataatcccgagagttgttcagtttctctgtcgcctcaagattttataaacctatttaaattttag

SEQ ID NO: 84351 - DNA, 789 bp, Artificial Sequence
  derived and/or modified sequence
atgccattcctcggtcaggactggcggtcacctggacagaattgggtcaagacagccgatggctggaagaggttcctcgatgagaagagcggctcatttgtcagcgatctgtcttcatactgtaacaaagaggtctacaacaaggaaaatctgttcaactcgcttaactacgatgttgccgcaaagaaaaggaaaaaggatatgctgaactctaagacaaaaacacagtattttcaccaggagaaatggatatacgtccacaagggctccactaaagaacgccacggctactgtactcttggggaggcttttaatcgcttagacttttctaccgccattctcgatagccgacgcttcaattacgtggtgagaccagcatttaagggtctaaccttcactgaccttccgttatgcctgcagctgaacatcatgcagcgactttccgacggcagagatttagtgagcttgggccaagccgctcctgacctgcacgtgctatctgaagacaggctgttgtggaagaaactttgccagtaccacttcagcgagcgacagatccgtaagagactaattctgtccgacaagggccagctggactggaagaaaatgtacttcaagttggtgcgatgctacccgagaaaagagcagtacggcgatacgctgcagctgtgcaagcattgtcacattctgagttggaagggcaccgaccatccctgtactgccaacaacccggagtcctgctccgtgagcctgagcccccaggactttatcaatcttttcaagttctag

SEQ ID NO: 84352 - DNA, 789 bp, Artificial Sequence
  derived and/or modified sequence
atgcccttcctgggccaggactggagaagccccggccagaactgggtgaagaccgccgacggctggaagagattcctggacgagaagagcggcagcttcgtgagcgacctgagcagctactgcaacaaggaggtgtacaacaaggagaacctgttcaacagcctgaactacgacgtggccgccaagaagagaaagaaggacatgctgaacagcaagaccaagacccagtacttccaccaggagaagtggatctacgtgcacaagggcagcaccaaggagagacacggctactgcaccctgggcgaggccttcaacagactggacttcagcaccgccatcctggacagcagaagattcaactacgtggtgagacccgccttcaagggcctgaccttcaccgacctgcccctgtgcctgcagctgaacatcatgcagagactgagcgacggcagagacctggtgagcctgggccaggccgcccccgacctgcacgtgctgagcgaggacagactgctgtggaagaagctgtgccagtaccacttcagcgagagacagatcagaaagagactgatcctgagcgacaagggccagctggactggaagaagatgtacttcaagctggtgagatgctaccccagaaaggagcagtacggcgacaccctgcagctgtgcaagcactgccacatcctgagctggaagggcaccgaccacccctgcaccgccaacaaccccgagagctgcagcgtgagcctgagcccccaggacttcatcaacctgttcaagttctag

SEQ ID NO: 84353 - DNA, 1086 bp, Artificial Sequence
  derived and/or modified sequence
atgcacggcgactacaccctgaccctgagaaagggcggcaacaacaagctgatcaagatcttccacagagacggcaagtacggcttcagcgaccccctgaccttcagcagcgtggtggagctgatcaaccactacagaaacgagagcctggcccagtacaaccccaagctggacgtgaagctgctgtaccccgtgagcaagtaccagcaggaccaggtggtgaaggaggacaacatcgaggccgtgggcaagaagctgcacgagtacaacacccagttccaggagaagagcagagagtacgacagactgtacgaggagtacaccagaaccagccaggagatccagatgaagagaaccgccatcgaggccttcaacgagaccatcaagatcttcgaggagcagtgccagacccaggagagatacagcaaggagtacatcgagaagttcaagagagagggcaacgagaaggagatccagagaatcatgcacaactacgacaagctgaagagcagaatcagcgagatcatcgacagcagaagaagactggaggaggacctgaagaagcaggccgccgagtacagagagatcgacaagagaatgaacagcatcaagcccgacctgatccagctgagaaagaccagagaccagtacctgatgtggctgacccagaagggcgtgagacagaagaagctgaacgagtggctgggcaacgagaacaccgaggaccagtacagcctggtggaggacgacgaggacctgccccaccacgacgagaagacctggaacgtgggcagcagcaacagaaacaaggccgagaacctgctgagaggcaagagagacggcaccttcctggtgagagagagcagcaagcagggctgctacgcctgcagcgtggtggtggacggcgaggtgaagcactgcgtgatcaacaagaccgccaccggctacggcttcgccgagccctacaacctgtacagcagcctgaaggagctggtgctgcactaccagcacaccagcctggtgcagcacaacgacagcctgaacgtgaccctggcctaccccgtgtacgcccagcagagaagatag

SEQ ID NO: 84354 - DNA, 414 bp, Artificial Sequence
  derived and/or modified sequence
atgcacggcgactacaccctgaccctgagaaagggcggcaacaacaagctgatcaagatcttccacagagacggcaagtacggcttcagcgaccccctgaccttcagcagcgtggtggagctgatcaaccactacagaaacgagagcctggcccagtacaaccccaagctggacgtgaagctgctgtaccccgtgagcaagtaccagcaggaccaggtggtgaaggaggacaacatcgaggccgtgggcaagaagctgcacgagtacaacacccagttccaggagaagagcagagagtacgacagactgtacgaggagtacaccagaaccagccaggagatccagatgaagagaaccgccatcgaggccttcaacgagaccatcaagatcttcgaggagcagtgccagacctag

SEQ ID NO: 84355 - DNA, 1086 bp, Artificial Sequence
  derived and/or modified sequence
atgcacggagactatactctaacccttagaaagggcggtaacaataagcttattaagatatttcatcgggacggtaagtatgggtttagcgacccgttgacgttttctagcgtagtggagctgatcaatcactacagaaatgagtccttggcccaatacaatccaaagcttgacgtgaaactcctgtatcccgtgtctaagtaccagcaagaccaggttgtgaaagaggacaatattgaggctgtgggcaagaaattgcatgagtacaatacacagttccaggaaaaatcgagagagtacgatcgcttatacgaagagtacactcggacctctcaagaaattcagatgaaaagaaccgctatcgaggcctttaacgaaactattaagatcttcgaggagcagtgtcaaacgcaggagagatactcgaaggagtacatcgagaaatttaagagggaaggaaatgagaaggaaatccaacggatcatgcataactatgacaaactgaaatcccgaatttcagagattattgattcccgcaggcgattagaggaagatctgaagaagcaggccgccgaatatcgtgaaattgacaagaggatgaattccatcaagcctgacttaatccagctccggaaaactcgggatcagtacctcatgtggctcacccaaaaaggagtgagacagaaaaagctgaatgaatggctcggcaatgagaatacagaagaccagtactctctcgtagaagatgatgaggacctcccacaccacgatgaaaaaacttggaatgtgggaagctccaatagaaacaaagccgagaaccttctccgcggcaaaagggacggtactttccttgtccgggaatccagcaaacaggggtgttatgcctgcagcgtggtggttgacggcgaagtgaagcactgtgtgattaataagacagccaccgggtatggtttcgctgaaccatataacctgtattcttcactgaaagagttagtgctacattaccagcacaccagtctggtgcagcacaatgacagtctgaacgtgacactggcttaccccgtctacgctcagcagagacggtag

SEQ ID NO: 84356 - DNA, 414 bp, Artificial Sequence
  derived and/or modified sequence
atgcacggggattatacactgactctgcgaaaaggtgggaataataaactaatcaaaatttttcacagagacgggaaatatggcttctccgatccactgacattcagttctgttgtggaactgatcaatcattatagaaacgaatctcttgctcagtacaacccaaaactggatgtaaaactgctatatcctgtatctaagtaccagcaggaccaggtggttaaagaagataatatcgaagcagtgggaaagaaacttcatgaatacaacacccagttccaggaaaagagtcgagaatacgaccggctttatgaggaatataccaggacatcccaggaaatccagatgaaacgaacggcgatcgaagcctttaacgaaaccatcaagatctttgaggagcagtgtcagacatag

SEQ ID NO: 84357 - DNA, 1086 bp, Artificial Sequence
  derived and/or modified sequence
atgcacggggactacaccctgaccctgaggaaaggaggcaacaacaagctgatcaagatcttccacagagatggcaagtatggcttcagtgaccccctgaccttcagctctgtggtggagctgatcaaccactacagaaatgaaagcctggcccagtacaaccccaagctggatgtgaagctgctgtaccctgtgtccaagtaccagcaggaccaggtggtgaaggaggacaacattgaagctgtgggcaagaagctgcacgagtacaacacccagttccaggagaagagccgggagtatgaccggctgtatgaggagtacaccaggaccagccaggagatccagatgaagaggacagccatcgaggccttcaatgagaccatcaagatctttgaggagcagtgccagacccaggagcgctacagcaaggagtacatcgagaagttcaagcgggagggcaatgagaaggagatccagaggatcatgcacaactatgacaagctgaagagccgcatcagcgagatcatcgacagcagaagaaggctggaggaggacctgaagaagcaggccgctgagtaccgggagattgacaagaggatgaacagcatcaagccagacctgatccagctgaggaagacccgggaccagtacctgatgtggctgacccagaagggcgtgcggcagaagaagctgaatgagtggctgggcaatgaaaatacagaggaccagtacagcctggtggaggatgatgaggacctgccccaccatgatgagaagacctggaatgtgggcagcagcaacagaaacaaggccgagaacctgctgcggggcaagagagatggcaccttcctggtgcgggagagcagcaagcagggctgctacgcctgcagcgtggtggtggatggagaggtgaagcactgtgtgatcaacaagacagccaccggctacggctttgctgagccctacaacctgtacagcagcctgaaggagctggtgctgcactaccagcacaccagcctggtgcagcacaatgacagcctgaatgtgaccctggcctaccctgtgtatgcccagcagaggaggtag

SEQ ID NO: 84358 - DNA, 414 bp, Artificial Sequence
  derived and/or modified sequence
atgcacggggactacaccctgaccctgaggaaaggaggcaacaacaagctgatcaagatcttccacagagatggcaagtatggcttcagtgaccccctgaccttcagctctgtggtggagctgatcaaccactacagaaatgaaagcctggcccagtacaaccccaagctggatgtgaagctgctgtaccctgtgtccaagtaccagcaggaccaggtggtgaaggaggacaacattgaagctgtgggcaagaagctgcacgagtacaacacccagttccaggagaagagccgggagtatgaccggctgtatgaggagtacaccaggaccagccaggagatccagatgaagaggacagccatcgaggccttcaatgagaccatcaagatctttgaggagcagtgccagacctag

SEQ ID NO: 84359 - DNA, 1086 bp, Artificial Sequence
  derived and/or modified sequence
atgcacggcgactacaccctgaccctgcggaagggcggcaacaacaagctcatcaagatatttcatcgagatgggaagtacgggttctccgacccccttacttttagttcagtggtggagctcattaatcactaccgcaacgagagccttgctcagtataatccgaagttagatgtcaaactcctgtacccagtgtccaaatatcaacaggaccaggtagttaaagaagacaacatagaggctgtaggaaaaaagctgcatgaatacaacacccaattccaggagaaatctagggagtacgacaggctgtacgaagagtacactaggacaagtcaggaaattcagatgaagcggaccgccattgaggccttcaatgaaaccatcaagatctttgaggaacaatgtcaaacacaagagcgctattccaaggagtacatagagaaatttaagagggagggaaacgagaaggagatccaacgtatcatgcataattatgataaactgaaatccagaatatcagaaatcatcgacagcaggcggaggctcgaggaggacctaaagaagcaggctgcagaatatcgggagatagataagcggatgaatagcattaagccagaccttattcagctgcgcaaaacccgggaccaatacctgatgtggttaacccagaagggcgtgcggcaaaagaagttgaatgagtggctgggcaatgaaaatactgaggaccagtactccttggttgaggatgacgaggatctgccccaccacgacgaaaaaacctggaatgtgggatcttccaatcggaacaaggccgaaaacctgctgcgtggcaagcgagacggtactttcctggtacgtgaatcctcaaagcaggggtgttatgcttgctcagttgttgtggacggcgaggtgaaacactgcgtcatcaacaagaccgccaccgggtatggcttcgccgagccgtataacctctacagctccctcaaggagctggtactgcactatcagcacaccagccttgtgcagcataatgactccttaaacgtgactcttgcatatccagtatatgcccagcaaaggaggtag

SEQ ID NO: 84360 - DNA, 414 bp, Artificial Sequence
  derived and/or modified sequence
atgcacggcgactacaccctgaccctgcggaagggcggcaacaacaaactaatcaaaattttccatcgagacggaaagtacggattctctgacccactgactttcagctccgtagtggagcttattaaccactatcggaacgaatccctggctcaatataatcccaaattagacgtgaagctcctttatcctgtgtccaagtatcagcaggatcaagtcgtgaaagaagacaatatcgaagcagtcggcaaaaaattgcacgagtataatactcagtttcaggagaagtcccgagaatacgaccgattatacgaggagtatactcggacttcccaagagatacaaatgaagagaaccgccattgaagctttcaacgaaaccattaagatttttgaggagcaatgccagacttag

SEQ ID NO: 84361 - DNA, 1086 bp, Artificial Sequence
  derived and/or modified sequence
atgcacggcgattatacactgacactccggaaaggaggcaacaacaaactgataaagatctttcaccgcgatggtaagtatggattctccgacccgctgacattctcttccgtggtggaacttattaaccactaccgaaacgaaagtctggctcagtataatcccaaattggacgtgaagttgctgtaccctgtctctaagtaccagcaggaccaagtcgtgaaagaagacaacattgaagcagttgggaagaagcttcacgaatataatactcaatttcaggaaaagtcccgggagtatgacaggctatacgaggaatacacccggacgtcacaggagattcagatgaaacgcacggccatagaggcatttaacgaaactataaaaatcttcgaagaacagtgccagacgcaggagcgctactcaaaagagtatattgagaaattcaagcgtgagggcaatgaaaaggagatccagcgtattatgcataactacgacaagctaaagagccgaatctctgagattattgattcccggaggcgactggaagaggacttgaagaagcaggccgcagaatacagggagattgataagagaatgaactcaatcaaaccggacctgattcagttgcggaaaacccgtgaccagtatcttatgtggcttactcagaagggagtgagacaaaaaaaactgaacgaatggttgggtaacgagaacaccgaggaccaatacagcttagtggaagatgacgaggacctcccgcaccatgatgaaaaaacgtggaatgtggggagcagtaacagaaacaaggctgaaaaccttttgagaggtaaaagggatggtacgtttctggtacgggaatctagcaagcaaggttgctatgcatgcagcgttgtcgtggatggcgaagtcaaacattgcgtaatcaataaaactgctaccggatatggattcgctgaaccctataacttgtatagctccttaaaggagctcgtgctacactatcaacatacatccctagtccagcataatgattctttgaacgtcacacttgcttatcccgtttacgctcagcagagacgctag

SEQ ID NO: 84362 - DNA, 414 bp, Artificial Sequence
  derived and/or modified sequence
atgcatggggattatacactcaccctccgaaaaggcggaaataataagctcattaaaattttccaccgcgacggtaagtatggcttctcagaccctcttaccttttcttccgtggtggaactgattaaccactacaggaatgagtctctggcacagtacaaccctaaactggatgttaagctgttatatcccgtctccaagtaccagcaggaccaagtggtgaaggaagataatatcgaggctgtagggaagaagcttcatgagtataatacccagtttcaagagaagtcccgtgagtacgacaggctgtacgaagagtacacacggacaagccaggagattcagatgaagcgaactgctattgaggccttcaatgaaaccatcaagatcttcgaagagcaatgccagacctag

SEQ ID NO: 84363 - protein, 165 aa, Artificial Sequence
  derived and/or modified sequence
MSQATKRKHVVKEVLGEHIVPSDQQQIVRVLRTPGNNLHEVETAQGQRFLVSMPSKYRKNIWIKRGDFLIVDPIEEGEKVKAEISFVLCKDHVRSLQKEGFWPEAFSEVAEKHNNRNRQTQPELPAEPQLSGEESSSEDDSDLFVNTNRRQYHESEEESEEEEAA

SEQ ID NO: 84364 - protein, 78 aa, Artificial Sequence
  derived and/or modified sequence
MSQATKRKHVVKEVLGEHIVPSDQQQIVRVLRTPGNNLHEVETAQGQRFLVSMPSKYRKNIWIKRGDFLIVDPIEEGE

SEQ ID NO: 84365 - protein, 146 aa, Artificial Sequence
  derived and/or modified sequence
MSQATKRKHVVKEVLGEHIVPSDQQQIVRVLRTPGNNLHEVETAQGQRFLVSMPSKYRKNIWIKRGDFLIVDPIEEGEKVKAEISFVLCKDHVRSLQKEGFWPEAFSEVAEKHNNRNRQTQPELPAEPQLSGEESSSEDDSDLFVN

SEQ ID NO: 84366 - protein, 114 aa, Artificial Sequence
  derived and/or modified sequence
MSQATKRKHVVKEVLGEHIVPSDQQQIVRVLRTPGNNLHEVETAQGQRFLVSMPSKYRKNIWIKRGDFLIVDPIEEGEKVKAEISFVLCKDHVRSLQKEGFWPEAFSEVAEKHN

SEQ ID NO: 84367 - protein, 113 aa, Artificial Sequence
  derived and/or modified sequence
MSQATKRKHVVKEVLGEHIVPSDQQQIVRVLRTPGNNLHEVETAQGQRFLVSMPSKYRKNIWIKRGDFLIVDPIEEGEKVKAEISFVLCKDHVRSLQKEGFWPEAFSEVAEKH

SEQ ID NO: 84368 - DNA, 498 bp, Artificial Sequence
  derived and/or modified sequence
atgagccaagccactaaacgcaaacacgtggtgaaggaagttctgggcgagcatattgtgccaagtgaccagcagcagattgtacgcgtcctccggacccccggtaataatctccacgaggtcgaaactgcacagggtcagcgattcctcgtttctatgcctagtaagtaccggaagaatatttggattaagcgcggggatttcctgattgtcgaccccatcgaggagggggaaaaagtcaaggctgaaataagctttgtactgtgtaaggaccacgtgcgctctctgcagaaggaaggcttctggcccgaggcttttagcgaagtcgctgaaaagcacaataacagaaatagacagacacagccagagttgcctgcggaacctcagctcagtggcgaggagtcgtcaagtgaagatgatagtgacctttttgttaacacaaatagaaggcagtaccatgagagtgaagaggagtcagaagaagaggaagcagcctag

SEQ ID NO: 84369 - DNA, 498 bp, Artificial Sequence
  derived and/or modified sequence
atgtcacaggcgacaaaaagaaagcatgtggtcaaggaggttctgggagaacacattgtcccatcggaccagcaacaaatcgtgagggttctccgaacccccggcaataacctacatgaagttgagacagcccagggccaacggtttttagtaagcatgccaagcaaatatcgtaagaacatctggatcaagcggggagatttcctaatcgtggatcccatcgaagaaggggaaaaagtgaaggcagagattagcttcgtcctctgtaaagatcacgttcgctcgctgcagaaggagggattctggcctgaggcgttcagcgaggtagcagagaagcacaataaccgcaaccgccagacccaacctgagcttccagcagaaccacagctgagtggagaagagtctagctcggaggatgattctgacttatttgtgaacaccaacagacggcaataccacgagagcgaggaagaaagcgaggaagaggaggcagcctag

SEQ ID NO: 84370 - DNA, 237 bp, Artificial Sequence
  derived and/or modified sequence
atgagccaggctacaaaaaggaaacacgtggtgaaggaggttctcggcgaacacattgtgccatctgatcagcaacaaatcgtcagggttctacgtactcctggaaataacttgcacgaggtggagacagctcaaggccagagatttcttgtttcaatgccgagtaaataccggaaaaatatctggatcaaaaggggagacttcctcatagtagaccctattgaggagggcgaatag

SEQ ID NO: 84371 - DNA, 498 bp, Artificial Sequence
  derived and/or modified sequence
atgtcccaggcgaccaagaggaaacatgtggtcaaggaggtcctgggtgaacatatcgttccctctgatcagcagcagatcgtccgtgtgctgcgaacccccggaaataatttgcacgaggttgaaaccgcccagggtcaacgcttcctggtgtccatgcccagtaagtaccgcaagaacatttggatcaagcgcggagattttcttatcgtggatccaattgaggagggggagaaagttaaggcggaaatctctttcgtgctatgcaaagatcacgtgagaagcctgcagaaagagggcttctggcccgaagccttcagtgaggtggcggagaaacataacaaccgcaatagacagacccagcctgagttaccagctgaacctcaactgtctggcgaggagagtagtagtgaggacgattctgacctctttgtcaacaccaaccgcaggcagtaccatgaatcggaggaggagagtgaggaagaagaggctgcatag

SEQ ID NO: 84372 - DNA, 441 bp, Artificial Sequence
  derived and/or modified sequence
atgagccaagctaccaaacggaagcacgttgtgaaggaggtgctgggcgaacatattgtcccttctgatcagcaacaaatagtgagagtgcttagaacccccggcaataatctgcatgaggtggagaccgcccaaggccagaggtttctggtcagtatgcccagcaagtatcgaaagaacatttggattaagcggggggattttttgatcgttgatcctatcgaggagggagaaaaggtgaaagccgaaatttcttttgtgctgtgcaaggatcatgtgcgaagcctccaaaaggaagggttctggcctgaggcttttagtgaagtcgctgaaaagcataataaccgtaaccgtcagacccagccggaactgcctgccgagccccagctttccggtgaagagagtagttcagaagacgactccgatcttttcgtgaactag

SEQ ID NO: 84373 - DNA, 345 bp, Artificial Sequence
  derived and/or modified sequence
atgagccaagctaccaaacgcaagcatgttgttaaggaggtccttggggaacacatagtaccctctgatcaacagcaaatcgtacgggttttgcgcacccccggcaataatttgcatgaggtggagaccgcacaggggcagcgctttctcgtgtccatgccttcaaaataccggaaaaacatctggattaaacggggcgattttctcatcgtagatcccattgaggaaggagaaaaggtgaaagccgaaattagcttcgtactttgcaaagaccacgtgcggtctttgcagaaagaaggtttctggcccgaagctttcagcgaggtcgctgagaaacacaactag

SEQ ID NO: 84374 - DNA, 342 bp, Artificial Sequence
  derived and/or modified sequence
atgagccaagccactaagcgcaaacacgtcgtgaaagaagtgcttggagagcatatcgtcccgtccgatcagcagcagatcgtgcgcgtcctgaggacgcctggcaacaacttgcacgaggttgagactgcgcagggccagcggttcctcgtctctatgcctagcaagtacagaaagaatatatggatcaaacgaggcgactttctaatcgtggaccccatcgaggagggggagaaagtcaaggccgagatctctttcgtgttgtgtaaagaccacgtaagatccttgcagaaagagggattttggccagaagctttcagtgaggttgccgagaagcattag

SEQ ID NO: 84375 - DNA, 498 bp, Artificial Sequence
  derived and/or modified sequence
atgagtcaagcaactaagagaaaacacgtggtaaaagaggtgctcggggaacatatagttcccagtgaccagcagcagattgttcgggtgctacggacaccagggaacaatctgcatgaagttgaaaccgcccaggggcaacggttcctggtgagcatgcctagtaagtatcgaaagaacatatggatcaagcggggagacttcctgatcgtcgaccccatagaggagggtgaaaaagtgaaggccgaaatctcatttgtgctctgtaaagaccacgtgcgttcactgcaaaaagagggattctggccagaggcctttagtgaggtggctgaaaaacacaataacaggaaccggcagactcagcccgagttgcctgccgagccgcagctctcgggagaggagtcctcctccgaggacgatagtgatctgtttgtgaataccaatcgaagacaatatcatgaatccgaagaggagagcgaggaggaagaagccgcttag

SEQ ID NO: 84376 - DNA, 498 bp, Artificial Sequence
  derived and/or modified sequence
atgagccaggccaccaagaggaagcacgtggtgaaggaggtgctgggggagcacatcgtgcccagcgaccagcagcagatcgtgcgggtgctgcggaccccaggcaacaacctgcacgaggtggagacagcccagggccagcgcttcctggtgtccatgcccagcaagtacaggaagaacatctggatcaagagaggagacttcctgattgtggaccccatcgaggagggggagaaggtgaaggccgagatcagctttgtgctgtgcaaggaccacgtgcgcagcctgcagaaggagggcttctggccagaggccttcagcgaggtggccgagaagcacaacaacagaaaccggcagacccagcctgagctgcctgctgagccccagctgtctggagaggagagcagcagtgaagatgacagcgacctgtttgtgaacaccaacagacggcagtaccatgaaagtgaggaggagagcgaggaggaggaggccgcctag

SEQ ID NO: 84377 - DNA, 237 bp, Artificial Sequence
  derived and/or modified sequence
atgagccaggccaccaagaggaagcacgtggtgaaggaggtgctgggggagcacatcgtgcccagcgaccagcagcagatcgtgcgggtgctgcggaccccaggcaacaacctgcacgaggtggagacagcccagggccagcgcttcctggtgtccatgcccagcaagtacaggaagaacatctggatcaagagaggagacttcctgattgtggaccccatcgaggagggggagtag

SEQ ID NO: 84378 - DNA, 441 bp, Artificial Sequence
  derived and/or modified sequence
atgagccaggccaccaagaggaagcacgtggtgaaggaggtgctgggggagcacatcgtgcccagcgaccagcagcagatcgtgcgggtgctgcggaccccaggcaacaacctgcacgaggtggagacagcccagggccagcgcttcctggtgtccatgcccagcaagtacaggaagaacatctggatcaagagaggagacttcctgattgtggaccccatcgaggagggggagaaggtgaaggccgagatcagctttgtgctgtgcaaggaccacgtgcgcagcctgcagaaggagggcttctggccagaggccttcagcgaggtggccgagaagcacaacaacagaaaccggcagacccagcctgagctgcctgctgagccccagctgtctggagaggagagcagcagtgaagatgacagcgacctgtttgtgaactag

SEQ ID NO: 84379 - DNA, 345 bp, Artificial Sequence
  derived and/or modified sequence
atgagccaggccaccaagaggaagcacgtggtgaaggaggtgctgggggagcacatcgtgcccagcgaccagcagcagatcgtgcgggtgctgcggaccccaggcaacaacctgcacgaggtggagacagcccagggccagcgcttcctggtgtccatgcccagcaagtacaggaagaacatctggatcaagagaggagacttcctgattgtggaccccatcgaggagggggagaaggtgaaggccgagatcagctttgtgctgtgcaaggaccacgtgcgcagcctgcagaaggagggcttctggccagaggccttcagcgaggtggccgagaagcacaactag

SEQ ID NO: 84380 - DNA, 342 bp, Artificial Sequence
  derived and/or modified sequence
atgagccaggccaccaagaggaagcacgtggtgaaggaggtgctgggggagcacatcgtgcccagcgaccagcagcagatcgtgcgggtgctgcggaccccaggcaacaacctgcacgaggtggagacagcccagggccagcgcttcctggtgtccatgcccagcaagtacaggaagaacatctggatcaagagaggagacttcctgattgtggaccccatcgaggagggggagaaggtgaaggccgagatcagctttgtgctgtgcaaggaccacgtgcgcagcctgcagaaggagggcttctggccagaggccttcagcgaggtggccgagaagcactag

SEQ ID NO: 84381 - DNA, 498 bp, Artificial Sequence
  derived and/or modified sequence
atgagccaggccaccaagcggaagcacgtggtgaaggaggtgctgggggaacatattgtccccagtgatcaacagcagattgtgagagtgctccggactccgggaaataatctgcatgaagtggaaactgcacaagggcagcgtttcctggtgtctatgccctcaaaatatagaaaaaacatttggatcaagagaggagacttcctcattgtggacccaatcgaggaaggcgaaaaggtgaaagcagagatcagttttgtgctgtgcaaggatcacgtgcgctcattgcagaaggaaggattctggcctgaagccttctctgaggtggcagagaagcataacaaccggaatagacagacacagcctgagctgcccgcggagccacagcttagcggcgaagaaagttccagcgaagatgacagtgatttgtttgtgaacaccaataggcgccagtaccacgaaagcgaagaagaaagcgaggaggaagaggccgcttag

SEQ ID NO: 84382 - DNA, 498 bp, Artificial Sequence
  derived and/or modified sequence
atgagccaggccaccaagcggaagcacgtggtgaaggaggtgctgggggaacacatcgtcccttctgatcaacagcagattgtgagggttctgcgcaccccaggaaataacctgcacgaagtggaaacagcgcagggacagagattcctggtgtccatgccaagtaagtaccgtaaaaatatttggattaagcgaggagacttcctgatagtggatccaatcgaggaaggagagaaggttaaggctgagatatcttttgtgctgtgcaaagatcacgtcaggtccctgcagaaggaaggcttttggcctgaggcgtttagcgaggtggccgaaaagcataataatcgcaacaggcagacccagcctgaactccccgctgaacctcaacttagtggcgaagagtcctcctctgaggacgacagcgatctcttcgttaacaccaacaggagacagtaccacgagtccgaagaggagtctgaagaggaagaggccgcatag

SEQ ID NO: 84383 - DNA, 237 bp, Artificial Sequence
  derived and/or modified sequence
atgagccaggccaccaagcggaagcacgtggtgaaggaggtgctgggtgaacatatcgtaccttcagatcaacaacaaatcgtacgggtactgagaactcccggcaacaacttgcacgaggtggagacagcacagggccaacgcttccttgtgtccatgccgagcaagtaccgaaaaaacatttggataaagcggggggacttcctcattgtggaccccatcgaggagggggaatag

SEQ ID NO: 84384 - DNA, 498 bp, Artificial Sequence
  derived and/or modified sequence
atgagccaggccaccaagcggaagcacgtggtgaaggaggtgctgggggaacacattgttccctctgatcagcaacaaatcgttcgagtgttgcgaacccccggcaataacttgcacgaggttgaaactgctcaggggcaaagatttctggtttccatgccaagcaagtacagaaagaacatctggatcaagaggggggacttcctcattgtggaccccatagaagaaggcgagaaggtgaaggctgagatctcttttgtcctatgtaaggaccacgtccggtcactgcagaaagagggtttttggcctgaggccttctcagaagttgctgaaaaacacaacaaccgcaatcgccagactcagcccgaactccctgctgagccccagctgtctggagaggagtctagcagcgaggacgatagcgacttgttcgtcaacactaaccgcaggcagtaccacgagtcagaggaagagagcgaggaggaagaggccgcatag

SEQ ID NO: 84385 - DNA, 441 bp, Artificial Sequence
  derived and/or modified sequence
atgagccaggccaccaagcggaagcacgtggtgaaggaggtgctgggggaacacattgttcctagcgaccagcagcagatcgtgagagtgctgaggacccccggaaataacctgcacgaggtggagactgctcagggacagaggttcctggtaagcatgcctagtaaataccggaaaaacatatggataaagcgcggagacttcctaatagttgatcctatcgaggagggggaaaaagtaaaagcagagatctccttcgtgctgtgtaaggatcacgttcgcagcctacagaaggagggattttggccagaggcctttagcgaagtcgcagagaaacacaacaatcgcaacagacagacccagcccgagttgccagccgagccacagttgtctggcgaagaaagcagtagtgaggacgacagcgacctgttcgtgaattag

SEQ ID NO: 84386 - DNA, 345 bp, Artificial Sequence
  derived and/or modified sequence
atgagccaggccaccaagcggaagcacgtggtgaaggaggtgctgggagagcacattgttccctctgatcaacagcagattgtcagagtcctccggacaccagggaataatctgcatgaagttgagacagcccagggccaaagattccttgtctccatgccttcaaagtatcgtaagaatatctggattaagcgtggagacttcctgatcgtggatcccattgaggaaggggaaaaagtgaaagcagagatctcctttgttttgtgcaaagaccatgtaaggagtcttcagaaggagggcttttggccagaagctttttccgaagtggccgagaaacacaattag

SEQ ID NO: 84387 - DNA, 342 bp, Artificial Sequence
  derived and/or modified sequence
atgagccaggccaccaagcggaagcacgtggtgaaggaggtgctgggagaacacatcgtcccctcagaccaacaacagatcgtgcgggtcttaaggacgcctggtaataatttgcatgaagttgaaaccgctcaggggcagaggttcttagtgtctatgccttcaaaataccggaagaacatatggataaaaagaggagacttccttatcgttgacccaatcgaagagggagaaaaggtcaaagctgagatctcattcgtcctatgcaaggatcacgttcggtccctgcagaaagaaggcttctggcccgaggcgttcagtgaggtggcagaaaagcattag

SEQ ID NO: 84388 - DNA, 498 bp, Artificial Sequence
  derived and/or modified sequence
atgagccaggccaccaagcggaagcacgtggtgaaggaggtgctgggggaacatatcgtgcctagtgaccagcagcagatcgtgagggtgttgagaacaccgggcaacaatctgcatgaggtggagactgcacagggtcaaagattcttagtttcaatgccaagcaaataccgtaaaaatatctggattaagaggggagattttcttatcgttgatccaattgaagaaggcgagaaggtcaaagccgagatctcctttgttctgtgcaaggaccatgtgaggagtttgcagaaagagggattttggcccgaggccttcagcgaagtcgcagagaagcacaacaataggaacaggcagacgcagcctgagctaccagcagagccacagctgagtggtgaggagtctagcagcgaggatgactctgacctgtttgttaatactaatcggaggcagtaccatgagtcagaggaagaatctgaggaggaggaggctgcttag

SEQ ID NO: 84389 - DNA, 498 bp, Artificial Sequence
  derived and/or modified sequence
atgagccaggctacaaagaggaagcacgtggtcaaagaggtgttaggagagcacatcgtgcctagtgaccagcaacagatcgtcagagtgctgcgaacacctggcaacaacctgcatgaagtggaaacagcccaaggccaaaggtttctcgtgagcatgccctccaaataccgaaagaacatctggattaagagaggcgattttttaatcgtggatccaattgaggaaggcgagaaagttaaggccgagatcagtttcgtattatgcaaggaccacgtgcgaagcttacagaaggaaggcttctggccagaagccttcagtgaagtggcggaaaagcataacaacaggaatcggcaaactcaaccagaactgcccgctgagcctcaactctctggtgaggagagttcctccgaagatgattccgatctgttcgtaaacactaataggagacagtaccatgaatccgaggaggagagcgaggaagaggaagccgcttag

SEQ ID NO: 84390 - DNA, 498 bp, Artificial Sequence
  derived and/or modified sequence
atgtctcaggcaaccaaacgcaaacacgtggttaaggaggtcctgggcgaacacatcgttccaagtgatcagcaacagattgtccgagtgcttagaacccccggtaataatctgcacgaggtcgagactgctcaagggcagaggtttctggtgagtatgccatctaaatacaggaaaaatatttggatcaagcgcggagactttctcatcgtggatccgattgaggagggggagaaagtgaaggcggagatcagttttgttctgtgtaaagatcacgtgaggagcctgcagaaagagggtttctggccagaggcattttcggaagtggcagagaagcacaacaatagaaacaggcagacacagcccgagcttcctgccgaaccccaactctcaggtgaggaatcgtcaagcgaagacgacagtgacctgttcgtgaataccaatcggagacagtatcatgaatctgaagaggaatccgaggaagaagaagcagcctag

SEQ ID NO: 84391 - DNA, 237 bp, Artificial Sequence
  derived and/or modified sequence
atgtcacaggcaaccaagcgaaaacacgtagtcaaggaggtgttaggagagcacatagtcccctcagatcagcagcaaattgtcagggtcttacgcacgccaggaaacaatctccatgaagtggagaccgctcaggggcagcggtttctggtcagcatgcccagcaaataccgcaagaacatatggattaagcgcggtgattttctgattgtggaccccatagaagaaggcgagtag

SEQ ID NO: 84392 - DNA, 498 bp, Artificial Sequence
  derived and/or modified sequence
atgtcccaggcaacaaagcgcaagcacgtggtgaaagaggttctcggagaacacattgtgccctccgaccagcagcagatcgtacgggtgctgcgcactccgggtaacaatttgcatgaggtggaaactgctcaggggcaaaggttcctggtatcaatgcccagtaaatacaggaaaaatatttggatcaagcggggagatttcctcatcgtggatcccatcgaggagggggagaaggtgaaagccgagatttccttcgtgctttgcaaggaccacgtgcgctcccttcaaaaggaaggattttggccagaagctttctccgaggtcgccgaaaagcataataatcggaatcgccagacacagccagagctgcccgcagaaccccaactcagcggcgaagaatcctcatccgaggatgactccgacctgtttgtgaataccaaccgtcgacagtaccacgaaagcgaggaagaatccgaagaagaagaagctgcatag

SEQ ID NO: 84393 - DNA, 441 bp, Artificial Sequence
  derived and/or modified sequence
atgtcccaggcaacgaagaggaagcatgtcgtgaaggaggttctaggagagcacattgtcccttctgatcaacagcagatcgtcagagttttacgaactcctggaaataatctacacgaggttgagaccgctcagggccagaggttcctggtcagtatgccgagcaaatatagaaagaacatatggatcaaacgaggagactttctaattgttgacccaatcgaggaaggagaaaaagtaaaggctgaaatatcgtttgtgctttgcaaggaccacgtcagaagcctgcagaaggagggcttttggcctgaagctttctcagaggttgcagaaaagcacaacaatcgaaaccgccaaactcagccggagctgccagctgagccacaactatcaggcgaagaaagttcaagtgaagacgactccgacctgtttgttaattag

SEQ ID NO: 84394 - DNA, 345 bp, Artificial Sequence
  derived and/or modified sequence
atgtcccaggcgaccaaaagaaaacatgtggttaaggaggtcttaggcgagcacattgtgccaagtgaccagcaacaaattgtccgagtcctgcgcacccctggcaacaacttgcacgaagttgagaccgcacaggggcaacgcttcctggtctctatgccatccaaataccggaaaaatatttggatcaagcgcggtgacttcctgatcgttgaccccatcgaggagggtgaaaaagtgaaagccgaaatatccttcgtgctgtgcaaggaccatgtgcggtctctgcagaaggagggattctggcctgaagcattcagcgaggtggcggaaaagcataattag

SEQ ID NO: 84395 - DNA, 342 bp, Artificial Sequence
  derived and/or modified sequence
atgagtcaggccacaaaacggaaacacgtagttaaggaggtcctgggtgaacatatcgtaccaagcgaccaacaacagattgttcgcgttctccgtacccctggaaataacttacatgaggtggagactgcccagggccagagatttctagtctccatgccctccaaataccgcaagaatatttggatcaaacgaggagactttctgatcgttgaccctatagaggaaggcgagaaagtgaaggcagaaattagcttcgtcctctgtaaggaccacgtgcggtcacttcagaaagaagggttctggccagaggctttctcagaggtcgccgaaaaacactag

SEQ ID NO: 84396 - DNA, 498 bp, Artificial Sequence
  derived and/or modified sequence
atgagccaggcaaccaaacgcaaacacgttgtcaaagaagttctgggtgaacatattgtgccatctgatcagcagcaaatcgttcgggttctgagaacgccgggtaataatctgcatgaggtggaaaccgcgcagggccagcgtttcctggtgagtatgcctagtaaataccggaagaacatatggatcaaaaggggtgatttcctgatcgtggaccctattgaggaaggggaaaaagtcaaggccgagatcagttttgtgctttgcaaggaccatgtgcgtagcctgcaaaaagagggattctggccagaggccttcagtgaggtggcagagaagcacaacaaccggaacaggcagacccaacctgaactgcccgctgaacctcaacttagcggtgaggagagctcgtccgaggacgattccgacctttttgtgaatacgaatcggaggcagtaccacgagagcgaagaagaatccgaagaggaggaagccgcttag

SEQ ID NO: 84397 - DNA, 2887 bp, Artificial Sequence
  derived and/or modified sequence
agtacggttttcggagggatcagactcagactcacgtcgcactcctcgcagttggactggtgggaactgggaacactggagacctgatttctaactgacgctaccgtcgcggccgccggcaagttcctttactgtgttttcttggttcagccttgaagtgagtcgtggacgatcctctctcagcgtccagcctagacggcggtgttgctccggcagcgttcctgggagccgagggccagagactaagttcctgggttctgagcctgccatccaaggaactcaggaggaggagttgacagtctcttcgttcctaaccagtgtgggacgacttcagcatgtctcaggccaccaagaggaagcatgtggtgaaggaggtgctaggggagcacatagtgccctccgaccagcagcagattgtcagggtactcaggaccccagggaacaatctgcatgaggtggagacagcccaagggcagcgcttcctggtgagcatgccctccaaataccgcaagaacatctggatcaagagaggggactttctcattgttgaccccattgaagagggagaaaaggtgaaggctgaaatctcgtttgtgctctgcaaggaccacgtgcgctctctgcagaaggaggggttttggcctgaggccttctctgaagtggctgagaaacacaacaacaggaacagacaaactcaaccagaactcccagctgagccacagttatcaggagaggagtccagctcagaagatgattctgacctgtttgttaacacaaaccgcagacagtatcatgagagtgaggaggagagtgaagaggaggaggcagcctgagactccaggacccaattctccacttgctcagggactggcccctggctcttctgggcttggacattcccagggtgctctgcacatcttcacccctgcatgaggacaaagcagggctcctctctgaactgatcttttgattcagagaattaaacccctggtgggttggtgacttgttctggtgtctgagtggctctctcgggggagggagattgtgatgaagtgaaaaactgctccctatttattagagaccttgtgggtgggtgggctgaatggggaggaaatgggaaatggctggagtctttcccaggtggtttgttctttcttattgggcacttagaaagtgccaggccgtgctctgggccttcttgcatgtgtttaacagctgggagcactcctgcttccttgcctgcttgcagttcataccaatttaagcattcaggatgacagccctaggacctaacacccacctgcctctaagagacgctcaggagcccatggtgcctcgtgctgttctccccgcctttctagtcaccctgtgtacgggagtgctcacctccagctactgtgtccatccccacatacgacctcatctctcccactctgcaccatctatcacttccagaaggtggctggcaaatctctctatccttaactttgttttgaatggtccatccatctcctgactttatttgaaacctgattattccctgaggacattgattgtcttataaccttttaaatagaggctgcttttccaccctcacccttcattcttctaaccagccctgacattctcatgagtaaccttctgccttcacttccctcttgtgtagcatcaattccgtagtccaccctacacccctctgtctccctccattctgttccgctagtaaaaccctaaccctgggtaaacccaatcattcacctctgtgcccaaacccaagtcaccatcattaggtgagaaaacagccagcctggccaccagttgtaccttacgtttatcattacaaacctcagatggacactaagcactgcccagcagatctactctgggatgtctgtttcaaaacttctgtcttatctatcaattcccccttgtggtagttaccacaacacatgcctcattaagaaacagcaaccatcagagggaatgcctgcctccctgttaccagctctgcagatgtgcacatatcttcctgtcgtaagccaatgggacttaaaccttacctcttgtgttttggagactatctttttttttttttttttttttttgagagagtgtctccctgtgttgctcaggctggagtgcagtggtgtgatctcggctcactgtaaccttcacctactgggttcaagtaactctcctgcctcagcctcccgagtagcttggactacaggcgtgcaccaccacacctggctaactttttgtatttttagtagagacggggttttgccatgttgcccgggctggtctcgaactcctgaccttaaatgagcctcctgcctcagcctcccaaactgctgggattacaggcgtgtgccaccatgcctggctaatttttatattttcagtagagacgaggttttgccatgttggccaggctggtctcgaactcctgacctcaagtggtccacccaccttggcctcctagagtgctgggattacaggtgtgagccactgtgcccggcctcttttgctttcttaaagactttggtcgggtatttgtgttgttgagtattgtgtctgggtgtgggtatttgattctttttttgttttgtgtttttggctgtcctgtctattggatgtgatatgttatggatgtgatgtgttagtgtcgagcgtgctgtagaatctcccatttctgaaacaggcgtgaaaacctgtactgattcccacgtcctccagctaccacttcatttgtctgtttctcatttactttctcttatagcgtggctttaaacatatatacatttgtatatatgtatatatgaatataatgtataaaatgtatgtagatgtatatacaaaaaataaacgagatgggttaaagata

SEQ ID NO: 84398 - DNA, 2761 bp, Artificial Sequence
  derived and/or modified sequence
gtacggttttcggagggatcagactcagactcacgtcgcactcctcgcagttggactggtgggaactgggaacactggagacctgatttctaactgacgctaccgtcgcggccgccgaacagtcctgggttctgagcctgccatccaaggaactcaggaggaggagttgacagtctcttcgttcctaaccagtgtgggacgacttcagcatgtctcaggccaccaagaggaagcatgtggtgaaggaggtgctaggggagcacatagtgccctccgaccagcagcagattgtcagggtactcaggaccccagggaacaatctgcatgaggtggagacagcccaagggcagcgcttcctggtgagcatgccctccaaataccgcaagaacatctggatcaagagaggggactttctcattgttgaccccattgaagagggagaaaaggtgaaggctgaaatctcgtttgtgctctgcaaggaccacgtgcgctctctgcagaaggaggggttttggcctgaggccttctctgaagtggctgagaaacacaacaacaggaacagacaaactcaaccagaactcccagctgagccacagttatcaggagaggagtccagctcagaagatgattctgacctgtttgttaacacaaaccgcagacagtatcatgagagtgaggaggagagtgaagaggaggaggcagcctgagactccaggacccaattctccacttgctcagggactggcccctggctcttctgggcttggacattcccagggtgctctgcacatcttcacccctgcatgaggacaaagcagggctcctctctgaactgatcttttgattcagagaattaaacccctggtgggttggtgacttgttctggtgtctgagtggctctctcgggggagggagattgtgatgaagtgaaaaactgctccctatttattagagaccttgtgggtgggtgggctgaatggggaggaaatgggaaatggctggagtctttcccaggtggtttgttctttcttattgggcacttagaaagtgccaggccgtgctctgggccttcttgcatgtgtttaacagctgggagcactcctgcttccttgcctgcttgcagttcataccaatttaagcattcaggatgacagccctaggacctaacacccacctgcctctaagagacgctcaggagcccatggtgcctcgtgctgttctccccgcctttctagtcaccctgtgtacgggagtgctcacctccagctactgtgtccatccccacatacgacctcatctctcccactctgcaccatctatcacttccagaaggtggctggcaaatctctctatccttaactttgttttgaatggtccatccatctcctgactttatttgaaacctgattattccctgaggacattgattgtcttataaccttttaaatagaggctgcttttccaccctcacccttcattcttctaaccagccctgacattctcatgagtaaccttctgccttcacttccctcttgtgtagcatcaattccgtagtccaccctacacccctctgtctccctccattctgttccgctagtaaaaccctaaccctgggtaaacccaatcattcacctctgtgcccaaacccaagtcaccatcattaggtgagaaaacagccagcctggccaccagttgtaccttacgtttatcattacaaacctcagatggacactaagcactgcccagcagatctactctgggatgtctgtttcaaaacttctgtcttatctatcaattcccccttgtggtagttaccacaacacatgcctcattaagaaacagcaaccatcagagggaatgcctgcctccctgttaccagctctgcagatgtgcacatatcttcctgtcgtaagccaatgggacttaaaccttacctcttgtgttttggagactatctttttttttttttttttttttttgagagagtgtctccctgtgttgctcaggctggagtgcagtggtgtgatctcggctcactgtaaccttcacctactgggttcaagtaactctcctgcctcagcctcccgagtagcttggactacaggcgtgcaccaccacacctggctaactttttgtatttttagtagagacggggttttgccatgttgcccgggctggtctcgaactcctgaccttaaatgagcctcctgcctcagcctcccaaactgctgggattacaggcgtgtgccaccatgcctggctaatttttatattttcagtagagacgaggttttgccatgttggccaggctggtctcgaactcctgacctcaagtggtccacccaccttggcctcctagagtgctgggattacaggtgtgagccactgtgcccggcctcttttgctttcttaaagactttggtcgggtatttgtgttgttgagtattgtgtctgggtgtgggtatttgattctttttttgttttgtgtttttggctgtcctgtctattggatgtgatatgttatggatgtgatgtgttagtgtcgagcgtgctgtagaatctcccatttctgaaacaggcgtgaaaacctgtactgattcccacgtcctccagctaccacttcatttgtctgtttctcatttactttctcttatagcgtggctttaaacatatatacatttgtatatatgtatatatgaatataatgtataaaatgtatgtagatgtatatacaaaaaataaacgagatgggttaaagata

SEQ ID NO: 84399 - DNA, 588 bp, Artificial Sequence
  derived and/or modified sequence
ttctcccttttctcctgtcttataaactagggaaaaggggaggttggagagaaactaagaaggccaacaggagaagtggtggcctcataccatactgtaacagtgctgagttagctgttatttttctgggacctagagaagttgaatagttaggaaataaaccaaggtaggatttgaatccaggcagttagacttcagaacccatgttcttaaccaagacaccgtgtcacccctcagtaaaaggcccctccccatcttcagaacagtcctgggttctgagcctgccatccaaggaactcaggaggaggagttgacagtctcttcgttcctaaccagtgtgggacgacttcagcatgtctcaggccaccaagaggaagcatgtggtgaaggaggtgctaggggagcacatagtgccctccgaccagcagcagattgtcagggtactcaggaccccagggaacaatctgcatgaggtggagacagcccaagggcagcgcttcctggtgagcatgccctccaaataccgcaagaacatctggatcaagagaggggactttctcattgttgaccccattgaagagggagaaa

SEQ ID NO: 84400 - DNA, 889 bp, Artificial Sequence
  derived and/or modified sequence
cctccgagacagcgccggaagtacggttttcggagggatcagactcagactcacgtcgcactcctcgcagttggactggtgggaactgggaacactggagacctgatttctaactgacgctaccgtcgcggccgccggcaagttcctttactgtgttttcttggttcagccttgaagtgagtcgtggacgatcctctctcagcgtccagcctagacggcggtgttgctccggcagcgttcctgggagccgagggccagagactaagtaacagtcctgggttctgagcctgccatccaaggaactcaggaggaggagttgacagtctcttcgttcctaaccagtgtgggacgacttcagcatgtctcaggccaccaagaggaagcatgtggtgaaggaggtgctaggggagcacatagtgccctccgaccagcagcagattgtcagggtactcaggaccccagggaacaatctgcatgaggtggagacagcccaagggcagcgcttcctggtgagcatgccctccaaataccgcaagaacatctggatcaagagaggggactttctcattgttgaccccattgaagagggagaaaaggtgaaggctgaaatctcgtttgtgctctgcaaggaccacgtgcgctctctgcagaaggaggggttttggcctgaggccttctctgaagtggctgagaaacacaacaacaggaacagacaaactcaaccagaactcccagctgagccacagttatcaggagaggagtccagctcagaagatgattctgacctgtttgttaacacaaaccgcagacagtatcatgagagtgaggaggagagtgaagaggaggaggcagcctgagactccaggacccaattctccacttgctcagg

SEQ ID NO: 84401 - DNA, 808 bp, Artificial Sequence
  derived and/or modified sequence
agcgccggaagtacggttttcggagggatcagactcagactcacgtcgcactcctcgcagttggactggtgggaactgggaacactggagacctgatttctaactgacgctaccgtcgcggccgccgtgtgggacgacttcagcatgtctcaggccaccaagaggaagcatgtggtgaaggaggtgctaggggagcacatagtgccctccgaccagcagcagattgtcagggtactcaggaccccagggaacaatctgcatgaggtggagacagcccaagggcagcgcttcctggtgagcatgccctccaaataccgcaagaacatctggatcaagagaggggactttctcattgttgaccccattgaagagggagaaaaggtgaaggctgaaatctcgtttgtgctctgcaaggaccacgtgcgctctctgcagaaggaggggttttggcctgaggccttctctgaagtggctgagaaacacaacaacaggaacagacaaactcaaccagaactcccagctgagccacagttatcaggagaggagtccagctcagaagatgattctgacctgtttgttaacacaaaccgcagacagtatcatgagagtgaggaggagagtgaagaggaggaggcagcctgagactccaggacccaattctccacttgctcagggactggcccctggctcttctgggcttggacattcccagggtgctctgcacatcttcacccctgcatgaggacaaagcagggctcctctctgaactgatcttttgattcagagaattaaacccctggtgggttgg

SEQ ID NO: 84402 - DNA, 580 bp, Artificial Sequence
  derived and/or modified sequence
ggaagtacggttttcggagggatcagactcagactcacgtcgcactcctcgcagttggactggtgggaactgggaacactggagacctgatttctaactgacgctaccgtcgcggccgccgtaaaaggcccctccccatcttcagaacagtcctgggttctgagcctgccatccaaggaactcaggaggaggagttgacagtctcttcgttcctaaccagtgtgggacgacttcagcatgtctcaggccaccaagaggaagcatgtggtgaaggaggtgctaggggagcacatagtgccctccgaccagcagcagattgtcagggtactcaggaccccagggaacaatctgcatgaggtggagacagcccaagggcagcgcttcctggtgagcatgccctccaaataccgcaagaacatctggatcaagagaggggactttctcattgttgaccccattgaagagggagaaaaggtgaaggctgaaatctcgtttgtgctctgcaaggaccacgtgcgctctctgcagaaggaggggttttggcctgaggccttctctgaagtggctgagaaacacaaca

SEQ ID NO: 84403 - DNA, 584 bp, Artificial Sequence
  derived and/or modified sequence
agactcagactcacgtcgcactcctcgcagttggactggtgggaactgggaacactggagacctgatttctaactgacgctaccgtcgcggccgccggcaagttcctttactgtgttttcttggttcagccttgaagtgagtcgtggacgatcctctctcagcgtccagcctagacggcggtgttgctccggcagcgttcctgggagccgagggccagagactaagttgtgggacgacttcagcatgtctcaggccaccaagaggaagcatgtggtgaaggaggtgctaggggagcacatagtgccctccgaccagcagcagattgtcagggtactcaggaccccagggaacaatctgcatgaggtggagacagcccaagggcagcgcttcctggtgagcatgccctccaaataccgcaagaacatctggatcaagagaggggactttctcattgttgaccccattgaagagggagaaaaggtgaaggctgaaatctcgtttgtgctctgcaaggaccacgtgcgctctctgcagaaggaggggttttggcctgaggccttctctgaagtggctgagaaacaca

SEQ ID NO: 84404 - DNA, 965 bp, Artificial Sequence
  derived and/or modified sequence
acggttttcggagggatcagactcagactcacgtcgcactcctcgcagttggactggtgggaactgggaacactggagacctgatttctaactgacgctaccgtcgcggccgccggcaagttcctttactgtgttttcttggttcagccttgaagtgagtcgtggacgatcctctctcagcgtccagcctagacggcggtgttgctccggcagcgttcctgggagccgagggccagagactaagttaaaaggcccctccccatcttcagaacagtcctgggttctgagcctgccatccaaggaactcaggaggaggagttgacagtctcttcgttcctaaccagtgtgggacgacttcagcatgtctcaggccaccaagaggaagcatgtggtgaaggaggtgctaggggagcacatagtgccctccgaccagcagcagattgtcagggtactcaggaccccagggaacaatctgcatgaggtggagacagcccaagggcagcgcttcctggtgagcatgccctccaaataccgcaagaacatctggatcaagagaggggactttctcattgttgaccccattgaagagggagaaaaggtgaaggctgaaatctcgtttgtgctctgcaaggaccacgtgcgctctctgcagaaggaggggttttggcctgaggccttctctgaagtggctgagaaacacaacaacaggaacagacaaactcaaccagaactcccagctgagccacagttatcaggagaggagtccagctcagaagatgattctgacctgtttgttaacacaaaccgcagacagtatcatgagagtgaggaggagagtgaagaggaggaggcagcctgagactccaggacccaattctccacttgctcagggactggcccctggctcttctgggcttggacattcccagggtgctctgcacatcttcacccctgcatgaggacaa

SEQ ID NO: 84405 - DNA, 498 bp, Artificial Sequence
  derived and/or modified sequence
atgagccaggccaccaagagaaagcacgtggtgaaggaggtgctgggcgagcacatcgtgcccagcgaccagcagcagatcgtgagagtgctgagaacccccggcaacaacctgcacgaggtggagaccgcccagggccagagattcctggtgagcatgcccagcaagtacagaaagaacatctggatcaagagaggcgacttcctgatcgtggaccccatcgaggagggcgagaaggtgaaggccgagatcagcttcgtgctgtgcaaggaccacgtgagaagcctgcagaaggagggcttctggcccgaggccttcagcgaggtggccgagaagcacaacaacagaaacagacagacccagcccgagctgcccgccgagccccagctgagcggcgaggagagcagcagcgaggacgacagcgacctgttcgtgaacaccaacagaagacagtaccacgagagcgaggaggagagcgaggaggaggaggccgcctag

SEQ ID NO: 84406 - DNA, 237 bp, Artificial Sequence
  derived and/or modified sequence
atgagccaggccaccaagagaaagcacgtggtgaaggaggtgctgggcgagcacatcgtgcccagcgaccagcagcagatcgtgagagtgctgagaacccccggcaacaacctgcacgaggtggagaccgcccagggccagagattcctggtgagcatgcccagcaagtacagaaagaacatctggatcaagagaggcgacttcctgatcgtggaccccatcgaggagggcgagtag

SEQ ID NO: 84407 - DNA, 441 bp, Artificial Sequence
  derived and/or modified sequence
atgagccaggccaccaagagaaagcacgtggtgaaggaggtgctgggcgagcacatcgtgcccagcgaccagcagcagatcgtgagagtgctgagaacccccggcaacaacctgcacgaggtggagaccgcccagggccagagattcctggtgagcatgcccagcaagtacagaaagaacatctggatcaagagaggcgacttcctgatcgtggaccccatcgaggagggcgagaaggtgaaggccgagatcagcttcgtgctgtgcaaggaccacgtgagaagcctgcagaaggagggcttctggcccgaggccttcagcgaggtggccgagaagcacaacaacagaaacagacagacccagcccgagctgcccgccgagccccagctgagcggcgaggagagcagcagcgaggacgacagcgacctgttcgtgaactag

SEQ ID NO: 84408 - DNA, 345 bp, Artificial Sequence
  derived and/or modified sequence
atgagccaggccaccaagagaaagcacgtggtgaaggaggtgctgggcgagcacatcgtgcccagcgaccagcagcagatcgtgagagtgctgagaacccccggcaacaacctgcacgaggtggagaccgcccagggccagagattcctggtgagcatgcccagcaagtacagaaagaacatctggatcaagagaggcgacttcctgatcgtggaccccatcgaggagggcgagaaggtgaaggccgagatcagcttcgtgctgtgcaaggaccacgtgagaagcctgcagaaggagggcttctggcccgaggccttcagcgaggtggccgagaagcacaactag

SEQ ID NO: 84409 - DNA, 342 bp, Artificial Sequence
  derived and/or modified sequence
atgagccaggccaccaagagaaagcacgtggtgaaggaggtgctgggcgagcacatcgtgcccagcgaccagcagcagatcgtgagagtgctgagaacccccggcaacaacctgcacgaggtggagaccgcccagggccagagattcctggtgagcatgcccagcaagtacagaaagaacatctggatcaagagaggcgacttcctgatcgtggaccccatcgaggagggcgagaaggtgaaggccgagatcagcttcgtgctgtgcaaggaccacgtgagaagcctgcagaaggagggcttctggcccgaggccttcagcgaggtggccgagaagcactag

SEQ ID NO: 84410 - DNA, 270 bp, Artificial Sequence
  derived and/or modified sequence
atggggatcctgtctgtggaccttcttataacactccagatacttcctgtgtttttttctaactgcctatttcttgcgctgtacgactctgtgatcctgctgaaacacgtggtccttctgctgtcgcgatcaaaaagcacgaggggtgaatggcgcaggatgcttacctcggaaggcctgcgctgtgtgtggaaatcctttttactggatgcctataagcagctgaactgtccgccttcgggtttctccaaggatggccatatactgtag

SEQ ID NO: 84411 - DNA, 270 bp, Artificial Sequence
  derived and/or modified sequence
atgggcatcctgtctgtggacctgctgatcaccctgcagatcctgcccgtcttcttcagcaactgcctcttcctggccctgtatgacagcgtcatcctgctgaagcacgtggtgctgctgctgagccgcagcaagagcaccagaggagagtggaggaggatgctgaccagcgagggcctgcgctgtgtgtggaagagcttcctgctggatgcctacaagcagctgaactgcccccccagcggcttcagcaaggatggccacatcctgtag

SEQ ID NO: 84412 - DNA, 270 bp, Artificial Sequence
  derived and/or modified sequence
atgggcatcctgagcgtggacctgctgatcaccctgcagatcctgcccgtttttttcagcaattgcctgttccttgctctgtatgattccgtgattctcctcaaacatgtagtgttgctcctctcacgctccaaatctacccgcggcgaatggaggcggatgcttacttcagaaggcctacggtgcgtttggaaatcctttctgctcgacgcctataagcagttgaactgtccgcccagtggttttagtaaggatggtcatattttgtag

SEQ ID NO: 84413 - DNA, 270 bp, Artificial Sequence
  derived and/or modified sequence
atgggaatcctgtctgtggatctcctcattaccctccagatactcccagtgttcttctctaattgcctgtttctggcattgtacgatagtgtcatcttattaaagcacgtggttctactcctatcccgctcaaagtccacccgcggagagtggaggcgaatgttaaccagcgaaggtcttcgctgcgtttggaagagttttttgctggacgcgtacaaacagttgaattgtcctccgagtggttttagcaaggacgggcatatactgtag

SEQ ID NO: 84414 - DNA, 270 bp, Artificial Sequence
  derived and/or modified sequence
atgggcatcctgagcgtggacctgctgatcaccctgcagatcctgcccgtgttcttcagcaactgcctgttcctggccctgtacgacagcgtgatcctgctgaagcacgtggtgctgctgctgagcagaagcaagagcaccagaggcgagtggagaagaatgctgaccagcgagggcctgagatgcgtgtggaagagcttcctgctggacgcctacaagcagctgaactgcccccccagcggcttcagcaaggacggccacatcctgtag

SEQ ID NO: 84415 - DNA, 168 bp, Artificial Sequence
  derived and/or modified sequence
atggggatcttatcagtggatctactgattaccttgcagatcctccctgtgttttttagcaattgccttttcttggctttgtacgactcagtcattcttcttaaacatgtcgtgctgctattgtcccgatccaagagtaccagaggcgagtggaggaggatgctttag

SEQ ID NO: 84416 - DNA, 168 bp, Artificial Sequence
  derived and/or modified sequence
atgggcatcctgtctgtggacctgctgatcaccctgcagatcctgcccgtcttcttcagcaactgcctcttcctggccctgtatgacagcgtcatcctgctgaagcacgtggtgctgctgctgagccgcagcaagagcaccagaggagagtggaggaggatgctgtag

SEQ ID NO: 84417 - DNA, 168 bp, Artificial Sequence
  derived and/or modified sequence
atgggcatcctgagcgtggacctgctgatcaccctgcagatcctgcccgtgttcttcagcaattgccttttccttgctctgtacgattccgtgattctgctaaaacacgtggtgcttcttctgagccgaagcaagtctacccgcggagagtggcggcgcatgctgtag

SEQ ID NO: 84418 - DNA, 168 bp, Artificial Sequence
  derived and/or modified sequence
atgggcatcctcagtgttgaccttctgatcaccctgcagatactgcctgtattctttagcaattgcctatttttagccttatacgactcagtgattcttcttaaacacgttgttctgctcttgagtaggtcaaaatctacccgtggcgagtggcgtaggatgctgtag

SEQ ID NO: 84419 - DNA, 168 bp, Artificial Sequence
  derived and/or modified sequence
atgggcatcctgagcgtggacctgctgatcaccctgcagatcctgcccgtgttcttcagcaactgcctgttcctggccctgtacgacagcgtgatcctgctgaagcacgtggtgctgctgctgagcagaagcaagagcaccagaggcgagtggagaagaatgctgtag

SEQ ID NO: 84420 - DNA, 569 bp, Artificial Sequence
  derived and/or modified sequence
aaagtgcttgcaattgcatagagcaaagagcatgctgaacagtgatgttccagtttaaaaggacagagctgcaaacaaaggactttggacttgggccggaactacacatcagctctcctgggcctctagcttgccaactacggacactgtgacttttcagccatcacaattgttaggtagcctggaaaaaaaagagaagcaacagttcctgagggaagaatgcattaacaactcggatgggtgctgtctgccagcactgcagaggaacctacggagagggctgctgggagagaatgctcatacctcccaaggcgtcagcctgccctcccgcccccaagttgctttgctcaagagggtgaaggggaaccagagcgcacaagggaactgactcaggaggcagagaagatgggcatcctcagcgtagacttgctgatcacactgcaaattctgccagtttttttctccaactgcctcttcctggctctctatgactcggtcattctgctcaagcacgtggtgctgctgttgagccgctccaagtccactcgcggagagtggcggcgcatgct

SEQ ID NO: 84421 - protein, 471 aa, Artificial Sequence
  derived and/or modified sequence
MCAAQMPPLAHIFRGTFVHSTWTCPMEVLRDHLLGVSDSGKIVFLEEASQQEKLAKEWCFKPCEIRELSHHEFFMPGLVDTHIHASQYSFAGSSIDLPLLEWLTKYTFPAEHRFQNIDFAEEVYTRVVRRTLKNGTTTACYFATIHTDSSLLLADITDKFGQRAFVGKVCMDLNDTFPEYKETTEESIKETERFVSEMLQKNYSRVKPIVTPRFSLSCSETLMGELGNIAKTRDLHIQSHISENRDEVEAVKNLYPSYKNYTSVYDKNNLLTNKTVMAHGCYLSAEELNVFHERGASIAHCPNSNLSLSSGFLNVLEVLKHEVKIGLGTDVAGGYSYSMLDAIRRAVMVSNILLINKVNEKSLTLKEVFRLATLGGSQALGLDGEIGNFEVGKEFDAILINPKASDSPIDLFYGDFFGDISEAVIQKFLYLGDDRNIEEVYVGGKQVVPFSSSVKETIHLPASSPHPPPFP

SEQ ID NO: 84422 - protein, 410 aa, Artificial Sequence
  derived and/or modified sequence
MEVLRDHLLGVSDSGKIVFLEEASQQEKLAKEWCFKPCEIRELSHHEFFMPGLVDTHIHASQYSFAGSSIDLPLLEWLTKYTFPAEHRFQNIDFAEEVYTRVVRRTLKNGTTTACYFATIHTDSSLLLADITDKFGQRAFVGKVCMDLNDTFPEYKETTEESIKETERFVSEMLQKNSHISENRDEVEAVKNLYPSYKNYTSVYDKNNLLTNKTVMAHGCYLSAEELNVFHERGASIAHCPNSNLSLSSGFLNVLEVLKHEVKIGLGTDVAGGYSYSMLDAIRRAVMVSNILLINKVNEKSLTLKEVFRLATLGGSQALGLDGEIGNFEVGKEFDAILINPKASDSPIDLFYGDFFGDISEAVIQKFLYLGDDRNIEEVYVGGKQVVPFSSSVKETIHLPASSPHPPPFP

SEQ ID NO: 84423 - DNA, 1416 bp, Artificial Sequence
  derived and/or modified sequence
atgtgtgccgctcagatgccacctctggcacatattttcagaggcacatttgttcacagcacgtggacctgcccaatggaggttctgagagatcatctccttggcgtgagtgacagcgggaagatcgtcttcctcgaagaagcctcacagcaagaaaaattggcaaaggaatggtgttttaaaccctgtgaaatccgcgagctgtcccatcatgaatttttcatgcctgggctcgtcgacactcacatccatgcttcccagtatagcttcgcgggtagctcgatagatctgcctctgctggaatggttgactaagtatacttttcctgcggagcacaggtttcagaacatagacttcgcagaagaggtttacactcgtgtcgtgcggcggactctgaagaacggcaccacaacagcgtgctacttcgcaactattcataccgactcaagcctgttactggccgacatcaccgataaatttggccagagggcctttgtgggcaaggtgtgcatggacctaaacgatacattccccgaatacaaggaaacaactgaagagtctataaaggaaacagagcgctttgtgtccgaaatgcttcagaaaaactactccagagtgaagcctatcgtcaccccgaggttctccctctcttgctctgaaacgctgatgggcgaactgggcaacatagccaagaccagagatcttcacatccagtcccacattagcgagaaccgcgatgaggtggaggctgtcaaaaacttatacccgagttacaagaattacacctcagtctacgataagaacaatctgctcaccaacaagacagtgatggcacacgggtgctaccttagcgccgaggaacttaacgtgttccacgagcgcggggcatccatcgcccactgcccgaattctaacctgagcttgtcgtcggggttcctgaacgtgctggaggtacttaagcacgaggtgaagatcggattaggcacagacgtggccggcgggtacagctacagtatgttagacgccataagacgggctgtgatggtgagtaacatcctgttgataaacaaagtcaacgaaaagtctttaacactgaaggaggtgtttaggctagctaccctggggggctcgcaggcacttggtctggacggtgaaatagggaacttcgaagtcgggaaagagttcgacgccatcttgatcaaccccaaagcttccgactcaccgatcgacctgttctacggcgatttcttcggtgacatcagcgaggcggtgattcaaaagttcctctatctgggcgatgacaggaacatcgaggaagtttatgtcggcggaaagcaagtcgttcctttctcatcgtctgtgaaggagaccattcacctgcctgccagttcaccacacccaccacccttcccctag

SEQ ID NO: 84424 - DNA, 1233 bp, Artificial Sequence
  derived and/or modified sequence
atggaagtacttcgggaccatctgctgggagtgagcgatagcggaaagatcgtttttctggaggaagcctcccagcaggaaaaactggcaaaagagtggtgcttcaagccctgcgaaatccgcgaactttctcatcacgaattttttatgcctgggctggtggatacacacatacacgcaagccagtactcgttcgctggatcaagtattgatctgcctttgctagaatggctcacgaaatatacgttcccagcagaacatagattccagaatatcgactttgcagaggaagtgtacacacgggtggtgagacgcacgctcaaaaacggaaccactaccgcctgctatttcgctaccatccataccgactctagcttgctgctcgccgacataacagacaaatttgggcagcgcgctttcgtagggaaggtgtgtatggacctgaatgatacgttccccgaatacaaggagaccactgaggaatcgataaaagagactgagagattcgtgagcgagatgcttcagaagaactcccacatttctgagaatcgagatgaggtagaggctgtaaaaaacctgtaccctagctataagaactacacttccgtttatgacaagaacaaccttcttacgaacaagacggttatggcccacgggtgttacctctccgccgaagaactaaacgttttccacgagagaggagcctctatcgcgcactgcccgaattcaaacctcagcctctcctccggcttcttaaatgttctggaagttttaaagcacgaagtcaagatcggtctgggtacagatgtggctggggggtattcctactccatgctggacgccatccgcagagccgttatggtgtcgaatatcctgctgatcaataaggtaaacgaaaaaagtctgaccctgaaggaagtgtttcggttagccaccctcggcggttcccaggcattaggcctcgatggggaaattggcaactttgaggtcggcaaggagtttgacgccattctgatcaaccccaaagcatctgattctccaatagatctattttatggtgatttctttggggatatatcagaggcggtcatccagaaattcctctatctgggcgatgacaggaacatagaggaagtctacgtagggggcaagcaagtggtgccattcagctcgtcggtgaaggagaccatacatctgcccgcttcctccccccatcctcccccattcccatag

SEQ ID NO: 84425 - DNA, 1599 bp, Artificial Sequence
  derived and/or modified sequence
gtagggagccagcccctgggcgcggcctgcagggtaccggcaaccgcccgggtaagcgggggcaggacaaggccggagcctgtgtccgcccggcagccgcccgcagctgcagagagtcccgctgcgtctccgccgcgtgcgccctcctcgaccagcagacccgcgctgcgctccgccgctgacatgtgtgccgctcagatgccgcccctggcgcacatcttccgagggacgttcgtccactccacctggacctgccccatggaggtgctgcgggatcacctcctcggcgtgagcgacagcggcaaaatagtgtttttagaagaagcatctcaacaggaaaaactggccaaagaatggtgcttcaagccgtgtgaaataagagaactgagccaccatgagttcttcatgcctgggctggttgatacacacatccatgcctctcagtattcctttgctggaagtagcatagacctgccactcttggagtggctgaccaagtacacatttcctgcagaacacagattccagaacatcgactttgcagaagaagtatataccagagttgtcaggagaacactaaagaatggaacaaccacagcttgttactttgcaacaattcacactgactcatctctgctccttgccgacattacagataaatttggacagcgggcatttgtgggcaaagtttgcatggatttgaatgacacttttccagaatacaaggagaccactgaggaatcgatcaaggaaactgagagatttgtgtcagaaatgctccaaaagaactattctagagtgaagcccatagtgacaccacgtttttccctctcctgctctgagactttgatgggtgaactgggcaacattgctaaaacccgtgatttgcacattcagagccatataagtgaaaatcgtgatgaagttgaagctgtgaaaaacttataccccagttataaaaactacacatctgtgtatgataaaaacaatcttttgacaaataagacagtgatggcacacggctgctacctctctgcagaagaactgaacgtattccatgaacgaggagcatccatcgcacactgtcccaattctaatttatcgctcagcagtggatttctaaatgtgctagaagtcctgaaacatgaagtcaagatagggctgggtacagacgtggctggtggctattcatattccatgcttgatgcaatcagaagagcagtgatggtttccaatatccttttaattaataaggtaaatgagaaaagcctcaccctcaaagaagtcttcagactagctactcttggaggaagccaagccctggggctggatggtgagattggaaactttgaagtgggcaaggaatttgatgccatcctgatcaaccccaaagcatccgactctcccattgacctgttttatggggacttttttggtgatatttctgaggctgttatccagaagttcctctatctaggagatgatcgaaatattgaagaggtttatgtgggcggaaagcaggtggttccgttttccagctcagtgaaagaaacaattcacttaccagcctcctcaccccatcctccaccatttccttaa

SEQ ID NO: 84426 - DNA, 1491 bp, Artificial Sequence
  derived and/or modified sequence
gtagggagccagcccctgggcgcggcctgcagggtaccggcaaccgcccgggtaagcgggggcaggacaaggccggagcctgtgtccgcccggcagccgcccgcagctgcagagagtcccgctgcgtctccgccgcgtgcgccctcctcgaccagcagacccgcgctgcgctccgccgctgacatgtgtgccgctcagatgccgcccctggcgcacatcttccgagggacgttcgtccactccacctggacctgccccatggaggtgctgcgggatcacctcctcggcgtgagcgacagcggcaaaatagtgtttttagaagaagcatctcaacaggaaaaactggccaaagaatggtgcttcaagccgtgtgaaataagagaactgagccaccatgagttcttcatgcctgggctggttgatacacacatccatgcctctcagtattcctttgctggaagtagcatagacctgccactcttggagtggctgaccaagtacacatttcctgcagaacacagattccagaacatcgactttgcagaagaagtatataccagagttgtcaggagaacactaaagaatggaacaaccacagcttgttactttgcaacaattcacactgactcatctctgctccttgccgacattacagataaatttggacagcgggcatttgtgggcaaagtttgcatggatttgaatgacacttttccagaatacaaggagaccactgaggaatcgatcaaggaaactgagagatttgtgtcagaaatgctccaaaagaacagccatataagtgaaaatcgtgatgaagttgaagctgtgaaaaacttataccccagttataaaaactacacatctgtgtatgataaaaacaatcttttgacaaataagacagtgatggcacacggctgctacctctctgcagaagaactgaacgtattccatgaacgaggagcatccatcgcacactgtcccaattctaatttatcgctcagcagtggatttctaaatgtgctagaagtcctgaaacatgaagtcaagatagggctgggtacagacgtggctggtggctattcatattccatgcttgatgcaatcagaagagcagtgatggtttccaatatccttttaattaataaggtaaatgagaaaagcctcaccctcaaagaagtcttcagactagctactcttggaggaagccaagccctggggctggatggtgagattggaaactttgaagtgggcaaggaatttgatgccatcctgatcaaccccaaagcatccgactctcccattgacctgttttatggggacttttttggtgatatttctgaggctgttatccagaagttcctctatctaggagatgatcgaaatattgaagaggtttatgtgggcggaaagcaggtggttccgttttccagctcagtgaaagaaacaattcacttaccagcctcctcaccccatcctccaccatttccttaa

SEQ ID NO: 84427 - DNA, 1416 bp, Artificial Sequence
  derived and/or modified sequence
atgtgtgccgcccagatgccacccctggcccacatcttccggggcacctttgtgcacagcacctggacctgccccatggaggtgctgcgggaccacctgctgggcgtgtctgattctgggaagatcgtgttcctggaggaggccagccagcaggagaagctggccaaggagtggtgcttcaagccctgtgagatccgggagctgagccaccacgagttcttcatgcctggcctggtggacacccacatccacgccagccagtacagctttgctggcagcagcattgacctgcccctgctggagtggctgaccaagtacaccttccctgctgagcaccgcttccagaacatcgactttgctgaggaggtgtacaccagggtggtgcggaggaccctgaagaatggcaccaccacagcctgctactttgccaccatccacacagacagcagcctgctgctggccgacatcacagacaagtttggccagagggcctttgtgggcaaggtgtgcatggacctgaatgacaccttccctgagtacaaggagaccacagaggagagcatcaaggagacagaaagatttgtgtctgagatgctgcagaagaactacagccgggtgaagcccatcgtgaccccccgcttcagcctgagctgcagcgagaccctgatgggagagctgggcaacatcgccaagacccgggacctgcacatccagagccacatcagtgaaaatagagatgaggtggaggccgtgaagaacctgtaccccagctacaagaactacacctctgtgtatgacaagaacaacctgctgaccaacaagacagtgatggcccacggctgctacctgtctgctgaggagctgaatgtgttccacgagcggggggccagcatcgcccactgccccaacagcaacctgagcctgagcagcggcttcctgaatgtgctggaggtgctgaagcatgaggtgaagattggcctgggcacagatgtggccggcggctacagctacagcatgctggatgccatccggcgggctgtgatggtgagcaacatcctgctgatcaacaaggtgaatgagaagagcctgaccctgaaggaggtgttccggctggccaccctgggcggcagccaggccctgggcctggatggagagatcggcaactttgaggtgggcaaggagtttgatgccatcctgatcaaccccaaggccagtgacagccccatcgacctcttctatggagacttctttggagacatcagcgaggccgtcatccagaagttcctgtacctgggagatgacagaaatattgaggaggtgtatgtgggcggcaagcaggtggtgcccttcagcagctctgtgaaggagaccatccacctgcctgccagcagcccccaccccccacccttcccctag

SEQ ID NO: 84428 - DNA, 1233 bp, Artificial Sequence
  derived and/or modified sequence
atggaggtgctgcgggaccacctgctgggcgtgtctgacagcggcaagatcgtgttcctggaggaggccagccagcaggagaagctggccaaggagtggtgcttcaagccctgtgagatccgggagctgagccaccacgagttcttcatgcctggcctggtggacacccacatccacgccagccagtacagctttgctggcagcagcattgacctgcccctgctggagtggctgaccaagtacaccttccctgctgagcaccgcttccagaacatcgactttgctgaggaggtgtacaccagggtggtgcggaggaccctgaagaatggcaccaccacagcctgctactttgccaccatccacacagacagcagcctgctgctggccgacatcacagacaagtttggccagagggcctttgtgggcaaggtgtgcatggacctgaatgacaccttccctgagtacaaggagaccacagaggagagcatcaaggagacagaaagatttgtgtctgagatgctgcagaagaacagccacatcagcgagaacagagatgaggtggaggccgtgaagaacctgtaccccagctacaagaactacacctctgtgtatgacaagaacaacctgctgaccaacaagacagtgatggcccacggctgctacctgtctgctgaggagctgaatgtgttccacgagcggggggccagcatcgcccactgccccaacagcaacctgagcctgagcagcggcttcctgaatgtgctggaggtgctgaagcatgaggtgaagattggcctgggcacagatgtggccggcggctacagctacagcatgctggatgccatcagaagagctgtgatggtgagcaacatcctgctgatcaacaaggtgaatgagaagagcctgaccctgaaggaggtgttccggctggccaccctgggcggcagccaggccctgggcctggatggagaaattggcaactttgaggtgggcaaggagtttgatgccatcctgatcaaccccaaggccagtgacagccccatcgacctcttctacggggacttcttcggggacatcagcgaggccgtcatccagaagttcctgtacctgggagatgacaggaacatcgaggaggtgtatgtgggcggcaagcaggtggtgcccttcagcagctctgtgaaggagaccatccacctgcctgccagcagcccccaccccccacccttcccctag

SEQ ID NO: 84429 - DNA, 1416 bp, Artificial Sequence
  derived and/or modified sequence
atgtgcgccgcccagatgccccccctggcccacatcttccggggcacatttgttcactcaacgtggacctgtcctatggaggtgctaagagaccacctgctcggggttagtgactcaggcaaaattgtattcttggaagaggcttctcagcaggaaaagctcgccaaggaatggtgctttaaaccatgcgagatccgggaactgtcccaccatgaattcttcatgcctggactagtggacacccacatccacgcatcacagtattccttcgccgggtcctctattgacctgccattgctggagtggctcaccaagtataccttcccggcagagcataggttccaaaatatcgactttgcagaggaggtctacacgcgcgtcgtcagacgcaccctcaagaatgggacaacaaccgcctgttactttgctaccatccacacagatagttccctcctattggccgacattaccgataagtttgggcaacgagcctttgtgggcaaagtgtgtatggacctcaacgatacgtttcccgaatacaaagaaacaaccgaggagagcataaaggaaacggagaggtttgtgtctgagatgctccagaagaactacagccgggtgaagccaatcgtcacgccccgtttctccctatcttgtagcgagaccctcatgggggagttaggcaacatcgcgaagacacgtgacctgcatattcagagccacatcagtgaaaatagggatgaagtcgaggccgtcaaaaatttatatccctcctacaaaaattatacaagtgtctacgacaaaaataacctgctgactaacaaaacagtgatggctcacggctgctacttatcagccgaagaactgaatgtgttccatgagcgaggggcgtccatcgcccactgtccgaatagtaacctgtctctttctagtggatttctgaatgtcctggaagtacttaagcatgaggtgaagatcggtcttgggacggatgtggcaggagggtatagctactcgatgcttgatgcgatcagacgcgccgttatggtgtctaacattctactcattaacaaggtgaacgaaaagtctctcactctgaaagaagtcttccggctggctacactgggcggttcccaggccctgggactcgacggagagatcggaaattttgaggttggaaaagaatttgacgccatccttattaatcccaaagcttccgattccccaatcgatctgttttatggagacttcttcggggacatatcggaagccgttattcagaaattcctgtatctgggagatgacagaaacatagaggaagtgtatgtgggcgggaaacaggtggtgcccttctcctcttcagtgaaagagacaatacatctgcccgcctcatcaccacacccgcctcctttcccctag

SEQ ID NO: 84430 - DNA, 1233 bp, Artificial Sequence
  derived and/or modified sequence
atggaggtgctgcgggaccacctgctgggcgtgagcgacagcggcaaaatcgttttcctggaagaggcttcgcagcaggagaaattggccaaagagtggtgtttcaagccttgcgagattcgagaactcagccaccacgaattcttcatgccaggccttgtcgatacacacattcatgcctcacagtattccttcgctggttcctccatcgaccttcccctgctggagtggcttacgaagtacaccttcccggcagaacatcgtttccaaaacattgactttgccgaagaggtctacacacgcgtggtgcgcagaactctgaaaaacggtacaacaaccgcctgttatttcgccactattcacaccgactctagcctcttgctggccgacattacagacaagttcggtcagcgcgccttcgttggaaaagtctgtatggatctcaatgacactttccctgagtataaagagaccactgaggagtccataaaggagacagagcgctttgtgtctgaaatgctccaaaagaattctcatatctcggaaaaccgcgacgaggtggaggcagtgaaaaacctctaccctagttataagaactacacctctgtgtatgataagaacaacctgctgacaaacaagactgtcatggcacacggttgctatctgagtgccgaagaacttaatgtgtttcatgagcgtggcgcctccatcgcacactgccccaattctaacttatccctaagtagcggcttcttgaacgttctggaggtgctgaaacacgaggtaaagataggactgggaacagacgtggccggcggctactcttactcgatgctggatgctatacgtagagccgtgatggtaagcaacattttgctcattaacaaggtgaatgaaaagagcctcacgcttaaggaggtcttcaggttggccactctggggggatcacaggccctcggactggatggtgagattggaaactttgaggtgggtaaggaatttgatgctatcctcattaacccgaaagcttccgatagtccaatcgacctgttttatggtgatttcttcggcgacatcagcgaggccgttatccagaagttcttgtatctgggcgatgaccggaacattgaggaagtttacgtgggggggaagcaggtcgtccctttctcaagcagtgtgaaggaaacaattcacttgcccgcctccagcccccaccccccgccctttccatag

SEQ ID NO: 84431 - DNA, 1416 bp, Artificial Sequence
  derived and/or modified sequence
atgtgtgctgctcagatgccccctctggcccacatttttcgtggcactttcgtccattctacttggacatgccctatggaggtgctgcgggatcacctcttgggcgtaagtgactctgggaaaatcgtctttctggaagaagccagccagcaggaaaaactggctaaagagtggtgtttcaaaccctgtgagattagagaactgtctcaccatgagttcttcatgcccggactggtagatacacacatacacgctagccagtactcctttgccggaagttccattgatctaccacttctggaatggctgacaaaatatactttcccagctgagcatagattccagaacattgacttcgcagaggaggtctataccagggttgtgaggagaacgctaaaaaatgggactacaacagcctgctacttcgcaactattcacacggatagcagcttgctgctcgctgacataaccgacaagttcgggcaacgggcatttgtcggcaaggtgtgtatggaccttaacgacacatttccggaatataaggaaaccaccgaggagtcaatcaaggaaactgagcggtttgtgtcggagatgcttcagaaaaactatagtcgggttaaacccatcgtgacccccaggtttagtctatcctgtagcgaaaccttgatgggcgagctgggtaatattgccaagacccgcgatctccacattcagtctcacatctccgagaatagagatgaggtcgaggctgtcaaaaacctgtatccctcctataaaaactacacatccgtctacgacaaaaataaccttctgacaaacaaaactgtgatggcacatggctgttatttaagcgctgaagagttgaacgtcttccatgaaagaggggctagcatcgctcactgtccaaactcaaacttaagtctttcgtcaggctttttgaatgtgttagaagtgttgaaacacgaggtgaaaattggcttggggactgacgtcgctggcggttatagttacagtatgcttgacgcaatccgccgagccgttatggtttcaaacatccttctaatcaataaagttaacgagaagtctctgacactgaaagaggtctttaggctggcaaccctgggtggaagtcaggccctgggccttgatggcgaaatcgggaactttgaagtcggcaaagagttcgacgccattcttattaaccctaaggcaagcgactcccctatcgacttgttctatggcgacttctttggcgacataagtgaggctgtgattcaaaaattcctgtatctgggcgatgaccgaaatattgaggaagtgtacgtgggcggaaaacaggtggtgccattttcaagttccgtgaaggagactatccatctaccggcttcctccccccatccccctccctttccatag

SEQ ID NO: 84432 - DNA, 1233 bp, Artificial Sequence
  derived and/or modified sequence
atggaagtactgcgagaccacctgctaggagtatctgactcgggaaagatagtttttctggaggaagcgtcccagcaagaaaaactagcaaaagaatggtgttttaaaccctgcgagattagagagttaagccaccatgaatttttcatgcccggtctggtagacacgcacatccacgcaagccagtactcatttgctggctctagcattgatctgcccctattggaatggctgactaaatatacattccctgcagagcaccggtttcagaacattgactttgccgaagaggtctatacccgtgtagtgagaagaacccttaaaaacggaaccaccaccgcatgttatttcgccaccatccacacagactcgagtttactgctggccgacattacagataaatttggacaaagagcgttcgtgggtaaagtgtgtatggatctgaacgacaccttcccggagtacaaagaaaccactgaggagagcatcaaagagaccgaacgatttgtatccgagatgctgcagaaaaatagtcacatttcagaaaaccgggacgaagtcgaagctgttaaaaatctgtatccctcttataaaaattacacaagcgtttacgataagaacaatcttctgaccaataaaactgttatggcccatggctgctacctgtcagccgaggagctcaacgtatttcatgagaggggcgctagtatcgctcattgcccaaatagcaatttgtctcttagttcgggattcctaaatgtcctcgaggttttgaaacacgaggtgaaaatcggtcttggaactgatgtagcaggagggtattcatacagtatgttggatgccatacgacgagccgtgatggtcagtaacatattactgattaacaaggttaatgagaaatctctgacgctgaaagaagtgtttcggcttgcaacacttggaggctcccaggcattaggactagatggcgagatcgggaatttcgaggtcgggaaagaatttgacgctattctgattaatccgaaagcaagtgactcaccaattgacctcttctacggggactttttcggagatatatcggaggctgtcatccagaagtttctatatctgggagacgataggaatatcgaggaagtctacgtgggcggaaagcaggtggttccgttctcatccagcgtcaaagagactatccacctaccagctagttcccctcatcctcctcccttcccttag

SEQ ID NO: 84433 - DNA, 1416 bp, Artificial Sequence
  derived and/or modified sequence
atgtgcgccgcccagatgccccccctggcccacatcttcagaggcaccttcgtgcacagcacctggacctgccccatggaggtgctgagagaccacctgctgggcgtgagcgacagcggcaagatcgtgttcctggaggaggccagccagcaggagaagctggccaaggagtggtgcttcaagccctgcgagatcagagagctgagccaccacgagttcttcatgcccggcctggtggacacccacatccacgccagccagtacagcttcgccggcagcagcatcgacctgcccctgctggagtggctgaccaagtacaccttccccgccgagcacagattccagaacatcgacttcgccgaggaggtgtacaccagagtggtgagaagaaccctgaagaacggcaccaccaccgcctgctacttcgccaccatccacaccgacagcagcctgctgctggccgacatcaccgacaagttcggccagagagccttcgtgggcaaggtgtgcatggacctgaacgacaccttccccgagtacaaggagaccaccgaggagagcatcaaggagaccgagagattcgtgagcgagatgctgcagaagaactacagcagagtgaagcccatcgtgacccccagattcagcctgagctgcagcgagaccctgatgggcgagctgggcaacatcgccaagaccagagacctgcacatccagagccacatcagcgagaacagagacgaggtggaggccgtgaagaacctgtaccccagctacaagaactacaccagcgtgtacgacaagaacaacctgctgaccaacaagaccgtgatggcccacggctgctacctgagcgccgaggagctgaacgtgttccacgagagaggcgccagcatcgcccactgccccaacagcaacctgagcctgagcagcggcttcctgaacgtgctggaggtgctgaagcacgaggtgaagatcggcctgggcaccgacgtggccggcggctacagctacagcatgctggacgccatcagaagagccgtgatggtgagcaacatcctgctgatcaacaaggtgaacgagaagagcctgaccctgaaggaggtgttcagactggccaccctgggcggcagccaggccctgggcctggacggcgagatcggcaacttcgaggtgggcaaggagttcgacgccatcctgatcaaccccaaggccagcgacagccccatcgacctgttctacggcgacttcttcggcgacatcagcgaggccgtgatccagaagttcctgtacctgggcgacgacagaaacatcgaggaggtgtacgtgggcggcaagcaggtggtgcccttcagcagcagcgtgaaggagaccatccacctgcccgccagcagcccccaccccccccccttcccctag

SEQ ID NO: 84434 - DNA, 1233 bp, Artificial Sequence
  derived and/or modified sequence
atggaggtgctgagagaccacctgctgggcgtgagcgacagcggcaagatcgtgttcctggaggaggccagccagcaggagaagctggccaaggagtggtgcttcaagccctgcgagatcagagagctgagccaccacgagttcttcatgcccggcctggtggacacccacatccacgccagccagtacagcttcgccggcagcagcatcgacctgcccctgctggagtggctgaccaagtacaccttccccgccgagcacagattccagaacatcgacttcgccgaggaggtgtacaccagagtggtgagaagaaccctgaagaacggcaccaccaccgcctgctacttcgccaccatccacaccgacagcagcctgctgctggccgacatcaccgacaagttcggccagagagccttcgtgggcaaggtgtgcatggacctgaacgacaccttccccgagtacaaggagaccaccgaggagagcatcaaggagaccgagagattcgtgagcgagatgctgcagaagaacagccacatcagcgagaacagagacgaggtggaggccgtgaagaacctgtaccccagctacaagaactacaccagcgtgtacgacaagaacaacctgctgaccaacaagaccgtgatggcccacggctgctacctgagcgccgaggagctgaacgtgttccacgagagaggcgccagcatcgcccactgccccaacagcaacctgagcctgagcagcggcttcctgaacgtgctggaggtgctgaagcacgaggtgaagatcggcctgggcaccgacgtggccggcggctacagctacagcatgctggacgccatcagaagagccgtgatggtgagcaacatcctgctgatcaacaaggtgaacgagaagagcctgaccctgaaggaggtgttcagactggccaccctgggcggcagccaggccctgggcctggacggcgagatcggcaacttcgaggtgggcaaggagttcgacgccatcctgatcaaccccaaggccagcgacagccccatcgacctgttctacggcgacttcttcggcgacatcagcgaggccgtgatccagaagttcctgtacctgggcgacgacagaaacatcgaggaggtgtacgtgggcggcaagcaggtggtgcccttcagcagcagcgtgaaggagaccatccacctgcccgccagcagcccccaccccccccccttcccctag

SEQ ID NO: 84435 - protein, 195 aa, Artificial Sequence
  derived and/or modified sequence
MTLFQNTRRPLRNRSRKLRDCHSVTQAGVQWRDLSSLKPPPPVFKRFSCLSLPSSWDYRFVSEMLQKNYSRVKPIVTPRFSLSCSETLMGELGNIAKTRDLHIQSHISENRDEVEAVKNLYPSYKNYTSVYDKNNLLTNKTVMAHGCYLSAEELNVFHERGASIAHCPNSNLSLSSGFLNVLEVLKHEVKIGLGT

SEQ ID NO: 84436 - protein, 380 aa, Artificial Sequence
  derived and/or modified sequence
MPGLVDTHIHASQYSFAGSSIDLPLLEWLTKYTFPAEHRFQNIDFAEEVYTRVVRRTLKNGTTTACYFATIHTDSSLLLADITDKFGQRAFVGKVCMDLNDTFPEYKETTEESIKETERFVSEMLQKNYSRVKPIVTPRFSLSCSETLMGELGNIAKTRDLHIQSHISENRDEVEAVKNLYPSYKNYTSVYDKNNLLTNKTVMAHGCYLSAEELNVFHERGASIAHCPNSNLSLSSGFLNVLEVLKHEVKIGLGTDVAGGYSYSMLDAIRRAVMVSNILLINKVNEKSLTLKEVFRLATLGGSQALGLDGEIGNFEVGKEFDAILINPKASDSPIDLFYGDFFGDISEAVIQKFLYLGDDRNIEEVYVGGKQVVPFSSSV

SEQ ID NO: 84437 - DNA, 1143 bp, Artificial Sequence
  derived and/or modified sequence
atgcccggattagtggatactcatattcatgcaagtcagtattcttttgcgggatcttcaatcgacctccctctgctcgagtggctgacaaagtatacatttcctgcagagcaccggtttcagaacattgactttgccgaggaagtgtatactagagtggtgaggcgcaccttaaagaatggcaccaccacggcttgttacttcgctaccattcataccgattccagtctactgctcgccgatattaccgacaaatttggtcagagggcgtttgtgggaaaggtctgtatggatctgaacgacaccttccccgagtataaagagaccaccgaggagtccatcaaggaaacagagagattcgtgtctgagatgctccagaagaattatagtagagtgaaacccatagtgaccccgcgcttttctctgtcttgctccgaaaccttaatgggagaattgggcaacatagcaaagacaagagacctccacattcagagtcacatctccgagaaccgagacgaagtggaagcggtgaagaacttatatccttcatataaaaattacacgtctgtgtatgacaagaacaacttgcttacaaacaagacagtaatggcccatggctgctatttatcagcagaggaactaaacgtcttccacgagcgaggcgcgtctatcgcacattgtccaaacagcaacctgtccttaagcagcgggttcctcaatgtgctggaggtgctgaaacacgaagtaaagattggactgggaaccgacgtcgccggcggatactcttactcaatgctcgatgctattagaagggctgtcatggtgagcaacatcctgttgattaataaggttaacgaaaagtctttaaccctaaaggaagtattcagactcgctactttgggcggctcacaagccctggggctcgatggcgaaatcggtaactttgaagtgggcaaggagtttgatgcgatcctcatcaacccaaaagcctctgattctcctatcgatctcttctatggcgacttttttggtgatatcagcgaggcagttattcagaaattcctctatctgggagatgaccgaaatatagaagaagtatatgttgggggaaagcaggtggtgccattttccagctctgtttag

SEQ ID NO: 84438 - DNA, 1143 bp, Artificial Sequence
  derived and/or modified sequence
atgcctggcctggtggacacccacatccacgccagccagtacagctttgctggcagcagcattgacctgcccctgctggagtggctgaccaagtacaccttccctgctgagcaccgcttccagaacatcgactttgctgaggaggtgtacaccagggtggtgcggaggaccctgaagaatggcaccaccacagcctgctactttgccaccatccacacagacagcagcctgctgctggccgacatcacagacaagtttggccagagggcctttgtgggcaaggtgtgcatggacctgaatgacaccttccctgagtacaaggagaccacagaggagagcatcaaggagacagaaagatttgtgtctgagatgctgcagaagaactacagccgggtgaagcccatcgtgaccccccgcttcagcctgagctgcagcgagaccctgatgggagagctgggcaacatcgccaagacccgggacctgcacatccagagccacatcagtgaaaatagagatgaggtggaggccgtgaagaacctgtaccccagctacaagaactacacctctgtgtatgacaagaacaacctgctgaccaacaagacagtgatggcccacggctgctacctgtctgctgaggagctgaatgtgttccacgagcggggggccagcatcgcccactgccccaacagcaacctgagcctgagcagcggcttcctgaatgtgctggaggtgctgaagcatgaggtgaagattggcctgggcacagatgtggccggcggctacagctacagcatgctggatgccatccggcgggctgtgatggtgagcaacatcctgctgatcaacaaggtgaatgagaagagcctgaccctgaaggaggtgttccggctggccaccctgggcggcagccaggccctgggcctggatggagagatcggcaactttgaggtgggcaaggagtttgatgccatcctgatcaaccccaaggccagtgacagccccatcgacctcttctatggagacttctttggagacatcagcgaggccgtcatccagaagttcctgtacctgggagatgacagaaatattgaggaggtgtatgtgggcggcaagcaggtggtgcccttcagcagctctgtgtag

SEQ ID NO: 84439 - DNA, 1143 bp, Artificial Sequence
  derived and/or modified sequence
atgcccggcctggtggacacccacatccacgccagccagtacagctttgcaggcagcagcatcgacttgcccctattagagtggctgacaaagtatacttttcctgcggaacatcggttccagaacattgatttcgctgaagaggtctacacacgggttgtgcgccgcaccctgaaaaatggaacaaccactgcatgttactttgccaccattcacacggattccagcctgctgctggccgacattaccgataagtttggtcagagagctttcgtcggcaaagtctgtatggatctgaacgataccttcccggagtataaggagacaactgaggaaagcataaaggagaccgaaagattcgtgtccgaaatgttgcagaagaactactcacgtgtgaaacctatcgtgactccccgattttccctgtcatgttccgaaaccctgatgggagaactgggtaacatcgcgaagactcgcgacctgcacattcagtctcatatttccgagaatagagacgaggtggaagccgtgaagaatctatatccctcttacaagaactacacctcagtatatgataagaacaacctcttaaccaataagacagtgatggctcacggctgctacctctcggccgaggagctcaacgtgttccatgagcggggggcgtcaattgcccattgccccaactccaacctgtctctgtcctctgggtttttaaatgtgctggaggtgctgaagcacgaagtcaaaatagggctcgggacagatgtggctggcggctattcttactccatgctcgatgcgattagacgggccgtgatggtttctaacatcctgctcatcaacaaggttaacgagaaatctttgactttgaaggaggtgtttaggcttgctactttaggggggagccaggccctcgggcttgatggggaaattggaaattttgaggtggggaaggagtttgatgctatcttgatcaaccccaaagcttctgattcaccaatcgacctgttttacggggacttctttggggacatttcggaggctgttattcagaaattcctgtatctcggtgatgacagaaatatagaagaagtctacgtcgggggaaagcaggttgtgcccttcagttcctctgtttag

SEQ ID NO: 84440 - DNA, 1143 bp, Artificial Sequence
  derived and/or modified sequence
atgcctggactggtggatactcatatccacgcctcgcagtatagtttcgcgggatcttcgattgatctgcctctcctggaatggctgaccaagtatacctttcccgctgagcataggtttcagaatattgacttcgctgaggaggtctacactagagtggtgcgaaggaccctcaagaacggtacaaccaccgcctgctactttgctactattcacaccgactcaagcttactgctggccgatatcaccgataagttcgggcaacgagcattcgtcgggaaagtgtgcatggatctaaacgacacatttcctgagtataaggagactacagaggagagtattaaagagaccgaacgctttgtgagcgaaatgttacagaaaaactactctcgcgtaaaacctatcgtcaccccccgtttctccctgtcttgttccgaaactttgatgggtgaactcgggaatattgcgaagacacgggatctacacatccagtctcacatctctgagaatcgggatgaagtcgaagcggtgaaaaatctgtatccatcttacaagaactacacctccgtgtacgataaaaacaacctgctaacaaacaaaacggtgatggcacatggctgttatctcagcgctgaagagctcaatgtgtttcacgagagaggggctagcatagcccattgcccaaacagtaacctgagcttgagcagcgggtttctgaacgttctggaagtactgaagcacgaggtgaaaatagggcttggcaccgatgtcgcagggggatatagttactcaatgctggatgccatcaggcgagctgtaatggtctccaatattctgctgattaacaaggtgaacgagaaaagtttgacgctgaaagaagtctttaggctggccacactgggtggcagccaggctcttggactagacggagaaataggcaatttcgaagtcgggaaagagtttgatgctatcttaattaacccgaaagcctctgattctcccattgacctgttttacggagacttttttggggacatcagcgaagctgtgatccagaagtttttgtatctgggagacgatcgcaatatcgaggaggtttatgtcggcggaaaacaagtcgtgccattttcaagctctgtctag

SEQ ID NO: 84441 - DNA, 1143 bp, Artificial Sequence
  derived and/or modified sequence
atgcccggcctggtggacacccacatccacgccagccagtacagcttcgccggcagcagcatcgacctgcccctgctggagtggctgaccaagtacaccttccccgccgagcacagattccagaacatcgacttcgccgaggaggtgtacaccagagtggtgagaagaaccctgaagaacggcaccaccaccgcctgctacttcgccaccatccacaccgacagcagcctgctgctggccgacatcaccgacaagttcggccagagagccttcgtgggcaaggtgtgcatggacctgaacgacaccttccccgagtacaaggagaccaccgaggagagcatcaaggagaccgagagattcgtgagcgagatgctgcagaagaactacagcagagtgaagcccatcgtgacccccagattcagcctgagctgcagcgagaccctgatgggcgagctgggcaacatcgccaagaccagagacctgcacatccagagccacatcagcgagaacagagacgaggtggaggccgtgaagaacctgtaccccagctacaagaactacaccagcgtgtacgacaagaacaacctgctgaccaacaagaccgtgatggcccacggctgctacctgagcgccgaggagctgaacgtgttccacgagagaggcgccagcatcgcccactgccccaacagcaacctgagcctgagcagcggcttcctgaacgtgctggaggtgctgaagcacgaggtgaagatcggcctgggcaccgacgtggccggcggctacagctacagcatgctggacgccatcagaagagccgtgatggtgagcaacatcctgctgatcaacaaggtgaacgagaagagcctgaccctgaaggaggtgttcagactggccaccctgggcggcagccaggccctgggcctggacggcgagatcggcaacttcgaggtgggcaaggagttcgacgccatcctgatcaaccccaaggccagcgacagccccatcgacctgttctacggcgacttcttcggcgacatcagcgaggccgtgatccagaagttcctgtacctgggcgacgacagaaacatcgaggaggtgtacgtgggcggcaagcaggtggtgcccttcagcagcagcgtgtag

SEQ ID NO: 84442 - protein, 260 aa, Artificial Sequence
  derived and/or modified sequence
MRPEDRMFHIRAVILRALSLAFLLSLRGAGAIKADHVSTYAAFVQTHRPTGEFMFEFDEDEMFYVDLDKKETVWHLEEFGQAFSFEAQGGLANIAILNNNLNTLIQRSNHTQATNDPPEVTVFPKEPVELGQPNTLICHIDKFFPPVLNVTWLCNGELVTEGVAESLFLPRTDYSFHKFHYLTFVPSAEDFYDCRVEHWGLDQPLLKHWEAQEPIQMPETTETVLCALGLVLGLVGIIVGTVLIIKSLRSGHDPRAQGTL

SEQ ID NO: 84443 - protein, 128 aa, Artificial Sequence
  derived and/or modified sequence
  misc_feature (1)..(1): Xaa can be any naturally occurring amino acid
XNTLICHIDKFFPPVLNVTWLCNGELVTEGVAESLFLPRTDYSFHKFHYLTFVPSAEDFYDCRVEHWGLDQPLLKHWEAQEPIQMPETTETVLCALGLVLGLVGIIVGTVLIIKSLRSGHDPRAQGTL

SEQ ID NO: 84444 - protein, 209 aa, Artificial Sequence
  derived and/or modified sequence
MRPEDRMFHIRAVILRALSLAFLLSLRGAGAIKADHVSTYAAFVQTHRPTGEFMFEFDEDEMFYVDLDKKETVWHLEEFGQAFSFEAQGGLANIAILNNNLNTLIQRSNHTQATNDPPEVTVFPKEPVELGQPNTLICHIDKFFPPVLNVTWLCNGELVTEGVAESLFLPRTDYSFHKFHYLTFVPSAEDFYDCRVEHWGLDQPLLKHW

SEQ ID NO: 84445 - protein, 212 aa, Artificial Sequence
  derived and/or modified sequence
MRPEDRMFHIRAVILRALSLAFLLSLRGAGAIKADHVSTYAAFVQTHRPTGEFMFEFDEDEMFYVDLDKKETVWHLEEFGQAFSFEVTVFPKEPVELGQPNTLICHIDKFFPPVLNVTWLCNGELVTEGVAESLFLPRTDYSFHKFHYLTFVPSAEDFYDCRVEHWGLDQPLLKHWEAQEPIQMPETTETVLCALGLVLGLVGIIVGTVLII

SEQ ID NO: 84446 - DNA, 783 bp, Artificial Sequence
  derived and/or modified sequence
atgcgacccgaagaccgtatgttccacattcgggccgtgattctccgtgccctctcactcgcttttctcctcagcctcaggggcgccggtgccatcaaagccgaccatgtttcaacctacgccgcgttcgtccagacccatagaccaacaggcgagtttatgttcgaatttgatgaggatgagatgttttacgtagacctcgataagaaagagaccgtgtggcacctggaagagtttggccaggccttctccttcgaggcccaaggtggcctggcaaatattgctattctgaataacaatctaaacacccttatccagagaagcaaccacacccaagctacaaatgatccacctgaggttacagtgttccctaaggaacccgttgaactgggacagcctaacaccctaatatgccatatcgataaattttttccgcctgtgctcaacgtgacttggctctgcaacggagagttggtgacagaaggcgtggccgagtctcttttcctacccagaacagactactcctttcataagtttcattacctcacttttgtcccttccgcggaggatttctacgactgcagagtagaacactgggggttggatcaaccattgctgaagcattgggaagcacaggagccaattcaaatgcccgaaacgaccgaaacagtcctgtgtgcactgggactggtgctgggcctcgtgggcattattgtggggaccgttctgatcattaaatctctgagatcagggcacgaccccagagctcagggcaccctgtag

SEQ ID NO: 84447 - DNA, 783 bp, Artificial Sequence
  derived and/or modified sequence
atgagaccagaggatagaatgtttcatatccgcgcagtgattctgagagccctttcgcttgcttttctactctccctacggggagcgggcgcgatcaaagctgaccacgtgagcacatacgccgccttcgttcagacgcacagacccactggcgaattcatgttcgaattcgacgaggatgagatgttttacgtggacctcgacaaaaaggagacggtttggcatctggaggagtttgggcaggccttctcgttcgaggctcaaggcggcctggcaaacattgctatcctgaacaacaatctcaataccctgatccagagatctaatcatactcaggcaaccaacgacccccccgaagtgaccgtcttcccgaaagagccggtcgaactggggcagcctaacaccttgatctgccatatagataaattcttcccaccagtgctcaacgtgacatggctttgtaatggtgaattagtgacagagggcgtcgccgagagcctgtttctgccaaggacggactactcattccataagttccactatctgacttttgtacccagcgccgaggatttttatgactgcagggtcgaacattggggactggatcagccactcttgaaacactgggaagcacaggagcccattcagatgccggagaccaccgaaactgtgttgtgcgcattgggcctcgtcctgggcctggttggaatcattgtggggacagtgctgataatcaagagcctccggtccggccacgacccccgcgcccagggaactctgtag

SEQ ID NO: 84448 - DNA, 387 bp, Artificial Sequence
  derived and/or modified sequence
tagaacaccttgatctgtcatattgacaagttctttcctccagtacttaatgtgacttggctctgcaacggcgaactagtgaccgaaggggtggccgagtctctgttcctacctaggaccgactatagttttcataagttccattatctgaccttcgtaccttccgccgaagacttttatgattgtagagtggaacactggggtctggatcagcccttgctcaagcactgggaggcccaggagccaatacagatgccggagacaactgagactgtcctttgtgcgttgggcctggtgctaggtctggtgggcatcattgtgggaactgttcttataataaaatccctgaggtcgggacacgaccccagggctcaagggacactttag

SEQ ID NO: 84449 - DNA, 783 bp, Artificial Sequence
  derived and/or modified sequence
atgagaccggaggatagaatgttccatataagggcagtaattctgcgtgctctgtccctggcatttttactttccctgaggggcgctggcgccatcaaggccgatcatgtaagtacatatgccgccttcgtacagacgcatcggcccactggcgaattcatgtttgaatttgatgaggatgagatgttttacgtggacctggacaagaaggaaaccgtctggcatcttgaagagtttggccaggccttttctttcgaagcccaggggggcctggctaatattgccattctgaacaataatctgaatactttaatccaacggtcgaaccacacccaggcgacaaacgacccaccggaggtcactgtctttcctaaggagccagtggaactcggacagccgaataccttgatctgccacatcgataaatttttcccaccggttctgaatgtcacttggctatgcaatggagaattggtgacagagggggtggcagaatccctattcttgccccgtactgattattcgtttcacaaattccactatcttacgttcgtgccatctgcggaggatttttacgattgcagagtagaacactggggcctggatcagcccctgctgaaacattgggaggcacaggagcccatacagatgccggagacaactgagaccgtgttgtgtgcccttggtctagtcttgggtctggtggggattatcgttgggaccgtcttgatcataaagagtttacgcagcgggcacgaccctcgggcacaggggactctgtag

SEQ ID NO: 84450 - DNA, 783 bp, Artificial Sequence
  derived and/or modified sequence
atgcggcctgaggacaggatgtttcatattagagccgtaatccttcgggctcttagtcttgccttcctgctgagtctcagaggggccggagcaattaaagctgaccatgtgagtacatacgccgcctttgtacagactcataggccgaccggcgaatttatgttcgagtttgacgaggacgagatgttttatgtggacttggacaaaaaagaaacagtttggcatttagaggagttcggccaggccttcagctttgaagcacaaggcggcctagcaaacatagccatcctgaacaacaatctgaacaccctaatacagcgcagcaaccatacccaggcgacaaatgacccgcccgaagtcacggtgttccccaaagaaccagtcgagttgggccaacctaatacgctcatatgtcatatagacaaattcttccctcccgttctcaacgttacatggctttgtaacggtgaactcgtaactgagggcgtggcagaatctttgttcttgcctaggaccgattactcattccataaatttcattatttaacattcgtaccttctgcagaagatttctatgactgtcgtgtggaacactggggcttagatcagcccctcctcaaacattgggaggcccaggaaccaattcagatgccagagacgaccgaaacagttttgtgtgccctgggtctcgtcctgggtctggtggggataatcgtaggaacagtgctgattattaagtctctgagatctggacacgaccccagagctcaggggaccctgtag

SEQ ID NO: 84451 - DNA, 387 bp, Artificial Sequence
  derived and/or modified sequence
tgaaataccctaatctgccatatcgacaaattcttccctcctgtcctcaatgtcacatggctctgcaatggggagctggtgaccgagggagttgctgaaagcctgtttttgccaagaacagactacagcttccacaaattccattacctcacgtttgtgccatctgctgaagacttctatgactgtagagtggagcattgggggctagaccagcccttgctgaagcactgggaggcccaggagcctatccagatgccagagacgaccgaaacagtgctgtgtgccctgggactcgttttgggtctggttggtatcatcgtgggcacagtcctgatcattaaaagcctcaggtccggccacgaccctcgcgcgcagggcacattgtag

SEQ ID NO: 84452 - DNA, 783 bp, Artificial Sequence
  derived and/or modified sequence
atgagaccagaggaccgaatgtttcacatccgcgccgtgattctccgcgctctgtctctagcctttctgctcagcctccgcggcgctggggcaattaaagcagatcacgtctcaacctacgcagcatttgtacagacccatcgacctaccggcgagtttatgttcgaattcgacgaagacgagatgttttacgtggatcttgacaagaaagaaactgtctggcacctcgaagagttcgggcaagcattttcatttgaggcacagggtggattggcaaatatcgccatcctgaacaacaatctcaacactctgatccagagatccaaccatacccaagcaaccaacgatcctccagaggttacggtgttccctaaggaacccgttgagctgggtcagcctaacacacttatttgccatatcgacaaattctttcctcccgtcctcaatgtcacgtggctctgtaatggtgaactcgtgaccgagggcgtggcagagagcctcttcctaccccggaccgactatagtttccacaaattccactatctgacgttcgtcccatccgcggaggacttctacgactgcagagtggaacactggggcctggatcaaccattacttaaacactgggaggcccaggagccgatccaaatgccggagacaacagagactgtcctgtgtgccctaggacttgtgctcggactagttggtataattgtggggaccgtcctgatcatcaaatccctgcgcagcggccacgacccacgcgcccagggcaccttgtag

SEQ ID NO: 84453 - DNA, 387 bp, Artificial Sequence
  derived and/or modified sequence
tagaatacattgatttgtcacatagacaagttcttcccgcccgtcttgaatgttacctggctgtgtaacggggagctcgtgactgagggagtggcagaatcattgtttctacctcgtactgattactcattccacaaattccactacctgacatttgtgccctcagcagaggatttttatgattgcagagtggagcactggggcctggatcagcccctgctgaagcactgggaggcccaagaacctatccagatgccagagactacagaaacagtcctgtgcgcacttggtctggtgttaggcctcgtaggaatcatcgtaggcacagtgttgattattaagtcactcaggtccggccacgatccccgggcgcaaggaacattgtag

SEQ ID NO: 84454 - DNA, 783 bp, Artificial Sequence
  derived and/or modified sequence
atgagacccgaagatcgcatgttccacatcagggcagtgatcttgagggcactgagcctagctttcctgctgagcctccggggtgctggcgcaatcaaagctgaccacgtgagcacctacgccgcgttcgtgcagacacatagacctaccggcgagtttatgttcgagttcgacgaggacgaaatgttttatgtcgatttggataagaaagagacggtgtggcatttggaagagtttggccaagccttttcgttcgaggcacagggaggtttagcaaacattgctatcctcaacaacaacctcaataccctcatccaacgcagcaatcatacccaagcaaccaatgatccgccagaagtgaccgtgttcccaaaagaaccagtggagctggggcagccaaacacgctcatctgccacattgacaagttcttccctcctgtccttaacgtgacatggctctgtaacggggagctcgtgacagaaggggtggcagagtccctgttcctgccgcggacagactatagcttccacaagttccactacctgacattcgtcccctcagccgaagacttttatgactgtagggtggagcactggggcctggatcaacccctgttgaaacattgggaagcacaggagcccattcagatgccagaaacaactgaaacagtcctctgcgctcttgggctggtgcttggtctcgtcggaatcatcgtggggacagtgctgatcatcaaaagcttacgctccggacatgacccccgcgctcagggtactctttag

SEQ ID NO: 84455 - DNA, 387 bp, Artificial Sequence
  derived and/or modified sequence
taaaacactctcatctgccacatcgacaagtttttcccacctgttttaaatgtgacttggctgtgcaatggcgagttggtgactgagggcgttgccgagagcctattccttccgagaaccgactactcctttcataagtttcactatctcacattcgtccccagtgccgaggacttttacgactgtcgagtcgagcactggggccttgatcaacctttacttaaacactgggaggctcaggagcctatacagatgcctgagaccacagagacagtcttgtgtgccctaggcctggtcctcggacttgtcgggattatagtggggacagtgctgattatcaaaagccttcgttccggccacgaccctagggcacagggaactctgtag

SEQ ID NO: 84456 - DNA, 639 bp, Artificial Sequence
  derived and/or modified sequence
atgcggccggaagatcgtatgtttcacatcagagccgttatattgcgcgcgctgtcgctcgcgttcctgctcagccttcgcggcgccggggccataaaggctgaccacgtgtcaacatatgctgcttttgtgcaaacccaccgaccaacgggcgagttcatgttcgaatttgacgaagacgagatgttttacgttgaccttgacaagaaggagacggtctggcacctggaggagtttgggcaggctttttccttcgaagtgaccgtgtttcctaaggagcctgtggagttaggacagcccaacacgctgatttgtcacattgacaaatttttcccccccgtcctgaatgtgacttggctgtgcaatggagaactcgtcactgaaggtgtagcagagagcctgttcctccctaggacagattatagcttccacaagttccactacctgacattcgtcccctccgcagaggacttttatgactgccgcgtggaacactgggggttggaccagccactactcaagcactgggaagcccaggagcccatccagatgcccgaaaccactgagactgtactctgcgctttaggcctggtgctggggctggtgggcatcattgtcggaactgtcctcatcatctag

SEQ ID NO: 84457 - DNA, 639 bp, Artificial Sequence
  derived and/or modified sequence
atgcgacccgaggatagaatgttccatattcgggccgtgatcctacgagccctgtccctggcttttctgctgtccctgcgtggcgctggagccataaaagctgaccatgtaagcacatatgccgcctttgtgcagacccacaggcccacaggtgagttcatgttcgagttcgacgaggatgaaatgttctatgtcgacctggacaaaaaggagaccgtatggcacctggaggagttcggccaagcgttcagctttgaggttacagtcttccccaaagaacctgtcgaactgggtcagcccaacaccctcatttgccatatcgataagttctttcctccggtgctgaacgtgacatggctctgtaatggcgagctcgtcacagagggcgtcgccgaatccctttttctaccccggaccgactacagttttcataaatttcattatctgacctttgtgccgtccgccgaagacttctatgactgtagagtggaacactggggcctggaccaacctctgctgaaacattgggaagctcaggagcccattcagatgccagagactacagaaaccgtgctttgtgctctcggcctggttctgggccttgtggggatcatcgtgggcactgtgttgatcatctag

SEQ ID NO: 84458 - DNA, 387 bp, Artificial Sequence
  derived and/or modified sequence
taaaatacactcatttgccacatagacaaattttttcctcctgtgttaaatgtcacatggttatgcaacggggagctggtaacagaaggtgtagctgagagcctattccttccccggaccgactactctttccacaaatttcactatctcaccttcgtacccagtgccgaggatttctatgactgccgggtcgaacattggggtttggaccagcctcttctcaagcactgggaagcccaggagccaatccagatgccagaaacaacagaaacggtgctgtgcgccctgggactcgtgctcggccttgtgggcataatcgtgggcacagtgcttatcattaaaagcctgagatccgggcacgaccctcgcgcccaggggacattgtag

SEQ ID NO: 84459 - DNA, 639 bp, Artificial Sequence
  derived and/or modified sequence
atgcggcccgaagaccggatgtttcatattcgcgcagtgattctccgcgcactaagtctcgccttcctcctgtccttaaggggagcgggcgctatcaaagccgaccacgtatctacatatgctgccttcgtgcagacccatcgacctaccggcgaatttatgttcgagtttgacgaggatgagatgttctacgtcgatctggataagaaggaaacggtctggcaccttgaagaattcggccaagcatttagttttgaggtgaccgttttcccaaaagagcctgtggaacttgggcagcctaataccctgatatgtcatatcgacaagttcttcccgcccgtgctcaatgtgacttggctttgcaacggcgagctggtaacggaaggagtggctgaatcactgtttctcccgagaaccgactatagctttcacaagtttcactacctgacatttgttccaagcgctgaagatttctacgattgtcgcgtcgagcattggggcctggatcagcctcttttgaaacattgggaggcccaggagccaatccaaatgccagagaccactgagaccgtgctgtgcgccttgggcctggtgttggggttggtggggatcatagtggggacagtgctcataatctag

SEQ ID NO: 84460 - DNA, 639 bp, Artificial Sequence
  derived and/or modified sequence
atgaggccagaagacaggatgttccatatccgggccgtgattctgcgagccctgagcttggcgttcctcctaagtctgcggggcgctggtgccattaaggccgatcacgtgtctacctacgccgcatttgtgcaaacacatcggccaactggcgagttcatgtttgagtttgatgaggacgaaatgttttacgtcgatctagacaagaaagaaaccgtctggcatctcgaagagttcggacaggctttttcctttgaagtcaccgtcttccccaaagagcctgtcgagctcggccagcctaacacactgatatgtcacatcgacaaattcttcccacccgtactgaacgtgacctggctgtgtaacggggagctggtaaccgaaggcgtggccgagagcctattcctgccccgcactgattattcattccacaagtttcactacttaactttcgtgccaagcgctgaggacttttacgattgccgcgtcgagcactggggcctggaccagcctctgctgaagcattgggaagctcaagaacccattcaaatgccggaaaccactgagacggtattgtgtgcccttggcctggtgcttgggctggtagggatcattgtggggacagtcctaataatctag

SEQ ID NO: 84461 - DNA, 387 bp, Artificial Sequence
  derived and/or modified sequence
tgaaacactctgatctgtcacattgataaattctttccccccgtgctcaacgtgacctggttatgtaatggcgagctagtcactgaaggcgtggctgagtctctctttctccctcgcacagactactcctttcataaatttcattaccttacatttgtgccgtccgccgaggacttctatgattgccgggttgaacactggggtcttgaccagcctttactgaagcattgggaagctcaggaacctattcagatgccggagaccaccgagactgtgctgtgcgcacttggtctggtacttggactggttggcatcatcgtgggaactgtgttgatcataaagtctctgcgatcaggccacgatccccgggctcaggggacactgtag

SEQ ID NO: 84462 - DNA, 783 bp, Artificial Sequence
  derived and/or modified sequence
atgcggcccgaggacaggatgttccacataagggccgttattctgcgggcactcagcctcgccttcttactgtctctgcgcggcgctggagctatcaaggctgaccatgtctcaacatacgccgctttcgtccaaactcacagacctacaggagagttcatgtttgaattcgacgaagacgaaatgttttacgtggatttggataaaaaggagacagtgtggcacctggaagagtttggacaggcttttagcttcgaggctcagggcggtctcgcaaacatcgcgattttgaacaataaccttaatacattgatacagaggagtaaccacactcaagccactaacgatcctccagaagtcacagtattcccaaaagagccggtggagctggggcagcctaatactctgatctgccacattgataaattctttcctcctgtcctgaacgtgacttggctctgcaacggcgaactggtgactgaaggggtcgccgagtcactgtttttgccccgcaccgattattcatttcacaaattccactatctgacattcgtcccctcagctgaagatttctacgactgcagggtcgagcattgggggctggaccaacctctgctcaaacattgggaagcccaggaacctattcaaatgcccgaaacgacggaaactgtcctctgcgccctgggactcgttctgggtctagtgggcatcatagtgggcactgtgttgattattaagagccttaggagcggacacgatccacgtgctcagggcacactgtag

SEQ ID NO: 84463 - DNA, 639 bp, Artificial Sequence
  derived and/or modified sequence
atgcggcctgaagacaggatgttccacatccgggcagtaattctgcgggctttgagcttagcctttttactgagtctgaggggggccggggcgatcaaggccgaccacgtgtctacctacgcggcttttgttcagactcaccgccctacaggggaatttatgtttgagtttgatgaagacgaaatgttttatgtggacctggacaagaaagaaaccgtttggcatctcgaagagttcgggcaagctttttcgttcgaggttacagtttttcccaaagaacctgtggagctgggtcagcccaacaccctcatttgtcatatagacaaattttttccacctgtgcttaacgtgacttggctgtgtaacggagaactcgtaaccgagggcgtggccgaatctttatttctcccccgaaccgattacagcttccacaagttccactacctaacattcgttccaagtgcggaggacttttatgactgtagggtggaacattggggccttgaccaaccacttctgaagcattgggaggcccaggagcccatccaaatgccagagacaaccgaaaccgtgttgtgcgctcttggactggtgttgggactggttgggattattgtgggaactgtcctgattatttag

SEQ ID NO: 84464 - DNA, 639 bp, Artificial Sequence
  derived and/or modified sequence
atgagacccgaggacagaatgttccacattcgagcggtaattctgcgggctctgtccctggctttcctgctcagtctaaggggcgccggtgcaatcaaggcagaccacgtatcaacctacgctgccttcgtgcagacccatcgacctaccggggaatttatgtttgaatttgacgaggatgagatgttttatgtcgacttagacaagaaggaaaccgtctggcacctcgaggagtttggacaggctttcagctttgaagtgacagtttttcccaaagaacccgtggagctggggcagccaaatacccttatttgtcacattgacaagtttttcccccctgtcttgaacgtgacttggttatgcaatggagaactggtcactgaaggagtcgctgaatctctgttcctgccacggaccgactattcatttcacaagtttcactatctgacctttgttccttctgcggaagacttttatgactgccgcgtggagcactggggcctcgaccagccgttgctgaagcactgggaagcacaggagcctattcaaatgccggaaaccactgaaacagttctgtgcgctttgggtctggttctcggtttggtgggaatcattgtgggtacagttctgattatttag

SEQ ID NO: 84465 - DNA, 639 bp, Artificial Sequence
  derived and/or modified sequence
atgagacccgaagaccgcatgttccatattcgtgctgtaatccttcgggccctgtctctggcatttttattgtctcttagaggggccggagcaataaaggccgatcatgtgagtacctacgcagccttcgtccaaacacacaggcccaccggtgaattcatgtttgaattcgacgaagatgagatgttttacgtagatctcgataaaaaagaaacagtttggcatctcgaagagtttggacaggcgttttctttcgaggtgactgtttttccaaaggaaccagtggaacttgggcagcctaatacactcatctgccacattgataaattcttcccaccggttctgaatgttacatggctatgcaacggtgagctcgtgaccgagggggtcgctgagtctctctttcttccgaggaccgattacagctttcataagtttcactacttgaccttcgtgccctccgcagaggacttctatgactgcagagttgaacattggggcctagaccagcccctgctgaagcactgggaggcacaggagcctattcaaatgccagaaacaaccgaaaccgttctttgcgcactcggattggttctgggcctggtggggatcatagttggtactgtgctgatcatttag

SEQ ID NO: 84466 - DNA, 387 bp, Artificial Sequence
  derived and/or modified sequence
tgaaatacccttatttgccatattgacaaattctttccacccgtccttaacgtcacatggctgtgtaatggagaacttgtaacagagggcgtcgcagaaagtctcttcttgcctcgcacggactacagttttcataagttccattatctgacatttgtcccctccgcggaggacttttacgattgtcgggttgagcactgggggttggatcagcctctcctaaagcattgggaggcccaagaacctatccagatgcccgagaccacggagactgtgctgtgcgcattgggcctggtgctgggattagtgggcattatcgtcggtaccgttcttatcattaagtcactgcgcagtggccatgacccccgtgcccaaggcactctttag

SEQ ID NO: 84467 - DNA, 783 bp, Artificial Sequence
  derived and/or modified sequence
atgaggccagaggatcgaatgttccatattcgggccgtgattttgcgcgcactgagtcttgcattcctgctgtctctacggggtgccggtgccataaaggctgatcatgtgtcgacttacgccgcctttgtgcaaacgcatagacccaccggcgagttcatgtttgagttcgatgaggacgagatgttctacgttgatctggataagaaagagaccgtctggcacttagaggagtttggacaggcttttagcttcgaggcccagggaggtctcgctaatatcgccatcctgaataacaatctcaacactcttattcagagaagtaatcatacccaggccaccaatgacccaccagaggtcaccgtgttcccaaaggaacccgtagagcttgggcagccaaacaccctgatctgtcacattgataaattcttcccccccgtccttaacgtgacgtggctctgcaatggtgagctggtgacagagggcgtggcagagagcttgtttcttcctaggaccgattattccttccacaagttccactatctgacatttgtcccgtccgccgaggatttctatgactgtcgggtcgaacactgggggttggaccagccactcttaaaacactgggaggctcaggaacctatacagatgcctgagaccactgagacagttctgtgtgccctgggcctcgtgctgggcttggtgggtatcattgtggggacagtgctcattataaagagcctcagatcaggacacgacccccgggcccagggcacgctctag

SEQ ID NO: 84468 - DNA, 387 bp, Artificial Sequence
  derived and/or modified sequence
tgaaacaccttgatatgtcacatcgacaagttctttcccccagtgttaaatgtcacctggttatgtaacggcgaacttgtgactgaaggcgtggcagagagtctgtttctgccccgcaccgattattcatttcataaattccattatctgactttcgtgcctagcgccgaagatttctatgactgcagggtggagcactgggggttagaccagccactccttaagcactgggaagcccaggagccaattcagatgcctgaaaccaccgaaactgtcttgtgcgcccttggcctcgtgctgggtttggtcggtattatcgtgggcacagtgctgattattaagtctctgcgttccgggcatgaccccagagcccagggaaccctttag

SEQ ID NO: 84469 - DNA, 783 bp, Artificial Sequence
  derived and/or modified sequence
atgcgccctgaagatcggatgttccatattagggctgtgattctccgggccttaagcttagccttcttgctgtccctccgcggcgccggcgccataaaagcagaccacgtcagcacctatgcagcctttgtgcagacgcatcgccctacaggggagttcatgttcgaattcgacgaggatgaaatgttttacgtggatttggacaaaaaggagacggtctggcatctggaggagtttgggcaagcctttagctttgaggctcagggcggcctggccaacatcgccatcctgaataataacttaaacaccctgatccaacgaagcaatcacacccaggcgactaatgacccccccgaggtcacagtgttcccgaaggagcccgtggaacttggacagcctaatacgttgatttgtcacatcgataaattttttcccccagtgctgaatgtgacatggctgtgcaatggggagttagttacagagggtgtggctgaatctctgtttctgccccgcactgattacagcttccataagtttcactacctcacatttgtcccttcagccgaggacttttatgattgcagagtggaacactggggcctggatcagcctctcctgaagcattgggaggcccaggaacctatccagatgccagagactacggaaactgtcctttgtgctctgggtctcgtacttggccttgtgggtattattgtcggaaccgttcttattatcaagtcactgcgctcagggcacgatccgcgtgcccagggcactctatag

SEQ ID NO: 84470 - DNA, 639 bp, Artificial Sequence
  derived and/or modified sequence
atgagacccgaagaccggatgttccacatacgtgcggtaatcctgagagctctgagtctggcctttctgttgtccctgcgcggcgccggtgctatcaaggccgatcacgtgtctacttacgcagcgtttgtacagactcaccgacccactggagagttcatgtttgagttcgacgaagacgaaatgttctatgtggaccttgataaaaaggagactgtgtggcacctggaagaatttggccaggccttctctttcgaggtgaccgtattccctaaggagcctgtggaactggggcaaccaaataccctgatatgtcacatcgataagtttttcccacccgtcctgaatgtgacctggctttgtaatggtgagctggtgaccgagggcgtggcagagagtctgttccttcctcgcactgattacagctttcacaaatttcactatttaacctttgtgccctccgcggaagatttttatgattgccgagtggaacattggggactggatcaacctctgcttaaacattgggaagcccaagaacccatacagatgcctgagacaactgagactgttctttgcgccctgggcctggtgctcggccttgtcggcattatcgtaggcaccgtgctgattatctag

SEQ ID NO: 84471 - DNA, 783 bp, Artificial Sequence
  derived and/or modified sequence
atgcgcccagaagatcggatgttccatatccgcgcggtgatcctaagagcactgtcactagcattcctcctgagcctgaggggcgccggggcgattaaagcagaccacgttagtacctacgcggccttcgtccaaactcatagacccactggagagttcatgtttgaattcgatgaagacgaaatgttctacgtggacctggacaaaaaagaaaccgtttggcaccttgaagaattcggacaggccttttcctttgaggctcagggtggtctggccaatatagctatcctgaataacaatctgaacacgctcatacagaggagcaaccacacgcaggctaccaatgaccctccagaggtcaccgtgttccccaaggagcccgtggaactcgggcagccaaataccctcatttgccatatagataaattctttcctccagtgctgaacgtgacctggctctgcaacggcgagctggttacagagggagtggccgagtcgctctttctccctaggactgactacagcttccataagttccattacctgacattcgtacctagcgccgaggacttttacgattgccgtgttgaacattggggcctggatcagcccctgcttaagcactgggaggcacaggagcccatacagatgcctgagacaacagaaacagttctctgtgctctgggacttgtcttgggcttagtgggcattatcgttggcacagtgctgatcatcaaatcgcttcgttccggccacgatcctcgggcccaggggaccttatag

SEQ ID NO: 84472 - DNA, 783 bp, Artificial Sequence
  derived and/or modified sequence
atgcgacctgaggatagaatgttccatatacgcgccgtgattctgagggctctttccctcgccttcctgctgtccctacgtggtgccggagccattaaagccgatcatgtgagtacgtacgcggcatttgtgcagacacatcggcctacgggtgagttcatgttcgaattcgacgaagacgagatgttctacgtggatctcgacaaaaaagagaccgtgtggcatctggaagagttcggccaagctttttcttttgaagcccagggtgggcttgctaatatagcaatactgaacaacaaccttaatacactgatccagcggagtaaccacactcaggcgacgaacgatcctcccgaggtcactgtgtttccgaaagagcctgtggagttaggtcagcccaacacccttatttgtcacattgacaagttctttcctcccgtcctgaacgtgacatggctgtgcaatggcgaattggttaccgaaggagtggctgagagtttatttcttccgaggactgattatagcttccacaaatttcactacctaaccttcgtgccctcagcagaagatttctatgattgccgcgtcgagcattggggtctggaccagccccttctaaagcattgggaggcccaggaaccaatccaaatgccagaaactactgaaaccgtgttgtgtgctctggggttagtgttgggcttagtgggaatcatagtggggactgtcttgatcataaagtccctcaggtcaggacatgatccgcgcgcccagggtaccttgtag

SEQ ID NO: 84473 - DNA, 783 bp, Artificial Sequence
  derived and/or modified sequence
atgaggcccgaagatagaatgtttcacatcagggccgttatcctgcgagccttgagcctggcattcctgctgagcctcagaggagccggtgctattaaagcagaccacgtgagcacctatgccgccttcgtccagacccaccgtcccacaggcgagttcatgtttgagttcgatgaggatgagatgttttatgtggacttggacaaaaaggaaactgtctggcatcttgaagagtttggccaggctttttccttcgaggcccaaggaggattggcgaacatagctatcctcaataacaatctgaatacactgatacaaagatccaaccatactcaggcaacaaatgaccctcccgaggtgaccgttttccccaaagagccggtcgaacttggtcaaccaaacactctcatttgccatatcgacaagtttttcccccccgtgctgaatgtaacatggctgtgcaatggcgagctggtcaccgagggagtcgccgagagtctcttcctgccccgcactgattactcatttcataaatttcactatctcacgttcgtgccttccgccgaggacttttacgattgcagagtggaacactgggggctcgaccagccactgctcaagcattgggaggcgcaggagccaatccagatgcctgaaacgaccgagacagttctgtgcgcgctcgggttggtgctcgggttggttggaattatagtggggaccgtactgataataaagtcgctgcgctccggccatgatcctcgcgctcaagggacactgtag

SEQ ID NO: 84474 - DNA, 783 bp, Artificial Sequence
  derived and/or modified sequence
atgagaccggaggatagaatgtttcacataagggccgtgatcctgagggccctgtccctggcctttttgctgtccttaagaggtgctggcgcgatcaaagcggaccacgtgagcacctatgctgcattcgttcaaactcaccggccgacaggcgaatttatgtttgaatttgatgaagatgaaatgttttatgttgatctggacaagaaagagaccgtgtggcaccttgaagagtttgggcaagcatttagcttcgaggcccagggaggcctggccaacatagctatcctcaataacaatttgaacaccctgatccaacgctcgaaccatactcaggccacaaatgatccccccgaggtcacggtttttccaaaggaacccgtggaactgggacagcccaacaccctgatttgccatatcgacaagttttttccaccggtccttaacgttacttggttgtgtaacggggagctggtcacagagggagttgcagagagcctgttcctcccaagaaccgactatagttttcacaaattccattacctgacatttgtcccctccgctgaagatttctatgactgccgggtggaacattgggggctggaccaacctctgttaaagcactgggaggcccaggagcctatccagatgccagaaactacagaaacagttttgtgcgccctggggctggtgcttggactggtgggcattatcgtcggcacagtgttaattatcaagtctctgcgctccggccacgaccccagagcacagggaaccctctag

SEQ ID NO: 84475 - DNA, 783 bp, Artificial Sequence
  derived and/or modified sequence
atgcggcctgaagacaggatgtttcacatcagagccgtgattctgagggcactctcactcgcttttctcctttccctgcgcggagcgggggccattaaggctgaccacgtgtctacttatgcagcattcgtccagacccaccgtcccacgggtgaatttatgttcgaattcgatgaggatgagatgttctacgtggatctcgacaaaaaagagacggtttggcatctcgaggagtttggacaggctttctctttcgaggcccagggagggctcgctaatatcgctatcctcaacaataacctgaacacactaatccagcggtcaaaccatacccaggcaaccaacgatccacccgaggtcaccgtgttccctaaggagccggtggaactaggccagcctaatactttgatctgccacatcgacaagttcttccctcctgtactgaatgtaacgtggctgtgcaatggcgaattagtgactgaaggtgtggcagaatccctgttcctcccacggacagactactcttttcacaaattccactacttaaccttcgtgcctagtgcagaagacttttatgattgtagggtggagcattggggactcgatcaacctctcttaaagcactgggaagctcaagaacccatacagatgcccgagaccaccgagaccgttctgtgtgctctgggtttggttctggggctggtggggattatcgttgggaccgtcttaataattaaatcgttacggtccggacatgatccccgggctcaggggaccctgtag

SEQ ID NO: 84476 - DNA, 783 bp, Artificial Sequence
  derived and/or modified sequence
atgcgcccggaggacagaatgttccatataagggccgtgatcctgcgcgcattgtcgcttgcctttctgctgagcctgcggggcgctggcgccattaaggccgaccatgtgtccacctatgccgctttcgttcagacccaccggccgactggggagttcatgtttgaatttgacgaggacgaaatgttttacgtggatctggacaagaaagagaccgtatggcacctggaagagttcggacaggccttttcgttcgaggcccagggtggactggccaacatagccatacttaataacaatctgaataccctcatccagcggtcaaatcacacgcaggcaactaacgacccccccgaggtgacagtttttcctaaagagccagtggagctcggacagcccaataccctgatctgtcacattgacaagtttttcccacctgtgctgaatgtaacatggctttgtaacggagagcttgttacggaaggagtggcagagtcattgttcttgccacgcacagactacagttttcataagtttcactacttaactttcgtgccctctgccgaggacttctacgactgccgtgtagagcattggggactggaccagccactcctcaagcactgggaagcacaggaacctattcaaatgcccgaaactactgaaacagtgctctgcgcccttggactagtgcttgggctcgttggcatcatcgtagggacggtgctgattattaagagtctgagatctggccacgacccgagggcacaggggacactatag

SEQ ID NO: 84477 - DNA, 783 bp, Artificial Sequence
  derived and/or modified sequence
atgaggcctgaggacaggatgttccacatccgggccgtcatcctgcgggccctgagcctggccttcctgctgagcctgcggggagctggggccatcaaggctgaccacgtgtccacctatgctgcctttgtgcagacccaccggcccaccggggagttcatgtttgaatttgatgaagatgagatgttctacgtggacctggacaagaaggagaccgtgtggcacctggaggagtttggccaggccttctcctttgaggcccagggcggcctggccaacatcgccatcctgaacaacaacctgaacaccctcatccagaggagcaaccacacccaggccaccaatgaccccccagaggtgacagtgttccccaaggagcctgtggagctgggccagcccaacaccctcatctgccacatcgacaagttcttcccccctgtgctgaatgtgacctggctgtgcaatggagagctggtgacagagggcgtggccgagagcctcttcctgcccaggacagactacagcttccacaagttccactacctgacctttgtgcccagcgctgaggacttctatgactgccgggtggagcactggggcctggaccagcccctgctgaagcactgggaggcccaggagcccatccagatgcctgagaccacagaaacagtgctgtgtgccctgggcctggtgctgggcctggtgggcatcatcgtgggcaccgtgctgatcatcaagagcctgcggagcggccatgacccccgggcccagggcaccctgtag

SEQ ID NO: 84478 - DNA, 387 bp, Artificial Sequence
  derived and/or modified sequence
tgaaacaccctcatctgccacatcgacaagttcttcccccctgtgctgaatgtgacctggctgtgcaatggagagctggtgacagagggcgtggccgagagcctcttcctgcccaggacagactacagcttccacaagttccactacctgacctttgtgcccagcgctgaggacttctatgactgccgggtggagcactggggcctggaccagcccctgctgaagcactgggaggcccaggagcccatccagatgcctgagaccacagaaacagtgctgtgtgccctgggcctggtgctgggcctggtgggcatcatcgtgggcaccgtgctgatcatcaagagcctgcggagcggccatgacccccgggcccagggcaccctgtag

SEQ ID NO: 84479 - DNA, 639 bp, Artificial Sequence
  derived and/or modified sequence
atgaggcctgaggacaggatgttccacatccgggccgtcatcctgcgggccctgagcctggccttcctgctgagcctgcggggagctggggccatcaaggctgaccacgtgtccacctatgctgcctttgtgcagacccaccggcccaccggggagttcatgtttgaatttgatgaagatgagatgttctacgtggacctggacaagaaggagaccgtgtggcacctggaggagtttggccaggccttctcctttgaggtgaccgtcttccccaaggagcctgtggagctgggccagcccaacaccctcatctgccacatcgacaagttcttcccccctgtgctgaatgtgacctggctgtgcaatggagagctggtgacagaaggagtggccgagagcctcttcctgcccaggacagactacagcttccacaagttccactacctgacctttgtgcccagcgctgaggacttctatgactgccgggtggagcactggggcctggaccagcccctgctgaagcactgggaggcccaggagcccatccagatgcctgagaccacagagaccgtgctgtgtgccctgggcctggtgctgggcctggtgggcatcatcgtgggcaccgtgctgatcatctag

SEQ ID NO: 84480 - DNA, 1704 bp, Artificial Sequence
  derived and/or modified sequence
acgcgtagcattcctgccgtccctggaaaagtgctagaggcccacagtttcagtctcatctgcctccactcggcctcagttcctcatcactgttcctgtgctcacagtcatcaattatagaccccacaacatgcgccctgaagacagaatgttccatatcagagctgtgatcttgagagccctctccttggctttcctgctgagtctccgaggagctggggccatcaaggcggaccatgtgtcaacttatgccgcgtttgtacagacgcatagaccaacaggggagtttatgtttgaatttgatgaagatgagatgttctatgtggatctggacaagaaggagaccgtctggcatctggaggagtttggccaagccttttcctttgaggctcagggcgggctggctaacattgctatattgaacaacaacttgaataccttgatccagcgttccaaccacactcaggccaccaacgatccccctgaggtgaccgtgtttcccaaggagcctgtggagctgggccagcccaacaccctcatctgccacattgacaagttcttcccaccagtgctcaacgtcacgtggctgtgcaacggggagctggtcactgagggtgtcgctgagagcctcttcctgcccagaacagattacagcttccacaagttccattacctgacctttgtgccctcagcagaggacttctatgactgcagggtggagcactggggcttggaccagccgctcctcaagcactgggaggcccaagagccaatccagatgcctgagacaacggagactgtgctctgtgccctgggcctggtgctgggcctagtcggcatcatcgtgggcaccgtcctcatcataaagtctctgcgttctggccatgacccccgggcccaggggaccctgtgaaatactgtaaaggtgacaaaatatctgaacagaagaggacttaggagagatctgaactccagctgccctacaaactccatctcagcttttcttctcacttcatgtgaaaactactccagtggctgactgaattgctgacccttcaagctctgtccttatccattacctcaaagcagtcattccttagtaaagtttccaacaaatagaaattaatgacactttggtagcactaatatggagattatcctttcattgagccttttatcctctgttctcctttgaagaacccctcactgtcaccttcccgagaataccctaagaccaataaatacttcagtatttcagagcggggagactctgagtcattcttactggaagtctaggaccaggtcacatgtgaatactatttcttgaaggtgtggtttcaacctctgttgccgatgtggttactaaaggttctgatcccacttgaacggaaaggtctgaggatattgattcagtcctgggtttttccctaactacaggatagggtggggtagagaaaggatatttgggggaaattttacttggatgaagattttcttggatgtagtttgaagactgcagtgtttgaagtctctgagggaagagatttggtctgtctggatcaagatttcaggcagattaggattccattcacagcccctgagcttccttcccaaggctgtattgtaattatagcaatatttcatggaggatttttctacatgataaactaagagccaagaaataaaatttttaaaatgccctaa

SEQ ID NO: 84481 - DNA, 1704 bp, Artificial Sequence
  derived and/or modified sequence
acgcgtagcattcctgccgtccctggaaaagtgctagaggcccacagtttcagtctcatctgcctccactcggcctcagttcctcatcactgttcctgtgctcacagtcatcaattatagaccccacaacatgcgccctgaagacagaatgttccatatcagagctgtgatcttgagagccctctccttggctttcctgctgagtctccgaggagctggggccatcaaggcggaccatgtgtcaacttatgccgcgtttgtacagacgcatagaccaacaggggagtttatgtttgaatttgatgaagatgagatgttctatgtggatctggacaagaaggagaccgtctggcatctggaggagtttggccaagccttttcctttgaggctcagggcgggctggctaacattgctatattgaacaacaacttgaataccttgatccagcgttccaaccacactcaggccaccaacgatccccctgaggtgaccgtgtttcccaaggagcctgtggagctgggccagcccaacaccctcatctgccacattgacaagttcttcccaccagtgctcaacgtcacgtggctgtgcaacggggagctggtcactgagggtgtcgctgagagcctcttcctgcccagaacagattacagcttccacaagttccattacctgacctttgtgccctcagcagaggacttctatgactgcagggtggagcactggggcttggaccagccgctcctcaagcactgggaggcccaagagccaatccagatgcctgagacaacggagactgtgctctgtgccctgggcctggtgctgggcctagtcggcatcatcgtgggcaccgtcctcatcataaagtctctgcgttctggccatgacccccgggcccaggggaccctgtgaaatactgtaaaggtgacaaaatatctgaacagaagaggacttaggagagatctgaactccagctgccctacaaactccatctcagcttttcttctcacttcatgtgaaaactactccagtggctgactgaattgctgacccttcaagctctgtccttatccattacctcaaagcagtcattccttagtaaagtttccaacaaatagaaattaatgacactttggtagcactaatatggagattatcctttcattgagccttttatcctctgttctcctttgaagagcccctcactgtcaccttcccgagaataccctaagaccaataaatacttcagtatttcagagcggggagactctgagtcattcttactggaagtctaggaccaggtcacatgtgaatactatttcttgaaggtgtggtttcaacctctgttgccgatgtggttactaaaggttctgatcccacttgaacggaaaggtctgaggatattgattcagtcctgggtttttccctaactacaggatagggtggggtagagaaaggatatttgggggaaattttacttggatgaagattttcttggatgtagtttgaagactgcagtgtttgaagtctctgagggaagagatttggtctgtctggatcaagatttcaggcagattaggattccattcacagcccctgagcttccttcccaaggctgtattgtaattatagcaatatttcatggaggatttttctacatgataaactaagagccaagaaataaattttttaaaatgccctaa

SEQ ID NO: 84482 - DNA, 1375 bp, Artificial Sequence
  derived and/or modified sequence
caacaccctcatctgccacattgacaagttcttcccaccagtgctcaacgtcacgtggctgtgcaacggggagctggtcactgagggtgtcgctgagagcctcttcctgcccagaacagattacagcttccacaagttccattacctgacctttgtgccctcagcagaggacttctatgactgcagggtggagcactggggcttggaccagccgctcctcaagcactgggaggcccaagagccaatccagatgcctgagacaacggagactgtgctctgtgccctgggcctggtgctgggcctagtcggcatcatcgtgggcaccgtcctcatcataaagtctctgcgttctggccatgacccccgggcccaggggaccctgtgaaatactgtaaaggtgggaatgtaaagaggaggccctaggatttgtagaatgtaaggaagggaggaaaaattcaatctgataagtgttcattgatcttctaatgggttaaaagcattcagccacataacaacaacaacaccgataactaactgagtagttaatatggtcaggcgctattctgaggatttacatttattaactcactttattctcacacatagtctttgaggtaggtactattattttcactatttcacatgagagatacttacatctttttacatacacagagactttaagcactttgatcaagttcccacagctatgaagtagtagggctagcttccaatccagaaagtctggatccaagactgtttatccactgtcctattcaccctattttgtgaaggaaaagaccaagttcaaattctccagagtccattgccaaataatggagtcagatctatatttctatacataattacaacacagtgtggtgggtgcctgtaactacttactgtctctacttggactcattccatggcaatgttcacacaaaaaatgcccctccagagatcttacaggtttctatttatcataacactcaccatgctttatatttttatatgttttgggaattctcttagcattagacagtgaacttccatgcagatgaccacatctaattcattattattattgttattcatgctggacctcaggtacaaaaggttaagaacttctcagttcattatatgatcatcattggtgcctccgagctctctctctctcccttgatttatttggtcccttttatctccagtccttactcccatatctaacctcttacccctacctcataggtaaacattttaatgaatttgatgtttccttttatttgcatagatcctctgtaatatgtagtagtgtccagtgtacatgtatttttaattaaccaaaatggcattaaattatagatctaattttgta

SEQ ID NO: 84483 - DNA, 1626 bp, Artificial Sequence
  derived and/or modified sequence
gttcctcatcactgttcctgtgctcacagtcatcaattatagaccccacaacatgcgccctgaagacagaatgttccatatcagagctgtgatcttgagagccctctccttggctttcctgctgagtctccgaggagctggggccatcaaggcggaccatgtgtcaacttatgccgcgtttgtacagacgcatagaccaacaggggagtttatgtttgaatttgatgaagatgagatgttctatgtggatctggacaagaaggagaccgtctggcatctggaggagtttggccaagccttttcctttgaggctcagggcgggctggctaacattgctatattgaacaacaacttgaataccttgatccagcgttccaaccacactcaggccaccaacgatccccctgaggtgaccgtgtttcccaaggagcctgtggagctgggccagcccaacaccctcatctgccacattgacaagttcttcccaccagtgctcaacgtcacgtggctgtgcaacggggagctggtcactgagggtgtcgctgagagcctcttcctgcccagaacagattacagcttccacaagttccattacctgacctttgtgccctcagcagaggacttctatgactgcagggtggagcactggggcttggaccagccgctcctcaagcactgggaggcccaagagccaatccagatgcctgagacaacggagactgtgctctgtgccctgggcctggtgctgggcctagtcggcatcatcgtgggcaccgtcctcatcataaagtctctgcgttctggccatgacccccgggcccaggggaccctgtgaaatactgtaaaggtgacaaaatatctgaacagaagaggacttaggagagatctgaactccagctgccctacaaactccatctcagcttttcttctcacttcatgtgaaaactactccagtggctgactgaattgctgacccttcaagctctgtccttatccattacctcaaagcagtcattccttagtaaagtttccaacaaatagaaattaatgacactttggtagcactaatatggagattatcctttcattgagccttttatcctctgttctcctttgaagaacccctcactgtcaccttcccgagaataccctaagaccaataaatacttcagtatttcagagcggggagactctgagtcattcttactggaagtctaggaccaggtcacatgtgaatactatttcttgaaggtgtggtttcaacctctgttgccgatgtggttactaaaggttctgatcccacttgaacggaaaggtctgaggatattgattcagtcctgggtttttccctaactacaggatagggtggggtagagaaaggatatttgggggaaattttacttggatgaagattttcttggatgtagtttgaagactgcagtgtttgaagtctctgagggaagagatttggtctgtctggatcaagatttcaggcagattaggattccattcacagcccctgagcttccttcccaaggctgtattgtaattatagcaatatttcatggaggatttttctacatgataaactaagagccaagaaataaaatttttaaaatgccctaa

SEQ ID NO: 84484 - DNA, 1375 bp, Artificial Sequence
  derived and/or modified sequence
caacaccctcatctgccacattgacaagttcttcccaccagtgctcaacgtcacgtggctgtgcaacggggagctggtcactgagggtgtcgctgagagcctcttcctgcccagaacagattacagcttccacaagttccattacctgacctttgtgccctcagcagaggacttctatgactgcagggtggagcactggggcttggaccagccgctcctcaagcactgggaggcccaagagccaatccagatgcctgagacaacggagactgtgctctgtgccctgggcctggtgctgggcctagtcggcatcatcgtgggcaccgtcctcatcataaagtctctgcgttctggccatgacccccgggcccaggggaccctgtgaaatactgtaaaggtgggaatgtaaagaggaggccctaggatttgtagaatgtaaggaagggaggaaaaattcaatctgataagtgttcattgatcttctaatgggttaaaagcattcagccacataacaacaacaacaccgataactaactgagtagttaatatggtcaggcgctattctgaggatttacatttattaactcactttattctcacacatagtctttgaggtaggtactattattttcactatttcacatgagagatacttacatctttttacatacacagagactttaagcactttgatcaagttcccacagctatgaagtagtagggctagcttccaatccagaaagtctggatccaagactgtttatccactgtcctattcaccctattttgtgaaggaaaagaccaagttcaaattctccagagtccattgccaaataatggagtcagatctatatttctatacataattacaacacagtgtggtgggtgcctgtaactacttactgtctctacttggactcattccatggcaatgttcacacaaaaaatgcctctccagagatcttacaggtttctatttatcataacactcaccatgctttatatttttatatgttttgggaattctcttagcattagacagtgaacttccatgcagatgaccacatctaattcattattattattgttattcatgctggacctcaggtacaaaaggttaagaacttctcagttcattatatgatcatcattggtgcctccgagctctctctctctcccttgatttatttggtcccttttatctccagtccttactcccatatctaacctcttacccctacctcataggtaaacattttaatgaatttgatgtttccttttatttgcatagatcctctgtaatatgtagtagtgtccagtgtacatgtatttttaattaaccaaaatggcattaaattatagatctaattttgta

SEQ ID NO: 84485 - DNA, 1157 bp, Artificial Sequence
  derived and/or modified sequence
gctcacagtcatcaattatagaccccacaacatgcgccctgaagacagaatgttccatatcagagctgtgatcttgagagccctctccttggctttcctgctgagtctccgaggagctggggccatcaaggcggaccatgtgtcaacttatgccgcgtttgtacagacgcatagaccaacaggggagtttatgtttgaatttgatgaagatgagatgttctatgtggatctggacaagaaggagaccgtctggcatctggaggagtttggccaagccttttcctttgaggctcagggcgggctggctaacattgctatattgaacaacaacttgaataccttgatccagcgttccaaccacactcaggccaccaacgatccccctgaggtgaccgtgtttcccaaggagcctgtggagctgggccagcccaacaccctcatctgccacattgacaagttcttcccaccagtgctcaacgtcacgtggctgtgcaacggggagctggtcactgagggtgtcgctgagagcctcttcctgcccagaacagattacagcttccacaagttccattacctgacctttgtgccctcagcagaggacttctatgactgcagggtggagcactggggcttggaccagccgctcctcaagcactgggaggcccaagagccaatccagatgcctgagacaacggagactgtgctctgtgccctgggcctggtgctgggcctagtcggcatcatcgtgggcaccgtcctcatcataaagtctctgcgttctggccatgacccccgggcccaggggaccctgtgaaatactgtaaaggtgacaaaatatctgaacagaagaggacttaggagagatctgaactccagctgccctacaaactccatctcagcttttcttctcacttcatgtgaaaactactccagtggctgactgaattgctgacccttcaagctctgtccttatccattacctcaaagcagtcattccttagtaaagtttccaacaaatagaaattaatgacactttggtagcactaatatggagattatcctttcattgagccttttatcctctgttctcctttgaagaacccctcactgtcaccttcccgagaataccctaagaccaataaatacttcagtatttc

SEQ ID NO: 84486 - DNA, 703 bp, Artificial Sequence
  derived and/or modified sequence
ctccactcggcctcagttcctcatcactgttcctgtgctcacagtcatcaattatagaccccacaacatgcgccctgaagacagaatgttccatatcagagctgtgatcttgagagccctctccttggctttcctgctgagtctccgaggagctggggccatcaaggcggaccatgtgtcaacttatgccgcgtttgtacagacgcatagaccaacaggggagtttatgtttgaatttgatgaagatgagatgttctatgtggatctggacaagaaggagaccgtctggcatctggaggagtttggccaagccttttcctttgaggtgaccgtgtttcccaaggagcctgtggagctgggccagcccaacaccctcatctgccacattgacaagttcttcccaccagtgctcaacgtcacgtggctgtgcaacggggagctggtcactgagggtgtcgctgagagcctcttcctgcccagaacagattacagcttccacaagttccattacctgacctttgtgccctcagcagaggacttctatgactgcagggtggagcactggggcttggaccagccgctcctcaagcactgggaggcccaagagccaatccagatgcctgagacaacggagactgtgctctgtgccctgggcctggtgctgggcctagtcggcatcatcgtgggcaccgtcctcatcata

SEQ ID NO: 84487 - DNA, 1375 bp, Artificial Sequence
  derived and/or modified sequence
caacaccctcatctgccacattgacaagttcttcccaccagtgctcaacgtcacgtggctgtgcaacggggagctggtcactgagggtgtcgctgagagcctcttcctgcccagaacagattacagcttccacaagttccattacctgacctttgtgccctcagcagaggacttctatgactgcagggtggagcactggggcttggaccagccgctcctcaagcactgggaggcccaagagccaatccagatgcctgagacaacggagactgtgctctgtgccctgggcctggtgctgggcctagtcggcatcatcgtgggcaccgtcctcatcataaagtctctgcgttctggccatgacccccgggcccaggggaccctgtgaaatactgtaaaggtgggaatgtaaagaggaggccctaggatttgtagaatgtaaggaagggaggaaaaattcaatctgataagtgttcattgatcttctaatgggttaaaagcattcagccacataacaacaacaataccgataactaactgagtagttaatatggtcaggcgctattctgaggatttacatttattaactcactttattctcacacatagtctttgaggtaggtactattattttcactatttcacatgagagatacttacatctttttacatacacagagactttaagcactttgatcaagttcccacagctatgaagtagtagggctagcttccaatccagaaagtctggatccaagactgtttatccactgtcctattcaccctattttgtgaaggaaaagaccaagttcaaattctccagagtccattgccaaataatggagtcagatctatatttctatacataattacaacacagtgtggtgggtgcctgtaactacttactgtctctacttggactcattccatggcaatgttcacacaaaaaatgcccctccagagatcttacaggtttctatttatcataacactcaccatgctttatatttttatatgttttgggaattctcttagcattagacagtgaacttccatgcagatgaccacatctaattcattattattattgttattcatgctggacctcaggtacaaaaggttaagaacttctcagttcattatatgatcatcattggtgcctccgagctctctctctctcccttgatttatttggtcccttttatctccagtccttactcccatatctaacctcttacccctacctcataggtaaacattttaatgaatttgatgtttccttttatttgcatagatcctctgtaatatgtagtagtgtccagtgtacatgtatttttaattaaccaaaatggcattaaattatagatctaattttgta

SEQ ID NO: 84488 - DNA, 1157 bp, Artificial Sequence
  derived and/or modified sequence
gctcacagtcatcaattatagaccccacaacatgcgccctgaagacagaatgttccatatcagagctgtgatcttgagagccctctccttggctttcctgctgagtctccgaggagctggggccatcaaggcggaccatgtgtcaacttatgccgcgtttgtacagacgcatagaccaacaggggagtttatgtttgaatttgatgaagatgagatgttctatgtggatctggacaagaaggagaccgtctggcatctggaggagtttggccaagccttttcctttgaggctcagggcgggctggctaacattgctatattgaacaacaacttgaataccttgatccagcgttccaaccacactcaggccaccaacgatccccctgaggtgaccgtgtttcccaaggagcctgtggagctgggccagcccaacaccctcatctgccacattgacaagttcttcccaccagtgctcaacgtcacgtggctgtgcaacggggagctggtcactgagggtgtcgctgagagcctcttcctgcccagaacagattacagcttccacaagttccattacctgacctttgtgccctcagcagaggacttctatgactgcagggtggagcactggggcttggaccagccgctcctcaagcactgggaggcccaagagccaatccagatgcctgagacaacggagactgtgctctgtgccctgggcctggtgctgggcctagtcggcatcatcgtgggcaccgtcctcatcataaagtctctgcgttctggccatgacccccgggcccaggggaccctgtgaaatactgtaaaggtgacaaaatatctgaacagaagaggacttaggagagatctgaactccagctgccctacaaactccatctcagcttttcttctcacttcatgtgaaaactactccagtggctgactgaattgctgacccttcaagctctgtccttatccattacctcaaagcagtcattccttagtaaagtttccaacaaatagaaattaatgacactttggtagcactaatatggagattatcctttcattgagccttttatcctctgttctcctttgaagagcccctcactgtcaccttcccgagaataccctaagaccaataaatacttcagtatttc

SEQ ID NO: 84489 - DNA, 783 bp, Artificial Sequence
  derived and/or modified sequence
atgcggcccgaggaccggatgttccacatccgggccgtgatcctgcgggcactgagcctggcgttccttttgtccctgcggggcgcgggcgccatcaaggccgaccacgtctcaacctacgctgccttcgttcagacccacaggcctaccggagaattcatgttcgaatttgacgaagatgagatgttctacgtggacctcgacaagaaagaaacagtgtggcaccttgaggagttcggccaggccttttcattcgaggcccagggagggttggcgaacatcgccattctcaataacaatctcaacaccttgatccaaaggtcaaaccacactcaggctactaatgacccccccgaagtaaccgttttccccaaagagcctgtcgaactggggcagccaaatactctgatctgtcatatcgacaaatttttcccacccgtactcaacgtgacttggctgtgtaacggggagctggtcaccgagggggtggcagaaagtctcttcctgccccgaactgattattctttccacaagttccattacctgacctttgttccatcagccgaagatttctatgactgtcgcgtggagcactggggtcttgaccagcctctcctgaaacattgggaagcccaagaacctattcagatgccagagacaacagagacggtgttgtgcgccctcggactggttttgggcctcgttgggatcattgtcgggaccgttttgattatcaagtcccttaggtcaggacacgaccctagggcacaaggtactctctag

SEQ ID NO: 84490 - DNA, 783 bp, Artificial Sequence
  derived and/or modified sequence
atgcggcccgaggaccggatgttccacatccgggccgtgatcctgagggccctgtccctagcattcttactgagtctgaggggagcgggggccatcaaagcagatcacgtgtccacatatgccgctttcgtacagacgcatagacccactggtgaatttatgttcgaatttgatgaggacgaaatgttttatgttgatctggacaagaaagaaacggtgtggcacctggaagaatttggccaggcattctcattcgaagcccagggtggactggctaacattgccatactgaataacaatctgaacaccttgattcagcgcagtaatcacactcaagccacaaacgacccgccagaagtgacagtgtttcctaaggagcccgtggaattgggacagccaaatacacttatctgccatatcgataagtttttcccacccgtgcttaacgtcacttggctgtgcaatggagagctggttactgagggcgtagccgagtcactgtttctcccccgtacagattacagttttcacaagtttcactatctgacctttgttccatccgccgaggacttctatgactgtcgggtagaacactgggggcttgatcagcccttactgaaacactgggaagcccaggaacctatacagatgcccgagaccacggaaactgtcctttgtgccctgggcctcgtgctgggtctcgtcgggatcattgtgggtacagtgctcataatcaaatccctgcggtcagggcacgaccctagagcccagggcacgctttag

SEQ ID NO: 84491 - DNA, 387 bp, Artificial Sequence
  derived and/or modified sequence
tgaaacaccctgatctgccacatcgacaagttcttcccccccgtgttaaacgttacttggctttgcaacggggaattagtgactgagggagtggccgaaagccttttccttccgcgaacagattactcattccataagttccactatctcacgtttgtccctagcgcggaggacttttacgattgccgcgtggaacactggggcttggaccaaccacttctaaagcattgggaagctcaagaacccatccagatgccagagacaaccgagacagttttgtgtgctcttggtctggttttgggcctcgttgggatcatcgtggggaccgtcctgattatcaaaagcttgaggagcggtcacgaccctagagcgcagggaactctgtag

SEQ ID NO: 84492 - DNA, 783 bp, Artificial Sequence
  derived and/or modified sequence
atgcggcccgaggaccggatgttccacatccgggccgtgatcctgcgcgcactgtccttggcattcttgctgtctctgcggggtgcaggcgcaatcaaagcagatcacgtatccacatacgctgcttttgtgcagacacatcgtcccacaggcgagtttatgtttgaatttgacgaggatgagatgttttacgtagacttagataagaaggagaccgtctggcatctggaagagtttggccaggcctttagctttgaagcccagggaggcctagcaaacattgccattctcaataataacctgaatacactgattcaaaggtccaatcacactcaggcgacgaacgaccctcctgaggtgactgtctttccaaaggaacctgtggaactggggcagcccaataccctcatttgccatatcgataagttctttccccctgtgctaaatgtcacctggttgtgcaacggggaattagttaccgaaggagtggccgagtctctgttcctgccccgcacagactatagcttccataaattccattatttgacctttgtgccatccgcggaggatttctatgactgccgcgtggagcactggggacttgatcagccgctgctgaagcattgggaagcccaggaaccgattcaaatgcccgagacgacagaaaccgtgctatgtgccctcggactggtcttgggactggttgggatcatagtgggcacagtgcttattatcaagtcgctgaggtccggacacgatccaagggcacagggcacgctgtag

SEQ ID NO: 84493 - DNA, 783 bp, Artificial Sequence
  derived and/or modified sequence
atgcggcccgaggaccggatgttccacatccgggccgtgatcctgcgggcactcagcctcgcctttttactcagcctaaggggtgccggagctattaaagctgatcacgtctctacctatgccgccttcgtgcagacccacaggcctactggcgaattcatgttcgagttcgacgaagatgagatgttctacgtggatctcgacaaaaaggaaaccgtgtggcacctcgaggaattcggccaggctttcagctttgaggctcagggtgggcttgcaaacattgccatcctgaacaataatctgaatactctgattcagcggtccaaccatactcaggccactaatgaccctcctgaagttacagtcttccccaaggaaccagtggaattggggcagcctaataccctgatttgccacatagacaaattcttcccgccggtgctcaatgtaacttggctgtgtaatggagaactcgtgacggagggagtcgctgaatctctgttcttgccccgcactgactattcgttccacaagtttcactaccttactttcgtgccctctgctgaggatttttacgattgtagggtggagcactggggcctcgaccagcccctgcttaagcactgggaggcgcaggagcctattcagatgcccgaaacaaccgaaacagtgctgtgtgcgttgggcctcgtcctcggtctggtcgggattatcgtgggtaccgtgctgataattaaaagcttgcggtcagggcatgatccccgcgcccagggcaccctgtag

SEQ ID NO: 84494 - DNA, 387 bp, Artificial Sequence
  derived and/or modified sequence
tgaaacaccctgatctgccacatcgacaagttcttcccccccgtgctcaacgtgacttggttgtgcaatggcgaactggtgacagagggtgtcgccgagtctctcttcctaccgaggactgactattcgttccataagttccattacttgacgttcgtcccgtcggccgaagacttctatgattgccgcgtggagcactggggactggaccagccactgctcaaacactgggaggcccaggaaccgattcaaatgccggagacgactgaaacagtactgtgtgctctcggccttgtgctgggtctggttgggatcattgttggcactgtgttgatcattaagagccttagatcgggccatgacccccgcgcccagggcaccctgtag

SEQ ID NO: 84495 - DNA, 783 bp, Artificial Sequence
  derived and/or modified sequence
atgcggcccgaggaccggatgttccacatccgggccgtgatcctgagggcgctttctttggcttttctactttcacttcggggcgcgggggctatcaaggctgaccatgtatcaacttacgccgccttcgtccaaactcacaggcccacaggtgagttcatgttcgagtttgacgaggacgaaatgttttatgtggacctggataagaaggagactgtgtggcaccttgaggaattcggccaagctttttcgtttgaggctcagggaggacttgccaacatagccattctcaataacaatctaaatacactgattcaacgaagtaaccacacacaagccaccaacgatcctcctgaagtgactgtctttccgaaggaacccgtcgagttaggacagcccaatactctgatatgtcacattgataaattctttccccctgtcctcaatgtcacatggctctgcaatggtgaactcgtgaccgaaggtgtcgccgaaagtctcttcctgcctagaaccgattactcctttcacaagttccactacctaaccttcgtgccatcggccgaagacttttacgactgcagagtggaacattggggcctcgaccagcccctacttaaacactgggaggcccaggagcccatacagatgcccgaaacaactgagactgttctttgtgcgctcggactcgtgctcggcctggttggaatcattgtaggcacagtgctcatcattaagtcgctgaggtccgggcatgacccacgggcacagggtaccctctag

SEQ ID NO: 84496 - DNA, 387 bp, Artificial Sequence
  derived and/or modified sequence
tgaaacaccctgatctgccacatcgacaagttcttcccccccgtgctcaatgtcacttggctgtgcaacggtgagcttgtaactgagggcgtggctgagtcattgtttcttccgagaactgactacagctttcataaatttcattatttaactttcgtcccgagtgcagaagatttttatgattgccgagtcgagcactggggactggatcagccccttctgaaacattgggaagctcaagagccgatccaaatgcccgaaactacagaaactgtgctgtgtgccctaggcctggtgcttggcctggtgggtatcatcgtgggcaccgtgcttattatcaagagtctgcgcagcggacacgatcctcgagcccagggtacgctctag

SEQ ID NO: 84497 - DNA, 783 bp, Artificial Sequence
  derived and/or modified sequence
atgcggcccgaggaccggatgttccacatccgggccgtgatcctgcgtgccctgtccctcgctttcctgctgagcttgaggggagctggcgctatcaaagctgatcatgtcagcacctacgctgcatttgttcagactcacagaccaactggcgaattcatgttcgagttcgatgaggatgagatgttttatgtggaccttgacaagaaggaaacggtgtggcacttggaggagttcggtcaagctttttccttcgaggcacaaggcggacttgccaacattgctatccttaacaacaacttgaacacactcatccagcgttccaatcacacacaagctacaaatgacccccctgaggtgaccgtctttccaaaggagccagttgagctcggtcagccgaatacgcttatctgtcacatcgataagttcttcccacctgtacttaatgtgacctggctgtgtaatggcgagctggttacggagggggtggcagaatccctgttcctgccgaggacagactactcctttcacaagttccactatctgacgttcgtcccgagtgccgaagacttctatgactgccgggtggaacattggggtctagatcaacctctcttgaagcactgggaggcccaggagcctattcagatgcctgagactacagaaacagtgctctgcgcacttggcttggtgctcgggttagttgggatcatagttggcacagtactgatcattaaatctctccggagtggacacgaccctagggctcagggaactctctag

SEQ ID NO: 84498 - DNA, 387 bp, Artificial Sequence
  derived and/or modified sequence
tgaaacaccctgatctgccacatcgacaagttcttcccccccgtgctgaatgtgacatggctgtgcaacggtgagcttgtgaccgaaggcgtagccgaatctctgtttttgcctagaaccgactactcctttcacaaattccattacttgacttttgtcccaagcgctgaagacttctacgattgtagggtggagcattggggactcgaccagcctcttctcaaacactgggaggcacaggaaccaattcagatgccagagactacagaaaccgtgctgtgtgcattgggactcgttctcggattggtcggcatcatcgtaggaacagtcctgatcatcaaaagtctccgctcaggccacgatcccagagcccaggggacgctgtag

SEQ ID NO: 84499 - DNA, 639 bp, Artificial Sequence
  derived and/or modified sequence
atgcggcccgaggaccggatgttccacatccgggccgtgatcctgcgtgcactctccctggccttccttctgtcattaagaggcgcaggcgctatcaaagctgatcacgttagcacctacgctgccttcgtgcagacacatcgacccactggagaatttatgtttgaatttgatgaggacgagatgttttacgtggacctggataaaaaggagaccgtgtggcatctggaagagtttggccaagccttctccttcgaggtaaccgtctttccaaaagagccagtggagttagggcagcctaacacactgatttgccacatagataagtttttcccacccgtgcttaatgtcacatggctgtgtaacggcgaattggttactgagggagtggccgaaagtctattcctgccacgcacagattatagctttcataagtttcactatttgaccttcgtgccttccgctgaggatttctatgactgccgcgttgaacattggggattggaccaacccctgttgaaacactgggaggctcaggagccaattcagatgcctgagacaactgaaactgtcctgtgtgccctcggcctggtgttgggattggtcggcataatagtcggaaccgtactgattatatag

SEQ ID NO: 84500 - DNA, 639 bp, Artificial Sequence
  derived and/or modified sequence
atgcggcccgaggaccggatgttccacatccgggccgtgatcctgagggcgctgtcattggccttccttctgtctctgcggggcgctggggccatcaaggcggaccacgtaagcacctacgccgccttcgtacagacacaccggcccaccggagagtttatgtttgagttcgacgaagacgagatgttttacgttgatttggataagaaagaaactgtatggcatctggaagaatttggccaggcattcagtttcgaggtgacagtgtttcccaaggagcctgtagagttgggccagccaaacaccttgatttgtcacattgataagttcttcccacctgtcttgaacgttacgtggctgtgcaacggcgagctggtcactgagggcgtagccgagagcttgtttcttccacgaaccgactactcttttcacaagttccactaccttacatttgttccttccgcagaagacttctacgactgcagggtcgagcattggggattggaccagcccctgctgaaacactgggaggctcaggaacccatccaaatgccagaaaccacggaaaccgtcttgtgtgcgcttgggctcgtgctgggtctcgtaggcattatcgtcggaaccgtactgattatttag

SEQ ID NO: 84501 - DNA, 387 bp, Artificial Sequence
  derived and/or modified sequence
tgaaacaccctgatctgccacatcgacaagttcttcccccccgtgcttaatgtcacttggctgtgtaatggcgagctggtgacggaaggggtcgccgagtctctcttcctaccccggacggattatagctttcacaagtttcactatttgacattcgtgccttcagcagaggacttctacgactgtagagtggaacactggggactggatcagccgctgttgaagcactgggaggcgcaagagcctatccagatgcctgagacaaccgaaactgtcctttgtgccttaggattggtcctcggcctggtgggaatcatcgtcggaaccgtgctgatcatcaagagcctgcgctcaggccatgatcctagagcacaaggaactctatag

SEQ ID NO: 84502 - DNA, 639 bp, Artificial Sequence
  derived and/or modified sequence
atgcggcccgaggaccggatgttccacatccgggccgtgatcctgcgcgcactcagtctggccttccttttgagccttcgcggcgcaggcgccatcaaggctgatcatgtcagcacttacgccgcctttgtccagactcaccggcccactggggagtttatgtttgaattcgatgaggatgagatgttctacgtagacctcgacaaaaaagaaactgtatggcacttagaagagttcgggcaggcattttctttcgaggtcacggtgttccccaaggagcctgtagagctaggtcagccaaataccctgatctgtcacattgataagtttttcccacccgtactgaacgttacttggttgtgcaacggtgagctagtgacggaaggagtggccgaatcactcttcttgccccgtaccgattattcatttcataaatttcactacctcaccttcgtgccctcggccgaagacttttatgactgtcgggtggagcactggggtctcgaccaaccccttctgaagcactgggaggcacaggaaccaatccagatgccagagacgactgagactgttttatgcgcgctcggcctggtgctgggcttagtgggtataatcgtcggaaccgtactaataatctag

SEQ ID NO: 84503 - DNA, 639 bp, Artificial Sequence
  derived and/or modified sequence
atgcggcccgaggaccggatgttccacatccgggccgtgatcctgcgggcactttcactggccttccttctttctctgcgcggcgccggggctattaaggccgaccacgtctccacttacgctgcgtttgttcaaacgcatcggcctaccggcgaatttatgttcgagttcgacgaggacgagatgttctatgtggaccttgataagaaggagaccgtctggcatttggaggaattcggtcaggcattctcattcgaagtaacggtgtttccgaaggagcctgtcgaattaggacaacccaataccctcatatgtcacattgacaagttttttcctcccgtactcaatgtgacttggctttgtaatggggaactggtcaccgaaggggtggccgaaagcctttttctgccgcgaactgattattcattccataaatttcactatctcacatttgtaccttcagccgaagacttttatgactgcagagtggagcattggggccttgaccagccactactcaagcattgggaagcacaggaaccaatccagatgcctgaaaccaccgaaacagtgctctgtgcattaggcctggtattgggcttggttggaattatcgttgggacagtcctgatcatctag

SEQ ID NO: 84504 - DNA, 387 bp, Artificial Sequence
  derived and/or modified sequence
tgaaacaccctgatctgccacatcgacaagttcttcccccccgtgttaaacgtgacctggctctgcaacggagagctcgtaactgaaggtgttgcagaaagcctctttctgccaagaacggattattctttccataaattccactatctgaccttcgtgcccagcgccgaggacttttatgactgcagagtggagcattggggactggatcagccattgctcaaacactgggaggcacaggagcccattcagatgccagaaacaacggagactgtgctgtgtgccctcggcttggtcttgggcctggttggcataattgttggtacagtgttgattatcaagagcttaagatcaggccatgatccacgcgcccaggggactctgtag

SEQ ID NO: 84505 - DNA, 783 bp, Artificial Sequence
  derived and/or modified sequence
atgcggcccgaggaccggatgttccacatccgggccgtgatcctgcgggctctctctctcgctttcctgctgtctctcaggggcgctggggcgataaaagcagatcatgtttcgacatatgctgccttcgtccagacgcaccggcctacaggagagtttatgtttgaattcgacgaagatgagatgttttacgtggacttagacaaaaaagagaccgtgtggcatctggaggaattcggtcaagctttctccttcgaagcacaaggcggactggccaatatcgctattttgaataataaccttaacaccctgatacagcgatctaaccacacacaggccacgaatgacccccccgaggtcactgtgtttccaaaggaaccagtggagttaggtcagcccaataccctcatttgtcatatagacaagttctttccccccgtgctcaatgtgacctggttgtgtaatggtgaactcgttacagagggtgtggccgagtcgctcttcctgccgcggaccgactattcctttcataagttccattacttgaccttcgtaccctctgccgaagatttttatgactgcagagtagaacattggggtctcgaccagccgctactcaagcactgggaggcccaggagcccatccaaatgccggaaacgacagagactgttctctgtgcactgggcctagtactggggctggtaggaattattgttggaaccgttctcattatcaagtccctccgcagcggacacgaccccagagcgcagggaacgctgtag

SEQ ID NO: 84506 - DNA, 639 bp, Artificial Sequence
  derived and/or modified sequence
atgcggcccgaggaccggatgttccacatccgggccgtgatcctgagagcactgtcacttgcatttctgttgtcccttcgaggggctggggccattaaagcggaccacgtgtccacctatgccgctttcgttcaaacacatcgcccaaccggagaatttatgttcgaatttgatgaagacgagatgttctacgttgacctggataaaaaggagaccgtgtggcacttagaagaattcgggcaggcattctccttcgaagtcaccgtatttccgaaggaaccagttgaactcgggcagcctaacaccctgatatgccatatagacaagttcttcccaccagtgctcaatgtgacctggttgtgtaatggcgagctcgtgacggagggcgtcgccgaaagtcttttcttgcctaggacagactacagtttccataagtttcattatctgacatttgtcccatctgccgaagatttttacgattgtcgagttgaacattggggcctcgaccagccacttctgaaacactgggaagcccaggaaccaattcagatgcctgaaaccactgaaactgtgctgtgcgctctgggactggtattggggttggtgggcataattgtcggtaccgtgttgatcatttag

SEQ ID NO: 84507 - DNA, 639 bp, Artificial Sequence
  derived and/or modified sequence
atgcggcccgaggaccggatgttccacatccgggccgtgatcctgagggccctgtccctcgcttttctgctctctctgcgcggggctggcgcaattaaggcagatcacgtcagcacgtatgcagcatttgtgcagacacacagacccaccggagaattcatgtttgagtttgacgaagacgagatgttctatgtcgacctggataagaaagaaactgtgtggcaccttgaggagttcggacaggctttttctttcgaagtgacagtgtttccaaaagaacctgtggagctcggacagcctaataccctgatatgtcacatagacaagttcttccccccggtgctgaatgtgacgtggttatgcaatggtgagctggtgactgaaggggtggctgaatcactgtttctgcctcgtaccgattactcctttcacaaatttcattatctcaccttcgtgcctagcgcagaggatttttacgactgtagagtggagcactgggggttagatcagcccctgctgaaacactgggaagctcaagaacctatccagatgcctgaaacaactgaaacagtcctctgtgccctgggactcgtgctcggcctagtgggaattatcgtaggtactgttctcatcatctag

SEQ ID NO: 84508 - DNA, 639 bp, Artificial Sequence
  derived and/or modified sequence
atgcggcccgaggaccggatgttccacatccgggccgtgatcctgcgagccctcagcctggccttcttgctgtccctgcgcggcgccggcgccataaaggccgatcacgtgagcacctacgctgcttttgtccagacgcacaggccgaccggtgagtttatgtttgaattcgatgaagatgagatgttttacgtggacttggacaagaaagaaacagtttggcacctcgaagagtttggccaggccttctcatttgaagtgactgtctttcccaaggaaccagtagaactgggtcaaccaaacaccctgatatgtcatattgacaaattcttcccgcccgtgctgaacgtcacctggttgtgtaacggtgaactggtgaccgaaggcgtcgctgagagccttttcttgcctcgtaccgattacagctttcataaattccactatctgacgttcgtcccctcggctgaagatttctatgattgccgtgtcgaacattggggcttggaccaacctttgctgaagcactgggaggctcaggaaccgattcagatgccagagaccacagagacagttctgtgcgcactgggactggtgctcggcctggtagggattattgtagggacggtgctgatcatctag

SEQ ID NO: 84509 - DNA, 387 bp, Artificial Sequence
  derived and/or modified sequence
tgaaacaccctgatctgccacatcgacaagttcttcccccccgtgctcaacgtaacttggctgtgcaatggggaactcgttacagaaggggtcgccgagagtctgttcctgccgaggacagactattcctttcacaagttccactatctaacttttgttccttccgctgaggacttttatgattgccgcgtcgaacattgggggttggatcagcccctgctgaaacactgggaagctcaagagccaatacagatgcctgagacaacagaaacggtcttgtgtgcccttggactggtgctgggtttggtggggatcattgtcggaaccgtgttgatcattaaatcacttcgttcggggcacgacccccgggcccagggtaccctctag

SEQ ID NO: 84510 - DNA, 783 bp, Artificial Sequence
  derived and/or modified sequence
atgcggcccgaggaccggatgttccacatccgggccgtgatcctgcgagctctgagcctggccttcctgctatccctaagaggtgccggggccatcaaggcggaccatgtctcaacatatgctgccttcgtccagacccatagaccaaccggagagtttatgttcgagttcgatgaagatgaaatgttctacgtggaccttgataaaaaggagacagtatggcatctcgaggagttcggacaagccttttcttttgaggctcaaggcggcctggcaaacatcgccatcttgaacaataatctgaacacactgatccaacgctccaatcacacccaggctaccaacgacccacctgaggtcacagtgtttcctaaagagcctgtggagctggggcaacctaataccctcatctgtcatatcgacaagttttttccacctgttcttaacgtcacttggctgtgcaacggagaactggttacagaaggcgttgcagaaagtttgttccttccgcggaccgactacagttttcacaagttccattatttgactttcgtgccatccgctgaggatttttacgactgcagggtggagcactggggtttggaccagcctttactgaagcattgggaagctcaggagccaattcagatgccggagaccacggagaccgtcctttgcgcactcggcttagtgctgggcctcgtcggaatcatcgttggtacagtccttattatcaagagtctaagatcgggtcacgaccccagggcccaggggaccctgtag

SEQ ID NO: 84511 - DNA, 387 bp, Artificial Sequence
  derived and/or modified sequence
tgaaacaccctgatctgccacatcgacaagttcttcccccccgtgctgaatgtaacttggttgtgtaacggcgaactggtgacagagggtgtggccgagtctctgttcttacctcgcaccgactattcctttcataagttccactacttaaccttcgttccatcagctgaagatttctacgattgcagggttgaacactggggactggatcagccactgctgaagcactgggaagcacaggaaccaattcagatgcccgaaactacagagacagtgctttgcgcacttggcctagtgctggggctagtcggtataatagtgggcacagtgctgatcattaaatctctccggagtggccacgatccccgcgcccagggcaccttgtag

SEQ ID NO: 84512 - DNA, 783 bp, Artificial Sequence
  derived and/or modified sequence
atgcggcccgaggaccggatgttccacatccgggccgtgatcctgcgcgccctgtccctggcatttctgttgtcgctgcgtggggctggcgccatcaaggccgatcatgtgtcgacatatgcagcattcgtccagacgcaccggccaacaggtgaattcatgtttgagttcgacgaggatgaaatgttctatgtggatttagataaaaaagagacagtgtggcatctagaggaatttggccaagccttctcattcgaggcccagggcggcctggcaaacattgcaatacttaacaataatctgaatacgctcatacagaggagcaaccacacccaggccacgaatgatccccccgaagtgaccgtgttcccaaaggagcctgttgagctggggcagcctaacactcttatttgtcatatcgacaagttcttcccgcctgtcctgaatgtgacctggctgtgcaacggagagctcgtgaccgaaggcgtcgccgagtctctgttcctaccaagaaccgactactccttccacaagttccactatctgacctttgttccttccgctgaagatttctacgactgccgggtcgagcattggggactagaccagcctcttctgaagcattgggaagctcaagagcccattcaaatgcccgaaactacagagacagtgctgtgtgccctcggcctggttctgggccttgtgggaatcatcgtgggaacagtgctcattataaagtcacttaggagcgggcacgatccccgggcacagggaaccttgtag

SEQ ID NO: 84513 - DNA, 639 bp, Artificial Sequence
  derived and/or modified sequence
atgcggcccgaggaccggatgttccacatccgggccgtgatcctgcgcgccctgtccctagcatttcttctttccctgcgcggggctggggcgattaaggctgaccacgtgtcgacgtacgcagcattcgtgcagactcaccgacccactggcgagttcatgttcgaattcgacgaggatgagatgttttatgtcgatctggacaaaaaggagaccgtatggcatctggaagaattcggacaggctttcagtttcgaggtcacggtctttcccaaagagcctgtggaactgggacaacctaatacgcttatctgtcatatcgacaaattttttccacccgttctgaatgtgacatggttatgtaatggagaactggtaaccgagggagtagccgaatctttattccttccaaggacagattacagctttcacaagttccactatctaaccttcgtgccaagcgccgaagacttctacgattgccgggtggagcactggggcctggatcagccactgcttaagcactgggaagcccaagaaccaatccagatgccggaaacgacagaaacagtactgtgcgccctcggcctggtgctgggactggtgggcatcattgtcggcacagtcctgattatatag

SEQ ID NO: 84514 - DNA, 783 bp, Artificial Sequence
  derived and/or modified sequence
atgcggcccgaggaccggatgttccacatccgggccgtgatcctgcgtgccttatccctggcatttcttctcagccttagaggtgcaggcgccatcaaggccgaccacgtgtctacctatgcggccttcgtgcagactcatcggcccacaggtgagttcatgtttgagtttgacgaagatgaaatgttttacgtggacctggataagaaagaaacagtttggcatttggaagagtttggacaggcattcagcttcgaggcgcaggggggcctcgccaatattgctattttgaacaataacctcaacaccctgatacagaggtctaatcatacccaggccaccaatgatccccctgaggtgacagtgttcccgaaggaacctgtggagctcgggcagccaaatacactaatttgtcacatcgacaagttttttccccccgtgctgaatgtgacgtggctgtgtaacggcgaactggtaaccgaaggcgtggccgaatctctctttctgcccaggactgattactcttttcataaattccactacttgacctttgtaccatctgccgaagacttctatgattgccgggttgagcactggggattagatcagcctctcttaaagcattgggaggcccaagagcccattcagatgcctgaaacaacagaaacagtcctgtgtgccctaggactggtgctgggattagtaggcattattgtgggaactgtactcataattaaaagtctgcgaagcgggcacgaccctagagcccagggtactttatag

SEQ ID NO: 84515 - DNA, 783 bp, Artificial Sequence
  derived and/or modified sequence
atgcggcccgaggaccggatgttccacatccgggccgtgatcctgagggcgctctctctagcctttcttctctcgttgcgcggagcaggggccattaaagccgatcacgtgtctacctacgcggccttcgtgcaaactcacagaccgactggcgagtttatgtttgagttcgacgaagacgagatgttttatgttgatcttgataaaaaagaaacagtttggcatcttgaagaatttggccaagcattcagctttgaagctcagggagggctagccaatattgccattctgaacaataatctgaatacccttatccagaggtctaaccatacacaagcgactaatgatccaccggaggtgaccgtgtttcctaaagaacccgttgaacttgggcagcccaatacattgatctgccacatcgataaatttttcccgccagtgttgaacgtgacatggctgtgtaacggcgagctggtgaccgagggcgtggcagagagtttgtttttgcccagaactgattattccttccacaaattccattatctgacttttgtgcccagtgctgaagacttttacgattgtcgggtggagcattgggggctggaccagcctttgttaaagcattgggaggcacaggagccaatccaaatgcctgagactaccgagaccgtcctctgtgcactggggttggtcctgggactcgtgggaatcatagtgggcactgtcttaattatcaagtctcttcgctccggacacgatccccgggcacagggcacactgtag

SEQ ID NO: 84516 - DNA, 783 bp, Artificial Sequence
  derived and/or modified sequence
atgcggcccgaggaccggatgttccacatccgggccgtgatcctgagggctctctccctggcattcctgctgtcccttcggggagccggcgcgatcaaggccgaccatgttagcacatatgcagcctttgtgcaaactcatcggcctactggcgagttcatgtttgaattcgacgaggacgaaatgttttacgtcgatttggacaagaaagagactgtctggcatcttgaggagtttgggcaggccttcagtttcgaagcccagggcggcctcgccaatattgccatactcaacaacaatctaaacaccctgatccaaaggagcaaccacacacaggccactaatgacccacctgaagttactgtgtttccaaaggagcctgtggaactgggccagccaaatacactgatatgccacatcgataaattctttccgcccgtcttgaatgtcacttggctttgtaacggggaactggtgactgagggcgttgccgagtcactcttcctacctcggaccgactacagctttcataagttccattacctgacgtttgtgccgtctgccgaggacttttacgattgtagggtggagcattggggactcgaccagccactcctgaagcattgggaggcacaggagccaatacaaatgcccgagacgaccgaaaccgtattgtgcgctcttggcctggtgctgggacttgtcggtattattgtaggaacagtgctgattattaagtccctacgctcaggccacgaccccagggcccaaggaactctgtag

SEQ ID NO: 84517 - DNA, 783 bp, Artificial Sequence
  derived and/or modified sequence
atgcggcccgaggaccggatgttccacatccgggccgtgatcctgagagccttatccttggccttcttgctgagcctacgcggtgccggggctatcaaagctgatcatgtatctacgtatgctgcctttgttcagacacatcggcctaccggtgaattcatgtttgaatttgatgaagatgaaatgttctacgtggatttagataaaaaggaaactgtgtggcaccttgaagaatttggacaggcctttagcttcgaggctcaggggggcttagcaaacatcgcaatcctgaataacaacctaaacactttaatacagaggagcaaccacacccaagctactaatgacccccctgaagtgacagtcttcccaaaggagccagtggagctcgggcaacctaatacattgatctgccacatcgataagttttttcccccagtgctgaatgtgacatggctttgcaacggtgagcttgtgaccgagggagtggccgagtccctttttctaccccgcactgattactcattccataagtttcattatttaaccttcgtaccttctgccgaagacttttacgactgtcgggtggaacactgggggctggatcaaccgttgttgaagcactgggaggcgcaggagccaatacaaatgcctgagacgaccgaaacagtcctttgcgcccttggcctcgtacttggtctcgtgggtattattgtggggacggtactgatcattaagtctctccggagcgggcacgatccacgggctcagggcactctctag

SEQ ID NO: 84518 - DNA, 783 bp, Artificial Sequence
  derived and/or modified sequence
atgcggcccgaggaccggatgttccacatccgggccgtgatcctgcgcgcactatcattggctttcttgctgtctctgagaggggccggagccatcaaagcggatcacgtgtccacttatgcggcctttgtgcagacacatcggccaaccggggaattcatgttcgaattcgatgaggacgagatgttctacgtagatctggacaagaaagaaacagtgtggcatctggaggaatttggtcaggcattcagctttgaggcacaaggtgggctcgcgaatattgccatacttaacaataatttgaacactcttatacagaggtctaaccacactcaggcgacaaatgaccccccagaggtcacggtttttccaaaagaaccagtggagctgggtcagccgaatacattgatatgccacatcgataaatttttccctcctgtgctgaatgtgacatggctctgcaacggcgagttggtgactgagggagtggctgaaagcctctttctcccacgaaccgactacagcttccacaaattccactatctgacgttcgttccttccgcagaggacttctacgattgtagagtcgagcactggggactggatcaaccactgctgaaacattgggaagctcaggagcctatccagatgccagaaaccaccgaaactgtgctgtgcgccctggggttagtgctgggtctcgttggtatcatcgtaggcaccgtgctcattataaaatccctgcgtagcggccacgaccctcgggcccaggggaccctctag

SEQ ID NO: 84519 - DNA, 783 bp, Artificial Sequence
  derived and/or modified sequence
atgcggcccgaggaccggatgttccacatccgggccgtgatcctgcgggcactatcacttgcgtttctactgagcctccggggagctggggccattaaagccgaccatgtcagcacatacgcggctttcgtgcagacccacaggccaactggggagttcatgttcgaatttgatgaggacgaaatgttctatgtggatttggacaaaaaggaaactgtatggcatctcgaggagtttggacaggcattctcattcgaggcccaggggggtctggccaacatcgccattcttaataataatttaaacactctaattcagaggagtaaccacacacaggctactaatgacccccccgaggtaacagttttccctaaagaacctgtggaacttggacagcccaacaccttgatctgccacatagataagttttttcctccagtcctgaacgtcacatggctgtgtaacggggagctggtcaccgagggagtggctgagtcattgttcctgccgaggaccgattactctttccacaagttccattacttgacatttgttcctagcgcggaagacttttatgattgtagagtcgagcactggggactggatcagccccttctcaaacactgggaggcccaggaacccatccagatgcctgagaccactgagaccgttctgtgtgccctagggttggtactgggccttgtggggataatcgtcggcaccgttctgatcatcaaatccttgcgcagcggtcatgaccctagagctcagggaactctgtag

SEQ ID NO: 84520 - DNA, 783 bp, Artificial Sequence
  derived and/or modified sequence
atgaggcctgaagaccgaatgttccacatcagagctgtaattcttcgcgcattatcacttgccttcctccttagcctcaggggtgccggagccataaaagctgatcacgtgtccacctacgctgcattcgtccagacccacaggccaaccggagagttcatgttcgagttcgacgaggacgagatgttttacgtcgacttggataaaaaagaaacagtctggcacctagaagagttcggtcaggctttcagcttcgaggcccaaggtgggttggccaacattgccattcttaataataacctaaataccctaattcaaagatctaatcatacccaggctacgaatgatcctccagaggtgaccgtttttcccaaggaacctgtggagttaggacaacccaataccctgatctgtcatattgataagttctttccccctgtactgaatgtcacttggctgtgtaacggggaactggttaccgagggagtagctgaaagcctgttccttcctcgaacagactacagttttcacaaattccactacctcacattcgttccctctgccgaggatttttacgattgccgagtggagcattggggactcgaccagcctctgcttaaacattgggaggcacaggagcctattcagatgccagaaaccacggagactgtcctatgtgcgctgggactagtgttgggcctggtgggtattatagtaggcaccgttctcataattaaaagtcttaggtccggacacgatccccgtgcccaaggcacactttag

SEQ ID NO: 84521 - DNA, 783 bp, Artificial Sequence
  derived and/or modified sequence
atgcggcctgaagacaggatgttccatatcagagcagttatccttagagctcttagcctggcgtttctactgagcttgagaggtgctggagccattaaagctgatcatgtgagcacatacgctgccttcgttcagactcacagacctacgggcgaattcatgttcgaattcgatgaggacgaaatgttttacgtggatctggacaaaaaggaaactgtttggcacctggaggaatttggacaagccttcagttttgaagcacagggaggactggccaacatcgcaatcttgaacaacaacctgaataccctgatccagcgctccaaccatactcaagctactaatgacccacctgaggttacggtctttccgaaggagccagtggagcttggacaaccaaacactttgatttgccatattgataaatttttcccccctgtgctcaacgttacctggctgtgcaatggtgagctggtgacagaaggagttgctgaatccctatttctgccaagaactgattattcctttcacaagtttcactatctgaccttcgtgcccagcgccgaagacttttatgactgtagagtggagcactggggcctcgaccaaccactcctgaagcactgggaagcacaagagcccattcaaatgcccgagacaaccgagactgtcttatgcgcactcggtttagtgctcggcctcgtcggtattattgtagggacagtcctcattattaagtcactgcgcagtgggcacgatccaagggcacagggtacactttag

SEQ ID NO: 84522 - DNA, 387 bp, Artificial Sequence
  derived and/or modified sequence
tgaaataccttaatttgtcacattgataaatttttcccgcctgtgctcaacgtaacgtggctctgcaacggtgagctggtaaccgagggcgtagcagaaagcctgttcttaccaaggaccgactatagctttcacaaatttcattacctcacctttgtgccatctgccgaggacttctatgactgccgcgtagagcactggggactcgatcaacccctgctcaagcactgggaagcccaagagcccatacagatgcctgagacgaccgagaccgtgctgtgtgcccttggactggttctaggcctggtcggaatcatcgtcggaactgtgttaataattaagtcgctgagaagcggccacgacccgagggcacagggaacgctctag

SEQ ID NO: 84523 - DNA, 783 bp, Artificial Sequence
  derived and/or modified sequence
atgagacccgaagaccggatgtttcacattagagcagtcatcctcagggctctcagtctggccttcctgctgtccctaaggggggctggcgctattaaagccgatcatgtttctacgtacgcagcctttgtacaaactcaccgcccaacaggcgaatttatgttcgagtttgatgaggatgaaatgttttacgttgacctcgataagaaagagactgtgtggcacttggaggagtttggacaagccttcagtttcgaggcacagggcggactagcaaatattgctatcttaaacaataatttgaacaccttaatacagcgtagtaatcacactcaggccacaaacgaccctccggaggtgaccgtctttccaaaagagcctgtggagcttggccagcccaatactttaatatgtcacatcgacaagttctttccgcctgtgcttaacgtgacctggctgtgtaacggcgagctcgtcactgagggagttgcagaaagtctctttttaccgagaactgactatagcttccacaaatttcattatcttacattcgttccatccgctgaggatttttatgactgcagggttgaacattggggacttgatcagccacttctgaaacactgggaggctcaggaacctattcaaatgccagagaccacggaaactgttctgtgcgcactgggtctggtgctgggcttggtaggcatcatcgtcggtactgtgttgataataaaaagtctaaggtcaggacatgatccacgggcacagggtacattatag

SEQ ID NO: 84524 - DNA, 783 bp, Artificial Sequence
  derived and/or modified sequence
atgaggccagaagacaggatgttccacatcagggccgtgatcctgcgcgcactgtctctggcttttctgcttagcctgcgtggcgcaggcgcaatcaaggcggatcacgtgagcacctacgcagcctttgttcagacgcaccgtccaactggggagttcatgttcgagttcgacgaggatgaaatgttctatgtagacctcgacaagaaggagaccgtgtggcacctggaggagttcgggcaggctttcagttttgaagcacagggtggactggcaaacatcgctattttaaacaacaacctgaacaccctgatccaacggagcaatcacacccaggctacaaatgaccctcctgaggtgacagtcttccccaaagagccagtcgaactgggacagccaaacacattaatttgccacatcgacaagttcttccctccagttctgaatgtgacctggctgtgcaacggcgagttggtgaccgaaggtgttgcagagagtctgtttctccctaggaccgactattcatttcacaagtttcattacctgaccttcgtgcctagcgccgaggatttctatgactgtagggtggaacattggggcttagatcaaccacttctaaagcattgggaggcccaggagcccatacagatgcccgagactacggaaaccgtgctgtgcgcgctggggctcgttctcggcctggtcgggatcatcgtgggcacagtgcttatcattaaatctctgaggtccggccacgaccccagggcacagggcaccctgtag

SEQ ID NO: 84525 - DNA, 387 bp, Artificial Sequence
  derived and/or modified sequence
tgaaacaccctgatttgccatattgataaatttttccccccagtgcttaatgtgacgtggctctgcaatggtgaacttgtgactgagggtgtggccgaatctttgttcctccctaggactgattacagttttcacaaatttcattaccttacgttcgtgccctctgcggaagacttttatgactgtcgcgtggagcattggggacttgatcaacccttgctgaagcactgggaggcccaggagcccattcagatgcctgagactactgagactgtcctatgcgccctgggccttgtgcttggcttagttggcataatcgtgggaacggttcttatcataaagtccctcaggtcgggacacgacccccgagcccagggcaccctgtag

SEQ ID NO: 84526 - DNA, 783 bp, Artificial Sequence
  derived and/or modified sequence
atgcggccagaagatcgcatgttccatatcagggcagtcatcctccgagccttgtcattggccttccttctgtcattacgtggggctggggctatcaaggcagaccacgtgtcaacgtacgcagctttcgtgcagactcataggcctaccggtgagttcatgttcgaattcgacgaggatgagatgttttatgtcgatttggacaaaaaggagacagtgtggcatttagaagaattcggtcaggcttttagctttgaggcccagggcggactcgcgaacatcgcgattctaaataacaacctgaacacactgatccagcggagtaatcatacccaagcgactaatgatcctccagaggtcacagtgttcccaaaggagcctgtggaacttgggcagcctaacactctaatctgtcatatcgataaatttttcccacccgtgttgaacgtcacttggctttgtaacggcgagctcgtgactgaaggcgtggccgagagcctgtttttgcctaggaccgattattccttccataaattccactatctaacatttgtaccctccgccgaagatttttacgattgtagggttgagcactggggcctggaccagcccctcctgaaacattgggaggcacaagaaccaatccagatgcctgagaccaccgagacggtcctctgtgccttaggactggtgctggggctggttgggattatcgtgggaactgtgctaattatcaaatctctccgcagcggacacgatccaagggcccagggcacactgtag

SEQ ID NO: 84527 - DNA, 387 bp, Artificial Sequence
  derived and/or modified sequence
tagaatacgctaatttgccatattgataaatttttccctccagtgctgaacgttacctggctatgtaacggtgagctggttaccgaaggcgtcgccgaatccttattcctgccaaggacagattacagctttcacaagttccattatttgacatttgtcccatcagctgaggacttttatgactgcagagtcgagcattggggcctagatcagccattacttaagcactgggaagcccaggagccaatacagatgcctgaaacaactgagaccgtgctatgcgctcttggattagttttgggattggtcggaatcatagtgggcacggtgcttattattaaaagtctgcgtagcggccacgacccaagagcccagggtaccttgtag

SEQ ID NO: 84528 - DNA, 783 bp, Artificial Sequence
  derived and/or modified sequence
atgcgacccgaggatcgcatgttccacatccgcgcagtcatcttgagagccctttctctggcattcctgctgagcttgagaggagccggagcaattaaggccgaccatgtcagcacatacgccgctttcgtccagactcacagacctacgggggaatttatgttcgaatttgatgaggatgagatgttctatgtggacctggacaagaaagagacagtgtggcatctggaagagtttggacaggcatttagcttcgaagcccaaggtggactagccaacatcgccattctcaataataatctgaatactctgatccagcgttctaaccatacgcaggccactaatgaccctccagaggtgactgtttttccaaaagaaccggttgagctgggacagcccaatactttaatctgtcatattgacaaatttttccctccagtgctaaatgtgacctggctgtgcaatggtgagctcgttacagaaggcgtggcagaatccctttttttaccacgaactgactactcatttcacaagttccattacttaactttcgtcccttcagcggaagatttttacgactgccgagttgaacactggggactggaccagcctttgcttaagcactgggaagctcaagagccaatccagatgccagagactacagagaccgtgttatgcgcactcggactggtgttaggccttgtgggaatcatagtggggaccgtactgatcataaaatcccttcgctcagggcacgatcccagggcccaggggaccctctag

SEQ ID NO: 84529 - DNA, 387 bp, Artificial Sequence
  derived and/or modified sequence
tgaaatactctgatctgtcacatcgacaagttcttccctccagtcttaaacgtgacttggctttgcaacggcgaattggtgaccgaaggtgttgcggagtccctgttcttgcctcgcacggactacagctttcacaaatttcactacctgacatttgtaccctctgccgaggacttttacgactgtcgggtagagcactggggtcttgatcagccgctcttgaaacactgggaggcacaggaaccaattcagatgcctgagacaaccgagaccgtcctgtgtgccttagggctcgtgctgggactggtgggcataatcgtggggactgtgttaatcattaagagtctgaggagcggacacgatcctcgcgctcagggcactctgtag

SEQ ID NO: 84530 - DNA, 639 bp, Artificial Sequence
  derived and/or modified sequence
atgaggcccgaggacaggatgttccatattcgagcggtgatccttagagcgctcagtctggcctttcttctgagtctacgaggagctggcgcaatcaaagccgaccacgtgtcaacctatgccgcttttgtgcagacccacagacctacaggagagttcatgttcgagtttgacgaggatgagatgttttacgtcgatttagacaagaaagagaccgtgtggcacctggaggaattcgggcaggcatttagcttcgaagttaccgtgtttcctaaggaaccagttgagctggggcagcctaacacgctgatctgtcatatagacaaattcttcccaccagtgttaaacgtgacatggctctgtaacggtgaactggttactgaaggcgttgctgagagcttatttcttcctcgcacagactattccttccataaatttcattacctcaccttcgtgccaagtgccgaggatttttatgattgccgggtagagcattggggccttgaccagcctctcctaaaacattgggaggcccaggagcctatacagatgcctgagaccacggagaccgtcctctgcgccctgggcttagtgctgggtttggttgggatcatcgtgggaacggtgctcattatctag

SEQ ID NO: 84531 - DNA, 639 bp, Artificial Sequence
  derived and/or modified sequence
atgcgccctgaggaccggatgtttcacattcgcgctgtcatactcagggctctgagtctcgccttcctattgtccctgagaggagcgggtgcgatcaaagcggatcacgtgtcaacttatgctgccttcgtacagacacacagacctaccggtgagttcatgttcgagttcgacgaggacgagatgttttacgtcgatctggataaaaaagaaactgtgtggcacctggaagaatttgggcaggcatttagcttcgaggtaacggtgttcccgaaggagcctgttgaactgggacaaccaaacaccctgatctgccatatcgataagttctttcccccagtgctaaacgtaacctggctctgtaatggagagctcgttaccgagggggttgccgagagtctgttcttgcctcggaccgattacagttttcacaaattccattatctgacgtttgtgccaagtgccgaggacttctatgactgtcgagttgagcattggggcttggaccagcctcttctcaagcattgggaggcccaggaaccaatccagatgccggagacaacggaaactgtgctatgcgccctcggattagtgttgggcctcgtcggcattatcgtcggtacggtcctaataatttag

SEQ ID NO: 84532 - DNA, 387 bp, Artificial Sequence
  derived and/or modified sequence
tagaatactttgatatgtcatatagataagttctttcctccagtgctgaacgtaacttggctgtgtaatggtgagctggttaccgagggggttgctgaatccttgttccttccccgtaccgactactcctttcataaattccactatctgactttcgtcccctccgctgaagatttctatgactgtcgcgtcgaacattgggggctggaccagccattactgaaacactgggaagcccaagagcctattcaaatgcccgagacaacggaaaccgtgctctgcgcattgggcctggtcctgggtctggtggggattatcgtcggtaccgtcttgatcatcaaatcgctccgttctggtcacgatcctcgggctcagggcactttgtag

SEQ ID NO: 84533 - DNA, 639 bp, Artificial Sequence
  derived and/or modified sequence
atgcggccagaggatcgcatgtttcatataagggccgtgattctccgcgctctttcacttgcattcttactgtcactccggggtgccggagctatcaaggcggaccacgtgtcaacgtatgctgcatttgttcagacccatcggccaacaggagagttcatgttcgagtttgacgaggacgagatgttttacgttgaccttgacaagaaggagactgtgtggcatctggaagaattcgggcaagcattcagttttgaagtcacggtcttccctaaggagcccgtcgagctgggccagccgaacacgctcatttgtcacatagacaagtttttcccgccagtgctcaacgtaacttggctctgtaacggtgagctagtgacggagggcgtagcagagagcctcttcttgccaagaacagactacagcttccacaagtttcattaccttaccttcgtgccaagtgcagaggacttttatgattgtcgtgtcgagcattggggactcgaccagccattgcttaaacactgggaggcacaggagcctatacagatgcctgaaactaccgaaacagtgttatgcgctctagggctggttctcggactggttggcattatcgtgggtactgtgcttataatttag

SEQ ID NO: 84534 - DNA, 639 bp, Artificial Sequence
  derived and/or modified sequence
atgcgtcctgaagacaggatgttccatatccgcgcagtgatcttacgtgcactgagcttggcattcctgctctccctgaggggagccggtgccattaaggctgaccacgtgagcacatacgctgcatttgtgcagacgcacaggccaaccggagagttcatgttcgaattcgacgaggatgagatgttctatgtcgatctggacaaaaaggaaacggtgtggcatctcgaggagtttggacaggccttctcttttgaggtgacagtttttccgaaagaacccgtggagctcggccagcctaatactctgatctgccatatagacaagttctttcctccagtgctcaacgtcacgtggctttgcaacggtgagcttgtaaccgagggagtggcggaatctctgttccttccccgaaccgattactcatttcataaatttcactatctcaccttcgttccgtccgcagaagacttctatgactgccgcgtagagcactgggggctcgaccagcccctgctgaagcattgggaagcacaagaacccatccagatgcccgagactacggagacggtcttatgtgctctcggcttagtgctgggtttagtgggaatcatcgtaggaacagttcttataatttag

SEQ ID NO: 84535 - DNA, 387 bp, Artificial Sequence
  derived and/or modified sequence
tgaaatacattaatttgccacattgataagtttttccctcccgtactgaacgttacgtggctgtgcaatggtgagctggtaactgagggggtggcagagtctctgtttcttcccagaacagattattcatttcataagtttcattatcttaccttcgttccaagcgccgaagacttctatgattgccgcgtggagcactggggccttgatcagcccctactgaagcattgggaggcccaggaaccaatccaaatgccagagacgactgagaccgttctgtgcgcccttggactggtgctaggtctggtgggtatcatcgtaggcaccgtcctgatcataaaatctctgcggtcagggcacgatccgagggctcagggaaccctgtag

SEQ ID NO: 84536 - DNA, 783 bp, Artificial Sequence
  derived and/or modified sequence
atgcgcccagaggacaggatgtttcacatcagagctgttatactccgggcactgtctctcgcttttttactatcattgcggggagccggagccatcaaggccgaccacgtatctacctacgccgctttcgtccagactcatcgccctacaggcgaattcatgttcgagttcgacgaggacgagatgttttacgtcgacctagacaagaaggaaacagtgtggcacttggaggagtttgggcaagcgttcagtttcgaagcccaggggggactggcgaatattgccatcctgaataataatctcaacacactgatacaacggagtaatcatacacaggctactaatgatccacctgaggtgaccgtcttccctaaggaaccagtggaacttggacagccgaacactttaatctgtcacatcgacaagttttttccaccggtgctcaatgtgacctggctgtgcaatggggagttggtgaccgagggcgtagcagaaagcctcttccttcctaggaccgattactctttccacaaattccattaccttacatttgtaccatccgccgaggatttttatgactgtagggtggaacactggggcctggatcaacctctgctgaaacattgggaagctcaggagccaatccaaatgccagagacaaccgagactgtcctgtgcgccctggggctggttctcgggcttgtcggtataatcgtgggcacagtgctgattattaagtcccttagatccgggcacgatccacgggcacaaggaactctctag

SEQ ID NO: 84537 - DNA, 639 bp, Artificial Sequence
  derived and/or modified sequence
atgcgaccggaagaccgcatgttccacataagggcggtgattttgcgtgcactgagcctcgcctttttgctgtccctgaggggagcaggagccatcaaggctgaccacgtctctacatacgccgcattcgtccagactcatcggccaacaggcgagttcatgtttgaatttgacgaagatgagatgttctacgtcgaccttgacaaaaaagaaacggtctggcatcttgaagagtttggccaggcatttagctttgaggtcacagtgttccctaaggaacccgtggaactgggccagccaaacacactgatctgtcatattgacaaattttttccccctgtgctcaatgtgacctggctgtgcaatggcgaacttgtcaccgagggagtggctgagagcctgtttctgccaaggaccgactacagtttccataagttccattatctgaccttcgttccaagtgcagaggatttctatgattgccgcgtcgagcactgggggctggatcagccgttactgaagcattgggaggcacaggagccgatacagatgcctgaaactaccgagaccgttctttgtgccttggggctcgttttgggactggtggggatcatagttgggacagtccttatcatctag

SEQ ID NO: 84538 - DNA, 639 bp, Artificial Sequence
  derived and/or modified sequence
atgcgacccgaggatagaatgttccacatcagagccgtgatcctcagagctttgtccctcgctttccttctaagcctgaggggagccggagcaatcaaggccgatcacgtctccacgtacgcagcgtttgttcagacacatcggcctactggcgagttcatgtttgagtttgacgaagatgaaatgttctacgttgacttggacaagaaggagacggtttggcatttagaggagtttggtcaggcgttcagctttgaagtgaccgtgttcccaaaggagccagtcgagcttggtcagccgaacacgctcatctgtcacattgataaattttttccacctgtattgaacgtgacatggttgtgtaatggcgaacttgtcactgagggtgtggctgaatccctgtttttgcctcggacagattactcatttcataagttccactatctgacattcgtcccttcggctgaggacttttacgactgccgcgttgagcattggggccttgatcagcccctgttaaagcattgggaagcccaagagcccattcagatgcctgagactaccgagactgtgttatgcgcgctgggactggtgctaggactggtcggtatcatagtcggtacagtgctgataatctag

SEQ ID NO: 84539 - DNA, 639 bp, Artificial Sequence
  derived and/or modified sequence
atgagacccgaggacagaatgttccatatcagggcagtcatactgagagccctatctctggcgttcctgcttagccttcggggtgctggtgctatcaaggccgaccatgttagcacatacgctgctttcgtccagacccatcgacccacaggcgaatttatgttcgaatttgatgaggacgaaatgttttacgtcgaccttgacaagaaagagacggtgtggcatcttgaggagttcggacaggctttttccttcgaggtgactgtgtttcccaaggaaccagttgagcttgggcaacctaacacccttatttgtcacattgataaattcttcccacctgtgttgaatgtgacatggctgtgcaatggggaattagttacggaaggcgtggccgaaagtctgttcctgccacgcaccgactattcgtttcacaaattccactatttaactttcgtgcctagtgccgaagatttctacgactgcagagtggagcattgggggttagatcagccgctgttgaagcactgggaggctcaagaacccatccagatgccagagactacagagaccgtattatgcgccctgggtctcgttttgggtctagtgggcatcatcgtgggcaccgtcctcattatttag

SEQ ID NO: 84540 - DNA, 387 bp, Artificial Sequence
  derived and/or modified sequence
tagaacacactcatctgccacattgacaagtttttccctcccgtcctcaacgtgacatggctatgtaatggagaactggtcaccgaaggtgtcgccgagtctcttttcttgcctcgcacagattactctttccacaagtttcactatcttacctttgttccgagtgccgaagacttttacgactgtcgggtggaacactggggcctcgatcagcctttgctgaagcattgggaggcacaggaacccatccaaatgccagaaaccactgagacagtgttgtgcgccctggggctcgtgctgggccttgttggcattatcgttggtactgtgctcatcattaagtccctgcgttctggtcatgacccacgggcacagggcacactgtag

SEQ ID NO: 84541 - DNA, 783 bp, Artificial Sequence
  derived and/or modified sequence
atgaggccagaggaccggatgttccatatccgcgctgtgatcctaagggcgttgagccttgcctttctgctatctctgcggggtgcgggagccatcaaggccgaccatgtttccacgtacgccgcttttgtgcagacccacagaccgactggagagtttatgtttgaatttgacgaagatgagatgttttacgtggacctggacaagaaagaaacagtctggcacttagaggagttcggccaggcatttagcttcgaggcccaaggcggactagctaatattgctatcctgaataacaatctaaacaccctgattcagaggtcaaaccatactcaagcaacgaacgaccccccagaggtgacggtgttcccaaaggaacctgtcgagctgggtcagccaaatactttaatttgccacattgacaagtttttcccgcctgtgctgaatgtgacatggttgtgtaacggagagctggttaccgaaggagttgccgagtctctgtttttgccccgtaccgactactcattccacaagtttcattaccttactttcgtgccatcagcggaagatttttatgactgccgagtggagcactggggcctggaccaaccactcttaaaacattgggaagcccaagagcctatacagatgcctgaaaccacagagaccgttttgtgtgccttgggcttggtgctgggcctcgtgggaattattgtgggtacagtgctcatcataaagtctctgaggtccggtcacgacccccgagcgcagggaaccctgtag

SEQ ID NO: 84542 - DNA, 387 bp, Artificial Sequence
  derived and/or modified sequence
tagaacaccttgatctgccatatcgacaagttctttcctccagtgctcaatgtaacgtggctgtgtaacggggagcttgtgaccgagggcgtggccgaatctctcttcctacctcgcaccgactactcctttcacaaattccattacctgaccttcgtgccgagcgcagaggacttctatgactgtcgagtggaacactggggattggaccagcccctgctgaagcactgggaagcccaggaacccatacagatgcctgagaccacggagaccgtgctgtgcgccttggggctcgtcctaggattagtgggaatcatcgtggggaccgtattgattatcaagagcttacggagtggtcacgaccctagggcccaaggcactctatag

SEQ ID NO: 84543 - DNA, 783 bp, Artificial Sequence
  derived and/or modified sequence
atgagaccggaggaccgaatgtttcacatcagggcggtgatactgcgcgctctatctctggcctttctgctttctctacggggtgccggagcaataaaggccgatcatgtttccacatacgcagccttcgtgcagacccatcgacccacaggagagttcatgttcgagtttgacgaggacgagatgttctacgtggacctcgacaagaaagagacggtgtggcatctggaagagtttggacaggcattcagcttcgaggcccaggggggtctggccaacattgctatattaaataacaacctgaataccttgatacaacgctccaaccatacccaggccacaaatgatcctccggaagtcacggtattcccaaaggagcccgtggagctcggccagccaaacaccctcatctgccacatcgacaagtttttccctccagtcttgaatgtcacatggctgtgcaatggcgaactagtcaccgagggcgtggcggagtccctgtttcttccgaggaccgactacagctttcataaattccattacctgacttttgtccccagtgctgaggatttctatgactgtagggtggaacattgggggctggatcagccacttctgaaacattgggaggcacaggaaccaatacagatgcccgaaacaaccgaaactgtgctgtgcgcccttggtctggtgctggggctggtgggaatcatcgtgggcaccgtcctgattataaagtcactgcgcagcggacatgatccgagagcgcaaggaactctctag

SEQ ID NO: 84544 - DNA, 639 bp, Artificial Sequence
  derived and/or modified sequence
atgcgtccagaggataggatgttccacattagagccgtgatcctgagagcgttgtctctcgcgtttctgctctctctgagaggggcaggcgctatcaaggcagaccatgttagcacttatgccgcattcgtgcagacccacaggccaacaggagagtttatgtttgagtttgacgaggatgaaatgttctatgtggatttggacaaaaaggagactgtgtggcatcttgaggagttcgggcaggctttcagtttcgaggttacagtctttcccaaagaaccggtcgaactgggacagcctaataccttgatctgtcatatcgacaagtttttccccccagtgctcaacgtcacttggctgtgcaatggggaactggttactgaaggcgtggcagagagcctgttcctgcctagaacggattatagtttccataaatttcactatctgacatttgtaccttctgccgaggatttttatgattgccgcgtggaacattggggcttagatcaacccctcttaaagcattgggaagcccaggagcccatccagatgcctgaaactactgagaccgtcctctgtgccctgggcctcgttttgggcctcgtcggaatcattgtcgggaccgtactgatcatctag

SEQ ID NO: 84545 - DNA, 783 bp, Artificial Sequence
  derived and/or modified sequence
atgaggccggaagaccgcatgttccacatccgtgccgtgatcctccgggcactgtcacttgcatttttacttagcctgcggggagccggtgctattaaggcagatcatgtgtcaacatatgccgctttcgtgcagactcataggccgacaggcgagtttatgtttgagtttgatgaggatgagatgttttatgtggatttggacaaaaaggaaaccgtgtggcacttggaggagttcggtcaagcgttttcctttgaggcccagggcggactggcaaatattgctattctgaacaacaaccttaacaccctcattcaacgcagcaaccatactcaggcaaccaacgaccccccagaagttactgtttttcctaaggagcccgtggaactcggacaaccaaacactttgatctgtcacatcgataagttcttccctcccgtgctgaatgtcacttggctatgcaacggagagttggtcactgaaggcgtcgcggaaagcctgtttcttccacgtacagattacagtttccataaattccattacctcacgttcgtacccagcgcagaggacttttacgattgtcgggtggaacactgggggctggatcaaccactactcaagcactgggaggcacaagagcccattcaaatgcctgaaacgactgaaacagtactgtgtgctctaggtttggtgctggggttggttggaatcattgtaggcaccgtgcttataattaagtccctgcggtccggacatgatccgagggcccagggaaccttatag

SEQ ID NO: 84546 - DNA, 783 bp, Artificial Sequence
  derived and/or modified sequence
atgcggcctgaagacaggatgttccatataagggctgtgattctgagggccctctcactcgcttttcttctgagcctgcggggtgccggagctattaaggcagatcatgtctcaacatacgcagcctttgtgcagacccatcgcccaaccggcgagtttatgttcgagttcgatgaggatgaaatgttttatgtggacctcgataaaaaggagaccgtctggcatctcgaggagttcggtcaggccttttctttcgaggcccaagggggactggccaacatcgccattcttaataacaacctcaacacacttattcaaaggagcaaccatacccaggctacaaacgaccctccggaggtcactgtcttccccaaagagcccgtagagctcggacagcctaatactctgatatgtcatatagacaagttttttccgcctgtcctgaatgtgacatggctgtgcaacggagagcttgtcactgagggcgtggccgaatctctgtttctgcccagaactgactactcattccacaagttccactatttgacgttcgtcccttcagctgaggatttttacgattgccgggtcgaacattggggcctcgaccagccgctccttaaacattgggaggcccaggaaccaatacagatgccggagactacagagaccgtgttgtgcgctctgggcctggtgctcggattggtgggtattatcgtggggactgtgctgattattaaatccctccggtccggacacgaccctcgggcacagggaaccctctag

SEQ ID NO: 84547 - DNA, 783 bp, Artificial Sequence
  derived and/or modified sequence
atgagacctgaagaccggatgtttcacatccgcgctgtgattctcagagctctgagccttgcgtttctgttgagcctgcggggagccggtgctatcaaagccgatcatgtctctacttacgctgcttttgtacagacacatcgccctacaggcgagttcatgtttgagttcgacgaagatgaaatgttctacgttgacttggacaagaaagagaccgtgtggcacctggaagagttcgggcaggcattcagcttcgaggcccagggcggattggcaaacatcgccatcttgaacaataatctaaacaccctgattcagcgctctaaccacactcaagctacaaatgaccctccagaagtaacagtgtttccaaaggagccagtggaactgggccagccaaataccctcatctgccatatagataaattttttccccctgtgctcaatgtgacttggctctgcaacggagagcttgtgaccgaaggcgtggctgaaagcctgttccttccgcgaaccgactacagcttccacaaatttcactatctcacattcgttccatcggccgaggatttttatgactgccgggtggagcattggggcctggaccagcctcttctcaaacactgggaggcacaagagcccatccagatgccagagacaactgaaaccgtcctgtgcgctctgggcctcgttctgggcttggttggaataattgtcggaacagtgctcatcattaagagcctcaggagcggacacgacccaagggcccaaggcactctctag

SEQ ID NO: 84548 - DNA, 783 bp, Artificial Sequence
  derived and/or modified sequence
atgcggcctgaagatcggatgttccacattagagcagtcatcttaagggcactctcactagcgtttctgctgagcctgcggggagccggagccatcaaggcagatcacgtatccacctatgccgctttcgtgcagacacaccgtcccaccggagagttcatgttcgagtttgacgaggatgaaatgttttacgtcgacctcgacaagaaagagaccgtctggcaccttgaggagtttggccaggcctttagcttcgaggcccagggtggcctggccaacattgctatcctgaacaataacctcaatacactgattcagaggtcaaaccacactcaggctacaaacgatccccctgaggtgacggtctttccgaaagaacctgttgagctcggacagccgaatacacttatatgccacatagacaagtttttcccacccgtgttgaacgtcacctggttgtgcaatggagagttagtgaccgaaggtgtggccgagagtctgtttctcccaagaacagactactccttccataagttccattacctcaccttcgtgccttcggcagaggatttctatgattgtcgcgtcgagcactggggcctggaccagccattactcaagcactgggaagcccaggagcccattcagatgcctgagaccactgagaccgtactgtgcgctctgggcctggtgctcggcctcgttggaataattgtgggaaccgtgctcatcatcaaatctttgcggagcggccacgatcctagagcccagggcaccctgtag

SEQ ID NO: 84549 - DNA, 783 bp, Artificial Sequence
  derived and/or modified sequence
atgcgcccagaggatagaatgttccatatcagagcagtgatcctcagagccctgagtctggcttttctgctctctctgagaggtgctggcgcaattaaggctgaccatgtatccacctacgccgcatttgttcagacccacagacctacgggcgagtttatgttcgaatttgatgaagacgagatgttttatgttgatctcgataagaaggaaacagtgtggcatctcgaagaattcgggcaggccttctcatttgaggcacagggcggacttgccaatatcgccatactgaataacaacctcaacacacttatccaaagatcaaatcacacacaggccacaaacgatccgcctgaggttactgtatttccgaaagagcccgtggagctcgggcaaccgaacaccctgatttgccatatcgataagtttttcccaccagtgctgaatgttacatggctgtgtaatggagaattggtgacagaaggggttgcggaaagcctctttctgccacgaaccgattatagctttcacaaatttcactatttaactttcgtaccaagcgccgaggatttctatgattgccgcgttgagcactggggattagaccaacctttgctcaaacattgggaggcccaagagcctatccagatgccggagactacagagacggtgctttgcgcccttggcctggtgttgggactcgtcggtattatcgttggcactgtcttaatcatcaagtccctgcggagtggacacgatcccagggcgcaaggaaccttgtag

SEQ ID NO: 84550 - DNA, 783 bp, Artificial Sequence
  derived and/or modified sequence
atgcgtccagaggatcggatgttccacatacgagctgttatcttgcgggctctgtcccttgccttcctgcttagcctgcgaggcgctggggcaattaaagcagatcacgtgtctacttatgctgccttcgtgcagacccatagacccacaggggaatttatgttcgaattcgatgaagatgagatgttctatgtggatctggacaagaaagaaactgtgtggcatctcgaagaatttggccaggccttcagcttcgaagctcaaggcggactggctaatatcgccattctgaacaacaatttaaatactctgatacaacgctccaaccatacgcaggcaacaaatgatccgccagaggttactgtgttccccaaggaacctgtggaattgggacaacccaataccttaatctgtcacattgataaattcttccccccagtgctgaatgtgacctggctttgcaacggcgagttagttaccgagggggtcgctgaatccctgtttctgccgcgtacggactactctttccataagttccattacctgaccttcgtccctagcgcagaggatttctatgactgccgggttgagcactgggggttagatcagcccctgttaaagcattgggaggctcaggaacctatccagatgcctgagactactgagaccgtgttgtgcgcgctggggcttgtccttggcctcgtggggatcatcgtgggaaccgtgctcatcatcaagtccttacggagtgggcacgatccccgagcgcaggggacactgtag

SEQ ID NO: 84551 - DNA, 783 bp, Artificial Sequence
  derived and/or modified sequence
atgagacccgaggacagaatgttccacatcagagccgtgatcctgagagccctgagcctggccttcctgctgagcctgagaggcgccggcgccatcaaggccgaccacgtgagcacctacgccgccttcgtgcagacccacagacccaccggcgagttcatgttcgagttcgacgaggacgagatgttctacgtggacctggacaagaaggagaccgtgtggcacctggaggagttcggccaggccttcagcttcgaggcccagggcggcctggccaacatcgccatcctgaacaacaacctgaacaccctgatccagagaagcaaccacacccaggccaccaacgacccccccgaggtgaccgtgttccccaaggagcccgtggagctgggccagcccaacaccctgatctgccacatcgacaagttcttcccccccgtgctgaacgtgacctggctgtgcaacggcgagctggtgaccgagggcgtggccgagagcctgttcctgcccagaaccgactacagcttccacaagttccactacctgaccttcgtgcccagcgccgaggacttctacgactgcagagtggagcactggggcctggaccagcccctgctgaagcactgggaggcccaggagcccatccagatgcccgagaccaccgagaccgtgctgtgcgccctgggcctggtgctgggcctggtgggcatcatcgtgggcaccgtgctgatcatcaagagcctgagaagcggccacgaccccagagcccagggcaccctgtag

SEQ ID NO: 84552 - DNA, 387 bp, Artificial Sequence
  derived and/or modified sequence
tgaaacaccctgatctgccacatcgacaagttcttcccccccgtgctgaacgtgacctggctgtgcaacggcgagctggtgaccgagggcgtggccgagagcctgttcctgcccagaaccgactacagcttccacaagttccactacctgaccttcgtgcccagcgccgaggacttctacgactgcagagtggagcactggggcctggaccagcccctgctgaagcactgggaggcccaggagcccatccagatgcccgagaccaccgagaccgtgctgtgcgccctgggcctggtgctgggcctggtgggcatcatcgtgggcaccgtgctgatcatcaagagcctgagaagcggccacgaccccagagcccagggcaccctgtag

SEQ ID NO: 84553 - DNA, 639 bp, Artificial Sequence
  derived and/or modified sequence
atgagacccgaggacagaatgttccacatcagagccgtgatcctgagagccctgagcctggccttcctgctgagcctgagaggcgccggcgccatcaaggccgaccacgtgagcacctacgccgccttcgtgcagacccacagacccaccggcgagttcatgttcgagttcgacgaggacgagatgttctacgtggacctggacaagaaggagaccgtgtggcacctggaggagttcggccaggccttcagcttcgaggtgaccgtgttccccaaggagcccgtggagctgggccagcccaacaccctgatctgccacatcgacaagttcttcccccccgtgctgaacgtgacctggctgtgcaacggcgagctggtgaccgagggcgtggccgagagcctgttcctgcccagaaccgactacagcttccacaagttccactacctgaccttcgtgcccagcgccgaggacttctacgactgcagagtggagcactggggcctggaccagcccctgctgaagcactgggaggcccaggagcccatccagatgcccgagaccaccgagaccgtgctgtgcgccctgggcctggtgctgggcctggtgggcatcatcgtgggcaccgtgctgatcatctag

SEQ ID NO: 84554 - DNA, 1788 bp, Artificial Sequence
  derived and/or modified sequence
gctgtcgaagcgcgcgaactcctcccggttgtagatgtatctctccaggaagcgctgtgtcccattaaacgcgtagcattcctgccgtccctggaaaagtgctagaggcccacagtttcagtctcatctgcctccactcggcctcagttcctcatcactgttcctgtgctcacagtcatcaattatagaccccacaacatgcgccctgaagacagaatgttccatatcagagctgtgatcttgagagccctctccttggctttcctgctgagtctccgaggagctggggccatcaaggcggaccatgtgtcaacttatgccgcgtttgtacagacgcatagaccaacaggggagtttatgtttgaatttgatgaagatgagatgttctatgtggatctggacaagaaggagaccgtctggcatctggaggagtttggccaagccttttcctttgaggctcagggcgggctggctaacattgctatattgaacaacaacttgaataccttgatccagcgttccaaccacactcaggccaccaacgatccccctgaggtgaccgtgtttcccaaggagcctgtggagctgggccagcccaacaccctcatctgccacattgacaagttcttcccaccagtgctcaacgtcacgtggctgtgcaacggggagctggtcactgagggtgtcgctgagagcctcttcctgcccagaacagattacagcttccacaagttccattacctgacctttgtgccctcagcagaggacttctatgactgcagggtggagcactggggcttggaccagccgctcctcaagcactgggaggcccaagagccaatccagatgcctgagacaacggagactgtgctctgtgccctgggcctggtgctgggcctagtcggcatcatcgtgggcaccgtcctcatcataaagtctctgcgttctggccatgacccccgggcccaggggaccctgtgaaatactgtaaaggtgacaaaatatctgaacagaagaggacttaggagagatctgaactccagctgccctacaaactccatctcagcttttcttctcacttcatgtgaaaactactccagtggctgactgaattgctgacccttcaagctctgtccttatccattacctcaaagcagtcattccttagtaaagtttccaacaaatagaaattaatgacactttggtagcactaatatggagattatcctttcattgagccttttatcctctgttctcctttgaagaacccctcactgtcaccttcccgagaataccctaagaccaataaatacttcagtatttcagagcggggagactctgagtcattcttactggaagtctaggaccaggtcacatgtgaatactatttcttgaaggtgtggtttcaacctctgttgccgatgtggttactaaaggttctgatcccacttgaacggaaaggtctgaggatattgattcagtcctgggtttttccctaactacaggatagggtggggtagagaaaggatatttgggggaaattttacttggatgaagattttcttggatgtagtttgaagactgcagtgtttgaagtctctgagggaagagatttggtctgtctggatcaagatttcaggcagattaggattccattcacagcccctgagcttccttcccaaggctgtattgtaattatagcaatatttcatggaggatttttctacatgataaactaagagccaagaaataaaatttttaaaatgccctaaaaaaaaaaaaaaaaaa

SEQ ID NO: 84555 - DNA, 1712 bp, Artificial Sequence
  derived and/or modified sequence
gctgtcgaagcgcgcgaactcctcccggttgtagatgtatctctccaggaagcgctgtgtcccattaaacgcgtagcattcctgccgtccctggaaaagtcatcaattatagaccccacaacatgcgccctgaagacagaatgttccatatcagagctgtgatcttgagagccctctccttggctttcctgctgagtctccgaggagctggggccatcaaggcggaccatgtgtcaacttatgccgcgtttgtacagacgcatagaccaacaggggagtttatgtttgaatttgatgaagatgagatgttctatgtggatctggacaagaaggagaccgtctggcatctggaggagtttggccaagccttttcctttgaggctcagggcgggctggctaacattgctatattgaacaacaacttgaataccttgatccagcgttccaaccacactcaggccaccaacgatccccctgaggtgaccgtgtttcccaaggagcctgtggagctgggccagcccaacaccctcatctgccacattgacaagttcttcccaccagtgctcaacgtcacgtggctgtgcaacggggagctggtcactgagggtgtcgctgagagcctcttcctgcccagaacagattacagcttccacaagttccattacctgacctttgtgccctcagcagaggacttctatgactgcagggtggagcactggggcttggaccagccgctcctcaagcactgggaggcccaagagccaatccagatgcctgagacaacggagactgtgctctgtgccctgggcctggtgctgggcctagtcggcatcatcgtgggcaccgtcctcatcataaagtctctgcgttctggccatgacccccgggcccaggggaccctgtgaaatactgtaaaggtgacaaaatatctgaacagaagaggacttaggagagatctgaactccagctgccctacaaactccatctcagcttttcttctcacttcatgtgaaaactactccagtggctgactgaattgctgacccttcaagctctgtccttatccattacctcaaagcagtcattccttagtaaagtttccaacaaatagaaattaatgacactttggtagcactaatatggagattatcctttcattgagccttttatcctctgttctcctttgaagaacccctcactgtcaccttcccgagaataccctaagaccaataaatacttcagtatttcagagcggggagactctgagtcattcttactggaagtctaggaccaggtcacatgtgaatactatttcttgaaggtgtggtttcaacctctgttgccgatgtggttactaaaggttctgatcccacttgaacggaaaggtctgaggatattgattcagtcctgggtttttccctaactacaggatagggtggggtagagaaaggatatttgggggaaattttacttggatgaagattttcttggatgtagtttgaagactgcagtgtttgaagtctctgagggaagagatttggtctgtctggatcaagatttcaggcagattaggattccattcacagcccctgagcttccttcccaaggctgtattgtaattatagcaatatttcatggaggatttttctacatgataaactaagagccaagaaataaaatttttaaaatgccctaaaaaaaaaaaaaaaaaa

SEQ ID NO: 84556 - DNA, 1697 bp, Artificial Sequence
  derived and/or modified sequence
atttccagtgctagaggcccacagtttcagtctcatctgcctccactcggcctcagttcctcatcactgttcctgtgctcacagtcatcaattatagaccccacaacatgcgccctgaagacagaatgttccatatcagagctgtgatcttgagagccctctccttggctttcctgctgagtctccgaggagctggggccatcaaggcggaccatgtgtcaacttatgccgcgtttgtacagacgcatagaccaacaggggagtttatgtttgaatttgatgaagatgagatgttctatgtggatctggacaagaaggagaccgtctggcatctggaggagtttggccaagccttttcctttgaggctcagggcgggctggctaacattgctatattgaacaacaacttgaataccttgatccagcgttccaaccacactcaggccaccaacgatccccctgaggtgaccgtgtttcccaaggagcctgtggagctgggccagcccaacaccctcatctgccacattgacaagttcttcccaccagtgctcaacgtcacgtggctgtgcaacggggagctggtcactgagggtgtcgctgagagcctcttcctgcccagaacagattacagcttccacaagttccattacctgacctttgtgccctcagcagaggacttctatgactgcagggtggagcactggggcttggaccagccgctcctcaagcactgggaggcccaagagccaatccagatgcctgagacaacggagactgtgctctgtgccctgggcctggtgctgggcctagtcggcatcatcgtgggcaccgtcctcatcataaagtctctgcgttctggccatgacccccgggcccaggggaccctgtgaaatactgtaaaggtgacaaaatatctgaacagaagaggacttaggagagatctgaactccagctgccctacaaactccatctcagcttttcttctcacttcatgtgaaaactactccagtggctgactgaattgctgacccttcaagctctgtccttatccattacctcaaagcagtcattccttagtaaagtttccaacaaatagaaattaatgacactttggtagcactaatatggagattatcctttcattgagccttttatcctctgttctcctttgaagaacccctcactgtcaccttcccgagaataccctaagaccaataaatacttcagtatttcagagcggggagactctgagtcattcttactggaagtctaggaccaggtcacatgtgaatactatttcttgaaggtgtggtttcaacctctgttgccgatgtggttactaaaggttctgatcccacttgaacggaaaggtctgaggatattgattcagtcctgggtttttccctaactacaggatagggtggggtagagaaaggatatttgggggaaattttacttggatgaagattttcttggatgtagtttgaagactgcagtgtttgaagtctctgagggaagagatttggtctgtctggatcaagatttcaggcagattaggattccattcacagcccctgagcttccttcccaaggctgtattgtaattatagcaatatttcatggaggatttttctacatgataaactaagagccaagaaataaaatttttaaaatgccctaaaaaaaaaaaaaaaaaa

SEQ ID NO: 84557 - protein, 397 aa, Artificial Sequence
  derived and/or modified sequence
MSPESKKLFNIIILGVAFMFMFTAFQTCGNVAQTVIRSLNRTDFHGSGYTSMAIIYGVFSASNLITPSVVAIVGPQLSMFASGLFYSMYIAVFIQPFPWSFYTASVFIGIAAAESDRRTVFIALTVISLVGTVLFFLIRKPDSENVLGEDESSDDQDMEVNESAQNNLTKAVDAFKKSFKLCVTKEMLLLSITTAYTGLELTFFSGVYGTCIGATNKFGAEEKSLIGLSGIFIGIGEILGGSLFGLLSKNNRFGRNPVVLLGILVHFIAFYLIFLNMPGDAPIAPVKGTDSSAYIKSSKEVAILCSFLLGLGDSCFNTQLLSILGFLYSEDSAPAFAIFKFVQSICAAVAFFYSNYLLLHWQLLVMVIFGFFGTISFFTVEWEAAAFVARGSDYRSI

SEQ ID NO: 84558 - DNA, 1194 bp, Artificial Sequence
  derived and/or modified sequence
atgagccccgagagcaagaagctgttcaacatcatcatcctgggcgtggccttcatgttcatgttcaccgccttccagacctgcggcaacgtggcccagaccgtgatcagaagcctgaacagaaccgacttccacggcagcggctacaccagcatggccatcatctacggcgtgttcagcgccagcaacctgatcacccccagcgtggtggccatcgtgggcccccagctgagcatgttcgccagcggcctgttctacagcatgtacatcgccgtgttcatccagcccttcccctggagcttctacaccgccagcgtgttcatcggcatcgccgccgccgagagcgacagaagaaccgtgttcatcgccctgaccgtgatcagcctggtgggcaccgtgctgttcttcctgatcagaaagcccgacagcgagaacgtgctgggcgaggacgagagcagcgacgaccaggacatggaggtgaacgagagcgcccagaacaacctgaccaaggccgtggacgccttcaagaagagcttcaagctgtgcgtgaccaaggagatgctgctgctgagcatcaccaccgcctacaccggcctggagctgaccttcttcagcggcgtgtacggcacctgcatcggcgccaccaacaagttcggcgccgaggagaagagcctgatcggcctgagcggcatcttcatcggcatcggcgagatcctgggcggcagcctgttcggcctgctgagcaagaacaacagattcggcagaaaccccgtggtgctgctgggcatcctggtgcacttcatcgccttctacctgatcttcctgaacatgcccggcgacgcccccatcgcccccgtgaagggcaccgacagcagcgcctacatcaagagcagcaaggaggtggccatcctgtgcagcttcctgctgggcctgggcgacagctgcttcaacacccagctgctgagcatcctgggcttcctgtacagcgaggacagcgcccccgccttcgccatcttcaagttcgtgcagagcatctgcgccgccgtggccttcttctacagcaactacctgctgctgcactggcagctgctggtgatggtgatcttcggcttcttcggcaccatcagcttcttcaccgtggagtgggaggccgccgccttcgtggccagaggcagcgactacagaagcatctag

SEQ ID NO: 84559 - DNA, 1194 bp, Artificial Sequence
  derived and/or modified sequence
atgtctccagaatccaagaagctgttcaacattatcattctgggcgttgcgttcatgttcatgttcactgcatttcagacatgtggaaacgttgcccagactgtgataagaagtttaaataggactgactttcacgggtcaggatatacatctatggcaatcatctacggcgtgttctccgcttctaatctcattacgccctcagtggtagctatcgtcggccctcagctgagtatgttcgcgtcaggtctgttctacagcatgtatattgcagtgtttattcagccctttccctggtctttctacactgcttccgtctttattggcatagcagccgccgagtccgacagacgcaccgtcttcatcgccctaactgtgatatcattagtgggtaccgtgctcttcttcttaattcggaagcctgatagcgagaatgttctgggagaggatgaatccagcgatgaccaggatatggaagtcaatgaatccgcccagaacaacttgacgaaggcagtggatgcgtttaagaagagctttaaactgtgcgtgacgaaggagatgctgctgctgagtataacaaccgcatacacaggactggagcttacattcttctcgggcgtctatggaacctgtataggcgcgacaaataaattcggcgctgaggaaaagtctctcattggactcagcggcatcttcatcggaatcggcgagattctggggggaagtctgtttggcttgctgtctaaaaataacaggttcgggcggaatcccgtggtccttctgggaatccttgtccactttatcgccttctacctcattttcctgaatatgcctggggacgcaccaatagctccagtgaagggaactgattcttcagcttatataaaatcctcgaaggaagttgccatcctctgctcctttctcctgggcctgggagactcgtgttttaacacacagcttctctccatcctcgggtttctgtacagtgaggactcggctccggctttcgcaatcttcaagttcgtgcagagtatttgcgccgcagttgcctttttttactcaaattacctgcttctgcactggcagttgctggtcatggttatctttgggtttttcggcaccatcagtttcttcactgtagaatgggaagccgccgcatttgtggcccggggatccgactaccggtcaatttag

SEQ ID NO: 84560 - DNA, 2350 bp, Artificial Sequence
  derived and/or modified sequence
cccgtctccgtctgaagagtgcttctgccctcatttgcctctccctgtgaccccggccccctcagactccgctgcgtcgtctctcggccccgtccagccgttcctgactgctcttcgccggagtccgcttcccaaccccctttcgccagagcccgagagctccgtcggctctgcgtcctggcggattgtcagtggcttcgccccgaggagagctgactgccctgggctgctgcctccggcagagctgagccaaaatgtccccggaatctaaaaagcttttcaacatcattattttaggagttgcctttatgtttatgttcactgcctttcaaacttgtggaaatgtggcgcaaactgtcatcaggagcttaaataggacagattttcacggcagtggatataccagcatggctattatctatggagtgttctctgcttcaaatttgattacaccgtcagtggttgccattgtaggacctcaactctctatgtttgccagtggtttattttacagcatgtacattgccgttttcatccagcctttcccgtggtccttctacacagcctctgttttcattggaattgctgctgctgagagtgaccgaagaacagtgtttattgccctaacggtgattagccttgtggggacagttctattctttctcattcggaaaccagattctgaaaatgtcctaggagaagatgagtcttctgatgaccaggacatggaagtcaacgagtctgcccagaacaatctgacaaaggcagtagatgcttttaaaaagtcttttaagttatgtgtcaccaaggagatgctccttcttagtattacaactgcttatacaggtctggaattaactttcttctctggtgtatatggaacctgtattggtgctacaaataaatttggagcagaagagaaaagccttattggactttctggcattttcatcggcattggagaaattttaggtggaagcctcttcggcctgctgagcaagaacaatcgttttggtagaaatccagttgtgctgttgggcatcctggtgcacttcatagctttttatctaatatttctcaacatgcctggagatgccccgattgctcctgttaaaggaactgacagcagtgcttacatcaaatccagcaaagaagttgccattctctgcagttttctgttgggccttggagacagctgctttaatacccagctgcttagtatcttgggctttctgtattctgaagacagcgccccagcatttgccatcttcaagtttgttcagtctatttgcgcagccgtggcatttttctacagcaactaccttctccttcactggcaactcctggtcatggtgatatttgggttttttggaacaatttctttcttcactgtggaatgggaagctgccgcctttgtagcccgcggctctgactaccgaagtatctgatctggtgtccgtgaggggacacgtatgacctcagaaacacagctggacacagagcttggtggaagaagtcgcctttgatcttcactatatattgggtgatgttcagtatggaaaatcaagggattaagactgttaaatcagccagagttggtgttcaagtttacagatatgagttatttaaagcaagtagaataagggaaagctgttctgtcaactgtaattgttcaaagatgttgtttttcatttcatctatctcaattcttataatcatgttatagaatgtaaatgttttcttctctctcctgctcttgttggaagatcctgccttgatttagaatactaggccatatgtcatataaatattttttctggatatggagtatgttttgccatgtaataatgggaagcatatgtcattccccatatgtgttggagaatgacatttaaataaatagcaaagctgggtgtggtgttgcaccgctatactcccagctgttggggaggctgagacagaaggatcacttcagcccaggagattgaggctgcggtgagctatgatcacaccactgcactccaggctgggcaacagagtgagaccctgtcttgaaaataataataggctggtcacagtggctcatgcctgtaatcccaacactttgggaggctgaggtgggtggatcacctgaggtcaggagtttgagaccagcctggccaacatggtgaaacctcatctctactaaaaatacaaaaatgtgttgggtttggtggtgcatgcctgtaatcctagctactagggaggctgaggtaagagaattcgcttgaacctgggaggcggaggttgcagtgagccgagatcgtgccattgcactccagcctggatgacaagagtgaaactccatctc

SEQ ID NO: 84561 - DNA, 1194 bp, Artificial Sequence
  derived and/or modified sequence
atgagccctgagagcaagaagctgttcaacatcatcatcctgggcgtggccttcatgttcatgttcaccgccttccagacctgtggaaatgtggcccagaccgtcatccgcagcctgaacagaacagacttccacggcagcggctacacctccatggccatcatctacggcgtcttcagcgccagcaacctgatcacccccagcgtggtggccatcgtgggcccccagctgtccatgtttgccagcggcctcttctacagcatgtacatcgctgtgttcatccagcccttcccctggagcttctacacagcctctgtgttcatcggcattgctgctgctgagagtgacagaagaacagtgttcatcgccctgaccgtcatcagcctggtgggcaccgtgctcttcttcctgatcaggaagccagattctgaaaatgtgctgggagaagatgagagcagtgatgaccaggacatggaggtgaatgaaagtgcccagaacaacctgaccaaggctgtggatgccttcaagaagagcttcaagctgtgtgtgaccaaggagatgctgctgctgagcatcaccacagcctacacaggcctggagctgaccttcttctctggagtgtatggcacctgcatcggggccaccaacaagtttggagctgaggagaagagcctcatcggcctgagcggcatcttcatcggcattggagagatcctgggcggcagcctgtttggcctgctgagcaagaacaacagatttggaagaaatcctgtggtgctgctgggcatcctggtgcacttcatcgccttctacctgatcttcctgaacatgcctggagatgcccccatcgcccctgtgaagggcacagacagcagcgcctacatcaagagcagcaaggaggtggccatcctgtgcagcttcctgctgggcctgggggacagctgcttcaacacccagctgctgagcatcctgggcttcctgtacagcgaggacagcgccccagcctttgccatcttcaagtttgtgcagagcatctgtgccgctgtggccttcttctacagcaactacctgctgctgcactggcagctgctggtgatggtgatcttcggcttcttcggcaccatctccttcttcaccgtggagtgggaggccgccgcctttgtggcccggggcagtgactaccgcagcatctag

SEQ ID NO: 84562 - DNA, 1194 bp, Artificial Sequence
  derived and/or modified sequence
atgagccccgagagcaagaagctgttcaacatcatcatcctgggcgttgccttcatgttcatgttcaccgcgttccagacttgtggaaacgtcgcccaaaccgtgatacgttcactcaaccgaaccgacttccatgggtcaggctacactagtatggccattatctacggcgtttttagtgccagtaatcttatcactccttcagttgtagccatagtaggccctcaactgtccatgttcgcttccggtctcttttattcaatgtacatagccgtgtttattcagccctttccctggtccttttacaccgccagcgtcttcatcggtatcgctgccgctgagagcgatagaagaacagtgttcatcgctctaaccgtcatcagtctggtgggaacagtgctgttttttcttattagaaagccagactcggagaatgtactgggcgaagacgaaagcagcgacgaccaggatatggaggtgaatgagagcgcacagaacaacctcaccaaagccgttgatgcattcaaaaaaagcttcaaactctgcgttacaaaagagatgctgctactgagcatcacaacagcctatactggcctggagctaaccttcttcagtggggtctacggcacttgcatcggcgccacaaacaaatttggggccgaggagaaaagtcttatcggtctttcaggcatctttatcggcattggcgagatcttgggaggctcgttgtttggacttcttagtaagaacaatcgattcggtcgcaacccagtggttcttctaggcatcttggtgcacttcatcgccttctacttgattttcctgaacatgcctggggacgcccccatagcacctgtgaaaggtacagattcaagcgcttatattaagagctccaaggaggtggccattctctgctcatttctcctggggctgggcgacagttgtttcaatacccagcttctcagtattctcggattcctgtactccgaggattccgccccggcgttcgctatttttaaattcgtgcagtcaatctgtgcagcagtcgccttcttctactctaactacttgctgctgcattggcagctgcttgtgatggtgatcttcgggttctttgggactatcagttttttcactgtggaatgggaggcagcggcctttgttgccagagggagcgactatcggagcatttag

SEQ ID NO: 84563 - DNA, 1194 bp, Artificial Sequence
  derived and/or modified sequence
atgagtcctgagtcaaaaaagctattcaatatcattatcttgggagtcgctttcatgttcatgttcaccgcttttcaaacatgcggaaatgttgcacagaccgtcatcagaagtctgaatagaacagatttccatggaagcggatacacaagtatggccatcatctacggagtcttttccgcctccaacctcataacacctagcgtggtagctattgtcggccctcaattgtctatgttcgccagtggactgttttatagtatgtatatagcagtgtttattcagcccttcccttggagcttctacactgcatcagttttcattgggattgcggctgccgagtccgatcgcaggactgtgtttattgccctcaccgttattagcctcgttggcacagtgctttttttcctgatccgcaaacccgacagcgagaacgtgctgggcgaagacgagtcatcagacgatcaggacatggaagtgaatgagtctgcccagaacaatttgacgaaggccgtggacgcattcaagaagagtttcaaactctgtgtaaccaaagaaatgttgttactgtcaataactacggcgtatacaggcttagaattaactttctttagtggcgtgtacggaacctgtatcggcgcaaccaataagtttggagctgaagagaagtccctcattggactgagcggcatttttattgggataggggaaattcttggaggaagcctttttggccttctctctaagaacaaccgcttcgggcgtaacccggttgtgctattgggaattcttgtgcattttatcgcgttttatctgattttcctgaatatgccgggtgacgcccctattgcacctgttaagggaactgatagctctgcctacatcaagagttccaaggaggttgcaatcctctgttcttttctccttggcctcggagacagctgtttcaatacacagctactctccattctgggattcctgtattcagaggattctgctcctgcattcgctattttcaaattcgttcagtctatatgcgccgctgtcgcttttttctactcaaattacctgctgctacattggcaactgctggtgatggttatcttcggctttttcggaacgatttctttctttacagtggagtgggaggcagcagcattcgtggctagggggtcagactaccgtagtatttag

SEQ ID NO: 84564 - DNA, 1086 bp, Artificial Sequence
  derived and/or modified sequence
atggtactcgatgatctgccgaatttggaggacatctacacatctctctgttcctctacaatggaggattcggagatggacttcgacagtgggttggaagatgatgacacaaagtcagactctatccttgaggactcaacaatatttgtggcatttaagggcaacattgacgataaagatttcaagtggaagctggacgctatcctcaagaatgtaccaaacctgctgcacatggagagctcaaaactgaaggtgcagaaggtcgagccatggaatagcgttcgggtgacattcaacatccctagggaggccgccgaacggcttaggatcctcgcgcagagtaataaccagcagctgcgggatctcgggatactctctgtgcagatcgaaggtgaaggggctataaacctcgcactggctcaaaatcgctcccaggatgtccggatgaacggtccgatgggcgccggtaatagcgtgagaatggaggccgggttcccgatggccagcggccctgacgcaatggatcccctcctgtccggtctccacatccaacagcagagccacccctctggatccctcgccccaccgcatcatcctatgcagcctgtaagcgtgaataggcaaatgaatcccgccaatttcccacagttgcaacaacaacagcagcagcagcagcagcaacagcagcaacaacagcagcaacaacagcagcagcagcagcagcaactgcaggctaggccgccccagcagcatcagcagcagcaaccgcagggaataaggccacaatttacggccccaacccaggtgcccgtaccccctggttggaaccagcttccatctggagcgctacaacctcccccggcacagggcagcttggggaccatgacggccaaccagggctggaaaaaggccccactccccggccccatgcagcagcagctgcaggctaggcctagcctcgctacagtccagacgcctagtcatcctcctcctccttacccattcggttcccagcaggcctcccaggcccacacgaacttcccccagatgtccaatccgggtcagttcactgctccccagatgtag

SEQ ID NO: 84565 - DNA, 1086 bp, Artificial Sequence
  derived and/or modified sequence
atggtgctggatgacctgcccaacctggaggacatctacaccagcctgtgcagcagcaccatggaggacagcgagatggactttgacagcggcctggaggatgatgacaccaagagtgacagcatcctggaggacagcaccatctttgtggccttcaagggcaacattgatgacaaggacttcaagtggaagctggatgccatcctgaagaatgtgcccaacctgctgcacatggagagcagcaagctgaaggtgcagaaggtggagccctggaacagcgtgcgggtgaccttcaacatcccccgggaggccgctgagcggctgcgcatcctggcccagagcaacaaccagcagctgcgggacctgggcatcctgtctgtgcagattgaaggagagggcgccatcaacctggccctggcccagaacagaagccaggatgtgaggatgaatggccccatgggcgccggcaacagcgtgaggatggaggccggcttccccatggccagcggcccagatgccatggaccccctgctgagcggcctgcacatccagcagcagagccaccccagcggcagcctggccccaccccaccaccccatgcagcctgtgtctgtgaaccggcagatgaacccagccaacttcccccagctgcagcagcagcagcagcagcagcagcagcagcagcagcagcagcagcagcagcagcagcagcagcagcagcagcagctgcaggcccggcccccccagcagcaccagcagcagcagccccagggcatccggccccagttcaccgcccccacccaggtgcctgtgcccccaggctggaaccagctgcccagcggggccctgcagcccccaccagcccagggcagcctgggcaccatgacagccaaccagggctggaagaaggcccccctgcccggccccatgcagcagcagctgcaggcccggcccagcctggccaccgtgcagacccccagccaccccccaccaccctaccccttcggcagccagcaggccagccaggcccacaccaacttcccccagatgagcaaccctggccagttcaccgccccccagatgtag

SEQ ID NO: 84566 - DNA, 1086 bp, Artificial Sequence
  derived and/or modified sequence
atggtgctggacgacctgcccaacctggaggacatctacaccagcttatgtagttctacaatggaggacagcgaaatggattttgatagtggtctggaggacgacgatacaaaatccgatagtatcttggaagactcaacaatttttgtggcctttaaagggaatatagatgataaggattttaagtggaagctcgatgcgattttgaaaaatgtgcctaacctcctgcacatggaatcgtcaaagcttaaggtgcagaaagttgaaccttggaatagcgttcgcgtgacatttaacatccctcgcgaagcagcagaaaggttaagaatcctggctcaatccaataaccaacagctgcgagatctggggatcctgtccgttcaaatcgaaggagaaggtgccatcaatctggcacttgcacagaatcgttcacaagacgtgaggatgaatggacctatgggagccggaaattctgttcgcatggaagcaggatttccaatggcttccggtcctgacgcaatggaccccctgttgtccggcctgcacatccaacagcaaagccacccctcggggtccctggctcccccccatcaccccatgcagccagtttccgtgaacagacaaatgaacccagcaaatttccctcagctccagcagcagcaacagcagcaacagcaacagcagcaacaacaacagcaacagcagcaacagcagcaacagcaacaacttcaggcccggcctccgcagcagcaccaacagcagcagccacaaggtattcggccccagttcaccgcccctacacaagtgcccgtgccacccggctggaatcagctcccaagcggagccctccagccccctccagctcagggcagcctcggcacaatgaccgcaaatcagggctggaaaaaagcacctctgcccgggccaatgcagcagcaacttcaggcgcgccctagcctggcaaccgttcagactccatctcaccctccgcccccttacccttttgggagtcagcaggcctcccaggcccacaccaatttcccacagatgagcaatccagggcagttcacggcgccccagatgtag

SEQ ID NO: 84567 - DNA, 1086 bp, Artificial Sequence
  derived and/or modified sequence
atggttctggacgacctacctaatttagaggatatctacacatccctctgtagctccactatggaggattcagagatggatttcgattccggcctcgaggatgatgatactaaaagcgactcaatactggaagatagtacaatttttgtcgcgttcaaaggaaacatcgacgacaaggattttaagtggaagctggatgcaattctgaagaacgtgccaaatctgctgcacatggaaagttctaaactgaaggtacagaaagtggagccctggaactcggttagggtgacctttaatatccccagagaagcggctgagcgactcagaatcttagcccagtctaacaaccaacaactccgagatctggggatcttaagcgtacagattgagggcgagggggctatcaacctggcattggcccaaaatcggagccaggatgtacgaatgaacggcccaatgggtgccggaaacagcgtccggatggaggccggattccctatggcgtcaggccctgatgccatggatccccttctttcaggcctgcatatacaacagcagtctcatcccagtgggagcctggcgccaccccatcatccaatgcaaccagtcagcgttaatcgtcagatgaaccccgctaattttccccagctgcagcagcagcagcagcaacagcagcagcagcagcagcagcagcagcagcaacagcaacagcagcagcaacagcagttgcaggcccgaccaccccagcaacaccagcagcagcagccccagggtatccgaccacagttcactgctcctacacaggttcccgtgcctccgggttggaaccagctgccctctggggctctgcagccacctcctgctcaagggagtttaggaacgatgacagcgaaccagggttggaagaaagctccgctccctggtccgatgcagcagcagctgcaggcccgtcccagcctcgcgacggtgcaaactccaagccaccccccacctccgtaccctttcgggtcacagcaggcgagccaagcgcacactaacttcccccagatgtctaaccccggacaatttaccgctccccaaatgtag

SEQ ID NO: 84568 - DNA, 1086 bp, Artificial Sequence
  derived and/or modified sequence
atggtgctggacgacctgcccaacctggaggacatctacaccagcctgtgcagcagcaccatggaggacagcgagatggacttcgacagcggcctggaggacgacgacaccaagagcgacagcatcctggaggacagcaccatcttcgtggccttcaagggcaacatcgacgacaaggacttcaagtggaagctggacgccatcctgaagaacgtgcccaacctgctgcacatggagagcagcaagctgaaggtgcagaaggtggagccctggaacagcgtgagagtgaccttcaacatccccagagaggccgccgagagactgagaatcctggcccagagcaacaaccagcagctgagagacctgggcatcctgagcgtgcagatcgagggcgagggcgccatcaacctggccctggcccagaacagaagccaggacgtgagaatgaacggccccatgggcgccggcaacagcgtgagaatggaggccggcttccccatggccagcggccccgacgccatggaccccctgctgagcggcctgcacatccagcagcagagccaccccagcggcagcctggcccccccccaccaccccatgcagcccgtgagcgtgaacagacagatgaaccccgccaacttcccccagctgcagcagcagcagcagcagcagcagcagcagcagcagcagcagcagcagcagcagcagcagcagcagcagcagcagctgcaggccagacccccccagcagcaccagcagcagcagccccagggcatcagaccccagttcaccgcccccacccaggtgcccgtgccccccggctggaaccagctgcccagcggcgccctgcagcccccccccgcccagggcagcctgggcaccatgaccgccaaccagggctggaagaaggcccccctgcccggccccatgcagcagcagctgcaggccagacccagcctggccaccgtgcagacccccagccaccccccccccccctaccccttcggcagccagcaggccagccaggcccacaccaacttcccccagatgagcaaccccggccagttcaccgccccccagatgtag

SEQ ID NO: 84569 - protein, 1239 aa, Artificial Sequence
  derived and/or modified sequence
MANDSPAKSLVDIDLSSLRDPAGIFELVEVVGNGTYGQVYKGRHVKTGQLAAIKVMDVTEDEEEEIKLEINMLKKYSHHRNIATYYGAFIKKSPPGHDDQLWLVMEFCGAGSITDLVKNTKGNTLKEDWIAYISREILRGLAHLHIHHVIHRDIKGQNVLLTENAEVKLVDFGVSAQLDRTVGRRNTFIGTPYWMAPEVIACDENPDATYDYRSDLWSCGITAIEMAEGAPPLCDMHPMRALFLIPRNPPPRLKSKKWSKKFFSFIEGCLVKNYMQRPSTEQLLKHPFIRDQPNERQVRIQLKDHIDRTRKKRGEKDETEYEYSGSEEEEEEVPEQEGEPSSIVNVPGESTLRRDFLRLQQENKERSEALRRQQLLQEQQLREQEEYKRQLLAERQKRIEQQKEQRRRLEEQQRREREARRQQEREQRRREQEEKRRLEELERRRKEEEERRRAEEEKRRVEREQEYIRRQLEEEQRHLEVLQQQLLQEQAMLLECRWREMEEHRQAERLQRQLQQEQAYLLSLQHDHRRPHPQHSQQPPPPQQERSKPSFHAPEPKAHYEPADRAREVEDRFRKTNHSSPEAQSKQTGRVLEPPVPSRSESFSNGNSESVHPALQRPAEPQVPVRTTSRSPVLSRRDSPLQGSGQQNSQAGQRNSTSIEPRLLWERVEKLVPRPGSGSSSGSSNSGSQPGSHPGSQSGSGERFRVRSSSKSEGSPSQRLENAVKKPEDKKEVFRPLKPADLTALAKELRAVEDVRPPHKVTDYSSSSEESGTTDEEDDDVEQEGADESTSGPEDTRAASSLNLSNGETESVKTMIVHDDVESEPAMTPSKEGTLIVRQTQSASSTLQKHKSSSSFTPFIDPRLLQISPSSGTTVTSVVGFSCDGMRPEAIRQDPTRKGSVVNVNPTNTRPQSDTPEIRKYKKRFNSEILCAALWGVNLLVGTESGLMLLDRSGQGKVYPLINRRRFQQMDVLEGLNVLVTISGKKDKLRVYYLSWLRNKILHNDPEVEKKQGWTTVGDLEGCVHYKVVKYERIKFLVIALKSSVEVYAWAPKPYHKFMAFKSFGELVHKPLLVDLTVEEGQRLKVIYGSCAGFHAVDVDSGSVYDIYLPTHIQCSIKPHAIIILPNTDGMELLVCYEDEGVYVNTYGRITKDVVLQWGEMPTSVAYIRSNQTMGWGEKAIEIRSVETGHLDGVFMHKRAQRLKFLCERNDKVFFASVRSGGSSQVYFMTLGRTSLLSW

SEQ ID NO: 84570 - DNA, 3720 bp, Artificial Sequence
  derived and/or modified sequence
atggccaacgacagccccgccaagagcctggtggacatcgacctgagcagcctgagagaccccgccggcatcttcgagctggtggaggtggtgggcaacggcacctacggccaggtgtacaagggcagacacgtgaagaccggccagctggccgccatcaaggtgatggacgtgaccgaggacgaggaggaggagatcaagctggagatcaacatgctgaagaagtacagccaccacagaaacatcgccacctactacggcgccttcatcaagaagagcccccccggccacgacgaccagctgtggctggtgatggagttctgcggcgccggcagcatcaccgacctggtgaagaacaccaagggcaacaccctgaaggaggactggatcgcctacatcagcagagagatcctgagaggcctggcccacctgcacatccaccacgtgatccacagagacatcaagggccagaacgtgctgctgaccgagaacgccgaggtgaagctggtggacttcggcgtgagcgcccagctggacagaaccgtgggcagaagaaacaccttcatcggcaccccctactggatggcccccgaggtgatcgcctgcgacgagaaccccgacgccacctacgactacagaagcgacctgtggagctgcggcatcaccgccatcgagatggccgagggcgccccccccctgtgcgacatgcaccccatgagagccctgttcctgatccccagaaaccccccccccagactgaagagcaagaagtggagcaagaagttcttcagcttcatcgagggctgcctggtgaagaactacatgcagagacccagcaccgagcagctgctgaagcaccccttcatcagagaccagcccaacgagagacaggtgagaatccagctgaaggaccacatcgacagaaccagaaagaagagaggcgagaaggacgagaccgagtacgagtacagcggcagcgaggaggaggaggaggaggtgcccgagcaggagggcgagcccagcagcatcgtgaacgtgcccggcgagagcaccctgagaagagacttcctgagactgcagcaggagaacaaggagagaagcgaggccctgagaagacagcagctgctgcaggagcagcagctgagagagcaggaggagtacaagagacagctgctggccgagagacagaagagaatcgagcagcagaaggagcagagaagaagactggaggagcagcagagaagagagagagaggccagaagacagcaggagagagagcagagaagaagagagcaggaggagaagagaagactggaggagctggagagaagaagaaaggaggaggaggagagaagaagagccgaggaggagaagagaagagtggagagagagcaggagtacatcagaagacagctggaggaggagcagagacacctggaggtgctgcagcagcagctgctgcaggagcaggccatgctgctggagtgcagatggagagagatggaggagcacagacaggccgagagactgcagagacagctgcagcaggagcaggcctacctgctgagcctgcagcacgaccacagaagaccccacccccagcacagccagcagcccccccccccccagcaggagagaagcaagcccagcttccacgcccccgagcccaaggcccactacgagcccgccgacagagccagagaggtggaggacagattcagaaagaccaaccacagcagccccgaggcccagagcaagcagaccggcagagtgctggagccccccgtgcccagcagaagcgagagcttcagcaacggcaacagcgagagcgtgcaccccgccctgcagagacccgccgagccccaggtgcccgtgagaaccaccagcagaagccccgtgctgagcagaagagacagccccctgcagggcagcggccagcagaacagccaggccggccagagaaacagcaccagcatcgagcccagactgctgtgggagagagtggagaagctggtgcccagacccggcagcggcagcagcagcggcagcagcaacagcggcagccagcccggcagccaccccggcagccagagcggcagcggcgagagattcagagtgagaagcagcagcaagagcgagggcagccccagccagagactggagaacgccgtgaagaagcccgaggacaagaaggaggtgttcagacccctgaagcccgccgacctgaccgccctggccaaggagctgagagccgtggaggacgtgagacccccccacaaggtgaccgactacagcagcagcagcgaggagagcggcaccaccgacgaggaggacgacgacgtggagcaggagggcgccgacgagagcaccagcggccccgaggacaccagagccgccagcagcctgaacctgagcaacggcgagaccgagagcgtgaagaccatgatcgtgcacgacgacgtggagagcgagcccgccatgacccccagcaaggagggcaccctgatcgtgagacagacccagagcgccagcagcaccctgcagaagcacaagagcagcagcagcttcacccccttcatcgaccccagactgctgcagatcagccccagcagcggcaccaccgtgaccagcgtggtgggcttcagctgcgacggcatgagacccgaggccatcagacaggaccccaccagaaagggcagcgtggtgaacgtgaaccccaccaacaccagaccccagagcgacacccccgagatcagaaagtacaagaagagattcaacagcgagatcctgtgcgccgccctgtggggcgtgaacctgctggtgggcaccgagagcggcctgatgctgctggacagaagcggccagggcaaggtgtaccccctgatcaacagaagaagattccagcagatggacgtgctggagggcctgaacgtgctggtgaccatcagcggcaagaaggacaagctgagagtgtactacctgagctggctgagaaacaagatcctgcacaacgaccccgaggtggagaagaagcagggctggaccaccgtgggcgacctggagggctgcgtgcactacaaggtggtgaagtacgagagaatcaagttcctggtgatcgccctgaagagcagcgtggaggtgtacgcctgggcccccaagccctaccacaagttcatggccttcaagagcttcggcgagctggtgcacaagcccctgctggtggacctgaccgtggaggagggccagagactgaaggtgatctacggcagctgcgccggcttccacgccgtggacgtggacagcggcagcgtgtacgacatctacctgcccacccacatccagtgcagcatcaagccccacgccatcatcatcctgcccaacaccgacggcatggagctgctggtgtgctacgaggacgagggcgtgtacgtgaacacctacggcagaatcaccaaggacgtggtgctgcagtggggcgagatgcccaccagcgtggcctacatcagaagcaaccagaccatgggctggggcgagaaggccatcgagatcagaagcgtggagaccggccacctggacggcgtgttcatgcacaagagagcccagagactgaagttcctgtgcgagagaaacgacaaggtgttcttcgccagcgtgagaagcggcggcagcagccaggtgtacttcatgaccctgggcagaaccagcctgctgagctggtag

SEQ ID NO: 84571 - DNA, 3513 bp, Artificial Sequence
  derived and/or modified sequence
gtgtacaagggcagacacgtgaagaccggccagctggccgccatcaaggtgatggacgtgaccgaggacgaggaggaggagatcaagctggagatcaacatgctgaagaagtacagccaccacagaaacatcgccacctactacggcgccttcatcaagaagagcccccccggccacgacgaccagctgtggctggtgatggagttctgcggcgccggcagcatcaccgacctggtgaagaacaccaagggcaacaccctgaaggaggactggatcgcctacatcagcagagagatcctgagaggcctggcccacctgcacatccaccacgtgatccacagagacatcaagggccagaacgtgctgctgaccgagaacgccgaggtgaagctggtggacttcggcgtgagcgcccagctggacagaaccgtgggcagaagaaacaccttcatcggcaccccctactggatggcccccgaggtgatcgcctgcgacgagaaccccgacgccacctacgactacagaagcgacctgtggagctgcggcatcaccgccatcgagatggccgagggcgccccccccctgtgcgacatgcaccccatgagagccctgttcctgatccccagaaaccccccccccagactgaagagcaagaagtggagcaagaagttcttcagcttcatcgagggctgcctggtgaagaactacatgcagagacccagcaccgagcagctgctgaagcaccccttcatcagagaccagcccaacgagagacaggtgagaatccagctgaaggaccacatcgacagaaccagaaagaagagaggcgagaaggacgagaccgagtacgagtacagcggcagcgaggaggaggaggaggaggtgcccgagcaggagggcgagcccagcagcatcgtgaacgtgcccggcgagagcaccctgagaagagacttcctgagactgcagcaggagaacaaggagagaagcgaggccctgagaagacagcagctgctgcaggagcagcagctgagagagcaggaggagtacaagagacagctgctggccgagagacagaagagaatcgagcagcagaaggagcagagaagaagactggaggagcagcagagaagagagagagaggccagaagacagcaggagagagagcagagaagaagagagcaggaggagaagagaagactggaggagctggagagaagaagaaaggaggaggaggagagaagaagagccgaggaggagaagagaagagtggagagagagcaggagtacatcagaagacagctggaggaggagcagagacacctggaggtgctgcagcagcagctgctgcaggagcaggccatgctgctgcacgaccacagaagaccccacccccagcacagccagcagcccccccccccccagcaggagagaagcaagcccagcttccacgcccccgagcccaaggcccactacgagcccgccgacagagccagagaggtggaggacagattcagaaagaccaaccacagcagccccgaggcccagagcaagcagaccggcagagtgctggagccccccgtgcccagcagaagcgagagcttcagcaacggcaacagcgagagcgtgcaccccgccctgcagagacccgccgagccccaggtgcccgtgagaaccaccagcagaagccccgtgctgagcagaagagacagccccctgcagggcagcggccagcagaacagccaggccggccagagaaacagcaccagcatcgagcccagactgctgtgggagagagtggagaagctggtgcccagacccggcagcggcagcagcagcggcagcagcaacagcggcagccagcccggcagccaccccggcagccagagcggcagcggcgagagattcagagtgagaagcagcagcaagagcgagggcagccccagccagagactggagaacgccgtgaagaagcccgaggacaagaaggaggtgttcagacccctgaagcccgccgacctgaccgccctggccaaggagctgagagccgtggaggacgtgagacccccccacaaggtgaccgactacagcagcagcagcgaggagagcggcaccaccgacgaggaggacgacgacgtggagcaggagggcgccgacgagagcaccagcggccccgaggacaccagagccgccagcagcctgaacctgagcaacggcgagaccgagagcgtgaagaccatgatcgtgcacgacgacgtggagagcgagcccgccatgacccccagcaaggagggcaccctgatcgtgagacagacccagagcgccagcagcaccctgcagaagcacaagagcagcagcagcttcacccccttcatcgaccccagactgctgcagatcagccccagcagcggcaccaccgtgaccagcgtggtgggcttcagctgcgacggcatgagacccgaggccatcagacaggaccccaccagaaagggcagcgtggtgaacgtgaaccccaccaacaccagaccccagagcgacacccccgagatcagaaagtacaagaagagattcaacagcgagatcctgtgcgccgccctgtggggcgtgaacctgctggtgggcaccgagagcggcctgatgctgctggacagaagcggccagggcaaggtgtaccccctgatcaacagaagaagattccagcagatggacgtgctggagggcctgaacgtgctggtgaccatcagcggcaagaaggacaagctgagagtgtactacctgagctggctgagaaacaagatcctgcacaacgaccccgaggtggagaagaagcagggctggaccaccgtgggcgacctggagggctgcgtgcactacaaggtggtgaagtacgagagaatcaagttcctggtgatcgccctgaagagcagcgtggaggtgtacgcctgggcccccaagccctaccacaagttcatggccttcaagagcttcggcgagctggtgcacaagcccctgctggtggacctgaccgtggaggagggccagagactgaaggtgatctacggcagctgcgccggcttccacgccgtggacgtggacagcggcagcgtgtacgacatctacctgcccacccacatccagtgcagcatcaagccccacgccatcatcatcctgcccaacaccgacggcatggagctgctggtgtgctacgaggacgagggcgtgtacgtgaacacctacggcagaatcaccaaggacgtggtgctgcagtggggcgagatgcccaccagcgtggcctacatcagaagcaaccagaccatgggctggggcgagaaggccatcgagatcagaagcgtggagaccggccacctggacggcgtgttcatgcacaagagagcccagagactgaagttcctgtgcgagagaaacgacaaggtgttcttcgccagcgtgagaagcggcggcagcagccaggtgtacttcatgaccctgggcagaaccagcctgctgagctggtag

SEQ ID NO: 84572 - DNA, 3792 bp, Artificial Sequence
  derived and/or modified sequence
atggcgaacgactcccctgcaaaaagtctggtggacatcgacctctcctccctgcgggatcctgctgggatttttgagctggtggaagtggttggaaatggcacctatggacaagtctataagggtcgacatgttaaaacgggtcagttggcagccatcaaagttatggatgtcactgaggatgaagaggaagaaatcaaactggagataaatatgctaaagaaatactctcatcacagaaacattgcaacatattatggtgctttcatcaaaaagagccctccaggacatgatgaccaactctggcttgttatggagttctgtggggctgggtccattacagaccttgtgaagaacaccaaagggaacacactcaaagaagactggatcgcttacatctccagagaaatcctgaggggactggcacatcttcacattcatcatgtgattcaccgggatatcaagggccagaatgtgttgctgactgagaatgcagaggtgaaacttgttgactttggtgtgagtgctcagctggacaggactgtggggcggagaaatacgttcataggcactccctactggatggctcctgaggtcatcgcctgtgatgagaacccagatgccacctatgattacagaagtgatctttggtcttgtggcattacagccattgagatggcagaaggtgctccccctctctgtgacatgcatccaatgagagcactgtttctcattcccagaaaccctcctccccggctgaagtcaaaaaaatggtcgaagaagttttttagttttatagaagggtgcctggtgaagaattacatgcagcggccctctacagagcagcttttgaaacatccttttataagggatcagccaaatgaaaggcaagttagaatccagcttaaggatcatatagatcgtaccaggaagaagagaggcgagaaagatgaaactgagtatgagtacagtgggagtgaggaagaagaggaggaagtgcctgaacaggaaggagagccaagttccattgtgaacgtgcctggtgagtctactcttcgccgagatttcctgagactgcagcaggagaacaaggaacgttccgaggctcttcggagacaacagttactacaggagcaacagctccgggagcaggaagaatataaaaggcaactgctggcagagagacagaagcggattgagcagcagaaagaacagaggcgacggctagaagagcaacaaaggagagagcgggaagctagaaggcagcaggaacgtgaacagcgaaggagagaacaagaagaaaagaggcgtctagaggagttggagagaaggcgcaaagaagaagaggagaggagacgggcagaagaagaaaagaggagagttgaaagagaacaggagtatatcaggcgacagctagaagaggagcagcggcacttggaagtccttcagcagcagctgctccaggagcaggccatgttactggagtgccgatggcgggagatggaggagcaccggcaggcagagaggctccagaggcagttgcaacaagaacaagcatatctcctgtctctacagcatgaccataggaggccgcacccgcagcactcgcagcagccgccaccaccgcagcaggaaaggagcaagccaagcttccatgctcccgagcccaaagcccactacgagcctgctgaccgagcgcgagaggtggaagatagatttaggaaaactaaccacagctcccctgaagcccagtctaagcagacaggcagagtattggagccaccagtgccttcccgatcagagtctttttccaatggcaactccgagtctgtgcatcccgccctgcagagaccagcggagccacaggttcctgtgagaacaacatctcgctcccctgttctgtcccgtcgagattccccactgcagggcagtgggcagcagaatagccaggcaggacagagaaactccaccagtattgagcccaggcttctgtgggagagagtggagaagctggtgcccagacctggcagtggcagctcctcagggtccagcaactcaggatcccagcccgggtctcaccctgggtctcagagtggctccggggaacgcttcagagtgagatcatcatccaagtctgaaggctctccatctcagcgcctggaaaatgcagtgaaaaaacctgaagataaaaaggaagttttcagacccctcaagcctgctgatctgaccgcactggccaaagagcttcgagcagtggaagatgtacggccacctcacaaagtaacggactactcctcatccagtgaggagtcggggacgacggatgaggaggacgacgatgtggagcaggaaggggctgacgagtccacctcaggaccagaggacaccagagcagcgtcatctctgaatttgagcaatggtgaaacggaatctgtgaaaaccatgattgtccatgatgatgtagaaagtgagccggccatgaccccatccaaggagggcactctaatcgtccgccagactcagtccgctagtagcacactccagaaacacaaatcttcctcctcctttacaccttttatagaccccagattactacagatttctccatctagcggaacaacagtgacatctgtggtgggattttcctgtgatgggatgagaccagaagccataaggcaagatcctacccggaaaggctcagtggtcaatgtgaatcctaccaacactaggccacagagtgacaccccggagattcgtaaatacaagaagaggtttaactctgagattctgtgtgctgccttatggggagtgaatttgctagtgggtacagagagtggcctgatgctgctggacagaagtggccaagggaaggtctatcctcttatcaaccgaagacgatttcaacaaatggacgtacttgagggcttgaatgtcttggtgacaatatctggcaaaaaggataagttacgtgtctactatttgtcctggttaagaaataaaatacttcacaatgatccagaagttgagaagaagcagggatggacaaccgtaggggatttggaaggatgtgtacattataaagttgtaaaatatgaaagaatcaaatttctggtgattgctttgaagagttctgtggaagtctatgcgtgggcaccaaagccatatcacaaatttatggcctttaagtcatttggagaattggtacataagccattactggtggatctcactgttgaggaaggccagaggttgaaagtgatctatggatcctgtgctggattccatgctgttgatgtggattcaggatcagtctatgacatttatctaccaacacatatccagtgtagcatcaaaccccatgcaatcatcatcctccccaatacagatggaatggagcttctggtgtgctatgaagatgagggggtttatgtaaacacatatggaaggatcaccaaggatgtagttctacagtggggagagatgcctacatcagtagcatatattcgatccaatcagacaatgggctggggagagaaggccatagagatccgatctgtggaaactggtcacttggatggtgtgttcatgcacaaaagggctcaaagactaaaattcttgtgtgaacgcaatgacaaggtgttctttgcctctgttcggtctggtggcagcagtcaggtttatttcatgaccttaggcaggacttctcttctgagctggtagaagcagtgtgatccagggattactggcctccagagtcttcaagatcctgagaacttggaattccttgtaact

SEQ ID NO: 84573 - DNA, 3720 bp, Artificial Sequence
  derived and/or modified sequence
atggctaacgatagtccggccaagagcctggtcgacatcgacttatcttccctgagggatccagccggcatcttcgaattagtggaagtggtggggaacgggacttatgggcaggtctataagggccggcacgtcaagacgggtcagctggccgccataaaggtgatggacgtgacggaggacgaggaagaagaaatcaaactcgaaatcaacatgttgaagaagtatagccatcacagaaacatcgcaacctattacggcgcgttcatcaagaaatctcctcctggccatgacgaccagctgtggctggtgatggagttctgcggtgccggctctatcacggacctggttaaaaatactaagggtaatactctcaaggaagattggatcgcctatatcagccgcgagattctgcgtgggcttgcccatctgcatatccaccacgttatccacagggacatcaaaggacagaacgtcctcttgaccgaaaatgcagaagtgaagttagtggactttggggtgtctgcacagctcgatcggacagtgggtaggagaaatacattcatcggcaccccatattggatggcaccagaggttatcgcttgcgacgagaacccagacgctacttatgattataggtccgatctttggagctgcgggatcaccgccatcgagatggcagagggtgccccgccactctgcgacatgcaccctatgagggcgctgttcctcattcccagaaatccccccccaaggctgaaatccaaaaagtggagcaagaagttcttctcctttatcgaaggctgtttggtcaagaactacatgcagcgtccatccactgagcaactgctcaagcacccttttattagagatcagccaaacgagaggcaggtccgcatacagctgaaggaccacatcgataggacaaggaagaaacgcggggagaaagatgagacagaatacgagtattcaggctccgaagaggaagaggaagaggtccccgagcaggagggggaaccctcatcaatcgtgaacgtgccaggggaatctacattaagacgggacttcctgagacttcagcaggaaaacaaagaaaggtcagaagcactgagaaggcagcagctgctacaggagcaacaactcagggagcaagaggaatacaagcgtcaactgctggcagagaggcagaagcgtatcgaacagcagaaagagcagagacggaggctcgaggagcagcagcgtagagagcgagaggctcgaaggcagcaggagagggaacagcgtagaagagaacaggaagagaaacggaggttggaggaactggaaagacggcgaaaagaagaggaggagaggaggagagcggaagaggagaaacgcagagttgagcgagagcaggagtacatccggcgacagcttgaagaggagcaaagacacctggaggtccttcagcagcagctgctccaggagcaggccatgctgttggaatgcaggtggagggaaatggaggaacacaggcaggcagagaggttgcagcgccagcttcaacaggaacaagcctatctcctgagcctacagcacgatcacaggcgcccccaccctcagcattcacagcagcctcccccaccccagcaggagagatccaagccctcattccatgccccagaaccgaaggctcactacgagcccgcagaccgagcccgcgaagtcgaagaccggtttcgcaagaccaaccactccagcccagaagctcaaagcaaacagactggaagggtgcttgagcctcccgtcccatcacggagtgaatctttctccaatgggaattccgaaagtgtacatcccgcccttcagagacctgctgagccacaagtgcctgtgaggaccacatcccgctcaccagtcctctctagacgagactctcctctgcaggggagtggtcagcagaacagccaggctggccagagaaattccactagtatagagccgcggttactctgggagagggtggagaaactggttccccgcccgggctccggttcatcatcgggtagctccaactccggttcacaaccgggaagtcatcccggcagtcagtccggctctggcgaaaggtttagagtgagatccagcagtaagagcgaggggtctccaagtcaacggctggaaaacgccgtaaaaaaaccggaagacaaaaaagaagtgttccgtcccctgaaaccggcagatctgacagcattagctaaagagctacgcgccgtcgaggatgtgcggccccctcacaaggtgactgattatagcagttcttcagaagaatccggcaccactgacgaggaggacgatgacgtggagcaggaaggggccgatgagtcaacctccggccccgaggacacccgcgctgcctcaagcctcaatctgtccaatggtgagacagaatccgtgaagaccatgattgttcacgacgatgtggagtcggaacccgccatgaccccttcaaaggaagggactttaatagtcaggcagacacagtcagctagttcaaccctccaaaagcataaatcctcctcgtccttcacaccatttattgacccgaggttgctgcagatctcccctagcagcggcactaccgtgactagtgtagtggggttctcctgcgatggcatgaggccagaagcaataaggcaagatccaaccagaaaaggctcagttgtgaatgtgaatccgaccaacacgaggccccagtcagacacaccggaaatacgtaagtacaagaagagatttaactctgagatactgtgtgctgccctgtggggtgtcaatcttctggtgggaacagagtccggcctaatgctgcttgatcgcagcggccaaggtaaggtttacccactgatcaaccggcgcaggtttcaacaaatggatgttttggaagggctgaacgtgctggtaaccataagtgggaagaaggataaactcagagtctactatttgagttggctcaggaacaagatattgcacaatgatcccgaggtggagaaaaagcaaggctggacgactgtgggggacctggaaggttgcgtccactataaggtggtgaaatatgagcggatcaagtttttggttattgcgctgaagtcgtccgtggaggtatatgcctgggctccaaagccctatcacaagtttatggctttcaaaagcttcggtgaactggtccacaagccactgctggtggatctgacagttgaggaagggcagcgtcttaaagtgatttacgggagttgcgcagggtttcatgcagtggacgtagatagtggttccgtatatgatatatatctgccaacgcatattcagtgttccattaaaccacacgctatcatcattcttccgaatactgacggcatggaattacttgtgtgttacgaagatgagggggtgtacgtgaacacctacggcaggatcaccaaagatgtcgtgcttcagtggggggaaatgcctacatcagtggcctacatccgttccaaccagaccatgggttggggtgagaaggccattgaaatcagatcagttgagactggtcatttggacggcgtgttcatgcacaagcgggctcagaggctgaaatttctgtgcgaacggaatgataaggttttttttgccagtgtgcgttcaggtggcagcagtcaggtatactttatgacattggggcggaccagcctcttgtcctggtag

SEQ ID NO: 84574 - DNA, 3513 bp, Artificial Sequence
  derived and/or modified sequence
gtatacaagggacgacatgtgaaaacgggccagctggccgctatcaaggttatggacgtgactgaagacgaggaagaagagatcaaactcgagattaacatgctcaaaaagtactctcaccatcgcaatatcgctacgtattatggcgcattcatcaagaaatcccccccggggcacgacgatcagctctggctggtcatggagttttgcggggcaggaagcatcacagacctagtgaaaaatactaagggaaacacactgaaagaggactggatcgcgtatatcagcagggagattctgagggggctggctcacctgcacatccaccacgtcattcaccgtgacattaagggtcaaaatgttctgctgacggagaatgcagaagtgaagctggtggattttggggtcagtgcacaattagataggaccgtgggcaggcgtaatacctttatcggaaccccctattggatggcccccgaggtcatcgcatgcgatgagaatcctgatgccacctatgactatcgcagcgacctgtggtcctgcggaattactgccatcgagatggcagaaggggcccctcccttgtgtgatatgcatccaatgcgtgctctgttcctgatccccagaaacccaccccctcgtctcaagagcaagaagtggtccaaaaagttcttcagtttcattgagggttgtctggtgaagaattatatgcagcgcccatccactgagcagctgcttaaacatcctttcatccgagaccagccaaacgaaagacaggttcgtattcaactgaaggatcatatcgataggaccagaaaaaagcggggagagaaggacgagactgagtacgagtacagtggctccgaagaggaagaagaggaagtgcctgaacaggagggggaaccttccagcatcgtgaacgtgcccggagaatccactcttaggcgcgatttcctgagacttcagcaggaaaacaaggaaagaagcgaggcgctcaggagacagcagctgcttcaagaacaacagctgcgggagcaggaagagtataagcgacagttactggccgagcggcagaagcgcattgaacagcaaaaggagcagagacggcggcttgaagaacagcaaaggcgtgagcgagaggcccgcagacagcaggagcgtgagcagaggaggcgagagcaagaggagaagcggcggctggaagagcttgaacgtaggcgaaaagaagaagaagagcggaggcgcgccgaagaggagaaacggagggtggaaagggagcaggagtacattcgccggcaactcgaggaggagcagcgacacctcgaagttctccaacagcagctcctgcaagaacaggccatgcttctgcatgaccacaggcgcccccacccccagcactctcagcaaccgcctccaccacaacaagaaaggagtaaaccatcctttcatgcacctgagccaaaagcccactatgagccagcagatcgagcgagggaagtagaagaccgctttaggaaaaccaatcactcttctcctgaggcgcagtctaaacagaccgggagagtgctggagcctcctgtcccatcccggtccgagtccttctcaaacgggaacagtgagagtgtgcatcctgctctgcagcggcctgctgaaccacaagtgcccgtgaggacaacatccaggtcacccgtgctttctcggcgggattctccccttcagggaagcggccagcaaaactcacaggccgggcaacgcaatagcacatccatagagcctcgcctactatgggaacgagtggagaagcttgtgccccgccccgggtctggctcctctagcggtagtagtaacagcggctcacaaccaggctctcatccagggagtcagtctgggagcggcgaacggtttcgagtgcgctctagttcgaagtctgaggggtcaccaagccagcgcctcgaaaacgctgtaaaaaaaccggaggataaaaaagaggtgtttagaccgttaaaacctgccgacctgaccgcccttgccaaggagctgcgcgctgtggaggacgtgcggcctccgcacaaggtgacagactactccagctcgtcggaggagtctgggaccacggacgaggaggacgacgacgtggagcaggaaggtgcggacgaaagcacatccggccccgaagacaccagagctgccagttctctcaatctgagcaatggagagaccgagagtgttaagacaatgattgttcatgatgatgtggagtcggagcctgctatgacaccctccaaggaggggactctaattgttaggcagactcagtctgcatcctccaccctccagaaacataagagcagttcaagcttcactccattcatcgacccgcggctcctccaaattagccctagcagcgggaccactgttaccagtgtcgtgggcttctcttgtgatgggatgaggccagaggccattcgccaggaccccacccgcaaagggagtgtcgtcaacgtgaatcccacaaataccagaccacagtcagacacaccagaaattagaaaatacaaaaagagattcaatagcgaaatcctctgtgcagctttgtggggagttaacctcctggttggtacagagtcgggcctcatgcttctggatcgctcgggtcagggaaaggtgtaccctctgattaacagaaggaggttccaacagatggatgttttggaaggcctgaacgtcctcgtaacaatctctggtaagaaagataaattaagagtgtactacttatcttggctgaggaacaagatattgcataacgatcccgaggtcgagaagaaacagggatggactactgtaggtgatctagaaggctgcgtgcactataaagttgtgaagtatgagaggatcaaatttttggttattgcactgaaaagttcagtggaagtgtatgcctgggcccccaagccgtaccacaaattcatggcttttaagtcattcggagaactcgtgcataagccactcctcgtggacttaaccgtggaagaaggtcagcgtcttaaggtaatttacggtagctgcgccggcttccacgctgtggatgttgacagtggatctgtgtacgacatatacctgccgactcatattcaatgttcaatcaaaccacatgcgatcatcatcttgcccaacacagacggcatggagttgctggtgtgctatgaggacgaaggagtttacgtcaatacctatggcagaatcactaaagatgtcgtcctccagtggggagaaatgcctacctctgttgcttatatacggagcaaccaaactatgggttggggcgaaaaagccatagagatccggagcgtcgaaaccggacacctcgacggtgtcttcatgcacaagcgtgcgcaacggcttaagtttctctgcgagcgcaacgacaaggtgttttttgcctcggtgcgtagtggcggatcgagtcaggtgtattttatgacgcttggaaggacgagtcttctctcttggtag

SEQ ID NO: 84575 - DNA, 3720 bp, Artificial Sequence
  derived and/or modified sequence
atggccaatgacagccctgccaagagcctggtggacatcgacctgagcagcctgcgggaccctgctggcatctttgagctggtggaggtggtgggcaatggcacctacggccaggtgtacaagggccgccacgtgaagacaggccagctggccgccatcaaggtgatggatgtgacagaagatgaggaggaggagatcaagctggagatcaacatgctgaagaagtacagccaccacaggaacatcgccacctactacggggccttcatcaagaagagccccccaggccatgatgaccagctgtggctggtgatggagttctgtggggccggcagcatcacagacctggtgaagaacaccaagggcaacaccctgaaggaggactggatcgcctacatcagccgggagatcctgcggggcctggcccacctgcacatccaccacgtgatccaccgggacatcaagggccagaatgtgctgctgacagaaaatgctgaggtgaagctggtggactttggagtgtctgcccagctggacagaacagtgggcagaagaaacaccttcatcggcaccccctactggatggcccctgaggtgattgcctgtgatgagaacccagatgccacctatgactacagaagtgacctgtggagctgtggcatcacagccatcgagatggccgagggcgccccacccctgtgtgacatgcaccccatgagggccctcttcctgatccccagaaatcctccaccccggctgaagagcaagaagtggagcaagaagttcttctccttcatcgagggctgcctggtgaagaactacatgcagaggcccagcacagagcagctgctgaagcaccccttcatccgggaccagcccaatgaaaggcaggtgcgcatccagctgaaggaccacatcgacaggaccaggaagaagagaggagagaaggatgaaacagaatatgagtacagcggcagcgaggaggaggaggaggaggtgcctgagcaggagggggagcccagcagcatcgtgaatgtgcctggagagagcaccctgcggcgggacttcctgcggctgcagcaggagaacaaggagaggtctgaggccctgcggcggcagcagctgctgcaggagcagcagctgcgggagcaggaggagtacaagaggcagctgctggccgagcggcagaagagaattgagcagcagaaggagcagaggcggcggctggaggagcagcagaggcgggagcgggaggcccggcggcagcaggagcgggagcagaggagaagagagcaggaggagaagaggcggctggaggagctggagaggaggaggaaggaggaggaggagcggcggcgggcagaggaggagaagagaagagtggagcgggagcaggagtacatccggcggcagctggaggaggagcagaggcacctggaggtgctgcagcagcagctgctgcaggagcaggccatgctgctggagtgccgctggagggagatggaggagcaccggcaggccgagcggctgcagaggcagctgcagcaggagcaggcctacctgctgagcctgcagcacgaccacagaagaccccacccccagcacagccagcagcccccaccaccccagcaggagaggagcaagcccagcttccacgcccctgagcccaaggcccactatgagcctgctgaccgggcccgggaggtggaggaccgcttcaggaagaccaaccacagcagccctgaggcccagagcaagcagacaggccgggtgctggagccccctgtgcccagccgctctgagagcttcagcaatggaaacagcgagagcgtgcacccagccctgcagaggcctgctgagccccaggtgcctgtgaggaccaccagccgcagccctgtgctgagccggcgggacagccccctgcagggcagcggccagcagaacagccaggccggccagaggaacagcaccagcattgagccccggctgctgtgggagcgggtggagaagctggtgcccaggcctggcagcggcagcagcagcggcagcagcaacagcggcagccagcccggcagccaccctggcagccagagcggcagcggggagcgcttccgggtgcgcagcagcagcaagtctgagggcagccccagccagaggctggagaatgctgtgaagaagccagaggacaagaaggaggtgttccggcccctgaagccagctgacctgacagccctggccaaggagctgcgggctgtggaggatgtgcggcccccccacaaggtgacagactacagcagcagcagcgaggagagcggcaccacagatgaagaagatgatgatgtggagcaggagggcgcagatgagagcaccagcggccctgaggacacccgggccgccagcagcctgaacctgagcaatggagaaacagaatctgtgaagaccatgattgtgcatgatgatgtggagagcgagcccgccatgacccccagcaaggagggcaccctcatcgtgcggcagacccagagcgccagcagcaccctgcagaagcacaagagcagcagcagcttcacccccttcatcgacccccggctgctgcagatcagccccagcagcggcaccaccgtgacctctgtggtgggcttcagctgtgatggcatgaggcctgaggccatccggcaggaccccaccaggaagggctctgtggtgaatgtgaaccccaccaacacccggccccagagcgacaccccagagatcaggaagtacaagaagcgcttcaacagcgagatcctgtgtgccgccctgtggggcgtgaacctgctggtgggcacagaaagtggcctgatgctgctggacagaagtggccagggcaaggtgtaccccctcatcaacagaagacgcttccagcagatggatgtgctggagggcctgaatgtgctggtgaccatcagcggcaagaaggacaagctgcgggtgtactacctgtcctggctgaggaacaagatcctgcacaatgaccctgaggtggagaagaagcagggctggaccaccgtgggggacctggagggctgtgtgcactacaaggtggtgaagtatgagcgcatcaagttcctggtgattgccctgaagagctctgtggaggtgtatgcctgggcccccaagccctaccacaagttcatggccttcaagagctttggagagctggtgcacaagcccctgctggtggacctgactgtggaggagggccagaggctgaaggtgatctacggcagctgtgccggcttccacgctgtggatgtggacagcggctctgtgtatgacatctacctgcccacccacatccagtgcagcatcaagccccacgccatcatcatcctgcccaacacagatggcatggagctgctggtgtgctatgaagatgaaggagtgtatgtgaacacctacggccgcatcaccaaggatgtggtgctgcagtggggcgagatgcccacctctgtggcctacatccgcagcaaccagaccatgggctggggcgagaaggccatcgagatccgctctgtggagaccggccacctggatggagtcttcatgcacaagagggcccagaggctgaagttcctgtgtgaaagaaatgacaaggtgttctttgcctctgtgcgcagcggcggcagcagccaggtgtacttcatgaccctgggccgcaccagcctgctgtcctggtag

SEQ ID NO: 84576 - DNA, 3513 bp, Artificial Sequence
  derived and/or modified sequence
gtgtacaagggccgccacgtgaagacaggccagctggccgccatcaaggtgatggatgtgacagaagatgaggaggaggagatcaagctggagatcaacatgctgaagaagtacagccaccacaggaacatcgccacctactacggggccttcatcaagaagagccccccaggccatgatgaccagctgtggctggtgatggagttctgtggggccggcagcatcacagacctggtgaagaacaccaagggcaacaccctgaaggaggactggatcgcctacatcagccgggagatcctgcggggcctggcccacctgcacatccaccacgtgatccaccgggacatcaagggccagaatgtgctgctgacagaaaatgctgaggtgaagctggtggactttggagtgtctgcccagctggacagaacagtgggcagaagaaacaccttcatcggcaccccctactggatggcccctgaggtgattgcctgtgatgagaacccagatgccacctatgactacagaagtgacctgtggagctgtggcatcacagccatcgagatggccgagggcgccccacccctgtgtgacatgcaccccatgagggccctcttcctgatccccagaaatcctccaccccggctgaagagcaagaagtggagcaagaagttcttctccttcatcgagggctgcctggtgaagaactacatgcagaggcccagcacagagcagctgctgaagcaccccttcatccgggaccagcccaatgaaaggcaggtgcgcatccagctgaaggaccacatcgacaggaccaggaagaagagaggagagaaggatgaaacagaatatgagtacagcggcagcgaggaggaggaggaggaggtgcctgagcaggagggggagcccagcagcatcgtgaatgtgcctggagagagcaccctgcggcgggacttcctgcggctgcagcaggagaacaaggagaggtctgaggccctgcggcggcagcagctgctgcaggagcagcagctgcgggagcaggaggagtacaagaggcagctgctggccgagcggcagaagagaattgagcagcagaaggagcagaggcggcggctggaggagcagcagaggcgggagcgggaggcccggcggcagcaggagcgggagcagaggagaagagagcaggaggagaagaggcggctggaggagctggagaggaggaggaaggaggaggaggagcggcggcgggcagaggaggagaagagaagagtggagcgggagcaggagtacatccggcggcagctggaggaggagcagaggcacctggaggtgctgcagcagcagctgctgcaggagcaggccatgctgctgcatgaccaccggcggccccacccccagcacagccagcagcccccaccaccccagcaggagaggagcaagcccagcttccacgcccctgagcccaaggcccactatgagcctgctgaccgggcccgggaggtggaggaccgcttcaggaagaccaaccacagcagccctgaggcccagagcaagcagacaggccgggtgctggagccccctgtgcccagccgctctgagagcttcagcaatggaaattctgagagcgtgcacccagccctgcagaggcctgctgagccccaggtgcctgtgaggaccaccagccgcagccctgtgctgagcagaagagacagccccctgcagggcagcggccagcagaacagccaggccggccagaggaacagcaccagcattgagccccggctgctgtgggagcgggtggagaagctggtgccccggcccggcagcggcagcagcagcggcagcagcaacagcggcagccagcccggcagccaccctggcagccagagcggcagcggggagcgcttccgggtgcgcagcagcagcaagtctgagggcagccccagccagaggctggagaatgctgtgaagaagccagaggacaagaaggaggtgttccggcccctgaagccagctgacctgacagccctggccaaggagctgcgggctgtggaggatgtgcggcccccccacaaggtgacagactacagcagcagcagcgaggagagcggcaccacagatgaggaggatgatgatgtggagcaggagggcgcagatgagagcaccagcggccctgaggacaccagggctgccagcagcctgaacctgagcaatggagaaacagagagcgtgaagaccatgattgtgcatgatgatgtggagagcgagcccgccatgacccccagcaaggagggcaccctgattgtgcggcagacccagagcgccagcagcaccctgcagaagcacaagagcagcagcagcttcacccccttcatcgacccccggctgctgcagatcagccccagcagcggcaccaccgtgacctctgtggtgggcttcagctgtgatggcatgaggcctgaggccatccggcaggaccccaccaggaaaggatctgtggtgaatgtgaaccccaccaacacccggccccagagcgacaccccagagatcaggaagtacaagaagcgcttcaacagcgagatcctgtgtgccgccctgtggggcgtgaacctgctggtgggcacagagagcggcctgatgctgctggacaggagcggccagggcaaggtgtaccccctcatcaacagaagacgcttccagcagatggatgtgctggagggcctgaatgtgctggtgaccatcagcggcaagaaggacaagctgcgggtgtactacctgtcctggctgaggaacaagatcctgcacaatgaccctgaggtggagaagaagcagggctggaccaccgtgggggacctggagggctgtgtgcactacaaggtggtgaagtatgaaagaatcaagttcctggtgattgccctgaagagctctgtggaggtgtatgcctgggcccccaagccctaccacaagttcatggccttcaagagctttggagagctggtgcacaagcccctgctggtggacctgactgtggaggagggccagaggctgaaggtgatctacggcagctgtgccggcttccacgctgtggatgtggacagcggctctgtgtatgacatctacctgcccacccacatccagtgcagcatcaagccccacgccatcatcatcctgcccaacacagatggcatggagctgctggtgtgctatgaagatgagggcgtgtatgtgaacacctacggccgcatcaccaaggatgtggtgctgcagtggggcgagatgcccacctctgtggcctacatccgcagcaaccagaccatgggctggggcgagaaggccatcgagatccgctctgtggagaccggccacctggatggagtcttcatgcacaagagggcccagaggctgaagttcctgtgtgaaagaaatgacaaggtgttctttgcctctgtgcgcagcggcggcagcagccaggtgtacttcatgaccctgggccgcaccagcctgctgtcctggtag

SEQ ID NO: 84577 - DNA, 3720 bp, Artificial Sequence
  derived and/or modified sequence
atggccaacgacagccccgccaagagcctggtggacatcgacctgtcctccctgagagaccctgcaggaatcttcgaacttgttgaagtggtgggaaacggcacctacggacaggtgtataaagggcgccatgtaaagacaggacagctggcggccataaaggtgatggacgttacagaagacgaggaagaggagatcaaactggaaattaacatgctgaaaaagtatagtcaccaccgcaacatcgccacctattatggagccttcataaaaaaaagtccaccgggccacgacgaccagctgtggctggtgatggagttctgcggcgcaggttctattaccgacctggtcaagaacaccaaagggaataccctgaaagaggactggatcgcctacatttccagggagatcctccgcgggctggcccacctccacattcaccatgtgatccatcgcgatattaagggacaaaacgtgcttcttaccgagaacgcagaggtgaagctggttgacttcggggtctctgctcagctggaccggactgtggggcgcagaaatacctttattggtaccccttattggatggcccccgaggtaattgcctgtgacgaaaacccagatgctacctacgactaccgttcggatctgtggagctgcggaattactgctatcgagatggcagaaggggccccaccactctgcgatatgcatcccatgagagccctgttcctcatcccccggaacccaccccccaggttgaaatccaagaagtggtccaagaagtttttctccttcatcgaaggctgtctcgtcaagaactatatgcagaggccatctactgagcagctactgaagcatcccttcatcagagatcagccaaacgagcggcaggtgaggatacagctgaaagaccatatcgatcgaaccagaaaaaaacgcggagagaaagacgaaactgagtatgagtactccgggagcgaagaagaggaggaggaagtgcccgagcaggaaggggaacccagtagcatagtcaatgtcccgggagagtccaccttaaggagagacttcctccgattgcagcaggagaacaaagaaaggagcgaagctctcaggagacagcagctgctgcaagaacaacagttgagggagcaggaagagtacaaacgacagcttctcgcggagagacagaaaaggattgagcagcagaaggaacaaagacgcagacttgaggaacagcagcgccgagagagagaggctcgaaggcagcaggagcgcgagcagcggagaagggagcaagaggaaaaacggaggctggaggaattagagcggcggcgcaaggaggaggaggagcggcgccgcgctgaggaggagaagcggagggtggagagagagcaggaatacattaggcgccaactcgaagaggagcaacgccacctcgaagttctgcagcagcagctactgcaggagcaggcaatgctgctggagtgccggtggagggaaatggaagaacaccgtcaggccgagcggctgcagagacaactgcaacaggagcaagcctacttacttagcctgcaacacgaccaccggcggccacatccccagcactcacagcagccaccaccacctcagcaggagaggtccaagccatcttttcacgctcccgagcctaaagctcattatgagccagctgatagggccagggaagtggaggacagatttcggaaaaccaaccactccagccccgaggctcagtcgaagcagactggaagagtgctcgagcctccagtcccctcccgatccgagtccttctccaatggtaactctgagagcgtgcacccagctctgcagagacccgcagagccccaggtccccgtccggaccacatcgcgaagccctgtgctgtctcggagagacagcccccttcagggttcagggcagcagaattcccaggctggccagcggaacagcactagcatcgagccacggcttctatgggagagggtagaaaaattggtgcctcgacccggctccggctcatcttccggctcttctaactctggttcccagcccggtagtcatcccggaagccaaagcgggtcaggagaaaggttccgggtacggtctagttccaaaagcgaaggttcccctagtcagcgcttggaaaatgctgttaagaaacccgaggacaaaaaagaagtgtttagaccacttaaacccgcggacttgacagccctggcaaaagagcttcgtgctgttgaggacgttcgcccacctcacaaggtgaccgactattcctccagtagcgaggaaagcggaacgacagacgaggaagatgacgacgtggaacaggagggggccgatgagtcgacttcaggaccagaagacacaagagctgcatcctccctaaacttaagtaacggcgaaacagagtcagtgaaaactatgatcgttcatgatgacgttgagtcagagcctgcaatgacacctagtaaagaagggacccttatcgtacggcagacacagagcgcaagtagcacgctgcagaagcacaagtctagctcatcatttacgcctttcatcgacccaaggctcctacaaatttctccttccagtggaactactgtaacttccgtcgtgggctttagctgcgacggtatgcgcccagaggcgattcggcaggatcccacaaggaaaggcagtgtggtaaatgtgaatccaaccaacacacgtccccaatcagacacaccagaaatcaggaaatacaagaagcgatttaacagtgagatcctctgtgcagcattatggggcgtgaacctcctcgtggggactgaatctggcctaatgttgttggaccgctccggtcagggtaaagtgtacccactgattaataggcgccggttccagcagatggacgtgttggagggactaaacgtgcttgttactatcagcggcaagaaagacaaactgcgggtgtactacttgtcttggcttaggaacaaaattttgcacaatgacccagaggttgagaagaagcaaggctggacgactgtgggtgacttggagggatgcgtgcattataaggtggtgaaatatgagagaattaagtttttagtgattgccttaaagagttctgtggaagtctatgcctgggcccctaagccctaccacaagtttatggcatttaagagcttcggggaactagttcacaagccgttgcttgtggatctgaccgtggaagaaggtcaaaggttaaaagtaatatacgggagctgcgctggctttcatgcggtcgatgtggactccggatctgtatatgacatctatctccccacccacatccagtgctctattaagccacacgccatcattatattgcctaacaccgacggtatggagctcctcgtttgttacgaggacgagggggtatacgtgaatacttacgggcgtataacgaaagatgttgtactccaatggggcgagatgccaaccagcgttgcttatatcaggagcaaccagaccatgggttggggtgaaaaagccattgaaattcgcagcgtcgaaactggtcacctggacggcgtattcatgcacaaacgagctcagagattgaagttcctgtgtgagcggaatgacaaggttttcttcgctagcgtgaggtccggcggcagctcacaggtttacttcatgacattagggcgaaccagcttactgtcatggtag

SEQ ID NO: 84578 - DNA, 3513 bp, Artificial Sequence
  derived and/or modified sequence
gtgtacaagggccggcacgtgaagaccggccagctggccgccatcaaggtaatggacgtaacagaagacgaggaggaggagataaaactcgagatcaacatgctgaagaaatactcacaccatcggaacatcgctacttactatggcgccttcataaagaagagccctcctgggcacgacgatcagctttggctcgtaatggagttttgtggtgccggcagcattactgacctcgtgaaaaacacgaagggaaacaccctgaaggaagactggatcgcctacatctctagggaaatcctgcggggcctggcccacttacatatccaccatgtgatccatagagatattaaaggacagaatgtccttctgacagagaatgctgaagtcaaactggtcgactttggtgtgagcgctcaactggacagaacggtcggtcgaaggaatacttttatcggaactccctattggatggcccctgaggtgatcgcctgtgacgaaaatcctgatgccacctacgattatcggtctgacctttggtcatgcggaatcaccgccatagagatggcggaaggagctccgcccctgtgtgacatgcaccctatgagagcattattcttaataccacgcaaccccccacctcgcctgaagtcaaaaaaatggtccaagaaattcttttcgtttatagaagggtgcctggtgaagaattatatgcagagacccagcactgagcaactgctgaagcatccctttatcagggaccagcctaatgaaagacaagtccggatacagctgaaggaccacatcgatcggacgaggaagaagaggggggagaaggatgagactgagtacgaatacagtggaagtgaggaggaagaggaggaagtccccgagcaagaaggggagccctcctccatcgtgaatgtgcctggtgagagcaccctccgacgcgatttcttgcgactccagcaggagaataaggaaaggtcggaagccctcaggcggcagcaactgctccaagaacagcagctgcgggagcaggaagagtataaacgccagctccttgctgagaggcagaaaaggattgagcaacaaaaagaacaaaggcgcagattagaagagcagcaacggagagaacgagaggccagaagacagcaggaacgggagcaaaggcgtcgcgaacaggaagaaaaacggagacttgaagagctcgaacggaggcggaaggaagaagaggagcggagacgcgctgaggaagagaagcggagggtggaaagagagcaagagtatataagacgtcaacttgaggaggagcagcgtcaccttgaggtgctccagcaacagctccttcaggagcaggcaatgctgctgcatgaccaccggcggcctcacccccagcacagccagcagcctcccccgccccagcaagagaggtctaagccttcctttcacgctccagaaccgaaggctcactatgagcccgccgaccgcgcccgcgaagtcgaagacaggttccgaaaaacgaaccacagttctcccgaagcccaatccaaacagaccgggagggtgctcgaaccaccagtgccttcgcgcagcgaatccttctcgaatggtaactcggagagtgtgcatccagccctgcagaggcctgctgagccgcaggtgcccgtccgaaccacttccaggtctcctgtactcagtcgccgcgattcccccctgcagggctcgggccagcagaattcacaggccggacagcggaattccacaagcattgagcctaggctcctttgggaacgtgtagaaaagctcgtccctagaccaggtagtggcagctcgtctggctcttctaacagcggctcccagcccggcagccaccctggaagccaaagcggctccggcgaacgctttagggtgcgaagcagcagcaaatctgaggggtcaccatcccagagactggagaatgccgtcaaaaagcctgaagacaaaaaggaagtgtttcgaccacttaagcctgcggacctcactgcattagccaaggagctccgtgcagtcgaggatgtccgaccaccacacaaggtcactgattatagctcctctagtgaagaatctggaaccaccgatgaggaagacgatgatgtggagcaagagggcgcagatgaatctacatcaggtccagaggacacccgagcggctagttcactgaatttaagcaacggcgagactgaatctgtcaaaaccatgatcgtgcatgacgacgtggaaagtgaacctgcaatgactcccagtaaagagggcacgttgattgttaggcaaacccagtccgcatcgagcaccctccagaaacataaatcgtccagcagcttcacgccatttatcgaccctaggctcctacagatcagcccatcttcagggaccactgtgacatctgtcgtggggttcagttgcgatggtatgaggcccgaagccatcagacaagaccccactagaaagggatccgttgtgaatgtgaacccgaccaacacaagaccacaatctgatactccggaaattcgcaagtacaagaagcggtttaattctgaaatcctgtgtgctgccctctggggggtgaacctgctcgtaggaaccgagtctggcctgatgctgctggatcggagcggccaggggaaggtgtatcccctcataaaccgacggcgttttcaacagatggacgttctcgaaggcctgaatgtgctcgtcactatatcaggcaagaaggataagcttcgcgtttattacctgtcttggctgagaaacaagattctccacaacgacccagaagtggagaagaagcaggggtggacaacagttggggatctggagggttgcgtgcattacaaagtggtcaaatatgaacgaatcaaattcctggtcatcgccctcaagagcagtgtagaagtgtatgcctgggcaccaaagccttatcacaagttcatggccttcaagagtttcggcgaactggtgcacaaacctctcctggtagacttaacggtggaggaagggcagcggttaaaagtaatctacggatcttgtgcaggatttcacgccgtggatgtggattcaggcagcgtatacgatatttacctgcctacccatattcagtgtagcatcaagccccatgctatcatcatcctgcctaacaccgatggcatggagctcctggtttgttacgaggacgagggcgtgtatgtgaatacatatggtagaatcacgaaggatgtcgtcctacagtggggcgagatgccaacaagtgttgcatatattcggtccaaccagaccatgggctggggggaaaaagcgatcgagatcaggagtgtggaaacaggccatttagacggcgtgttcatgcacaagcgggcccaacgactaaaattcctgtgtgagagaaatgacaaggttttctttgcttcggtcaggagcggaggtagctctcaggtgtacttcatgacattgggtcggacttccctcctctcttggtag

SEQ ID NO: 84579 - DNA, 4251 bp, Artificial Sequence
  derived and/or modified sequence
gtctataagggtcgacatgttaaaacgggtcagttggcagccatcaaagttatggatgtcactgaggatgaagaggaagaaatcaaactggagataaatatgctaaagaaatactctcatcacagaaacattgcaacatattatggtgctttcatcaaaaagagccctccaggacatgatgaccaactctggcttgttatggagttctgtggggctgggtccattacagaccttgtgaagaacaccaaagggaacacactcaaagaagactggatcgcttacatctccagagaaatcctgaggggactggcacatcttcacattcatcatgtgattcaccgggatatcaagggccagaatgtgttgctgactgagaatgcagaggtgaaacttgttgactttggtgtgagtgctcagctggacaggactgtggggcggagaaatacgttcataggcactccctactggatggctcctgaggtcatcgcctgtgatgagaacccagatgccacctatgattacagaagtgatctttggtcttgtggcattacagccattgagatggcagaaggtgctccccctctctgtgacatgcatccaatgagagcactgtttctcattcccagaaaccctcctccccggctgaagtcaaaaaaatggtcgaagaagttttttagttttatagaagggtgcctggtgaagaattacatgcagcggccctctacagagcagcttttgaaacatccttttataagggatcagccaaatgaaaggcaagttagaatccagcttaaggatcatatagatcgtaccaggaagaagagaggcgagaaagatgaaactgagtatgagtacagtgggagtgaggaagaagaggaggaagtgcctgaacaggaaggagagccaagttccattgtgaacgtgcctggtgagtctactcttcgccgagatttcctgagactgcagcaggagaacaaggaacgttccgaggctcttcggagacaacagttactacaggagcaacagctccgggagcaggaagaatataaaaggcaactgctggcagagagacagaagcggattgagcagcagaaagaacagaggcgacggctagaagagcaacaaaggagagagcgggaagctagaaggcagcaggaacgtgaacagcgaaggagagaacaagaagaaaagaggcgtctagaggagttggagagaaggcgcaaagaagaagaggagaggagacgggcagaagaagaaaagaggagagttgaaagagaacaggagtatatcaggcgacagctagaagaggagcagcggcacttggaagtccttcagcagcagctgctccaggagcaggccatgttactgcatgaccataggaggccgcacccgcagcactcgcagcagccgccaccaccgcagcaggaaaggagcaagccaagcttccatgctcccgagcccaaagcccactacgagcctgctgaccgagcgcgagaggtggaagatagatttaggaaaactaaccacagctcccctgaagcccagtctaagcagacaggcagagtattggagccaccagtgccttcccgatcagagtctttttccaatggcaactccgagtctgtgcatcccgccctgcagagaccagcggagccacaggttcctgtgagaacaacatctcgctcccctgttctgtcccgtcgagattccccactgcagggcagtgggcagcagaatagccaggcaggacagagaaactccaccagtattgagcccaggcttctgtgggagagagtggagaagctggtgcccagacctggcagtggcagctcctcagggtccagcaactcaggatcccagcccgggtctcaccctgggtctcagagtggctccggggaacgcttcagagtgagatcatcatccaagtctgaaggctctccatctcagcgcctggaaaatgcagtgaaaaaacctgaagataaaaaggaagttttcagacccctcaagcctgctgatctgaccgcactggccaaagagcttcgagcagtggaagatgtacggccacctcacaaagtaacggactactcctcatccagtgaggagtcggggacgacggatgaggaggacgacgatgtggagcaggaaggggctgacgagtccacctcaggaccagaggacaccagagcagcgtcatctctgaatttgagcaatggtgaaacggaatctgtgaaaaccatgattgtccatgatgatgtagaaagtgagccggccatgaccccatccaaggagggcactctaatcgtccgccagactcagtccgctagtagcacactccagaaacacaaatcttcctcctcctttacaccttttatagaccccagattactacagatttctccatctagcggaacaacagtgacatctgtggtgggattttcctgtgatgggatgagaccagaagccataaggcaagatcctacccggaaaggctcagtggtcaatgtgaatcctaccaacactaggccacagagtgacaccccggagattcgtaaatacaagaagaggtttaactctgagattctgtgtgctgccttatggggagtgaatttgctagtgggtacagagagtggcctgatgctgctggacagaagtggccaagggaaggtctatcctcttatcaaccgaagacgatttcaacaaatggacgtacttgagggcttgaatgtcttggtgacaatatctggcaaaaaggataagttacgtgtctactatttgtcctggttaagaaataaaatacttcacaatgatccagaagttgagaagaagcagggatggacaaccgtaggggatttggaaggatgtgtacattataaagttgtaaaatatgaaagaatcaaatttctggtgattgctttgaagagttctgtggaagtctatgcgtgggcaccaaagccatatcacaaatttatggcctttaagtcatttggagaattggtacataagccattactggtggatctcactgttgaggaaggccagaggttgaaagtgatctatggatcctgtgctggattccatgctgttgatgtggattcaggatcagtctatgacatttatctaccaacacatatccagtgtagcatcaaaccccatgcaatcatcatcctccccaatacagatggaatggagcttctggtgtgctatgaagatgagggggtttatgtaaacacatatggaaggatcaccaaggatgtagttctacagtggggagagatgcctacatcagtagcatatattcgatccaatcagacaatgggctggggagagaaggccatagagatccgatctgtggaaactggtcacttggatggtgtgttcatgcacaaaagggctcaaagactaaaattcttgtgtgaacgcaatgacaaggtgttctttgcctctgttcggtctggtggcagcagtcaggtttatttcatgaccttaggcaggacttctcttctgagctggtagaagcagtgtgatccagggattactggcctccagagtcttcaagatcctgagaacttggaattccttgtaactggagctcggagctgcaccgagggcaaccaggacagctgtgtgtgcagacctcatgtgttgggttctctcccctccttcctgttcctcttatataccagtttatccccattctttttttttttcttactccaaaataaatcaaggctgcaatgcagctggtgctgttcagattctaccatcaggtgctataagtgtttgggattgagcatcatactggaaagcaaacacctttcctccagctccagaattccttgtctctgaatgactctgtcttgtgggtgtctgacagtggcgacgatgaacatgccgttggttttattggcagtgggcacaaggaggtgagaagtggtggtaaaaggagcggagtgctgaagcagagagcagatttaatatagtaacattaacagtgtatttaattgacatttcttttttgtaatgtgacgatatgtggacaaagaagaagatgcaggtttaagaagttaatatttataaaatgtgaaagacacagttactaggataacttttttgtgggtggggcttgggagatggggtggggtgggttaaggggtcccattttgtttctttggatttggggtgggggtcctggccaagaactcagtcatttttctgtgtaccaggttgcctaaatcatgtgcagatggttct

SEQ ID NO: 84580 - DNA, 3720 bp, Artificial Sequence
  derived and/or modified sequence
atggctaatgactctcccgcaaagtcacttgtcgacatcgacctatcatcgttgagggaccctgcgggaatattcgaactggtggaggtagtcggcaacggcacttatggacaggtttataaagggaggcacgtgaagaccgggcaactggccgctatcaaagtcatggatgtcacggaggatgaagaagaagagatcaagttagagataaatatgttgaaaaaatactcacaccatcggaacattgccacatactacggagcatttattaagaagtcgccacccggtcacgacgatcagctatggctcgtgatggagttctgcggagcgggatcaatcacggaccttgtgaaaaataccaaaggaaacacactgaaagaggattggattgcctatattagcagagagattctccggggtttagctcatctacacatccaccacgtgattcatcgggatattaaaggccagaatgttctgcttacagaaaacgcagaggtgaagctggtcgatttcggcgtatctgctcagcttgatagaaccgttgggaggcgaaatacattcattggcaccccatactggatggcgcctgaggtgatcgcatgcgacgagaatcctgatgctacttacgattatcggtcagatctttggtcatgcggtatcacagctatcgaaatggccgagggagcacccccactgtgcgacatgcacccgatgcgcgcactcttcctgattccacgtaacccccctccaaggttgaagtctaaaaagtggtccaagaaatttttttctttcatagagggctgcctggtcaagaactacatgcagcgaccatcaactgaacagctgttaaaacatcccttcatacgggatcaacccaacgagcggcaggtgaggatccagcttaaggatcatatagatcgaactagaaagaagcgcggtgaaaaggatgagaccgaatatgaatacagtggatcagaggaggaagaggaagaagttcccgaacaggagggagagccatcttcgattgtgaacgtgcccggtgaatctactctccgccgagattttctcagactgcagcaggagaataaggagagatctgaagccctgcgaagacagcaactcctgcaagaacagcaactgagggagcaggaagaatacaaaaggcaacttctcgccgagagacagaagaggattgagcagcagaaagagcagaggcgccgtctggaggagcagcagcgacgcgagagagaggctcggaggcagcaggagagagagcagcggcgtcgggaacaggaggagaaaagacggctcgaggaactggagcgaaggcggaaggaagaagaggaaagacgacgggctgaagaagaaaagcgcagggttgagcgcgagcaagagtacattcgtaggcaactcgaggaagaacagaggcacctggaagtcctccagcagcagctgctgcaggagcaggctatgctgctggagtgccggtggagagaaatggaggagcacagacaggctgaacggctgcagcgacagctgcaacaggagcaggcttatctgttgagcctgcagcatgaccacagacggcctcaccctcagcactcccaacagccccctcctccccagcaggagagaagcaagccgagtttccacgccccagaacccaaggctcactacgaaccggctgatcgggcacgcgaagtagaagataggtttcggaagaccaatcattctagcccggaggcgcaaagtaagcagacagggcgtgtattggagccccctgtcccatcgcgcagcgaatctttttcaaacgggaattctgaatccgtgcaccccgctctgcagagacctgctgagccccaggtgccagtgcgcaccactagtcgttccccggtcttgagccggagggatagcccgctacagggcagtggccaacaaaattcgcaggcagggcagcggaattcaaccagtatcgaacccagacttttgtgggagcgagtggagaaactggtgcccaggccaggatctggctcttcttctgggtctagcaactcggggtcgcagcccggtagtcaccccggatcccaatccgggtcaggagagcgcttccgggtgcgtagcagctctaaatctgaaggtagtccatctcagaggctggaaaatgccgtgaagaagcccgaagacaagaaggaggtgttccgacccctaaagccggctgacctgaccgccctcgcaaaggaacttcgagccgtggaggacgttaggccccctcataaggtgactgactattcaagctcatcagaggagagtgggaccactgatgaagaggacgacgatgtggagcaagaaggggcagatgagtccacctcagggccagaggatacgagggctgccagcagcttgaatctttccaacggcgagaccgaatccgtgaagactatgattgtgcatgatgacgtcgagagtgaacctgcgatgacgcccagtaaagaaggaactctgatcgtccggcagacccaatcggcaagttccacattacagaaacacaaatcctcaagctccttcaccccgttcatagacccacgccttcttcaaatctccccctcttccggcactaccgtgacctctgttgtaggattttcttgtgacggaatgcgccctgaggctatccgtcaggaccctacaagaaaggggtccgtcgtcaacgtgaacccaacaaatacaagaccccagtcggacactccagagatacgaaagtataaaaagaggtttaacagcgaaattctgtgcgcagccctgtggggcgtgaacctgctcgtgggaaccgaatccggtctgatgctgttggaccgatcgggccaggggaaggtataccctctgattaaccggcgacggtttcaacagatggacgttctcgagggcctcaacgtcctggtcaccatcagcgggaagaaagataagctgcgcgtgtactatttgtcatggctcagaaataaaatactgcacaatgaccccgaggtcgagaaaaaacagggatggacgacggtcggagatctcgagggctgcgtgcactataaggtggtgaagtatgaacgcattaaatttctggttattgcattgaaaagctcggttgaggtgtatgcctgggcgcctaagccatatcacaagttcatggcattcaagtccttcggggaattggtacataaacccttgctagtggaccttaccgtggaagagggacaaaggctcaaagtgatttacggcagctgcgctgggttccatgcagtggacgtggatagtgggtccgtgtacgatatttaccttccaactcatattcaatgctccataaagccacacgccataataatcctgcccaataccgacggtatggagctcctagtgtgttacgaagacgagggcgtgtatgtaaatacttacggcagaattactaaggatgtggtcctccagtggggagagatgcccacctcagtggcgtacataagatccaaccagacaatgggctggggggagaaagcaatcgaaatcaggtctgtggagaccgggcacctggacggggtgtttatgcacaagagggcccagcgattgaaattcctgtgcgagcgtaatgataaggttttctttgccagcgtacgcagcggcggtagtagccaggtttatttcatgaccctggggagaacgagcctcctctcctggtag

SEQ ID NO: 84581 - DNA, 3513 bp, Artificial Sequence
  derived and/or modified sequence
gtgtacaagggaaggcatgtaaagacggggcaactcgctgccattaaggtgatggacgtaactgaggatgaagaagaggagatcaagctggagattaatatgttaaaaaaatattcacatcatagaaacatcgctacttattacggagctttcattaagaagagcccccctggccacgacgatcagttatggctggttatggaattttgtggtgcagggtcgattactgacctggtgaagaacaccaaaggcaatacattaaaagaggattggattgcctacattagcagagagatcctgagaggcttagcgcatcttcacattcaccacgtgatccaccgggacattaaaggtcaaaatgtgctgctgactgaaaacgctgaagtgaagcttgtcgactttggagtgagcgcacagctcgaccgtacggtcggaaggcgcaatactttcatagggacaccatactggatggccccagaagtgatagcgtgcgacgagaacccggatgccacctacgactaccgctccgatctctggagctgtggaataaccgctatcgagatggcagagggagcccctccattatgcgatatgcaccctatgcgggctctcttcttaataccgcgaaatccccctcccaggcttaagtccaagaaatggagtaaaaaatttttcagctttattgagggctgtctggtaaaaaattatatgcagcgcccttccacagagcagctgttgaaacatccgtttattcgcgaccaaccaaacgagcgccaggttcgcatccagctgaaagatcacatagatagaactagaaaaaaacgcggtgagaaggacgagacagaatacgaatactcaggctctgaagaagaagaggaggaagttcccgaacaggaaggcgagccatctagcatcgtaaatgtaccaggcgagagcactttgagacgcgacttccttaggttgcagcaggaaaacaaggaacgttcagaggccttaagaagacaacagcttttgcaggagcagcagctgagagagcaggaagagtacaaaagacaacttctggccgaaaggcagaagcggatcgaacagcaaaaagagcagcggcgaaggctggaggagcagcagcgaagagaaagggaagctcggaggcagcaagagcgcgagcagcggcgacgtgaacaagaggaaaaaaggagactggaagagttggaaagaaggcgcaaggaagaggaggagcggcgtcgggcagaggaggaaaaaaggcgcgttgagagggagcaggagtacatccgcagacaactcgaagaggaacagcgtcatctggaggttctccagcagcagctgctgcaggaacaagcaatgcttctgcacgaccatcgacgccctcacccacaacattctcagcaaccaccgcctccccagcaggaaagatctaaaccatcctttcacgctcctgaacccaaggcccattatgaacccgctgatagagcccgagaagtggaggacagatttcgcaagactaaccacagctcccccgaagcccagtcaaaacagacagggagagtgctcgagcctccagtgccatctaggagtgaaagtttctccaacgggaatagtgagtccgtccatcctgcgctgcagagacccgctgaaccacaggtccctgtgcgcacaacttcaagatctccggtcctgtcacggagggattcaccactgcagggcagcggacagcaaaatagccaggctggtcagcgtaattctacatcaattgagccaaggcttttgtgggagcgggttgagaagctggtgcctcgcccaggctcaggatcgagctctgggtcaagtaattccggctcccagccgggtagccatccaggttcccagtccggcagcggcgagagattcagggtcaggtctagtagcaaaagtgagggaagccccagccagcggctcgaaaacgcagtaaaaaagcccgaggataaaaaggaggtgtttaggcctctgaaacccgctgacctgacagctctggccaaggagcttagggctgtagaggacgtacgccctccacacaaggtaaccgactactcttccagtagcgaggagtctggaactaccgatgaggaggatgatgacgtggaacaagaaggtgccgacgagtctacctccggccctgaggatacgcgtgcagcgagttcccttaaccttagcaatggggagaccgagtctgtgaaaacgatgattgtgcacgatgatgttgagtccgagcccgctatgacgccgtctaaagaaggaacactgatcgtgcgccagacccagtctgcttcctctacactgcagaagcacaaatcctctagttcctttactccttttatcgacccacggctgttgcagatttccccctcgagtggaactactgtcacctcggtggtaggcttctcttgtgacggaatgcggccagaggccattcgccaggacccaactcgcaaaggctccgttgttaacgtgaaccccacaaatacacgaccccaatccgatacaccagagattagaaaatacaaaaagagatttaactccgaaatcctttgcgctgccctatggggagtgaatttgcttgtgggtacagaatcaggcctcatgcttctggatcggtcggggcagggaaaagtttaccccttaatcaatcgcagaagattccagcagatggatgttttggagggcctgaacgtgctggtgacgattagtggtaaaaaggataagcttcgagtatactacctcagctggttgcggaacaaaattctgcacaacgatcctgaggtggaaaagaaacagggatggacaacggtgggggatcttgagggatgtgtgcactacaaagttgtcaagtacgaaagaattaaattccttgtgatcgccctcaaatcatccgtggaggtctatgcctgggctccaaaaccatatcacaaattcatggccttcaagtcgttcggagagttggtccataaaccgctgctggtcgatcttaccgtggaagagggtcaacgattaaaagtaatctacgggagctgtgccggttttcatgccgtcgacgtggatagcgggtcagtgtatgacatatatctcccaacccatattcagtgctccatcaaaccccacgccatcatcattctacctaataccgacggcatggaactgcttgtttgttacgaggacgagggggtctatgtgaatacctacggacgtatcacaaaagacgtcgtgctacaatggggtgaaatgcctacaagtgtggcttacatacggtccaatcaaactatgggctggggcgaaaaggctatcgagatacgcagtgtggagaccggtcacctcgatggagtcttcatgcacaagagggcccaacgactcaagtttctgtgtgaacggaacgacaaagtgtttttcgccagtgtgcggtccggcggatcatcgcaagtgtatttcatgaccctgggtcgaacatcgttgctttcatggtag

SEQ ID NO: 84582 - protein, 944 aa, Artificial Sequence
  derived and/or modified sequence
MLDSFSQESTLPFREARKRTSFQPVQVWRNFTASQTTESPACSGASLGEMTAWTMGARGLDKRGSFFKLIDTIASEIGELKQEMVRTDVNLENGLEPAETHSMVRHKDGGYSEEEDVKTCARDSGYDSLSNRLSILDRLLHTHPIWLQLSLSEEEAAEVLQAQPPGIFLVHKSTKMQKKVLSLRLPCEFGAPLKEFAIKESTYTFSLEGSGISFADLFRLIAFYCISRDVLPFTLKLPYAISTAKSEAQLEELAQMGLNFWSSPADSKPPNLPPPHRPLSSDGVCPASLRQLCLINGVHSIKTRTPSELECSQTNGALCFINPLFLKVHSQDLSGGLKRPSTRTPNANGTERTRSPPPRPPPPAINSLHTSPRLARTETQTSMPETVNHNKHGNVALPGTKPTPIPPPRLKKQASFLEAEGGAKTLSGGRPGAGPELELGTAGSPGGAPPEAAPGDCTRAPPPSSESRPPCHGGRQRLSDMSISTSSSDSLEFDRSMPLFGYEADTNSSLEDYEGESDQETMAPPIKSKKKRSSSFVLPKLVKSQLQKVSGVFSSFMTPEKRMVRRIAELSRDKCTYFGCLVQDYVSFLQENKECHVSSTDMLQTIRQFMTQVKNYLSQSSELDPPIESLIPEDQIDVVLEKAMHKCILKPLKGHVEAMLKDFHMADGSWKQLKENLQLVRQRNPQELGVFAPTPDFVDVEKIKVKFMTMQKMYSPEKKVMLLLRVCKLIYTVMENNSGRMYGADDFLPVLTYVIAQCDMLELDTEIEYMMELLDPSLLHGEGGYYLTSAYGALSLIKNFQEEQAARLLSSETRDTLRQWHKRRTTNRTIPSVDDFQNYLRVAFQEVNSGCTGKTLLVRPYITTEDVCQICAEKFKVGDPEEYSLFLFVDETWQQLAEDTYPQKIKAELHSRPQPHIFHFVYKRIKNDPYGIIFQNGEEDLTTS

SEQ ID NO: 84583 - DNA, 2835 bp, Artificial Sequence
  derived and/or modified sequence
atgctggactccttctcacaagagtccacgctccctttcagagaagccagaaaacgaacgagcttccaacccgtccaagtgtggcggaacttcaccgcctctcagactactgagagccctgcttgtagcggcgcctctctgggtgaaatgaccgcttggaccatgggggctagaggactggacaagaggggtagctttttcaagctgattgacactatcgcctccgaaattggagagctaaaacaggagatggtgcgcacggatgtgaacctggagaacgggctggagccggcagagacccatagtatggtaaggcacaaggacggcggatactccgaggaagaggacgttaagacttgtgctagggactccgggtatgactcattatccaacaggttgtctattttggatcgtctattgcatacacacccaatctggcttcagctgagcctgtccgaggaggaggccgccgaggtactgcaggcccaacccccaggcatctttttagtgcacaagtcaacgaagatgcaaaagaaagtgctctccttacgactgccctgtgaattcggggcgccgctgaaggagttcgcaatcaaggagagcacatacaccttttccctggaaggatccggaatttctttcgccgatctgttcagactgatcgccttctattgtatctctagagatgtgttacccttcaccttgaaacttccttacgcaatcagcacagccaaaagcgaggcacagctggaggaattggcccagatgggcctgaatttctggtctagtcctgctgacagcaaaccaccaaacctgccccctccccaccggccactttcaagcgacggcgtctgcccggctagtttaaggcaattgtgtctcattaacggtgtacactccatcaaaacaaggacgccttccgagctggagtgtagccagacgaacggtgctctgtgctttatcaatccgcttttcctgaaggttcattcacaagacctgtcgggcgggcttaagagacctagtacaagaacccccaacgccaacggcaccgagcggactaggtctcctcctccacgccctccacccccagccattaactccctgcacacttcccctcgcctggcccgcaccgagacccagacctctatgcctgaaacagtgaatcacaacaaacatggaaacgtagctctgcccgggacaaaaccaacccccatccccccccctcggctaaaaaaacaggcatccttccttgaagccgaggggggcgccaaaaccttgtcaggcggccgacctggggccgggcccgaactggagctcgggacagccgggtctccaggcggcgccccccctgaggcagctcctggtgactgcacacgagctccaccaccttcctctgagagtagaccaccatgtcatggtggccgccaacgtctctccgacatgtctatctcgacatcctctagcgactcccttgagttcgaccgatccatgcccctttttggttatgaggcagacacaaattcgagcttagaggactacgagggcgagtcagatcaggaaactatggcccctcccataaagtcaaagaagaagcgctccagcagcttcgtcctaccaaaactcgttaaatctcaactacagaaggtgtctggcgtgttttcctcattcatgactcccgagaaacgaatggtccggagaatagccgagctgagccgggacaaatgcacctacttcggttgcctcgtgcaggactatgtgtcattcctccaggagaacaaagagtgccatgtctcatcaacagatatgctgcaaacgattagacagttcatgacccaagtcaagaattatttatctcagtccagtgaattagatccccccatcgaatccttgatccccgaggaccagatagacgtggtcctggagaaagcaatgcataagtgcattctgaagccgttgaaaggtcacgtcgaagctatgctgaaagacttccatatggccgatgggtcgtggaaacagctcaaggagaacctgcagctggtgaggcagcggaatcctcaggagctgggcgtgttcgcacctacccccgatttcgtggacgtcgagaagatcaaggtgaagtttatgactatgcagaagatgtattcaccggagaagaaagtaatgctcctgctgagagtgtgtaagctgatttacacggttatggagaataactctggtagaatgtacggggcagacgactttctgccagtgctgacctacgtaatcgctcagtgtgacatgttggaattggatactgagattgaatacatgatggaactgctagatcccagcctattgcacggagagggcggctattaccttactagcgcctatggcgctttgtccctgattaaaaacttccaagaagagcaagcggctcggctcctgtcaagtgagaccagggacactctccggcaatggcataaaaggagaacaacaaacaggactattccctcagtggatgacttccagaactatctccgggttgcttttcaggaggtcaattccggatgtaccggcaaaacacttctggtgagaccttacattacaaccgaggacgtctgtcaaatatgtgctgagaagttcaaggtgggagaccccgaggaatatagtctctttctatttgtggatgagacttggcagcagctcgcagaagatacctatccccagaagatcaaggccgaattacacagccgacctcaaccccatatctttcactttgtatacaagagaatcaaaaacgatccttatggtatcatctttcagaacggagaggaagacctcaccacatcttag

SEQ ID NO: 84584 - DNA, 2835 bp, Artificial Sequence
  derived and/or modified sequence
atgctggacagcttcagccaggagagcaccctgcccttccgggaggccaggaagaggaccagcttccagcctgtgcaggtgtggaggaacttcaccgccagccagaccacagagagccctgcctgcagcggggccagcctgggggagatgacagcctggaccatgggcgcccggggcctggacaagaggggcagcttcttcaagctgattgacaccatcgccagcgagattggagagctgaagcaggagatggtgaggacagatgtgaacctggagaatggcctggagcctgctgagacccacagcatggtgcgccacaaggatggcggctacagcgaggaggaggatgtgaagacctgtgcccgggacagcggctatgacagcctgagcaaccggctgagcatcctggaccggctgctgcacacccaccccatctggctgcagctgagcctgtctgaggaggaggccgctgaggtgctgcaggcccagcccccaggcatcttcctggtgcacaagagcaccaagatgcagaagaaggtgctgagcctgcggctgccctgtgaatttggagcccccctgaaggagtttgccatcaaggagagcacctacaccttcagcctggagggcagcggcatcagctttgctgacctcttccggctgattgccttctactgcatcagcagagatgtgctgcccttcaccctgaagctgccctatgccatcagcacagccaagtctgaggcccagctggaggagctggcccagatgggcctgaacttctggagcagccctgctgacagcaagccacccaacctgcccccaccccaccggcccctgagcagtgatggagtgtgcccagccagcctgcggcagctgtgcctgatcaacggggtgcacagcatcaagaccaggaccccatctgagctggagtgcagccagaccaatggagccctgtgcttcatcaaccccctcttcctgaaggtgcacagccaggacctgagcggcggcctgaagaggcccagcaccaggaccccaaatgccaacggcacagagaggaccaggagccccccaccccggcccccacctccagccatcaacagcctgcacaccagcccccggctggccaggacagagacccagacctccatgcctgagaccgtgaaccacaacaagcacggcaatgtggccctgcccggcaccaagcccacccccatccccccaccccggctgaagaagcaggccagcttcctggaggccgagggcggggccaagaccctgagcggcggccggcctggagctggccctgagctggagctgggcacagctggcagccctggaggagcccctcctgaggccgcccctggggactgcacccgggcccccccacccagcagcgagagcaggcctccctgccacggcggccggcagaggctgagtgacatgagcatcagcaccagcagcagtgacagcctggagtttgaccgctccatgcccctgtttggctatgaggccgacaccaacagcagcctggaggactatgaaggagagagtgaccaggagaccatggccccacccatcaagagcaagaagaagaggagcagcagctttgtgctgcccaagctggtgaagagccagctgcagaaggtgtctggagtcttcagcagcttcatgaccccagagaagaggatggtgagaagaattgctgagctgagccgggacaagtgcacctacttcggctgcctggtgcaggactatgtgtccttcctgcaggagaacaaggagtgccacgtgagcagcacagacatgctgcagaccatccggcagttcatgacccaggtgaagaactacctgagccagagcagcgagctggacccccccatcgagagcctcatccctgaggaccagattgatgtggtgctggagaaggccatgcacaagtgcatcctgaagcccctgaagggccacgtggaggccatgctgaaggacttccacatggctgatggctcctggaagcagctgaaggagaacctgcagctggtgcggcagaggaacccccaggagctgggcgtgtttgcccccaccccagactttgtggatgtggagaagatcaaggtgaagttcatgaccatgcagaagatgtacagccctgagaagaaggtgatgctgctgctgcgggtgtgcaagctgatctacacagtgatggagaacaacagcggccgcatgtacggggctgatgacttcctgcctgtgctgacctacgtgattgcccagtgtgacatgctggagctggacacagaaattgagtacatgatggagctgctggaccccagcctgctgcacggggagggcggctactacctgaccagcgcctatggagccctgagcctcatcaagaacttccaggaggagcaggccgcccggctgctgagcagcgagacccgggacaccctgcggcagtggcacaagaggaggaccaccaacagaaccatccccagcgtggatgacttccagaactacctgcgggtggccttccaggaggtgaacagcggctgcaccgggaagaccctgctggtgcggccctacatcaccacagaagatgtgtgccagatctgtgccgagaagttcaaggtgggggaccctgaggagtacagcctcttcctgtttgtggatgagacctggcagcagctggccgaggacacctacccccagaagatcaaggccgagctgcacagccggccccagccccacatcttccactttgtgtacaagaggatcaagaatgacccctacggcatcatcttccagaatggagaggaggacctgaccaccagctag

SEQ ID NO: 84585 - DNA, 2835 bp, Artificial Sequence
  derived and/or modified sequence
atgctggacagcttcagccaggagagcaccctgcccttccgggaggctcggaaacgaacaagcttccagcctgttcaggtatggaggaatttcactgcctcgcaaacgactgagagccccgcctgtagtggggctagcctgggagagatgacggcttggaccatgggagcacgagggctggataagcgcggatcgttttttaaactcattgatactattgcatctgagatcggcgagttaaagcaggagatggtccggactgatgtgaacctcgaaaacggccttgaacctgccgaaactcactccatggtgcgacacaaagacggcggttattcggaggaggaggatgtgaagacgtgcgcgcgtgatagtggttatgacagcttgagcaatagactttccatcttggaccgcctcctgcacacacaccctatctggttacagctgtctttatccgaagaagaggcggccgaggtgctgcaggcgcagcctcccgggattttcctggtacataagtcgactaagatgcagaaaaaagttctctcactacggctgccttgcgagttcggcgccccactgaaagaattcgccataaaagaatccacctatacgttttccctggaggggtccggcatcagcttcgcagacctgttcagactgatcgccttctattgtatcagtcgggatgtgctcccctttaccctgaagcttccctatgccatcagcactgccaagtccgaagcccagcttgaagagttggctcagatgggactcaatttctggtcgagccctgccgactcaaagcctccaaacctgcctcctcctcacagacctttgtcatcagatggcgtttgccctgcctccttgcggcaactgtgcctaatcaatggcgtgcactccatcaagacaaggactccctcggagctggaatgttctcagacgaatggagccctgtgtttcattaatcctcttttcttgaaggtgcatagtcaggatctgtccggaggattgaaaagaccttcaactcgtacccccaacgccaatggcacggaacgtacccggtcgcctcctcctcgacccccaccgccagcgattaactctctgcatacaagtcccaggttggcgagaacagagacgcagactagcatgcccgagacggtgaatcataataaacatggcaacgttgcgctgccagggaccaagcctacaccaatccctccacctagactgaagaagcaagccagcttcctggaagctgagggtggcgctaagaccctaagcggcgggcggcccggtgcaggtccggaactggagctcgggacagccggaagcccaggcggggctccgcctgaggctgccccgggggattgcacacgcgccccccccccctccagtgagtcccgacccccttgccatggcgggcgccagagactttccgatatgtcaatttctaccagctcaagtgacagccttgaatttgacagaagtatgccactatttggctacgaagcagacaccaacagttcactcgaggattacgagggcgagtccgatcaagaaactatggcacccccaatcaaatccaaaaaaaaaagaagctcttctttcgttctgcctaagcttgtgaagtctcagctgcaaaaagtgtccggggttttcagctcttttatgacacctgaaaaacgcatggtgcgcagaattgccgagctgtctcgcgataaatgcacttacttcggctgcctcgtgcaggactatgtttcctttttgcaagagaataaggagtgccatgtgagctccacggacatgcttcagaccattcgccagtttatgacccaggtcaagaattacctgtcacagtcgagtgagctggaccctccgattgagtcacttatacccgaggatcagattgacgtcgtgctcgagaaggccatgcataaatgcattctgaagcccctgaaggggcacgtggaagctatgctgaaagactttcacatggccgacgggtcttggaagcaactgaaagagaacctacagctcgtacgccagcgaaacccccaggaactgggggtctttgcacccacacccgacttcgtagacgtagaaaaaattaaagtgaagttcatgacgatgcagaagatgtactctcctgagaaaaaggtgatgctcctccttcgcgtatgtaaactcatttacacggtcatggaaaacaacagcggtagaatgtacggtgccgacgattttctgccagtgcttacctacgtcattgcccagtgcgacatgcttgagcttgacacagagatcgaatacatgatggagcttcttgatccctccctgttacacggagagggcggttactatcttacatccgcctatggcgcactttctctgattaaaaacttccaggaggaacaggcggctagactgttatcctcagaaactagagacaccctgcggcagtggcataaacgccgcacaaccaaccggaccattccgagtgttgatgattttcagaattacctcagagttgcctttcaggaagtgaacagcggatgcactggcaagaccttgctggtcagaccttacattactacagaggacgtatgccagatttgcgccgagaaatttaaagttggcgaccctgaggaatattccctcttcttattcgtcgacgagacttggcagcagcttgccgaggacacttacccacagaaaatcaaggctgaactccactccagaccacagccccatatcttccacttcgtttataagcgcattaaaaacgatccttacggcatcatcttccagaacggggaggaggatctcacaacatcatag

SEQ ID NO: 84586 - DNA, 2835 bp, Artificial Sequence
  derived and/or modified sequence
atgcttgattccttcagtcaggagtccaccctgccctttcgggaggccagaaaaagaacaagctttcagccagtgcaggtgtggcgaaattttacagcctctcaaacaactgagagccctgcttgtagcggggcaagcctgggcgagatgacagcttggactatgggcgcacggggactggacaaaagaggcagcttctttaagttaattgatactatagcctccgagatcggggagctgaagcaggaaatggtgcgtacagatgtgaatcttgagaatggtctggaacctgcagaaactcactctatggttcgccacaaagatggcggatactctgaggaagaagacgtgaagacttgcgctagagactccgggtacgactccctttcgaatcgtctgtccatactggaccgtttgctgcatacgcaccccatttggctgcagctgtctctaagcgaagaggaggccgctgaggttctgcaggcccagccccctggaattttcctggtccacaagtcaacaaagatgcagaaaaaagtcctgagtctgcgtctgccgtgcgaatttggagctccattaaaagagttcgccattaaagaatctacctacacattctcattggaaggaagcggcatcagcttcgctgacctgttccggctgatcgctttttactgcattagccgcgatgtgctgcccttcactttaaaactaccctatgcgattagtacagctaagtcagaagcacagcttgaagagctcgctcagatggggctgaatttctggtcctctcctgctgactctaaacccccaaatctgcctccaccacaccgacctttgtcttctgacggagtgtgtccggctagtctcaggcagctgtgcctcatcaacggtgtccactcaatcaaaacaagaacacctagcgagctcgaatgctcccagacaaatggcgcactctgttttatcaatcctcttttccttaaagtgcactcacaggacctctctggaggactgaagcgacctagcactcgcacaccaaatgcaaacggtactgaacggacccgcagccctccccctcgaccgcctccgcctgcaataaattctctgcataccagtcctagattggccagaactgagacccagacatccatgcctgagactgttaatcacaataaacacggcaacgtcgccctgcccggtacaaagcctacccctatacccccacccaggctgaaaaaacaggcttcattcctggaagctgagggcggagccaagaccctgtcaggtggccgacccggtgcgggtcccgaactggaactgggcactgccggaagcccaggaggagcacctcccgaagctgctccgggagactgcacacgggcaccccctccatcttccgaatcaagacctccttgccatggaggccgtcagcgattgtcagatatgtcaatcagcacgtcatcgagcgactctttggagttcgatcggtccatgccactgttcgggtatgaagccgacactaactcgtcccttgaggactatgaaggggagtctgatcaggaaactatggcccctcctatcaagagcaagaagaagaggagttcatcatttgtccttcctaagttggttaaaagccagttgcaaaaggtttccggcgtattctcctcgttcatgacccccgagaaacgaatggttaggaggatcgctgagctcagcagggacaagtgtacatattttggctgcctcgtgcaggactacgtgtctttcttacaggaaaacaaagaatgtcatgtgagctccaccgatatgctgcagaccattagacagttcatgactcaggttaagaattacctctcacaaagctccgagctcgatcccccaatcgaatcgctgatacctgaggaccagatcgacgtggtactggaaaaggccatgcacaagtgtatactaaaaccattgaaagggcacgtggaagcgatgcttaaagatttccacatggctgacggttcatggaagcagctcaaagagaatctccagctggtgaggcaacgtaatcctcaagagctgggcgtctttgcccctaccccagacttcgtggacgtggagaaaatcaaggtgaaattcatgaccatgcagaaaatgtatagtccagagaagaaagtgatgctgttgttaagagtgtgcaagctcatatacaccgtcatggagaacaacagcggcagaatgtatggagcagatgattttctgcccgtcctgacgtacgtgatagcccagtgcgacatgctggagttggacacagaaatcgaatacatgatggagctcctggatccatctcttttgcatggggaagggggatactatctaacaagcgcttacggagccctatcactcatcaaaaactttcaggaagagcaggcagcaaggctattgagctccgagactagagacacattgaggcagtggcacaagcggcgtaccacaaacagaaccattcctagtgttgatgatttccagaactacctgcgagtggcttttcaggaagtgaattccggctgcacaggcaaaaccctacttgttcggccttacatcacaaccgaggatgtgtgtcagatctgtgctgaaaagtttaaggttggagacccggaggaatattctctcttcttatttgtcgacgaaacctggcagcaattggccgaggatacttatccgcagaaaattaaagctgagcttcatagtcgcccacagccacatatttttcacttcgtctacaagaggattaagaatgacccctacggaataatattccaaaacggcgaagaagacctaacaacatcctag

SEQ ID NO: 84587 - DNA, 4505 bp, Artificial Sequence
  derived and/or modified sequence
ctttcagtggtgttgttgaaagggcttggcagctcccaaatgtttgcagtgtccttagtcctatgagggctgccttcttcttcttcttcttctttttttttttttttttttgctagcttttagctagtatctggaaacatctactggacatgttggactcattttctcaagaatccactttacccttcagggaagccaggaaaagaacaagcttccaaccggtacaagtctggaggaatttcacagcctctcaaactacggagtccccggcgtgcagtggagcctcgctgggggaaatgacagcttggaccatgggcgcccgcggtctggacaagcgaggaagtttctttaagctcattgacacaattgcctcggagatcggagaactgaaacaggagatggtgcggacagatgtcaacctggaaaatggcctggaacccgctgaaacccacagcatggtaagacacaaggatggtggctattccgaggaagaggacgtgaagacctgtgcccgggactcaggctatgacagcctctccaacaggctcagcatcttggaccggctcctccacacccaccccatatggctgcagctgagtctgagtgaggaggaggcagcagaggtcctgcaggcccagcctccggggatcttcctggttcataaatctaccaagatgcagaagaaagtcctctccctccgcctgccctgtgaatttggggccccactcaaggaatttgccataaaggaaagcacatacaccttttccctggaaggctcaggaatcagtttcgcagatttattccggctcattgctttctactgcatcagcagggatgttctaccatttaccttgaagttgccttatgccatttcaacagccaagtcggaggctcagcttgaagaactggcccagatgggactaaatttctggagctccccagctgacagcaaacccccgaaccttccacctccccataggcctctttcctccgacggtgtctgtcctgcctccctgcgtcagctctgccttataaatggagtgcattctatcaaaaccaggacgccttcagagctggagtgcagccagaccaacggggccctgtgctttattaatccccttttcttgaaagtgcacagccaggacctcagtggaggcctgaaacggccgagcacaaggactcccaacgcgaatggcacggagcggactcggtcccccccacccaggcccccgccacccgctattaatagtctccacacaagccctcggctggccaggactgaaacccagacgagcatgccagaaacagtcaaccataacaaacatgggaacgtagctctgcctggaacgaaaccaactcccatccctccaccccggctgaagaagcaggcttcttttctggaagcagagggcggtgcaaagaccttgagcggcggccggccgggcgcaggcccggagctggagctgggcacagctggcagcccaggtggggccccgcctgaggccgccccgggggattgcacaagggccccgccgcccagctctgaatcacggcccccgtgccatggaggccggcagcggctgagcgacatgagcatttctacttcctcctccgactcgctggagttcgaccggagcatgcctctgtttggctacgaggcggacaccaacagcagcctggaggactacgagggggaaagtgaccaagagaccatggcgccccccatcaagtccaaaaagaaaaggagcagctccttcgtgctgcccaagctcgtcaagtcccagctgcagaaggtgagcggggtgttcagctccttcatgaccccggagaagcggatggtccgcaggatcgccgagctttcccgggacaaatgcacctacttcgggtgcttagtgcaggactacgtgagcttcctgcaggagaacaaggagtgccacgtgtccagcaccgacatgctgcagaccatccggcagttcatgacccaggtcaagaactatttgtctcagagctcggagctggacccccccatcgagtcgctgatccctgaagaccaaatagatgtggtgctggaaaaagccatgcacaagtgcatcttgaagcccctcaaggggcacgtggaggccatgctgaaggactttcacatggccgatggctcatggaagcaactcaaggagaacctgcagcttgtgcggcagaggaatccgcaggagctgggggtcttcgccccgacccctgattttgtggatgtggagaaaatcaaagtcaagttcatgaccatgcagaagatgtattcgccggaaaagaaggtcatgctgctgctgcgggtctgcaagctcatttacacggtcatggagaacaactcagggaggatgtatggcgctgatgacttcttgccagtcctgacctatgtcatagcccagtgtgacatgcttgaattggacactgaaatcgagtacatgatggagctcctagacccatcgctgttacatggagaaggaggctattacttgacaagcgcatatggagcactttctctgataaagaatttccaagaagaacaagcagcgcgactgctcagctcagaaaccagagacaccctgaggcagtggcacaaacggagaaccaccaaccggaccatcccctctgtggacgacttccagaattacctccgagttgcatttcaggaggtcaacagtggttgcacaggaaagaccctccttgtgagaccttacatcaccactgaggatgtgtgtcagatctgcgctgagaagttcaaggtgggggaccctgaggagtacagcctctttctcttcgttgacgagacatggcagcagctggcagaggacacttaccctcaaaaaatcaaggcggagctgcacagccgaccacagccccacatcttccactttgtctacaaacgcatcaagaacgatccttatggcatcattttccagaacggggaagaagacctcaccacctcctagaagacaggcgggacttcccagtggtgcatccaaaggggagctggaagccttgccttcccgcttctacatgcttgagcttgaaaagcagtcacctcctcggggacccctcagtgtagtgactaagccatccacaggccaactcggccaagggcaactttagccacgcaaggtagctgaggtttgtgaaacagtaggattctcttttggcaatggagaattgcatctgatggttcaagtgtcctgagattgtttgctacctacccccagtcaggttctaggttggcttacaggtatgtatatgtgcagaagaaacacttaagatacaagttcttttgaattcaacagcagatgcttgcgatgcagtgcgtcaggtgattctcactcctgtggatggcttcatccctgccttccttcctttctttttccttttttttttttttttttttttttttacaaagagccttcatgtttttatatatttcatagaaatttttatagcagttgcaggtaaactgtcaggattggttttaaaatatttttgtaactttaaaatattctataattatgcatgtgattttaacatttaatattcaaaaataaatctcttgctggatttgagagtattgcatttttaaagtctctcttctgtaactggatgttttggcaactttgtggggagagactgctggatttcttaaagcaacgtattcctgacactggccacagaatgcctttggaaatcggatgtactgttctcttgttcacgtttagtggtgttttgctgttttgttttttaaacaaatgatgctgagaataaggagagaaatgaatgtagagagaggtagagagagaaatatgaactctaacaaaggactgaggagtgcagtctgctggttcaggctcttcaaaagatgtagaaaaagagatagaaggaaccacctatgcttaaaatactgtaaatatgcagtgaggtttggcaaaatctattccatgtgtgatttgcttgtagaaacaattttgaaagccccttgaggaaaataaaaatcaagaagaacacttttctcccttttccatacaaattaaaacttaacagcatcaaattattgggaccagaaaccaagtaatgtataatgtggcttttgttgagttaaataagatgctatataatggagaagaatttgaaaatgcacaaaaaaatcaatctacattatcagaacctgcagtgaaattaaacttatgttaaataaaaccagtttgcaggtgcacaaactatgagggtcttgtatccacgtaacacaggtagttacaaaaacatgttattgtactgtgtaaagatgcatagtcatctcatttggttggctttgtaccttgtaccttttttagccttggcttttgttgaactagaaccctcagcacatactgtgttgtacttttgtaaatgattttttaaatggaattttgcacataatacattgtaatactgtatgataatcatgtgtgaaaataatttttgaaatatcc

SEQ ID NO: 84588 - DNA, 2835 bp, Artificial Sequence
  derived and/or modified sequence
atgctggacagcttcagccaggagagcaccctgcccttcagagaggccagaaagagaaccagcttccagcccgtgcaggtgtggagaaacttcaccgccagccagaccaccgagagccccgcctgcagcggcgccagcctgggcgagatgaccgcctggaccatgggcgccagaggcctggacaagagaggcagcttcttcaagctgatcgacaccatcgccagcgagatcggcgagctgaagcaggagatggtgagaaccgacgtgaacctggagaacggcctggagcccgccgagacccacagcatggtgagacacaaggacggcggctacagcgaggaggaggacgtgaagacctgcgccagagacagcggctacgacagcctgagcaacagactgagcatcctggacagactgctgcacacccaccccatctggctgcagctgagcctgagcgaggaggaggccgccgaggtgctgcaggcccagccccccggcatcttcctggtgcacaagagcaccaagatgcagaagaaggtgctgagcctgagactgccctgcgagttcggcgcccccctgaaggagttcgccatcaaggagagcacctacaccttcagcctggagggcagcggcatcagcttcgccgacctgttcagactgatcgccttctactgcatcagcagagacgtgctgcccttcaccctgaagctgccctacgccatcagcaccgccaagagcgaggcccagctggaggagctggcccagatgggcctgaacttctggagcagccccgccgacagcaagccccccaacctgccccccccccacagacccctgagcagcgacggcgtgtgccccgccagcctgagacagctgtgcctgatcaacggcgtgcacagcatcaagaccagaacccccagcgagctggagtgcagccagaccaacggcgccctgtgcttcatcaaccccctgttcctgaaggtgcacagccaggacctgagcggcggcctgaagagacccagcaccagaacccccaacgccaacggcaccgagagaaccagaagccccccccccagaccccccccccccgccatcaacagcctgcacaccagccccagactggccagaaccgagacccagaccagcatgcccgagaccgtgaaccacaacaagcacggcaacgtggccctgcccggcaccaagcccacccccatccccccccccagactgaagaagcaggccagcttcctggaggccgagggcggcgccaagaccctgagcggcggcagacccggcgccggccccgagctggagctgggcaccgccggcagccccggcggcgccccccccgaggccgcccccggcgactgcaccagagcccccccccccagcagcgagagcagacccccctgccacggcggcagacagagactgagcgacatgagcatcagcaccagcagcagcgacagcctggagttcgacagaagcatgcccctgttcggctacgaggccgacaccaacagcagcctggaggactacgagggcgagagcgaccaggagaccatggccccccccatcaagagcaagaagaagagaagcagcagcttcgtgctgcccaagctggtgaagagccagctgcagaaggtgagcggcgtgttcagcagcttcatgacccccgagaagagaatggtgagaagaatcgccgagctgagcagagacaagtgcacctacttcggctgcctggtgcaggactacgtgagcttcctgcaggagaacaaggagtgccacgtgagcagcaccgacatgctgcagaccatcagacagttcatgacccaggtgaagaactacctgagccagagcagcgagctggacccccccatcgagagcctgatccccgaggaccagatcgacgtggtgctggagaaggccatgcacaagtgcatcctgaagcccctgaagggccacgtggaggccatgctgaaggacttccacatggccgacggcagctggaagcagctgaaggagaacctgcagctggtgagacagagaaacccccaggagctgggcgtgttcgcccccacccccgacttcgtggacgtggagaagatcaaggtgaagttcatgaccatgcagaagatgtacagccccgagaagaaggtgatgctgctgctgagagtgtgcaagctgatctacaccgtgatggagaacaacagcggcagaatgtacggcgccgacgacttcctgcccgtgctgacctacgtgatcgcccagtgcgacatgctggagctggacaccgagatcgagtacatgatggagctgctggaccccagcctgctgcacggcgagggcggctactacctgaccagcgcctacggcgccctgagcctgatcaagaacttccaggaggagcaggccgccagactgctgagcagcgagaccagagacaccctgagacagtggcacaagagaagaaccaccaacagaaccatccccagcgtggacgacttccagaactacctgagagtggccttccaggaggtgaacagcggctgcaccggcaagaccctgctggtgagaccctacatcaccaccgaggacgtgtgccagatctgcgccgagaagttcaaggtgggcgaccccgaggagtacagcctgttcctgttcgtggacgagacctggcagcagctggccgaggacacctacccccagaagatcaaggccgagctgcacagcagaccccagccccacatcttccacttcgtgtacaagagaatcaagaacgacccctacggcatcatcttccagaacggcgaggaggacctgaccaccagctag

SEQ ID NO: 84589 - protein, 225 aa, Artificial Sequence
  derived and/or modified sequence
MRKTRLWGLLWMLFVSELRAATKLTEEKYELKEGQTLDVKCDYTLEKFASSQKAWQIIRDGEMPKTLACTERPSKNSHPVQVGRIILEDYHDHGLLRVRMVNLQVEDSGLYQCVIYQPPKEPHMLFDRIRLVVTKGFSGTPGSNENSTQNVYKIPPTTTKALCPLYTSPRTVTQAPPKSTADVSTPDSEINLTNVTDIIRYSFQVPGPLVWTLSPLFPSLCAERM

SEQ ID NO: 84590 - DNA, 678 bp, Artificial Sequence
  derived and/or modified sequence
atgagaaagaccagactgtggggcctgctgtggatgctgttcgtgagcgagctgagagccgccaccaagctgaccgaggagaagtacgagctgaaggagggccagaccctggacgtgaagtgcgactacaccctggagaagttcgccagcagccagaaggcctggcagatcatcagagacggcgagatgcccaagaccctggcctgcaccgagagacccagcaagaacagccaccccgtgcaggtgggcagaatcatcctggaggactaccacgaccacggcctgctgagagtgagaatggtgaacctgcaggtggaggacagcggcctgtaccagtgcgtgatctaccagccccccaaggagccccacatgctgttcgacagaatcagactggtggtgaccaagggcttcagcggcacccccggcagcaacgagaacagcacccagaacgtgtacaagatcccccccaccaccaccaaggccctgtgccccctgtacaccagccccagaaccgtgacccaggccccccccaagagcaccgccgacgtgagcacccccgacagcgagatcaacctgaccaacgtgaccgacatcatcagatacagcttccaggtgcccggccccctggtgtggaccctgagccccctgttccccagcctgtgcgccgagagaatgtag

SEQ ID NO: 84591 - DNA, 678 bp, Artificial Sequence
  derived and/or modified sequence
atgaggaagacacggctatgggggctgttatggatgttgtttgtgtccgagctgcgcgcagctacaaaactcacagaggaaaagtacgaactaaaagagggccagactttggacgtaaaatgcgactacacactggaaaaatttgcctcctcacaaaaggcttggcaaatcataagagacggcgaaatgcccaaaaccctggcttgtaccgaaagaccatctaagaacagtcaccctgtgcaggtcgggaggataatccttgaggactatcacgatcatggcctactgcgcgtccgcatggttaatctccaagtggaggattccggcctctatcagtgcgtgatataccaaccgcctaaagagccccacatgctcttcgatcgcattcgcctggtagtcacaaagggcttcagtggcacacccgggtccaacgagaattcgacccagaacgtgtataagatcccgcccactactacaaaggccttgtgccctctgtacacttcacccaggaccgttactcaggcgccgcccaagtccactgccgatgtatccacaccagacagcgagattaatctcacaaacgtaactgacattatcaggtactcgtttcaggtccctggcccattggtttggactctgagtcccttatttccatccctgtgtgccgaacggatgtag

SEQ ID NO: 84592 - DNA, 678 bp, Artificial Sequence
  derived and/or modified sequence
atgaggaagacccggctgtggggcctgctgtggatgctgtttgtgtctgagctgcgggccgccaccaagctgacagaggagaagtatgagctgaaggagggccagaccctggatgtgaagtgtgactacaccctggagaagtttgccagcagccagaaggcctggcagatcatcagagatggagagatgcccaagaccctggcctgcacagagcggcccagcaagaacagccaccctgtgcaggtgggccgcatcatcctggaggactaccatgaccacggcctgctgcgggtgaggatggtgaacctgcaggtggaggacagcggcctgtaccagtgtgtgatctaccagccccccaaggagccccacatgctgtttgaccgcatccggctggtggtgaccaagggcttcagcggcaccccaggcagcaatgaaaacagcacccagaatgtgtacaagatcccccccaccaccaccaaggccctgtgccccctgtacaccagccccaggacagtgacccaggccccacccaagagcacagcagatgtgtccaccccagacagcgagatcaacctgaccaacgtgacagacatcatccgctacagcttccaggtgcccggccccctggtgtggaccctgagccccctcttccccagcctgtgtgccgagaggatgtag

SEQ ID NO: 84593 - DNA, 678 bp, Artificial Sequence
  derived and/or modified sequence
atgcggaagacccggctgtggggcctgctgtggatgctgttcgtgtctgaactccgggctgctacaaagctgactgaggagaagtatgagctgaaggaaggtcagacgctggacgtcaagtgcgactatacactggaaaaatttgcgagctctcagaaagcatggcagatcatccgggatggggaaatgcctaagaccctcgcctgtactgaacgtccttctaaaaattctcacccagtgcaagtcggccgcattattctggaggactaccacgatcatggtctcctgcgggtgcggatggtgaatctacaggttgaagactccggtctgtatcagtgtgttatctatcaaccaccgaaagagccccacatgctgtttgaccgtatccggctggttgtgaccaaggggtttagtggaactcctggtagcaacgaaaactccacccagaatgtatataagatccctccaactaccacaaaggccctatgccccctgtatacaagcccgcgaacggtgacccaggctcctcccaagtccaccgctgatgtcagtactcccgattccgagatcaaccttaccaacgttactgatatcatacgctattcctttcaggtaccgggacctctcgtatggactctgagtccactgtttcccagcctttgtgccgaacgcatgtag

SEQ ID NO: 84594 - DNA, 678 bp, Artificial Sequence
  derived and/or modified sequence
atgagaaaaaccaggttgtggggcctcctctggatgctgtttgtctctgaactgagggctgccaccaaactgactgaagaaaagtacgagctgaaggaaggacagaccttggatgtaaagtgtgattacacacttgaaaaatttgcgagcagccagaaggcgtggcagattatccgcgacggcgagatgcctaaaacattggcctgtacagaacgaccctcgaagaatagtcaccctgtccaagtaggtcgtataatccttgaggactaccatgaccacggtttactgagggtccgcatggttaacttgcaggtagaggattcaggcctctaccagtgcgtgatttaccagccgccaaaagaaccccacatgctgttcgatcgaattcgcttagtggtcaccaaaggcttctcaggaacaccgggatcgaacgaaaactcaacccagaacgtttataagattccacccacaaccacgaaggcactgtgcccactatacacctctccgaggacagttactcaagcccctccgaagtcaactgcagatgtctcaactcccgatagcgagataaatctgactaatgtcacagatatcatacgatacagctttcaggtgcccggacctctcgtatggaccttaagtcccctatttccctccctgtgcgccgagcgcatgtag

SEQ ID NO: 84595 - DNA, 2048 bp, Artificial Sequence
  derived and/or modified sequence
agcagttggagctggtgcacaggaaggatgaggaagaccaggctctgggggctgctgtggatgctctttgtctcagaactccgagctgcaactaaattaactgaggaaaagtatgaactgaaagaggggcagaccctggatgtgaaatgtgactacacgctagagaagtttgccagcagccagaaagcttggcagataataagggacggagagatgcccaagaccctggcatgcacagagaggccttcaaagaattcccatccagtccaagtggggaggatcatactagaagactaccatgatcatggtttactgcgcgtccgaatggtcaaccttcaagtggaagattctggactgtatcagtgtgtgatctaccagcctcccaaggagcctcacatgctgttcgatcgcatccgcttggtggtgaccaagggtttttcagggacccctggctccaatgagaattctacccagaatgtgtataagattcctcctaccaccactaaggccttgtgcccactctataccagccccagaactgtgacccaagctccacccaagtcaactgccgatgtctccactcctgactctgaaatcaaccttacaaatgtgacagatatcatcaggtatagtttccaggtccctgggcccctggtttggacactgagccctttgtttcccagtctgtgtgctgagaggatgtgaaagtgagggaaaggggagggtggggcaggagaagacttgagtcacattagtctgggtagaaatgtccaggggaagaaggaagtggtgatggagaataggggaggctctcagccaggctgtccttctccccagttcaccttctttgtttccttgcaacctgagtattaaagagagggaaatggcatcttccccaagttccagtggagctcatccaaccccaggggcctgatgggcagtgggaaagcactctgagtgaggggccctggatctagtgttggcctgactaactgaatgtgactttgggtgagtcaggaaccctctctggctttagcttctttgacaattcagtaggcatggtagaaacccaaagctggaagacattgtccacctaataactctcagcaggagctggagctggggctaaatgcagtattggtttttgccttattgttttttaaataacattgttgcatgtgcccaattatagataaatagaatcagaatttttgcagatgaggtccctctcagtatttttaataagatgtttaggagatttctaatgtgtaggcaaacttaagaaccactaacttagcaatttcacacctctttacagttattaaatgttgatttatattagaatgtgtttatcattaaatactgaattatcaggatggaaatacttttccacatcaccactagtctaacatgtcttttttctcatattctcttctagtctttattcatgtttatacatattttaatatggcagtaagtctaattatacatgtttttattcttttccttgctgaaattattctttgatgctgctacctaaatttcataaatataatttcaatgagtgcatatttttctatcaattgggaaagccataacttacataaccattggcctgttcttagacattgatatagtgttgataactctgagataaacatattcttgcagatatatttttcttcttttaaataattaactcgaaatttccatgagataatttaaacactgatatcattttgtatacaaatagcatctaccaatggtcttccaaaagattggaaacaatttgcagtgtgatccattaagcataaataaagcagtgtcatggcaggcttacagacacggatttagtcttttaaatcattaaatagtgtgagttaaatcacattcctgctaaaacaaatgtgaactggtgcctgctctaatttctctatgagtgtagactccacctccatatgggtagtggcagtgcctttttccccattatgttgtttggggaacaaagtgctcattaaacttctgtggaataaatcaaacgaatgatc

SEQ ID NO: 84596 - protein, 150 aa, Artificial Sequence
  derived and/or modified sequence
MRKTRLWGLLWMLFVSELRAATKLTEEKYELKEGQTLDVKCDYTLEKFASSQKAWQIIRDGEMPKTLACTERPSKNSHPVQVGRIILEDYHDHGLLRVRMVNLQVEDSGLYQCVIYQPPKEPHMLFDRIRLVVTKGFRCSTLSFSWLVDS

SEQ ID NO: 84597 - DNA, 453 bp, Artificial Sequence
  derived and/or modified sequence
atgagaaagaccagactgtggggcctgctgtggatgctgttcgtgagcgagctgagagccgccaccaagctgaccgaggagaagtacgagctgaaggagggccagaccctggacgtgaagtgcgactacaccctggagaagttcgccagcagccagaaggcctggcagatcatcagagacggcgagatgcccaagaccctggcctgcaccgagagacccagcaagaacagccaccccgtgcaggtgggcagaatcatcctggaggactaccacgaccacggcctgctgagagtgagaatggtgaacctgcaggtggaggacagcggcctgtaccagtgcgtgatctaccagccccccaaggagccccacatgctgttcgacagaatcagactggtggtgaccaagggcttcagatgcagcaccctgagcttcagctggctggtggacagctag

SEQ ID NO: 84598 - DNA, 453 bp, Artificial Sequence
  derived and/or modified sequence
atgcggaagaccagattatggggtctgttgtggatgctgtttgtatctgaattgcgggcagccaccaagctgaccgaggaaaaatacgaactgaaggagggccagaccctggacgtcaaatgtgactacaccctcgaaaagttcgcatctagccagaaggcttggcagatcatccgggacggtgagatgccaaaaaccctcgcctgcactgagcgtccatctaagaattcgcaccctgtccaagttggtcgaattattctggaagattatcacgaccatggactccttagagtacggatggtcaatctccaggtggaggattctggcttgtaccaatgcgtcatataccagccccccaaagagccgcatatgctatttgaccgtatccggttggttgttactaagggttttaggtgttcgactctgtcattttcttggctggtggattcgtag

SEQ ID NO: 84599 - DNA, 453 bp, Artificial Sequence
  derived and/or modified sequence
atgaggaagacccggctgtggggcctgctgtggatgctgtttgtgtctgagctgcgggccgccaccaagctgacagaggagaagtatgagctgaaggagggccagaccctggatgtgaagtgtgactacaccctggagaagtttgccagcagccagaaggcctggcagatcatcagagatggagagatgcccaagaccctggcctgcacagagcggcccagcaagaacagccaccctgtgcaggtgggccgcatcatcctggaggactaccatgaccacggcctgctgcgggtgaggatggtgaacctgcaggtggaggacagcggcctgtaccagtgtgtgatctaccagccccccaaggagccccacatgctgtttgaccgcatccggctggtggtgaccaagggcttccgctgcagcaccctgtccttctcctggctggtggacagctag

SEQ ID NO: 84600 - DNA, 453 bp, Artificial Sequence
  derived and/or modified sequence
atgcggaagacccggctgtggggcctgctgtggatgctgttcgtgtctgagctgcgcgccgccacgaagcttacggaggagaagtatgagctcaaggagggtcagaccctagacgtgaagtgtgattacaccctcgagaagtttgcatcttctcaaaaagcgtggcagatcattcgcgacggagagatgcccaagaccctggcttgcactgaacgacccagcaaaaattctcacccagtgcaagtgggtcgaattatcctggaagactaccacgaccacgggcttctgagggtccggatggtaaaccttcaagtggaggatagtggactgtatcagtgcgtgatttaccagccaccaaaggagccacatatgttattcgatagaattcggctcgtcgtcaccaaggggttcaggtgtagcacactttcattcagttggctggtcgacagctag

SEQ ID NO: 84601 - DNA, 453 bp, Artificial Sequence
  derived and/or modified sequence
atgcggaaaacaaggctatggggactactgtggatgctgttcgtaagcgagcttcgggcagccactaagttaaccgaagagaaatatgaactcaaagaagggcagactttggatgtaaaatgtgactacactctggagaaatttgcttcttctcagaaggcttggcagattataagagacggcgagatgcctaaaactctggcttgcacagagcgaccttccaagaatagtcaccccgtgcaggtgggccgtattatacttgaggactaccatgatcacggcctactgagagtccgtatggtgaatctgcaggtggaggattctgggctctaccagtgtgtgatttaccagcctcccaaagaaccccacatgctctttgaccggatccgcctcgtcgttacaaaggggtttcggtgcagcacactaagcttctcctggctcgtggatagttag

SEQ ID NO: 84602 - DNA, 727 bp, Artificial Sequence
  derived and/or modified sequence
attgtggtgccttgtagctgtcccgggagccctcagcagcagttggagctggtgcacaggaaggatgaggaagaccaggctctgggggctgctgtggatgctctttgtctcagaactccgagctgcaactaaattaactgaggaaaagtatgaactgaaagaggggcagaccctggatgtgaaatgtgactacacgctagagaagtttgccagcagccagaaagcttggcagataataagggacggagagatgcccaagaccctggcatgcacagagaggccttcaaagaattcccatccagtccaagtggggaggatcatactagaagactaccatgatcatggtttactgcgcgtccgaatggtcaaccttcaagtggaagattctggactgtatcagtgtgtgatctaccagcctcccaaggagcctcacatgctgttcgatcgcatccgcttggtggtgaccaaggggttccggtgttcaacattgtcattctcctggctggtggattcctgagtaagagcctggtcttctctgtcctgtttgctgtcacgctgaggtcatttgtaccctaggcccacgaacccacgagaatgtcctctgacttccagccacatccatctggcagttgtgccaagggaggagggaggaggtaaaaggcagggagttaataacatgaattaaatctgtaatcaccggctatttctaaagtcagcgtctcacctt

SEQ ID NO: 84603 - protein, 373 aa, Artificial Sequence
  derived and/or modified sequence
MQLAARIRPRDLEEFFSTVGKVRDVRMISDRNSRRSKGIAYVEFVDVSSVPLAIGLTGQRVLGVPIIVQASQAEKNRAAAMANNLQKGSAGPMRLYVGSLHFNITEDMLRGIFEPFGRIESIQLMMDSETGRSKGYGFITFSDSECAKKALEQLNGFELAGRPMKVGHVTERTDASSASSFLDSDELERTGIDLGTTGRLQLMARLAEGTGLQIPPAAQQALQMSGSLAFGAVAEFSFVIDLQTRLSQQTEASALAAAASVQPLATQCFQLSNMFNPQTEEEVGWDTEIKDDVIEECNKHGGVIHIYVDKNSAQGNVYVKCPSIAAAIAAVNALHGRWFAGKMITAAYVPLPTYHNLFPDSMTATQLLVPSRR

SEQ ID NO: 84604 - protein, 508 aa, Artificial Sequence
  derived and/or modified sequence
MADDIDIEAMLEAPYKKDENKLSSANGHEERSKKRKKSKSRSRSHERKRSKSKERKRSRDRERKKSKSRERKRSRSKERRRSRSRSRDRRFRGRYRSPYRRRSRSKSPFRKDKSPVREPIDNLTPEERDARTVFCMQLAARIRPRDLEEFFSTVGKVRDVRMISDRNSRRSKGIAYVEFVDVSSVPLAIGLTGQRVLGVPIIVQASQAEKNRAAAMANNLQKGSAGPMRLYVGSLHFNITEDMLRGIFEPFGRIESIQLMMDSETGRSKGYGFITFSDSECAKKALEQLNGFELAGRPMKVGHVTERTDASSASSFLDSDELERTGIDLGTTGRLQLMARLAEGTGLQIPPAAQQALQMSGSLAFGAVAEFSFVIDLQTRLSQQTEASALAAAASVQPLATQCFQLSNMFNPQTEEEVGWDTEIKDDVIEECNKHGGVIHIYVDKNSAQGNVYVKCPSIAAAIAAVNALHGRWFAGKMITAAYVPLPTYHNLFPDSMTATQLLVPSRR

SEQ ID NO: 84605 - DNA, 1014 bp, Artificial Sequence
  derived and/or modified sequence
tgaagccccttcagaaaggacaagagccccgtgagagagcccatcgacaacctgacccccgaggagagagacgccagaaccgtgttctgcatgcagctggccgccagaatcagacccagagacctggaggagttcttcagcaccgtgggcaaggtgagagacgtgagaatgatcagcgacagaaacagcagaagaagcaagggcatcgcctacgtggagttcgtggacgtgagcagcgtgcccctggccatcggcctgaccggccagagagtgctgggcgtgcccatcatcgtgcaggccagccaggccgagaagaacagagccgccgccatggccaacaacctgcagaagggcagcgccggccccatgagactgtacgtgggcagcctgcacttcaacatcaccgaggacatgctgagaggcatcttcgagcccttcggcagattcagcgacagcgagtgcgccaagaaggccctggagcagctgaacggcttcgagctggccggcagacccatgaaggtgggccacgtgaccgagagaaccgacgccagcagcgccagcagcttcctggacagcgacgagctggagagaaccggcatcgacctgggcaccaccggcagactgcagctgatggccagactggccgagggcaccggcctgcagatcccccccgccgcccagcaggccctgcagatgagcggcagcctggccttcggcgccgtggccgagttcagcttcgtgatcgacctgcagaccagactgagccagcagaccgaggccagcgccctggccgccgccgccagcgtgcagcccctggccacccagtgcttccagctgagcaacatgttcaacccccagaccgaggaggaggtgggctgggacaccgagatcaaggacgacgtgatcgaggagtgcaacaagcacggcggcgtgatccacatctacgtggacaagaacagcgcccagggcaacgtgtacgtgaagtgccccagcatcgccgccgccatcgcctag

SEQ ID NO: 84606 - DNA, 1527 bp, Artificial Sequence
  derived and/or modified sequence
atggccgacgacatcgacatcgaggccatgctggaggccccctacaagaaggacgagaacaagctgagcagcgccaacggccacgaggagagaagcaagaagagaaagaagagcaagagcagaagcagaagccacgagagaaagagaagcaagagcaaggagagaaagagaagcagagacagagagagaaagaagagcaagagcagagagagaaagagaagcagaagcaaggagagaagaagaagcagaagcagaagcagagacagaagattcagaggcagatacagaagcccctacagaagaagaagcagaagcaagagccccttcagaaaggacaagagccccgtgagagagcccatcgacaacctgacccccgaggagagagacgccagaaccgtgttctgcatgcagctggccgccagaatcagacccagagacctggaggagttcttcagcaccgtgggcaaggtgagagacgtgagaatgatcagcgacagaaacagcagaagaagcaagggcatcgcctacgtggagttcgtggacgtgagcagcgtgcccctggccatcggcctgaccggccagagagtgctgggcgtgcccatcatcgtgcaggccagccaggccgagaagaacagagccgccgccatggccaacaacctgcagaagggcagcgccggccccatgagactgtacgtgggcagcctgcacttcaacatcaccgaggacatgctgagaggcatcttcgagcccttcggcagaatcgagagcatccagctgatgatggacagcgagaccggcagaagcaagggctacggcttcatcaccttcagcgacagcgagtgcgccaagaaggccctggagcagctgaacggcttcgagctggccggcagacccatgaaggtgggccacgtgaccgagagaaccgacgccagcagcgccagcagcttcctggacagcgacgagctggagagaaccggcatcgacctgggcaccaccggcagactgcagctgatggccagactggccgagggcaccggcctgcagatcccccccgccgcccagcaggccctgcagatgagcggcagcctggccttcggcgccgtggccgagttcagcttcgtgatcgacctgcagaccagactgagccagcagaccgaggccagcgccctggccgccgccgccagcgtgcagcccctggccacccagtgcttccagctgagcaacatgttcaacccccagaccgaggaggaggtgggctgggacaccgagatcaaggacgacgtgatcgaggagtgcaacaagcacggcggcgtgatccacatctacgtggacaagaacagcgcccagggcaacgtgtacgtgaagtgccccagcatcgccgccgccatcgccgccgtgaacgccctgcacggcagatggttcgccggcaagatgatcaccgccgcctacgtgcccctgcccacctaccacaacctgttccccgacagcatgaccgccacccagctgctggtgcccagcagaagatag

SEQ ID NO: 84607 - DNA, 1014 bp, Artificial Sequence
  derived and/or modified sequence
taatcaccattcagaaaagacaaatcacccgtgagggagcccattgataacctgaccccagaagagcgcgatgctcgcactgttttctgcatgcagctggccgcgagaattcgcccaagggatctggaggagttcttcagcacggtcgggaaagtgcgtgatgtgaggatgatttctgaccggaattcccggcgcagtaaaggaattgcatacgtggagtttgtagatgtgtcatcagttcctctcgccatcggcctgaccggacagagggtgctcggcgttccaatcattgtgcaggcctctcaggctgagaagaatcgtgccgccgctatggcaaataacttgcagaaaggctcagcaggcccgatgcgactctacgtagggtccctgcacttcaatataactgaagacatgctcaggggtattttcgaaccattcggcagattctccgactcagagtgtgccaagaaggccctggagcagcttaacgggttcgagctggccggacgcccaatgaaagtgggacacgtgacagaaaggaccgatgcatctagcgcctcttccttcctggactctgatgaactcgagaggaccgggattgacctcgggactacgggacgcctgcagctaatggcgcggttggcggagggcaccggcctccagattcccccagccgcacaacaagccctccagatgagcggcagtcttgcattcggtgcggtggcggaattttcattcgtcatcgatctgcaaacccgcctgtcgcagcagaccgaagcttctgcgcttgccgctgcagcttctgttcagcctctcgccacacaatgttttcagctcagcaacatgttcaacccgcagaccgaagaagaggtcggctgggatacagagataaaggatgatgtgatcgaagagtgtaacaagcacgggggtgtcatacatatatatgtggataagaatagcgcgcagggcaatgtctatgtgaaatgtcccagcattgcagctgccatagcttag

SEQ ID NO: 84608 - DNA, 1527 bp, Artificial Sequence
  derived and/or modified sequence
atggccgatgatatcgatattgaagccatgctcgaagctccgtacaagaaggatgaaaacaagctctcatcggccaacggacacgaagagcgctcaaagaaaagaaagaagagtaagtcccgctcccgttcgcacgagcggaaaaggagcaagagcaaggaaaggaaaagatctagggatcgtgagcgaaagaagtccaagagtagggagcggaaaagatctagatcgaaggaaaggcggcggagtaggagcaggtcacgggatagacgtttcaggggcaggtacagaagtccctatcggcgaagatcccggtcaaagtctccatttcgtaaggacaagtctcccgtgcgagagccaatagataatctgactcccgaagagcgagacgctcgcaccgtcttttgtatgcaactcgcagcccggatccgccctcgagatctggaggagtttttctcgaccgtcgggaaggtgagggacgtgcggatgatttccgatcgcaattcgcgtaggtcaaaaggtatcgcctatgtcgagttcgtggacgtttcttccgtaccactggcaattgggcttacaggccagcgagtcctaggcgtgcctatcatagtgcaggcctcacaagcagagaagaaccgagccgctgccatggccaacaatctgcagaagggctccgccgggcccatgagactgtacgttggttccctgcattttaatatcacagaggatatgctgagaggcatctttgagccgtttgggcgcatcgaatccattcagctcatgatggattccgaaacaggacgaagtaaaggttatggttttatcaccttctctgactccgagtgtgcaaagaaggccctggagcagctcaatggcttcgaattggcgggcagaccgatgaaagtgggccacgtcacagagaggaccgacgcctcatccgcatctagcttccttgactcagacgagttagagcggactggcatcgatctgggcaccacgggacggctccagttaatggccaggctggccgaaggcacgggcttacaaatcccacctgcggctcagcaggctctccagatgtcaggatccctggcctttggagctgtggccgaattctcttttgttattgatctgcagactagactgtcccagcagacagaagcctctgccctggccgccgccgcttccgtgcagccgctggccacacagtgcttccagttgagtaacatgtttaacccgcagactgaagaagaggtgggatgggacacagagatcaaagacgatgtgattgaggaatgcaacaagcacggaggcgttatccatatttatgtggacaagaacagtgcacagggaaatgtttacgtgaagtgcccgtctatcgctgccgcaatagccgccgttaacgccctgcatgggcgctggttcgcggggaagatgattactgccgcttatgtgccccttcctacataccacaacctctttcctgattctatgactgccacccagctgctggtcccatcccggcgttag

SEQ ID NO: 84609 - DNA, 1014 bp, Artificial Sequence
  derived and/or modified sequence
tgaagccccttcaggaaggacaagagccctgtgcgggagcccatcgacaacctgaccccagaggagagagatgccaggacagtgttctgcatgcagctggccgcccgcatccggccccgggacctggaggagttcttcagcacagtgggcaaggtgagagatgtgaggatgatcagtgacaggaacagccgccgcagcaaaggaattgcctacgtggagtttgtggatgtgtcctctgtgcccctggccatcggcctgaccggccagagggtgctgggcgtgcccatcatcgtgcaggccagccaggccgagaagaacagagctgctgccatggccaacaacctgcagaagggcagcgctggccccatgaggctgtatgtgggcagcctgcacttcaacatcacagaggacatgctgcggggcatctttgagcccttcggccgcttcagtgacagtgaatgtgccaagaaggccctggagcagctgaatggatttgagctggccggccggcccatgaaggtgggccacgtgacagagaggacagatgccagcagcgccagcagcttcctggacagtgatgagctggagaggacaggcatcgacctgggcaccaccggccgcctgcagctgatggcccggctggccgagggcaccggcctgcagatccccccagctgcccagcaggccctgcagatgagcggcagcctggccttcggggctgtggccgagttctcctttgtgattgacctgcagacccggctgagccagcagacagaggccagcgccctggccgccgccgcctctgtgcagcccctggccacccagtgcttccagctgagcaacatgttcaacccccagacagaggaggaggtgggctgggacacagagatcaaggatgatgtgattgaggagtgcaacaagcacggcggcgtcatccacatctacgtggacaagaacagcgcccagggcaatgtgtatgtgaagtgccccagcattgctgctgccatcgcctag

SEQ ID NO: 84610 - DNA, 1527 bp, Artificial Sequence
  derived and/or modified sequence
atggctgatgacattgatattgaggccatgctggaggccccctacaagaaggatgagaacaagctgagcagcgccaacggccacgaggagaggagcaagaagaggaagaagagcaagagccgcagccgcagccatgagaggaagaggagcaagagcaaggagaggaagaggagccgggaccgggagaggaagaagagcaagagccgggagaggaagaggagccgcagcaaggagcggcggcgcagccgcagccgcagccgggaccggcgcttccggggccgctaccgcagcccctacagaagaagaagccgcagcaagagccccttcaggaaggacaagagccctgtgcgggagcccatcgacaacctgaccccagaggagagagatgccaggacagtgttctgcatgcagctggccgcccgcatccggccccgggacctggaggagttcttcagcacagtgggcaaggtgagagatgtgaggatgatcagtgacaggaacagcagaagaagcaagggcatcgcctacgtggagtttgtggatgtgtcctctgtgcccctggccatcggcctgaccggccagagggtgctgggcgtgcccatcatcgtgcaggccagccaggccgagaagaacagagctgctgccatggccaacaacctgcagaagggcagcgctggccccatgaggctgtatgtgggcagcctgcacttcaacatcacagaggacatgctgcggggcatctttgagcccttcggccgcatcgagagcatccagctgatgatggattctgaaacaggccgcagcaagggctacggcttcatcaccttcagtgacagtgaatgtgccaagaaggccctggagcagctgaatggatttgagctggccggccggcccatgaaggtgggccacgtgacagagaggacagatgccagcagcgccagcagcttcctggacagtgatgagctggagaggactggaattgacctgggcaccaccggccgcctgcagctgatggcccggctggccgagggcaccggcctgcagatccccccagctgcccagcaggccctgcagatgagcggcagcctggcctttggagctgtggccgagttctcctttgtgattgacctgcagacccggctgagccagcagacagaggccagcgccctggccgctgctgcctctgtgcagcccctggccacccagtgcttccagctgagcaacatgttcaacccccagacagaggaggaggtgggctgggacacagagatcaaggatgatgtgattgaggagtgcaacaagcatggaggagtcatccacatctacgtggacaagaacagcgcccagggcaatgtgtatgtgaagtgccccagcattgctgctgccatcgctgctgtgaatgccctgcacggccgctggtttgctgggaagatgatcacagctgcctacgtgcccctgcccacctaccacaacctcttcccagacagcatgacagccacccagctgctggtgcccagcagaagatag

SEQ ID NO: 84611 - DNA, 1014 bp, Artificial Sequence
  derived and/or modified sequence
tgaagccccttccggaaggacaagagccccgtgcgggagcccatcgacaacctgacaccggaggaacgggatgctcgtacggtattctgcatgcaactggccgctcgtataagaccgagggacctagaagagttcttctccaccgtgggcaaagtgcgcgacgtcaggatgatatctgaccggaatagccgtagatctaaggggattgcttacgtcgaatttgtggatgtgtcttctgttccactagctatcggattgacaggacagcgggtcctcggggtacctatcattgtacaagcttctcaggccgagaaaaaccgggccgcggcaatggcaaacaacttacaaaaaggtagtgccggacccatgagactgtatgtcggatcgctgcattttaatatcaccgaagacatgctcagagggatatttgaacctttcggtcgctttagcgatagcgagtgtgccaaaaaggccttggagcagctaaacggttttgagctggcgggccgcccgatgaaggttggccacgtgactgagagaactgatgccagtagtgcctcttcttttctggactcagatgagctggaaaggaccggcattgaccttggaaccacaggtcgtctgcaactcatggccaggttggctgaaggaacgggcctgcaaatccctcctgcagctcagcaggctctccagatgtctgggtccctcgccttcggggcagtcgccgagttcagttttgtgatcgacctgcagaccagactgagccagcagactgaggcctcagcccttgccgctgccgcctctgttcagcccttggccacccaatgttttcagttgagcaacatgttcaacccgcagactgaggaggaggtgggatgggataccgagattaaggacgacgtgatcgaagagtgtaataaacatggcggggtgatccacatatacgtcgacaagaacagcgcccagggaaatgtgtacgtgaagtgtcctagcattgcggcagctatcgcttag

SEQ ID NO: 84612 - DNA, 1527 bp, Artificial Sequence
  derived and/or modified sequence
atggccgacgacatcgacatcgaggccatgctggaggccccctacaagaaagacgagaataaactcagcagtgccaacggtcacgaagaacggtcaaagaagcgcaaaaaatcaaagtcccgctctaggtcccatgagagaaagcggagcaagtccaaagaacggaagagaagcagagatagagaacgcaaaaagtccaaatcgcgggagcgtaagcggagtcgcagtaaggaacggaggcgctcacgaagtaggtcacgagataggagatttcgcggcagataccgcagcccttacaggcggagaagccgaagcaagtcccccttcagaaaagacaaaagccctgtaagagaacctatcgacaacctgactccagaagagcgagatgccagaaccgtcttctgcatgcaactcgctgcacgaattcgccctcgcgacctggaggaattcttttctaccgttggcaaagttcgtgatgtgaggatgatcagtgacagaaattcgcgtcgcagcaagggcatcgcatacgtggagttcgttgacgtgtcttctgtaccactggctattggactgaccgggcagcgagttcttggagtgcccatcattgttcaggcatcgcaggcagagaagaacagggcagcagccatggcgaataacctgcagaagggctcagccggaccgatgagactttatgtgggaagtttgcattttaacatcacagaggacatgctccgaggcattttcgaacccttcgggcgcatcgagagcattcagctaatgatggacagtgaaacaggacgtagtaaagggtacggatttatcaccttttccgacagcgagtgcgccaaaaaagcactagaacaactgaacgggtttgaactggccgggaggcctatgaaagtgggccacgttaccgaaagaacagacgcaagctccgcttcctctttcctggactctgatgaactggagagaacaggtattgatctgggaaccacagggcgactccagctgatggccagactggccgaaggcacgggacttcaaatcccccccgcagctcagcaggcccttcagatgagcggcagtcttgcatttggggccgtagccgagttctccttcgtgatcgatctgcaaactaggctgtcacagcagaccgaagcctccgcattggcagctgctgcgagcgtccagcccttggcaacacagtgtttccaactgtccaatatgttcaatcctcagacagaggaggaggttggctgggacacagaaatcaaagatgatgtgatcgaagagtgtaataagcatgggggtgtgatccatatttacgtggacaaaaactcagcacaaggcaacgtgtatgtgaagtgccccagcattgccgcagccatcgccgctgtcaacgcgctccatggccgctggtttgctggaaaaatgatcactgccgcatatgtcccactgccgacgtatcataaccttttccccgatagcatgacagcaactcaactgctcgtaccttcccggaggtag

SEQ ID NO: 84613 - DNA, 1014 bp, Artificial Sequence
  derived and/or modified sequence
tagagccctttcagaaaggacaagtctccagtacgcgaaccaattgacaacctcacaccagaagaacgcgatgctagaaccgtcttttgtatgcagttagccgctcgaataagaccgagagatcttgaagagtttttcagtactgttggaaaagttcgggacgtgaggatgatcagtgacagaaatagccgccgttcgaaagggatcgcctatgtcgaattcgtggatgtcagttcagtgcccttggccatcgggctcaccggacagagagtgctgggtgtgcccatcattgtccaagcatcccaggccgagaagaaccgggctgccgctatggccaataatctgcagaaagggagtgccggtcccatgcgcctctacgtcggtagcctgcactttaatattaccgaagacatgctgcgcggaatcttcgagcccttcggcaggttcagcgacagtgagtgcgcgaaaaaagccctggaacagctgaatgggttcgaacttgctgggaggcccatgaaggtcggccatgtcactgagcggaccgatgcgtctagcgcctcctctttcctcgattctgacgagctcgaaaggactggcattgacctcggcaccacgggacgcctccaactcatggccaggctggctgagggtacggggctgcagatcccaccagcagctcaacaagctttgcagatgtccggaagcttagcattcggcgcagtcgccgaattcagctttgtcatcgacctgcaaacccggttgagtcagcagactgaagcctccgctttggccgctgcagccagtgtgcagcctcttgcaacacaatgttttcagctgtccaacatgtttaatccccaaacagaagaagaagtgggctgggacacagagataaaggacgatgtgattgaggaatgtaataaacacggcggagttattcacatctacgtggacaagaattccgcgcaaggtaatgtatacgtgaaatgtccctccattgccgcagccatcgcctag

SEQ ID NO: 84614 - DNA, 1527 bp, Artificial Sequence
  derived and/or modified sequence
atggccgatgacattgacatcgaagctatgctggaggctccttacaaaaaagacgaaaacaaactatcttccgccaatggtcacgaggagaggagcaaaaagcgcaaaaagtccaagagtcgctctagatcccacgaaagaaagcgctccaagagcaaggagcgcaagcgttctcgagatcgcgaacgtaagaaaagtaaatcaagggagcggaaaagatcccgctctaaggagagacggaggtcgaggagtcgttcccgggacaggcgcttcaggggcagatacagatctccatatcggaggagatcccggtcgaagtccccatttcgaaaggataagtctcccgtgagagagcccattgataatttaactcccgaggagagagatgccagaacggtgttttgcatgcagttggccgcaaggatccgtccaagggacctggaagagttcttctccaccgtgggcaaagtccgtgacgtccgcatgatctcagatagaaactctaggcgctctaagggcatcgcctatgtggagtttgtcgatgtttcttccgtgcctttagcgattggcctgacagggcagagggtactgggcgtgcctatcatagtgcaggcttctcaggcagagaagaaccgagccgctgccatggctaataacctacagaagggcagcgcaggccctatgagattgtacgtaggcagcttacattttaacattacggaggatatgttgagaggcattttcgaacccttcggtaggattgagtccatccaactaatgatggacagtgagaccggacggtcgaagggctacggatttatcacattctcagattccgaatgcgcaaagaaggcccttgagcagcttaatggctttgagctcgctggcaggcctatgaaagtcggccatgtcacagaaagaaccgacgcaagctcagcaagtagctttttggatagtgacgaactcgagagaaccgggatagatctggggactaccgggaggttgcaactcatggctaggctcgccgagggaaccggtctgcagattccgcctgccgctcagcaggccctacagatgtctggctcactcgcctttggtgcggtcgccgagttttcatttgtgatcgatttgcaaactaggctgtcccagcaaacggaggctagcgctctggctgcggcagctagcgtccagcctctggcaacccagtgttttcaattatccaatatgttcaacccacagacagaggaggaagtgggatgggataccgagatcaaagacgacgtgatagaagagtgtaacaagcacgggggagtgatacatatctacgtagataagaatagcgctcagggcaatgtttacgtcaaatgtcccagcattgcggcagcaatcgccgctgtgaacgctctgcatggaaggtggttcgccggtaagatgattacagccgcatacgtgcccttacccacgtatcacaatctctttcctgactcaatgaccgcaacgcaactcctagtgccctctcggagatag

SEQ ID NO: 84615 - DNA, 1008 bp, Artificial Sequence
  derived and/or modified sequence
aagtccattcagaaaagacaagagccctgtgagagaacctattgataatttaactcctgaggaaagagatgcaaggacagtcttctgtatgcagctggcggcaagaattcgaccaagggatttggaagagtttttctctacagtaggaaaggttcgagatgtgaggatgatttctgacagaaattcaagacgttccaaaggaattgcttatgtggagttcgtcgatgttagctcagtgcctctagcaataggattaactggccaacgagttttaggcgtgccaatcatagtacaggcatcacaggcagaaaaaaacagagctgcagcaatggcaaacaatttacaaaagggaagtgctggacctatgaggctttatgtgggctcattacacttcaacataactgaagatatgcttcgtgggatctttgagccttttggaagattttctgactcagaatgtgccaaaaaggctttggaacaacttaatggatttgaactagcaggaagaccaatgaaagttggtcatgttactgaacgtactgatgcttcgagtgctagttcatttttggacagtgatgaactggaaaggactggaattgatttgggaacaactggtcgtcttcagttaatggcaagacttgcagagggtacaggtttgcagattccgccagcagcacagcaagctctacagatgagtggctctttggcatttggtgctgtggcagaattctcttttgttatagatttgcaaacaagactttcccagcagactgaagcttcagctttagctgcagctgcctctgttcagccacttgcaacacaatgtttccaactctctaacatgtttaaccctcaaacagaagaagaagttggatgggataccgagattaaggatgatgtgattgaagaatgtaataaacatggaggagttattcatatttatgttgacaaaaattcagctcagggcaatgtgtatgtgaagtgcccatcaattgctgcagctattgc

SEQ ID NO: 84616 - DNA, 2109 bp, Artificial Sequence
  derived and/or modified sequence
cctagccgtccttggaacccgatattcgggctgggcggttccgcggcctgggcctaggggcttaacagtagcaacagaagcggcggcggcggcagcagcagcagcagcagcagcaatctcttcccgaacacgagcaccacaggcgcccgaaggccggaacaggcgtttagagaaaatggcagacgatattgatattgaagcaatgcttgaggctccttacaagaaggatgagaacaagttgagcagtgccaacggccatgaagaacgtagcaaaaagaggaaaaaaagcaagagcagaagtcgtagtcatgaacgaaagagaagcaaaagtaaggaacggaagcgaagtagagacagagaaaggaaaaagagcaaaagccgtgaaagaaagcgaagtagaagcaaagagaggcgacggagccgctcaagaagtcgagatcgaagatttagaggccgctacagaagtccttacagacgacgttcccgaagcaaaagtccattcagaaaagacaagagccctgtgagagaacctattgataatttaactcctgaggaaagagatgcaaggacagtcttctgtatgcagctggcggcaagaattcgaccaagggatttggaagagtttttctctacagtaggaaaggttcgagatgtgaggatgatttctgacagaaattcaagacgttccaaaggaattgcttatgtggagttcgtcgatgttagctcagtgcctctagcaataggattaactggccaacgagttttaggcgtgccaatcatagtacaggcatcacaggcagaaaaaaacagagctgcagcaatggcaaacaatttacaaaagggaagtgctggacctatgaggctttatgtgggctcattacacttcaacataactgaagatatgcttcgtgggatctttgagccttttggaagaattgaaagtatccagctgatgatggacagtgaaactggtcgatccaagggatatggatttattacattttctgactcagaatgtgccaaaaaggctttggaacaacttaatggatttgaactagcaggaagaccaatgaaagttggtcatgttactgaacgtactgatgcttcgagtgctagttcatttttggacagtgatgaactggaaaggactggaattgatttgggaacaactggtcgtcttcagttaatggcaagacttgcagagggtacaggtttgcagattccgccagcagcacagcaagctctacagatgagtggctctttggcatttggtgctgtggcagaattctcttttgttatagatttgcaaacaagactttcccagcagactgaagcttcagctttagctgcagctgcctctgttcagccacttgcaacacaatgtttccaactctctaacatgtttaaccctcaaacagaagaagaagttggatgggataccgagattaaggatgatgtgattgaagaatgtaataaacatggaggagttattcatatttatgttgacaaaaattcagctcagggcaatgtgtatgtgaagtgcccatcaattgctgcagctattgctgctgtcaatgcattgcatggcaggtggtttgctggtaaaatgataacagcagcatatgtacctcttccaacttaccacaacctgtttcctgattctatgacagcaacacagctactggttccaagtagacgatgaaggaagatatagtcccttatgtatatagctttttttctttcttgagaattcatcttgagttatcttttatttagataaaaataaagaggcaaggatctactgtcatttgtatgcaatttcctgttaccttgaaaaaataaaaatgttaacaggaatgcagtgtgctcattctccctaaatagtaaatcccactgtatacaaaactgttctcttgttctgccttttaaaatgttcatgtagaaaattaatgaactataggaatagctctaggagaacaaatgtgctttctgtaaaaaggcagaccagggatgtaatgtttttaatgtttcagaagcctaactttttacacagtggttacatttcacatttcactaatgttgatatttggctgatggttgagcagtttc

SEQ ID NO: 84617 - protein, 726 aa, Artificial Sequence
  derived and/or modified sequence
MLQTKDLIWTLFFLGTAVSLQVDIVPSQGEISVGESKFFLCQVAGDAKDKDISWFSPNGEKLTPNQQRISVVWNDDSSSTLTIYNANIDDAGIYKCVVTGEDGSESEATVNVKIFQKLMFKNAPTPQEFREGEDAVIVCDVVSSLPPTIIWKHKGRDVILKKDVRFIVLSNNYLQIRGIKKTDEGTYRCEGRILARGEINFKDIQVIVNVPPTIQARQNIVNATANLGQSVTLVCDAEGFPEPTMSWTKDGEQIEQEEDDEKYIFSDDSSQLTIKKVDKNDEAEYICIAENKAGEQDATIHLKVFAKPKITYVENQTAMELEEQVTLTCEASGDPIPSITWRTSTRNISSEEKTLDGHMVVRSHARVSSLTLKSIQYTDAGEYICTASNTIGQDSQSMYLEVQYAPKLQGPVAVYTWEGNQVNITCEVFAYPSATISWFRDGQLLPSSNYSNIKIYNTPSASYLEVTPDSENDFGNYNCTAVNRIGQESLEFILVQADTPSSPSIDQVEPYSSTAQVQFDEPEATGGVPILKYKAEWRAVGEEVWHSKWYDAKEASMEGIVTIVGLKPETTYAVRLAALNGKGLGEISAASEFKTQPVQGEPSAPKLEGQMGEDGNSIKVNLIKQDDGGSPIRHYLVRYRALSSEWKPEIRLPSGSDHVMLKSLDWNAEYEVYVVAENQQGKSKAAHFVFRTSAQPTAIPATLGGNSASYTFVSLLFSAVTLLLLC

SEQ ID NO: 84618 - DNA, 2181 bp, Artificial Sequence
  derived and/or modified sequence
atgctgcagaccaaggacctgatctggaccctgttcttcctgggcaccgccgtgagcctgcaggtggacatcgtgcccagccagggcgagatcagcgtgggcgagagcaagttcttcctgtgccaggtggccggcgacgccaaggacaaggacatcagctggttcagccccaacggcgagaagctgacccccaaccagcagagaatcagcgtggtgtggaacgacgacagcagcagcaccctgaccatctacaacgccaacatcgacgacgccggcatctacaagtgcgtggtgaccggcgaggacggcagcgagagcgaggccaccgtgaacgtgaagatcttccagaagctgatgttcaagaacgcccccaccccccaggagttcagagagggcgaggacgccgtgatcgtgtgcgacgtggtgagcagcctgccccccaccatcatctggaagcacaagggcagagacgtgatcctgaagaaggacgtgagattcatcgtgctgagcaacaactacctgcagatcagaggcatcaagaagaccgacgagggcacctacagatgcgagggcagaatcctggccagaggcgagatcaacttcaaggacatccaggtgatcgtgaacgtgccccccaccatccaggccagacagaacatcgtgaacgccaccgccaacctgggccagagcgtgaccctggtgtgcgacgccgagggcttccccgagcccaccatgagctggaccaaggacggcgagcagatcgagcaggaggaggacgacgagaagtacatcttcagcgacgacagcagccagctgaccatcaagaaggtggacaagaacgacgaggccgagtacatctgcatcgccgagaacaaggccggcgagcaggacgccaccatccacctgaaggtgttcgccaagcccaagatcacctacgtggagaaccagaccgccatggagctggaggagcaggtgaccctgacctgcgaggccagcggcgaccccatccccagcatcacctggagaaccagcaccagaaacatcagcagcgaggagaagaccctggacggccacatggtggtgagaagccacgccagagtgagcagcctgaccctgaagagcatccagtacaccgacgccggcgagtacatctgcaccgccagcaacaccatcggccaggacagccagagcatgtacctggaggtgcagtacgcccccaagctgcagggccccgtggccgtgtacacctgggagggcaaccaggtgaacatcacctgcgaggtgttcgcctaccccagcgccaccatcagctggttcagagacggccagctgctgcccagcagcaactacagcaacatcaagatctacaacacccccagcgccagctacctggaggtgacccccgacagcgagaacgacttcggcaactacaactgcaccgccgtgaacagaatcggccaggagagcctggagttcatcctggtgcaggccgacacccccagcagccccagcatcgaccaggtggagccctacagcagcaccgcccaggtgcagttcgacgagcccgaggccaccggcggcgtgcccatcctgaagtacaaggccgagtggagagccgtgggcgaggaggtgtggcacagcaagtggtacgacgccaaggaggccagcatggagggcatcgtgaccatcgtgggcctgaagcccgagaccacctacgccgtgagactggccgccctgaacggcaagggcctgggcgagatcagcgccgccagcgagttcaagacccagcccgtgcagggcgagcccagcgcccccaagctggagggccagatgggcgaggacggcaacagcatcaaggtgaacctgatcaagcaggacgacggcggcagccccatcagacactacctggtgagatacagagccctgagcagcgagtggaagcccgagatcagactgcccagcggcagcgaccacgtgatgctgaagagcctggactggaacgccgagtacgaggtgtacgtggtggccgagaaccagcagggcaagagcaaggccgcccacttcgtgttcagaaccagcgcccagcccaccgccatccccgccaccctgggcggcaacagcgccagctacaccttcgtgagcctgctgttcagcgccgtgaccctgctgctgctgtgctag

SEQ ID NO: 84619 - DNA, 2181 bp, Artificial Sequence
  derived and/or modified sequence
atgctacagaccaaggacctgatttggactctgttcttcctgggaacagcagtgtcactgcaggtagacatcgttcctagtcagggcgagataagcgtgggcgagtcgaaattctttctctgtcaggtggcaggcgatgcgaaagataaggatatatcctggttctcaccgaatggcgagaaactgactccaaaccagcagagaatcagcgttgtgtggaacgacgactcctcctccacccttacaatctacaatgctaatatcgacgatgccgggatctacaagtgcgtggttactggggaagatggatcagaatctgaggccactgtgaacgtgaaaatttttcagaaattgatgttcaagaatgcaccaactcctcaggagtttcgcgaaggcgaggacgccgtgatcgtttgtgacgtggtctcttccttgccgcccaccatcatctggaagcacaaaggtcgcgacgttattctgaagaaagacgttcggttcattgtgctgtctaacaattacttacagattcgcggaatcaagaagacagacgaaggcacctaccgatgcgagggacgcatcctggcccggggagaaatcaactttaaagacatacaggtaatcgttaacgtcccgcccaccattcaggccagacaaaacattgttaacgctactgctaatcttggccagtccgttactctggtgtgtgacgcagagggatttcccgagcctaccatgtcttggacaaaggatggagaacagatcgaacaggaagaagacgatgagaaatatatctttagcgacgattcttctcagctgacaattaaaaaagttgacaagaacgatgaggcagagtatatctgtatcgcagaaaacaaagcgggcgagcaggatgctacaatccatttgaaagtgtttgcaaaaccaaagattacctatgttgaaaaccaaactgcgatggaactagaggagcaggtcactttaacctgcgaggcatcaggagaccccatccctagcatcacttggaggacttctacccggaacatctcttccgaagaaaaaacgctggacggacacatggtcgtccggtcccacgcaagggtttcttctctgactctgaaaagtatccagtatacagacgctggggagtacatttgtacagcctccaacaccatcggacaggatagccagtccatgtacttggaggttcaatacgctcccaagctgcagggtccagtcgcggtgtacacttgggaagggaaccaggtcaatatcacttgtgaggtgttcgcttacccttcagccactatttcatggtttcgggatggacagctgctgccaagtagcaattactctaatataaaaatctacaacacaccaagtgccagctacttagaagtgacgccagacagtgagaatgattttggaaattacaactgcacagccgttaatagaattgggcaggaatccctggaattcattctggtgcaggcagacactccatccagcccgtccatagaccaggttgaaccgtactcatcaactgctcaggtgcagtttgatgagccagaggcaacgggcggagtgcccatactcaagtacaaggcagaatggcgtgctgtaggtgaggaggtatggcattccaagtggtatgatgccaaagaagccagcatggaaggtattgtgaccatcgtagggctgaagcctgaaactacttatgccgtgagactggccgccctaaacggtaagggacttggggagatcagcgctgcgtctgagttcaaaacacagccagttcagggagagcctagcgctccaaaactggagggccagatgggggaggatgggaacagcatcaaggtgaatctgatcaagcaggatgacggaggctctccaatacgtcattatctggtgcggtacagggccctgagttctgagtggaaacctgagattagactgccgtctggctctgatcatgtgatgctgaagagccttgactggaatgcggagtacgaagtctacgtcgtcgctgagaaccaacaaggaaaatccaaagccgctcatttcgtgtttaggacgagtgcccagccgacggccattcccgccacactgggcggcaattctgcctcttatacgttcgtctcattgctgtttagcgctgtcacgcttcttctgttgtgctag

SEQ ID NO: 84620 - DNA, 2181 bp, Artificial Sequence
  derived and/or modified sequence
atgctgcagaccaaggacctgatctggaccctcttcttcctgggcacagctgtgtccctgcaggtggacatcgtgcccagccagggcgagatctctgtgggggagagcaagttcttcctgtgccaggtggccggagatgccaaggacaaggacatctcctggttcagccccaacggggagaagctgacccccaaccagcagaggatctctgtggtgtggaatgatgacagcagcagcaccctgaccatctacaatgccaacattgatgatgctggcatctacaagtgtgtggtgactggagaagatggcagcgagagcgaggccaccgtgaatgtgaagatcttccagaagctgatgttcaagaatgcccccaccccccaggagttccgggagggagaagatgctgtgattgtgtgtgatgtggtgagcagcctgccccccaccatcatctggaagcacaagggcagagatgtgatcctgaagaaggatgtgcgcttcatcgtgctgagcaacaactacctgcagatccggggcatcaagaagacagatgagggcacctaccgctgtgagggccgcatcctggcccggggggagatcaacttcaaggacatccaggtgattgtgaatgtgccccccaccatccaggcccggcagaacatcgtgaatgccacagccaacctgggccagagcgtgaccctggtgtgtgatgctgagggcttccctgagcccaccatgtcctggaccaaggatggagagcagatcgagcaggaggaggatgatgagaagtacatcttcagtgatgacagcagccagctgaccatcaagaaggtggacaagaatgatgaagctgagtacatctgcatcgccgagaacaaggccggggagcaggatgccaccatccacctgaaggtgtttgccaagcccaagatcacctacgtggagaaccagacagccatggagctggaggagcaggtgaccctgacctgtgaggccagcggggaccccatccccagcatcacctggaggaccagcaccaggaacatcagcagcgaggagaagaccctggatggccacatggtggtgcgcagccacgcccgggtgagcagcctgaccctgaagagcatccagtacacagatgctggggagtacatctgcacagccagcaacaccatcggccaggacagccagagcatgtacctggaggtgcagtatgcccccaagctgcagggccctgtggccgtgtacacctgggagggcaaccaggtgaacatcacctgtgaggtgtttgcctaccccagcgccaccatctcctggttcagagatggccagctgctgcccagcagcaactacagcaacatcaagatctacaacacccccagcgccagctacctggaggtgaccccagacagtgaaaatgactttggaaactacaactgcacagctgtgaacagaattggccaggagagcctggagttcatcctggtgcaggccgacacccccagcagccccagcattgaccaggtggagccctacagcagcacagcccaggtgcagtttgatgagcctgaggccactggaggagtgcccatcctgaagtacaaggccgagtggagggctgtgggggaggaggtgtggcacagcaagtggtatgatgccaaggaggcctccatggagggcatcgtgaccatcgtgggcctgaagccagagaccacctatgctgtgcggctggccgccctgaatggcaagggcctgggggagatctctgctgccagcgagttcaagacccagcctgtgcagggcgagcccagcgcccccaagctggagggccagatgggagaagatggcaacagcatcaaggtgaacctgatcaagcaggatgatggcggcagccccatccgccactacctggtgcgctaccgggccctgagcagcgagtggaagccagagatccggctgcccagcggcagtgaccacgtgatgctgaagagcctggactggaatgcagaatatgaggtgtatgtggtggccgagaaccagcagggcaagagcaaggccgcccactttgtgttccgcaccagcgcccagcccacagccatcccagccaccctgggcggcaacagcgccagctacacctttgtgtccctgctcttctctgctgtgaccctgctgctgctgtgctag

SEQ ID NO: 84621 - DNA, 2181 bp, Artificial Sequence
  derived and/or modified sequence
atgctgcagaccaaggacctgatctggaccctgttcttcctgggcaccgccgtgagcctacaggtcgacatagtcccatcccagggcgaaatctccgtaggagaatctaaattcttcctatgccaggttgctggggatgctaaggacaaggacatctcttggttttcccccaacggggaaaaattaacccccaatcagcaacgcatatcggttgtgtggaacgatgattcctctagtaccctaactatttacaacgccaacattgacgacgctggtatctataagtgcgtggtaacgggcgaggatggtagcgagagtgaggcgacggtgaatgtaaagatcttccagaagctgatgttcaaaaatgcacctactcctcaggaattcagggaaggagaagacgctgtgattgtgtgcgatgttgtctctagtctgcctccgacaatcatttggaagcacaagggcagggacgtgatcctgaagaaggacgtgagattcattgttttgagcaacaattatctgcagatccggggcatcaaaaaaactgacgaaggaacatatcgctgcgagggacggattcttgcccggggagaaattaacttcaaggatattcaggttattgtgaacgtcccccctactattcaagcaaggcaaaacattgtgaatgcaacggccaaccttggtcaaagcgtgacccttgtgtgcgatgctgaaggcttcccagagccaacaatgtcttggactaaggatggcgaacagatcgagcaggaggaagacgatgagaagtacatttttagcgacgactcctcacagttgactatcaagaaggtcgacaaaaatgacgaagccgagtacatctgcattgccgaaaacaaagccggagaacaggatgcaaccatccatttgaaagtgttcgcaaaaccgaaaataacatacgtggaaaatcagacagccatggaactggaggaacaggttaccctgacgtgcgaagcttcaggagatcctatcccttctattacctggcgcacctctactcgaaacatcagttccgaagagaaaactcttgacggccatatggtggtcaggtcgcatgctagagtatcctcactgacccttaaatccatccagtatactgatgcaggcgagtacatctgcactgcaagcaacaccatcgggcaggatagccagagcatgtacctggaggtccaatacgcccccaaactgcagggccccgttgcagtgtacacgtgggagggaaaccaagtgaatattacttgcgaagtctttgcctacccatccgcaaccatttcatggtttcgagacggacaactcctgcccagctcaaattacagcaacatcaagatttataatacaccatctgcgtcatacctcgaagtaacccctgactcagaaaatgacttcggtaactacaattgtactgcagttaacagaatcggacaggagagtctggagtttatcttagtccaagccgataccccaagctctccttccatcgaccaggtcgagccctatagttccaccgcacaggttcaatttgacgagcctgaggccacagggggggtgccaattctcaaatacaaagcagaatggcgtgctgttggtgaggaggtctggcacagtaaatggtacgacgcaaaagaagcctctatggagggcatcgtgactatcgtcggcctgaagcctgagacgacgtacgctgtaagactggccgctctgaatgggaaggggctcggtgagatctccgctgcgtcagaattcaagacacagcccgttcagggtgaaccgtccgctcctaagctagaaggacagatgggcgaggacggaaattccattaaagtgaacttgattaagcaggatgacggtggttcaccaattaggcactaccttgtgcggtatcgggctctgtcatccgaatggaagcctgagatccggctgccttccggatctgatcatgtgatgttgaagagtctcgactggaacgcagagtacgaggtctacgttgttgcggaaaatcagcagggaaagtcaaaggctgcgcattttgtctttcgtacatctgcccagcctaccgccatcccggccactctcggaggtaatagcgcttcatatactttcgtttccttgttattcagcgctgtcacactgcttctgctgtgttag

SEQ ID NO: 84622 - DNA, 4698 bp, Artificial Sequence
  derived and/or modified sequence
cgggccagcgcaaggatctccgagttgcgagtgtgctgaggctgggactgtcactcattctccgatcagcgcgtgaacgcagctcggctgccgctggcaggaaacaattctgcaaaaataatcatactcagcctggcaattgtctgcccctaggtctgtcgctcagccgccgtccacactcgctgcaggggggggggcacagaatttaccgcggcaagaacatccctcccagccagcagattacaatgctgcaaactaaggatctcatctggactttgtttttcctgggaactgcagtttctctgcaggtggatattgttcccagccagggggagatcagcgttggagagtccaaattcttcttatgccaagtggcaggagatgccaaagataaagacatctcctggttctcccccaatggagaaaagctcaccccaaaccagcagcggatctcagtggtgtggaatgatgattcctcctccaccctcaccatctataacgccaacatcgacgacgccggcatttacaagtgtgtggttacaggcgaggatggcagtgagtcagaggccaccgtcaacgtgaagatctttcagaagctcatgttcaagaatgcgccaaccccacaggagttccgggagggggaagatgccgtgattgtgtgtgatgtggtcagctccctcccaccaaccatcatctggaaacacaaaggccgagatgtcatcctgaaaaaagatgtccgattcatagtcctgtccaacaactacctgcagatccggggcatcaagaaaacagatgagggcacttatcgctgtgagggcagaatcctggcacggggggagatcaacttcaaggacattcaggtcattgtgaatgtgccacctaccatccaggccaggcagaatattgtgaatgccaccgccaacctcggccagtccgtcaccctggtgtgcgatgccgaaggcttcccagagcccaccatgagctggacaaaggatggggaacagatagagcaagaggaagacgatgagaagtacatcttcagcgacgatagttcccagctgaccatcaaaaaggtggataagaacgacgaggctgagtacatctgcattgctgagaacaaggctggcgagcaggatgcgaccatccacctcaaagtctttgcaaaacccaaaatcacatatgtagagaaccagactgccatggaattagaggagcaggtcactcttacctgtgaagcctccggagaccccattccctccatcacctggaggacttctacccggaacatcagcagcgaagaaaagactctggatgggcacatggtggtgcgtagccatgcccgtgtgtcgtcgctgaccctgaagagcatccagtacactgatgccggagagtacatctgcaccgccagcaacaccatcggccaggactcccagtccatgtaccttgaagtgcaatatgccccaaagctacagggccctgtggctgtgtacacttgggaggggaaccaggtgaacatcacctgcgaggtatttgcctatcccagtgccacgatctcatggtttcgggatggccagctgctgccaagctccaattacagcaatatcaagatctacaacaccccctctgccagctatctggaggtgaccccagactctgagaatgattttgggaactacaactgtactgcagtgaaccgcattgggcaggagtccttggaattcatccttgttcaagcagacaccccctcttcaccatccatcgaccaggtggagccatactccagcacagcccaggtgcagtttgatgaaccagaggccacaggtggggtgcccatcctcaaatacaaagctgagtggagagcagttggtgaagaagtatggcattccaagtggtatgatgccaaggaagccagcatggagggcatcgtcaccatcgtgggcctgaagcccgaaacaacgtacgccgtaaggctggcggcgctcaatggcaaagggctgggtgagatcagcgcggcctccgagttcaagacgcagccagtccaaggggaacccagtgcacctaagctcgaagggcagatgggagaggatggaaactctattaaagtgaacctgatcaagcaggatgacggcggctcccccatcagacactatctggtcaggtaccgagcgctctcctccgagtggaaaccagagatcaggctcccgtctggcagtgaccacgtcatgctgaagtccctggactggaatgctgagtatgaggtctacgtggtggctgagaaccagcaaggaaaatccaaggcggctcattttgtgttcaggacctcggcccagcccacagccatcccagcaaccttgggaggcaattctgcatcctacacctttgtctcattgcttttctctgcagtgactcttcttttgctctgttaggaacttgaacacaaaaattaaatttgcttaaaagcccagttcctatgaaaaagatcagtgccccctttggaagaacctggcaggaccaccatggccacagctgctgagcaaccattctgtgtggaagagaaggttttgtgattggaaaaagctttacctccagacatgtcaccactcacagatacttttgtgccacttcataaggagtttgccccctttttaatggcagtaaaaagaatttgagagctctttctttaaatgctatttttaaaaaccatcatgctagatttacagagaagtttctgcatatctgctacttgttgcattttgggttcaaacctaaatatgatgtagcagaggaagaattctaagtaccttctaaagcttgtgtcagattgttaaaatcaccacacattcccctcattctaactctgtgctccttgtcctcccttcaataataattggctttgcttgcaattaagcatttaagtgcccatgttaaaagagccagaccgcactgattcacatgagcgttttgctgacatgatgggcaactgaagtcacccctgttgcccatgcactggaaaaaaagttgaatttgttggatattttctggggctgatgaacgttctgggatgtgctttcagtcctcgtattacggccagcaccttacactgtctctgtgaacggggccaagccatgatgtgccaacaagtgtcagctttgaaaggtgtttgtctcccaatcggggtgactcccctgctgcctggcagcatgtcgcagatcagcacagagtggggccgtggttcagcagtgacccacagaatggctttgagcatcagtctacaggacaggttggaagcatccactgtgaaccaggcattagtcccctacctggcctgtgtgtgctcagtagagaaggagagggacaggccactcccagactgcccagcccaggagggttaataaattggggccgagccaacctgtcagtgcttcctgaatgccccagcctctgtattggtgcgttggttcagtgacattttctaaactctcctgaaaatccagctgctcctccctgctgcttgggagttcacccaggagaggaaatgggtgtgttttgttaaggtcccttgtggagactcagggctgaatcctgcttggtaatatcagtgtgtgtgcttggggatggaccttctactgaataaaaactccctccctccccccattgtggtcacatatcattctacatatctcatctctgagcatctccatggaagcttgatttttgttctttttggtttctttatgtatttttttctgttgttattattttttaatgttcaaagactagcctttccctttgggattccaaatgatcccatgctgtggtctgaggggcaaagccacctatgttggcgctcgccattaatccccagcgctcagtttagaggctcacgtgcagacatcagaggctccatgctgcacagtagctcaggcagggtagtgcctctcaacccagccacaaaactctccccgctggagtcccagatggcgcttcacaccagggcagtggaggcaggcatggtttttgggcacagggcagagcataaggatcccaggtcagtgtgggagagctactggctcttaggatcaccttgggcagaagtcacacggcttcatcctaggagggcccagcttgggagtctgcctccccctgatcccaggaccacccacaggagaggggcagtgtccatctttctgaagggaccctttggagatctcgtcctaagtgtggagaggactgacgtggccctgtcatctcaacacatcccagggtcaggcaggcctcagctgaaacaatgtcagggtcctcaagggtcccatttagacagacccacggcttgtaacagtgcgctcctcaggaggcagcactagcgcatacccactccccacggacactgagttcctggtgacagctgcagccccagccccgccaggagtcctggagacagcagccctcagagaccctgcaggagtgagtgcaccccaccttgctcagccacaccccactcccctgtgccctgtagttgtgctgcccatgctccacacaccatggggcccctttgctcatttttggactatttatacagcaggtttggatcatgtttttctactaataagaatgctaacattgttgtgtagataatcagtgagggctttatgaagtttacacctttgcattattaaaggaaataacagttcatgtgaa

SEQ ID NO: 84623 - DNA, 2181 bp, Artificial Sequence
  derived and/or modified sequence
atgctccagacaaaggacctgatttggacactgttttttctcggcaccgcggtgagtcttcaggtcgacattgttccttcacaaggcgaaatctccgtgggcgaatctaagttcttcttgtgccaagtcgctggagacgcaaaggacaaggacatttcctggttcagccctaatggcgagaaactgactcccaatcagcagcgaatctctgttgtttggaacgatgacagctcgtctactctgaccatctataacgctaacatagacgacgcgggaatttataagtgtgtcgtgacaggcgaggacggaagtgagtcagaggccaccgtgaatgtgaaaatctttcagaaattgatgttcaagaacgcccctaccccccaggaattcagggaaggcgaagacgctgtgatcgtgtgcgacgtggtcagttccctgcccccaaccatcatctggaaacataagggtagggacgtgattttgaagaaagatgtgagatttatcgtgctgagtaataactacctgcagattagggggatcaagaagaccgatgagggtacctataggtgcgaggggagaatcctcgcaaggggcgagataaatttcaaggacatccaagtgatagtgaatgtccctcctaccattcaggccaggcaaaacatcgtgaacgcaaccgctaacctaggccagtcagtcacgctagtatgtgacgccgagggctttccggaacctacgatgtcttggaccaaggatggagaacagattgagcaagaggaggatgacgaaaaatacatcttctctgacgattcctcccagctgactataaagaaagtcgacaaaaatgatgaggctgagtatatctgcatcgcggaaaacaaggccggtgagcaagatgccaccattcacctcaaggtgttcgcgaaacctaagataacctacgtcgagaatcaaactgcaatggaacttgaggagcaggtcactttgacctgcgaggcttctggagatcccattcccagcatcacctggcggaccagtaccaggaacatcagctcagaagaaaaaacactggacggacatatggtagtgagatcccacgccagagtttcctctctgacacttaaatctattcagtacacagatgccggtgagtatatttgcacagcaagcaatacgattggacaggattcccagtccatgtatctcgaggtgcagtacgctccaaagcttcaaggtccggtggcagtatacacctgggagggaaaccaagtgaatattacttgcgaagtgttcgcttatcctagcgcaaccatttcctggttcagggacggccagctcctgccatcatctaactattccaatatcaaaatatataatactccgtcggcatcatatttggaagtgacgcccgacagcgagaatgacttcggaaactataattgcacagctgtcaataggataggtcaggaatcactcgagttcatcctggtgcaagcggatacaccaagtagtccaagcatcgaccaggtcgaaccttacagctcaactgcccaagtgcagttcgatgagcctgaggcaacaggcggtgtacccatcctgaagtataaggcggaatggcgtgccgtgggagaagaggtctggcacagtaagtggtatgacgccaaagaagcgtccatggaaggaattgtgactatcgtggggctaaaacccgagactacctacgcagttagactggcggctcttaatggtaaggggttaggggagatttcagccgcatcagagttcaagactcagccggtgcagggagagccttccgcacctaagctcgaggggcagatgggtgaagacggaaactccatcaaggtgaacctcattaaacaagacgatggcggatctcccatccgccattacctagttcgctaccgcgcactgagcagtgagtggaagcccgaaataaggctgccttcgggcagcgaccatgttatgctaaagagccttgactggaatgccgagtatgaagtttatgtggttgccgaaaaccaacaaggaaaaagcaaggccgctcactttgtgtttagaaccagcgctcagcctacagccatacccgctacgctcgggggtaactccgcctcatatacatttgtctccctcctcttttccgccgtgacactgctcttgctatgctag

SEQ ID NO: 84624 - DNA, 429 bp, Artificial Sequence
  derived and/or modified sequence
atggctacctctcttgactttaagacatacgtggatcaagcgtgccgcgccgcagaagagttcgtcaatatctactatgaaaccatggataagcgccgccgcgccctgactagattgtacctggataaggctacactgatatggaacggaaacgctgtttccggactcgatgccttaaataacttcttcgacacactgcctagttccgaattccaagtgaacatgctggactgccaaccagtgcacgagcaggccacgcagtcccagaccactgtgctggttgttacgtctggaacagttaagttcgatggcaataaacaacatttctttaaccagaacttcctgttaacagcccagagcacccccaacaatacagtgtggaaaatagcctcagattgctttaggtttcaggactggagctctagttag

SEQ ID NO: 84625 - DNA, 429 bp, Artificial Sequence
  derived and/or modified sequence
atggccaccagcctggacttcaagacctacgtggaccaggcctgcagagctgctgaggagtttgtgaacatctactatgagaccatggacaagagaagaagagccctgacccggctgtacctggacaaggccaccctcatctggaatggaaatgctgtgtctggcctggatgccctgaacaacttctttgacaccctgcccagcagcgagttccaggtgaacatgctggactgccagcctgtgcatgagcaggccacccagagccagaccaccgtgctggtggtgaccagcggcaccgtgaagtttgatggcaacaagcagcacttcttcaaccagaacttcctgctgacagcccagagcacccccaacaacacagtgtggaagatcgccagtgactgcttccgcttccaggactggagcagcagctag

SEQ ID NO: 84626 - DNA, 429 bp, Artificial Sequence
  derived and/or modified sequence
atggccaccagcctggacttcaagacctacgtggaccaggcctgccgagctgcagaagaatttgtgaatatttactatgaaaccatggacaagcggcggagagctctgacccggttatacctggataaagcaacattaatatggaacgggaatgccgtgtccggattggatgcacttaataatttcttcgacactctgccatcgtcggaattccaagtgaatatgctcgactgccaaccagtgcatgagcaagccacccagagccagacgacagtgctggtcgttacatcagggacggtgaaatttgacggcaataaacagcatttttttaaccagaactttctgctgaccgcacagagcacccccaacaatacagtgtggaagattgcttcggattgcttccgctttcaggactggagttcgagctag

SEQ ID NO: 84627 - DNA, 429 bp, Artificial Sequence
  derived and/or modified sequence
atggctaccagcttagatttcaaaacatatgttgatcaggcctgtcgggctgccgaagagtttgtgaatatctactatgagactatggataagcgcagacgggctctgaccagattatatctggataaggctaccttaatttggaatgggaacgccgtctccggacttgatgcgctcaataatttcttcgacacgctgccaagttcagaatttcaggtaaacatgttagattgccagcccgttcacgaacaggcgactcaatctcagacaaccgttctggttgtaacatcaggtacagtgaaatttgacggtaacaagcagcactttttcaaccagaatttcttactgacagcccagtccactcctaataacactgtgtggaagatcgccagtgattgtttccgatttcaggattggagcagtagctag

SEQ ID NO: 84628 - DNA, 429 bp, Artificial Sequence
  derived and/or modified sequence
atggccaccagcctggacttcaagacctacgtggaccaggcctgcagagccgccgaggagttcgtgaacatctactacgagaccatggacaagagaagaagagccctgaccagactgtacctggacaaggccaccctgatctggaacggcaacgccgtgagcggcctggacgccctgaacaacttcttcgacaccctgcccagcagcgagttccaggtgaacatgctggactgccagcccgtgcacgagcaggccacccagagccagaccaccgtgctggtggtgaccagcggcaccgtgaagttcgacggcaacaagcagcacttcttcaaccagaacttcctgctgaccgcccagagcacccccaacaacaccgtgtggaagatcgccagcgactgcttcagattccaggactggagcagcagctag

SEQ ID NO: 84629 - DNA, 345 bp, Artificial Sequence
  derived and/or modified sequence
atggataagaggcgcagagcactgacgagactgtacttagacaaagcaaccctaatttggaatggcaacgctgtgtcgggcttggatgcattgaataatttctttgacactctgccctccagtgaattccaggttaatatgctcgactgccagcccgtgcatgagcaagccacacagtctcagaccacggtgctggttgtaacttcagggaccgtcaaatttgacggcaataagcagcattttttcaaccagaattttcttttgacagcccaaagtacaccaaacaacaccgtctggaaaatcgctagtgattgcttcagattccaggattggtccagctcgtag

SEQ ID NO: 84630 - DNA, 345 bp, Artificial Sequence
  derived and/or modified sequence
atggacaaacgccgccgcgctctcacacggttgtacttagataaagccactcttatttggaatgggaacgccgtaagtgggctggacgcactgaataactttttcgatacactgccaagctcagaattccaggtgaatatgctggattgccagcctgttcacgagcaggccacccagtctcagacgaccgtgctggtggtaacctcaggaactgtcaagttcgacggtaataagcaacatttctttaaccagaactttctgctgactgcacagagtactcctaataacacggtatggaagatagcttctgattgttttcgattccaggactggtctagcagctag

SEQ ID NO: 84631 - DNA, 345 bp, Artificial Sequence
  derived and/or modified sequence
atggacaagagaagaagagccctgacccggctgtacctggacaaggccaccctcatctggaatggaaatgctgtgtctggcctggatgccctgaacaacttctttgacaccctgcccagcagcgagttccaggtgaacatgctggactgccagcctgtgcatgagcaggccacccagagccagaccaccgtgctggtggtgaccagcggcaccgtgaagtttgatggcaacaagcagcacttcttcaaccagaacttcctgctgacagcccagagcacccccaacaacacagtgtggaagatcgccagtgactgcttccgcttccaggactggagcagcagctag

SEQ ID NO: 84632 - DNA, 345 bp, Artificial Sequence
  derived and/or modified sequence
atggacaagcggcggcgggccctgacccggctgtacctggacaaggctactttgatttggaacggtaatgccgtgagtgggctggatgctcttaacaattttttcgacacactgccgagtagtgaattccaggtgaacatgttggactgtcagccagtccacgaacaggctacgcagagccagaccaccgtgcttgttgtcacttccggtaccgtgaaatttgatggaaacaagcagcacttcttcaatcagaattttctgttgactgcgcaaagcacacccaacaacaccgtctggaaaattgccagcgattgttttcgcttccaggactggagtagctcttag

SEQ ID NO: 84633 - DNA, 345 bp, Artificial Sequence
  derived and/or modified sequence
atggacaagcggcggcgggccctgacccggctgtacctggacaaggcaaccctcatctggaacggcaacgccgtctcgggcttggatgcactaaataacttcttcgacacccttcctagctcagagttccaagtgaacatgctggactgtcagccggtgcacgaacaggccactcagagccagaccactgtcctggtggtgacaagcggtactgtgaaatttgatggtaataagcaacacttcttcaaccagaacttcctactcacggcccagagcaccccaaacaatacagtgtggaaaattgcgtcggattgtttcagattccaggactggagctcaagctag

SEQ ID NO: 84634 - DNA, 345 bp, Artificial Sequence
  derived and/or modified sequence
atggacaagcgtagaagagccttaacacgtctgtacttggacaaggccacccttatctggaacggcaacgctgtctcaggattggatgcactgaacaattttttcgatactctcccatcttccgagtttcaggttaacatgctggactgccaacccgtgcatgaacaggctactcagtcacagaccaccgtactggtggtaacctctggcactgtgaaatttgatggcaacaagcagcactttttcaaccagaactttctgctaactgcacagtccactcccaacaacacagtttggaaaattgcaagcgattgctttagattccaggattggtcgagctcttag

SEQ ID NO: 84635 - DNA, 345 bp, Artificial Sequence
  derived and/or modified sequence
atggataaacgccgaagggctctcacgcggttgtacctcgacaaggccacattgatatggaacggtaatgccgtttccggtctggatgctttgaataacttttttgacaccttgccatcctcagagttccaggtaaacatgctggattgccaaccagtacatgagcaggcaactcagtcgcaaactacggttttggtcgtgacaagcggaacagtgaagttcgacggtaataagcagcacttttttaatcagaactttctcctcaccgcccagtccacccccaacaataccgtatggaagatcgcttcagactgcttcagattccaggactggagttcctcatag

SEQ ID NO: 84636 - DNA, 345 bp, Artificial Sequence
  derived and/or modified sequence
atggacaagagaagaagagccctgaccagactgtacctggacaaggccaccctgatctggaacggcaacgccgtgagcggcctggacgccctgaacaacttcttcgacaccctgcccagcagcgagttccaggtgaacatgctggactgccagcccgtgcacgagcaggccacccagagccagaccaccgtgctggtggtgaccagcggcaccgtgaagttcgacggcaacaagcagcacttcttcaaccagaacttcctgctgaccgcccagagcacccccaacaacaccgtgtggaagatcgccagcgactgcttcagattccaggactggagcagcagctag

SEQ ID NO: 84637 - DNA, 2414 bp, Artificial Sequence
  derived and/or modified sequence
cagcagaacatctgtggaacatcccctgatacatgaagctctctccccagccttcatgtgttaacctggggatgatgtggacctgggcactgtggatgctcccctcactctgcaaattcagcctggcagttcctaacaggccatggacccgtaccttgcccagcggttgaggaatcctgctagactacagcctggcaacctcccccggacttgctgtacctggtgaaataggctaccagccagatgaccttggtgcatgggacccatccgcatctctgccagctaagcctgagaacatttcctgtgtctactactataggaaaaatttaacctgcacttggagtccaggaaaggaaaccagttatacccagtacacagttaagagaacttacgcttttggagaaaaacatgataattgtacaaccaatagttctacaagtgaaaatcgtgcttcgtgctcttttttccttccaagaataacgatcccagataattataccattgaggtggaagctgaaaatggagatggtgtaattaaatctcatatgacatactggagattagagaacatagcgaaaactgaaccacctaagattttccgtgtgaaaccagttttgggcatcaaacgaatgattcaaattgaatggataaagcctgagttggcgcctgtttcatctgatttaaaatacacacttcgattcaggacagtcaacagtaccagctggatggaagtcaacttcgctaagaaccgtaaggataaaaaccaaacgtacaacctcacggggctgcagccttttacagaatatgtcatagctctgcgatgtgcggtcaaggagtcaaagttctggagtgactggagccaagaaaaaatgggaatgactgaggaagaagctccatgtggcctggaactgtggagagtcctgaaaccagctgaggcggatggaagaaggccagtgcggttgttatggaagaaggcaagaggagccccagtcctagagaaaacacttggctacaacatatggtactatccagaaagcaacactaacctcacagaaacaatgaacactactaaccagcagcttgaactgcatctgggaggcgagagcttttgggtgtctatgatttcttataattctcttgggaagtctccagtggccaccctgaggattccagctattcaagaaaaatcatttcagtgcattgaggtcatgcaggcctgcgttgctgaggaccagctagtggtgaagtggcaaagctctgctctagacgtgaacacttggatgattgaatggtttccggatgtggactcagagcccaccaccctttcctgggaatctgtgtctcaggccacgaactggacgatccagcaagataaattaaaacctttctggtgctataacatctctgtgtatccaatgttgcatgacaaagttggcgagccatattccatccaggcttatgccaaagaaggcgttccatcagaaggtcctgagaccaaggtggagaacattggcgtgaagacggtcacgatcacatggaaagagattcccaagagtgagagaaagggtatcatctgcaactacaccatcttttaccaagctgaaggtggaaaaggattctccaagacagtcaattccagcatcttgcagtacggcctggagtccctgaaacgaaagacctcttacattgttcaggtcatggccagcaccagtgctgggggaaccaacgggaccagcataaatttcaagacattgtcattcagtgtctttgagattatcctcataacttctctgattggtggaggccttcttattctcattatcctgacagtggcatatggtctcaaaaaacccaacaaattgactcatctgtgttggcccaccgttcccaaccctgctgaaagtagtatagccacatggcatggagatgatttcaaggataagctaaacctgaaggagtctgatgactctgtgaacacagaagacaggatcttaaaaccatgttccacccccagtgacaagttggtgattgacaagttggtggtgaactttgggaatgttctgcaagaaattttcacagatgaagccagaacgggtcaggaaaacaatttaggaggggaaaagaatgggtatgtgacctgccccttcaggcctgattgtcccctggggaaaagttttgaggagctcccagtttcacctgagattccgcccagaaaatcccaatacctacgttcgaggatgccagaggggacccgcccagaagccaaagagcagcttctcttttctggtcaaagtttagtaccagatcatctgtgtgaggaaggagccccaaatccatatttgaaaaattcagtgacagccagggaatttcttgtgtctgaaaaacttccagagcacaccaagggagaagtctaa

SEQ ID NO: 84638 - protein, 681 aa, Artificial Sequence
  derived and/or modified sequence
MCIRQLKFFTTACVCECPQNILSPQPSCVNLGMMWTWALWMLPSLCKFSLAALPAKPENISCVYYYRKNLTCTWSPGKETSYTQYTVKRTYAFGEKHDNCTTNSSTSENRASCSFFLPRITIPDNYTIEVEAENGDGVIKSHMTYWRLENIAKTEPPKIFRVKPVLGIKRMIQIEWIKPELAPVSSDLKYTLRFRTVNSTSWMEVNFAKNRKDKNQTYNLTGLQPFTEYVIALRCAVKESKFWSDWSQEKMGMTEEEAPCGLELWRVLKPAEADGRRPVRLLWKKARGAPVLEKTLGYNIWYYPESNTNLTETMNTTNQQLELHLGGESFWVSMISYNSLGKSPVATLRIPAIQEKSFQCIEVMQACVAEDQLVVKWQSSALDVNTWMIEWFPDVDSEPTTLSWESVSQATNWTIQQDKLKPFWCYNISVYPMLHDKVGEPYSIQAYAKEGVPSEGPETKVENIGVKTVTITWKEIPKSERKGIICNYTIFYQAEGGKGFSKTVNSSILQYGLESLKRKTSYIVQVMASTSAGGTNGTSINFKTLSFSVFEIILITSLIGGGLLILIILTVAYGLKKPNKLTHLCWPTVPNPAESSIATWHGDDFKDKLNLKESDDSVNTEDRILKPCSTPSDKLVIDKLVVNFGNVLQEIFTDEARTGQENNLGGEKNGTRILSSCPTSI

SEQ ID NO: 84639 - DNA, 2046 bp, Artificial Sequence
  derived and/or modified sequence
atgtgcatccggcagttgaaattttttaccacggcctgtgtatgcgagtgccctcagaatatcctgtccccccagcccagctgtgtgaacctggggatgatgtggacttgggccctgtggatgctgccatctctctgcaaatttagcctggcagctctccctgctaaaccggagaacattagttgtgtttattattatcgcaagaacctgacctgcacatggtcgcccggcaaagagacatcctatacgcaatatacagtcaagcggacttatgcctttggcgagaagcatgacaattgtacaacaaattctagcacaagcgagaacagggcctcatgttcatttttcctgcctaggattactatccccgataattacacgatcgaagttgaagccgagaacggcgacggcgtcattaagagccacatgacttactggagattggagaatatcgccaagactgagccaccaaagatcttccgagtgaaaccggtgctgggtataaagagaatgatccaaatcgaatggatcaagcccgagctagcacccgtaagttccgacctcaagtacacccttagatttcgcaccgtgaattcgacttcctggatggaggttaatttcgccaagaacagaaaggataagaatcagacctacaaccttacaggtttacagccatttacagagtatgtcatagctttaaggtgtgctgtcaaggagagcaaattttggagtgattggagtcaggagaaaatgggaatgaccgaggaagaagcaccatgtgggttggaactctggcgagttcttaaacctgctgaagcggatggcagacgccccgtccgcctgctttggaagaaagcccgcggggcacctgtgctggagaaaacactgggttacaacatttggtattatccagaatctaacactaacctgactgagaccatgaatactactaatcagcagctggagttgcatcttgggggggaatctttttgggtcagtatgatcagttacaactctttgggaaaaagcccagtcgccaccctgcggatccccgctatccaggaaaaaagtttccagtgtattgaagtaatgcaggcctgtgttgcggaggatcagctggtggtgaaatggcaaagttccgctctcgacgtgaacacttggatgatagaatggttccctgacgttgatagtgaaccgacaactttgtcttgggagtcagtttcacaagcgaccaattggacaatacaacaggataagttgaaaccattctggtgttacaatatcagcgtgtaccccatgctgcatgacaaggtcggcgagccctattccatacaggcatacgcgaaggaaggagtaccttctgaggggccagagaccaaggtggagaacattggagttaagaccgtgacgattacatggaaggagatccctaagtcagagcgcaaaggcataatctgtaactatactatcttttatcaagctgagggcggcaaaggattcagcaaaaccgtgaatagttctattttacagtacggtttggagtccctcaagcgcaaaacctcatatatcgtacaggtgatggcctctacctcggccggtgggaccaatggtacctccatcaatttcaaaactctaagcttttccgtgttcgagatcatactgatcacctccctcatcggaggaggccttctgatactgattatcttaacggtagcatacggcctgaagaaacctaacaagttgacgcatctgtgctggcctaccgtgccgaaccccgccgagtctagcattgccacttggcatggagacgattttaaagacaaactgaaccttaaggagagcgacgacagcgttaacaccgaagatagaatccttaagccctgctcaacccctagcgataagctcgtgatagacaaacttgtcgtgaacttcggcaacgtcctacaggagatctttaccgacgaggctcggacaggccaggaaaataacttaggcggcgagaagaatgggacaagaatcttgtcctcatgccctacttctatatag

SEQ ID NO: 84640 - DNA, 2529 bp, Artificial Sequence
  derived and/or modified sequence
tgtgtgtgcagtatgaaaattgagacaggaaggcagagtgtcagcttgttccacctcagctgggaatgtgcatcaggcaactcaagtttttcaccacggcatgtgtctgtgaatgtccgcaaaacattctctctccccagccttcatgtgttaacctggggatgatgtggacctgggcactgtggatgctcccctcactctgcaaattcagcctggcagctctgccagctaagcctgagaacatttcctgtgtctactactataggaaaaatttaacctgcacttggagtccaggaaaggaaaccagttatacccagtacacagttaagagaacttacgcttttggagaaaaacatgataattgtacaaccaatagttctacaagtgaaaatcgtgcttcgtgctcttttttccttccaagaataacgatcccagataattataccattgaggtggaagctgaaaatggagatggtgtaattaaatctcatatgacatactggagattagagaacatagcgaaaactgaaccacctaagattttccgtgtgaaaccagttttgggcatcaaacgaatgattcaaattgaatggataaagcctgagttggcgcctgtttcatctgatttaaaatacacacttcgattcaggacagtcaacagtaccagctggatggaagtcaacttcgctaagaaccgtaaggataaaaaccaaacgtacaacctcacggggctgcagccttttacagaatatgtcatagctctgcgatgtgcggtcaaggagtcaaagttctggagtgactggagccaagaaaaaatgggaatgactgaggaagaagctccatgtggcctggaactgtggagagtcctgaaaccagctgaggcggatggaagaaggccagtgcggttgttatggaagaaggcaagaggagccccagtcctagagaaaacacttggctacaacatatggtactatccagaaagcaacactaacctcacagaaacaatgaacactactaaccagcagcttgaactgcatctgggaggcgagagcttttgggtgtctatgatttcttataattctcttgggaagtctccagtggccaccctgaggattccagctattcaagaaaaatcatttcagtgcattgaggtcatgcaggcctgcgttgctgaggaccagctagtggtgaagtggcaaagctctgctctagacgtgaacacttggatgattgaatggtttccggatgtggactcagagcccaccaccctttcctgggaatctgtgtctcaggccacgaactggacgatccagcaagataaattaaaacctttctggtgctataacatctctgtgtatccaatgttgcatgacaaagttggcgagccatattccatccaggcttatgccaaagaaggcgttccatcagaaggtcctgagaccaaggtggagaacattggcgtgaagacggtcacgatcacatggaaagagattcccaagagtgagagaaagggtatcatctgcaactacaccatcttttaccaagctgaaggtggaaaaggattctccaagacagtcaattccagcatcttgcagtacggcctggagtccctgaaacgaaagacctcttacattgttcaggtcatggccagcaccagtgctgggggaaccaacgggaccagcataaatttcaagacattgtcattcagtgtctttgagattatcctcataacttctctgattggtggaggccttcttattctcattatcctgacagtggcatatggtctcaaaaaacccaacaaattgactcatctgtgttggcccaccgttcccaaccctgctgaaagtagtatagccacatggcatggagatgatttcaaggataagctaaacctgaaggagtctgatgactctgtgaacacagaagacaggatcttaaaaccatgttccacccccagtgacaagttggtgattgacaagttggtggtgaactttgggaatgttctgcaagaaattttcacagatgaagccagaacgggtcaggaaaacaatttaggaggggaaaagaatgggactagaattctgtcttcctgcccaacttcaatataagtgtggactaaaatgcgagaaaggtgtcctgtggtctatgcaaattagaaaggacatgcagagttttccaactaggaagactgaatctgtggccccaagagaaccatctctgaagactgggtatgtggtcttttccacacatggaccacctacggatgcaatctgtaatgcatgtgcatgagaagtctgttattaagtagagtgtgaaaacatggttatggtaataggaacagcttttaaaatgcttttgtatttgggcctttcatacaaaaaagccataataccattttcatgtaatgctatacttctatactattttcatgtaatactatacttctatactattttcatgtaatactatacttctatactattttcatgtaatactatacttctatattaaagttttacccactca

SEQ ID NO: 84641 - DNA, 2046 bp, Artificial Sequence
  derived and/or modified sequence
atgtgcatccggcagctgaagttcttcaccacagcctgtgtgtgtgagtgcccccagaacatcctgagcccccagcccagctgtgtgaacctgggcatgatgtggacctgggccctgtggatgctgcccagcctgtgcaagttcagcctggccgccctgcctgccaagccagagaacatcagctgtgtgtactactacaggaagaacctgacctgcacctggagccctgggaaggagaccagctacacccagtacacagtgaagaggacctacgcctttggagagaagcatgacaactgcaccaccaacagcagcaccagcgagaacagagccagctgcagcttcttcctgccccgcatcaccatcccagacaactacaccatcgaggtggaggctgaaaatggagatggagtcatcaagagccacatgacctactggaggctggagaacatcgccaagacagagccccccaagatcttccgggtgaagcctgtgctgggcatcaagaggatgatccagatcgagtggatcaagccagagctggcccctgtgtccagtgacctgaagtacaccctgcgcttcagaacagtgaacagcacctcctggatggaggtgaactttgccaagaacaggaaggacaagaaccagacctacaacctgaccggcctgcagcccttcacagaatatgtgattgccctgcgctgtgctgtgaaggagagcaagttctggagcgactggagccaggagaagatgggcatgacagaggaggaggccccctgtggcctggagctgtggagggtgctgaagccagctgaggctgatggccggcggcctgtgcggctgctgtggaagaaggcccggggggcccctgtgctggagaagaccctgggctacaacatctggtactacccagagagcaacaccaacctgacagagaccatgaacaccaccaaccagcagctggagctgcacctgggcggggagagcttctgggtgtccatgatctcctacaacagcctgggcaagagccctgtggccaccctgcgcatcccagccatccaggagaagagcttccagtgcatcgaggtgatgcaggcctgtgtggccgaggaccagctggtggtgaagtggcagagcagcgccctggatgtgaacacctggatgattgagtggttcccagatgtggacagcgagcccaccaccctgtcctgggagagcgtgtcccaggccaccaactggaccatccagcaggacaagctgaagcccttctggtgctacaacatctctgtgtaccccatgctgcatgacaaggtgggggagccctacagcatccaggcctatgccaaggagggcgtgcccagcgagggccctgagaccaaggtggagaacatcggcgtgaagacagtgaccatcacctggaaggagatccccaagtctgagaggaagggcatcatctgcaactacaccatcttctaccaggccgagggcggcaagggcttcagcaagacagtgaacagcagcatcctgcagtatggcctggagagcctgaagaggaagaccagctacatcgtgcaggtgatggccagcaccagcgctgggggcaccaacggcaccagcatcaacttcaagaccctgtccttctctgtgtttgagatcatcctgatcaccagcctgattggaggcggcctgctgatcctgatcatcctgactgtggcctacggcctgaagaagcccaacaagctgacccacctgtgctggcccaccgtgcccaacccagctgagagcagcatcgccacctggcatggagatgacttcaaggacaagctgaacctgaaggagagtgatgattctgtgaacacagaagatcgcatcctgaagccctgcagcacccccagcgacaagctggtgattgacaagctggtggtgaactttggaaatgtgctgcaggagatcttcacagatgaggccaggacaggccaggagaacaacctgggcggggagaagaatggcacccgcatcctgagcagctgccccaccagcatctag

SEQ ID NO: 84642 - DNA, 2046 bp, Artificial Sequence
  derived and/or modified sequence
atgtgcatccggcagctgaagttcttcaccaccgcctgcgtgtgcgaatgtccacaaaacattctgtctcctcaaccctcgtgtgtcaatttaggtatgatgtggacctgggccctttggatgctgccgtccctctgtaagtttagcctcgcggccttgccggcgaagccagagaacataagttgcgtgtattactatcggaaaaatcttacctgcacctggagtccaggaaaggagacttcttatacacaatataccgtgaaaaggacctacgctttcggggagaagcatgacaattgtacaaccaattccagcacttcagaaaatcgagcttcatgcagctttttcctgccgcgtattacaatcccagacaattacacgattgaagtggaggccgagaacggagatggagtcataaagtcccacatgacctattggcggctcgagaacatagctaagaccgaaccaccgaaaatattccgcgttaaacccgtcctcggaataaagagaatgattcaaatcgaatggatcaaacctgagttggcgcccgtatcgagcgatctcaagtataccctgaggtttagaacagtgaattctacctcctggatggaggtcaacttcgccaaaaacaggaaagataaaaatcaaacatacaacttaactgggttacaaccatttaccgagtatgtaattgctttgcggtgcgccgtcaaggagagcaaattttggagtgattggagtcaggagaagatgggtatgactgaggaggaggcgccttgcggcctcgaactttggcgcgtgttgaagccggcagaagccgacggaagacgacccgtgaggttgctttggaaaaaagccagaggagctcctgtactggaaaaaaccctaggatataacatttggtactaccccgagagtaatactaatctgactgaaactatgaatacgaccaatcagcaattggagctccacctgggtggagagagcttctgggtcagtatgatctcctacaattctctcggtaagtcaccagtggcaacattaagaatccctgctattcaggaaaaaagttttcagtgcatcgaagttatgcaagcttgtgtggcagaggatcaacttgtggtaaagtggcagtccagcgctctggacgtcaatacctggatgatcgagtggtttcctgacgtggactccgagcccacaactttgagctgggagtcagtgtcccaggccactaactggaccatccagcaggacaaacttaaaccgttctggtgctataatattagcgtgtaccccatgttacatgataaggtcggagagccgtactctatacaggcttacgcaaaggagggcgtgccaagcgaggggcccgaaacgaaggtcgaaaatatcggcgtaaagacggtgaccattacttggaaagaaatacctaaatccgagcgaaagggaatcatttgtaactatacgattttctatcaggccgaaggtggcaaaggcttcagtaagacagttaactcttctattctgcagtatggattggaaagtctgaagcggaaaactagctacatcgtgcaagtgatggcgtccacctccgctgggggcaccaacggaacttccatcaactttaagaccctaagttttagcgtatttgaaattattcttattacttccctgatcggcggcggactgctgatactgatcatcctgactgtagcttatgggttgaagaaacctaataaactgacccatctttgctggccaaccgtaccgaatcccgcagaaagttccattgccacctggcatggcgacgactttaaagataagctaaacctcaaagaatccgacgatagtgttaacacggaagacagaatactcaaaccatgttctacaccgtccgacaaattggtgattgacaagctggtggtgaattttgggaatgtgctgcaggaaatatttaccgatgaagctcgaacaggccaggagaataatttgggaggcgagaagaatggtactagaatcttgtcgtcttgccctacgtccatatag

SEQ ID NO: 84643 - DNA, 2046 bp, Artificial Sequence
  derived and/or modified sequence
atgtgcataagacaactcaaattcttcacaacagcatgcgtctgtgagtgcccgcagaacatcctctctcctcaaccaagctgcgtcaaccttggtatgatgtggacatgggcgttgtggatgcttcccagcctgtgtaaattctctttggccgcactccccgcaaaaccagagaacatcagctgcgtctattactatcggaagaacctgacgtgtacgtggtcccctgggaaggaaacttcttatacccagtataccgtcaaaagaacttatgctttcggagaaaagcacgacaactgtactactaatagctcaacgtctgaaaatcgagccagttgctcttttttcctcccacgaattactatccccgacaactataccattgaggtggaggcagagaacggggatggggtgatcaagagtcatatgacatattggaggctggagaacatcgcaaagacagaacccccaaaaatttttagggtcaagccagtgctggggatcaagaggatgatccagattgaatggatcaagccagaactggctcctgtgtcgtccgatctgaagtatactctgagattccgcacagttaactctaccagttggatggaggttaacttcgccaagaatcgtaaagataagaaccagacctataacctgaccgggctgcagccattcaccgagtacgtgatagcactgcgctgtgcagttaaagaatccaaattctggagcgattggtcacaggagaagatgggaatgaccgaagaggaggctccctgcggactggagctctggcgggtccttaaacctgctgaagcagatggcaggagaccagtgcggctcctctggaagaaagccagaggagcgccagttttagagaagaccctgggctataacatctggtactatccagagtctaatacaaatctcactgaaacgatgaatacaaccaatcaacagctcgagcttcacctggggggagagtccttctgggtgtcaatgatcagttacaacagcttgggcaaatctcccgtggccacgttacggattcccgctatccaggagaagagctttcaatgcatcgaagtgatgcaagcgtgcgtcgccgaggaccaactagtcgtaaaatggcagagtagcgcccttgatgtgaacacatggatgatcgagtggttccccgacgtcgattctgaaccgaccacgttaagctgggagagcgtgtcacaggctactaattggactatccagcaggacaagctaaaaccgttctggtgttacaacattagcgtgtaccccatgctgcacgataaggtaggcgagccctacagtattcaagcatacgcgaaggagggtgtgccgtctgagggacctgaaactaaggtggagaacatcggcgtaaagacagtaactatcacttggaaggagattcccaagagtgagagaaagggcataatttgcaactatacaatattctaccaagcggaagggggaaaggggttctcaaagacagtgaattctagcattctccagtatggcctggagtccctaaagcggaaaacatcttatattgtacaggtgatggcttccacttccgccggtggcactaatgggactagcataaacttcaaaaccctaagcttctccgttttcgagatcatccttataacgtctctgattggcggtggtttactcatcctcattatcctgacggtggcgtatgggctgaaaaagcccaacaagctgactcatctctgctggcccaccgtgcctaaccccgcagagtcttctattgcgacatggcatggggatgacttcaaggacaaattaaacctgaaagaatccgacgactctgtgaacacggaagatcggattctcaaaccttgttctactccaagcgacaaactggtgatcgacaagttggtcgttaatttcgggaacgtgctgcaggagatcttcacggatgaggccaggacagggcaggaaaacaatctgggaggtgagaagaacggcacacgcatcctgagttcttgtcctacctccatctag

SEQ ID NO: 84644 - DNA, 2046 bp, Artificial Sequence
  derived and/or modified sequence
atgtgcatcagacagctgaagttcttcaccaccgcctgcgtgtgcgagtgcccccagaacatcctgagcccccagcccagctgcgtgaacctgggcatgatgtggacctgggccctgtggatgctgcccagcctgtgcaagttcagcctggccgccctgcccgccaagcccgagaacatcagctgcgtgtactactacagaaagaacctgacctgcacctggagccccggcaaggagaccagctacacccagtacaccgtgaagagaacctacgccttcggcgagaagcacgacaactgcaccaccaacagcagcaccagcgagaacagagccagctgcagcttcttcctgcccagaatcaccatccccgacaactacaccatcgaggtggaggccgagaacggcgacggcgtgatcaagagccacatgacctactggagactggagaacatcgccaagaccgagccccccaagatcttcagagtgaagcccgtgctgggcatcaagagaatgatccagatcgagtggatcaagcccgagctggcccccgtgagcagcgacctgaagtacaccctgagattcagaaccgtgaacagcaccagctggatggaggtgaacttcgccaagaacagaaaggacaagaaccagacctacaacctgaccggcctgcagcccttcaccgagtacgtgatcgccctgagatgcgccgtgaaggagagcaagttctggagcgactggagccaggagaagatgggcatgaccgaggaggaggccccctgcggcctggagctgtggagagtgctgaagcccgccgaggccgacggcagaagacccgtgagactgctgtggaagaaggccagaggcgcccccgtgctggagaagaccctgggctacaacatctggtactaccccgagagcaacaccaacctgaccgagaccatgaacaccaccaaccagcagctggagctgcacctgggcggcgagagcttctgggtgagcatgatcagctacaacagcctgggcaagagccccgtggccaccctgagaatccccgccatccaggagaagagcttccagtgcatcgaggtgatgcaggcctgcgtggccgaggaccagctggtggtgaagtggcagagcagcgccctggacgtgaacacctggatgatcgagtggttccccgacgtggacagcgagcccaccaccctgagctgggagagcgtgagccaggccaccaactggaccatccagcaggacaagctgaagcccttctggtgctacaacatcagcgtgtaccccatgctgcacgacaaggtgggcgagccctacagcatccaggcctacgccaaggagggcgtgcccagcgagggccccgagaccaaggtggagaacatcggcgtgaagaccgtgaccatcacctggaaggagatccccaagagcgagagaaagggcatcatctgcaactacaccatcttctaccaggccgagggcggcaagggcttcagcaagaccgtgaacagcagcatcctgcagtacggcctggagagcctgaagagaaagaccagctacatcgtgcaggtgatggccagcaccagcgccggcggcaccaacggcaccagcatcaacttcaagaccctgagcttcagcgtgttcgagatcatcctgatcaccagcctgatcggcggcggcctgctgatcctgatcatcctgaccgtggcctacggcctgaagaagcccaacaagctgacccacctgtgctggcccaccgtgcccaaccccgccgagagcagcatcgccacctggcacggcgacgacttcaaggacaagctgaacctgaaggagagcgacgacagcgtgaacaccgaggacagaatcctgaagccctgcagcacccccagcgacaagctggtgatcgacaagctggtggtgaacttcggcaacgtgctgcaggagatcttcaccgacgaggccagaaccggccaggagaacaacctgggcggcgagaagaacggcaccagaatcctgagcagctgccccaccagcatctag

SEQ ID NO: 84645 - protein, 662 aa, Artificial Sequence
  derived and/or modified sequence
MKLSPQPSCVNLGMMWTWALWMLPSLCKFSLAALPAKPENISCVYYYRKNLTCTWSPGKETSYTQYTVKRTYAFGEKHDNCTTNSSTSENRASCSFFLPRITIPDNYTIEVEAENGDGVIKSHMTYWRLENIAKTEPPKIFRVKPVLGIKRMIQIEWIKPELAPVSSDLKYTLRFRTVNSTSWMEVNFAKNRKDKNQTYNLTGLQPFTEYVIALRCAVKESKFWSDWSQEKMGMTEEEAPCGLELWRVLKPAEADGRRPVRLLWKKARGAPVLEKTLGYNIWYYPESNTNLTETMNTTNQQLELHLGGESFWVSMISYNSLGKSPVATLRIPAIQEKSFQCIEVMQACVAEDQLVVKWQSSALDVNTWMIEWFPDVDSEPTTLSWESVSQATNWTIQQDKLKPFWCYNISVYPMLHDKVGEPYSIQAYAKEGVPSEGPETKVENIGVKTVTITWKEIPKSERKGIICNYTIFYQAEGGKGFSKTVNSSILQYGLESLKRKTSYIVQVMASTSAGGTNGTSINFKTLSFSVFEIILITSLIGGGLLILIILTVAYGLKKPNKLTHLCWPTVPNPAESSIATWHGDDFKDKLNLKESDDSVNTEDRILKPCSTPSDKLVIDKLVVNFGNVLQEIFTDEARTGQENNLGGEKNGTRILSSCPTSI

SEQ ID NO: 84646 - DNA, 1989 bp, Artificial Sequence
  derived and/or modified sequence
atgaagctctccccacagccttcttgcgtcaacctgggtatgatgtggacttgggcattatggatgcttccttccctgtgcaagttctcccttgccgcattaccagctaagccagaaaatatcagctgtgtgtattactaccggaagaacctcacctgcacttggtctccaggcaaggagaccagctacacgcagtatacggtgaaaaggacatacgcttttggagaaaagcatgataactgcactacaaactcctcgacatctgagaacagagctagctgttccttctttctgcctaggatcaccatccctgataactatacaatcgaggtggaggcagaaaacggagatggcgtaattaaatctcatatgacgtattggaggttggagaatattgccaaaactgagccacctaagatctttcgtgtgaaacccgtgcttggcattaaaagaatgatccagatagaatggattaaaccagagttagcgcctgtttccagcgacctgaagtacacactgcggtttagaactgtcaattctacaagttggatggaagtgaactttgcaaagaacaggaaggataagaatcaaacctacaacctcacgggcctacagccctttaccgagtatgtgattgccctgcgctgcgccgtgaaggagagcaaattctggtccgattggtctcaggagaagatgggtatgacagaagaagaggccccttgtggcctcgagctctggagagtgctcaagccagctgaagcagacggtcggaggccggtgaggctactgtggaagaaagcccgaggagccccagtgctggagaagacactgggttataatatctggtactatcctgagagtaataccaatttgacagaaaccatgaacaccacaaaccagcagcttgaactccaccttgggggcgagtccttttgggtgtcgatgatttcgtataatagtctcggcaagtccccagtggctacccttcgcattccagccattcaagagaagtctttccagtgcatcgaggtgatgcaggcatgtgttgctgaggatcaactcgtcgtaaagtggcaaagcagtgccttggacgtaaatacctggatgatcgagtggttcccagatgtggacagcgagccaacaaccttgtcttgggagagtgtgtcccaagcgacaaactggaccattcagcaagataaacttaaaccattttggtgctacaatatcagtgtctaccccatgctccatgataaagtcggcgaaccatactccatccaggcatacgctaaggaaggcgtgcctagcgaaggcccagagaccaaggtcgagaatattggtgtgaaaaccgtcacaataacctggaaagagatccctaaaagcgagagaaaagggatcatctgtaactacacaatcttctatcaggccgaaggcggcaaaggcttcagcaagaccgtaaattcaagcatcctgcagtacgggctggagtccctcaagcggaagacgtcctatatcgtgcaggttatggcaagtacctcagcaggtggtaccaacggcacaagcatcaattttaaaactttatcattctccgtattcgagattattcttattacttcactgatcggaggtggcttgttaattctgatcatcctaaccgtggcttacgggctgaagaagccgaacaagcttactcatttatgttggcccaccgtacctaatccagccgaatcgtccatagcaacctggcatggtgatgacttcaaggataaacttaaccttaaagagtccgacgactccgtgaacactgaggataggattctgaagccctgctccactccttccgacaagcttgtgatcgacaaattagtggtgaattttgggaacgtactccaggagatcttcaccgatgaagctcgaaccggccaggaaaataatctgggaggcgaaaaaaatgggactcgaatcctctcctcctgtcctaccagcatctag

SEQ ID NO: 84647 - DNA, 1989 bp, Artificial Sequence
  derived and/or modified sequence
atgaaactgtcaccgcagcccagctgtgtcaatctgggaatgatgtggacatgggctctgtggatgcttccaagcctgtgtaagtttagtctcgccgcccttcccgccaaacctgagaatattagttgtgtctactactatcgcaagaacctgacgtgcacgtggtcgcctggcaaggagactagctatactcagtatactgtgaaaaggacatacgccttcggcgagaaacatgacaattgtaccacaaacagtagtacctccgagaatcgcgcaagctgtagctttttcctcccaaggattacaattcccgataactacacaatcgaagtggaagcagaaaacggagatggagtcatcaagagccatatgacttactggaggctggaaaatattgcgaagaccgaacccccgaagattttcagggtgaaacctgtactcggaatcaagaggatgatacagatcgaatggattaagccagaactcgcaccggtgagtagcgatttaaaatacacccttaggtttagaacagtgaatagcacttcgtggatggaggtcaattttgctaagaataggaaggacaagaatcagacgtacaatctcacaggtttacagccattcactgagtatgtcattgcccttagatgcgctgtgaaagagtcaaagttctggtcagattggtcccaggaaaaaatggggatgacagaggaggaagccccatgtggactcgagctgtggcgggtactcaaaccagctgaggcagacggacggagacctgtcagactcctttggaaaaaggcaaggggggcccctgtgttggagaagacactgggatacaacatctggtactatccggaatctaacaccaatttgacggagactatgaacacaaccaaccagcagcttgagctccacttgggtggcgaaagcttctgggtctctatgatatcttacaactccttgggaaaaagccctgtagccactttgaggattccagctattcaggaaaaaagcttccaatgtatcgaggtgatgcaggcctgtgtcgctgaagatcaattggtggttaaatggcagtcttctgcactcgatgtcaacacttggatgatcgagtggttccccgatgttgattccgagcccaccaccctctcctgggaaagcgttagccaggcgacgaattggaccattcagcaggataagctgaagccgttctggtgctataatatctccgtgtaccccatgctgcatgataaggtgggcgagccctactccattcaggcctacgccaaggaaggcgttccaagtgaaggcccggagacaaaggtggagaacattggcgtcaaaaccgtgacaataacctggaaggaaatccctaaaagtgaaaggaagggaattatctgcaattacactatattctaccaggccgaagggggcaaggggttttccaagaccgtgaatagcagcatcctgcagtatggtctcgaatccttgaagagaaaaacgtcttacattgtgcaggtgatggcttccacgtccgccggcggcacaaatggcacttccataaattttaagaccctgagcttttcagtttttgaaatcattctgatcacaagccttattgggggcggactgctgatcctcatcatcctgactgtggcatacggccttaagaagcctaacaagctgacacacctgtgttggcccactgtgcccaaccctgctgaatcttcaattgccacttggcatggggatgacttcaaagataaactgaatttgaaggaatccgacgactccgtgaacacggaggataggattctgaagccttgctccacgccgtctgacaagctggtgatcgataagttggtggttaatttcggcaatgtgctgcaggaaattttcaccgatgaggccaggactgggcaggaaaacaatttaggcggtgaaaagaatggcacacgaatactgtcaagctgtccaacgtcaatctag

SEQ ID NO: 84648 - DNA, 2021 bp, Artificial Sequence
  derived and/or modified sequence
cagcagaacatctgtggaacatcccctgatacatgaagctctctccccagccttcatgtgttaacctggggatgatgtggacctgggcactgtggatgctcccctcactctgcaaattcagcctggcagctctgccagctaagcctgagaacatttcctgtgtctactactataggaaaaatttaacctgcacttggagtccaggaaaggaaaccagttatacccagtacacagttaagagaacttacgcttttggagaaaaacatgataattgtacaaccaatagttctacaagtgaaaatcgtgcttcgtgctcttttttccttccaagaataacgatcccagataattataccattgaggtggaagctgaaaatggagatggtgtaattaaatctcatatgacatactggagattagagaacatagcgaaaactgaaccacctaagattttccgtgtgaaaccagttttgggcatcaaacgaatgattcaaattgaatggataaagcctgagttggcgcctgtttcatctgatttaaaatacacacttcgattcaggacagtcaacagtaccagctggatggaagtcaacttcgctaagaaccgtaaggataaaaaccaaacgtacaacctcacggggctgcagccttttacagaatatgtcatagctctgcgatgtgcggtcaaggagtcaaagttctggagtgactggagccaagaaaaaatgggaatgactgaggaagaagctccatgtggcctggaactgtggagagtcctgaaaccagctgaggcggatggaagaaggccagtgcggttgttatggaagaaggcaagaggagccccagtcctagagaaaacacttggctacaacatatggtactatccagaaagcaacactaacctcacagaaacaatgaacactactaaccagcagcttgaactgcatctgggaggcgagagcttttgggtgtctatgatttcttataattctcttgggaagtctccagtggccaccctgaggattccagctattcaagaaaaatcatttcagtgcattgaggtcatgcaggcctgcgttgctgaggaccagctagtggtgaagtggcaaagctctgctctagacgtgaacacttggatgattgaatggtttccggatgtggactcagagcccaccaccctttcctgggaatctgtgtctcaggccacgaactggacgatccagcaagataaattaaaacctttctggtgctataacatctctgtgtatccaatgttgcatgacaaagttggcgagccatattccatccaggcttatgccaaagaaggcgttccatcagaaggtcctgagaccaaggtggagaacattggcgtgaagacggtcacgatcacatggaaagagattcccaagagtgagagaaagggtatcatctgcaactacaccatcttttaccaagctgaaggtggaaaaggattctccaagacagtcaattccagcatcttgcagtacggcctggagtccctgaaacgaaagacctcttacattgttcaggtcatggccagcaccagtgctgggggaaccaacgggaccagcataaatttcaagacattgtcattcagtgtctttgagattatcctcataacttctctgattggtggaggccttcttattctcattatcctgacagtggcatatggtctcaaaaaacccaacaaattgactcatctgtgttggcccaccgttcccaaccctgctgaaagtagtatagccacatggcatggagatgatttcaaggataagctaaacctgaaggagtctgatgactctgtgaacacagaagacaggatcttaaaaccatgttccacccccagtgacaagttggtgattgacaagttggtggtgaactttgggaatgttctgcaagaaattttcacagatgaagccagaacgggtcaggaaaacaatttaggaggggaaaagaatgggactagaattctgtcttcctgcccaacttcaatataa

SEQ ID NO: 84649 - DNA, 2903 bp, Artificial Sequence
  derived and/or modified sequence
tgaaaagacatgtgtgtgcagtatgaaaattgagacaggaaggcagagtgtcagcttgttccacctcagctgggaatgtgcatcaggcaactcaagtttttcaccacggcatgtgtctgtgaatgtccgcaaaacattagtttcactcttgtcgccaggttggagtacaatggcacgatcttggctcactgcaacctctgcctcccgggttcaagcgattctcctgcctcagcctcccgagtagctgggattacagttaacaataatgcaatccatttcccagcataagtgggtaagtgccactttgacttgggctgggcttaaaagcacaagaaaagctcgcagacaatcagagtggaaacactcccacatcttagtgtggataaattaaagtccagattgttcttcctgtcctgacttgtgctgtgggaggtggagttgcctttgatgcaaatcctttgagccagcagaacatctgtggaacatcccctgatacatgaagctctctccccagccttcatgtgttaacctggggatgatgtggacctgggcactgtggatgctcccctcactctgcaaattcagcctggcagctctgccagctaagcctgagaacatttcctgtgtctactactataggaaaaatttaacctgcacttggagtccaggaaaggaaaccagttatacccagtacacagttaagagaacttacgcttttggagaaaaacatgataattgtacaaccaatagttctacaagtgaaaatcgtgcttcgtgctcttttttccttccaagaataacgatcccagataattataccattgaggtggaagctgaaaatggagatggtgtaattaaatctcatatgacatactggagattagagaacatagcgaaaactgaaccacctaagattttccgtgtgaaaccagttttgggcatcaaacgaatgattcaaattgaatggataaagcctgagttggcgcctgtttcatctgatttaaaatacacacttcgattcaggacagtcaacagtaccagctggatggaagtcaacttcgctaagaaccgtaaggataaaaaccaaacgtacaacctcacggggctgcagccttttacagaatatgtcatagctctgcgatgtgcggtcaaggagtcaaagttctggagtgactggagccaagaaaaaatgggaatgactgaggaagaagctccatgtggcctggaactgtggagagtcctgaaaccagctgaggcggatggaagaaggccagtgcggttgttatggaagaaggcaagaggagccccagtcctagagaaaacacttggctacaacatatggtactatccagaaagcaacactaacctcacagaaacaatgaacactactaaccagcagcttgaactgcatctgggaggcgagagcttttgggtgtctatgatttcttataattctcttgggaagtctccagtggccaccctgaggattccagctattcaagaaaaatcatttcagtgcattgaggtcatgcaggcctgcgttgctgaggaccagctagtggtgaagtggcaaagctctgctctagacgtgaacacttggatgattgaatggtttccggatgtggactcagagcccaccaccctttcctgggaatctgtgtctcaggccacgaactggacgatccagcaagataaattaaaacctttctggtgctataacatctctgtgtatccaatgttgcatgacaaagttggcgagccatattccatccaggcttatgccaaagaaggcgttccatcagaaggtcctgagaccaaggtggagaacattggcgtgaagacggtcacgatcacatggaaagagattcccaagagtgagagaaagggtatcatctgcaactacaccatcttttaccaagctgaaggtggaaaaggattctccaagacagtcaattccagcatcttgcagtacggcctggagtccctgaaacgaaagacctcttacattgttcaggtcatggccagcaccagtgctgggggaaccaacgggaccagcataaatttcaagacattgtcattcagtgtctttgagattatcctcataacttctctgattggtggaggccttcttattctcattatcctgacagtggcatatggtctcaaaaaacccaacaaattgactcatctgtgttggcccaccgttcccaaccctgctgaaagtagtatagccacatggcatggagatgatttcaaggataagctaaacctgaaggagtctgatgactctgtgaacacagaagacaggatcttaaaaccatgttccacccccagtgacaagttggtgattgacaagttggtggtgaactttgggaatgttctgcaagaaattttcacagatgaagccagaacgggtcaggaaaacaatttaggaggggaaaagaatgggactagaattctgtcttcctgcccaacttcaatataagtgtggactaaaatgcgagaaaggtgtcctgtggtctatgcaaattagaaaggacatgcagagttttccaactaggaagactgaatctgtggccccaagagaaccatctctgaagactgggtatgtggtcttttccacacatggaccacctacggatgcaatctgtaatgcatgtgcatgagaagtctgttattaagtagagtgtgaaaacatggttatggtaataggaacagcttttaaaatgcttttgtatttgggcctttcatacaaaaaagccataataccattttcatgtaatgctatacttctatactattttcatgtaatactatacttctatactattttcatgtaatactatacttctatactattttcatgtaatactatacttctatattaaagttttacccactca

SEQ ID NO: 84650 - DNA, 1989 bp, Artificial Sequence
  derived and/or modified sequence
atgaagctgagcccccagcccagctgtgtgaacctgggcatgatgtggacctgggccctgtggatgctgcccagcctgtgcaagttcagcctggccgccctgcctgccaagccagagaacatcagctgtgtgtactactacaggaagaacctgacctgcacctggagccctgggaaggagaccagctacacccagtacacagtgaagaggacctacgccttcggggagaagcatgacaactgcaccaccaacagcagcaccagtgaaaatagagccagctgcagcttcttcctgccccgcatcaccatcccagacaactacaccatcgaggtggaggccgagaatggagatggagtcatcaagagccacatgacctactggaggctggagaacatcgccaagacagagccccccaagatcttccgggtgaagcctgtgctgggcatcaagaggatgatccagatcgagtggatcaagccagagctggcccctgtgtccagtgacctgaagtacaccctgcgcttcagaacagtgaacagcacctcctggatggaggtgaactttgccaagaacaggaaggacaagaaccagacctacaacctgaccggcctgcagcccttcacagaatatgtgattgccctgcgctgtgctgtgaaggagagcaagttctggagcgactggagccaggagaagatgggcatgacagaggaggaggccccctgtggcctggagctgtggagggtgctgaagccagctgaggctgatggaagaagacctgtgcggctgctgtggaagaaggcccggggggcccctgtgctggagaagaccctgggctacaacatctggtactacccagagagcaacaccaacctgacagagaccatgaacaccaccaaccagcagctggagctgcacctgggcggggagagcttctgggtgtccatgatctcctacaacagcctgggcaagagccctgtggccaccctgcgcatcccagccatccaggagaagagcttccagtgcatcgaggtgatgcaggcctgtgtggccgaggaccagctggtggtgaagtggcagagcagcgccctggatgtgaacacctggatgattgagtggttcccagatgtggacagcgagcccaccaccctgtcctgggagagcgtgtcccaggccaccaactggaccatccagcaggacaagctgaagcccttctggtgctacaacatctctgtgtaccccatgctgcatgacaaggtgggggagccctacagcatccaggcctatgccaaggagggcgtgcccagcgagggccctgagaccaaggtggagaacattggagtgaagacagtgaccatcacctggaaggagatccccaagtctgagaggaagggcatcatctgcaactacaccatcttctaccaggccgagggcggcaagggcttcagcaagacagtgaacagcagcatcctgcagtatggcctggagagcctgaagaggaagaccagctacatcgtgcaggtgatggccagcaccagcgctgggggcaccaacggcaccagcatcaacttcaagaccctgtccttctctgtgtttgagatcatcctgatcaccagcctcatcggcggcggcctgctgatcctgatcatcctgactgtggcctacggcctgaagaagcccaacaagctgacccacctgtgctggcccaccgtgcccaacccagctgagagcagcatcgccacctggcatggagatgacttcaaggacaagctgaacctgaaggagagtgatgacagcgtgaacacagaggaccgcatcctgaagccctgcagcacccccagcgacaagctggtgattgacaagctggtggtgaactttggaaatgtgctgcaggagatcttcacagatgaggccaggacaggccaggagaacaacctgggcggggagaagaatggcacccgcatcctgagcagctgccccaccagcatctag

SEQ ID NO: 84651 - DNA, 1989 bp, Artificial Sequence
  derived and/or modified sequence
atgaagctgagcccccagcccagctgcgtgaacctgggcatgatgtggacatgggccctttggatgcttccttcactctgtaagttctctttggctgcccttcccgccaaacccgaaaatatcagctgtgtttactactatcgcaaaaacttaacttgcacatggagcccaggaaaggagacaagttacacccaatacacagtaaagcgcacttacgcctttggcgaaaaacacgacaattgtaccacaaactcctccaccagcgagaatcgcgcgagttgttcattcttcctgccccgaatcactatcccagataactacaccatcgaagtggaggctgaaaatggtgatggggtgatcaagtcccacatgacttattggcgactggagaatatcgcaaagaccgaaccgcccaagatcttcagggtgaagccagtgctagggattaaaaggatgatacagatcgaatggatcaagcccgagttagctccagtttccagtgacctaaagtacaccttgcggtttcgaaccgttaatagcaccagctggatggaggtaaactttgcaaaaaaccgcaaggacaagaaccagacctacaatcttaccggtctccagccgtttacagaatatgtcattgcgctgcgttgcgctgtaaaggagagtaaattctggagcgactggtcacaggaaaagatgggtatgactgaagaagaggcaccctgtgggttggagttatggagggtgctgaagccggcagaagcagacggccgccgacccgttcgacttctgtggaagaaggcacggggagcacccgttctcgaaaaaaccctggggtacaacatatggtattacccggaaagcaacaccaaccttacggagacgatgaacaccactaatcagcagctagaactgcatctgggaggagagtccttctgggtgagtatgattagttacaactccttaggcaagtcgcccgttgcaactcttagaatccccgccatccaagagaaaagttttcagtgcatcgaagtgatgcaagcctgcgtcgccgaggatcagctggtcgtgaagtggcagtcttccgctctcgatgtgaatacctggatgatcgagtggttccccgatgtggactccgaaccaactaccctgagctgggagtccgtgagccaagccaccaattggacaatccaacaggacaaactaaaacctttctggtgttataacatctcagtgtacccaatgctccacgacaaagttggcgagccttactccatacaagcctatgctaaggagggagtgccatcagagggccccgagaccaaggtagaaaatatcggggtgaaaacagtgactatcacttggaaagagatacctaaatctgaacgaaaggggatcatctgtaactacaccatcttttaccaggcagaaggtgggaaaggttttagtaagaccgtgaactcctccatcctgcaatatggcctggagtccctaaaacgcaaaactagttatatagtgcaggtcatggcctcaacttcggcaggtgggactaacggcacctcaataaattttaaaacactgtcctttagcgtatttgaaatcatactaatcacttcacttatcggcggaggcctgctgatcttaatcattctcactgtcgcctacggcttgaagaaaccaaataagctgacccacctgtgctggcctacagtgccaaaccctgcagaatcaagcatcgccacctggcatggcgacgattttaaagataagctgaatctgaaagagtcagacgattccgttaatactgaggatcggattctgaagccatgttcaacgccgagcgataagctggtgattgataagttggttgtgaattttggaaatgtgctgcaggaaatttttacagatgaggcccggaccggccaggaaaataatctgggtggagagaagaacgggacgcggatactgtcatcttgccccacctccatctag

SEQ ID NO: 84652 - DNA, 1989 bp, Artificial Sequence
  derived and/or modified sequence
atgaagctgagcccccagcccagctgcgtgaacctgggcatgatgtggacatgggcactttggatgctgccatccctgtgtaaattttcacttgctgcgctgcccgcaaagccagaaaacatctcctgcgtgtactactatcgaaagaacttaacctgtacttggtcacccggcaaggaaactagttatactcagtatactgtgaaacgaacttatgccttcggggagaagcatgacaactgtacaacaaatagctccaccagcgagaatagagcctcttgctccttcttcctcccccgcataacaatcccagataactacaccattgaagtcgaagccgagaacggtgatggtgtaattaagtcccacatgacttactggaggctcgaaaatatcgctaagacagagcctcccaaaatcttcagagtaaaacccgtgttgggaatcaagagaatgatacagattgagtggatcaaacctgagctggctccggtgagttcagatctcaagtacaccttacgatttaggacggtcaactccacttcgtggatggaagtaaacttcgctaaaaaccgcaaagataagaaccagacctataacctcaccgggctgcagccattcacagaatacgttattgctctgcgctgcgctgtaaaagagtcaaaattttggtctgattggtcgcaagaaaaaatgggcatgactgaggaggaggctccctgcgggcttgaattgtggagagtcctgaagcctgcagaagcagatgggagaagaccagtcagattattgtggaagaaagcaaggggagcccctgtcctcgaaaagaccttagggtacaatatctggtactaccctgaaagtaatacaaaccttactgagaccatgaataccactaaccagcagctggagcttcatctgggtggcgagagtttctgggtctccatgatcagttacaatagtctgggaaaatcaccagtcgctacccttaggatcccggccatccaggaaaagagctttcagtgtattgaagttatgcaggcttgcgtggccgaggatcagctagtcgttaagtggcaatcgagcgcattggatgtaaacacttggatgatagaatggtttcctgacgttgactcagaacccaccaccctaagttgggaatcagtgagtcaggccaccaactggactattcagcaggataaactgaaacccttctggtgttacaacatctctgtgtacccaatgctgcacgacaaggtgggagaaccctattctatccaagcctatgcaaaggagggggtgccatcagagggcccagaaaccaaggtggagaatattggagttaaaactgtaacgatcacttggaaggagattcccaagtccgagaggaaggggatcatctgcaactatactattttttatcaggctgagggaggcaaggggtttagcaagaccgtgaacagctctattttgcagtacggcttagagtcgcttaaacgcaagaccagctacatcgttcaagtgatggcttcaacaagcgccggaggcactaacgggaccagcataaatttcaagaccttgagcttctcagtttttgagattattttgataacctctctcattggaggtgggcttctcatactcataatactgacagtggcttacggtctaaaaaagccaaataaactgacccatctgtgttggcccaccgttccaaacccagccgagtcttcaattgccacatggcacggagatgacttcaaggacaaattgaacctgaaggagagtgatgacagcgtgaatacagaggaccggattcttaagccctgctctacaccgagtgataagttggtgattgataagctggtggtgaattttggaaatgtgcttcaggaaattttcacggatgaggctcggaccggccaggagaataacctaggaggcgaaaagaacggcacaaggatcttgagtagttgccccacctccatttag

SEQ ID NO: 84653 - DNA, 1989 bp, Artificial Sequence
  derived and/or modified sequence
atgaagctgagtccccagcctagctgcgtgaacctggggatgatgtggacctgggccctgtggatgttgccgtccttgtgtaagtttagcttggccgctctgcctgccaagcccgaaaatatcagctgtgtctactattatcggaagaacctgacgtgtacatggtcccccggtaaagaaacctcttatactcagtacacagtgaagcgtacctacgcttttggtgaaaagcacgataattgcacgactaactcaagcacttcggagaaccgagcttcatgttcctttttcttgcctaggattaccatcccagataactacacaattgaagttgaggctgagaatggggatggtgtaatcaaatcacacatgacatattggcgactagagaacattgcaaagaccgaaccccctaagatcttccgggtaaagccagtgctgggtataaagcggatgatccagatagaatggatcaagcctgagttggctccagtgtctagtgatctcaaatacaccctccggtttcggacggtgaattctacctcttggatggaggtaaacttcgcaaaaaatcggaaagacaaaaaccaaacctacaacttgaccggattgcagcccttcactgaatacgtgattgccctccgatgcgcggtgaaagagtctaaattttggtcagactggtcccaggagaaaatgggcatgactgaagaggaagcaccttgcggactagagttgtggagagtgctgaagccagcggaagcagacggcaggaggcccgtgaggctgctttggaagaaagctcgcggtgctccggtgctcgagaaaacccttggctacaatatctggtactaccctgagagcaacacaaatctaaccgagacaatgaatacgacaaatcagcaacttgagctgcatcttggcggagagagcttctgggtaagcatgatatcatataactctttgggtaaaagccctgtcgcgaccctcaggataccagctatccaggaaaaatccttccagtgcatcgaagtcatgcaggcctgtgtcgcagaagatcaactggtggtgaagtggcaaagttcagcccttgatgtaaatacttggatgattgagtggtttcccgacgtggatagtgaacccactacactttcatgggagtcagtcagtcaggcaaccaattggaccatccagcaagacaaactgaagcctttctggtgttataatatttctgtctatccgatgttgcacgacaaggtgggtgagccatacagtatccaggcctacgcgaaggagggggtcccttccgaaggcccagagaccaaggtggaaaatatcggggtgaagacggtaacgatcacgtggaaggagatccccaagagcgagcggaaaggcatcatatgcaattacactatcttctaccaagcagagggtggtaaaggcttctctaagactgtgaactcgtcgattctgcagtatggtctcgaatccctgaagagaaagactagctacatcgtgcaggtgatggcttcgacctcagccggtgggacaaatgggacctctattaactttaaaaccctcagcttcagcgtctttgagattatcttgatcacctcactcatcgggggaggcctattgattctaataattcttactgtggcctatggcctgaagaagcctaacaaactgacacatttgtgttggcccactgttcccaaccccgcagaatcctctatagcaacgtggcacggagacgactttaaggataaactaaaccttaaggaaagcgatgattctgtaaacaccgaggacaggattctgaaaccctgtagcacacctagcgataagctggtgatagataagttggtcgtcaatttcggtaatgtgctccaagaaattttcacagatgaggccaggaccgggcaggaaaacaatctggggggagaaaaaaatggcacacgcattttgtcgtcttgcccaacttcgatatag

SEQ ID NO: 84654 - DNA, 1989 bp, Artificial Sequence
  derived and/or modified sequence
atgaagctgagccctcagcccagttgcgttaatttaggcatgatgtggacctgggctctgtggatgctgcctagcctgtgtaagtttagcctggccgctttaccagcaaaacccgaaaatatctcctgtgtgtattactacaggaagaacctgacatgtacttggagtcctggaaaggagacatcttacacgcagtacacagtgaaacgaacatatgcttttggggaaaaacatgataactgtacgaccaatagttctacatctgagaacagagcgagttgtagtttcttcctgcctaggatcactattccagacaattacactattgaggtggaagcggagaatggagatggtgtgataaaatcccatatgacttattggcgcctggaaaacatagccaaaacggagccgcctaaaattttccgtgtcaaaccggtactgggtatcaaacgcatgatacaaatagaatggatcaagcctgagctcgccccagttagttcggatctcaaatatacattacggttccgtaccgtgaatagtactagctggatggaggtgaattttgctaaaaaccggaaggataaaaaccagacctataatcttaccgggctccagcccttcacggagtacgtgattgcgctaagatgcgccgtgaaggagtctaaattctggagtgattggtctcaggagaagatgggaatgacagaggaggaggccccatgtggattagagctgtggagggtgctcaagcctgcggaggcagatggtcgtaggccagtccggttgctctggaaaaaagccaggggtgcgcctgtccttgaaaagacactcggatataacatttggtactatcccgagagtaacacaaacctgaccgaaacaatgaacaccacaaaccagcagctggaactgcacctagggggagaaagtttctgggtttccatgatctcctataactcactgggaaagagtcctgtggcaaccctgagaatccccgctatccaggagaagagcttccagtgcattgaagtgatgcaggcgtgtgtggcagaggatcagctggttgtcaaatggcagtcttccgctctggatgtgaacacatggatgattgaatggttcccggacgtggatagcgagcccaccaccctctcttgggaaagcgtgtcacaggcaaccaattggaccattcagcaggataaactcaaacctttttggtgctataatatcagcgtttatccaatgttacacgacaaggtgggagaaccctattctattcaggcctatgccaaagagggggttccaagtgaggggcctgaaacaaaagtagagaatataggagttaaaaccgtgactataacctggaaagagatcccaaaatcagagcggaagggaattatctgcaattatacaattttttaccaggctgaaggtgggaagggattttccaaaacagtcaacagctcgatccttcaatacggtcttgagtctctgaagaggaaaacttcctacattgtccaggtaatggcatcaacatcagcagggggtactaacggtacatctatcaattttaagactctgtcctttagtgtttttgaaattatcctcattacttccctgattgggggtggattgctgattctgatcatcctgaccgtggcgtatggacttaagaagcccaacaagctaacccatctctgttggcctaccgtgcccaacccggctgaatcttctatcgcaacttggcatggcgacgattttaaagataagctcaacttaaaagagtcggatgacagcgtgaacacagaggatcgcatcctcaagccatgctctacgcccagcgacaagttagtcatagacaaattggtcgtcaacttcggcaacgttctacaggagatcttcaccgatgaggccagaacaggccaggaaaacaatctcggcggtgaaaaaaacggaacacgaatcctgagctcctgtccgaccagcatttag

SEQ ID NO: 84655 - DNA, 1989 bp, Artificial Sequence
  derived and/or modified sequence
atgaagctgagcccccagcccagctgcgtgaacctgggcatgatgtggacctgggccctgtggatgctgcccagcctgtgcaagttcagcctggccgccctgcccgccaagcccgagaacatcagctgcgtgtactactacagaaagaacctgacctgcacctggagccccggcaaggagaccagctacacccagtacaccgtgaagagaacctacgccttcggcgagaagcacgacaactgcaccaccaacagcagcaccagcgagaacagagccagctgcagcttcttcctgcccagaatcaccatccccgacaactacaccatcgaggtggaggccgagaacggcgacggcgtgatcaagagccacatgacctactggagactggagaacatcgccaagaccgagccccccaagatcttcagagtgaagcccgtgctgggcatcaagagaatgatccagatcgagtggatcaagcccgagctggcccccgtgagcagcgacctgaagtacaccctgagattcagaaccgtgaacagcaccagctggatggaggtgaacttcgccaagaacagaaaggacaagaaccagacctacaacctgaccggcctgcagcccttcaccgagtacgtgatcgccctgagatgcgccgtgaaggagagcaagttctggagcgactggagccaggagaagatgggcatgaccgaggaggaggccccctgcggcctggagctgtggagagtgctgaagcccgccgaggccgacggcagaagacccgtgagactgctgtggaagaaggccagaggcgcccccgtgctggagaagaccctgggctacaacatctggtactaccccgagagcaacaccaacctgaccgagaccatgaacaccaccaaccagcagctggagctgcacctgggcggcgagagcttctgggtgagcatgatcagctacaacagcctgggcaagagccccgtggccaccctgagaatccccgccatccaggagaagagcttccagtgcatcgaggtgatgcaggcctgcgtggccgaggaccagctggtggtgaagtggcagagcagcgccctggacgtgaacacctggatgatcgagtggttccccgacgtggacagcgagcccaccaccctgagctgggagagcgtgagccaggccaccaactggaccatccagcaggacaagctgaagcccttctggtgctacaacatcagcgtgtaccccatgctgcacgacaaggtgggcgagccctacagcatccaggcctacgccaaggagggcgtgcccagcgagggccccgagaccaaggtggagaacatcggcgtgaagaccgtgaccatcacctggaaggagatccccaagagcgagagaaagggcatcatctgcaactacaccatcttctaccaggccgagggcggcaagggcttcagcaagaccgtgaacagcagcatcctgcagtacggcctggagagcctgaagagaaagaccagctacatcgtgcaggtgatggccagcaccagcgccggcggcaccaacggcaccagcatcaacttcaagaccctgagcttcagcgtgttcgagatcatcctgatcaccagcctgatcggcggcggcctgctgatcctgatcatcctgaccgtggcctacggcctgaagaagcccaacaagctgacccacctgtgctggcccaccgtgcccaaccccgccgagagcagcatcgccacctggcacggcgacgacttcaaggacaagctgaacctgaaggagagcgacgacagcgtgaacaccgaggacagaatcctgaagccctgcagcacccccagcgacaagctggtgatcgacaagctggtggtgaacttcggcaacgtgctgcaggagatcttcaccgacgaggccagaaccggccaggagaacaacctgggcggcgagaagaacggcaccagaatcctgagcagctgccccaccagcatctag

SEQ ID NO: 84656 - protein, 292 aa, Artificial Sequence
  derived and/or modified sequence
MAVQVVQAVQAVHLESDAFLVCLNHALSTEKEEVMGLCIGELNDDTSRSDSKFAYTGTEMRTVAEKVDAVRIVHIHSVIILRRSDKRKDRVEISPEQLSAASTEAERLAELTGRPMRVVGWYHSHPHITVWPSHVDVRTQAMYQMMDQGFVGLIFSCFIEDKNTKTGRVLYTCFQSIQAQKSSEYERIEIPIHIVPHVTIGKVCLESAVELPKILCQEEQDAYRRIHSLTHLDSVTKIHNGSVFTKNLCSQMSAVSGPLLQWLEDRLEQNQQHLQELQQEKEELMQELSSLE

SEQ ID NO: 84657 - DNA, 879 bp, Artificial Sequence
  derived and/or modified sequence
atggctgtacaggtggtgcaagcagtgcaggcagtccatttggagagtgatgccttcctggtgtgtttaaaccacgcattgagcacagagaaggaagaggtgatgggattgtgcattggcgagctcaatgacgacacctccaggagtgattctaagttcgcgtacaccggcacagagatgcgaacagtggcggagaaggtcgacgcagttagaattgtacatattcactccgtgattatccttcgcagatcagataagaggaaagatcgcgtggagataagccccgaacaactgtctgcagcttctactgaggctgagcggctcgcagagctaaccggcagaccgatgagggttgtgggttggtaccactcccatcctcacattaccgtatggcccagccatgtcgacgtgagaacacaggctatgtaccagatgatggaccaggggtttgtcgggctaatattcagctgctttatcgaggataaaaataccaaaaccggacgggtactgtacacctgttttcagtcaattcaggcccaaaaatcgagcgagtatgaacgtatcgagatccctattcatatcgtgccacacgtgacaattggaaaggtttgcctcgagtcagctgtcgagcttccaaagatcctctgccaggaggagcaggatgcctaccgccgaatccattccctaactcatctcgattcggtaacaaaaatccataatggctccgtgttcactaaaaatttgtgtagccagatgagcgcagtgtctggccctttactgcaatggctcgaggatcgactggagcaaaaccagcagcacctgcaggagctgcagcaggaaaaagaagaattgatgcaggagctgtcctcattggagtag

SEQ ID NO: 84658 - DNA, 879 bp, Artificial Sequence
  derived and/or modified sequence
atggctgtgcaggtggtgcaggccgtgcaggccgtgcacctggagagtgatgccttcctggtgtgcctgaaccacgccctgagcacagagaaggaggaggtgatgggcctgtgcattggagagctgaatgatgacaccagcagaagtgacagcaagtttgcctacacaggaacagagatgaggacagtggccgagaaggtggatgctgtgcgcatcgtgcacatccacagcgtcatcatcctgcggcggagtgacaagaggaaggacagagtggagatcagccctgagcagctgtctgctgccagcacagaagctgagcggctggccgagctgaccggccggcccatgagggtggtgggctggtaccacagccacccccacatcaccgtgtggcccagccacgtggatgtgaggacccaggccatgtaccagatgatggaccagggctttgtgggcctcatcttcagctgcttcatcgaggacaagaacaccaagacaggccgggtgctgtacacctgcttccagagcatccaggcccagaagagcagtgaatatgagcgcatcgagatccccatccacatcgtgccccacgtgaccatcggcaaggtgtgcctggagagcgctgtggagctgcccaagatcctgtgccaggaggagcaggatgcctaccgccgcatccacagcctgacccacctggacagcgtgaccaagatccacaacggcagcgtcttcaccaagaacctgtgcagccagatgtctgctgtgtctggccccctgctgcagtggctggaggaccggctggagcagaaccagcagcacctgcaggagctgcagcaggagaaggaggagctgatgcaggagctgagcagcctggagtag

SEQ ID NO: 84659 - DNA, 879 bp, Artificial Sequence
  derived and/or modified sequence
atggccgtgcaggtggtgcaggccgtgcaggccgtgcacctggagtctgacgcatttctggtgtgtctcaatcatgccctctccaccgagaaggaggaggttatgggtctatgcattggcgaactgaatgatgacacctctcgttccgactcaaagttcgcctacactggaacagaaatgcgcaccgtggctgagaaagtagatgctgtccgtatcgtgcacatacattcagtgattatactgcgtcggtcagataaacggaaggaccgcgttgagatctcccccgagcagctttccgctgcttcaacagaggccgagcgactcgccgagctcaccggccgccctatgcgtgtagtcggctggtaccactcacatcctcatataaccgtctggcctagccacgtcgatgttcgcacacaagctatgtatcagatgatggaccagggttttgtgggccttatattttcctgctttatcgaagacaagaacacgaagaccgggcgggtgttgtacacctgcttccagtctattcaggctcaaaaaagcagcgaatacgaaaggatagaaatcccaatccatattgttcctcacgttaccatcggcaaggtctgcttggaaagcgccgttgagctccctaaaatcttgtgtcaggaggaacaagatgcctaccggagaatccactccctgacgcacttggactccgttactaagatccacaacggctccgttttcacaaagaatctctgctctcagatgtccgctgtttctgggcctctattgcaatggctggaagaccgcttggagcagaaccaacagcatctccaagagcttcaacaggaaaaggaggaactaatgcaggagctttcctctcttgagtag

SEQ ID NO: 84660 - DNA, 879 bp, Artificial Sequence
  derived and/or modified sequence
atggccgtgcaggtggtgcaggctgtgcaggccgttcacctagagtcagacgctttcttggtgtgtctcaatcacgccttatcaacggaaaaagaagaggttatgggattatgcattggggagcttaacgatgacacatcccgtagcgatagtaagttcgcttataccgggacagagatgcggaccgtcgcagaaaaggtggatgccgtgagaatagtgcacattcatagcgtgatcatccttcggcgaagcgataagagaaaggaccgggtggagatctccccagagcaattaagcgctgcctcaacagaagccgagaggctggccgagctcaccgggcgacccatgagagtcgtgggttggtaccactcacaccctcacattactgtttggcccagccacgtggatgtgagaacccaggcaatgtatcagatgatggaccagggattcgtcggtctgatattttcgtgctttatagaggacaagaacactaagactggcagggtgttatatacatgctttcagagcattcaggcacagaagagtagtgagtatgaacggattgaaattccgatccacattgtaccccacgtgaccatcggcaaagtttgtttagaaagtgccgtggagctcccaaaaatcctgtgccaggaggagcaggacgcgtatcgacggattcatagtcttactcatcttgactccgttaccaagatccataacggcagtgtgtttaccaagaatttatgctcacagatgtctgcagtttcaggtcccttattgcaatggttggaggacaggctcgagcagaatcaacagcatcttcaagagctacagcaggaaaaggaagagctgatgcaggaactatcttccctggaatag

SEQ ID NO: 84661 - DNA, 1101 bp, Artificial Sequence
  derived and/or modified sequence
aggcctgggcggagcgcacagcgctgggcgctggggaggctgcgccgcagcacccggttggtcaggaccaagtgggcccgaggcggacgtgagaagggtcgggccaagatggcggtgcaggtggtgcaggcggtgcaggcggttcatctcgagtctgacgctttcctcgtttgtctcaaccacgctctgagcacagagaaggaggaagtaatggggctgtgcataggggagttgaacgatgatacaagtaggagtgactccaaatttgcatatactggaactgaaatgcgcacagttgctgaaaaggttgatgccgtcagaattgttcacattcattctgtcatcatcttacgacgttctgataagaggaaggaccgagtagaaatttctccagagcagctgtctgcagcttcaacagaggcagagaggttggctgaactgacaggccgccccatgagagttgtgggctggtatcattcccatcctcatataactgtttggccttcacatgttgatgttcgcacacaagccatgtaccagatgatggatcaaggctttgtaggacttattttttcctgtttcatagaagataagaacacaaagactggccgggtactctacacttgcttccaatccatacaggcccaaaagagttcagagtatgagagaatcgaaatcccaatccatattgtacctcatgtcactatcgggaaagtgtgccttgaatcagcagtagagctgcccaagatcctgtgccaggaggagcaggatgcgtataggaggatccacagccttacacatctggactcagtaaccaagatccataatggctcagtgtttaccaagaatctgtgcagtcagatgtcggcagtcagcgggcctctcctacagtggttggaggacagactggagcaaaaccaacagcatttgcaggaattacaacaagaaaaggaagagcttatgcaagaactttcttctctagaataaatcaggagacaaaatggggaaagatgaaaatatccagtgtaaagttacttaagctaaatcaatttcaaagaagaaaaacttggaggactcattttacctgacttcaagacttac

SEQ ID NO: 84662 - DNA, 879 bp, Artificial Sequence
  derived and/or modified sequence
atggccgtgcaggtggtgcaggccgtgcaggccgtgcacctggagagcgacgccttcctggtgtgcctgaaccacgccctgagcaccgagaaggaggaggtgatgggcctgtgcatcggcgagctgaacgacgacaccagcagaagcgacagcaagttcgcctacaccggcaccgagatgagaaccgtggccgagaaggtggacgccgtgagaatcgtgcacatccacagcgtgatcatcctgagaagaagcgacaagagaaaggacagagtggagatcagccccgagcagctgagcgccgccagcaccgaggccgagagactggccgagctgaccggcagacccatgagagtggtgggctggtaccacagccacccccacatcaccgtgtggcccagccacgtggacgtgagaacccaggccatgtaccagatgatggaccagggcttcgtgggcctgatcttcagctgcttcatcgaggacaagaacaccaagaccggcagagtgctgtacacctgcttccagagcatccaggcccagaagagcagcgagtacgagagaatcgagatccccatccacatcgtgccccacgtgaccatcggcaaggtgtgcctggagagcgccgtggagctgcccaagatcctgtgccaggaggagcaggacgcctacagaagaatccacagcctgacccacctggacagcgtgaccaagatccacaacggcagcgtgttcaccaagaacctgtgcagccagatgagcgccgtgagcggccccctgctgcagtggctggaggacagactggagcagaaccagcagcacctgcaggagctgcagcaggagaaggaggagctgatgcaggagctgagcagcctggagtag

SEQ ID NO: 84663 - protein, 188 aa, Artificial Sequence
  derived and/or modified sequence
MAYAYLFKYIIIGDTGVEFGARMITIDGKQIKLQIWDTAGQESFRSITRSYYRGAAGALLVYDITRRDTFNHLTTWLEDARQHSNSNMVIMLIGNKSDLESRREVKKEEGEAFAREHGLIFMETSAKTASNVEEAFINTAKEIYEKIQEGVFDINNEANGIKIGPQHAATNATHAGNQGGQQAGGGCC

SEQ ID NO: 84664 - protein, 166 aa, Artificial Sequence
  derived and/or modified sequence
MITIDGKQIKLQIWDTAGQESFRSITRSYYRGAAGALLVYDITRRDTFNHLTTWLEDARQHSNSNMVIMLIGNKSDLESRREVKKEEGEAFAREHGLIFMETSAKTASNVEEAFINTAKEIYEKIQEGVFDINNEANGIKIGPQHAATNATHAGNQGGQQAGGGCC

SEQ ID NO: 84665 - DNA, 567 bp, Artificial Sequence
  derived and/or modified sequence
atggcttacgcctatctgtttaaatacataattatcggtgatactggcgtcgaatttggggccagaatgatcaccatcgacggcaagcagattaagcttcaaatatgggatacagctggacaggagtctttcagatccataacccgcagttactataggggggccgccggcgctctgttagtatacgacataactcgaagggatactttcaaccacctgacaacgtggctcgaagatgctaggcagcatagcaattccaatatggtgattatgctcataggaaacaaatccgatctggagtctcgaagagaagtcaagaaggaggaaggcgaggcctttgcacgagaacacggccttattttcatggagactagcgccaaaactgcctctaatgtagaagaagcattcatcaacacagcaaaggaaatctacgagaagatacaggagggggtttttgacataaacaatgaggccaatggcattaagatcgggcctcaacacgctgctacaaatgccacccatgctggaaatcagggcggacagcaagccggagggggatgctgctag

SEQ ID NO: 84666 - DNA, 501 bp, Artificial Sequence
  derived and/or modified sequence
atgattactatcgacgggaaacagataaaactgcaaatatgggacaccgcaggccaagaatccttccggagcatcacccgtagttattaccgaggggcagccggagcactgttggtttatgacataaccaggcgagatacatttaatcacctgacaacttggttggaagatgcaaggcaacatagtaacagcaacatggtcatcatgctcatcgggaacaagtctgatcttgaatcccgaagagaggtgaagaaagaggaaggggaagccttcgctagggagcacggccttatctttatggagactagcgccaagactgcatccaacgtcgaggaggcctttataaacactgcgaaagaaatctacgaaaaaatccaggagggggtctttgacattaacaatgaggctaacggaatcaaaattgggccgcagcatgccgctaccaatgccactcacgcgggcaaccaaggcggacagcaggccggtggtggctgttgctag

SEQ ID NO: 84667 - DNA, 567 bp, Artificial Sequence
  derived and/or modified sequence
atggcctatgcctacctgttcaagtacatcatcatcggggacacaggagtggagtttggagccaggatgatcaccattgatggcaagcagatcaagctgcagatctgggacacagctggccaggagagcttccgcagcatcaccaggagctactacagaggagctgctggggccctgctggtgtatgacatcacccggcgggacaccttcaaccacctgaccacctggctggaggatgcccggcagcacagcaacagcaacatggtgatcatgctgattggcaacaagagtgacctggagagccggcgggaggtgaagaaggaggagggggaggcctttgcccgggagcacggcctcatcttcatggagaccagcgccaagacagccagcaatgtggaggaggccttcatcaacacagccaaggagatctatgagaagatccaggagggcgtgtttgacatcaacaatgaggccaacggcatcaagattggcccccagcacgccgccaccaatgccacccatgctggcaaccagggcggccagcaggccggcggcggctgctgctag

SEQ ID NO: 84668 - DNA, 501 bp, Artificial Sequence
  derived and/or modified sequence
atgatcaccattgatggcaagcagatcaagctgcagatctgggacacagctggccaggagagcttccgcagcatcaccaggagctactacagaggagctgctggggccctgctggtgtatgacatcacccggcgggacaccttcaaccacctgaccacctggctggaggatgcccggcagcacagcaacagcaacatggtgatcatgctgattggcaacaagagtgacctggagagccggcgggaggtgaagaaggaggagggggaggcctttgcccgggagcacggcctcatcttcatggagaccagcgccaagacagccagcaatgtggaggaggccttcatcaacacagccaaggagatctatgagaagatccaggagggcgtgtttgacatcaacaatgaggccaacggcatcaagattggcccccagcacgccgccaccaatgccacccatgctggcaaccagggcggccagcaggccggcggcggctgctgctag

SEQ ID NO: 84669 - DNA, 567 bp, Artificial Sequence
  derived and/or modified sequence
atggcctacgcctacctgttcaagtacatcatcatcggcgacaccggcgtcgagtttggagctcggatgatcacaatcgatgggaagcagataaaactgcagatttgggacactgcaggccaagagtcctttcgatcgatcacaaggtcctattataggggtgccgccggcgcccttctggtttatgacataacccgtcgggatacgtttaatcacctgacaacttggctcgaagacgcgagacagcattccaactccaacatggtcatcatgctgatcggtaataagtcggatctggaatctcgaagagaggttaagaaggaagagggcgaggcctttgcccgagagcacggtctcattttcatggaaacaagcgctaagaccgcgtccaacgtcgaggaggctttcatcaataccgcaaaagagatttatgagaagatccaggagggtgtcttcgatatcaacaacgaggctaacgggattaaaattggaccacagcatgccgctaccaatgcaacccatgctggaaaccaggggggccaacaagccggtgggggatgttgctag

SEQ ID NO: 84670 - DNA, 501 bp, Artificial Sequence
  derived and/or modified sequence
atgatcaccatcgacggcaagcagatcaagctgcagatctgggacaccgctgggcaggagtcattccgttctataacacggagctactatcggggcgctgccggagcactgctcgtgtacgatatcacacggcgcgatacctttaatcatcttactacctggctcgaggacgcaagacagcactccaactccaacatggtgataatgctgatcggaaacaagtcagatttggaatccaggagagaagttaaaaaggaggaaggtgaagctttcgcacgcgagcatggacttatctttatggaaacttcagccaaaactgcttcaaacgttgaagaggcttttattaataccgccaaagaaatatacgagaaaattcaggaaggcgtgttcgacattaataatgaagcgaacgggattaagattggtccacagcacgcggccacaaacgctacacatgctggcaaccagggtgggcaacaggcgggcggtgggtgctgctag

SEQ ID NO: 84671 - DNA, 567 bp, Artificial Sequence
  derived and/or modified sequence
atggcctacgcttacctgttcaagtacatcatcatcggagacacaggggtggagttcggtgcacgcatgataactattgacggcaagcagattaaacttcagatttgggatactgcagggcaggaaagttttcgttcgataaccaggtcctattacagaggcgcagctggcgctttgctggtgtacgatataacccggagagacaccttcaatcatcttaccacttggttggaggacgcgagacagcattcaaactccaacatggtaataatgctcattggcaataagtccgacctggagtctcggagggaagttaaaaaagaagaaggcgaggcgttcgccagagaacacggtctgatttttatggagacaagcgcaaaaactgcttcgaacgtggaagaggcctttattaacactgcgaaagagatatacgagaagatccaggaaggcgtcttcgacataaacaacgaggccaacggaatcaaaatcgggcctcagcatgcagccacaaatgctactcacgcgggaaatcaaggcggtcagcaggcgggaggagggtgctgttag

SEQ ID NO: 84672 - DNA, 501 bp, Artificial Sequence
  derived and/or modified sequence
atgatcacaatcgacggtaaacaaattaagctccagatctgggacactgctggccaggagtcttttaggtccattacacgctcttattatcggggtgccgctggcgctctactggtatacgatattactcgcagagacacctttaaccatctcacaacttggctggaagacgcccgtcaacacagtaactctaacatggtaatcatgctaattggcaataaaagtgacctggagtcacggagagaagtgaaaaaagaggaaggcgaagcgtttgccagggagcatggcctcatatttatggagacatccgccaagacagcctccaacgttgaagaggccttcatcaataccgccaaggagatttacgagaaaattcaggaaggcgtcttcgacatcaataatgaggcaaacgggatcaagattgggccacaacatgcagcaacaaacgccacccacgccggaaatcagggaggacagcaggcgggtggcggatgttgctag

SEQ ID NO: 84673 - DNA, 1058 bp, Artificial Sequence
  derived and/or modified sequence
agaacttccgggtcggcgcggaggcggggcggaggcgccgcggcggctgttattgttcggctgggctcggtcgggcgctgtctccctcggctctgcgggtgtcagttcgtccggcttcctcacagcccctcactcccggcggctgacagcagcagcggcggcggcgggcggcgcctggcgtttcgaggctgagcggcaccggggttggggcgcggaggaggagcagcagcgggaggaggagccgtgtgccctggcactgagcggccgcggccatggcgtacgcctatctcttcaagtacatcataatcggcgacacaggtgtagagttcggtgctcgaatgataactattgatgggaaacagataaaacttcagatatgggatacggcagggcaagaatcctttcgttccatcacaaggtcgtattacagaggtgcagcaggagctttactagtttacgatattacacggagagatacattcaaccacttgacaacctggttagaagatgcccgccagcattccaattccaacatggtcattatgcttattggaaataaaagtgatttagaatctagaagagaagtaaaaaaagaagaaggtgaagcttttgcacgagaacatggactcatcttcatggaaacgtctgctaagactgcttccaatgtagaagaggcatttattaatacagcaaaagaaatttatgaaaaaattcaagaaggagtctttgacattaataatgaggcaaatggcattaaaattggccctcagcatgctgctaccaatgcaacacatgcaggcaatcagggaggacagcaggctgggggcggctgctgttgagtctgtttttactgtctagctgcccaacggggcctactcacttattctttcaccccctctcctcctgctcagctgagacatgaaactatttgaaatggctttatgtcacagaagactttaatccgtcaaattcttgtataactttgaataaatggttaatgttcacttaaaagacagattttggagattgtattcatatctatttgcatttgatttcta

SEQ ID NO: 84674 - DNA, 567 bp, Artificial Sequence
  derived and/or modified sequence
atggcctacgcctacctgttcaagtacatcatcatcggcgacaccggcgtggagttcggcgccagaatgatcaccatcgacggcaagcagatcaagctgcagatctgggacaccgccggccaggagagcttcagaagcatcaccagaagctactacagaggcgccgccggcgccctgctggtgtacgacatcaccagaagagacaccttcaaccacctgaccacctggctggaggacgccagacagcacagcaacagcaacatggtgatcatgctgatcggcaacaagagcgacctggagagcagaagagaggtgaagaaggaggagggcgaggccttcgccagagagcacggcctgatcttcatggagaccagcgccaagaccgccagcaacgtggaggaggccttcatcaacaccgccaaggagatctacgagaagatccaggagggcgtgttcgacatcaacaacgaggccaacggcatcaagatcggcccccagcacgccgccaccaacgccacccacgccggcaaccagggcggccagcaggccggcggcggctgctgctag

SEQ ID NO: 84675 - DNA, 501 bp, Artificial Sequence
  derived and/or modified sequence
atgatcaccatcgacggcaagcagatcaagctgcagatctgggacaccgccggccaggagagcttcagaagcatcaccagaagctactacagaggcgccgccggcgccctgctggtgtacgacatcaccagaagagacaccttcaaccacctgaccacctggctggaggacgccagacagcacagcaacagcaacatggtgatcatgctgatcggcaacaagagcgacctggagagcagaagagaggtgaagaaggaggagggcgaggccttcgccagagagcacggcctgatcttcatggagaccagcgccaagaccgccagcaacgtggaggaggccttcatcaacaccgccaaggagatctacgagaagatccaggagggcgtgttcgacatcaacaacgaggccaacggcatcaagatcggcccccagcacgccgccaccaacgccacccacgccggcaaccagggcggccagcaggccggcggcggctgctgctag

SEQ ID NO: 84676 - protein, 580 aa, Artificial Sequence
  derived and/or modified sequence
MDYPKMDYFLDVESAHRLLDVESAQRFFYSQGAQARRATLLLPPTLMAASSEDDIDRRPIRRVRSKSDTPYLAEARISFNLGAAEEVERLAAMRSDSLVPGTHTPPIRRRSKFANLGRIFKPWKWRKKKSEKFKHTSAALERKISMRQSREELIKRGVLKEIYDKDGELSISNEEDSLENGQSLSSSQLSLPALSEMEPVPMPRDPCSYEVLQPSDIMDGPDPGAPVKLPCLPVKLSPPLPPKKVMICMPVGGPDLSLVSYTAQKSGQQGVAQHHHTVLPSQIQHQLQYGSHGQHLPSTTGSLPMHPSGCRMIDELNKTLAMTMQRLESSEQRVPCSTSYHSSGLHSGDGVTKAGPMGLPEIRQVPTVVIECDDNKENVPHESDYEDSSCLYTREEEEEEEDEDDDSSLYTSSLAMKVCRKDSLAIKLSNRPSKRELEEKNILPRQTDEERLELRQQIGTKLTRRLSQRPTAEELEQRNILKPRNEQEEQEEKREIKRRLTRKLSQRPTVEELRERKILIRFSDYVEVADAQDYDRRADKPWTRLTAADKAAIRKELNEFKSTEMEVHELSRHLTSFRFP

SEQ ID NO: 84677 - protein, 484 aa, Artificial Sequence
  derived and/or modified sequence
MDYPKMDYFLDVESAHRLLDVESAQRFFYSQGAQARRATLLLPPTLMAASSEDDIDRRPIRRVRSKSDTPYLAEARISFNLGAAEEVERLAAMRSDSLVPGTHTPPIRRRSKFANLGRIFKPWKWRKKKSEKFKHTSAALERKISMRQSREELIKRGVLKEIYDKDGELSISNEEDSLENGQSLSSSQLSLPALSEMEPVPMPRDPCSYEVLQPSDIMDGPDPGAPVKLPCLPVKLSPPLPPKKVMICMPVGGPDLSLVSYTAQKSGQQGVAQHHHTVLPSQIQHQLQYGSHGQHLPSTTGSLPMHPSGCRMIDELNKTLAMTMQRLESSEQRVPCSTSYHSSGLHSGDGVTKAGPMGLPEIRQVPTVVIECDDNKENVPHESDYEDSSCLYTREEEEEEEDEDDDSSLYTSSLAMKVCRKDSLAIKLSNRPSKRELEEKNILPRQTDEERLELRQQIGTKLTRRLSQRPTAEELEQRNILKRK

SEQ ID NO: 84678 - protein, 415 aa, Artificial Sequence
  derived and/or modified sequence
  misc_feature (1)..(1): Xaa can be any naturally occurring amino acid
XGELSISNEEDSLENGQSLSSSQLSLPALSEMEPVPMPRDPCSYEVLQPSDIMDGPDPGAPVKLPCLPVKLSPPLPPKKVMICMPVGGPDLSLVSYTAQKSGQQGVAQHHHTVLPSQIQHQLQYGSHGQHLPSTTGSLPMHPSGCRMIDELNKTLAMTMQRLESSEQRVPCSTSYHSSGLHSGDGVTKAGPMGLPEIRQVPTVVIECDDNKENVPHESDYEDSSCLYTREEEEEEEDEDDDSSLYTSSLAMKVCRKDSLAIKLSNRPSKRELEEKNILPRQTDEERLELRQQIGTKLTRRLSQRPTAEELEQRNILKPRNEQEEQEEKREIKRRLTRKLSQRPTVEELRERKILIRFSDYVEVADAQDYDRRADKPWTRLTAADKAAIRKELNEFKSTEMEVHELSRHLTRFHRP

SEQ ID NO: 84679 - protein, 435 aa, Artificial Sequence
  derived and/or modified sequence
MRQSREELIKRGVLKEIYDKDGELSISNEEDSLENGQSLSSSQLSLPALSEMEPVPMPRDPCSYEVLQPSDIMDGPDPGAPVKLPCLPVKLSPPLPPKKVMICMPVGGPDLSLVSYTAQKSGQQGVAQHHHTVLPSQIQHQLQYGSHGQHLPSTTGSLPMHPSGCRMIDELNKTLAMTMQRLESSEQRVPCSTSYHSSGLHSGDGVTKAGPMGLPEIRQVPTVVIECDDNKENVPHESDYEDSSCLYTREEEEEEEDEDDDSSLYTSSLAMKVCRKDSLAIKLSNRPSKRELEEKNILPRQTDEERLELRQQIGTKLTRRLSQRPTAEELEQRNILKPRNEQEEQEEKREIKRRLTRKLSQRPTVEELRERKILIRFSDYVEVADAQDYDRRADKPWTRLTAADKAAIRKELNEFKSTEMEVHELSRHLTSFRFP

SEQ ID NO: 84680 - DNA, 1743 bp, Artificial Sequence
  derived and/or modified sequence
atggactaccccaagatggactacttcctggacgtggagagcgcccacagactgctggacgtggagagcgcccagagattcttctacagccagggcgcccaggccagaagagccaccctgctgctgccccccaccctgatggccgccagcagcgaggacgacatcgacagaagacccatcagaagagtgagaagcaagagcgacaccccctacctggccgaggccagaatcagcttcaacctgggcgccgccgaggaggtggagagactggccgccatgagaagcgacagcctggtgcccggcacccacaccccccccatcagaagaagaagcaagttcgccaacctgggcagaatcttcaagccctggaagtggagaaagaagaagagcgagaagttcaagcacaccagcgccgccctggagagaaagatcagcatgagacagagcagagaggagctgatcaagagaggcgtgctgaaggagatctacgacaaggacggcgagctgagcatcagcaacgaggaggacagcctggagaacggccagagcctgagcagcagccagctgagcctgcccgccctgagcgagatggagcccgtgcccatgcccagagacccctgcagctacgaggtgctgcagcccagcgacatcatggacggccccgaccccggcgcccccgtgaagctgccctgcctgcccgtgaagctgagcccccccctgccccccaagaaggtgatgatctgcatgcccgtgggcggccccgacctgagcctggtgagctacaccgcccagaagagcggccagcagggcgtggcccagcaccaccacaccgtgctgcccagccagatccagcaccagctgcagtacggcagccacggccagcacctgcccagcaccaccggcagcctgcccatgcaccccagcggctgcagaatgatcgacgagctgaacaagaccctggccatgaccatgcagagactggagagcagcgagcagagagtgccctgcagcaccagctaccacagcagcggcctgcacagcggcgacggcgtgaccaaggccggccccatgggcctgcccgagatcagacaggtgcccaccgtggtgatcgagtgcgacgacaacaaggagaacgtgccccacgagagcgactacgaggacagcagctgcctgtacaccagagaggaggaggaggaggaggaggacgaggacgacgacagcagcctgtacaccagcagcctggccatgaaggtgtgcagaaaggacagcctggccatcaagctgagcaacagacccagcaagagagagctggaggagaagaacatcctgcccagacagaccgacgaggagagactggagctgagacagcagatcggcaccaagctgaccagaagactgagccagagacccaccgccgaggagctggagcagagaaacatcctgaagcccagaaacgagcaggaggagcaggaggagaagagagagatcaagagaagactgaccagaaagctgagccagagacccaccgtggaggagctgagagagagaaagatcctgatcagattcagcgactacgtggaggtggccgacgcccaggactacgacagaagagccgacaagccctggaccagactgaccgccgccgacaaggccgccatcagaaaggagctgaacgagttcaagagcaccgagatggaggtgcacgagctgagcagacacctgaccagcttcagattcccctag

SEQ ID NO: 84681 - DNA, 510 bp, Artificial Sequence
  derived and/or modified sequence
atggactaccccaagatggactacttcctggacgtggagagcgcccacagactgctggacgtggagagcgcccagagattcttctacagccagggcgcccaggccagaagagccaccctgctgctgccccccaccctgatggccgccagcagcgaggacgacatcgacagaagacccatcagaagagtgagaagcaagagcgacaccccctacctggccgaggccagaatcagcttcaacctgggcgccggcgtgagcctgttcggcgacatggacgaggccagaatgggccccgccgtgcccaccctgggcagacccctgggcctggagctgtgcagcctggagaaccacggcctgctgaagaccgcccccacctacaccaccagcgcccacatctgcagcggccccagcaccggcggccagttcagcacccagggcatgagccccgtgcagggcgccaagagaagaagagtggtgtggctgcccctggagggcgaggagttcggctag

SEQ ID NO: 84682 - DNA, 1455 bp, Artificial Sequence
  derived and/or modified sequence
atggactaccccaagatggactacttcctggacgtggagagcgcccacagactgctggacgtggagagcgcccagagattcttctacagccagggcgcccaggccagaagagccaccctgctgctgccccccaccctgatggccgccagcagcgaggacgacatcgacagaagacccatcagaagagtgagaagcaagagcgacaccccctacctggccgaggccagaatcagcttcaacctgggcgccgccgaggaggtggagagactggccgccatgagaagcgacagcctggtgcccggcacccacaccccccccatcagaagaagaagcaagttcgccaacctgggcagaatcttcaagccctggaagtggagaaagaagaagagcgagaagttcaagcacaccagcgccgccctggagagaaagatcagcatgagacagagcagagaggagctgatcaagagaggcgtgctgaaggagatctacgacaaggacggcgagctgagcatcagcaacgaggaggacagcctggagaacggccagagcctgagcagcagccagctgagcctgcccgccctgagcgagatggagcccgtgcccatgcccagagacccctgcagctacgaggtgctgcagcccagcgacatcatggacggccccgaccccggcgcccccgtgaagctgccctgcctgcccgtgaagctgagcccccccctgccccccaagaaggtgatgatctgcatgcccgtgggcggccccgacctgagcctggtgagctacaccgcccagaagagcggccagcagggcgtggcccagcaccaccacaccgtgctgcccagccagatccagcaccagctgcagtacggcagccacggccagcacctgcccagcaccaccggcagcctgcccatgcaccccagcggctgcagaatgatcgacgagctgaacaagaccctggccatgaccatgcagagactggagagcagcgagcagagagtgccctgcagcaccagctaccacagcagcggcctgcacagcggcgacggcgtgaccaaggccggccccatgggcctgcccgagatcagacaggtgcccaccgtggtgatcgagtgcgacgacaacaaggagaacgtgccccacgagagcgactacgaggacagcagctgcctgtacaccagagaggaggaggaggaggaggaggacgaggacgacgacagcagcctgtacaccagcagcctggccatgaaggtgtgcagaaaggacagcctggccatcaagctgagcaacagacccagcaagagagagctggaggagaagaacatcctgcccagacagaccgacgaggagagactggagctgagacagcagatcggcaccaagctgaccagaagactgagccagagacccaccgccgaggagctggagcagagaaacatcctgaagagaaagtag

SEQ ID NO: 84683 - DNA, 1743 bp, Artificial Sequence
  derived and/or modified sequence
atggactatcctaagatggactattttctcgatgtggagtccgctcatcggcttctggacgtcgagtccgcgcagcggtttttttattcacagggtgcccaggctcgcagggcaacgctgctgctgccaccaacactaatggctgcctcgagcgaagatgacatcgatcggcggcccatcaggagagtgagatctaagagcgacaccccctacctcgcggaggccagaatcagttttaatctgggtgccgcggaagaggttgaacgcctcgcggctatgagaagtgactccctcgttcctggaacccacaccccacccataagacggcggtctaaatttgccaatctcggacgaatcttcaaaccttggaaatggcgtaaaaagaagtctgagaaattcaagcacacctccgccgctctcgagcgcaagatttcgatgagacaaagtagagaggagctaatcaagcgaggcgtcctcaaggagatctacgacaaggacggagaactgtccatctcgaatgaggaggactcactggaaaacggccagtcattgtctagctcccagctgtcattgcccgccctgtcagagatggagccagtaccaatgccacgcgacccctgttcctacgaggtgctgcagccatcagatattatggacggcccagatcctggcgccccagtcaaactgccgtgcctcccggtgaaactgagcccacccctgccacctaagaaggtgatgatttgcatgccagtgggcggcccagacttatctctggtcagctatacagcccaaaagagcggtcaacagggcgtggctcaacaccaccataccgtgctccccagccagattcagcatcagctccaatatggtagccatgggcagcacttacctagtacgaccggttctctgcccatgcatccaagcgggtgtcggatgattgacgagctcaacaaaactctggctatgaccatgcagcggctggagtcctccgagcaacgcgtaccctgctctacctcctaccacagtagcgggctccattcaggggatggcgtgactaaggccggcccaatgggcctccctgaaatccgtcaggtccccaccgttgtcattgagtgcgacgacaataaagagaatgtcccacacgaaagcgactacgaggactcttcctgcctgtatactcgggaagaggaggaggaagaagaggacgaggacgatgactcgagtttatacacaagtagcttagctatgaaggtgtgtcggaaggacagtcttgcaatcaagctgagcaatcgtccatccaaacgagaattggaggagaaaaacattcttccacggcagactgatgaagagcgcttggagctccgtcagcagattggtacaaagctcacacggcgactgtcacagcgccctactgccgaggaactggagcagcgcaacattctgaagcctcgtaacgaacaggaggaacaagaagagaaaagggaaattaaacgacgcctgacacgtaaactgagccagaggccaacggtggaagagctgagagaacggaaaattctgattcgcttctcagattacgttgaggtagctgatgcccaggattatgacagacgagcagacaagccttggacaagacttactgcggcagacaaggctgcaatcaggaaagaattgaatgagttcaagtctaccgaaatggaagtgcacgaactgagcagacacctgaccagtttcagattcccttag

SEQ ID NO: 84684 - DNA, 510 bp, Artificial Sequence
  derived and/or modified sequence
atggattaccctaaaatggattattttctggatgttgaatccgcccacagactcctggatgtagaatccgcacagcggtttttttactcacagggagctcaggctcgccgggctaccttattactgccccctacccttatggccgcctcgtccgaggacgatattgatcgcagacccattcgacgtgtgcggagcaagagtgacaccccataccttgctgaagctaggattagcttcaatcttggtgccggtgtgtctctgtttggcgatatggacgaggcaaggatgggaccagccgtccccacgctcggccggcctctaggcctggaattgtgcagcctcgagaatcacggtctattgaagacggcccccacatacaccacgtctgctcacatttgctctggccccagcacagggggtcagttctctactcagggcatgtcacctgtgcagggagcaaagaggcgaagagtggtctggctcccacttgaaggggaagaatttggctag

SEQ ID NO: 84685 - DNA, 1455 bp, Artificial Sequence
  derived and/or modified sequence
atggattacccgaagatggattactttcttgatgtcgagtctgcccacaggctgctagatgtagaaagcgctcagcggttcttctatagccaaggagcacaggccaggagggctaccctgctgctccctccaaccctaatggcggccagttctgaagatgacatcgatcggaggcccatcaggcgtgtccggtcaaaatcagacacaccgtacctggcagaggcaaggatatcattcaacctcggtgccgctgaggaggtagagagactggccgcaatgagatctgacagcctcgttccagggacccacacgccacccatccggaggcggtcaaaattcgctaacctgggacgcatattcaaaccgtggaagtggcggaagaagaagtcagagaagtttaagcacacctctgcggcgttggaaagaaaaattagcatgcgccagtcacgggaagagctgattaaacgcggcgtgctaaaagagatttacgataaggatggcgagctgtccataagcaatgaggaggacagcttagagaatggacaatctctgagcagcagtcaactgagcttgccggcattgagcgagatggaaccagtgcccatgccgcgggatccgtgctcgtacgaggttttacagccgagcgacatcatggatgggccggatcctggagctcccgtcaagctgccttgcctgcccgtgaagctgagccctcctctgcctcctaaaaaggtgatgatctgcatgccagttgggggtccagacttatctctggtgtcttacacggcccagaagtcagggcagcagggtgtcgcccaacaccaccacaccgtgctccctagtcagattcagcaccagctacagtatggctctcatggccagcatttaccctcaacgaccggcagcctgcctatgcacccgtctggatgtcgtatgatagatgagctgaacaagaccctggccatgacgatgcagaggctggagtctagcgaacagagagtaccatgctcgacgagctatcacagttctggactgcatagcggtgatggtgttaccaaagccggacctatgggcctgccagaaatccgccaggttccgaccgtggtcatcgagtgcgacgacaataaagaaaatgtgccacatgaaagcgactatgaggacagctcttgtctgtatactagggaggaggaagaggaagaggaggacgaagacgacgacagcagtctctacaccagctccctcgctatgaaagtctgcagaaaagattcattggcgatcaagctaagcaacaggccctccaaaagggagctggaagagaaaaacatcctgcctcggcagaccgatgaggaacgcctggagttacggcagcagattggtacgaagctaacacggcgcctctcccagcgccctactgcagaggagctcgaacagcgaaacattctcaaacggaagtag

SEQ ID NO: 84686 - DNA, 1743 bp, Artificial Sequence
  derived and/or modified sequence
atggactaccccaagatggactacttcctggatgtggagagcgcccaccggctgctggatgtggagagcgcccagcgcttcttctacagccagggcgcccaggcccggcgggccaccctgctgctgccccccaccctgatggccgccagcagtgaagatgacatcgacagaagacccatcagaagagtgcgcagcaagagtgacaccccctacctggccgaggcccgcatctccttcaacctgggcgctgctgaggaggtggagcggctggccgccatgagaagtgacagcctggtgcccggcacccacaccccacccatcagaagaagaagcaagtttgccaacctgggccgcatcttcaagccctggaagtggaggaagaagaagtctgagaagttcaagcacaccagcgctgccctggagaggaagatctccatgaggcagagccgggaggagctgatcaagaggggcgtgctgaaggagatctatgacaaggatggagagctgagcatcagcaatgaggaggacagcctggagaatggccagagcctgagcagcagccagctgagcctgcctgccctgtctgagatggagcctgtgcccatgccccgggacccctgcagctatgaggtgctgcagcccagcgacatcatggatggccctgaccccggggcccctgtgaagctgccctgcctgcctgtgaagctgagcccccccctgccccccaagaaggtgatgatctgcatgcctgtgggcggccctgacctgagcctggtgtcctacacagcccagaagagcggccagcagggcgtggcccagcaccaccacacagtgctgcccagccagatccagcaccagctgcagtatggcagccacggccagcacctgcccagcaccaccggcagcctgcccatgcaccccagcggctgcaggatgattgatgagctgaacaagaccctggccatgaccatgcagaggctggagagcagcgagcagagggtgccctgcagcaccagctaccacagcagcggcctgcacagcggagatggagtgaccaaggccggccccatgggcctgcctgagatccggcaggtgcccaccgtggtgattgaatgtgatgacaacaaggaaaatgtgccccatgaaagtgactatgaggacagcagctgcctgtacacccgggaggaggaggaggaggaggaggatgaagatgatgacagcagcctgtacaccagcagcctggccatgaaggtgtgcaggaaggacagcctggccatcaagctgagcaaccggcccagcaagcgggagctggaggagaagaacatcctgccccggcagacagatgaggagcggctggagctgcggcagcagatcggcaccaagctgacccggcggctgagccagaggcccacagctgaggagctggagcagaggaacatcctgaagcccagaaatgagcaggaggagcaggaggagaagcgggagatcaagaggcggctgaccaggaagctgagccagaggcccaccgtggaggagctgcgggagaggaagatcctgatccgcttcagtgactatgtggaggtggctgatgcccaggactatgaccggcgggctgacaagccctggacccggctgacagctgctgacaaggccgccatcaggaaggagctgaatgagttcaagagcacagagatggaggtgcatgagctgagccgccacctgaccagcttccgcttcccctag

SEQ ID NO: 84687 - DNA, 510 bp, Artificial Sequence
  derived and/or modified sequence
atggactaccccaagatggactacttcctggatgtggagagcgcccaccggctgctggatgtggagagcgcccagcgcttcttctacagccagggcgcccaggcccggcgggccaccctgctgctgccccccaccctgatggccgccagcagtgaagatgacatcgacagaagacccatcagaagagtgcgcagcaagagtgacaccccctacctggccgaggcccgcatctccttcaacctgggcgccggcgtgtccctgtttggagacatggatgaggccaggatgggccctgctgtgcccaccctgggccggcccctgggcctggagctgtgcagcctggagaaccacggcctgctgaagacagcccccacctacaccaccagcgcccacatctgcagcggccccagcactggaggccagttcagcacccagggcatgagccctgtgcagggcgccaagagaagaagagtggtgtggctgcccctggagggggaggagtttggatag

SEQ ID NO: 84688 - DNA, 1455 bp, Artificial Sequence
  derived and/or modified sequence
atggactaccccaagatggactacttcctggatgtggagagcgcccaccggctgctggatgtggagagcgcccagcgcttcttctacagccagggcgcccaggcccggcgggccaccctgctgctgccccccaccctgatggccgccagcagtgaagatgacatcgacagaagacccatcagaagagtgcgcagcaagagtgacaccccctacctggccgaggcccgcatctccttcaacctgggcgctgctgaggaggtggagcggctggccgccatgagaagtgacagcctggtgcccggcacccacaccccacccatcagaagaagaagcaagtttgccaacctgggccgcatcttcaagccctggaagtggaggaagaagaagtctgagaagttcaagcacaccagcgctgccctggagaggaagatctccatgaggcagagccgggaggagctgatcaagaggggcgtgctgaaggagatctatgacaaggatggagagctgagcatcagcaatgaggaggacagcctggagaatggccagagcctgagcagcagccagctgagcctgcctgccctgtctgagatggagcctgtgcccatgccccgggacccctgcagctatgaggtgctgcagcccagcgacatcatggatggccctgaccccggggcccctgtgaagctgccctgcctgcctgtgaagctgagcccccccctgccccccaagaaggtgatgatctgcatgcctgtgggcggccctgacctgagcctggtgtcctacacagcccagaagagcggccagcagggcgtggcccagcaccaccacacagtgctgcccagccagatccagcaccagctgcagtatggcagccacggccagcacctgcccagcaccaccggcagcctgcccatgcaccccagcggctgcaggatgattgatgagctgaacaagaccctggccatgaccatgcagaggctggagagcagcgagcagagggtgccctgcagcaccagctaccacagcagcggcctgcacagcggagatggagtgaccaaggccggccccatgggcctgcctgagatccggcaggtgcccaccgtggtgattgaatgtgatgacaacaaggaaaatgtgccccatgaaagtgactatgaggacagcagctgcctgtacacccgggaggaggaggaggaggaggaggatgaagatgatgacagcagcctgtacaccagcagcctggccatgaaggtgtgcaggaaggacagcctggccatcaagctgagcaaccggcccagcaagcgggagctggaggagaagaacatcctgccccggcagacagatgaggagcggctggagctgcggcagcagatcggcaccaagctgacccggcggctgagccagaggcccacagctgaggagctggagcagaggaacatcctgaagaggaagtag

SEQ ID NO: 84689 - DNA, 1743 bp, Artificial Sequence
  derived and/or modified sequence
atggactaccccaagatggactacttcctggacgtggagagcgcccatagattgctggatgtcgaaagcgctcagcgattcttctacagccaaggggcccaagcaagacgtgcaacattgcttctccccccaacccttatggctgcatctagcgaggatgatattgacagacgccccatcagaagagttcgcagcaagagtgacaccccgtacctggcagaggctcgcatatcatttaacctgggggcagctgaggaggtagagagactagccgctatgcgctctgactccctggtgcccggcactcatactccgccaattcgacgaagatctaaatttgccaatctcggcaggatctttaagccttggaaatggcgaaaaaagaaatcagaaaagtttaaacacacgagtgcagctctggaaaggaaaatctccatgcggcaaagccgcgaggagctgataaagcggggcgttctgaaagagatttatgataaagatggtgaactgtccatcagtaacgaggaggatagtctcgagaatggccagagcttaagctcgtcccagttgtctctcccagcgctgtccgaaatggaacccgtaccgatgcctagggacccttgcagctatgaggtattgcagccctccgacatcatggatggtcctgaccccggcgcccccgtcaaactcccctgcctgcctgtaaaactctcccctccgctgcccccaaagaaggtcatgatctgtatgcccgttgggggacctgatctctccttagtcagctacaccgcacagaagagcggccagcagggcgtcgctcaacaccaccacacagtactcccctctcagatacagcatcaactccagtacggatcacacggtcagcacctaccaagtactactggctctttgccgatgcaccccagcggctgccgtatgatcgacgagctaaacaagactttggctatgacaatgcagaggctggaatcttccgagcaacgcgtgccttgcagcacttcatatcactctagtggcctccactctggtgatggggtgaccaaggcgggtcccatgggactgccggaaatcagacaggtccctaccgtggtgatcgagtgcgacgacaacaaagaaaatgtgccccacgagtccgactatgaagatagcagttgtctatatacaagggaagaagaggaggaagaggaagatgaggacgacgacagctctctgtatacctcaagcctagctatgaaggtctgtaggaaggacagcctcgctattaagcttagcaatcgtccttcgaagcgagaactggaagagaaaaacatactgcctagacagaccgatgaagagcgcctcgagctaaggcagcagattggcacaaagctgactaggagactgtcccagcgacccaccgcagaggagctggagcagcggaacattttgaagcccagaaacgagcaagaagaacaggaggagaaaagggagatcaaaagacgtctgacccggaagctgtctcagagacccactgtggaagagcttagagaacgcaagatcctgattcgcttctcagattatgtcgaggtggctgacgctcaggattacgatagaagagcagacaagccctggacccgactgacggcagcagacaaagccgcaatccggaaagaactcaatgaattcaagtcaactgagatggaggttcacgaactgagtcggcatctcacatcattcagattcccctag

SEQ ID NO: 84690 - DNA, 510 bp, Artificial Sequence
  derived and/or modified sequence
atggactaccccaagatggactacttcctggacgtggagagcgcccacaggcttctcgatgtggagtccgcacagcgatttttttatagtcagggtgcacaggcccgcagggccactctccttctgcctccaacgctgatggccgcctctagcgaggatgatattgatcgacgacccattcgcagagtcaggagcaaatccgatacaccgtacctggctgaggctaggatctcattcaatttgggggccggagtatccctcttcggggacatggatgaagccaggatgggtcccgccgtccctacccttggccgaccgcttggattagaactgtgtagcctggaaaaccacggattattaaagacagcaccaacctacaccacgagtgcccatatttgctcggggccttcaaccggtgggcaattctctacgcagggaatgagccccgttcagggcgccaagcgccggagggttgtctggctcccactggagggggaggagttcggatag

SEQ ID NO: 84691 - DNA, 1455 bp, Artificial Sequence
  derived and/or modified sequence
atggactaccccaagatggactacttcctggacgtggagagcgcccacaggctgctcgacgtggaaagtgcacagcgtttcttctacagccagggcgcgcaagcgcgccgtgcaacattacttctcccacctacactcatggccgcttcttccgaagacgatattgatagacgtccaattcgcagggtgagatccaagtctgacaccccctatctggctgaggccaggatcagcttcaatctgggagccgccgaggaagtggagcgcctggccgccatgcgctcagatagcctggtgccgggcacccatacacccccaatcaggcgtaggagcaagttcgctaacctcggtcgaatctttaaaccatggaaatggcgcaagaaaaagagcgagaagttcaagcatacaagcgccgccttggaacggaaaataagcatgaggcaaagcagggaggaattaataaagaggggggttttgaaggagatctacgataaggacggcgagctgtcaattagtaacgaagaggactctcttgagaacggacaaagcctgtcctcatcacaattgtcactgcccgcactgagtgagatggagccagtgcctatgcctagggatccctgttcatatgaggttcttcagccaagtgacatcatggacggccccgatccaggtgccccagtcaaacttccatgtctgcccgtgaagttgtcacctccattgcctcctaagaaggttatgatctgtatgcctgtcggaggtccagatctctcgcttgtgtcctacaccgcacagaagtcgggccagcaaggagttgcacaacaccaccacacagtgctcccctctcagatccagcatcaactgcaatacggaagccatggccagcacctgccaagtaccacgggcagtctgcctatgcaccctagtggatgccgcatgatcgatgaattgaataagacccttgcaatgacaatgcaaagattagagagctccgagcagcgtgttccctgcagcactagttatcacagtagtgggctacacagcggagatggggttactaaggccggacccatgggcttgcccgaaattcggcaggtaccaacagttgtgattgaatgtgatgacaataaagagaacgtccctcacgagtcagactatgaagatagttcgtgtctgtataccagagaggaggaggaagaagaggaggatgaggacgacgatagttctctgtacacaagttcactggccatgaaggtgtgccggaaggacagcttggctattaaactgagcaataggccatctaaaagggaacttgaggaaaaaaacatcttgccacgtcagaccgacgaagaacgactggagttgcggcagcaaatcgggacaaaactgactcgacggctcagccagcgacccactgccgaagaactggagcagaggaacatccttaagagaaaatag

SEQ ID NO: 84692 - DNA, 1740 bp, Artificial Sequence
  derived and/or modified sequence
atggattatcccaaaatggattattttctggatgtagagtctgctcacagactcttggatgttgagtcagctcaaagattcttctacagtcaaggagctcaagctcgccgggcgaccctgctcctgcctcccacattaatggcggcatcctcggaggatgatatagaccggcggcccatccggagagtgcgctccaagagcgacacgccgtacctcgcagaggccaggatctcctttaacctgggggcagctgaggaagtggagaggctggcggcgatgcgttctgactccctcgtcccaggcacccacaccccacccatccgcaggagaagtaagtttgccaacctgggaaggattttcaagccttggaaatggaggaagaagaaaagcgaaaagttcaaacacacgtcagcagccctggaaaggaaaatatctatgaggcaaagcagagaagagctgataaagcgaggagtcctgaaggaaatctatgataaagatggggaactctctatatccaatgaagaggactccctagaaaatgggcagtccctgagctccagccagctgtctctgcctgccctgtccgaaatggagccagtcccaatgcccagggatccctgctcatatgaggtgctccaaccgtcagacatcatggatgggccagatcctggcgcccctgtgaaattgccttgtctgccagtgaaactgtcgcctccgctacctccaaagaaagtcatgatctgtatgcccgtgggggggccagacctctcactggtgtcctacacagcccagaagagtggccagcagggtgtggcccagcaccaccacactgtcctgccctcccagatccagcaccagctgcagtacggcagccacggccagcacctcccctccaccaccggctccctccccatgcacccctcgggctgcagaatgatagacgagctcaacaaaacgctggccatgaccatgcagaggctggaaagctctgagcagcgggtcccctgttccacttcttaccacagctctgggttgcactcgggtgatggggtcaccaaagcaggacctatgggccttccagaaataagacaagtgccaactgttgtgattgaatgtgatgacaataaagaaaatgtgcctcatgagtcagactacgaagactcttcttgcctgtatacaagagaagaggaggaagaggaggaggacgaagacgacgacagctcattatacaccagctccctggccatgaaggtctgcaggaaggactccttagccatcaaactcagcaacaggccctccaagcgagagctggaagaaaagaacatccttcccaggcagacggatgaggagcggctggagctgaggcaacagattggcaccaagctcaccaggcggctgagccagaggccaactgcagaggaactggaacagaggaacattttgaaacctcggaatgaacaagaggaacaggaggagaagagagagatcaagaggaggctaacccgaaagctcagtcaaaggcccacggtggaagagcttcgggaaagaaagatcctcatccgcttcagtgactacgtggaggtggctgacgctcaggactatgaccgcagggcagataagccgtggacccgcctcaccgctgcagacaaagctgccatccgaaaggagctcaatgaattcaaaagcactgagatggaagttcatgaattgagtagacacttaacaagctttcgatttcct

SEQ ID NO: 84693 - DNA, 795 bp, Artificial Sequence
  derived and/or modified sequence
gatgagctgaggatcaacactcacaacggctgacacttaatgacgctatttatcaaatagaccttttgaaaactgatagcatgtgaatttaacagtatatgttccagagaatataaagcaaggaaaggctggtgttccagtgttttctctcaaaactctgtgtttggaacatcaaggatggattatcccaaaatggattattttctggatgtagagtctgctcacagactcttggatgttgagtcagctcaaagattcttctacagtcaaggagctcaagctcgccgggcgaccctgctcctgcctcccacattaatggcggcatcctcggaggatgatatagaccggcggcccatccggagagtgcgctccaagagcgacacgccgtacctcgcagaggccaggatctcctttaacctgggggcaggcgtttccctttttggggatatggatgaagcaagaatgggaccagcagtgccaactcttgggcgtcctcttgggctcgaactgtgttccctggaaaaccacggcctcctgaagacagcccctacatacactacatcagcccacatctgctcaggccccagtacaggtggacaattctctactcagggtatgagccctgttcaaggagctaagagaaggagggtggtttggctgcctttagagggggaagagtttggctgagaggacatttactctttggtccatatgggaagggaaaatgcgggttggcgtgtgtattcatttcctagagttgctgtaacaaagtaccacaaactacatgacataaaa

SEQ ID NO: 84694 - DNA, 4784 bp, Artificial Sequence
  derived and/or modified sequence
tatttagcaagatcaaagacactctggctggaacggctcttgttttaccgctgacagatagcctttgatttttattttttgcagtgttccagtgttttctctcaaaactctgtgtttggaacatcaaggatggattatcccaaaatggattattttctggatgtagagtctgctcacagactcttggatgttgagtcagctcaaagattcttctacagtcaaggagctcaagctcgccgggcgaccctgctcctgcctcccacattaatggcggcatcctcggaggatgatatagaccggcggcccatccggagagtgcgctccaagagcgacacgccgtacctcgcagaggccaggatctcctttaacctgggggcagctgaggaagtggagaggctggcggcgatgcgttctgactccctcgtcccaggcacccacaccccacccatccgcaggagaagtaagtttgccaacctgggaaggattttcaagccttggaaatggaggaagaagaaaagcgaaaagttcaaacacacgtcagcagccctggaaaggaaaatatctatgaggcaaagcagagaagagctgataaagcgaggagtcctgaaggaaatctatgataaagatggggaactctctatatccaatgaagaggactccctagaaaatgggcagtccctgagctccagccagctgtctctgcctgccctgtccgaaatggagccagtcccaatgcccagggatccctgctcatatgaggtgctccaaccgtcagacatcatggatgggccagatcctggcgcccctgtgaaattgccttgtctgccagtgaaactgtcgcctccgctacctccaaagaaagtcatgatctgtatgcccgtgggggggccagacctctcactggtgtcctacacagcccagaagagtggccagcagggtgtggcccagcaccaccacactgtcctgccctcccagatccagcaccagctgcagtacggcagccacggccagcacctcccctccaccaccggctccctccccatgcacccctcgggctgcagaatgatagacgagctcaacaaaacgctggccatgaccatgcagaggctggaaagctctgagcagcgggtcccctgttccacttcttaccacagctctgggttgcactcgggtgatggggtcaccaaagcaggacctatgggccttccagaaataagacaagtgccaactgttgtgattgaatgtgatgacaataaagaaaatgtgcctcatgagtcagactacgaagactcttcttgcctgtatacaagagaagaggaggaagaggaggaggacgaagacgacgacagctcattatacaccagctccctggccatgaaggtctgcaggaaggactccttagccatcaaactcagcaacaggccctccaagcgagagctggaagaaaagaacatccttcccaggcagacggatgaggagcggctggagctgaggcaacagattggcaccaagctcaccaggcggctgagccagaggccaactgcagaggaactggaacagaggaacattttgaaacgtaagtgactaagcccatggcaatccctgatgttttgtggcggcttttgttattatttaatggtaggccacaaggtttctaccttgcgcctctgcggaaagcattgaaaacctttctaacggttgaagcttcatgtgtgcatgttagaacaccaaagacgacctccccaaagagaaggcaaattttattccactttattctttagaagctcacgggcggcaggcagaaccttccttttagtgagttgtaaagtcagagagaagctgaaaaattagagtgagaccacttattatttaatgatttttaagagcagggtcacctttaaaccagaattggcttgaaaatggagactgtgatatgcacggctaaaataagggaaatgtccatttgaactgagactagaaagcatgactttgcattgcagctggctgctgttgataaaaatccctcatccctttgaatgttaaattgaaagactaagaaagcatttccaagtgaagtgcttcatgtctgtctctcaggattcccacagctggtcccgggcatgcctgtctgatgctctcattcgaggaaaactgcctttcaccattgctgcagacagaaaaaaataaatgagccccttgtttggtttaggacacagagacatttgaatatgtacagaggatccacttggtgctttaaaaaaaaaaagagaaaacaggatacaaaatactaaaagagatcaagcatttgatggacagcagtatgcgtcagtttagtggtagatattaaataacttaaatatcaaaccattctattcattcattgctaccattctcgccaacactggcctcaagatagtgaacaaatatttctggcttaattcatgaccctgttccccctaccccacaacacacttctaatttctctccagaagagaaagatatatactatgcagagttttctagaaatgctatgttgtacagactgactccttgcctcccccggcccccccgccccgccccgccccgtgcccagtaaatcacatgcaaccgcagtgtgagtttgccgggaatttccactgaaaccacactaagatattcttgactttacctttctaccgtgctcactgtggccttgtgacttggtcggcatttcgtagtctgctgaaggtgggtgctgggttccgctttggtggggagacctgttgcctacagcacccacccccgcccgacgcccccgcatgtccgtttatgtcaactctgcctttatcaatgtcttgcctcccgtccccacgccagccgccacttcctcaactctcagtagaagttattttcaggattagccttcctcagtcgtgggggaaccctacgctttgcctaggtctctaggaatgtgtgtttacttttttctgcccaaggggtaccctttaaagtttccaagcttaatattctatataatgaattcagagctttttcaaagcatttccaaggtcagggaagcatttggcttgtaggatgtcttcctttcggccccaatctggtacctgagccattataaacttcccattgttggagagaaagataaacagccaggtgaacctgtacaacttactcacagcccgctgctgtacttgtggcctctgacctgagacctaaactcaaagaagctaaaagcctccgggggattatttaggtttcagaaaatagtgcttatcacaccaggagtacggtttctggagagatctaaaatcccctagctcagctctgggctctctcaaagatatcagatccccgctgtggcttgtccagatccctgggagactacaggtcctttgagcttgggtttttaccgccatcaaccagggaacttagattcaggggaccaaaaaggagttgtgaaagattgttcccatggttctcttttattctcttccctaatccctcttgtcctggccacatagttgcaaattaaagaactacttgaccaattctaacaggttggtcatttcatagttttgaaacttttcagaaatcaacttgttttcccataggttcttatttttccctgtattctggaactatgttctcctaaatatttttttaaatttaatctattgcgattgttaaacaaaaaaaatgtctagtggtataagaaaacatcctccaatagtttgttttaaaactgattttctgagctttcagccatttgaggaactgctcggtgttgggtggtggggaacagggcacagagatgccatggctcagccctggagctttgagagccttgggttggtttccagccccaccctgcctggtcctgggagcagcccctgttctgtccagcagccagtgaggccctgtgcacctctgagcacataatgaaccctctgacggtggcagctgtaatgacgacatcgtaggcctttcctggcctgtcttcctagttgcctaatggggttgtcttggtaccttctgcctgaaaattcatgaacctgggttggtcaatggctttgaactaaaggtatcaattctgtaggtggtagcttgtggccccacccctcagagtgacctaagaaacgcacataggagatgaaggctccatgctgtgtcagctgtgtcacaggatgcccgccttcacggctctgaagggacctgtaggatcagaagtctgaggctagtaatgaggaggagagccggccccacacaaaacatgaccacaggaaaaaacctatctgtgtaaccactgagccaggtagggtgtgactggccacttaacacccctgaggcttcagatcctcagttataaaccaggagtggtagacgaggtggtcactaggtcccctcatggccctagtattctgtgcttctgtaaattttcaccgtgtgccctctagctgtccctggtgacccaacatccagaccaccttttcttccatccgttttcccacctgagacatcgcaaaatgggagttccctccttctggttcttgctgtctgcctccccatttaactctgctagattaattcatactaagatattaatggctgactagtttaataggttttatcccactgaaatttgcatttgtacaaatgtcactgtctgggggctccctacttccgggtgttgctgtctgccccccagtttatctctactagattaattcatactgagctattaatggctgactagtttaatgggcttttattcaagagaaatttgcatt

SEQ ID NO: 84695 - DNA, 1546 bp, Artificial Sequence
  derived and/or modified sequence
acagacccagagaggcggatgcatgtgggagcaaagagctttgggcagcctttaagctgaggaagtggagaggctggcggcgatgcgttctgactccctcgtcccaggcacccacaccccacccatccgcaggagaagtaagtttgccaacctgggaaggattttcaagccttggaaatggaggaagaagaaaagcgaaaagttcaaacacacgtcagcagccctggaaaggaaaatatctatgaggcaaagcagagaagagctgataaagcgaggagtcctgaaggaaatctatgataaagatggggaactctctatatccaatgaagaggactccctagaaaatgggcagtccctgagctccagccagctgtctctgcctgccctgtccgaaatggagccagtcccaatgcccagggatccctgctcatatgaggtgctccaaccgtcagacatcatggatgggccagatcctggcgcccctgtgaaattgccttgtctgccagtgaaactgtcgcctccgctacctccaaagaaagtcatgatctgtatgcccgtgggggggccagacctctcactggtgtcctacacagcccagaagagtggccagcagggtgtggcccagcaccaccacactgtcctgccctcccagatccagcaccagctgcagtacggcagccacggccagcacctcccctccaccaccggctccctccccatgcacccctcgggctgcagaatgatagacgagctcaacaaaacgctggccatgaccatgcagaggctggaaagctctgagcagcgggtcccctgttccacttcttaccacagctctgggttgcactcgggtgatggggtcaccaaagcaggacctatgggccttccagaaataagacaagtgccaactgttgtgattgaatgtgatgacaataaagaaaatgtgcctcatgagtcagactacgaagactcttcttgcctgtatacaagagaagaggaggaagaggaggaggacgaagacgacgacagctcattatacaccagctccctggccatgaaggtctgcaggaaggactccttagccatcaaactcagcaacaggccctccaagcgagagctggaagaaaagaacatccttcccaggcagacggatgaggagcggctggagctgaggcaacagattggcaccaagctcaccaggcggctgagccagaggccaactgcagaggaactggaacagaggaacattttgaaacctcggaatgaacaagaggaacaggaggagaagagagagatcaagaggaggctaacccgaaagctcagtcaaaggcccacggtggaagagcttcgggaaagaaagatcctcatccgcttcagtgactacgtggaggtggctgacgctcaggactatgaccgcagggcagataagccgtggacccgcctcaccgctgcagacaaagctgccatccgaaaggagctcaatgaattcaaaagcactgagatggaagttcatgaattgagtagacacttaacaagctttcgatttcct

SEQ ID NO: 84696 - DNA, 1743 bp, Artificial Sequence
  derived and/or modified sequence
atggattacccaaagatggactattttttagacgtagaaagcgcgcaccgactgcttgacgtggaatctgcccaaaggtttttctatagtcaaggtgctcaggcgagacgagccacgctgttgctcccgccaaccctcatggccgctagcagcgaggacgacattgaccggagacctattcgccgagtgagatcaaaaagtgatactccgtatctggcggaggcccgaatctctttcaatctcggggctgctgaagaggttgaaaggttggcagccatgcggtcagactccctggtgccaggaacccacacccctcctataaggcgcaggagtaaatttgccaatctcggccgaatttttaagccctggaaatggaggaaaaagaaatctgagaagttcaaacatacttcggccgcacttgaaagaaaaatctccatgaggcaatcacgcgaggagttgattaagcggggtgtgctgaaggagatttacgacaaggacggtgaactcagtattagtaatgaagaagattccctggaaaacgggcagagcttgagcagttctcagctgagtttgccagccctatccgagatggagcccgtgcctatgccccgagacccgtgctcttacgaggtcctgcaaccgtccgacattatggacggcccagaccctggcgcacctgttaaactaccatgcttgccagttaagctcagcccgcctctcccaccaaagaaagtgatgatttgcatgcccgtgggcggtcccgatctatctctggtgagttatactgcacagaaaagcggccagcagggagtcgctcagcaccatcacacagtcctcccaagtcagatccagcaccaactacagtacggttcgcacggccagcacctcccctctactacaggatctctgcccatgcatcctagcggatgccgtatgattgacgagctcaacaaaaccctagcaatgaccatgcaacgcttggaatccagcgagcagcgggtcccttgtagcacaagctaccattcctccgggctgcactccggagacggggtcacaaaagctgggccaatgggcctccctgagatccggcaggtgcccacggtggtgatcgagtgcgacgataataaggagaatgtgccgcatgagagtgactacgaagacagtagctgcctctatacaagggaggaagaggaggaagaggaagacgaagatgacgattcttctctctacactagcagccttgcaatgaaggtgtgccgaaaggactctttggctatcaaactcagcaatcggccatctaagagagaactagaagaaaaaaacattttgcctaggcagactgatgaggaaaggctcgagttgagacagcagataggaacaaagttgacaaggagattgagccagcgtcctaccgccgaagagctcgagcagcgcaatattctgaagcccagaaacgaacaggaggaacaggaggagaaacgcgagatcaagaggcggttgactaggaaactgagtcagcggccaacagttgaagagcttcgtgaacgaaaaattttgatccgattcagtgactacgtcgaggtcgctgatgctcaggattacgataggcgcgcagacaagccttggaccaggctcactgccgcagacaaagctgctatccggaaggagctgaacgaattcaaatcaaccgagatggaggtgcacgaattgtccagacacctcacctctttccggtttccctag

SEQ ID NO: 84697 - DNA, 510 bp, Artificial Sequence
  derived and/or modified sequence
atggactatcccaaaatggactatttcttggatgtagaaagcgcccacagactgctagatgtggagagtgcacagagattcttttattcccaaggtgcacaggctcggagagccaccctgctgctgcctcccacgctgatggctgcttcatccgaggatgatattgatagacgtcccattcgaagggtgcggagcaagtctgataccccttatctggccgaggcaagaatttcctttaatctgggggcaggcgtgtcgctgtttggggacatggatgaagccaggatggggccagctgtgccaacgctggggcgaccactgggactggagctgtgctccctggagaatcacggccttctgaagactgcccctacctacaccacttctgcccatatttgttcaggaccatcaaccggtggccagttttcaactcagggcatgagcccagtgcagggggcaaagcgccgacgggtggtgtggctcccccttgagggggaggagttcggttag

SEQ ID NO: 84698 - DNA, 1455 bp, Artificial Sequence
  derived and/or modified sequence
atggactaccctaagatggattactttctcgacgtggagagtgctcacagactgctcgacgtggaaagtgctcagcgtttcttttactcacagggagctcaggccaggcgggctaccctccttctgcccccaacactaatggcagctagctcagaagatgatattgacagaagaccaattaggcgggtgcggagtaagtctgatactccctatctggcggaagccagaatttcttttaacctgggcgctgctgaggaggtcgagaggctggctgctatgcggtcggatagcctggtcccaggaacccatactcctcccattcgtcggagatctaagttcgccaatctgggacgcatcttcaagccctggaaatggcggaaaaagaagagcgaaaagttcaagcacacaagcgccgctctggagaggaagattagtatgagacagagccgtgaggagctgattaagcgcggtgtactgaaggagatctatgataaggatggagagctgagcatcagtaatgaggaagattctctagagaatgggcagtccctaagctcttcccagcttagtttgcccgcactttccgaaatggagccggtgcccatgcctagagacccctgcagttacgaggtattgcaaccgtcagatatcatggacggaccagatccaggcgcacccgtgaagctcccttgcctgccggtcaagctgtcacctccactgcctccaaagaaagtgatgatctgtatgccagtgggtggcccagacctgagtctcgtctcttacacagcacaaaaaagcggccaacaaggagtagcccagcatcaccacacagtgcttccttcacagatccaacatcagctgcagtacggttcacatggccagcatctcccatcgacaacaggctcccttccaatgcatccctcggggtgcaggatgatcgacgagctgaacaagacactcgctatgacaatgcagcgcctagagagcagtgagcagcgcgtgccttgttcaacgagttatcattcaagcggcttacactcaggcgatggcgtgactaaagccggacccatggggctgcctgagatcagacaggtaccaaccgtggtgatcgagtgcgatgataacaaggaaaacgtgccccacgaatccgattacgaggacagcagctgtctttatacacgtgaagaagaggaggaagaggaggacgaagacgacgattctagtctatatacgtcctctctcgctatgaaggtttgtcggaaagactccctggctattaaactgtcaaatagacctagtaagagggaactggaggaaaaaaacattctcccaaggcagactgacgaagagcgcctggagctgaggcagcagattggcaccaaactgacaaggcgcctgtcacagcgaccgactgctgaggagctcgagcagcgaaacattttgaaaagaaagtag

SEQ ID NO: 84699 - protein, 628 aa, Artificial Sequence
  derived and/or modified sequence
MEEEGGGRSCGTTRELQKLKQQAMEYYRENDVPRRLEELLNSTFYLQPADVYGHLKANCFSKLAKPPTICKIVGKDVLDGLGLPTLQVDIFCTIQNFPKNVCSVVISTHFEVHENALPELAKAEEAERASAVSTAVQWVNSTITHELQGMAPSDQAEVDHLLRIFFASKVQEDKGRKELEKSLEYSTVPTPLPPVPPPPPPPPPTKKKGQKPGRKDTITEKPIAPAEPVEPVLSGSMAIGAVSLAVAKACAMLLNKPLYLNIALLKHNQEQPTTLSMPLLMVSLVSCGKSSSGKLNLMKEVICIPHPELTTKQGVEMLMEMQKHINKIIEMVSPSPPKAETKKGHDGSKRGQQQITGKMSHLGCLTINCDSIEQPLLLIQEICANLGLELGTNLHLAINCAGHELMDYNKGKYEVIMGTYKNAAEMVDLYVDLINKYPSIIALIDPFRKEDSEQWDSIYHALGSRCYIIAGTASKSISKLLEQGNISIPKSNGLIIKHTNQTTMSDLVEITNLIDSKKHITVFGSTEGESSDDSLVDLAVGLGVRFIKLGGLSRGERVTKYNRLLTIEEELVQNGTLGFKEEHTFFYFNEEAEKAAEALEAAAAREPLVPTFPTQGVEESAETGASSG

SEQ ID NO: 84700 - DNA, 1887 bp, Artificial Sequence
  derived and/or modified sequence
atggaggaggagggcggcggcagaagctgcggcaccaccagagagctgcagaagctgaagcagcaggccatggagtactacagagagaacgacgtgcccagaagactggaggagctgctgaacagcaccttctacctgcagcccgccgacgtgtacggccacctgaaggccaactgcttcagcaagctggccaagccccccaccatctgcaagatcgtgggcaaggacgtgctggacggcctgggcctgcccaccctgcaggtggacatcttctgcaccatccagaacttccccaagaacgtgtgcagcgtggtgatcagcacccacttcgaggtgcacgagaacgccctgcccgagctggccaaggccgaggaggccgagagagccagcgccgtgagcaccgccgtgcagtgggtgaacagcaccatcacccacgagctgcagggcatggcccccagcgaccaggccgaggtggaccacctgctgagaatcttcttcgccagcaaggtgcaggaggacaagggcagaaaggagctggagaagagcctggagtacagcaccgtgcccacccccctgccccccgtgcccccccccccccccccccccccccccaccaagaagaagggccagaagcccggcagaaaggacaccatcaccgagaagcccatcgcccccgccgagcccgtggagcccgtgctgagcggcagcatggccatcggcgccgtgagcctggccgtggccaaggcctgcgccatgctgctgaacaagcccctgtacctgaacatcgccctgctgaagcacaaccaggagcagcccaccaccctgagcatgcccctgctgatggtgagcctggtgagctgcggcaagagcagcagcggcaagctgaacctgatgaaggaggtgatctgcatcccccaccccgagctgaccaccaagcagggcgtggagatgctgatggagatgcagaagcacatcaacaagatcatcgagatggtgagccccagcccccccaaggccgagaccaagaagggccacgacggcagcaagagaggccagcagcagatcaccggcaagatgagccacctgggctgcctgaccatcaactgcgacagcatcgagcagcccctgctgctgatccaggagatctgcgccaacctgggcctggagctgggcaccaacctgcacctggccatcaactgcgccggccacgagctgatggactacaacaagggcaagtacgaggtgatcatgggcacctacaagaacgccgccgagatggtggacctgtacgtggacctgatcaacaagtaccccagcatcatcgccctgatcgaccccttcagaaaggaggacagcgagcagtgggacagcatctaccacgccctgggcagcagatgctacatcatcgccggcaccgccagcaagagcatcagcaagctgctggagcagggcaacatcagcatccccaagagcaacggcctgatcatcaagcacaccaaccagaccaccatgagcgacctggtggagatcaccaacctgatcgacagcaagaagcacatcaccgtgttcggcagcaccgagggcgagagcagcgacgacagcctggtggacctggccgtgggcctgggcgtgagattcatcaagctgggcggcctgagcagaggcgagagagtgaccaagtacaacagactgctgaccatcgaggaggagctggtgcagaacggcaccctgggcttcaaggaggagcacaccttcttctacttcaacgaggaggccgagaaggccgccgaggccctggaggccgccgccgccagagagcccctggtgcccaccttccccacccagggcgtggaggagagcgccgagaccggcgccagcagcggctag

SEQ ID NO: 84701 - DNA, 1887 bp, Artificial Sequence
  derived and/or modified sequence
atggaggaagagggagggggccggtcttgtggtaccacaagggagttacaaaagttgaagcaacaagcaatggaatattaccgtgagaacgatgtgcctcggaggctggaagagctgctcaattcgacattttacttgcagcctgccgacgtctacgggcacctcaaggcaaactgtttttccaagctggccaaaccccctaccatttgcaaaattgtaggaaaggacgtgctcgacggtcttggcctgcccactctccaggtggacatcttctgcactattcagaactttcccaagaacgtgtgttcagtggtgatctccacccacttcgaagtccatgaaaatgctctgccggaacttgcaaaggctgaggaggccgaacgagcctcagctgtcagcactgcggtgcaatgggttaacagcaccatcacacatgagctacaggggatggctccctccgatcaggccgaagtcgatcatcttctgaggatcttcttcgcttcaaaggtgcaagaggataagggccgtaaagagctcgagaagagcttggaatacagtacggtcccgacgccactgcctcccgtgccaccaccccctcctccaccaccccccactaagaaaaagggtcaaaagccaggccgcaaggacaccattactgaaaagccaatcgcacctgccgagccggtagagcccgttctatctggctcaatggcaattggtgccgtgagtctcgctgtggctaaggcctgcgcaatgctcctgaataaaccattgtacctgaatatcgcactgctgaagcataatcaggagcaaccaaccaccctcagtatgccattactgatggtgtctttagtctcctgtgggaaatcctccagtggtaagctgaacttgatgaaggaggtgatctgcatccctcacccggagttgacgacgaagcagggtgttgagatgttgatggagatgcagaaacacataaacaagatcatagagatggtttctcctagtcctcctaaggcagaaaccaaaaaaggccacgacggctccaaacgaggccagcagcaaatcactggtaagatgtcccacttaggctgtctgactattaattgtgatagcatcgagcaaccattgttactcatccaggagatttgcgccaatctcggcctcgaacttggtacaaacctgcatctggcaatcaattgcgcagggcatgagttaatggattataacaaaggtaagtacgaagttatcatgggaacttacaagaatgccgctgagatggtagacttatacgtcgatttaatcaacaagtacccgtccattattgcactcatagatccatttagaaaggaggacagcgagcaatgggatagcatataccacgcacttggatctcgctgctacattatagctggtaccgcttccaaatcaatcagcaagctgctggaacagggtaatatcagcatccccaaaagcaatggcttgatcattaaacacaccaatcaaacaaccatgtcagatttagtcgaaatcactaaccttatcgacagtaagaaacacatcaccgtgtttggctccactgagggcgagtcatccgatgattccctagttgatctggccgttggcctcggcgtccgcttcatcaagctggggggtttgtccagaggagaaagagtaaccaaatacaatagattgctcaccatagaagaggagctggttcaaaatggcacgctcggattcaaggaagaacacacgttcttctacttcaacgaagaagcagagaaggccgcagaagccttggaggcagccgcagctcgtgagccactggtacccacgtttccaacccagggtgtggaagagtcagctgagaccggcgcgagctccggctag

SEQ ID NO: 84702 - DNA, 2779 bp, Artificial Sequence
  derived and/or modified sequence
agggacgctcgtgggaccccaggctaaaccccgctgtagccttaaatctcctaccatggaggaagaaggcggcggccgcagctgtgggaccactagggagctgcagaagctgaagcagcaggcgatggagtactaccgggagaacgacgttccgcgcaggctggaagagctgctcaactccaccttctacctccagcctgccgacgtctacgggcacctgaaagcaaactgcttttctaaacttgcaaagcctcccaccatatgcaaaatagtggggaaagacgtactagatggactggggcttccaaccctgcaagtggacatattctgcaccattcaaaactttcccaagaacgtatgttctgtggtgatctcgactcattttgaagtccatgagaatgctctgcccgagctggccaaggcggaggaggcagagagggccagcgcggtgagcaccgccgtgcagtgggtcaacagcaccatcacgcacgagctccaggggatggcaccctctgaccaggcagaggtggatcacctactcaggatattcttcgcaagtaaagtacaagaagataaggggagaaaagaattggaaaagagcctggaatactcaacagtgcctacacctctacctccagtaccaccaccaccaccccctccacctcctaccaaaaaaaaggggcaaaagccagggaggaaggatactattacagagaaacctattgcgcctgcagagcctgttgagcctgtactcagtggcagtatggccataggggccgtgtcactagctgttgccaaagcctgtgccatgctgcttaataaacctctgtacttaaatatcgctctactgaagcacaatcaggaacagccaacaacgctatctatgcctttgctgatggtatcgctggtcagctgtgggaagtcatcatctgggaagctaaatttaatgaaagaagtgatttgtataccccatcctgaattaacaaccaaacaaggtgtcgagatgcttatggaaatgcagaaacatatcaacaaaataattgaaatggtatcaccctctcctccaaaagcagagacaaaaaaagggcacgatggaagcaaaagaggtcaacagcagatcactggcaagatgtctcatcttggctgtttaaccattaactgtgactccatagaacagccactgcttctaatacaggaaatctgtgccaacctggggctagaactgggaacaaatctgcatctagctatcaactgtgctggacatgagctgatggactacaataaaggaaagtatgaagtgatcatgggcacatacaaaaatgcagcggagatggttgacctgtatgtggatctgatcaacaagtacccttcaattattgccttaattgatcctttcaggaaggaggactctgaacagtgggacagcatctatcacgcacttggttccaggtgttacataattgcaggaactgcttccaaaagcatttctaaacttctagagcaaggaaacatcagcatccccaaatccaatgggctgatcataaaacacacaaaccaaactacaatgtctgacttggtggaaataaccaatctgattgacagtaagaagcacatcactgtctttggaagtacagaaggagaatcatctgatgacagccttgtcgatttggctgttgggcttggtgtccggttcatcaagttggggggtctttcccgtggtgaacgagtgactaaatacaaccgccttctcactatagaggaagaacttgtccagaatggaacactgggtttcaaagaagaacacacttttttttactttaatgaggaagctgaaaaggctgcggaggcacttgaggctgctgcggctagggagccgctggtgcccaccttccccacacaaggtgtagaggaatcagccgaaacaggagcatcctctggatagggctgtacacaccccaggttccagccacaccatcagtattagtagaccgggaggtctgaagtacggcgccgtgtctccacatggagtttcctcttcaacttcaccaactcttgtggtttttattcttctaattccactgtttggtaaattacatatatgatgtttttgcctgaaattctgtgaacttcgttttgcagccaccacacttccatgtggattttgtttgtctattagctctcctgtccatttttcagggacacgctccagtaaaagaggccaatatttttgttgccaactccacactcagtcaaacaccccatcctttaccaatcagaatatctctgagaacaaaaacctaatgaccctagaagctctctgtgctgggaacagatgtccatcttctgtgtttattctacatgtctgtgctgaaaagcactgacacatttttgtaaccaacctcacgtagaagtgtgagagcatcaccattttttgtaagagccaatttcatctcactttcctacccttgattccttttttcctaattccctctcctttttaaattttagtttttcttgtattatttttatctttgcgagtcttcttagatcctttttggagtaagaatgagtataaatgaataagcacatcagtaaatgaattaatattctcaaggttattaaatgcccagttattcataccacagcatttaaaaagcaatccgcaagtgataaaaaaaaaaaaaaaaaatgatgtgacatatccattgcctgaattgctcttttgtaagccagtgttgggattatagcagaggagtagcagaaataaatatattcagac

SEQ ID NO: 84703 - DNA, 1887 bp, Artificial Sequence
  derived and/or modified sequence
atggaggaggagggcggcggccgcagctgtggcaccacccgggagctgcagaagctgaagcagcaggccatggagtactacagagaaaatgatgtgccccggcggctggaggagctgctgaacagcaccttctacctgcagcctgcagatgtgtatggccacctgaaggccaactgcttcagcaagctggccaagccacccaccatctgcaagatcgtgggcaaggatgtgctggatggcctgggcctgcccaccctgcaggtggacatcttctgcaccatccagaacttccccaagaatgtgtgcagcgtggtgatcagcacccactttgaggtgcatgaaaatgccctgcctgagctggccaaggccgaggaggccgagcgggccagcgctgtgtccacagctgtgcagtgggtgaacagcaccatcacccatgagctgcagggcatggcccccagcgaccaggccgaggtggaccacctgctgcgcatcttctttgccagcaaggtgcaggaggacaagggcaggaaggagctggagaagagcctggagtacagcacagtgcccacccccctgccccctgtgcccccacctcctcctcctcctccacccaccaagaagaagggccagaagccaggcaggaaggacaccatcacagagaagcccatcgccccagctgagcctgtggagcctgtgctgagcggctccatggccatcggggctgtgtccctggccgtggccaaggcctgtgccatgctgctgaacaagcccctgtacctgaacatcgccctgctgaagcacaaccaggagcagcccaccaccctgtccatgcccctgctgatggtgtccctggtgtcctgtgggaagagcagcagcggcaagctgaacctgatgaaggaggtgatctgcatcccccaccctgagctgaccaccaagcagggcgtggagatgctgatggagatgcagaagcacatcaacaagatcatcgagatggtgagccccagcccccccaaggccgagaccaagaagggccatgatggcagcaagaggggccagcagcagatcaccgggaagatgagccacctgggctgcctgaccatcaactgtgacagcattgagcagcccctgctgctgatccaggagatctgtgccaacctgggcctggagctgggcaccaacctgcacctggccatcaactgtgccggccacgagctgatggactacaacaagggcaagtatgaagtcatcatgggcacctacaagaatgctgctgagatggtggacctgtatgtggacctgatcaacaagtaccccagcatcatcgccctgattgaccccttcaggaaggaggacagcgagcagtgggacagcatctaccacgccctgggcagccgctgctacatcatcgccggcacagccagcaagagcatcagcaagctgctggagcagggcaacatcagcatccccaagagcaatggcctcatcatcaagcacaccaaccagaccaccatgtctgacctggtggagatcaccaacctgattgacagcaagaagcacatcaccgtgtttggcagcacagaaggagagagcagtgatgacagcctggtggacctggccgtgggcctgggcgtgcgcttcatcaagctgggcggcctgagcagaggagagcgggtgaccaagtacaaccggctgctgaccatcgaggaggagctggtgcagaatggcaccctgggcttcaaggaggagcacaccttcttctacttcaatgaggaggccgagaaggctgctgaggccctggaggccgctgctgcccgggagcccctggtgcccaccttccccacccagggcgtggaggagagcgctgagactggagccagcagtggatag

SEQ ID NO: 84704 - DNA, 1887 bp, Artificial Sequence
  derived and/or modified sequence
atggaggaggagggcggcggccggagctgcggcaccacccgggagctccaaaagctcaagcagcaggctatggagtactatagagaaaacgacgtgccaaggcggctggaggaactgttgaattctaccttttaccttcagcccgcagatgtatatggtcaccttaaagcaaattgcttcagcaagctggcgaagcccccaaccatatgtaaaattgttggcaaggacgtcctcgacgggctgggcctccctacactgcaggtcgacatattctgcaccatccagaatttccccaagaacgtgtgttctgtagtgatttccacgcactttgaggtccacgaaaacgcccttcccgagttagctaaggccgaggaagccgagagagccagtgccgtatcgactgccgtacaatgggttaattcaactattacccatgagcttcagggtatggctcctagcgatcaggcagaagtcgaccatcttttgcgtatcttttttgcaagcaaggtccaggaagacaaaggccgaaaagagctcgaaaagagtttggagtatagtacagtgccgacgcctctacccccggtacctcccccaccaccccccccacccccaaccaagaagaaaggccagaaaccaggcaggaaagacacaataacagagaagcccatcgcccccgctgagcctgtggaacccgtattgtcaggctctatggccataggcgctgtaagtctggcggtggcaaaggcttgtgcaatgctactaaacaagccactctacctcaatatagcactgctaaaacacaaccaggaacagccgacaacattaagcatgcctttgcttatggtatcgctggtgtcctgtgggaaatcttcttccggtaaactcaacctaatgaaggaggttatatgtataccacaccctgagctgacaacaaagcaaggagtcgaaatgctaatggagatgcagaagcacatcaataagatcatcgaaatggtctcccctagcccacccaaggccgaaaccaaaaaagggcacgacggtagtaagcggggccaacagcagatcacaggtaagatgagtcacctcggctgtttgacgataaactgcgatagcattgaacagccgctcttactcattcaggagatttgtgcgaatctaggactcgagctcggaaccaatcttcatctcgctataaattgtgctggacacgaattgatggattataacaaagggaagtacgaggttatcatgggcacctacaaaaacgcagctgagatggtggacctatatgtcgacctaatcaacaagtacccctcaataattgcactgattgacccgttccgcaaagaagactctgagcaatgggatagcatctaccacgctctgggatcccgatgctatattatcgctggcacagcatcaaagagtatcagcaaactgctggaacagggaaacatcagcatccccaagagcaatggccttatcatcaagcatactaaccaaacaacaatgtccgacctggtggagatcaccaatctcattgattccaagaagcacattacagtctttggaagcacagagggagaaagttctgatgatagccttgtggacttagcagtcggccttggagtcaggttcatcaaactcggcggtttgtccaggggcgaacgtgtaactaagtataaccgactgttgacgatcgaggaagagttggtgcagaatgggaccctcggatttaaggaggagcataccttcttctacttcaatgaggaagcggaaaaggctgccgaggcacttgaggctgctgcagctagggagccactcgtgcctacattccccacccaaggcgtggaagagtctgccgaaaccggcgcaagctccggttag

SEQ ID NO: 84705 - DNA, 1887 bp, Artificial Sequence
  derived and/or modified sequence
atggaagaagaaggtgggggacggtcatgcgggaccacacgggaactgcagaaacttaagcaacaagctatggaatactatagggaaaacgacgtaccacgcaggctggaagagttactgaattcgaccttctacctgcagcctgcagacgtgtacggtcatttgaaagccaattgtttctcaaagcttgccaagccacctaccatttgcaaaattgttggtaaggatgtgctagatgggttgggtctgcccaccctgcaagtggatatcttttgtacaatacagaacttccctaagaatgtttgctcagtggtcatctccactcattttgaggtgcatgagaatgctctaccggagctggctaaggcggaggaagcggagcgggctagtgcggtgtcaacagctgtccaatgggtgaacagtacgataacccatgagctccagggcatggcacctagcgaccaggccgaagtcgaccatttattaagaatttttttcgcatctaaagtgcaggaagacaagggccgtaaggaactcgaaaagtccctggagtattcaaccgtgcctacaccactgcccccagtgcctcctcctccgccacccccacctcctacaaagaaaaagggtcagaagcccggtcggaaagacacgattaccgagaagccgattgctccggctgaaccagtggaacccgttctgtccggctctatggcaattggcgctgttagcttggcagttgcgaaggcatgtgctatgctcttaaacaaacctctttacctgaacatagctctcttgaaacacaaccaagagcaacccacgacactctcgatgccactcctgatggtctcactggtgtcttgtggaaagtcttcatccggcaagctcaatctgatgaaagaggtcatctgcatcccacacccagagcttactaccaaacagggcgttgagatgttgatggaaatgcagaaacacataaataagattattgagatggtcagtccttccccacctaaagctgagacgaagaagggacacgatggctcaaagcggggacagcagcaaatcactgggaaaatgtcccacctgggctgcctgaccattaactgcgattctatcgagcagcccctgctcttgatccaggaaatttgtgccaacctggggttggaattaggcaccaacctgcacctggcaatcaactgcgcaggccacgagctgatggattataacaagggtaaatatgaagttatcatgggcacctataagaatgctgctgagatggttgacctgtatgtggatcttattaataagtaccccagtattattgcactcatcgatcctttcagaaaagaagactccgagcagtgggattctatatatcacgctctcggttccaggtgttatataatcgccggaactgcgtccaagtccattagtaagttactggaacagggaaatatttctatccccaaaagcaatggcctcatcattaaacacacaaatcagacaaccatgagcgacctagtggagattacgaatctgattgacagtaaaaagcacattacggtattcggcagtactgaaggagagtcctccgatgactcacttgtcgacctggcagtcgggttgggggtgcgctttatcaagcttgggggacttagtcgcggtgagagggtgaccaaatataacagactcctcaccatagaggaggagcttgtgcagaacgggaccctggggttcaaagaggagcacacgtttttctacttcaatgaggaggcagaaaaggcagcagaggctctggaggcagcagccgctagagagcctcttgtaccgaccttccctactcaaggagttgaggagagtgctgagactggcgcatctagtggatag

SEQ ID NO: 84706 - protein, 219 aa, Artificial Sequence
  derived and/or modified sequence
MEPKEATGKENMVTKKKNLAFLRSRLYMLERRKTDTVVESSVSGDHSGTLRRSQSDRTEYNQKLQEKMTPQGECSVAETLTPEEEHHMKRMMAKREKIIKELIQTEKDYLNDLELCVREVVQPLRNKKTDRLDVDSLFSNIESVHQISAKLLSLLEEATTDVEPAMQVIGEVFLQIKGPLEDIYKIYCYHHDEAHSILESYEKEEELKEHLSHCIQSLK

SEQ ID NO: 84707 - protein, 777 aa, Artificial Sequence
  derived and/or modified sequence
MEPKEATGKENMVTKKKNLAFLRSRLYMLERRKTDTVVESSVSGDHSGTLRRSQSDRTEYNQKLQEKMTPQGECSVAETLTPEEEHHMKRMMAKREKIIKELIQTEKDYLNDLELCVREVVQPLRNKKTDRLDVDSLFSNIESVHQISAKLLSLLEEATTDVEPAMQVIGEVFLQIKGPLEDIYKIYCYHHDEAHSILESYEKEEELKEHLSHCIQSLKKIYMQEGKPNLLDMGSLMIKPIQRVMKYPLLLCELRNSTPPSHPDYRALDDAFAAVKDINVNINELKRRKDLVLKYKKNDEDESLKDKLSKLNIHSISKKSKRVTNHLKILTRGESQVKDNTFNREEKLFRALEKTVRLCVKNISLCLQHIQDAMPLALQSVMDLQEISYNKDDEMDYSETLSNALNSCHDFASHLQRLILTPLSALLSLFPGPHKLIQKRYDKLLDCNSYLQRSTGEESDLAKKEYEALNAQLVEELQAFNQAARKILLNCLCSFITLLRDLMLVAQQAYSTLVPMPLLVSSISEIQNQVLEEIQNLNCVKENSATFIERKLSFEKKKPVQILPEMPHQTDIHRSKLLSTYSAEELYQAKRKCNATQEYDINLLEGDLVAVIEQKDPLGSTSRWLVDTGNVKGYVYSSFLKPYNPAKMQKVDAENRFCDDDFENISLFVSSRPASDSVTGTSESSIGDSSSSLSGTCGKFETNGTDVDSFQEVDEQIFYAVHAFQARSDHELSLQEYQRVHILRFCDLSGNKEWWLAEAQGQKGYVPANYLGKMTYA

SEQ ID NO: 84708 - DNA, 2334 bp, Artificial Sequence
  derived and/or modified sequence
atggagcccaaggaggccaccggcaaggagaacatggtgaccaagaagaagaacctggccttcctgagaagcagactgtacatgctggagagaagaaagaccgacaccgtggtggagagcagcgtgagcggcgaccacagcggcaccctgagaagaagccagagcgacagaaccgagtacaaccagaagctgcaggagaagatgaccccccagggcgagtgcagcgtggccgagaccctgacccccgaggaggagcaccacatgaagagaatgatggccaagagagagaagatcatcaaggagctgatccagaccgagaaggactacctgaacgacctggagctgtgcgtgagagaggtggtgcagcccctgagaaacaagaagaccgacagactggacgtggacagcctgttcagcaacatcgagagcgtgcaccagatcagcgccaagctgctgagcctgctggaggaggccaccaccgacgtggagcccgccatgcaggtgatcggcgaggtgttcctgcagatcaagggccccctggaggacatctacaagatctactgctaccaccacgacgaggcccacagcatcctggagagctacgagaaggaggaggagctgaaggagcacctgagccactgcatccagagcctgaagaagatctacatgcaggagggcaagcccaacctgctggacatgggcagcctgatgatcaagcccatccagagagtgatgaagtaccccctgctgctgtgcgagctgagaaacagcaccccccccagccaccccgactacagagccctggacgacgccttcgccgccgtgaaggacatcaacgtgaacatcaacgagctgaagagaagaaaggacctggtgctgaagtacaagaagaacgacgaggacgagagcctgaaggacaagctgagcaagctgaacatccacagcatcagcaagaagagcaagagagtgaccaaccacctgaagatcctgaccagaggcgagagccaggtgaaggacaacaccttcaacagagaggagaagctgttcagagccctggagaagaccgtgagactgtgcgtgaagaacatcagcctgtgcctgcagcacatccaggacgccatgcccctggccctgcagagcgtgatggacctgcaggagatcagctacaacaaggacgacgagatggactacagcgagaccctgagcaacgccctgaacagctgccacgacttcgccagccacctgcagagactgatcctgacccccctgagcgccctgctgagcctgttccccggcccccacaagctgatccagaagagatacgacaagctgctggactgcaacagctacctgcagagaagcaccggcgaggagagcgacctggccaagaaggagtacgaggccctgaacgcccagctggtggaggagctgcaggccttcaaccaggccgccagaaagatcctgctgaactgcctgtgcagcttcatcaccctgctgagagacctgatgctggtggcccagcaggcctacagcaccctggtgcccatgcccctgctggtgagcagcatcagcgagatccagaaccaggtgctggaggagatccagaacctgaactgcgtgaaggagaacagcgccaccttcatcgagagaaagctgagcttcgagaagaagaagcccgtgcagatcctgcccgagatgccccaccagaccgacatccacagaagcaagctgctgagcacctacagcgccgaggagctgtaccaggccaagagaaagtgcaacgccacccaggagtacgacatcaacctgctggagggcgacctggtggccgtgatcgagcagaaggaccccctgggcagcaccagcagatggctggtggacaccggcaacgtgaagggctacgtgtacagcagcttcctgaagccctacaaccccgccaagatgcagaaggtggacgccgagaacagattctgcgacgacgacttcgagaacatcagcctgttcgtgagcagcagacccgccagcgacagcgtgaccggcaccagcgagagcagcatcggcgacagcagcagcagcctgagcggcacctgcggcaagttcgagaccaacggcaccgacgtggacagcttccaggaggtggacgagcagatcttctacgccgtgcacgccttccaggccagaagcgaccacgagctgagcctgcaggagtaccagagagtgcacatcctgagattctgcgacctgagcggcaacaaggagtggtggctggccgaggcccagggccagaagggctacgtgcccgccaactacctgggcaagatgacctacgcctag

SEQ ID NO: 84709 - DNA, 2334 bp, Artificial Sequence
  derived and/or modified sequence
atggagccgaaggaggccactggcaaggagaacatggtgactaaaaagaagaatcttgcctttcttagaagtcgcttgtacatgctggagcgccgcaaaacggacactgttgtcgaaagctccgtttcaggagatcacagcgggacattgcgcagatcacagtctgacagaacggaatataaccagaagctccaggagaaaatgaccccccagggggagtgtagcgtagccgagaccctaacaccagaagaagaacaccacatgaaacgcatgatggccaagagagagaaaattatcaaggaattaatccagacggaaaaagactatctgaatgatcttgagctctgcgttcgggaggtagtgcagccgctccgtaataaaaagacggatcgcctcgacgtggatagtttatttagcaacatagagtctgtgcatcaaatttccgccaagctgctgtcccttttagaggaggccacaactgatgtggagcctgccatgcaggttattggggaagtctttttgcaaattaaaggccctctggaggatatttacaaaatctactgttaccaccacgacgaggctcactctatactagagtcttacgagaaggaagaggaactcaaggagcatctcagccactgtattcagagtctaaagaaaatctatatgcaagagggtaagccaaatctgctcgacatgggttcactcatgattaaacctatacagagggttatgaaataccccttgttgctgtgtgagctcaggaattcaacccccccaagccaccctgattatagggccctagatgacgctttcgcggctgtaaaagacatcaatgttaacataaacgagctgaaacgccgcaaggacttagtgctgaagtataagaaaaacgacgaagatgagtcgctgaaggataaactcagtaaactaaacatccacagcatctcaaaaaagagtaagcgagtaaccaaccacctgaagattttgacgcggggcgaatcccaggtcaaagacaacacgtttaatcgagaagaaaaacttttccgcgctctcgagaagaccgtgcgtttatgcgtcaagaatatatctctctgcctgcagcacatccaggacgctatgccgctcgcacttcagtccgtcatggacttacaggaaattagttacaacaaggacgatgaaatggactactctgagacgctatctaatgcgctgaacagctgccatgattttgccagccacctccagagactcatcctgactcccttgtcagcgctcctcagccttttccctgggccccacaagctgattcagaagcggtatgataaattactcgattgtaatagctaccttcaaagaagtacaggcgaggagtcggacctcgcaaaaaaggaatacgaagccttaaacgcccagctggtggaagaattgcaggcctttaaccaggccgctaggaagattttgctgaattgtctctgcagttttattaccctccttcgcgacctgatgctcgtcgcccagcaggcctactctaccttggttcccatgccattgctcgttagctcaatcagcgagatccagaaccaggtgctagaagagattcagaacctgaactgtgtgaaggagaattccgctactttcatcgagcgaaagctgagctttgaaaagaaaaagccggtgcagatactcccggagatgccgcatcagaccgatatccatcggagcaaattattgagcacatactccgcagaggagctttaccaagctaaacgtaaatgcaacgccacccaagaatatgacattaacctcctggagggagatttggttgctgtcatcgaacagaaagatccgctgggctccacaagtaggtggctggtcgatacaggtaatgtgaaagggtatgtatattcgtcatttttgaagccttataatcccgccaaaatgcagaaggttgatgctgagaaccgcttttgcgatgatgatttcgagaatattagcctgtttgtttcttctagacctgccagtgatagcgtgactggcacaagtgagagctctatcggggatagtagcagcagcctgtccggcacgtgtgggaagttcgagaccaatggcactgatgtggactcgttccaggaggttgatgagcagattttctacgcagtccacgcatttcaagctcggtctgaccatgaactgtccttgcaggagtaccagagagtgcatattctccgcttctgtgacctcagcgggaacaaggagtggtggctggccgaggcccaggggcagaaaggctatgtgcccgcaaactaccttggaaagatgacctatgcttag

SEQ ID NO: 84710 - DNA, 2334 bp, Artificial Sequence
  derived and/or modified sequence
atggagcccaaggaggccaccgggaaggagaacatggtgaccaagaagaagaacctggccttcctgcggagccggctgtacatgctggagaggaggaagacagacacagtggtggagagctctgtgtctggggaccacagcggcaccctgcggcgcagccagagcgacagaacagagtacaaccagaagctgcaggagaagatgaccccccagggagaatgttctgtggccgagaccctgaccccagaggaggagcaccacatgaagaggatgatggccaagcgggagaagatcatcaaggagctgatccagacagagaaggactacctgaatgacctggagctgtgtgtgcgggaggtggtgcagcccctgaggaacaagaagacagaccggctggatgtggacagcctcttcagcaacattgaatctgtgcaccagatcagcgccaagctgctgagcctgctggaggaggccaccacagatgtggagcccgccatgcaggtgattggagaggtgttcctgcagatcaagggccccctggaggacatctacaagatctactgctaccaccatgatgaggcccacagcatcctggagagctatgagaaggaggaggagctgaaggagcacctgagccactgcatccagagcctgaagaagatctacatgcaggagggcaagcccaacctgctggacatgggcagcctgatgatcaagcccatccagagggtgatgaagtaccccctgctgctgtgtgagctgaggaacagcaccccacccagccacccagactaccgggccctggatgatgcctttgctgctgtgaaggacatcaacgtgaacatcaatgagctgaagaggaggaaggacctggtgctgaagtacaagaagaatgatgaagatgagagcctgaaggacaagctgagcaagctgaacatccacagcatcagcaagaagagcaagagggtgaccaaccacctgaagatcctgaccagaggagagagccaggtgaaggacaacaccttcaaccgggaggagaagctgttccgggccctggagaagacagtgcggctgtgtgtgaagaacatcagcctgtgcctgcagcacatccaggatgccatgcccctggccctgcagagcgtgatggacctgcaggagatctcctacaacaaggatgatgagatggactacagcgagaccctgagcaatgccctgaacagctgccacgactttgccagccacctgcagaggctcatcctgacccccctgagcgccctgctgagcctcttccctggcccccacaagctgatccagaagagatatgacaagctgctggactgcaacagctacctgcagaggagcactggagaggagagtgacctggccaagaaggagtatgaggccctgaatgcccagctggtggaggagctgcaggccttcaaccaggccgccaggaagatcctgctgaactgcctgtgcagcttcatcaccctgctgcgggacctgatgctggtggcccagcaggcctacagcaccctggtgcccatgcccctgctggtgagcagcatcagcgagatccagaaccaggtgctggaggagatccagaacctgaactgtgtgaaggagaacagcgccaccttcatcgagaggaagctgagctttgagaagaagaagcctgtgcagatcctgcctgagatgccccaccagacagacatccacaggagcaagctgctgagcacctacagcgctgaggagctgtaccaggccaagaggaagtgcaatgccacccaggagtatgacatcaacctgctggagggggacctggtggccgtcatcgagcagaaggaccccctgggcagcaccagccgctggctggtggacacaggaaatgtgaagggctacgtgtacagcagcttcctgaagccctacaacccagccaagatgcagaaggtggatgctgagaaccgcttctgtgatgatgactttgagaacatcagcctgtttgtgagcagcaggcctgccagtgacagcgtgacaggcaccagcgagagcagcatcggggacagcagcagcagcctgagcggcacctgtgggaagtttgagaccaatggaacagatgtggacagcttccaggaggtggatgagcagatcttctatgctgtgcacgccttccaggcccggagtgaccacgagctgagcctgcaggagtaccagagggtgcacatcctgcgcttctgtgacctgagcggcaacaaggagtggtggctggccgaggcccagggccagaagggctacgtgcctgccaactacctgggcaagatgacctacgcctag

SEQ ID NO: 84711 - DNA, 2334 bp, Artificial Sequence
  derived and/or modified sequence
atggagcccaaggaggccaccggcaaggagaacatggtgaccaagaagaagaacctggcgtttctcagaagcagactatatatgctggaacgccgcaagactgacactgtggtcgaaagtagcgtgtcgggtgaccacagcgggaccctgcggcgctcacagtcagacaggactgagtataaccaaaaactccaggagaagatgacaccacaaggcgaatgtagcgtggcagaaacacttacgcctgaggaagagcatcatatgaaaagaatgatggccaagcgggaaaaaatcataaaggaactgattcaaactgagaaagattacctcaatgatcttgagctgtgtgtcagagaggtagtacaaccactccgaaataaaaaaacggatcgcctagacgttgacagcttgttctccaatattgagagcgttcaccagatcagtgctaagctgctgagtctgctggaggaagccactactgatgtagaacctgccatgcaagtcatcggggaggtgtttttgcaaattaagggacctctcgaggacatctataagatttactgctaccaccatgacgaagcgcatagcattctcgaatcatatgaaaaggaagaagagctcaaggaacatctgtcccactgtattcaatctctcaagaagatctatatgcaggaaggaaagccaaacctcctcgatatgggttccttaatgataaaaccaatccagagggtgatgaaatacccactgctgctttgcgaattgaggaattcaacccctcctagccatcccgattaccgggctctggatgacgctttcgccgccgtcaaagacattaatgttaatatcaacgaactcaaaaggagaaaggatctggtcttgaagtataaaaagaacgacgaggacgagagccttaaggataagctgtctaaactgaatatccactccatctcaaagaagtcaaaacgcgttactaaccacctaaaaatactgacacgaggggaatcacaggtcaaagacaacacgtttaacagagaggagaaactgttcagagccctagagaaaacggtccgcctttgcgtcaagaacatctcactctgtttacagcacattcaggatgccatgcctttggcactacaatctgtgatggatcttcaagagatatcttacaacaaagatgatgagatggactactcggaaactctgagcaacgctctgaactcatgccatgacttcgcctctcatctgcagagattaattctgacgcccctgagcgccttgctttcgttgttccctggccctcacaagctgatccagaaacgctatgacaaactgttggactgcaattcttacctccaaagatccaccggggaggaaagcgacctggccaagaaggaatatgaagctctgaacgcccaattggtggaagaactgcaagccttcaaccaggctgcacgtaaaatcctgctcaattgcctgtgcagttttataactctgctacgcgatctgatgctcgtcgcgcagcaggcctactccacactggtcccaatgcccctgctagtgtcttcgatctctgagatccaaaatcaagtgcttgaggaaatccagaatcttaattgtgtgaaggagaacagcgccacctttattgagcgcaaattgtcgttcgagaaaaagaagcccgtccagatccttccagaaatgccacaccagactgatatccatcgctcaaagttgttatccacgtattcagctgaggagctgtaccaggctaaaagaaaatgcaacgctacgcaggagtacgatattaatttactggaaggcgatctcgtggcagttatcgagcaaaaggaccctttaggttccacaagtcggtggctggtagatacaggaaacgtgaaagggtacgtatattccagcttcttgaaaccgtataatcccgccaaaatgcaaaaggtcgacgcagagaacaggttctgtgacgacgattttgagaatatcagcctgtttgtaagttccaggcctgccagcgattccgttaccggaactagtgaatcaagtataggggattctagttcctcgctttcagggacctgtggcaagttcgagactaacggaaccgacgttgacagcttccaggaggtagacgaacagatcttctatgcagtgcacgcatttcaagctagaagcgatcacgagctgagcttacaggagtatcagagggtgcatatcctgcgcttttgtgatctctctggcaataaggagtggtggcttgctgaggctcagggacaaaagggctacgtgccggcaaactacttgggcaagatgacctatgcttag

SEQ ID NO: 84712 - DNA, 5454 bp, Artificial Sequence
  derived and/or modified sequence
tcacagccaggtaaccctggagtgaagcggtttagttagaagggagcagataaactcgtcactctagtagctttaaccctcaccctgaggcaccttagcaatcagccattgcctgcaagcctccaaagcttgtctttgcctaatatggagcccaaagaagccactgggaaagaaaacatggtcaccaagaaaaagaatctggccttcttgaggtctagactctatatgctggagagaaggaagactgacactgtggttgagagcagtgtttctggggaccactctggcaccttgaggaggagccaatctgacaggactgaatacaaccagaaattacaagaaaagatgactccacagggtgagtgttctgtagctgagaccttaaccccagaggaagagcatcatatgaagaggatgatggcaaagcgggaaaagatcattaaggagctgatacagacagaaaaggattatctcaatgatctagagctgtgtgttagggaagtggttcagcccctgagaaataaaaagactgataggctggatgtggatagcttgtttagcaacattgagtccgtgcatcagatatcagccaagctgctgtcattgttggaagaggccacaacagacgtggaaccggccatgcaagtaattggagaagtattcttgcagattaaagggccactggaagatatttataaaatctactgctatcaccatgatgaagcacatagtatactggagtcctatgaaaaggaagaagagctgaaggaacatttgagccactgtatccagtccttaaagaaaatatacatgcaagaaggcaaaccaaacttattggacatgggctctttgatgatcaaaccaattcaacgtgtgatgaaataccccctattactgtgcgaacttcggaattccacccctccctctcacccagattacagagcactggacgatgcctttgctgctgtgaaggacattaatgttaacatcaatgaacttaaaagaaggaaagatttagttctaaaatacaagaagaatgacgaggatgaatcacttaaagacaaattgtctaaactaaatattcattcaattagcaagaaatcaaaaagagtgacaaatcatctgaagattctgaccagaggagaatcacaggttaaagacaatacctttaacagagaagaaaagctgtttagagctttagaaaagactgtgaggctttgtgtgaagaacatttcactctgtcttcaacacatacaggatgccatgcccctggctctgcagagtgtgatggaccttcaggagatttcatacaacaaagacgatgagatggactattctgagaccctaagtaatgccttaaattcgtgtcatgactttgcatctcacttacagagactcatcctgacccccttgtcagccctgctgtccttattcccagggcctcacaagctcatccagaaacgctatgacaaactgctggattgcaacagctacctgcagcgatcaacgggagaggagtcagacttggccaaaaaggagtatgaggccctcaacgcccagcttgtggaggagctccaggcattcaaccaggctgctcggaagattctgttgaactgtctatgcagcttcattaccctccttagggacctgatgctcgtggcacagcaggcttactccacacttgtgccgatgccactgttggtttcaagcatttctgagattcagaatcaagtactagaagagatccaaaatttgaattgtgtgaaagaaaacagtgccacctttattgagaggaaactcagttttgaaaagaagaaacctgtgcagattctgccagaaatgccacatcaaactgacattcatcgctccaaacttctatccacatatagtgcagaggaactctatcaagctaagcgcaagtgcaatgctacacaagaatatgacatcaatcttctggaaggagacttggtggctgtgatagaacagaaagatccactggggagtacaagcaggtggcttgtggacacaggaaatgtgaaaggatatgtttattcctccttcctaaaaccctacaatccagcaaaaatgcagaaagtggatgctgagaacaggttctgtgacgatgattttgagaacatcagcctcttcgtgtcttcacggccagctagtgacagtgtcacaggcacctcagaaagcagcattggtgatagcagctcatctcttagtggcacatgtggaaagtttgaaacaaatggtactgatgttgacagttttcaagaagtagacgaacagattttctatgcagttcatgcttttcaagcacggagtgaccatgaactcagccttcaggaataccagagagttcatatactcaggttttgtgacctaagtggcaataaagagtggtggttagctgaagctcaagggcagaaaggatacgtgccagctaactaccttggaaagatgacttatgcttaagaaaataagccttcaacttttattttccagcaagttgttgattgactacctcataaaactgacattacaaaactttggaccagaaagcaagaaacctctgaactacagaaactgatactgtactgggttttcaggaatactgtacttcctaacaggattattgcatgaatgtattataaaggatacatgttgaaagaaatactaagccaacagaaatagcaaagcaaatgacccaagcttcaactatcaactatttaaaagtgaagatcttttgaaggagtaattatattcttttatcatcaagaaaggttggatccaaaggtttttcaatttacttttttttttactgtatgatgtattttgccttaaatgtttttgtttttcatattgctctcttgcaaatgcatacatgtttatatacatacatataaaccatatatattatgtagctttatacacgtatgtggataatatgaattatacacctatatgtataaatcagagtatacaccaaatatacataagaagaatataccaccaactagaagtctttgataatatattttgttaatgtttcgtttatatgttttgaactaaaactgaataacttgatattaacatgtaacattactgaatgcacactatatgccagacattgttctaagtgctttatatgtagtaacttgtttaatattcaaaacattatgaagaaaccatggcccaaaaaggtgaagtaatttaatccaaatcacattgctattaagtggtgggcctggacttaaacctaggtagtgtaaaccaaaaataaaattctaaggcttccaaccatctaaatagacttccccttcagccagggcttttttctttcttttcttgttgtttttttttttttttaaagagacaataaaaggaggtttttttattcaaaggtataactggataagtagatttgtttacaatcattcttgtgaaatacttttttaaaaaaatacgatcaacttctttgcaaatagtagacacatacctcaacaatgatgacctaatttttgatccataatgtaagattaggtagaaataggcaagctcacactgctaaattaactatcaaatactcagtcaaaactccatttgtggcccccacttcttgatctatttctgttccacttcgtcttctaccatcttgccgactttcctgagcaactgctttgtcgactctctctacctgaccaattgccagatcgacaacctgactggcctgaccagccactcctctgtctggaattaaaagatgtttccatcataatattctttaatttcaggtaatttagctggcactgagagtatccagccggaatcatgccactttgcctgtaacctttgactcaattggaggaatatcaaagcaaacacccatatttcctttcaggaggcacactctggtaatctgagacactgcattactattcagctttctaagttctttccaagcacagctgacatcctgtatttcctctaggctttccagagtcatggtcacaaaccccttatcagagttgattaaagatcatggttcaaagcttgatacaccagaaatgtgggctaaagctgcagccaatgcatctatcgcccctttctcttctatcagtatctgagctgatggttggaaaaaaatcaacagcagcataagaaatggaagccagagaccttatggcatccatgcttttaaatttaactaaatccattgtagaaggaacacctacacatttaaaagtaatttgtgttttttgttccacatgtcttagttgacctttctcttggttgataaaaacatatacaaacccctgtctgtccagctttacccacgcatccagagagatggatataggactcaatatcctgaggaggagaactttgaatcaccaggtcaactacaggaatgtccaaaccacgaggagccacattggttgccaccaaaactttataattacctctctgaagccttttagtgtaatttctctttgtgactgtgcaatgtccccatgtaaacacagtgcattctgttttgtgcggattcatggccatgtcagttacattcttcttcgtctcacagaaaataatagccctcccttcagatccactgtagacttgaaggacatctcattttcatctgtgttttataaaggaggaaattgaggacctcacatggagggactggaatttaaaaccaggtcttctgactttaaggcctttcttttagtgttttcccttttcttttccttaagtcactaaaatctgtagttatataatcttacataaagcatatgcaaaatagaaaaatgatagtcaccacatatctactaatgggattaaaatgtacaatcctaaaagcttacttgttagcacacttgcttatctgtccattcattcattgaaccagtaagtatttattgagagttagtgggaatacaatgctgtgcaagacaaacaagatccctccattcataccacttaaattctagtggggaaaacatctgcacataacaaactaaataaaatgatcataaaataataaatgctatttatataaaactggctactttcattactgctcagttaaagggtcttgtagctcattttatgacatgaaaaaaatcaaggtctaaaagctccttgagacaatttaaactctaataccaaatatacctctataaaataccaaactgagctaaatacggtatatgtgtacttatacatatgtacataacctaaatatacgtgtgcacacattatctatacaaagagccatactcagtgaaagataaattacctcctaaactaaagtcccctctgaggtacaacagaaattaaaataattgcttctcttctcaactctatgtagcacgtattttccatgatgggataaatgttttcatttcaagtgccaatgtgtgaactgtaataaacattactgctttc

SEQ ID NO: 84713 - DNA, 2334 bp, Artificial Sequence
  derived and/or modified sequence
atggaacccaaggaggccacagggaaagagaatatggtcaccaaaaagaagaatctggcattcctgaggagcaggctctacatgcttgaaagacggaagaccgatactgtggttgaaagctccgtgagtggggatcactctggcacgcttcgccgatctcaatcagatagaaccgaatataaccaaaaattgcaggagaaaatgaccccccagggggagtgtagcgtggctgaaacactgacacccgaggaggagcaccacatgaaacggatgatggccaagcgcgagaaaataattaaagagttgatccagactgaaaaggactacctgaatgatttagagctgtgcgtgagagaggtggtgcaaccgctgcgaaacaaaaaaaccgataggctggatgtcgatagcctcttctccaacatagaatccgttcaccagatttctgcgaagttgctgtctttactggaggaggctacaaccgacgttgaacctgctatgcaggtgataggtgaagtattcctacagattaagggcccactggaagatatctataagatttactgctaccatcacgacgaggcacatagtattctggagtcttacgaaaaagaggaggaactgaaggagcacctttcccactgtattcagagcctcaagaagatttacatgcaggaaggaaaaccgaatctcttggacatgggcagtctgatgattaagcctatccagagagtgatgaaatatccgctcctcttgtgtgaactgagaaactccacacccccttcccaccccgactaccgggctctggacgacgcattcgccgctgtgaaagatattaacgttaacatcaatgagctcaagcggagaaaggatttggttttgaagtataagaagaatgatgaggatgaaagtcttaaggataagctcagtaagttaaatatacactccatctctaagaaatccaagcgcgtgaccaaccatctcaaaattcttacacgtggtgaatcccaagttaaggataacacatttaaccgtgaagaaaagttgttcagagcactcgagaagacagtccggctgtgtgttaagaatatctctctatgtcttcaacacatacaagacgctatgccactggccctgcagagcgtgatggaccttcaggaaatctcttataataaggacgatgaaatggactatagcgagactctgtccaatgctctaaatagctgtcatgacttcgcgagccatcttcaacgactcattctaacccctttgtcagccttgctgagcctcttccccggtccccacaagctgatacaaaaaagatacgacaaactgctggattgcaactcttacctgcagcgctctaccggggaggagagtgatctggctaaaaaggagtacgaggcactcaacgcccaactggttgaggagctgcaggcattcaaccaagctgcccgaaaaatcctgctgaattgcctttgttcattcatcaccttgttacgagatctgatgttggtcgcccaacaggcctacagcaccttggtgcccatgcctctgctggttagctctattagtgagatccagaatcaagtgctcgaggaaatccagaacctgaattgtgtcaaggagaactcagctacattcatagagagaaaattgtcctttgagaaaaaaaaacccgtgcagatactccctgagatgcctcatcaaacagatatacatcggtccaagctgctcagcacttactcagcagaggaactgtaccaggcgaagcggaagtgtaacgctactcaggaatatgatatcaacttgctagaaggcgatttggtggccgttatagaacagaaagatcctctcggaagcacgtcccggtggcttgtggacactggcaacgtcaaaggatatgtgtactcttcttttctgaagccctataatcccgcaaagatgcagaaagtggatgctgagaacagattctgcgacgatgatttcgaaaatattagcctttttgtatcctctagaccagcctcggacagtgtgaccgggacctctgagtcttccataggcgactcttcctcaagcctgagtgggacttgtggtaagtttgagactaacggcactgacgttgattcctttcaggaagtcgacgagcagattttttacgccgtgcatgcctttcaggctcgcagcgatcacgaactgagcctgcaggagtaccagcgtgttcacatcctaaggttttgtgatctcagcggaaataaagaatggtggctggctgaggcccaaggacagaagggttacgtccccgcaaactacctcggaaagatgacgtatgcatag

SEQ ID NO: 84714 - protein, 299 aa, Artificial Sequence
  derived and/or modified sequence
MAVMAPRTLLLLLSGALALTQTWAGSHSMRYFFTSVSRPGRGEPRFIAVGYVDDTQFVRFDSDAASQKMEPRAPWIEQEGPEYWDQETRNMKAHSQTDRANLGTLRGYYNQSEDGSHTIQIMYGCDVGPDGRFLRGYRQDAYDGKDYIALNEDLRSWTAADMAAQITKRKWEAVHAAEQRRVYLEGRCVDGLRRYLENGKETLQRTDPPKTHMTHHPISDHEATLRCWALGFYPAEITLTWQRDGEDQTQDTELVETRPAGDGTFQKWAAVVVPSGEEQRYTCHVQHEGLPKPLTLRWV

SEQ ID NO: 84715 - protein, 371 aa, Artificial Sequence
  derived and/or modified sequence
MAVMAPRTLLLLLSGALALTQTWAGSHSMRYFFTSVSRPGRGEPRFIAVGYVDDTQFVRFDSDAASQKMEPRAPWIEQEGPEYWDQETRNMKAHSQTDRANLGTLRGYYNQSEDGSHTIQIMYGCDVGPDGRFLRGYRQDAYDGKDYIALNEDLRSWTAADMAAQITKRKWEAVHAAEQRRVYLEGRCVDGLRRYLENGKETLQRTDPPKTHMTHHPISDHEATLRCWALGFYPAEITLTWQRDGEDQTQDTELVETRPAGDGTFQKWAAVVVPSGEEQRYTCHVQHEGLPKPLTLRWELSSQPTIPIVGIIAGLVLLGAVITGAVVAAVMWRRKSSGGEGVKDRKGGSYTQAASSDSAQGSDVSLTACKV

SEQ ID NO: 84716 - protein, 365 aa, Artificial Sequence
  derived and/or modified sequence
MAVMAPRTLLLLLSGALALTQTWAGSHSMRYFFTSVSRPGRGEPRFIAVGYVDDTQFVRFDSDAASQKMEPRAPWIEQEGPEYWDQETRNMKAHSQTDRANLGTLRGYYNQSEDGSHTIQIMYGCDVGPDGRFLRGYRQDAYDGKDYIALNEDLRSWTAADMAAQITKRKWEAVHAAEQRRVYLEGRCVDGLRRYLENGKETLQRTDPPKTHMTHHPISDHEATLRCWALGFYPAEITLTWQRDGEDQTQDTELVETRPAGDGTFQKWAAVVVPSGEEQRYTCHVQHEGLPKPLTLRWELSSQPTIPIVGIIAGLVLLGAVITGAVVAAVMWRRKSSDRKGGSYTQAASSDSAQGSDVSLTACKV

SEQ ID NO: 84717 - protein, 114 aa, Artificial Sequence
  derived and/or modified sequence
MTHHPISDHEATLRCWALGFYPAEITLTWQRDGEDQTQDTELVETRPAGDGTFQKWAAVVVPSGEEQRYTCHVQHEGLPKPLTLRWDRKGGSYTQAASSDSAQGSDVSLTACKV

SEQ ID NO: 84718 - protein, 154 aa, Artificial Sequence
  derived and/or modified sequence
MAVMAPRTLLLLLSGALALTQTWAGSHSMRYFFTSVSRPGRGEPRFIAVGYVDDTQFVRFDSDAASQKMEPRAPWIEQEGPEYWDQETRNMKAHSQTDRANLGTLRGYYNQSEDGSHTIQIMYGCDVGPDGRFLRGYRLRSPSASGRRSMRRSS

SEQ ID NO: 84719 - DNA, 900 bp, Artificial Sequence
  derived and/or modified sequence
atggccgtgatggcccccagaaccctggtgctgctgctgagcggcgccctggccctgacccagacctgggccggcagccacagcatgagatacttctacaccagcgtgagcagacccggcagaggcgagcccagattcatcgccgtgggctacgtggacgacacccagttcgtgagattcgacagcgacgccgccagccagagaatggagcccagagccccctggatcgagcaggagggccccgagtactgggacagaaacaccagaaacgtgaaggcccacagccagaccgacagagccaacctgggcaccctgagaggctactacaaccagagcgaggacggcagccacaccatccagagaatgtacggctgcgacgtgggccccgacggcagattcctgagaggctaccagcaggacgcctacgacggcaaggactacatcgccctgaacgaggacctgagaagctggaccgccgccgacatggccgcccagatcacccagagaaagtgggagaccgcccacgaggccgagcagtggagagcctacctggagggcagatgcgtggagtggctgagaagatacctggagaacggcaaggagaccctgcagagaaccgacgcccccaagacccacatgacccaccacgccgtgagcgaccacgaggccaccctgagatgctgggccctgagcttctaccccgccgagatcaccctgacctggcagagagacggcgaggaccagacccaggacaccgagctggtggagaccagacccgccggcgacggcaccttccagaagtgggccagcgtggtggtgcccagcggccaggagcagagatacacctgccacgtgcagcacgagggcctgcccaagcccctgaccctgagatgggtgtag

SEQ ID NO: 84720 - DNA, 1098 bp, Artificial Sequence
  derived and/or modified sequence
atggccgtgatggcccccagaaccctggtgctgctgctgagcggcgccctggccctgacccagacctgggccggcagccacagcatgagatacttctacaccagcgtgagcagacccggcagaggcgagcccagattcatcgccgtgggctacgtggacgacacccagttcgtgagattcgacagcgacgccgccagccagagaatggagcccagagccccctggatcgagcaggagggccccgagtactgggacagaaacaccagaaacgtgaaggcccacagccagaccgacagagccaacctgggcaccctgagaggctactacaaccagagcgaggacggcagccacaccatccagagaatgtacggctgcgacgtgggccccgacggcagattcctgagaggctaccagcaggacgcctacgacggcaaggactacatcgccctgaacgaggacctgagaagctggaccgccgccgacatggccgcccagatcacccagagaaagtgggagaccgcccacgaggccgagcagtggagagcctacctggagggcagatgcgtggagtggctgagaagatacctggagaacggcaaggagaccctgcagagaaccgacgcccccaagacccacatgacccaccacgccgtgagcgaccacgaggccaccctgagatgctgggccctgagcttctaccccgccgagatcaccctgacctggcagagagacggcgaggaccagacccaggacaccgagctggtggagaccagacccgccggcgacggcaccttccagaagtgggccagcgtggtggtgcccagcggccaggagcagagatacacctgccacgtgcagcacgagggcctgcccaagcccctgaccctgagatgggagcccagcagccagcccaccatccccatcgtgggcatcatcgccggcctggtgctgttcggcgccgtgatcgccggcgccgtggtggccgccgtgatgtggagaagaaagagcagcgacagaaagggcggcagctacagccaggccgccagcagcgacagcgcccagggcagcgacatgagcctgaccgcctgcaaggtgtag

SEQ ID NO: 84721 - DNA, 1116 bp, Artificial Sequence
  derived and/or modified sequence
atggccgtgatggcccccagaaccctggtgctgctgctgagcggcgccctggccctgacccagacctgggccggcagccacagcatgagatacttctacaccagcgtgagcagacccggcagaggcgagcccagattcatcgccgtgggctacgtggacgacacccagttcgtgagattcgacagcgacgccgccagccagagaatggagcccagagccccctggatcgagcaggagggccccgagtactgggacagaaacaccagaaacgtgaaggcccacagccagaccgacagagccaacctgggcaccctgagaggctactacaaccagagcgaggacggcagccacaccatccagagaatgtacggctgcgacgtgggccccgacggcagattcctgagaggctaccagcaggacgcctacgacggcaaggactacatcgccctgaacgaggacctgagaagctggaccgccgccgacatggccgcccagatcacccagagaaagtgggagaccgcccacgaggccgagcagtggagagcctacctggagggcagatgcgtggagtggctgagaagatacctggagaacggcaaggagaccctgcagagaaccgacgcccccaagacccacatgacccaccacgccgtgagcgaccacgaggccaccctgagatgctgggccctgagcttctaccccgccgagatcaccctgacctggcagagagacggcgaggaccagacccaggacaccgagctggtggagaccagacccgccggcgacggcaccttccagaagtgggccagcgtggtggtgcccagcggccaggagcagagatacacctgccacgtgcagcacgagggcctgcccaagcccctgaccctgagatgggagcccagcagccagcccaccatccccatcgtgggcatcatcgccggcctggtgctgttcggcgccgtgatcgccggcgccgtggtggccgccgtgatgtggagaagaaagagcagcggcggcgagggcatgaaggacagaaagggcggcagctacagccaggccgccagcagcgacagcgcccagggcagcgacatgagcctgaccgcctgcaaggtgtag

SEQ ID NO: 84722 - DNA, 900 bp, Artificial Sequence
  derived and/or modified sequence
atggccgtgatggcccccagaaccctgctgctgctgctgagcggcgccctggccctgacccagacctgggccggcagccacagcatgagatacttcttcaccagcgtgagcagacccggcagaggcgagcccagattcatcgccgtgggctacgtggacgacacccagttcgtgagattcgacagcgacgccgccagccagaagatggagcccagagccccctggatcgagcaggagggccccgagtactgggaccaggagaccagaaacatgaaggcccacagccagaccgacagagccaacctgggcaccctgagaggctactacaaccagagcgaggacggcagccacaccatccagatcatgtacggctgcgacgtgggccccgacggcagattcctgagaggctacagacaggacgcctacgacggcaaggactacatcgccctgaacgaggacctgagaagctggaccgccgccgacatggccgcccagatcaccaagagaaagtgggaggccgtgcacgccgccgagcagagaagagtgtacctggagggcagatgcgtggacggcctgagaagatacctggagaacggcaaggagaccctgcagagaaccgacccccccaagacccacatgacccaccaccccatcagcgaccacgaggccaccctgagatgctgggccctgggcttctaccccgccgagatcaccctgacctggcagagagacggcgaggaccagacccaggacaccgagctggtggagaccagacccgccggcgacggcaccttccagaagtgggccgccgtggtggtgcccagcggcgaggagcagagatacacctgccacgtgcagcacgagggcctgcccaagcccctgaccctgagatgggtgtag

SEQ ID NO: 84723 - DNA, 1116 bp, Artificial Sequence
  derived and/or modified sequence
atggccgtgatggcccccagaaccctgctgctgctgctgagcggcgccctggccctgacccagacctgggccggcagccacagcatgagatacttcttcaccagcgtgagcagacccggcagaggcgagcccagattcatcgccgtgggctacgtggacgacacccagttcgtgagattcgacagcgacgccgccagccagaagatggagcccagagccccctggatcgagcaggagggccccgagtactgggaccaggagaccagaaacatgaaggcccacagccagaccgacagagccaacctgggcaccctgagaggctactacaaccagagcgaggacggcagccacaccatccagatcatgtacggctgcgacgtgggccccgacggcagattcctgagaggctacagacaggacgcctacgacggcaaggactacatcgccctgaacgaggacctgagaagctggaccgccgccgacatggccgcccagatcaccaagagaaagtgggaggccgtgcacgccgccgagcagagaagagtgtacctggagggcagatgcgtggacggcctgagaagatacctggagaacggcaaggagaccctgcagagaaccgacccccccaagacccacatgacccaccaccccatcagcgaccacgaggccaccctgagatgctgggccctgggcttctaccccgccgagatcaccctgacctggcagagagacggcgaggaccagacccaggacaccgagctggtggagaccagacccgccggcgacggcaccttccagaagtgggccgccgtggtggtgcccagcggcgaggagcagagatacacctgccacgtgcagcacgagggcctgcccaagcccctgaccctgagatgggagctgagcagccagcccaccatccccatcgtgggcatcatcgccggcctggtgctgctgggcgccgtgatcaccggcgccgtggtggccgccgtgatgtggagaagaaagagcagcggcggcgagggcgtgaaggacagaaagggcggcagctacacccaggccgccagcagcgacagcgcccagggcagcgacgtgagcctgaccgcctgcaaggtgtag

SEQ ID NO: 84724 - DNA, 1098 bp, Artificial Sequence
  derived and/or modified sequence
atggccgtgatggcccccagaaccctgctgctgctgctgagcggcgccctggccctgacccagacctgggccggcagccacagcatgagatacttcttcaccagcgtgagcagacccggcagaggcgagcccagattcatcgccgtgggctacgtggacgacacccagttcgtgagattcgacagcgacgccgccagccagaagatggagcccagagccccctggatcgagcaggagggccccgagtactgggaccaggagaccagaaacatgaaggcccacagccagaccgacagagccaacctgggcaccctgagaggctactacaaccagagcgaggacggcagccacaccatccagatcatgtacggctgcgacgtgggccccgacggcagattcctgagaggctacagacaggacgcctacgacggcaaggactacatcgccctgaacgaggacctgagaagctggaccgccgccgacatggccgcccagatcaccaagagaaagtgggaggccgtgcacgccgccgagcagagaagagtgtacctggagggcagatgcgtggacggcctgagaagatacctggagaacggcaaggagaccctgcagagaaccgacccccccaagacccacatgacccaccaccccatcagcgaccacgaggccaccctgagatgctgggccctgggcttctaccccgccgagatcaccctgacctggcagagagacggcgaggaccagacccaggacaccgagctggtggagaccagacccgccggcgacggcaccttccagaagtgggccgccgtggtggtgcccagcggcgaggagcagagatacacctgccacgtgcagcacgagggcctgcccaagcccctgaccctgagatgggagctgagcagccagcccaccatccccatcgtgggcatcatcgccggcctggtgctgctgggcgccgtgatcaccggcgccgtggtggccgccgtgatgtggagaagaaagagcagcgacagaaagggcggcagctacacccaggccgccagcagcgacagcgcccagggcagcgacgtgagcctgaccgcctgcaaggtgtag

SEQ ID NO: 84725 - DNA, 465 bp, Artificial Sequence
  derived and/or modified sequence
atggccgtgatggcccccagaaccctgctgctgctgctgagcggcgccctggccctgacccagacctgggccggcagccacagcatgagatacttcttcaccagcgtgagcagacccggcagaggcgagcccagattcatcgccgtgggctacgtggacgacacccagttcgtgagattcgacagcgacgccgccagccagaagatggagcccagagccccctggatcgagcaggagggccccgagtactgggaccaggagaccagaaacatgaaggcccacagccagaccgacagagccaacctgggcaccctgagaggctactacaaccagagcgaggacggcagccacaccatccagatcatgtacggctgcgacgtgggccccgacggcagattcctgagaggctacagactgagaagccccagcgccagcggcagaagaagcatgagaagaagcagctag

SEQ ID NO: 84726 - DNA, 900 bp, Artificial Sequence
  derived and/or modified sequence
atggccgtgatggcccctcgtacgctcgttttgctattgtctggagctcttgctctgacccaaacctgggctgggtctcactctatgcgctatttttatacatccgtctcccgcccaggtagaggggaaccccggtttatagccgttgggtacgttgatgacacccagttcgtccgatttgatagcgacgcggcttcccagcggatggagccacgcgcgccctggatagagcaggagggaccagagtactgggatcgcaatacccggaacgttaaggcccacagccaaacagacagagcaaatctgggcaccctgaggggctattacaaccagagtgaagacggaagtcacactatccagcgcatgtacgggtgtgacgtcggacccgatggacgattcctgcgaggataccagcaggacgcctatgatggtaaggactacatcgcactgaatgaggacctacggtcatggacggccgctgacatggctgcacaaattacccaacgaaagtgggagaccgcacacgaggccgaacagtggcgagcttatcttgagggccggtgcgtggaatggctgcggcgatatttggaaaatggaaaggagactctgcagcggacggacgcgcctaaaacacacatgacccaccacgccgtttctgatcacgaggctaccctccgatgttgggccctgagtttttacccagcggaaattaccctcacatggcagcgggatggagaagaccagactcaggacacggaacttgtcgagactcggcccgcaggtgatggaacattccaaaagtgggcctccgtggtggtccctagtggccaggagcaaaggtacacctgccatgtgcagcacgaagggcttcctaaaccactgacactccgttgggtttag

SEQ ID NO: 84727 - DNA, 1098 bp, Artificial Sequence
  derived and/or modified sequence
atggccgtcatggccccacgcacgctggttctcttgttgtctggcgctctagccctgactcaaacctgggccggctctcatagcatgaggtacttttacacatccgtatcacgacctggacgaggggagccgcgatttattgccgtcgggtacgttgatgatacacaatttgtgcggttcgacagcgacgccgcctcccagcggatggagcccagagcaccctggatcgaacaagagggcccagagtactgggatcggaacacccgcaacgtcaaggcccatagtcaaacagaccgcgcaaacctgggcacactccgcggatactacaaccagtccgaggacggcagtcacacgatccagcgtatgtacggctgtgacgtcgggccagacgggcgtttcctcaggggataccagcaagatgcctatgatggcaaagactatattgcactgaatgaggatttgcgaagctggactgccgctgacatggctgcccagattacccaaagaaagtgggagaccgcgcatgaggcagagcagtggcgggcttatcttgaaggacggtgtgtagagtggcttaggcgatatctggagaatggaaaggagacactgcagcggaccgacgcccctaaaacccatatgacacatcatgccgtaagtgatcacgaggctacgctgcgttgctgggccctgagcttctacccagccgaaataacccttacgtggcagagggatggcgaggatcaaacacaggacacagagttggtagagacacgtcccgccggcgatggtacgtttcagaaatgggcctcagtggtggtgccctccggtcaggaacagagatacacgtgccacgtccagcatgaaggcttacccaaacccctgaccctgcggtgggagccttcatcccagcctactattcctatcgtcggaatcatcgccggacttgtgctgtttggcgccgtgatcgccggtgctgtggtagcagccgttatgtggcgtaggaagagcagcgaccggaagggtggctcttactctcaggccgcctcatcggattcagctcagggttcagatatgtctctgactgcttgcaaggtgtag

SEQ ID NO: 84728 - DNA, 1116 bp, Artificial Sequence
  derived and/or modified sequence
atggcagtgatggccccgagaacattggttctgctgttatccggcgccctagcacttacacagacgtgggcaggctctcactccatgaggtacttttacacgtcagtctcccgccctggaaggggcgagcctcggtttattgccgtgggctacgtcgatgacacacagttcgtgagatttgacagcgatgctgcatcccagagaatggagcccagagcaccgtggatcgagcaggagggtcctgaatactgggaccggaacacacgcaatgttaaagcacactctcagacggaccgggcaaacctcgggacacttcgaggttattacaaccaatccgaggatggctcacacactatccagcgcatgtacggctgcgatgtgggtcccgacgggcgattcttgcgcgggtaccagcaggacgcatacgatggaaaggactatatcgcgctgaacgaagatctgagatcctggactgccgcagacatggccgcgcagatcactcagcggaaatgggaaaccgcccacgaagctgagcagtggagggcatacctggagggtcgttgcgtcgagtggcttcgacgatacctggagaacggcaaggagaccttgcagagaaccgacgcccctaaaactcatatgacacaccacgccgtttccgaccacgaggcaacactgagatgctgggccctcagcttctaccctgcggagatcacattaacctggcaaagagacggagaagatcaaacgcaggatacggaattagtcgaaaccaggcccgccggggacggcactttccaaaaatgggcaagcgtcgtggtgccttctggtcaggagcagcgttacacttgccacgtgcaacacgagggactgccaaagccccttacacttagatgggaaccctcctctcaaccaacaattcctattgtgggtatcatcgccggacttgtgctatttggcgccgttatcgccggtgcagtggtggcggctgtgatgtggcggcggaaaagtagcgggggggaaggtatgaaggatcgcaaggggggctcgtacagccaggccgcgtcatctgatagcgcgcagggctccgacatgtccctgactgcctgtaaggtgtag

SEQ ID NO: 84729 - DNA, 900 bp, Artificial Sequence
  derived and/or modified sequence
atggccgtgatggccccccgaacactcctattgctcttaagcggcgccttagcactgactcaaacctgggcaggctctcactcaatgcggtatttctttacttccgtgtcacggcctggcaggggggagccccggttcattgctgttggctatgtcgacgacacacagttcgttagatttgatagtgatgccgcttctcagaaaatggaaccgcgcgccccttggatagagcaggaaggtccagaatattgggaccaggaaacgaggaacatgaaggcgcattcccaaacagatcgcgccaatctggggacactccggggatactacaatcagtccgaagacggatctcatacaatccagatcatgtacggttgcgacgtcggaccagacggccgcttcctgcgcggatatcgccaagatgcttacgacgggaaagactacatcgctttgaacgaggacctgcgttcatggaccgcagcagacatggctgcccagattactaagcgaaaatgggaggccgtgcacgcagctgaacaacgccgtgtttatcttgaggggagatgcgtcgatggcctcaggcgctatctggagaacggaaaagagaccctgcagcggaccgacccccccaagacgcatatgacacatcatccaatcagcgatcacgaagcgaccctgaggtgttgggctctggggttttaccccgcagagattactctcacttggcagagagatggcgaggaccagacgcaggatactgagctcgtggagaccaggccagccggagacggaactttccagaagtgggctgccgtggtggtccctagcggagaggaacagcggtacacgtgccatgtacaacacgaaggactacccaaacctctgaccctccggtgggtatag

SEQ ID NO: 84730 - DNA, 1116 bp, Artificial Sequence
  derived and/or modified sequence
atggccgtgatggccccccgcacactcctgctcctgctgtcaggggctcttgccctgactcagacgtgggcaggatctcattctatgcgctatttctttacatccgtgagccgaccaggccggggagagcctcggttcattgctgtggggtacgtggacgacacacagttcgtaaggttcgactccgacgctgcatcccaaaaaatggagccacgggcaccttggatcgaacaagagggaccggagtactgggatcaggagacccgaaacatgaaggcccatagtcagaccgaccgggctaacctgggtaccctacgaggctattacaaccagtccgaggatggaagtcacacaatccaaattatgtacggctgcgatgtgggacccgatgggcgcttcctgagaggttatcgccaagacgcttacgacggaaaggactacatcgctctcaatgaagacttgcgctcttggactgccgccgacatggcagcgcaaattaccaagcggaaatgggaggccgtgcatgctgccgaacagcgccgcgtgtatttggaggggagatgcgtggatggactgcggaggtacctcgagaatggcaaggagaccctgcagcgcactgaccccccaaagacacacatgacacaccacccgatttctgatcatgaagcaactctgagatgttgggccctgggtttttatcctgctgaaataactcttacttggcagagagatggagaagatcagacgcaggacacagagctggtggagacccgacctgcgggagacggcacgttccaaaagtgggccgcggttgtggttccttccggagaggagcagaggtacacttgtcacgtgcaacacgaaggccttcctaaacctctgaccctccgatgggaattaagctctcaacctacaatcccgatagtcggaatcatcgctgggttagtgttactgggtgctgtgatcaccggcgcagtggtggccgctgtcatgtggagaagaaaatctagcgggggcgagggagtcaaagacaggaagggggggtcatatacacaggccgcttctagcgactccgctcagggaagcgacgtttccctcaccgcctgcaaagtgtag

SEQ ID NO: 84731 - DNA, 1098 bp, Artificial Sequence
  derived and/or modified sequence
atggctgtgatggcccctcgaacactgctgctcctgctgagcggagcactggcactcacacagacatgggccgggagtcattccatgaggtactttttcacatctgtgtccagaccggggcggggggagcctaggtttattgccgtggggtatgtagacgacacccagtttgtgcggttcgatagtgacgccgcttcccaaaagatggagcctcgcgctccttggattgagcaggagggccccgagtactgggatcaggagacacgtaatatgaaagcccactcgcagacagatcgcgccaacttggggacactgcggggttattacaatcaaagcgaggacggctcacataccatacagatcatgtacggttgtgatgttggtcccgatggccgtttcctgcgcggatataggcaggatgcctatgacggaaaagattacatagccttgaatgaagacttaaggtcgtggaccgccgcggatatggctgctcagatcacaaaacggaagtgggaggccgtgcatgcggcagaacagcgacgggtgtacttggagggacgatgcgttgatggcctccgccggtacctagaaaacggcaaagaaactttgcagagaactgaccctcctaaaacccacatgacacatcaccccatctccgaccatgaggccaccctccgctgttgggcgttagggttctaccccgcggaaatcacactgacctggcagcgggacggtgaagaccagacccaggacacagaactggtggagacgcgacccgccggagatggtaccttccagaaatgggctgccgttgtcgtgcccagcggcgaagagcagcgatatacttgccacgtgcagcatgaggggctccctaagccactgaccctgaggtgggagctgagtagccagccaactatacccattgtgggcatcattgcaggactagtgctcctgggcgccgtgattaccggggcagttgtggccgcagtgatgtggaggcggaaatcaagcgaccgtaaaggtgggtcctatacccaagcagccagctctgattctgctcagggaagcgatgtgtctctgacagcttgcaaggtctag

SEQ ID NO: 84732 - DNA, 900 bp, Artificial Sequence
  derived and/or modified sequence
atggctgtcatggcaccccgtacattactgctgctccttagcggtgccctggccctgacgcagacttgggccggcagccatagcatgaggtacttctttactagcgtctccagaccggggagaggcgaacctcgttttattgccgtggggtacgtggatgatacacagttcgtgaggttcgactccgacgccgcttcccagaagatggagccccgggctccctggatagagcaagagggcccagagtactgggaccaagagacccgaaacatgaaggcacatagtcagacagatagggctaacctcggaaccctgagaggctattacaaccagtcagaagacggctcacacaccattcagatcatgtatgggtgtgatgttggtcctgacggtcgatttctcagggggtatcgccaggacgcttacgacggaaaagattacatagccctgaacgaggatttgagatcttggacagcagccgacatggccgcccagatcaccaaacggaaatgggaggctgtgcatgccgcggaacagcggcgggtgtatctggaaggaaggtgcgttgacggcctccgtcgttatttagagaatgggaaagagaccctgcagagaactgatccgcctaagactcacatgacccaccacccaatcagcgatcacgaggccaccctccgttgctgggcactgggcttctaccctgctgaaatcaccctcacctggcagagagacggtgaggatcagacccaggataccgagttggtcgagactcggcccgccggagacggtaccttccagaagtgggcagcggtggtagtgccctcaggggaagaacagaggtacacctgtcacgtgcagcacgagggccttcccaaaccattgactttgcgatgggtgtag

SEQ ID NO: 84733 - DNA, 1098 bp, Artificial Sequence
  derived and/or modified sequence
atggcggtaatggccccacgcaccctgttactcctgctctctggagctttggcacttacacagacgtgggcgggctctcactctatgaggtatttcttcacctcagtgtcacgccctggacgaggagagccccgctttatcgccgttggctacgtggatgacacccagtttgtgcgctttgacagcgacgccgctagtcaaaagatggagccaagagccccctggatcgagcaggagggacctgagtattgggatcaggaaacgcgcaatatgaaagcgcacagccaaacagaccgcgctaacctgggtactttgcgtgggtactacaaccagtcagaggacgggagtcatactattcagatcatgtatgggtgtgacgtgggacccgatggacggttccttcgcggataccgacaggacgcgtatgacggtaaggattacatcgccctgaacgaggacttacggtcttggaccgccgccgatatggcagcccagatcaccaagcgtaagtgggaggctgtgcacgcagccgagcagcgccgggtgtatctggagggacggtgcgtagatggtctgagaaggtatttggagaacggaaaggagacccttcagagaacagacccccctaaaacccatatgacccatcatccgattagcgaccacgaggccaccttacgctgctgggcgcttggcttctatcctgccgagattactctgacatggcaacgggatggcgaggatcagacccaagacaccgagttggttgaaacccggcccgccggtgacggtacattccagaaatgggctgcggtggttgtgcccagtggtgaggagcagagatatacatgtcatgtgcaacatgagggtttaccaaaacccctgacgctgcgatgggaactgtcctcccagcccaccattccgatcgttggtattatcgccggcctcgtgctcctgggcgcagtgatcacaggagctgtggtcgctgccgtgatgtggagaaggaagtccagcgatcggaaagggggcagctacacccaagctgcaagttccgattccgcccagggcagcgacgtctctttaaccgcatgcaaggtgtag

SEQ ID NO: 84734 - DNA, 1116 bp, Artificial Sequence
  derived and/or modified sequence
atggccgtaatggcaccacggacccttctcttgctgctgagtggggctctcgccctgacccaaacatgggcaggatcccactctatgcgctacttcttcacaagcgtatcgcgtcctgggaggggggagcccagatttatagccgtgggttacgttgatgacacacagttcgttaggttcgactcagacgctgcaagccagaagatggagccacgcgccccgtggatcgagcaagagggaccagagtattgggatcaagagacacggaatatgaaggcacattcccagacagaccgggccaacctcggcactcttaggggttattacaatcagtccgaggacgggtcccatactatccaaatcatgtatggttgcgacgtgggtcccgatggtcgtttcctccgcgggtacagacaggacgcatatgatggaaaagattatatcgccctgaatgaggacctgagatcttggactgccgccgacatggccgcccaaattacaaagcggaagtgggaggcagtccatgcagcggaacagagacgggtgtatttggagggccgctgtgtggacggcctgcggaggtacctcgagaatggcaaggagaccctccagagaactgacccaccgaaaacacacatgacgcatcatcccatctccgatcacgaagcaacccttcggtgctgggctcttggcttctaccccgcagagatcacactgacctggcagagagacggagaagaccagacgcaggacaccgagctggtcgagacgagacctgctggggatggtaccttccagaaatgggcagctgtggtcgtcccaagcggtgaggaacagcgttacacctgccacgtccagcacgagggacttcccaagcctctgactctgagatgggagctgagcagtcaaccgactattccaatcgtgggaattatagccggcttggtgctccttggcgctgtgatcacgggcgctgtggtggcagccgtgatgtggcgcagaaagagtagcggcggagagggtgtgaaggatcggaagggtggatcatatacccaggctgctagctcagatagtgctcagggatccgatgtgtcgctgaccgcatgtaaggtgtag

SEQ ID NO: 84735 - DNA, 465 bp, Artificial Sequence
  derived and/or modified sequence
atggcggtcatggctccacgcaccctgctgcttttactgtcaggcgctctggccttaacccagacttgggccggctctcatagcatgagatacttcttcacttctgtgagccgtcctggaagaggcgaacctcgcttcatcgccgttggatacgtggatgacactcagttcgtccggtttgatagcgatgccgctagccagaagatggaacccagagcaccctggatcgagcaggagggccctgaatactgggatcaggaaacgaggaatatgaaggcacactctcagaccgatagagctaatctaggtaccttgcgtggttactacaatcaatctgaggacggttcccacacaattcaaattatgtatggctgcgacgtcggccctgatggtcgatttctgcggggataccgattgcgctcaccttccgcctccggccgacggagcatgcgccggtccagctag

SEQ ID NO: 84736 - DNA, 1098 bp, Artificial Sequence
  derived and/or modified sequence
atggccgtgatggcaccacggacactggtactgcttttaagtggagcactcgccctgacccagacttgggccgggtcccattctatgaggtacttctacaccagtgtgtccaggccaggcagaggcgaacctcgattcattgcagtgggttatgtcgacgacacacaattcgttcgatttgacagcgatgctgcttcccagagaatggagccacgggcaccgtggattgagcaggaagggccggagtactgggaccgcaacacaaggaatgtgaaggcccattcccagaccgacagagcaaatcttggaacactgcgtggctactacaatcagtcggaggacgggtcccacaccattcagcgaatgtatggctgtgacgtgggacccgatgggaggtttcttaggggctaccagcaagacgcgtacgatggcaaagactatatcgctctgaatgaggacctgagaagttggaccgccgccgatatggcggcccagatcacccagcgaaagtgggaaaccgctcacgaggcagagcagtggcgcgcttatttggaaggacggtgtgtggaatggcttagacgttacctcgagaacggcaaagaaaccttgcagagaacagacgcaccaaagacccatatgacacaccatgcggtgtcagaccacgaggccaccctcagatgctgggcactgtctttttaccccgccgagataaccttaacttggcagcgtgacggggaagatcaaactcaagatacagaactggtggagacccggcctgctggcgacggtaccttccagaaatgggcttccgttgtggtgccctctggccaggaacaacgctacacctgtcacgtgcagcatgaggggctgcctaagcccctaaccctccgctgggagccatcctcgcagcccaccatccccatcgtgggaattatagcaggactggtgctgtttggcgccgtcattgcaggcgcggtagtggctgctgtgatgtggagacgcaaatcctccgaccgaaagggaggatcatactcccaggcagcatccagcgactcagcacagggtagtgatatgtctttgactgcgtgcaaggtttag

SEQ ID NO: 84737 - DNA, 1098 bp, Artificial Sequence
  derived and/or modified sequence
atggccgttatggcgcctcgcactctgctactgttgttgtccggggccttagctctgacccagacctgggcgggctcccactcgatgaggtactttttcactagtgtgtctcgcccgggtaggggtgaaccccggtttatcgctgtgggttatgttgacgacacacagttcgttcggtttgattccgacgccgctagccagaaaatggaacctagagcaccctggatcgaacaggaaggccccgaatactgggaccaggagacacgaaacatgaaggcgcactcccagacagaccgcgccaacctcggcacactgaggggctattacaaccaatctgaggatggctcccatactatccaaattatgtacggctgtgatgtggggcctgacgggaggttcttgcgcgggtaccggcaggacgcatatgatggtaaggactacatcgccctgaacgaagatcttaggagctggacagctgccgatatggccgcccagattaccaagcgaaaatgggaggctgttcacgccgctgagcagagaagagtctacctggagggaaggtgcgtagatggactgcggcggtacctggaaaacggcaaagagacacttcagaggaccgatccacctaagacacacatgacgcaccaccccatctcggatcacgaagctactttgcgctgctgggccctcggattttatcctgccgagattaccctaacatggcagcgggacggggaggaccaaacccaggacacggagctggttgaaaccagacccgctggtgatggaacatttcaaaagtgggccgctgtggtggttccttcgggcgaagaacaaagatatacttgtcatgtccagcacgagggcctgcctaagcccctgacactaagatgggagctgtccagccaacctactatccctattgtgggaataatcgcaggactcgtgttgctcggtgccgtgatcaccggcgcagtggttgcggcagtcatgtggcgtaggaagtcgtcggatagaaaagggggcagctacactcaggctgcctcttcagactccgctcagggatctgacgtttctttaaccgcttgcaaagtgtag

SEQ ID NO: 84738 - DNA, 465 bp, Artificial Sequence
  derived and/or modified sequence
atggcagtgatggccccaaggacccttttgctgcttttgtccggcgctttagctctcacacagacttgggcagggagccattccatgcggtatttttttacctctgtgtccagacctggtcgcggggagcctagatttatcgcagtcggttacgtagatgacacccagttcgtaagattcgatagcgatgccgcctcccagaagatggagccaagggccccatggatcgagcaggaggggcccgaatactgggaccaggaaacccgtaacatgaaagcgcactctcagacagatagggcaaacctgggtactctacgcggctattataatcaatccgaggatggatctcataccattcagatcatgtacggctgtgacgtcggcccagatgggaggttcctccgcggctatcggctgcggagcccttctgctagcggccgtagaagcatgcgcagatccagctag

SEQ ID NO: 84739 - DNA, 1098 bp, Artificial Sequence
  derived and/or modified sequence
atggccgtcatggcacctagaacattgctcctgctactgtctggggctctggctctgactcaaacatgggccgggtctcacagcatgcgctacttttttacctccgtatcccgtcctgggcgcggtgagccacgcttcatcgctgtgggttacgtggacgacacacaatttgtcagatttgactccgatgcagcaagtcagaagatggagccccgggccccctggattgagcaggagggtcctgagtattgggaccaggagactcggaacatgaaggctcattcccagactgaccgggccaatcttggcacactaagagggtattacaatcagtctgaggatggctcccatacgatccagatcatgtatggttgcgacgttggccctgacggccgtttcctgaggggttatcggcaggatgcttatgatggcaaagactatattgccctgaatgaggatctcagatcctggacagccgctgacatggccgcccagatcacgaagcgtaagtgggaggcggtgcacgccgcagagcagaggcgtgtttaccttgaaggacgctgcgtggacgggctgcggcgctacctcgagaatgggaaagagactctccagcgaacagatcctccgaagactcatatgacccatcatccaatctccgatcatgaggccacgttgcgctgttgggcccttggtttctacccagctgagattaccctgacttggcagagggatggagaggatcagacccaggacacagagcttgtagagaccagaccggctggtgacgggacctttcagaagtgggctgctgtcgtcgtaccaagcggagaagagcaaaggtacacatgccacgttcaacatgagggattgccaaagccgctgaccctccggtgggagctcagctcacagcccacaatccctatcgtgggcatcattgccggtctcgtcttactaggtgctgtcataacaggcgccgtcgtggcagcagtgatgtggcgcagaaagtctagcgaccgcaaagggggcagttacacccaagccgccagctccgattccgctcagggcagtgacgtgtctttgaccgcctgcaaagtctag

SEQ ID NO: 84740 - DNA, 1074 bp, Artificial Sequence
  derived and/or modified sequence
agattctccccagacgccgaggatggccgtcatggcgccccgaaccctcctcctgctactctcgggggccctggccctgacccagacctgggcgggctcccactccatgaggtatttcttcacatccgtgtcccggcccggccgcggggagccccgcttcatcgccgtgggctacgtggacgacacgcagttcgtgcggttcgacagcgacgccgcgagccagaggatggagccgcgggcgccgtggatagagcaggaggggccggagtattgggaccaggagacacggaatgtgaaggcccagtcacagactgaccgagtggacctggggaccctgcgcggctactacaaccagagcgaggccggttctcacaccatccagataatgtatggctgcgacgtggggtcggacgggcgcttcctccgcgggtaccggctcagatcaccaagcgcaagtgggaggcggcccatgaggcggagcagttgagagcctacctggatggcacgtgcgtggagtggctccgcagatacctggagaacgggaaggagacgctgcagcgcacggacccccccaagacacatatgacccaccaccccatctctgaccatgaggccaccctgaggtgctgggccctgggcttctaccctgcggagatcacactgacctggcagcgggatggggaggaccagacccaggacacggagctcgtggagaccaggcctgcaggggatggaaccttccagaagtgggcggctgtggtggtgccttctggagaggagcagagatacacctgccatgtgcagcatgagggtctgcccaagcccctcaccctgagatgggagctgtcttcccagcccaccatccccatcgtgggcatcattgctggcctggttctccttggagctgtgatcactggagctgtggtcgctgccgtgatgtggaggaggaagagctcagatagaaaaggagggagttacactcaggctgcaagcagtgacagtgcccagggctctgatgtgtccctcacagcttgtaaagtgtgagacagctgccttgtgtgggactgagaggca

SEQ ID NO: 84741 - DNA, 1334 bp, Artificial Sequence
  derived and/or modified sequence
cgaggatggccgtcatggcgccccgaaccctcgtcctgctactctcgggggccctggccctgacccagacctgggcgggctcccactccatgaggtatttctacacctccgtgtcccggcccggccgcggggagccccgcttcatcgccgtgggctacgtggacgacacgcagttcgtgcggttcgacagcgacgccgcgagccagaggatggagccgcgggcgccgtggatagagcaggaggggccggagtattgggaccggaacacacggaatgtgaaggcccactcacagactgaccgagcgaacctggggaccctgcgcggctactacaaccagagcgaggacggttctcacaccatccagaggatgtatggctgcgacgtggggccggacgggcgcttcctccgcgggtaccagcaggacgcttacgacggcaaggattacatcgccctgaacgaggacctgcgctcttggaccgcggcggacatggcggctcagatcacccagcgcaagtgggagacggcccatgaggcggagcagtggagagcctacctggagggccggtgcgtggagtggctccgcagatacctggagaacgggaaggagacgctgcagcgcacggacgcccccaagacgcatatgactcaccacgctgtctctgaccatgaggccaccctgaggtgctgggccctgagcttctaccctgcggagatcacactgacctggcagcgggatggggaggaccagacccaggacacggagctcgtggagaccaggcctgcaggggatgggaccttccagaagtgggcgtctgtggtggtgccttctggacaggagcagagatacacctgccatgtgcagcatgagggtctgcccaagcccctcaccctgagatgggtgtgagacagctgccttgtgtgggactgagaggcaagatttgttcctgcccttccctttgtgacttgaagaaccctgactttgtttctgcaaaggcacctgcatgtgtctgtgttcttgtaggcataatgtgaggaggtggggagaccaccccacccccatgtccaccatgaccctcttcccacgctgacctgtgctccctccccaatcatctttcctgttccagagaggtggggctgaggtgtctccatctctgcctcaacttcatggtgcactgagctgtaactttttccttccctattaaaattagaacctgagtataaatttactttctcaaattcttgccatgagaggttgatgagttaattaaaggagaagattcctaaaatttgagagacaaaataaatggaacacatgagaaccttccagagtcca

SEQ ID NO: 84742 - DNA, 1868 bp, Artificial Sequence
  derived and/or modified sequence
aaggggagaggagggcctgaaggatgagaaggacggagggaagggctggagaagcaggaggcgcaactcttcccgattaaaaacaaaaacaacaacaacaaaaatctacacctccattcccagagcaagcttactctctggcaccaaactccatgggatgatttttcttctagaagagtccaggtggacagggtccttcttcctggatactcacgacgcggacccagttctcactcccattgggtgtcgggtttccagagaagccaatcagtgtcgtcgcggtcgcggttctaaagtccgcacgcacccaccgggactcagattctccccagacgccgaggatggccgtcatggcgccccgaaccctcgtcctgctactctcgggggccctggccctgacccagacctgggcgggctcccactccatgaggtatttctacacctccgtgtcccggcccggccgcggggagccccgcttcatcgccgtgggctacgtggacgacacgcagttcgtgcggttcgacagcgacgccgcgagccagaggatggagccgcgggcgccgtggatagagcaggaggggccggagtattgggaccggaacacacggaatgtgaaggcccactcacagactgaccgagcgaacctggggaccctgcgcggctactacaaccagagcgaggacggttctcacaccatccagaggatgtatggctgcgacgtggggccggacgggcgcttcctccgcgggtaccagcaggacgcttacgacggcaaggattacatcgccctgaacgaggacctgcgctcttggaccgcggcggacatggcggctcagatcacccagcgcaagtgggagacggcccatgaggcggagcagtggagagcctacctggagggccggtgcgtggagtggctccgcagatacctggagaacgggaaggagacgctgcagcgcacggacgcccccaagacgcatatgactcaccacgctgtctctgaccatgaggccaccctgaggtgctgggccctgagcttctaccctgcggagatcacactgacctggcagcgggatggggaggaccagacccaggacacggagctcgtggagaccaggcctgcaggggatgggaccttccagaagtgggcgtctgtggtggtgccttctggacaggagcagagatacacctgccatgtgcagcatgagggtctgcccaagcccctcaccctgagatgggagccgtcttcccagcccaccatccccatcgtgggcatcattgctggcctggttctctttggagctgtgatcgctggagctgtggtcgctgctgtgatgtggaggaggaagagctcagatagaaaaggagggagctactctcaggctgcaagcagtgacagtgcccagggctctgatatgtctctcacagcttgtaaagtgtgagacagctgccttgtgtgggactgagaggcaagatttgttcctgcccttccctttgtgacttgaagaaccctgactttgtttctgcaaaggcacctgcatgtgtctgtgttcttgtaggcataatgtgaggaggtggggagaccaccccacccccatgtccaccatgaccctcttcccacgctgacctgtgctccctccccaatcatctttcctgttccagagaggtggggctgaggtgtctccatctctgcctcaacttcatggtgcactgagctgtaactttttccttccctattaaaattagaacctgagtataaatttactttctcaaattcttgccatgagaggttgatgagttaattaaaggagaagattcctaaaatttgagagacaaaataaatggaacacatgagaaccttccagagtcca

SEQ ID NO: 84743 - DNA, 1854 bp, Artificial Sequence
  derived and/or modified sequence
cgcttggcacaggagcagaggggtcagggcgaagtcccagggccccaggcgtggctctcagggtctcaggccccgaaggcggtatatggattggggagtcccagccttggggattccccaactccgcagtttcttttctccctctcccaacctatgtagggtccttcttcctggatactcacgacgcggacccagttctcactcccattgggtgtcgggtttccagagaagccaatcagtgtcgtcgcggtcgcggttctaaagtccgcacgcacccaccgggactcagattctccccagacgccgaggatggccgtcatggcgccccgaaccctcgtcctgctactctcgggggccctggccctgacccagacctgggcgggctcccactccatgaggtatttctacacctccgtgtcccggcccggccgcggggagccccgcttcatcgccgtgggctacgtggacgacacgcagttcgtgcggttcgacagcgacgccgcgagccagaggatggagccgcgggcgccgtggatagagcaggaggggccggagtattgggaccggaacacacggaatgtgaaggcccactcacagactgaccgagcgaacctggggaccctgcgcggctactacaaccagagcgaggacggttctcacaccatccagaggatgtatggctgcgacgtggggccggacgggcgcttcctccgcgggtaccagcaggacgcttacgacggcaaggattacatcgccctgaacgaggacctgcgctcttggaccgcggcggacatggcggctcagatcacccagcgcaagtgggagacggcccatgaggcggagcagtggagagcctacctggagggccggtgcgtggagtggctccgcagatacctggagaacgggaaggagacgctgcagcgcacggacgcccccaagacgcatatgactcaccacgctgtctctgaccatgaggccaccctgaggtgctgggccctgagcttctaccctgcggagatcacactgacctggcagcgggatggggaggaccagacccaggacacggagctcgtggagaccaggcctgcaggggatgggaccttccagaagtgggcgtctgtggtggtgccttctggacaggagcagagatacacctgccatgtgcagcatgagggtctgcccaagcccctcaccctgagatgggagccgtcttcccagcccaccatccccatcgtgggcatcattgctggcctggttctctttggagctgtgatcgctggagctgtggtcgctgctgtgatgtggaggaggaagagctcaggtggggaagggatgaaggatagaaaaggagggagctactctcaggctgcaagcagtgacagtgcccagggctctgatatgtctctcacagcttgtaaagtgtgagacagctgccttgtgtgggactgagaggcaagatttgttcctgcccttccctttgtgacttgaagaaccctgactttgtttctgcaaaggcacctgcatgtgtctgtgttcttgtaggcataatgtgaggaggtggggagaccaccccacccccatgtccaccatgaccctcttcccacgctgacctgtgctccctccccaatcatctttcctgttccagagaggtggggctgaggtgtctccatctctgcctcaacttcatggtgcactgagctgtaactttttccttccctattaaaattagaacctgagtataaatttactttctcaaattcttgccatgagaggttgatgagttaattaaaggagaagattcctaaaatttgagagacaaaataaatggaacacatgagaaccttccagagtcca

SEQ ID NO: 84744 - DNA, 1334 bp, Artificial Sequence
  derived and/or modified sequence
cgaggatggccgtcatggcgccccgaaccctcctcctgctactctcgggggccctggccctgacccagacctgggcgggctcccactccatgaggtatttcttcacatccgtgtcccggcccggccgcggggagccccgcttcatcgccgtgggctacgtggacgacacgcagttcgtgcggttcgacagcgacgccgcgagccagaagatggagccgcgggcgccgtggatagagcaggaggggccggagtattgggaccaggagacacggaatatgaaggcccactcacagactgaccgagcgaacctggggaccctgcgcggctactacaaccagagcgaggacggttctcacaccatccagataatgtatggctgcgacgtggggccggacgggcgcttcctccgcgggtaccggcaggacgcctacgacggcaaggattacatcgccctgaacgaggacctgcgctcttggaccgcggcggacatggcagctcagatcaccaagcgcaagtgggaggcggtccatgcggcggagcagcggagagtctacctggagggccggtgcgtggacgggctccgcagatacctggagaacgggaaggagacgctgcagcgcacggacccccccaagacacatatgacccaccaccccatctctgaccatgaggccaccctgaggtgctgggccctgggcttctaccctgcggagatcacactgacctggcagcgggatggggaggaccagacccaggacacggagctcgtggagaccaggcctgcaggggatggaaccttccagaagtgggcggctgtggtggtgccttctggagaggagcagagatacacctgccatgtgcagcatgagggtctgcccaagcccctcaccctgagatgggtgtgagacagctgccttgtgtgggactgagaggcaagagttgttcctgcccttccctttgtgacttgaagaaccctgactttgtttctgcaaaggcacctgcatgtgtctgtgttcgtgtaggcataatgtgaggaggtggggagagcaccccacccccatgtccaccatgaccctcttcccacgctgacctgtgctccctctccaatcatctttcctgttccagagaggtggggctgaggtgtctccatctctgtctcaacttcatggtgcactgagctgtaacttcttccttccctattaaaattagaacctgagtataaatttactttctcaaattcttgccatgagaggttgatgagttaattaaaggagaagattcctaaaatttgagagacaaaattaatggaacgcatgagaaccttccagagtcca

SEQ ID NO: 84745 - DNA, 1854 bp, Artificial Sequence
  derived and/or modified sequence
cgcttcgcacaggagcagaggggtcagggcgaagtcccagggccccaggcgtggctctcagggtctcaggccccgaaggcggtgtatggattggggagtcccagccttggggattccccaactccgcagtttcttttctccctctcccaacctacgtagggtccttcatcctggatactcacgacgcggacccagttctcactcccattgggtgtcgggtttccagagaagccaatcagtgtcgtcgcggtcgctgttctaaagtccgcacgcacccaccgggactcagattctccccagacgccgaggatggccgtcatggcgccccgaaccctcctcctgctactctcgggggccctggccctgacccagacctgggcgggctcccactccatgaggtatttcttcacatccgtgtcccggcccggccgcggggagccccgcttcatcgccgtgggctacgtggacgacacgcagttcgtgcggttcgacagcgacgccgcgagccagaagatggagccgcgggcgccgtggatagagcaggaggggccggagtattgggaccaggagacacggaatatgaaggcccactcacagactgaccgagcgaacctggggaccctgcgcggctactacaaccagagcgaggacggttctcacaccatccagataatgtatggctgcgacgtggggccggacgggcgcttcctccgcgggtaccggcaggacgcctacgacggcaaggattacatcgccctgaacgaggacctgcgctcttggaccgcggcggacatggcagctcagatcaccaagcgcaagtgggaggcggtccatgcggcggagcagcggagagtctacctggagggccggtgcgtggacgggctccgcagatacctggagaacgggaaggagacgctgcagcgcacggacccccccaagacacatatgacccaccaccccatctctgaccatgaggccaccctgaggtgctgggccctgggcttctaccctgcggagatcacactgacctggcagcgggatggggaggaccagacccaggacacggagctcgtggagaccaggcctgcaggggatggaaccttccagaagtgggcggctgtggtggtgccttctggagaggagcagagatacacctgccatgtgcagcatgagggtctgcccaagcccctcaccctgagatgggagctgtcttcccagcccaccatccccatcgtgggcatcattgctggcctggttctccttggagctgtgatcactggagctgtggtcgctgccgtgatgtggaggaggaagagctcaggtggagaaggggtgaaggatagaaaaggagggagttacactcaggctgcaagcagtgacagtgcccagggctctgatgtgtctctcacagcttgtaaagtgtgagacagctgccttgtgtgggactgagaggcaagagttgttcctgcccttccctttgtgacttgaagaaccctgactttgtttctgcaaaggcacctgcatgtgtctgtgttcgtgtaggcataatgtgaggaggtggggagagcaccccacccccatgtccaccatgaccctcttcccacgctgacctgtgctccctctccaatcatctttcctgttccagagaggtggggctgaggtgtctccatctctgtctcaacttcatggtgcactgagctgtaacttcttccttccctattaaaattagaacctgagtataaatttactttctcaaattcttgccatgagaggttgatgagttaattaaaggagaagattcctaaaatttgagagacaaaattaatggaacgcatgagaaccttccagagtcca

SEQ ID NO: 84746 - DNA, 1865 bp, Artificial Sequence
  derived and/or modified sequence
aaggggagaggagggcctgaaggatgagaaggatagagggaagggctggagaagcaggaggcacaacttttccggattaaaaacaaaaacaacaacaaaaatctacacctctattcccagagcaagcttactctctggcaccaaactccatggggtgatttttcttctagaagagtccaggtggacagggtccttcatcctggatactcacgacgcggacccagttctcactcccattgggtgtcgggtttccagagaagccaatcagtgtcgtcgcggtcgctgttctaaagtccgcacgcacccaccgggactcagattctccccagacgccgaggatggccgtcatggcgccccgaaccctcctcctgctactctcgggggccctggccctgacccagacctgggcgggctcccactccatgaggtatttcttcacatccgtgtcccggcccggccgcggggagccccgcttcatcgccgtgggctacgtggacgacacgcagttcgtgcggttcgacagcgacgccgcgagccagaagatggagccgcgggcgccgtggatagagcaggaggggccggagtattgggaccaggagacacggaatatgaaggcccactcacagactgaccgagcgaacctggggaccctgcgcggctactacaaccagagcgaggacggttctcacaccatccagataatgtatggctgcgacgtggggccggacgggcgcttcctccgcgggtaccggcaggacgcctacgacggcaaggattacatcgccctgaacgaggacctgcgctcttggaccgcggcggacatggcagctcagatcaccaagcgcaagtgggaggcggtccatgcggcggagcagcggagagtctacctggagggccggtgcgtggacgggctccgcagatacctggagaacgggaaggagacgctgcagcgcacggacccccccaagacacatatgacccaccaccccatctctgaccatgaggccaccctgaggtgctgggccctgggcttctaccctgcggagatcacactgacctggcagcgggatggggaggaccagacccaggacacggagctcgtggagaccaggcctgcaggggatggaaccttccagaagtgggcggctgtggtggtgccttctggagaggagcagagatacacctgccatgtgcagcatgagggtctgcccaagcccctcaccctgagatgggagctgtcttcccagcccaccatccccatcgtgggcatcattgctggcctggttctccttggagctgtgatcactggagctgtggtcgctgccgtgatgtggaggaggaagagctcagatagaaaaggagggagttacactcaggctgcaagcagtgacagtgcccagggctctgatgtgtctctcacagcttgtaaagtgtgagacagctgccttgtgtgggactgagaggcaagagttgttcctgcccttccctttgtgacttgaagaaccctgactttgtttctgcaaaggcacctgcatgtgtctgtgttcgtgtaggcataatgtgaggaggtggggagagcaccccacccccatgtccaccatgaccctcttcccacgctgacctgtgctccctctccaatcatctttcctgttccagagaggtggggctgaggtgtctccatctctgtctcaacttcatggtgcactgagctgtaacttcttccttccctattaaaattagaacctgagtataaatttactttctcaaattcttgccatgagaggttgatgagttaattaaaggagaagattcctaaaatttgagagacaaaattaatggaacgcatgagaaccttccagagtcca

SEQ ID NO: 84747 - DNA, 506 bp, Artificial Sequence
  derived and/or modified sequence
ccgcacgcacccaccgggactcagattctccccagacgccgaggatggccgtcatggcgccccgaaccctcctcctgctactctcgggggccctggccctgacccagacctgggcgggctcccactccatgaggtatttcttcacatccgtgtcccggcccggccgcggggagccccgcttcatcgccgtgggctacgtggacgacacgcagttcgtgcggttcgacagcgacgccgcgagccagaagatggagccgcgggcgccgtggatagagcaggaggggccggagtattgggaccaggagacacggaatatgaaggcccactcacagactgaccgagcgaacctggggaccctgcgcggctactacaaccagagcgaggacggttctcacaccatccagataatgtatggctgcgacgtggggccggacgggcgcttcctccgcgggtaccggctcagatcaccaagcgcaagtgggaggcggtccatgcggcggagcagc

SEQ ID NO: 84748 - DNA, 1466 bp, Artificial Sequence
  derived and/or modified sequence
ttctaaagtccgcacgcacccaccgggactcagattctccccagacgccgaggatggccgtcatggcgccccgaaccctcgtcctgctactctcgggggccctggccctgacccagacctgggcgggctcccactccatgaggtatttctacacctccgtgtcccggcccggccgcggggagccccgcttcatcgccgtgggctacgtggacgacacgcagttcgtgcggttcgacagcgacgccgcgagccagaggatggagccgcgggcgccgtggatagagcaggaggggccggagtattgggaccggaacacacggaatgtgaaggcccactcacagactgaccgagcgaacctggggaccctgcgcggctactacaaccagagcgaggacggttctcacaccatccagaggatgtatggctgcgacgtggggccggacgggcgcttcctccgcgggtaccagcaggacgcttacgacggcaaggattacatcgccctgaacgaggacctgcgctcttggaccgcggcggacatggcggctcagatcacccagcgcaagtgggagacggcccatgaggcggagcagtggagagcctacctggagggccggtgcgtggagtggctccgcagatacctggagaacgggaaggagacgctgcagcgcacggacgcccccaagacgcatatgactcaccacgctgtctctgaccatgaggccaccctgaggtgctgggccctgagcttctaccctgcggagatcacactgacctggcagcgggatggggaggaccagacccaggacacggagctcgtggagaccaggcctgcaggggatgggaccttccagaagtgggcgtctgtggtggtgccttctggacaggagcagagatacacctgccatgtgcagcatgagggtctgcccaagcccctcaccctgagatgggagccgtcttcccagcccaccatccccatcgtgggcatcattgctggcctggttctctttggagctgtgatcgctggagctgtggtcgctgctgtgatgtggaggaggaagagctcagatagaaaaggagggagctactctcaggctgcaagcagtgacagtgcccagggctctgatatgtctctcacagcttgtaaagtgtgagacagctgccttgtgtgggactgagaggcaagatttgttcctgcccttccctttgtgacttgaagaaccctgactttgtttctgcaaaggcacctgcatgtgtctgtgttcttgtaggcataatgtgaggaggtggggagaccaccccacccccatgtccaccatgaccctcttcccacgctgacctgtgctccctccccaatcatctttcctgttccagagaggtggggctgaggtgtctccatctctgcctcaacttcatggtgcactgagctgtaactttttccttccctattaaaattagaacctgagtat

SEQ ID NO: 84749 - DNA, 1548 bp, Artificial Sequence
  derived and/or modified sequence
agattctccccagacgccgaggatggccgtcatggcgccccgaaccctcctcctgctactctcgggggccctggccctgacccagacctgggcgggctcccactccatgaggtatttcttcacatccgtgtcccggcccggccgcggggagccccgcttcatcgccgtgggctacgtggacgacacgcagttcgtgcggttcgacagcgacgccgcgagccagaagatggagccgcgggcgccgtggatagagcaggaggggccggagtattgggaccaggagacacggaatatgaaggcccactcacagactgaccgagcgaacctggggaccctgcgcggctactacaaccagagcgaggacggttctcacaccatccagataatgtatggctgcgacgtggggccggacgggcgcttcctccgcgggtaccggcaggacgcctacgacggcaaggattacatcgccctgaacgaggacctgcgctcttggaccgcggcggacatggcagctcagatcaccaagcgcaagtgggaggcggtccatgcggcggagcagcggagagtctacctggagggccggtgcgtggacgggctccgcagatacctggagaacgggaaggagacgctgcagcgcacggacccccccaagacacatatgacccaccaccccatctctgaccatgaggccaccctgaggtgctgggccctgggcttctaccctgcggagatcacactgacctggcagcgggatggggaggaccagacccaggacacggagctcgtggagaccaggcctgcaggggatggaaccttccagaagtgggcggctgtggtggtgccttctggagaggagcagagatacacctgccatgtgcagcatgagggtctgcccaagcccctcaccctgagatgggagctgtcttcccagcccaccatccccatcgtgggcatcattgctggcctggttctccttggagctgtgatcactggagctgtggtcgctgccgtgatgtggaggaggaagagctcagatagaaaaggagggagttacactcaggctgcaagcagtgacagtgcccagggctctgatgtgtctctcacagcttgtaaagtgtgagacagctgccttgtgtgggactgagaggcaagagttgttcctgcccttccctttgtgacttgaagaaccctgactttgtttctgcaaaggcacctgcatgtgtctgtgttcgtgtaggcataatgtgaggaggtggggagagcaccccacccccatgtccaccatgaccctcttcccacgctgacctgtgctccctctccaatcatctttcctgttccagagaggtggggctgaggtgtctccatctctgtctcaacttcatggtgcactgagctgtaacttcttccttccctattaaaattagaacctgagtataaatttactttctcaaattcttgccatgagaggttgatgagttaattaaaggagaagattcctaaaatttgagagacaaaattaatggaacgcatgagaaccttccagagtcc

SEQ ID NO: 84750 - DNA, 1410 bp, Artificial Sequence
  derived and/or modified sequence
ccgcacgcacccaccgggactcagattctccccagacgccgaggatggccgtcatggcgccccgaaccctcctcctgctactctcgggggccctggccctgacccagacctgggcgggctcccactccatgaggtatttcttcacatccgtgtcccggcccggccgcggggagccccgcttcatcgccgtgggctacgtggacgacacgcagttcgtgcggttcgacagcgacgccgcgagccagaagatggagccgcgggcgccgtggatagagcaggaggggccggagtattgggaccaggagacacggaatatgaaggcccactcacagactgaccgagcgaacctggggaccctgcgcggctactacaaccagagcgaggacggttctcacaccatccagataatgtatggctgcgacgtggggccggacgggcgcttcctccgcgggtaccggcaggacgcctacgacggcaaggattacatcgccctgaacgaggacctgcgctcttggaccgcggcggacatggcagctcagatcaccaagcgcaagtgggaggcggtccatgcggcggagcagcggagagtctacctggagggccggtgcgtggacgggctccgcagatacctggagaacgggaaggagacgctgcagcgcacggacccccccaagacacatatgacccaccaccccatctctgaccatgaggccaccctgaggtgctgggccctgggcttctaccctgcggagatcacactgacctggcagcgggatggggaggaccagacccaggacacggagctcgtggagaccaggcctgcaggggatggaaccttccagaagtgggcggctgtggtggtgccttctggagaggagcagagatacacctgccatgtgcagcatgagggtctgcccaagcccctcaccctgagatgggatagaaaaggagggagttacactcaggctgcaagcagtgacagtgcccagggctctgatgtgtctctcacagcttgtaaagtgtgagacagctgccttgtgtgggactgagaggcaagagttgttcctgcccttccctttgtgacttgaagaaccctgactttgtttctgcaaaggcacctgcatgtgtctgtgttcgtgtaggcataatgtgaggaggtggggagagcaccccacccccatgtccaccatgaccctcttcccacgctgacctgtgctccctctccaatcatctttcctgttccagagaggtggggctgaggtgtctccatctctgtctcaacttcatggtgcactgagctgtaacttcttccttccctattaaaattagaacctgagtataaatttactttctcaaattcttgccatgagaggttgatgagttaattaaaggagaagattcctaaaattt

SEQ ID NO: 84751 - DNA, 900 bp, Artificial Sequence
  derived and/or modified sequence
atggctgtgatggcccccaggaccctggtgctgctgctgagcggggccctggccctgacccagacctgggccggcagccacagcatgagatacttctacacctctgtgtccaggcctggccgcggggagccccgcttcatcgctgtgggctacgtggatgacacccagtttgtgcgctttgacagtgatgctgccagccagaggatggagccccgggccccctggattgagcaggagggccctgagtactgggacaggaacaccagaaatgtgaaggcccacagccagacagaccgggccaacctgggcaccctgcggggctactacaaccagagtgaagatggcagccacaccatccagaggatgtatggctgtgatgtgggcccagatggccgcttcctgcggggctaccagcaggatgcctatgatggcaaggactacatcgccctgaatgaagacctgcgctcctggacagctgctgacatggccgcccagatcacccagaggaagtgggagacagcccatgaagctgagcagtggagggcctacctggagggccgctgtgtggagtggctgcggcgctacctggagaatggcaaggagaccctgcagaggacagatgcccccaagacccacatgacccaccacgctgtgtctgaccacgaggccaccctgcgctgctgggccctgtccttctacccagctgagatcaccctgacctggcagagagatggagaggaccagacccaggacacagagctggtggagaccaggcctgctggagatggcaccttccagaagtgggcctctgtggtggtgcccagcggccaggagcagcgctacacctgccacgtgcagcacgagggcctgcccaagcccctgaccctgcgctgggtgtag

SEQ ID NO: 84752 - DNA, 1098 bp, Artificial Sequence
  derived and/or modified sequence
atggctgtgatggcccccaggaccctggtgctgctgctgagcggggccctggccctgacccagacctgggccggcagccacagcatgagatacttctacacctctgtgtccaggcctggccgcggggagccccgcttcatcgctgtgggctacgtggatgacacccagtttgtgcgctttgacagtgatgctgccagccagaggatggagccccgggccccctggattgagcaggagggccctgagtactgggacaggaacaccagaaatgtgaaggcccacagccagacagaccgggccaacctgggcaccctgcggggctactacaaccagagtgaagatggcagccacaccatccagaggatgtatggctgtgatgtgggcccagatggccgcttcctgcggggctaccagcaggatgcctatgatggcaaggactacatcgccctgaatgaagacctgcgctcctggacagctgctgacatggccgcccagatcacccagaggaagtgggagacagcccatgaagctgagcagtggagggcctacctggagggccgctgtgtggagtggctgcggcgctacctggagaatggcaaggagaccctgcagaggacagatgcccccaagacccacatgacccaccacgctgtgtctgaccacgaggccaccctgcgctgctgggccctgtccttctacccagctgagatcaccctgacctggcagagagatggagaggaccagacccaggacacagagctggtggagaccaggcctgctggagatggcaccttccagaagtgggcctctgtggtggtgcccagcggccaggagcagcgctacacctgccacgtgcagcacgagggcctgcccaagcccctgaccctgcgctgggagcccagcagccagcccaccatccccatcgtgggcatcatcgccggcctggtgctgtttggagctgtgattgctggagctgtggtggccgctgtgatgtggaggaggaagagcagtgacaggaagggcggcagctacagccaggccgccagcagtgacagcgcccagggcagtgacatgagcctgacagcctgcaaggtgtag

SEQ ID NO: 84753 - DNA, 1116 bp, Artificial Sequence
  derived and/or modified sequence
atggctgtgatggcccccaggaccctggtgctgctgctgagcggggccctggccctgacccagacctgggccggcagccacagcatgagatacttctacacctctgtgtccaggcctggccgcggggagccccgcttcatcgctgtgggctacgtggatgacacccagtttgtgcgctttgacagtgatgctgccagccagaggatggagccccgggccccctggattgagcaggagggccctgagtactgggacaggaacaccagaaatgtgaaggcccacagccagacagaccgggccaacctgggcaccctgcggggctactacaaccagagtgaagatggcagccacaccatccagaggatgtatggctgtgatgtgggcccagatggccgcttcctgcggggctaccagcaggatgcctatgatggcaaggactacatcgccctgaatgaagacctgcgctcctggacagctgctgacatggccgcccagatcacccagaggaagtgggagacagcccatgaagctgagcagtggagggcctacctggagggccgctgtgtggagtggctgcggcgctacctggagaatggcaaggagaccctgcagaggacagatgcccccaagacccacatgacccaccacgctgtgtctgaccacgaggccaccctgcgctgctgggccctgtccttctacccagctgagatcaccctgacctggcagagagatggagaggaccagacccaggacacagagctggtggagaccaggcctgctggagatggcaccttccagaagtgggcctctgtggtggtgcccagcggccaggagcagcgctacacctgccacgtgcagcacgagggcctgcccaagcccctgaccctgcgctgggagcccagcagccagcccaccatccccatcgtgggcatcatcgccggcctggtgctgtttggagctgtgattgctggagctgtggtggccgctgtgatgtggaggaggaagagcagtggaggagagggcatgaaggacaggaagggcggcagctacagccaggccgccagcagtgacagcgcccagggcagtgacatgagcctgacagcctgcaaggtgtag

SEQ ID NO: 84754 - DNA, 900 bp, Artificial Sequence
  derived and/or modified sequence
atggctgtgatggcccccaggaccctgctgctgctgctgagcggggccctggccctgacccagacctgggccggcagccacagcatgagatacttcttcacctctgtgtccaggcctggccgcggggagccccgcttcatcgctgtgggctacgtggatgacacccagtttgtgcgctttgacagtgatgctgccagccagaagatggagccccgggccccctggattgagcaggagggccctgagtactgggaccaggagaccaggaacatgaaggcccacagccagacagaccgggccaacctgggcaccctgcggggctactacaaccagagtgaagatggcagccacaccatccagatcatgtatggctgtgatgtgggcccagatggccgcttcctgcggggctaccggcaggatgcctatgatggcaaggactacatcgccctgaatgaagacctgcgctcctggacagctgctgacatggccgcccagatcaccaagaggaagtgggaggccgtgcacgccgctgagcagaggagagtgtacctggagggccgctgtgtggatggcctgcggcgctacctggagaatggcaaggagaccctgcagaggacagacccccccaagacccacatgacccaccaccccatcagtgaccacgaggccaccctgcgctgctgggccctgggcttctacccagctgagatcaccctgacctggcagagagatggagaggaccagacccaggacacagagctggtggagaccaggcctgctggagatggcaccttccagaagtgggccgctgtggtggtgcccagcggggaggagcagcgctacacctgccacgtgcagcacgagggcctgcccaagcccctgaccctgcgctgggtgtag

SEQ ID NO: 84755 - DNA, 1116 bp, Artificial Sequence
  derived and/or modified sequence
atggctgtgatggcccccaggaccctgctgctgctgctgagcggggccctggccctgacccagacctgggccggcagccacagcatgagatacttcttcacctctgtgtccaggcctggccgcggggagccccgcttcatcgctgtgggctacgtggatgacacccagtttgtgcgctttgacagtgatgctgccagccagaagatggagccccgggccccctggattgagcaggagggccctgagtactgggaccaggagaccaggaacatgaaggcccacagccagacagaccgggccaacctgggcaccctgcggggctactacaaccagagtgaagatggcagccacaccatccagatcatgtatggctgtgatgtgggcccagatggccgcttcctgcggggctaccggcaggatgcctatgatggcaaggactacatcgccctgaatgaagacctgcgctcctggacagctgctgacatggccgcccagatcaccaagaggaagtgggaggccgtgcacgccgctgagcagaggagagtgtacctggagggccgctgtgtggatggcctgcggcgctacctggagaatggcaaggagaccctgcagaggacagacccccccaagacccacatgacccaccaccccatcagtgaccacgaggccaccctgcgctgctgggccctgggcttctacccagctgagatcaccctgacctggcagagagatggagaggaccagacccaggacacagagctggtggagaccaggcctgctggagatggcaccttccagaagtgggccgctgtggtggtgcccagcggggaggagcagcgctacacctgccacgtgcagcacgagggcctgcccaagcccctgaccctgcgctgggagctgagcagccagcccaccatccccatcgtgggcatcatcgccggcctggtgctgctgggcgccgtcatcactggagctgtggtggccgctgtgatgtggaggaggaagagcagtggaggagaaggagtgaaggacaggaagggcggcagctacacccaggccgccagcagtgacagcgcccagggcagtgatgtgtccctgacagcctgcaaggtgtag

SEQ ID NO: 84756 - DNA, 1098 bp, Artificial Sequence
  derived and/or modified sequence
atggctgtgatggcccccaggaccctgctgctgctgctgagcggggccctggccctgacccagacctgggccggcagccacagcatgagatacttcttcacctctgtgtccaggcctggccgcggggagccccgcttcatcgctgtgggctacgtggatgacacccagtttgtgcgctttgacagtgatgctgccagccagaagatggagccccgggccccctggattgagcaggagggccctgagtactgggaccaggagaccaggaacatgaaggcccacagccagacagaccgggccaacctgggcaccctgcggggctactacaaccagagtgaagatggcagccacaccatccagatcatgtatggctgtgatgtgggcccagatggccgcttcctgcggggctaccggcaggatgcctatgatggcaaggactacatcgccctgaatgaagacctgcgctcctggacagctgctgacatggccgcccagatcaccaagaggaagtgggaggccgtgcacgccgctgagcagaggagagtgtacctggagggccgctgtgtggatggcctgcggcgctacctggagaatggcaaggagaccctgcagaggacagacccccccaagacccacatgacccaccaccccatcagtgaccacgaggccaccctgcgctgctgggccctgggcttctacccagctgagatcaccctgacctggcagagagatggagaggaccagacccaggacacagagctggtggagaccaggcctgctggagatggcaccttccagaagtgggccgctgtggtggtgcccagcggggaggagcagcgctacacctgccacgtgcagcacgagggcctgcccaagcccctgaccctgcgctgggagctgagcagccagcccaccatccccatcgtgggcatcatcgccggcctggtgctgctgggcgccgtcatcactggagctgtggtggccgctgtgatgtggaggaggaagagcagtgacaggaagggcggcagctacacccaggccgccagcagtgacagcgcccagggcagtgatgtgtccctgacagcctgcaaggtgtag

SEQ ID NO: 84757 - DNA, 465 bp, Artificial Sequence
  derived and/or modified sequence
atggctgtgatggcccccaggaccctgctgctgctgctgagcggggccctggccctgacccagacctgggccggcagccacagcatgagatacttcttcacctctgtgtccaggcctggccgcggggagccccgcttcatcgctgtgggctacgtggatgacacccagtttgtgcgctttgacagtgatgctgccagccagaagatggagccccgggccccctggattgagcaggagggccctgagtactgggaccaggagaccaggaacatgaaggcccacagccagacagaccgggccaacctgggcaccctgcggggctactacaaccagagtgaagatggcagccacaccatccagatcatgtatggctgtgatgtgggcccagatggccgcttcctgcggggctaccgcctgcggagccccagcgccagcggcagaagatccatgagaagaagcagctag

SEQ ID NO: 84758 - DNA, 900 bp, Artificial Sequence
  derived and/or modified sequence
atggccgtgatggccccccggaccctggtgctgctgctgagcggcgctctggccttgacacagacttgggcaggtagccattccatgcggtatttctatacctctgtctcacggcctggacgcggcgagccgcgatttatagctgttggatatgtggatgacactcagttcgtccgcttcgatagtgacgctgcgtctcaacgaatggagccacgggccccttggattgagcaggaggggcctgaatattgggataggaatacaaggaacgtgaaggcccattctcaaactgatagggctaatctggggaccctcagaggctactacaatcaaagcgaggatggctcacataccatccagcggatgtatggctgtgatgtgggtccagatggccgcttcctccggggataccagcaggatgcctacgatgggaaagactatattgctctgaatgaagatctccgctcatggacagcagcagacatggcggctcagatcacacagcgaaagtgggagaccgctcatgaggctgaacaatggagggcctacctggagggacgttgcgttgagtggcttcggcgctacctcgagaacggcaaagaaactctacaacgcactgacgccccgaaaacacacatgactcatcacgccgtttccgatcacgaagctactcttagatgctgggcgttatctttttaccccgcagagataaccctgacgtggcagcgggatggtgaggaccaaacacaggacaccgagctcgttgaaacccgccccgcaggtgatggaacgtttcaaaaatgggcgagcgttgtcgtgccctcgggacaggaacaaagatacacttgccatgtccagcatgaagggcttccgaaaccgctgacactgagatgggtttag

SEQ ID NO: 84759 - DNA, 1098 bp, Artificial Sequence
  derived and/or modified sequence
atggccgtgatggccccccggaccctggtgctgctgctgagcggcgcattggcccttacccagacctgggccgggtcccattccatgaggtacttttacacctctgtgtctcgccctggtcgaggtgagcctcggtttatcgcagtgggatacgtggacgatacccaatttgtcaggttcgattctgacgccgcctcacagagaatggaacctagggccccatggattgaacaagagggccccgaatattgggacaggaacacacgcaacgttaaagcacacagtcagaccgaccgtgccaatctggggacactacgaggctattacaaccagtcagaagatggctcccacacaattcaacggatgtacggatgtgacgtcggcccagacggccggttccttcgtggctatcagcaggatgcatatgatggtaaggattacatcgcgctgaatgaagacctgcggtcttggactgcagctgacatggctgcccagatcacgcagagaaaatgggaaaccgcccacgaagcggaacaatggcgtgcctatctcgagggcagatgcgtggaatggctacgccgatatcttgaaaatgggaaagagaccctccaaagaactgacgcaccaaaaacccatatgacgcaccacgccgtctcagaccatgaggccactctgaggtgttgggccctgtccttctacccagctgagatcactcttacctggcaacgggatggcgaggaccaaacacaggacacagaacttgtggagactcggcctgccggggacggaacattccagaaatgggcatctgttgtggtccctagcggccaggagcagcggtacacatgtcatgtccaacacgaggggctgcctaaaccactgacactacggtgggaacctagcagtcagcctacgatcccaatcgtggggattattgctggcctggttctgtttggtgctgtgatcgccggcgccgttgtggctgccgttatgtggcggaggaagtcatcagatcgtaaaggcggaagttactctcaggcagcctcttccgattccgcccagggcagcgatatgagtctgaccgcctgcaaggtatag

SEQ ID NO: 84760 - DNA, 1116 bp, Artificial Sequence
  derived and/or modified sequence
atggccgtgatggccccccggaccctggtgctgctgctgagcggcgccctagcactcacccagacttgggccggctcacactcaatgaggtatttttacactagcgtttcccgcccagggaggggcgagccaaggttcattgcggtggggtatgtggacgacacccaattcgtcagattcgattcagatgctgccagccaaaggatggagcctagagccccatggatcgaacaggaaggaccggagtattgggaccgcaacacccggaatgtgaaggctcacagtcagaccgaccgtgcgaaccttgggacgttgcgcgggtactataatcagtccgaagacggatcgcacaccatacagcgcatgtatggatgtgatgttggcccggacggtaggttcctccggggataccagcaggacgcatacgacggaaaagactacatcgcgttaaacgaggaccttcgctcctggacggccgctgacatggccgctcagatcactcagagaaagtgggaaaccgcccatgaggctgaacagtggagagcctacctggaaggcagatgcgttgagtggctgcgacgatacctcgaaaatggcaaggagaccctgcagaggacggatgcaccaaagactcatatgacgcaccacgctgtctccgatcatgaggctacccttagatgttgggccctgagcttttaccctgcagagattactctgacctggcagcgggatggcgaggaccaaacgcaggatactgagctggtggagactaggcccgcaggagacggcactttccaaaaatgggcttccgtggtggtgcctagtggtcaggaacaacgttacacttgtcatgttcagcacgagggactgcctaagcccctgaccctaaggtgggagcccagctctcagcctaccattccaatcgtagggataattgccggtctggtgctgttcggtgccgtgattgctggcgccgtcgtggccgcggtgatgtggagacgaaagtcctctggtggcgaagggatgaaggataggaaaggcggctcctacagtcaagcagcttcctcggattccgcccaggggtcagacatgtcgttaaccgcgtgcaaagtgtag

SEQ ID NO: 84761 - DNA, 900 bp, Artificial Sequence
  derived and/or modified sequence
atggccgtgatggccccccggaccctgctgctgctgctgagcggcgcactagccttgacacaaacctgggccggttctcactctatgaggtactttttcacatcagtgagtaggccgggccgcggagagccgcgatttatcgcagtcggatatgtcgatgacacgcagttcgtgagattcgacagtgacgcagcttcccaaaaaatggagccacgggccccctggatagagcaggaagggcctgagtactgggaccaggagaccagaaatatgaaggcccatagccagaccgatcgagcaaatctgggtacgctgcgcggatattacaatcagtctgaggacggatcccatacaatccagatcatgtacgggtgcgacgtgggtccagatggacgcttcctgagagggtatcgtcaggacgcttacgatggaaaggattatattgcactcaacgaggacctgcggtcatggactgcagccgacatggcggcacagatcactaagcggaaatgggaggccgtgcacgcagcggagcagcgaagggtctacctcgagggtcgatgtgtagacggattgagaagatacctagaaaatggcaaagagactctccagcgaaccgatcccccgaagacacacatgactcatcaccccatctccgatcacgaggctaccctgaggtgctgggctcttggcttttatccagcagagattactctaacttggcagcgcgacggcgaagaccaaacacaagacaccgagctggttgagacacggcctgcgggggatggaacattccagaaatgggctgccgtcgtagtccccagtggagaagaacaaaggtatacctgccacgtgcaacatgaaggactgccaaaacctcttacactgaggtgggtatag

SEQ ID NO: 84762 - DNA, 1116 bp, Artificial Sequence
  derived and/or modified sequence
atggccgtgatggccccccggaccctgctgctgctgctgagcggcgctctggctctgacgcagacttgggccgggtcccactctatgcgctattttttcaccagcgtgtcccgtccaggaagaggtgaaccacgcttcatcgcagtggggtacgtagacgacacccagttcgtcagatttgactctgatgctgcatcacagaagatggagccgagagctccgtggattgagcaggaaggccccgaatactgggaccaggaaacccgaaatatgaaggcacacagccagactgatcgcgccaatcttggcactctgagaggatactataaccagtctgaagatgggtcccacactatccagatcatgtacggatgcgatgtgggacctgatggccgttttctccgaggatacagacaagacgcctacgacggaaaagactacattgctctgaacgaggacctgcgctcttggaccgcagccgacatggctgctcagattaccaagaggaaatgggaggctgtccatgcagcggagcagcggagggtatacttggaggggcggtgcgtggacggactccgtcgttacctcgagaatgggaaggagactctccaacgaacggatccacccaaaacgcatatgacccaccatccaatttcagaccacgaggccactcttcggtgttgggcgcttggtttctatcccgcagaaataacgctcacatggcagcgggatggcgaggaccagacacaggatactgagctcgttgagacacgccctgccggggacggtaccttccagaagtgggctgcagtagttgttccctccggcgaggaacaaaggtacacttgtcacgtgcagcacgaagggctgccaaaaccactcactcttcggtgggagttgtccagtcaacccacaatcccaattgttggaattatcgcaggccttgtgttgctaggggcagtcattacaggagccgtcgtcgcagcggtcatgtggcggcggaagtcctctggaggagagggcgttaaggatagaaaaggtgggtcttatacacaggctgcaagctccgacagtgcacagggtagtgatgttagcctcactgcttgtaaagtctag

SEQ ID NO: 84763 - DNA, 1098 bp, Artificial Sequence
  derived and/or modified sequence
atggccgtgatggccccccggaccctgctgctgctgctgagcggcgctcttgccctcactcaaacttgggctgggtcccacagtatgcgttacttcttcacctcagtatcaaggcccggcagaggcgaaccaaggtttattgccgtgggatatgtcgatgatacacaatttgttagatttgactctgatgcggccagccagaagatggaaccaagggccccctggattgaacaggagggccccgaatattgggatcaggaaaccaggaatatgaaagcccattctcagacagaccgcgccaatcttgggaccctgcgggggtattataaccagtcagaggatgggagccatacgatccagatcatgtacggctgtgatgtgggcccagacggtagattcctgagaggttatcgccaagacgcctacgatggcaaagattatattgcactgaatgaagatcttcgttcttggactgcagccgacatggccgcgcagatcacgaaacggaagtgggaggccgtgcacgccgccgaacagcgccgggtgtaccttgaggggcgctgtgttgacggacttaggcggtacctcgaaaatggcaaggaaactctgcagcgcaccgatccacccaagacccatatgacacaccatccaatttctgatcatgaggcaactctgaggtgttgggctctcggattctacccagctgagatcaccctgacctggcagcgtgacggcgaggaccagacccaagacactgagctcgtagagacccggccggccggggacggtacatttcagaagtgggccgccgtagtcgtgcccagtggggaagagcaaagatatacatgtcacgtccagcatgagggcctgccaaaacccctgacactgcggtgggagctgtcctctcagccgacaatcccaatagtgggcatcatcgcaggcttagtcctccttggtgcggtcattacgggcgccgtggtagcagctgtcatgtggcgtcgcaagtccagcgaccggaaggggggtagttatactcaggctgcaagctccgactctgcacagggctccgacgtgagcctgactgcttgcaaagtttag

SEQ ID NO: 84764 - DNA, 900 bp, Artificial Sequence
  derived and/or modified sequence
atggccgtgatggccccccggaccctgctgctgctgctgagcggcgctctcgcactgacacagacctgggccgggagtcactcaatgagatatttcttcactagcgtgtccaggccaggaaggggagaaccacgctttatagccgtgggatatgtcgacgatacccagttcgtgcgtttcgactccgatgcagcaagccagaaaatggaaccaagggctccatggattgaacaggaaggccccgagtattgggaccaagagacaaggaatatgaaagcccatagtcagacagatcgtgccaacctcggtaccctgcggggatactacaaccagagcgaggacggctcacacaccatacaaataatgtacggatgtgacgtgggtcccgacggacgcttcttacgaggataccggcaggatgcttatgatgggaaggattatatcgctctgaacgaggacttgaggtcctggacagccgccgatatggccgctcagattacaaagcgaaagtgggaggccgtacatgcagctgaacagagacgcgtataccttgaaggccggtgcgtcgatgggctgcgccgctacctggaaaacgggaaggaaactctgcagcggactgatcctccaaagacacatatgacacatcatcctatatccgatcacgaggccaccctcagatgctgggctctcggtttctatcccgcagaaataaccctgacatggcagagggatggagaggaccagactcaggataccgagctggtggagacgcggcccgcaggagacgggacatttcagaaatgggccgcagttgttgttccatccggcgaggagcagaggtatacctgccatgtgcaacacgaaggattacccaagcctctgacgctccgctgggtgtag

SEQ ID NO: 84765 - DNA, 1098 bp, Artificial Sequence
  derived and/or modified sequence
atggccgtgatggccccccggaccctgctgctgctgctgagcggcgctctggcacttactcagacatgggccggctctcattcgatgcgctacttctttacgtcagtgtcgcgccccggtagaggtgagcccagattcatcgctgtggggtatgtagatgatactcagttcgttcggtttgactccgacgccgcctcccaaaaaatggagccgcgtgcaccttggatcgaacaggaaggccccgaatactgggaccaagaaacacgaaacatgaaggctcacagccagaccgatcgagcaaacttaggtactctgaggggttactataaccaatctgaagatggctcccacactatacagatcatgtacgggtgtgacgtcggccccgatggccggtttctcaggggatataggcaggatgcttatgatgggaaggattacattgctctgaacgaagatctgaggtcatggactgctgctgatatggccgctcagatcactaagcgtaagtgggaggccgtgcacgctgcagaacagaggagagtgtatcttgagggtagatgtgtggatggtctgcggaggtatctcgagaatgggaaagagaccctacagcggaccgacccgcccaagacccacatgacacaccatccgatcagtgaccacgaagcaacattgaggtgttgggcgctgggtttttaccctgctgagataacactcacctggcagcgagacggagaagatcagacccaggatacggaattggtggagacacgacctgccggtgatggcacttttcaaaagtgggccgccgttgtggtcccctcaggggaggagcagaggtacacctgccacgtacaacacgaggggcttcctaagccactgaccctgaggtgggaattgtcctctcaacctactatacccatcgtcgggattatagctggactggtgcttctgggcgccgtcatcaccggggctgtggttgcagcggtcatgtggagacgcaaaagtagcgacaggaaaggggggtcctatactcaggctgcatcaagcgactctgctcaagggtcagacgtgagccttacggcctgcaaggtctag

SEQ ID NO: 84766 - DNA, 1116 bp, Artificial Sequence
  derived and/or modified sequence
atggccgtgatggccccccggaccctgctgctgctgctgagcggcgccctagcactgactcaaacatgggctgggagccacagcatgaggtatttctttacatcagtgtccagacctggacggggcgaaccacgatttattgcggtcggctatgttgatgatactcagttcgtgaggtttgactcagacgcggcctctcaaaaaatggagccacgagccccttggatcgaacaagagggacctgagtactgggaccaagaaacaagaaacatgaaggcccactctcagacagaccgcgccaaccttggcacacttcgaggttattacaaccagtctgaggatgggtcccacaccatccagattatgtatgggtgcgacgttgggcctgatgggagattcctgcgtggttacagacaggatgcatatgacggtaaagactacatagcgctcaatgaggatctccggtcctggacagccgccgacatggccgcacagatcaccaaacgtaaatgggaagccgttcatgctgcggaacagcgccgtgtttacttggagggcaggtgtgtggacggacttcgaagatacttggaaaatggaaaagagactctgcagcgaactgatccccccaaaacccatatgacgcaccatccgatatcggaccacgaagctacccttagatgctgggcactggggttctatcccgcagaaattaccttgacttggcagagagatggcgaagatcagacccaggacacagagcttgtggagaccagaccagccggggacgggacttttcagaagtgggcagcggttgtagtgccctctggggaagagcagcgttatacctgccacgtgcaacatgaaggtctgccaaaaccactcacgctgcggtgggaattatcctcccagcctaccattcccattgtcggcataatcgccggcctcgtgttgcttggcgctgtcatcactggtgctgtagtggctgcggtgatgtggcggaggaaatcttccggaggcgaaggggtgaaggaccgtaaaggggggtcctatactcaggctgctagctctgattccgcacaggggtcagacgtgagcctgactgcatgtaaggtgtag

SEQ ID NO: 84767 - DNA, 465 bp, Artificial Sequence
  derived and/or modified sequence
atggccgtgatggccccccggaccctgctgctgctgctgagcggcgccttggccctgacccaaacctgggctggatctcatagcatgcggtacttcttcacctctgtaagccgccccggcaggggtgaacctcgattcattgcggtgggttacgtggatgacacccagtttgtaaggtttgattctgatgcagcgagtcagaagatggagccacgcgcaccttggatcgaacaggaaggcccagagtattgggaccaggaaaccagaaatatgaaggcccacagtcaaacagatcgggctaatctaggaactctacgcggatactacaatcagagtgaggacggatcacatactattcagatcatgtatggatgtgatgtgggacctgacggccggtttctccggggttatcggctgcggtcacccagtgcttcaggcagaagaagtatgaggcggtctagctag

SEQ ID NO: 84768 - DNA, 1098 bp, Artificial Sequence
  derived and/or modified sequence
atggccgtgatggccccccggaccctggtgctgctgctgagcggcgctcttgccctgactcagacgtgggccggcagccatagcatgagatacttttacacttccgttagccggcctgggcgcggtgagccgaggtttatcgctgttggctatgtggacgatacacaattcgtcagatttgatagcgacgcggcctcacaacggatggaacctagggccccttggatcgaacaggaaggccctgagtactgggatcggaacacacggaacgtaaaggcccactctcagacagaccgcgcaaacttgggcacgctgcggggttattacaaccagagcgaggacgggagtcatacgattcagcgcatgtacggctgcgacgtcggcccggatgggcggttcctgcgcgggtatcagcaggatgcgtacgacggaaaggactacatagctctgaacgaggacctgcgttcttggaccgcggcagacatggcggctcagatcacccagagaaagtgggaaactgcccacgaggccgagcagtggcgagcctacctcgaggggaggtgtgtggagtggctaaggcggtaccttgagaacggcaaggaaaccctgcagcgaacagacgctcctaagacacacatgacacaccatgctgttagcgatcacgaagctaccctgcgctgttgggccctgtctttctatcccgccgaaatcaccctgacttggcaacgtgacggtgaagatcagacccaggacacagagctggtggagacaagaccggccggtgatggcacgttccagaaatgggcctcagtcgtcgtgcccagtgggcaagagcagcggtatacctgtcatgtgcagcacgaaggcttaccaaagcctctgaccctgcgatgggagccatctagccagccaactataccaatagtggggatcatcgccgggctagtgctttttggtgctgtcatcgctggagcagtggtagcagccgtgatgtggcgtagaaagtccagcgaccggaagggcggcagttattcccaggctgcatcatcagattcagcccagggttctgatatgtccctgactgcgtgtaaagtatag

SEQ ID NO: 84769 - DNA, 1098 bp, Artificial Sequence
  derived and/or modified sequence
atggccgtgatggccccccggaccctgctgctgctgctgagcggcgcgctggctctcacgcagacttgggccggctctcactccatgcgctactttttcacctcagtgagccgccctggacgaggtgagcctcgtttcatcgcagtcggttatgtggacgacacgcagtttgtccggtttgactcggatgctgcctcacagaagatggaaccccgggccccttggatcgagcaggagggcccagagtactgggaccaggaaaccagaaatatgaaagcacacagtcagacggaccgtgccaatctcgggacgctccggggatattataaccagagtgaggatgggagtcataccattcagatcatgtacggatgcgatgtcggaccagacggtaggttcctacggggctacagacaggacgcgtacgacggtaaagattatattgcactcaacgaagatctgaggagctggaccgccgccgacatggccgctcaaatcactaagcggaagtgggaggcggtacatgctgcagagcaacggcgcgtgtatcttgaggggaggtgcgtggatggcctgaggcggtatcttgaaaatggaaaagaaaccttgcagagaaccgatcctcccaagacacacatgacccaccacccaatttccgatcacgaggctactttacgttgttgggccttagggttctacccggccgagattacgctgacttggcagagagacggcgaggatcaaacacaggatactgagctggtcgagacaagacccgcaggggacggcacgtttcagaagtgggcagcagtggtggtgcccagcggcgaagaacagcggtatacgtgtcacgtgcagcatgaaggcctgcccaagcctctgacactgaggtgggaactgtctagtcaaccaaccattccaatagttggcattattgccggcctcgtgctccttggtgcggttattacaggcgctgtggtggctgccgtcatgtggaggcgcaaatccagcgatagaaaaggcggatcttatacgcaagccgcttcctccgatagtgcccagggcagtgacgtgagcctgactgcttgcaaggtgtag

SEQ ID NO: 84770 - DNA, 465 bp, Artificial Sequence
  derived and/or modified sequence
atggccgtgatggccccccggaccctgctgctgctgctgagcggcgccttggccctcacccagacctgggccggcagccacagcatgcgttacttctttacatctgtctcccgtccaggccgcggagagccccgttttatcgctgtgggatatgtggatgacacccaatttgtgagattcgactctgatgcagcatcacaaaaaatggaacccagggccccttggattgaacaagaggggccggagtactgggatcaagagacccggaacatgaaggcccactcacagacggacagggcaaacctgggaaccctgcgcggatactacaatcagagtgaggacggctcccataccatccagatcatgtacgggtgcgatgtgggtcccgacggaagatttctgagaggatatcgtctccggagtccaagtgccagtgggcgcaggtctatgagacgctcatcctag

SEQ ID NO: 84771 - DNA, 1098 bp, Artificial Sequence
  derived and/or modified sequence
atggccgtgatggccccccggaccctgctgctgctgctgagcggcgctttagccctgacccaaacttgggccgggagccacagcatgcgatacttctttactagtgtgagcaggcccggtagaggagagcctcgctttattgccgtaggttacgttgacgatacgcagtttgtcaggtttgatagcgatgccgcctcgcaaaagatggaaccaagagcgccgtggattgagcaggagggcccagagtattgggaccaggaaaccagaaatatgaaggcacactcccagactgacagggctaacctggggactctgcgcgggtattataatcagtctgaagatggttcgcatacaatccagatcatgtacggatgcgatgtgggacccgacggaaggtttctgaggggataccgtcaggatgcatatgatggcaaagactacatcgccttgaatgaggatctgcggtcatggaccgcggccgacatggccgcacagattactaagcgtaagtgggaggcggtacacgctgccgaacagagacgtgtgtatctggaggggcgctgcgtggacggcctccgccgataccttgagaatggtaaagagaccctgcaaaggacagatccacctaagacccatatgacgcatcacccaatatcagaccacgaggccacccttcggtgctgggcgctgggattctacccagccgagatcaccctgacatggcagagggatggtgaggatcaaacacaagacactgagctcgtagaaactagaccagccggcgatggcactttccaaaagtgggccgccgttgtggttcccagcggcgaggagcagcgttatacctgccatgttcagcacgagggactacccaaaccccttacgttaaggtgggagttatccagccagcctaccattcctatcgtgggcataatcgccggattggtcctcctgggcgctgttataacaggcgctgttgtggccgccgtaatgtggcgccgaaaaagctccgaccggaagggcgggagctatactcaggccgccagtagcgactccgcccaaggaagcgacgtctctctaacagcctgcaaagtgtag

SEQ ID NO: 84772 - DNA, 900 bp, Artificial Sequence
  derived and/or modified sequence
atggctgtgatggccccacgtaccctagtgctcttgttgagcggagccctggccctaacgcaaacctgggctggcagccactcaatgagatacttctacactagtgtgtcacgtccagggcgaggcgagcctagattcatcgccgtggggtatgtagacgatacccagttcgtgaggtttgattccgacgccgcatcacaacgcatggagcctagagcgccatggattgagcaagaggggccagaatactgggatcgtaacacccgcaacgttaaagcccattcgcaaaccgatcgggctaatctcggcactctgcgtggctattataaccagtcagaagatggctctcacaccattcagcggatgtatgggtgtgatgtcggacccgacggtcgttttttaaggggttatcaacaagacgcttatgatggaaaagattacattgccctaaacgaagacctacggagttggacagccgcagatatggcagcccagatcacacagcggaaatgggagactgcgcatgaggcggagcagtggcgggcttatctggaagggaggtgtgtcgaatggttgaggcgttacctcgaaaacggaaaagaaactctgcagcgcacagatgcccctaagacccacatgacgcaccacgctgtgtctgaccacgaagccacactgagatgctgggccctgtctttctaccccgcagaaatcaccttgacctggcagcgggacggggaggaccagacccaggatacagagttagtcgaaacccgccctgctggagacggaacattccagaaatgggcgtccgtggtagttcccagtgggcaagagcagaggtatacctgtcacgttcagcacgaagggttgccaaagcccttaaccctcaggtgggtgtag

SEQ ID NO: 84773 - DNA, 1098 bp, Artificial Sequence
  derived and/or modified sequence
atggccgtaatggccccaaggacattggtcctgttgctgtcgggagctcttgctctgacccaaacttgggccggaagccactcaatgaggtacttttacactagcgtatccaggcctgggagaggtgaaccgagatttattgccgttggctacgtcgatgatacacaatttgtgagattcgattccgatgcagcctcacagaggatggaaccgcgtgccccatggattgagcaggaaggccctgaatactgggaccgtaacactcggaatgtcaaagcccactcccaaacagatcgcgctaacctgggaaccctcagaggatattataaccagtctgaggacggcagccatacaatacagagaatgtatggctgtgacgtgggacccgatggccgatttctgcggggatatcaacaggatgcttacgatgggaaagattacatcgcactgaacgaggacttaagatcctggaccgctgccgacatggccgcacaaattacccagaggaagtgggaaaccgcacacgaagcagagcagtggcgggcttacctagagggcagatgcgtggagtggcttaggcgttatcttgagaacgggaaagaaacattgcagcgtacagatgccccaaagacgcatatgacacatcacgcggtctctgatcacgaggcgacactgagatgttgggcgttgtctttctacccagcggaaattaccctgacatggcagcgggatggcgaagatcagacgcaggatactgagctggtggaaacaaggcctgcgggtgatggaactttccagaaatgggccagcgttgttgtccccagcggccaggaacagcgatacacctgccacgttcagcatgagggtctgcccaaacccctgaccctcagatgggagcctagtagtcagcccaccatccccattgtcgggatcatagccggattggtgctgttcggcgcagttattgctggggctgttgtggccgcagttatgtggcgacgcaagagcagcgacagaaaaggaggtagctactctcaggccgcatctagcgattctgcacagggttctgacatgagccttacagcctgtaaggtttag

SEQ ID NO: 84774 - DNA, 1116 bp, Artificial Sequence
  derived and/or modified sequence
atggcggtgatggcccctaggaccctcgtcctgctgctgagcggtgctctggcccttacacaaacctgggccggttcccactcgatgcggtatttttacacttctgtatcacgccctggcaggggcgaacctcgttttatagccgttgggtatgtcgacgacactcaattcgtcagatttgatagtgacgccgctagccaaaggatggagccgagagccccatggattgagcaagagggccctgaatactgggaccgaaacactaggaacgtgaaagcacactcacagacagatcgcgctaacttgggtacactgagggggtactataaccagagcgaagacggctcacacacgatccagaggatgtacggctgtgatgtgggcccagacgggaggtttttgcgtggataccagcaggacgcatatgacgggaaagattacattgccctcaacgaggatctccggtcgtggaccgccgctgacatggctgcgcagatcacacaaagaaaatgggagacagctcacgaggctgaacagtggcgagcctatttggagggtcgctgtgttgaatggctgcgcagatacctggagaacggcaaagagaccttgcagaggactgacgcccctaaaacccacatgactcaccacgctgtgagcgatcacgaggccacattgaggtgctgggccctatcattctaccctgcagagattaccctgacatggcagagggatggagaagaccagacccaggataccgagctggtagagactagacccgctggcgatggcactttccaaaaatgggcatccgtggttgtgccctctgggcaggaacagagatacacatgtcatgttcagcacgaaggcctgccgaaaccgctgacactgcggtgggagccctcttcacagcctactataccaatagtgggcattatcgctggcctggttttgttcggcgcagtgatcgccggtgcagttgtggcagcggtaatgtggcggagaaagagcagcggcggtgaaggcatgaaggacagaaagggtggcagctacagtcaggccgcatcctcagactcagcccaggggtccgacatgtctctcacggcttgcaaagtgtag

SEQ ID NO: 84775 - DNA, 900 bp, Artificial Sequence
  derived and/or modified sequence
atggcagttatggcccctaggacccttctactcttactgagtggggctctggccttgactcagacatgggctggatcccattcaatgaggtatttctttacgtctgtgtctaggcccggacggggtgagcctcgcttcatcgctgttggttacgtggacgatacacagttcgtaagatttgactccgatgccgcttctcagaagatggaaccaagagctccctggatcgaacaggagggcccagaatattgggatcaggaaacaagaaatatgaaagctcactctcagaccgatcgtgctaacctcggtacactccggggttattacaaccagagcgaggacggaagtcatactatccaaattatgtatgggtgcgatgtcggcccagacggcagatttctccgcggttatagacaggatgcgtacgacggcaaagactatatcgctcttaatgaggatctgcggtcctggacggccgcagatatggccgctcaaattacaaaacggaagtgggaggccgtccacgctgccgagcagcgacgcgtgtacctggaagggagatgtgtggacggactccgacgttacctcgagaatggaaaggagaccctgcagagaaccgatcctccaaaaacccacatgacccaccatcctattagtgaccatgaggccactctccgctgttgggccttgggattctaccctgcagagattacactgacttggcagagggacggcgaggatcagacacaggatacggaactggtggagactcggccagcaggagatggaaccttccagaaatgggccgcagtagttgtgcccagcggcgaagaacagagatatacgtgtcacgtccagcacgagggtctgccgaaaccccttaccctaaggtgggtgtag

SEQ ID NO: 84776 - DNA, 1116 bp, Artificial Sequence
  derived and/or modified sequence
atggccgtaatggcacctaggacgttgctgctgcttctgtcaggggctctcgcactaacacaaacctgggcaggctctcacagcatgcgctacttctttacttctgtgtcgaggcccggtaggggtgagcccaggtttatcgcggttggatatgtggacgacacccagttcgtgcgcttcgatagtgatgctgcctcacagaaaatggagcctagagccccatggatcgagcaggagggccctgaatattgggatcaagaaacccggaacatgaaagcgcactctcaaactgatcgtgccaacttggggaccttgagaggatattacaatcagagcgaagacggcagtcacactatccagatcatgtacggctgtgacgtgggaccggacgggaggttcttgcgtggctacaggcaggacgcttacgacggaaaggactacatcgcactgaacgaagatttgcgaagctggaccgctgccgacatggctgcccagatcactaaacgaaagtgggaagccgtccacgccgctgagcaaaggcgcgtctatttggaaggcaggtgcgtcgatggcttaagaaggtacctggaaaacggcaaggaaaccctgcagcgcaccgacccccctaagacccacatgacccaccacccgatcagtgaccacgaagcaacactgcggtgttgggctctgggattctatcctgcagagataacactgacctggcagcgggatggagaggaccagacacaggacacggagctggtggaaacgcgcccagcaggtgacgggacatttcagaaatgggctgccgtagttgtcccctcaggagaagagcaacgctacacctgccatgtgcagcacgagggccttcccaagccccttaccctgcgctgggaattgtctagccaaccaaccataccaatcgtaggcattattgctggattagtactcctcggcgctgtaattaccggtgccgttgtggcagcagtcatgtggcgccgaaaaagttcaggcggtgagggcgttaaggatagaaagggaggaagctacacacaggcggctagttccgatagcgcccagggctcggacgtgagtctgaccgcgtgcaaggtgtag

SEQ ID NO: 84777 - DNA, 1098 bp, Artificial Sequence
  derived and/or modified sequence
atggctgttatggcgccacgtactttgctactcctcctgtccggcgctctggcattgacacagacgtgggccggatctcattctatgcgctatttttttacgtctgtatccagacccggacggggagaaccaaggttcatcgcagttggttacgtagacgatacacagttcgtccgatttgattctgacgctgcaagccagaagatggagccacgagccccttggatagagcaagaaggcccagaatattgggatcaggaaacacgtaacatgaaagcacatagccaaactgatcgggcaaatctgggcaccctgaggggatactacaatcagtcagaagacgggagccacactatccaaatcatgtacggttgcgatgttggtcccgacgggagattcctcaggggataccggcaagacgcgtacgacggtaaggattacatcgccctgaatgaggatctccgcagttggacagccgctgacatggccgctcagattaccaagcggaagtgggaagccgtgcatgccgcagaacagcgacgcgtatacctcgagggaagatgcgtcgatggcttgaggaggtatcttgagaacgggaaagagactttgcaaaggacagaccctccaaaaacacacatgacgcatcaccctatatcagatcatgaagctactttgagatgctgggcgttgggattctatcctgctgaaatcactctcacatggcagcgggatggcgaggatcagacccaagataccgagctggtggaaacacgtccggcaggcgatgggacgttccagaagtgggccgctgttgtcgtgccctccggggaagagcagaggtacacatgtcatgtgcagcacgaaggcctgccgaaacctttaacactacggtgggagttaagttcccagccgacgatccccatcgtggggatcatagctgggttggtgcttttgggagcagttattaccggcgctgtggtggcagcagtcatgtggagaagaaaatctagtgataggaagggcggatcctatacccaagcagcttcttctgattcagcccagggatcggatgtatcgttaactgcttgcaaggtatag

SEQ ID NO: 84778 - DNA, 900 bp, Artificial Sequence
  derived and/or modified sequence
atggccgttatggccccacgaacactgctgctgcttctgtccggcgcactggctctgactcaaacttgggcaggaagccactccatgagatatttttttacctccgtctcccgtcccggacgcggagagcccagattcatcgccgtgggctatgttgacgatacccagtttgttaggttcgacagtgatgctgcaagccagaagatggagcctagagccccatggattgagcaggaagggcctgagtactgggaccaggaaacacggaatatgaaggcccacagtcagactgatcgggcaaatctggggacgctgcggggatactataaccagtcagaggacggcagccacactatccagatcatgtacggatgcgatgtgggacccgacggcagattcctgcggggttatcggcaagacgcctacgatggcaaggattatatagctttgaacgaggatctgaggtcctggacggctgcagacatggccgcacaaatcactaagagaaaatgggaggctgtgcacgctgctgagcaaaggcgcgtgtatctggaaggccgatgtgtggatgggcttaggcgatatctcgagaatgggaaggagacactgcagcggactgacccaccaaaaactcatatgactcaccatccaatcagtgatcacgaagcaacactgcgatgttgggcactgggattttatcccgctgagataacacttacttggcagagagacggggaagatcagacccaagacaccgagctagtagaaactagaccggctggagatggcactttccagaagtgggcagcggtggtggttcctagtggagaggagcagcgctatacttgtcacgtccagcatgagggactgccaaaaccacttacgctccgttgggtttag

SEQ ID NO: 84779 - DNA, 1098 bp, Artificial Sequence
  derived and/or modified sequence
atggctgttatggctccacgaactcttttgctgctgctgtctggcgcacttgcacttacacagacttgggctggcagtcattccatgagatacttctttaccagcgtcagtagacccggtcgtggcgaacctaggtttatcgccgtgggctatgtagacgacactcagttcgtgaggttcgattctgatgccgctagtcagaagatggagccaagggctccatggattgagcaagaggggccagagtattgggatcaggaaaccaggaacatgaaggctcacagtcagaccgatcgcgctaatcttgggactctcaggggttactataaccaatctgaagatggcagccacaccattcagatcatgtacggctgtgacgtcggcccagacggtcgtttcttgagaggttaccgacaggatgcttacgacgggaaagactatatcgccctgaacgaggatctcaggtcttggaccgctgcggacatggccgctcagatcaccaagagaaagtgggaggccgttcacgccgcagaacaacgacgtgtgtacctcgaaggtcgctgtgtggatgggctgcgcaggtacttggaaaatggaaaagagaccctgcagcgaactgacccccctaagactcacatgacacaccaccctatttccgatcacgaggctacattacgctgttgggctcttgggttctatccagccgagataacccttacctggcaacgtgacggcgaagatcagacacaggatacagaactggttgaaactcgaccagctggggacggcacatttcagaaatgggcagcggtggtcgtcccatctggggaggaacagcgatacacttgccatgtgcaacacgagggcctccccaagccgctgacactgagatgggagctgtcctcacagccgacaattccgatcgtcggtatcatcgctggacttgtactgctaggtgcagttattaccggcgctgtcgtggcggctgtgatgtggaggagaaagagttccgatcggaagggcggttcttacacacaggctgctagtagcgattctgcacaaggctccgatgtcagcctgacggcttgtaaagtgtag

SEQ ID NO: 84780 - DNA, 1116 bp, Artificial Sequence
  derived and/or modified sequence
atggccgtcatggcccctaggacactgttacttctgctgtctggcgctttggcgctgacccagacatgggctggcagtcactcaatgcggtattttttcacatctgtgtctagacctggacgaggtgaacctcgatttatagccgtggggtacgtggatgacacccagtttgtgcggttcgattcagacgcagccagtcagaagatggagcctagggccccatggatcgaacaagaaggacccgagtattgggaccaggaaacaagaaacatgaaggcgcactcacaaactgatagggctaacctgggtaccttgcgcggatactacaaccagtcggaggatggctcccacacaattcagataatgtacggttgtgatgtaggcccagatggtcggtttctgaggggctaccggcaggacgcttacgacggcaaagattacatcgcccttaacgaggacctgcgctcttggacggccgcagatatggcggctcagatcaccaaacgaaagtgggaggccgtgcacgcagccgagcaaaggagagtatatctggagggaagatgcgtcgacggtctcaggcgatatctcgagaacgggaaggagaccctgcagcgcacagaccctcccaaaacccacatgacccaccatcccatcagcgaccacgaagcaacactcagatgttgggcccttggtttctatcccgctgagattacactgacgtggcagcgagacggggaagaccagacacaggacaccgaacttgtggaaactagaccagccggagacggaacgttccagaaatgggctgctgttgtcgtcccatcaggtgaggagcagcgctacacttgtcacgtacagcatgagggcttacccaagcccctcactctgcgttgggagcttagctcccagcctaccattcctatcgtgggcattattgccggtctggtgctgctcggggctgtcattaccggcgctgttgtggccgctgtcatgtggcgcagaaagtctagcggcggagagggggtgaaagatcgcaaaggagggtcatacacacaagcagcatctagcgactccgcccagggatcagatgtgtcactgactgcatgcaaagtgtag

SEQ ID NO: 84781 - DNA, 465 bp, Artificial Sequence
  derived and/or modified sequence
atggccgtgatggccccacggacgctgctcctcctacttagtggggctctagccttaacccagacctgggccggatcccactccatgagatacttctttacctctgtttcccggcctggccgaggagagcccaggtttatagctgtcgggtatgtagatgatacacagttcgttcgattcgactccgacgctgcgagccaaaaaatggaaccaagagcaccatggattgaacaggagggaccagaatattgggaccaggagactaggaacatgaaagcccactcacagactgaccgtgccaacctaggcacactccgcggttattataatcagagcgaagacggcagtcacacaattcaaatcatgtacggatgtgacgtcgggccagatgggcgattcctgcggggttacaggctccggtccccaagcgcctccggtcgaagatccatgcgtcgctcctcttag

SEQ ID NO: 84782 - DNA, 1098 bp, Artificial Sequence
  derived and/or modified sequence
atggcagtcatggcgcctcgaactctggtgcttctactgagcggagcgctagcattaacacagacttgggctggcagccactcaatgcgctacttttacacttctgtgtctcgccctggcaggggagaacctagatttatcgcggtagggtacgtggatgacactcagttcgtgcggttcgactctgacgcagcaagccagcgcatggagccccgagctccttggatagagcaagagggccctgaatactgggacagaaacacccggaatgtgaaggcccattcccagactgatagagcaaacctcgggaccctacgaggttattacaatcagtcagaggatggaagccacactattcaaagaatgtacggttgcgacgtggggcctgacggcaggtttctgagagggtaccaacaagacgcttacgatggcaaagattatatcgctctgaacgaggacttgaggagctggacagctgcagatatggcagcgcagataacgcagcgaaaatgggagaccgctcatgaggctgaacagtggagggcttatctggaaggcagatgtgtagaatggctaagacgctatttggagaatggaaaggagaccctgcaacgtaccgatgcccctaaaacacacatgacacatcacgcagtctccgaccatgaggccactttacgttgttgggccctgagcttctatccagctgaaataacgcttacgtggcagagggacggagaggaccagacgcaggatacagagcttgtcgagacacgtcccgcaggagatggcactttccagaaatgggcgtcagtagttgtcccttccggacaggaacagagatacacttgccacgttcagcatgagggcctgcctaaaccactgaccctgcgctgggagccttcgtcacagcctactatccctatcgtgggaatcattgcaggcctggtcctcttcggcgcagtcatcgccggtgctgtggtcgctgcagtgatgtggaggagaaaatcatcagatagaaagggaggctcctacagccaggcagccagtagcgatagcgctcagggtagtgacatgtccctcaccgcctgtaaagtttag

SEQ ID NO: 84783 - DNA, 1098 bp, Artificial Sequence
  derived and/or modified sequence
atggcagttatggctcccagaacactgctgctcctcctgtccggcgcattggccctcacccaaacgtgggctggcagtcacagtatgagatattttttcacaagtgtgagcaggcctggacgaggggagcccaggtttatcgccgtggggtacgtggatgatacccagttcgttcggttcgactccgacgcagccagccagaagatggagccgcgtgcgccatggatcgaacaggaaggaccagagtactgggatcaggagacacggaatatgaaggcgcactcacagaccgacagggcgaacttgggtacactgaggggatattataaccagtcagaagacgggagccacaccatccaaattatgtatggctgtgatgttggccctgatggacgatttctgagaggatatcgccaggacgcatatgatgggaaagactacatcgccttgaatgaggatctccgctcctggactgccgctgatatggctgcacagattaccaaaaggaagtgggaagccgttcatgccgcagaacagcgcagagtttatctcgaaggaaggtgcgtcgatggactcaggcgctatctcgaaaacggcaaagaaaccctgcagagaactgatccaccaaaaacccatatgacccaccaccctatttcggaccatgaagccacattgcgttgctgggctctgggcttttacccagctgagatcaccctgacctggcagagggacggggaagaccagactcaagatacagaactcgttgaaacaagaccggcaggtgacggaacattccagaagtgggccgctgtggtcgtgccatccggcgaagagcaaaggtatacttgccacgtacagcacgagggtttgcccaaaccactgacattacggtgggagctgtcgtcacaacctaccattcctatagtaggaattatcgccggactggtgctgctcggggctgtgatcaccggcgcagtggtggccgctgtcatgtggcgtagaaaatcttctgatcggaaggggggtagctatacccaagccgcatcgtctgactccgcccagggatccgacgtcagtttaaccgcttgcaaagtgtag

SEQ ID NO: 84784 - DNA, 465 bp, Artificial Sequence
  derived and/or modified sequence
atggctgtgatggccccacgcactctgttgcttcttctgtcaggcgctttggcgctcacacagacctgggccggtagtcactcaatgcgctacttcttcacatctgtcagcagacccggtcgcggtgaaccaaggtttatcgcggtgggctatgtggatgatacacagttcgtgcggtttgactccgatgctgcttcccaaaagatggaaccacgtgctccatggattgagcaggagggacctgagtactgggatcaagagacaagaaatatgaaagcccactcccagacggatcgggcaaacctcgggaccctgcgtggctactataaccagtccgaagatggttctcacacgatacagataatgtacggttgtgatgtgggtcctgacggacgcttcctgagaggatatcgcctccgctcccccagcgcctcgggcagacgttccatgagacgaagttcctag

SEQ ID NO: 84785 - DNA, 1098 bp, Artificial Sequence
  derived and/or modified sequence
atggctgtcatggctcccaggactctgttactccttctgtccggcgcactggctttgacccagacgtgggcaggtagccattctatgaggtactttttcactagcgtgagcaggcctggacgcggagagccacggtttattgctgtgggctatgtggacgacactcagtttgtgagattcgacagcgatgctgcaagccaaaagatggaaccccgagcgccatggatcgagcaggaaggtccggagtactgggaccaggagactaggaatatgaaggcccactcacagactgacagagcaaatctaggcactttgcgcggttattacaatcagtctgaggacggctcgcatactattcagattatgtacgggtgcgatgtggggccagacgggaggttcttgcggggatataggcaggacgcttacgacgggaaagactacatagctcttaatgaggacctgagatcctggactgctgctgacatggcagcccagatcacaaagcggaagtgggaagccgtccatgccgcagagcagcggagagtgtacctggaaggtcgctgcgtggacgggctgaggcgctacttagaaaacggaaaggagacgcttcagcgcactgaccctccaaaaacacatatgactcatcaccccatttccgaccacgaggcaactctgcgctgttgggcactgggcttctatcctgctgagatcaccttaacgtggcagcgcgatggcgaggaccagacacaagatacagagttagtagaaacgcggcctgctggcgacggcacctttcagaaatgggcggctgtggtagtcccctccggggaagaacagagatacacttgtcacgtccaacacgaaggattaccaaagcctttaacccttagatgggagctctcatctcaacccaccattcctattgtcggcattatcgcaggcctcgttcttcttggagctgtaatcaccggagcagtggtggccgctgtgatgtggcggcgaaaaagcagtgatagaaaggggggaagctacacccaggctgccagcagcgattcggcccaagggtccgacgtctctttgaccgcctgtaaagtttag

SEQ ID NO: 84786 - DNA, 1611 bp, Artificial Sequence
  derived and/or modified sequence
gagaagccaatcagtgtcgtcgcggtcgctgttctaaagtccgcacgcacccaccgggactcagattctccccagacgccgaggatggccgtcatggcgccccgaaccctcctcctgctactctcgggggccctggccctgacccagacctgggcgggctcccactccatgaggtatttcttcacatccgtgtcccggcccggccgcggggagccccgcttcatcgccgtgggctacgtggacgacacgcagttcgtgcggttcgacagcgacgccgcgagccagaagatggagccgcgggcgccgtggatagagcaggaggggccggagtattgggaccaggagacacggaatatgaaggcccactcacagactgaccgagcgaacctggggaccctgcgcggctactacaaccagagcgaggacggttctcacaccatccagataatgtatggctgcgacgtggggccggacgggcgcttcctccgcgggtaccggcaggacgcctacgacggcaaggattacatcgccctgaacgaggacctgcgctcttggaccgcggcggacatggcagctcagatcaccaagcgcaagtgggaggcggtccatgcggcggagcagcggagagtctacctggagggccggtgcgtggacgggctccgcagatacctggagaacgggaaggagacgctgcagcgcacggacccccccaagacacatatgacccaccaccccatctctgaccatgaggccaccctgaggtgctgggccctgggcttctaccctgcggagatcacactgacctggcagcgggatggggaggaccagacccaggacacggagctcgtggagaccaggcctgcaggggatggaaccttccagaagtgggcggctgtggtggtgccttctggagaggagcagagatacacctgccatgtgcagcatgagggtctgcccaagcccctcaccctgagatgggagctgtcttcccagcccaccatccccatcgtgggcatcattgctggcctggttctccttggagctgtgatcactggagctgtggtcgctgccgtgatgtggaggaggaagagctcagatagaaaaggagggagttacactcaggctgcaagcagtgacagtgcccagggctctgatgtgtctctcacagcttgtaaagtgtgagacagctgccttgtgtgggactgagaggcaagagttgttcctgcccttccctttgtgacttgaagaaccctgactttgtttctgcaaaggcacctgcatgtgtctgtgttcgtgtaggcataatgtgaggaggtggggagagcaccccacccccatgtccaccatgaccctcttcccacgctgacctgtgctccctctccaatcatctttcctgttccagagaggtggggctgaggtgtctccatctctgtctcaacttcatggtgcactgagctgtaacttcttccttccctattaaaattagaacctgagtataaatttactttctcaaattcttgccatgagaggttgatgagttaattaaaggagaagattcctaaaatttgagagacaaaattaatggaacgcatgagaaccttccagagtcca

SEQ ID NO: 84787 - protein, 929 aa, Artificial Sequence
  derived and/or modified sequence
MKGLSGSRSHHHGVTCDSACDSLSHHSDRKPYLLSPVEHHPADHPYYTQRNSFQAECVGPFSDPLASSTFPRRHYTSQQELKDECALVPRTLATKANRIPANLLDQFERQLPLSRDGYHTLQYKRTAVEHRSDSPGRIRHLVHSVQKLFTKSHSLEGPSKGSVNGGKASPDEAQAARYGKRSKSKERRAEPKARPSTSPGWWSSDDNLDGDMCIYHAPSGVMTMGRCPDRSASQYFLEAYNTISEQAVKASRSNNDVKCSTCANLPVSLDTPLLKKSAWSSTLTVSRAREVYQKASVNMDQAMVKSESCQQERSCQYLQVPQDEWTGYTPRGKDDEIPCRRMRSGSYIKAMGDEDSGDSDTSPKPSPKVAARRESYLKATQPSLTELTTLKISNEHSPKLQIRSHSYLRAVSEVSINRSLDSLDPAGLLTSPKFRSRNESYMRAMSTISQVSEMEVNGQFESVCESVFSELESQAVEALDLPMPGCFRMRSHSYVRAIEKGCSQDDECVSLRSSSPPRTTTTVRTIQSSTVSSCITTYKKTPPPVPPRTTTKPFISITAQSSTESAQDAYMDGQGQRGDIISQSGLSNSTESLDSMKALTAAIEAANAQIHGPASQHMGNNTATVTTTTTIATVTTEDRKKDHFKKNRCLSIGIQVDDAEEPDKTGENKAPSKFQSVGVQVEEEKCFRRFTRSNSVTTAVQADLDFHDNLENSLESIEDNSCPGPMARQFSRDASTSTVSIQGSGNHYHACAADDDFDTDFDPSILPPPDPWIDSITEDPLEAVQRSVCHRDGHWFLKLLQAERDRMEGWCQQMEREERENNLPEDILGKIRTAVGSAQLLMAQKFYQFRELCEENLNPNAHPRPTSQDLAGFWDMLQLSIENISMKFDELHQLKANNWKQMDPLDKKVEQCRFCMVHLKTCTNTGQSK

SEQ ID NO: 84788 - DNA, 2790 bp, Artificial Sequence
  derived and/or modified sequence
atgaagggcctgagcggcagcagaagccaccaccacggcgtgacctgcgacagcgcctgcgacagcctgagccaccacagcgacagaaagccctacctgctgagccccgtggagcaccaccccgccgaccacccctactacacccagagaaacagcttccaggccgagtgcgtgggccccttcagcgaccccctggccagcagcaccttccccagaagacactacaccagccagcaggagctgaaggacgagtgcgccctggtgcccagaaccctggccaccaaggccaacagaatccccgccaacctgctggaccagttcgagagacagctgcccctgagcagagacggctaccacaccctgcagtacaagagaaccgccgtggagcacagaagcgacagccccggcagaatcagacacctggtgcacagcgtgcagaagctgttcaccaagagccacagcctggagggccccagcaagggcagcgtgaacggcggcaaggccagccccgacgaggcccaggccgccagatacggcaagagaagcaagagcaaggagagaagagccgagcccaaggccagacccagcaccagccccggctggtggagcagcgacgacaacctggacggcgacatgtgcatctaccacgcccccagcggcgtgatgaccatgggcagatgccccgacagaagcgccagccagtacttcctggaggcctacaacaccatcagcgagcaggccgtgaaggccagcagaagcaacaacgacgtgaagtgcagcacctgcgccaacctgcccgtgagcctggacacccccctgctgaagaagagcgcctggagcagcaccctgaccgtgagcagagccagagaggtgtaccagaaggccagcgtgaacatggaccaggccatggtgaagagcgagagctgccagcaggagagaagctgccagtacctgcaggtgccccaggacgagtggaccggctacacccccagaggcaaggacgacgagatcccctgcagaagaatgagaagcggcagctacatcaaggccatgggcgacgaggacagcggcgacagcgacaccagccccaagcccagccccaaggtggccgccagaagagagagctacctgaaggccacccagcccagcctgaccgagctgaccaccctgaagatcagcaacgagcacagccccaagctgcagatcagaagccacagctacctgagagccgtgagcgaggtgagcatcaacagaagcctggacagcctggaccccgccggcctgctgaccagccccaagttcagaagcagaaacgagagctacatgagagccatgagcaccatcagccaggtgagcgagatggaggtgaacggccagttcgagagcgtgtgcgagagcgtgttcagcgagctggagagccaggccgtggaggccctggacctgcccatgcccggctgcttcagaatgagaagccacagctacgtgagagccatcgagaagggctgcagccaggacgacgagtgcgtgagcctgagaagcagcagcccccccagaaccaccaccaccgtgagaaccatccagagcagcaccgtgagcagctgcatcaccacctacaagaagacccccccccccgtgccccccagaaccaccaccaagcccttcatcagcatcaccgcccagagcagcaccgagagcgcccaggacgcctacatggacggccagggccagagaggcgacatcatcagccagagcggcctgagcaacagcaccgagagcctggacagcatgaaggccctgaccgccgccatcgaggccgccaacgcccagatccacggccccgccagccagcacatgggcaacaacaccgccaccgtgaccaccaccaccaccatcgccaccgtgaccaccgaggacagaaagaaggaccacttcaagaagaacagatgcctgagcatcggcatccaggtggacgacgccgaggagcccgacaagaccggcgagaacaaggcccccagcaagttccagagcgtgggcgtgcaggtggaggaggagaagtgcttcagaagattcaccagaagcaacagcgtgaccaccgccgtgcaggccgacctggacttccacgacaacctggagaacagcctggagagcatcgaggacaacagctgccccggccccatggccagacagttcagcagagacgccagcaccagcaccgtgagcatccagggcagcggcaaccactaccacgcctgcgccgccgacgacgacttcgacaccgacttcgaccccagcatcctgcccccccccgacccctggatcgacagcatcaccgaggaccccctggaggccgtgcagagaagcgtgtgccacagagacggccactggttcctgaagctgctgcaggccgagagagacagaatggagggctggtgccagcagatggagagagaggagagagagaacaacctgcccgaggacatcctgggcaagatcagaaccgccgtgggcagcgcccagctgctgatggcccagaagttctaccagttcagagagctgtgcgaggagaacctgaaccccaacgcccaccccagacccaccagccaggacctggccggcttctgggacatgctgcagctgagcatcgagaacatcagcatgaagttcgacgagctgcaccagctgaaggccaacaactggaagcagatggaccccctggacaagaaggtggagcagtgcagattctgcatggtgcacctgaagacctgcaccaacaccggccagagcaagtag

SEQ ID NO: 84789 - DNA, 3525 bp, Artificial Sequence
  derived and/or modified sequence
agcctccgctccagaggcgagcgctgcgcttcgggcgccgcaatctccaggacacggcctcgcggacaccttccgcctcggggaatcggcagcataggcggcgcgaacggccgccgccgcctcggctcctctctcgagtccttcccgtcacctcgctgagagccggtcctggtcgcggggacatctctctccttcctccgaggctcgtgggaccaacggacggacgcagccagcgagggccggactgcgggacgcggccagagcagttgaacatcagatacccagagtgacatcaggttaaaaaaaagcctgcaatttggatcttttcctgactcggaagcaaggaaaatggacaattgataatcaaaggctaaatctcttctgggatccactgaatgccactagagggtctgctcgagagaattcctgattgaatgacaacggcgctaagaacaatccctgcccaagacgggtctggagcctgacttccgggtgtccatgaccctggcggctgcttccggtccgccatgaaagggctatcaggcagccgcagccatcaccacggggtcacctgcgactcggcctgtgactcgctgtcgcaccactccgaccgcaagccctacctgctgagcccagtggagcaccaccccgcagaccacccatactacacccagcggaactccttccaggctgagtgcgtgggccccttcagcgacccgctggccagcagcaccttcccccgcaggcactacacctcgcagcaagagctgaaggacgagtgtgccctggtgccccgcaccctggccaccaaggcgaaccgcatccccgccaacctgctggaccagttcgagcggcagctgccactcagccgcgatggctatcacaccctgcagtacaagcgcacggccgtggagcaccgcagcgacagccccggccgcatccgccacctggtgcactcggtccagaagctcttcaccaagtcgcactccctggaggggccgtccaagggcagcgtcaacgggggcaaggccagccctgacgaggcgcaggcggcgcgctatggcaaacgcagcaagagcaaggagcggcgcgcggagcccaaggcccggcccagcacctccccgggctggtggagctcggacgacaacctggatggtgacatgtgcatctaccacgccccctcgggcgtgatgaccatgggcaggtgccccgaccgctcggcctcacagtacttcctggaggcctacaacaccatcagcgagcaggcggtgaaggcctcccggagcaacaacgacgtcaagtgctccacctgcgccaacctgccggtcagcctggacaccccgctgctgaagaagagcgcctggtcctccacgctcaccgtgagccgggcccgggaggtttaccagaaggcctcggtgaacatggaccaggccatggtgaagtccgagtcgtgtcagcaagaacgctcctgccagtacctgcaggttccacaagatgaatggacagggtacaccccacgaggtaaagatgatgaaattccatgccgaagaatgcggagtggcagttatatcaaggccatgggggatgaagacagtggagactcagacacgagtcctaagccttctccaaaagttgctgcgcggagagaaagctatctcaaggctactcagccatcccttacagaactcaccacactcaaaatctccaatgaacactcacccaaactccagatccggagtcatagttacctgagggcagtgagtgaagtctccatcaaccggagcctggacagcctggaccctgcaggcttgctcacatcaccaaagttccgctccaggaatgagagctacatgcgagccatgagcaccatcagccaggtgagcgagatggaagtgaacgggcagttcgagtccgtgtgcgagtccgtgttcagcgagctggagtcgcaggccgtggaagcgctggacctgcccatgcccggctgcttccgcatgcggagccacagctatgtgcgggccattgagaaaggctgctcccaggacgacgagtgcgtgtccctgaggtcgtcctcgccgccgcgcaccaccaccaccgttaggaccatccagagcagcacggtgtcatcttgcattacaacatataagaagacaccacctccagtcccacccagaactaccacgaaacctttcatttctatcacagcccagagtagcacagagtcagcccaggatgcctacatggacggacagggccagcgaggagatattatcagccagtctggactcagcaactccaccgagagcctggacagtatgaaggctctgacagccgccatcgaagctgcaaacgcccagatccatggccctgccagtcaacacatgggcaataacactgccaccgtcaccaccacgactaccatagccaccgtcaccacggaggacaggaagaaggaccactttaagaaaaatcgatgcctgtctatcgggatacaggtggatgatgctgaagaacctgacaaaacaggggagaataaagcacccagtaagttccagtccgtgggagtgcaagtagaagaagagaagtgcttccgcaggttcactcgatccaacagtgtgacgacagcagtacaggccgacctggacttccatgataatctggaaaattctctggaatctatagaggacaattcgtgtcctggccccatggccagacagttctcccgcgatgccagcacctccacagtcagcattcagggctcaggaaaccattaccatgcctgtgccgccgatgatgactttgacacggattttgacccctctattctgcctcctccggacccctggattgactctatcactgaagaccctctggaggccgtgcaaaggtcagtgtgccaccgggatggccactggttcctgaagcttctccaggcagagcgagaccgcatggaggggtggtgtcaacagatggagcgggaagaacgggaaaacaacctgcccgaagacattctaggaaaaatccgaaccgcagtgggcagtgcccaacttctcatggcccagaaattctaccagttcagagaactgtgtgaagaaaacctgaatcctaatgctcatccaagacccacctcccaggatttggcggggttttgggacatgctgcagttgtccatagaaaatattagtatgaaatttgatgaacttcatcagttaaaggccaataattggaaacagatggatcctcttgacaagaaggtagaacaatgtagattttgtatggttcatttaaaaacctgcacaaacactggacagtctaaataggcttctgcattcagtcctgctgtttacaatgtgaaatggagctgatatcatattaatttcattgtaatgacaatgtttacatagtaatcatttgggatattatctgtaatatgtttcaggcatatttttaaagaaaaacctgtctttgtgaattggaaaatgggaatgtggctttttttgttaattaaactttaagttaaaccatttt

SEQ ID NO: 84790 - DNA, 3267 bp, Artificial Sequence
  derived and/or modified sequence
cagagcagttgaacatcagatacccagagtgacatcaggttaaaaaaaagcctgcaatttggatcttttcctgactcggaagcaaggaaaatggacaattgataatcaaaggctaaatctcttctgggatccactgaatgccactagagggtctgctcgagagaattcctgattgaatgacaacggcgctaagaacaatccctgcccaagacgggtctggagcctgacttccgggtgtccatgaccctggcggctgcttccggtccgccatgaaagggctatcaggcagccgcagccatcaccacggggtcacctgcgactcggcctgtgactcgctgtcgcaccactccgaccgcaagccctacctgctgagcccagtggagcaccaccccgcagaccacccatactacacccagcggaactccttccaggctgagtgcgtgggccccttcagcgacccgctggccagcagcaccttcccccgcaggcactacacctcgcagcaagagctgaaggacgagtgtgccctggtgccccgcaccctggccaccaaggcgaaccgcatccccgccaacctgctggaccagttcgagcggcagctgccactcagccgcgatggctatcacaccctgcagtacaagcgcacggccgtggagcaccgcagcgacagccccggccgcatccgccacctggtgcactcggtccagaagctcttcaccaagtcgcactccctggaggggccgtccaagggcagcgtcaacgggggcaaggccagccctgacgaggcgcaggcggcgcgctatggcaaacgcagcaagagcaaggagcggcgcgcggagcccaaggcccggcccagcacctccccgggctggtggagctcggacgacaacctggatggtgacatgtgcatctaccacgccccctcgggcgtgatgaccatgggcaggtgccccgaccgctcggcctcacagtacttcctggaggcctacaacaccatcagcgagcaggcggtgaaggcctcccggagcaacaacgacgtcaagtgctccacctgcgccaacctgccggtcagcctggacaccccgctgctgaagaagagcgcctggtcctccacgctcaccgtgagccgggcccgggaggtttaccagaaggcctcggtgaacatggaccaggccatggtgaagtccgagtcgtgtcagcaagaacgctcctgccagtacctgcaggttccacaagatgaatggacagggtacaccccacgaggtaaagatgatgaaattccatgccgaagaatgcggagtggcagttatatcaaggccatgggggatgaagacagtggagactcagacacgagtcctaagccttctccaaaagttgctgcgcggagagaaagctatctcaaggctactcagccatcccttacagaactcaccacactcaaaatctccaatgaacactcacccaaactccagatccggagtcatagttacctgagggcagtgagtgaagtctccatcaaccggagcctggacagcctggaccctgcaggcttgctcacatcaccaaagttccgctccaggaatgagagctacatgcgagccatgagcaccatcagccaggtgagcgagatggaagtgaacgggcagttcgagtccgtgtgcgagtccgtgttcagcgagctggagtcgcaggccgtggaagcgctggacctgcccatgcccggctgcttccgcatgcggagccacagctatgtgcgggccattgagaaaggctgctcccaggacgacgagtgcgtgtccctgaggtcgtcctcgccgccgcgcaccaccaccaccgttaggaccatccagagcagcacggtgtcatcttgcattacaacatataagaagacaccacctccagtcccacccagaactaccacgaaacctttcatttctatcacagcccagagtagcacagagtcagcccaggatgcctacatggacggacagggccagcgaggagatattatcagccagtctggactcagcaactccaccgagagcctggacagtatgaaggctctgacagccgccatcgaagctgcaaacgcccagatccatggccctgccagtcaacacatgggcaataacactgccaccgtcaccaccacgactaccatagccaccgtcaccacggaggacaggaagaaggaccactttaagaaaaatcgatgcctgtctatcgggatacaggtggatgatgctgaagaacctgacaaaacaggggagaataaagcacccagtaagttccagtccgtgggagtgcaagtagaagaagagaagtgcttccgcaggttcactcgatccaacagtgtgacgacagcagtacaggccgacctggacttccatgataatctggaaaattctctggaatctatagaggacaattcgtgtcctggccccatggccagacagttctcccgcgatgccagcacctccacagtcagcattcagggctcaggaaaccattaccatgcctgtgccgccgatgatgactttgacacggattttgacccctctattctgcctcctccggacccctggattgactctatcactgaagaccctctggaggccgtgcaaaggtcagtgtgccaccgggatggccactggttcctgaagcttctccaggcagagcgagaccgcatggaggggtggtgtcaacagatggagcgggaagaacgggaaaacaacctgcccgaagacattctaggaaaaatccgaaccgcagtgggcagtgcccaacttctcatggcccagaaattctaccagttcagagaactgtgtgaagaaaacctgaatcctaatgctcatccaagacccacctcccaggatttggcggggttttgggacatgctgcagttgtccatagaaaatattagtatgaaatttgatgaacttcatcagttaaaggccaataattggaaacagatggatcctcttgacaagaaggtagaacaatgtagattttgtatggttcatttaaaaacctgcacaaacactggacagtctaaataggcttctgcattcagtcctgctgtttacaatgtgaaatggagctgatatcatattaatttcattgtaatgacaatgtttacatagtaatcatttgggatattatctgtaatatgtttcaggcatatttttaaagaaaaacctgtctttgtgaattggaaaatgggaatgtggctttttttgttaattaaactttaagttaaaccatttt

SEQ ID NO: 84791 - DNA, 2790 bp, Artificial Sequence
  derived and/or modified sequence
atgaagggtttatccgggagtcgatctcatcaccacggcgttacgtgtgactcagcctgcgattccctctcccaccacagcgaccggaaaccatacctcctctcgccggttgaacaccatccagccgatcacccttactacacacagcggaattcatttcaggctgagtgtgtgggccccttcagcgacccactcgcgagttcaacgttcccacggcgtcactacacttcacagcaagagctgaaagacgaatgtgccctggtgccacggactctcgccactaaagccaaccgaattcctgcaaatttactcgaccagttcgaacgtcaactgccactcagtagagatggctaccacactcttcagtataagagaaccgccgtagagcaccgtagtgacagccccggcagaatcaggcacctggtccacagtgtgcagaagctttttaccaagagccattccttagagggaccctctaagggaagtgtaaatggtggaaaagcctccccagatgaagcacaagccgcgagatacggcaaaagaagcaagtcaaaagaaaggcgagcagaacctaaggcaagaccatccacaagtcccggttggtggtcttcagatgacaacctggatggggatatgtgcatttatcacgctccttccggtgtcatgacaatgggcaggtgtcctgacagatcagcaagccagtacttcctcgaagcctacaacacgatttctgaacaggcagtgaaggcgtccaggtctaataatgatgtgaaatgctcaacctgtgccaatttaccggtgagtctggatacgcctcttctcaagaaaagcgcctggtcgagcaccctgactgtgagccgcgcgcgggaggtgtaccagaaggcaagcgttaacatggatcaggcaatggttaagtctgaaagctgtcagcaggagcgctcttgtcaatacctgcaggtacctcaagatgaatggaccggctatacccctcgggggaaggacgacgagattccctgtcgccggatgcgttcagggagttacattaaggccatgggagacgaggactccggggatagtgatacttctccaaaaccttcacccaaggtggcagccaggagggaaagttacctcaaggccactcaaccaagtctaaccgaactgacaacactcaaaatttctaatgagcacagccctaagctccaaattcgctcacattcatatctgagagccgttagcgaggtgtccattaatcggtcgctcgattcgctggaccctgcggggctgctaacatcacccaagtttagaagcaggaatgagtcttacatgcgagccatgtcaacaataagccaggtgagcgagatggaagtcaatggacagtttgagagcgtatgtgaatccgtgttctccgagctagaaagccaggccgtggaggcccttgatctgcccatgccaggctgcttccgtatgagaagtcattcgtacgttcgggccattgaaaagggttgttcgcaggatgacgagtgtgtcagcttaagatcctcctccccccccagaacaactacaaccgtaagaacaatccagagtagcactgtgagctcttgcatcacgacctacaaaaaaactcctccaccagtacccccgcgcacgacaacaaaacccttcatttcaattactgcccaatcctctaccgaaagcgcgcaggacgcttatatggacgggcaggggcaacgtggtgatattatctcccaaagcggcctaagtaattcgactgaatcactggattccatgaaagctctgactgccgcaatcgaggccgccaatgctcagattcacggacctgcttctcagcacatgggtaataataccgcgaccgtgacgacaaccacaacgattgctacggtcactaccgaggatagaaaaaaagaccatttcaaaaagaatcgctgtctgtctattggtatacaggtggacgatgccgaggagccggataaaactggcgagaataaggccccatcgaaattccagtccgtgggggtgcaggttgaggaagagaaatgcttcaggcggttcaccaggtctaattccgtgactactgccgtacaggccgacttagattttcacgacaaccttgagaactccctggaatccatcgaggataacagctgtcccggaccaatggccagacaattttctagggacgcatcaacaagtaccgtatccatccagggttccggaaaccattatcacgcatgtgcagctgatgacgatttcgatactgacttcgacccatccatcctcccaccacctgacccatggatagatagtatcaccgaagatccactggaagctgtgcagaggagcgtctgccaccgagatgggcactggtttttgaagctactccaggccgagagggatagaatggaaggttggtgtcaacagatggagagagaagaacgagagaataacctgccggaggatattctgggaaagatcaggactgcagttggatcagcacagctcctgatggcccagaagttctaccaattcagggagctgtgcgaggagaacctgaatcctaacgctcacccgcggcctaccagccaggacctggccggcttctgggacatgctgcaactatctattgagaatatttcaatgaaatttgacgagttacaccagctgaaagccaacaattggaagcagatggatcccttggataagaaagtcgagcagtgcagattttgcatggtgcatctcaaaacttgcaccaataccggtcagagcaaatag

SEQ ID NO: 84792 - DNA, 2790 bp, Artificial Sequence
  derived and/or modified sequence
atgaagggactctcaggctctagatcccaccatcatggtgtcacctgtgattccgcttgtgattcactgagccaccacagcgaccgaaagccatacctcctttctcctgtagagcaccaccccgcggatcacccctattacacacagaggaactcattccaggccgagtgtgtgggacctttttccgaccccttagcaagtagtacatttcctagaaggcattacacaagtcagcaggaattgaaggacgagtgcgccttagttcctcgtacactcgctacgaaagccaatcgtatccctgctaatctgctcgaccagtttgaaaggcagctgccactctccagggatggttatcatactcttcagtataagaggacagctgtggaacatcggagtgacagccccggccgcatacgccatttagtgcactcagtgcaaaagctattcactaagtcccattccttggaggggccttctaagggttctgtgaatgggggtaaagcaagcccagacgaggcccaagcggcaaggtacggcaaacgttcaaagtcaaaagagaggcgagctgagcctaaggcccggcccagcacgtcccccggttggtggtctagcgacgacaatctggacggggatatgtgtatctatcacgctccctccggtgtaatgacaatggggcggtgccccgatcggagcgcatcccagtactttttggaagcctacaatactatatctgaacaggccgtgaaggcgtctaggagtaacaatgacgtaaagtgtagcacatgcgcgaatctgccagtatcactggataccccgctgttaaaaaagtcagcttggtcttctactctcaccgtgtcccgtgccagggaggtgtatcagaaagcatcagtcaacatggatcaggccatggttaaatccgagagctgccagcaggagcgttcctgccagtatcttcaggtcccccaagacgaatggactggatacacaccacggggaaaggacgacgaaatcccgtgcaggagaatgcgttcaggtagctatattaaggcaatgggggacgaggattctggcgactccgatacttcccccaaaccgtcgcccaaggtggctgcgcgccgcgagtcctaccttaaggccacacagccttcacttaccgagctgacaaccttgaagatttctaatgagcatagccctaaactgcagatccggtcacatagttatttgcgggccgtgagcgaagtgtctatcaacaggtccttggattctttagatccggccggattacttaccagccccaagtttagatcacgtaacgagagctatatgagggcgatgagcaccatctcccaagtaagcgaaatggaggtaaacggccagttcgaaagcgtctgcgagtcggtcttctccgagctggagtcccaggctgtcgaagcactggacctgccgatgccaggctgtttcaggatgcgtagccacagctatgtgcgggcaattgagaagggctgctctcaagacgacgaatgcgtaagtctgcgatcctcctctcctccccggacaaccaccaccgttcgaacaatccagtcctccactgtctctagctgcataaccacctacaagaagacgccaccgcccgtccctcctaggacaaccaccaagccattcatctcaataaccgcccagtctagtactgagtccgcgcaggacgcctacatggatgggcagggccagcggggggatatcatctctcagtccggcctgagtaatagcaccgagtctctggattccatgaaggcacttactgccgccatcgaggctgcaaatgcccaaatccatggcccggcatcccagcacatgggtaacaatacagccacggtcacaaccacaacaaccattgctacagtcacaactgaagaccgaaagaaggatcattttaagaagaatcggtgtttatcaattggaattcaggtcgatgatgccgaagagccagataagaccggagagaataaagctccttcaaaattccagtccgtgggtgtgcaggtcgaggaggaaaaatgttttcgtcgattcactagaagcaactcagtgactaccgcggtgcaggccgacctcgacttccatgacaaccttgagaatagcctggagtcaatcgaggacaatagctgtccgggtccaatggctaggcagttcagccgtgacgcaagtacgtccacagtgagtatccaggggagcggcaaccactaccacgcatgtgccgctgatgacgatttcgatactgatttcgatccctctatcctgcctccaccggatccctggatcgattcaatcacagaggacccacttgaggctgtgcagagatcagtgtgccacagggatggacactggttccttaagctcttgcaagccgaacgcgacaggatggaggggtggtgccagcaaatggaacgggaggagagggagaacaacctgcccgaggacatcctggggaagatcagaacagctgtgggtagcgcccaactccttatggctcaaaagttttaccagttccgggagctgtgcgaggaaaacctgaaccctaatgcacacccccggcccacgtcccaggatttggccggcttttgggacatgctgcaactcagtatcgaaaacatctctatgaagttcgacgaactccatcaactgaaggccaacaattggaagcagatggatccactggataaaaaagtcgagcagtgtcggttctgcatggtgcacttgaagacatgcacaaacaccggtcagtcaaagtag

SEQ ID NO: 84793 - DNA, 2790 bp, Artificial Sequence
  derived and/or modified sequence
atgaagggcctgagcggcagccgcagccaccaccacggcgtgacctgtgacagcgcctgtgacagcctgagccaccacagcgacaggaagccctacctgctgagccctgtggagcaccaccctgctgaccacccctactacacccagaggaacagcttccaggccgagtgtgtgggccccttcagtgaccccctggccagcagcaccttcccccggcggcactacaccagccagcaggagctgaaggatgaatgtgccctggtgcccaggaccctggccaccaaggccaaccgcatcccagccaacctgctggaccagtttgagcggcagctgcccctgagcagagatggctaccacaccctgcagtacaagaggacagctgtggagcacagaagtgacagccctggccgcatccgccacctggtgcacagcgtgcagaagctgttcaccaagagccacagcctggagggccccagcaagggctctgtgaatggaggcaaggccagcccagatgaggcccaggccgcccgctatggcaagaggagcaagagcaaggagaggagagctgagcccaaggcccggcccagcaccagccctggctggtggagcagtgatgacaacctggatggagacatgtgcatctaccacgcccccagcggcgtgatgaccatgggccgctgcccagacagaagtgccagccagtacttcctggaggcctacaacaccatcagcgagcaggccgtgaaggccagccgcagcaacaatgatgtgaagtgcagcacctgtgccaacctgcctgtgtccctggacacccccctgctgaagaagagcgcctggagcagcaccctgactgtgtcccgggcccgggaggtgtaccagaaggcctctgtgaacatggaccaggccatggtgaagtctgagagctgccagcaggagaggagctgccagtacctgcaggtgccccaggatgagtggacaggctacaccccccggggcaaggatgatgagatcccctgcaggaggatgaggagcggcagctacatcaaggccatgggagatgaggacagcggggacagcgacaccagccccaagcccagccccaaggtggccgcccggcgggagagctacctgaaggccacccagcccagcctgacagagctgaccaccctgaagatcagcaatgagcacagccccaagctgcagatccgcagccacagctacctgcgggctgtgtctgaggtgtccatcaacagaagcctggacagcctggaccctgctggcctgctgaccagccccaagttccgcagcagaaatgaaagctacatgagggccatgagcaccatcagccaggtgtctgagatggaggtgaatggccagtttgagagcgtgtgtgagagcgtcttcagcgagctggagagccaggccgtggaggccctggacctgcccatgcctggctgcttcaggatgaggagccacagctatgtgcgggccatcgagaagggctgcagccaggatgatgaatgtgtgtccctgcggagcagcagcccccccaggaccaccaccaccgtgaggaccatccagagcagcacagtgagcagctgcatcaccacctacaagaagaccccacctcctgtgccccccaggaccaccaccaagcccttcatcagcatcacagcccagagcagcacagaaagtgcccaggatgcctacatggatggccagggccagagaggagacatcatcagccagagcggcctgagcaacagcacagagagcctggacagcatgaaggccctgacagctgccattgaagctgccaatgcccagatccacggccctgccagccagcacatgggcaacaacacagccaccgtgaccaccaccaccaccatcgccaccgtgaccacagaggacaggaagaaggaccacttcaagaagaaccgctgcctgagcatcggcatccaggtggatgatgctgaggagccagacaagacaggagagaacaaggcccccagcaagttccagagcgtgggcgtgcaggtggaggaggagaagtgcttccgccgcttcaccaggagcaacagcgtgaccacagctgtgcaggccgacctggacttccatgacaacctggagaacagcctggagagcattgaggacaacagctgccccggccccatggcccggcagttcagcagagatgccagcaccagcacagtgtccatccagggcagcggcaaccactaccacgcctgtgccgcagatgatgactttgacacagactttgaccccagcatcctgcccccaccagacccctggattgacagcatcacagaggaccccctggaggccgtgcagaggtctgtgtgccacagagatggccactggttcctgaagctgctgcaggccgagcgggacaggatggagggctggtgccagcagatggagcgggaggagcgggagaacaacctgcctgaggacatcctgggcaagatcagaacagctgtgggcagcgcccagctgctgatggcccagaagttctaccagttccgggagctgtgtgaggagaacctgaaccccaatgcccacccccggcccaccagccaggacctggccggcttctgggacatgctgcagctgagcattgagaacatctccatgaagtttgatgagctgcaccagctgaaggccaacaactggaagcagatggaccccctggacaagaaggtggagcagtgccgcttctgcatggtgcacctgaagacctgcaccaacacaggccagagcaagtag

SEQ ID NO: 84794 - DNA, 2790 bp, Artificial Sequence
  derived and/or modified sequence
atgaagggcctgagcggcagccggagccaccaccacggcgtgacctgcgactctgcctgcgacagtctgagccatcacagcgaccgcaagccctatctgctttcacctgttgagcaccaccccgcagaccatccgtattatacacagaggaactctttccaggcagagtgcgtcgggcctttttctgatccgctggcatcaagtacttttcccaggcggcattatacttcacaacaagagctcaaagacgagtgtgccctggtgcctcgaaccctagctactaaagccaatcggataccggccaaccttctggaccaattcgagaggcagctgcctctttcccgggacggctaccatacgcttcagtacaagagaacagccgtggaacatagaagtgatagcccaggcagaattaggcacctggttcacagtgtacagaagttgttcaccaagagccattccctcgagggaccttccaaagggtcagttaacgggggtaaggcctccccggacgaagcccaggctgccagatacggaaaacggtctaaaagtaaggaaaggcgcgccgagcctaaggcccgaccaagcacttccccgggatggtggtcgtccgacgataatttagatggtgatatgtgtatctaccacgctccaagcggggttatgactatgggacggtgtcctgatagatcagcgagtcagtattttcttgaggcctacaacacaatctccgagcaagctgttaaggccagtcgcagcaacaatgacgttaagtgcagcacatgcgcgaacctgcccgtgtcgctggacacaccactgttgaaaaaatccgcgtggtcctcaacattaactgtcagtcgtgcccgagaggtgtatcagaaagccagtgtcaacatggatcaggcaatggtcaaatccgagagttgtcagcaggagagaagttgtcagtacctgcaagtgcctcaagacgaatggacagggtacaccccaagggggaaggacgatgaaattccctgtcgccgcatgaggtcaggtagttacattaaagcaatgggagatgaagacagcggggacagtgacacatctcccaaacccagcccaaaggtagctgcacgaagagaaagctacctaaaggcaacgcagccgagcttaactgaacttacgacattaaagatctcaaacgaacactcccctaagctgcagatcagatcacattcttatctccgggccgtcagcgaggttagcatcaatagaagtctggacagtctcgaccccgccggcctgctaacctcgcctaagttccgcagtcggaatgagtcctacatgcgggctatgagtaccatctcccaggtgtctgagatggaggtcaacggccagtttgagagcgtttgtgaaagcgtcttttccgaactcgagtcccaggcagtcgaagccctagatcttcccatgccaggctgtttcagaatgaggagtcactcctatgtgagagctattgaaaagggttgtagccaggatgatgagtgcgtttcactgagatcaagctctccacctcgcactaccacaactgtaagaaccatccagtcttccactgtgtccagctgcatcaccacttataaaaaaacccccccccctgtccccccccgcactacgaccaaacctttcattagtatcacagctcagagcagcaccgagtcagcacaagatgcctacatggacggccagggacagaggggcgatattatatcccaaagcgggttgagcaactcaactgagagtctggattctatgaaagctctcacagctgccatagaggccgccaatgcgcagatccacgggccagcgtctcagcatatgggcaataacacagccaccgtgacaacaacaaccaccatcgcgacggtgaccactgaggataggaaaaaagaccatttcaaaaaaaaccgttgtctttccatcggcatacaggttgatgacgccgaagaaccggacaagacgggcgagaacaaggctcccagtaaattccaatcagtcggggtacaggttgaagaggagaaatgcttccgtcgattcactaggagcaactccgtgaccactgctgtccaggccgacctggatttccacgacaatctggagaattcactggagtctattgaagataattcgtgcccaggtccaatggctagacaattctctcgggacgcatcaacctccactgttagcatccaagggtctggcaatcactaccacgcttgcgccgcagatgatgactttgatacggatttcgatccatcaatactgccacctcctgacccctggatagatagcattaccgaagaccccctggaagctgtccagcgctctgtatgccaccgggatggacattggtttctgaagttgctccaggcggaacgggaccgaatggaaggctggtgccagcagatggaaagggaggagagggagaacaatttgccggaggatatcctgggaaagatccgaaccgcggttgggtccgcacagctgctgatggcacaaaagttttatcagtttcgggagctgtgcgaggaaaatcttaacccaaatgcccacccaagacccaccagtcaggatctggctgggttctgggatatgctgcaattatcgatcgagaacatcagcatgaagttcgacgagctgcaccagctgaaggccaataactggaagcagatggatcctttagataagaaggtcgaacagtgtcggttttgtatggtgcacctgaaaacctgcactaacaccggtcagtccaaatag

SEQ ID NO: 84795 - DNA, 2790 bp, Artificial Sequence
  derived and/or modified sequence
atgaagggcctgagcggcagccggagccaccaccacggcgtgacctgtgactctgcatgcgattccctctctcatcatagcgacaggaagccttatctgctctctcccgttgagcaccaccctgccgaccatccatattatacgcagcgcaactcatttcaggccgagtgcgtgggtccttttagcgatccactggccagcagcacattccctaggcgccactacaccagccagcaagagctaaaggatgagtgtgccctggtgccccgcactttggcgaccaaagcaaaccggatccccgctaatctcctggaccagttcgagaggcagctacccttgagtagggacggttatcataccctgcaatacaagcgcaccgctgtcgaacaccgttcagacagtccggggcgcatccgtcatttagtacatagtgtgcagaaactattcaccaaatcccacagcctcgaaggcccaagtaaaggcagcgtgaatggagggaaagcaagccccgacgaagcccaagccgcaaggtatggcaaaagatctaagagcaaggaacggagagctgagcccaaagcccgcccatccacctctccaggctggtggtccagtgacgataacctggatggagacatgtgtatctatcacgctccctccggggtcatgacaatgggtcggtgccctgaccggagtgcatcccagtactttttagaggcttataatacaattagtgaacaggccgtgaaagcatccaggtcaaacaatgatgtgaaatgctccacttgcgccaacttgccagtgtccctggatactccactattaaagaaatcagcgtggagctccaccttaaccgtgtcccgggcacgagaggtgtaccagaaggccagtgttaatatggaccaggctatggttaaatctgagtcctgccagcaagaaagaagctgtcagtacctgcaggtgccacaggacgagtggactggctacacaccaagaggtaaagatgatgagattccttgtaggcggatgcggtctgggtcctatatcaaggcgatgggggacgaagatagtggcgactccgacacatccccaaaacctagcccaaaagtggctgcgagaagggagagttacctcaaggccacgcagcccagtttaactgagctgactaccctcaagattagcaacgaacattcgcctaagttgcagatacggagccacagctatctccgtgcagtaagtgaggtgtctattaatcggtctctcgattcattggaccctgccgggctgttgaccagcccgaagtttcgatctcgcaacgaatcttatatgcgggccatgtccactattagtcaggtctctgagatggaggtgaacggacagtttgaaagcgtttgcgagtccgtgttcagcgagctggagagccaggccgtggaggccctggacctgcctatgccaggctgttttcgcatgcgatcacattcttatgtccgggccatagaaaagggctgttcccaagatgatgaatgtgtgtccctgcgctcttcctcaccgcctaggaccacaacgacggtgagaaccattcagtccagcacagtttcctcctgcataaccacctacaagaagacccctcctcctgtgccgccccgcaccaccaccaaaccgtttattagcatcaccgcccagtcatctacagaaagcgcacaggacgcatatatggatgggcagggacaaagaggggatatcatcagccagagcggcctgtcgaactccaccgaatctctggatagcatgaaagcactcactgccgctattgaagctgctaatgcccagatccacggtccagcatcccaacatatgggtaataacaccgcaacagtaacaacaactaccacgattgcgacagtcaccacggaagaccgaaagaaagaccattttaaaaaaaatcggtgtttgagtatcggcatccaggttgatgacgccgaagagccagataaaacaggggaaaataaagctcccagcaaatttcagtcagttggcgtacaagtggaggaggaaaaatgctttcggcgtttcactcggtccaactcagtgacaactgctgtacaagccgacctggactttcacgataatctggaaaattctcttgaatctattgaggataacagctgccctgggcctatggcacgccagttcagccgtgatgcgtccacatccacagtcagcattcaaggcagtggtaaccattaccatgcttgcgctgcagacgacgacttcgatacagacttcgacccttccatccttccgcctccggatccctggattgacagtatcactgaagatcccttggaggcagtacaaaggtcagtttgccatagagacggccactggttccttaagcttctacaggctgaaagagatcggatggagggttggtgtcagcagatggaacgcgaggagcgcgaaaacaatttgcccgaggacattttagggaaaataaggactgcggtggggtccgcccaactgcttatggcccagaagttctatcaattccgggagctgtgcgaagaaaatttgaaccccaacgcccatccccgccctacctcccaggatcttgccggattctgggatatgcttcagctgtctattgagaatatatccatgaagtttgatgaattgcatcagttgaaggccaataactggaagcagatggacccactcgacaaaaaggtggaacagtgccgcttttgtatggtccatctgaagacatgcacgaacacaggacagtcaaagtag

SEQ ID NO: 84796 - DNA, 2790 bp, Artificial Sequence
  derived and/or modified sequence
atgaaaggattgagtggctcaagatctcatcaccacggcgtcacttgtgattccgcgtgcgacagcctgtcccaccactccgaccgcaaaccatacctgctgtcccctgtagaacatcaccccgcagatcacccttattacacccagagaaacagcttccaggccgaatgcgtcggcccattcagtgatcctctggccagctcaacttttccccgtcgccactatacttctcagcaagagctgaaagacgaatgcgccctggtgccacgaacactcgcgactaaggcgaatagaatccccgcaaacttgttggaccagttcgagagacaactgcccctgtcccgggatggttaccacacgctccagtataaaaggaccgcagtggagcatcggtccgattctcccggtagaattaggcatctcgtgcatagcgtgcaaaagctgtttaccaaatctcactcgttggagggccctagtaagggaagtgtcaacggtggcaaggcatctcctgacgaagcacaggcagccaggtacggcaagcggagcaagtcaaaagagcgccgagccgaaccaaaggcacggcctagcaccagtccgggatggtggagctccgatgacaatctcgatggcgatatgtgcatctatcacgctccgagcggcgtgatgacaatgggaaggtgccctgatcgctccgcttctcagtatttcctcgaggcctataacaccatcagtgaacaggccgtgaaagcctctcgatcgaacaacgatgtgaaatgttcgacttgcgccaacctgccagtgagccttgatacaccactgcttaagaagtctgcctggtctagtaccttgacagtctcaagggctcgcgaggtttaccagaaggccagcgtgaacatggatcaggccatggtcaaatcggaatcatgtcagcaagaaaggagttgccaatatctgcaggtgcctcaagacgagtggaccggatacacacctagaggcaaggacgacgagataccttgccgccgaatgcggtcgggctcatatattaaagcaatgggggatgaggattcaggcgactcggacacgtcgcctaagccttcccccaaagtagccgctcgccgagagagctacctgaaagcaacccagccatccctgaccgaattgacaacactcaagatcagcaatgaacactctccgaagctgcagatccgcagccattcctatttacgtgccgtgagcgaggtttctattaacaggtccctagactctctggatcctgcgggacttctgaccagccccaaatttcgctctaggaacgagagctatatgagagccatgtccacaatatcgcaggtctctgagatggaagtcaatggacaattcgagtctgtgtgtgagagcgtctttagcgaacttgagtctcaggccgttgaagctctggacctcccaatgccaggctgctttagaatgaggtcccattcttacgtgagagccatagagaaagggtgttcacaagacgacgaatgtgtgagtttaaggtcctcttccccccctaggacaacaaccaccgtgagaactatccagtcctcaaccgtcagtagctgcatcactacttataaaaaaactcctcctcccgtgcctccccgaactaccaccaagcctttcatctcaattaccgcgcaaagttccacagaatcggcacaggatgcatacatggatgggcaaggccagaggggggatataatctctcagtcaggactgagcaattccactgagtcactcgacagtatgaaagccctgactgccgcaatagaggccgctaacgcacaaatccatggacccgcttcacagcacatgggaaataacaccgcaacggtgaccactaccactaccatagcaactgtgaccaccgaagatcggaagaaagatcatttcaaaaagaataggtgcctgtccatcgggatacaggttgacgacgcagaggagccggataagaccggcgaaaataaggcaccatcgaaatttcagagcgttggggtgcaagtggaggaggagaagtgttttaggcggttcactcgaagtaacagcgtgactaccgctgtccaagcagacctggacttccatgataatctggagaattccctcgaaagtatagaagacaatagctgtccaggccctatggcacggcagttttctcgggacgccagcacaagcaccgtctccattcagggatctgggaaccactatcacgcttgcgccgcagacgacgatttcgatacagactttgacccctccatcctgcctccccctgacccttggatagactccataacagaagatcccttagaggcggtacagagatcagtgtgccaccgggacgggcactggttcctcaaacttcttcaagctgaacgggaccgaatggagggatggtgtcagcagatggagcgtgaggagcgggagaataatttaccagaggacatattggggaagatccgcactgcagtgggatccgcccagttgcttatggcccaaaaattttaccaattccgagagttgtgcgaggaaaacctgaatcccaatgcacaccccaggcctacgagtcaggatctcgccggattttgggatatgctgcagctgagcattgaaaatatttcgatgaagttcgatgaactgcatcagctgaaggccaacaactggaaacagatggaccctcttgataaaaaagttgagcagtgcagattctgtatggtacacctgaagacctgtactaataccggacagtcaaagtag

SEQ ID NO: 84797 - DNA, 2790 bp, Artificial Sequence
  derived and/or modified sequence
atgaagggcctgtcagggtcacgaagccatcaccacggggtgacttgtgatagcgcgtgcgattccctcagtcatcattcggacaggaagccttatcttctcagtccagttgagcaccaccctgccgaccatccttactacacccagcgcaactctttccaggcagaatgcgttgggccatttagtgatcctctggccagtagtacgttccccagaagacactacacaagtcagcaggagctgaaagacgagtgcgcgctggtgcccagaacactggccaccaaggcgaatcgaattcccgcaaatctgcttgatcagtttgagcgacagctcccgttatcccgggatgggtaccatacccttcaatataagaggactgcagtcgaacacaggtccgactcccctggtcggataagacacctggtccactcagtgcagaaacttttcacgaagtctcattctttggagggaccgtcaaaggggtcagtgaatggcggaaaggcctcccccgatgaagctcaggcagcccgatatggaaagaggtcgaaatcaaaagagcgcagagctgagcccaaggctagacctagtacctctccaggctggtggtcgtcagacgataatctcgacggagacatgtgcatctatcacgcaccctcaggtgtcatgaccatggggcgatgcccagaccggtctgccagccagtattttctggaggcttacaacacaattagtgaacaggcggtcaaagcttcacggtctaacaacgacgtaaaatgtagtacgtgtgcaaacctgcccgtgagcctggatacacctctcttaaaaaagagcgcttggtcatccactttgaccgtgtcccgcgcacgcgaagtgtaccagaaagcttcagtgaatatggatcaggctatggtcaaatctgaatcgtgtcagcaggaaaggtcctgccagtacttacaggtgcctcaagacgagtggacagggtacactcccagaggcaaggatgacgagattccttgcagacgaatgaggagcggcagctatatcaaggcaatgggtgacgaagactccggcgacagcgacacatcacccaagcctagtcccaaagtagccgctcgcagagagagctacctcaaggccacgcagccgtccctgactgagctgaccacgttgaaaatcagcaatgaacacagccctaagctgcaaatcaggagccacagttatcttcgagccgtgagtgaagtgagtatcaacagatctctggattcccttgatccagcaggtctgcttacttctcctaaatttagaagtcggaatgagtcgtatatgcgagccatgtctactatttcccaggtgtccgaaatggaagtcaatgggcagttcgaaagtgtatgcgagagcgtattcagtgagttggagtctcaggccgtggaagcattggatctacctatgccaggctgctttaggatgcggagccactcctacgtcagagcgattgaaaaaggatgctcacaggatgatgaatgtgtgtcactccgctcatcttcgccaccgaggaccactaccaccgtacgcactatccaatccagtactgtgagttcctgtatcacaacctacaagaaaaccccaccacccgtgcccccacgcaccacgactaaaccgtttatatctattaccgctcagtcgagtacagaatcagcacaagacgcgtacatggatgggcaagggcagagaggagatatcatctcacagtctgggctgagcaattcaacggagtctcttgacagcatgaaagctttgacagctgctatcgaggccgctaatgcccagatccacgggcctgcgtcccagcacatgggtaacaacacagcaaccgttaccaccaccaccacaattgcaacagtcacaaccgaggatagaaaaaaggatcacttcaaaaaaaacagatgcctgagtatcggtatacaggtcgacgacgctgaagagccagacaagacaggggaaaacaaggctccaagtaagtttcagagtgtgggggtacaggttgaggaggagaaatgctttcgcagattcacaagatctaactcggtaactacggctgtgcaggcagatctggatttccacgacaacctcgaaaattccctggaaagcatcgaagataactcatgcccagggccaatggccaggcagttttcacgggatgcatctacatccactgtcagcatacagggaagtggtaaccactatcacgcctgtgctgccgacgacgatttcgatacagactttgatccctctatcctgcctccaccagatccttggatcgactcaatcacagaagacccactcgaggcggtgcagagatccgtgtgccaccgtgacggtcattggtttttgaaactcctgcaagccgaacgcgacagaatggagggatggtgtcagcagatggagcgggaggaaagagagaacaatctgcctgaagacatccttggcaaaatccgtacagcagtgggttccgcacagctgctgatggcccagaaattttaccagttccgggagttgtgtgaagagaatttgaaccccaatgcccatcccagaccaacatcgcaagacctagccggtttttgggacatgctccagctcagcattgagaacatctctatgaaattcgacgagttacaccagctgaaggcaaacaattggaagcagatggatcccctggacaaaaaagtggaacaatgtcggttctgcatggtgcatctgaagacatgcactaacacggggcagtccaaatag

SEQ ID NO: 84798 - protein, 661 aa, Artificial Sequence
  derived and/or modified sequence
MDLKTLKLFNSQLRCGWLLYIWNKAFMAHLRVPQDEWTGYTPRGKDDEIPCRRMRSGSYIKAMGDEDSGDSDTSPKPSPKVAARRESYLKATQPSLTELTTLKISNEHSPKLQIRSHSYLRAVSEVSINRSLDSLDPAGLLTSPKFRSRNESYMRAMSTISQVSEMEVNGQFESVCESVFSELESQAVEALDLPMPGCFRMRSHSYVRAIEKGCSQDDECVSLRSSSPPRTTTTVRTIQSSTAQSSTESAQDAYMDGQGQRGDIISQSGLSNSTESLDSMKALTAAIEAANAQIHGPASQHMGNNTATVTTTTTIATVTTEDRKKDHFKKNRCLSIGIQVDDAEEPDKTGENKAPSKFQSVGVQVEEEKCFRRFTRSNSVTTAVQADLDFHDNLENSLESIEDNSCPGPMARQFSRDASTSTVSIQGSGNHYHACAADDDFDTDFDPSILPPPDPWIDSITEDPLEAVQRSVCHRDGHWFLKLLQAERDRMEGWCQQMEREERENNLPEDILGKIRTAVGSAQLLMAQKFYQFRELCEENLNPNAHPRPTSQDLAGFWDMLQLSIENISMKFDELHQLKANNWKQMDPLDKKERRAPPPVPKKPAKGPAPLIRERSLESSQRQEARKRLMAAKRAASVRQNSATESAESIEIYIPEAQTRL

SEQ ID NO: 84799 - DNA, 1986 bp, Artificial Sequence
  derived and/or modified sequence
atggacctgaagaccctgaagctgttcaacagccagctgagatgcggctggctgctgtacatctggaacaaggccttcatggcccacctgagagtgccccaggacgagtggaccggctacacccccagaggcaaggacgacgagatcccctgcagaagaatgagaagcggcagctacatcaaggccatgggcgacgaggacagcggcgacagcgacaccagccccaagcccagccccaaggtggccgccagaagagagagctacctgaaggccacccagcccagcctgaccgagctgaccaccctgaagatcagcaacgagcacagccccaagctgcagatcagaagccacagctacctgagagccgtgagcgaggtgagcatcaacagaagcctggacagcctggaccccgccggcctgctgaccagccccaagttcagaagcagaaacgagagctacatgagagccatgagcaccatcagccaggtgagcgagatggaggtgaacggccagttcgagagcgtgtgcgagagcgtgttcagcgagctggagagccaggccgtggaggccctggacctgcccatgcccggctgcttcagaatgagaagccacagctacgtgagagccatcgagaagggctgcagccaggacgacgagtgcgtgagcctgagaagcagcagcccccccagaaccaccaccaccgtgagaaccatccagagcagcaccgcccagagcagcaccgagagcgcccaggacgcctacatggacggccagggccagagaggcgacatcatcagccagagcggcctgagcaacagcaccgagagcctggacagcatgaaggccctgaccgccgccatcgaggccgccaacgcccagatccacggccccgccagccagcacatgggcaacaacaccgccaccgtgaccaccaccaccaccatcgccaccgtgaccaccgaggacagaaagaaggaccacttcaagaagaacagatgcctgagcatcggcatccaggtggacgacgccgaggagcccgacaagaccggcgagaacaaggcccccagcaagttccagagcgtgggcgtgcaggtggaggaggagaagtgcttcagaagattcaccagaagcaacagcgtgaccaccgccgtgcaggccgacctggacttccacgacaacctggagaacagcctggagagcatcgaggacaacagctgccccggccccatggccagacagttcagcagagacgccagcaccagcaccgtgagcatccagggcagcggcaaccactaccacgcctgcgccgccgacgacgacttcgacaccgacttcgaccccagcatcctgcccccccccgacccctggatcgacagcatcaccgaggaccccctggaggccgtgcagagaagcgtgtgccacagagacggccactggttcctgaagctgctgcaggccgagagagacagaatggagggctggtgccagcagatggagagagaggagagagagaacaacctgcccgaggacatcctgggcaagatcagaaccgccgtgggcagcgcccagctgctgatggcccagaagttctaccagttcagagagctgtgcgaggagaacctgaaccccaacgcccaccccagacccaccagccaggacctggccggcttctgggacatgctgcagctgagcatcgagaacatcagcatgaagttcgacgagctgcaccagctgaaggccaacaactggaagcagatggaccccctggacaagaaggagagaagagcccccccccccgtgcccaagaagcccgccaagggccccgcccccctgatcagagagagaagcctggagagcagccagagacaggaggccagaaagagactgatggccgccaagagagccgccagcgtgagacagaacagcgccaccgagagcgccgagagcatcgagatctacatccccgaggcccagaccagactgtag

SEQ ID NO: 84800 - DNA, 2365 bp, Artificial Sequence
  derived and/or modified sequence
gctgtttagaactattgtaccgctgccagtgactgtctgtattagggttgggagcaggaacatggatttgaagacattaaaactgtttaattctcagttgagatgtggttggctcttatacatttggaataaagcatttatggcacatctcagggttccacaagatgaatggacagggtacaccccacgaggtaaagatgatgaaattccatgccgaagaatgcggagtggcagttatatcaaggccatgggggatgaagacagtggagactcagacacgagtcctaagccttctccaaaagttgctgcgcggagagaaagctatctcaaggctactcagccatcccttacagaactcaccacactcaaaatctccaatgaacactcacccaaactccagatccggagtcatagttacctgagggcagtgagtgaagtctccatcaaccggagcctggacagcctggaccctgcaggcttgctcacatcaccaaagttccgctccaggaatgagagctacatgcgagccatgagcaccatcagccaggtgagcgagatggaagtgaacgggcagttcgagtccgtgtgcgagtccgtgttcagcgagctggagtcgcaggccgtggaagcgctggacctgcccatgcccggctgcttccgcatgcggagccacagctatgtgcgggccattgagaaaggctgctcccaggacgacgagtgcgtgtccctgaggtcgtcctcgccgccgcgcaccaccaccaccgttaggaccatccagagcagcacggcccagagtagcacagagtcagcccaggatgcctacatggacggacagggccagcgaggagatattatcagccagtctggactcagcaactccaccgagagcctggacagtatgaaggctctgacagccgccatcgaagctgcaaacgcccagatccatggccctgccagtcaacacatgggcaataacactgccaccgtcaccaccacgactaccatagccaccgtcaccacggaggacaggaagaaggaccactttaagaaaaatcgatgcctgtctatcgggatacaggtggatgatgctgaagaacctgacaaaacaggggagaataaagcacccagtaagttccagtccgtgggagtgcaagtagaagaagagaagtgcttccgcaggttcactcgatccaacagtgtgacgacagcagtacaggccgacctggacttccatgataatctggaaaattctctggaatctatagaggacaattcgtgtcctggccccatggccagacagttctcccgcgatgccagcacctccacagtcagcattcagggctcaggaaaccattaccatgcctgtgccgccgatgatgactttgacacggattttgacccctctattctgcctcctccggacccctggattgactctatcactgaagaccctctggaggccgtgcaaaggtcagtgtgccaccgggatggccactggttcctgaagcttctccaggcagagcgagaccgcatggaggggtggtgtcaacagatggagcgggaagaacgggaaaacaacctgcccgaagacattctaggaaaaatccgaaccgcagtgggcagtgcccaacttctcatggcccagaaattctaccagttcagagaactgtgtgaagaaaacctgaatcctaatgctcatccaagacccacctcccaggatttggcggggttttgggacatgctgcagttgtccatagaaaatattagtatgaaatttgatgaacttcatcagttaaaggccaataattggaaacagatggatcctcttgacaagaaggagagaagggcccctcctccagtgccaaagaagccggcgaagggccccgcgccgctgatccgggagcgctcgctggagagctcgcagcgccaggaggcccgcaagcgcctgatggccgccaagcgcgccgcgtccgtccgccagaactcggccaccgagagcgccgagagcatcgagatctacatccccgaggcgcagacccggctctgagcgccccgcagcccggccgccgccgccaagcatctgtcccctcctcccccggccgctcctctgccggctgcctctccccctccgagcccgtccgctcccgagctcggtgacttccactgtcgcggtgtagttgtccacctcgcaggagccgccccccgggcccccctcagccccccacttcccgtacccgtttgcccatctccttcttcaccgagcttcgccccctgtcctgatgccgtcgccctgcctcatactgagatccaaccctttattttctgggcaaagccaaacccacctgtgtagaagtgatgcctttag

SEQ ID NO: 84801 - DNA, 1986 bp, Artificial Sequence
  derived and/or modified sequence
atggacctgaagaccctgaagctgtttaactcccagctcagatgcggctggttgctgtacatctggaataaggcgtttatggctcatctgagggtgccgcaagatgagtggactggctacaccccccgggggaaagacgatgagataccctgtcgccgtatgcgatccggcagctacatcaaggcgatgggagacgaagactcgggtgatagcgatacgtctcctaaacctagtcccaaggtggccgctcgaagggagagctatttgaaagcaacccagcctagtctgaccgagctcaccaccctcaaaataagcaacgagcattctcccaaactgcagatcagatctcattcatacctgcgcgcggtcagcgaggtcagtataaaccggtcactggactccctagaccctgccgggctgctcacttctccaaaattccgttcccggaacgaatcatatatgagggcaatgagcaccattagtcaggtatcagaaatggaggtcaacgggcaatttgagtcggtgtgcgaatctgtgttttccgagcttgaatctcaagcagtggaggcacttgacctccccatgccaggttgttttcgtatgcggagccactcatacgtccgagccattgaaaaagggtgttcccaggacgacgaatgcgtgagtctgcgatcctcctcaccaccacggacgaccaccacggttcggaccattcagtccagcacagcgcagtctagtacggaatctgctcaggatgcttacatggatggacaaggccagcggggggatatcatcagtcaatcaggcctttccaacagtaccgagtcccttgatagtatgaaggctctgactgccgcaattgaggccgccaacgcccagattcatggcccggccagccagcacatgggaaataataccgctacagtaactacgaccaccactatcgccacagttacaaccgaggacaggaagaaggatcattttaagaaaaacaggtgcctctccattggcatccaggttgatgatgcagaagagccggacaagactggcgaaaataaagccccttccaagttccaatcggtgggagtgcaggtcgaggaagaaaaatgctttcgccgcttcactagaagtaacagtgtcactaccgcagtgcaggctgacctggattttcacgacaatctggaaaacagcctggaatcaatcgaggataacagctgcccaggccccatggccaggcaatttagtcgagatgcctccacttccaccgtgtccattcagggctcaggcaaccactatcacgcttgcgccgctgatgatgatttcgacacagactttgatcctagcatcttacctccgccggatccttggatcgattcaatcacagaagaccccctcgaggccgtccaacggagcgtgtgtcacagggatggacattggttccttaaattactccaggccgagcgcgacaggatggaggggtggtgtcagcaaatggagcgggaggaaagagagaacaatctgccagaggacatcctgggtaaaatcaggactgcggtcggctctgctcagttgttgatggcacagaagttctatcaatttcgcgagctgtgcgaggagaatcttaaccctaatgctcatccaaggccgacctctcaggatttagccggtttttgggacatgctgcagctcagcattgagaatatctcaatgaaattcgatgaactgcatcagctgaaggccaataattggaagcaaatggacccactggataaaaaggagcgccgcgctccccctcccgtgccaaaaaaaccagccaaggggccagcaccattgattagggagagaagtctcgagtcctctcagcgacaggaggcccgcaagaggctgatggctgctaagagggccgcatcagtgaggcagaactcagccacagagtcagcagagagtattgaaatttatattccggaggcgcaaactcggctctag

SEQ ID NO: 84802 - DNA, 1986 bp, Artificial Sequence
  derived and/or modified sequence
atggacctgaagaccctgaagctgttcaacagccagctgcgctgtggctggctgctgtacatctggaacaaggccttcatggcccacctgcgggtgccccaggatgagtggacaggctacaccccccggggcaaggatgatgagatcccctgcaggaggatgaggagcggcagctacatcaaggccatgggagatgaggacagcggggacagcgacaccagccccaagcccagccccaaggtggccgcccggcgggagagctacctgaaggccacccagcccagcctgacagagctgaccaccctgaagatcagcaatgagcacagccccaagctgcagatccgcagccacagctacctgcgggctgtgtctgaggtgtccatcaacagaagcctggacagcctggaccctgctggcctgctgaccagccccaagttccgcagcagaaatgaaagctacatgagggccatgagcaccatcagccaggtgtctgagatggaggtgaatggccagtttgagagcgtgtgtgagagcgtcttcagcgagctggagagccaggccgtggaggccctggacctgcccatgcctggctgcttcaggatgaggagccacagctatgtgcgggccatcgagaagggctgcagccaggatgatgaatgtgtgtccctgcggagcagcagcccccccaggaccaccaccaccgtgaggaccatccagagcagcacagcccagagcagcacagaaagtgcccaggatgcctacatggatggccagggccagagaggagacatcatcagccagagcggcctgagcaacagcacagagagcctggacagcatgaaggccctgacagctgccattgaagctgccaatgcccagatccacggccctgccagccagcacatgggcaacaacacagccaccgtgaccaccaccaccaccatcgccaccgtgaccacagaggacaggaagaaggaccacttcaagaagaaccgctgcctgagcatcggcatccaggtggatgatgctgaggagccagacaagacaggagagaacaaggcccccagcaagttccagagcgtgggcgtgcaggtggaggaggagaagtgcttccgccgcttcaccaggagcaacagcgtgaccacagctgtgcaggccgacctggacttccatgacaacctggagaacagcctggagagcattgaggacaacagctgccccggccccatggcccggcagttcagcagagatgccagcaccagcacagtgtccatccagggcagcggcaaccactaccacgcctgtgccgcagatgatgactttgacacagactttgaccccagcatcctgcccccaccagacccctggattgacagcatcacagaggaccccctggaggccgtgcagaggtctgtgtgccacagagatggccactggttcctgaagctgctgcaggccgagcgggacaggatggagggctggtgccagcagatggagcgggaggagcgggagaacaacctgcctgaggacatcctgggcaagatcagaacagctgtgggcagcgcccagctgctgatggcccagaagttctaccagttccgggagctgtgtgaggagaacctgaaccccaatgcccacccccggcccaccagccaggacctggccggcttctgggacatgctgcagctgagcattgagaacatctccatgaagtttgatgagctgcaccagctgaaggccaacaactggaagcagatggaccccctggacaagaaggagcggcgggcccctcctcctgtgcccaagaagccagccaagggccctgcccccctcatccgggagaggagcctggagagcagccagaggcaggaggccaggaagaggctgatggccgccaagagagctgcctctgtgcggcagaacagcgccacagagagcgctgagagcattgagatctacatccctgaggcccagacccggctgtag

SEQ ID NO: 84803 - DNA, 1986 bp, Artificial Sequence
  derived and/or modified sequence
atggacctgaagaccctgaagctgttcaacagccagctgcggtgcggatggctgctgtatatctggaacaaggcttttatggcacaccttcgggtgcctcaggatgagtggaccgggtacacacccaggggaaaagacgacgaaataccttgtcggagaatgcgctccggatcttacataaaggcaatgggtgacgaagattcgggagattcggatactagtccaaaacccagccccaaagtcgccgccagaagagagagttatctaaaggccacccaaccttcactcactgagcttaccacacttaaaatcagcaacgaacatagcccaaaactccagattagatcgcactcatatctccgcgcagtgtccgaggtttccatcaacaggtccctagactccctggaccctgctggcctgctcacctctccaaagtttcgctcaagaaatgaaagctatatgcgtgctatgagcacaatctcgcaagtgtcggaaatggaagttaatggccaatttgaatctgtatgcgaatcagtatttagtgagttagagagtcaggccgtggaggctctggatctgcctatgcccggatgctttaggatgcgttctcattcatatgttcgagctatcgaaaaaggatgcagccaggacgacgagtgtgtgagcctgcgcagcagctctccacccagaaccactaccacagtgcgaaccatccaatcaagtaccgcgcagtctagcactgagtccgcccaggatgcctacatggacggccagggacagagaggagatatcatctcacaatccggtctctctaactctaccgaaagtctcgactccatgaaggcgttgacagccgccatcgaagccgcgaatgcgcagattcacggaccggcaagccagcacatgggaaacaacaccgccaccgtgaccacgaccaccaccatcgccacagtgaccaccgaggaccgtaaaaaagatcacttcaaaaaaaaccggtgcttatccattggcatccaagtcgatgatgctgaggagccagataaaacgggcgaaaataaagcacctagcaaattccagtctgtcggagtacaagttgaagaagaaaagtgcttccggcgatttaccagatcaaattctgtgaccaccgctgtgcaagcggacttggattttcacgataacctggagaatagtcttgaatctatcgaggacaacagttgcccgggcccaatggcacgtcagttcagcagagacgcatcgaccagcaccgtctccattcagggcagcggtaaccattaccacgcttgtgccgccgacgatgattttgataccgattttgatccctctattcttcccccacccgatccatggatcgacagcatcaccgaagaccccctggaggccgtacagaggagcgtatgccaccgtgacggccactggttcttgaagctactgcaggccgaacgtgaccgcatggaagggtggtgtcaacaaatggaaagggaggaacgtgagaataacttgccagaagacatactgggaaagattcggacagccgtgggctccgcccagttgcttatggcccaaaagttttaccagttcagagagctgtgtgaagaaaatctgaaccctaatgcccacccgcgccctacctcacaggacctggcagggttttgggatatgctgcagttatctatcgaaaatatctccatgaagttcgatgagctgcaccagctcaaggctaataactggaaacagatggaccccctagacaaaaaggagaggcgcgcaccgccgcccgtacccaagaagcccgcgaagggcccggcacctctcatccgggagagatctctcgaatcatctcaacggcaggaggctaggaagaggttgatggctgccaaacgggcagccagcgtgaggcagaactcagcgactgaaagcgctgaatccatcgagatttacatacctgaggcacagacccgattatag

SEQ ID NO: 84804 - DNA, 1986 bp, Artificial Sequence
  derived and/or modified sequence
atggaccttaaaacactgaaactgttcaattcacagctgcgctgcggttggcttttgtacatttggaacaaggccttcatggctcacctgcgcgtcccccaggatgagtggactggttatacgccaagggggaaagatgatgagattccttgtaggcggatgcgcagcggttcatacattaaagcaatgggggatgaagacagtggcgacagcgacactagtcctaagccctcccccaaagtggccgctcgcagggagagctatctgaaggctacacagcctagtctaaccgagttaactacactgaagattagtaacgagcactctcccaagctgcagatccggagccattcctacctgagggcagtgtctgaggtgtcaattaatagaagcctagatagcctggatcctgccggattgctgacatcccccaagttccgcagtcggaacgagagctatatgcgcgctatgtccacgatctcacaggtgtccgagatggaagtgaatggccagtttgagtccgtgtgcgagtccgtgttttcagaattagagagtcaggcagtggaggctctggacctgccaatgcctgggtgctttcgtatgaggagccactcatatgtgagagcgatcgagaaggggtgctcacaggacgatgagtgcgtaagtctgcgatcttcctcaccccctaggaccaccactaccgttaggacaatacagtcatcaaccgcacagtcaagcaccgaatccgcccaggacgcttacatggacgggcagggccaacgaggcgatataattagccagtctgggctgtctaacagtacagagagccttgattctatgaaagccctgacagccgctatcgaagcagctaatgcacagatccacggtcctgcatcgcagcacatgggtaataatacagctaccgtgacaaccactactacaattgccacagtgactaccgaagaccgcaaaaaagatcatttcaaaaagaaccgttgcctgtccattggtattcaggtagacgacgccgaggagccagataaaaccggtgagaataaggctccatctaagttccagagcgtcggggtgcaagtggaggaggagaagtgttttcgtcggtttacaagatccaacagcgtgacaaccgctgtccaggcggatctggattttcacgataaccttgagaactccctggaaagtatcgaagataatagctgtcccggaccgatggcacgacagttttcccgcgatgcgtctacctcgaccgtctctatccagggttcaggaaaccactaccatgcctgcgctgccgacgacgacttcgataccgatttcgatccttcaatactgcctcctccagacccatggatagactcaatcacagaagatcccctggaggctgttcagcgctctgtttgccacagagacggccactggttcctgaaactgttgcaggctgaaagagaccgaatggaagggtggtgccagcagatggagcgagaggaacgagagaacaatttacccgaagacattctggggaaaatcagaactgctgtggggtccgcccagctgctgatggcacagaagttttaccagttcagggaactgtgcgaagaaaacctcaaccctaatgcccaccccagaccaactagccaggatctggcaggattctgggacatgttgcagctgtccattgagaacattagcatgaagtttgacgaactgcaccagttgaaggccaataattggaaacagatggatcccctcgacaaaaaagaacgcagggccccacctcctgtgcccaagaagccggctaagggaccggctccactgatcagagaacgttccttggaatcctcccagagacaggaggccagaaagcgtttgatggcagcaaaacgcgctgcctctgtgcggcaaaacagtgccacagaaagcgcagagtctatagaaatttatattccagaagcccagaccagactctag

SEQ ID NO: 84805 - protein, 683 aa, Artificial Sequence
  derived and/or modified sequence
MIDLFKAEWVSSVCVQVSRNGRTDQVPQDEWTGYTPRGKDDEIPCRRMRSGSYIKAMGDEDSGDSDTSPKPSPKVAARRESYLKATQPSLTELTTLKISNEHSPKLQIRSHSYLRAVSEVSINRSLDSLDPAGLLTSPKFRSRNESYMRAMSTISQVSEMEVNGQFESVCESVFSELESQAVEALDLPMPGCFRMRSHSYVRAIEKGCSQDDECVSLRSSSPPRTTTTVRTIQSSTVSSCITTYKKTPPPVPPRTTTKPFISITAQSSTESAQDAYMDGQGQRGDIISQSGLSNSTESLDSMKALTAAIEAANAQIHGPASQHMGNNTATVTTTTTIATVTTEDRKKDHFKKNRCLSIGIQVDDAEEPDKTGENKAPSKFQSVGVQVEEEKCFRRFTRSNSVTTAVQADLDFHDNLENSLESIEDNSCPGPMARQFSRDASTSTVSIQGSGNHYHACAADDDFDTDFDPSILPPPDPWIDSITEDPLEAVQRSVCHRDGHWFLKLLQAERDRMEGWCQQMEREERENNLPEDILGKIRTAVGSAQLLMAQKFYQFRELCEENLNPNAHPRPTSQDLAGFWDMLQLSIENISMKFDELHQLKANNWKQMDPLDKKERRAPPPVPKKPAKGPAPLIRERSLESSQRQEARKRLMAAKRAASVRQNSATESAESIEIYIPEAQTRL

SEQ ID NO: 84806 - DNA, 2052 bp, Artificial Sequence
  derived and/or modified sequence
atgatcgacctgttcaaggccgagtgggtgagcagcgtgtgcgtgcaggtgagcagaaacggcagaaccgaccaggtgccccaggacgagtggaccggctacacccccagaggcaaggacgacgagatcccctgcagaagaatgagaagcggcagctacatcaaggccatgggcgacgaggacagcggcgacagcgacaccagccccaagcccagccccaaggtggccgccagaagagagagctacctgaaggccacccagcccagcctgaccgagctgaccaccctgaagatcagcaacgagcacagccccaagctgcagatcagaagccacagctacctgagagccgtgagcgaggtgagcatcaacagaagcctggacagcctggaccccgccggcctgctgaccagccccaagttcagaagcagaaacgagagctacatgagagccatgagcaccatcagccaggtgagcgagatggaggtgaacggccagttcgagagcgtgtgcgagagcgtgttcagcgagctggagagccaggccgtggaggccctggacctgcccatgcccggctgcttcagaatgagaagccacagctacgtgagagccatcgagaagggctgcagccaggacgacgagtgcgtgagcctgagaagcagcagcccccccagaaccaccaccaccgtgagaaccatccagagcagcaccgtgagcagctgcatcaccacctacaagaagacccccccccccgtgccccccagaaccaccaccaagcccttcatcagcatcaccgcccagagcagcaccgagagcgcccaggacgcctacatggacggccagggccagagaggcgacatcatcagccagagcggcctgagcaacagcaccgagagcctggacagcatgaaggccctgaccgccgccatcgaggccgccaacgcccagatccacggccccgccagccagcacatgggcaacaacaccgccaccgtgaccaccaccaccaccatcgccaccgtgaccaccgaggacagaaagaaggaccacttcaagaagaacagatgcctgagcatcggcatccaggtggacgacgccgaggagcccgacaagaccggcgagaacaaggcccccagcaagttccagagcgtgggcgtgcaggtggaggaggagaagtgcttcagaagattcaccagaagcaacagcgtgaccaccgccgtgcaggccgacctggacttccacgacaacctggagaacagcctggagagcatcgaggacaacagctgccccggccccatggccagacagttcagcagagacgccagcaccagcaccgtgagcatccagggcagcggcaaccactaccacgcctgcgccgccgacgacgacttcgacaccgacttcgaccccagcatcctgcccccccccgacccctggatcgacagcatcaccgaggaccccctggaggccgtgcagagaagcgtgtgccacagagacggccactggttcctgaagctgctgcaggccgagagagacagaatggagggctggtgccagcagatggagagagaggagagagagaacaacctgcccgaggacatcctgggcaagatcagaaccgccgtgggcagcgcccagctgctgatggcccagaagttctaccagttcagagagctgtgcgaggagaacctgaaccccaacgcccaccccagacccaccagccaggacctggccggcttctgggacatgctgcagctgagcatcgagaacatcagcatgaagttcgacgagctgcaccagctgaaggccaacaactggaagcagatggaccccctggacaagaaggagagaagagcccccccccccgtgcccaagaagcccgccaagggccccgcccccctgatcagagagagaagcctggagagcagccagagacaggaggccagaaagagactgatggccgccaagagagccgccagcgtgagacagaacagcgccaccgagagcgccgagagcatcgagatctacatccccgaggcccagaccagactgtag

SEQ ID NO: 84807 - DNA, 5257 bp, Artificial Sequence
  derived and/or modified sequence
agacagaccgagaaggaaagcactcccagagatgaaattttaggaaagcaaaatgatcgacctttttaaggctgagtgggtttcttcagtttgtgtgcaagtttcaagaaatggaaggactgaccaggttccacaagatgaatggacagggtacaccccacgaggtaaagatgatgaaattccatgccgaagaatgcggagtggcagttatatcaaggccatgggggatgaagacagtggagactcagacacgagtcctaagccttctccaaaagttgctgcgcggagagaaagctatctcaaggctactcagccatcccttacagaactcaccacactcaaaatctccaatgaacactcacccaaactccagatccggagtcatagttacctgagggcagtgagtgaagtctccatcaaccggagcctggacagcctggaccctgcaggcttgctcacatcaccaaagttccgctccaggaatgagagctacatgcgagccatgagcaccatcagccaggtgagcgagatggaagtgaacgggcagttcgagtccgtgtgcgagtccgtgttcagcgagctggagtcgcaggccgtggaagcgctggacctgcccatgcccggctgcttccgcatgcggagccacagctatgtgcgggccattgagaaaggctgctcccaggacgacgagtgcgtgtccctgaggtcgtcctcgccgccgcgcaccaccaccaccgttaggaccatccagagcagcacggtgtcatcttgcattacaacatataagaagacaccacctccagtcccacccagaactaccacgaaacctttcatttctatcacagcccagagtagcacagagtcagcccaggatgcctacatggacggacagggccagcgaggagatattatcagccagtctggactcagcaactccaccgagagcctggacagtatgaaggctctgacagccgccatcgaagctgcaaacgcccagatccatggccctgccagtcaacacatgggcaataacactgccaccgtcaccaccacgactaccatagccaccgtcaccacggaggacaggaagaaggaccactttaagaaaaatcgatgcctgtctatcgggatacaggtggatgatgctgaagaacctgacaaaacaggggagaataaagcacccagtaagttccagtccgtgggagtgcaagtagaagaagagaagtgcttccgcaggttcactcgatccaacagtgtgacgacagcagtacaggccgacctggacttccatgataatctggaaaattctctggaatctatagaggacaattcgtgtcctggccccatggccagacagttctcccgcgatgccagcacctccacagtcagcattcagggctcaggaaaccattaccatgcctgtgccgccgatgatgactttgacacggattttgacccctctattctgcctcctccggacccctggattgactctatcactgaagaccctctggaggccgtgcaaaggtcagtgtgccaccgggatggccactggttcctgaagcttctccaggcagagcgagaccgcatggaggggtggtgtcaacagatggagcgggaagaacgggaaaacaacctgcccgaagacattctaggaaaaatccgaaccgcagtgggcagtgcccaacttctcatggcccagaaattctaccagttcagagaactgtgtgaagaaaacctgaatcctaatgctcatccaagacccacctcccaggatttggcggggttttgggacatgctgcagttgtccatagaaaatattagtatgaaatttgatgaacttcatcagttaaaggccaataattggaaacagatggatcctcttgacaagaaggagagaagggcccctcctccagtgccaaagaagccggcgaagggccccgcgccgctgatccgggagcgctcgctggagagctcgcagcgccaggaggcccgcaagcgcctgatggccgccaagcgcgccgcgtccgtccgccagaactcggccaccgagagcgccgagagcatcgagatctacatccccgaggcgcagacccggctctgagcgccccgcagcccggccgccgccgccaagcatctgtcccctcctcccccggccgctcctctgccggctgcctctccccctccgagcccgtccgctcccgagctcggtgacttccactgtcgcggtgtagttgtccacctcgcaggagccgccccccgggcccccctcagccccccacttcccgtacccgtttgcccatctccttcttcaccgagcttcgccccctgtcctgatgccgtcgccctgcctcatactgagatccaaccctttattttctgggcaaagccaaacccacctgtgtagaagtgatgcctttaggtcacccgccgtcctcagttctctcgagctagtctgttcagcaatataaaaccatagggtatttcagaaatccagtatcacagggtgatcctttgggacttaccgtcttccacgtgaaagaaactaggcctccgattccctttatttcccctaaatggttattcttttaaaaaagcagatggagcactttattcccaacctcagaaatcacaccatctcactggaatccatgagggacacagagagaggggaccaagcctggcctgggggtgggggacctggatgtgtagcaaggatgggagaagcgaaatctgcaggtgctgggggcacctgcacactcacagctgcacaaactgcctcactgttacttcatcaatcacagcttcaaatgtctcaatcagcagaagattgtaaattcgatctttcagggaaattaatctattctgaaaggcaataacatgaagcaaggcaaaggaggcactgatggtttagtatactacataagggatttttttgttctattattaagaaaatctagacctgaaatgttttctcaactcttattgtactgtgtatatttatattgttgtcgtggcggctgtttttaaagggaaagtgttggttctattaatttgttaagtgtccatccaggtgggcctacctgattccacatatataagtacatatctgcttataaagcgctgtaaatggcagcaaggctgtttttggagaagagtttgggttttcctaccatccctttgaatgctacacatccgtctattttaacccaagtagttcgtatttcagatatattttctcctttcatctcctctcactactgcagagtccagtaatacctagcataggattctgtcctgtgtcaaatggctaaaataaatttttgccccaatagacatgctgcctcattcaaaagagctgccgctgtcatcttgaggttccaggtagtgagagaagaaactcgacctgccagggtcaacagccatgaagaggtggggggagtcatgattcataaacactgaaagaagtcaaggcttttggcagagagtgttgatttagatttttagtcttgattgatgggcagtatgcatcggtgtctagctgaagttgtctttaaatgcccttactcgtcacagtttaaacacttaggatgtggcaatcttaagtatcaatggcattttatgtccagctaacatcctaaagcattagaaattaaaaacgaaagacttttaaaaacatacatcaaacatgcttgcaccagagaagctttttaaaataatacactctcatagccaggtgctaatttaattttacttatgaaattaagagaggtgatgggttctagcaacagatattttcacggacatattctaaaaccactagagaattcgctacctctcagagccatcgatgctttgagctacctttataaacagggcacaaatgtttactgctgtggtttacaagaaaagggctactcacttattttgaaaccaacgaaccaacttttaactagggtgaacaaagcactcaaagtgctttgtgaaattggagcatacagagattttgagcttcaagtatttgctagttttaaaaagaatacaccttttctttaccttgtagcagcaattaaaagtcacacaaagcttgcatcgagtagggccaactgccacttgggtagcctatggtcacattcaatactgagaatgacttggaactcacagattaatatgaaagaagcagcgttcatcccaagacccatgctcacaattacagctccgtgccctgaggtagagttgagatttggattaagaaatagatttctaatacgactcaagatcatcctacaatattttctttggaaactaatttagcccatgatattttaaagagagacaagagaaggcctatttatcttgtctaagtgaacggcatttgtatattcataagctatttttggtaagaattttaaatcttttagctcaaggcctacagggcatcatgatctttgccttccttgaaaatacaatttaaattgtacaaacactttataaaaagctaattattggtgttagaacatgaccccacacaatgctgcttgacccctgaaactgacattcatgagcataacctttgttacattgttctttttgatgtaatttgtagaaatgttttttagttcgtaatggaaaatgtatgtaccctgaaaaattacttattttgtttaactttggtataaaggtgttgggcattttcttggggagggggggattacaaaagaagtttgtctcccacatcaaaaaacgttcaaagaaattaagtatttattatattttttgcagatgtttccatacaattcacataacctttttgtaaagagagatgaagaaatggattaaagatttttaatatttgaaatggtaaatagaactaatttattgtaatatatttctgttatttatagatgtttccttaatgttttactgtgcattaccactttcatttaagccttatccttgtgaatttaccatttcttttttaaaacatgtctagatgcatattttaaataactggaatgtaaatcactagcatatctgaattcccaaatgtaatttttaaaaattattttggtttggaaaaaaaagattcatttgaaagccttcagatggaggggtgggaacatttttatggctttatgaattggaatttcataggcttatttacctagattgtgtgtgaacaaaaaaatattgtaaatagatgaatgtttcccataatgtaaaaagaagaaattaataaaataattaatgcactgct

SEQ ID NO: 84808 - DNA, 2052 bp, Artificial Sequence
  derived and/or modified sequence
atgatagacctcttcaaagcagagtgggtgtcctctgtgtgcgttcaagtgtctaggaacgggagaaccgatcaggtgcctcaggatgaatggactggctatacaccaaggggcaaagacgacgaaattccatgcaggcggatgaggtcggggagctacatcaaagcgatgggcgatgaagacagcggcgattctgacacttcccctaagccaagtcctaaggtcgcagcaaggagagagagctacctaaaagccactcagccaagcttaaccgaacttaccacactgaagatttccaacgaacatagtcccaaactgcagattcgatcccacagctatcttcgtgccgtttccgaagtgagtataaacaggagcctcgacagcctggatccggcagggctgctgacctcccccaaattccggtcacgaaacgagtcttatatgcgggctatgtccacgatatcacaggtgagcgagatggaggtgaacggacaatttgaaagcgtctgcgagtccgtcttttcagaactggagtcccaagccgtagaagccctcgacctgccaatgccaggttgcttccggatgcggtctcattcttacgtacgggctatcgagaaagggtgctcccaggacgatgagtgcgtctctctgcgtagttcatccccccccaggacaaccaccacagtgcggacgatacagtcatcaacagtttcctcctgtataactacctataagaaaacgcctccaccagtccccccccgcactacaaccaaaccattcatctccattacagcccagtcatccactgaatctgcgcaagacgcgtacatggatggccagggtcagaggggcgacattatttctcagagcgggctatccaacagcacagaatctctcgacagcatgaaagcccttaccgccgcgatcgaggctgccaatgcccagatacacggtcccgcctcccagcacatgggtaacaacaccgcaaccgtgacaaccactacaaccattgcaacagtaaccacggaggacagaaaaaaagaccattttaagaaaaatcgctgtttgagcattggcatccaggtagatgacgccgaagaacctgacaagacaggtgagaacaaagcaccatctaagttccaaagcgtaggagtccaggtggaagaggaaaagtgctttagaagattcacccgtagtaatagcgtgacaaccgccgtgcaggccgacttggatttccatgacaacctggagaatagtctggagagcatcgaagataattcttgccccggccccatggcccgacagttctcacgcgacgcctctacttcaaccgtcagcatacaggggtccggtaatcactaccatgcttgcgcggcagatgatgacttcgatacagacttcgatccctccatcctgcctccccccgatccgtggatcgattcaataactgaggatcccctggaagctgttcagcgtagcgtgtgccaccgagatgggcattggtttctcaaactgctgcaagcggagcgggacaggatggagggctggtgtcaacagatggagcgtgaggagagagagaacaaccttccagaggacatactggggaagattagaaccgctgtcgggtctgctcagctgttgatggcccagaaattctaccagtttcgcgagctatgtgaggagaacctcaatcccaatgcccaccccaggccaaccagccaggatctggccggtttttgggacatgcttcagctctcaatagaaaacatctcaatgaaatttgacgagttacaccagctgaaggctaacaactggaaacaaatggatcctctggacaagaaggagaggagggctccgccacctgttcctaagaaacccgccaaggggcccgcccccctgatacgggaacggagtcttgaatcctcccagcgccaggaagccagaaaaagactgatggccgccaagagagcggcaagtgttcggcaaaacagcgccactgagtcagcagagagtattgagatctacattcccgaagcacaaacccgcctctag

SEQ ID NO: 84809 - DNA, 2052 bp, Artificial Sequence
  derived and/or modified sequence
atgattgacctcttcaaggccgagtgggtgtcctctgtgtgtgtgcaggtgtccagaaatggccgcacagaccaggtgccccaggatgagtggacaggctacaccccccggggcaaggatgatgagatcccctgcaggaggatgaggagcggcagctacatcaaggccatgggagatgaggacagcggggacagcgacaccagccccaagcccagccccaaggtggccgcccggcgggagagctacctgaaggccacccagcccagcctgacagagctgaccaccctgaagatcagcaatgagcacagccccaagctgcagatccgcagccacagctacctgcgggctgtgtctgaggtgtccatcaacagaagcctggacagcctggaccctgctggcctgctgaccagccccaagttccgcagcagaaatgaaagctacatgagggccatgagcaccatcagccaggtgtctgagatggaggtgaatggccagtttgagagcgtgtgtgagagcgtcttcagcgagctggagagccaggccgtggaggccctggacctgcccatgcctggctgcttcaggatgaggagccacagctatgtgcgggccatcgagaagggctgcagccaggatgatgaatgtgtgtccctgcggagcagcagcccccccaggaccaccaccaccgtgaggaccatccagagcagcacagtgagcagctgcatcaccacctacaagaagaccccacctcctgtgccccccaggaccaccaccaagcccttcatcagcatcacagcccagagcagcacagaaagtgcccaggatgcctacatggatggccagggccagagaggagacatcatcagccagagcggcctgagcaacagcacagagagcctggacagcatgaaggccctgacagctgccattgaagctgccaatgcccagatccacggccctgccagccagcacatgggcaacaacacagccaccgtgaccaccaccaccaccatcgccaccgtgaccacagaggacaggaagaaggaccacttcaagaagaaccgctgcctgagcatcggcatccaggtggatgatgctgaggagccagacaagacaggagagaacaaggcccccagcaagttccagagcgtgggcgtgcaggtggaggaggagaagtgcttccgccgcttcaccaggagcaacagcgtgaccacagctgtgcaggccgacctggacttccatgacaacctggagaacagcctggagagcattgaggacaacagctgccccggccccatggcccggcagttcagcagagatgccagcaccagcacagtgtccatccagggcagcggcaaccactaccacgcctgtgccgcagatgatgactttgacacagactttgaccccagcatcctgcccccaccagacccctggattgacagcatcacagaggaccccctggaggccgtgcagaggtctgtgtgccacagagatggccactggttcctgaagctgctgcaggccgagcgggacaggatggagggctggtgccagcagatggagcgggaggagcgggagaacaacctgcctgaggacatcctgggcaagatcagaacagctgtgggcagcgcccagctgctgatggcccagaagttctaccagttccgggagctgtgtgaggagaacctgaaccccaatgcccacccccggcccaccagccaggacctggccggcttctgggacatgctgcagctgagcattgagaacatctccatgaagtttgatgagctgcaccagctgaaggccaacaactggaagcagatggaccccctggacaagaaggagcggcgggcccctcctcctgtgcccaagaagccagccaagggccctgcccccctcatccgggagaggagcctggagagcagccagaggcaggaggccaggaagaggctgatggccgccaagagagctgcctctgtgcggcagaacagcgccacagagagcgctgagagcattgagatctacatccctgaggcccagacccggctgtag

SEQ ID NO: 84810 - DNA, 2052 bp, Artificial Sequence
  derived and/or modified sequence
atgatcgacctgttcaaggccgagtgggtgagcagcgtgtgcgtgcaggtctcacgtaacgggagaaccgaccaggtgccccaggacgaatggaccgggtataccccacgcgggaaggatgacgagattccttgcaggaggatgcggagcggcagttacatcaaagccatgggcgatgaagatagtggagactctgacactagccccaagccttccccaaaagtcgccgctcggcgggaaagctacttgaaagccacccagccaagcctcaccgaactcactacactgaagatcagcaatgaacactcacctaaattgcagatcaggtctcactcctatctgagggcagtttcggaggtgtccatcaacaggtctttggacagcctcgacccggcagggctccttacaagtcctaaattccggagccgcaacgagtcctatatgcgggctatgtcaaccatctcacaagtaagcgaaatggaagttaacgggcaattcgagagcgtttgtgagagtgtgttttcggagctggagtctcaggctgttgaggcgttagacctcccaatgcctggctgtttccgtatgcgaagccactcctacgtacgggccatcgagaagggctgctctcaggatgacgagtgcgtgtctctgcgctcctcgtcgccgccccgtactacaaccacggtacgcacaatccaatcaagcacggtgtcttcatgtattacaacatataaaaagacacctcccccagtaccaccacgcaccacaaccaagccttttatttccatcactgcccaaagtagcactgagtcagctcaggacgcctatatggacggacaaggccagcgcggagacataatatcccaatctggactctctaattcaactgaatccctcgattccatgaaggcgttgactgcggcgattgaagccgctaatgcccagattcatggacccgcttctcaacatatggggaacaatacagccactgtaaccacaaccaccacgatcgctaccgtaacaacggaagacaggaagaaagatcatttcaaaaaaaatagatgtctaagcataggtatccaagtggacgatgccgaggaacctgacaagacaggggaaaacaaagccccgtcaaagtttcagagcgtgggagtccaggtcgaagaagagaagtgtttccggaggtttacccgctccaatagcgtcacaactgccgtgcaggcggacctggatttccatgataatctcgagaatagcctggaatccatcgaggacaactcatgtcctggcccaatggcaagacagtttagccgcgatgcgtccacctctaccgtcagcatccagggatctgggaaccattaccacgcctgcgctgcagatgatgacttcgacacagattttgacccaagtattctccccccgcctgatccctggattgacagcatcaccgaagatccccttgaagcagttcagcggtccgtatgccaccgtgatggccactggttcttgaaacttctgcaggccgagcgggaccgaatggaaggctggtgtcagcagatggaacgtgaagagcgcgagaataatctgccagaagacatcctcggtaagattcgcaccgccgtggggagtgcgcagttgttaatggcacagaagttctatcagtttcgcgagctgtgcgaggaaaacttaaatcccaatgcccacccgaggcccaccagccaggacctcgcgggcttttgggatatgctgcagttatcgattgagaacatttcgatgaagtttgatgagctgcaccagctgaaggctaacaattggaagcagatggaccccttggataaaaaagaaagaagagccccgccccctgtacctaagaagcccgccaaagggccagccccactgattcgggagagatccctggagtcttctcaacgccaggaagctagaaaaagactcatggccgctaaaagggctgcttctgtaagacagaactctgccactgaatccgcagaaagcatcgaaatttatatcccggaggcccagacccggctatag

SEQ ID NO: 84811 - DNA, 2052 bp, Artificial Sequence
  derived and/or modified sequence
atgatagatctgttcaaggccgaatgggtaagctcggtctgcgtccaggtgtcccgtaatggcagaacagaccaggtgccgcaagatgagtggaccgggtacacacccagaggtaaggatgacgaaatcccttgcaggcgtatgagatccggatcctacattaaagctatgggtgacgaggactctggtgatagcgacactagcccaaagccctcccccaaagtggccgcacggcgtgaaagctatctgaaagctacccagcctagccttacagagcttaccacactgaaaatttctaacgagcactcccctaagctacaaattcgctctcacagctatctgagagccgtgagcgaggtgagcattaaccgctcactggatagccttgaccccgcagggctgctgactagccctaaattccgcagcagaaacgaatcctatatgcgcgctatgtctactataagtcaagtttctgaaatggaggtgaatggccagtttgagagtgtgtgcgagtctgtgttttccgagcttgagagccaggccgtcgaggcccttgacctgccgatgcctggatgttttcgcatgcgctcccactcctacgtacgggcaatcgagaagggctgttcccaggacgatgaatgtgtatccctgaggagttcatcccccccacgaaccaccactacagtgagaacaatccagagttcaacagtctcttcttgtattaccacatacaaaaagactcccccacccgttccgcctcgtaccacaacgaaaccttttatatcaatcaccgcacagagttccaccgaaagtgcgcaggatgcctacatggacggacagggccagaggggcgacataatcagccagagcgggctctcaaacagcactgagtctctggactctatgaaagccttaactgccgctatcgaagctgctaatgcccagatccatggacccgcatctcaacatatgggtaataacactgcaaccgtaaccaccactaccactattgcgacagtaaccacagaagatagaaagaaggaccacttcaaaaaaaaccgatgcctgtctatcggcattcaggtggatgacgcagaggagccagataagaccggtgagaacaaagccccaagcaagttccaaagcgtaggcgttcaagtcgaagaagagaagtgttttagacggtttactaggagcaattcggttactactgccgtccaggcagatctggattttcacgataaccttgaaaacagcttagagtccattgaggataacagttgcccaggtcccatggctaggcagttctcgcgagacgctagtacctccactgtgtccatccaggggtctggaaaccattatcacgcctgcgccgcagatgatgacttcgacacagatttcgatccttccatcctcccccctcccgacccatggatcgattccataaccgaagaccccttagaggccgttcaacgatcagtctgccatcgggatggccattggtttctgaagcttctgcaggcagagcgggacaggatggaggggtggtgtcagcagatggaacgggaagagcgcgagaataacctgcctgaagacattttgggcaagatccgaactgccgtcggctctgcacagttactcatggcacagaaattctatcagttccgtgagctgtgcgaggagaatctcaatcccaatgcccaccccagacccaccagtcaggacttggccggattctgggacatgctccagttatccattgaaaatatttctatgaagttcgacgagctccatcagcttaaggccaacaattggaagcaaatggaccctctagacaaaaaggaacgtagggcaccccctcctgttcccaagaagccagctaagggacctgcccctctcatcagggagaggagcctcgagtcctcacagcgacaggaggcacgcaaaagactgatggccgctaagcgagctgccagtgtgcgccagaattcagccacagagagcgccgaatctatcgaaatttatattccagaggcacagaccaggctgtag

SEQ ID NO: 84812 - protein, 627 aa, Artificial Sequence
  derived and/or modified sequence
MNLIFHKDILFGIPANKVPQDEWTGYTPRGKDDEIPCRRMRSGSYIKAMGDEDSGDSDTSPKPSPKVAARRESYLKATQPSLTELTTLKISNEHSPKLQIRSHSYLRAVSEVSINRSLDSLDPAGLLTSPKFRSRNESYMRAMSTISQVSEMEVNGQFESVCESVFSELESQAVEALDLPMPGCFRMRSHSYVRAIEKGCSQDDECVSLRSSSPPRTTTTVRTIQSSTVSSCITTYKKTPPPVPPRTTTKPFISITAQSSTESAQDAYMDGQGQRGDIISQSGLSNSTESLDSMKALTAAIEAANAQIHGPASQHMGNNTATVTTTTTIATVTTEDRKKDHFKKNRCLSIGIQVDDAEEPDKTGENKAPSKFQSVGVQVEEEKCFRRFTRSNSVTTAVQADLDFHDNLENSLESIEDNSCPGPMARQFSRDASTSTVSIQGSGNHYHACAADDDFDTDFDPSILPPPDPWIDSITEDPLEAVQRSVCHRDGHWFLKLLQAERDRMEGWCQQMEREERENNLPEDILGKIRTAVGSAQLLMAQKFYQFRELCEENLNPNAHPRPTSQDLAGFWDMLQLSIENISMKFDELHQLKANNWKQMDPLDKKVEQCRFCMVHLKTCTNTGQSK

SEQ ID NO: 84813 - DNA, 1884 bp, Artificial Sequence
  derived and/or modified sequence
atgaacctgatcttccacaaggacatcctgttcggcatccccgccaacaaggtgccccaggacgagtggaccggctacacccccagaggcaaggacgacgagatcccctgcagaagaatgagaagcggcagctacatcaaggccatgggcgacgaggacagcggcgacagcgacaccagccccaagcccagccccaaggtggccgccagaagagagagctacctgaaggccacccagcccagcctgaccgagctgaccaccctgaagatcagcaacgagcacagccccaagctgcagatcagaagccacagctacctgagagccgtgagcgaggtgagcatcaacagaagcctggacagcctggaccccgccggcctgctgaccagccccaagttcagaagcagaaacgagagctacatgagagccatgagcaccatcagccaggtgagcgagatggaggtgaacggccagttcgagagcgtgtgcgagagcgtgttcagcgagctggagagccaggccgtggaggccctggacctgcccatgcccggctgcttcagaatgagaagccacagctacgtgagagccatcgagaagggctgcagccaggacgacgagtgcgtgagcctgagaagcagcagcccccccagaaccaccaccaccgtgagaaccatccagagcagcaccgtgagcagctgcatcaccacctacaagaagacccccccccccgtgccccccagaaccaccaccaagcccttcatcagcatcaccgcccagagcagcaccgagagcgcccaggacgcctacatggacggccagggccagagaggcgacatcatcagccagagcggcctgagcaacagcaccgagagcctggacagcatgaaggccctgaccgccgccatcgaggccgccaacgcccagatccacggccccgccagccagcacatgggcaacaacaccgccaccgtgaccaccaccaccaccatcgccaccgtgaccaccgaggacagaaagaaggaccacttcaagaagaacagatgcctgagcatcggcatccaggtggacgacgccgaggagcccgacaagaccggcgagaacaaggcccccagcaagttccagagcgtgggcgtgcaggtggaggaggagaagtgcttcagaagattcaccagaagcaacagcgtgaccaccgccgtgcaggccgacctggacttccacgacaacctggagaacagcctggagagcatcgaggacaacagctgccccggccccatggccagacagttcagcagagacgccagcaccagcaccgtgagcatccagggcagcggcaaccactaccacgcctgcgccgccgacgacgacttcgacaccgacttcgaccccagcatcctgcccccccccgacccctggatcgacagcatcaccgaggaccccctggaggccgtgcagagaagcgtgtgccacagagacggccactggttcctgaagctgctgcaggccgagagagacagaatggagggctggtgccagcagatggagagagaggagagagagaacaacctgcccgaggacatcctgggcaagatcagaaccgccgtgggcagcgcccagctgctgatggcccagaagttctaccagttcagagagctgtgcgaggagaacctgaaccccaacgcccaccccagacccaccagccaggacctggccggcttctgggacatgctgcagctgagcatcgagaacatcagcatgaagttcgacgagctgcaccagctgaaggccaacaactggaagcagatggaccccctggacaagaaggtggagcagtgcagattctgcatggtgcacctgaagacctgcaccaacaccggccagagcaagtag

SEQ ID NO: 84814 - DNA, 2188 bp, Artificial Sequence
  derived and/or modified sequence
agctgagatgaataatgaacttaattttccataaagacattctgtttggcattccagctaataaggttccacaagatgaatggacagggtacaccccacgaggtaaagatgatgaaattccatgccgaagaatgcggagtggcagttatatcaaggccatgggggatgaagacagtggagactcagacacgagtcctaagccttctccaaaagttgctgcgcggagagaaagctatctcaaggctactcagccatcccttacagaactcaccacactcaaaatctccaatgaacactcacccaaactccagatccggagtcatagttacctgagggcagtgagtgaagtctccatcaaccggagcctggacagcctggaccctgcaggcttgctcacatcaccaaagttccgctccaggaatgagagctacatgcgagccatgagcaccatcagccaggtgagcgagatggaagtgaacgggcagttcgagtccgtgtgcgagtccgtgttcagcgagctggagtcgcaggccgtggaagcgctggacctgcccatgcccggctgcttccgcatgcggagccacagctatgtgcgggccattgagaaaggctgctcccaggacgacgagtgcgtgtccctgaggtcgtcctcgccgccgcgcaccaccaccaccgttaggaccatccagagcagcacggtgtcatcttgcattacaacatataagaagacaccacctccagtcccacccagaactaccacgaaacctttcatttctatcacagcccagagtagcacagagtcagcccaggatgcctacatggacggacagggccagcgaggagatattatcagccagtctggactcagcaactccaccgagagcctggacagtatgaaggctctgacagccgccatcgaagctgcaaacgcccagatccatggccctgccagtcaacacatgggcaataacactgccaccgtcaccaccacgactaccatagccaccgtcaccacggaggacaggaagaaggaccactttaagaaaaatcgatgcctgtctatcgggatacaggtggatgatgctgaagaacctgacaaaacaggggagaataaagcacccagtaagttccagtccgtgggagtgcaagtagaagaagagaagtgcttccgcaggttcactcgatccaacagtgtgacgacagcagtacaggccgacctggacttccatgataatctggaaaattctctggaatctatagaggacaattcgtgtcctggccccatggccagacagttctcccgcgatgccagcacctccacagtcagcattcagggctcaggaaaccattaccatgcctgtgccgccgatgatgactttgacacggattttgacccctctattctgcctcctccggacccctggattgactctatcactgaagaccctctggaggccgtgcaaaggtcagtgtgccaccgggatggccactggttcctgaagcttctccaggcagagcgagaccgcatggaggggtggtgtcaacagatggagcgggaagaacgggaaaacaacctgcccgaagacattctaggaaaaatccgaaccgcagtgggcagtgcccaacttctcatggcccagaaattctaccagttcagagaactgtgtgaagaaaacctgaatcctaatgctcatccaagacccacctcccaggatttggcggggttttgggacatgctgcagttgtccatagaaaatattagtatgaaatttgatgaacttcatcagttaaaggccaataattggaaacagatggatcctcttgacaagaaggtagaacaatgtagattttgtatggttcatttaaaaacctgcacaaacactggacagtctaaataggcttctgcattcagtcctgctgtttacaatgtgaaatggagctgatatcatattaatttcattgtaatgacaatgtttacatagtaatcatttgggatattatctgtaatatgtttcaggcatatttttaaagaaaaacctgtctttgtgaattggaaaatgggaatgtggctttttttgttaattaaactttaagttaaaccattttagtcactggaaggaactgcctccattttgctttttaaactaaaataaatgacatcttcagtgcatgaatccatagaacaaga

SEQ ID NO: 84815 - DNA, 1884 bp, Artificial Sequence
  derived and/or modified sequence
atgaatctcatcttccataaggacatcctattcggaattccagcaaacaaggtgccacaggatgaatggaccggatatacacctagaggcaaggatgatgagatcccttgccggagaatgcggagtggctcatatataaaagccatgggtgacgaagattccggggactcggacacgtccccaaagccttcacccaaggtggccgcccgcagagaaagttacttaaaggcaactcagcccagtctgacggagctgaccactctgaagatctcaaacgaacactcaccaaagctacagattagaagccattcatatcttcgggctgtgagcgaggtgtcaattaaccggagcttagactctctggaccctgctggtcttttaactagtcccaagttccgctcgaggaatgagtcctatatgcgggcaatgtctacaatctctcaagtgagcgagatggaggtaaatggtcaattcgagtccgtgtgtgaaagcgtgttttccgagctggaaagccaggccgtagaggctttagatctgccgatgccagggtgcttccgaatgcgcagccacagctatgtcagggctatcgaaaaaggctgtagccaggacgatgagtgtgtgtccctgcgtagctcctcccctccaaggacaaccaccactgtgagaaccattcagtcgagcacagtgagcagctgtatcacaacctacaaaaaaacaccaccccccgtcccacctcggacaacaacgaaacccttcatatccattactgcccagagctctacggagtctgcccaggatgcttatatggatggacagggccagaggggcgatataattagtcagagcggactttctaactccaccgaatccctggactccatgaaggcccttacagctgccatcgaagctgcaaacgcacagatccatggcccggcgtcacagcatatgggaaacaatacggctaccgtgacaaccacgactacaattgctacagtcacgaccgaagacaggaagaaagaccatttcaaaaaaaataggtgtctatctattgggattcaagttgatgatgccgaagagcccgataagacaggcgagaacaaggccccatcaaagttccagagcgttggagtccaggtcgaagaggaaaaatgttttcggcgctttacccggtccaacagcgtgactaccgccgttcaagccgacctcgattttcatgataatctggagaactctctggagtccattgaggataattcatgtcctggccccatggcgcgtcagttttcacgcgacgccagcactagtaccgtatcaattcaaggctctggtaatcactatcacgcatgtgctgcagacgatgacttcgatacagatttcgacccgagcattttgccgcctcccgatccgtggatcgattctataaccgaagatcctctggaggcagtgcagcgctcggtgtgtcatcgcgacggccactggttcctaaaactgctccaagctgaacgggatcggatggagggatggtgtcagcagatggaacgggaagagcgcgaaaataacctgccggaggatattctcggaaaaatccgcacagcagtgggctccgcacagctcctgatggctcaaaaattctatcagttcagagagctctgcgaagaaaacctgaatccaaacgcccacccccgtcccacttcacaagatttggcagggttctgggacatgttacagctcagcattgagaacatcagtatgaagttcgacgaattacaccagctcaaggcaaataattggaaacagatggatcctttggataagaaggtggaacaatgtcggttctgtatggttcatctcaagacatgcacaaacacgggtcagtccaaatag

SEQ ID NO: 84816 - DNA, 1884 bp, Artificial Sequence
  derived and/or modified sequence
atgaacctgatcttccacaaggacatcctgtttggcatcccagccaacaaggtgccccaggatgagtggacaggctacaccccccggggcaaggatgatgagatcccctgcaggaggatgaggagcggcagctacatcaaggccatgggagatgaggacagcggggacagcgacaccagccccaagcccagccccaaggtggccgcccggcgggagagctacctgaaggccacccagcccagcctgacagagctgaccaccctgaagatcagcaatgagcacagccccaagctgcagatccgcagccacagctacctgcgggctgtgtctgaggtgtccatcaacagaagcctggacagcctggaccctgctggcctgctgaccagccccaagttccgcagcagaaatgaaagctacatgagggccatgagcaccatcagccaggtgtctgagatggaggtgaatggccagtttgagagcgtgtgtgagagcgtcttcagcgagctggagagccaggccgtggaggccctggacctgcccatgcctggctgcttcaggatgaggagccacagctatgtgcgggccatcgagaagggctgcagccaggatgatgaatgtgtgtccctgcggagcagcagcccccccaggaccaccaccaccgtgaggaccatccagagcagcacagtgagcagctgcatcaccacctacaagaagaccccacctcctgtgccccccaggaccaccaccaagcccttcatcagcatcacagcccagagcagcacagaaagtgcccaggatgcctacatggatggccagggccagagaggagacatcatcagccagagcggcctgagcaacagcacagagagcctggacagcatgaaggccctgacagctgccattgaagctgccaatgcccagatccacggccctgccagccagcacatgggcaacaacacagccaccgtgaccaccaccaccaccatcgccaccgtgaccacagaggacaggaagaaggaccacttcaagaagaaccgctgcctgagcatcggcatccaggtggatgatgctgaggagccagacaagacaggagagaacaaggcccccagcaagttccagagcgtgggcgtgcaggtggaggaggagaagtgcttccgccgcttcaccaggagcaacagcgtgaccacagctgtgcaggccgacctggacttccatgacaacctggagaacagcctggagagcattgaggacaacagctgccccggccccatggcccggcagttcagcagagatgccagcaccagcacagtgtccatccagggcagcggcaaccactaccacgcctgtgccgcagatgatgactttgacacagactttgaccccagcatcctgcccccaccagacccctggattgacagcatcacagaggaccccctggaggccgtgcagaggtctgtgtgccacagagatggccactggttcctgaagctgctgcaggccgagcgggacaggatggagggctggtgccagcagatggagcgggaggagcgggagaacaacctgcctgaggacatcctgggcaagatcagaacagctgtgggcagcgcccagctgctgatggcccagaagttctaccagttccgggagctgtgtgaggagaacctgaaccccaatgcccacccccggcccaccagccaggacctggccggcttctgggacatgctgcagctgagcattgagaacatctccatgaagtttgatgagctgcaccagctgaaggccaacaactggaagcagatggaccccctggacaagaaggtggagcagtgccgcttctgcatggtgcacctgaagacctgcaccaacacaggccagagcaagtag
